United States Patent Application Publication US 2018/0305689 A1 - sequence listing, part 52

SEQ ID NO: 714299 - RNA, 19 nt, Artificial Sequence
  Description of Artificial Sequence: Synthetic oligonucleotide
  Antisense strand to SEQ ID NO: 714298
uaucuggagaacuauaccu

SEQ ID NO: 714300 - RNA, 19 nt, Artificial Sequence
  Description of Artificial Sequence: Synthetic oligonucleotide
  Sense strand starting at position 3449 of SEQ ID NO: 586390
gguauaguucuccagauag

SEQ ID NO: 714301 - RNA, 19 nt, Artificial Sequence
  Description of Artificial Sequence: Synthetic oligonucleotide
  Antisense strand to SEQ ID NO: 714300
cuaucuggagaacuauacc

SEQ ID NO: 714302 - RNA, 19 nt, Artificial Sequence
  Description of Artificial Sequence: Synthetic oligonucleotide
  Sense strand starting at position 3503 of SEQ ID NO: 586390
auggcucaccucuguaaua

SEQ ID NO: 714303 - RNA, 19 nt, Artificial Sequence
  Description of Artificial Sequence: Synthetic oligonucleotide
  Antisense strand to SEQ ID NO: 714302
uauuacagaggugagccau

SEQ ID NO: 714304 - RNA, 19 nt, Artificial Sequence
  Description of Artificial Sequence: Synthetic oligonucleotide
  Sense strand starting at position 3740 of SEQ ID NO: 586390
agagauuagagauguuccu

SEQ ID NO: 714305 - RNA, 19 nt, Artificial Sequence
  Description of Artificial Sequence: Synthetic oligonucleotide
  Antisense strand to SEQ ID NO: 714304
aggaacaucucuaaucucu

SEQ ID NO: 714306 - RNA, 19 nt, Artificial Sequence
  Description of Artificial Sequence: Synthetic oligonucleotide
  Sense strand starting at position 3746 of SEQ ID NO: 586390
uagagauguuccuuccugu

SEQ ID NO: 714307 - RNA, 19 nt, Artificial Sequence
  Description of Artificial Sequence: Synthetic oligonucleotide
  Antisense strand to SEQ ID NO: 714306
acaggaaggaacaucucua

SEQ ID NO: 714308 - RNA, 19 nt, Artificial Sequence
  Description of Artificial Sequence: Synthetic oligonucleotide
  Sense strand starting at position 3763 of SEQ ID NO: 586390
gugccuugcugauguucua

SEQ ID NO: 714309 - RNA, 19 nt, Artificial Sequence
  Description of Artificial Sequence: Synthetic oligonucleotide
  Antisense strand to SEQ ID NO: 714308
uagaacaucagcaaggcac

SEQ ID NO: 714310 - RNA, 19 nt, Artificial Sequence
  Description of Artificial Sequence: Synthetic oligonucleotide
  Sense strand starting at position 3766 of SEQ ID NO: 586390
ccuugcugauguucuagaa

SEQ ID NO: 714311 - RNA, 19 nt, Artificial Sequence
  Description of Artificial Sequence: Synthetic oligonucleotide
  Antisense strand to SEQ ID NO: 714310
uucuagaacaucagcaagg

SEQ ID NO: 714312 - RNA, 19 nt, Artificial Sequence
  Description of Artificial Sequence: Synthetic oligonucleotide
  Sense strand starting at position 3968 of SEQ ID NO: 586390
ccugguugacgcggugaaa

SEQ ID NO: 714313 - RNA, 19 nt, Artificial Sequence
  Description of Artificial Sequence: Synthetic oligonucleotide
  Antisense strand to SEQ ID NO: 714312
uuucaccgcgucaaccagg

SEQ ID NO: 714314 - RNA, 19 nt, Artificial Sequence
  Description of Artificial Sequence: Synthetic oligonucleotide
  Sense strand starting at position 185 of SEQ ID NO: 586391
gcugacuuguauuucugau

SEQ ID NO: 714315 - RNA, 19 nt, Artificial Sequence
  Description of Artificial Sequence: Synthetic oligonucleotide
  Antisense strand to SEQ ID NO: 714314
aucagaaauacaagucagc

SEQ ID NO: 714316 - RNA, 19 nt, Artificial Sequence
  Description of Artificial Sequence: Synthetic oligonucleotide
  Sense strand starting at position 547 of SEQ ID NO: 586391
uuggcaacuccauguuauu

SEQ ID NO: 714317 - RNA, 19 nt, Artificial Sequence
  Description of Artificial Sequence: Synthetic oligonucleotide
  Antisense strand to SEQ ID NO: 714316
aauaacauggaguugccaa

SEQ ID NO: 714318 - RNA, 19 nt, Artificial Sequence
  Description of Artificial Sequence: Synthetic oligonucleotide
  Sense strand starting at position 553 of SEQ ID NO: 586391
acuccauguuauucccgaa

SEQ ID NO: 714319 - RNA, 19 nt, Artificial Sequence
  Description of Artificial Sequence: Synthetic oligonucleotide
  Antisense strand to SEQ ID NO: 714318
uucgggaauaacauggagu

SEQ ID NO: 714320 - RNA, 19 nt, Artificial Sequence
  Description of Artificial Sequence: Synthetic oligonucleotide
  Sense strand starting at position 557 of SEQ ID NO: 586391
cauguuauucccgaaauug

SEQ ID NO: 714321 - RNA, 19 nt, Artificial Sequence
  Description of Artificial Sequence: Synthetic oligonucleotide
  Antisense strand to SEQ ID NO: 714320
caauuucgggaauaacaug

SEQ ID NO: 714322 - RNA, 19 nt, Artificial Sequence
  Description of Artificial Sequence: Synthetic oligonucleotide
  Sense strand starting at position 568 of SEQ ID NO: 586391
cgaaauuguccugguguau

SEQ ID NO: 714323 - RNA, 19 nt, Artificial Sequence
  Description of Artificial Sequence: Synthetic oligonucleotide
  Antisense strand to SEQ ID NO: 714322
auacaccaggacaauuucg

SEQ ID NO: 714324 - RNA, 19 nt, Artificial Sequence
  Description of Artificial Sequence: Synthetic oligonucleotide
  Sense strand starting at position 580 of SEQ ID NO: 586391
gguguaucgcuggcuacau

SEQ ID NO: 714325 - RNA, 19 nt, Artificial Sequence
  Description of Artificial Sequence: Synthetic oligonucleotide
  Antisense strand to SEQ ID NO: 714324
auguagccagcgauacacc

SEQ ID NO: 714326 - RNA, 19 nt, Artificial Sequence
  Description of Artificial Sequence: Synthetic oligonucleotide
  Sense strand starting at position 593 of SEQ ID NO: 586391
cuacaucagcaaggguauu

SEQ ID NO: 714327 - RNA, 19 nt, Artificial Sequence
  Description of Artificial Sequence: Synthetic oligonucleotide
  Antisense strand to SEQ ID NO: 714326
aauacccuugcugauguag

SEQ ID NO: 714328 - RNA, 19 nt, Artificial Sequence
  Description of Artificial Sequence: Synthetic oligonucleotide
  Sense strand starting at position 655 of SEQ ID NO: 586391
gcugauguguucccaacuu

SEQ ID NO: 714329 - RNA, 19 nt, Artificial Sequence
  Description of Artificial Sequence: Synthetic oligonucleotide
  Antisense strand to SEQ ID NO: 714328
aaguugggaacacaucagc

SEQ ID NO: 714330 - RNA, 19 nt, Artificial Sequence
  Description of Artificial Sequence: Synthetic oligonucleotide
  Sense strand starting at position 716 of SEQ ID NO: 586391
accagcucucaucagaagu

SEQ ID NO: 714331 - RNA, 19 nt, Artificial Sequence
  Description of Artificial Sequence: Synthetic oligonucleotide
  Antisense strand to SEQ ID NO: 714330
acuucugaugagagcuggu

SEQ ID NO: 714332 - RNA, 19 nt, Artificial Sequence
  Description of Artificial Sequence: Synthetic oligonucleotide
  Sense strand starting at position 804 of SEQ ID NO: 586391
aggcaaagcuggcuguuau

SEQ ID NO: 714333 - RNA, 19 nt, Artificial Sequence
  Description of Artificial Sequence: Synthetic oligonucleotide
  Antisense strand to SEQ ID NO: 714332
auaacagccagcuuugccu

SEQ ID NO: 714334 - RNA, 19 nt, Artificial Sequence
  Description of Artificial Sequence: Synthetic oligonucleotide
  Sense strand starting at position 812 of SEQ ID NO: 586391
cuggcuguuaucggcaaua

SEQ ID NO: 714335 - RNA, 19 nt, Artificial Sequence
  Description of Artificial Sequence: Synthetic oligonucleotide
  Antisense strand to SEQ ID NO: 714334
uauugccgauaacagccag

SEQ ID NO: 714336 - RNA, 19 nt, Artificial Sequence
  Description of Artificial Sequence: Synthetic oligonucleotide
  Sense strand starting at position 814 of SEQ ID NO: 586391
ggcuguuaucggcaauauu

SEQ ID NO: 714337 - RNA, 19 nt, Artificial Sequence
  Description of Artificial Sequence: Synthetic oligonucleotide
  Antisense strand to SEQ ID NO: 714336
aauauugccgauaacagcc

SEQ ID NO: 714338 - RNA, 19 nt, Artificial Sequence
  Description of Artificial Sequence: Synthetic oligonucleotide
  Sense strand starting at position 817 of SEQ ID NO: 586391
uguuaucggcaauauuaaa

SEQ ID NO: 714339 - RNA, 19 nt, Artificial Sequence
  Description of Artificial Sequence: Synthetic oligonucleotide
  Antisense strand to SEQ ID NO: 714338
uuuaauauugccgauaaca

SEQ ID NO: 714340 - RNA, 19 nt, Artificial Sequence
  Description of Artificial Sequence: Synthetic oligonucleotide
  Sense strand starting at position 1154 of SEQ ID NO: 586391
gauuucugguugucaugca

SEQ ID NO: 714341 - RNA, 19 nt, Artificial Sequence
  Description of Artificial Sequence: Synthetic oligonucleotide
  Antisense strand to SEQ ID NO: 714340
ugcaugacaaccagaaauc

SEQ ID NO: 714342 - RNA, 19 nt, Artificial Sequence
  Description of Artificial Sequence: Synthetic oligonucleotide
  Sense strand starting at position 1278 of SEQ ID NO: 586391
cucgguggcuucucaggaa

SEQ ID NO: 714343 - RNA, 19 nt, Artificial Sequence
  Description of Artificial Sequence: Synthetic oligonucleotide
  Antisense strand to SEQ ID NO: 714342
uuccugagaagccaccgag

SEQ ID NO: 714344 - RNA, 19 nt, Artificial Sequence
  Description of Artificial Sequence: Synthetic oligonucleotide
  Sense strand starting at position 1282 of SEQ ID NO: 586391
guggcuucucaggaacaca

SEQ ID NO: 714345 - RNA, 19 nt, Artificial Sequence
  Description of Artificial Sequence: Synthetic oligonucleotide
  Antisense strand to SEQ ID NO: 714344
uguguuccugagaagccac

SEQ ID NO: 714346 - RNA, 19 nt, Artificial Sequence
  Description of Artificial Sequence: Synthetic oligonucleotide
  Sense strand starting at position 1312 of SEQ ID NO: 586391
gcuggaacuucugcacgaa

SEQ ID NO: 714347 - RNA, 19 nt, Artificial Sequence
  Description of Artificial Sequence: Synthetic oligonucleotide
  Antisense strand to SEQ ID NO: 714346
uucgugcagaaguuccagc

SEQ ID NO: 714348 - RNA, 19 nt, Artificial Sequence
  Description of Artificial Sequence: Synthetic oligonucleotide
  Sense strand starting at position 2135 of SEQ ID NO: 586391
cugauauauuugugacaag

SEQ ID NO: 714349 - RNA, 19 nt, Artificial Sequence
  Description of Artificial Sequence: Synthetic oligonucleotide
  Antisense strand to SEQ ID NO: 714348
cuugucacaaauauaucag

SEQ ID NO: 714350 - RNA, 19 nt, Artificial Sequence
  Description of Artificial Sequence: Synthetic oligonucleotide
  Sense strand starting at position 2136 of SEQ ID NO: 586391
ugauauauuugugacaaga

SEQ ID NO: 714351 - RNA, 19 nt, Artificial Sequence
  Description of Artificial Sequence: Synthetic oligonucleotide
  Antisense strand to SEQ ID NO: 714350
ucuugucacaaauauauca

SEQ ID NO: 714352 - RNA, 19 nt, Artificial Sequence
  Description of Artificial Sequence: Synthetic oligonucleotide
  Sense strand starting at position 2146 of SEQ ID NO: 586391
gugacaagaaagugcuuaa

SEQ ID NO: 714353 - RNA, 19 nt, Artificial Sequence
  Description of Artificial Sequence: Synthetic oligonucleotide
  Antisense strand to SEQ ID NO: 714352
uuaagcacuuucuugucac

SEQ ID NO: 714354 - RNA, 19 nt, Artificial Sequence
  Description of Artificial Sequence: Synthetic oligonucleotide
  Sense strand starting at position 2149 of SEQ ID NO: 586391
acaagaaagugcuuaauuc

SEQ ID NO: 714355 - RNA, 19 nt, Artificial Sequence
  Description of Artificial Sequence: Synthetic oligonucleotide
  Antisense strand to SEQ ID NO: 714354
gaauuaagcacuuucuugu

SEQ ID NO: 714356 - RNA, 19 nt, Artificial Sequence
  Description of Artificial Sequence: Synthetic oligonucleotide
  Sense strand starting at position 2182 of SEQ ID NO: 586391
guuucugugcaucaguaaa

SEQ ID NO: 714357 - RNA, 19 nt, Artificial Sequence
  Description of Artificial Sequence: Synthetic oligonucleotide
  Antisense strand to SEQ ID NO: 714356
uuuacugaugcacagaaac

SEQ ID NO: 714358 - RNA, 19 nt, Artificial Sequence
  Description of Artificial Sequence: Synthetic oligonucleotide
  Sense strand starting at position 2184 of SEQ ID NO: 586391
uucugugcaucaguaaacu

SEQ ID NO: 714359 - RNA, 19 nt, Artificial Sequence
  Description of Artificial Sequence: Synthetic oligonucleotide
  Antisense strand to SEQ ID NO: 714358
aguuuacugaugcacagaa

SEQ ID NO: 714360 - RNA, 19 nt, Artificial Sequence
  Description of Artificial Sequence: Synthetic oligonucleotide
  Sense strand starting at position 2194 of SEQ ID NO: 586391
caguaaacucaugggagca

SEQ ID NO: 714361 - RNA, 19 nt, Artificial Sequence
  Description of Artificial Sequence: Synthetic oligonucleotide
  Antisense strand to SEQ ID NO: 714360
ugcucccaugaguuuacug

SEQ ID NO: 714362 - RNA, 19 nt, Artificial Sequence
  Description of Artificial Sequence: Synthetic oligonucleotide
  Sense strand starting at position 2195 of SEQ ID NO: 586391
aguaaacucaugggagcau

SEQ ID NO: 714363 - RNA, 19 nt, Artificial Sequence
  Description of Artificial Sequence: Synthetic oligonucleotide
  Antisense strand to SEQ ID NO: 714362
augcucccaugaguuuacu

SEQ ID NO: 714364 - RNA, 19 nt, Artificial Sequence
  Description of Artificial Sequence: Synthetic oligonucleotide
  Sense strand starting at position 2237 of SEQ ID NO: 586391
gaugguuccguccaacaug

SEQ ID NO: 714365 - RNA, 19 nt, Artificial Sequence
  Description of Artificial Sequence: Synthetic oligonucleotide
  Antisense strand to SEQ ID NO: 714364
cauguuggacggaaccauc

SEQ ID NO: 714366 - RNA, 19 nt, Artificial Sequence
  Description of Artificial Sequence: Synthetic oligonucleotide
  Sense strand starting at position 2381 of SEQ ID NO: 586391
caguuaauacccuggaaga

SEQ ID NO: 714367 - RNA, 19 nt, Artificial Sequence
  Description of Artificial Sequence: Synthetic oligonucleotide
  Antisense strand to SEQ ID NO: 714366
ucuuccaggguauuaacug

SEQ ID NO: 714368 - RNA, 19 nt, Artificial Sequence
  Description of Artificial Sequence: Synthetic oligonucleotide
  Sense strand starting at position 2428 of SEQ ID NO: 586391
gcgucugagccuuucgcua

SEQ ID NO: 714369 - RNA, 19 nt, Artificial Sequence
  Description of Artificial Sequence: Synthetic oligonucleotide
  Antisense strand to SEQ ID NO: 714368
uagcgaaaggcucagacgc

SEQ ID NO: 714370 - RNA, 19 nt, Artificial Sequence
  Description of Artificial Sequence: Synthetic oligonucleotide
  Sense strand starting at position 2433 of SEQ ID NO: 586391
ugagccuuucgcuagggaa

SEQ ID NO: 714371 - RNA, 19 nt, Artificial Sequence
  Description of Artificial Sequence: Synthetic oligonucleotide
  Antisense strand to SEQ ID NO: 714370
uucccuagcgaaaggcuca

SEQ ID NO: 714372 - RNA, 19 nt, Artificial Sequence
  Description of Artificial Sequence: Synthetic oligonucleotide
  Sense strand starting at position 2435 of SEQ ID NO: 586391
agccuuucgcuagggaaac

SEQ ID NO: 714373 - RNA, 19 nt, Artificial Sequence
  Description of Artificial Sequence: Synthetic oligonucleotide
  Antisense strand to SEQ ID NO: 714372
guuucccuagcgaaaggcu

SEQ ID NO: 714374 - RNA, 19 nt, Artificial Sequence
  Description of Artificial Sequence: Synthetic oligonucleotide
  Sense strand starting at position 2446 of SEQ ID NO: 586391
agggaaaccguuuaguuua

SEQ ID NO: 714375 - RNA, 19 nt, Artificial Sequence
  Description of Artificial Sequence: Synthetic oligonucleotide
  Antisense strand to SEQ ID NO: 714374
uaaacuaaacgguuucccu

SEQ ID NO: 714376 - RNA, 19 nt, Artificial Sequence
  Description of Artificial Sequence: Synthetic oligonucleotide
  Sense strand starting at position 2451 of SEQ ID NO: 586391
aaccguuuaguuuacguua

SEQ ID NO: 714377 - RNA, 19 nt, Artificial Sequence
  Description of Artificial Sequence: Synthetic oligonucleotide
  Antisense strand to SEQ ID NO: 714376
uaacguaaacuaaacgguu

SEQ ID NO: 714378 - RNA, 19 nt, Artificial Sequence
  Description of Artificial Sequence: Synthetic oligonucleotide
  Sense strand starting at position 2458 of SEQ ID NO: 586391
uaguuuacguuacuaaagu

SEQ ID NO: 714379 - RNA, 19 nt, Artificial Sequence
  Description of Artificial Sequence: Synthetic oligonucleotide
  Antisense strand to SEQ ID NO: 714378
acuuuaguaacguaaacua

SEQ ID NO: 714380 - RNA, 19 nt, Artificial Sequence
  Description of Artificial Sequence: Synthetic oligonucleotide
  Sense strand starting at position 2506 of SEQ ID NO: 586391
cgccuacugacugagcaaa

SEQ ID NO: 714381 - RNA, 19 nt, Artificial Sequence
  Description of Artificial Sequence: Synthetic oligonucleotide
  Antisense strand to SEQ ID NO: 714380
uuugcucagucaguaggcg

SEQ ID NO: 714382 - RNA, 19 nt, Artificial Sequence
  Description of Artificial Sequence: Synthetic oligonucleotide
  Sense strand starting at position 3360 of SEQ ID NO: 586391
gcgagacccugucuucgaa

SEQ ID NO: 714383 - RNA, 19 nt, Artificial Sequence
  Description of Artificial Sequence: Synthetic oligonucleotide
  Antisense strand to SEQ ID NO: 714382
uucgaagacagggucucgc

SEQ ID NO: 714384 - RNA, 19 nt, Artificial Sequence
  Description of Artificial Sequence: Synthetic oligonucleotide
  Sense strand starting at position 3645 of SEQ ID NO: 586391
uuaaguacauugccaagua

SEQ ID NO: 714385 - RNA, 19 nt, Artificial Sequence
  Description of Artificial Sequence: Synthetic oligonucleotide
  Antisense strand to SEQ ID NO: 714384
uacuuggcaauguacuuaa

SEQ ID NO: 714386 - RNA, 19 nt, Artificial Sequence
  Description of Artificial Sequence: Synthetic oligonucleotide
  Sense strand starting at position 3657 of SEQ ID NO: 586391
ccaaguacuugggacugaa

SEQ ID NO: 714387 - RNA, 19 nt, Artificial Sequence
  Description of Artificial Sequence: Synthetic oligonucleotide
  Antisense strand to SEQ ID NO: 714386
uucagucccaaguacuugg

SEQ ID NO: 714388 - RNA, 19 nt, Artificial Sequence
  Description of Artificial Sequence: Synthetic oligonucleotide
  Sense strand starting at position 3828 of SEQ ID NO: 586391
ccauccuaacgguguuuaa

SEQ ID NO: 714389 - RNA, 19 nt, Artificial Sequence
  Description of Artificial Sequence: Synthetic oligonucleotide
  Antisense strand to SEQ ID NO: 714388
uuaaacaccguuaggaugg

SEQ ID NO: 714390 - RNA, 19 nt, Artificial Sequence
  Description of Artificial Sequence: Synthetic oligonucleotide
  Sense strand starting at position 3859 of SEQ ID NO: 586391
gaagcagagucuucccaug

SEQ ID NO: 714391 - RNA, 19 nt, Artificial Sequence
  Description of Artificial Sequence: Synthetic oligonucleotide
  Antisense strand to SEQ ID NO: 714390
caugggaagacucugcuuc

SEQ ID NO: 714392 - RNA, 19 nt, Artificial Sequence
  Description of Artificial Sequence: Synthetic oligonucleotide
  Sense strand starting at position 3915 of SEQ ID NO: 586391
agugguguaucuuugggca

SEQ ID NO: 714393 - RNA, 19 nt, Artificial Sequence
  Description of Artificial Sequence: Synthetic oligonucleotide
  Antisense strand to SEQ ID NO: 714392
ugcccaaagauacaccacu

SEQ ID NO: 714394 - RNA, 19 nt, Artificial Sequence
  Description of Artificial Sequence: Synthetic oligonucleotide
  Sense strand starting at position 200 of SEQ ID NO: 586392
guagcaauacuuuauguag

SEQ ID NO: 714395 - RNA, 19 nt, Artificial Sequence
  Description of Artificial Sequence: Synthetic oligonucleotide
  Antisense strand to SEQ ID NO: 714394
cuacauaaaguauugcuac

SEQ ID NO: 714396 - RNA, 19 nt, Artificial Sequence
  Description of Artificial Sequence: Synthetic oligonucleotide
  Sense strand starting at position 320 of SEQ ID NO: 586392
cagugcuaccuaggaaacu

SEQ ID NO: 714397 - RNA, 19 nt, Artificial Sequence
  Description of Artificial Sequence: Synthetic oligonucleotide
  Antisense strand to SEQ ID NO: 714396
aguuuccuagguagcacug

SEQ ID NO: 714398 - RNA, 19 nt, Artificial Sequence
  Description of Artificial Sequence: Synthetic oligonucleotide
  Sense strand starting at position 474 of SEQ ID NO: 586392
accagaagagcuggcaaau

SEQ ID NO: 714399 - RNA, 19 nt, Artificial Sequence
  Description of Artificial Sequence: Synthetic oligonucleotide
  Antisense strand to SEQ ID NO: 714398
auuugccagcucuucuggu

SEQ ID NO: 714400 - RNA, 19 nt, Artificial Sequence
  Description of Artificial Sequence: Synthetic oligonucleotide
  Sense strand starting at position 486 of SEQ ID NO: 586392
ggcaaaugugucugaagga

SEQ ID NO: 714401 - RNA, 19 nt, Artificial Sequence
  Description of Artificial Sequence: Synthetic oligonucleotide
  Antisense strand to SEQ ID NO: 714400
uccuucagacacauuugcc

SEQ ID NO: 714402 - RNA, 19 nt, Artificial Sequence
  Description of Artificial Sequence: Synthetic oligonucleotide
  Sense strand starting at position 529 of SEQ ID NO: 586392
guuuaauaaggucaccuua

SEQ ID NO: 714403 - RNA, 19 nt, Artificial Sequence
  Description of Artificial Sequence: Synthetic oligonucleotide
  Antisense strand to SEQ ID NO: 714402
uaaggugaccuuauuaaac

SEQ ID NO: 714404 - RNA, 19 nt, Artificial Sequence
  Description of Artificial Sequence: Synthetic oligonucleotide
  Sense strand starting at position 542 of SEQ ID NO: 586392
accuuauuguagucccaau

SEQ ID NO: 714405 - RNA, 19 nt, Artificial Sequence
  Description of Artificial Sequence: Synthetic oligonucleotide
  Antisense strand to SEQ ID NO: 714404
auugggacuacaauaaggu

SEQ ID NO: 714406 - RNA, 19 nt, Artificial Sequence
  Description of Artificial Sequence: Synthetic oligonucleotide
  Sense strand starting at position 680 of SEQ ID NO: 586392
gagaacaaauuugauguuu

SEQ ID NO: 714407 - RNA, 19 nt, Artificial Sequence
  Description of Artificial Sequence: Synthetic oligonucleotide
  Antisense strand to SEQ ID NO: 714406
aaacaucaaauuuguucuc

SEQ ID NO: 714408 - RNA, 19 nt, Artificial Sequence
  Description of Artificial Sequence: Synthetic oligonucleotide
  Sense strand starting at position 682 of SEQ ID NO: 586392
gaacaaauuugauguuuag

SEQ ID NO: 714409 - RNA, 19 nt, Artificial Sequence
  Description of Artificial Sequence: Synthetic oligonucleotide
  Antisense strand to SEQ ID NO: 714408
cuaaacaucaaauuuguuc

SEQ ID NO: 714410 - RNA, 19 nt, Artificial Sequence
  Description of Artificial Sequence: Synthetic oligonucleotide
  Sense strand starting at position 688 of SEQ ID NO: 586392
auuugauguuuagaaaccu

SEQ ID NO: 714411 - RNA, 19 nt, Artificial Sequence
  Description of Artificial Sequence: Synthetic oligonucleotide
  Antisense strand to SEQ ID NO: 714410
agguuucuaaacaucaaau

SEQ ID NO: 714412 - RNA, 19 nt, Artificial Sequence
  Description of Artificial Sequence: Synthetic oligonucleotide
  Sense strand starting at position 953 of SEQ ID NO: 586392
caccucaguguguauuauu

SEQ ID NO: 714413 - RNA, 19 nt, Artificial Sequence
  Description of Artificial Sequence: Synthetic oligonucleotide
  Antisense strand to SEQ ID NO: 714412
aauaauacacacugaggug

SEQ ID NO: 714414 - RNA, 19 nt, Artificial Sequence
  Description of Artificial Sequence: Synthetic oligonucleotide
  Sense strand starting at position 973 of SEQ ID NO: 586392
ugguguuauccugggaaag

SEQ ID NO: 714415 - RNA, 19 nt, Artificial Sequence
  Description of Artificial Sequence: Synthetic oligonucleotide
  Antisense strand to SEQ ID NO: 714414
cuuucccaggauaacacca

SEQ ID NO: 714416 - RNA, 19 nt, Artificial Sequence
  Description of Artificial Sequence: Synthetic oligonucleotide
  Sense strand starting at position 974 of SEQ ID NO: 586392
gguguuauccugggaaagu

SEQ ID NO: 714417 - RNA, 19 nt, Artificial Sequence
  Description of Artificial Sequence: Synthetic oligonucleotide
  Antisense strand to SEQ ID NO: 714416
acuuucccaggauaacacc

SEQ ID NO: 714418 - RNA, 19 nt, Artificial Sequence
  Description of Artificial Sequence: Synthetic oligonucleotide
  Sense strand starting at position 991 of SEQ ID NO: 586392
guaauccuuucugcaagaa

SEQ ID NO: 714419 - RNA, 19 nt, Artificial Sequence
  Description of Artificial Sequence: Synthetic oligonucleotide
  Antisense strand to SEQ ID NO: 714418
uucuugcagaaaggauuac

SEQ ID NO: 714420 - RNA, 19 nt, Artificial Sequence
  Description of Artificial Sequence: Synthetic oligonucleotide
  Sense strand starting at position 1022 of SEQ ID NO: 586392
aaguguguccuugacaaac

SEQ ID NO: 714421 - RNA, 19 nt, Artificial Sequence
  Description of Artificial Sequence: Synthetic oligonucleotide
  Antisense strand to SEQ ID NO: 714420
guuugucaaggacacacuu

SEQ ID NO: 714422 - RNA, 19 nt, Artificial Sequence
  Description of Artificial Sequence: Synthetic oligonucleotide
  Sense strand starting at position 1107 of SEQ ID NO: 586392
ugcagaguccuggaauuaa

SEQ ID NO: 714423 - RNA, 19 nt, Artificial Sequence
  Description of Artificial Sequence: Synthetic oligonucleotide
  Antisense strand to SEQ ID NO: 714422
uuaauuccaggacucugca

SEQ ID NO: 714424 - RNA, 19 nt, Artificial Sequence
  Description of Artificial Sequence: Synthetic oligonucleotide
  Sense strand starting at position 1227 of SEQ ID NO: 586392
guuccuucuccagaucaga

SEQ ID NO: 714425 - RNA, 19 nt, Artificial Sequence
  Description of Artificial Sequence: Synthetic oligonucleotide
  Antisense strand to SEQ ID NO: 714424
ucugaucuggagaaggaac

SEQ ID NO: 714426 - RNA, 19 nt, Artificial Sequence
  Description of Artificial Sequence: Synthetic oligonucleotide
  Sense strand starting at position 1235 of SEQ ID NO: 586392
uccagaucagagcgagaaa

SEQ ID NO: 714427 - RNA, 19 nt, Artificial Sequence
  Description of Artificial Sequence: Synthetic oligonucleotide
  Antisense strand to SEQ ID NO: 714426
uuucucgcucugaucugga

SEQ ID NO: 714428 - RNA, 19 nt, Artificial Sequence
  Description of Artificial Sequence: Synthetic oligonucleotide
  Sense strand starting at position 2562 of SEQ ID NO: 586392
gugggaugcagacacgaau

SEQ ID NO: 714429 - RNA, 19 nt, Artificial Sequence
  Description of Artificial Sequence: Synthetic oligonucleotide
  Antisense strand to SEQ ID NO: 714428
auucgugucugcaucccac

SEQ ID NO: 714430 - RNA, 19 nt, Artificial Sequence
  Description of Artificial Sequence: Synthetic oligonucleotide
  Sense strand starting at position 2635 of SEQ ID NO: 586392
gaguauaggugaucgguga

SEQ ID NO: 714431 - RNA, 19 nt, Artificial Sequence
  Description of Artificial Sequence: Synthetic oligonucleotide
  Antisense strand to SEQ ID NO: 714430
ucaccgaucaccuauacuc

SEQ ID NO: 714432 - RNA, 19 nt, Artificial Sequence
  Description of Artificial Sequence: Synthetic oligonucleotide
  Sense strand starting at position 2639 of SEQ ID NO: 586392
auaggugaucggugacuua

SEQ ID NO: 714433 - RNA, 19 nt, Artificial Sequence
  Description of Artificial Sequence: Synthetic oligonucleotide
  Antisense strand to SEQ ID NO: 714432
uaagucaccgaucaccuau

SEQ ID NO: 714434 - RNA, 19 nt, Artificial Sequence
  Description of Artificial Sequence: Synthetic oligonucleotide
  Sense strand starting at position 2725 of SEQ ID NO: 586392
uguggauuccaucaucuag

SEQ ID NO: 714435 - RNA, 19 nt, Artificial Sequence
  Description of Artificial Sequence: Synthetic oligonucleotide
  Antisense strand to SEQ ID NO: 714434
cuagaugauggaauccaca

SEQ ID NO: 714436 - RNA, 19 nt, Artificial Sequence
  Description of Artificial Sequence: Synthetic oligonucleotide
  Sense strand starting at position 2727 of SEQ ID NO: 586392
uggauuccaucaucuagca

SEQ ID NO: 714437 - RNA, 19 nt, Artificial Sequence
  Description of Artificial Sequence: Synthetic oligonucleotide
  Antisense strand to SEQ ID NO: 714436
ugcuagaugauggaaucca

SEQ ID NO: 714438 - RNA, 19 nt, Artificial Sequence
  Description of Artificial Sequence: Synthetic oligonucleotide
  Sense strand starting at position 2756 of SEQ ID NO: 586392
augguuaugcagugggaau

SEQ ID NO: 714439 - RNA, 19 nt, Artificial Sequence
  Description of Artificial Sequence: Synthetic oligonucleotide
  Antisense strand to SEQ ID NO: 714438
auucccacugcauaaccau

SEQ ID NO: 714440 - RNA, 19 nt, Artificial Sequence
  Description of Artificial Sequence: Synthetic oligonucleotide
  Sense strand starting at position 2758 of SEQ ID NO: 586392
gguuaugcagugggaauua

SEQ ID NO: 714441 - RNA, 19 nt, Artificial Sequence
  Description of Artificial Sequence: Synthetic oligonucleotide
  Antisense strand to SEQ ID NO: 714440
uaauucccacugcauaacc

SEQ ID NO: 714442 - RNA, 19 nt, Artificial Sequence
  Description of Artificial Sequence: Synthetic oligonucleotide
  Sense strand starting at position 2785 of SEQ ID NO: 586392
gguaaauuuccagguuugu

SEQ ID NO: 714443 - RNA, 19 nt, Artificial Sequence
  Description of Artificial Sequence: Synthetic oligonucleotide
  Antisense strand to SEQ ID NO: 714442
acaaaccuggaaauuuacc

SEQ ID NO: 714444 - RNA, 19 nt, Artificial Sequence
  Description of Artificial Sequence: Synthetic oligonucleotide
  Sense strand starting at position 2794 of SEQ ID NO: 586392
ccagguuugugauugagau

SEQ ID NO: 714445 - RNA, 19 nt, Artificial Sequence
  Description of Artificial Sequence: Synthetic oligonucleotide
  Antisense strand to SEQ ID NO: 714444
aucucaaucacaaaccugg

SEQ ID NO: 714446 - RNA, 19 nt, Artificial Sequence
  Description of Artificial Sequence: Synthetic oligonucleotide
  Sense strand starting at position 2795 of SEQ ID NO: 586392
cagguuugugauugagaug

SEQ ID NO: 714447 - RNA, 19 nt, Artificial Sequence
  Description of Artificial Sequence: Synthetic oligonucleotide
  Antisense strand to SEQ ID NO: 714446
caucucaaucacaaaccug

SEQ ID NO: 714448 - RNA, 19 nt, Artificial Sequence
  Description of Artificial Sequence: Synthetic oligonucleotide
  Sense strand starting at position 2800 of SEQ ID NO: 586392
uugugauugagaugguagu

SEQ ID NO: 714449 - RNA, 19 nt, Artificial Sequence
  Description of Artificial Sequence: Synthetic oligonucleotide
  Antisense strand to SEQ ID NO: 714448
acuaccaucucaaucacaa

SEQ ID NO: 714450 - RNA, 19 nt, Artificial Sequence
  Description of Artificial Sequence: Synthetic oligonucleotide
  Sense strand starting at position 2801 of SEQ ID NO: 586392
ugugauugagaugguagua

SEQ ID NO: 714451 - RNA, 19 nt, Artificial Sequence
  Description of Artificial Sequence: Synthetic oligonucleotide
  Antisense strand to SEQ ID NO: 714450
uacuaccaucucaaucaca

SEQ ID NO: 714452 - RNA, 19 nt, Artificial Sequence
  Description of Artificial Sequence: Synthetic oligonucleotide
  Sense strand starting at position 2810 of SEQ ID NO: 586392
gaugguaguaauuguggau

SEQ ID NO: 714453 - RNA, 19 nt, Artificial Sequence
  Description of Artificial Sequence: Synthetic oligonucleotide
  Antisense strand to SEQ ID NO: 714452
auccacaauuacuaccauc

SEQ ID NO: 714454 - RNA, 19 nt, Artificial Sequence
  Description of Artificial Sequence: Synthetic oligonucleotide
  Sense strand starting at position 2814 of SEQ ID NO: 586392
guaguaauuguggaugcca

SEQ ID NO: 714455 - RNA, 19 nt, Artificial Sequence
  Description of Artificial Sequence: Synthetic oligonucleotide
  Antisense strand to SEQ ID NO: 714454
uggcauccacaauuacuac

SEQ ID NO: 714456 - RNA, 19 nt, Artificial Sequence
  Description of Artificial Sequence: Synthetic oligonucleotide
  Sense strand starting at position 2856 of SEQ ID NO: 586392
cuaagcacacuuugaaaga

SEQ ID NO: 714457 - RNA, 19 nt, Artificial Sequence
  Description of Artificial Sequence: Synthetic oligonucleotide
  Antisense strand to SEQ ID NO: 714456
ucuuucaaagugugcuuag

SEQ ID NO: 714458 - RNA, 19 nt, Artificial Sequence
  Description of Artificial Sequence: Synthetic oligonucleotide
  Sense strand starting at position 2941 of SEQ ID NO: 586392
uauuuauugguucguuguu

SEQ ID NO: 714459 - RNA, 19 nt, Artificial Sequence
  Description of Artificial Sequence: Synthetic oligonucleotide
  Antisense strand to SEQ ID NO: 714458
aacaacgaaccaauaaaua

SEQ ID NO: 714460 - RNA, 19 nt, Artificial Sequence
  Description of Artificial Sequence: Synthetic oligonucleotide
  Sense strand starting at position 3385 of SEQ ID NO: 586392
ggcucuaauuugcuuugua

SEQ ID NO: 714461 - RNA, 19 nt, Artificial Sequence
  Description of Artificial Sequence: Synthetic oligonucleotide
  Antisense strand to SEQ ID NO: 714460
uacaaagcaaauuagagcc

SEQ ID NO: 714462 - RNA, 19 nt, Artificial Sequence
  Description of Artificial Sequence: Synthetic oligonucleotide
  Sense strand starting at position 3386 of SEQ ID NO: 586392
gcucuaauuugcuuuguaa

SEQ ID NO: 714463 - RNA, 19 nt, Artificial Sequence
  Description of Artificial Sequence: Synthetic oligonucleotide
  Antisense strand to SEQ ID NO: 714462
uuacaaagcaaauuagagc

SEQ ID NO: 714464 - RNA, 19 nt, Artificial Sequence
  Description of Artificial Sequence: Synthetic oligonucleotide
  Sense strand starting at position 3443 of SEQ ID NO: 586392
cagguuugucucgaucuac

SEQ ID NO: 714465 - RNA, 19 nt, Artificial Sequence
  Description of Artificial Sequence: Synthetic oligonucleotide
  Antisense strand to SEQ ID NO: 714464
guagaucgagacaaaccug

SEQ ID NO: 714466 - RNA, 19 nt, Artificial Sequence
  Description of Artificial Sequence: Synthetic oligonucleotide
  Sense strand starting at position 3569 of SEQ ID NO: 586392
caguguuaagauggacaga

SEQ ID NO: 714467 - RNA, 19 nt, Artificial Sequence
  Description of Artificial Sequence: Synthetic oligonucleotide
  Antisense strand to SEQ ID NO: 714466
ucuguccaucuuaacacug

SEQ ID NO: 714468 - RNA, 19 nt, Artificial Sequence
  Description of Artificial Sequence: Synthetic oligonucleotide
  Sense strand starting at position 3605 of SEQ ID NO: 586392
guuaauaguguugaacuca

SEQ ID NO: 714469 - RNA, 19 nt, Artificial Sequence
  Description of Artificial Sequence: Synthetic oligonucleotide
  Antisense strand to SEQ ID NO: 714468
ugaguucaacacuauuaac

SEQ ID NO: 714470 - RNA, 19 nt, Artificial Sequence
  Description of Artificial Sequence: Synthetic oligonucleotide
  Sense strand starting at position 3739 of SEQ ID NO: 586392
cguugcuuaaccgcuuuaa

SEQ ID NO: 714471 - RNA, 19 nt, Artificial Sequence
  Description of Artificial Sequence: Synthetic oligonucleotide
  Antisense strand to SEQ ID NO: 714470
uuaaagcgguuaagcaacg

SEQ ID NO: 714472 - RNA, 19 nt, Artificial Sequence
  Description of Artificial Sequence: Synthetic oligonucleotide
  Sense strand starting at position 3895 of SEQ ID NO: 586392
gcuuuaccuguagauaaua

SEQ ID NO: 714473 - RNA, 19 nt, Artificial Sequence
  Description of Artificial Sequence: Synthetic oligonucleotide
  Antisense strand to SEQ ID NO: 714472
uauuaucuacagguaaagc

SEQ ID NO: 714474 - RNA, 19 nt, Artificial Sequence
  Description of Artificial Sequence: Synthetic oligonucleotide
  Sense strand starting at position 2 of SEQ ID NO: 586393
gaaugugguauugagguca

SEQ ID NO: 714475 - RNA, 19 nt, Artificial Sequence
  Description of Artificial Sequence: Synthetic oligonucleotide
  Antisense strand to SEQ ID NO: 714474
ugaccucaauaccacauuc

SEQ ID NO: 714476 - RNA, 19 nt, Artificial Sequence
  Description of Artificial Sequence: Synthetic oligonucleotide
  Sense strand starting at position 107 of SEQ ID NO: 586393
gcauuugagucccugcuga

SEQ ID NO: 714477 - RNA, 19 nt, Artificial Sequence
  Description of Artificial Sequence: Synthetic oligonucleotide
  Antisense strand to SEQ ID NO: 714476
ucagcagggacucaaaugc

SEQ ID NO: 714478 - RNA, 19 nt, Artificial Sequence
  Description of Artificial Sequence: Synthetic oligonucleotide
  Sense strand starting at position 198 of SEQ ID NO: 586393
ugcccucacuuugugaaga

SEQ ID NO: 714479 - RNA, 19 nt, Artificial Sequence
  Description of Artificial Sequence: Synthetic oligonucleotide
  Antisense strand to SEQ ID NO: 714478
ucuucacaaagugagggca

SEQ ID NO: 714480 - RNA, 19 nt, Artificial Sequence
  Description of Artificial Sequence: Synthetic oligonucleotide
  Sense strand starting at position 283 of SEQ ID NO: 586393
ugagaaaguuggguucaug

SEQ ID NO: 714481 - RNA, 19 nt, Artificial Sequence
  Description of Artificial Sequence: Synthetic oligonucleotide
  Antisense strand to SEQ ID NO: 714480
caugaacccaacuuucuca

SEQ ID NO: 714482 - RNA, 19 nt, Artificial Sequence
  Description of Artificial Sequence: Synthetic oligonucleotide
  Sense strand starting at position 291 of SEQ ID NO: 586393
uuggguucaugaucccgaa

SEQ ID NO: 714483 - RNA, 19 nt, Artificial Sequence
  Description of Artificial Sequence: Synthetic oligonucleotide
  Antisense strand to SEQ ID NO: 714482
uucgggaucaugaacccaa

SEQ ID NO: 714484 - RNA, 19 nt, Artificial Sequence
  Description of Artificial Sequence: Synthetic oligonucleotide
  Sense strand starting at position 479 of SEQ ID NO: 586393
aacacuggccugugaguua

SEQ ID NO: 714485 - RNA, 19 nt, Artificial Sequence
  Description of Artificial Sequence: Synthetic oligonucleotide
  Antisense strand to SEQ ID NO: 714484
uaacucacaggccaguguu

SEQ ID NO: 714486 - RNA, 19 nt, Artificial Sequence
  Description of Artificial Sequence: Synthetic oligonucleotide
  Sense strand starting at position 484 of SEQ ID NO: 586393
uggccugugaguuagagga

SEQ ID NO: 714487 - RNA, 19 nt, Artificial Sequence
  Description of Artificial Sequence: Synthetic oligonucleotide
  Antisense strand to SEQ ID NO: 714486
uccucuaacucacaggcca

SEQ ID NO: 714488 - RNA, 19 nt, Artificial Sequence
  Description of Artificial Sequence: Synthetic oligonucleotide
  Sense strand starting at position 514 of SEQ ID NO: 586393
ccgaucugacucugaauca

SEQ ID NO: 714489 - RNA, 19 nt, Artificial Sequence
  Description of Artificial Sequence: Synthetic oligonucleotide
  Antisense strand to SEQ ID NO: 714488
ugauucagagucagaucgg

SEQ ID NO: 714490 - RNA, 19 nt, Artificial Sequence
  Description of Artificial Sequence: Synthetic oligonucleotide
  Sense strand starting at position 777 of SEQ ID NO: 586393
acuugucuuccugagauac

SEQ ID NO: 714491 - RNA, 19 nt, Artificial Sequence
  Description of Artificial Sequence: Synthetic oligonucleotide
  Antisense strand to SEQ ID NO: 714490
guaucucaggaagacaagu

SEQ ID NO: 714492 - RNA, 19 nt, Artificial Sequence
  Description of Artificial Sequence: Synthetic oligonucleotide
  Sense strand starting at position 942 of SEQ ID NO: 586393
guccauuggaauuggcaga

SEQ ID NO: 714493 - RNA, 19 nt, Artificial Sequence
  Description of Artificial Sequence: Synthetic oligonucleotide
  Antisense strand to SEQ ID NO: 714492
ucugccaauuccaauggac

SEQ ID NO: 714494 - RNA, 19 nt, Artificial Sequence
  Description of Artificial Sequence: Synthetic oligonucleotide
  Sense strand starting at position 1024 of SEQ ID NO: 586393
gcuauuuauugaggaaacc

SEQ ID NO: 714495 - RNA, 19 nt, Artificial Sequence
  Description of Artificial Sequence: Synthetic oligonucleotide
  Antisense strand to SEQ ID NO: 714494
gguuuccucaauaaauagc

SEQ ID NO: 714496 - RNA, 19 nt, Artificial Sequence
  Description of Artificial Sequence: Synthetic oligonucleotide
  Sense strand starting at position 1066 of SEQ ID NO: 586393
caguguacuguguugcuua

SEQ ID NO: 714497 - RNA, 19 nt, Artificial Sequence
  Description of Artificial Sequence: Synthetic oligonucleotide
  Antisense strand to SEQ ID NO: 714496
uaagcaacacaguacacug

SEQ ID NO: 714498 - RNA, 19 nt, Artificial Sequence
  Description of Artificial Sequence: Synthetic oligonucleotide
  Sense strand starting at position 1094 of SEQ ID NO: 586393
ccuccuucuggucaaguua

SEQ ID NO: 714499 - RNA, 19 nt, Artificial Sequence
  Description of Artificial Sequence: Synthetic oligonucleotide
  Antisense strand to SEQ ID NO: 714498
uaacuugaccagaaggagg

SEQ ID NO: 714500 - RNA, 19 nt, Artificial Sequence
  Description of Artificial Sequence: Synthetic oligonucleotide
  Sense strand starting at position 1119 of SEQ ID NO: 586393
acaaccgagcucuauuaga

SEQ ID NO: 714501 - RNA, 19 nt, Artificial Sequence
  Description of Artificial Sequence: Synthetic oligonucleotide
  Antisense strand to SEQ ID NO: 714500
ucuaauagagcucgguugu

SEQ ID NO: 714502 - RNA, 19 nt, Artificial Sequence
  Description of Artificial Sequence: Synthetic oligonucleotide
  Sense strand starting at position 1191 of SEQ ID NO: 586393
cccagaacugggugaagua

SEQ ID NO: 714503 - RNA, 19 nt, Artificial Sequence
  Description of Artificial Sequence: Synthetic oligonucleotide
  Antisense strand to SEQ ID NO: 714502
uacuucacccaguucuggg

SEQ ID NO: 714504 - RNA, 19 nt, Artificial Sequence
  Description of Artificial Sequence: Synthetic oligonucleotide
  Sense strand starting at position 1245 of SEQ ID NO: 586393
ggacauaucugcuauuucu

SEQ ID NO: 714505 - RNA, 19 nt, Artificial Sequence
  Description of Artificial Sequence: Synthetic oligonucleotide
  Antisense strand to SEQ ID NO: 714504
agaaauagcagauaugucc

SEQ ID NO: 714506 - RNA, 19 nt, Artificial Sequence
  Description of Artificial Sequence: Synthetic oligonucleotide
  Sense strand starting at position 1334 of SEQ ID NO: 586393
gcauaacugggucaccaaa

SEQ ID NO: 714507 - RNA, 19 nt, Artificial Sequence
  Description of Artificial Sequence: Synthetic oligonucleotide
  Antisense strand to SEQ ID NO: 714506
uuuggugacccaguuaugc

SEQ ID NO: 714508 - RNA, 19 nt, Artificial Sequence
  Description of Artificial Sequence: Synthetic oligonucleotide
  Sense strand starting at position 1483 of SEQ ID NO: 586393
gugaccuaugccguguuau

SEQ ID NO: 714509 - RNA, 19 nt, Artificial Sequence
  Description of Artificial Sequence: Synthetic oligonucleotide
  Antisense strand to SEQ ID NO: 714508
auaacacggcauaggucac

SEQ ID NO: 714510 - RNA, 19 nt, Artificial Sequence
  Description of Artificial Sequence: Synthetic oligonucleotide
  Sense strand starting at position 1593 of SEQ ID NO: 586393
uggcuugucagggaaggau

SEQ ID NO: 714511 - RNA, 19 nt, Artificial Sequence
  Description of Artificial Sequence: Synthetic oligonucleotide
  Antisense strand to SEQ ID NO: 714510
auccuucccugacaagcca

SEQ ID NO: 714512 - RNA, 19 nt, Artificial Sequence
  Description of Artificial Sequence: Synthetic oligonucleotide
  Sense strand starting at position 1828 of SEQ ID NO: 586393
acucacaggucauuaggaa

SEQ ID NO: 714513 - RNA, 19 nt, Artificial Sequence
  Description of Artificial Sequence: Synthetic oligonucleotide
  Antisense strand to SEQ ID NO: 714512
uuccuaaugaccugugagu

SEQ ID NO: 714514 - RNA, 19 nt, Artificial Sequence
  Description of Artificial Sequence: Synthetic oligonucleotide
  Sense strand starting at position 1986 of SEQ ID NO: 586393
aagacauguucgccucauu

SEQ ID NO: 714515 - RNA, 19 nt, Artificial Sequence
  Description of Artificial Sequence: Synthetic oligonucleotide
  Antisense strand to SEQ ID NO: 714514
aaugaggcgaacaugucuu

SEQ ID NO: 714516 - RNA, 19 nt, Artificial Sequence
  Description of Artificial Sequence: Synthetic oligonucleotide
  Sense strand starting at position 1989 of SEQ ID NO: 586393
acauguucgccucauucca

SEQ ID NO: 714517 - RNA, 19 nt, Artificial Sequence
  Description of Artificial Sequence: Synthetic oligonucleotide
  Antisense strand to SEQ ID NO: 714516
uggaaugaggcgaacaugu

SEQ ID NO: 714518 - RNA, 19 nt, Artificial Sequence
  Description of Artificial Sequence: Synthetic oligonucleotide
  Sense strand starting at position 2034 of SEQ ID NO: 586393
gacaaacuguaggacaaau

SEQ ID NO: 714519 - RNA, 19 nt, Artificial Sequence
  Description of Artificial Sequence: Synthetic oligonucleotide
  Antisense strand to SEQ ID NO: 714518
auuuguccuacaguuuguc

SEQ ID NO: 714520 - RNA, 19 nt, Artificial Sequence
  Description of Artificial Sequence: Synthetic oligonucleotide
  Sense strand starting at position 2564 of SEQ ID NO: 586393
uggguaugcucaccagaac

SEQ ID NO: 714521 - RNA, 19 nt, Artificial Sequence
  Description of Artificial Sequence: Synthetic oligonucleotide
  Antisense strand to SEQ ID NO: 714520
guucuggugagcauaccca

SEQ ID NO: 714522 - RNA, 19 nt, Artificial Sequence
  Description of Artificial Sequence: Synthetic oligonucleotide
  Sense strand starting at position 2565 of SEQ ID NO: 586393
ggguaugcucaccagaacu

SEQ ID NO: 714523 - RNA, 19 nt, Artificial Sequence
  Description of Artificial Sequence: Synthetic oligonucleotide
  Antisense strand to SEQ ID NO: 714522
aguucuggugagcauaccc

SEQ ID NO: 714524 - RNA, 19 nt, Artificial Sequence
  Description of Artificial Sequence: Synthetic oligonucleotide
  Sense strand starting at position 2636 of SEQ ID NO: 586393
ggagcagaguaugccaaau

SEQ ID NO: 714525 - RNA, 19 nt, Artificial Sequence
  Description of Artificial Sequence: Synthetic oligonucleotide
  Antisense strand to SEQ ID NO: 714524
auuuggcauacucugcucc

SEQ ID NO: 714526 - RNA, 19 nt, Artificial Sequence
  Description of Artificial Sequence: Synthetic oligonucleotide
  Sense strand starting at position 2730 of SEQ ID NO: 586393
uggucugcugagugacaga

SEQ ID NO: 714527 - RNA, 19 nt, Artificial Sequence
  Description of Artificial Sequence: Synthetic oligonucleotide
  Antisense strand to SEQ ID NO: 714526
ucugucacucagcagacca

SEQ ID NO: 714528 - RNA, 19 nt, Artificial Sequence
  Description of Artificial Sequence: Synthetic oligonucleotide
  Sense strand starting at position 2752 of SEQ ID NO: 586393
ugggcuggucagugaacua

SEQ ID NO: 714529 - RNA, 19 nt, Artificial Sequence
  Description of Artificial Sequence: Synthetic oligonucleotide
  Antisense strand to SEQ ID NO: 714528
uaguucacugaccagccca

SEQ ID NO: 714530 - RNA, 19 nt, Artificial Sequence
  Description of Artificial Sequence: Synthetic oligonucleotide
  Sense strand starting at position 2806 of SEQ ID NO: 586393
ggaucaaucccaggaagcu

SEQ ID NO: 714531 - RNA, 19 nt, Artificial Sequence
  Description of Artificial Sequence: Synthetic oligonucleotide
  Antisense strand to SEQ ID NO: 714530
agcuuccugggauugaucc

SEQ ID NO: 714532 - RNA, 19 nt, Artificial Sequence
  Description of Artificial Sequence: Synthetic oligonucleotide
  Sense strand starting at position 2847 of SEQ ID NO: 586393
gaggauucuccaggccuca

SEQ ID NO: 714533 - RNA, 19 nt, Artificial Sequence
  Description of Artificial Sequence: Synthetic oligonucleotide
  Antisense strand to SEQ ID NO: 714532
ugaggccuggagaauccuc

SEQ ID NO: 714534 - RNA, 19 nt, Artificial Sequence
  Description of Artificial Sequence: Synthetic oligonucleotide
  Sense strand starting at position 3079 of SEQ ID NO: 586393
ggagguagugucugcaaga

SEQ ID NO: 714535 - RNA, 19 nt, Artificial Sequence
  Description of Artificial Sequence: Synthetic oligonucleotide
  Antisense strand to SEQ ID NO: 714534
ucuugcagacacuaccucc

SEQ ID NO: 714536 - RNA, 19 nt, Artificial Sequence
  Description of Artificial Sequence: Synthetic oligonucleotide
  Sense strand starting at position 3080 of SEQ ID NO: 586393
gagguagugucugcaagac

SEQ ID NO: 714537 - RNA, 19 nt, Artificial Sequence
  Description of Artificial Sequence: Synthetic oligonucleotide
  Antisense strand to SEQ ID NO: 714536
gucuugcagacacuaccuc

SEQ ID NO: 714538 - RNA, 19 nt, Artificial Sequence
  Description of Artificial Sequence: Synthetic oligonucleotide
  Sense strand starting at position 3332 of SEQ ID NO: 586393
ugugcaaauagaugaguga

SEQ ID NO: 714539 - RNA, 19 nt, Artificial Sequence
  Description of Artificial Sequence: Synthetic oligonucleotide
  Antisense strand to SEQ ID NO: 714538
ucacucaucuauuugcaca

SEQ ID NO: 714540 - RNA, 19 nt, Artificial Sequence
  Description of Artificial Sequence: Synthetic oligonucleotide
  Sense strand starting at position 3345 of SEQ ID NO: 586393
gagugaguggcauguaauu

SEQ ID NO: 714541 - RNA, 19 nt, Artificial Sequence
  Description of Artificial Sequence: Synthetic oligonucleotide
  Antisense strand to SEQ ID NO: 714540
aauuacaugccacucacuc

SEQ ID NO: 714542 - RNA, 19 nt, Artificial Sequence
  Description of Artificial Sequence: Synthetic oligonucleotide
  Sense strand starting at position 3347 of SEQ ID NO: 586393
gugaguggcauguaauuac

SEQ ID NO: 714543 - RNA, 19 nt, Artificial Sequence
  Description of Artificial Sequence: Synthetic oligonucleotide
  Antisense strand to SEQ ID NO: 714542
guaauuacaugccacucac

SEQ ID NO: 714544 - RNA, 19 nt, Artificial Sequence
  Description of Artificial Sequence: Synthetic oligonucleotide
  Sense strand starting at position 3350 of SEQ ID NO: 586393
aguggcauguaauuaccua

SEQ ID NO: 714545 - RNA, 19 nt, Artificial Sequence
  Description of Artificial Sequence: Synthetic oligonucleotide
  Antisense strand to SEQ ID NO: 714544
uagguaauuacaugccacu

SEQ ID NO: 714546 - RNA, 19 nt, Artificial Sequence
  Description of Artificial Sequence: Synthetic oligonucleotide
  Sense strand starting at position 3376 of SEQ ID NO: 586393
ggguuagaagcagauguaa

SEQ ID NO: 714547 - RNA, 19 nt, Artificial Sequence
  Description of Artificial Sequence: Synthetic oligonucleotide
  Antisense strand to SEQ ID NO: 714546
uuacaucugcuucuaaccc

SEQ ID NO: 714548 - RNA, 19 nt, Artificial Sequence
  Description of Artificial Sequence: Synthetic oligonucleotide
  Sense strand starting at position 3378 of SEQ ID NO: 586393
guuagaagcagauguaaau

SEQ ID NO: 714549 - RNA, 19 nt, Artificial Sequence
  Description of Artificial Sequence: Synthetic oligonucleotide
  Antisense strand to SEQ ID NO: 714548
auuuacaucugcuucuaac

SEQ ID NO: 714550 - RNA, 19 nt, Artificial Sequence
  Description of Artificial Sequence: Synthetic oligonucleotide
  Sense strand starting at position 3500 of SEQ ID NO: 586393
gguugaaccuguguuggaa

SEQ ID NO: 714551 - RNA, 19 nt, Artificial Sequence
  Description of Artificial Sequence: Synthetic oligonucleotide
  Antisense strand to SEQ ID NO: 714550
uuccaacacagguucaacc

SEQ ID NO: 714552 - RNA, 19 nt, Artificial Sequence
  Description of Artificial Sequence: Synthetic oligonucleotide
  Sense strand starting at position 3810 of SEQ ID NO: 586393
ugcaaagcacuccauguua

SEQ ID NO: 714553 - RNA, 19 nt, Artificial Sequence
  Description of Artificial Sequence: Synthetic oligonucleotide
  Antisense strand to SEQ ID NO: 714552
uaacauggagugcuuugca

SEQ ID NO: 714554 - RNA, 19 nt, Artificial Sequence
  Description of Artificial Sequence: Synthetic oligonucleotide
  Sense strand starting at position 66 of SEQ ID NO: 586394
acuggucuccuagguaaau

SEQ ID NO: 714555 - RNA, 19 nt, Artificial Sequence
  Description of Artificial Sequence: Synthetic oligonucleotide
  Antisense strand to SEQ ID NO: 714554
auuuaccuaggagaccagu

SEQ ID NO: 714556 - RNA, 19 nt, Artificial Sequence
  Description of Artificial Sequence: Synthetic oligonucleotide
  Sense strand starting at position 67 of SEQ ID NO: 586394
cuggucuccuagguaaauu

SEQ ID NO: 714557 - RNA, 19 nt, Artificial Sequence
  Description of Artificial Sequence: Synthetic oligonucleotide
  Antisense strand to SEQ ID NO: 714556
aauuuaccuaggagaccag

SEQ ID NO: 714558 - RNA, 19 nt, Artificial Sequence
  Description of Artificial Sequence: Synthetic oligonucleotide
  Sense strand starting at position 117 of SEQ ID NO: 586394
caggaaugagauggugcau

SEQ ID NO: 714559 - RNA, 19 nt, Artificial Sequence
  Description of Artificial Sequence: Synthetic oligonucleotide
  Antisense strand to SEQ ID NO: 714558
augcaccaucucauuccug

SEQ ID NO: 714560 - RNA, 19 nt, Artificial Sequence
  Description of Artificial Sequence: Synthetic oligonucleotide
  Sense strand starting at position 203 of SEQ ID NO: 586394
cccaaauggcguuauuaau

SEQ ID NO: 714561 - RNA, 19 nt, Artificial Sequence
  Description of Artificial Sequence: Synthetic oligonucleotide
  Antisense strand to SEQ ID NO: 714560
auuaauaacgccauuuggg

SEQ ID NO: 714562 - RNA, 19 nt, Artificial Sequence
  Description of Artificial Sequence: Synthetic oligonucleotide
  Sense strand starting at position 264 of SEQ ID NO: 586394
aauuauuguggugauuguu

SEQ ID NO: 714563 - RNA, 19 nt, Artificial Sequence
  Description of Artificial Sequence: Synthetic oligonucleotide
  Antisense strand to SEQ ID NO: 714562
aacaaucaccacaauaauu

SEQ ID NO: 714564 - RNA, 19 nt, Artificial Sequence
  Description of Artificial Sequence: Synthetic oligonucleotide
  Sense strand starting at position 385 of SEQ ID NO: 586394
caaguacaucgacaugcau

SEQ ID NO: 714565 - RNA, 19 nt, Artificial Sequence
  Description of Artificial Sequence: Synthetic oligonucleotide
  Antisense strand to SEQ ID NO: 714564
augcaugucgauguacuug

SEQ ID NO: 714566 - RNA, 19 nt, Artificial Sequence
  Description of Artificial Sequence: Synthetic oligonucleotide
  Sense strand starting at position 387 of SEQ ID NO: 586394
aguacaucgacaugcauga

SEQ ID NO: 714567 - RNA, 19 nt, Artificial Sequence
  Description of Artificial Sequence: Synthetic oligonucleotide
  Antisense strand to SEQ ID NO: 714566
ucaugcaugucgauguacu

SEQ ID NO: 714568 - RNA, 19 nt, Artificial Sequence
  Description of Artificial Sequence: Synthetic oligonucleotide
  Sense strand starting at position 422 of SEQ ID NO: 586394
caguuccuagcuggauaaa

SEQ ID NO: 714569 - RNA, 19 nt, Artificial Sequence
  Description of Artificial Sequence: Synthetic oligonucleotide
  Antisense strand to SEQ ID NO: 714568
uuuauccagcuaggaacug

SEQ ID NO: 714570 - RNA, 19 nt, Artificial Sequence
  Description of Artificial Sequence: Synthetic oligonucleotide
  Sense strand starting at position 444 of SEQ ID NO: 586394
cggcaagguccuuaauauu

SEQ ID NO: 714571 - RNA, 19 nt, Artificial Sequence
  Description of Artificial Sequence: Synthetic oligonucleotide
  Antisense strand to SEQ ID NO: 714570
aauauuaaggaccuugccg

SEQ ID NO: 714572 - RNA, 19 nt, Artificial Sequence
  Description of Artificial Sequence: Synthetic oligonucleotide
  Sense strand starting at position 697 of SEQ ID NO: 586394
gggaucuugcuuuacccua

SEQ ID NO: 714573 - RNA, 19 nt, Artificial Sequence
  Description of Artificial Sequence: Synthetic oligonucleotide
  Antisense strand to SEQ ID NO: 714572
uaggguaaagcaagauccc

SEQ ID NO: 714574 - RNA, 19 nt, Artificial Sequence
  Description of Artificial Sequence: Synthetic oligonucleotide
  Sense strand starting at position 810 of SEQ ID NO: 586394
agaguuccaugauccaaua

SEQ ID NO: 714575 - RNA, 19 nt, Artificial Sequence
  Description of Artificial Sequence: Synthetic oligonucleotide
  Antisense strand to SEQ ID NO: 714574
uauuggaucauggaacucu

SEQ ID NO: 714576 - RNA, 19 nt, Artificial Sequence
  Description of Artificial Sequence: Synthetic oligonucleotide
  Sense strand starting at position 1008 of SEQ ID NO: 586394
agcugacugucacuuaaug

SEQ ID NO: 714577 - RNA, 19 nt, Artificial Sequence
  Description of Artificial Sequence: Synthetic oligonucleotide
  Antisense strand to SEQ ID NO: 714576
cauuaagugacagucagcu

SEQ ID NO: 714578 - RNA, 19 nt, Artificial Sequence
  Description of Artificial Sequence: Synthetic oligonucleotide
  Sense strand starting at position 1128 of SEQ ID NO: 586394
caggcagaauucucaaugu

SEQ ID NO: 714579 - RNA, 19 nt, Artificial Sequence
  Description of Artificial Sequence: Synthetic oligonucleotide
  Antisense strand to SEQ ID NO: 714578
acauugagaauucugccug

SEQ ID NO: 714580 - RNA, 19 nt, Artificial Sequence
  Description of Artificial Sequence: Synthetic oligonucleotide
  Sense strand starting at position 1367 of SEQ ID NO: 586394
uugagucuucuauaggcga

SEQ ID NO: 714581 - RNA, 19 nt, Artificial Sequence
  Description of Artificial Sequence: Synthetic oligonucleotide
  Antisense strand to SEQ ID NO: 714580
ucgccuauagaagacucaa

SEQ ID NO: 714582 - RNA, 19 nt, Artificial Sequence
  Description of Artificial Sequence: Synthetic oligonucleotide
  Sense strand starting at position 1443 of SEQ ID NO: 586394
aguaaauucuauucuagag

SEQ ID NO: 714583 - RNA, 19 nt, Artificial Sequence
  Description of Artificial Sequence: Synthetic oligonucleotide
  Antisense strand to SEQ ID NO: 714582
cucuagaauagaauuuacu

SEQ ID NO: 714584 - RNA, 19 nt, Artificial Sequence
  Description of Artificial Sequence: Synthetic oligonucleotide
  Sense strand starting at position 1465 of SEQ ID NO: 586394
cgugaagacccacagcauu

SEQ ID NO: 714585 - RNA, 19 nt, Artificial Sequence
  Description of Artificial Sequence: Synthetic oligonucleotide
  Antisense strand to SEQ ID NO: 714584
aaugcugugggucuucacg

SEQ ID NO: 714586 - RNA, 19 nt, Artificial Sequence
  Description of Artificial Sequence: Synthetic oligonucleotide
  Sense strand starting at position 1607 of SEQ ID NO: 586394
agucaaguggacuguaaau

SEQ ID NO: 714587 - RNA, 19 nt, Artificial Sequence
  Description of Artificial Sequence: Synthetic oligonucleotide
  Antisense strand to SEQ ID NO: 714586
auuuacaguccacuugacu

SEQ ID NO: 714588 - RNA, 19 nt, Artificial Sequence
  Description of Artificial Sequence: Synthetic oligonucleotide
  Sense strand starting at position 1821 of SEQ ID NO: 586394
gaaugauuauaacucgucu

SEQ ID NO: 714589 - RNA, 19 nt, Artificial Sequence
  Description of Artificial Sequence: Synthetic oligonucleotide
  Antisense strand to SEQ ID NO: 714588
agacgaguuauaaucauuc

SEQ ID NO: 714590 - RNA, 19 nt, Artificial Sequence
  Description of Artificial Sequence: Synthetic oligonucleotide
  Sense strand starting at position 1825 of SEQ ID NO: 586394
gauuauaacucgucuggaa

SEQ ID NO: 714591 - RNA, 19 nt, Artificial Sequence
  Description of Artificial Sequence: Synthetic oligonucleotide
  Antisense strand to SEQ ID NO: 714590
uuccagacgaguuauaauc

SEQ ID NO: 714592 - RNA, 19 nt, Artificial Sequence
  Description of Artificial Sequence: Synthetic oligonucleotide
  Sense strand starting at position 1827 of SEQ ID NO: 586394
uuauaacucgucuggaauc

SEQ ID NO: 714593 - RNA, 19 nt, Artificial Sequence
  Description of Artificial Sequence: Synthetic oligonucleotide
  Antisense strand to SEQ ID NO: 714592
gauuccagacgaguuauaa

SEQ ID NO: 714594 - RNA, 19 nt, Artificial Sequence
  Description of Artificial Sequence: Synthetic oligonucleotide
  Sense strand starting at position 1984 of SEQ ID NO: 586394
guuucuacccaacgaaauu

SEQ ID NO: 714595 - RNA, 19 nt, Artificial Sequence
  Description of Artificial Sequence: Synthetic oligonucleotide
  Antisense strand to SEQ ID NO: 714594
aauuucguuggguagaaac

SEQ ID NO: 714596 - RNA, 19 nt, Artificial Sequence
  Description of Artificial Sequence: Synthetic oligonucleotide
  Sense strand starting at position 2080 of SEQ ID NO: 586394
agagccaauccuugaauau

SEQ ID NO: 714597 - RNA, 19 nt, Artificial Sequence
  Description of Artificial Sequence: Synthetic oligonucleotide
  Antisense strand to SEQ ID NO: 714596
auauucaaggauuggcucu

SEQ ID NO: 714598 - RNA, 19 nt, Artificial Sequence
  Description of Artificial Sequence: Synthetic oligonucleotide
  Sense strand starting at position 2364 of SEQ ID NO: 586394
uugacagaccauuguaaua

SEQ ID NO: 714599 - RNA, 19 nt, Artificial Sequence
  Description of Artificial Sequence: Synthetic oligonucleotide
  Antisense strand to SEQ ID NO: 714598
uauuacaauggucugucaa

SEQ ID NO: 714600 - RNA, 19 nt, Artificial Sequence
  Description of Artificial Sequence: Synthetic oligonucleotide
  Sense strand starting at position 2476 of SEQ ID NO: 586394
gguugacucuuauuauuaa

SEQ ID NO: 714601 - RNA, 19 nt, Artificial Sequence
  Description of Artificial Sequence: Synthetic oligonucleotide
  Antisense strand to SEQ ID NO: 714600
uuaauaauaagagucaacc

SEQ ID NO: 714602 - RNA, 19 nt, Artificial Sequence
  Description of Artificial Sequence: Synthetic oligonucleotide
  Sense strand starting at position 2756 of SEQ ID NO: 586394
uuagcucaggcugauaaua

SEQ ID NO: 714603 - RNA, 19 nt, Artificial Sequence
  Description of Artificial Sequence: Synthetic oligonucleotide
  Antisense strand to SEQ ID NO: 714602
uauuaucagccugagcuaa

SEQ ID NO: 714604 - RNA, 19 nt, Artificial Sequence
  Description of Artificial Sequence: Synthetic oligonucleotide
  Sense strand starting at position 2768 of SEQ ID NO: 586394
gauaauaccgguggacaca

SEQ ID NO: 714605 - RNA, 19 nt, Artificial Sequence
  Description of Artificial Sequence: Synthetic oligonucleotide
  Antisense strand to SEQ ID NO: 714604
uguguccaccgguauuauc

SEQ ID NO: 714606 - RNA, 19 nt, Artificial Sequence
  Description of Artificial Sequence: Synthetic oligonucleotide
  Sense strand starting at position 2777 of SEQ ID NO: 586394
gguggacacaugugugaga

SEQ ID NO: 714607 - RNA, 19 nt, Artificial Sequence
  Description of Artificial Sequence: Synthetic oligonucleotide
  Antisense strand to SEQ ID NO: 714606
ucucacacauguguccacc

SEQ ID NO: 714608 - RNA, 19 nt, Artificial Sequence
  Description of Artificial Sequence: Synthetic oligonucleotide
  Sense strand starting at position 2798 of SEQ ID NO: 586394
gagguuuacucaccaagcu

SEQ ID NO: 714609 - RNA, 19 nt, Artificial Sequence
  Description of Artificial Sequence: Synthetic oligonucleotide
  Antisense strand to SEQ ID NO: 714608
agcuuggugaguaaaccuc

SEQ ID NO: 714610 - RNA, 19 nt, Artificial Sequence
  Description of Artificial Sequence: Synthetic oligonucleotide
  Sense strand starting at position 2899 of SEQ ID NO: 586394
gaacaaugugcuggaauac

SEQ ID NO: 714611 - RNA, 19 nt, Artificial Sequence
  Description of Artificial Sequence: Synthetic oligonucleotide
  Antisense strand to SEQ ID NO: 714610
guauuccagcacauuguuc

SEQ ID NO: 714612 - RNA, 19 nt, Artificial Sequence
  Description of Artificial Sequence: Synthetic oligonucleotide
  Sense strand starting at position 2919 of SEQ ID NO: 586394
accagaugguuccugagua

SEQ ID NO: 714613 - RNA, 19 nt, Artificial Sequence
  Description of Artificial Sequence: Synthetic oligonucleotide
  Antisense strand to SEQ ID NO: 714612
uacucaggaaccaucuggu

SEQ ID NO: 714614 - RNA, 19 nt, Artificial Sequence
  Description of Artificial Sequence: Synthetic oligonucleotide
  Sense strand starting at position 2924 of SEQ ID NO: 586394
augguuccugaguaagcuu

SEQ ID NO: 714615 - RNA, 19 nt, Artificial Sequence
  Description of Artificial Sequence: Synthetic oligonucleotide
  Antisense strand to SEQ ID NO: 714614
aagcuuacucaggaaccau

SEQ ID NO: 714616 - RNA, 19 nt, Artificial Sequence
  Description of Artificial Sequence: Synthetic oligonucleotide
  Sense strand starting at position 3023 of SEQ ID NO: 586394
gaagaauaagcauguagcu

SEQ ID NO: 714617 - RNA, 19 nt, Artificial Sequence
  Description of Artificial Sequence: Synthetic oligonucleotide
  Antisense strand to SEQ ID NO: 714616
agcuacaugcuuauucuuc

SEQ ID NO: 714618 - RNA, 19 nt, Artificial Sequence
  Description of Artificial Sequence: Synthetic oligonucleotide
  Sense strand starting at position 3193 of SEQ ID NO: 586394
uuucucuuagaguaucaca

SEQ ID NO: 714619 - RNA, 19 nt, Artificial Sequence
  Description of Artificial Sequence: Synthetic oligonucleotide
  Antisense strand to SEQ ID NO: 714618
ugugauacucuaagagaaa

SEQ ID NO: 714620 - RNA, 19 nt, Artificial Sequence
  Description of Artificial Sequence: Synthetic oligonucleotide
  Sense strand starting at position 3365 of SEQ ID NO: 586394
uggugaugggcuggagaua

SEQ ID NO: 714621 - RNA, 19 nt, Artificial Sequence
  Description of Artificial Sequence: Synthetic oligonucleotide
  Antisense strand to SEQ ID NO: 714620
uaucuccagcccaucacca

SEQ ID NO: 714622 - RNA, 19 nt, Artificial Sequence
  Description of Artificial Sequence: Synthetic oligonucleotide
  Sense strand starting at position 3426 of SEQ ID NO: 586394
agugccugggcucaauaau

SEQ ID NO: 714623 - RNA, 19 nt, Artificial Sequence
  Description of Artificial Sequence: Synthetic oligonucleotide
  Antisense strand to SEQ ID NO: 714622
auuauugagcccaggcacu

SEQ ID NO: 714624 - RNA, 19 nt, Artificial Sequence
  Description of Artificial Sequence: Synthetic oligonucleotide
  Sense strand starting at position 3485 of SEQ ID NO: 586394
guuggauucgugcagaaca

SEQ ID NO: 714625 - RNA, 19 nt, Artificial Sequence
  Description of Artificial Sequence: Synthetic oligonucleotide
  Antisense strand to SEQ ID NO: 714624
uguucugcacgaauccaac

SEQ ID NO: 714626 - RNA, 19 nt, Artificial Sequence
  Description of Artificial Sequence: Synthetic oligonucleotide
  Sense strand starting at position 3487 of SEQ ID NO: 586394
uggauucgugcagaacauc

SEQ ID NO: 714627 - RNA, 19 nt, Artificial Sequence
  Description of Artificial Sequence: Synthetic oligonucleotide
  Antisense strand to SEQ ID NO: 714626
gauguucugcacgaaucca

SEQ ID NO: 714628 - RNA, 19 nt, Artificial Sequence
  Description of Artificial Sequence: Synthetic oligonucleotide
  Sense strand starting at position 3561 of SEQ ID NO: 586394
auuugauugugaguuugcu

SEQ ID NO: 714629 - RNA, 19 nt, Artificial Sequence
  Description of Artificial Sequence: Synthetic oligonucleotide
  Antisense strand to SEQ ID NO: 714628
agcaaacucacaaucaaau

SEQ ID NO: 714630 - RNA, 19 nt, Artificial Sequence
  Description of Artificial Sequence: Synthetic oligonucleotide
  Sense strand starting at position 3869 of SEQ ID NO: 586394
cugagagcuccgcaaauaa

SEQ ID NO: 714631 - RNA, 19 nt, Artificial Sequence
  Description of Artificial Sequence: Synthetic oligonucleotide
  Antisense strand to SEQ ID NO: 714630
uuauuugcggagcucucag

SEQ ID NO: 714632 - RNA, 19 nt, Artificial Sequence
  Description of Artificial Sequence: Synthetic oligonucleotide
  Sense strand starting at position 3967 of SEQ ID NO: 586394
ggcggcuuguggaagauuu

SEQ ID NO: 714633 - RNA, 19 nt, Artificial Sequence
  Description of Artificial Sequence: Synthetic oligonucleotide
  Antisense strand to SEQ ID NO: 714632
aaaucuuccacaagccgcc

SEQ ID NO: 714634 - RNA, 19 nt, Artificial Sequence
  Description of Artificial Sequence: Synthetic oligonucleotide
  Sense strand starting at position 29 of SEQ ID NO: 586395
acgaauuaggcccgaauca

SEQ ID NO: 714635 - RNA, 19 nt, Artificial Sequence
  Description of Artificial Sequence: Synthetic oligonucleotide
  Antisense strand to SEQ ID NO: 714634
ugauucgggccuaauucgu

SEQ ID NO: 714636 - RNA, 19 nt, Artificial Sequence
  Description of Artificial Sequence: Synthetic oligonucleotide
  Sense strand starting at position 30 of SEQ ID NO: 586395
cgaauuaggcccgaaucau

SEQ ID NO: 714637 - RNA, 19 nt, Artificial Sequence
  Description of Artificial Sequence: Synthetic oligonucleotide
  Antisense strand to SEQ ID NO: 714636
augauucgggccuaauucg

SEQ ID NO: 714638 - RNA, 19 nt, Artificial Sequence
  Description of Artificial Sequence: Synthetic oligonucleotide
  Sense strand starting at position 631 of SEQ ID NO: 586395
ccgagauuuccacgaagcu

SEQ ID NO: 714639 - RNA, 19 nt, Artificial Sequence
  Description of Artificial Sequence: Synthetic oligonucleotide
  Antisense strand to SEQ ID NO: 714638
agcuucguggaaaucucgg

SEQ ID NO: 714640 - RNA, 19 nt, Artificial Sequence
  Description of Artificial Sequence: Synthetic oligonucleotide
  Sense strand starting at position 710 of SEQ ID NO: 586395
gagaguauuuacuaaccag

SEQ ID NO: 714641 - RNA, 19 nt, Artificial Sequence
  Description of Artificial Sequence: Synthetic oligonucleotide
  Antisense strand to SEQ ID NO: 714640
cugguuaguaaauacucuc

SEQ ID NO: 714642 - RNA, 19 nt, Artificial Sequence
  Description of Artificial Sequence: Synthetic oligonucleotide
  Sense strand starting at position 885 of SEQ ID NO: 586395
cuucucuagcucuauagga

SEQ ID NO: 714643 - RNA, 19 nt, Artificial Sequence
  Description of Artificial Sequence: Synthetic oligonucleotide
  Antisense strand to SEQ ID NO: 714642
uccuauagagcuagagaag

SEQ ID NO: 714644 - RNA, 19 nt, Artificial Sequence
  Description of Artificial Sequence: Synthetic oligonucleotide
  Sense strand starting at position 887 of SEQ ID NO: 586395
ucucuagcucuauaggaau

SEQ ID NO: 714645 - RNA, 19 nt, Artificial Sequence
  Description of Artificial Sequence: Synthetic oligonucleotide
  Antisense strand to SEQ ID NO: 714644
auuccuauagagcuagaga

SEQ ID NO: 714646 - RNA, 19 nt, Artificial Sequence
  Description of Artificial Sequence: Synthetic oligonucleotide
  Sense strand starting at position 1837 of SEQ ID NO: 586395
ccaugcaugccucagaucu

SEQ ID NO: 714647 - RNA, 19 nt, Artificial Sequence
  Description of Artificial Sequence: Synthetic oligonucleotide
  Antisense strand to SEQ ID NO: 714646
agaucugaggcaugcaugg

SEQ ID NO: 714648 - RNA, 19 nt, Artificial Sequence
  Description of Artificial Sequence: Synthetic oligonucleotide
  Sense strand starting at position 1860 of SEQ ID NO: 586395
uaaauaauaugugugcaga

SEQ ID NO: 714649 - RNA, 19 nt, Artificial Sequence
  Description of Artificial Sequence: Synthetic oligonucleotide
  Antisense strand to SEQ ID NO: 714648
ucugcacacauauuauuua

SEQ ID NO: 714650 - RNA, 19 nt, Artificial Sequence
  Description of Artificial Sequence: Synthetic oligonucleotide
  Sense strand starting at position 1861 of SEQ ID NO: 586395
aaauaauaugugugcagag

SEQ ID NO: 714651 - RNA, 19 nt, Artificial Sequence
  Description of Artificial Sequence: Synthetic oligonucleotide
  Antisense strand to SEQ ID NO: 714650
cucugcacacauauuauuu

SEQ ID NO: 714652 - RNA, 19 nt, Artificial Sequence
  Description of Artificial Sequence: Synthetic oligonucleotide
  Sense strand starting at position 1863 of SEQ ID NO: 586395
auaauaugugugcagagca

SEQ ID NO: 714653 - RNA, 19 nt, Artificial Sequence
  Description of Artificial Sequence: Synthetic oligonucleotide
  Antisense strand to SEQ ID NO: 714652
ugcucugcacacauauuau

SEQ ID NO: 714654 - RNA, 19 nt, Artificial Sequence
  Description of Artificial Sequence: Synthetic oligonucleotide
  Sense strand starting at position 2005 of SEQ ID NO: 586395
accgguuccggauauuaag

SEQ ID NO: 714655 - RNA, 19 nt, Artificial Sequence
  Description of Artificial Sequence: Synthetic oligonucleotide
  Antisense strand to SEQ ID NO: 714654
cuuaauauccggaaccggu

SEQ ID NO: 714656 - RNA, 19 nt, Artificial Sequence
  Description of Artificial Sequence: Synthetic oligonucleotide
  Sense strand starting at position 2039 of SEQ ID NO: 586395
gcuguuugaacgcuacuuu

SEQ ID NO: 714657 - RNA, 19 nt, Artificial Sequence
  Description of Artificial Sequence: Synthetic oligonucleotide
  Antisense strand to SEQ ID NO: 714656
aaaguagcguucaaacagc

SEQ ID NO: 714658 - RNA, 19 nt, Artificial Sequence
  Description of Artificial Sequence: Synthetic oligonucleotide
  Sense strand starting at position 2043 of SEQ ID NO: 586395
uuugaacgcuacuuuaaga

SEQ ID NO: 714659 - RNA, 19 nt, Artificial Sequence
  Description of Artificial Sequence: Synthetic oligonucleotide
  Antisense strand to SEQ ID NO: 714658
ucuuaaaguagcguucaaa

SEQ ID NO: 714660 - RNA, 19 nt, Artificial Sequence
  Description of Artificial Sequence: Synthetic oligonucleotide
  Sense strand starting at position 2082 of SEQ ID NO: 586395
gccucuacccuuggacaga

SEQ ID NO: 714661 - RNA, 19 nt, Artificial Sequence
  Description of Artificial Sequence: Synthetic oligonucleotide
  Antisense strand to SEQ ID NO: 714660
ucuguccaaggguagaggc

SEQ ID NO: 714662 - RNA, 19 nt, Artificial Sequence
  Description of Artificial Sequence: Synthetic oligonucleotide
  Sense strand starting at position 2137 of SEQ ID NO: 586395
cgucgacaucuauguauuu

SEQ ID NO: 714663 - RNA, 19 nt, Artificial Sequence
  Description of Artificial Sequence: Synthetic oligonucleotide
  Antisense strand to SEQ ID NO: 714662
aaauacauagaugucgacg

SEQ ID NO: 714664 - RNA, 19 nt, Artificial Sequence
  Description of Artificial Sequence: Synthetic oligonucleotide
  Sense strand starting at position 2138 of SEQ ID NO: 586395
gucgacaucuauguauuua

SEQ ID NO: 714665 - RNA, 19 nt, Artificial Sequence
  Description of Artificial Sequence: Synthetic oligonucleotide
  Antisense strand to SEQ ID NO: 714664
uaaauacauagaugucgac

SEQ ID NO: 714666 - RNA, 19 nt, Artificial Sequence
  Description of Artificial Sequence: Synthetic oligonucleotide
  Sense strand starting at position 2194 of SEQ ID NO: 586395
ccaauuaagccagggacuu

SEQ ID NO: 714667 - RNA, 19 nt, Artificial Sequence
  Description of Artificial Sequence: Synthetic oligonucleotide
  Antisense strand to SEQ ID NO: 714666
aagucccuggcuuaauugg

SEQ ID NO: 714668 - RNA, 19 nt, Artificial Sequence
  Description of Artificial Sequence: Synthetic oligonucleotide
  Sense strand starting at position 2572 of SEQ ID NO: 586395
guggcuaucccugagaugu

SEQ ID NO: 714669 - RNA, 19 nt, Artificial Sequence
  Description of Artificial Sequence: Synthetic oligonucleotide
  Antisense strand to SEQ ID NO: 714668
acaucucagggauagccac

SEQ ID NO: 714670 - RNA, 19 nt, Artificial Sequence
  Description of Artificial Sequence: Synthetic oligonucleotide
  Sense strand starting at position 2664 of SEQ ID NO: 586395
uguugauuacauuauugca

SEQ ID NO: 714671 - RNA, 19 nt, Artificial Sequence
  Description of Artificial Sequence: Synthetic oligonucleotide
  Antisense strand to SEQ ID NO: 714670
ugcaauaauguaaucaaca

SEQ ID NO: 714672 - RNA, 19 nt, Artificial Sequence
  Description of Artificial Sequence: Synthetic oligonucleotide
  Sense strand starting at position 2687 of SEQ ID NO: 586395
augagaauagucugaugua

SEQ ID NO: 714673 - RNA, 19 nt, Artificial Sequence
  Description of Artificial Sequence: Synthetic oligonucleotide
  Antisense strand to SEQ ID NO: 714672
uacaucagacuauucucau

SEQ ID NO: 714674 - RNA, 19 nt, Artificial Sequence
  Description of Artificial Sequence: Synthetic oligonucleotide
  Sense strand starting at position 2829 of SEQ ID NO: 586395
ucauuaguggcucaccuua

SEQ ID NO: 714675 - RNA, 19 nt, Artificial Sequence
  Description of Artificial Sequence: Synthetic oligonucleotide
  Antisense strand to SEQ ID NO: 714674
uaaggugagccacuaauga

SEQ ID NO: 714676 - RNA, 19 nt, Artificial Sequence
  Description of Artificial Sequence: Synthetic oligonucleotide
  Sense strand starting at position 2831 of SEQ ID NO: 586395
auuaguggcucaccuuaua

SEQ ID NO: 714677 - RNA, 19 nt, Artificial Sequence
  Description of Artificial Sequence: Synthetic oligonucleotide
  Antisense strand to SEQ ID NO: 714676
uauaaggugagccacuaau

SEQ ID NO: 714678 - RNA, 19 nt, Artificial Sequence
  Description of Artificial Sequence: Synthetic oligonucleotide
  Sense strand starting at position 2900 of SEQ ID NO: 586395
gaggcaguauuaguaucaa

SEQ ID NO: 714679 - RNA, 19 nt, Artificial Sequence
  Description of Artificial Sequence: Synthetic oligonucleotide
  Antisense strand to SEQ ID NO: 714678
uugauacuaauacugccuc

SEQ ID NO: 714680 - RNA, 19 nt, Artificial Sequence
  Description of Artificial Sequence: Synthetic oligonucleotide
  Sense strand starting at position 2925 of SEQ ID NO: 586395
cuggguccagaugguuaua

SEQ ID NO: 714681 - RNA, 19 nt, Artificial Sequence
  Description of Artificial Sequence: Synthetic oligonucleotide
  Antisense strand to SEQ ID NO: 714680
uauaaccaucuggacccag

SEQ ID NO: 714682 - RNA, 19 nt, Artificial Sequence
  Description of Artificial Sequence: Synthetic oligonucleotide
  Sense strand starting at position 2938 of SEQ ID NO: 586395
guuauaagccaguaacuaa

SEQ ID NO: 714683 - RNA, 19 nt, Artificial Sequence
  Description of Artificial Sequence: Synthetic oligonucleotide
  Antisense strand to SEQ ID NO: 714682
uuaguuacuggcuuauaac

SEQ ID NO: 714684 - RNA, 19 nt, Artificial Sequence
  Description of Artificial Sequence: Synthetic oligonucleotide
  Sense strand starting at position 3092 of SEQ ID NO: 586395
uacuaacgaugcucugaga

SEQ ID NO: 714685 - RNA, 19 nt, Artificial Sequence
  Description of Artificial Sequence: Synthetic oligonucleotide
  Antisense strand to SEQ ID NO: 714684
ucucagagcaucguuagua

SEQ ID NO: 714686 - RNA, 19 nt, Artificial Sequence
  Description of Artificial Sequence: Synthetic oligonucleotide
  Sense strand starting at position 3103 of SEQ ID NO: 586395
cucugagacacuuguagug

SEQ ID NO: 714687 - RNA, 19 nt, Artificial Sequence
  Description of Artificial Sequence: Synthetic oligonucleotide
  Antisense strand to SEQ ID NO: 714686
cacuacaagugucucagag

SEQ ID NO: 714688 - RNA, 19 nt, Artificial Sequence
  Description of Artificial Sequence: Synthetic oligonucleotide
  Sense strand starting at position 3115 of SEQ ID NO: 586395
uguagugauaaguaugaau

SEQ ID NO: 714689 - RNA, 19 nt, Artificial Sequence
  Description of Artificial Sequence: Synthetic oligonucleotide
  Antisense strand to SEQ ID NO: 714688
auucauacuuaucacuaca

SEQ ID NO: 714690 - RNA, 19 nt, Artificial Sequence
  Description of Artificial Sequence: Synthetic oligonucleotide
  Sense strand starting at position 3149 of SEQ ID NO: 586395
guagcuaaggcauauaaag

SEQ ID NO: 714691 - RNA, 19 nt, Artificial Sequence
  Description of Artificial Sequence: Synthetic oligonucleotide
  Antisense strand to SEQ ID NO: 714690
cuuuauaugccuuagcuac

SEQ ID NO: 714692 - RNA, 19 nt, Artificial Sequence
  Description of Artificial Sequence: Synthetic oligonucleotide
  Sense strand starting at position 3191 of SEQ ID NO: 586395
gugagcacucaguaaacau

SEQ ID NO: 714693 - RNA, 19 nt, Artificial Sequence
  Description of Artificial Sequence: Synthetic oligonucleotide
  Antisense strand to SEQ ID NO: 714692
auguuuacugagugcucac

SEQ ID NO: 714694 - RNA, 19 nt, Artificial Sequence
  Description of Artificial Sequence: Synthetic oligonucleotide
  Sense strand starting at position 3427 of SEQ ID NO: 586395
ugagccaucuucucccaga

SEQ ID NO: 714695 - RNA, 19 nt, Artificial Sequence
  Description of Artificial Sequence: Synthetic oligonucleotide
  Antisense strand to SEQ ID NO: 714694
ucugggagaagauggcuca

SEQ ID NO: 714696 - RNA, 19 nt, Artificial Sequence
  Description of Artificial Sequence: Synthetic oligonucleotide
  Sense strand starting at position 3443 of SEQ ID NO: 586395
agaagaauaucugucucug

SEQ ID NO: 714697 - RNA, 19 nt, Artificial Sequence
  Description of Artificial Sequence: Synthetic oligonucleotide
  Antisense strand to SEQ ID NO: 714696
cagagacagauauucuucu

SEQ ID NO: 714698 - RNA, 19 nt, Artificial Sequence
  Description of Artificial Sequence: Synthetic oligonucleotide
  Sense strand starting at position 3599 of SEQ ID NO: 586395
caucucaguguugauagga

SEQ ID NO: 714699 - RNA, 19 nt, Artificial Sequence
  Description of Artificial Sequence: Synthetic oligonucleotide
  Antisense strand to SEQ ID NO: 714698
uccuaucaacacugagaug

SEQ ID NO: 714700 - RNA, 19 nt, Artificial Sequence
  Description of Artificial Sequence: Synthetic oligonucleotide
  Sense strand starting at position 3631 of SEQ ID NO: 586395
acuggaaauucuuuacagu

SEQ ID NO: 714701 - RNA, 19 nt, Artificial Sequence
  Description of Artificial Sequence: Synthetic oligonucleotide
  Antisense strand to SEQ ID NO: 714700
acuguaaagaauuuccagu

SEQ ID NO: 714702 - RNA, 19 nt, Artificial Sequence
  Description of Artificial Sequence: Synthetic oligonucleotide
  Sense strand starting at position 3671 of SEQ ID NO: 586395
ggaacauggaguugaucuu

SEQ ID NO: 714703 - RNA, 19 nt, Artificial Sequence
  Description of Artificial Sequence: Synthetic oligonucleotide
  Antisense strand to SEQ ID NO: 714702
aagaucaacuccauguucc

SEQ ID NO: 714704 - RNA, 19 nt, Artificial Sequence
  Description of Artificial Sequence: Synthetic oligonucleotide
  Sense strand starting at position 3677 of SEQ ID NO: 586395
uggaguugaucuuuggaac

SEQ ID NO: 714705 - RNA, 19 nt, Artificial Sequence
  Description of Artificial Sequence: Synthetic oligonucleotide
  Antisense strand to SEQ ID NO: 714704
guuccaaagaucaacucca

SEQ ID NO: 714706 - RNA, 19 nt, Artificial Sequence
  Description of Artificial Sequence: Synthetic oligonucleotide
  Sense strand starting at position 3716 of SEQ ID NO: 586395
cucuaagucccuuaggauu

SEQ ID NO: 714707 - RNA, 19 nt, Artificial Sequence
  Description of Artificial Sequence: Synthetic oligonucleotide
  Antisense strand to SEQ ID NO: 714706
aauccuaagggacuuagag

SEQ ID NO: 714708 - RNA, 19 nt, Artificial Sequence
  Description of Artificial Sequence: Synthetic oligonucleotide
  Sense strand starting at position 3820 of SEQ ID NO: 586395
ucugcuaagcugggagaau

SEQ ID NO: 714709 - RNA, 19 nt, Artificial Sequence
  Description of Artificial Sequence: Synthetic oligonucleotide
  Antisense strand to SEQ ID NO: 714708
auucucccagcuuagcaga

SEQ ID NO: 714710 - RNA, 19 nt, Artificial Sequence
  Description of Artificial Sequence: Synthetic oligonucleotide
  Sense strand starting at position 3834 of SEQ ID NO: 586395
agaauagcauucuuugguu

SEQ ID NO: 714711 - RNA, 19 nt, Artificial Sequence
  Description of Artificial Sequence: Synthetic oligonucleotide
  Antisense strand to SEQ ID NO: 714710
aaccaaagaaugcuauucu

SEQ ID NO: 714712 - RNA, 19 nt, Artificial Sequence
  Description of Artificial Sequence: Synthetic oligonucleotide
  Sense strand starting at position 3926 of SEQ ID NO: 586395
uuagaaguauugucaagug

SEQ ID NO: 714713 - RNA, 19 nt, Artificial Sequence
  Description of Artificial Sequence: Synthetic oligonucleotide
  Antisense strand to SEQ ID NO: 714712
cacuugacaauacuucuaa

SEQ ID NO: 714714 - RNA, 19 nt, Artificial Sequence
  Description of Artificial Sequence: Synthetic oligonucleotide
  Sense strand starting at position 13 of SEQ ID NO: 586396
guuucugucccuuacaauu

SEQ ID NO: 714715 - RNA, 19 nt, Artificial Sequence
  Description of Artificial Sequence: Synthetic oligonucleotide
  Antisense strand to SEQ ID NO: 714714
aauuguaagggacagaaac

SEQ ID NO: 714716 - RNA, 19 nt, Artificial Sequence
  Description of Artificial Sequence: Synthetic oligonucleotide
  Sense strand starting at position 80 of SEQ ID NO: 586396
guuccaaacuugucauuaa

SEQ ID NO: 714717 - RNA, 19 nt, Artificial Sequence
  Description of Artificial Sequence: Synthetic oligonucleotide
  Antisense strand to SEQ ID NO: 714716
uuaaugacaaguuuggaac

SEQ ID NO: 714718 - RNA, 19 nt, Artificial Sequence
  Description of Artificial Sequence: Synthetic oligonucleotide
  Sense strand starting at position 261 of SEQ ID NO: 586396
ucagaagucacgcauggau

SEQ ID NO: 714719 - RNA, 19 nt, Artificial Sequence
  Description of Artificial Sequence: Synthetic oligonucleotide
  Antisense strand to SEQ ID NO: 714718
auccaugcgugacuucuga

SEQ ID NO: 714720 - RNA, 19 nt, Artificial Sequence
  Description of Artificial Sequence: Synthetic oligonucleotide
  Sense strand starting at position 288 of SEQ ID NO: 586396
uuagucucacuccagcauu

SEQ ID NO: 714721 - RNA, 19 nt, Artificial Sequence
  Description of Artificial Sequence: Synthetic oligonucleotide
  Antisense strand to SEQ ID NO: 714720
aaugcuggagugagacuaa

SEQ ID NO: 714722 - RNA, 19 nt, Artificial Sequence
  Description of Artificial Sequence: Synthetic oligonucleotide
  Sense strand starting at position 319 of SEQ ID NO: 586396
ccgcuucucugaguuauuu

SEQ ID NO: 714723 - RNA, 19 nt, Artificial Sequence
  Description of Artificial Sequence: Synthetic oligonucleotide
  Antisense strand to SEQ ID NO: 714722
aaauaacucagagaagcgg

SEQ ID NO: 714724 - RNA, 19 nt, Artificial Sequence
  Description of Artificial Sequence: Synthetic oligonucleotide
  Sense strand starting at position 561 of SEQ ID NO: 586396
aucuacaugucugauuuga

SEQ ID NO: 714725 - RNA, 19 nt, Artificial Sequence
  Description of Artificial Sequence: Synthetic oligonucleotide
  Antisense strand to SEQ ID NO: 714724
ucaaaucagacauguagau

SEQ ID NO: 714726 - RNA, 19 nt, Artificial Sequence
  Description of Artificial Sequence: Synthetic oligonucleotide
  Sense strand starting at position 803 of SEQ ID NO: 586396
gugaaauguccauaugcaa

SEQ ID NO: 714727 - RNA, 19 nt, Artificial Sequence
  Description of Artificial Sequence: Synthetic oligonucleotide
  Antisense strand to SEQ ID NO: 714726
uugcauauggacauuucac

SEQ ID NO: 714728 - RNA, 19 nt, Artificial Sequence
  Description of Artificial Sequence: Synthetic oligonucleotide
  Sense strand starting at position 835 of SEQ ID NO: 586396
ccaaauguaucuguccaga

SEQ ID NO: 714729 - RNA, 19 nt, Artificial Sequence
  Description of Artificial Sequence: Synthetic oligonucleotide
  Antisense strand to SEQ ID NO: 714728
ucuggacagauacauuugg

SEQ ID NO: 714730 - RNA, 19 nt, Artificial Sequence
  Description of Artificial Sequence: Synthetic oligonucleotide
  Sense strand starting at position 880 of SEQ ID NO: 586396
gcggcacacguuucucaua

SEQ ID NO: 714731 - RNA, 19 nt, Artificial Sequence
  Description of Artificial Sequence: Synthetic oligonucleotide
  Antisense strand to SEQ ID NO: 714730
uaugagaaacgugugccgc

SEQ ID NO: 714732 - RNA, 19 nt, Artificial Sequence
  Description of Artificial Sequence: Synthetic oligonucleotide
  Sense strand starting at position 922 of SEQ ID NO: 586396
cuccucgguuucucagaaa

SEQ ID NO: 714733 - RNA, 19 nt, Artificial Sequence
  Description of Artificial Sequence: Synthetic oligonucleotide
  Antisense strand to SEQ ID NO: 714732
uuucugagaaaccgaggag

SEQ ID NO: 714734 - RNA, 19 nt, Artificial Sequence
  Description of Artificial Sequence: Synthetic oligonucleotide
  Sense strand starting at position 947 of SEQ ID NO: 586396
cuaaauagucuuggccaga

SEQ ID NO: 714735 - RNA, 19 nt, Artificial Sequence
  Description of Artificial Sequence: Synthetic oligonucleotide
  Antisense strand to SEQ ID NO: 714734
ucuggccaagacuauuuag

SEQ ID NO: 714736 - RNA, 19 nt, Artificial Sequence
  Description of Artificial Sequence: Synthetic oligonucleotide
  Sense strand starting at position 948 of SEQ ID NO: 586396
uaaauagucuuggccagaa

SEQ ID NO: 714737 - RNA, 19 nt, Artificial Sequence
  Description of Artificial Sequence: Synthetic oligonucleotide
  Antisense strand to SEQ ID NO: 714736
uucuggccaagacuauuua

SEQ ID NO: 714738 - RNA, 19 nt, Artificial Sequence
  Description of Artificial Sequence: Synthetic oligonucleotide
  Sense strand starting at position 950 of SEQ ID NO: 586396
aauagucuuggccagaaau

SEQ ID NO: 714739 - RNA, 19 nt, Artificial Sequence
  Description of Artificial Sequence: Synthetic oligonucleotide
  Antisense strand to SEQ ID NO: 714738
auuucuggccaagacuauu

SEQ ID NO: 714740 - RNA, 19 nt, Artificial Sequence
  Description of Artificial Sequence: Synthetic oligonucleotide
  Sense strand starting at position 996 of SEQ ID NO: 586396
ccguuagucccauauugaa

SEQ ID NO: 714741 - RNA, 19 nt, Artificial Sequence
  Description of Artificial Sequence: Synthetic oligonucleotide
  Antisense strand to SEQ ID NO: 714740
uucaauaugggacuaacgg

SEQ ID NO: 714742 - RNA, 19 nt, Artificial Sequence
  Description of Artificial Sequence: Synthetic oligonucleotide
  Sense strand starting at position 1033 of SEQ ID NO: 586396
augggcuugucuccaggaa

SEQ ID NO: 714743 - RNA, 19 nt, Artificial Sequence
  Description of Artificial Sequence: Synthetic oligonucleotide
  Antisense strand to SEQ ID NO: 714742
uuccuggagacaagcccau

SEQ ID NO: 714744 - RNA, 19 nt, Artificial Sequence
  Description of Artificial Sequence: Synthetic oligonucleotide
  Sense strand starting at position 1034 of SEQ ID NO: 586396
ugggcuugucuccaggaaa

SEQ ID NO: 714745 - RNA, 19 nt, Artificial Sequence
  Description of Artificial Sequence: Synthetic oligonucleotide
  Antisense strand to SEQ ID NO: 714744
uuuccuggagacaagccca

SEQ ID NO: 714746 - RNA, 19 nt, Artificial Sequence
  Description of Artificial Sequence: Synthetic oligonucleotide
  Sense strand starting at position 1037 of SEQ ID NO: 586396
gcuugucuccaggaaagua

SEQ ID NO: 714747 - RNA, 19 nt, Artificial Sequence
  Description of Artificial Sequence: Synthetic oligonucleotide
  Antisense strand to SEQ ID NO: 714746
uacuuuccuggagacaagc

SEQ ID NO: 714748 - RNA, 19 nt, Artificial Sequence
  Description of Artificial Sequence: Synthetic oligonucleotide
  Sense strand starting at position 1175 of SEQ ID NO: 586396
uugugaucauuugaacauc

SEQ ID NO: 714749 - RNA, 19 nt, Artificial Sequence
  Description of Artificial Sequence: Synthetic oligonucleotide
  Antisense strand to SEQ ID NO: 714748
gauguucaaaugaucacaa

SEQ ID NO: 714750 - RNA, 19 nt, Artificial Sequence
  Description of Artificial Sequence: Synthetic oligonucleotide
  Sense strand starting at position 1354 of SEQ ID NO: 586396
cugguucuaccuuaagacu

SEQ ID NO: 714751 - RNA, 19 nt, Artificial Sequence
  Description of Artificial Sequence: Synthetic oligonucleotide
  Antisense strand to SEQ ID NO: 714750
agucuuaagguagaaccag

SEQ ID NO: 714752 - RNA, 19 nt, Artificial Sequence
  Description of Artificial Sequence: Synthetic oligonucleotide
  Sense strand starting at position 1453 of SEQ ID NO: 586396
agcuauggucuggguaaag

SEQ ID NO: 714753 - RNA, 19 nt, Artificial Sequence
  Description of Artificial Sequence: Synthetic oligonucleotide
  Antisense strand to SEQ ID NO: 714752
cuuuacccagaccauagcu

SEQ ID NO: 714754 - RNA, 19 nt, Artificial Sequence
  Description of Artificial Sequence: Synthetic oligonucleotide
  Sense strand starting at position 1570 of SEQ ID NO: 586396
gugcguucucggucucacu

SEQ ID NO: 714755 - RNA, 19 nt, Artificial Sequence
  Description of Artificial Sequence: Synthetic oligonucleotide
  Antisense strand to SEQ ID NO: 714754
agugagaccgagaacgcac

SEQ ID NO: 714756 - RNA, 19 nt, Artificial Sequence
  Description of Artificial Sequence: Synthetic oligonucleotide
  Sense strand starting at position 1588 of SEQ ID NO: 586396
ugccuuuaagaaugaagca

SEQ ID NO: 714757 - RNA, 19 nt, Artificial Sequence
  Description of Artificial Sequence: Synthetic oligonucleotide
  Antisense strand to SEQ ID NO: 714756
ugcuucauucuuaaaggca

SEQ ID NO: 714758 - RNA, 19 nt, Artificial Sequence
  Description of Artificial Sequence: Synthetic oligonucleotide
  Sense strand starting at position 2103 of SEQ ID NO: 586396
gcugacuggcguguuuaca

SEQ ID NO: 714759 - RNA, 19 nt, Artificial Sequence
  Description of Artificial Sequence: Synthetic oligonucleotide
  Antisense strand to SEQ ID NO: 714758
uguaaacacgccagucagc

SEQ ID NO: 714760 - RNA, 19 nt, Artificial Sequence
  Description of Artificial Sequence: Synthetic oligonucleotide
  Sense strand starting at position 2163 of SEQ ID NO: 586396
auccuuuagcgagacacaa

SEQ ID NO: 714761 - RNA, 19 nt, Artificial Sequence
  Description of Artificial Sequence: Synthetic oligonucleotide
  Antisense strand to SEQ ID NO: 714760
uugugucucgcuaaaggau

SEQ ID NO: 714762 - RNA, 19 nt, Artificial Sequence
  Description of Artificial Sequence: Synthetic oligonucleotide
  Sense strand starting at position 2339 of SEQ ID NO: 586396
gcaccaguuucucuuaaag

SEQ ID NO: 714763 - RNA, 19 nt, Artificial Sequence
  Description of Artificial Sequence: Synthetic oligonucleotide
  Antisense strand to SEQ ID NO: 714762
cuuuaagagaaacuggugc

SEQ ID NO: 714764 - RNA, 19 nt, Artificial Sequence
  Description of Artificial Sequence: Synthetic oligonucleotide
  Sense strand starting at position 2387 of SEQ ID NO: 586396
agaaguaacugcccugaau

SEQ ID NO: 714765 - RNA, 19 nt, Artificial Sequence
  Description of Artificial Sequence: Synthetic oligonucleotide
  Antisense strand to SEQ ID NO: 714764
auucagggcaguuacuucu

SEQ ID NO: 714766 - RNA, 19 nt, Artificial Sequence
  Description of Artificial Sequence: Synthetic oligonucleotide
  Sense strand starting at position 2470 of SEQ ID NO: 586396
auaugaguucucugagggu

SEQ ID NO: 714767 - RNA, 19 nt, Artificial Sequence
  Description of Artificial Sequence: Synthetic oligonucleotide
  Antisense strand to SEQ ID NO: 714766
acccucagagaacucauau

SEQ ID NO: 714768 - RNA, 19 nt, Artificial Sequence
  Description of Artificial Sequence: Synthetic oligonucleotide
  Sense strand starting at position 2510 of SEQ ID NO: 586396
ucuguuguuccagaccuga

SEQ ID NO: 714769 - RNA, 19 nt, Artificial Sequence
  Description of Artificial Sequence: Synthetic oligonucleotide
  Antisense strand to SEQ ID NO: 714768
ucaggucuggaacaacaga

SEQ ID NO: 714770 - RNA, 19 nt, Artificial Sequence
  Description of Artificial Sequence: Synthetic oligonucleotide
  Sense strand starting at position 2669 of SEQ ID NO: 586396
uccagaauuccuugcacag

SEQ ID NO: 714771 - RNA, 19 nt, Artificial Sequence
  Description of Artificial Sequence: Synthetic oligonucleotide
  Antisense strand to SEQ ID NO: 714770
cugugcaaggaauucugga

SEQ ID NO: 714772 - RNA, 19 nt, Artificial Sequence
  Description of Artificial Sequence: Synthetic oligonucleotide
  Sense strand starting at position 2776 of SEQ ID NO: 586396
gggccuauuccagauuccu

SEQ ID NO: 714773 - RNA, 19 nt, Artificial Sequence
  Description of Artificial Sequence: Synthetic oligonucleotide
  Antisense strand to SEQ ID NO: 714772
aggaaucuggaauaggccc

SEQ ID NO: 714774 - RNA, 19 nt, Artificial Sequence
  Description of Artificial Sequence: Synthetic oligonucleotide
  Sense strand starting at position 2871 of SEQ ID NO: 586396
gcucucuugcgcuuuggga

SEQ ID NO: 714775 - RNA, 19 nt, Artificial Sequence
  Description of Artificial Sequence: Synthetic oligonucleotide
  Antisense strand to SEQ ID NO: 714774
ucccaaagcgcaagagagc

SEQ ID NO: 714776 - RNA, 19 nt, Artificial Sequence
  Description of Artificial Sequence: Synthetic oligonucleotide
  Sense strand starting at position 2880 of SEQ ID NO: 586396
cgcuuugggaaucagcauu

SEQ ID NO: 714777 - RNA, 19 nt, Artificial Sequence
  Description of Artificial Sequence: Synthetic oligonucleotide
  Antisense strand to SEQ ID NO: 714776
aaugcugauucccaaagcg

SEQ ID NO: 714778 - RNA, 19 nt, Artificial Sequence
  Description of Artificial Sequence: Synthetic oligonucleotide
  Sense strand starting at position 3123 of SEQ ID NO: 586396
caggaagugcuggagcauu

SEQ ID NO: 714779 - RNA, 19 nt, Artificial Sequence
  Description of Artificial Sequence: Synthetic oligonucleotide
  Antisense strand to SEQ ID NO: 714778
aaugcuccagcacuuccug

SEQ ID NO: 714780 - RNA, 19 nt, Artificial Sequence
  Description of Artificial Sequence: Synthetic oligonucleotide
  Sense strand starting at position 3200 of SEQ ID NO: 586396
augugaaacuucuuucuug

SEQ ID NO: 714781 - RNA, 19 nt, Artificial Sequence
  Description of Artificial Sequence: Synthetic oligonucleotide
  Antisense strand to SEQ ID NO: 714780
caagaaagaaguuucacau

SEQ ID NO: 714782 - RNA, 19 nt, Artificial Sequence
  Description of Artificial Sequence: Synthetic oligonucleotide
  Sense strand starting at position 3257 of SEQ ID NO: 586396
ccuagaacauuugauugca

SEQ ID NO: 714783 - RNA, 19 nt, Artificial Sequence
  Description of Artificial Sequence: Synthetic oligonucleotide
  Antisense strand to SEQ ID NO: 714782
ugcaaucaaauguucuagg

SEQ ID NO: 714784 - RNA, 19 nt, Artificial Sequence
  Description of Artificial Sequence: Synthetic oligonucleotide
  Sense strand starting at position 3552 of SEQ ID NO: 586396
acaugugacccucaguauc

SEQ ID NO: 714785 - RNA, 19 nt, Artificial Sequence
  Description of Artificial Sequence: Synthetic oligonucleotide
  Antisense strand to SEQ ID NO: 714784
gauacugagggucacaugu

SEQ ID NO: 714786 - RNA, 19 nt, Artificial Sequence
  Description of Artificial Sequence: Synthetic oligonucleotide
  Sense strand starting at position 3566 of SEQ ID NO: 586396
guauccucaucugugaaac

SEQ ID NO: 714787 - RNA, 19 nt, Artificial Sequence
  Description of Artificial Sequence: Synthetic oligonucleotide
  Antisense strand to SEQ ID NO: 714786
guuucacagaugaggauac

SEQ ID NO: 714788 - RNA, 19 nt, Artificial Sequence
  Description of Artificial Sequence: Synthetic oligonucleotide
  Sense strand starting at position 3751 of SEQ ID NO: 586396
agccacacugcaugagaau

SEQ ID NO: 714789 - RNA, 19 nt, Artificial Sequence
  Description of Artificial Sequence: Synthetic oligonucleotide
  Antisense strand to SEQ ID NO: 714788
auucucaugcaguguggcu

SEQ ID NO: 714790 - RNA, 19 nt, Artificial Sequence
  Description of Artificial Sequence: Synthetic oligonucleotide
  Sense strand starting at position 3752 of SEQ ID NO: 586396
gccacacugcaugagaauu

SEQ ID NO: 714791 - RNA, 19 nt, Artificial Sequence
  Description of Artificial Sequence: Synthetic oligonucleotide
  Antisense strand to SEQ ID NO: 714790
aauucucaugcaguguggc

SEQ ID NO: 714792 - RNA, 19 nt, Artificial Sequence
  Description of Artificial Sequence: Synthetic oligonucleotide
  Sense strand starting at position 3901 of SEQ ID NO: 586396
aacgauuguguugacagaa

SEQ ID NO: 714793 - RNA, 19 nt, Artificial Sequence
  Description of Artificial Sequence: Synthetic oligonucleotide
  Antisense strand to SEQ ID NO: 714792
uucugucaacacaaucguu

SEQ ID NO: 714794 - RNA, 19 nt, Artificial Sequence
  Description of Artificial Sequence: Synthetic oligonucleotide
  Sense strand starting at position 74 of SEQ ID NO: 586397
ggacauuaaugcuugaaac

SEQ ID NO: 714795 - RNA, 19 nt, Artificial Sequence
  Description of Artificial Sequence: Synthetic oligonucleotide
  Antisense strand to SEQ ID NO: 714794
guuucaagcauuaaugucc

SEQ ID NO: 714796 - RNA, 19 nt, Artificial Sequence
  Description of Artificial Sequence: Synthetic oligonucleotide
  Sense strand starting at position 105 of SEQ ID NO: 586397
uaggcauggaggugagaua

SEQ ID NO: 714797 - RNA, 19 nt, Artificial Sequence
  Description of Artificial Sequence: Synthetic oligonucleotide
  Antisense strand to SEQ ID NO: 714796
uaucucaccuccaugccua

SEQ ID NO: 714798 - RNA, 19 nt, Artificial Sequence
  Description of Artificial Sequence: Synthetic oligonucleotide
  Sense strand starting at position 199 of SEQ ID NO: 586397
aggauuauaucccucuaug

SEQ ID NO: 714799 - RNA, 19 nt, Artificial Sequence
  Description of Artificial Sequence: Synthetic oligonucleotide
  Antisense strand to SEQ ID NO: 714798
cauagagggauauaauccu

SEQ ID NO: 714800 - RNA, 19 nt, Artificial Sequence
  Description of Artificial Sequence: Synthetic oligonucleotide
  Sense strand starting at position 244 of SEQ ID NO: 586397
uguguaaauacaggucauu

SEQ ID NO: 714801 - RNA, 19 nt, Artificial Sequence
  Description of Artificial Sequence: Synthetic oligonucleotide
  Antisense strand to SEQ ID NO: 714800
aaugaccuguauuuacaca

SEQ ID NO: 714802 - RNA, 19 nt, Artificial Sequence
  Description of Artificial Sequence: Synthetic oligonucleotide
  Sense strand starting at position 371 of SEQ ID NO: 586397
cccgucuuagauuaucuga

SEQ ID NO: 714803 - RNA, 19 nt, Artificial Sequence
  Description of Artificial Sequence: Synthetic oligonucleotide
  Antisense strand to SEQ ID NO: 714802
ucagauaaucuaagacggg

SEQ ID NO: 714804 - RNA, 19 nt, Artificial Sequence
  Description of Artificial Sequence: Synthetic oligonucleotide
  Sense strand starting at position 373 of SEQ ID NO: 586397
cgucuuagauuaucugaaa

SEQ ID NO: 714805 - RNA, 19 nt, Artificial Sequence
  Description of Artificial Sequence: Synthetic oligonucleotide
  Antisense strand to SEQ ID NO: 714804
uuucagauaaucuaagacg

SEQ ID NO: 714806 - RNA, 19 nt, Artificial Sequence
  Description of Artificial Sequence: Synthetic oligonucleotide
  Sense strand starting at position 403 of SEQ ID NO: 586397
acgaauuaggcccgaauca

SEQ ID NO: 714807 - RNA, 19 nt, Artificial Sequence
  Description of Artificial Sequence: Synthetic oligonucleotide
  Antisense strand to SEQ ID NO: 714806
ugauucgggccuaauucgu

SEQ ID NO: 714808 - RNA, 19 nt, Artificial Sequence
  Description of Artificial Sequence: Synthetic oligonucleotide
  Sense strand starting at position 404 of SEQ ID NO: 586397
cgaauuaggcccgaaucau

SEQ ID NO: 714809 - RNA, 19 nt, Artificial Sequence
  Description of Artificial Sequence: Synthetic oligonucleotide
  Antisense strand to SEQ ID NO: 714808
augauucgggccuaauucg

SEQ ID NO: 714810 - RNA, 19 nt, Artificial Sequence
  Description of Artificial Sequence: Synthetic oligonucleotide
  Sense strand starting at position 1005 of SEQ ID NO: 586397
ccgagauuuccacgaagcu

SEQ ID NO: 714811 - RNA, 19 nt, Artificial Sequence
  Description of Artificial Sequence: Synthetic oligonucleotide
  Antisense strand to SEQ ID NO: 714810
agcuucguggaaaucucgg

SEQ ID NO: 714812 - RNA, 19 nt, Artificial Sequence
  Description of Artificial Sequence: Synthetic oligonucleotide
  Sense strand starting at position 1084 of SEQ ID NO: 586397
gagaguauuuacuaaccag

SEQ ID NO: 714813 - RNA, 19 nt, Artificial Sequence
  Description of Artificial Sequence: Synthetic oligonucleotide
  Antisense strand to SEQ ID NO: 714812
cugguuaguaaauacucuc

SEQ ID NO: 714814 - RNA, 19 nt, Artificial Sequence
  Description of Artificial Sequence: Synthetic oligonucleotide
  Sense strand starting at position 1259 of SEQ ID NO: 586397
cuucucuagcucuauagga

SEQ ID NO: 714815 - RNA, 19 nt, Artificial Sequence
  Description of Artificial Sequence: Synthetic oligonucleotide
  Antisense strand to SEQ ID NO: 714814
uccuauagagcuagagaag

SEQ ID NO: 714816 - RNA, 19 nt, Artificial Sequence
  Description of Artificial Sequence: Synthetic oligonucleotide
  Sense strand starting at position 1261 of SEQ ID NO: 586397
ucucuagcucuauaggaau

SEQ ID NO: 714817 - RNA, 19 nt, Artificial Sequence
  Description of Artificial Sequence: Synthetic oligonucleotide
  Antisense strand to SEQ ID NO: 714816
auuccuauagagcuagaga

SEQ ID NO: 714818 - RNA, 19 nt, Artificial Sequence
  Description of Artificial Sequence: Synthetic oligonucleotide
  Sense strand starting at position 2211 of SEQ ID NO: 586397
ccaugcaugccucagaucu

SEQ ID NO: 714819 - RNA, 19 nt, Artificial Sequence
  Description of Artificial Sequence: Synthetic oligonucleotide
  Antisense strand to SEQ ID NO: 714818
agaucugaggcaugcaugg

SEQ ID NO: 714820 - RNA, 19 nt, Artificial Sequence
  Description of Artificial Sequence: Synthetic oligonucleotide
  Sense strand starting at position 2234 of SEQ ID NO: 586397
uaaauaauaugugugcaga

SEQ ID NO: 714821 - RNA, 19 nt, Artificial Sequence
  Description of Artificial Sequence: Synthetic oligonucleotide
  Antisense strand to SEQ ID NO: 714820
ucugcacacauauuauuua

SEQ ID NO: 714822 - RNA, 19 nt, Artificial Sequence
  Description of Artificial Sequence: Synthetic oligonucleotide
  Sense strand starting at position 2235 of SEQ ID NO: 586397
aaauaauaugugugcagag

SEQ ID NO: 714823 - RNA, 19 nt, Artificial Sequence
  Description of Artificial Sequence: Synthetic oligonucleotide
  Antisense strand to SEQ ID NO: 714822
cucugcacacauauuauuu

SEQ ID NO: 714824 - RNA, 19 nt, Artificial Sequence
  Description of Artificial Sequence: Synthetic oligonucleotide
  Sense strand starting at position 2237 of SEQ ID NO: 586397
auaauaugugugcagagca

SEQ ID NO: 714825 - RNA, 19 nt, Artificial Sequence
  Description of Artificial Sequence: Synthetic oligonucleotide
  Antisense strand to SEQ ID NO: 714824
ugcucugcacacauauuau

SEQ ID NO: 714826 - RNA, 19 nt, Artificial Sequence
  Description of Artificial Sequence: Synthetic oligonucleotide
  Sense strand starting at position 2379 of SEQ ID NO: 586397
accgguuccggauauuaag

SEQ ID NO: 714827 - RNA, 19 nt, Artificial Sequence
  Description of Artificial Sequence: Synthetic oligonucleotide
  Antisense strand to SEQ ID NO: 714826
cuuaauauccggaaccggu

SEQ ID NO: 714828 - RNA, 19 nt, Artificial Sequence
  Description of Artificial Sequence: Synthetic oligonucleotide
  Sense strand starting at position 2413 of SEQ ID NO: 586397
gcuguuugaacgcuacuuu

SEQ ID NO: 714829 - RNA, 19 nt, Artificial Sequence
  Description of Artificial Sequence: Synthetic oligonucleotide
  Antisense strand to SEQ ID NO: 714828
aaaguagcguucaaacagc

SEQ ID NO: 714830 - RNA, 19 nt, Artificial Sequence
  Description of Artificial Sequence: Synthetic oligonucleotide
  Sense strand starting at position 2417 of SEQ ID NO: 586397
uuugaacgcuacuuuaaga

SEQ ID NO: 714831 - RNA, 19 nt, Artificial Sequence
  Description of Artificial Sequence: Synthetic oligonucleotide
  Antisense strand to SEQ ID NO: 714830
ucuuaaaguagcguucaaa

SEQ ID NO: 714832 - RNA, 19 nt, Artificial Sequence
  Description of Artificial Sequence: Synthetic oligonucleotide
  Sense strand starting at position 2456 of SEQ ID NO: 586397
gccucuacccuuggacaga

SEQ ID NO: 714833 - RNA, 19 nt, Artificial Sequence
  Description of Artificial Sequence: Synthetic oligonucleotide
  Antisense strand to SEQ ID NO: 714832
ucuguccaaggguagaggc

SEQ ID NO: 714834 - RNA, 19 nt, Artificial Sequence
  Description of Artificial Sequence: Synthetic oligonucleotide
  Sense strand starting at position 2511 of SEQ ID NO: 586397
cgucgacaucuauguauuu

SEQ ID NO: 714835 - RNA, 19 nt, Artificial Sequence
  Description of Artificial Sequence: Synthetic oligonucleotide
  Antisense strand to SEQ ID NO: 714834
aaauacauagaugucgacg

SEQ ID NO: 714836 - RNA, 19 nt, Artificial Sequence
  Description of Artificial Sequence: Synthetic oligonucleotide
  Sense strand starting at position 2512 of SEQ ID NO: 586397
gucgacaucuauguauuua

SEQ ID NO: 714837 - RNA, 19 nt, Artificial Sequence
  Description of Artificial Sequence: Synthetic oligonucleotide
  Antisense strand to SEQ ID NO: 714836
uaaauacauagaugucgac

SEQ ID NO: 714838 - RNA, 19 nt, Artificial Sequence
  Description of Artificial Sequence: Synthetic oligonucleotide
  Sense strand starting at position 2568 of SEQ ID NO: 586397
ccaauuaagccagggacuu

SEQ ID NO: 714839 - RNA, 19 nt, Artificial Sequence
  Description of Artificial Sequence: Synthetic oligonucleotide
  Antisense strand to SEQ ID NO: 714838
aagucccuggcuuaauugg

SEQ ID NO: 714840 - RNA, 19 nt, Artificial Sequence
  Description of Artificial Sequence: Synthetic oligonucleotide
  Sense strand starting at position 2945 of SEQ ID NO: 586397
uguggcuaucccugagaug

SEQ ID NO: 714841 - RNA, 19 nt, Artificial Sequence
  Description of Artificial Sequence: Synthetic oligonucleotide
  Antisense strand to SEQ ID NO: 714840
caucucagggauagccaca

SEQ ID NO: 714842 - RNA, 19 nt, Artificial Sequence
  Description of Artificial Sequence: Synthetic oligonucleotide
  Sense strand starting at position 2946 of SEQ ID NO: 586397
guggcuaucccugagaugu

SEQ ID NO: 714843 - RNA, 19 nt, Artificial Sequence
  Description of Artificial Sequence: Synthetic oligonucleotide
  Antisense strand to SEQ ID NO: 714842
acaucucagggauagccac

SEQ ID NO: 714844 - RNA, 19 nt, Artificial Sequence
  Description of Artificial Sequence: Synthetic oligonucleotide
  Sense strand starting at position 3038 of SEQ ID NO: 586397
uguugauuacauuauugca

SEQ ID NO: 714845 - RNA, 19 nt, Artificial Sequence
  Description of Artificial Sequence: Synthetic oligonucleotide
  Antisense strand to SEQ ID NO: 714844
ugcaauaauguaaucaaca

SEQ ID NO: 714846 - RNA, 19 nt, Artificial Sequence
  Description of Artificial Sequence: Synthetic oligonucleotide
  Sense strand starting at position 3061 of SEQ ID NO: 586397
augagaauagucugaugua

SEQ ID NO: 714847 - RNA, 19 nt, Artificial Sequence
  Description of Artificial Sequence: Synthetic oligonucleotide
  Antisense strand to SEQ ID NO: 714846
uacaucagacuauucucau

SEQ ID NO: 714848 - RNA, 19 nt, Artificial Sequence
  Description of Artificial Sequence: Synthetic oligonucleotide
  Sense strand starting at position 3203 of SEQ ID NO: 586397
ucauuaguggcucaccuua

SEQ ID NO: 714849 - RNA, 19 nt, Artificial Sequence
  Description of Artificial Sequence: Synthetic oligonucleotide
  Antisense strand to SEQ ID NO: 714848
uaaggugagccacuaauga

SEQ ID NO: 714850 - RNA, 19 nt, Artificial Sequence
  Description of Artificial Sequence: Synthetic oligonucleotide
  Sense strand starting at position 3205 of SEQ ID NO: 586397
auuaguggcucaccuuaua

SEQ ID NO: 714851 - RNA, 19 nt, Artificial Sequence
  Description of Artificial Sequence: Synthetic oligonucleotide
  Antisense strand to SEQ ID NO: 714850
uauaaggugagccacuaau

SEQ ID NO: 714852 - RNA, 19 nt, Artificial Sequence
  Description of Artificial Sequence: Synthetic oligonucleotide
  Sense strand starting at position 3274 of SEQ ID NO: 586397
gaggcaguauuaguaucaa

SEQ ID NO: 714853 - RNA, 19 nt, Artificial Sequence
  Description of Artificial Sequence: Synthetic oligonucleotide
  Antisense strand to SEQ ID NO: 714852
uugauacuaauacugccuc

SEQ ID NO: 714854 - RNA, 19 nt, Artificial Sequence
  Description of Artificial Sequence: Synthetic oligonucleotide
  Sense strand starting at position 3299 of SEQ ID NO: 586397
cuggguccagaugguuaua

SEQ ID NO: 714855 - RNA, 19 nt, Artificial Sequence
  Description of Artificial Sequence: Synthetic oligonucleotide
  Antisense strand to SEQ ID NO: 714854
uauaaccaucuggacccag

SEQ ID NO: 714856 - RNA, 19 nt, Artificial Sequence
  Description of Artificial Sequence: Synthetic oligonucleotide
  Sense strand starting at position 3312 of SEQ ID NO: 586397
guuauaagccaguaacuaa

SEQ ID NO: 714857 - RNA, 19 nt, Artificial Sequence
  Description of Artificial Sequence: Synthetic oligonucleotide
  Antisense strand to SEQ ID NO: 714856
uuaguuacuggcuuauaac

SEQ ID NO: 714858 - RNA, 19 nt, Artificial Sequence
  Description of Artificial Sequence: Synthetic oligonucleotide
  Sense strand starting at position 3466 of SEQ ID NO: 586397
uacuaacgaugcucugaga

SEQ ID NO: 714859 - RNA, 19 nt, Artificial Sequence
  Description of Artificial Sequence: Synthetic oligonucleotide
  Antisense strand to SEQ ID NO: 714858
ucucagagcaucguuagua

SEQ ID NO: 714860 - RNA, 19 nt, Artificial Sequence
  Description of Artificial Sequence: Synthetic oligonucleotide
  Sense strand starting at position 3477 of SEQ ID NO: 586397
cucugagacacuuguagug

SEQ ID NO: 714861 - RNA, 19 nt, Artificial Sequence
  Description of Artificial Sequence: Synthetic oligonucleotide
  Antisense strand to SEQ ID NO: 714860
cacuacaagugucucagag

SEQ ID NO: 714862 - RNA, 19 nt, Artificial Sequence
  Description of Artificial Sequence: Synthetic oligonucleotide
  Sense strand starting at position 3489 of SEQ ID NO: 586397
uguagugauaaguaugaau

SEQ ID NO: 714863 - RNA, 19 nt, Artificial Sequence
  Description of Artificial Sequence: Synthetic oligonucleotide
  Antisense strand to SEQ ID NO: 714862
auucauacuuaucacuaca

SEQ ID NO: 714864 - RNA, 19 nt, Artificial Sequence
  Description of Artificial Sequence: Synthetic oligonucleotide
  Sense strand starting at position 3523 of SEQ ID NO: 586397
guagcuaaggcauauaaag

SEQ ID NO: 714865 - RNA, 19 nt, Artificial Sequence
  Description of Artificial Sequence: Synthetic oligonucleotide
  Antisense strand to SEQ ID NO: 714864
cuuuauaugccuuagcuac

SEQ ID NO: 714866 - RNA, 19 nt, Artificial Sequence
  Description of Artificial Sequence: Synthetic oligonucleotide
  Sense strand starting at position 3565 of SEQ ID NO: 586397
gugagcacucaguaaacau

SEQ ID NO: 714867 - RNA, 19 nt, Artificial Sequence
  Description of Artificial Sequence: Synthetic oligonucleotide
  Antisense strand to SEQ ID NO: 714866
auguuuacugagugcucac

SEQ ID NO: 714868 - RNA, 19 nt, Artificial Sequence
  Description of Artificial Sequence: Synthetic oligonucleotide
  Sense strand starting at position 3801 of SEQ ID NO: 586397
ugagccaucuucucccaga

SEQ ID NO: 714869 - RNA, 19 nt, Artificial Sequence
  Description of Artificial Sequence: Synthetic oligonucleotide
  Antisense strand to SEQ ID NO: 714868
ucugggagaagauggcuca

SEQ ID NO: 714870 - RNA, 19 nt, Artificial Sequence
  Description of Artificial Sequence: Synthetic oligonucleotide
  Sense strand starting at position 3817 of SEQ ID NO: 586397
agaagaauaucugucucug

SEQ ID NO: 714871 - RNA, 19 nt, Artificial Sequence
  Description of Artificial Sequence: Synthetic oligonucleotide
  Antisense strand to SEQ ID NO: 714870
cagagacagauauucuucu

SEQ ID NO: 714872 - RNA, 19 nt, Artificial Sequence
  Description of Artificial Sequence: Synthetic oligonucleotide
  Sense strand starting at position 3973 of SEQ ID NO: 586397
caucucaguguugauagga

SEQ ID NO: 714873 - RNA, 19 nt, Artificial Sequence
  Description of Artificial Sequence: Synthetic oligonucleotide
  Antisense strand to SEQ ID NO: 714872
uccuaucaacacugagaug

SEQ ID NO: 714874 - RNA, 19 nt, Artificial Sequence
  Description of Artificial Sequence: Synthetic oligonucleotide
  Sense strand starting at position 213 of SEQ ID NO: 586398
uugagucuucuauaggcga

SEQ ID NO: 714875 - RNA, 19 nt, Artificial Sequence
  Description of Artificial Sequence: Synthetic oligonucleotide
  Antisense strand to SEQ ID NO: 714874
ucgccuauagaagacucaa

SEQ ID NO: 714876 - RNA, 19 nt, Artificial Sequence
  Description of Artificial Sequence: Synthetic oligonucleotide
  Sense strand starting at position 271 of SEQ ID NO: 586398
aggucccauuuaggauaaa

SEQ ID NO: 714877 - RNA, 19 nt, Artificial Sequence
  Description of Artificial Sequence: Synthetic oligonucleotide
  Antisense strand to SEQ ID NO: 714876
uuuauccuaaaugggaccu

SEQ ID NO: 714878 - RNA, 19 nt, Artificial Sequence
  Description of Artificial Sequence: Synthetic oligonucleotide
  Sense strand starting at position 289 of SEQ ID NO: 586398
aguaaauucuauucuagag

SEQ ID NO: 714879 - RNA, 19 nt, Artificial Sequence
  Description of Artificial Sequence: Synthetic oligonucleotide
  Antisense strand to SEQ ID NO: 714878
cucuagaauagaauuuacu

SEQ ID NO: 714880 - RNA, 19 nt, Artificial Sequence
  Description of Artificial Sequence: Synthetic oligonucleotide
  Sense strand starting at position 311 of SEQ ID NO: 586398
cgugaagacccacagcauu

SEQ ID NO: 714881 - RNA, 19 nt, Artificial Sequence
  Description of Artificial Sequence: Synthetic oligonucleotide
  Antisense strand to SEQ ID NO: 714880
aaugcugugggucuucacg

SEQ ID NO: 714882 - RNA, 19 nt, Artificial Sequence
  Description of Artificial Sequence: Synthetic oligonucleotide
  Sense strand starting at position 453 of SEQ ID NO: 586398
agucaaguggacuguaaau

SEQ ID NO: 714883 - RNA, 19 nt, Artificial Sequence
  Description of Artificial Sequence: Synthetic oligonucleotide
  Antisense strand to SEQ ID NO: 714882
auuuacaguccacuugacu

SEQ ID NO: 714884 - RNA, 19 nt, Artificial Sequence
  Description of Artificial Sequence: Synthetic oligonucleotide
  Sense strand starting at position 476 of SEQ ID NO: 586398
gacaucaagugugcuauga

SEQ ID NO: 714885 - RNA, 19 nt, Artificial Sequence
  Description of Artificial Sequence: Synthetic oligonucleotide
  Antisense strand to SEQ ID NO: 714884
ucauagcacacuugauguc

SEQ ID NO: 714886 - RNA, 19 nt, Artificial Sequence
  Description of Artificial Sequence: Synthetic oligonucleotide
  Sense strand starting at position 667 of SEQ ID NO: 586398
gaaugauuauaacucgucu

SEQ ID NO: 714887 - RNA, 19 nt, Artificial Sequence
  Description of Artificial Sequence: Synthetic oligonucleotide
  Antisense strand to SEQ ID NO: 714886
agacgaguuauaaucauuc

SEQ ID NO: 714888 - RNA, 19 nt, Artificial Sequence
  Description of Artificial Sequence: Synthetic oligonucleotide
  Sense strand starting at position 671 of SEQ ID NO: 586398
gauuauaacucgucuggaa

SEQ ID NO: 714889 - RNA, 19 nt, Artificial Sequence
  Description of Artificial Sequence: Synthetic oligonucleotide
  Antisense strand to SEQ ID NO: 714888
uuccagacgaguuauaauc

SEQ ID NO: 714890 - RNA, 19 nt, Artificial Sequence
  Description of Artificial Sequence: Synthetic oligonucleotide
  Sense strand starting at position 673 of SEQ ID NO: 586398
uuauaacucgucuggaauc

SEQ ID NO: 714891 - RNA, 19 nt, Artificial Sequence
  Description of Artificial Sequence: Synthetic oligonucleotide
  Antisense strand to SEQ ID NO: 714890
gauuccagacgaguuauaa

SEQ ID NO: 714892 - RNA, 19 nt, Artificial Sequence
  Description of Artificial Sequence: Synthetic oligonucleotide
  Sense strand starting at position 830 of SEQ ID NO: 586398
guuucuacccaacgaaauu

SEQ ID NO: 714893 - RNA, 19 nt, Artificial Sequence
  Description of Artificial Sequence: Synthetic oligonucleotide
  Antisense strand to SEQ ID NO: 714892
aauuucguuggguagaaac

SEQ ID NO: 714894 - RNA, 19 nt, Artificial Sequence
  Description of Artificial Sequence: Synthetic oligonucleotide
  Sense strand starting at position 926 of SEQ ID NO: 586398
agagccaauccuugaauau

SEQ ID NO: 714895 - RNA, 19 nt, Artificial Sequence
  Description of Artificial Sequence: Synthetic oligonucleotide
  Antisense strand to SEQ ID NO: 714894
auauucaaggauuggcucu

SEQ ID NO: 714896 - RNA, 19 nt, Artificial Sequence
  Description of Artificial Sequence: Synthetic oligonucleotide
  Sense strand starting at position 1210 of SEQ ID NO: 586398
uugacagaccauuguaaua

SEQ ID NO: 714897 - RNA, 19 nt, Artificial Sequence
  Description of Artificial Sequence: Synthetic oligonucleotide
  Antisense strand to SEQ ID NO: 714896
uauuacaauggucugucaa

SEQ ID NO: 714898 - RNA, 19 nt, Artificial Sequence
  Description of Artificial Sequence: Synthetic oligonucleotide
  Sense strand starting at position 1322 of SEQ ID NO: 586398
gguugacucuuauuauuaa

SEQ ID NO: 714899 - RNA, 19 nt, Artificial Sequence
  Description of Artificial Sequence: Synthetic oligonucleotide
  Antisense strand to SEQ ID NO: 714898
uuaauaauaagagucaacc

SEQ ID NO: 714900 - RNA, 19 nt, Artificial Sequence
  Description of Artificial Sequence: Synthetic oligonucleotide
  Sense strand starting at position 1602 of SEQ ID NO: 586398
uuagcucaggcugauaaua

SEQ ID NO: 714901 - RNA, 19 nt, Artificial Sequence
  Description of Artificial Sequence: Synthetic oligonucleotide
  Antisense strand to SEQ ID NO: 714900
uauuaucagccugagcuaa

SEQ ID NO: 714902 - RNA, 19 nt, Artificial Sequence
  Description of Artificial Sequence: Synthetic oligonucleotide
  Sense strand starting at position 1614 of SEQ ID NO: 586398
gauaauaccgguggacaca

SEQ ID NO: 714903 - RNA, 19 nt, Artificial Sequence
  Description of Artificial Sequence: Synthetic oligonucleotide
  Antisense strand to SEQ ID NO: 714902
uguguccaccgguauuauc

SEQ ID NO: 714904 - RNA, 19 nt, Artificial Sequence
  Description of Artificial Sequence: Synthetic oligonucleotide
  Sense strand starting at position 1623 of SEQ ID NO: 586398
gguggacacaugugugaga

SEQ ID NO: 714905 - RNA, 19 nt, Artificial Sequence
  Description of Artificial Sequence: Synthetic oligonucleotide
  Antisense strand to SEQ ID NO: 714904
ucucacacauguguccacc

SEQ ID NO: 714906 - RNA, 19 nt, Artificial Sequence
  Description of Artificial Sequence: Synthetic oligonucleotide
  Sense strand starting at position 1644 of SEQ ID NO: 586398
gagguuuacucaccaagcu

SEQ ID NO: 714907 - RNA, 19 nt, Artificial Sequence
  Description of Artificial Sequence: Synthetic oligonucleotide
  Antisense strand to SEQ ID NO: 714906
agcuuggugaguaaaccuc

SEQ ID NO: 714908 - RNA, 19 nt, Artificial Sequence
  Description of Artificial Sequence: Synthetic oligonucleotide
  Sense strand starting at position 1666 of SEQ ID NO: 586398
guaaguccaucuuucccaa

SEQ ID NO: 714909 - RNA, 19 nt, Artificial Sequence
  Description of Artificial Sequence: Synthetic oligonucleotide
  Antisense strand to SEQ ID NO: 714908
uugggaaagauggacuuac

SEQ ID NO: 714910 - RNA, 19 nt, Artificial Sequence
  Description of Artificial Sequence: Synthetic oligonucleotide
  Sense strand starting at position 1745 of SEQ ID NO: 586398
gaacaaugugcuggaauac

SEQ ID NO: 714911 - RNA, 19 nt, Artificial Sequence
  Description of Artificial Sequence: Synthetic oligonucleotide
  Antisense strand to SEQ ID NO: 714910
guauuccagcacauuguuc

SEQ ID NO: 714912 - RNA, 19 nt, Artificial Sequence
  Description of Artificial Sequence: Synthetic oligonucleotide
  Sense strand starting at position 1765 of SEQ ID NO: 586398
accagaugguuccugagua

SEQ ID NO: 714913 - RNA, 19 nt, Artificial Sequence
  Description of Artificial Sequence: Synthetic oligonucleotide
  Antisense strand to SEQ ID NO: 714912
uacucaggaaccaucuggu

SEQ ID NO: 714914 - RNA, 19 nt, Artificial Sequence
  Description of Artificial Sequence: Synthetic oligonucleotide
  Sense strand starting at position 1770 of SEQ ID NO: 586398
augguuccugaguaagcuu

SEQ ID NO: 714915 - RNA, 19 nt, Artificial Sequence
  Description of Artificial Sequence: Synthetic oligonucleotide
  Antisense strand to SEQ ID NO: 714914
aagcuuacucaggaaccau

SEQ ID NO: 714916 - RNA, 19 nt, Artificial Sequence
  Description of Artificial Sequence: Synthetic oligonucleotide
  Sense strand starting at position 1869 of SEQ ID NO: 586398
gaagaauaagcauguagcu

SEQ ID NO: 714917 - RNA, 19 nt, Artificial Sequence
  Description of Artificial Sequence: Synthetic oligonucleotide
  Antisense strand to SEQ ID NO: 714916
agcuacaugcuuauucuuc

SEQ ID NO: 714918 - RNA, 19 nt, Artificial Sequence
  Description of Artificial Sequence: Synthetic oligonucleotide
  Sense strand starting at position 2039 of SEQ ID NO: 586398
uuucucuuagaguaucaca

SEQ ID NO: 714919 - RNA, 19 nt, Artificial Sequence
  Description of Artificial Sequence: Synthetic oligonucleotide
  Antisense strand to SEQ ID NO: 714918
ugugauacucuaagagaaa

SEQ ID NO: 714920 - RNA, 19 nt, Artificial Sequence
  Description of Artificial Sequence: Synthetic oligonucleotide
  Sense strand starting at position 2211 of SEQ ID NO: 586398
uggugaugggcuggagaua

SEQ ID NO: 714921 - RNA, 19 nt, Artificial Sequence
  Description of Artificial Sequence: Synthetic oligonucleotide
  Antisense strand to SEQ ID NO: 714920
uaucuccagcccaucacca

SEQ ID NO: 714922 - RNA, 19 nt, Artificial Sequence
  Description of Artificial Sequence: Synthetic oligonucleotide
  Sense strand starting at position 2272 of SEQ ID NO: 586398
agugccugggcucaauaau

SEQ ID NO: 714923 - RNA, 19 nt, Artificial Sequence
  Description of Artificial Sequence: Synthetic oligonucleotide
  Antisense strand to SEQ ID NO: 714922
auuauugagcccaggcacu

SEQ ID NO: 714924 - RNA, 19 nt, Artificial Sequence
  Description of Artificial Sequence: Synthetic oligonucleotide
  Sense strand starting at position 2331 of SEQ ID NO: 586398
guuggauucgugcagaaca

SEQ ID NO: 714925 - RNA, 19 nt, Artificial Sequence
  Description of Artificial Sequence: Synthetic oligonucleotide
  Antisense strand to SEQ ID NO: 714924
uguucugcacgaauccaac

SEQ ID NO: 714926 - RNA, 19 nt, Artificial Sequence
  Description of Artificial Sequence: Synthetic oligonucleotide
  Sense strand starting at position 2333 of SEQ ID NO: 586398
uggauucgugcagaacauc

SEQ ID NO: 714927 - RNA, 19 nt, Artificial Sequence
  Description of Artificial Sequence: Synthetic oligonucleotide
  Antisense strand to SEQ ID NO: 714926
gauguucugcacgaaucca

SEQ ID NO: 714928 - RNA, 19 nt, Artificial Sequence
  Description of Artificial Sequence: Synthetic oligonucleotide
  Sense strand starting at position 2407 of SEQ ID NO: 586398
auuugauugugaguuugcu

SEQ ID NO: 714929 - RNA, 19 nt, Artificial Sequence
  Description of Artificial Sequence: Synthetic oligonucleotide
  Antisense strand to SEQ ID NO: 714928
agcaaacucacaaucaaau

SEQ ID NO: 714930 - RNA, 19 nt, Artificial Sequence
  Description of Artificial Sequence: Synthetic oligonucleotide
  Sense strand starting at position 2715 of SEQ ID NO: 586398
cugagagcuccgcaaauaa

SEQ ID NO: 714931 - RNA, 19 nt, Artificial Sequence
  Description of Artificial Sequence: Synthetic oligonucleotide
  Antisense strand to SEQ ID NO: 714930
uuauuugcggagcucucag

SEQ ID NO: 714932 - RNA, 19 nt, Artificial Sequence
  Description of Artificial Sequence: Synthetic oligonucleotide
  Sense strand starting at position 2813 of SEQ ID NO: 586398
ggcggcuuguggaagauuu

SEQ ID NO: 714933 - RNA, 19 nt, Artificial Sequence
  Description of Artificial Sequence: Synthetic oligonucleotide
  Antisense strand to SEQ ID NO: 714932
aaaucuuccacaagccgcc

SEQ ID NO: 714934 - RNA, 19 nt, Artificial Sequence
  Description of Artificial Sequence: Synthetic oligonucleotide
  Sense strand starting at position 2974 of SEQ ID NO: 586398
guugcaugacuagaauuaa

SEQ ID NO: 714935 - RNA, 19 nt, Artificial Sequence
  Description of Artificial Sequence: Synthetic oligonucleotide
  Antisense strand to SEQ ID NO: 714934
uuaauucuagucaugcaac

SEQ ID NO: 714936 - RNA, 19 nt, Artificial Sequence
  Description of Artificial Sequence: Synthetic oligonucleotide
  Sense strand starting at position 3128 of SEQ ID NO: 586398
cccucaguuccacagagau

SEQ ID NO: 714937 - RNA, 19 nt, Artificial Sequence
  Description of Artificial Sequence: Synthetic oligonucleotide
  Antisense strand to SEQ ID NO: 714936
aucucuguggaacugaggg

SEQ ID NO: 714938 - RNA, 19 nt, Artificial Sequence
  Description of Artificial Sequence: Synthetic oligonucleotide
  Sense strand starting at position 3159 of SEQ ID NO: 586398
guaagugucacagaaggca

SEQ ID NO: 714939 - RNA, 19 nt, Artificial Sequence
  Description of Artificial Sequence: Synthetic oligonucleotide
  Antisense strand to SEQ ID NO: 714938
ugccuucugugacacuuac

SEQ ID NO: 714940 - RNA, 19 nt, Artificial Sequence
  Description of Artificial Sequence: Synthetic oligonucleotide
  Sense strand starting at position 3231 of SEQ ID NO: 586398
cugccuuggcaucauaaca

SEQ ID NO: 714941 - RNA, 19 nt, Artificial Sequence
  Description of Artificial Sequence: Synthetic oligonucleotide
  Antisense strand to SEQ ID NO: 714940
uguuaugaugccaaggcag

SEQ ID NO: 714942 - RNA, 19 nt, Artificial Sequence
  Description of Artificial Sequence: Synthetic oligonucleotide
  Sense strand starting at position 3257 of SEQ ID NO: 586398
ggagaaccuucucuuccuu

SEQ ID NO: 714943 - RNA, 19 nt, Artificial Sequence
  Description of Artificial Sequence: Synthetic oligonucleotide
  Antisense strand to SEQ ID NO: 714942
aaggaagagaagguucucc

SEQ ID NO: 714944 - RNA, 19 nt, Artificial Sequence
  Description of Artificial Sequence: Synthetic oligonucleotide
  Sense strand starting at position 3272 of SEQ ID NO: 586398
ccuuaaaggucucugcaag

SEQ ID NO: 714945 - RNA, 19 nt, Artificial Sequence
  Description of Artificial Sequence: Synthetic oligonucleotide
  Antisense strand to SEQ ID NO: 714944
cuugcagagaccuuuaagg

SEQ ID NO: 714946 - RNA, 19 nt, Artificial Sequence
  Description of Artificial Sequence: Synthetic oligonucleotide
  Sense strand starting at position 3305 of SEQ ID NO: 586398
cccguaaugacccagauga

SEQ ID NO: 714947 - RNA, 19 nt, Artificial Sequence
  Description of Artificial Sequence: Synthetic oligonucleotide
  Antisense strand to SEQ ID NO: 714946
ucaucugggucauuacggg

SEQ ID NO: 714948 - RNA, 19 nt, Artificial Sequence
  Description of Artificial Sequence: Synthetic oligonucleotide
  Sense strand starting at position 3347 of SEQ ID NO: 586398
gcucuuuguguguuucuga

SEQ ID NO: 714949 - RNA, 19 nt, Artificial Sequence
  Description of Artificial Sequence: Synthetic oligonucleotide
  Antisense strand to SEQ ID NO: 714948
ucagaaacacacaaagagc

SEQ ID NO: 714950 - RNA, 19 nt, Artificial Sequence
  Description of Artificial Sequence: Synthetic oligonucleotide
  Sense strand starting at position 3447 of SEQ ID NO: 586398
cuaaaugaagcucaguaua

SEQ ID NO: 714951 - RNA, 19 nt, Artificial Sequence
  Description of Artificial Sequence: Synthetic oligonucleotide
  Antisense strand to SEQ ID NO: 714950
uauacugagcuucauuuag

SEQ ID NO: 714952 - RNA, 19 nt, Artificial Sequence
  Description of Artificial Sequence: Synthetic oligonucleotide
  Sense strand starting at position 3864 of SEQ ID NO: 586398
ccacuaaguguaggaagaa

SEQ ID NO: 714953 - RNA, 19 nt, Artificial Sequence
  Description of Artificial Sequence: Synthetic oligonucleotide
  Antisense strand to SEQ ID NO: 714952
uucuuccuacacuuagugg

SEQ ID NO: 714954 - RNA, 19 nt, Artificial Sequence
  Description of Artificial Sequence: Synthetic oligonucleotide
  Sense strand starting at position 764 of SEQ ID NO: 586399
ggaugaaccugugagcaga

SEQ ID NO: 714955 - RNA, 19 nt, Artificial Sequence
  Description of Artificial Sequence: Synthetic oligonucleotide
  Antisense strand to SEQ ID NO: 714954
ucugcucacagguucaucc

SEQ ID NO: 714956 - RNA, 19 nt, Artificial Sequence
  Description of Artificial Sequence: Synthetic oligonucleotide
  Sense strand starting at position 888 of SEQ ID NO: 586399
cgcucauuccugugugcau

SEQ ID NO: 714957 - RNA, 19 nt, Artificial Sequence
  Description of Artificial Sequence: Synthetic oligonucleotide
  Antisense strand to SEQ ID NO: 714956
augcacacaggaaugagcg

SEQ ID NO: 714958 - RNA, 19 nt, Artificial Sequence
  Description of Artificial Sequence: Synthetic oligonucleotide
  Sense strand starting at position 1301 of SEQ ID NO: 586399
ggacuauucugagucgagg

SEQ ID NO: 714959 - RNA, 19 nt, Artificial Sequence
  Description of Artificial Sequence: Synthetic oligonucleotide
  Antisense strand to SEQ ID NO: 714958
ccucgacucagaauagucc

SEQ ID NO: 714960 - RNA, 19 nt, Artificial Sequence
  Description of Artificial Sequence: Synthetic oligonucleotide
  Sense strand starting at position 1316 of SEQ ID NO: 586399
gagggugucucuuugacag

SEQ ID NO: 714961 - RNA, 19 nt, Artificial Sequence
  Description of Artificial Sequence: Synthetic oligonucleotide
  Antisense strand to SEQ ID NO: 714960
cugucaaagagacacccuc

SEQ ID NO: 714962 - RNA, 19 nt, Artificial Sequence
  Description of Artificial Sequence: Synthetic oligonucleotide
  Sense strand starting at position 2168 of SEQ ID NO: 586399
gagacagguucugcccaaa

SEQ ID NO: 714963 - RNA, 19 nt, Artificial Sequence
  Description of Artificial Sequence: Synthetic oligonucleotide
  Antisense strand to SEQ ID NO: 714962
uuugggcagaaccugucuc

SEQ ID NO: 714964 - RNA, 19 nt, Artificial Sequence
  Description of Artificial Sequence: Synthetic oligonucleotide
  Sense strand starting at position 2261 of SEQ ID NO: 586399
guugaauggccuggaaggu

SEQ ID NO: 714965 - RNA, 19 nt, Artificial Sequence
  Description of Artificial Sequence: Synthetic oligonucleotide
  Antisense strand to SEQ ID NO: 714964
accuuccaggccauucaac

SEQ ID NO: 714966 - RNA, 19 nt, Artificial Sequence
  Description of Artificial Sequence: Synthetic oligonucleotide
  Sense strand starting at position 2291 of SEQ ID NO: 586399
gguauugcucugggaggga

SEQ ID NO: 714967 - RNA, 19 nt, Artificial Sequence
  Description of Artificial Sequence: Synthetic oligonucleotide
  Antisense strand to SEQ ID NO: 714966
ucccucccagagcaauacc

SEQ ID NO: 714968 - RNA, 19 nt, Artificial Sequence
  Description of Artificial Sequence: Synthetic oligonucleotide
  Sense strand starting at position 2448 of SEQ ID NO: 586399
gggaauggcuugggaguua

SEQ ID NO: 714969 - RNA, 19 nt, Artificial Sequence
  Description of Artificial Sequence: Synthetic oligonucleotide
  Antisense strand to SEQ ID NO: 714968
uaacucccaagccauuccc

SEQ ID NO: 714970 - RNA, 19 nt, Artificial Sequence
  Description of Artificial Sequence: Synthetic oligonucleotide
  Sense strand starting at position 2461 of SEQ ID NO: 586399
gaguuaaggccauguuggu

SEQ ID NO: 714971 - RNA, 19 nt, Artificial Sequence
  Description of Artificial Sequence: Synthetic oligonucleotide
  Antisense strand to SEQ ID NO: 714970
accaacauggccuuaacuc

SEQ ID NO: 714972 - RNA, 19 nt, Artificial Sequence
  Description of Artificial Sequence: Synthetic oligonucleotide
  Sense strand starting at position 2529 of SEQ ID NO: 586399
uucuauucugcauggguca

SEQ ID NO: 714973 - RNA, 19 nt, Artificial Sequence
  Description of Artificial Sequence: Synthetic oligonucleotide
  Antisense strand to SEQ ID NO: 714972
ugacccaugcagaauagaa

SEQ ID NO: 714974 - RNA, 19 nt, Artificial Sequence
  Description of Artificial Sequence: Synthetic oligonucleotide
  Sense strand starting at position 2530 of SEQ ID NO: 586399
ucuauucugcaugggucaa

SEQ ID NO: 714975 - RNA, 19 nt, Artificial Sequence
  Description of Artificial Sequence: Synthetic oligonucleotide
  Antisense strand to SEQ ID NO: 714974
uugacccaugcagaauaga

SEQ ID NO: 714976 - RNA, 19 nt, Artificial Sequence
  Description of Artificial Sequence: Synthetic oligonucleotide
  Sense strand starting at position 2675 of SEQ ID NO: 586399
ucccauuaucacuggguca

SEQ ID NO: 714977 - RNA, 19 nt, Artificial Sequence
  Description of Artificial Sequence: Synthetic oligonucleotide
  Antisense strand to SEQ ID NO: 714976
ugacccagugauaauggga

SEQ ID NO: 714978 - RNA, 19 nt, Artificial Sequence
  Description of Artificial Sequence: Synthetic oligonucleotide
  Sense strand starting at position 2830 of SEQ ID NO: 586399
ggaccacguuccuggagaa

SEQ ID NO: 714979 - RNA, 19 nt, Artificial Sequence
  Description of Artificial Sequence: Synthetic oligonucleotide
  Antisense strand to SEQ ID NO: 714978
uucuccaggaacguggucc

SEQ ID NO: 714980 - RNA, 19 nt, Artificial Sequence
  Description of Artificial Sequence: Synthetic oligonucleotide
  Sense strand starting at position 3002 of SEQ ID NO: 586399
gagggaaacuuguuccuug

SEQ ID NO: 714981 - RNA, 19 nt, Artificial Sequence
  Description of Artificial Sequence: Synthetic oligonucleotide
  Antisense strand to SEQ ID NO: 714980
caaggaacaaguuucccuc

SEQ ID NO: 714982 - RNA, 19 nt, Artificial Sequence
  Description of Artificial Sequence: Synthetic oligonucleotide
  Sense strand starting at position 3003 of SEQ ID NO: 586399
agggaaacuuguuccuugu

SEQ ID NO: 714983 - RNA, 19 nt, Artificial Sequence
  Description of Artificial Sequence: Synthetic oligonucleotide
  Antisense strand to SEQ ID NO: 714982
acaaggaacaaguuucccu

SEQ ID NO: 714984 - RNA, 19 nt, Artificial Sequence
  Description of Artificial Sequence: Synthetic oligonucleotide
  Sense strand starting at position 3086 of SEQ ID NO: 586399
cacgauggcuccgagggau

SEQ ID NO: 714985 - RNA, 19 nt, Artificial Sequence
  Description of Artificial Sequence: Synthetic oligonucleotide
  Antisense strand to SEQ ID NO: 714984
aucccucggagccaucgug

SEQ ID NO: 714986 - RNA, 19 nt, Artificial Sequence
  Description of Artificial Sequence: Synthetic oligonucleotide
  Sense strand starting at position 3092 of SEQ ID NO: 586399
ggcuccgagggaugaguua

SEQ ID NO: 714987 - RNA, 19 nt, Artificial Sequence
  Description of Artificial Sequence: Synthetic oligonucleotide
  Antisense strand to SEQ ID NO: 714986
uaacucaucccucggagcc

SEQ ID NO: 714988 - RNA, 19 nt, Artificial Sequence
  Description of Artificial Sequence: Synthetic oligonucleotide
  Sense strand starting at position 3205 of SEQ ID NO: 586399
gcagguauugguggaccua

SEQ ID NO: 714989 - RNA, 19 nt, Artificial Sequence
  Description of Artificial Sequence: Synthetic oligonucleotide
  Antisense strand to SEQ ID NO: 714988
uagguccaccaauaccugc

SEQ ID NO: 714990 - RNA, 19 nt, Artificial Sequence
  Description of Artificial Sequence: Synthetic oligonucleotide
  Sense strand starting at position 3242 of SEQ ID NO: 586399
uagccuuucugguaggaaa

SEQ ID NO: 714991 - RNA, 19 nt, Artificial Sequence
  Description of Artificial Sequence: Synthetic oligonucleotide
  Antisense strand to SEQ ID NO: 714990
uuuccuaccagaaaggcua

SEQ ID NO: 714992 - RNA, 19 nt, Artificial Sequence
  Description of Artificial Sequence: Synthetic oligonucleotide
  Sense strand starting at position 3280 of SEQ ID NO: 586399
guuuccuuaucugucuaca

SEQ ID NO: 714993 - RNA, 19 nt, Artificial Sequence
  Description of Artificial Sequence: Synthetic oligonucleotide
  Antisense strand to SEQ ID NO: 714992
uguagacagauaaggaaac

SEQ ID NO: 714994 - RNA, 19 nt, Artificial Sequence
  Description of Artificial Sequence: Synthetic oligonucleotide
  Sense strand starting at position 3292 of SEQ ID NO: 586399
gucuacaggugaucaguau

SEQ ID NO: 714995 - RNA, 19 nt, Artificial Sequence
  Description of Artificial Sequence: Synthetic oligonucleotide
  Antisense strand to SEQ ID NO: 714994
auacugaucaccuguagac

SEQ ID NO: 714996 - RNA, 19 nt, Artificial Sequence
  Description of Artificial Sequence: Synthetic oligonucleotide
  Sense strand starting at position 3293 of SEQ ID NO: 586399
ucuacaggugaucaguauu

SEQ ID NO: 714997 - RNA, 19 nt, Artificial Sequence
  Description of Artificial Sequence: Synthetic oligonucleotide
  Antisense strand to SEQ ID NO: 714996
aauacugaucaccuguaga

SEQ ID NO: 714998 - RNA, 19 nt, Artificial Sequence
  Description of Artificial Sequence: Synthetic oligonucleotide
  Sense strand starting at position 3296 of SEQ ID NO: 586399
acaggugaucaguauuccu

SEQ ID NO: 714999 - RNA, 19 nt, Artificial Sequence
  Description of Artificial Sequence: Synthetic oligonucleotide
  Antisense strand to SEQ ID NO: 714998
aggaauacugaucaccugu

SEQ ID NO: 715000 - RNA, 19 nt, Artificial Sequence
  Description of Artificial Sequence: Synthetic oligonucleotide
  Sense strand starting at position 3301 of SEQ ID NO: 586399
ugaucaguauuccuagcua

SEQ ID NO: 715001 - RNA, 19 nt, Artificial Sequence
  Description of Artificial Sequence: Synthetic oligonucleotide
  Antisense strand to SEQ ID NO: 715000
uagcuaggaauacugauca

SEQ ID NO: 715002 - RNA, 19 nt, Artificial Sequence
  Description of Artificial Sequence: Synthetic oligonucleotide
  Sense strand starting at position 3305 of SEQ ID NO: 586399
caguauuccuagcuaagag

SEQ ID NO: 715003 - RNA, 19 nt, Artificial Sequence
  Description of Artificial Sequence: Synthetic oligonucleotide
  Antisense strand to SEQ ID NO: 715002
cucuuagcuaggaauacug

SEQ ID NO: 715004 - RNA, 19 nt, Artificial Sequence
  Description of Artificial Sequence: Synthetic oligonucleotide
  Sense strand starting at position 3309 of SEQ ID NO: 586399
auuccuagcuaagagauua

SEQ ID NO: 715005 - RNA, 19 nt, Artificial Sequence
  Description of Artificial Sequence: Synthetic oligonucleotide
  Antisense strand to SEQ ID NO: 715004
uaaucucuuagcuaggaau

SEQ ID NO: 715006 - RNA, 19 nt, Artificial Sequence
  Description of Artificial Sequence: Synthetic oligonucleotide
  Sense strand starting at position 3317 of SEQ ID NO: 586399
cuaagagauuauugcaaag

SEQ ID NO: 715007 - RNA, 19 nt, Artificial Sequence
  Description of Artificial Sequence: Synthetic oligonucleotide
  Antisense strand to SEQ ID NO: 715006
cuuugcaauaaucucuuag

SEQ ID NO: 715008 - RNA, 19 nt, Artificial Sequence
  Description of Artificial Sequence: Synthetic oligonucleotide
  Sense strand starting at position 3339 of SEQ ID NO: 586399
aauacaacguggucuugua

SEQ ID NO: 715009 - RNA, 19 nt, Artificial Sequence
  Description of Artificial Sequence: Synthetic oligonucleotide
  Antisense strand to SEQ ID NO: 715008
uacaagaccacguuguauu

SEQ ID NO: 715010 - RNA, 19 nt, Artificial Sequence
  Description of Artificial Sequence: Synthetic oligonucleotide
  Sense strand starting at position 3351 of SEQ ID NO: 586399
ucuuguauuucugcuagau

SEQ ID NO: 715011 - RNA, 19 nt, Artificial Sequence
  Description of Artificial Sequence: Synthetic oligonucleotide
  Antisense strand to SEQ ID NO: 715010
aucuagcagaaauacaaga

SEQ ID NO: 715012 - RNA, 19 nt, Artificial Sequence
  Description of Artificial Sequence: Synthetic oligonucleotide
  Sense strand starting at position 3353 of SEQ ID NO: 586399
uuguauuucugcuagauca

SEQ ID NO: 715013 - RNA, 19 nt, Artificial Sequence
  Description of Artificial Sequence: Synthetic oligonucleotide
  Antisense strand to SEQ ID NO: 715012
ugaucuagcagaaauacaa

SEQ ID NO: 715014 - RNA, 19 nt, Artificial Sequence
  Description of Artificial Sequence: Synthetic oligonucleotide
  Sense strand starting at position 3380 of SEQ ID NO: 586399
cuguguucagcuggugcua

SEQ ID NO: 715015 - RNA, 19 nt, Artificial Sequence
  Description of Artificial Sequence: Synthetic oligonucleotide
  Antisense strand to SEQ ID NO: 715014
uagcaccagcugaacacag

SEQ ID NO: 715016 - RNA, 19 nt, Artificial Sequence
  Description of Artificial Sequence: Synthetic oligonucleotide
  Sense strand starting at position 3425 of SEQ ID NO: 586399
gucacucgcucugcaagua

SEQ ID NO: 715017 - RNA, 19 nt, Artificial Sequence
  Description of Artificial Sequence: Synthetic oligonucleotide
  Antisense strand to SEQ ID NO: 715016
uacuugcagagcgagugac

SEQ ID NO: 715018 - RNA, 19 nt, Artificial Sequence
  Description of Artificial Sequence: Synthetic oligonucleotide
  Sense strand starting at position 3441 of SEQ ID NO: 586399
guacucugcuucuaggaca

SEQ ID NO: 715019 - RNA, 19 nt, Artificial Sequence
  Description of Artificial Sequence: Synthetic oligonucleotide
  Antisense strand to SEQ ID NO: 715018
uguccuagaagcagaguac

SEQ ID NO: 715020 - RNA, 19 nt, Artificial Sequence
  Description of Artificial Sequence: Synthetic oligonucleotide
  Sense strand starting at position 3460 of SEQ ID NO: 586399
gcuaucaggcuuuggucua

SEQ ID NO: 715021 - RNA, 19 nt, Artificial Sequence
  Description of Artificial Sequence: Synthetic oligonucleotide
  Antisense strand to SEQ ID NO: 715020
uagaccaaagccugauagc

SEQ ID NO: 715022 - RNA, 19 nt, Artificial Sequence
  Description of Artificial Sequence: Synthetic oligonucleotide
  Sense strand starting at position 3534 of SEQ ID NO: 586399
gggagcagcucuggaauuu

SEQ ID NO: 715023 - RNA, 19 nt, Artificial Sequence
  Description of Artificial Sequence: Synthetic oligonucleotide
  Antisense strand to SEQ ID NO: 715022
aaauuccagagcugcuccc

SEQ ID NO: 715024 - RNA, 19 nt, Artificial Sequence
  Description of Artificial Sequence: Synthetic oligonucleotide
  Sense strand starting at position 3573 of SEQ ID NO: 586399
ggagaauugucuugaagau

SEQ ID NO: 715025 - RNA, 19 nt, Artificial Sequence
  Description of Artificial Sequence: Synthetic oligonucleotide
  Antisense strand to SEQ ID NO: 715024
aucuucaagacaauucucc

SEQ ID NO: 715026 - RNA, 19 nt, Artificial Sequence
  Description of Artificial Sequence: Synthetic oligonucleotide
  Sense strand starting at position 3652 of SEQ ID NO: 586399
gaggguagcugauggagau

SEQ ID NO: 715027 - RNA, 19 nt, Artificial Sequence
  Description of Artificial Sequence: Synthetic oligonucleotide
  Antisense strand to SEQ ID NO: 715026
aucuccaucagcuacccuc

SEQ ID NO: 715028 - RNA, 19 nt, Artificial Sequence
  Description of Artificial Sequence: Synthetic oligonucleotide
  Sense strand starting at position 3653 of SEQ ID NO: 586399
aggguagcugauggagauu

SEQ ID NO: 715029 - RNA, 19 nt, Artificial Sequence
  Description of Artificial Sequence: Synthetic oligonucleotide
  Antisense strand to SEQ ID NO: 715028
aaucuccaucagcuacccu

SEQ ID NO: 715030 - RNA, 19 nt, Artificial Sequence
  Description of Artificial Sequence: Synthetic oligonucleotide
  Sense strand starting at position 3780 of SEQ ID NO: 586399
ggaagucaaugguauaucu

SEQ ID NO: 715031 - RNA, 19 nt, Artificial Sequence
  Description of Artificial Sequence: Synthetic oligonucleotide
  Antisense strand to SEQ ID NO: 715030
agauauaccauugacuucc

SEQ ID NO: 715032 - RNA, 19 nt, Artificial Sequence
  Description of Artificial Sequence: Synthetic oligonucleotide
  Sense strand starting at position 3918 of SEQ ID NO: 586399
ugcacagagucuuuauuaa

SEQ ID NO: 715033 - RNA, 19 nt, Artificial Sequence
  Description of Artificial Sequence: Synthetic oligonucleotide
  Antisense strand to SEQ ID NO: 715032
uuaauaaagacucugugca

SEQ ID NO: 715034 - RNA, 19 nt, Artificial Sequence
  Description of Artificial Sequence: Synthetic oligonucleotide
  Sense strand starting at position 7 of SEQ ID NO: 586400
acgcauaguucugcgggau

SEQ ID NO: 715035 - RNA, 19 nt, Artificial Sequence
  Description of Artificial Sequence: Synthetic oligonucleotide
  Antisense strand to SEQ ID NO: 715034
aucccgcagaacuaugcgu

SEQ ID NO: 715036 - RNA, 19 nt, Artificial Sequence
  Description of Artificial Sequence: Synthetic oligonucleotide
  Sense strand starting at position 8 of SEQ ID NO: 586400
cgcauaguucugcgggaug

SEQ ID NO: 715037 - RNA, 19 nt, Artificial Sequence
  Description of Artificial Sequence: Synthetic oligonucleotide
  Antisense strand to SEQ ID NO: 715036
caucccgcagaacuaugcg

SEQ ID NO: 715038 - RNA, 19 nt, Artificial Sequence
  Description of Artificial Sequence: Synthetic oligonucleotide
  Sense strand starting at position 49 of SEQ ID NO: 586400
ccugcugugaucugggcaa

SEQ ID NO: 715039 - RNA, 19 nt, Artificial Sequence
  Description of Artificial Sequence: Synthetic oligonucleotide
  Antisense strand to SEQ ID NO: 715038
uugcccagaucacagcagg

SEQ ID NO: 715040 - RNA, 19 nt, Artificial Sequence
  Description of Artificial Sequence: Synthetic oligonucleotide
  Sense strand starting at position 51 of SEQ ID NO: 586400
ugcugugaucugggcaaau

SEQ ID NO: 715041 - RNA, 19 nt, Artificial Sequence
  Description of Artificial Sequence: Synthetic oligonucleotide
  Antisense strand to SEQ ID NO: 715040
auuugcccagaucacagca

SEQ ID NO: 715042 - RNA, 19 nt, Artificial Sequence
  Description of Artificial Sequence: Synthetic oligonucleotide
  Sense strand starting at position 53 of SEQ ID NO: 586400
cugugaucugggcaaauga

SEQ ID NO: 715043 - RNA, 19 nt, Artificial Sequence
  Description of Artificial Sequence: Synthetic oligonucleotide
  Antisense strand to SEQ ID NO: 715042
ucauuugcccagaucacag

SEQ ID NO: 715044 - RNA, 19 nt, Artificial Sequence
  Description of Artificial Sequence: Synthetic oligonucleotide
  Sense strand starting at position 172 of SEQ ID NO: 586400
auggaaugcaguugaugau

SEQ ID NO: 715045 - RNA, 19 nt, Artificial Sequence
  Description of Artificial Sequence: Synthetic oligonucleotide
  Antisense strand to SEQ ID NO: 715044
aucaucaacugcauuccau

SEQ ID NO: 715046 - RNA, 19 nt, Artificial Sequence
  Description of Artificial Sequence: Synthetic oligonucleotide
  Sense strand starting at position 173 of SEQ ID NO: 586400
uggaaugcaguugaugauu

SEQ ID NO: 715047 - RNA, 19 nt, Artificial Sequence
  Description of Artificial Sequence: Synthetic oligonucleotide
  Antisense strand to SEQ ID NO: 715046
aaucaucaacugcauucca

SEQ ID NO: 715048 - RNA, 19 nt, Artificial Sequence
  Description of Artificial Sequence: Synthetic oligonucleotide
  Sense strand starting at position 267 of SEQ ID NO: 586400
cugcgaaugcugccucuuu

SEQ ID NO: 715049 - RNA, 19 nt, Artificial Sequence
  Description of Artificial Sequence: Synthetic oligonucleotide
  Antisense strand to SEQ ID NO: 715048
aaagaggcagcauucgcag

SEQ ID NO: 715050 - RNA, 19 nt, Artificial Sequence
  Description of Artificial Sequence: Synthetic oligonucleotide
  Sense strand starting at position 312 of SEQ ID NO: 586400
gagagaagguccuuucuau

SEQ ID NO: 715051 - RNA, 19 nt, Artificial Sequence
  Description of Artificial Sequence: Synthetic oligonucleotide
  Antisense strand to SEQ ID NO: 715050
auagaaaggaccuucucuc

SEQ ID NO: 715052 - RNA, 19 nt, Artificial Sequence
  Description of Artificial Sequence: Synthetic oligonucleotide
  Sense strand starting at position 570 of SEQ ID NO: 586400
ccgggauaaccggauggua

SEQ ID NO: 715053 - RNA, 19 nt, Artificial Sequence
  Description of Artificial Sequence: Synthetic oligonucleotide
  Antisense strand to SEQ ID NO: 715052
uaccauccgguuaucccgg

SEQ ID NO: 715054 - RNA, 19 nt, Artificial Sequence
  Description of Artificial Sequence: Synthetic oligonucleotide
  Sense strand starting at position 636 of SEQ ID NO: 586400
guuggaagaucguagggaa

SEQ ID NO: 715055 - RNA, 19 nt, Artificial Sequence
  Description of Artificial Sequence: Synthetic oligonucleotide
  Antisense strand to SEQ ID NO: 715054
uucccuacgaucuuccaac

SEQ ID NO: 715056 - RNA, 19 nt, Artificial Sequence
  Description of Artificial Sequence: Synthetic oligonucleotide
  Sense strand starting at position 923 of SEQ ID NO: 586400
cacacaaugucgcgugagu

SEQ ID NO: 715057 - RNA, 19 nt, Artificial Sequence
  Description of Artificial Sequence: Synthetic oligonucleotide
  Antisense strand to SEQ ID NO: 715056
acucacgcgacauugugug

SEQ ID NO: 715058 - RNA, 19 nt, Artificial Sequence
  Description of Artificial Sequence: Synthetic oligonucleotide
  Sense strand starting at position 2989 of SEQ ID NO: 586400
augagcugccgagauacaa

SEQ ID NO: 715059 - RNA, 19 nt, Artificial Sequence
  Description of Artificial Sequence: Synthetic oligonucleotide
  Antisense strand to SEQ ID NO: 715058
uuguaucucggcagcucau

SEQ ID NO: 715060 - RNA, 19 nt, Artificial Sequence
  Description of Artificial Sequence: Synthetic oligonucleotide
  Sense strand starting at position 3021 of SEQ ID NO: 586400
guccgcuuuccuugcugau

SEQ ID NO: 715061 - RNA, 19 nt, Artificial Sequence
  Description of Artificial Sequence: Synthetic oligonucleotide
  Antisense strand to SEQ ID NO: 715060
aucagcaaggaaagcggac

SEQ ID NO: 715062 - RNA, 19 nt, Artificial Sequence
  Description of Artificial Sequence: Synthetic oligonucleotide
  Sense strand starting at position 3045 of SEQ ID NO: 586400
ggaauagugucacucccau

SEQ ID NO: 715063 - RNA, 19 nt, Artificial Sequence
  Description of Artificial Sequence: Synthetic oligonucleotide
  Antisense strand to SEQ ID NO: 715062
augggagugacacuauucc

SEQ ID NO: 715064 - RNA, 19 nt, Artificial Sequence
  Description of Artificial Sequence: Synthetic oligonucleotide
  Sense strand starting at position 3077 of SEQ ID NO: 586400
ccggcagcuuccugucuua

SEQ ID NO: 715065 - RNA, 19 nt, Artificial Sequence
  Description of Artificial Sequence: Synthetic oligonucleotide
  Antisense strand to SEQ ID NO: 715064
uaagacaggaagcugccgg

SEQ ID NO: 715066 - RNA, 19 nt, Artificial Sequence
  Description of Artificial Sequence: Synthetic oligonucleotide
  Sense strand starting at position 3080 of SEQ ID NO: 586400
gcagcuuccugucuuaaac

SEQ ID NO: 715067 - RNA, 19 nt, Artificial Sequence
  Description of Artificial Sequence: Synthetic oligonucleotide
  Antisense strand to SEQ ID NO: 715066
guuuaagacaggaagcugc

SEQ ID NO: 715068 - RNA, 19 nt, Artificial Sequence
  Description of Artificial Sequence: Synthetic oligonucleotide
  Sense strand starting at position 3128 of SEQ ID NO: 586400
gcagacacuuauuguaagu

SEQ ID NO: 715069 - RNA, 19 nt, Artificial Sequence
  Description of Artificial Sequence: Synthetic oligonucleotide
  Antisense strand to SEQ ID NO: 715068
acuuacaauaagugucugc

SEQ ID NO: 715070 - RNA, 19 nt, Artificial Sequence
  Description of Artificial Sequence: Synthetic oligonucleotide
  Sense strand starting at position 3130 of SEQ ID NO: 586400
agacacuuauuguaagugu

SEQ ID NO: 715071 - RNA, 19 nt, Artificial Sequence
  Description of Artificial Sequence: Synthetic oligonucleotide
  Antisense strand to SEQ ID NO: 715070
acacuuacaauaagugucu

SEQ ID NO: 715072 - RNA, 19 nt, Artificial Sequence
  Description of Artificial Sequence: Synthetic oligonucleotide
  Sense strand starting at position 3203 of SEQ ID NO: 586400
gacagcgacccucaugaaa

SEQ ID NO: 715073 - RNA, 19 nt, Artificial Sequence
  Description of Artificial Sequence: Synthetic oligonucleotide
  Antisense strand to SEQ ID NO: 715072
uuucaugagggucgcuguc

SEQ ID NO: 715074 - RNA, 19 nt, Artificial Sequence
  Description of Artificial Sequence: Synthetic oligonucleotide
  Sense strand starting at position 3215 of SEQ ID NO: 586400
caugaaacaugcuuagcga

SEQ ID NO: 715075 - RNA, 19 nt, Artificial Sequence
  Description of Artificial Sequence: Synthetic oligonucleotide
  Antisense strand to SEQ ID NO: 715074
ucgcuaagcauguuucaug

SEQ ID NO: 715076 - RNA, 19 nt, Artificial Sequence
  Description of Artificial Sequence: Synthetic oligonucleotide
  Sense strand starting at position 3216 of SEQ ID NO: 586400
augaaacaugcuuagcgau

SEQ ID NO: 715077 - RNA, 19 nt, Artificial Sequence
  Description of Artificial Sequence: Synthetic oligonucleotide
  Antisense strand to SEQ ID NO: 715076
aucgcuaagcauguuucau

SEQ ID NO: 715078 - RNA, 19 nt, Artificial Sequence
  Description of Artificial Sequence: Synthetic oligonucleotide
  Sense strand starting at position 3224 of SEQ ID NO: 586400
ugcuuagcgauccgaaaga

SEQ ID NO: 715079 - RNA, 19 nt, Artificial Sequence
  Description of Artificial Sequence: Synthetic oligonucleotide
  Antisense strand to SEQ ID NO: 715078
ucuuucggaucgcuaagca

SEQ ID NO: 715080 - RNA, 19 nt, Artificial Sequence
  Description of Artificial Sequence: Synthetic oligonucleotide
  Sense strand starting at position 3277 of SEQ ID NO: 586400
gggagaaauccaggagccu

SEQ ID NO: 715081 - RNA, 19 nt, Artificial Sequence
  Description of Artificial Sequence: Synthetic oligonucleotide
  Antisense strand to SEQ ID NO: 715080
aggcuccuggauuucuccc

SEQ ID NO: 715082 - RNA, 19 nt, Artificial Sequence
  Description of Artificial Sequence: Synthetic oligonucleotide
  Sense strand starting at position 3336 of SEQ ID NO: 586400
ggugacuguucagcuaaga

SEQ ID NO: 715083 - RNA, 19 nt, Artificial Sequence
  Description of Artificial Sequence: Synthetic oligonucleotide
  Antisense strand to SEQ ID NO: 715082
ucuuagcugaacagucacc

SEQ ID NO: 715084 - RNA, 19 nt, Artificial Sequence
  Description of Artificial Sequence: Synthetic oligonucleotide
  Sense strand starting at position 3388 of SEQ ID NO: 586400
ucucuacucugauugagga

SEQ ID NO: 715085 - RNA, 19 nt, Artificial Sequence
  Description of Artificial Sequence: Synthetic oligonucleotide
  Antisense strand to SEQ ID NO: 715084
uccucaaucagaguagaga

SEQ ID NO: 715086 - RNA, 19 nt, Artificial Sequence
  Description of Artificial Sequence: Synthetic oligonucleotide
  Sense strand starting at position 3567 of SEQ ID NO: 586400
ccuuccagcuguugucaga

SEQ ID NO: 715087 - RNA, 19 nt, Artificial Sequence
  Description of Artificial Sequence: Synthetic oligonucleotide
  Antisense strand to SEQ ID NO: 715086
ucugacaacagcuggaagg

SEQ ID NO: 715088 - RNA, 19 nt, Artificial Sequence
  Description of Artificial Sequence: Synthetic oligonucleotide
  Sense strand starting at position 3690 of SEQ ID NO: 586400
ucgccuguccaucauuuaa

SEQ ID NO: 715089 - RNA, 19 nt, Artificial Sequence
  Description of Artificial Sequence: Synthetic oligonucleotide
  Antisense strand to SEQ ID NO: 715088
uuaaaugauggacaggcga

SEQ ID NO: 715090 - RNA, 19 nt, Artificial Sequence
  Description of Artificial Sequence: Synthetic oligonucleotide
  Sense strand starting at position 3719 of SEQ ID NO: 586400
uauggaaaugugugaauuc

SEQ ID NO: 715091 - RNA, 19 nt, Artificial Sequence
  Description of Artificial Sequence: Synthetic oligonucleotide
  Antisense strand to SEQ ID NO: 715090
gaauucacacauuuccaua

SEQ ID NO: 715092 - RNA, 19 nt, Artificial Sequence
  Description of Artificial Sequence: Synthetic oligonucleotide
  Sense strand starting at position 3726 of SEQ ID NO: 586400
augugugaauuccuggaaa

SEQ ID NO: 715093 - RNA, 19 nt, Artificial Sequence
  Description of Artificial Sequence: Synthetic oligonucleotide
  Antisense strand to SEQ ID NO: 715092
uuuccaggaauucacacau

SEQ ID NO: 715094 - RNA, 19 nt, Artificial Sequence
  Description of Artificial Sequence: Synthetic oligonucleotide
  Sense strand starting at position 3776 of SEQ ID NO: 586400
gcauuugcacgccaugagu

SEQ ID NO: 715095 - RNA, 19 nt, Artificial Sequence
  Description of Artificial Sequence: Synthetic oligonucleotide
  Antisense strand to SEQ ID NO: 715094
acucauggcgugcaaaugc

SEQ ID NO: 715096 - RNA, 19 nt, Artificial Sequence
  Description of Artificial Sequence: Synthetic oligonucleotide
  Sense strand starting at position 49 of SEQ ID NO: 586401
agugucaugccucauauau

SEQ ID NO: 715097 - RNA, 19 nt, Artificial Sequence
  Description of Artificial Sequence: Synthetic oligonucleotide
  Antisense strand to SEQ ID NO: 715096
auauaugaggcaugacacu

SEQ ID NO: 715098 - RNA, 19 nt, Artificial Sequence
  Description of Artificial Sequence: Synthetic oligonucleotide
  Sense strand starting at position 140 of SEQ ID NO: 586401
cuugaaagacuucgaauca

SEQ ID NO: 715099 - RNA, 19 nt, Artificial Sequence
  Description of Artificial Sequence: Synthetic oligonucleotide
  Antisense strand to SEQ ID NO: 715098
ugauucgaagucuuucaag

SEQ ID NO: 715100 - RNA, 19 nt, Artificial Sequence
  Description of Artificial Sequence: Synthetic oligonucleotide
  Sense strand starting at position 223 of SEQ ID NO: 586401
ccuugauauuguuugaaag

SEQ ID NO: 715101 - RNA, 19 nt, Artificial Sequence
  Description of Artificial Sequence: Synthetic oligonucleotide
  Antisense strand to SEQ ID NO: 715100
cuuucaaacaauaucaagg

SEQ ID NO: 715102 - RNA, 19 nt, Artificial Sequence
  Description of Artificial Sequence: Synthetic oligonucleotide
  Sense strand starting at position 224 of SEQ ID NO: 586401
cuugauauuguuugaaagg

SEQ ID NO: 715103 - RNA, 19 nt, Artificial Sequence
  Description of Artificial Sequence: Synthetic oligonucleotide
  Antisense strand to SEQ ID NO: 715102
ccuuucaaacaauaucaag

SEQ ID NO: 715104 - RNA, 19 nt, Artificial Sequence
  Description of Artificial Sequence: Synthetic oligonucleotide
  Sense strand starting at position 271 of SEQ ID NO: 586401
cgccuaauacuugaacaaa

SEQ ID NO: 715105 - RNA, 19 nt, Artificial Sequence
  Description of Artificial Sequence: Synthetic oligonucleotide
  Antisense strand to SEQ ID NO: 715104
uuuguucaaguauuaggcg

SEQ ID NO: 715106 - RNA, 19 nt, Artificial Sequence
  Description of Artificial Sequence: Synthetic oligonucleotide
  Sense strand starting at position 554 of SEQ ID NO: 586401
gaggguuuccuuugucaca

SEQ ID NO: 715107 - RNA, 19 nt, Artificial Sequence
  Description of Artificial Sequence: Synthetic oligonucleotide
  Antisense strand to SEQ ID NO: 715106
ugugacaaaggaaacccuc

SEQ ID NO: 715108 - RNA, 19 nt, Artificial Sequence
  Description of Artificial Sequence: Synthetic oligonucleotide
  Sense strand starting at position 555 of SEQ ID NO: 586401
aggguuuccuuugucacaa

SEQ ID NO: 715109 - RNA, 19 nt, Artificial Sequence
  Description of Artificial Sequence: Synthetic oligonucleotide
  Antisense strand to SEQ ID NO: 715108
uugugacaaaggaaacccu

SEQ ID NO: 715110 - RNA, 19 nt, Artificial Sequence
  Description of Artificial Sequence: Synthetic oligonucleotide
  Sense strand starting at position 830 of SEQ ID NO: 586401
cuaaguuugugggugaaau

SEQ ID NO: 715111 - RNA, 19 nt, Artificial Sequence
  Description of Artificial Sequence: Synthetic oligonucleotide
  Antisense strand to SEQ ID NO: 715110
auuucacccacaaacuuag

SEQ ID NO: 715112 - RNA, 19 nt, Artificial Sequence
  Description of Artificial Sequence: Synthetic oligonucleotide
  Sense strand starting at position 831 of SEQ ID NO: 586401
uaaguuugugggugaaauu

SEQ ID NO: 715113 - RNA, 19 nt, Artificial Sequence
  Description of Artificial Sequence: Synthetic oligonucleotide
  Antisense strand to SEQ ID NO: 715112
aauuucacccacaaacuua

SEQ ID NO: 715114 - RNA, 19 nt, Artificial Sequence
  Description of Artificial Sequence: Synthetic oligonucleotide
  Sense strand starting at position 2007 of SEQ ID NO: 586401
ggagacugugcugagaagu

SEQ ID NO: 715115 - RNA, 19 nt, Artificial Sequence
  Description of Artificial Sequence: Synthetic oligonucleotide
  Antisense strand to SEQ ID NO: 715114
acuucucagcacagucucc

SEQ ID NO: 715116 - RNA, 19 nt, Artificial Sequence
  Description of Artificial Sequence: Synthetic oligonucleotide
  Sense strand starting at position 2026 of SEQ ID NO: 586401
guguuucuccacuaacuuc

SEQ ID NO: 715117 - RNA, 19 nt, Artificial Sequence
  Description of Artificial Sequence: Synthetic oligonucleotide
  Antisense strand to SEQ ID NO: 715116
gaaguuaguggagaaacac

SEQ ID NO: 715118 - RNA, 19 nt, Artificial Sequence
  Description of Artificial Sequence: Synthetic oligonucleotide
  Sense strand starting at position 2251 of SEQ ID NO: 586401
ucccauucccagugaagag

SEQ ID NO: 715119 - RNA, 19 nt, Artificial Sequence
  Description of Artificial Sequence: Synthetic oligonucleotide
  Antisense strand to SEQ ID NO: 715118
cucuucacugggaauggga

SEQ ID NO: 715120 - RNA, 19 nt, Artificial Sequence
  Description of Artificial Sequence: Synthetic oligonucleotide
  Sense strand starting at position 2423 of SEQ ID NO: 586401
aagguuaauuggguuuaua

SEQ ID NO: 715121 - RNA, 19 nt, Artificial Sequence
  Description of Artificial Sequence: Synthetic oligonucleotide
  Antisense strand to SEQ ID NO: 715120
uauaaacccaauuaaccuu

SEQ ID NO: 715122 - RNA, 19 nt, Artificial Sequence
  Description of Artificial Sequence: Synthetic oligonucleotide
  Sense strand starting at position 2426 of SEQ ID NO: 586401
guuaauuggguuuauaguu

SEQ ID NO: 715123 - RNA, 19 nt, Artificial Sequence
  Description of Artificial Sequence: Synthetic oligonucleotide
  Antisense strand to SEQ ID NO: 715122
aacuauaaacccaauuaac

SEQ ID NO: 715124 - RNA, 19 nt, Artificial Sequence
  Description of Artificial Sequence: Synthetic oligonucleotide
  Sense strand starting at position 2432 of SEQ ID NO: 586401
uggguuuauaguuauguaa

SEQ ID NO: 715125 - RNA, 19 nt, Artificial Sequence
  Description of Artificial Sequence: Synthetic oligonucleotide
  Antisense strand to SEQ ID NO: 715124
uuacauaacuauaaaccca

SEQ ID NO: 715126 - RNA, 19 nt, Artificial Sequence
  Description of Artificial Sequence: Synthetic oligonucleotide
  Sense strand starting at position 2629 of SEQ ID NO: 586401
agugauaaaguaugaaauc

SEQ ID NO: 715127 - RNA, 19 nt, Artificial Sequence
  Description of Artificial Sequence: Synthetic oligonucleotide
  Antisense strand to SEQ ID NO: 715126
gauuucauacuuuaucacu

SEQ ID NO: 715128 - RNA, 19 nt, Artificial Sequence
  Description of Artificial Sequence: Synthetic oligonucleotide
  Sense strand starting at position 2709 of SEQ ID NO: 586401
gaugauuaagauugagcca

SEQ ID NO: 715129 - RNA, 19 nt, Artificial Sequence
  Description of Artificial Sequence: Synthetic oligonucleotide
  Antisense strand to SEQ ID NO: 715128
uggcucaaucuuaaucauc

SEQ ID NO: 715130 - RNA, 19 nt, Artificial Sequence
  Description of Artificial Sequence: Synthetic oligonucleotide
  Sense strand starting at position 2716 of SEQ ID NO: 586401
aagauugagccaggugaaa

SEQ ID NO: 715131 - RNA, 19 nt, Artificial Sequence
  Description of Artificial Sequence: Synthetic oligonucleotide
  Antisense strand to SEQ ID NO: 715130
uuucaccuggcucaaucuu

SEQ ID NO: 715132 - RNA, 19 nt, Artificial Sequence
  Description of Artificial Sequence: Synthetic oligonucleotide
  Sense strand starting at position 2718 of SEQ ID NO: 586401
gauugagccaggugaaagu

SEQ ID NO: 715133 - RNA, 19 nt, Artificial Sequence
  Description of Artificial Sequence: Synthetic oligonucleotide
  Antisense strand to SEQ ID NO: 715132
acuuucaccuggcucaauc

SEQ ID NO: 715134 - RNA, 19 nt, Artificial Sequence
  Description of Artificial Sequence: Synthetic oligonucleotide
  Sense strand starting at position 2839 of SEQ ID NO: 586401
uaaggaauuugucauugau

SEQ ID NO: 715135 - RNA, 19 nt, Artificial Sequence
  Description of Artificial Sequence: Synthetic oligonucleotide
  Antisense strand to SEQ ID NO: 715134
aucaaugacaaauuccuua

SEQ ID NO: 715136 - RNA, 19 nt, Artificial Sequence
  Description of Artificial Sequence: Synthetic oligonucleotide
  Sense strand starting at position 2909 of SEQ ID NO: 586401
ucaggcauaugcuuuagaa

SEQ ID NO: 715137 - RNA, 19 nt, Artificial Sequence
  Description of Artificial Sequence: Synthetic oligonucleotide
  Antisense strand to SEQ ID NO: 715136
uucuaaagcauaugccuga

SEQ ID NO: 715138 - RNA, 19 nt, Artificial Sequence
  Description of Artificial Sequence: Synthetic oligonucleotide
  Sense strand starting at position 2911 of SEQ ID NO: 586401
aggcauaugcuuuagaaag

SEQ ID NO: 715139 - RNA, 19 nt, Artificial Sequence
  Description of Artificial Sequence: Synthetic oligonucleotide
  Antisense strand to SEQ ID NO: 715138
cuuucuaaagcauaugccu

SEQ ID NO: 715140 - RNA, 19 nt, Artificial Sequence
  Description of Artificial Sequence: Synthetic oligonucleotide
  Sense strand starting at position 2989 of SEQ ID NO: 586401
uguuaucauccuggaaaga

SEQ ID NO: 715141 - RNA, 19 nt, Artificial Sequence
  Description of Artificial Sequence: Synthetic oligonucleotide
  Antisense strand to SEQ ID NO: 715140
ucuuuccaggaugauaaca

SEQ ID NO: 715142 - RNA, 19 nt, Artificial Sequence
  Description of Artificial Sequence: Synthetic oligonucleotide
  Sense strand starting at position 3007 of SEQ ID NO: 586401
agaugauccugacucagcu

SEQ ID NO: 715143 - RNA, 19 nt, Artificial Sequence
  Description of Artificial Sequence: Synthetic oligonucleotide
  Antisense strand to SEQ ID NO: 715142
agcugagucaggaucaucu

SEQ ID NO: 715144 - RNA, 19 nt, Artificial Sequence
  Description of Artificial Sequence: Synthetic oligonucleotide
  Sense strand starting at position 3031 of SEQ ID NO: 586401
agcgggaguggucauggaa

SEQ ID NO: 715145 - RNA, 19 nt, Artificial Sequence
  Description of Artificial Sequence: Synthetic oligonucleotide
  Antisense strand to SEQ ID NO: 715144
uuccaugaccacucccgcu

SEQ ID NO: 715146 - RNA, 19 nt, Artificial Sequence
  Description of Artificial Sequence: Synthetic oligonucleotide
  Sense strand starting at position 3168 of SEQ ID NO: 586401
uugguugaucuugagcuga

SEQ ID NO: 715147 - RNA, 19 nt, Artificial Sequence
  Description of Artificial Sequence: Synthetic oligonucleotide
  Antisense strand to SEQ ID NO: 715146
ucagcucaagaucaaccaa

SEQ ID NO: 715148 - RNA, 19 nt, Artificial Sequence
  Description of Artificial Sequence: Synthetic oligonucleotide
  Sense strand starting at position 3170 of SEQ ID NO: 586401
gguugaucuugagcugacu

SEQ ID NO: 715149 - RNA, 19 nt, Artificial Sequence
  Description of Artificial Sequence: Synthetic oligonucleotide
  Antisense strand to SEQ ID NO: 715148
agucagcucaagaucaacc

SEQ ID NO: 715150 - RNA, 19 nt, Artificial Sequence
  Description of Artificial Sequence: Synthetic oligonucleotide
  Sense strand starting at position 3183 of SEQ ID NO: 586401
cugacuguggaguauuaag

SEQ ID NO: 715151 - RNA, 19 nt, Artificial Sequence
  Description of Artificial Sequence: Synthetic oligonucleotide
  Antisense strand to SEQ ID NO: 715150
cuuaauacuccacagucag

SEQ ID NO: 715152 - RNA, 19 nt, Artificial Sequence
  Description of Artificial Sequence: Synthetic oligonucleotide
  Sense strand starting at position 3191 of SEQ ID NO: 586401
ggaguauuaagguggaaau

SEQ ID NO: 715153 - RNA, 19 nt, Artificial Sequence
  Description of Artificial Sequence: Synthetic oligonucleotide
  Antisense strand to SEQ ID NO: 715152
auuuccaccuuaauacucc

SEQ ID NO: 715154 - RNA, 19 nt, Artificial Sequence
  Description of Artificial Sequence: Synthetic oligonucleotide
  Sense strand starting at position 3272 of SEQ ID NO: 586401
uagguacauaggugguaaa

SEQ ID NO: 715155 - RNA, 19 nt, Artificial Sequence
  Description of Artificial Sequence: Synthetic oligonucleotide
  Antisense strand to SEQ ID NO: 715154
uuuaccaccuauguaccua

SEQ ID NO: 715156 - RNA, 19 nt, Artificial Sequence
  Description of Artificial Sequence: Synthetic oligonucleotide
  Sense strand starting at position 3273 of SEQ ID NO: 586401
agguacauaggugguaaau

SEQ ID NO: 715157 - RNA, 19 nt, Artificial Sequence
  Description of Artificial Sequence: Synthetic oligonucleotide
  Antisense strand to SEQ ID NO: 715156
auuuaccaccuauguaccu

SEQ ID NO: 715158 - RNA, 19 nt, Artificial Sequence
  Description of Artificial Sequence: Synthetic oligonucleotide
  Sense strand starting at position 3286 of SEQ ID NO: 586401
guaaaugaagccgaagagu

SEQ ID NO: 715159 - RNA, 19 nt, Artificial Sequence
  Description of Artificial Sequence: Synthetic oligonucleotide
  Antisense strand to SEQ ID NO: 715158
acucuucggcuucauuuac

SEQ ID NO: 715160 - RNA, 19 nt, Artificial Sequence
  Description of Artificial Sequence: Synthetic oligonucleotide
  Sense strand starting at position 3350 of SEQ ID NO: 586401
agaaacauuuggcaauauc

SEQ ID NO: 715161 - RNA, 19 nt, Artificial Sequence
  Description of Artificial Sequence: Synthetic oligonucleotide
  Antisense strand to SEQ ID NO: 715160
gauauugccaaauguuucu

SEQ ID NO: 715162 - RNA, 19 nt, Artificial Sequence
  Description of Artificial Sequence: Synthetic oligonucleotide
  Sense strand starting at position 3381 of SEQ ID NO: 586401
ugaugaucacaauguagau

SEQ ID NO: 715163 - RNA, 19 nt, Artificial Sequence
  Description of Artificial Sequence: Synthetic oligonucleotide
  Antisense strand to SEQ ID NO: 715162
aucuacauugugaucauca

SEQ ID NO: 715164 - RNA, 19 nt, Artificial Sequence
  Description of Artificial Sequence: Synthetic oligonucleotide
  Sense strand starting at position 3559 of SEQ ID NO: 586401
gggaguguugagugugaga

SEQ ID NO: 715165 - RNA, 19 nt, Artificial Sequence
  Description of Artificial Sequence: Synthetic oligonucleotide
  Antisense strand to SEQ ID NO: 715164
ucucacacucaacacuccc

SEQ ID NO: 715166 - RNA, 19 nt, Artificial Sequence
  Description of Artificial Sequence: Synthetic oligonucleotide
  Sense strand starting at position 3561 of SEQ ID NO: 586401
gaguguugagugugagaag

SEQ ID NO: 715167 - RNA, 19 nt, Artificial Sequence
  Description of Artificial Sequence: Synthetic oligonucleotide
  Antisense strand to SEQ ID NO: 715166
cuucucacacucaacacuc

SEQ ID NO: 715168 - RNA, 19 nt, Artificial Sequence
  Description of Artificial Sequence: Synthetic oligonucleotide
  Sense strand starting at position 3745 of SEQ ID NO: 586401
gaaguaggguguucuagaa

SEQ ID NO: 715169 - RNA, 19 nt, Artificial Sequence
  Description of Artificial Sequence: Synthetic oligonucleotide
  Antisense strand to SEQ ID NO: 715168
uucuagaacacccuacuuc

SEQ ID NO: 715170 - RNA, 19 nt, Artificial Sequence
  Description of Artificial Sequence: Synthetic oligonucleotide
  Sense strand starting at position 3749 of SEQ ID NO: 586401
uaggguguucuagaaucac

SEQ ID NO: 715171 - RNA, 19 nt, Artificial Sequence
  Description of Artificial Sequence: Synthetic oligonucleotide
  Antisense strand to SEQ ID NO: 715170
gugauucuagaacacccua

SEQ ID NO: 715172 - RNA, 19 nt, Artificial Sequence
  Description of Artificial Sequence: Synthetic oligonucleotide
  Sense strand starting at position 3967 of SEQ ID NO: 586401
cccauaagacuuugugacu

SEQ ID NO: 715173 - RNA, 19 nt, Artificial Sequence
  Description of Artificial Sequence: Synthetic oligonucleotide
  Antisense strand to SEQ ID NO: 715172
agucacaaagucuuauggg

SEQ ID NO: 715174 - RNA, 19 nt, Artificial Sequence
  Description of Artificial Sequence: Synthetic oligonucleotide
  Sense strand starting at position 3968 of SEQ ID NO: 586401
ccauaagacuuugugacuu

SEQ ID NO: 715175 - RNA, 19 nt, Artificial Sequence
  Description of Artificial Sequence: Synthetic oligonucleotide
  Antisense strand to SEQ ID NO: 715174
aagucacaaagucuuaugg

SEQ ID NO: 715176 - RNA, 19 nt, Artificial Sequence
  Description of Artificial Sequence: Synthetic oligonucleotide
  Sense strand starting at position 67 of SEQ ID NO: 586402
cuacgacaaucuccaagau

SEQ ID NO: 715177 - RNA, 19 nt, Artificial Sequence
  Description of Artificial Sequence: Synthetic oligonucleotide
  Antisense strand to SEQ ID NO: 715176
aucuuggagauugucguag

SEQ ID NO: 715178 - RNA, 19 nt, Artificial Sequence
  Description of Artificial Sequence: Synthetic oligonucleotide
  Sense strand starting at position 77 of SEQ ID NO: 586402
cuccaagauuguguucuca

SEQ ID NO: 715179 - RNA, 19 nt, Artificial Sequence
  Description of Artificial Sequence: Synthetic oligonucleotide
  Antisense strand to SEQ ID NO: 715178
ugagaacacaaucuuggag

SEQ ID NO: 715180 - RNA, 19 nt, Artificial Sequence
  Description of Artificial Sequence: Synthetic oligonucleotide
  Sense strand starting at position 79 of SEQ ID NO: 586402
ccaagauuguguucucacu

SEQ ID NO: 715181 - RNA, 19 nt, Artificial Sequence
  Description of Artificial Sequence: Synthetic oligonucleotide
  Antisense strand to SEQ ID NO: 715180
agugagaacacaaucuugg

SEQ ID NO: 715182 - RNA, 19 nt, Artificial Sequence
  Description of Artificial Sequence: Synthetic oligonucleotide
  Sense strand starting at position 140 of SEQ ID NO: 586402
gggaaugcauucuuaagga

SEQ ID NO: 715183 - RNA, 19 nt, Artificial Sequence
  Description of Artificial Sequence: Synthetic oligonucleotide
  Antisense strand to SEQ ID NO: 715182
uccuuaagaaugcauuccc

SEQ ID NO: 715184 - RNA, 19 nt, Artificial Sequence
  Description of Artificial Sequence: Synthetic oligonucleotide
  Sense strand starting at position 552 of SEQ ID NO: 586402
aggagccauucuguuuaua

SEQ ID NO: 715185 - RNA, 19 nt, Artificial Sequence
  Description of Artificial Sequence: Synthetic oligonucleotide
  Antisense strand to SEQ ID NO: 715184
uauaaacagaauggcuccu

SEQ ID NO: 715186 - RNA, 19 nt, Artificial Sequence
  Description of Artificial Sequence: Synthetic oligonucleotide
  Sense strand starting at position 584 of SEQ ID NO: 586402
augaacaaaugcuuguuaa

SEQ ID NO: 715187 - RNA, 19 nt, Artificial Sequence
  Description of Artificial Sequence: Synthetic oligonucleotide
  Antisense strand to SEQ ID NO: 715186
uuaacaagcauuuguucau

SEQ ID NO: 715188 - RNA, 19 nt, Artificial Sequence
  Description of Artificial Sequence: Synthetic oligonucleotide
  Sense strand starting at position 613 of SEQ ID NO: 586402
gaaugugaaccugguauac

SEQ ID NO: 715189 - RNA, 19 nt, Artificial Sequence
  Description of Artificial Sequence: Synthetic oligonucleotide
  Antisense strand to SEQ ID NO: 715188
guauaccagguucacauuc

SEQ ID NO: 715190 - RNA, 19 nt, Artificial Sequence
  Description of Artificial Sequence: Synthetic oligonucleotide
  Sense strand starting at position 617 of SEQ ID NO: 586402
gugaaccugguauaccaua

SEQ ID NO: 715191 - RNA, 19 nt, Artificial Sequence
  Description of Artificial Sequence: Synthetic oligonucleotide
  Antisense strand to SEQ ID NO: 715190
uaugguauaccagguucac

SEQ ID NO: 715192 - RNA, 19 nt, Artificial Sequence
  Description of Artificial Sequence: Synthetic oligonucleotide
  Sense strand starting at position 683 of SEQ ID NO: 586402
uuaagaaaguugcuuaauc

SEQ ID NO: 715193 - RNA, 19 nt, Artificial Sequence
  Description of Artificial Sequence: Synthetic oligonucleotide
  Antisense strand to SEQ ID NO: 715192
gauuaagcaacuuucuuaa

SEQ ID NO: 715194 - RNA, 19 nt, Artificial Sequence
  Description of Artificial Sequence: Synthetic oligonucleotide
  Sense strand starting at position 713 of SEQ ID NO: 586402
cagaguuauugucuguaaa

SEQ ID NO: 715195 - RNA, 19 nt, Artificial Sequence
  Description of Artificial Sequence: Synthetic oligonucleotide
  Antisense strand to SEQ ID NO: 715194
uuuacagacaauaacucug

SEQ ID NO: 715196 - RNA, 19 nt, Artificial Sequence
  Description of Artificial Sequence: Synthetic oligonucleotide
  Sense strand starting at position 807 of SEQ ID NO: 586402
agugucaugccucauauau

SEQ ID NO: 715197 - RNA, 19 nt, Artificial Sequence
  Description of Artificial Sequence: Synthetic oligonucleotide
  Antisense strand to SEQ ID NO: 715196
auauaugaggcaugacacu

SEQ ID NO: 715198 - RNA, 19 nt, Artificial Sequence
  Description of Artificial Sequence: Synthetic oligonucleotide
  Sense strand starting at position 898 of SEQ ID NO: 586402
cuugaaagacuucgaauca

SEQ ID NO: 715199 - RNA, 19 nt, Artificial Sequence
  Description of Artificial Sequence: Synthetic oligonucleotide
  Antisense strand to SEQ ID NO: 715198
ugauucgaagucuuucaag

SEQ ID NO: 715200 - RNA, 19 nt, Artificial Sequence
  Description of Artificial Sequence: Synthetic oligonucleotide
  Sense strand starting at position 981 of SEQ ID NO: 586402
ccuugauauuguuugaaag

SEQ ID NO: 715201 - RNA, 19 nt, Artificial Sequence
  Description of Artificial Sequence: Synthetic oligonucleotide
  Antisense strand to SEQ ID NO: 715200
cuuucaaacaauaucaagg

SEQ ID NO: 715202 - RNA, 19 nt, Artificial Sequence
  Description of Artificial Sequence: Synthetic oligonucleotide
  Sense strand starting at position 982 of SEQ ID NO: 586402
cuugauauuguuugaaagg

SEQ ID NO: 715203 - RNA, 19 nt, Artificial Sequence
  Description of Artificial Sequence: Synthetic oligonucleotide
  Antisense strand to SEQ ID NO: 715202
ccuuucaaacaauaucaag

SEQ ID NO: 715204 - RNA, 19 nt, Artificial Sequence
  Description of Artificial Sequence: Synthetic oligonucleotide
  Sense strand starting at position 1029 of SEQ ID NO: 586402
cgccuaauacuugaacaaa

SEQ ID NO: 715205 - RNA, 19 nt, Artificial Sequence
  Description of Artificial Sequence: Synthetic oligonucleotide
  Antisense strand to SEQ ID NO: 715204
uuuguucaaguauuaggcg

SEQ ID NO: 715206 - RNA, 19 nt, Artificial Sequence
  Description of Artificial Sequence: Synthetic oligonucleotide
  Sense strand starting at position 1312 of SEQ ID NO: 586402
gaggguuuccuuugucaca

SEQ ID NO: 715207 - RNA, 19 nt, Artificial Sequence
  Description of Artificial Sequence: Synthetic oligonucleotide
  Antisense strand to SEQ ID NO: 715206
ugugacaaaggaaacccuc

SEQ ID NO: 715208 - RNA, 19 nt, Artificial Sequence
  Description of Artificial Sequence: Synthetic oligonucleotide
  Sense strand starting at position 1313 of SEQ ID NO: 586402
aggguuuccuuugucacaa

SEQ ID NO: 715209 - RNA, 19 nt, Artificial Sequence
  Description of Artificial Sequence: Synthetic oligonucleotide
  Antisense strand to SEQ ID NO: 715208
uugugacaaaggaaacccu

SEQ ID NO: 715210 - RNA, 19 nt, Artificial Sequence
  Description of Artificial Sequence: Synthetic oligonucleotide
  Sense strand starting at position 1314 of SEQ ID NO: 586402
ggguuuccuuugucacaac

SEQ ID NO: 715211 - RNA, 19 nt, Artificial Sequence
  Description of Artificial Sequence: Synthetic oligonucleotide
  Antisense strand to SEQ ID NO: 715210
guugugacaaaggaaaccc

SEQ ID NO: 715212 - RNA, 19 nt, Artificial Sequence
  Description of Artificial Sequence: Synthetic oligonucleotide
  Sense strand starting at position 1588 of SEQ ID NO: 586402
cuaaguuugugggugaaau

SEQ ID NO: 715213 - RNA, 19 nt, Artificial Sequence
  Description of Artificial Sequence: Synthetic oligonucleotide
  Antisense strand to SEQ ID NO: 715212
auuucacccacaaacuuag

SEQ ID NO: 715214 - RNA, 19 nt, Artificial Sequence
  Description of Artificial Sequence: Synthetic oligonucleotide
  Sense strand starting at position 1589 of SEQ ID NO: 586402
uaaguuugugggugaaauu

SEQ ID NO: 715215 - RNA, 19 nt, Artificial Sequence
  Description of Artificial Sequence: Synthetic oligonucleotide
  Antisense strand to SEQ ID NO: 715214
aauuucacccacaaacuua

SEQ ID NO: 715216 - RNA, 19 nt, Artificial Sequence
  Description of Artificial Sequence: Synthetic oligonucleotide
  Sense strand starting at position 2765 of SEQ ID NO: 586402
ggagacugugcugagaagu

SEQ ID NO: 715217 - RNA, 19 nt, Artificial Sequence
  Description of Artificial Sequence: Synthetic oligonucleotide
  Antisense strand to SEQ ID NO: 715216
acuucucagcacagucucc

SEQ ID NO: 715218 - RNA, 19 nt, Artificial Sequence
  Description of Artificial Sequence: Synthetic oligonucleotide
  Sense strand starting at position 2784 of SEQ ID NO: 586402
guguuucuccacuaacuuc

SEQ ID NO: 715219 - RNA, 19 nt, Artificial Sequence
  Description of Artificial Sequence: Synthetic oligonucleotide
  Antisense strand to SEQ ID NO: 715218
gaaguuaguggagaaacac

SEQ ID NO: 715220 - RNA, 19 nt, Artificial Sequence
  Description of Artificial Sequence: Synthetic oligonucleotide
  Sense strand starting at position 3009 of SEQ ID NO: 586402
ucccauucccagugaagag

SEQ ID NO: 715221 - RNA, 19 nt, Artificial Sequence
  Description of Artificial Sequence: Synthetic oligonucleotide
  Antisense strand to SEQ ID NO: 715220
cucuucacugggaauggga

SEQ ID NO: 715222 - RNA, 19 nt, Artificial Sequence
  Description of Artificial Sequence: Synthetic oligonucleotide
  Sense strand starting at position 3181 of SEQ ID NO: 586402
aagguuaauuggguuuaua

SEQ ID NO: 715223 - RNA, 19 nt, Artificial Sequence
  Description of Artificial Sequence: Synthetic oligonucleotide
  Antisense strand to SEQ ID NO: 715222
uauaaacccaauuaaccuu

SEQ ID NO: 715224 - RNA, 19 nt, Artificial Sequence
  Description of Artificial Sequence: Synthetic oligonucleotide
  Sense strand starting at position 3184 of SEQ ID NO: 586402
guuaauuggguuuauaguu

SEQ ID NO: 715225 - RNA, 19 nt, Artificial Sequence
  Description of Artificial Sequence: Synthetic oligonucleotide
  Antisense strand to SEQ ID NO: 715224
aacuauaaacccaauuaac

SEQ ID NO: 715226 - RNA, 19 nt, Artificial Sequence
  Description of Artificial Sequence: Synthetic oligonucleotide
  Sense strand starting at position 3190 of SEQ ID NO: 586402
uggguuuauaguuauguaa

SEQ ID NO: 715227 - RNA, 19 nt, Artificial Sequence
  Description of Artificial Sequence: Synthetic oligonucleotide
  Antisense strand to SEQ ID NO: 715226
uuacauaacuauaaaccca

SEQ ID NO: 715228 - RNA, 19 nt, Artificial Sequence
  Description of Artificial Sequence: Synthetic oligonucleotide
  Sense strand starting at position 3387 of SEQ ID NO: 586402
agugauaaaguaugaaauc

SEQ ID NO: 715229 - RNA, 19 nt, Artificial Sequence
  Description of Artificial Sequence: Synthetic oligonucleotide
  Antisense strand to SEQ ID NO: 715228
gauuucauacuuuaucacu

SEQ ID NO: 715230 - RNA, 19 nt, Artificial Sequence
  Description of Artificial Sequence: Synthetic oligonucleotide
  Sense strand starting at position 3467 of SEQ ID NO: 586402
gaugauuaagauugagcca

SEQ ID NO: 715231 - RNA, 19 nt, Artificial Sequence
  Description of Artificial Sequence: Synthetic oligonucleotide
  Antisense strand to SEQ ID NO: 715230
uggcucaaucuuaaucauc

SEQ ID NO: 715232 - RNA, 19 nt, Artificial Sequence
  Description of Artificial Sequence: Synthetic oligonucleotide
  Sense strand starting at position 3474 of SEQ ID NO: 586402
aagauugagccaggugaaa

SEQ ID NO: 715233 - RNA, 19 nt, Artificial Sequence
  Description of Artificial Sequence: Synthetic oligonucleotide
  Antisense strand to SEQ ID NO: 715232
uuucaccuggcucaaucuu

SEQ ID NO: 715234 - RNA, 19 nt, Artificial Sequence
  Description of Artificial Sequence: Synthetic oligonucleotide
  Sense strand starting at position 3476 of SEQ ID NO: 586402
gauugagccaggugaaagu

SEQ ID NO: 715235 - RNA, 19 nt, Artificial Sequence
  Description of Artificial Sequence: Synthetic oligonucleotide
  Antisense strand to SEQ ID NO: 715234
acuuucaccuggcucaauc

SEQ ID NO: 715236 - RNA, 19 nt, Artificial Sequence
  Description of Artificial Sequence: Synthetic oligonucleotide
  Sense strand starting at position 3597 of SEQ ID NO: 586402
uaaggaauuugucauugau

SEQ ID NO: 715237 - RNA, 19 nt, Artificial Sequence
  Description of Artificial Sequence: Synthetic oligonucleotide
  Antisense strand to SEQ ID NO: 715236
aucaaugacaaauuccuua

SEQ ID NO: 715238 - RNA, 19 nt, Artificial Sequence
  Description of Artificial Sequence: Synthetic oligonucleotide
  Sense strand starting at position 3667 of SEQ ID NO: 586402
ucaggcauaugcuuuagaa

SEQ ID NO: 715239 - RNA, 19 nt, Artificial Sequence
  Description of Artificial Sequence: Synthetic oligonucleotide
  Antisense strand to SEQ ID NO: 715238
uucuaaagcauaugccuga

SEQ ID NO: 715240 - RNA, 19 nt, Artificial Sequence
  Description of Artificial Sequence: Synthetic oligonucleotide
  Sense strand starting at position 3669 of SEQ ID NO: 586402
aggcauaugcuuuagaaag

SEQ ID NO: 715241 - RNA, 19 nt, Artificial Sequence
  Description of Artificial Sequence: Synthetic oligonucleotide
  Antisense strand to SEQ ID NO: 715240
cuuucuaaagcauaugccu

SEQ ID NO: 715242 - RNA, 19 nt, Artificial Sequence
  Description of Artificial Sequence: Synthetic oligonucleotide
  Sense strand starting at position 3747 of SEQ ID NO: 586402
uguuaucauccuggaaaga

SEQ ID NO: 715243 - RNA, 19 nt, Artificial Sequence
  Description of Artificial Sequence: Synthetic oligonucleotide
  Antisense strand to SEQ ID NO: 715242
ucuuuccaggaugauaaca

SEQ ID NO: 715244 - RNA, 19 nt, Artificial Sequence
  Description of Artificial Sequence: Synthetic oligonucleotide
  Sense strand starting at position 3765 of SEQ ID NO: 586402
agaugauccugacucagcu

SEQ ID NO: 715245 - RNA, 19 nt, Artificial Sequence
  Description of Artificial Sequence: Synthetic oligonucleotide
  Antisense strand to SEQ ID NO: 715244
agcugagucaggaucaucu

SEQ ID NO: 715246 - RNA, 19 nt, Artificial Sequence
  Description of Artificial Sequence: Synthetic oligonucleotide
  Sense strand starting at position 3789 of SEQ ID NO: 586402
agcgggaguggucauggaa

SEQ ID NO: 715247 - RNA, 19 nt, Artificial Sequence
  Description of Artificial Sequence: Synthetic oligonucleotide
  Antisense strand to SEQ ID NO: 715246
uuccaugaccacucccgcu

SEQ ID NO: 715248 - RNA, 19 nt, Artificial Sequence
  Description of Artificial Sequence: Synthetic oligonucleotide
  Sense strand starting at position 3926 of SEQ ID NO: 586402
uugguugaucuugagcuga

SEQ ID NO: 715249 - RNA, 19 nt, Artificial Sequence
  Description of Artificial Sequence: Synthetic oligonucleotide
  Antisense strand to SEQ ID NO: 715248
ucagcucaagaucaaccaa

SEQ ID NO: 715250 - RNA, 19 nt, Artificial Sequence
  Description of Artificial Sequence: Synthetic oligonucleotide
  Sense strand starting at position 3928 of SEQ ID NO: 586402
gguugaucuugagcugacu

SEQ ID NO: 715251 - RNA, 19 nt, Artificial Sequence
  Description of Artificial Sequence: Synthetic oligonucleotide
  Antisense strand to SEQ ID NO: 715250
agucagcucaagaucaacc

SEQ ID NO: 715252 - RNA, 19 nt, Artificial Sequence
  Description of Artificial Sequence: Synthetic oligonucleotide
  Sense strand starting at position 3941 of SEQ ID NO: 586402
cugacuguggaguauuaag

SEQ ID NO: 715253 - RNA, 19 nt, Artificial Sequence
  Description of Artificial Sequence: Synthetic oligonucleotide
  Antisense strand to SEQ ID NO: 715252
cuuaauacuccacagucag

SEQ ID NO: 715254 - RNA, 19 nt, Artificial Sequence
  Description of Artificial Sequence: Synthetic oligonucleotide
  Sense strand starting at position 3949 of SEQ ID NO: 586402
ggaguauuaagguggaaau

SEQ ID NO: 715255 - RNA, 19 nt, Artificial Sequence
  Description of Artificial Sequence: Synthetic oligonucleotide
  Antisense strand to SEQ ID NO: 715254
auuuccaccuuaauacucc

SEQ ID NO: 715256 - RNA, 19 nt, Artificial Sequence
  Description of Artificial Sequence: Synthetic oligonucleotide
  Sense strand starting at position 58 of SEQ ID NO: 586403
ggaacaagcucugacacuu

SEQ ID NO: 715257 - RNA, 19 nt, Artificial Sequence
  Description of Artificial Sequence: Synthetic oligonucleotide
  Antisense strand to SEQ ID NO: 715256
aagugucagagcuuguucc

SEQ ID NO: 715258 - RNA, 19 nt, Artificial Sequence
  Description of Artificial Sequence: Synthetic oligonucleotide
  Sense strand starting at position 168 of SEQ ID NO: 586403
uuuaacuucggaggaguca

SEQ ID NO: 715259 - RNA, 19 nt, Artificial Sequence
  Description of Artificial Sequence: Synthetic oligonucleotide
  Antisense strand to SEQ ID NO: 715258
ugacuccuccgaaguuaaa

SEQ ID NO: 715260 - RNA, 19 nt, Artificial Sequence
  Description of Artificial Sequence: Synthetic oligonucleotide
  Sense strand starting at position 196 of SEQ ID NO: 586403
ugaagaauuugaugaaagc

SEQ ID NO: 715261 - RNA, 19 nt, Artificial Sequence
  Description of Artificial Sequence: Synthetic oligonucleotide
  Antisense strand to SEQ ID NO: 715260
gcuuucaucaaauucuuca

SEQ ID NO: 715262 - RNA, 19 nt, Artificial Sequence
  Description of Artificial Sequence: Synthetic oligonucleotide
  Sense strand starting at position 326 of SEQ ID NO: 586403
augaauggaucucagauug

SEQ ID NO: 715263 - RNA, 19 nt, Artificial Sequence
  Description of Artificial Sequence: Synthetic oligonucleotide
  Antisense strand to SEQ ID NO: 715262
caaucugagauccauucau

SEQ ID NO: 715264 - RNA, 19 nt, Artificial Sequence
  Description of Artificial Sequence: Synthetic oligonucleotide
  Sense strand starting at position 456 of SEQ ID NO: 586403
ucacaaguaucagcuugua

SEQ ID NO: 715265 - RNA, 19 nt, Artificial Sequence
  Description of Artificial Sequence: Synthetic oligonucleotide
  Antisense strand to SEQ ID NO: 715264
uacaagcugauacuuguga

SEQ ID NO: 715266 - RNA, 19 nt, Artificial Sequence
  Description of Artificial Sequence: Synthetic oligonucleotide
  Sense strand starting at position 519 of SEQ ID NO: 586403
agcguucaucuugagguga

SEQ ID NO: 715267 - RNA, 19 nt, Artificial Sequence
  Description of Artificial Sequence: Synthetic oligonucleotide
  Antisense strand to SEQ ID NO: 715266
ucaccucaagaugaacgcu

SEQ ID NO: 715268 - RNA, 19 nt, Artificial Sequence
  Description of Artificial Sequence: Synthetic oligonucleotide
  Sense strand starting at position 764 of SEQ ID NO: 586403
cuugcuuguguccaucaga

SEQ ID NO: 715269 - RNA, 19 nt, Artificial Sequence
  Description of Artificial Sequence: Synthetic oligonucleotide
  Antisense strand to SEQ ID NO: 715268
ucugauggacacaagcaag

SEQ ID NO: 715270 - RNA, 19 nt, Artificial Sequence
  Description of Artificial Sequence: Synthetic oligonucleotide
  Sense strand starting at position 767 of SEQ ID NO: 586403
gcuuguguccaucagagua

SEQ ID NO: 715271 - RNA, 19 nt, Artificial Sequence
  Description of Artificial Sequence: Synthetic oligonucleotide
  Antisense strand to SEQ ID NO: 715270
uacucugauggacacaagc

SEQ ID NO: 715272 - RNA, 19 nt, Artificial Sequence
  Description of Artificial Sequence: Synthetic oligonucleotide
  Sense strand starting at position 772 of SEQ ID NO: 586403
uguccaucagaguaacuga

SEQ ID NO: 715273 - RNA, 19 nt, Artificial Sequence
  Description of Artificial Sequence: Synthetic oligonucleotide
  Antisense strand to SEQ ID NO: 715272
ucaguuacucugauggaca

SEQ ID NO: 715274 - RNA, 19 nt, Artificial Sequence
  Description of Artificial Sequence: Synthetic oligonucleotide
  Sense strand starting at position 1024 of SEQ ID NO: 586403
cugggucuuugaccaaagu

SEQ ID NO: 715275 - RNA, 19 nt, Artificial Sequence
  Description of Artificial Sequence: Synthetic oligonucleotide
  Antisense strand to SEQ ID NO: 715274
acuuuggucaaagacccag

SEQ ID NO: 715276 - RNA, 19 nt, Artificial Sequence
  Description of Artificial Sequence: Synthetic oligonucleotide
  Sense strand starting at position 1260 of SEQ ID NO: 586403
ugaucagagccgugaagug

SEQ ID NO: 715277 - RNA, 19 nt, Artificial Sequence
  Description of Artificial Sequence: Synthetic oligonucleotide
  Antisense strand to SEQ ID NO: 715276
cacuucacggcucugauca

SEQ ID NO: 715278 - RNA, 19 nt, Artificial Sequence
  Description of Artificial Sequence: Synthetic oligonucleotide
  Sense strand starting at position 1509 of SEQ ID NO: 586403
gggacugucugggaaugca

SEQ ID NO: 715279 - RNA, 19 nt, Artificial Sequence
  Description of Artificial Sequence: Synthetic oligonucleotide
  Antisense strand to SEQ ID NO: 715278
ugcauucccagacaguccc

SEQ ID NO: 715280 - RNA, 19 nt, Artificial Sequence
  Description of Artificial Sequence: Synthetic oligonucleotide
  Sense strand starting at position 2087 of SEQ ID NO: 586403
cuagacugguaaucaaauu

SEQ ID NO: 715281 - RNA, 19 nt, Artificial Sequence
  Description of Artificial Sequence: Synthetic oligonucleotide
  Antisense strand to SEQ ID NO: 715280
aauuugauuaccagucuag

SEQ ID NO: 715282 - RNA, 19 nt, Artificial Sequence
  Description of Artificial Sequence: Synthetic oligonucleotide
  Sense strand starting at position 2117 of SEQ ID NO: 586403
ggcgucuugacccgaauga

SEQ ID NO: 715283 - RNA, 19 nt, Artificial Sequence
  Description of Artificial Sequence: Synthetic oligonucleotide
  Antisense strand to SEQ ID NO: 715282
ucauucgggucaagacgcc

SEQ ID NO: 715284 - RNA, 19 nt, Artificial Sequence
  Description of Artificial Sequence: Synthetic oligonucleotide
  Sense strand starting at position 2121 of SEQ ID NO: 586403
ucuugacccgaaugagacu

SEQ ID NO: 715285 - RNA, 19 nt, Artificial Sequence
  Description of Artificial Sequence: Synthetic oligonucleotide
  Antisense strand to SEQ ID NO: 715284
agucucauucgggucaaga

SEQ ID NO: 715286 - RNA, 19 nt, Artificial Sequence
  Description of Artificial Sequence: Synthetic oligonucleotide
  Sense strand starting at position 2148 of SEQ ID NO: 586403
cgccuaguaggugggauua

SEQ ID NO: 715287 - RNA, 19 nt, Artificial Sequence
  Description of Artificial Sequence: Synthetic oligonucleotide
  Antisense strand to SEQ ID NO: 715286
uaaucccaccuacuaggcg

SEQ ID NO: 715288 - RNA, 19 nt, Artificial Sequence
  Description of Artificial Sequence: Synthetic oligonucleotide
  Sense strand starting at position 2360 of SEQ ID NO: 586403
aggcuuagaugaccacaau

SEQ ID NO: 715289 - RNA, 19 nt, Artificial Sequence
  Description of Artificial Sequence: Synthetic oligonucleotide
  Antisense strand to SEQ ID NO: 715288
auuguggucaucuaagccu

SEQ ID NO: 715290 - RNA, 19 nt, Artificial Sequence
  Description of Artificial Sequence: Synthetic oligonucleotide
  Sense strand starting at position 2446 of SEQ ID NO: 586403
ggcacauuaguugagucuu

SEQ ID NO: 715291 - RNA, 19 nt, Artificial Sequence
  Description of Artificial Sequence: Synthetic oligonucleotide
  Antisense strand to SEQ ID NO: 715290
aagacucaacuaaugugcc

SEQ ID NO: 715292 - RNA, 19 nt, Artificial Sequence
  Description of Artificial Sequence: Synthetic oligonucleotide
  Sense strand starting at position 2452 of SEQ ID NO: 586403
uuaguugagucuucaggga

SEQ ID NO: 715293 - RNA, 19 nt, Artificial Sequence
  Description of Artificial Sequence: Synthetic oligonucleotide
  Antisense strand to SEQ ID NO: 715292
ucccugaagacucaacuaa

SEQ ID NO: 715294 - RNA, 19 nt, Artificial Sequence
  Description of Artificial Sequence: Synthetic oligonucleotide
  Sense strand starting at position 2473 of SEQ ID NO: 586403
gcuggugugaccuggguuu

SEQ ID NO: 715295 - RNA, 19 nt, Artificial Sequence
  Description of Artificial Sequence: Synthetic oligonucleotide
  Antisense strand to SEQ ID NO: 715294
aaacccaggucacaccagc

SEQ ID NO: 715296 - RNA, 19 nt, Artificial Sequence
  Description of Artificial Sequence: Synthetic oligonucleotide
  Sense strand starting at position 2596 of SEQ ID NO: 586403
ggauuugucuugggaauca

SEQ ID NO: 715297 - RNA, 19 nt, Artificial Sequence
  Description of Artificial Sequence: Synthetic oligonucleotide
  Antisense strand to SEQ ID NO: 715296
ugauucccaagacaaaucc

SEQ ID NO: 715298 - RNA, 19 nt, Artificial Sequence
  Description of Artificial Sequence: Synthetic oligonucleotide
  Sense strand starting at position 2691 of SEQ ID NO: 586403
agacaugaauaucugguua

SEQ ID NO: 715299 - RNA, 19 nt, Artificial Sequence
  Description of Artificial Sequence: Synthetic oligonucleotide
  Antisense strand to SEQ ID NO: 715298
uaaccagauauucaugucu

SEQ ID NO: 715300 - RNA, 19 nt, Artificial Sequence
  Description of Artificial Sequence: Synthetic oligonucleotide
  Sense strand starting at position 2693 of SEQ ID NO: 586403
acaugaauaucugguuaag

SEQ ID NO: 715301 - RNA, 19 nt, Artificial Sequence
  Description of Artificial Sequence: Synthetic oligonucleotide
  Antisense strand to SEQ ID NO: 715300
cuuaaccagauauucaugu

SEQ ID NO: 715302 - RNA, 19 nt, Artificial Sequence
  Description of Artificial Sequence: Synthetic oligonucleotide
  Sense strand starting at position 2695 of SEQ ID NO: 586403
augaauaucugguuaaggu

SEQ ID NO: 715303 - RNA, 19 nt, Artificial Sequence
  Description of Artificial Sequence: Synthetic oligonucleotide
  Antisense strand to SEQ ID NO: 715302
accuuaaccagauauucau

SEQ ID NO: 715304 - RNA, 19 nt, Artificial Sequence
  Description of Artificial Sequence: Synthetic oligonucleotide
  Sense strand starting at position 2696 of SEQ ID NO: 586403
ugaauaucugguuaagguu

SEQ ID NO: 715305 - RNA, 19 nt, Artificial Sequence
  Description of Artificial Sequence: Synthetic oligonucleotide
  Antisense strand to SEQ ID NO: 715304
aaccuuaaccagauauuca

SEQ ID NO: 715306 - RNA, 19 nt, Artificial Sequence
  Description of Artificial Sequence: Synthetic oligonucleotide
  Sense strand starting at position 2788 of SEQ ID NO: 586403
ugcggacuuccuuauauuc

SEQ ID NO: 715307 - RNA, 19 nt, Artificial Sequence
  Description of Artificial Sequence: Synthetic oligonucleotide
  Antisense strand to SEQ ID NO: 715306
gaauauaaggaaguccgca

SEQ ID NO: 715308 - RNA, 19 nt, Artificial Sequence
  Description of Artificial Sequence: Synthetic oligonucleotide
  Sense strand starting at position 3124 of SEQ ID NO: 586403
ugccgagacuuucuuauau

SEQ ID NO: 715309 - RNA, 19 nt, Artificial Sequence
  Description of Artificial Sequence: Synthetic oligonucleotide
  Antisense strand to SEQ ID NO: 715308
auauaagaaagucucggca

SEQ ID NO: 715310 - RNA, 19 nt, Artificial Sequence
  Description of Artificial Sequence: Synthetic oligonucleotide
  Sense strand starting at position 3276 of SEQ ID NO: 586403
uugcacaaaugauugaaau

SEQ ID NO: 715311 - RNA, 19 nt, Artificial Sequence
  Description of Artificial Sequence: Synthetic oligonucleotide
  Antisense strand to SEQ ID NO: 715310
auuucaaucauuugugcaa

SEQ ID NO: 715312 - RNA, 19 nt, Artificial Sequence
  Description of Artificial Sequence: Synthetic oligonucleotide
  Sense strand starting at position 3277 of SEQ ID NO: 586403
ugcacaaaugauugaaaug

SEQ ID NO: 715313 - RNA, 19 nt, Artificial Sequence
  Description of Artificial Sequence: Synthetic oligonucleotide
  Antisense strand to SEQ ID NO: 715312
cauuucaaucauuugugca

SEQ ID NO: 715314 - RNA, 19 nt, Artificial Sequence
  Description of Artificial Sequence: Synthetic oligonucleotide
  Sense strand starting at position 3411 of SEQ ID NO: 586403
ccaucccaucuggguaaau

SEQ ID NO: 715315 - RNA, 19 nt, Artificial Sequence
  Description of Artificial Sequence: Synthetic oligonucleotide
  Antisense strand to SEQ ID NO: 715314
auuuacccagaugggaugg

SEQ ID NO: 715316 - RNA, 19 nt, Artificial Sequence
  Description of Artificial Sequence: Synthetic oligonucleotide
  Sense strand starting at position 3463 of SEQ ID NO: 586403
acauuucgguacugugaau

SEQ ID NO: 715317 - RNA, 19 nt, Artificial Sequence
  Description of Artificial Sequence: Synthetic oligonucleotide
  Antisense strand to SEQ ID NO: 715316
auucacaguaccgaaaugu

SEQ ID NO: 715318 - RNA, 19 nt, Artificial Sequence
  Description of Artificial Sequence: Synthetic oligonucleotide
  Sense strand starting at position 3525 of SEQ ID NO: 586403
auguaaugcuucucagguu

SEQ ID NO: 715319 - RNA, 19 nt, Artificial Sequence
  Description of Artificial Sequence: Synthetic oligonucleotide
  Antisense strand to SEQ ID NO: 715318
aaccugagaagcauuacau

SEQ ID NO: 715320 - RNA, 19 nt, Artificial Sequence
  Description of Artificial Sequence: Synthetic oligonucleotide
  Sense strand starting at position 3559 of SEQ ID NO: 586403
uugcuuucuuaugcagaua

SEQ ID NO: 715321 - RNA, 19 nt, Artificial Sequence
  Description of Artificial Sequence: Synthetic oligonucleotide
  Antisense strand to SEQ ID NO: 715320
uaucugcauaagaaagcaa

SEQ ID NO: 715322 - RNA, 19 nt, Artificial Sequence
  Description of Artificial Sequence: Synthetic oligonucleotide
  Sense strand starting at position 3562 of SEQ ID NO: 586403
cuuucuuaugcagauacgu

SEQ ID NO: 715323 - RNA, 19 nt, Artificial Sequence
  Description of Artificial Sequence: Synthetic oligonucleotide
  Antisense strand to SEQ ID NO: 715322
acguaucugcauaagaaag

SEQ ID NO: 715324 - RNA, 19 nt, Artificial Sequence
  Description of Artificial Sequence: Synthetic oligonucleotide
  Sense strand starting at position 3570 of SEQ ID NO: 586403
ugcagauacguauaugaca

SEQ ID NO: 715325 - RNA, 19 nt, Artificial Sequence
  Description of Artificial Sequence: Synthetic oligonucleotide
  Antisense strand to SEQ ID NO: 715324
ugucauauacguaucugca

SEQ ID NO: 715326 - RNA, 19 nt, Artificial Sequence
  Description of Artificial Sequence: Synthetic oligonucleotide
  Sense strand starting at position 3601 of SEQ ID NO: 586403
caguucuuggcucagacua

SEQ ID NO: 715327 - RNA, 19 nt, Artificial Sequence
  Description of Artificial Sequence: Synthetic oligonucleotide
  Antisense strand to SEQ ID NO: 715326
uagucugagccaagaacug

SEQ ID NO: 715328 - RNA, 19 nt, Artificial Sequence
  Description of Artificial Sequence: Synthetic oligonucleotide
  Sense strand starting at position 3609 of SEQ ID NO: 586403
ggcucagacuauccuuauu

SEQ ID NO: 715329 - RNA, 19 nt, Artificial Sequence
  Description of Artificial Sequence: Synthetic oligonucleotide
  Antisense strand to SEQ ID NO: 715328
aauaaggauagucugagcc

SEQ ID NO: 715330 - RNA, 19 nt, Artificial Sequence
  Description of Artificial Sequence: Synthetic oligonucleotide
  Sense strand starting at position 3646 of SEQ ID NO: 586403
ucauguacauugguuagga

SEQ ID NO: 715331 - RNA, 19 nt, Artificial Sequence
  Description of Artificial Sequence: Synthetic oligonucleotide
  Antisense strand to SEQ ID NO: 715330
uccuaaccaauguacauga

SEQ ID NO: 715332 - RNA, 19 nt, Artificial Sequence
  Description of Artificial Sequence: Synthetic oligonucleotide
  Sense strand starting at position 3647 of SEQ ID NO: 586403
cauguacauugguuaggaa

SEQ ID NO: 715333 - RNA, 19 nt, Artificial Sequence
  Description of Artificial Sequence: Synthetic oligonucleotide
  Antisense strand to SEQ ID NO: 715332
uuccuaaccaauguacaug

SEQ ID NO: 715334 - RNA, 19 nt, Artificial Sequence
  Description of Artificial Sequence: Synthetic oligonucleotide
  Sense strand starting at position 3968 of SEQ ID NO: 586403
gggucagagcuuugugauu

SEQ ID NO: 715335 - RNA, 19 nt, Artificial Sequence
  Description of Artificial Sequence: Synthetic oligonucleotide
  Antisense strand to SEQ ID NO: 715334
aaucacaaagcucugaccc

SEQ ID NO: 715336 - RNA, 19 nt, Artificial Sequence
  Description of Artificial Sequence: Synthetic oligonucleotide
  Sense strand starting at position 44 of SEQ ID NO: 586404
cguuucucuuucugacagu

SEQ ID NO: 715337 - RNA, 19 nt, Artificial Sequence
  Description of Artificial Sequence: Synthetic oligonucleotide
  Antisense strand to SEQ ID NO: 715336
acugucagaaagagaaacg

SEQ ID NO: 715338 - RNA, 19 nt, Artificial Sequence
  Description of Artificial Sequence: Synthetic oligonucleotide
  Sense strand starting at position 200 of SEQ ID NO: 586404
guugcuggaugggugaaau

SEQ ID NO: 715339 - RNA, 19 nt, Artificial Sequence
  Description of Artificial Sequence: Synthetic oligonucleotide
  Antisense strand to SEQ ID NO: 715338
auuucacccauccagcaac

SEQ ID NO: 715340 - RNA, 19 nt, Artificial Sequence
  Description of Artificial Sequence: Synthetic oligonucleotide
  Sense strand starting at position 210 of SEQ ID NO: 586404
gggugaaauuaauauuugu

SEQ ID NO: 715341 - RNA, 19 nt, Artificial Sequence
  Description of Artificial Sequence: Synthetic oligonucleotide
  Antisense strand to SEQ ID NO: 715340
acaaauauuaauuucaccc

SEQ ID NO: 715342 - RNA, 19 nt, Artificial Sequence
  Description of Artificial Sequence: Synthetic oligonucleotide
  Sense strand starting at position 264 of SEQ ID NO: 586404
ucagguaauaggugucaca

SEQ ID NO: 715343 - RNA, 19 nt, Artificial Sequence
  Description of Artificial Sequence: Synthetic oligonucleotide
  Antisense strand to SEQ ID NO: 715342
ugugacaccuauuaccuga

SEQ ID NO: 715344 - RNA, 19 nt, Artificial Sequence
  Description of Artificial Sequence: Synthetic oligonucleotide
  Sense strand starting at position 267 of SEQ ID NO: 586404
gguaauaggugucacaauc

SEQ ID NO: 715345 - RNA, 19 nt, Artificial Sequence
  Description of Artificial Sequence: Synthetic oligonucleotide
  Antisense strand to SEQ ID NO: 715344
gauugugacaccuauuacc

SEQ ID NO: 715346 - RNA, 19 nt, Artificial Sequence
  Description of Artificial Sequence: Synthetic oligonucleotide
  Sense strand starting at position 508 of SEQ ID NO: 586404
aauccuucccuuugggagu

SEQ ID NO: 715347 - RNA, 19 nt, Artificial Sequence
  Description of Artificial Sequence: Synthetic oligonucleotide
  Antisense strand to SEQ ID NO: 715346
acucccaaagggaaggauu

SEQ ID NO: 715348 - RNA, 19 nt, Artificial Sequence
  Description of Artificial Sequence: Synthetic oligonucleotide
  Sense strand starting at position 521 of SEQ ID NO: 586404
gggagucccucauagccua

SEQ ID NO: 715349 - RNA, 19 nt, Artificial Sequence
  Description of Artificial Sequence: Synthetic oligonucleotide
  Antisense strand to SEQ ID NO: 715348
uaggcuaugagggacuccc

SEQ ID NO: 715350 - RNA, 19 nt, Artificial Sequence
  Description of Artificial Sequence: Synthetic oligonucleotide
  Sense strand starting at position 617 of SEQ ID NO: 586404
gagaguuucuagggcucuu

SEQ ID NO: 715351 - RNA, 19 nt, Artificial Sequence
  Description of Artificial Sequence: Synthetic oligonucleotide
  Antisense strand to SEQ ID NO: 715350
aagagcccuagaaacucuc

SEQ ID NO: 715352 - RNA, 19 nt, Artificial Sequence
  Description of Artificial Sequence: Synthetic oligonucleotide
  Sense strand starting at position 666 of SEQ ID NO: 586404
gcgauccauggccaaagaa

SEQ ID NO: 715353 - RNA, 19 nt, Artificial Sequence
  Description of Artificial Sequence: Synthetic oligonucleotide
  Antisense strand to SEQ ID NO: 715352
uucuuuggccauggaucgc

SEQ ID NO: 715354 - RNA, 19 nt, Artificial Sequence
  Description of Artificial Sequence: Synthetic oligonucleotide
  Sense strand starting at position 708 of SEQ ID NO: 586404
ggagauagacuggguuagu

SEQ ID NO: 715355 - RNA, 19 nt, Artificial Sequence
  Description of Artificial Sequence: Synthetic oligonucleotide
  Antisense strand to SEQ ID NO: 715354
acuaacccagucuaucucc

SEQ ID NO: 715356 - RNA, 19 nt, Artificial Sequence
  Description of Artificial Sequence: Synthetic oligonucleotide
  Sense strand starting at position 709 of SEQ ID NO: 586404
gagauagacuggguuaguu

SEQ ID NO: 715357 - RNA, 19 nt, Artificial Sequence
  Description of Artificial Sequence: Synthetic oligonucleotide
  Antisense strand to SEQ ID NO: 715356
aacuaacccagucuaucuc

SEQ ID NO: 715358 - RNA, 19 nt, Artificial Sequence
  Description of Artificial Sequence: Synthetic oligonucleotide
  Sense strand starting at position 770 of SEQ ID NO: 586404
cuguguaggucaguuucua

SEQ ID NO: 715359 - RNA, 19 nt, Artificial Sequence
  Description of Artificial Sequence: Synthetic oligonucleotide
  Antisense strand to SEQ ID NO: 715358
uagaaacugaccuacacag

SEQ ID NO: 715360 - RNA, 19 nt, Artificial Sequence
  Description of Artificial Sequence: Synthetic oligonucleotide
  Sense strand starting at position 792 of SEQ ID NO: 586404
gcuccuaggucucaaggga

SEQ ID NO: 715361 - RNA, 19 nt, Artificial Sequence
  Description of Artificial Sequence: Synthetic oligonucleotide
  Antisense strand to SEQ ID NO: 715360
ucccuugagaccuaggagc

SEQ ID NO: 715362 - RNA, 19 nt, Artificial Sequence
  Description of Artificial Sequence: Synthetic oligonucleotide
  Sense strand starting at position 985 of SEQ ID NO: 586404
ggaggaucaaggugugauc

SEQ ID NO: 715363 - RNA, 19 nt, Artificial Sequence
  Description of Artificial Sequence: Synthetic oligonucleotide
  Antisense strand to SEQ ID NO: 715362
gaucacaccuugauccucc

SEQ ID NO: 715364 - RNA, 19 nt, Artificial Sequence
  Description of Artificial Sequence: Synthetic oligonucleotide
  Sense strand starting at position 988 of SEQ ID NO: 586404
ggaucaaggugugaucgcu

SEQ ID NO: 715365 - RNA, 19 nt, Artificial Sequence
  Description of Artificial Sequence: Synthetic oligonucleotide
  Antisense strand to SEQ ID NO: 715364
agcgaucacaccuugaucc

SEQ ID NO: 715366 - RNA, 19 nt, Artificial Sequence
  Description of Artificial Sequence: Synthetic oligonucleotide
  Sense strand starting at position 994 of SEQ ID NO: 586404
aggugugaucgcuaaggaa

SEQ ID NO: 715367 - RNA, 19 nt, Artificial Sequence
  Description of Artificial Sequence: Synthetic oligonucleotide
  Antisense strand to SEQ ID NO: 715366
uuccuuagcgaucacaccu

SEQ ID NO: 715368 - RNA, 19 nt, Artificial Sequence
  Description of Artificial Sequence: Synthetic oligonucleotide
  Sense strand starting at position 1064 of SEQ ID NO: 586404
gcuguugcuucuccagaaa

SEQ ID NO: 715369 - RNA, 19 nt, Artificial Sequence
  Description of Artificial Sequence: Synthetic oligonucleotide
  Antisense strand to SEQ ID NO: 715368
uuucuggagaagcaacagc

SEQ ID NO: 715370 - RNA, 19 nt, Artificial Sequence
  Description of Artificial Sequence: Synthetic oligonucleotide
  Sense strand starting at position 1067 of SEQ ID NO: 586404
guugcuucuccagaaaccu

SEQ ID NO: 715371 - RNA, 19 nt, Artificial Sequence
  Description of Artificial Sequence: Synthetic oligonucleotide
  Antisense strand to SEQ ID NO: 715370
agguuucuggagaagcaac

SEQ ID NO: 715372 - RNA, 19 nt, Artificial Sequence
  Description of Artificial Sequence: Synthetic oligonucleotide
  Sense strand starting at position 1177 of SEQ ID NO: 586404
ggcguauguaaucagcagu

SEQ ID NO: 715373 - RNA, 19 nt, Artificial Sequence
  Description of Artificial Sequence: Synthetic oligonucleotide
  Antisense strand to SEQ ID NO: 715372
acugcugauuacauacgcc

SEQ ID NO: 715374 - RNA, 19 nt, Artificial Sequence
  Description of Artificial Sequence: Synthetic oligonucleotide
  Sense strand starting at position 1180 of SEQ ID NO: 586404
guauguaaucagcagugag

SEQ ID NO: 715375 - RNA, 19 nt, Artificial Sequence
  Description of Artificial Sequence: Synthetic oligonucleotide
  Antisense strand to SEQ ID NO: 715374
cucacugcugauuacauac

SEQ ID NO: 715376 - RNA, 19 nt, Artificial Sequence
  Description of Artificial Sequence: Synthetic oligonucleotide
  Sense strand starting at position 1183 of SEQ ID NO: 586404
uguaaucagcagugagagu

SEQ ID NO: 715377 - RNA, 19 nt, Artificial Sequence
  Description of Artificial Sequence: Synthetic oligonucleotide
  Antisense strand to SEQ ID NO: 715376
acucucacugcugauuaca

SEQ ID NO: 715378 - RNA, 19 nt, Artificial Sequence
  Description of Artificial Sequence: Synthetic oligonucleotide
  Sense strand starting at position 1184 of SEQ ID NO: 586404
guaaucagcagugagaguu

SEQ ID NO: 715379 - RNA, 19 nt, Artificial Sequence
  Description of Artificial Sequence: Synthetic oligonucleotide
  Antisense strand to SEQ ID NO: 715378
aacucucacugcugauuac

SEQ ID NO: 715380 - RNA, 19 nt, Artificial Sequence
  Description of Artificial Sequence: Synthetic oligonucleotide
  Sense strand starting at position 1219 of SEQ ID NO: 586404
gggaaugucccgggucgua

SEQ ID NO: 715381 - RNA, 19 nt, Artificial Sequence
  Description of Artificial Sequence: Synthetic oligonucleotide
  Antisense strand to SEQ ID NO: 715380
uacgacccgggacauuccc

SEQ ID NO: 715382 - RNA, 19 nt, Artificial Sequence
  Description of Artificial Sequence: Synthetic oligonucleotide
  Sense strand starting at position 1327 of SEQ ID NO: 586404
guccgaaguguuugggacu

SEQ ID NO: 715383 - RNA, 19 nt, Artificial Sequence
  Description of Artificial Sequence: Synthetic oligonucleotide
  Antisense strand to SEQ ID NO: 715382
agucccaaacacuucggac

SEQ ID NO: 715384 - RNA, 19 nt, Artificial Sequence
  Description of Artificial Sequence: Synthetic oligonucleotide
  Sense strand starting at position 1330 of SEQ ID NO: 586404
cgaaguguuugggacugca

SEQ ID NO: 715385 - RNA, 19 nt, Artificial Sequence
  Description of Artificial Sequence: Synthetic oligonucleotide
  Antisense strand to SEQ ID NO: 715384
ugcagucccaaacacuucg

SEQ ID NO: 715386 - RNA, 19 nt, Artificial Sequence
  Description of Artificial Sequence: Synthetic oligonucleotide
  Sense strand starting at position 2105 of SEQ ID NO: 586404
agcucacgcuacugaauaa

SEQ ID NO: 715387 - RNA, 19 nt, Artificial Sequence
  Description of Artificial Sequence: Synthetic oligonucleotide
  Antisense strand to SEQ ID NO: 715386
uuauucaguagcgugagcu

SEQ ID NO: 715388 - RNA, 19 nt, Artificial Sequence
  Description of Artificial Sequence: Synthetic oligonucleotide
  Sense strand starting at position 2510 of SEQ ID NO: 586404
aguagaagcuuuggagaau

SEQ ID NO: 715389 - RNA, 19 nt, Artificial Sequence
  Description of Artificial Sequence: Synthetic oligonucleotide
  Antisense strand to SEQ ID NO: 715388
auucuccaaagcuucuacu

SEQ ID NO: 715390 - RNA, 19 nt, Artificial Sequence
  Description of Artificial Sequence: Synthetic oligonucleotide
  Sense strand starting at position 2511 of SEQ ID NO: 586404
guagaagcuuuggagaauu

SEQ ID NO: 715391 - RNA, 19 nt, Artificial Sequence
  Description of Artificial Sequence: Synthetic oligonucleotide
  Antisense strand to SEQ ID NO: 715390
aauucuccaaagcuucuac

SEQ ID NO: 715392 - RNA, 19 nt, Artificial Sequence
  Description of Artificial Sequence: Synthetic oligonucleotide
  Sense strand starting at position 3083 of SEQ ID NO: 586404
ccggcuagaucuccaaauc

SEQ ID NO: 715393 - RNA, 19 nt, Artificial Sequence
  Description of Artificial Sequence: Synthetic oligonucleotide
  Antisense strand to SEQ ID NO: 715392
gauuuggagaucuagccgg

SEQ ID NO: 715394 - RNA, 19 nt, Artificial Sequence
  Description of Artificial Sequence: Synthetic oligonucleotide
  Sense strand starting at position 3351 of SEQ ID NO: 586404
aacuuaacaguauggguua

SEQ ID NO: 715395 - RNA, 19 nt, Artificial Sequence
  Description of Artificial Sequence: Synthetic oligonucleotide
  Antisense strand to SEQ ID NO: 715394
uaacccauacuguuaaguu

SEQ ID NO: 715396 - RNA, 19 nt, Artificial Sequence
  Description of Artificial Sequence: Synthetic oligonucleotide
  Sense strand starting at position 3358 of SEQ ID NO: 586404
caguauggguuacuggaua

SEQ ID NO: 715397 - RNA, 19 nt, Artificial Sequence
  Description of Artificial Sequence: Synthetic oligonucleotide
  Antisense strand to SEQ ID NO: 715396
uauccaguaacccauacug

SEQ ID NO: 715398 - RNA, 19 nt, Artificial Sequence
  Description of Artificial Sequence: Synthetic oligonucleotide
  Sense strand starting at position 3825 of SEQ ID NO: 586404
guuggaguccaggaugcuu

SEQ ID NO: 715399 - RNA, 19 nt, Artificial Sequence
  Description of Artificial Sequence: Synthetic oligonucleotide
  Antisense strand to SEQ ID NO: 715398
aagcauccuggacuccaac

SEQ ID NO: 715400 - RNA, 19 nt, Artificial Sequence
  Description of Artificial Sequence: Synthetic oligonucleotide
  Sense strand starting at position 3916 of SEQ ID NO: 586404
uuaucuuccugcugcaaga

SEQ ID NO: 715401 - RNA, 19 nt, Artificial Sequence
  Description of Artificial Sequence: Synthetic oligonucleotide
  Antisense strand to SEQ ID NO: 715400
ucuugcagcaggaagauaa

SEQ ID NO: 715402 - RNA, 19 nt, Artificial Sequence
  Description of Artificial Sequence: Synthetic oligonucleotide
  Sense strand starting at position 97 of SEQ ID NO: 586405
uguguaagggaauguguau

SEQ ID NO: 715403 - RNA, 19 nt, Artificial Sequence
  Description of Artificial Sequence: Synthetic oligonucleotide
  Antisense strand to SEQ ID NO: 715402
auacacauucccuuacaca

SEQ ID NO: 715404 - RNA, 19 nt, Artificial Sequence
  Description of Artificial Sequence: Synthetic oligonucleotide
  Sense strand starting at position 103 of SEQ ID NO: 586405
agggaauguguaugagaug

SEQ ID NO: 715405 - RNA, 19 nt, Artificial Sequence
  Description of Artificial Sequence: Synthetic oligonucleotide
  Antisense strand to SEQ ID NO: 715404
caucucauacacauucccu

SEQ ID NO: 715406 - RNA, 19 nt, Artificial Sequence
  Description of Artificial Sequence: Synthetic oligonucleotide
  Sense strand starting at position 176 of SEQ ID NO: 586405
gcagaagaugcacaucagu

SEQ ID NO: 715407 - RNA, 19 nt, Artificial Sequence
  Description of Artificial Sequence: Synthetic oligonucleotide
  Antisense strand to SEQ ID NO: 715406
acugaugugcaucuucugc

SEQ ID NO: 715408 - RNA, 19 nt, Artificial Sequence
  Description of Artificial Sequence: Synthetic oligonucleotide
  Sense strand starting at position 288 of SEQ ID NO: 586405
gguacuucugcagaaacac

SEQ ID NO: 715409 - RNA, 19 nt, Artificial Sequence
  Description of Artificial Sequence: Synthetic oligonucleotide
  Antisense strand to SEQ ID NO: 715408
guguuucugcagaaguacc

SEQ ID NO: 715410 - RNA, 19 nt, Artificial Sequence
  Description of Artificial Sequence: Synthetic oligonucleotide
  Sense strand starting at position 569 of SEQ ID NO: 586405
gcacccugaauggaguaau

SEQ ID NO: 715411 - RNA, 19 nt, Artificial Sequence
  Description of Artificial Sequence: Synthetic oligonucleotide
  Antisense strand to SEQ ID NO: 715410
auuacuccauucagggugc

SEQ ID NO: 715412 - RNA, 19 nt, Artificial Sequence
  Description of Artificial Sequence: Synthetic oligonucleotide
  Sense strand starting at position 644 of SEQ ID NO: 586405
cgcuaaucuuccuuugaga

SEQ ID NO: 715413 - RNA, 19 nt, Artificial Sequence
  Description of Artificial Sequence: Synthetic oligonucleotide
  Antisense strand to SEQ ID NO: 715412
ucucaaaggaagauuagcg

SEQ ID NO: 715414 - RNA, 19 nt, Artificial Sequence
  Description of Artificial Sequence: Synthetic oligonucleotide
  Sense strand starting at position 749 of SEQ ID NO: 586405
gcuucuguggucuacuaac

SEQ ID NO: 715415 - RNA, 19 nt, Artificial Sequence
  Description of Artificial Sequence: Synthetic oligonucleotide
  Antisense strand to SEQ ID NO: 715414
guuaguagaccacagaagc

SEQ ID NO: 715416 - RNA, 19 nt, Artificial Sequence
  Description of Artificial Sequence: Synthetic oligonucleotide
  Sense strand starting at position 821 of SEQ ID NO: 586405
cuccuagagccucagucaa

SEQ ID NO: 715417 - RNA, 19 nt, Artificial Sequence
  Description of Artificial Sequence: Synthetic oligonucleotide
  Antisense strand to SEQ ID NO: 715416
uugacugaggcucuaggag

SEQ ID NO: 715418 - RNA, 19 nt, Artificial Sequence
  Description of Artificial Sequence: Synthetic oligonucleotide
  Sense strand starting at position 1067 of SEQ ID NO: 586405
aggagcacgcaauagaauu

SEQ ID NO: 715419 - RNA, 19 nt, Artificial Sequence
  Description of Artificial Sequence: Synthetic oligonucleotide
  Antisense strand to SEQ ID NO: 715418
aauucuauugcgugcuccu

SEQ ID NO: 715420 - RNA, 19 nt, Artificial Sequence
  Description of Artificial Sequence: Synthetic oligonucleotide
  Sense strand starting at position 1078 of SEQ ID NO: 586405
auagaauuugguugcacgu

SEQ ID NO: 715421 - RNA, 19 nt, Artificial Sequence
  Description of Artificial Sequence: Synthetic oligonucleotide
  Antisense strand to SEQ ID NO: 715420
acgugcaaccaaauucuau

SEQ ID NO: 715422 - RNA, 19 nt, Artificial Sequence
  Description of Artificial Sequence: Synthetic oligonucleotide
  Sense strand starting at position 1144 of SEQ ID NO: 586405
aaggcuuaacuguggucau

SEQ ID NO: 715423 - RNA, 19 nt, Artificial Sequence
  Description of Artificial Sequence: Synthetic oligonucleotide
  Antisense strand to SEQ ID NO: 715422
augaccacaguuaagccuu

SEQ ID NO: 715424 - RNA, 19 nt, Artificial Sequence
  Description of Artificial Sequence: Synthetic oligonucleotide
  Sense strand starting at position 1147 of SEQ ID NO: 586405
gcuuaacuguggucaugga

SEQ ID NO: 715425 - RNA, 19 nt, Artificial Sequence
  Description of Artificial Sequence: Synthetic oligonucleotide
  Antisense strand to SEQ ID NO: 715424
uccaugaccacaguuaagc

SEQ ID NO: 715426 - RNA, 19 nt, Artificial Sequence
  Description of Artificial Sequence: Synthetic oligonucleotide
  Sense strand starting at position 1248 of SEQ ID NO: 586405
gagugaugccacuggaguc

SEQ ID NO: 715427 - RNA, 19 nt, Artificial Sequence
  Description of Artificial Sequence: Synthetic oligonucleotide
  Antisense strand to SEQ ID NO: 715426
gacuccaguggcaucacuc

SEQ ID NO: 715428 - RNA, 19 nt, Artificial Sequence
  Description of Artificial Sequence: Synthetic oligonucleotide
  Sense strand starting at position 1477 of SEQ ID NO: 586405
ccacucuggccuugaggaa

SEQ ID NO: 715429 - RNA, 19 nt, Artificial Sequence
  Description of Artificial Sequence: Synthetic oligonucleotide
  Antisense strand to SEQ ID NO: 715428
uuccucaaggccagagugg

SEQ ID NO: 715430 - RNA, 19 nt, Artificial Sequence
  Description of Artificial Sequence: Synthetic oligonucleotide
  Sense strand starting at position 2157 of SEQ ID NO: 586405
gggucuuggccgggaggau

SEQ ID NO: 715431 - RNA, 19 nt, Artificial Sequence
  Description of Artificial Sequence: Synthetic oligonucleotide
  Antisense strand to SEQ ID NO: 715430
auccucccggccaagaccc

SEQ ID NO: 715432 - RNA, 19 nt, Artificial Sequence
  Description of Artificial Sequence: Synthetic oligonucleotide
  Sense strand starting at position 2209 of SEQ ID NO: 586405
ggaagaggcugucuguaaa

SEQ ID NO: 715433 - RNA, 19 nt, Artificial Sequence
  Description of Artificial Sequence: Synthetic oligonucleotide
  Antisense strand to SEQ ID NO: 715432
uuuacagacagccucuucc

SEQ ID NO: 715434 - RNA, 19 nt, Artificial Sequence
  Description of Artificial Sequence: Synthetic oligonucleotide
  Sense strand starting at position 2358 of SEQ ID NO: 586405
cggcuuuaacucuaggaac

SEQ ID NO: 715435 - RNA, 19 nt, Artificial Sequence
  Description of Artificial Sequence: Synthetic oligonucleotide
  Antisense strand to SEQ ID NO: 715434
guuccuagaguuaaagccg

SEQ ID NO: 715436 - RNA, 19 nt, Artificial Sequence
  Description of Artificial Sequence: Synthetic oligonucleotide
  Sense strand starting at position 2360 of SEQ ID NO: 586405
gcuuuaacucuaggaacua

SEQ ID NO: 715437 - RNA, 19 nt, Artificial Sequence
  Description of Artificial Sequence: Synthetic oligonucleotide
  Antisense strand to SEQ ID NO: 715436
uaguuccuagaguuaaagc

SEQ ID NO: 715438 - RNA, 19 nt, Artificial Sequence
  Description of Artificial Sequence: Synthetic oligonucleotide
  Sense strand starting at position 2392 of SEQ ID NO: 586405
ccuacucagcuuggaacua

SEQ ID NO: 715439 - RNA, 19 nt, Artificial Sequence
  Description of Artificial Sequence: Synthetic oligonucleotide
  Antisense strand to SEQ ID NO: 715438
uaguuccaagcugaguagg

SEQ ID NO: 715440 - RNA, 19 nt, Artificial Sequence
  Description of Artificial Sequence: Synthetic oligonucleotide
  Sense strand starting at position 2760 of SEQ ID NO: 586405
gagagaaccucccugcagu

SEQ ID NO: 715441 - RNA, 19 nt, Artificial Sequence
  Description of Artificial Sequence: Synthetic oligonucleotide
  Antisense strand to SEQ ID NO: 715440
acugcagggagguucucuc

SEQ ID NO: 715442 - RNA, 19 nt, Artificial Sequence
  Description of Artificial Sequence: Synthetic oligonucleotide
  Sense strand starting at position 3066 of SEQ ID NO: 586405
aagcaaaugggcugaucaa

SEQ ID NO: 715443 - RNA, 19 nt, Artificial Sequence
  Description of Artificial Sequence: Synthetic oligonucleotide
  Antisense strand to SEQ ID NO: 715442
uugaucagcccauuugcuu

SEQ ID NO: 715444 - RNA, 19 nt, Artificial Sequence
  Description of Artificial Sequence: Synthetic oligonucleotide
  Sense strand starting at position 3176 of SEQ ID NO: 586405
guaagagucaccugggaga

SEQ ID NO: 715445 - RNA, 19 nt, Artificial Sequence
  Description of Artificial Sequence: Synthetic oligonucleotide
  Antisense strand to SEQ ID NO: 715444
ucucccaggugacucuuac

SEQ ID NO: 715446 - RNA, 19 nt, Artificial Sequence
  Description of Artificial Sequence: Synthetic oligonucleotide
  Sense strand starting at position 3219 of SEQ ID NO: 586405
cugaaugagugauagaaag

SEQ ID NO: 715447 - RNA, 19 nt, Artificial Sequence
  Description of Artificial Sequence: Synthetic oligonucleotide
  Antisense strand to SEQ ID NO: 715446
cuuucuaucacucauucag

SEQ ID NO: 715448 - RNA, 19 nt, Artificial Sequence
  Description of Artificial Sequence: Synthetic oligonucleotide
  Sense strand starting at position 3328 of SEQ ID NO: 586405
acugcauuuggacgucauu

SEQ ID NO: 715449 - RNA, 19 nt, Artificial Sequence
  Description of Artificial Sequence: Synthetic oligonucleotide
  Antisense strand to SEQ ID NO: 715448
aaugacguccaaaugcagu

SEQ ID NO: 715450 - RNA, 19 nt, Artificial Sequence
  Description of Artificial Sequence: Synthetic oligonucleotide
  Sense strand starting at position 3334 of SEQ ID NO: 586405
uuuggacgucauuaauaau

SEQ ID NO: 715451 - RNA, 19 nt, Artificial Sequence
  Description of Artificial Sequence: Synthetic oligonucleotide
  Antisense strand to SEQ ID NO: 715450
auuauuaaugacguccaaa

SEQ ID NO: 715452 - RNA, 19 nt, Artificial Sequence
  Description of Artificial Sequence: Synthetic oligonucleotide
  Sense strand starting at position 3399 of SEQ ID NO: 586405
ccugaaacucaguggugga

SEQ ID NO: 715453 - RNA, 19 nt, Artificial Sequence
  Description of Artificial Sequence: Synthetic oligonucleotide
  Antisense strand to SEQ ID NO: 715452
uccaccacugaguuucagg

SEQ ID NO: 715454 - RNA, 19 nt, Artificial Sequence
  Description of Artificial Sequence: Synthetic oligonucleotide
  Sense strand starting at position 3474 of SEQ ID NO: 586405
cagaauuugcauugugugu

SEQ ID NO: 715455 - RNA, 19 nt, Artificial Sequence
  Description of Artificial Sequence: Synthetic oligonucleotide
  Antisense strand to SEQ ID NO: 715454
acacacaaugcaaauucug

SEQ ID NO: 715456 - RNA, 19 nt, Artificial Sequence
  Description of Artificial Sequence: Synthetic oligonucleotide
  Sense strand starting at position 3490 of SEQ ID NO: 586405
uguggaauuacguaacuca

SEQ ID NO: 715457 - RNA, 19 nt, Artificial Sequence
  Description of Artificial Sequence: Synthetic oligonucleotide
  Antisense strand to SEQ ID NO: 715456
ugaguuacguaauuccaca

SEQ ID NO: 715458 - RNA, 19 nt, Artificial Sequence
  Description of Artificial Sequence: Synthetic oligonucleotide
  Sense strand starting at position 3493 of SEQ ID NO: 586405
ggaauuacguaacucauac

SEQ ID NO: 715459 - RNA, 19 nt, Artificial Sequence
  Description of Artificial Sequence: Synthetic oligonucleotide
  Antisense strand to SEQ ID NO: 715458
guaugaguuacguaauucc

SEQ ID NO: 715460 - RNA, 19 nt, Artificial Sequence
  Description of Artificial Sequence: Synthetic oligonucleotide
  Sense strand starting at position 3517 of SEQ ID NO: 586405
caugccugauugcuagaca

SEQ ID NO: 715461 - RNA, 19 nt, Artificial Sequence
  Description of Artificial Sequence: Synthetic oligonucleotide
  Antisense strand to SEQ ID NO: 715460
ugucuagcaaucaggcaug

SEQ ID NO: 715462 - RNA, 19 nt, Artificial Sequence
  Description of Artificial Sequence: Synthetic oligonucleotide
  Sense strand starting at position 3520 of SEQ ID NO: 586405
gccugauugcuagacaucu

SEQ ID NO: 715463 - RNA, 19 nt, Artificial Sequence
  Description of Artificial Sequence: Synthetic oligonucleotide
  Antisense strand to SEQ ID NO: 715462
agaugucuagcaaucaggc

SEQ ID NO: 715464 - RNA, 19 nt, Artificial Sequence
  Description of Artificial Sequence: Synthetic oligonucleotide
  Sense strand starting at position 3528 of SEQ ID NO: 586405
gcuagacaucuaugguuau

SEQ ID NO: 715465 - RNA, 19 nt, Artificial Sequence
  Description of Artificial Sequence: Synthetic oligonucleotide
  Antisense strand to SEQ ID NO: 715464
auaaccauagaugucuagc

SEQ ID NO: 715466 - RNA, 19 nt, Artificial Sequence
  Description of Artificial Sequence: Synthetic oligonucleotide
  Sense strand starting at position 3531 of SEQ ID NO: 586405
agacaucuaugguuauauu

SEQ ID NO: 715467 - RNA, 19 nt, Artificial Sequence
  Description of Artificial Sequence: Synthetic oligonucleotide
  Antisense strand to SEQ ID NO: 715466
aauauaaccauagaugucu

SEQ ID NO: 715468 - RNA, 19 nt, Artificial Sequence
  Description of Artificial Sequence: Synthetic oligonucleotide
  Sense strand starting at position 3659 of SEQ ID NO: 586405
caacguauccuguauugac

SEQ ID NO: 715469 - RNA, 19 nt, Artificial Sequence
  Description of Artificial Sequence: Synthetic oligonucleotide
  Antisense strand to SEQ ID NO: 715468
gucaauacaggauacguug

SEQ ID NO: 715470 - RNA, 19 nt, Artificial Sequence
  Description of Artificial Sequence: Synthetic oligonucleotide
  Sense strand starting at position 3720 of SEQ ID NO: 586405
accucauauuaggugacua

SEQ ID NO: 715471 - RNA, 19 nt, Artificial Sequence
  Description of Artificial Sequence: Synthetic oligonucleotide
  Antisense strand to SEQ ID NO: 715470
uagucaccuaauaugaggu

SEQ ID NO: 715472 - RNA, 19 nt, Artificial Sequence
  Description of Artificial Sequence: Synthetic oligonucleotide
  Sense strand starting at position 3835 of SEQ ID NO: 586405
ugucauacucaggaugcaa

SEQ ID NO: 715473 - RNA, 19 nt, Artificial Sequence
  Description of Artificial Sequence: Synthetic oligonucleotide
  Antisense strand to SEQ ID NO: 715472
uugcauccugaguaugaca

SEQ ID NO: 715474 - RNA, 19 nt, Artificial Sequence
  Description of Artificial Sequence: Synthetic oligonucleotide
  Sense strand starting at position 3864 of SEQ ID NO: 586405
auuugugauuagucggcuu

SEQ ID NO: 715475 - RNA, 19 nt, Artificial Sequence
  Description of Artificial Sequence: Synthetic oligonucleotide
  Antisense strand to SEQ ID NO: 715474
aagccgacuaaucacaaau

SEQ ID NO: 715476 - RNA, 19 nt, Artificial Sequence
  Description of Artificial Sequence: Synthetic oligonucleotide
  Sense strand starting at position 3868 of SEQ ID NO: 586405
gugauuagucggcuuugca

SEQ ID NO: 715477 - RNA, 19 nt, Artificial Sequence
  Description of Artificial Sequence: Synthetic oligonucleotide
  Antisense strand to SEQ ID NO: 715476
ugcaaagccgacuaaucac

SEQ ID NO: 715478 - RNA, 19 nt, Artificial Sequence
  Description of Artificial Sequence: Synthetic oligonucleotide
  Sense strand starting at position 3875 of SEQ ID NO: 586405
gucggcuuugcauccuaau

SEQ ID NO: 715479 - RNA, 19 nt, Artificial Sequence
  Description of Artificial Sequence: Synthetic oligonucleotide
  Antisense strand to SEQ ID NO: 715478
auuaggaugcaaagccgac

SEQ ID NO: 715480 - RNA, 19 nt, Artificial Sequence
  Description of Artificial Sequence: Synthetic oligonucleotide
  Sense strand starting at position 3939 of SEQ ID NO: 586405
uagaaugcauuguuaaagu

SEQ ID NO: 715481 - RNA, 19 nt, Artificial Sequence
  Description of Artificial Sequence: Synthetic oligonucleotide
  Antisense strand to SEQ ID NO: 715480
acuuuaacaaugcauucua

SEQ ID NO: 715482 - RNA, 19 nt, Artificial Sequence
  Description of Artificial Sequence: Synthetic oligonucleotide
  Sense strand starting at position 864 of SEQ ID NO: 586406
ggacauaucucuuccacug

SEQ ID NO: 715483 - RNA, 19 nt, Artificial Sequence
  Description of Artificial Sequence: Synthetic oligonucleotide
  Antisense strand to SEQ ID NO: 715482
caguggaagagauaugucc

SEQ ID NO: 715484 - RNA, 19 nt, Artificial Sequence
  Description of Artificial Sequence: Synthetic oligonucleotide
  Sense strand starting at position 923 of SEQ ID NO: 586406
cuugaaaucuuggugcucu

SEQ ID NO: 715485 - RNA, 19 nt, Artificial Sequence
  Description of Artificial Sequence: Synthetic oligonucleotide
  Antisense strand to SEQ ID NO: 715484
agagcaccaagauuucaag

SEQ ID NO: 715486 - RNA, 19 nt, Artificial Sequence
  Description of Artificial Sequence: Synthetic oligonucleotide
  Sense strand starting at position 1040 of SEQ ID NO: 586406
ucagaauuagaguggcacu

SEQ ID NO: 715487 - RNA, 19 nt, Artificial Sequence
  Description of Artificial Sequence: Synthetic oligonucleotide
  Antisense strand to SEQ ID NO: 715486
agugccacucuaauucuga

SEQ ID NO: 715488 - RNA, 19 nt, Artificial Sequence
  Description of Artificial Sequence: Synthetic oligonucleotide
  Sense strand starting at position 1262 of SEQ ID NO: 586406
caggguccuuucucugaca

SEQ ID NO: 715489 - RNA, 19 nt, Artificial Sequence
  Description of Artificial Sequence: Synthetic oligonucleotide
  Antisense strand to SEQ ID NO: 715488
ugucagagaaaggacccug

SEQ ID NO: 715490 - RNA, 19 nt, Artificial Sequence
  Description of Artificial Sequence: Synthetic oligonucleotide
  Sense strand starting at position 1263 of SEQ ID NO: 586406
aggguccuuucucugacaa

SEQ ID NO: 715491 - RNA, 19 nt, Artificial Sequence
  Description of Artificial Sequence: Synthetic oligonucleotide
  Antisense strand to SEQ ID NO: 715490
uugucagagaaaggacccu

SEQ ID NO: 715492 - RNA, 19 nt, Artificial Sequence
  Description of Artificial Sequence: Synthetic oligonucleotide
  Sense strand starting at position 1264 of SEQ ID NO: 586406
ggguccuuucucugacaaa

SEQ ID NO: 715493 - RNA, 19 nt, Artificial Sequence
  Description of Artificial Sequence: Synthetic oligonucleotide
  Antisense strand to SEQ ID NO: 715492
uuugucagagaaaggaccc

SEQ ID NO: 715494 - RNA, 19 nt, Artificial Sequence
  Description of Artificial Sequence: Synthetic oligonucleotide
  Sense strand starting at position 1619 of SEQ ID NO: 586406
uaagcuugcuuccugagga

SEQ ID NO: 715495 - RNA, 19 nt, Artificial Sequence
  Description of Artificial Sequence: Synthetic oligonucleotide
  Antisense strand to SEQ ID NO: 715494
uccucaggaagcaagcuua

SEQ ID NO: 715496 - RNA, 19 nt, Artificial Sequence
  Description of Artificial Sequence: Synthetic oligonucleotide
  Sense strand starting at position 1662 of SEQ ID NO: 586406
gugggaagaaaguguuucu

SEQ ID NO: 715497 - RNA, 19 nt, Artificial Sequence
  Description of Artificial Sequence: Synthetic oligonucleotide
  Antisense strand to SEQ ID NO: 715496
agaaacacuuucuucccac

SEQ ID NO: 715498 - RNA, 19 nt, Artificial Sequence
  Description of Artificial Sequence: Synthetic oligonucleotide
  Sense strand starting at position 1820 of SEQ ID NO: 586406
uggaguguucgugccuacu

SEQ ID NO: 715499 - RNA, 19 nt, Artificial Sequence
  Description of Artificial Sequence: Synthetic oligonucleotide
  Antisense strand to SEQ ID NO: 715498
aguaggcacgaacacucca

SEQ ID NO: 715500 - RNA, 19 nt, Artificial Sequence
  Description of Artificial Sequence: Synthetic oligonucleotide
  Sense strand starting at position 1903 of SEQ ID NO: 586406
guguuucugggucaaucuu

SEQ ID NO: 715501 - RNA, 19 nt, Artificial Sequence
  Description of Artificial Sequence: Synthetic oligonucleotide
  Antisense strand to SEQ ID NO: 715500
aagauugacccagaaacac

SEQ ID NO: 715502 - RNA, 19 nt, Artificial Sequence
  Description of Artificial Sequence: Synthetic oligonucleotide
  Sense strand starting at position 2107 of SEQ ID NO: 586406
ggaccuggaugcucuagaa

SEQ ID NO: 715503 - RNA, 19 nt, Artificial Sequence
  Description of Artificial Sequence: Synthetic oligonucleotide
  Antisense strand to SEQ ID NO: 715502
uucuagagcauccaggucc

SEQ ID NO: 715504 - RNA, 19 nt, Artificial Sequence
  Description of Artificial Sequence: Synthetic oligonucleotide
  Sense strand starting at position 2282 of SEQ ID NO: 586406
ggaggucuggcauacacuu

SEQ ID NO: 715505 - RNA, 19 nt, Artificial Sequence
  Description of Artificial Sequence: Synthetic oligonucleotide
  Antisense strand to SEQ ID NO: 715504
aaguguaugccagaccucc

SEQ ID NO: 715506 - RNA, 19 nt, Artificial Sequence
  Description of Artificial Sequence: Synthetic oligonucleotide
  Sense strand starting at position 2289 of SEQ ID NO: 586406
uggcauacacuuugugaac

SEQ ID NO: 715507 - RNA, 19 nt, Artificial Sequence
  Description of Artificial Sequence: Synthetic oligonucleotide
  Antisense strand to SEQ ID NO: 715506
guucacaaaguguaugcca

SEQ ID NO: 715508 - RNA, 19 nt, Artificial Sequence
  Description of Artificial Sequence: Synthetic oligonucleotide
  Sense strand starting at position 2290 of SEQ ID NO: 586406
ggcauacacuuugugaaca

SEQ ID NO: 715509 - RNA, 19 nt, Artificial Sequence
  Description of Artificial Sequence: Synthetic oligonucleotide
  Antisense strand to SEQ ID NO: 715508
uguucacaaaguguaugcc

SEQ ID NO: 715510 - RNA, 19 nt, Artificial Sequence
  Description of Artificial Sequence: Synthetic oligonucleotide
  Sense strand starting at position 2338 of SEQ ID NO: 586406
uuuccuagagcuuacagaa

SEQ ID NO: 715511 - RNA, 19 nt, Artificial Sequence
  Description of Artificial Sequence: Synthetic oligonucleotide
  Antisense strand to SEQ ID NO: 715510
uucuguaagcucuaggaaa

SEQ ID NO: 715512 - RNA, 19 nt, Artificial Sequence
  Description of Artificial Sequence: Synthetic oligonucleotide
  Sense strand starting at position 2356 of SEQ ID NO: 586406
agaauaacccuauggcuuu

SEQ ID NO: 715513 - RNA, 19 nt, Artificial Sequence
  Description of Artificial Sequence: Synthetic oligonucleotide
  Antisense strand to SEQ ID NO: 715512
aaagccauaggguuauucu

SEQ ID NO: 715514 - RNA, 19 nt, Artificial Sequence
  Description of Artificial Sequence: Synthetic oligonucleotide
  Sense strand starting at position 2439 of SEQ ID NO: 586406
caggccauuuguuauagaa

SEQ ID NO: 715515 - RNA, 19 nt, Artificial Sequence
  Description of Artificial Sequence: Synthetic oligonucleotide
  Antisense strand to SEQ ID NO: 715514
uucuauaacaaauggccug

SEQ ID NO: 715516 - RNA, 19 nt, Artificial Sequence
  Description of Artificial Sequence: Synthetic oligonucleotide
  Sense strand starting at position 2441 of SEQ ID NO: 586406
ggccauuuguuauagaagg

SEQ ID NO: 715517 - RNA, 19 nt, Artificial Sequence
  Description of Artificial Sequence: Synthetic oligonucleotide
  Antisense strand to SEQ ID NO: 715516
ccuucuauaacaaauggcc

SEQ ID NO: 715518 - RNA, 19 nt, Artificial Sequence
  Description of Artificial Sequence: Synthetic oligonucleotide
  Sense strand starting at position 2579 of SEQ ID NO: 586406
ugagauuagugcccagaug

SEQ ID NO: 715519 - RNA, 19 nt, Artificial Sequence
  Description of Artificial Sequence: Synthetic oligonucleotide
  Antisense strand to SEQ ID NO: 715518
caucugggcacuaaucuca

SEQ ID NO: 715520 - RNA, 19 nt, Artificial Sequence
  Description of Artificial Sequence: Synthetic oligonucleotide
  Sense strand starting at position 2730 of SEQ ID NO: 586406
cagcaucuagacugugaga

SEQ ID NO: 715521 - RNA, 19 nt, Artificial Sequence
  Description of Artificial Sequence: Synthetic oligonucleotide
  Antisense strand to SEQ ID NO: 715520
ucucacagucuagaugcug

SEQ ID NO: 715522 - RNA, 19 nt, Artificial Sequence
  Description of Artificial Sequence: Synthetic oligonucleotide
  Sense strand starting at position 2732 of SEQ ID NO: 586406
gcaucuagacugugagaaa

SEQ ID NO: 715523 - RNA, 19 nt, Artificial Sequence
  Description of Artificial Sequence: Synthetic oligonucleotide
  Antisense strand to SEQ ID NO: 715522
uuucucacagucuagaugc

SEQ ID NO: 715524 - RNA, 19 nt, Artificial Sequence
  Description of Artificial Sequence: Synthetic oligonucleotide
  Sense strand starting at position 2747 of SEQ ID NO: 586406
gaaagauauuucuauugug

SEQ ID NO: 715525 - RNA, 19 nt, Artificial Sequence
  Description of Artificial Sequence: Synthetic oligonucleotide
  Antisense strand to SEQ ID NO: 715524
cacaauagaaauaucuuuc

SEQ ID NO: 715526 - RNA, 19 nt, Artificial Sequence
  Description of Artificial Sequence: Synthetic oligonucleotide
  Sense strand starting at position 2849 of SEQ ID NO: 586406
ggaaauagguucucuugua

SEQ ID NO: 715527 - RNA, 19 nt, Artificial Sequence
  Description of Artificial Sequence: Synthetic oligonucleotide
  Antisense strand to SEQ ID NO: 715526
uacaagagaaccuauuucc

SEQ ID NO: 715528 - RNA, 19 nt, Artificial Sequence
  Description of Artificial Sequence: Synthetic oligonucleotide
  Sense strand starting at position 2850 of SEQ ID NO: 586406
gaaauagguucucuuguac

SEQ ID NO: 715529 - RNA, 19 nt, Artificial Sequence
  Description of Artificial Sequence: Synthetic oligonucleotide
  Antisense strand to SEQ ID NO: 715528
guacaagagaaccuauuuc

SEQ ID NO: 715530 - RNA, 19 nt, Artificial Sequence
  Description of Artificial Sequence: Synthetic oligonucleotide
  Sense strand starting at position 2864 of SEQ ID NO: 586406
uguacauacucugcuugaa

SEQ ID NO: 715531 - RNA, 19 nt, Artificial Sequence
  Description of Artificial Sequence: Synthetic oligonucleotide
  Antisense strand to SEQ ID NO: 715530
uucaagcagaguauguaca

SEQ ID NO: 715532 - RNA, 19 nt, Artificial Sequence
  Description of Artificial Sequence: Synthetic oligonucleotide
  Sense strand starting at position 2889 of SEQ ID NO: 586406
uuggaauauucucuuggga

SEQ ID NO: 715533 - RNA, 19 nt, Artificial Sequence
  Description of Artificial Sequence: Synthetic oligonucleotide
  Antisense strand to SEQ ID NO: 715532
ucccaagagaauauuccaa

SEQ ID NO: 715534 - RNA, 19 nt, Artificial Sequence
  Description of Artificial Sequence: Synthetic oligonucleotide
  Sense strand starting at position 2917 of SEQ ID NO: 586406
gguaauaucuuuccagcaa

SEQ ID NO: 715535 - RNA, 19 nt, Artificial Sequence
  Description of Artificial Sequence: Synthetic oligonucleotide
  Antisense strand to SEQ ID NO: 715534
uugcuggaaagauauuacc

SEQ ID NO: 715536 - RNA, 19 nt, Artificial Sequence
  Description of Artificial Sequence: Synthetic oligonucleotide
  Sense strand starting at position 2978 of SEQ ID NO: 586406
uggguuugcacagauguuu

SEQ ID NO: 715537 - RNA, 19 nt, Artificial Sequence
  Description of Artificial Sequence: Synthetic oligonucleotide
  Antisense strand to SEQ ID NO: 715536
aaacaucugugcaaaccca

SEQ ID NO: 715538 - RNA, 19 nt, Artificial Sequence
  Description of Artificial Sequence: Synthetic oligonucleotide
  Sense strand starting at position 2983 of SEQ ID NO: 586406
uugcacagauguuugaaca

SEQ ID NO: 715539 - RNA, 19 nt, Artificial Sequence
  Description of Artificial Sequence: Synthetic oligonucleotide
  Antisense strand to SEQ ID NO: 715538
uguucaaacaucugugcaa

SEQ ID NO: 715540 - RNA, 19 nt, Artificial Sequence
  Description of Artificial Sequence: Synthetic oligonucleotide
  Sense strand starting at position 2984 of SEQ ID NO: 586406
ugcacagauguuugaacaa

SEQ ID NO: 715541 - RNA, 19 nt, Artificial Sequence
  Description of Artificial Sequence: Synthetic oligonucleotide
  Antisense strand to SEQ ID NO: 715540
uuguucaaacaucugugca

SEQ ID NO: 715542 - RNA, 19 nt, Artificial Sequence
  Description of Artificial Sequence: Synthetic oligonucleotide
  Sense strand starting at position 3183 of SEQ ID NO: 586406
cuuuguuaagaaggauaua

SEQ ID NO: 715543 - RNA, 19 nt, Artificial Sequence
  Description of Artificial Sequence: Synthetic oligonucleotide
  Antisense strand to SEQ ID NO: 715542
uauauccuucuuaacaaag

SEQ ID NO: 715544 - RNA, 19 nt, Artificial Sequence
  Description of Artificial Sequence: Synthetic oligonucleotide
  Sense strand starting at position 3468 of SEQ ID NO: 586406
uucucagaacuauguagua

SEQ ID NO: 715545 - RNA, 19 nt, Artificial Sequence
  Description of Artificial Sequence: Synthetic oligonucleotide
  Antisense strand to SEQ ID NO: 715544
uacuacauaguucugagaa

SEQ ID NO: 715546 - RNA, 19 nt, Artificial Sequence
  Description of Artificial Sequence: Synthetic oligonucleotide
  Sense strand starting at position 3698 of SEQ ID NO: 586406
cuuuauuucugugaagaaa

SEQ ID NO: 715547 - RNA, 19 nt, Artificial Sequence
  Description of Artificial Sequence: Synthetic oligonucleotide
  Antisense strand to SEQ ID NO: 715546
uuucuucacagaaauaaag

SEQ ID NO: 715548 - RNA, 19 nt, Artificial Sequence
  Description of Artificial Sequence: Synthetic oligonucleotide
  Sense strand starting at position 3721 of SEQ ID NO: 586406
agagacauguugcccagau

SEQ ID NO: 715549 - RNA, 19 nt, Artificial Sequence
  Description of Artificial Sequence: Synthetic oligonucleotide
  Antisense strand to SEQ ID NO: 715548
aucugggcaacaugucucu

SEQ ID NO: 715550 - RNA, 19 nt, Artificial Sequence
  Description of Artificial Sequence: Synthetic oligonucleotide
  Sense strand starting at position 3722 of SEQ ID NO: 586406
gagacauguugcccagauu

SEQ ID NO: 715551 - RNA, 19 nt, Artificial Sequence
  Description of Artificial Sequence: Synthetic oligonucleotide
  Antisense strand to SEQ ID NO: 715550
aaucugggcaacaugucuc

SEQ ID NO: 715552 - RNA, 19 nt, Artificial Sequence
  Description of Artificial Sequence: Synthetic oligonucleotide
  Sense strand starting at position 3723 of SEQ ID NO: 586406
agacauguugcccagauug

SEQ ID NO: 715553 - RNA, 19 nt, Artificial Sequence
  Description of Artificial Sequence: Synthetic oligonucleotide
  Antisense strand to SEQ ID NO: 715552
caaucugggcaacaugucu

SEQ ID NO: 715554 - RNA, 19 nt, Artificial Sequence
  Description of Artificial Sequence: Synthetic oligonucleotide
  Sense strand starting at position 3789 of SEQ ID NO: 586406
aagagaaguugugauuugu

SEQ ID NO: 715555 - RNA, 19 nt, Artificial Sequence
  Description of Artificial Sequence: Synthetic oligonucleotide
  Antisense strand to SEQ ID NO: 715554
acaaaucacaacuucucuu

SEQ ID NO: 715556 - RNA, 19 nt, Artificial Sequence
  Description of Artificial Sequence: Synthetic oligonucleotide
  Sense strand starting at position 3818 of SEQ ID NO: 586406
uauauauggccuugggauu

SEQ ID NO: 715557 - RNA, 19 nt, Artificial Sequence
  Description of Artificial Sequence: Synthetic oligonucleotide
  Antisense strand to SEQ ID NO: 715556
aaucccaaggccauauaua

SEQ ID NO: 715558 - RNA, 19 nt, Artificial Sequence
  Description of Artificial Sequence: Synthetic oligonucleotide
  Sense strand starting at position 3824 of SEQ ID NO: 586406
uggccuugggauuguugaa

SEQ ID NO: 715559 - RNA, 19 nt, Artificial Sequence
  Description of Artificial Sequence: Synthetic oligonucleotide
  Antisense strand to SEQ ID NO: 715558
uucaacaaucccaaggcca

SEQ ID NO: 715560 - RNA, 19 nt, Artificial Sequence
  Description of Artificial Sequence: Synthetic oligonucleotide
  Sense strand starting at position 3941 of SEQ ID NO: 586406
ugugcuguccaugaaguua

SEQ ID NO: 715561 - RNA, 19 nt, Artificial Sequence
  Description of Artificial Sequence: Synthetic oligonucleotide
  Antisense strand to SEQ ID NO: 715560
uaacuucauggacagcaca

SEQ ID NO: 715562 - RNA, 19 nt, Artificial Sequence
  Description of Artificial Sequence: Synthetic oligonucleotide
  Sense strand starting at position 289 of SEQ ID NO: 586407
gugaaugaauaaugaaugu

SEQ ID NO: 715563 - RNA, 19 nt, Artificial Sequence
  Description of Artificial Sequence: Synthetic oligonucleotide
  Antisense strand to SEQ ID NO: 715562
acauucauuauucauucac

SEQ ID NO: 715564 - RNA, 19 nt, Artificial Sequence
  Description of Artificial Sequence: Synthetic oligonucleotide
  Sense strand starting at position 455 of SEQ ID NO: 586407
uuccaaauaucugggacua

SEQ ID NO: 715565 - RNA, 19 nt, Artificial Sequence
  Description of Artificial Sequence: Synthetic oligonucleotide
  Antisense strand to SEQ ID NO: 715564
uagucccagauauuuggaa

SEQ ID NO: 715566 - RNA, 19 nt, Artificial Sequence
  Description of Artificial Sequence: Synthetic oligonucleotide
  Sense strand starting at position 590 of SEQ ID NO: 586407
gccaucucagccugggauu

SEQ ID NO: 715567 - RNA, 19 nt, Artificial Sequence
  Description of Artificial Sequence: Synthetic oligonucleotide
  Antisense strand to SEQ ID NO: 715566
aaucccaggcugagauggc

SEQ ID NO: 715568 - RNA, 19 nt, Artificial Sequence
  Description of Artificial Sequence: Synthetic oligonucleotide
  Sense strand starting at position 591 of SEQ ID NO: 586407
ccaucucagccugggauua

SEQ ID NO: 715569 - RNA, 19 nt, Artificial Sequence
  Description of Artificial Sequence: Synthetic oligonucleotide
  Antisense strand to SEQ ID NO: 715568
uaaucccaggcugagaugg

SEQ ID NO: 715570 - RNA, 19 nt, Artificial Sequence
  Description of Artificial Sequence: Synthetic oligonucleotide
  Sense strand starting at position 592 of SEQ ID NO: 586407
caucucagccugggauuau

SEQ ID NO: 715571 - RNA, 19 nt, Artificial Sequence
  Description of Artificial Sequence: Synthetic oligonucleotide
  Antisense strand to SEQ ID NO: 715570
auaaucccaggcugagaug

SEQ ID NO: 715572 - RNA, 19 nt, Artificial Sequence
  Description of Artificial Sequence: Synthetic oligonucleotide
  Sense strand starting at position 593 of SEQ ID NO: 586407
aucucagccugggauuaua

SEQ ID NO: 715573 - RNA, 19 nt, Artificial Sequence
  Description of Artificial Sequence: Synthetic oligonucleotide
  Antisense strand to SEQ ID NO: 715572
uauaaucccaggcugagau

SEQ ID NO: 715574 - RNA, 19 nt, Artificial Sequence
  Description of Artificial Sequence: Synthetic oligonucleotide
  Sense strand starting at position 926 of SEQ ID NO: 586407
uugccuaguuuccagguau

SEQ ID NO: 715575 - RNA, 19 nt, Artificial Sequence
  Description of Artificial Sequence: Synthetic oligonucleotide
  Antisense strand to SEQ ID NO: 715574
auaccuggaaacuaggcaa

SEQ ID NO: 715576 - RNA, 19 nt, Artificial Sequence
  Description of Artificial Sequence: Synthetic oligonucleotide
  Sense strand starting at position 930 of SEQ ID NO: 586407
cuaguuuccagguaugguu

SEQ ID NO: 715577 - RNA, 19 nt, Artificial Sequence
  Description of Artificial Sequence: Synthetic oligonucleotide
  Antisense strand to SEQ ID NO: 715576
aaccauaccuggaaacuag

SEQ ID NO: 715578 - RNA, 19 nt, Artificial Sequence
  Description of Artificial Sequence: Synthetic oligonucleotide
  Sense strand starting at position 957 of SEQ ID NO: 586407
ccagacuuauucuuaugua

SEQ ID NO: 715579 - RNA, 19 nt, Artificial Sequence
  Description of Artificial Sequence: Synthetic oligonucleotide
  Antisense strand to SEQ ID NO: 715578
uacauaagaauaagucugg

SEQ ID NO: 715580 - RNA, 19 nt, Artificial Sequence
  Description of Artificial Sequence: Synthetic oligonucleotide
  Sense strand starting at position 1036 of SEQ ID NO: 586407
ggaggaguucccugaagcc

SEQ ID NO: 715581 - RNA, 19 nt, Artificial Sequence
  Description of Artificial Sequence: Synthetic oligonucleotide
  Antisense strand to SEQ ID NO: 715580
ggcuucagggaacuccucc

SEQ ID NO: 715582 - RNA, 19 nt, Artificial Sequence
  Description of Artificial Sequence: Synthetic oligonucleotide
  Sense strand starting at position 1059 of SEQ ID NO: 586407
gcgugaguucuguggaaug

SEQ ID NO: 715583 - RNA, 19 nt, Artificial Sequence
  Description of Artificial Sequence: Synthetic oligonucleotide
  Antisense strand to SEQ ID NO: 715582
cauuccacagaacucacgc

SEQ ID NO: 715584 - RNA, 19 nt, Artificial Sequence
  Description of Artificial Sequence: Synthetic oligonucleotide
  Sense strand starting at position 1061 of SEQ ID NO: 586407
gugaguucuguggaaugug

SEQ ID NO: 715585 - RNA, 19 nt, Artificial Sequence
  Description of Artificial Sequence: Synthetic oligonucleotide
  Antisense strand to SEQ ID NO: 715584
cacauuccacagaacucac

SEQ ID NO: 715586 - RNA, 19 nt, Artificial Sequence
  Description of Artificial Sequence: Synthetic oligonucleotide
  Sense strand starting at position 1089 of SEQ ID NO: 586407
gggucucaccgugauauuc

SEQ ID NO: 715587 - RNA, 19 nt, Artificial Sequence
  Description of Artificial Sequence: Synthetic oligonucleotide
  Antisense strand to SEQ ID NO: 715586
gaauaucacggugagaccc

SEQ ID NO: 715588 - RNA, 19 nt, Artificial Sequence
  Description of Artificial Sequence: Synthetic oligonucleotide
  Sense strand starting at position 1437 of SEQ ID NO: 586407
auccacuucuccggccaaa

SEQ ID NO: 715589 - RNA, 19 nt, Artificial Sequence
  Description of Artificial Sequence: Synthetic oligonucleotide
  Antisense strand to SEQ ID NO: 715588
uuuggccggagaaguggau

SEQ ID NO: 715590 - RNA, 19 nt, Artificial Sequence
  Description of Artificial Sequence: Synthetic oligonucleotide
  Sense strand starting at position 1458 of SEQ ID NO: 586407
ucaauccuggugugacaga

SEQ ID NO: 715591 - RNA, 19 nt, Artificial Sequence
  Description of Artificial Sequence: Synthetic oligonucleotide
  Antisense strand to SEQ ID NO: 715590
ucugucacaccaggauuga

SEQ ID NO: 715592 - RNA, 19 nt, Artificial Sequence
  Description of Artificial Sequence: Synthetic oligonucleotide
  Sense strand starting at position 2078 of SEQ ID NO: 586407
ggcuguuaucugcaugugu

SEQ ID NO: 715593 - RNA, 19 nt, Artificial Sequence
  Description of Artificial Sequence: Synthetic oligonucleotide
  Antisense strand to SEQ ID NO: 715592
acacaugcagauaacagcc

SEQ ID NO: 715594 - RNA, 19 nt, Artificial Sequence
  Description of Artificial Sequence: Synthetic oligonucleotide
  Sense strand starting at position 2313 of SEQ ID NO: 586407
gagcgugcuaucugggaaa

SEQ ID NO: 715595 - RNA, 19 nt, Artificial Sequence
  Description of Artificial Sequence: Synthetic oligonucleotide
  Antisense strand to SEQ ID NO: 715594
uuucccagauagcacgcuc

SEQ ID NO: 715596 - RNA, 19 nt, Artificial Sequence
  Description of Artificial Sequence: Synthetic oligonucleotide
  Sense strand starting at position 2401 of SEQ ID NO: 586407
ugcugaguuccgcaaagua

SEQ ID NO: 715597 - RNA, 19 nt, Artificial Sequence
  Description of Artificial Sequence: Synthetic oligonucleotide
  Antisense strand to SEQ ID NO: 715596
uacuuugcggaacucagca

SEQ ID NO: 715598 - RNA, 19 nt, Artificial Sequence
  Description of Artificial Sequence: Synthetic oligonucleotide
  Sense strand starting at position 2454 of SEQ ID NO: 586407
gcaaaugaguggucucccu

SEQ ID NO: 715599 - RNA, 19 nt, Artificial Sequence
  Description of Artificial Sequence: Synthetic oligonucleotide
  Antisense strand to SEQ ID NO: 715598
agggagaccacucauuugc

SEQ ID NO: 715600 - RNA, 19 nt, Artificial Sequence
  Description of Artificial Sequence: Synthetic oligonucleotide
  Sense strand starting at position 2508 of SEQ ID NO: 586407
ugaccauguugaggaauuu

SEQ ID NO: 715601 - RNA, 19 nt, Artificial Sequence
  Description of Artificial Sequence: Synthetic oligonucleotide
  Antisense strand to SEQ ID NO: 715600
aaauuccucaacaugguca

SEQ ID NO: 715602 - RNA, 19 nt, Artificial Sequence
  Description of Artificial Sequence: Synthetic oligonucleotide
  Sense strand starting at position 2584 of SEQ ID NO: 586407
cgucuaguacucugcaaac

SEQ ID NO: 715603 - RNA, 19 nt, Artificial Sequence
  Description of Artificial Sequence: Synthetic oligonucleotide
  Antisense strand to SEQ ID NO: 715602
guuugcagaguacuagacg

SEQ ID NO: 715604 - RNA, 19 nt, Artificial Sequence
  Description of Artificial Sequence: Synthetic oligonucleotide
  Sense strand starting at position 2951 of SEQ ID NO: 586407
guccauugugcaggacaca

SEQ ID NO: 715605 - RNA, 19 nt, Artificial Sequence
  Description of Artificial Sequence: Synthetic oligonucleotide
  Antisense strand to SEQ ID NO: 715604
uguguccugcacaauggac

SEQ ID NO: 715606 - RNA, 19 nt, Artificial Sequence
  Description of Artificial Sequence: Synthetic oligonucleotide
  Sense strand starting at position 2987 of SEQ ID NO: 586407
guuuauuugaccuguggug

SEQ ID NO: 715607 - RNA, 19 nt, Artificial Sequence
  Description of Artificial Sequence: Synthetic oligonucleotide
  Antisense strand to SEQ ID NO: 715606
caccacaggucaaauaaac

SEQ ID NO: 715608 - RNA, 19 nt, Artificial Sequence
  Description of Artificial Sequence: Synthetic oligonucleotide
  Sense strand starting at position 2989 of SEQ ID NO: 586407
uuauuugaccuguggugua

SEQ ID NO: 715609 - RNA, 19 nt, Artificial Sequence
  Description of Artificial Sequence: Synthetic oligonucleotide
  Antisense strand to SEQ ID NO: 715608
uacaccacaggucaaauaa

SEQ ID NO: 715610 - RNA, 19 nt, Artificial Sequence
  Description of Artificial Sequence: Synthetic oligonucleotide
  Sense strand starting at position 2994 of SEQ ID NO: 586407
ugaccugugguguagguua

SEQ ID NO: 715611 - RNA, 19 nt, Artificial Sequence
  Description of Artificial Sequence: Synthetic oligonucleotide
  Antisense strand to SEQ ID NO: 715610
uaaccuacaccacagguca

SEQ ID NO: 715612 - RNA, 19 nt, Artificial Sequence
  Description of Artificial Sequence: Synthetic oligonucleotide
  Sense strand starting at position 3027 of SEQ ID NO: 586407
cugaguucuuaagaacacu

SEQ ID NO: 715613 - RNA, 19 nt, Artificial Sequence
  Description of Artificial Sequence: Synthetic oligonucleotide
  Antisense strand to SEQ ID NO: 715612
aguguucuuaagaacucag

SEQ ID NO: 715614 - RNA, 19 nt, Artificial Sequence
  Description of Artificial Sequence: Synthetic oligonucleotide
  Sense strand starting at position 3118 of SEQ ID NO: 586407
gagccagaggagugagauu

SEQ ID NO: 715615 - RNA, 19 nt, Artificial Sequence
  Description of Artificial Sequence: Synthetic oligonucleotide
  Antisense strand to SEQ ID NO: 715614
aaucucacuccucuggcuc

SEQ ID NO: 715616 - RNA, 19 nt, Artificial Sequence
  Description of Artificial Sequence: Synthetic oligonucleotide
  Sense strand starting at position 3127 of SEQ ID NO: 586407
gagugagauucccagagca

SEQ ID NO: 715617 - RNA, 19 nt, Artificial Sequence
  Description of Artificial Sequence: Synthetic oligonucleotide
  Antisense strand to SEQ ID NO: 715616
ugcucugggaaucucacuc

SEQ ID NO: 715618 - RNA, 19 nt, Artificial Sequence
  Description of Artificial Sequence: Synthetic oligonucleotide
  Sense strand starting at position 3160 of SEQ ID NO: 586407
gcuggucucucacaccuua

SEQ ID NO: 715619 - RNA, 19 nt, Artificial Sequence
  Description of Artificial Sequence: Synthetic oligonucleotide
  Antisense strand to SEQ ID NO: 715618
uaaggugugagagaccagc

SEQ ID NO: 715620 - RNA, 19 nt, Artificial Sequence
  Description of Artificial Sequence: Synthetic oligonucleotide
  Sense strand starting at position 3219 of SEQ ID NO: 586407
ucaaauggguguggugaaa

SEQ ID NO: 715621 - RNA, 19 nt, Artificial Sequence
  Description of Artificial Sequence: Synthetic oligonucleotide
  Antisense strand to SEQ ID NO: 715620
uuucaccacacccauuuga

SEQ ID NO: 715622 - RNA, 19 nt, Artificial Sequence
  Description of Artificial Sequence: Synthetic oligonucleotide
  Sense strand starting at position 3510 of SEQ ID NO: 586407
cguagugagccaugaucgu

SEQ ID NO: 715623 - RNA, 19 nt, Artificial Sequence
  Description of Artificial Sequence: Synthetic oligonucleotide
  Antisense strand to SEQ ID NO: 715622
acgaucauggcucacuacg

SEQ ID NO: 715624 - RNA, 19 nt, Artificial Sequence
  Description of Artificial Sequence: Synthetic oligonucleotide
  Sense strand starting at position 3587 of SEQ ID NO: 586407
cuggaauguguagaucuga

SEQ ID NO: 715625 - RNA, 19 nt, Artificial Sequence
  Description of Artificial Sequence: Synthetic oligonucleotide
  Antisense strand to SEQ ID NO: 715624
ucagaucuacacauuccag

SEQ ID NO: 715626 - RNA, 19 nt, Artificial Sequence
  Description of Artificial Sequence: Synthetic oligonucleotide
  Sense strand starting at position 3596 of SEQ ID NO: 586407
guagaucugagcuguaaga

SEQ ID NO: 715627 - RNA, 19 nt, Artificial Sequence
  Description of Artificial Sequence: Synthetic oligonucleotide
  Antisense strand to SEQ ID NO: 715626
ucuuacagcucagaucuac

SEQ ID NO: 715628 - RNA, 19 nt, Artificial Sequence
  Description of Artificial Sequence: Synthetic oligonucleotide
  Sense strand starting at position 3598 of SEQ ID NO: 586407
agaucugagcuguaagagu

SEQ ID NO: 715629 - RNA, 19 nt, Artificial Sequence
  Description of Artificial Sequence: Synthetic oligonucleotide
  Antisense strand to SEQ ID NO: 715628
acucuuacagcucagaucu

SEQ ID NO: 715630 - RNA, 19 nt, Artificial Sequence
  Description of Artificial Sequence: Synthetic oligonucleotide
  Sense strand starting at position 3609 of SEQ ID NO: 586407
guaagaguuagccgggaga

SEQ ID NO: 715631 - RNA, 19 nt, Artificial Sequence
  Description of Artificial Sequence: Synthetic oligonucleotide
  Antisense strand to SEQ ID NO: 715630
ucucccggcuaacucuuac

SEQ ID NO: 715632 - RNA, 19 nt, Artificial Sequence
  Description of Artificial Sequence: Synthetic oligonucleotide
  Sense strand starting at position 3611 of SEQ ID NO: 586407
aagaguuagccgggagaaa

SEQ ID NO: 715633 - RNA, 19 nt, Artificial Sequence
  Description of Artificial Sequence: Synthetic oligonucleotide
  Antisense strand to SEQ ID NO: 715632
uuucucccggcuaacucuu

SEQ ID NO: 715634 - RNA, 19 nt, Artificial Sequence
  Description of Artificial Sequence: Synthetic oligonucleotide
  Sense strand starting at position 3612 of SEQ ID NO: 586407
agaguuagccgggagaaau

SEQ ID NO: 715635 - RNA, 19 nt, Artificial Sequence
  Description of Artificial Sequence: Synthetic oligonucleotide
  Antisense strand to SEQ ID NO: 715634
auuucucccggcuaacucu

SEQ ID NO: 715636 - RNA, 19 nt, Artificial Sequence
  Description of Artificial Sequence: Synthetic oligonucleotide
  Sense strand starting at position 3742 of SEQ ID NO: 586407
uggagagucaggugaguau

SEQ ID NO: 715637 - RNA, 19 nt, Artificial Sequence
  Description of Artificial Sequence: Synthetic oligonucleotide
  Antisense strand to SEQ ID NO: 715636
auacucaccugacucucca

SEQ ID NO: 715638 - RNA, 19 nt, Artificial Sequence
  Description of Artificial Sequence: Synthetic oligonucleotide
  Sense strand starting at position 3752 of SEQ ID NO: 586407
ggugaguauugcgggaucu

SEQ ID NO: 715639 - RNA, 19 nt, Artificial Sequence
  Description of Artificial Sequence: Synthetic oligonucleotide
  Antisense strand to SEQ ID NO: 715638
agaucccgcaauacucacc

SEQ ID NO: 715640 - RNA, 19 nt, Artificial Sequence
  Description of Artificial Sequence: Synthetic oligonucleotide
  Sense strand starting at position 3753 of SEQ ID NO: 586407
gugaguauugcgggaucug

SEQ ID NO: 715641 - RNA, 19 nt, Artificial Sequence
  Description of Artificial Sequence: Synthetic oligonucleotide
  Antisense strand to SEQ ID NO: 715640
cagaucccgcaauacucac

SEQ ID NO: 715642 - RNA, 19 nt, Artificial Sequence
  Description of Artificial Sequence: Synthetic oligonucleotide
  Sense strand starting at position 170 of SEQ ID NO: 586408
ucauaauucuuggagaauc

SEQ ID NO: 715643 - RNA, 19 nt, Artificial Sequence
  Description of Artificial Sequence: Synthetic oligonucleotide
  Antisense strand to SEQ ID NO: 715642
gauucuccaagaauuauga

SEQ ID NO: 715644 - RNA, 19 nt, Artificial Sequence
  Description of Artificial Sequence: Synthetic oligonucleotide
  Sense strand starting at position 181 of SEQ ID NO: 586408
ggagaauccagguggcagu

SEQ ID NO: 715645 - RNA, 19 nt, Artificial Sequence
  Description of Artificial Sequence: Synthetic oligonucleotide
  Antisense strand to SEQ ID NO: 715644
acugccaccuggauucucc

SEQ ID NO: 715646 - RNA, 19 nt, Artificial Sequence
  Description of Artificial Sequence: Synthetic oligonucleotide
  Sense strand starting at position 244 of SEQ ID NO: 586408
agcaaugugucuucgagaa

SEQ ID NO: 715647 - RNA, 19 nt, Artificial Sequence
  Description of Artificial Sequence: Synthetic oligonucleotide
  Antisense strand to SEQ ID NO: 715646
uucucgaagacacauugcu

SEQ ID NO: 715648 - RNA, 19 nt, Artificial Sequence
  Description of Artificial Sequence: Synthetic oligonucleotide
  Sense strand starting at position 289 of SEQ ID NO: 586408
ucuuaacuucucuaagggu

SEQ ID NO: 715649 - RNA, 19 nt, Artificial Sequence
  Description of Artificial Sequence: Synthetic oligonucleotide
  Antisense strand to SEQ ID NO: 715648
acccuuagagaaguuaaga

SEQ ID NO: 715650 - RNA, 19 nt, Artificial Sequence
  Description of Artificial Sequence: Synthetic oligonucleotide
  Sense strand starting at position 413 of SEQ ID NO: 586408
uucccagauaugcgaaguu

SEQ ID NO: 715651 - RNA, 19 nt, Artificial Sequence
  Description of Artificial Sequence: Synthetic oligonucleotide
  Antisense strand to SEQ ID NO: 715650
aacuucgcauaucugggaa

SEQ ID NO: 715652 - RNA, 19 nt, Artificial Sequence
  Description of Artificial Sequence: Synthetic oligonucleotide
  Sense strand starting at position 448 of SEQ ID NO: 586408
gcugaaauuuacuagacau

SEQ ID NO: 715653 - RNA, 19 nt, Artificial Sequence
  Description of Artificial Sequence: Synthetic oligonucleotide
  Antisense strand to SEQ ID NO: 715652
augucuaguaaauuucagc

SEQ ID NO: 715654 - RNA, 19 nt, Artificial Sequence
  Description of Artificial Sequence: Synthetic oligonucleotide
  Sense strand starting at position 455 of SEQ ID NO: 586408
uuuacuagacauuguagca

SEQ ID NO: 715655 - RNA, 19 nt, Artificial Sequence
  Description of Artificial Sequence: Synthetic oligonucleotide
  Antisense strand to SEQ ID NO: 715654
ugcuacaaugucuaguaaa

SEQ ID NO: 715656 - RNA, 19 nt, Artificial Sequence
  Description of Artificial Sequence: Synthetic oligonucleotide
  Sense strand starting at position 482 of SEQ ID NO: 586408
cacaguggauaucuugauu

SEQ ID NO: 715657 - RNA, 19 nt, Artificial Sequence
  Description of Artificial Sequence: Synthetic oligonucleotide
  Antisense strand to SEQ ID NO: 715656
aaucaagauauccacugug

SEQ ID NO: 715658 - RNA, 19 nt, Artificial Sequence
  Description of Artificial Sequence: Synthetic oligonucleotide
  Sense strand starting at position 692 of SEQ ID NO: 586408
uugcuuucuucucuuggga

SEQ ID NO: 715659 - RNA, 19 nt, Artificial Sequence
  Description of Artificial Sequence: Synthetic oligonucleotide
  Antisense strand to SEQ ID NO: 715658
ucccaagagaagaaagcaa

SEQ ID NO: 715660 - RNA, 19 nt, Artificial Sequence
  Description of Artificial Sequence: Synthetic oligonucleotide
  Sense strand starting at position 695 of SEQ ID NO: 586408
cuuucuucucuugggaaau

SEQ ID NO: 715661 - RNA, 19 nt, Artificial Sequence
  Description of Artificial Sequence: Synthetic oligonucleotide
  Antisense strand to SEQ ID NO: 715660
auuucccaagagaagaaag

SEQ ID NO: 715662 - RNA, 19 nt, Artificial Sequence
  Description of Artificial Sequence: Synthetic oligonucleotide
  Sense strand starting at position 697 of SEQ ID NO: 586408
uucuucucuugggaaaucu

SEQ ID NO: 715663 - RNA, 19 nt, Artificial Sequence
  Description of Artificial Sequence: Synthetic oligonucleotide
  Antisense strand to SEQ ID NO: 715662
agauuucccaagagaagaa

SEQ ID NO: 715664 - RNA, 19 nt, Artificial Sequence
  Description of Artificial Sequence: Synthetic oligonucleotide
  Sense strand starting at position 707 of SEQ ID NO: 586408
gggaaaucuuuacaaacag

SEQ ID NO: 715665 - RNA, 19 nt, Artificial Sequence
  Description of Artificial Sequence: Synthetic oligonucleotide
  Antisense strand to SEQ ID NO: 715664
cuguuuguaaagauuuccc

SEQ ID NO: 715666 - RNA, 19 nt, Artificial Sequence
  Description of Artificial Sequence: Synthetic oligonucleotide
  Sense strand starting at position 953 of SEQ ID NO: 586408
gacccugcuugagacagaa

SEQ ID NO: 715667 - RNA, 19 nt, Artificial Sequence
  Description of Artificial Sequence: Synthetic oligonucleotide
  Antisense strand to SEQ ID NO: 715666
uucugucucaagcaggguc

SEQ ID NO: 715668 - RNA, 19 nt, Artificial Sequence
  Description of Artificial Sequence: Synthetic oligonucleotide
  Sense strand starting at position 996 of SEQ ID NO: 586408
ugcccuguggagugugaaa

SEQ ID NO: 715669 - RNA, 19 nt, Artificial Sequence
  Description of Artificial Sequence: Synthetic oligonucleotide
  Antisense strand to SEQ ID NO: 715668
uuucacacuccacagggca

SEQ ID NO: 715670 - RNA, 19 nt, Artificial Sequence
  Description of Artificial Sequence: Synthetic oligonucleotide
  Sense strand starting at position 1057 of SEQ ID NO: 586408
uaggguugcuacuugcaaa

SEQ ID NO: 715671 - RNA, 19 nt, Artificial Sequence
  Description of Artificial Sequence: Synthetic oligonucleotide
  Antisense strand to SEQ ID NO: 715670
uuugcaaguagcaacccua

SEQ ID NO: 715672 - RNA, 19 nt, Artificial Sequence
  Description of Artificial Sequence: Synthetic oligonucleotide
  Sense strand starting at position 1189 of SEQ ID NO: 586408
ccaccuugaucguacaaau

SEQ ID NO: 715673 - RNA, 19 nt, Artificial Sequence
  Description of Artificial Sequence: Synthetic oligonucleotide
  Antisense strand to SEQ ID NO: 715672
auuuguacgaucaaggugg

SEQ ID NO: 715674 - RNA, 19 nt, Artificial Sequence
  Description of Artificial Sequence: Synthetic oligonucleotide
  Sense strand starting at position 1199 of SEQ ID NO: 586408
cguacaaauuaagaaacua

SEQ ID NO: 715675 - RNA, 19 nt, Artificial Sequence
  Description of Artificial Sequence: Synthetic oligonucleotide
  Antisense strand to SEQ ID NO: 715674
uaguuucuuaauuuguacg

SEQ ID NO: 715676 - RNA, 19 nt, Artificial Sequence
  Description of Artificial Sequence: Synthetic oligonucleotide
  Sense strand starting at position 1319 of SEQ ID NO: 586408
auagcuuggugcucuacaa

SEQ ID NO: 715677 - RNA, 19 nt, Artificial Sequence
  Description of Artificial Sequence: Synthetic oligonucleotide
  Antisense strand to SEQ ID NO: 715676
uuguagagcaccaagcuau

SEQ ID NO: 715678 - RNA, 19 nt, Artificial Sequence
  Description of Artificial Sequence: Synthetic oligonucleotide
  Sense strand starting at position 1363 of SEQ ID NO: 586408
ucuuuaauauuucugcgga

SEQ ID NO: 715679 - RNA, 19 nt, Artificial Sequence
  Description of Artificial Sequence: Synthetic oligonucleotide
  Antisense strand to SEQ ID NO: 715678
uccgcagaaauauuaaaga

SEQ ID NO: 715680 - RNA, 19 nt, Artificial Sequence
  Description of Artificial Sequence: Synthetic oligonucleotide
  Sense strand starting at position 1367 of SEQ ID NO: 586408
uaauauuucugcggagacu

SEQ ID NO: 715681 - RNA, 19 nt, Artificial Sequence
  Description of Artificial Sequence: Synthetic oligonucleotide
  Antisense strand to SEQ ID NO: 715680
agucuccgcagaaauauua

SEQ ID NO: 715682 - RNA, 19 nt, Artificial Sequence
  Description of Artificial Sequence: Synthetic oligonucleotide
  Sense strand starting at position 1376 of SEQ ID NO: 586408
ugcggagacuuccacaaau

SEQ ID NO: 715683 - RNA, 19 nt, Artificial Sequence
  Description of Artificial Sequence: Synthetic oligonucleotide
  Antisense strand to SEQ ID NO: 715682
auuuguggaagucuccgca

SEQ ID NO: 715684 - RNA, 19 nt, Artificial Sequence
  Description of Artificial Sequence: Synthetic oligonucleotide
  Sense strand starting at position 1457 of SEQ ID NO: 586408
ucugcauccugagucagua

SEQ ID NO: 715685 - RNA, 19 nt, Artificial Sequence
  Description of Artificial Sequence: Synthetic oligonucleotide
  Antisense strand to SEQ ID NO: 715684
uacugacucaggaugcaga

SEQ ID NO: 715686 - RNA, 19 nt, Artificial Sequence
  Description of Artificial Sequence: Synthetic oligonucleotide
  Sense strand starting at position 1493 of SEQ ID NO: 586408
uccaguggucccugcacaa

SEQ ID NO: 715687 - RNA, 19 nt, Artificial Sequence
  Description of Artificial Sequence: Synthetic oligonucleotide
  Antisense strand to SEQ ID NO: 715686
uugugcagggaccacugga

SEQ ID NO: 715688 - RNA, 19 nt, Artificial Sequence
  Description of Artificial Sequence: Synthetic oligonucleotide
  Sense strand starting at position 2047 of SEQ ID NO: 586408
ccucucaggccuugauuga

SEQ ID NO: 715689 - RNA, 19 nt, Artificial Sequence
  Description of Artificial Sequence: Synthetic oligonucleotide
  Antisense strand to SEQ ID NO: 715688
ucaaucaaggccugagagg

SEQ ID NO: 715690 - RNA, 19 nt, Artificial Sequence
  Description of Artificial Sequence: Synthetic oligonucleotide
  Sense strand starting at position 2051 of SEQ ID NO: 586408
ucaggccuugauugacaga

SEQ ID NO: 715691 - RNA, 19 nt, Artificial Sequence
  Description of Artificial Sequence: Synthetic oligonucleotide
  Antisense strand to SEQ ID NO: 715690
ucugucaaucaaggccuga

SEQ ID NO: 715692 - RNA, 19 nt, Artificial Sequence
  Description of Artificial Sequence: Synthetic oligonucleotide
  Sense strand starting at position 2054 of SEQ ID NO: 586408
ggccuugauugacagaaga

SEQ ID NO: 715693 - RNA, 19 nt, Artificial Sequence
  Description of Artificial Sequence: Synthetic oligonucleotide
  Antisense strand to SEQ ID NO: 715692
ucuucugucaaucaaggcc

SEQ ID NO: 715694 - RNA, 19 nt, Artificial Sequence
  Description of Artificial Sequence: Synthetic oligonucleotide
  Sense strand starting at position 2077 of SEQ ID NO: 586408
cucagaugcugggcugaau

SEQ ID NO: 715695 - RNA, 19 nt, Artificial Sequence
  Description of Artificial Sequence: Synthetic oligonucleotide
  Antisense strand to SEQ ID NO: 715694
auucagcccagcaucugag

SEQ ID NO: 715696 - RNA, 19 nt, Artificial Sequence
  Description of Artificial Sequence: Synthetic oligonucleotide
  Sense strand starting at position 2121 of SEQ ID NO: 586408
ggcagagcuuccucccuga

SEQ ID NO: 715697 - RNA, 19 nt, Artificial Sequence
  Description of Artificial Sequence: Synthetic oligonucleotide
  Antisense strand to SEQ ID NO: 715696
ucagggaggaagcucugcc

SEQ ID NO: 715698 - RNA, 19 nt, Artificial Sequence
  Description of Artificial Sequence: Synthetic oligonucleotide
  Sense strand starting at position 2160 of SEQ ID NO: 586408
gacggcauuugccuuguaa

SEQ ID NO: 715699 - RNA, 19 nt, Artificial Sequence
  Description of Artificial Sequence: Synthetic oligonucleotide
  Antisense strand to SEQ ID NO: 715698
uuacaaggcaaaugccguc

SEQ ID NO: 715700 - RNA, 19 nt, Artificial Sequence
  Description of Artificial Sequence: Synthetic oligonucleotide
  Sense strand starting at position 2162 of SEQ ID NO: 586408
cggcauuugccuuguaagg

SEQ ID NO: 715701 - RNA, 19 nt, Artificial Sequence
  Description of Artificial Sequence: Synthetic oligonucleotide
  Antisense strand to SEQ ID NO: 715700
ccuuacaaggcaaaugccg

SEQ ID NO: 715702 - RNA, 19 nt, Artificial Sequence
  Description of Artificial Sequence: Synthetic oligonucleotide
  Sense strand starting at position 2164 of SEQ ID NO: 586408
gcauuugccuuguaaggca

SEQ ID NO: 715703 - RNA, 19 nt, Artificial Sequence
  Description of Artificial Sequence: Synthetic oligonucleotide
  Antisense strand to SEQ ID NO: 715702
ugccuuacaaggcaaaugc

SEQ ID NO: 715704 - RNA, 19 nt, Artificial Sequence
  Description of Artificial Sequence: Synthetic oligonucleotide
  Sense strand starting at position 2177 of SEQ ID NO: 586408
aaggcaaccgucugaaaua

SEQ ID NO: 715705 - RNA, 19 nt, Artificial Sequence
  Description of Artificial Sequence: Synthetic oligonucleotide
  Antisense strand to SEQ ID NO: 715704
uauuucagacgguugccuu

SEQ ID NO: 715706 - RNA, 19 nt, Artificial Sequence
  Description of Artificial Sequence: Synthetic oligonucleotide
  Sense strand starting at position 2178 of SEQ ID NO: 586408
aggcaaccgucugaaauaa

SEQ ID NO: 715707 - RNA, 19 nt, Artificial Sequence
  Description of Artificial Sequence: Synthetic oligonucleotide
  Antisense strand to SEQ ID NO: 715706
uuauuucagacgguugccu

SEQ ID NO: 715708 - RNA, 19 nt, Artificial Sequence
  Description of Artificial Sequence: Synthetic oligonucleotide
  Sense strand starting at position 2196 of SEQ ID NO: 586408
aaaugugagccauguguga

SEQ ID NO: 715709 - RNA, 19 nt, Artificial Sequence
  Description of Artificial Sequence: Synthetic oligonucleotide
  Antisense strand to SEQ ID NO: 715708
ucacacauggcucacauuu

SEQ ID NO: 715710 - RNA, 19 nt, Artificial Sequence
  Description of Artificial Sequence: Synthetic oligonucleotide
  Sense strand starting at position 2198 of SEQ ID NO: 586408
augugagccaugugugaau

SEQ ID NO: 715711 - RNA, 19 nt, Artificial Sequence
  Description of Artificial Sequence: Synthetic oligonucleotide
  Antisense strand to SEQ ID NO: 715710
auucacacauggcucacau

SEQ ID NO: 715712 - RNA, 19 nt, Artificial Sequence
  Description of Artificial Sequence: Synthetic oligonucleotide
  Sense strand starting at position 2226 of SEQ ID NO: 586408
ucuaguaguuaagaagaaa

SEQ ID NO: 715713 - RNA, 19 nt, Artificial Sequence
  Description of Artificial Sequence: Synthetic oligonucleotide
  Antisense strand to SEQ ID NO: 715712
uuucuucuuaacuacuaga

SEQ ID NO: 715714 - RNA, 19 nt, Artificial Sequence
  Description of Artificial Sequence: Synthetic oligonucleotide
  Sense strand starting at position 2336 of SEQ ID NO: 586408
uaguguauauauucuugga

SEQ ID NO: 715715 - RNA, 19 nt, Artificial Sequence
  Description of Artificial Sequence: Synthetic oligonucleotide
  Antisense strand to SEQ ID NO: 715714
uccaagaauauauacacua

SEQ ID NO: 715716 - RNA, 19 nt, Artificial Sequence
  Description of Artificial Sequence: Synthetic oligonucleotide
  Sense strand starting at position 2338 of SEQ ID NO: 586408
guguauauauucuuggaac

SEQ ID NO: 715717 - RNA, 19 nt, Artificial Sequence
  Description of Artificial Sequence: Synthetic oligonucleotide
  Antisense strand to SEQ ID NO: 715716
guuccaagaauauauacac

SEQ ID NO: 715718 - RNA, 19 nt, Artificial Sequence
  Description of Artificial Sequence: Synthetic oligonucleotide
  Sense strand starting at position 2340 of SEQ ID NO: 586408
guauauauucuuggaacua

SEQ ID NO: 715719 - RNA, 19 nt, Artificial Sequence
  Description of Artificial Sequence: Synthetic oligonucleotide
  Antisense strand to SEQ ID NO: 715718
uaguuccaagaauauauac

SEQ ID NO: 715720 - RNA, 19 nt, Artificial Sequence
  Description of Artificial Sequence: Synthetic oligonucleotide
  Sense strand starting at position 3543 of SEQ ID NO: 586408
gguggcauccuguaauuaa

SEQ ID NO: 715721 - RNA, 19 nt, Artificial Sequence
  Description of Artificial Sequence: Synthetic oligonucleotide
  Antisense strand to SEQ ID NO: 715720
uuaauuacaggaugccacc

SEQ ID NO: 715722 - RNA, 19 nt, Artificial Sequence
  Description of Artificial Sequence: Synthetic oligonucleotide
  Sense strand starting at position 31 of SEQ ID NO: 586409
guuugaggagaccaguuau

SEQ ID NO: 715723 - RNA, 19 nt, Artificial Sequence
  Description of Artificial Sequence: Synthetic oligonucleotide
  Antisense strand to SEQ ID NO: 715722
auaacuggucuccucaaac

SEQ ID NO: 715724 - RNA, 19 nt, Artificial Sequence
  Description of Artificial Sequence: Synthetic oligonucleotide
  Sense strand starting at position 38 of SEQ ID NO: 586409
gagaccaguuauuaggcaa

SEQ ID NO: 715725 - RNA, 19 nt, Artificial Sequence
  Description of Artificial Sequence: Synthetic oligonucleotide
  Antisense strand to SEQ ID NO: 715724
uugccuaauaacuggucuc

SEQ ID NO: 715726 - RNA, 19 nt, Artificial Sequence
  Description of Artificial Sequence: Synthetic oligonucleotide
  Sense strand starting at position 164 of SEQ ID NO: 586409
gggaguuccgccuaggucu

SEQ ID NO: 715727 - RNA, 19 nt, Artificial Sequence
  Description of Artificial Sequence: Synthetic oligonucleotide
  Antisense strand to SEQ ID NO: 715726
agaccuaggcggaacuccc

SEQ ID NO: 715728 - RNA, 19 nt, Artificial Sequence
  Description of Artificial Sequence: Synthetic oligonucleotide
  Sense strand starting at position 341 of SEQ ID NO: 586409
uuagaauaauucugaacag

SEQ ID NO: 715729 - RNA, 19 nt, Artificial Sequence
  Description of Artificial Sequence: Synthetic oligonucleotide
  Antisense strand to SEQ ID NO: 715728
cuguucagaauuauucuaa

SEQ ID NO: 715730 - RNA, 19 nt, Artificial Sequence
  Description of Artificial Sequence: Synthetic oligonucleotide
  Sense strand starting at position 445 of SEQ ID NO: 586409
gguccaucugcggguuacu

SEQ ID NO: 715731 - RNA, 19 nt, Artificial Sequence
  Description of Artificial Sequence: Synthetic oligonucleotide
  Antisense strand to SEQ ID NO: 715730
aguaacccgcagauggacc

SEQ ID NO: 715732 - RNA, 19 nt, Artificial Sequence
  Description of Artificial Sequence: Synthetic oligonucleotide
  Sense strand starting at position 485 of SEQ ID NO: 586409
gaagcuacggguugucaau

SEQ ID NO: 715733 - RNA, 19 nt, Artificial Sequence
  Description of Artificial Sequence: Synthetic oligonucleotide
  Antisense strand to SEQ ID NO: 715732
auugacaacccguagcuuc

SEQ ID NO: 715734 - RNA, 19 nt, Artificial Sequence
  Description of Artificial Sequence: Synthetic oligonucleotide
  Sense strand starting at position 519 of SEQ ID NO: 586409
ggccuaugcucuuauuuac

SEQ ID NO: 715735 - RNA, 19 nt, Artificial Sequence
  Description of Artificial Sequence: Synthetic oligonucleotide
  Antisense strand to SEQ ID NO: 715734
guaaauaagagcauaggcc

SEQ ID NO: 715736 - RNA, 19 nt, Artificial Sequence
  Description of Artificial Sequence: Synthetic oligonucleotide
  Sense strand starting at position 549 of SEQ ID NO: 586409
aguggauuggagugcuaua

SEQ ID NO: 715737 - RNA, 19 nt, Artificial Sequence
  Description of Artificial Sequence: Synthetic oligonucleotide
  Antisense strand to SEQ ID NO: 715736
uauagcacuccaauccacu

SEQ ID NO: 715738 - RNA, 19 nt, Artificial Sequence
  Description of Artificial Sequence: Synthetic oligonucleotide
  Sense strand starting at position 562 of SEQ ID NO: 586409
gcuauagggucacagagaa

SEQ ID NO: 715739 - RNA, 19 nt, Artificial Sequence
  Description of Artificial Sequence: Synthetic oligonucleotide
  Antisense strand to SEQ ID NO: 715738
uucucugugacccuauagc

SEQ ID NO: 715740 - RNA, 19 nt, Artificial Sequence
  Description of Artificial Sequence: Synthetic oligonucleotide
  Sense strand starting at position 840 of SEQ ID NO: 586409
gggaguggguccuacauaa

SEQ ID NO: 715741 - RNA, 19 nt, Artificial Sequence
  Description of Artificial Sequence: Synthetic oligonucleotide
  Antisense strand to SEQ ID NO: 715740
uuauguaggacccacuccc

SEQ ID NO: 715742 - RNA, 19 nt, Artificial Sequence
  Description of Artificial Sequence: Synthetic oligonucleotide
  Sense strand starting at position 948 of SEQ ID NO: 586409
cgcagagcuuccuuagauc

SEQ ID NO: 715743 - RNA, 19 nt, Artificial Sequence
  Description of Artificial Sequence: Synthetic oligonucleotide
  Antisense strand to SEQ ID NO: 715742
gaucuaaggaagcucugcg

SEQ ID NO: 715744 - RNA, 19 nt, Artificial Sequence
  Description of Artificial Sequence: Synthetic oligonucleotide
  Sense strand starting at position 1068 of SEQ ID NO: 586409
gggcuacacuuugaagaaa

SEQ ID NO: 715745 - RNA, 19 nt, Artificial Sequence
  Description of Artificial Sequence: Synthetic oligonucleotide
  Antisense strand to SEQ ID NO: 715744
uuucuucaaaguguagccc

SEQ ID NO: 715746 - RNA, 19 nt, Artificial Sequence
  Description of Artificial Sequence: Synthetic oligonucleotide
  Sense strand starting at position 1154 of SEQ ID NO: 586409
gagacuucuggcuacacca

SEQ ID NO: 715747 - RNA, 19 nt, Artificial Sequence
  Description of Artificial Sequence: Synthetic oligonucleotide
  Antisense strand to SEQ ID NO: 715746
ugguguagccagaagucuc

SEQ ID NO: 715748 - RNA, 19 nt, Artificial Sequence
  Description of Artificial Sequence: Synthetic oligonucleotide
  Sense strand starting at position 1918 of SEQ ID NO: 586409
cagcucgagccguaagaaa

SEQ ID NO: 715749 - RNA, 19 nt, Artificial Sequence
  Description of Artificial Sequence: Synthetic oligonucleotide
  Antisense strand to SEQ ID NO: 715748
uuucuuacggcucgagcug

SEQ ID NO: 715750 - RNA, 19 nt, Artificial Sequence
  Description of Artificial Sequence: Synthetic oligonucleotide
  Sense strand starting at position 2266 of SEQ ID NO: 586409
uccugucucucaguugcaa

SEQ ID NO: 715751 - RNA, 19 nt, Artificial Sequence
  Description of Artificial Sequence: Synthetic oligonucleotide
  Antisense strand to SEQ ID NO: 715750
uugcaacugagagacagga

SEQ ID NO: 715752 - RNA, 19 nt, Artificial Sequence
  Description of Artificial Sequence: Synthetic oligonucleotide
  Sense strand starting at position 2281 of SEQ ID NO: 586409
gcaagauaauugcuguauc

SEQ ID NO: 715753 - RNA, 19 nt, Artificial Sequence
  Description of Artificial Sequence: Synthetic oligonucleotide
  Antisense strand to SEQ ID NO: 715752
gauacagcaauuaucuugc

SEQ ID NO: 715754 - RNA, 19 nt, Artificial Sequence
  Description of Artificial Sequence: Synthetic oligonucleotide
  Sense strand starting at position 2341 of SEQ ID NO: 586409
agggacuucugucuauguu

SEQ ID NO: 715755 - RNA, 19 nt, Artificial Sequence
  Description of Artificial Sequence: Synthetic oligonucleotide
  Antisense strand to SEQ ID NO: 715754
aacauagacagaagucccu

SEQ ID NO: 715756 - RNA, 19 nt, Artificial Sequence
  Description of Artificial Sequence: Synthetic oligonucleotide
  Sense strand starting at position 2342 of SEQ ID NO: 586409
gggacuucugucuauguuc

SEQ ID NO: 715757 - RNA, 19 nt, Artificial Sequence
  Description of Artificial Sequence: Synthetic oligonucleotide
  Antisense strand to SEQ ID NO: 715756
gaacauagacagaaguccc

SEQ ID NO: 715758 - RNA, 19 nt, Artificial Sequence
  Description of Artificial Sequence: Synthetic oligonucleotide
  Sense strand starting at position 2376 of SEQ ID NO: 586409
gucacauagccacaaauga

SEQ ID NO: 715759 - RNA, 19 nt, Artificial Sequence
  Description of Artificial Sequence: Synthetic oligonucleotide
  Antisense strand to SEQ ID NO: 715758
ucauuuguggcuaugugac

SEQ ID NO: 715760 - RNA, 19 nt, Artificial Sequence
  Description of Artificial Sequence: Synthetic oligonucleotide
  Sense strand starting at position 2389 of SEQ ID NO: 586409
aaaugacugcagugaagau

SEQ ID NO: 715761 - RNA, 19 nt, Artificial Sequence
  Description of Artificial Sequence: Synthetic oligonucleotide
  Antisense strand to SEQ ID NO: 715760
aucuucacugcagucauuu

SEQ ID NO: 715762 - RNA, 19 nt, Artificial Sequence
  Description of Artificial Sequence: Synthetic oligonucleotide
  Sense strand starting at position 2403 of SEQ ID NO: 586409
aagaucaugugacucagua

SEQ ID NO: 715763 - RNA, 19 nt, Artificial Sequence
  Description of Artificial Sequence: Synthetic oligonucleotide
  Antisense strand to SEQ ID NO: 715762
uacugagucacaugaucuu

SEQ ID NO: 715764 - RNA, 19 nt, Artificial Sequence
  Description of Artificial Sequence: Synthetic oligonucleotide
  Sense strand starting at position 2464 of SEQ ID NO: 586409
uggaauggauguugaauga

SEQ ID NO: 715765 - RNA, 19 nt, Artificial Sequence
  Description of Artificial Sequence: Synthetic oligonucleotide
  Antisense strand to SEQ ID NO: 715764
ucauucaacauccauucca

SEQ ID NO: 715766 - RNA, 19 nt, Artificial Sequence
  Description of Artificial Sequence: Synthetic oligonucleotide
  Sense strand starting at position 2509 of SEQ ID NO: 586409
ucgggaauaaguggcagau

SEQ ID NO: 715767 - RNA, 19 nt, Artificial Sequence
  Description of Artificial Sequence: Synthetic oligonucleotide
  Antisense strand to SEQ ID NO: 715766
aucugccacuuauucccga

SEQ ID NO: 715768 - RNA, 19 nt, Artificial Sequence
  Description of Artificial Sequence: Synthetic oligonucleotide
  Sense strand starting at position 2511 of SEQ ID NO: 586409
gggaauaaguggcagaugu

SEQ ID NO: 715769 - RNA, 19 nt, Artificial Sequence
  Description of Artificial Sequence: Synthetic oligonucleotide
  Antisense strand to SEQ ID NO: 715768
acaucugccacuuauuccc

SEQ ID NO: 715770 - RNA, 19 nt, Artificial Sequence
  Description of Artificial Sequence: Synthetic oligonucleotide
  Sense strand starting at position 2513 of SEQ ID NO: 586409
gaauaaguggcagauguua

SEQ ID NO: 715771 - RNA, 19 nt, Artificial Sequence
  Description of Artificial Sequence: Synthetic oligonucleotide
  Antisense strand to SEQ ID NO: 715770
uaacaucugccacuuauuc

SEQ ID NO: 715772 - RNA, 19 nt, Artificial Sequence
  Description of Artificial Sequence: Synthetic oligonucleotide
  Sense strand starting at position 2515 of SEQ ID NO: 586409
auaaguggcagauguuaca

SEQ ID NO: 715773 - RNA, 19 nt, Artificial Sequence
  Description of Artificial Sequence: Synthetic oligonucleotide
  Antisense strand to SEQ ID NO: 715772
uguaacaucugccacuuau

SEQ ID NO: 715774 - RNA, 19 nt, Artificial Sequence
  Description of Artificial Sequence: Synthetic oligonucleotide
  Sense strand starting at position 2524 of SEQ ID NO: 586409
agauguuacaaucgaaaug

SEQ ID NO: 715775 - RNA, 19 nt, Artificial Sequence
  Description of Artificial Sequence: Synthetic oligonucleotide
  Antisense strand to SEQ ID NO: 715774
cauuucgauuguaacaucu

SEQ ID NO: 715776 - RNA, 19 nt, Artificial Sequence
  Description of Artificial Sequence: Synthetic oligonucleotide
  Sense strand starting at position 2534 of SEQ ID NO: 586409
aucgaaaugggcugauuau

SEQ ID NO: 715777 - RNA, 19 nt, Artificial Sequence
  Description of Artificial Sequence: Synthetic oligonucleotide
  Antisense strand to SEQ ID NO: 715776
auaaucagcccauuucgau

SEQ ID NO: 715778 - RNA, 19 nt, Artificial Sequence
  Description of Artificial Sequence: Synthetic oligonucleotide
  Sense strand starting at position 2535 of SEQ ID NO: 586409
ucgaaaugggcugauuaua

SEQ ID NO: 715779 - RNA, 19 nt, Artificial Sequence
  Description of Artificial Sequence: Synthetic oligonucleotide
  Antisense strand to SEQ ID NO: 715778
uauaaucagcccauuucga

SEQ ID NO: 715780 - RNA, 19 nt, Artificial Sequence
  Description of Artificial Sequence: Synthetic oligonucleotide
  Sense strand starting at position 2637 of SEQ ID NO: 586409
caguaaagccagcauguua

SEQ ID NO: 715781 - RNA, 19 nt, Artificial Sequence
  Description of Artificial Sequence: Synthetic oligonucleotide
  Antisense strand to SEQ ID NO: 715780
uaacaugcuggcuuuacug

SEQ ID NO: 715782 - RNA, 19 nt, Artificial Sequence
  Description of Artificial Sequence: Synthetic oligonucleotide
  Sense strand starting at position 2652 of SEQ ID NO: 586409
guuaauugcaguggucuga

SEQ ID NO: 715783 - RNA, 19 nt, Artificial Sequence
  Description of Artificial Sequence: Synthetic oligonucleotide
  Antisense strand to SEQ ID NO: 715782
ucagaccacugcaauuaac

SEQ ID NO: 715784 - RNA, 19 nt, Artificial Sequence
  Description of Artificial Sequence: Synthetic oligonucleotide
  Sense strand starting at position 2692 of SEQ ID NO: 586409
gccuaauuaugguaauaca

SEQ ID NO: 715785 - RNA, 19 nt, Artificial Sequence
  Description of Artificial Sequence: Synthetic oligonucleotide
  Antisense strand to SEQ ID NO: 715784
uguauuaccauaauuaggc

SEQ ID NO: 715786 - RNA, 19 nt, Artificial Sequence
  Description of Artificial Sequence: Synthetic oligonucleotide
  Sense strand starting at position 2862 of SEQ ID NO: 586409
gcaaaugcaggcuauuaaa

SEQ ID NO: 715787 - RNA, 19 nt, Artificial Sequence
  Description of Artificial Sequence: Synthetic oligonucleotide
  Antisense strand to SEQ ID NO: 715786
uuuaauagccugcauuugc

SEQ ID NO: 715788 - RNA, 19 nt, Artificial Sequence
  Description of Artificial Sequence: Synthetic oligonucleotide
  Sense strand starting at position 2936 of SEQ ID NO: 586409
acauguaccaagugucaug

SEQ ID NO: 715789 - RNA, 19 nt, Artificial Sequence
  Description of Artificial Sequence: Synthetic oligonucleotide
  Antisense strand to SEQ ID NO: 715788
caugacacuugguacaugu

SEQ ID NO: 715790 - RNA, 19 nt, Artificial Sequence
  Description of Artificial Sequence: Synthetic oligonucleotide
  Sense strand starting at position 3483 of SEQ ID NO: 586409
gaaggaauuucccaagguu

SEQ ID NO: 715791 - RNA, 19 nt, Artificial Sequence
  Description of Artificial Sequence: Synthetic oligonucleotide
  Antisense strand to SEQ ID NO: 715790
aaccuugggaaauuccuuc

SEQ ID NO: 715792 - RNA, 19 nt, Artificial Sequence
  Description of Artificial Sequence: Synthetic oligonucleotide
  Sense strand starting at position 3668 of SEQ ID NO: 586409
ugacauugcugucuucuua

SEQ ID NO: 715793 - RNA, 19 nt, Artificial Sequence
  Description of Artificial Sequence: Synthetic oligonucleotide
  Antisense strand to SEQ ID NO: 715792
uaagaagacagcaauguca

SEQ ID NO: 715794 - RNA, 19 nt, Artificial Sequence
  Description of Artificial Sequence: Synthetic oligonucleotide
  Sense strand starting at position 3672 of SEQ ID NO: 586409
auugcugucuucuuauauu

SEQ ID NO: 715795 - RNA, 19 nt, Artificial Sequence
  Description of Artificial Sequence: Synthetic oligonucleotide
  Antisense strand to SEQ ID NO: 715794
aauauaagaagacagcaau

SEQ ID NO: 715796 - RNA, 19 nt, Artificial Sequence
  Description of Artificial Sequence: Synthetic oligonucleotide
  Sense strand starting at position 3784 of SEQ ID NO: 586409
cugcuucgagagggauuau

SEQ ID NO: 715797 - RNA, 19 nt, Artificial Sequence
  Description of Artificial Sequence: Synthetic oligonucleotide
  Antisense strand to SEQ ID NO: 715796
auaaucccucucgaagcag

SEQ ID NO: 715798 - RNA, 19 nt, Artificial Sequence
  Description of Artificial Sequence: Synthetic oligonucleotide
  Sense strand starting at position 3793 of SEQ ID NO: 586409
gagggauuaugggcggcau

SEQ ID NO: 715799 - RNA, 19 nt, Artificial Sequence
  Description of Artificial Sequence: Synthetic oligonucleotide
  Antisense strand to SEQ ID NO: 715798
augccgcccauaaucccuc

SEQ ID NO: 715800 - RNA, 19 nt, Artificial Sequence
  Description of Artificial Sequence: Synthetic oligonucleotide
  Sense strand starting at position 3887 of SEQ ID NO: 586409
gagcauuuauuguauagaa

SEQ ID NO: 715801 - RNA, 19 nt, Artificial Sequence
  Description of Artificial Sequence: Synthetic oligonucleotide
  Antisense strand to SEQ ID NO: 715800
uucuauacaauaaaugcuc

SEQ ID NO: 715802 - RNA, 19 nt, Artificial Sequence
  Description of Artificial Sequence: Synthetic oligonucleotide
  Sense strand starting at position 363 of SEQ ID NO: 586410
aaacauauggccugaaguu

SEQ ID NO: 715803 - RNA, 19 nt, Artificial Sequence
  Description of Artificial Sequence: Synthetic oligonucleotide
  Antisense strand to SEQ ID NO: 715802
aacuucaggccauauguuu

SEQ ID NO: 715804 - RNA, 19 nt, Artificial Sequence
  Description of Artificial Sequence: Synthetic oligonucleotide
  Sense strand starting at position 617 of SEQ ID NO: 586410
auaccaguuugggugaagu

SEQ ID NO: 715805 - RNA, 19 nt, Artificial Sequence
  Description of Artificial Sequence: Synthetic oligonucleotide
  Antisense strand to SEQ ID NO: 715804
acuucacccaaacugguau

SEQ ID NO: 715806 - RNA, 19 nt, Artificial Sequence
  Description of Artificial Sequence: Synthetic oligonucleotide
  Sense strand starting at position 619 of SEQ ID NO: 586410
accaguuugggugaaguaa

SEQ ID NO: 715807 - RNA, 19 nt, Artificial Sequence
  Description of Artificial Sequence: Synthetic oligonucleotide
  Antisense strand to SEQ ID NO: 715806
uuacuucacccaaacuggu

SEQ ID NO: 715808 - RNA, 19 nt, Artificial Sequence
  Description of Artificial Sequence: Synthetic oligonucleotide
  Sense strand starting at position 722 of SEQ ID NO: 586410
caaagaguggcagagugau

SEQ ID NO: 715809 - RNA, 19 nt, Artificial Sequence
  Description of Artificial Sequence: Synthetic oligonucleotide
  Antisense strand to SEQ ID NO: 715808
aucacucugccacucuuug

SEQ ID NO: 715810 - RNA, 19 nt, Artificial Sequence
  Description of Artificial Sequence: Synthetic oligonucleotide
  Sense strand starting at position 815 of SEQ ID NO: 586410
ucaauauuuccgggacgcu

SEQ ID NO: 715811 - RNA, 19 nt, Artificial Sequence
  Description of Artificial Sequence: Synthetic oligonucleotide
  Antisense strand to SEQ ID NO: 715810
agcgucccggaaauauuga

SEQ ID NO: 715812 - RNA, 19 nt, Artificial Sequence
  Description of Artificial Sequence: Synthetic oligonucleotide
  Sense strand starting at position 830 of SEQ ID NO: 586410
cgcugcauucuccauagaa

SEQ ID NO: 715813 - RNA, 19 nt, Artificial Sequence
  Description of Artificial Sequence: Synthetic oligonucleotide
  Antisense strand to SEQ ID NO: 715812
uucuauggagaaugcagcg

SEQ ID NO: 715814 - RNA, 19 nt, Artificial Sequence
  Description of Artificial Sequence: Synthetic oligonucleotide
  Sense strand starting at position 986 of SEQ ID NO: 586410
ccugguuguuguuugaaga

SEQ ID NO: 715815 - RNA, 19 nt, Artificial Sequence
  Description of Artificial Sequence: Synthetic oligonucleotide
  Antisense strand to SEQ ID NO: 715814
ucuucaaacaacaaccagg

SEQ ID NO: 715816 - RNA, 19 nt, Artificial Sequence
  Description of Artificial Sequence: Synthetic oligonucleotide
  Sense strand starting at position 987 of SEQ ID NO: 586410
cugguuguuguuugaagag

SEQ ID NO: 715817 - RNA, 19 nt, Artificial Sequence
  Description of Artificial Sequence: Synthetic oligonucleotide
  Antisense strand to SEQ ID NO: 715816
cucuucaaacaacaaccag

SEQ ID NO: 715818 - RNA, 19 nt, Artificial Sequence
  Description of Artificial Sequence: Synthetic oligonucleotide
  Sense strand starting at position 1009 of SEQ ID NO: 586410
gcgcaaauccucuagaggu

SEQ ID NO: 715819 - RNA, 19 nt, Artificial Sequence
  Description of Artificial Sequence: Synthetic oligonucleotide
  Antisense strand to SEQ ID NO: 715818
accucuagaggauuugcgc

SEQ ID NO: 715820 - RNA, 19 nt, Artificial Sequence
  Description of Artificial Sequence: Synthetic oligonucleotide
  Sense strand starting at position 1254 of SEQ ID NO: 586410
ccucuucucagggauaggu

SEQ ID NO: 715821 - RNA, 19 nt, Artificial Sequence
  Description of Artificial Sequence: Synthetic oligonucleotide
  Antisense strand to SEQ ID NO: 715820
accuaucccugagaagagg

SEQ ID NO: 715822 - RNA, 19 nt, Artificial Sequence
  Description of Artificial Sequence: Synthetic oligonucleotide
  Sense strand starting at position 1263 of SEQ ID NO: 586410
agggauagguuccuuguaa

SEQ ID NO: 715823 - RNA, 19 nt, Artificial Sequence
  Description of Artificial Sequence: Synthetic oligonucleotide
  Antisense strand to SEQ ID NO: 715822
uuacaaggaaccuaucccu

SEQ ID NO: 715824 - RNA, 19 nt, Artificial Sequence
  Description of Artificial Sequence: Synthetic oligonucleotide
  Sense strand starting at position 1264 of SEQ ID NO: 586410
gggauagguuccuuguaau

SEQ ID NO: 715825 - RNA, 19 nt, Artificial Sequence
  Description of Artificial Sequence: Synthetic oligonucleotide
  Antisense strand to SEQ ID NO: 715824
auuacaaggaaccuauccc

SEQ ID NO: 715826 - RNA, 19 nt, Artificial Sequence
  Description of Artificial Sequence: Synthetic oligonucleotide
  Sense strand starting at position 1352 of SEQ ID NO: 586410
gcacaaggucauugguuau

SEQ ID NO: 715827 - RNA, 19 nt, Artificial Sequence
  Description of Artificial Sequence: Synthetic oligonucleotide
  Antisense strand to SEQ ID NO: 715826
auaaccaaugaccuugugc

SEQ ID NO: 715828 - RNA, 19 nt, Artificial Sequence
  Description of Artificial Sequence: Synthetic oligonucleotide
  Sense strand starting at position 1355 of SEQ ID NO: 586410
caaggucauugguuaugaa

SEQ ID NO: 715829 - RNA, 19 nt, Artificial Sequence
  Description of Artificial Sequence: Synthetic oligonucleotide
  Antisense strand to SEQ ID NO: 715828
uucauaaccaaugaccuug

SEQ ID NO: 715830 - RNA, 19 nt, Artificial Sequence
  Description of Artificial Sequence: Synthetic oligonucleotide
  Sense strand starting at position 1419 of SEQ ID NO: 586410
gggaaaguugcagauucuu

SEQ ID NO: 715831 - RNA, 19 nt, Artificial Sequence
  Description of Artificial Sequence: Synthetic oligonucleotide
  Antisense strand to SEQ ID NO: 715830
aagaaucugcaacuuuccc

SEQ ID NO: 715832 - RNA, 19 nt, Artificial Sequence
  Description of Artificial Sequence: Synthetic oligonucleotide
  Sense strand starting at position 1496 of SEQ ID NO: 586410
uuagauguccuuugagugu

SEQ ID NO: 715833 - RNA, 19 nt, Artificial Sequence
  Description of Artificial Sequence: Synthetic oligonucleotide
  Antisense strand to SEQ ID NO: 715832
acacucaaaggacaucuaa

SEQ ID NO: 715834 - RNA, 19 nt, Artificial Sequence
  Description of Artificial Sequence: Synthetic oligonucleotide
  Sense strand starting at position 1568 of SEQ ID NO: 586410
agugauaucguauaccuaa

SEQ ID NO: 715835 - RNA, 19 nt, Artificial Sequence
  Description of Artificial Sequence: Synthetic oligonucleotide
  Antisense strand to SEQ ID NO: 715834
uuagguauacgauaucacu

SEQ ID NO: 715836 - RNA, 19 nt, Artificial Sequence
  Description of Artificial Sequence: Synthetic oligonucleotide
  Sense strand starting at position 1604 of SEQ ID NO: 586410
ggguuacuguggccuggaa

SEQ ID NO: 715837 - RNA, 19 nt, Artificial Sequence
  Description of Artificial Sequence: Synthetic oligonucleotide
  Antisense strand to SEQ ID NO: 715836
uuccaggccacaguaaccc

SEQ ID NO: 715838 - RNA, 19 nt, Artificial Sequence
  Description of Artificial Sequence: Synthetic oligonucleotide
  Sense strand starting at position 1606 of SEQ ID NO: 586410
guuacuguggccuggaaag

SEQ ID NO: 715839 - RNA, 19 nt, Artificial Sequence
  Description of Artificial Sequence: Synthetic oligonucleotide
  Antisense strand to SEQ ID NO: 715838
cuuuccaggccacaguaac

SEQ ID NO: 715840 - RNA, 19 nt, Artificial Sequence
  Description of Artificial Sequence: Synthetic oligonucleotide
  Sense strand starting at position 1627 of SEQ ID NO: 586410
gggcuauugucacucugua

SEQ ID NO: 715841 - RNA, 19 nt, Artificial Sequence
  Description of Artificial Sequence: Synthetic oligonucleotide
  Antisense strand to SEQ ID NO: 715840
uacagagugacaauagccc

SEQ ID NO: 715842 - RNA, 19 nt, Artificial Sequence
  Description of Artificial Sequence: Synthetic oligonucleotide
  Sense strand starting at position 1737 of SEQ ID NO: 586410
ugcccaacccgugaaagua

SEQ ID NO: 715843 - RNA, 19 nt, Artificial Sequence
  Description of Artificial Sequence: Synthetic oligonucleotide
  Antisense strand to SEQ ID NO: 715842
uacuuucacggguugggca

SEQ ID NO: 715844 - RNA, 19 nt, Artificial Sequence
  Description of Artificial Sequence: Synthetic oligonucleotide
  Sense strand starting at position 1745 of SEQ ID NO: 586410
ccgugaaaguaucuaccca

SEQ ID NO: 715845 - RNA, 19 nt, Artificial Sequence
  Description of Artificial Sequence: Synthetic oligonucleotide
  Antisense strand to SEQ ID NO: 715844
uggguagauacuuucacgg

SEQ ID NO: 715846 - RNA, 19 nt, Artificial Sequence
  Description of Artificial Sequence: Synthetic oligonucleotide
  Sense strand starting at position 1774 of SEQ ID NO: 586410
uacugaaaucccugagguu

SEQ ID NO: 715847 - RNA, 19 nt, Artificial Sequence
  Description of Artificial Sequence: Synthetic oligonucleotide
  Antisense strand to SEQ ID NO: 715846
aaccucagggauuucagua

SEQ ID NO: 715848 - RNA, 19 nt, Artificial Sequence
  Description of Artificial Sequence: Synthetic oligonucleotide
  Sense strand starting at position 1816 of SEQ ID NO: 586410
gccagucuucuccagggua

SEQ ID NO: 715849 - RNA, 19 nt, Artificial Sequence
  Description of Artificial Sequence: Synthetic oligonucleotide
  Antisense strand to SEQ ID NO: 715848
uacccuggagaagacuggc

SEQ ID NO: 715850 - RNA, 19 nt, Artificial Sequence
  Description of Artificial Sequence: Synthetic oligonucleotide
  Sense strand starting at position 1818 of SEQ ID NO: 586410
cagucuucuccaggguaau

SEQ ID NO: 715851 - RNA, 19 nt, Artificial Sequence
  Description of Artificial Sequence: Synthetic oligonucleotide
  Antisense strand to SEQ ID NO: 715850
auuacccuggagaagacug

SEQ ID NO: 715852 - RNA, 19 nt, Artificial Sequence
  Description of Artificial Sequence: Synthetic oligonucleotide
  Sense strand starting at position 1819 of SEQ ID NO: 586410
agucuucuccaggguaaug

SEQ ID NO: 715853 - RNA, 19 nt, Artificial Sequence
  Description of Artificial Sequence: Synthetic oligonucleotide
  Antisense strand to SEQ ID NO: 715852
cauuacccuggagaagacu

SEQ ID NO: 715854 - RNA, 19 nt, Artificial Sequence
  Description of Artificial Sequence: Synthetic oligonucleotide
  Sense strand starting at position 1829 of SEQ ID NO: 586410
aggguaauggccuguucuu

SEQ ID NO: 715855 - RNA, 19 nt, Artificial Sequence
  Description of Artificial Sequence: Synthetic oligonucleotide
  Antisense strand to SEQ ID NO: 715854
aagaacaggccauuacccu

SEQ ID NO: 715856 - RNA, 19 nt, Artificial Sequence
  Description of Artificial Sequence: Synthetic oligonucleotide
  Sense strand starting at position 1979 of SEQ ID NO: 586410
gcuaucgaugccuaaguga

SEQ ID NO: 715857 - RNA, 19 nt, Artificial Sequence
  Description of Artificial Sequence: Synthetic oligonucleotide
  Antisense strand to SEQ ID NO: 715856
ucacuuaggcaucgauagc

SEQ ID NO: 715858 - RNA, 19 nt, Artificial Sequence
  Description of Artificial Sequence: Synthetic oligonucleotide
  Sense strand starting at position 1988 of SEQ ID NO: 586410
gccuaagugaaagguuuga

SEQ ID NO: 715859 - RNA, 19 nt, Artificial Sequence
  Description of Artificial Sequence: Synthetic oligonucleotide
  Antisense strand to SEQ ID NO: 715858
ucaaaccuuucacuuaggc

SEQ ID NO: 715860 - RNA, 19 nt, Artificial Sequence
  Description of Artificial Sequence: Synthetic oligonucleotide
  Sense strand starting at position 2016 of SEQ ID NO: 586410
uuaaguaauuuccauugga

SEQ ID NO: 715861 - RNA, 19 nt, Artificial Sequence
  Description of Artificial Sequence: Synthetic oligonucleotide
  Antisense strand to SEQ ID NO: 715860
uccaauggaaauuacuuaa

SEQ ID NO: 715862 - RNA, 19 nt, Artificial Sequence
  Description of Artificial Sequence: Synthetic oligonucleotide
  Sense strand starting at position 2358 of SEQ ID NO: 586410
uuugauagguguucucuca

SEQ ID NO: 715863 - RNA, 19 nt, Artificial Sequence
  Description of Artificial Sequence: Synthetic oligonucleotide
  Antisense strand to SEQ ID NO: 715862
ugagagaacaccuaucaaa

SEQ ID NO: 715864 - RNA, 19 nt, Artificial Sequence
  Description of Artificial Sequence: Synthetic oligonucleotide
  Sense strand starting at position 2691 of SEQ ID NO: 586410
uugagaaauuacuuguuga

SEQ ID NO: 715865 - RNA, 19 nt, Artificial Sequence
  Description of Artificial Sequence: Synthetic oligonucleotide
  Antisense strand to SEQ ID NO: 715864
ucaacaaguaauuucucaa

SEQ ID NO: 715866 - RNA, 19 nt, Artificial Sequence
  Description of Artificial Sequence: Synthetic oligonucleotide
  Sense strand starting at position 2694 of SEQ ID NO: 586410
agaaauuacuuguugacag

SEQ ID NO: 715867 - RNA, 19 nt, Artificial Sequence
  Description of Artificial Sequence: Synthetic oligonucleotide
  Antisense strand to SEQ ID NO: 715866
cugucaacaaguaauuucu

SEQ ID NO: 715868 - RNA, 19 nt, Artificial Sequence
  Description of Artificial Sequence: Synthetic oligonucleotide
  Sense strand starting at position 2702 of SEQ ID NO: 586410
cuuguugacaguuauguuu

SEQ ID NO: 715869 - RNA, 19 nt, Artificial Sequence
  Description of Artificial Sequence: Synthetic oligonucleotide
  Antisense strand to SEQ ID NO: 715868
aaacauaacugucaacaag

SEQ ID NO: 715870 - RNA, 19 nt, Artificial Sequence
  Description of Artificial Sequence: Synthetic oligonucleotide
  Sense strand starting at position 2800 of SEQ ID NO: 586410
aguaauagagccugacauu

SEQ ID NO: 715871 - RNA, 19 nt, Artificial Sequence
  Description of Artificial Sequence: Synthetic oligonucleotide
  Antisense strand to SEQ ID NO: 715870
aaugucaggcucuauuacu

SEQ ID NO: 715872 - RNA, 19 nt, Artificial Sequence
  Description of Artificial Sequence: Synthetic oligonucleotide
  Sense strand starting at position 3338 of SEQ ID NO: 586410
ggauguguuccucacugag

SEQ ID NO: 715873 - RNA, 19 nt, Artificial Sequence
  Description of Artificial Sequence: Synthetic oligonucleotide
  Antisense strand to SEQ ID NO: 715872
cucagugaggaacacaucc

SEQ ID NO: 715874 - RNA, 19 nt, Artificial Sequence
  Description of Artificial Sequence: Synthetic oligonucleotide
  Sense strand starting at position 3531 of SEQ ID NO: 586410
aggacaaguguccagguau

SEQ ID NO: 715875 - RNA, 19 nt, Artificial Sequence
  Description of Artificial Sequence: Synthetic oligonucleotide
  Antisense strand to SEQ ID NO: 715874
auaccuggacacuuguccu

SEQ ID NO: 715876 - RNA, 19 nt, Artificial Sequence
  Description of Artificial Sequence: Synthetic oligonucleotide
  Sense strand starting at position 3546 of SEQ ID NO: 586410
guaugaggauuggcucaag

SEQ ID NO: 715877 - RNA, 19 nt, Artificial Sequence
  Description of Artificial Sequence: Synthetic oligonucleotide
  Antisense strand to SEQ ID NO: 715876
cuugagccaauccucauac

SEQ ID NO: 715878 - RNA, 19 nt, Artificial Sequence
  Description of Artificial Sequence: Synthetic oligonucleotide
  Sense strand starting at position 3549 of SEQ ID NO: 586410
ugaggauuggcucaagucu

SEQ ID NO: 715879 - RNA, 19 nt, Artificial Sequence
  Description of Artificial Sequence: Synthetic oligonucleotide
  Antisense strand to SEQ ID NO: 715878
agacuugagccaauccuca

SEQ ID NO: 715880 - RNA, 19 nt, Artificial Sequence
  Description of Artificial Sequence: Synthetic oligonucleotide
  Sense strand starting at position 3639 of SEQ ID NO: 586410
agauguuggguuugaagua

SEQ ID NO: 715881 - RNA, 19 nt, Artificial Sequence
  Description of Artificial Sequence: Synthetic oligonucleotide
  Antisense strand to SEQ ID NO: 715880
uacuucaaacccaacaucu

SEQ ID NO: 715882 - RNA, 19 nt, Artificial Sequence
  Description of Artificial Sequence: Synthetic oligonucleotide
  Sense strand starting at position 7 of SEQ ID NO: 586411
gcaauaugacgucacaaag

SEQ ID NO: 715883 - RNA, 19 nt, Artificial Sequence
  Description of Artificial Sequence: Synthetic oligonucleotide
  Antisense strand to SEQ ID NO: 715882
cuuugugacgucauauugc

SEQ ID NO: 715884 - RNA, 19 nt, Artificial Sequence
  Description of Artificial Sequence: Synthetic oligonucleotide
  Sense strand starting at position 108 of SEQ ID NO: 586411
ggugucucaugacuggaaa

SEQ ID NO: 715885 - RNA, 19 nt, Artificial Sequence
  Description of Artificial Sequence: Synthetic oligonucleotide
  Antisense strand to SEQ ID NO: 715884
uuuccagucaugagacacc

SEQ ID NO: 715886 - RNA, 19 nt, Artificial Sequence
  Description of Artificial Sequence: Synthetic oligonucleotide
  Sense strand starting at position 109 of SEQ ID NO: 586411
gugucucaugacuggaaac

SEQ ID NO: 715887 - RNA, 19 nt, Artificial Sequence
  Description of Artificial Sequence: Synthetic oligonucleotide
  Antisense strand to SEQ ID NO: 715886
guuuccagucaugagacac

SEQ ID NO: 715888 - RNA, 19 nt, Artificial Sequence
  Description of Artificial Sequence: Synthetic oligonucleotide
  Sense strand starting at position 230 of SEQ ID NO: 586411
ccuuucuugcagugugaaa

SEQ ID NO: 715889 - RNA, 19 nt, Artificial Sequence
  Description of Artificial Sequence: Synthetic oligonucleotide
  Antisense strand to SEQ ID NO: 715888
uuucacacugcaagaaagg

SEQ ID NO: 715890 - RNA, 19 nt, Artificial Sequence
  Description of Artificial Sequence: Synthetic oligonucleotide
  Sense strand starting at position 232 of SEQ ID NO: 586411
uuucuugcagugugaaacu

SEQ ID NO: 715891 - RNA, 19 nt, Artificial Sequence
  Description of Artificial Sequence: Synthetic oligonucleotide
  Antisense strand to SEQ ID NO: 715890
aguuucacacugcaagaaa

SEQ ID NO: 715892 - RNA, 19 nt, Artificial Sequence
  Description of Artificial Sequence: Synthetic oligonucleotide
  Sense strand starting at position 306 of SEQ ID NO: 586411
agccaacucuucgugucua

SEQ ID NO: 715893 - RNA, 19 nt, Artificial Sequence
  Description of Artificial Sequence: Synthetic oligonucleotide
  Antisense strand to SEQ ID NO: 715892
uagacacgaagaguuggcu

SEQ ID NO: 715894 - RNA, 19 nt, Artificial Sequence
  Description of Artificial Sequence: Synthetic oligonucleotide
  Sense strand starting at position 310 of SEQ ID NO: 586411
aacucuucgugucuauagu

SEQ ID NO: 715895 - RNA, 19 nt, Artificial Sequence
  Description of Artificial Sequence: Synthetic oligonucleotide
  Antisense strand to SEQ ID NO: 715894
acuauagacacgaagaguu

SEQ ID NO: 715896 - RNA, 19 nt, Artificial Sequence
  Description of Artificial Sequence: Synthetic oligonucleotide
  Sense strand starting at position 316 of SEQ ID NO: 586411
ucgugucuauaguccauaa

SEQ ID NO: 715897 - RNA, 19 nt, Artificial Sequence
  Description of Artificial Sequence: Synthetic oligonucleotide
  Antisense strand to SEQ ID NO: 715896
uuauggacuauagacacga

SEQ ID NO: 715898 - RNA, 19 nt, Artificial Sequence
  Description of Artificial Sequence: Synthetic oligonucleotide
  Sense strand starting at position 318 of SEQ ID NO: 586411
gugucuauaguccauaaau

SEQ ID NO: 715899 - RNA, 19 nt, Artificial Sequence
  Description of Artificial Sequence: Synthetic oligonucleotide
  Antisense strand to SEQ ID NO: 715898
auuuauggacuauagacac

SEQ ID NO: 715900 - RNA, 19 nt, Artificial Sequence
  Description of Artificial Sequence: Synthetic oligonucleotide
  Sense strand starting at position 320 of SEQ ID NO: 586411
gucuauaguccauaaauau

SEQ ID NO: 715901 - RNA, 19 nt, Artificial Sequence
  Description of Artificial Sequence: Synthetic oligonucleotide
  Antisense strand to SEQ ID NO: 715900
auauuuauggacuauagac

SEQ ID NO: 715902 - RNA, 19 nt, Artificial Sequence
  Description of Artificial Sequence: Synthetic oligonucleotide
  Sense strand starting at position 345 of SEQ ID NO: 586411
uagagaacugccggguuaa

SEQ ID NO: 715903 - RNA, 19 nt, Artificial Sequence
  Description of Artificial Sequence: Synthetic oligonucleotide
  Antisense strand to SEQ ID NO: 715902
uuaacccggcaguucucua

SEQ ID NO: 715904 - RNA, 19 nt, Artificial Sequence
  Description of Artificial Sequence: Synthetic oligonucleotide
  Sense strand starting at position 346 of SEQ ID NO: 586411
agagaacugccggguuaaa

SEQ ID NO: 715905 - RNA, 19 nt, Artificial Sequence
  Description of Artificial Sequence: Synthetic oligonucleotide
  Antisense strand to SEQ ID NO: 715904
uuuaacccggcaguucucu

SEQ ID NO: 715906 - RNA, 19 nt, Artificial Sequence
  Description of Artificial Sequence: Synthetic oligonucleotide
  Sense strand starting at position 548 of SEQ ID NO: 586411
acuuacugcccuugaaaug

SEQ ID NO: 715907 - RNA, 19 nt, Artificial Sequence
  Description of Artificial Sequence: Synthetic oligonucleotide
  Antisense strand to SEQ ID NO: 715906
cauuucaagggcaguaagu

SEQ ID NO: 715908 - RNA, 19 nt, Artificial Sequence
  Description of Artificial Sequence: Synthetic oligonucleotide
  Sense strand starting at position 555 of SEQ ID NO: 586411
gcccuugaaaugcgucaga

SEQ ID NO: 715909 - RNA, 19 nt, Artificial Sequence
  Description of Artificial Sequence: Synthetic oligonucleotide
  Antisense strand to SEQ ID NO: 715908
ucugacgcauuucaagggc

SEQ ID NO: 715910 - RNA, 19 nt, Artificial Sequence
  Description of Artificial Sequence: Synthetic oligonucleotide
  Sense strand starting at position 558 of SEQ ID NO: 586411
cuugaaaugcgucagaaac

SEQ ID NO: 715911 - RNA, 19 nt, Artificial Sequence
  Description of Artificial Sequence: Synthetic oligonucleotide
  Antisense strand to SEQ ID NO: 715910
guuucugacgcauuucaag

SEQ ID NO: 715912 - RNA, 19 nt, Artificial Sequence
  Description of Artificial Sequence: Synthetic oligonucleotide
  Sense strand starting at position 594 of SEQ ID NO: 586411
gucuucucccgguagaaga

SEQ ID NO: 715913 - RNA, 19 nt, Artificial Sequence
  Description of Artificial Sequence: Synthetic oligonucleotide
  Antisense strand to SEQ ID NO: 715912
ucuucuaccgggagaagac

SEQ ID NO: 715914 - RNA, 19 nt, Artificial Sequence
  Description of Artificial Sequence: Synthetic oligonucleotide
  Sense strand starting at position 632 of SEQ ID NO: 586411
accagcugucauuacguuu

SEQ ID NO: 715915 - RNA, 19 nt, Artificial Sequence
  Description of Artificial Sequence: Synthetic oligonucleotide
  Antisense strand to SEQ ID NO: 715914
aaacguaaugacagcuggu

SEQ ID NO: 715916 - RNA, 19 nt, Artificial Sequence
  Description of Artificial Sequence: Synthetic oligonucleotide
  Sense strand starting at position 714 of SEQ ID NO: 586411
ugggaaugcgcacgagaau

SEQ ID NO: 715917 - RNA, 19 nt, Artificial Sequence
  Description of Artificial Sequence: Synthetic oligonucleotide
  Antisense strand to SEQ ID NO: 715916
auucucgugcgcauuccca

SEQ ID NO: 715918 - RNA, 19 nt, Artificial Sequence
  Description of Artificial Sequence: Synthetic oligonucleotide
  Sense strand starting at position 2280 of SEQ ID NO: 586411
gggaaguugccgucgucaa

SEQ ID NO: 715919 - RNA, 19 nt, Artificial Sequence
  Description of Artificial Sequence: Synthetic oligonucleotide
  Antisense strand to SEQ ID NO: 715918
uugacgacggcaacuuccc

SEQ ID NO: 715920 - RNA, 19 nt, Artificial Sequence
  Description of Artificial Sequence: Synthetic oligonucleotide
  Sense strand starting at position 2281 of SEQ ID NO: 586411
ggaaguugccgucgucaaa

SEQ ID NO: 715921 - RNA, 19 nt, Artificial Sequence
  Description of Artificial Sequence: Synthetic oligonucleotide
  Antisense strand to SEQ ID NO: 715920
uuugacgacggcaacuucc

SEQ ID NO: 715922 - RNA, 19 nt, Artificial Sequence
  Description of Artificial Sequence: Synthetic oligonucleotide
  Sense strand starting at position 2553 of SEQ ID NO: 586411
ggucuuguuaucgggcauu

SEQ ID NO: 715923 - RNA, 19 nt, Artificial Sequence
  Description of Artificial Sequence: Synthetic oligonucleotide
  Antisense strand to SEQ ID NO: 715922
aaugcccgauaacaagacc

SEQ ID NO: 715924 - RNA, 19 nt, Artificial Sequence
  Description of Artificial Sequence: Synthetic oligonucleotide
  Sense strand starting at position 2566 of SEQ ID NO: 586411
ggcauuccggcgugagaac

SEQ ID NO: 715925 - RNA, 19 nt, Artificial Sequence
  Description of Artificial Sequence: Synthetic oligonucleotide
  Antisense strand to SEQ ID NO: 715924
guucucacgccggaaugcc

SEQ ID NO: 715926 - RNA, 19 nt, Artificial Sequence
  Description of Artificial Sequence: Synthetic oligonucleotide
  Sense strand starting at position 2641 of SEQ ID NO: 586411
cguugugaccuugacaacu

SEQ ID NO: 715927 - RNA, 19 nt, Artificial Sequence
  Description of Artificial Sequence: Synthetic oligonucleotide
  Antisense strand to SEQ ID NO: 715926
aguugucaaggucacaacg

SEQ ID NO: 715928 - RNA, 19 nt, Artificial Sequence
  Description of Artificial Sequence: Synthetic oligonucleotide
  Sense strand starting at position 2816 of SEQ ID NO: 586411
uuaauauuguggccaacua

SEQ ID NO: 715929 - RNA, 19 nt, Artificial Sequence
  Description of Artificial Sequence: Synthetic oligonucleotide
  Antisense strand to SEQ ID NO: 715928
uaguuggccacaauauuaa

SEQ ID NO: 715930 - RNA, 19 nt, Artificial Sequence
  Description of Artificial Sequence: Synthetic oligonucleotide
  Sense strand starting at position 2922 of SEQ ID NO: 586411
ucacuuuacuuuccaguga

SEQ ID NO: 715931 - RNA, 19 nt, Artificial Sequence
  Description of Artificial Sequence: Synthetic oligonucleotide
  Antisense strand to SEQ ID NO: 715930
ucacuggaaaguaaaguga

SEQ ID NO: 715932 - RNA, 19 nt, Artificial Sequence
  Description of Artificial Sequence: Synthetic oligonucleotide
  Sense strand starting at position 3066 of SEQ ID NO: 586411
cugaauuuguaacagagua

SEQ ID NO: 715933 - RNA, 19 nt, Artificial Sequence
  Description of Artificial Sequence: Synthetic oligonucleotide
  Antisense strand to SEQ ID NO: 715932
uacucuguuacaaauucag

SEQ ID NO: 715934 - RNA, 19 nt, Artificial Sequence
  Description of Artificial Sequence: Synthetic oligonucleotide
  Sense strand starting at position 3093 of SEQ ID NO: 586411
gcagguacugaaugaauaa

SEQ ID NO: 715935 - RNA, 19 nt, Artificial Sequence
  Description of Artificial Sequence: Synthetic oligonucleotide
  Antisense strand to SEQ ID NO: 715934
uuauucauucaguaccugc

SEQ ID NO: 715936 - RNA, 19 nt, Artificial Sequence
  Description of Artificial Sequence: Synthetic oligonucleotide
  Sense strand starting at position 3189 of SEQ ID NO: 586411
gugcauauguauguggaga

SEQ ID NO: 715937 - RNA, 19 nt, Artificial Sequence
  Description of Artificial Sequence: Synthetic oligonucleotide
  Antisense strand to SEQ ID NO: 715936
ucuccacauacauaugcac

SEQ ID NO: 715938 - RNA, 19 nt, Artificial Sequence
  Description of Artificial Sequence: Synthetic oligonucleotide
  Sense strand starting at position 3190 of SEQ ID NO: 586411
ugcauauguauguggagau

SEQ ID NO: 715939 - RNA, 19 nt, Artificial Sequence
  Description of Artificial Sequence: Synthetic oligonucleotide
  Antisense strand to SEQ ID NO: 715938
aucuccacauacauaugca

SEQ ID NO: 715940 - RNA, 19 nt, Artificial Sequence
  Description of Artificial Sequence: Synthetic oligonucleotide
  Sense strand starting at position 3202 of SEQ ID NO: 586411
uggagauuauaucacauau

SEQ ID NO: 715941 - RNA, 19 nt, Artificial Sequence
  Description of Artificial Sequence: Synthetic oligonucleotide
  Antisense strand to SEQ ID NO: 715940
auaugugauauaaucucca

SEQ ID NO: 715942 - RNA, 19 nt, Artificial Sequence
  Description of Artificial Sequence: Synthetic oligonucleotide
  Sense strand starting at position 3423 of SEQ ID NO: 586411
gcaaguaauugcuuuguug

SEQ ID NO: 715943 - RNA, 19 nt, Artificial Sequence
  Description of Artificial Sequence: Synthetic oligonucleotide
  Antisense strand to SEQ ID NO: 715942
caacaaagcaauuacuugc

SEQ ID NO: 715944 - RNA, 19 nt, Artificial Sequence
  Description of Artificial Sequence: Synthetic oligonucleotide
  Sense strand starting at position 3425 of SEQ ID NO: 586411
aaguaauugcuuuguugac

SEQ ID NO: 715945 - RNA, 19 nt, Artificial Sequence
  Description of Artificial Sequence: Synthetic oligonucleotide
  Antisense strand to SEQ ID NO: 715944
gucaacaaagcaauuacuu

SEQ ID NO: 715946 - RNA, 19 nt, Artificial Sequence
  Description of Artificial Sequence: Synthetic oligonucleotide
  Sense strand starting at position 3426 of SEQ ID NO: 586411
aguaauugcuuuguugaca

SEQ ID NO: 715947 - RNA, 19 nt, Artificial Sequence
  Description of Artificial Sequence: Synthetic oligonucleotide
  Antisense strand to SEQ ID NO: 715946
ugucaacaaagcaauuacu

SEQ ID NO: 715948 - RNA, 19 nt, Artificial Sequence
  Description of Artificial Sequence: Synthetic oligonucleotide
  Sense strand starting at position 3427 of SEQ ID NO: 586411
guaauugcuuuguugacac

SEQ ID NO: 715949 - RNA, 19 nt, Artificial Sequence
  Description of Artificial Sequence: Synthetic oligonucleotide
  Antisense strand to SEQ ID NO: 715948
gugucaacaaagcaauuac

SEQ ID NO: 715950 - RNA, 19 nt, Artificial Sequence
  Description of Artificial Sequence: Synthetic oligonucleotide
  Sense strand starting at position 3471 of SEQ ID NO: 586411
gcagcuuuccucuacugga

SEQ ID NO: 715951 - RNA, 19 nt, Artificial Sequence
  Description of Artificial Sequence: Synthetic oligonucleotide
  Antisense strand to SEQ ID NO: 715950
uccaguagaggaaagcugc

SEQ ID NO: 715952 - RNA, 19 nt, Artificial Sequence
  Description of Artificial Sequence: Synthetic oligonucleotide
  Sense strand starting at position 3874 of SEQ ID NO: 586411
aagagaaguuuccauguug

SEQ ID NO: 715953 - RNA, 19 nt, Artificial Sequence
  Description of Artificial Sequence: Synthetic oligonucleotide
  Antisense strand to SEQ ID NO: 715952
caacauggaaacuucucuu

SEQ ID NO: 715954 - RNA, 19 nt, Artificial Sequence
  Description of Artificial Sequence: Synthetic oligonucleotide
  Sense strand starting at position 3904 of SEQ ID NO: 586411
gcccaaguguccucagcuu

SEQ ID NO: 715955 - RNA, 19 nt, Artificial Sequence
  Description of Artificial Sequence: Synthetic oligonucleotide
  Antisense strand to SEQ ID NO: 715954
aagcugaggacacuugggc

SEQ ID NO: 715956 - RNA, 19 nt, Artificial Sequence
  Description of Artificial Sequence: Synthetic oligonucleotide
  Sense strand starting at position 3959 of SEQ ID NO: 586411
gugguuaauugccugcaga

SEQ ID NO: 715957 - RNA, 19 nt, Artificial Sequence
  Description of Artificial Sequence: Synthetic oligonucleotide
  Antisense strand to SEQ ID NO: 715956
ucugcaggcaauuaaccac

SEQ ID NO: 715958 - RNA, 19 nt, Artificial Sequence
  Description of Artificial Sequence: Synthetic oligonucleotide
  Sense strand starting at position 3960 of SEQ ID NO: 586411
ugguuaauugccugcagaa

SEQ ID NO: 715959 - RNA, 19 nt, Artificial Sequence
  Description of Artificial Sequence: Synthetic oligonucleotide
  Antisense strand to SEQ ID NO: 715958
uucugcaggcaauuaacca

SEQ ID NO: 715960 - RNA, 19 nt, Artificial Sequence
  Description of Artificial Sequence: Synthetic oligonucleotide
  Sense strand starting at position 3962 of SEQ ID NO: 586411
guuaauugccugcagaaag

SEQ ID NO: 715961 - RNA, 19 nt, Artificial Sequence
  Description of Artificial Sequence: Synthetic oligonucleotide
  Antisense strand to SEQ ID NO: 715960
cuuucugcaggcaauuaac

SEQ ID NO: 715962 - RNA, 19 nt, Artificial Sequence
  Description of Artificial Sequence: Synthetic oligonucleotide
  Sense strand starting at position 80 of SEQ ID NO: 586412
ugagccagaucucuguuaa

SEQ ID NO: 715963 - RNA, 19 nt, Artificial Sequence
  Description of Artificial Sequence: Synthetic oligonucleotide
  Antisense strand to SEQ ID NO: 715962
uuaacagagaucuggcuca

SEQ ID NO: 715964 - RNA, 19 nt, Artificial Sequence
  Description of Artificial Sequence: Synthetic oligonucleotide
  Sense strand starting at position 81 of SEQ ID NO: 586412
gagccagaucucuguuaau

SEQ ID NO: 715965 - RNA, 19 nt, Artificial Sequence
  Description of Artificial Sequence: Synthetic oligonucleotide
  Antisense strand to SEQ ID NO: 715964
auuaacagagaucuggcuc

SEQ ID NO: 715966 - RNA, 19 nt, Artificial Sequence
  Description of Artificial Sequence: Synthetic oligonucleotide
  Sense strand starting at position 118 of SEQ ID NO: 586412
auuuguugguuucucguua

SEQ ID NO: 715967 - RNA, 19 nt, Artificial Sequence
  Description of Artificial Sequence: Synthetic oligonucleotide
  Antisense strand to SEQ ID NO: 715966
uaacgagaaaccaacaaau

SEQ ID NO: 715968 - RNA, 19 nt, Artificial Sequence
  Description of Artificial Sequence: Synthetic oligonucleotide
  Sense strand starting at position 258 of SEQ ID NO: 586412
ucuaauggaucuucucuga

SEQ ID NO: 715969 - RNA, 19 nt, Artificial Sequence
  Description of Artificial Sequence: Synthetic oligonucleotide
  Antisense strand to SEQ ID NO: 715968
ucagagaagauccauuaga

SEQ ID NO: 715970 - RNA, 19 nt, Artificial Sequence
  Description of Artificial Sequence: Synthetic oligonucleotide
  Sense strand starting at position 262 of SEQ ID NO: 586412
auggaucuucucugaauag

SEQ ID NO: 715971 - RNA, 19 nt, Artificial Sequence
  Description of Artificial Sequence: Synthetic oligonucleotide
  Antisense strand to SEQ ID NO: 715970
cuauucagagaagauccau

SEQ ID NO: 715972 - RNA, 19 nt, Artificial Sequence
  Description of Artificial Sequence: Synthetic oligonucleotide
  Sense strand starting at position 322 of SEQ ID NO: 586412
ucacuuauuugacagugaa

SEQ ID NO: 715973 - RNA, 19 nt, Artificial Sequence
  Description of Artificial Sequence: Synthetic oligonucleotide
  Antisense strand to SEQ ID NO: 715972
uucacugucaaauaaguga

SEQ ID NO: 715974 - RNA, 19 nt, Artificial Sequence
  Description of Artificial Sequence: Synthetic oligonucleotide
  Sense strand starting at position 418 of SEQ ID NO: 586412
augguaucucagcaucaaa

SEQ ID NO: 715975 - RNA, 19 nt, Artificial Sequence
  Description of Artificial Sequence: Synthetic oligonucleotide
  Antisense strand to SEQ ID NO: 715974
uuugaugcugagauaccau

SEQ ID NO: 715976 - RNA, 19 nt, Artificial Sequence
  Description of Artificial Sequence: Synthetic oligonucleotide
  Sense strand starting at position 642 of SEQ ID NO: 586412
agugucagcauuugucuca

SEQ ID NO: 715977 - RNA, 19 nt, Artificial Sequence
  Description of Artificial Sequence: Synthetic oligonucleotide
  Antisense strand to SEQ ID NO: 715976
ugagacaaaugcugacacu

SEQ ID NO: 715978 - RNA, 19 nt, Artificial Sequence
  Description of Artificial Sequence: Synthetic oligonucleotide
  Sense strand starting at position 643 of SEQ ID NO: 586412
gugucagcauuugucucaa

SEQ ID NO: 715979 - RNA, 19 nt, Artificial Sequence
  Description of Artificial Sequence: Synthetic oligonucleotide
  Antisense strand to SEQ ID NO: 715978
uugagacaaaugcugacac

SEQ ID NO: 715980 - RNA, 19 nt, Artificial Sequence
  Description of Artificial Sequence: Synthetic oligonucleotide
  Sense strand starting at position 645 of SEQ ID NO: 586412
gucagcauuugucucaacu

SEQ ID NO: 715981 - RNA, 19 nt, Artificial Sequence
  Description of Artificial Sequence: Synthetic oligonucleotide
  Antisense strand to SEQ ID NO: 715980
aguugagacaaaugcugac

SEQ ID NO: 715982 - RNA, 19 nt, Artificial Sequence
  Description of Artificial Sequence: Synthetic oligonucleotide
  Sense strand starting at position 752 of SEQ ID NO: 586412
ugggcacuuuaaucagaaa

SEQ ID NO: 715983 - RNA, 19 nt, Artificial Sequence
  Description of Artificial Sequence: Synthetic oligonucleotide
  Antisense strand to SEQ ID NO: 715982
uuucugauuaaagugccca

SEQ ID NO: 715984 - RNA, 19 nt, Artificial Sequence
  Description of Artificial Sequence: Synthetic oligonucleotide
  Sense strand starting at position 809 of SEQ ID NO: 586412
acugaaagguaagcucauu

SEQ ID NO: 715985 - RNA, 19 nt, Artificial Sequence
  Description of Artificial Sequence: Synthetic oligonucleotide
  Antisense strand to SEQ ID NO: 715984
aaugagcuuaccuuucagu

SEQ ID NO: 715986 - RNA, 19 nt, Artificial Sequence
  Description of Artificial Sequence: Synthetic oligonucleotide
  Sense strand starting at position 827 of SEQ ID NO: 586412
uuugaagacugggcuucua

SEQ ID NO: 715987 - RNA, 19 nt, Artificial Sequence
  Description of Artificial Sequence: Synthetic oligonucleotide
  Antisense strand to SEQ ID NO: 715986
uagaagcccagucuucaaa

SEQ ID NO: 715988 - RNA, 19 nt, Artificial Sequence
  Description of Artificial Sequence: Synthetic oligonucleotide
  Sense strand starting at position 876 of SEQ ID NO: 586412
gcagauaaguaucugcaau

SEQ ID NO: 715989 - RNA, 19 nt, Artificial Sequence
  Description of Artificial Sequence: Synthetic oligonucleotide
  Antisense strand to SEQ ID NO: 715988
auugcagauacuuaucugc

SEQ ID NO: 715990 - RNA, 19 nt, Artificial Sequence
  Description of Artificial Sequence: Synthetic oligonucleotide
  Sense strand starting at position 947 of SEQ ID NO: 586412
cggagucaaguuuauaaac

SEQ ID NO: 715991 - RNA, 19 nt, Artificial Sequence
  Description of Artificial Sequence: Synthetic oligonucleotide
  Antisense strand to SEQ ID NO: 715990
guuuauaaacuugacuccg

SEQ ID NO: 715992 - RNA, 19 nt, Artificial Sequence
  Description of Artificial Sequence: Synthetic oligonucleotide
  Sense strand starting at position 987 of SEQ ID NO: 586412
ucacauuggugaccaugua

SEQ ID NO: 715993 - RNA, 19 nt, Artificial Sequence
  Description of Artificial Sequence: Synthetic oligonucleotide
  Antisense strand to SEQ ID NO: 715992
uacauggucaccaauguga

SEQ ID NO: 715994 - RNA, 19 nt, Artificial Sequence
  Description of Artificial Sequence: Synthetic oligonucleotide
  Sense strand starting at position 988 of SEQ ID NO: 586412
cacauuggugaccauguaa

SEQ ID NO: 715995 - RNA, 19 nt, Artificial Sequence
  Description of Artificial Sequence: Synthetic oligonucleotide
  Antisense strand to SEQ ID NO: 715994
uuacauggucaccaaugug

SEQ ID NO: 715996 - RNA, 19 nt, Artificial Sequence
  Description of Artificial Sequence: Synthetic oligonucleotide
  Sense strand starting at position 1091 of SEQ ID NO: 586412
gagauuuccucaggaucug

SEQ ID NO: 715997 - RNA, 19 nt, Artificial Sequence
  Description of Artificial Sequence: Synthetic oligonucleotide
  Antisense strand to SEQ ID NO: 715996
cagauccugaggaaaucuc

SEQ ID NO: 715998 - RNA, 19 nt, Artificial Sequence
  Description of Artificial Sequence: Synthetic oligonucleotide
  Sense strand starting at position 1191 of SEQ ID NO: 586412
cuaauuacccuccgacagu

SEQ ID NO: 715999 - RNA, 19 nt, Artificial Sequence
  Description of Artificial Sequence: Synthetic oligonucleotide
  Antisense strand to SEQ ID NO: 715998
acugucggaggguaauuag

SEQ ID NO: 716000 - RNA, 19 nt, Artificial Sequence
  Description of Artificial Sequence: Synthetic oligonucleotide
  Sense strand starting at position 1499 of SEQ ID NO: 586412
ccaugcaauuaucuggaga

SEQ ID NO: 716001 - RNA, 19 nt, Artificial Sequence
  Description of Artificial Sequence: Synthetic oligonucleotide
  Antisense strand to SEQ ID NO: 716000
ucuccagauaauugcaugg

SEQ ID NO: 716002 - RNA, 19 nt, Artificial Sequence
  Description of Artificial Sequence: Synthetic oligonucleotide
  Sense strand starting at position 1635 of SEQ ID NO: 586412
gccgaaagcgccucugaca

SEQ ID NO: 716003 - RNA, 19 nt, Artificial Sequence
  Description of Artificial Sequence: Synthetic oligonucleotide
  Antisense strand to SEQ ID NO: 716002
ugucagaggcgcuuucggc

SEQ ID NO: 716004 - RNA, 19 nt, Artificial Sequence
  Description of Artificial Sequence: Synthetic oligonucleotide
  Sense strand starting at position 1756 of SEQ ID NO: 586412
cagauuucgggcugucaau

SEQ ID NO: 716005 - RNA, 19 nt, Artificial Sequence
  Description of Artificial Sequence: Synthetic oligonucleotide
  Antisense strand to SEQ ID NO: 716004
auugacagcccgaaaucug

SEQ ID NO: 716006 - RNA, 19 nt, Artificial Sequence
  Description of Artificial Sequence: Synthetic oligonucleotide
  Sense strand starting at position 1880 of SEQ ID NO: 586412
cucgauuuccucuguaacc

SEQ ID NO: 716007 - RNA, 19 nt, Artificial Sequence
  Description of Artificial Sequence: Synthetic oligonucleotide
  Antisense strand to SEQ ID NO: 716006
gguuacagaggaaaucgag

SEQ ID NO: 716008 - RNA, 19 nt, Artificial Sequence
  Description of Artificial Sequence: Synthetic oligonucleotide
  Sense strand starting at position 1968 of SEQ ID NO: 586412
ggguguuagguccacuauu

SEQ ID NO: 716009 - RNA, 19 nt, Artificial Sequence
  Description of Artificial Sequence: Synthetic oligonucleotide
  Antisense strand to SEQ ID NO: 716008
aauaguggaccuaacaccc

SEQ ID NO: 716010 - RNA, 19 nt, Artificial Sequence
  Description of Artificial Sequence: Synthetic oligonucleotide
  Sense strand starting at position 2198 of SEQ ID NO: 586412
accauuaugguuuaucgaa

SEQ ID NO: 716011 - RNA, 19 nt, Artificial Sequence
  Description of Artificial Sequence: Synthetic oligonucleotide
  Antisense strand to SEQ ID NO: 716010
uucgauaaaccauaauggu

SEQ ID NO: 716012 - RNA, 19 nt, Artificial Sequence
  Description of Artificial Sequence: Synthetic oligonucleotide
  Sense strand starting at position 2200 of SEQ ID NO: 586412
cauuaugguuuaucgaaac

SEQ ID NO: 716013 - RNA, 19 nt, Artificial Sequence
  Description of Artificial Sequence: Synthetic oligonucleotide
  Antisense strand to SEQ ID NO: 716012
guuucgauaaaccauaaug

SEQ ID NO: 716014 - RNA, 19 nt, Artificial Sequence
  Description of Artificial Sequence: Synthetic oligonucleotide
  Sense strand starting at position 2260 of SEQ ID NO: 586412
guucgugggacagaaacau

SEQ ID NO: 716015 - RNA, 19 nt, Artificial Sequence
  Description of Artificial Sequence: Synthetic oligonucleotide
  Antisense strand to SEQ ID NO: 716014
auguuucugucccacgaac

SEQ ID NO: 716016 - RNA, 19 nt, Artificial Sequence
  Description of Artificial Sequence: Synthetic oligonucleotide
  Sense strand starting at position 2307 of SEQ ID NO: 586412
gaugcagaauugcugauua

SEQ ID NO: 716017 - RNA, 19 nt, Artificial Sequence
  Description of Artificial Sequence: Synthetic oligonucleotide
  Antisense strand to SEQ ID NO: 716016
uaaucagcaauucugcauc

SEQ ID NO: 716018 - RNA, 19 nt, Artificial Sequence
  Description of Artificial Sequence: Synthetic oligonucleotide
  Sense strand starting at position 2312 of SEQ ID NO: 586412
agaauugcugauuagcaga

SEQ ID NO: 716019 - RNA, 19 nt, Artificial Sequence
  Description of Artificial Sequence: Synthetic oligonucleotide
  Antisense strand to SEQ ID NO: 716018
ucugcuaaucagcaauucu

SEQ ID NO: 716020 - RNA, 19 nt, Artificial Sequence
  Description of Artificial Sequence: Synthetic oligonucleotide
  Sense strand starting at position 2521 of SEQ ID NO: 586412
gagggugucacuuacugua

SEQ ID NO: 716021 - RNA, 19 nt, Artificial Sequence
  Description of Artificial Sequence: Synthetic oligonucleotide
  Antisense strand to SEQ ID NO: 716020
uacaguaagugacacccuc

SEQ ID NO: 716022 - RNA, 19 nt, Artificial Sequence
  Description of Artificial Sequence: Synthetic oligonucleotide
  Sense strand starting at position 2700 of SEQ ID NO: 586412
acaguaaagcgucacuuua

SEQ ID NO: 716023 - RNA, 19 nt, Artificial Sequence
  Description of Artificial Sequence: Synthetic oligonucleotide
  Antisense strand to SEQ ID NO: 716022
uaaagugacgcuuuacugu

SEQ ID NO: 716024 - RNA, 19 nt, Artificial Sequence
  Description of Artificial Sequence: Synthetic oligonucleotide
  Sense strand starting at position 2849 of SEQ ID NO: 586412
acgugcugcaguucucaau

SEQ ID NO: 716025 - RNA, 19 nt, Artificial Sequence
  Description of Artificial Sequence: Synthetic oligonucleotide
  Antisense strand to SEQ ID NO: 716024
auugagaacugcagcacgu

SEQ ID NO: 716026 - RNA, 19 nt, Artificial Sequence
  Description of Artificial Sequence: Synthetic oligonucleotide
  Sense strand starting at position 2850 of SEQ ID NO: 586412
cgugcugcaguucucaauu

SEQ ID NO: 716027 - RNA, 19 nt, Artificial Sequence
  Description of Artificial Sequence: Synthetic oligonucleotide
  Antisense strand to SEQ ID NO: 716026
aauugagaacugcagcacg

SEQ ID NO: 716028 - RNA, 19 nt, Artificial Sequence
  Description of Artificial Sequence: Synthetic oligonucleotide
  Sense strand starting at position 3201 of SEQ ID NO: 586412
guacuaucugagggugcaa

SEQ ID NO: 716029 - RNA, 19 nt, Artificial Sequence
  Description of Artificial Sequence: Synthetic oligonucleotide
  Antisense strand to SEQ ID NO: 716028
uugcacccucagauaguac

SEQ ID NO: 716030 - RNA, 19 nt, Artificial Sequence
  Description of Artificial Sequence: Synthetic oligonucleotide
  Sense strand starting at position 3255 of SEQ ID NO: 586412
cccugcacuccuggaauaa

SEQ ID NO: 716031 - RNA, 19 nt, Artificial Sequence
  Description of Artificial Sequence: Synthetic oligonucleotide
  Antisense strand to SEQ ID NO: 716030
uuauuccaggagugcaggg

SEQ ID NO: 716032 - RNA, 19 nt, Artificial Sequence
  Description of Artificial Sequence: Synthetic oligonucleotide
  Sense strand starting at position 3281 of SEQ ID NO: 586412
ccuguaaucugagcaacag

SEQ ID NO: 716033 - RNA, 19 nt, Artificial Sequence
  Description of Artificial Sequence: Synthetic oligonucleotide
  Antisense strand to SEQ ID NO: 716032
cuguugcucagauuacagg

SEQ ID NO: 716034 - RNA, 19 nt, Artificial Sequence
  Description of Artificial Sequence: Synthetic oligonucleotide
  Sense strand starting at position 3282 of SEQ ID NO: 586412
cuguaaucugagcaacagu

SEQ ID NO: 716035 - RNA, 19 nt, Artificial Sequence
  Description of Artificial Sequence: Synthetic oligonucleotide
  Antisense strand to SEQ ID NO: 716034
acuguugcucagauuacag

SEQ ID NO: 716036 - RNA, 19 nt, Artificial Sequence
  Description of Artificial Sequence: Synthetic oligonucleotide
  Sense strand starting at position 3291 of SEQ ID NO: 586412
gagcaacaguuuccaaaga

SEQ ID NO: 716037 - RNA, 19 nt, Artificial Sequence
  Description of Artificial Sequence: Synthetic oligonucleotide
  Antisense strand to SEQ ID NO: 716036
ucuuuggaaacuguugcuc

SEQ ID NO: 716038 - RNA, 19 nt, Artificial Sequence
  Description of Artificial Sequence: Synthetic oligonucleotide
  Sense strand starting at position 3761 of SEQ ID NO: 586412
gauaauuccggcgugcacu

SEQ ID NO: 716039 - RNA, 19 nt, Artificial Sequence
  Description of Artificial Sequence: Synthetic oligonucleotide
  Antisense strand to SEQ ID NO: 716038
agugcacgccggaauuauc

SEQ ID NO: 716040 - RNA, 19 nt, Artificial Sequence
  Description of Artificial Sequence: Synthetic oligonucleotide
  Sense strand starting at position 3832 of SEQ ID NO: 586412
gucuuaaggacugggaacu

SEQ ID NO: 716041 - RNA, 19 nt, Artificial Sequence
  Description of Artificial Sequence: Synthetic oligonucleotide
  Antisense strand to SEQ ID NO: 716040
aguucccaguccuuaagac

SEQ ID NO: 716042 - RNA, 19 nt, Artificial Sequence
  Description of Artificial Sequence: Synthetic oligonucleotide
  Sense strand starting at position 91 of SEQ ID NO: 586413
ccaugcaauuaucuggaga

SEQ ID NO: 716043 - RNA, 19 nt, Artificial Sequence
  Description of Artificial Sequence: Synthetic oligonucleotide
  Antisense strand to SEQ ID NO: 716042
ucuccagauaauugcaugg

SEQ ID NO: 716044 - RNA, 19 nt, Artificial Sequence
  Description of Artificial Sequence: Synthetic oligonucleotide
  Sense strand starting at position 227 of SEQ ID NO: 586413
gccgaaagcgccucugaca

SEQ ID NO: 716045 - RNA, 19 nt, Artificial Sequence
  Description of Artificial Sequence: Synthetic oligonucleotide
  Antisense strand to SEQ ID NO: 716044
ugucagaggcgcuuucggc

SEQ ID NO: 716046 - RNA, 19 nt, Artificial Sequence
  Description of Artificial Sequence: Synthetic oligonucleotide
  Sense strand starting at position 348 of SEQ ID NO: 586413
cagauuucgggcugucaau

SEQ ID NO: 716047 - RNA, 19 nt, Artificial Sequence
  Description of Artificial Sequence: Synthetic oligonucleotide
  Antisense strand to SEQ ID NO: 716046
auugacagcccgaaaucug

SEQ ID NO: 716048 - RNA, 19 nt, Artificial Sequence
  Description of Artificial Sequence: Synthetic oligonucleotide
  Sense strand starting at position 472 of SEQ ID NO: 586413
cucgauuuccucuguaacc

SEQ ID NO: 716049 - RNA, 19 nt, Artificial Sequence
  Description of Artificial Sequence: Synthetic oligonucleotide
  Antisense strand to SEQ ID NO: 716048
gguuacagaggaaaucgag

SEQ ID NO: 716050 - RNA, 19 nt, Artificial Sequence
  Description of Artificial Sequence: Synthetic oligonucleotide
  Sense strand starting at position 560 of SEQ ID NO: 586413
ggguguuagguccacuauu

SEQ ID NO: 716051 - RNA, 19 nt, Artificial Sequence
  Description of Artificial Sequence: Synthetic oligonucleotide
  Antisense strand to SEQ ID NO: 716050
aauaguggaccuaacaccc

SEQ ID NO: 716052 - RNA, 19 nt, Artificial Sequence
  Description of Artificial Sequence: Synthetic oligonucleotide
  Sense strand starting at position 577 of SEQ ID NO: 586413
uugggcugguuuccuuaaa

SEQ ID NO: 716053 - RNA, 19 nt, Artificial Sequence
  Description of Artificial Sequence: Synthetic oligonucleotide
  Antisense strand to SEQ ID NO: 716052
uuuaaggaaaccagcccaa

SEQ ID NO: 716054 - RNA, 19 nt, Artificial Sequence
  Description of Artificial Sequence: Synthetic oligonucleotide
  Sense strand starting at position 790 of SEQ ID NO: 586413
accauuaugguuuaucgaa

SEQ ID NO: 716055 - RNA, 19 nt, Artificial Sequence
  Description of Artificial Sequence: Synthetic oligonucleotide
  Antisense strand to SEQ ID NO: 716054
uucgauaaaccauaauggu

SEQ ID NO: 716056 - RNA, 19 nt, Artificial Sequence
  Description of Artificial Sequence: Synthetic oligonucleotide
  Sense strand starting at position 792 of SEQ ID NO: 586413
cauuaugguuuaucgaaac

SEQ ID NO: 716057 - RNA, 19 nt, Artificial Sequence
  Description of Artificial Sequence: Synthetic oligonucleotide
  Antisense strand to SEQ ID NO: 716056
guuucgauaaaccauaaug

SEQ ID NO: 716058 - RNA, 19 nt, Artificial Sequence
  Description of Artificial Sequence: Synthetic oligonucleotide
  Sense strand starting at position 852 of SEQ ID NO: 586413
guucgugggacagaaacau

SEQ ID NO: 716059 - RNA, 19 nt, Artificial Sequence
  Description of Artificial Sequence: Synthetic oligonucleotide
  Antisense strand to SEQ ID NO: 716058
auguuucugucccacgaac

SEQ ID NO: 716060 - RNA, 19 nt, Artificial Sequence
  Description of Artificial Sequence: Synthetic oligonucleotide
  Sense strand starting at position 899 of SEQ ID NO: 586413
gaugcagaauugcugauua

SEQ ID NO: 716061 - RNA, 19 nt, Artificial Sequence
  Description of Artificial Sequence: Synthetic oligonucleotide
  Antisense strand to SEQ ID NO: 716060
uaaucagcaauucugcauc

SEQ ID NO: 716062 - RNA, 19 nt, Artificial Sequence
  Description of Artificial Sequence: Synthetic oligonucleotide
  Sense strand starting at position 904 of SEQ ID NO: 586413
agaauugcugauuagcaga

SEQ ID NO: 716063 - RNA, 19 nt, Artificial Sequence
  Description of Artificial Sequence: Synthetic oligonucleotide
  Antisense strand to SEQ ID NO: 716062
ucugcuaaucagcaauucu

SEQ ID NO: 716064 - RNA, 19 nt, Artificial Sequence
  Description of Artificial Sequence: Synthetic oligonucleotide
  Sense strand starting at position 1113 of SEQ ID NO: 586413
gagggugucacuuacugua

SEQ ID NO: 716065 - RNA, 19 nt, Artificial Sequence
  Description of Artificial Sequence: Synthetic oligonucleotide
  Antisense strand to SEQ ID NO: 716064
uacaguaagugacacccuc

SEQ ID NO: 716066 - RNA, 19 nt, Artificial Sequence
  Description of Artificial Sequence: Synthetic oligonucleotide
  Sense strand starting at position 1292 of SEQ ID NO: 586413
acaguaaagcgucacuuua

SEQ ID NO: 716067 - RNA, 19 nt, Artificial Sequence
  Description of Artificial Sequence: Synthetic oligonucleotide
  Antisense strand to SEQ ID NO: 716066
uaaagugacgcuuuacugu

SEQ ID NO: 716068 - RNA, 19 nt, Artificial Sequence
  Description of Artificial Sequence: Synthetic oligonucleotide
  Sense strand starting at position 1441 of SEQ ID NO: 586413
acgugcugcaguucucaau

SEQ ID NO: 716069 - RNA, 19 nt, Artificial Sequence
  Description of Artificial Sequence: Synthetic oligonucleotide
  Antisense strand to SEQ ID NO: 716068
auugagaacugcagcacgu

SEQ ID NO: 716070 - RNA, 19 nt, Artificial Sequence
  Description of Artificial Sequence: Synthetic oligonucleotide
  Sense strand starting at position 1442 of SEQ ID NO: 586413
cgugcugcaguucucaauu

SEQ ID NO: 716071 - RNA, 19 nt, Artificial Sequence
  Description of Artificial Sequence: Synthetic oligonucleotide
  Antisense strand to SEQ ID NO: 716070
aauugagaacugcagcacg

SEQ ID NO: 716072 - RNA, 19 nt, Artificial Sequence
  Description of Artificial Sequence: Synthetic oligonucleotide
  Sense strand starting at position 1793 of SEQ ID NO: 586413
guacuaucugagggugcaa

SEQ ID NO: 716073 - RNA, 19 nt, Artificial Sequence
  Description of Artificial Sequence: Synthetic oligonucleotide
  Antisense strand to SEQ ID NO: 716072
uugcacccucagauaguac

SEQ ID NO: 716074 - RNA, 19 nt, Artificial Sequence
  Description of Artificial Sequence: Synthetic oligonucleotide
  Sense strand starting at position 1847 of SEQ ID NO: 586413
cccugcacuccuggaauaa

SEQ ID NO: 716075 - RNA, 19 nt, Artificial Sequence
  Description of Artificial Sequence: Synthetic oligonucleotide
  Antisense strand to SEQ ID NO: 716074
uuauuccaggagugcaggg

SEQ ID NO: 716076 - RNA, 19 nt, Artificial Sequence
  Description of Artificial Sequence: Synthetic oligonucleotide
  Sense strand starting at position 1873 of SEQ ID NO: 586413
ccuguaaucugagcaacag

SEQ ID NO: 716077 - RNA, 19 nt, Artificial Sequence
  Description of Artificial Sequence: Synthetic oligonucleotide
  Antisense strand to SEQ ID NO: 716076
cuguugcucagauuacagg

SEQ ID NO: 716078 - RNA, 19 nt, Artificial Sequence
  Description of Artificial Sequence: Synthetic oligonucleotide
  Sense strand starting at position 1874 of SEQ ID NO: 586413
cuguaaucugagcaacagu

SEQ ID NO: 716079 - RNA, 19 nt, Artificial Sequence
  Description of Artificial Sequence: Synthetic oligonucleotide
  Antisense strand to SEQ ID NO: 716078
acuguugcucagauuacag

SEQ ID NO: 716080 - RNA, 19 nt, Artificial Sequence
  Description of Artificial Sequence: Synthetic oligonucleotide
  Sense strand starting at position 1883 of SEQ ID NO: 586413
gagcaacaguuuccaaaga

SEQ ID NO: 716081 - RNA, 19 nt, Artificial Sequence
  Description of Artificial Sequence: Synthetic oligonucleotide
  Antisense strand to SEQ ID NO: 716080
ucuuuggaaacuguugcuc

SEQ ID NO: 716082 - RNA, 19 nt, Artificial Sequence
  Description of Artificial Sequence: Synthetic oligonucleotide
  Sense strand starting at position 2243 of SEQ ID NO: 586413
uuguccugucccugaaaca

SEQ ID NO: 716083 - RNA, 19 nt, Artificial Sequence
  Description of Artificial Sequence: Synthetic oligonucleotide
  Antisense strand to SEQ ID NO: 716082
uguuucagggacaggacaa

SEQ ID NO: 716084 - RNA, 19 nt, Artificial Sequence
  Description of Artificial Sequence: Synthetic oligonucleotide
  Sense strand starting at position 2353 of SEQ ID NO: 586413
gauaauuccggcgugcacu

SEQ ID NO: 716085 - RNA, 19 nt, Artificial Sequence
  Description of Artificial Sequence: Synthetic oligonucleotide
  Antisense strand to SEQ ID NO: 716084
agugcacgccggaauuauc

SEQ ID NO: 716086 - RNA, 19 nt, Artificial Sequence
  Description of Artificial Sequence: Synthetic oligonucleotide
  Sense strand starting at position 2424 of SEQ ID NO: 586413
gucuuaaggacugggaacu

SEQ ID NO: 716087 - RNA, 19 nt, Artificial Sequence
  Description of Artificial Sequence: Synthetic oligonucleotide
  Antisense strand to SEQ ID NO: 716086
aguucccaguccuuaagac

SEQ ID NO: 716088 - RNA, 19 nt, Artificial Sequence
  Description of Artificial Sequence: Synthetic oligonucleotide
  Sense strand starting at position 2932 of SEQ ID NO: 586413
auaaaugugucccucuuga

SEQ ID NO: 716089 - RNA, 19 nt, Artificial Sequence
  Description of Artificial Sequence: Synthetic oligonucleotide
  Antisense strand to SEQ ID NO: 716088
ucaagagggacacauuuau

SEQ ID NO: 716090 - RNA, 19 nt, Artificial Sequence
  Description of Artificial Sequence: Synthetic oligonucleotide
  Sense strand starting at position 2942 of SEQ ID NO: 586413
cccucuugacugugaacga

SEQ ID NO: 716091 - RNA, 19 nt, Artificial Sequence
  Description of Artificial Sequence: Synthetic oligonucleotide
  Antisense strand to SEQ ID NO: 716090
ucguucacagucaagaggg

SEQ ID NO: 716092 - RNA, 19 nt, Artificial Sequence
  Description of Artificial Sequence: Synthetic oligonucleotide
  Sense strand starting at position 2999 of SEQ ID NO: 586413
guccuuucucugcauugau

SEQ ID NO: 716093 - RNA, 19 nt, Artificial Sequence
  Description of Artificial Sequence: Synthetic oligonucleotide
  Antisense strand to SEQ ID NO: 716092
aucaaugcagagaaaggac

SEQ ID NO: 716094 - RNA, 19 nt, Artificial Sequence
  Description of Artificial Sequence: Synthetic oligonucleotide
  Sense strand starting at position 3008 of SEQ ID NO: 586413
cugcauugauacuuacuga

SEQ ID NO: 716095 - RNA, 19 nt, Artificial Sequence
  Description of Artificial Sequence: Synthetic oligonucleotide
  Antisense strand to SEQ ID NO: 716094
ucaguaaguaucaaugcag

SEQ ID NO: 716096 - RNA, 19 nt, Artificial Sequence
  Description of Artificial Sequence: Synthetic oligonucleotide
  Sense strand starting at position 3051 of SEQ ID NO: 586413
augccuugauacucagaca

SEQ ID NO: 716097 - RNA, 19 nt, Artificial Sequence
  Description of Artificial Sequence: Synthetic oligonucleotide
  Antisense strand to SEQ ID NO: 716096
ugucugaguaucaaggcau

SEQ ID NO: 716098 - RNA, 19 nt, Artificial Sequence
  Description of Artificial Sequence: Synthetic oligonucleotide
  Sense strand starting at position 3101 of SEQ ID NO: 586413
ucugcuuggcacugggaaa

SEQ ID NO: 716099 - RNA, 19 nt, Artificial Sequence
  Description of Artificial Sequence: Synthetic oligonucleotide
  Antisense strand to SEQ ID NO: 716098
uuucccagugccaagcaga

SEQ ID NO: 716100 - RNA, 19 nt, Artificial Sequence
  Description of Artificial Sequence: Synthetic oligonucleotide
  Sense strand starting at position 3209 of SEQ ID NO: 586413
agcuguucugucuacaaga

SEQ ID NO: 716101 - RNA, 19 nt, Artificial Sequence
  Description of Artificial Sequence: Synthetic oligonucleotide
  Antisense strand to SEQ ID NO: 716100
ucuuguagacagaacagcu

SEQ ID NO: 716102 - RNA, 19 nt, Artificial Sequence
  Description of Artificial Sequence: Synthetic oligonucleotide
  Sense strand starting at position 3211 of SEQ ID NO: 586413
cuguucugucuacaagaca

SEQ ID NO: 716103 - RNA, 19 nt, Artificial Sequence
  Description of Artificial Sequence: Synthetic oligonucleotide
  Antisense strand to SEQ ID NO: 716102
ugucuuguagacagaacag

SEQ ID NO: 716104 - RNA, 19 nt, Artificial Sequence
  Description of Artificial Sequence: Synthetic oligonucleotide
  Sense strand starting at position 3366 of SEQ ID NO: 586413
ccaagaggcuuugacauuu

SEQ ID NO: 716105 - RNA, 19 nt, Artificial Sequence
  Description of Artificial Sequence: Synthetic oligonucleotide
  Antisense strand to SEQ ID NO: 716104
aaaugucaaagccucuugg

SEQ ID NO: 716106 - RNA, 19 nt, Artificial Sequence
  Description of Artificial Sequence: Synthetic oligonucleotide
  Sense strand starting at position 3517 of SEQ ID NO: 586413
uuauauuucccuugcuguu

SEQ ID NO: 716107 - RNA, 19 nt, Artificial Sequence
  Description of Artificial Sequence: Synthetic oligonucleotide
  Antisense strand to SEQ ID NO: 716106
aacagcaagggaaauauaa

SEQ ID NO: 716108 - RNA, 19 nt, Artificial Sequence
  Description of Artificial Sequence: Synthetic oligonucleotide
  Sense strand starting at position 3519 of SEQ ID NO: 586413
auauuucccuugcuguuau

SEQ ID NO: 716109 - RNA, 19 nt, Artificial Sequence
  Description of Artificial Sequence: Synthetic oligonucleotide
  Antisense strand to SEQ ID NO: 716108
auaacagcaagggaaauau

SEQ ID NO: 716110 - RNA, 19 nt, Artificial Sequence
  Description of Artificial Sequence: Synthetic oligonucleotide
  Sense strand starting at position 3560 of SEQ ID NO: 586413
auuagugacuucucuacag

SEQ ID NO: 716111 - RNA, 19 nt, Artificial Sequence
  Description of Artificial Sequence: Synthetic oligonucleotide
  Antisense strand to SEQ ID NO: 716110
cuguagagaagucacuaau

SEQ ID NO: 716112 - RNA, 19 nt, Artificial Sequence
  Description of Artificial Sequence: Synthetic oligonucleotide
  Sense strand starting at position 3564 of SEQ ID NO: 586413
gugacuucucuacaguuaa

SEQ ID NO: 716113 - RNA, 19 nt, Artificial Sequence
  Description of Artificial Sequence: Synthetic oligonucleotide
  Antisense strand to SEQ ID NO: 716112
uuaacuguagagaagucac

SEQ ID NO: 716114 - RNA, 19 nt, Artificial Sequence
  Description of Artificial Sequence: Synthetic oligonucleotide
  Sense strand starting at position 3578 of SEQ ID NO: 586413
guuaacuuacuauggcauu

SEQ ID NO: 716115 - RNA, 19 nt, Artificial Sequence
  Description of Artificial Sequence: Synthetic oligonucleotide
  Antisense strand to SEQ ID NO: 716114
aaugccauaguaaguuaac

SEQ ID NO: 716116 - RNA, 19 nt, Artificial Sequence
  Description of Artificial Sequence: Synthetic oligonucleotide
  Sense strand starting at position 3704 of SEQ ID NO: 586413
ucaaaugaaguuugcucaa

SEQ ID NO: 716117 - RNA, 19 nt, Artificial Sequence
  Description of Artificial Sequence: Synthetic oligonucleotide
  Antisense strand to SEQ ID NO: 716116
uugagcaaacuucauuuga

SEQ ID NO: 716118 - RNA, 19 nt, Artificial Sequence
  Description of Artificial Sequence: Synthetic oligonucleotide
  Sense strand starting at position 3927 of SEQ ID NO: 586413
gaaagauaaucaguggcuu

SEQ ID NO: 716119 - RNA, 19 nt, Artificial Sequence
  Description of Artificial Sequence: Synthetic oligonucleotide
  Antisense strand to SEQ ID NO: 716118
aagccacugauuaucuuuc

SEQ ID NO: 716120 - RNA, 19 nt, Artificial Sequence
  Description of Artificial Sequence: Synthetic oligonucleotide
  Sense strand starting at position 3956 of SEQ ID NO: 586413
guaugugaggaguagcaga

SEQ ID NO: 716121 - RNA, 19 nt, Artificial Sequence
  Description of Artificial Sequence: Synthetic oligonucleotide
  Antisense strand to SEQ ID NO: 716120
ucugcuacuccucacauac

SEQ ID NO: 716122 - RNA, 19 nt, Artificial Sequence
  Description of Artificial Sequence: Synthetic oligonucleotide
  Sense strand starting at position 276 of SEQ ID NO: 586414
ccaugcaauuaucuggaga

SEQ ID NO: 716123 - RNA, 19 nt, Artificial Sequence
  Description of Artificial Sequence: Synthetic oligonucleotide
  Antisense strand to SEQ ID NO: 716122
ucuccagauaauugcaugg

SEQ ID NO: 716124 - RNA, 19 nt, Artificial Sequence
  Description of Artificial Sequence: Synthetic oligonucleotide
  Sense strand starting at position 412 of SEQ ID NO: 586414
gccgaaagcgccucugaca

SEQ ID NO: 716125 - RNA, 19 nt, Artificial Sequence
  Description of Artificial Sequence: Synthetic oligonucleotide
  Antisense strand to SEQ ID NO: 716124
ugucagaggcgcuuucggc

SEQ ID NO: 716126 - RNA, 19 nt, Artificial Sequence
  Description of Artificial Sequence: Synthetic oligonucleotide
  Sense strand starting at position 533 of SEQ ID NO: 586414
cagauuucgggcugucaau

SEQ ID NO: 716127 - RNA, 19 nt, Artificial Sequence
  Description of Artificial Sequence: Synthetic oligonucleotide
  Antisense strand to SEQ ID NO: 716126
auugacagcccgaaaucug

SEQ ID NO: 716128 - RNA, 19 nt, Artificial Sequence
  Description of Artificial Sequence: Synthetic oligonucleotide
  Sense strand starting at position 657 of SEQ ID NO: 586414
cucgauuuccucuguaacc

SEQ ID NO: 716129 - RNA, 19 nt, Artificial Sequence
  Description of Artificial Sequence: Synthetic oligonucleotide
  Antisense strand to SEQ ID NO: 716128
gguuacagaggaaaucgag

SEQ ID NO: 716130 - RNA, 19 nt, Artificial Sequence
  Description of Artificial Sequence: Synthetic oligonucleotide
  Sense strand starting at position 745 of SEQ ID NO: 586414
ggguguuagguccacuauu

SEQ ID NO: 716131 - RNA, 19 nt, Artificial Sequence
  Description of Artificial Sequence: Synthetic oligonucleotide
  Antisense strand to SEQ ID NO: 716130
aauaguggaccuaacaccc

SEQ ID NO: 716132 - RNA, 19 nt, Artificial Sequence
  Description of Artificial Sequence: Synthetic oligonucleotide
  Sense strand starting at position 762 of SEQ ID NO: 586414
uugggcugguuuccuuaaa

SEQ ID NO: 716133 - RNA, 19 nt, Artificial Sequence
  Description of Artificial Sequence: Synthetic oligonucleotide
  Antisense strand to SEQ ID NO: 716132
uuuaaggaaaccagcccaa

SEQ ID NO: 716134 - RNA, 19 nt, Artificial Sequence
  Description of Artificial Sequence: Synthetic oligonucleotide
  Sense strand starting at position 975 of SEQ ID NO: 586414
accauuaugguuuaucgaa

SEQ ID NO: 716135 - RNA, 19 nt, Artificial Sequence
  Description of Artificial Sequence: Synthetic oligonucleotide
  Antisense strand to SEQ ID NO: 716134
uucgauaaaccauaauggu

SEQ ID NO: 716136 - RNA, 19 nt, Artificial Sequence
  Description of Artificial Sequence: Synthetic oligonucleotide
  Sense strand starting at position 977 of SEQ ID NO: 586414
cauuaugguuuaucgaaac

SEQ ID NO: 716137 - RNA, 19 nt, Artificial Sequence
  Description of Artificial Sequence: Synthetic oligonucleotide
  Antisense strand to SEQ ID NO: 716136
guuucgauaaaccauaaug

SEQ ID NO: 716138 - RNA, 19 nt, Artificial Sequence
  Description of Artificial Sequence: Synthetic oligonucleotide
  Sense strand starting at position 1037 of SEQ ID NO: 586414
guucgugggacagaaacau

SEQ ID NO: 716139 - RNA, 19 nt, Artificial Sequence
  Description of Artificial Sequence: Synthetic oligonucleotide
  Antisense strand to SEQ ID NO: 716138
auguuucugucccacgaac

SEQ ID NO: 716140 - RNA, 19 nt, Artificial Sequence
  Description of Artificial Sequence: Synthetic oligonucleotide
  Sense strand starting at position 1084 of SEQ ID NO: 586414
gaugcagaauugcugauua

SEQ ID NO: 716141 - RNA, 19 nt, Artificial Sequence
  Description of Artificial Sequence: Synthetic oligonucleotide
  Antisense strand to SEQ ID NO: 716140
uaaucagcaauucugcauc

SEQ ID NO: 716142 - RNA, 19 nt, Artificial Sequence
  Description of Artificial Sequence: Synthetic oligonucleotide
  Sense strand starting at position 1089 of SEQ ID NO: 586414
agaauugcugauuagcaga

SEQ ID NO: 716143 - RNA, 19 nt, Artificial Sequence
  Description of Artificial Sequence: Synthetic oligonucleotide
  Antisense strand to SEQ ID NO: 716142
ucugcuaaucagcaauucu

SEQ ID NO: 716144 - RNA, 19 nt, Artificial Sequence
  Description of Artificial Sequence: Synthetic oligonucleotide
  Sense strand starting at position 1298 of SEQ ID NO: 586414
gagggugucacuuacugua

SEQ ID NO: 716145 - RNA, 19 nt, Artificial Sequence
  Description of Artificial Sequence: Synthetic oligonucleotide
  Antisense strand to SEQ ID NO: 716144
uacaguaagugacacccuc

SEQ ID NO: 716146 - RNA, 19 nt, Artificial Sequence
  Description of Artificial Sequence: Synthetic oligonucleotide
  Sense strand starting at position 1477 of SEQ ID NO: 586414
acaguaaagcgucacuuua

SEQ ID NO: 716147 - RNA, 19 nt, Artificial Sequence
  Description of Artificial Sequence: Synthetic oligonucleotide
  Antisense strand to SEQ ID NO: 716146
uaaagugacgcuuuacugu

SEQ ID NO: 716148 - RNA, 19 nt, Artificial Sequence
  Description of Artificial Sequence: Synthetic oligonucleotide
  Sense strand starting at position 1626 of SEQ ID NO: 586414
acgugcugcaguucucaau

SEQ ID NO: 716149 - RNA, 19 nt, Artificial Sequence
  Description of Artificial Sequence: Synthetic oligonucleotide
  Antisense strand to SEQ ID NO: 716148
auugagaacugcagcacgu

SEQ ID NO: 716150 - RNA, 19 nt, Artificial Sequence
  Description of Artificial Sequence: Synthetic oligonucleotide
  Sense strand starting at position 1627 of SEQ ID NO: 586414
cgugcugcaguucucaauu

SEQ ID NO: 716151 - RNA, 19 nt, Artificial Sequence
  Description of Artificial Sequence: Synthetic oligonucleotide
  Antisense strand to SEQ ID NO: 716150
aauugagaacugcagcacg

SEQ ID NO: 716152 - RNA, 19 nt, Artificial Sequence
  Description of Artificial Sequence: Synthetic oligonucleotide
  Sense strand starting at position 1978 of SEQ ID NO: 586414
guacuaucugagggugcaa

SEQ ID NO: 716153 - RNA, 19 nt, Artificial Sequence
  Description of Artificial Sequence: Synthetic oligonucleotide
  Antisense strand to SEQ ID NO: 716152
uugcacccucagauaguac

SEQ ID NO: 716154 - RNA, 19 nt, Artificial Sequence
  Description of Artificial Sequence: Synthetic oligonucleotide
  Sense strand starting at position 2032 of SEQ ID NO: 586414
cccugcacuccuggaauaa

SEQ ID NO: 716155 - RNA, 19 nt, Artificial Sequence
  Description of Artificial Sequence: Synthetic oligonucleotide
  Antisense strand to SEQ ID NO: 716154
uuauuccaggagugcaggg

SEQ ID NO: 716156 - RNA, 19 nt, Artificial Sequence
  Description of Artificial Sequence: Synthetic oligonucleotide
  Sense strand starting at position 2058 of SEQ ID NO: 586414
ccuguaaucugagcaacag

SEQ ID NO: 716157 - RNA, 19 nt, Artificial Sequence
  Description of Artificial Sequence: Synthetic oligonucleotide
  Antisense strand to SEQ ID NO: 716156
cuguugcucagauuacagg

SEQ ID NO: 716158 - RNA, 19 nt, Artificial Sequence
  Description of Artificial Sequence: Synthetic oligonucleotide
  Sense strand starting at position 2059 of SEQ ID NO: 586414
cuguaaucugagcaacagu

SEQ ID NO: 716159 - RNA, 19 nt, Artificial Sequence
  Description of Artificial Sequence: Synthetic oligonucleotide
  Antisense strand to SEQ ID NO: 716158
acuguugcucagauuacag

SEQ ID NO: 716160 - RNA, 19 nt, Artificial Sequence
  Description of Artificial Sequence: Synthetic oligonucleotide
  Sense strand starting at position 2068 of SEQ ID NO: 586414
gagcaacaguuuccaaaga

SEQ ID NO: 716161 - RNA, 19 nt, Artificial Sequence
  Description of Artificial Sequence: Synthetic oligonucleotide
  Antisense strand to SEQ ID NO: 716160
ucuuuggaaacuguugcuc

SEQ ID NO: 716162 - RNA, 19 nt, Artificial Sequence
  Description of Artificial Sequence: Synthetic oligonucleotide
  Sense strand starting at position 2428 of SEQ ID NO: 586414
uuguccugucccugaaaca

SEQ ID NO: 716163 - RNA, 19 nt, Artificial Sequence
  Description of Artificial Sequence: Synthetic oligonucleotide
  Antisense strand to SEQ ID NO: 716162
uguuucagggacaggacaa

SEQ ID NO: 716164 - RNA, 19 nt, Artificial Sequence
  Description of Artificial Sequence: Synthetic oligonucleotide
  Sense strand starting at position 2538 of SEQ ID NO: 586414
gauaauuccggcgugcacu

SEQ ID NO: 716165 - RNA, 19 nt, Artificial Sequence
  Description of Artificial Sequence: Synthetic oligonucleotide
  Antisense strand to SEQ ID NO: 716164
agugcacgccggaauuauc

SEQ ID NO: 716166 - RNA, 19 nt, Artificial Sequence
  Description of Artificial Sequence: Synthetic oligonucleotide
  Sense strand starting at position 2609 of SEQ ID NO: 586414
gucuuaaggacugggaacu

SEQ ID NO: 716167 - RNA, 19 nt, Artificial Sequence
  Description of Artificial Sequence: Synthetic oligonucleotide
  Antisense strand to SEQ ID NO: 716166
aguucccaguccuuaagac

SEQ ID NO: 716168 - RNA, 19 nt, Artificial Sequence
  Description of Artificial Sequence: Synthetic oligonucleotide
  Sense strand starting at position 2822 of SEQ ID NO: 586414
ggcugauagcuuuaguuuc

SEQ ID NO: 716169 - RNA, 19 nt, Artificial Sequence
  Description of Artificial Sequence: Synthetic oligonucleotide
  Antisense strand to SEQ ID NO: 716168
gaaacuaaagcuaucagcc

SEQ ID NO: 716170 - RNA, 19 nt, Artificial Sequence
  Description of Artificial Sequence: Synthetic oligonucleotide
  Sense strand starting at position 3117 of SEQ ID NO: 586414
auaaaugugucccucuuga

SEQ ID NO: 716171 - RNA, 19 nt, Artificial Sequence
  Description of Artificial Sequence: Synthetic oligonucleotide
  Antisense strand to SEQ ID NO: 716170
ucaagagggacacauuuau

SEQ ID NO: 716172 - RNA, 19 nt, Artificial Sequence
  Description of Artificial Sequence: Synthetic oligonucleotide
  Sense strand starting at position 3127 of SEQ ID NO: 586414
cccucuugacugugaacga

SEQ ID NO: 716173 - RNA, 19 nt, Artificial Sequence
  Description of Artificial Sequence: Synthetic oligonucleotide
  Antisense strand to SEQ ID NO: 716172
ucguucacagucaagaggg

SEQ ID NO: 716174 - RNA, 19 nt, Artificial Sequence
  Description of Artificial Sequence: Synthetic oligonucleotide
  Sense strand starting at position 3184 of SEQ ID NO: 586414
guccuuucucugcauugau

SEQ ID NO: 716175 - RNA, 19 nt, Artificial Sequence
  Description of Artificial Sequence: Synthetic oligonucleotide
  Antisense strand to SEQ ID NO: 716174
aucaaugcagagaaaggac

SEQ ID NO: 716176 - RNA, 19 nt, Artificial Sequence
  Description of Artificial Sequence: Synthetic oligonucleotide
  Sense strand starting at position 3193 of SEQ ID NO: 586414
cugcauugauacuuacuga

SEQ ID NO: 716177 - RNA, 19 nt, Artificial Sequence
  Description of Artificial Sequence: Synthetic oligonucleotide
  Antisense strand to SEQ ID NO: 716176
ucaguaaguaucaaugcag

SEQ ID NO: 716178 - RNA, 19 nt, Artificial Sequence
  Description of Artificial Sequence: Synthetic oligonucleotide
  Sense strand starting at position 3236 of SEQ ID NO: 586414
augccuugauacucagaca

SEQ ID NO: 716179 - RNA, 19 nt, Artificial Sequence
  Description of Artificial Sequence: Synthetic oligonucleotide
  Antisense strand to SEQ ID NO: 716178
ugucugaguaucaaggcau

SEQ ID NO: 716180 - RNA, 19 nt, Artificial Sequence
  Description of Artificial Sequence: Synthetic oligonucleotide
  Sense strand starting at position 3286 of SEQ ID NO: 586414
ucugcuuggcacugggaaa

SEQ ID NO: 716181 - RNA, 19 nt, Artificial Sequence
  Description of Artificial Sequence: Synthetic oligonucleotide
  Antisense strand to SEQ ID NO: 716180
uuucccagugccaagcaga

SEQ ID NO: 716182 - RNA, 19 nt, Artificial Sequence
  Description of Artificial Sequence: Synthetic oligonucleotide
  Sense strand starting at position 3394 of SEQ ID NO: 586414
agcuguucugucuacaaga

SEQ ID NO: 716183 - RNA, 19 nt, Artificial Sequence
  Description of Artificial Sequence: Synthetic oligonucleotide
  Antisense strand to SEQ ID NO: 716182
ucuuguagacagaacagcu

SEQ ID NO: 716184 - RNA, 19 nt, Artificial Sequence
  Description of Artificial Sequence: Synthetic oligonucleotide
  Sense strand starting at position 3396 of SEQ ID NO: 586414
cuguucugucuacaagaca

SEQ ID NO: 716185 - RNA, 19 nt, Artificial Sequence
  Description of Artificial Sequence: Synthetic oligonucleotide
  Antisense strand to SEQ ID NO: 716184
ugucuuguagacagaacag

SEQ ID NO: 716186 - RNA, 19 nt, Artificial Sequence
  Description of Artificial Sequence: Synthetic oligonucleotide
  Sense strand starting at position 3551 of SEQ ID NO: 586414
ccaagaggcuuugacauuu

SEQ ID NO: 716187 - RNA, 19 nt, Artificial Sequence
  Description of Artificial Sequence: Synthetic oligonucleotide
  Antisense strand to SEQ ID NO: 716186
aaaugucaaagccucuugg

SEQ ID NO: 716188 - RNA, 19 nt, Artificial Sequence
  Description of Artificial Sequence: Synthetic oligonucleotide
  Sense strand starting at position 3609 of SEQ ID NO: 586414
aagaguucuugagagaaag

SEQ ID NO: 716189 - RNA, 19 nt, Artificial Sequence
  Description of Artificial Sequence: Synthetic oligonucleotide
  Antisense strand to SEQ ID NO: 716188
cuuucucucaagaacucuu

SEQ ID NO: 716190 - RNA, 19 nt, Artificial Sequence
  Description of Artificial Sequence: Synthetic oligonucleotide
  Sense strand starting at position 3702 of SEQ ID NO: 586414
uuauauuucccuugcuguu

SEQ ID NO: 716191 - RNA, 19 nt, Artificial Sequence
  Description of Artificial Sequence: Synthetic oligonucleotide
  Antisense strand to SEQ ID NO: 716190
aacagcaagggaaauauaa

SEQ ID NO: 716192 - RNA, 19 nt, Artificial Sequence
  Description of Artificial Sequence: Synthetic oligonucleotide
  Sense strand starting at position 3704 of SEQ ID NO: 586414
auauuucccuugcuguuau

SEQ ID NO: 716193 - RNA, 19 nt, Artificial Sequence
  Description of Artificial Sequence: Synthetic oligonucleotide
  Antisense strand to SEQ ID NO: 716192
auaacagcaagggaaauau

SEQ ID NO: 716194 - RNA, 19 nt, Artificial Sequence
  Description of Artificial Sequence: Synthetic oligonucleotide
  Sense strand starting at position 3745 of SEQ ID NO: 586414
auuagugacuucucuacag

SEQ ID NO: 716195 - RNA, 19 nt, Artificial Sequence
  Description of Artificial Sequence: Synthetic oligonucleotide
  Antisense strand to SEQ ID NO: 716194
cuguagagaagucacuaau

SEQ ID NO: 716196 - RNA, 19 nt, Artificial Sequence
  Description of Artificial Sequence: Synthetic oligonucleotide
  Sense strand starting at position 3749 of SEQ ID NO: 586414
gugacuucucuacaguuaa

SEQ ID NO: 716197 - RNA, 19 nt, Artificial Sequence
  Description of Artificial Sequence: Synthetic oligonucleotide
  Antisense strand to SEQ ID NO: 716196
uuaacuguagagaagucac

SEQ ID NO: 716198 - RNA, 19 nt, Artificial Sequence
  Description of Artificial Sequence: Synthetic oligonucleotide
  Sense strand starting at position 3763 of SEQ ID NO: 586414
guuaacuuacuauggcauu

SEQ ID NO: 716199 - RNA, 19 nt, Artificial Sequence
  Description of Artificial Sequence: Synthetic oligonucleotide
  Antisense strand to SEQ ID NO: 716198
aaugccauaguaaguuaac

SEQ ID NO: 716200 - RNA, 19 nt, Artificial Sequence
  Description of Artificial Sequence: Synthetic oligonucleotide
  Sense strand starting at position 3889 of SEQ ID NO: 586414
ucaaaugaaguuugcucaa

SEQ ID NO: 716201 - RNA, 19 nt, Artificial Sequence
  Description of Artificial Sequence: Synthetic oligonucleotide
  Antisense strand to SEQ ID NO: 716200
uugagcaaacuucauuuga

SEQ ID NO: 716202 - RNA, 19 nt, Artificial Sequence
  Description of Artificial Sequence: Synthetic oligonucleotide
  Sense strand starting at position 47 of SEQ ID NO: 586415
uacuuacaucgugauuaga

SEQ ID NO: 716203 - RNA, 19 nt, Artificial Sequence
  Description of Artificial Sequence: Synthetic oligonucleotide
  Antisense strand to SEQ ID NO: 716202
ucuaaucacgauguaagua

SEQ ID NO: 716204 - RNA, 19 nt, Artificial Sequence
  Description of Artificial Sequence: Synthetic oligonucleotide
  Sense strand starting at position 49 of SEQ ID NO: 586415
cuuacaucgugauuagaua

SEQ ID NO: 716205 - RNA, 19 nt, Artificial Sequence
  Description of Artificial Sequence: Synthetic oligonucleotide
  Antisense strand to SEQ ID NO: 716204
uaucuaaucacgauguaag

SEQ ID NO: 716206 - RNA, 19 nt, Artificial Sequence
  Description of Artificial Sequence: Synthetic oligonucleotide
  Sense strand starting at position 50 of SEQ ID NO: 586415
uuacaucgugauuagauaa

SEQ ID NO: 716207 - RNA, 19 nt, Artificial Sequence
  Description of Artificial Sequence: Synthetic oligonucleotide
  Antisense strand to SEQ ID NO: 716206
uuaucuaaucacgauguaa

SEQ ID NO: 716208 - RNA, 19 nt, Artificial Sequence
  Description of Artificial Sequence: Synthetic oligonucleotide
  Sense strand starting at position 137 of SEQ ID NO: 586415
aguaguccaccugggaauu

SEQ ID NO: 716209 - RNA, 19 nt, Artificial Sequence
  Description of Artificial Sequence: Synthetic oligonucleotide
  Antisense strand to SEQ ID NO: 716208
aauucccagguggacuacu

SEQ ID NO: 716210 - RNA, 19 nt, Artificial Sequence
  Description of Artificial Sequence: Synthetic oligonucleotide
  Sense strand starting at position 285 of SEQ ID NO: 586415
guuugauuuacagguaugu

SEQ ID NO: 716211 - RNA, 19 nt, Artificial Sequence
  Description of Artificial Sequence: Synthetic oligonucleotide
  Antisense strand to SEQ ID NO: 716210
acauaccuguaaaucaaac

SEQ ID NO: 716212 - RNA, 19 nt, Artificial Sequence
  Description of Artificial Sequence: Synthetic oligonucleotide
  Sense strand starting at position 302 of SEQ ID NO: 586415
guuaauaaucccggagaaa

SEQ ID NO: 716213 - RNA, 19 nt, Artificial Sequence
  Description of Artificial Sequence: Synthetic oligonucleotide
  Antisense strand to SEQ ID NO: 716212
uuucuccgggauuauuaac

SEQ ID NO: 716214 - RNA, 19 nt, Artificial Sequence
  Description of Artificial Sequence: Synthetic oligonucleotide
  Sense strand starting at position 321 of SEQ ID NO: 586415
gacuauucucugcagaguu

SEQ ID NO: 716215 - RNA, 19 nt, Artificial Sequence
  Description of Artificial Sequence: Synthetic oligonucleotide
  Antisense strand to SEQ ID NO: 716214
aacucugcagagaauaguc

SEQ ID NO: 716216 - RNA, 19 nt, Artificial Sequence
  Description of Artificial Sequence: Synthetic oligonucleotide
  Sense strand starting at position 445 of SEQ ID NO: 586415
augguaagagucugucaca

SEQ ID NO: 716217 - RNA, 19 nt, Artificial Sequence
  Description of Artificial Sequence: Synthetic oligonucleotide
  Antisense strand to SEQ ID NO: 716216
ugugacagacucuuaccau

SEQ ID NO: 716218 - RNA, 19 nt, Artificial Sequence
  Description of Artificial Sequence: Synthetic oligonucleotide
  Sense strand starting at position 446 of SEQ ID NO: 586415
ugguaagagucugucacag

SEQ ID NO: 716219 - RNA, 19 nt, Artificial Sequence
  Description of Artificial Sequence: Synthetic oligonucleotide
  Antisense strand to SEQ ID NO: 716218
cugugacagacucuuacca

SEQ ID NO: 716220 - RNA, 19 nt, Artificial Sequence
  Description of Artificial Sequence: Synthetic oligonucleotide
  Sense strand starting at position 725 of SEQ ID NO: 586415
cuuguaucugaauaugacu

SEQ ID NO: 716221 - RNA, 19 nt, Artificial Sequence
  Description of Artificial Sequence: Synthetic oligonucleotide
  Antisense strand to SEQ ID NO: 716220
agucauauucagauacaag

SEQ ID NO: 716222 - RNA, 19 nt, Artificial Sequence
  Description of Artificial Sequence: Synthetic oligonucleotide
  Sense strand starting at position 1116 of SEQ ID NO: 586415
auuugcauguuucccauau

SEQ ID NO: 716223 - RNA, 19 nt, Artificial Sequence
  Description of Artificial Sequence: Synthetic oligonucleotide
  Antisense strand to SEQ ID NO: 716222
auaugggaaacaugcaaau

SEQ ID NO: 716224 - RNA, 19 nt, Artificial Sequence
  Description of Artificial Sequence: Synthetic oligonucleotide
  Sense strand starting at position 1120 of SEQ ID NO: 586415
gcauguuucccauauaaug

SEQ ID NO: 716225 - RNA, 19 nt, Artificial Sequence
  Description of Artificial Sequence: Synthetic oligonucleotide
  Antisense strand to SEQ ID NO: 716224
cauuauaugggaaacaugc

SEQ ID NO: 716226 - RNA, 19 nt, Artificial Sequence
  Description of Artificial Sequence: Synthetic oligonucleotide
  Sense strand starting at position 1310 of SEQ ID NO: 586415
uuugaaguuguauaaagcu

SEQ ID NO: 716227 - RNA, 19 nt, Artificial Sequence
  Description of Artificial Sequence: Synthetic oligonucleotide
  Antisense strand to SEQ ID NO: 716226
agcuuuauacaacuucaaa

SEQ ID NO: 716228 - RNA, 19 nt, Artificial Sequence
  Description of Artificial Sequence: Synthetic oligonucleotide
  Sense strand starting at position 1318 of SEQ ID NO: 586415
uguauaaagcuuuaugaag

SEQ ID NO: 716229 - RNA, 19 nt, Artificial Sequence
  Description of Artificial Sequence: Synthetic oligonucleotide
  Antisense strand to SEQ ID NO: 716228
cuucauaaagcuuuauaca

SEQ ID NO: 716230 - RNA, 19 nt, Artificial Sequence
  Description of Artificial Sequence: Synthetic oligonucleotide
  Sense strand starting at position 1351 of SEQ ID NO: 586415
uauaaaguugcauacgaua

SEQ ID NO: 716231 - RNA, 19 nt, Artificial Sequence
  Description of Artificial Sequence: Synthetic oligonucleotide
  Antisense strand to SEQ ID NO: 716230
uaucguaugcaacuuuaua

SEQ ID NO: 716232 - RNA, 19 nt, Artificial Sequence
  Description of Artificial Sequence: Synthetic oligonucleotide
  Sense strand starting at position 1784 of SEQ ID NO: 586415
gaggucucuggagguacaa

SEQ ID NO: 716233 - RNA, 19 nt, Artificial Sequence
  Description of Artificial Sequence: Synthetic oligonucleotide
  Antisense strand to SEQ ID NO: 716232
uuguaccuccagagaccuc

SEQ ID NO: 716234 - RNA, 19 nt, Artificial Sequence
  Description of Artificial Sequence: Synthetic oligonucleotide
  Sense strand starting at position 1786 of SEQ ID NO: 586415
ggucucuggagguacaaua

SEQ ID NO: 716235 - RNA, 19 nt, Artificial Sequence
  Description of Artificial Sequence: Synthetic oligonucleotide
  Antisense strand to SEQ ID NO: 716234
uauuguaccuccagagacc

SEQ ID NO: 716236 - RNA, 19 nt, Artificial Sequence
  Description of Artificial Sequence: Synthetic oligonucleotide
  Sense strand starting at position 1843 of SEQ ID NO: 586415
ggcuuagaacuugaagucu

SEQ ID NO: 716237 - RNA, 19 nt, Artificial Sequence
  Description of Artificial Sequence: Synthetic oligonucleotide
  Antisense strand to SEQ ID NO: 716236
agacuucaaguucuaagcc

SEQ ID NO: 716238 - RNA, 19 nt, Artificial Sequence
  Description of Artificial Sequence: Synthetic oligonucleotide
  Sense strand starting at position 1893 of SEQ ID NO: 586415
gauugugagcuggaagcaa

SEQ ID NO: 716239 - RNA, 19 nt, Artificial Sequence
  Description of Artificial Sequence: Synthetic oligonucleotide
  Antisense strand to SEQ ID NO: 716238
uugcuuccagcucacaauc

SEQ ID NO: 716240 - RNA, 19 nt, Artificial Sequence
  Description of Artificial Sequence: Synthetic oligonucleotide
  Sense strand starting at position 1908 of SEQ ID NO: 586415
gcaauuucuccugguaauu

SEQ ID NO: 716241 - RNA, 19 nt, Artificial Sequence
  Description of Artificial Sequence: Synthetic oligonucleotide
  Antisense strand to SEQ ID NO: 716240
aauuaccaggagaaauugc

SEQ ID NO: 716242 - RNA, 19 nt, Artificial Sequence
  Description of Artificial Sequence: Synthetic oligonucleotide
  Sense strand starting at position 2024 of SEQ ID NO: 586415
ucaauuaauugggcugaau

SEQ ID NO: 716243 - RNA, 19 nt, Artificial Sequence
  Description of Artificial Sequence: Synthetic oligonucleotide
  Antisense strand to SEQ ID NO: 716242
auucagcccaauuaauuga

SEQ ID NO: 716244 - RNA, 19 nt, Artificial Sequence
  Description of Artificial Sequence: Synthetic oligonucleotide
  Sense strand starting at position 2134 of SEQ ID NO: 586415
ccauguuuccuguaauuga

SEQ ID NO: 716245 - RNA, 19 nt, Artificial Sequence
  Description of Artificial Sequence: Synthetic oligonucleotide
  Antisense strand to SEQ ID NO: 716244
ucaauuacaggaaacaugg

SEQ ID NO: 716246 - RNA, 19 nt, Artificial Sequence
  Description of Artificial Sequence: Synthetic oligonucleotide
  Sense strand starting at position 2141 of SEQ ID NO: 586415
uccuguaauugacuuagau

SEQ ID NO: 716247 - RNA, 19 nt, Artificial Sequence
  Description of Artificial Sequence: Synthetic oligonucleotide
  Antisense strand to SEQ ID NO: 716246
aucuaagucaauuacagga

SEQ ID NO: 716248 - RNA, 19 nt, Artificial Sequence
  Description of Artificial Sequence: Synthetic oligonucleotide
  Sense strand starting at position 2231 of SEQ ID NO: 586415
ggaaauauuugucaugaaa

SEQ ID NO: 716249 - RNA, 19 nt, Artificial Sequence
  Description of Artificial Sequence: Synthetic oligonucleotide
  Antisense strand to SEQ ID NO: 716248
uuucaugacaaauauuucc

SEQ ID NO: 716250 - RNA, 19 nt, Artificial Sequence
  Description of Artificial Sequence: Synthetic oligonucleotide
  Sense strand starting at position 2809 of SEQ ID NO: 586415
guauuuaaaugguaugaag

SEQ ID NO: 716251 - RNA, 19 nt, Artificial Sequence
  Description of Artificial Sequence: Synthetic oligonucleotide
  Antisense strand to SEQ ID NO: 716250
cuucauaccauuuaaauac

SEQ ID NO: 716252 - RNA, 19 nt, Artificial Sequence
  Description of Artificial Sequence: Synthetic oligonucleotide
  Sense strand starting at position 2912 of SEQ ID NO: 586415
uuaugaauguccucauaug

SEQ ID NO: 716253 - RNA, 19 nt, Artificial Sequence
  Description of Artificial Sequence: Synthetic oligonucleotide
  Antisense strand to SEQ ID NO: 716252
cauaugaggacauucauaa

SEQ ID NO: 716254 - RNA, 19 nt, Artificial Sequence
  Description of Artificial Sequence: Synthetic oligonucleotide
  Sense strand starting at position 3022 of SEQ ID NO: 586415
ggaggccuuaaguaugauu

SEQ ID NO: 716255 - RNA, 19 nt, Artificial Sequence
  Description of Artificial Sequence: Synthetic oligonucleotide
  Antisense strand to SEQ ID NO: 716254
aaucauacuuaaggccucc

SEQ ID NO: 716256 - RNA, 19 nt, Artificial Sequence
  Description of Artificial Sequence: Synthetic oligonucleotide
  Sense strand starting at position 3046 of SEQ ID NO: 586415
aacacauuauggucgauaa

SEQ ID NO: 716257 - RNA, 19 nt, Artificial Sequence
  Description of Artificial Sequence: Synthetic oligonucleotide
  Antisense strand to SEQ ID NO: 716256
uuaucgaccauaauguguu

SEQ ID NO: 716258 - RNA, 19 nt, Artificial Sequence
  Description of Artificial Sequence: Synthetic oligonucleotide
  Sense strand starting at position 3047 of SEQ ID NO: 586415
acacauuauggucgauaaa

SEQ ID NO: 716259 - RNA, 19 nt, Artificial Sequence
  Description of Artificial Sequence: Synthetic oligonucleotide
  Antisense strand to SEQ ID NO: 716258
uuuaucgaccauaaugugu

SEQ ID NO: 716260 - RNA, 19 nt, Artificial Sequence
  Description of Artificial Sequence: Synthetic oligonucleotide
  Sense strand starting at position 3048 of SEQ ID NO: 586415
cacauuauggucgauaaac

SEQ ID NO: 716261 - RNA, 19 nt, Artificial Sequence
  Description of Artificial Sequence: Synthetic oligonucleotide
  Antisense strand to SEQ ID NO: 716260
guuuaucgaccauaaugug

SEQ ID NO: 716262 - RNA, 19 nt, Artificial Sequence
  Description of Artificial Sequence: Synthetic oligonucleotide
  Sense strand starting at position 3057 of SEQ ID NO: 586415
gucgauaaacaagguauua

SEQ ID NO: 716263 - RNA, 19 nt, Artificial Sequence
  Description of Artificial Sequence: Synthetic oligonucleotide
  Antisense strand to SEQ ID NO: 716262
uaauaccuuguuuaucgac

SEQ ID NO: 716264 - RNA, 19 nt, Artificial Sequence
  Description of Artificial Sequence: Synthetic oligonucleotide
  Sense strand starting at position 3116 of SEQ ID NO: 586415
cuguuaauaguagaugguu

SEQ ID NO: 716265 - RNA, 19 nt, Artificial Sequence
  Description of Artificial Sequence: Synthetic oligonucleotide
  Antisense strand to SEQ ID NO: 716264
aaccaucuacuauuaacag

SEQ ID NO: 716266 - RNA, 19 nt, Artificial Sequence
  Description of Artificial Sequence: Synthetic oligonucleotide
  Sense strand starting at position 3260 of SEQ ID NO: 586415
auuguuaucuuagugaaug

SEQ ID NO: 716267 - RNA, 19 nt, Artificial Sequence
  Description of Artificial Sequence: Synthetic oligonucleotide
  Antisense strand to SEQ ID NO: 716266
cauucacuaagauaacaau

SEQ ID NO: 716268 - RNA, 19 nt, Artificial Sequence
  Description of Artificial Sequence: Synthetic oligonucleotide
  Sense strand starting at position 3335 of SEQ ID NO: 586415
gaagguugucauugagaag

SEQ ID NO: 716269 - RNA, 19 nt, Artificial Sequence
  Description of Artificial Sequence: Synthetic oligonucleotide
  Antisense strand to SEQ ID NO: 716268
cuucucaaugacaaccuuc

SEQ ID NO: 716270 - RNA, 19 nt, Artificial Sequence
  Description of Artificial Sequence: Synthetic oligonucleotide
  Sense strand starting at position 3336 of SEQ ID NO: 586415
aagguugucauugagaagu

SEQ ID NO: 716271 - RNA, 19 nt, Artificial Sequence
  Description of Artificial Sequence: Synthetic oligonucleotide
  Antisense strand to SEQ ID NO: 716270
acuucucaaugacaaccuu

SEQ ID NO: 716272 - RNA, 19 nt, Artificial Sequence
  Description of Artificial Sequence: Synthetic oligonucleotide
  Sense strand starting at position 3621 of SEQ ID NO: 586415
auuuguugguuucucguua

SEQ ID NO: 716273 - RNA, 19 nt, Artificial Sequence
  Description of Artificial Sequence: Synthetic oligonucleotide
  Antisense strand to SEQ ID NO: 716272
uaacgagaaaccaacaaau

SEQ ID NO: 716274 - RNA, 19 nt, Artificial Sequence
  Description of Artificial Sequence: Synthetic oligonucleotide
  Sense strand starting at position 3761 of SEQ ID NO: 586415
ucuaauggaucuucucuga

SEQ ID NO: 716275 - RNA, 19 nt, Artificial Sequence
  Description of Artificial Sequence: Synthetic oligonucleotide
  Antisense strand to SEQ ID NO: 716274
ucagagaagauccauuaga

SEQ ID NO: 716276 - RNA, 19 nt, Artificial Sequence
  Description of Artificial Sequence: Synthetic oligonucleotide
  Sense strand starting at position 3765 of SEQ ID NO: 586415
auggaucuucucugaauag

SEQ ID NO: 716277 - RNA, 19 nt, Artificial Sequence
  Description of Artificial Sequence: Synthetic oligonucleotide
  Antisense strand to SEQ ID NO: 716276
cuauucagagaagauccau

SEQ ID NO: 716278 - RNA, 19 nt, Artificial Sequence
  Description of Artificial Sequence: Synthetic oligonucleotide
  Sense strand starting at position 3825 of SEQ ID NO: 586415
ucacuuauuugacagugaa

SEQ ID NO: 716279 - RNA, 19 nt, Artificial Sequence
  Description of Artificial Sequence: Synthetic oligonucleotide
  Antisense strand to SEQ ID NO: 716278
uucacugucaaauaaguga

SEQ ID NO: 716280 - RNA, 19 nt, Artificial Sequence
  Description of Artificial Sequence: Synthetic oligonucleotide
  Sense strand starting at position 3921 of SEQ ID NO: 586415
augguaucucagcaucaaa

SEQ ID NO: 716281 - RNA, 19 nt, Artificial Sequence
  Description of Artificial Sequence: Synthetic oligonucleotide
  Antisense strand to SEQ ID NO: 716280
uuugaugcugagauaccau

SEQ ID NO: 716282 - RNA, 19 nt, Artificial Sequence
  Description of Artificial Sequence: Synthetic oligonucleotide
  Sense strand starting at position 1 of SEQ ID NO: 586416
augcauguugaguaucuua

SEQ ID NO: 716283 - RNA, 19 nt, Artificial Sequence
  Description of Artificial Sequence: Synthetic oligonucleotide
  Antisense strand to SEQ ID NO: 716282
uaagauacucaacaugcau

SEQ ID NO: 716284 - RNA, 19 nt, Artificial Sequence
  Description of Artificial Sequence: Synthetic oligonucleotide
  Sense strand starting at position 30 of SEQ ID NO: 586416
uaguauaugugaguggagu

SEQ ID NO: 716285 - RNA, 19 nt, Artificial Sequence
  Description of Artificial Sequence: Synthetic oligonucleotide
  Antisense strand to SEQ ID NO: 716284
acuccacucacauauacua

SEQ ID NO: 716286 - RNA, 19 nt, Artificial Sequence
  Description of Artificial Sequence: Synthetic oligonucleotide
  Sense strand starting at position 31 of SEQ ID NO: 586416
aguauaugugaguggaguc

SEQ ID NO: 716287 - RNA, 19 nt, Artificial Sequence
  Description of Artificial Sequence: Synthetic oligonucleotide
  Antisense strand to SEQ ID NO: 716286
gacuccacucacauauacu

SEQ ID NO: 716288 - RNA, 19 nt, Artificial Sequence
  Description of Artificial Sequence: Synthetic oligonucleotide
  Sense strand starting at position 52 of SEQ ID NO: 586416
gguuguucugaggguuaug

SEQ ID NO: 716289 - RNA, 19 nt, Artificial Sequence
  Description of Artificial Sequence: Synthetic oligonucleotide
  Antisense strand to SEQ ID NO: 716288
cauaacccucagaacaacc

SEQ ID NO: 716290 - RNA, 19 nt, Artificial Sequence
  Description of Artificial Sequence: Synthetic oligonucleotide
  Sense strand starting at position 55 of SEQ ID NO: 586416
uguucugaggguuauggga

SEQ ID NO: 716291 - RNA, 19 nt, Artificial Sequence
  Description of Artificial Sequence: Synthetic oligonucleotide
  Antisense strand to SEQ ID NO: 716290
ucccauaacccucagaaca

SEQ ID NO: 716292 - RNA, 19 nt, Artificial Sequence
  Description of Artificial Sequence: Synthetic oligonucleotide
  Sense strand starting at position 72 of SEQ ID NO: 586416
gaaggaggcugggugaaau

SEQ ID NO: 716293 - RNA, 19 nt, Artificial Sequence
  Description of Artificial Sequence: Synthetic oligonucleotide
  Antisense strand to SEQ ID NO: 716292
auuucacccagccuccuuc

SEQ ID NO: 716294 - RNA, 19 nt, Artificial Sequence
  Description of Artificial Sequence: Synthetic oligonucleotide
  Sense strand starting at position 80 of SEQ ID NO: 586416
cugggugaaaucggugaua

SEQ ID NO: 716295 - RNA, 19 nt, Artificial Sequence
  Description of Artificial Sequence: Synthetic oligonucleotide
  Antisense strand to SEQ ID NO: 716294
uaucaccgauuucacccag

SEQ ID NO: 716296 - RNA, 19 nt, Artificial Sequence
  Description of Artificial Sequence: Synthetic oligonucleotide
  Sense strand starting at position 82 of SEQ ID NO: 586416
gggugaaaucggugauaag

SEQ ID NO: 716297 - RNA, 19 nt, Artificial Sequence
  Description of Artificial Sequence: Synthetic oligonucleotide
  Antisense strand to SEQ ID NO: 716296
cuuaucaccgauuucaccc

SEQ ID NO: 716298 - RNA, 19 nt, Artificial Sequence
  Description of Artificial Sequence: Synthetic oligonucleotide
  Sense strand starting at position 85 of SEQ ID NO: 586416
ugaaaucggugauaagaua

SEQ ID NO: 716299 - RNA, 19 nt, Artificial Sequence
  Description of Artificial Sequence: Synthetic oligonucleotide
  Antisense strand to SEQ ID NO: 716298
uaucuuaucaccgauuuca

SEQ ID NO: 716300 - RNA, 19 nt, Artificial Sequence
  Description of Artificial Sequence: Synthetic oligonucleotide
  Sense strand starting at position 198 of SEQ ID NO: 586416
ccuacaguucuguggagga

SEQ ID NO: 716301 - RNA, 19 nt, Artificial Sequence
  Description of Artificial Sequence: Synthetic oligonucleotide
  Antisense strand to SEQ ID NO: 716300
uccuccacagaacuguagg

SEQ ID NO: 716302 - RNA, 19 nt, Artificial Sequence
  Description of Artificial Sequence: Synthetic oligonucleotide
  Sense strand starting at position 200 of SEQ ID NO: 586416
uacaguucuguggaggagu

SEQ ID NO: 716303 - RNA, 19 nt, Artificial Sequence
  Description of Artificial Sequence: Synthetic oligonucleotide
  Antisense strand to SEQ ID NO: 716302
acuccuccacagaacugua

SEQ ID NO: 716304 - RNA, 19 nt, Artificial Sequence
  Description of Artificial Sequence: Synthetic oligonucleotide
  Sense strand starting at position 287 of SEQ ID NO: 586416
aggugauuguuggcacaga

SEQ ID NO: 716305 - RNA, 19 nt, Artificial Sequence
  Description of Artificial Sequence: Synthetic oligonucleotide
  Antisense strand to SEQ ID NO: 716304
ucugugccaacaaucaccu

SEQ ID NO: 716306 - RNA, 19 nt, Artificial Sequence
  Description of Artificial Sequence: Synthetic oligonucleotide
  Sense strand starting at position 436 of SEQ ID NO: 586416
uuccuuuggguggagaagu

SEQ ID NO: 716307 - RNA, 19 nt, Artificial Sequence
  Description of Artificial Sequence: Synthetic oligonucleotide
  Antisense strand to SEQ ID NO: 716306
acuucuccacccaaaggaa

SEQ ID NO: 716308 - RNA, 19 nt, Artificial Sequence
  Description of Artificial Sequence: Synthetic oligonucleotide
  Sense strand starting at position 728 of SEQ ID NO: 586416
gcccggaucggcguuugau

SEQ ID NO: 716309 - RNA, 19 nt, Artificial Sequence
  Description of Artificial Sequence: Synthetic oligonucleotide
  Antisense strand to SEQ ID NO: 716308
aucaaacgccgauccgggc

SEQ ID NO: 716310 - RNA, 19 nt, Artificial Sequence
  Description of Artificial Sequence: Synthetic oligonucleotide
  Sense strand starting at position 729 of SEQ ID NO: 586416
cccggaucggcguuugauc

SEQ ID NO: 716311 - RNA, 19 nt, Artificial Sequence
  Description of Artificial Sequence: Synthetic oligonucleotide
  Antisense strand to SEQ ID NO: 716310
gaucaaacgccgauccggg

SEQ ID NO: 716312 - RNA, 19 nt, Artificial Sequence
  Description of Artificial Sequence: Synthetic oligonucleotide
  Sense strand starting at position 2071 of SEQ ID NO: 586416
gggacucgguaauuaaaua

SEQ ID NO: 716313 - RNA, 19 nt, Artificial Sequence
  Description of Artificial Sequence: Synthetic oligonucleotide
  Antisense strand to SEQ ID NO: 716312
uauuuaauuaccgaguccc

SEQ ID NO: 716314 - RNA, 19 nt, Artificial Sequence
  Description of Artificial Sequence: Synthetic oligonucleotide
  Sense strand starting at position 2147 of SEQ ID NO: 586416
uugaucuaacaccgaugaa

SEQ ID NO: 716315 - RNA, 19 nt, Artificial Sequence
  Description of Artificial Sequence: Synthetic oligonucleotide
  Antisense strand to SEQ ID NO: 716314
uucaucgguguuagaucaa

SEQ ID NO: 716316 - RNA, 19 nt, Artificial Sequence
  Description of Artificial Sequence: Synthetic oligonucleotide
  Sense strand starting at position 2210 of SEQ ID NO: 586416
gccucaauucugucggcau

SEQ ID NO: 716317 - RNA, 19 nt, Artificial Sequence
  Description of Artificial Sequence: Synthetic oligonucleotide
  Antisense strand to SEQ ID NO: 716316
augccgacagaauugaggc

SEQ ID NO: 716318 - RNA, 19 nt, Artificial Sequence
  Description of Artificial Sequence: Synthetic oligonucleotide
  Sense strand starting at position 2212 of SEQ ID NO: 586416
cucaauucugucggcauua

SEQ ID NO: 716319 - RNA, 19 nt, Artificial Sequence
  Description of Artificial Sequence: Synthetic oligonucleotide
  Antisense strand to SEQ ID NO: 716318
uaaugccgacagaauugag

SEQ ID NO: 716320 - RNA, 19 nt, Artificial Sequence
  Description of Artificial Sequence: Synthetic oligonucleotide
  Sense strand starting at position 2213 of SEQ ID NO: 586416
ucaauucugucggcauuau

SEQ ID NO: 716321 - RNA, 19 nt, Artificial Sequence
  Description of Artificial Sequence: Synthetic oligonucleotide
  Antisense strand to SEQ ID NO: 716320
auaaugccgacagaauuga

SEQ ID NO: 716322 - RNA, 19 nt, Artificial Sequence
  Description of Artificial Sequence: Synthetic oligonucleotide
  Sense strand starting at position 2214 of SEQ ID NO: 586416
caauucugucggcauuauu

SEQ ID NO: 716323 - RNA, 19 nt, Artificial Sequence
  Description of Artificial Sequence: Synthetic oligonucleotide
  Antisense strand to SEQ ID NO: 716322
aauaaugccgacagaauug

SEQ ID NO: 716324 - RNA, 19 nt, Artificial Sequence
  Description of Artificial Sequence: Synthetic oligonucleotide
  Sense strand starting at position 2217 of SEQ ID NO: 586416
uucugucggcauuauuaca

SEQ ID NO: 716325 - RNA, 19 nt, Artificial Sequence
  Description of Artificial Sequence: Synthetic oligonucleotide
  Antisense strand to SEQ ID NO: 716324
uguaauaaugccgacagaa

SEQ ID NO: 716326 - RNA, 19 nt, Artificial Sequence
  Description of Artificial Sequence: Synthetic oligonucleotide
  Sense strand starting at position 2531 of SEQ ID NO: 586416
ucuagauggccuuaaguuu

SEQ ID NO: 716327 - RNA, 19 nt, Artificial Sequence
  Description of Artificial Sequence: Synthetic oligonucleotide
  Antisense strand to SEQ ID NO: 716326
aaacuuaaggccaucuaga

SEQ ID NO: 716328 - RNA, 19 nt, Artificial Sequence
  Description of Artificial Sequence: Synthetic oligonucleotide
  Sense strand starting at position 2564 of SEQ ID NO: 586416
ucaucuugagauggcuauu

SEQ ID NO: 716329 - RNA, 19 nt, Artificial Sequence
  Description of Artificial Sequence: Synthetic oligonucleotide
  Antisense strand to SEQ ID NO: 716328
aauagccaucucaagauga

SEQ ID NO: 716330 - RNA, 19 nt, Artificial Sequence
  Description of Artificial Sequence: Synthetic oligonucleotide
  Sense strand starting at position 2567 of SEQ ID NO: 586416
ucuugagauggcuauucgu

SEQ ID NO: 716331 - RNA, 19 nt, Artificial Sequence
  Description of Artificial Sequence: Synthetic oligonucleotide
  Antisense strand to SEQ ID NO: 716330
acgaauagccaucucaaga

SEQ ID NO: 716332 - RNA, 19 nt, Artificial Sequence
  Description of Artificial Sequence: Synthetic oligonucleotide
  Sense strand starting at position 2570 of SEQ ID NO: 586416
ugagauggcuauucguaca

SEQ ID NO: 716333 - RNA, 19 nt, Artificial Sequence
  Description of Artificial Sequence: Synthetic oligonucleotide
  Antisense strand to SEQ ID NO: 716332
uguacgaauagccaucuca

SEQ ID NO: 716334 - RNA, 19 nt, Artificial Sequence
  Description of Artificial Sequence: Synthetic oligonucleotide
  Sense strand starting at position 2575 of SEQ ID NO: 586416
uggcuauucguacaagaag

SEQ ID NO: 716335 - RNA, 19 nt, Artificial Sequence
  Description of Artificial Sequence: Synthetic oligonucleotide
  Antisense strand to SEQ ID NO: 716334
cuucuuguacgaauagcca

SEQ ID NO: 716336 - RNA, 19 nt, Artificial Sequence
  Description of Artificial Sequence: Synthetic oligonucleotide
  Sense strand starting at position 2650 of SEQ ID NO: 586416
guuucuaagaguugucuuu

SEQ ID NO: 716337 - RNA, 19 nt, Artificial Sequence
  Description of Artificial Sequence: Synthetic oligonucleotide
  Antisense strand to SEQ ID NO: 716336
aaagacaacucuuagaaac

SEQ ID NO: 716338 - RNA, 19 nt, Artificial Sequence
  Description of Artificial Sequence: Synthetic oligonucleotide
  Sense strand starting at position 2699 of SEQ ID NO: 586416
cguucagaaucagcgaagu

SEQ ID NO: 716339 - RNA, 19 nt, Artificial Sequence
  Description of Artificial Sequence: Synthetic oligonucleotide
  Antisense strand to SEQ ID NO: 716338
acuucgcugauucugaacg

SEQ ID NO: 716340 - RNA, 19 nt, Artificial Sequence
  Description of Artificial Sequence: Synthetic oligonucleotide
  Sense strand starting at position 2920 of SEQ ID NO: 586416
agugguaccugucuccaaa

SEQ ID NO: 716341 - RNA, 19 nt, Artificial Sequence
  Description of Artificial Sequence: Synthetic oligonucleotide
  Antisense strand to SEQ ID NO: 716340
uuuggagacagguaccacu

SEQ ID NO: 716342 - RNA, 19 nt, Artificial Sequence
  Description of Artificial Sequence: Synthetic oligonucleotide
  Sense strand starting at position 2945 of SEQ ID NO: 586416
uggcguuugagguagaaga

SEQ ID NO: 716343 - RNA, 19 nt, Artificial Sequence
  Description of Artificial Sequence: Synthetic oligonucleotide
  Antisense strand to SEQ ID NO: 716342
ucuucuaccucaaacgcca

SEQ ID NO: 716344 - RNA, 19 nt, Artificial Sequence
  Description of Artificial Sequence: Synthetic oligonucleotide
  Sense strand starting at position 2947 of SEQ ID NO: 586416
gcguuugagguagaagaga

SEQ ID NO: 716345 - RNA, 19 nt, Artificial Sequence
  Description of Artificial Sequence: Synthetic oligonucleotide
  Antisense strand to SEQ ID NO: 716344
ucucuucuaccucaaacgc

SEQ ID NO: 716346 - RNA, 19 nt, Artificial Sequence
  Description of Artificial Sequence: Synthetic oligonucleotide
  Sense strand starting at position 3039 of SEQ ID NO: 586416
gguuguggaacuuaauauc

SEQ ID NO: 716347 - RNA, 19 nt, Artificial Sequence
  Description of Artificial Sequence: Synthetic oligonucleotide
  Antisense strand to SEQ ID NO: 716346
gauauuaaguuccacaacc

SEQ ID NO: 716348 - RNA, 19 nt, Artificial Sequence
  Description of Artificial Sequence: Synthetic oligonucleotide
  Sense strand starting at position 3093 of SEQ ID NO: 586416
cagggaagaagcugguaua

SEQ ID NO: 716349 - RNA, 19 nt, Artificial Sequence
  Description of Artificial Sequence: Synthetic oligonucleotide
  Antisense strand to SEQ ID NO: 716348
uauaccagcuucuucccug

SEQ ID NO: 716350 - RNA, 19 nt, Artificial Sequence
  Description of Artificial Sequence: Synthetic oligonucleotide
  Sense strand starting at position 3306 of SEQ ID NO: 586416
cuuucugugucccuagcaa

SEQ ID NO: 716351 - RNA, 19 nt, Artificial Sequence
  Description of Artificial Sequence: Synthetic oligonucleotide
  Antisense strand to SEQ ID NO: 716350
uugcuagggacacagaaag

SEQ ID NO: 716352 - RNA, 19 nt, Artificial Sequence
  Description of Artificial Sequence: Synthetic oligonucleotide
  Sense strand starting at position 3578 of SEQ ID NO: 586416
gcgggauccggaagguagu

SEQ ID NO: 716353 - RNA, 19 nt, Artificial Sequence
  Description of Artificial Sequence: Synthetic oligonucleotide
  Antisense strand to SEQ ID NO: 716352
acuaccuuccggaucccgc

SEQ ID NO: 716354 - RNA, 19 nt, Artificial Sequence
  Description of Artificial Sequence: Synthetic oligonucleotide
  Sense strand starting at position 3635 of SEQ ID NO: 586416
ccacuauaugcugagcacu

SEQ ID NO: 716355 - RNA, 19 nt, Artificial Sequence
  Description of Artificial Sequence: Synthetic oligonucleotide
  Antisense strand to SEQ ID NO: 716354
agugcucagcauauagugg

SEQ ID NO: 716356 - RNA, 19 nt, Artificial Sequence
  Description of Artificial Sequence: Synthetic oligonucleotide
  Sense strand starting at position 3742 of SEQ ID NO: 586416
uggagagcuguccagguau

SEQ ID NO: 716357 - RNA, 19 nt, Artificial Sequence
  Description of Artificial Sequence: Synthetic oligonucleotide
  Antisense strand to SEQ ID NO: 716356
auaccuggacagcucucca

SEQ ID NO: 716358 - RNA, 19 nt, Artificial Sequence
  Description of Artificial Sequence: Synthetic oligonucleotide
  Sense strand starting at position 3744 of SEQ ID NO: 586416
gagagcuguccagguauuc

SEQ ID NO: 716359 - RNA, 19 nt, Artificial Sequence
  Description of Artificial Sequence: Synthetic oligonucleotide
  Antisense strand to SEQ ID NO: 716358
gaauaccuggacagcucuc

SEQ ID NO: 716360 - RNA, 19 nt, Artificial Sequence
  Description of Artificial Sequence: Synthetic oligonucleotide
  Sense strand starting at position 3940 of SEQ ID NO: 586416
gcgcuuaaccuucucguga

SEQ ID NO: 716361 - RNA, 19 nt, Artificial Sequence
  Description of Artificial Sequence: Synthetic oligonucleotide
  Antisense strand to SEQ ID NO: 716360
ucacgagaagguuaagcgc

SEQ ID NO: 716362 - RNA, 19 nt, Artificial Sequence
  Description of Artificial Sequence: Synthetic oligonucleotide
  Sense strand starting at position 41 of SEQ ID NO: 586417
guuccuccuggagaauauu

SEQ ID NO: 716363 - RNA, 19 nt, Artificial Sequence
  Description of Artificial Sequence: Synthetic oligonucleotide
  Antisense strand to SEQ ID NO: 716362
aauauucuccaggaggaac

SEQ ID NO: 716364 - RNA, 19 nt, Artificial Sequence
  Description of Artificial Sequence: Synthetic oligonucleotide
  Sense strand starting at position 47 of SEQ ID NO: 586417
ccuggagaauauuaaggaa

SEQ ID NO: 716365 - RNA, 19 nt, Artificial Sequence
  Description of Artificial Sequence: Synthetic oligonucleotide
  Antisense strand to SEQ ID NO: 716364
uuccuuaauauucuccagg

SEQ ID NO: 716366 - RNA, 19 nt, Artificial Sequence
  Description of Artificial Sequence: Synthetic oligonucleotide
  Sense strand starting at position 91 of SEQ ID NO: 586417
cugaauuagcauuaguaaa

SEQ ID NO: 716367 - RNA, 19 nt, Artificial Sequence
  Description of Artificial Sequence: Synthetic oligonucleotide
  Antisense strand to SEQ ID NO: 716366
uuuacuaaugcuaauucag

SEQ ID NO: 716368 - RNA, 19 nt, Artificial Sequence
  Description of Artificial Sequence: Synthetic oligonucleotide
  Sense strand starting at position 206 of SEQ ID NO: 586417
ugggaacagccuggagaau

SEQ ID NO: 716369 - RNA, 19 nt, Artificial Sequence
  Description of Artificial Sequence: Synthetic oligonucleotide
  Antisense strand to SEQ ID NO: 716368
auucuccaggcuguuccca

SEQ ID NO: 716370 - RNA, 19 nt, Artificial Sequence
  Description of Artificial Sequence: Synthetic oligonucleotide
  Sense strand starting at position 448 of SEQ ID NO: 586417
auauguaauacgugccaga

SEQ ID NO: 716371 - RNA, 19 nt, Artificial Sequence
  Description of Artificial Sequence: Synthetic oligonucleotide
  Antisense strand to SEQ ID NO: 716370
ucuggcacguauuacauau

SEQ ID NO: 716372 - RNA, 19 nt, Artificial Sequence
  Description of Artificial Sequence: Synthetic oligonucleotide
  Sense strand starting at position 554 of SEQ ID NO: 586417
uccaaauaauguccuggua

SEQ ID NO: 716373 - RNA, 19 nt, Artificial Sequence
  Description of Artificial Sequence: Synthetic oligonucleotide
  Antisense strand to SEQ ID NO: 716372
uaccaggacauuauuugga

SEQ ID NO: 716374 - RNA, 19 nt, Artificial Sequence
  Description of Artificial Sequence: Synthetic oligonucleotide
  Sense strand starting at position 562 of SEQ ID NO: 586417
auguccugguauucuaauu

SEQ ID NO: 716375 - RNA, 19 nt, Artificial Sequence
  Description of Artificial Sequence: Synthetic oligonucleotide
  Antisense strand to SEQ ID NO: 716374
aauuagaauaccaggacau

SEQ ID NO: 716376 - RNA, 19 nt, Artificial Sequence
  Description of Artificial Sequence: Synthetic oligonucleotide
  Sense strand starting at position 657 of SEQ ID NO: 586417
gcguauugucacagcgaga

SEQ ID NO: 716377 - RNA, 19 nt, Artificial Sequence
  Description of Artificial Sequence: Synthetic oligonucleotide
  Antisense strand to SEQ ID NO: 716376
ucucgcugugacaauacgc

SEQ ID NO: 716378 - RNA, 19 nt, Artificial Sequence
  Description of Artificial Sequence: Synthetic oligonucleotide
  Sense strand starting at position 670 of SEQ ID NO: 586417
gcgagaaugugggccuaua

SEQ ID NO: 716379 - RNA, 19 nt, Artificial Sequence
  Description of Artificial Sequence: Synthetic oligonucleotide
  Antisense strand to SEQ ID NO: 716378
uauaggcccacauucucgc

SEQ ID NO: 716380 - RNA, 19 nt, Artificial Sequence
  Description of Artificial Sequence: Synthetic oligonucleotide
  Sense strand starting at position 836 of SEQ ID NO: 586417
uaagaugugucuuugucag

SEQ ID NO: 716381 - RNA, 19 nt, Artificial Sequence
  Description of Artificial Sequence: Synthetic oligonucleotide
  Antisense strand to SEQ ID NO: 716380
cugacaaagacacaucuua

SEQ ID NO: 716382 - RNA, 19 nt, Artificial Sequence
  Description of Artificial Sequence: Synthetic oligonucleotide
  Sense strand starting at position 844 of SEQ ID NO: 586417
gucuuugucagugaguggu

SEQ ID NO: 716383 - RNA, 19 nt, Artificial Sequence
  Description of Artificial Sequence: Synthetic oligonucleotide
  Antisense strand to SEQ ID NO: 716382
accacucacugacaaagac

SEQ ID NO: 716384 - RNA, 19 nt, Artificial Sequence
  Description of Artificial Sequence: Synthetic oligonucleotide
  Sense strand starting at position 846 of SEQ ID NO: 586417
cuuugucagugagugguaa

SEQ ID NO: 716385 - RNA, 19 nt, Artificial Sequence
  Description of Artificial Sequence: Synthetic oligonucleotide
  Antisense strand to SEQ ID NO: 716384
uuaccacucacugacaaag

SEQ ID NO: 716386 - RNA, 19 nt, Artificial Sequence
  Description of Artificial Sequence: Synthetic oligonucleotide
  Sense strand starting at position 858 of SEQ ID NO: 586417
gugguaagcuguucuaaug

SEQ ID NO: 716387 - RNA, 19 nt, Artificial Sequence
  Description of Artificial Sequence: Synthetic oligonucleotide
  Antisense strand to SEQ ID NO: 716386
cauuagaacagcuuaccac

SEQ ID NO: 716388 - RNA, 19 nt, Artificial Sequence
  Description of Artificial Sequence: Synthetic oligonucleotide
  Sense strand starting at position 864 of SEQ ID NO: 586417
agcuguucuaaugguuuga

SEQ ID NO: 716389 - RNA, 19 nt, Artificial Sequence
  Description of Artificial Sequence: Synthetic oligonucleotide
  Antisense strand to SEQ ID NO: 716388
ucaaaccauuagaacagcu

SEQ ID NO: 716390 - RNA, 19 nt, Artificial Sequence
  Description of Artificial Sequence: Synthetic oligonucleotide
  Sense strand starting at position 866 of SEQ ID NO: 586417
cuguucuaaugguuugaua

SEQ ID NO: 716391 - RNA, 19 nt, Artificial Sequence
  Description of Artificial Sequence: Synthetic oligonucleotide
  Antisense strand to SEQ ID NO: 716390
uaucaaaccauuagaacag

SEQ ID NO: 716392 - RNA, 19 nt, Artificial Sequence
  Description of Artificial Sequence: Synthetic oligonucleotide
  Sense strand starting at position 868 of SEQ ID NO: 586417
guucuaaugguuugauaca

SEQ ID NO: 716393 - RNA, 19 nt, Artificial Sequence
  Description of Artificial Sequence: Synthetic oligonucleotide
  Antisense strand to SEQ ID NO: 716392
uguaucaaaccauuagaac

SEQ ID NO: 716394 - RNA, 19 nt, Artificial Sequence
  Description of Artificial Sequence: Synthetic oligonucleotide
  Sense strand starting at position 1009 of SEQ ID NO: 586417
aauagaguguuuguuuaug

SEQ ID NO: 716395 - RNA, 19 nt, Artificial Sequence
  Description of Artificial Sequence: Synthetic oligonucleotide
  Antisense strand to SEQ ID NO: 716394
cauaaacaaacacucuauu

SEQ ID NO: 716396 - RNA, 19 nt, Artificial Sequence
  Description of Artificial Sequence: Synthetic oligonucleotide
  Sense strand starting at position 1011 of SEQ ID NO: 586417
uagaguguuuguuuaugaa

SEQ ID NO: 716397 - RNA, 19 nt, Artificial Sequence
  Description of Artificial Sequence: Synthetic oligonucleotide
  Antisense strand to SEQ ID NO: 716396
uucauaaacaaacacucua

SEQ ID NO: 716398 - RNA, 19 nt, Artificial Sequence
  Description of Artificial Sequence: Synthetic oligonucleotide
  Sense strand starting at position 1411 of SEQ ID NO: 586417
gguugaaaguauccagagu

SEQ ID NO: 716399 - RNA, 19 nt, Artificial Sequence
  Description of Artificial Sequence: Synthetic oligonucleotide
  Antisense strand to SEQ ID NO: 716398
acucuggauacuuucaacc

SEQ ID NO: 716400 - RNA, 19 nt, Artificial Sequence
  Description of Artificial Sequence: Synthetic oligonucleotide
  Sense strand starting at position 1412 of SEQ ID NO: 586417
guugaaaguauccagagug

SEQ ID NO: 716401 - RNA, 19 nt, Artificial Sequence
  Description of Artificial Sequence: Synthetic oligonucleotide
  Antisense strand to SEQ ID NO: 716400
cacucuggauacuuucaac

SEQ ID NO: 716402 - RNA, 19 nt, Artificial Sequence
  Description of Artificial Sequence: Synthetic oligonucleotide
  Sense strand starting at position 1417 of SEQ ID NO: 586417
aaguauccagagugugaaa

SEQ ID NO: 716403 - RNA, 19 nt, Artificial Sequence
  Description of Artificial Sequence: Synthetic oligonucleotide
  Antisense strand to SEQ ID NO: 716402
uuucacacucuggauacuu

SEQ ID NO: 716404 - RNA, 19 nt, Artificial Sequence
  Description of Artificial Sequence: Synthetic oligonucleotide
  Sense strand starting at position 1619 of SEQ ID NO: 586417
gggucccgagacuguaaua

SEQ ID NO: 716405 - RNA, 19 nt, Artificial Sequence
  Description of Artificial Sequence: Synthetic oligonucleotide
  Antisense strand to SEQ ID NO: 716404
uauuacagucucgggaccc

SEQ ID NO: 716406 - RNA, 19 nt, Artificial Sequence
  Description of Artificial Sequence: Synthetic oligonucleotide
  Sense strand starting at position 2010 of SEQ ID NO: 586417
ugcguaaauucuguauuug

SEQ ID NO: 716407 - RNA, 19 nt, Artificial Sequence
  Description of Artificial Sequence: Synthetic oligonucleotide
  Antisense strand to SEQ ID NO: 716406
caaauacagaauuuacgca

SEQ ID NO: 716408 - RNA, 19 nt, Artificial Sequence
  Description of Artificial Sequence: Synthetic oligonucleotide
  Sense strand starting at position 2307 of SEQ ID NO: 586417
uuugucaggcuuuaaauca

SEQ ID NO: 716409 - RNA, 19 nt, Artificial Sequence
  Description of Artificial Sequence: Synthetic oligonucleotide
  Antisense strand to SEQ ID NO: 716408
ugauuuaaagccugacaaa

SEQ ID NO: 716410 - RNA, 19 nt, Artificial Sequence
  Description of Artificial Sequence: Synthetic oligonucleotide
  Sense strand starting at position 2323 of SEQ ID NO: 586417
ucaaauuuaucugaugaug

SEQ ID NO: 716411 - RNA, 19 nt, Artificial Sequence
  Description of Artificial Sequence: Synthetic oligonucleotide
  Antisense strand to SEQ ID NO: 716410
caucaucagauaaauuuga

SEQ ID NO: 716412 - RNA, 19 nt, Artificial Sequence
  Description of Artificial Sequence: Synthetic oligonucleotide
  Sense strand starting at position 2348 of SEQ ID NO: 586417
uguguuaggguuuguauuu

SEQ ID NO: 716413 - RNA, 19 nt, Artificial Sequence
  Description of Artificial Sequence: Synthetic oligonucleotide
  Antisense strand to SEQ ID NO: 716412
aaauacaaacccuaacaca

SEQ ID NO: 716414 - RNA, 19 nt, Artificial Sequence
  Description of Artificial Sequence: Synthetic oligonucleotide
  Sense strand starting at position 2349 of SEQ ID NO: 586417
guguuaggguuuguauuua

SEQ ID NO: 716415 - RNA, 19 nt, Artificial Sequence
  Description of Artificial Sequence: Synthetic oligonucleotide
  Antisense strand to SEQ ID NO: 716414
uaaauacaaacccuaacac

SEQ ID NO: 716416 - RNA, 19 nt, Artificial Sequence
  Description of Artificial Sequence: Synthetic oligonucleotide
  Sense strand starting at position 2730 of SEQ ID NO: 586417
uuuaguauuuccugcauuu

SEQ ID NO: 716417 - RNA, 19 nt, Artificial Sequence
  Description of Artificial Sequence: Synthetic oligonucleotide
  Antisense strand to SEQ ID NO: 716416
aaaugcaggaaauacuaaa

SEQ ID NO: 716418 - RNA, 19 nt, Artificial Sequence
  Description of Artificial Sequence: Synthetic oligonucleotide
  Sense strand starting at position 2756 of SEQ ID NO: 586417
uuggcuuagucauuaauuc

SEQ ID NO: 716419 - RNA, 19 nt, Artificial Sequence
  Description of Artificial Sequence: Synthetic oligonucleotide
  Antisense strand to SEQ ID NO: 716418
gaauuaaugacuaagccaa

SEQ ID NO: 716420 - RNA, 19 nt, Artificial Sequence
  Description of Artificial Sequence: Synthetic oligonucleotide
  Sense strand starting at position 2808 of SEQ ID NO: 586417
accagaaugugcguggaaa

SEQ ID NO: 716421 - RNA, 19 nt, Artificial Sequence
  Description of Artificial Sequence: Synthetic oligonucleotide
  Antisense strand to SEQ ID NO: 716420
uuuccacgcacauucuggu

SEQ ID NO: 716422 - RNA, 19 nt, Artificial Sequence
  Description of Artificial Sequence: Synthetic oligonucleotide
  Sense strand starting at position 2809 of SEQ ID NO: 586417
ccagaaugugcguggaaag

SEQ ID NO: 716423 - RNA, 19 nt, Artificial Sequence
  Description of Artificial Sequence: Synthetic oligonucleotide
  Antisense strand to SEQ ID NO: 716422
cuuuccacgcacauucugg

SEQ ID NO: 716424 - RNA, 19 nt, Artificial Sequence
  Description of Artificial Sequence: Synthetic oligonucleotide
  Sense strand starting at position 2810 of SEQ ID NO: 586417
cagaaugugcguggaaagu

SEQ ID NO: 716425 - RNA, 19 nt, Artificial Sequence
  Description of Artificial Sequence: Synthetic oligonucleotide
  Antisense strand to SEQ ID NO: 716424
acuuuccacgcacauucug

SEQ ID NO: 716426 - RNA, 19 nt, Artificial Sequence
  Description of Artificial Sequence: Synthetic oligonucleotide
  Sense strand starting at position 2819 of SEQ ID NO: 586417
cguggaaagugguuagacu

SEQ ID NO: 716427 - RNA, 19 nt, Artificial Sequence
  Description of Artificial Sequence: Synthetic oligonucleotide
  Antisense strand to SEQ ID NO: 716426
agucuaaccacuuuccacg

SEQ ID NO: 716428 - RNA, 19 nt, Artificial Sequence
  Description of Artificial Sequence: Synthetic oligonucleotide
  Sense strand starting at position 2879 of SEQ ID NO: 586417
uggccugcucaguagcaau

SEQ ID NO: 716429 - RNA, 19 nt, Artificial Sequence
  Description of Artificial Sequence: Synthetic oligonucleotide
  Antisense strand to SEQ ID NO: 716428
auugcuacugagcaggcca

SEQ ID NO: 716430 - RNA, 19 nt, Artificial Sequence
  Description of Artificial Sequence: Synthetic oligonucleotide
  Sense strand starting at position 2995 of SEQ ID NO: 586417
uagacaucgagcugguaga

SEQ ID NO: 716431 - RNA, 19 nt, Artificial Sequence
  Description of Artificial Sequence: Synthetic oligonucleotide
  Antisense strand to SEQ ID NO: 716430
ucuaccagcucgaugucua

SEQ ID NO: 716432 - RNA, 19 nt, Artificial Sequence
  Description of Artificial Sequence: Synthetic oligonucleotide
  Sense strand starting at position 2996 of SEQ ID NO: 586417
agacaucgagcugguagaa

SEQ ID NO: 716433 - RNA, 19 nt, Artificial Sequence
  Description of Artificial Sequence: Synthetic oligonucleotide
  Antisense strand to SEQ ID NO: 716432
uucuaccagcucgaugucu

SEQ ID NO: 716434 - RNA, 19 nt, Artificial Sequence
  Description of Artificial Sequence: Synthetic oligonucleotide
  Sense strand starting at position 3103 of SEQ ID NO: 586417
auuccaguucuagggacuu

SEQ ID NO: 716435 - RNA, 19 nt, Artificial Sequence
  Description of Artificial Sequence: Synthetic oligonucleotide
  Antisense strand to SEQ ID NO: 716434
aagucccuagaacuggaau

SEQ ID NO: 716436 - RNA, 19 nt, Artificial Sequence
  Description of Artificial Sequence: Synthetic oligonucleotide
  Sense strand starting at position 3113 of SEQ ID NO: 586417
uagggacuuuguuccuaaa

SEQ ID NO: 716437 - RNA, 19 nt, Artificial Sequence
  Description of Artificial Sequence: Synthetic oligonucleotide
  Antisense strand to SEQ ID NO: 716436
uuuaggaacaaagucccua

SEQ ID NO: 716438 - RNA, 19 nt, Artificial Sequence
  Description of Artificial Sequence: Synthetic oligonucleotide
  Sense strand starting at position 3115 of SEQ ID NO: 586417
gggacuuuguuccuaaaga

SEQ ID NO: 716439 - RNA, 19 nt, Artificial Sequence
  Description of Artificial Sequence: Synthetic oligonucleotide
  Antisense strand to SEQ ID NO: 716438
ucuuuaggaacaaaguccc

SEQ ID NO: 716440 - RNA, 19 nt, Artificial Sequence
  Description of Artificial Sequence: Synthetic oligonucleotide
  Sense strand starting at position 3647 of SEQ ID NO: 586417
ugggccuagugguuaagaa

SEQ ID NO: 716441 - RNA, 19 nt, Artificial Sequence
  Description of Artificial Sequence: Synthetic oligonucleotide
  Antisense strand to SEQ ID NO: 716440
uucuuaaccacuaggccca

SEQ ID NO: 716442 - RNA, 19 nt, Artificial Sequence
  Description of Artificial Sequence: Synthetic oligonucleotide
  Sense strand starting at position 31 of SEQ ID NO: 586418
uccuguuuccgggaaaccu

SEQ ID NO: 716443 - RNA, 19 nt, Artificial Sequence
  Description of Artificial Sequence: Synthetic oligonucleotide
  Antisense strand to SEQ ID NO: 716442
agguuucccggaaacagga

SEQ ID NO: 716444 - RNA, 19 nt, Artificial Sequence
  Description of Artificial Sequence: Synthetic oligonucleotide
  Sense strand starting at position 96 of SEQ ID NO: 586418
gcuuuauaucuaugacuag

SEQ ID NO: 716445 - RNA, 19 nt, Artificial Sequence
  Description of Artificial Sequence: Synthetic oligonucleotide
  Antisense strand to SEQ ID NO: 716444
cuagucauagauauaaagc

SEQ ID NO: 716446 - RNA, 19 nt, Artificial Sequence
  Description of Artificial Sequence: Synthetic oligonucleotide
  Sense strand starting at position 224 of SEQ ID NO: 586418
cuuguacaguauuccuaaa

SEQ ID NO: 716447 - RNA, 19 nt, Artificial Sequence
  Description of Artificial Sequence: Synthetic oligonucleotide
  Antisense strand to SEQ ID NO: 716446
uuuaggaauacuguacaag

SEQ ID NO: 716448 - RNA, 19 nt, Artificial Sequence
  Description of Artificial Sequence: Synthetic oligonucleotide
  Sense strand starting at position 226 of SEQ ID NO: 586418
uguacaguauuccuaaaca

SEQ ID NO: 716449 - RNA, 19 nt, Artificial Sequence
  Description of Artificial Sequence: Synthetic oligonucleotide
  Antisense strand to SEQ ID NO: 716448
uguuuaggaauacuguaca

SEQ ID NO: 716450 - RNA, 19 nt, Artificial Sequence
  Description of Artificial Sequence: Synthetic oligonucleotide
  Sense strand starting at position 251 of SEQ ID NO: 586418
aguugcuaaugcuuaugaa

SEQ ID NO: 716451 - RNA, 19 nt, Artificial Sequence
  Description of Artificial Sequence: Synthetic oligonucleotide
  Antisense strand to SEQ ID NO: 716450
uucauaagcauuagcaacu

SEQ ID NO: 716452 - RNA, 19 nt, Artificial Sequence
  Description of Artificial Sequence: Synthetic oligonucleotide
  Sense strand starting at position 252 of SEQ ID NO: 586418
guugcuaaugcuuaugaag

SEQ ID NO: 716453 - RNA, 19 nt, Artificial Sequence
  Description of Artificial Sequence: Synthetic oligonucleotide
  Antisense strand to SEQ ID NO: 716452
cuucauaagcauuagcaac

SEQ ID NO: 716454 - RNA, 19 nt, Artificial Sequence
  Description of Artificial Sequence: Synthetic oligonucleotide
  Sense strand starting at position 321 of SEQ ID NO: 586418
uugugacagcauucguguu

SEQ ID NO: 716455 - RNA, 19 nt, Artificial Sequence
  Description of Artificial Sequence: Synthetic oligonucleotide
  Antisense strand to SEQ ID NO: 716454
aacacgaaugcugucacaa

SEQ ID NO: 716456 - RNA, 19 nt, Artificial Sequence
  Description of Artificial Sequence: Synthetic oligonucleotide
  Sense strand starting at position 426 of SEQ ID NO: 586418
gcaagccuuuaaguaaaua

SEQ ID NO: 716457 - RNA, 19 nt, Artificial Sequence
  Description of Artificial Sequence: Synthetic oligonucleotide
  Antisense strand to SEQ ID NO: 716456
uauuuacuuaaaggcuugc

SEQ ID NO: 716458 - RNA, 19 nt, Artificial Sequence
  Description of Artificial Sequence: Synthetic oligonucleotide
  Sense strand starting at position 483 of SEQ ID NO: 586418
uacagauccugugugauaa

SEQ ID NO: 716459 - RNA, 19 nt, Artificial Sequence
  Description of Artificial Sequence: Synthetic oligonucleotide
  Antisense strand to SEQ ID NO: 716458
uuaucacacaggaucugua

SEQ ID NO: 716460 - RNA, 19 nt, Artificial Sequence
  Description of Artificial Sequence: Synthetic oligonucleotide
  Sense strand starting at position 484 of SEQ ID NO: 586418
acagauccugugugauaaa

SEQ ID NO: 716461 - RNA, 19 nt, Artificial Sequence
  Description of Artificial Sequence: Synthetic oligonucleotide
  Antisense strand to SEQ ID NO: 716460
uuuaucacacaggaucugu

SEQ ID NO: 716462 - RNA, 19 nt, Artificial Sequence
  Description of Artificial Sequence: Synthetic oligonucleotide
  Sense strand starting at position 485 of SEQ ID NO: 586418
cagauccugugugauaaag

SEQ ID NO: 716463 - RNA, 19 nt, Artificial Sequence
  Description of Artificial Sequence: Synthetic oligonucleotide
  Antisense strand to SEQ ID NO: 716462
cuuuaucacacaggaucug

SEQ ID NO: 716464 - RNA, 19 nt, Artificial Sequence
  Description of Artificial Sequence: Synthetic oligonucleotide
  Sense strand starting at position 487 of SEQ ID NO: 586418
gauccugugugauaaagga

SEQ ID NO: 716465 - RNA, 19 nt, Artificial Sequence
  Description of Artificial Sequence: Synthetic oligonucleotide
  Antisense strand to SEQ ID NO: 716464
uccuuuaucacacaggauc

SEQ ID NO: 716466 - RNA, 19 nt, Artificial Sequence
  Description of Artificial Sequence: Synthetic oligonucleotide
  Sense strand starting at position 491 of SEQ ID NO: 586418
cugugugauaaaggaaguu

SEQ ID NO: 716467 - RNA, 19 nt, Artificial Sequence
  Description of Artificial Sequence: Synthetic oligonucleotide
  Antisense strand to SEQ ID NO: 716466
aacuuccuuuaucacacag

SEQ ID NO: 716468 - RNA, 19 nt, Artificial Sequence
  Description of Artificial Sequence: Synthetic oligonucleotide
  Sense strand starting at position 504 of SEQ ID NO: 586418
gaaguuuaacuguggacag

SEQ ID NO: 716469 - RNA, 19 nt, Artificial Sequence
  Description of Artificial Sequence: Synthetic oligonucleotide
  Antisense strand to SEQ ID NO: 716468
cuguccacaguuaaacuuc

SEQ ID NO: 716470 - RNA, 19 nt, Artificial Sequence
  Description of Artificial Sequence: Synthetic oligonucleotide
  Sense strand starting at position 515 of SEQ ID NO: 586418
guggacagcacacguuaaa

SEQ ID NO: 716471 - RNA, 19 nt, Artificial Sequence
  Description of Artificial Sequence: Synthetic oligonucleotide
  Antisense strand to SEQ ID NO: 716470
uuuaacgugugcuguccac

SEQ ID NO: 716472 - RNA, 19 nt, Artificial Sequence
  Description of Artificial Sequence: Synthetic oligonucleotide
  Sense strand starting at position 527 of SEQ ID NO: 586418
cguuaaauuucuuaggcaa

SEQ ID NO: 716473 - RNA, 19 nt, Artificial Sequence
  Description of Artificial Sequence: Synthetic oligonucleotide
  Antisense strand to SEQ ID NO: 716472
uugccuaagaaauuuaacg

SEQ ID NO: 716474 - RNA, 19 nt, Artificial Sequence
  Description of Artificial Sequence: Synthetic oligonucleotide
  Sense strand starting at position 617 of SEQ ID NO: 586418
agaaacugcuaaccguaua

SEQ ID NO: 716475 - RNA, 19 nt, Artificial Sequence
  Description of Artificial Sequence: Synthetic oligonucleotide
  Antisense strand to SEQ ID NO: 716474
uauacgguuagcaguuucu

SEQ ID NO: 716476 - RNA, 19 nt, Artificial Sequence
  Description of Artificial Sequence: Synthetic oligonucleotide
  Sense strand starting at position 622 of SEQ ID NO: 586418
cugcuaaccguauaaucua

SEQ ID NO: 716477 - RNA, 19 nt, Artificial Sequence
  Description of Artificial Sequence: Synthetic oligonucleotide
  Antisense strand to SEQ ID NO: 716476
uagauuauacgguuagcag

SEQ ID NO: 716478 - RNA, 19 nt, Artificial Sequence
  Description of Artificial Sequence: Synthetic oligonucleotide
  Sense strand starting at position 644 of SEQ ID NO: 586418
acacauuugucauagccau

SEQ ID NO: 716479 - RNA, 19 nt, Artificial Sequence
  Description of Artificial Sequence: Synthetic oligonucleotide
  Antisense strand to SEQ ID NO: 716478
auggcuaugacaaaugugu

SEQ ID NO: 716480 - RNA, 19 nt, Artificial Sequence
  Description of Artificial Sequence: Synthetic oligonucleotide
  Sense strand starting at position 720 of SEQ ID NO: 586418
ggaauaaucuggcugaaug

SEQ ID NO: 716481 - RNA, 19 nt, Artificial Sequence
  Description of Artificial Sequence: Synthetic oligonucleotide
  Antisense strand to SEQ ID NO: 716480
cauucagccagauuauucc

SEQ ID NO: 716482 - RNA, 19 nt, Artificial Sequence
  Description of Artificial Sequence: Synthetic oligonucleotide
  Sense strand starting at position 721 of SEQ ID NO: 586418
gaauaaucuggcugaauga

SEQ ID NO: 716483 - RNA, 19 nt, Artificial Sequence
  Description of Artificial Sequence: Synthetic oligonucleotide
  Antisense strand to SEQ ID NO: 716482
ucauucagccagauuauuc

SEQ ID NO: 716484 - RNA, 19 nt, Artificial Sequence
  Description of Artificial Sequence: Synthetic oligonucleotide
  Sense strand starting at position 739 of SEQ ID NO: 586418
acaguugauuucguuagca

SEQ ID NO: 716485 - RNA, 19 nt, Artificial Sequence
  Description of Artificial Sequence: Synthetic oligonucleotide
  Antisense strand to SEQ ID NO: 716484
ugcuaacgaaaucaacugu

SEQ ID NO: 716486 - RNA, 19 nt, Artificial Sequence
  Description of Artificial Sequence: Synthetic oligonucleotide
  Sense strand starting at position 771 of SEQ ID NO: 586418
ucagauguaucacacaagu

SEQ ID NO: 716487 - RNA, 19 nt, Artificial Sequence
  Description of Artificial Sequence: Synthetic oligonucleotide
  Antisense strand to SEQ ID NO: 716486
acuugugugauacaucuga

SEQ ID NO: 716488 - RNA, 19 nt, Artificial Sequence
  Description of Artificial Sequence: Synthetic oligonucleotide
  Sense strand starting at position 801 of SEQ ID NO: 586418
gcuuguaauguuuaaggau

SEQ ID NO: 716489 - RNA, 19 nt, Artificial Sequence
  Description of Artificial Sequence: Synthetic oligonucleotide
  Antisense strand to SEQ ID NO: 716488
auccuuaaacauuacaagc

SEQ ID NO: 716490 - RNA, 19 nt, Artificial Sequence
  Description of Artificial Sequence: Synthetic oligonucleotide
  Sense strand starting at position 808 of SEQ ID NO: 586418
auguuuaaggauuacgauu

SEQ ID NO: 716491 - RNA, 19 nt, Artificial Sequence
  Description of Artificial Sequence: Synthetic oligonucleotide
  Antisense strand to SEQ ID NO: 716490
aaucguaauccuuaaacau

SEQ ID NO: 716492 - RNA, 19 nt, Artificial Sequence
  Description of Artificial Sequence: Synthetic oligonucleotide
  Sense strand starting at position 816 of SEQ ID NO: 586418
ggauuacgauucuuuagaa

SEQ ID NO: 716493 - RNA, 19 nt, Artificial Sequence
  Description of Artificial Sequence: Synthetic oligonucleotide
  Antisense strand to SEQ ID NO: 716492
uucuaaagaaucguaaucc

SEQ ID NO: 716494 - RNA, 19 nt, Artificial Sequence
  Description of Artificial Sequence: Synthetic oligonucleotide
  Sense strand starting at position 820 of SEQ ID NO: 586418
uacgauucuuuagaaagug

SEQ ID NO: 716495 - RNA, 19 nt, Artificial Sequence
  Description of Artificial Sequence: Synthetic oligonucleotide
  Antisense strand to SEQ ID NO: 716494
cacuuucuaaagaaucgua

SEQ ID NO: 716496 - RNA, 19 nt, Artificial Sequence
  Description of Artificial Sequence: Synthetic oligonucleotide
  Sense strand starting at position 1014 of SEQ ID NO: 586418
gcucgacucuucccucaaa

SEQ ID NO: 716497 - RNA, 19 nt, Artificial Sequence
  Description of Artificial Sequence: Synthetic oligonucleotide
  Antisense strand to SEQ ID NO: 716496
uuugagggaagagucgagc

SEQ ID NO: 716498 - RNA, 19 nt, Artificial Sequence
  Description of Artificial Sequence: Synthetic oligonucleotide
  Sense strand starting at position 2196 of SEQ ID NO: 586418
uuuguucuuucgcugaaca

SEQ ID NO: 716499 - RNA, 19 nt, Artificial Sequence
  Description of Artificial Sequence: Synthetic oligonucleotide
  Antisense strand to SEQ ID NO: 716498
uguucagcgaaagaacaaa

SEQ ID NO: 716500 - RNA, 19 nt, Artificial Sequence
  Description of Artificial Sequence: Synthetic oligonucleotide
  Sense strand starting at position 2198 of SEQ ID NO: 586418
uguucuuucgcugaacaca

SEQ ID NO: 716501 - RNA, 19 nt, Artificial Sequence
  Description of Artificial Sequence: Synthetic oligonucleotide
  Antisense strand to SEQ ID NO: 716500
uguguucagcgaaagaaca

SEQ ID NO: 716502 - RNA, 19 nt, Artificial Sequence
  Description of Artificial Sequence: Synthetic oligonucleotide
  Sense strand starting at position 2994 of SEQ ID NO: 586418
cagugcuuaucgcccuaga

SEQ ID NO: 716503 - RNA, 19 nt, Artificial Sequence
  Description of Artificial Sequence: Synthetic oligonucleotide
  Antisense strand to SEQ ID NO: 716502
ucuagggcgauaagcacug

SEQ ID NO: 716504 - RNA, 19 nt, Artificial Sequence
  Description of Artificial Sequence: Synthetic oligonucleotide
  Sense strand starting at position 2997 of SEQ ID NO: 586418
ugcuuaucgcccuagaaac

SEQ ID NO: 716505 - RNA, 19 nt, Artificial Sequence
  Description of Artificial Sequence: Synthetic oligonucleotide
  Antisense strand to SEQ ID NO: 716504
guuucuagggcgauaagca

SEQ ID NO: 716506 - RNA, 19 nt, Artificial Sequence
  Description of Artificial Sequence: Synthetic oligonucleotide
  Sense strand starting at position 3065 of SEQ ID NO: 586418
guucuaagcacgugucagu

SEQ ID NO: 716507 - RNA, 19 nt, Artificial Sequence
  Description of Artificial Sequence: Synthetic oligonucleotide
  Antisense strand to SEQ ID NO: 716506
acugacacgugcuuagaac

SEQ ID NO: 716508 - RNA, 19 nt, Artificial Sequence
  Description of Artificial Sequence: Synthetic oligonucleotide
  Sense strand starting at position 3070 of SEQ ID NO: 586418
aagcacgugucaguguuaa

SEQ ID NO: 716509 - RNA, 19 nt, Artificial Sequence
  Description of Artificial Sequence: Synthetic oligonucleotide
  Antisense strand to SEQ ID NO: 716508
uuaacacugacacgugcuu

SEQ ID NO: 716510 - RNA, 19 nt, Artificial Sequence
  Description of Artificial Sequence: Synthetic oligonucleotide
  Sense strand starting at position 3493 of SEQ ID NO: 586418
gagggauucugcuuaggau

SEQ ID NO: 716511 - RNA, 19 nt, Artificial Sequence
  Description of Artificial Sequence: Synthetic oligonucleotide
  Antisense strand to SEQ ID NO: 716510
auccuaagcagaaucccuc

SEQ ID NO: 716512 - RNA, 19 nt, Artificial Sequence
  Description of Artificial Sequence: Synthetic oligonucleotide
  Sense strand starting at position 3507 of SEQ ID NO: 586418
aggauacagucucuccuau

SEQ ID NO: 716513 - RNA, 19 nt, Artificial Sequence
  Description of Artificial Sequence: Synthetic oligonucleotide
  Antisense strand to SEQ ID NO: 716512
auaggagagacuguauccu

SEQ ID NO: 716514 - RNA, 19 nt, Artificial Sequence
  Description of Artificial Sequence: Synthetic oligonucleotide
  Sense strand starting at position 3535 of SEQ ID NO: 586418
uggcaaugcaguuaagagu

SEQ ID NO: 716515 - RNA, 19 nt, Artificial Sequence
  Description of Artificial Sequence: Synthetic oligonucleotide
  Antisense strand to SEQ ID NO: 716514
acucuuaacugcauugcca

SEQ ID NO: 716516 - RNA, 19 nt, Artificial Sequence
  Description of Artificial Sequence: Synthetic oligonucleotide
  Sense strand starting at position 3544 of SEQ ID NO: 586418
aguuaagaguauuccgaau

SEQ ID NO: 716517 - RNA, 19 nt, Artificial Sequence
  Description of Artificial Sequence: Synthetic oligonucleotide
  Antisense strand to SEQ ID NO: 716516
auucggaauacucuuaacu

SEQ ID NO: 716518 - RNA, 19 nt, Artificial Sequence
  Description of Artificial Sequence: Synthetic oligonucleotide
  Sense strand starting at position 3546 of SEQ ID NO: 586418
uuaagaguauuccgaauuu

SEQ ID NO: 716519 - RNA, 19 nt, Artificial Sequence
  Description of Artificial Sequence: Synthetic oligonucleotide
  Antisense strand to SEQ ID NO: 716518
aaauucggaauacucuuaa

SEQ ID NO: 716520 - RNA, 19 nt, Artificial Sequence
  Description of Artificial Sequence: Synthetic oligonucleotide
  Sense strand starting at position 3615 of SEQ ID NO: 586418
gagauuccauauugagagu

SEQ ID NO: 716521 - RNA, 19 nt, Artificial Sequence
  Description of Artificial Sequence: Synthetic oligonucleotide
  Antisense strand to SEQ ID NO: 716520
acucucaauauggaaucuc

SEQ ID NO: 716522 - RNA, 19 nt, Artificial Sequence
  Description of Artificial Sequence: Synthetic oligonucleotide
  Sense strand starting at position 119 of SEQ ID NO: 586419
agggcaaaguuagaaauuu

SEQ ID NO: 716523 - RNA, 19 nt, Artificial Sequence
  Description of Artificial Sequence: Synthetic oligonucleotide
  Antisense strand to SEQ ID NO: 716522
aaauuucuaacuuugcccu

SEQ ID NO: 716524 - RNA, 19 nt, Artificial Sequence
  Description of Artificial Sequence: Synthetic oligonucleotide
  Sense strand starting at position 553 of SEQ ID NO: 586419
ggacaagauuauuaauagg

SEQ ID NO: 716525 - RNA, 19 nt, Artificial Sequence
  Description of Artificial Sequence: Synthetic oligonucleotide
  Antisense strand to SEQ ID NO: 716524
ccuauuaauaaucuugucc

SEQ ID NO: 716526 - RNA, 19 nt, Artificial Sequence
  Description of Artificial Sequence: Synthetic oligonucleotide
  Sense strand starting at position 619 of SEQ ID NO: 586419
uuguuauaaugucucaaca

SEQ ID NO: 716527 - RNA, 19 nt, Artificial Sequence
  Description of Artificial Sequence: Synthetic oligonucleotide
  Antisense strand to SEQ ID NO: 716526
uguugagacauuauaacaa

SEQ ID NO: 716528 - RNA, 19 nt, Artificial Sequence
  Description of Artificial Sequence: Synthetic oligonucleotide
  Sense strand starting at position 621 of SEQ ID NO: 586419
guuauaaugucucaacacu

SEQ ID NO: 716529 - RNA, 19 nt, Artificial Sequence
  Description of Artificial Sequence: Synthetic oligonucleotide
  Antisense strand to SEQ ID NO: 716528
aguguugagacauuauaac

SEQ ID NO: 716530 - RNA, 19 nt, Artificial Sequence
  Description of Artificial Sequence: Synthetic oligonucleotide
  Sense strand starting at position 761 of SEQ ID NO: 586419
agaucuuuaucauauagga

SEQ ID NO: 716531 - RNA, 19 nt, Artificial Sequence
  Description of Artificial Sequence: Synthetic oligonucleotide
  Antisense strand to SEQ ID NO: 716530
uccuauaugauaaagaucu

SEQ ID NO: 716532 - RNA, 19 nt, Artificial Sequence
  Description of Artificial Sequence: Synthetic oligonucleotide
  Sense strand starting at position 871 of SEQ ID NO: 586419
uccuguuuccgggaaaccu

SEQ ID NO: 716533 - RNA, 19 nt, Artificial Sequence
  Description of Artificial Sequence: Synthetic oligonucleotide
  Antisense strand to SEQ ID NO: 716532
agguuucccggaaacagga

SEQ ID NO: 716534 - RNA, 19 nt, Artificial Sequence
  Description of Artificial Sequence: Synthetic oligonucleotide
  Sense strand starting at position 936 of SEQ ID NO: 586419
gcuuuauaucuaugacuag

SEQ ID NO: 716535 - RNA, 19 nt, Artificial Sequence
  Description of Artificial Sequence: Synthetic oligonucleotide
  Antisense strand to SEQ ID NO: 716534
cuagucauagauauaaagc

SEQ ID NO: 716536 - RNA, 19 nt, Artificial Sequence
  Description of Artificial Sequence: Synthetic oligonucleotide
  Sense strand starting at position 1064 of SEQ ID NO: 586419
cuuguacaguauuccuaaa

SEQ ID NO: 716537 - RNA, 19 nt, Artificial Sequence
  Description of Artificial Sequence: Synthetic oligonucleotide
  Antisense strand to SEQ ID NO: 716536
uuuaggaauacuguacaag

SEQ ID NO: 716538 - RNA, 19 nt, Artificial Sequence
  Description of Artificial Sequence: Synthetic oligonucleotide
  Sense strand starting at position 1066 of SEQ ID NO: 586419
uguacaguauuccuaaaca

SEQ ID NO: 716539 - RNA, 19 nt, Artificial Sequence
  Description of Artificial Sequence: Synthetic oligonucleotide
  Antisense strand to SEQ ID NO: 716538
uguuuaggaauacuguaca

SEQ ID NO: 716540 - RNA, 19 nt, Artificial Sequence
  Description of Artificial Sequence: Synthetic oligonucleotide
  Sense strand starting at position 1091 of SEQ ID NO: 586419
aguugcuaaugcuuaugaa

SEQ ID NO: 716541 - RNA, 19 nt, Artificial Sequence
  Description of Artificial Sequence: Synthetic oligonucleotide
  Antisense strand to SEQ ID NO: 716540
uucauaagcauuagcaacu

SEQ ID NO: 716542 - RNA, 19 nt, Artificial Sequence
  Description of Artificial Sequence: Synthetic oligonucleotide
  Sense strand starting at position 1092 of SEQ ID NO: 586419
guugcuaaugcuuaugaag

SEQ ID NO: 716543 - RNA, 19 nt, Artificial Sequence
  Description of Artificial Sequence: Synthetic oligonucleotide
  Antisense strand to SEQ ID NO: 716542
cuucauaagcauuagcaac

SEQ ID NO: 716544 - RNA, 19 nt, Artificial Sequence
  Description of Artificial Sequence: Synthetic oligonucleotide
  Sense strand starting at position 1161 of SEQ ID NO: 586419
uugugacagcauucguguu

SEQ ID NO: 716545 - RNA, 19 nt, Artificial Sequence
  Description of Artificial Sequence: Synthetic oligonucleotide
  Antisense strand to SEQ ID NO: 716544
aacacgaaugcugucacaa

SEQ ID NO: 716546 - RNA, 19 nt, Artificial Sequence
  Description of Artificial Sequence: Synthetic oligonucleotide
  Sense strand starting at position 1266 of SEQ ID NO: 586419
gcaagccuuuaaguaaaua

SEQ ID NO: 716547 - RNA, 19 nt, Artificial Sequence
  Description of Artificial Sequence: Synthetic oligonucleotide
  Antisense strand to SEQ ID NO: 716546
uauuuacuuaaaggcuugc

SEQ ID NO: 716548 - RNA, 19 nt, Artificial Sequence
  Description of Artificial Sequence: Synthetic oligonucleotide
  Sense strand starting at position 1323 of SEQ ID NO: 586419
uacagauccugugugauaa

SEQ ID NO: 716549 - RNA, 19 nt, Artificial Sequence
  Description of Artificial Sequence: Synthetic oligonucleotide
  Antisense strand to SEQ ID NO: 716548
uuaucacacaggaucugua

SEQ ID NO: 716550 - RNA, 19 nt, Artificial Sequence
  Description of Artificial Sequence: Synthetic oligonucleotide
  Sense strand starting at position 1324 of SEQ ID NO: 586419
acagauccugugugauaaa

SEQ ID NO: 716551 - RNA, 19 nt, Artificial Sequence
  Description of Artificial Sequence: Synthetic oligonucleotide
  Antisense strand to SEQ ID NO: 716550
uuuaucacacaggaucugu

SEQ ID NO: 716552 - RNA, 19 nt, Artificial Sequence
  Description of Artificial Sequence: Synthetic oligonucleotide
  Sense strand starting at position 1325 of SEQ ID NO: 586419
cagauccugugugauaaag

SEQ ID NO: 716553 - RNA, 19 nt, Artificial Sequence
  Description of Artificial Sequence: Synthetic oligonucleotide
  Antisense strand to SEQ ID NO: 716552
cuuuaucacacaggaucug

SEQ ID NO: 716554 - RNA, 19 nt, Artificial Sequence
  Description of Artificial Sequence: Synthetic oligonucleotide
  Sense strand starting at position 1327 of SEQ ID NO: 586419
gauccugugugauaaagga

SEQ ID NO: 716555 - RNA, 19 nt, Artificial Sequence
  Description of Artificial Sequence: Synthetic oligonucleotide
  Antisense strand to SEQ ID NO: 716554
uccuuuaucacacaggauc

SEQ ID NO: 716556 - RNA, 19 nt, Artificial Sequence
  Description of Artificial Sequence: Synthetic oligonucleotide
  Sense strand starting at position 1331 of SEQ ID NO: 586419
cugugugauaaaggaaguu

SEQ ID NO: 716557 - RNA, 19 nt, Artificial Sequence
  Description of Artificial Sequence: Synthetic oligonucleotide
  Antisense strand to SEQ ID NO: 716556
aacuuccuuuaucacacag

SEQ ID NO: 716558 - RNA, 19 nt, Artificial Sequence
  Description of Artificial Sequence: Synthetic oligonucleotide
  Sense strand starting at position 1344 of SEQ ID NO: 586419
gaaguuuaacuguggacag

SEQ ID NO: 716559 - RNA, 19 nt, Artificial Sequence
  Description of Artificial Sequence: Synthetic oligonucleotide
  Antisense strand to SEQ ID NO: 716558
cuguccacaguuaaacuuc

SEQ ID NO: 716560 - RNA, 19 nt, Artificial Sequence
  Description of Artificial Sequence: Synthetic oligonucleotide
  Sense strand starting at position 1355 of SEQ ID NO: 586419
guggacagcacacguuaaa

SEQ ID NO: 716561 - RNA, 19 nt, Artificial Sequence
  Description of Artificial Sequence: Synthetic oligonucleotide
  Antisense strand to SEQ ID NO: 716560
uuuaacgugugcuguccac

SEQ ID NO: 716562 - RNA, 19 nt, Artificial Sequence
  Description of Artificial Sequence: Synthetic oligonucleotide
  Sense strand starting at position 1367 of SEQ ID NO: 586419
cguuaaauuucuuaggcaa

SEQ ID NO: 716563 - RNA, 19 nt, Artificial Sequence
  Description of Artificial Sequence: Synthetic oligonucleotide
  Antisense strand to SEQ ID NO: 716562
uugccuaagaaauuuaacg

SEQ ID NO: 716564 - RNA, 19 nt, Artificial Sequence
  Description of Artificial Sequence: Synthetic oligonucleotide
  Sense strand starting at position 1457 of SEQ ID NO: 586419
agaaacugcuaaccguaua

SEQ ID NO: 716565 - RNA, 19 nt, Artificial Sequence
  Description of Artificial Sequence: Synthetic oligonucleotide
  Antisense strand to SEQ ID NO: 716564
uauacgguuagcaguuucu

SEQ ID NO: 716566 - RNA, 19 nt, Artificial Sequence
  Description of Artificial Sequence: Synthetic oligonucleotide
  Sense strand starting at position 1462 of SEQ ID NO: 586419
cugcuaaccguauaaucua

SEQ ID NO: 716567 - RNA, 19 nt, Artificial Sequence
  Description of Artificial Sequence: Synthetic oligonucleotide
  Antisense strand to SEQ ID NO: 716566
uagauuauacgguuagcag

SEQ ID NO: 716568 - RNA, 19 nt, Artificial Sequence
  Description of Artificial Sequence: Synthetic oligonucleotide
  Sense strand starting at position 1484 of SEQ ID NO: 586419
acacauuugucauagccau

SEQ ID NO: 716569 - RNA, 19 nt, Artificial Sequence
  Description of Artificial Sequence: Synthetic oligonucleotide
  Antisense strand to SEQ ID NO: 716568
auggcuaugacaaaugugu

SEQ ID NO: 716570 - RNA, 19 nt, Artificial Sequence
  Description of Artificial Sequence: Synthetic oligonucleotide
  Sense strand starting at position 1560 of SEQ ID NO: 586419
ggaauaaucuggcugaaug

SEQ ID NO: 716571 - RNA, 19 nt, Artificial Sequence
  Description of Artificial Sequence: Synthetic oligonucleotide
  Antisense strand to SEQ ID NO: 716570
cauucagccagauuauucc

SEQ ID NO: 716572 - RNA, 19 nt, Artificial Sequence
  Description of Artificial Sequence: Synthetic oligonucleotide
  Sense strand starting at position 1561 of SEQ ID NO: 586419
gaauaaucuggcugaauga

SEQ ID NO: 716573 - RNA, 19 nt, Artificial Sequence
  Description of Artificial Sequence: Synthetic oligonucleotide
  Antisense strand to SEQ ID NO: 716572
ucauucagccagauuauuc

SEQ ID NO: 716574 - RNA, 19 nt, Artificial Sequence
  Description of Artificial Sequence: Synthetic oligonucleotide
  Sense strand starting at position 1579 of SEQ ID NO: 586419
acaguugauuucguuagca

SEQ ID NO: 716575 - RNA, 19 nt, Artificial Sequence
  Description of Artificial Sequence: Synthetic oligonucleotide
  Antisense strand to SEQ ID NO: 716574
ugcuaacgaaaucaacugu

SEQ ID NO: 716576 - RNA, 19 nt, Artificial Sequence
  Description of Artificial Sequence: Synthetic oligonucleotide
  Sense strand starting at position 1611 of SEQ ID NO: 586419
ucagauguaucacacaagu

SEQ ID NO: 716577 - RNA, 19 nt, Artificial Sequence
  Description of Artificial Sequence: Synthetic oligonucleotide
  Antisense strand to SEQ ID NO: 716576
acuugugugauacaucuga

SEQ ID NO: 716578 - RNA, 19 nt, Artificial Sequence
  Description of Artificial Sequence: Synthetic oligonucleotide
  Sense strand starting at position 1641 of SEQ ID NO: 586419
gcuuguaauguuuaaggau

SEQ ID NO: 716579 - RNA, 19 nt, Artificial Sequence
  Description of Artificial Sequence: Synthetic oligonucleotide
  Antisense strand to SEQ ID NO: 716578
auccuuaaacauuacaagc

SEQ ID NO: 716580 - RNA, 19 nt, Artificial Sequence
  Description of Artificial Sequence: Synthetic oligonucleotide
  Sense strand starting at position 1648 of SEQ ID NO: 586419
auguuuaaggauuacgauu

SEQ ID NO: 716581 - RNA, 19 nt, Artificial Sequence
  Description of Artificial Sequence: Synthetic oligonucleotide
  Antisense strand to SEQ ID NO: 716580
aaucguaauccuuaaacau

SEQ ID NO: 716582 - RNA, 19 nt, Artificial Sequence
  Description of Artificial Sequence: Synthetic oligonucleotide
  Sense strand starting at position 1656 of SEQ ID NO: 586419
ggauuacgauucuuuagaa

SEQ ID NO: 716583 - RNA, 19 nt, Artificial Sequence
  Description of Artificial Sequence: Synthetic oligonucleotide
  Antisense strand to SEQ ID NO: 716582
uucuaaagaaucguaaucc

SEQ ID NO: 716584 - RNA, 19 nt, Artificial Sequence
  Description of Artificial Sequence: Synthetic oligonucleotide
  Sense strand starting at position 1660 of SEQ ID NO: 586419
uacgauucuuuagaaagug

SEQ ID NO: 716585 - RNA, 19 nt, Artificial Sequence
  Description of Artificial Sequence: Synthetic oligonucleotide
  Antisense strand to SEQ ID NO: 716584
cacuuucuaaagaaucgua

SEQ ID NO: 716586 - RNA, 19 nt, Artificial Sequence
  Description of Artificial Sequence: Synthetic oligonucleotide
  Sense strand starting at position 1854 of SEQ ID NO: 586419
gcucgacucuucccucaaa

SEQ ID NO: 716587 - RNA, 19 nt, Artificial Sequence
  Description of Artificial Sequence: Synthetic oligonucleotide
  Antisense strand to SEQ ID NO: 716586
uuugagggaagagucgagc

SEQ ID NO: 716588 - RNA, 19 nt, Artificial Sequence
  Description of Artificial Sequence: Synthetic oligonucleotide
  Sense strand starting at position 3036 of SEQ ID NO: 586419
uuuguucuuucgcugaaca

SEQ ID NO: 716589 - RNA, 19 nt, Artificial Sequence
  Description of Artificial Sequence: Synthetic oligonucleotide
  Antisense strand to SEQ ID NO: 716588
uguucagcgaaagaacaaa

SEQ ID NO: 716590 - RNA, 19 nt, Artificial Sequence
  Description of Artificial Sequence: Synthetic oligonucleotide
  Sense strand starting at position 3038 of SEQ ID NO: 586419
uguucuuucgcugaacaca

SEQ ID NO: 716591 - RNA, 19 nt, Artificial Sequence
  Description of Artificial Sequence: Synthetic oligonucleotide
  Antisense strand to SEQ ID NO: 716590
uguguucagcgaaagaaca

SEQ ID NO: 716592 - RNA, 19 nt, Artificial Sequence
  Description of Artificial Sequence: Synthetic oligonucleotide
  Sense strand starting at position 3834 of SEQ ID NO: 586419
cagugcuuaucgcccuaga

SEQ ID NO: 716593 - RNA, 19 nt, Artificial Sequence
  Description of Artificial Sequence: Synthetic oligonucleotide
  Antisense strand to SEQ ID NO: 716592
ucuagggcgauaagcacug

SEQ ID NO: 716594 - RNA, 19 nt, Artificial Sequence
  Description of Artificial Sequence: Synthetic oligonucleotide
  Sense strand starting at position 3837 of SEQ ID NO: 586419
ugcuuaucgcccuagaaac

SEQ ID NO: 716595 - RNA, 19 nt, Artificial Sequence
  Description of Artificial Sequence: Synthetic oligonucleotide
  Antisense strand to SEQ ID NO: 716594
guuucuagggcgauaagca

SEQ ID NO: 716596 - RNA, 19 nt, Artificial Sequence
  Description of Artificial Sequence: Synthetic oligonucleotide
  Sense strand starting at position 3905 of SEQ ID NO: 586419
guucuaagcacgugucagu

SEQ ID NO: 716597 - RNA, 19 nt, Artificial Sequence
  Description of Artificial Sequence: Synthetic oligonucleotide
  Antisense strand to SEQ ID NO: 716596
acugacacgugcuuagaac

SEQ ID NO: 716598 - RNA, 19 nt, Artificial Sequence
  Description of Artificial Sequence: Synthetic oligonucleotide
  Sense strand starting at position 3910 of SEQ ID NO: 586419
aagcacgugucaguguuaa

SEQ ID NO: 716599 - RNA, 19 nt, Artificial Sequence
  Description of Artificial Sequence: Synthetic oligonucleotide
  Antisense strand to SEQ ID NO: 716598
uuaacacugacacgugcuu

SEQ ID NO: 716600 - RNA, 19 nt, Artificial Sequence
  Description of Artificial Sequence: Synthetic oligonucleotide
  Sense strand starting at position 3967 of SEQ ID NO: 586419
ucugcaaagugugaggaua

SEQ ID NO: 716601 - RNA, 19 nt, Artificial Sequence
  Description of Artificial Sequence: Synthetic oligonucleotide
  Antisense strand to SEQ ID NO: 716600
uauccucacacuuugcaga

SEQ ID NO: 716602 - RNA, 19 nt, Artificial Sequence
  Description of Artificial Sequence: Synthetic oligonucleotide
  Sense strand starting at position 131 of SEQ ID NO: 586420
cgcuucugagguuacagaa

SEQ ID NO: 716603 - RNA, 19 nt, Artificial Sequence
  Description of Artificial Sequence: Synthetic oligonucleotide
  Antisense strand to SEQ ID NO: 716602
uucuguaaccucagaagcg

SEQ ID NO: 716604 - RNA, 19 nt, Artificial Sequence
  Description of Artificial Sequence: Synthetic oligonucleotide
  Sense strand starting at position 147 of SEQ ID NO: 586420
gaaagaaucugacuucugu

SEQ ID NO: 716605 - RNA, 19 nt, Artificial Sequence
  Description of Artificial Sequence: Synthetic oligonucleotide
  Antisense strand to SEQ ID NO: 716604
acagaagucagauucuuuc

SEQ ID NO: 716606 - RNA, 19 nt, Artificial Sequence
  Description of Artificial Sequence: Synthetic oligonucleotide
  Sense strand starting at position 303 of SEQ ID NO: 586420
cagucaugugaguaagccu

SEQ ID NO: 716607 - RNA, 19 nt, Artificial Sequence
  Description of Artificial Sequence: Synthetic oligonucleotide
  Antisense strand to SEQ ID NO: 716606
aggcuuacucacaugacug

SEQ ID NO: 716608 - RNA, 19 nt, Artificial Sequence
  Description of Artificial Sequence: Synthetic oligonucleotide
  Sense strand starting at position 341 of SEQ ID NO: 586420
acgccuagccuugagauga

SEQ ID NO: 716609 - RNA, 19 nt, Artificial Sequence
  Description of Artificial Sequence: Synthetic oligonucleotide
  Antisense strand to SEQ ID NO: 716608
ucaucucaaggcuaggcgu

SEQ ID NO: 716610 - RNA, 19 nt, Artificial Sequence
  Description of Artificial Sequence: Synthetic oligonucleotide
  Sense strand starting at position 345 of SEQ ID NO: 586420
cuagccuugagaugacuga

SEQ ID NO: 716611 - RNA, 19 nt, Artificial Sequence
  Description of Artificial Sequence: Synthetic oligonucleotide
  Antisense strand to SEQ ID NO: 716610
ucagucaucucaaggcuag

SEQ ID NO: 716612 - RNA, 19 nt, Artificial Sequence
  Description of Artificial Sequence: Synthetic oligonucleotide
  Sense strand starting at position 369 of SEQ ID NO: 586420
agucaauaccuugauuguu

SEQ ID NO: 716613 - RNA, 19 nt, Artificial Sequence
  Description of Artificial Sequence: Synthetic oligonucleotide
  Antisense strand to SEQ ID NO: 716612
aacaaucaagguauugacu

SEQ ID NO: 716614 - RNA, 19 nt, Artificial Sequence
  Description of Artificial Sequence: Synthetic oligonucleotide
  Sense strand starting at position 371 of SEQ ID NO: 586420
ucaauaccuugauuguuga

SEQ ID NO: 716615 - RNA, 19 nt, Artificial Sequence
  Description of Artificial Sequence: Synthetic oligonucleotide
  Antisense strand to SEQ ID NO: 716614
ucaacaaucaagguauuga

SEQ ID NO: 716616 - RNA, 19 nt, Artificial Sequence
  Description of Artificial Sequence: Synthetic oligonucleotide
  Sense strand starting at position 438 of SEQ ID NO: 586420
cuggauuccugaucacaga

SEQ ID NO: 716617 - RNA, 19 nt, Artificial Sequence
  Description of Artificial Sequence: Synthetic oligonucleotide
  Antisense strand to SEQ ID NO: 716616
ucugugaucaggaauccag

SEQ ID NO: 716618 - RNA, 19 nt, Artificial Sequence
  Description of Artificial Sequence: Synthetic oligonucleotide
  Sense strand starting at position 488 of SEQ ID NO: 586420
uuguuuguucgcuuugguu

SEQ ID NO: 716619 - RNA, 19 nt, Artificial Sequence
  Description of Artificial Sequence: Synthetic oligonucleotide
  Antisense strand to SEQ ID NO: 716618
aaccaaagcgaacaaacaa

SEQ ID NO: 716620 - RNA, 19 nt, Artificial Sequence
  Description of Artificial Sequence: Synthetic oligonucleotide
  Sense strand starting at position 533 of SEQ ID NO: 586420
uguuacauagcuuauagau

SEQ ID NO: 716621 - RNA, 19 nt, Artificial Sequence
  Description of Artificial Sequence: Synthetic oligonucleotide
  Antisense strand to SEQ ID NO: 716620
aucuauaagcuauguaaca

SEQ ID NO: 716622 - RNA, 19 nt, Artificial Sequence
  Description of Artificial Sequence: Synthetic oligonucleotide
  Sense strand starting at position 685 of SEQ ID NO: 586420
agaauacguacaggauaau

SEQ ID NO: 716623 - RNA, 19 nt, Artificial Sequence
  Description of Artificial Sequence: Synthetic oligonucleotide
  Antisense strand to SEQ ID NO: 716622
auuauccuguacguauucu

SEQ ID NO: 716624 - RNA, 19 nt, Artificial Sequence
  Description of Artificial Sequence: Synthetic oligonucleotide
  Sense strand starting at position 958 of SEQ ID NO: 586420
agaccauucugagauauuu

SEQ ID NO: 716625 - RNA, 19 nt, Artificial Sequence
  Description of Artificial Sequence: Synthetic oligonucleotide
  Antisense strand to SEQ ID NO: 716624
aaauaucucagaauggucu

SEQ ID NO: 716626 - RNA, 19 nt, Artificial Sequence
  Description of Artificial Sequence: Synthetic oligonucleotide
  Sense strand starting at position 1038 of SEQ ID NO: 586420
uaguuuggaggaugaaagu

SEQ ID NO: 716627 - RNA, 19 nt, Artificial Sequence
  Description of Artificial Sequence: Synthetic oligonucleotide
  Antisense strand to SEQ ID NO: 716626
acuuucauccuccaaacua

SEQ ID NO: 716628 - RNA, 19 nt, Artificial Sequence
  Description of Artificial Sequence: Synthetic oligonucleotide
  Sense strand starting at position 1053 of SEQ ID NO: 586420
aagugauggaccgaugguu

SEQ ID NO: 716629 - RNA, 19 nt, Artificial Sequence
  Description of Artificial Sequence: Synthetic oligonucleotide
  Antisense strand to SEQ ID NO: 716628
aaccaucgguccaucacuu

SEQ ID NO: 716630 - RNA, 19 nt, Artificial Sequence
  Description of Artificial Sequence: Synthetic oligonucleotide
  Sense strand starting at position 1107 of SEQ ID NO: 586420
cgucuaguucgagcuguac

SEQ ID NO: 716631 - RNA, 19 nt, Artificial Sequence
  Description of Artificial Sequence: Synthetic oligonucleotide
  Antisense strand to SEQ ID NO: 716630
guacagcucgaacuagacg

SEQ ID NO: 716632 - RNA, 19 nt, Artificial Sequence
  Description of Artificial Sequence: Synthetic oligonucleotide
  Sense strand starting at position 1218 of SEQ ID NO: 586420
gccagcucucggcuguuua

SEQ ID NO: 716633 - RNA, 19 nt, Artificial Sequence
  Description of Artificial Sequence: Synthetic oligonucleotide
  Antisense strand to SEQ ID NO: 716632
uaaacagccgagagcuggc

SEQ ID NO: 716634 - RNA, 19 nt, Artificial Sequence
  Description of Artificial Sequence: Synthetic oligonucleotide
  Sense strand starting at position 1228 of SEQ ID NO: 586420
ggcuguuuaccagggaacu

SEQ ID NO: 716635 - RNA, 19 nt, Artificial Sequence
  Description of Artificial Sequence: Synthetic oligonucleotide
  Antisense strand to SEQ ID NO: 716634
aguucccugguaaacagcc

SEQ ID NO: 716636 - RNA, 19 nt, Artificial Sequence
  Description of Artificial Sequence: Synthetic oligonucleotide
  Sense strand starting at position 1230 of SEQ ID NO: 586420
cuguuuaccagggaacugu

SEQ ID NO: 716637 - RNA, 19 nt, Artificial Sequence
  Description of Artificial Sequence: Synthetic oligonucleotide
  Antisense strand to SEQ ID NO: 716636
acaguucccugguaaacag

SEQ ID NO: 716638 - RNA, 19 nt, Artificial Sequence
  Description of Artificial Sequence: Synthetic oligonucleotide
  Sense strand starting at position 1456 of SEQ ID NO: 586420
cccagcuggcgagaucaaa

SEQ ID NO: 716639 - RNA, 19 nt, Artificial Sequence
  Description of Artificial Sequence: Synthetic oligonucleotide
  Antisense strand to SEQ ID NO: 716638
uuugaucucgccagcuggg

SEQ ID NO: 716640 - RNA, 19 nt, Artificial Sequence
  Description of Artificial Sequence: Synthetic oligonucleotide
  Sense strand starting at position 1905 of SEQ ID NO: 586420
gcgguuguucccaggagga

SEQ ID NO: 716641 - RNA, 19 nt, Artificial Sequence
  Description of Artificial Sequence: Synthetic oligonucleotide
  Antisense strand to SEQ ID NO: 716640
uccuccugggaacaaccgc

SEQ ID NO: 716642 - RNA, 19 nt, Artificial Sequence
  Description of Artificial Sequence: Synthetic oligonucleotide
  Sense strand starting at position 2037 of SEQ ID NO: 586420
gcugauuggucgacgcgga

SEQ ID NO: 716643 - RNA, 19 nt, Artificial Sequence
  Description of Artificial Sequence: Synthetic oligonucleotide
  Antisense strand to SEQ ID NO: 716642
uccgcgucgaccaaucagc

SEQ ID NO: 716644 - RNA, 19 nt, Artificial Sequence
  Description of Artificial Sequence: Synthetic oligonucleotide
  Sense strand starting at position 2110 of SEQ ID NO: 586420
cgcagauguggcgccaaau

SEQ ID NO: 716645 - RNA, 19 nt, Artificial Sequence
  Description of Artificial Sequence: Synthetic oligonucleotide
  Antisense strand to SEQ ID NO: 716644
auuuggcgccacaucugcg

SEQ ID NO: 716646 - RNA, 19 nt, Artificial Sequence
  Description of Artificial Sequence: Synthetic oligonucleotide
  Sense strand starting at position 2165 of SEQ ID NO: 586420
gggagcaaauuguuaagaa

SEQ ID NO: 716647 - RNA, 19 nt, Artificial Sequence
  Description of Artificial Sequence: Synthetic oligonucleotide
  Antisense strand to SEQ ID NO: 716646
uucuuaacaauuugcuccc

SEQ ID NO: 716648 - RNA, 19 nt, Artificial Sequence
  Description of Artificial Sequence: Synthetic oligonucleotide
  Sense strand starting at position 2222 of SEQ ID NO: 586420
aagugacggccuugauaaa

SEQ ID NO: 716649 - RNA, 19 nt, Artificial Sequence
  Description of Artificial Sequence: Synthetic oligonucleotide
  Antisense strand to SEQ ID NO: 716648
uuuaucaaggccgucacuu

SEQ ID NO: 716650 - RNA, 19 nt, Artificial Sequence
  Description of Artificial Sequence: Synthetic oligonucleotide
  Sense strand starting at position 2223 of SEQ ID NO: 586420
agugacggccuugauaaau

SEQ ID NO: 716651 - RNA, 19 nt, Artificial Sequence
  Description of Artificial Sequence: Synthetic oligonucleotide
  Antisense strand to SEQ ID NO: 716650
auuuaucaaggccgucacu

SEQ ID NO: 716652 - RNA, 19 nt, Artificial Sequence
  Description of Artificial Sequence: Synthetic oligonucleotide
  Sense strand starting at position 2243 of SEQ ID NO: 586420
gcgagagauguuuauauaa

SEQ ID NO: 716653 - RNA, 19 nt, Artificial Sequence
  Description of Artificial Sequence: Synthetic oligonucleotide
  Antisense strand to SEQ ID NO: 716652
uuauauaaacaucucucgc

SEQ ID NO: 716654 - RNA, 19 nt, Artificial Sequence
  Description of Artificial Sequence: Synthetic oligonucleotide
  Sense strand starting at position 2286 of SEQ ID NO: 586420
acgagugaaaucuaucggu

SEQ ID NO: 716655 - RNA, 19 nt, Artificial Sequence
  Description of Artificial Sequence: Synthetic oligonucleotide
  Antisense strand to SEQ ID NO: 716654
accgauagauuucacucgu

SEQ ID NO: 716656 - RNA, 19 nt, Artificial Sequence
  Description of Artificial Sequence: Synthetic oligonucleotide
  Sense strand starting at position 2291 of SEQ ID NO: 586420
ugaaaucuaucgguucuag

SEQ ID NO: 716657 - RNA, 19 nt, Artificial Sequence
  Description of Artificial Sequence: Synthetic oligonucleotide
  Antisense strand to SEQ ID NO: 716656
cuagaaccgauagauuuca

SEQ ID NO: 716658 - RNA, 19 nt, Artificial Sequence
  Description of Artificial Sequence: Synthetic oligonucleotide
  Sense strand starting at position 2696 of SEQ ID NO: 586420
auuacauucguguaugaag

SEQ ID NO: 716659 - RNA, 19 nt, Artificial Sequence
  Description of Artificial Sequence: Synthetic oligonucleotide
  Antisense strand to SEQ ID NO: 716658
cuucauacacgaauguaau

SEQ ID NO: 716660 - RNA, 19 nt, Artificial Sequence
  Description of Artificial Sequence: Synthetic oligonucleotide
  Sense strand starting at position 2698 of SEQ ID NO: 586420
uacauucguguaugaagaa

SEQ ID NO: 716661 - RNA, 19 nt, Artificial Sequence
  Description of Artificial Sequence: Synthetic oligonucleotide
  Antisense strand to SEQ ID NO: 716660
uucuucauacacgaaugua

SEQ ID NO: 716662 - RNA, 19 nt, Artificial Sequence
  Description of Artificial Sequence: Synthetic oligonucleotide
  Sense strand starting at position 2747 of SEQ ID NO: 586420
gggcuaacgguggagaaau

SEQ ID NO: 716663 - RNA, 19 nt, Artificial Sequence
  Description of Artificial Sequence: Synthetic oligonucleotide
  Antisense strand to SEQ ID NO: 716662
auuucuccaccguuagccc

SEQ ID NO: 716664 - RNA, 19 nt, Artificial Sequence
  Description of Artificial Sequence: Synthetic oligonucleotide
  Sense strand starting at position 2757 of SEQ ID NO: 586420
uggagaaauugucuauuga

SEQ ID NO: 716665 - RNA, 19 nt, Artificial Sequence
  Description of Artificial Sequence: Synthetic oligonucleotide
  Antisense strand to SEQ ID NO: 716664
ucaauagacaauuucucca

SEQ ID NO: 716666 - RNA, 19 nt, Artificial Sequence
  Description of Artificial Sequence: Synthetic oligonucleotide
  Sense strand starting at position 2767 of SEQ ID NO: 586420
gucuauugauucuuaccuu

SEQ ID NO: 716667 - RNA, 19 nt, Artificial Sequence
  Description of Artificial Sequence: Synthetic oligonucleotide
  Antisense strand to SEQ ID NO: 716666
aagguaagaaucaauagac

SEQ ID NO: 716668 - RNA, 19 nt, Artificial Sequence
  Description of Artificial Sequence: Synthetic oligonucleotide
  Sense strand starting at position 2845 of SEQ ID NO: 586420
caguaaggcguugagaaug

SEQ ID NO: 716669 - RNA, 19 nt, Artificial Sequence
  Description of Artificial Sequence: Synthetic oligonucleotide
  Antisense strand to SEQ ID NO: 716668
cauucucaacgccuuacug

SEQ ID NO: 716670 - RNA, 19 nt, Artificial Sequence
  Description of Artificial Sequence: Synthetic oligonucleotide
  Sense strand starting at position 2855 of SEQ ID NO: 586420
uugagaauguuacuaacca

SEQ ID NO: 716671 - RNA, 19 nt, Artificial Sequence
  Description of Artificial Sequence: Synthetic oligonucleotide
  Antisense strand to SEQ ID NO: 716670
ugguuaguaacauucucaa

SEQ ID NO: 716672 - RNA, 19 nt, Artificial Sequence
  Description of Artificial Sequence: Synthetic oligonucleotide
  Sense strand starting at position 3052 of SEQ ID NO: 586420
acuaucuuccaggacugua

SEQ ID NO: 716673 - RNA, 19 nt, Artificial Sequence
  Description of Artificial Sequence: Synthetic oligonucleotide
  Antisense strand to SEQ ID NO: 716672
uacaguccuggaagauagu

SEQ ID NO: 716674 - RNA, 19 nt, Artificial Sequence
  Description of Artificial Sequence: Synthetic oligonucleotide
  Sense strand starting at position 3310 of SEQ ID NO: 586420
uuagaaggaccuugugauu

SEQ ID NO: 716675 - RNA, 19 nt, Artificial Sequence
  Description of Artificial Sequence: Synthetic oligonucleotide
  Antisense strand to SEQ ID NO: 716674
aaucacaagguccuucuaa

SEQ ID NO: 716676 - RNA, 19 nt, Artificial Sequence
  Description of Artificial Sequence: Synthetic oligonucleotide
  Sense strand starting at position 3333 of SEQ ID NO: 586420
ugugccuauccagauaauc

SEQ ID NO: 716677 - RNA, 19 nt, Artificial Sequence
  Description of Artificial Sequence: Synthetic oligonucleotide
  Antisense strand to SEQ ID NO: 716676
gauuaucuggauaggcaca

SEQ ID NO: 716678 - RNA, 19 nt, Artificial Sequence
  Description of Artificial Sequence: Synthetic oligonucleotide
  Sense strand starting at position 3421 of SEQ ID NO: 586420
ugccauguagcauugcgua

SEQ ID NO: 716679 - RNA, 19 nt, Artificial Sequence
  Description of Artificial Sequence: Synthetic oligonucleotide
  Antisense strand to SEQ ID NO: 716678
uacgcaaugcuacauggca

SEQ ID NO: 716680 - RNA, 19 nt, Artificial Sequence
  Description of Artificial Sequence: Synthetic oligonucleotide
  Sense strand starting at position 3462 of SEQ ID NO: 586420
ucuggacaucuguauuaau

SEQ ID NO: 716681 - RNA, 19 nt, Artificial Sequence
  Description of Artificial Sequence: Synthetic oligonucleotide
  Antisense strand to SEQ ID NO: 716680
auuaauacagauguccaga

SEQ ID NO: 716682 - RNA, 19 nt, Artificial Sequence
  Description of Artificial Sequence: Synthetic oligonucleotide
  Sense strand starting at position 13 of SEQ ID NO: 586421
ugcaguuacgugucuuacu

SEQ ID NO: 716683 - RNA, 19 nt, Artificial Sequence
  Description of Artificial Sequence: Synthetic oligonucleotide
  Antisense strand to SEQ ID NO: 716682
aguaagacacguaacugca

SEQ ID NO: 716684 - RNA, 19 nt, Artificial Sequence
  Description of Artificial Sequence: Synthetic oligonucleotide
  Sense strand starting at position 451 of SEQ ID NO: 586421
augauaucagcugagagcu

SEQ ID NO: 716685 - RNA, 19 nt, Artificial Sequence
  Description of Artificial Sequence: Synthetic oligonucleotide
  Antisense strand to SEQ ID NO: 716684
agcucucagcugauaucau

SEQ ID NO: 716686 - RNA, 19 nt, Artificial Sequence
  Description of Artificial Sequence: Synthetic oligonucleotide
  Sense strand starting at position 729 of SEQ ID NO: 586421
uguaaaguucuugaaucaa

SEQ ID NO: 716687 - RNA, 19 nt, Artificial Sequence
  Description of Artificial Sequence: Synthetic oligonucleotide
  Antisense strand to SEQ ID NO: 716686
uugauucaagaacuuuaca

SEQ ID NO: 716688 - RNA, 19 nt, Artificial Sequence
  Description of Artificial Sequence: Synthetic oligonucleotide
  Sense strand starting at position 739 of SEQ ID NO: 586421
uugaaucaaugucugguau

SEQ ID NO: 716689 - RNA, 19 nt, Artificial Sequence
  Description of Artificial Sequence: Synthetic oligonucleotide
  Antisense strand to SEQ ID NO: 716688
auaccagacauugauucaa

SEQ ID NO: 716690 - RNA, 19 nt, Artificial Sequence
  Description of Artificial Sequence: Synthetic oligonucleotide
  Sense strand starting at position 740 of SEQ ID NO: 586421
ugaaucaaugucugguaua

SEQ ID NO: 716691 - RNA, 19 nt, Artificial Sequence
  Description of Artificial Sequence: Synthetic oligonucleotide
  Antisense strand to SEQ ID NO: 716690
uauaccagacauugauuca

SEQ ID NO: 716692 - RNA, 19 nt, Artificial Sequence
  Description of Artificial Sequence: Synthetic oligonucleotide
  Sense strand starting at position 745 of SEQ ID NO: 586421
caaugucugguauacggua

SEQ ID NO: 716693 - RNA, 19 nt, Artificial Sequence
  Description of Artificial Sequence: Synthetic oligonucleotide
  Antisense strand to SEQ ID NO: 716692
uaccguauaccagacauug

SEQ ID NO: 716694 - RNA, 19 nt, Artificial Sequence
  Description of Artificial Sequence: Synthetic oligonucleotide
  Sense strand starting at position 750 of SEQ ID NO: 586421
ucugguauacgguaagacu

SEQ ID NO: 716695 - RNA, 19 nt, Artificial Sequence
  Description of Artificial Sequence: Synthetic oligonucleotide
  Antisense strand to SEQ ID NO: 716694
agucuuaccguauaccaga

SEQ ID NO: 716696 - RNA, 19 nt, Artificial Sequence
  Description of Artificial Sequence: Synthetic oligonucleotide
  Sense strand starting at position 758 of SEQ ID NO: 586421
acgguaagacuggaugagu

SEQ ID NO: 716697 - RNA, 19 nt, Artificial Sequence
  Description of Artificial Sequence: Synthetic oligonucleotide
  Antisense strand to SEQ ID NO: 716696
acucauccagucuuaccgu

SEQ ID NO: 716698 - RNA, 19 nt, Artificial Sequence
  Description of Artificial Sequence: Synthetic oligonucleotide
  Sense strand starting at position 767 of SEQ ID NO: 586421
cuggaugagugccucauaa

SEQ ID NO: 716699 - RNA, 19 nt, Artificial Sequence
  Description of Artificial Sequence: Synthetic oligonucleotide
  Antisense strand to SEQ ID NO: 716698
uuaugaggcacucauccag

SEQ ID NO: 716700 - RNA, 19 nt, Artificial Sequence
  Description of Artificial Sequence: Synthetic oligonucleotide
  Sense strand starting at position 769 of SEQ ID NO: 586421
ggaugagugccucauaaau

SEQ ID NO: 716701 - RNA, 19 nt, Artificial Sequence
  Description of Artificial Sequence: Synthetic oligonucleotide
  Antisense strand to SEQ ID NO: 716700
auuuaugaggcacucaucc

SEQ ID NO: 716702 - RNA, 19 nt, Artificial Sequence
  Description of Artificial Sequence: Synthetic oligonucleotide
  Sense strand starting at position 941 of SEQ ID NO: 586421
gucagaaggccauguagau

SEQ ID NO: 716703 - RNA, 19 nt, Artificial Sequence
  Description of Artificial Sequence: Synthetic oligonucleotide
  Antisense strand to SEQ ID NO: 716702
aucuacauggccuucugac

SEQ ID NO: 716704 - RNA, 19 nt, Artificial Sequence
  Description of Artificial Sequence: Synthetic oligonucleotide
  Sense strand starting at position 1153 of SEQ ID NO: 586421
cugcaaugucaggacuaac

SEQ ID NO: 716705 - RNA, 19 nt, Artificial Sequence
  Description of Artificial Sequence: Synthetic oligonucleotide
  Antisense strand to SEQ ID NO: 716704
guuaguccugacauugcag

SEQ ID NO: 716706 - RNA, 19 nt, Artificial Sequence
  Description of Artificial Sequence: Synthetic oligonucleotide
  Sense strand starting at position 1445 of SEQ ID NO: 586421
auauuaucuccugcgcgua

SEQ ID NO: 716707 - RNA, 19 nt, Artificial Sequence
  Description of Artificial Sequence: Synthetic oligonucleotide
  Antisense strand to SEQ ID NO: 716706
uacgcgcaggagauaauau

SEQ ID NO: 716708 - RNA, 19 nt, Artificial Sequence
  Description of Artificial Sequence: Synthetic oligonucleotide
  Sense strand starting at position 1455 of SEQ ID NO: 586421
cugcgcguagcuuugaaau

SEQ ID NO: 716709 - RNA, 19 nt, Artificial Sequence
  Description of Artificial Sequence: Synthetic oligonucleotide
  Antisense strand to SEQ ID NO: 716708
auuucaaagcuacgcgcag

SEQ ID NO: 716710 - RNA, 19 nt, Artificial Sequence
  Description of Artificial Sequence: Synthetic oligonucleotide
  Sense strand starting at position 1502 of SEQ ID NO: 586421
cugguuauguuccuggaga

SEQ ID NO: 716711 - RNA, 19 nt, Artificial Sequence
  Description of Artificial Sequence: Synthetic oligonucleotide
  Antisense strand to SEQ ID NO: 716710
ucuccaggaacauaaccag

SEQ ID NO: 716712 - RNA, 19 nt, Artificial Sequence
  Description of Artificial Sequence: Synthetic oligonucleotide
  Sense strand starting at position 1504 of SEQ ID NO: 586421
gguuauguuccuggagaag

SEQ ID NO: 716713 - RNA, 19 nt, Artificial Sequence
  Description of Artificial Sequence: Synthetic oligonucleotide
  Antisense strand to SEQ ID NO: 716712
cuucuccaggaacauaacc

SEQ ID NO: 716714 - RNA, 19 nt, Artificial Sequence
  Description of Artificial Sequence: Synthetic oligonucleotide
  Sense strand starting at position 1541 of SEQ ID NO: 586421
auaagagacugguagaaag

SEQ ID NO: 716715 - RNA, 19 nt, Artificial Sequence
  Description of Artificial Sequence: Synthetic oligonucleotide
  Antisense strand to SEQ ID NO: 716714
cuuucuaccagucucuuau

SEQ ID NO: 716716 - RNA, 19 nt, Artificial Sequence
  Description of Artificial Sequence: Synthetic oligonucleotide
  Sense strand starting at position 2174 of SEQ ID NO: 586421
caaaguaaaucguugagac

SEQ ID NO: 716717 - RNA, 19 nt, Artificial Sequence
  Description of Artificial Sequence: Synthetic oligonucleotide
  Antisense strand to SEQ ID NO: 716716
gucucaacgauuuacuuug

SEQ ID NO: 716718 - RNA, 19 nt, Artificial Sequence
  Description of Artificial Sequence: Synthetic oligonucleotide
  Sense strand starting at position 2175 of SEQ ID NO: 586421
aaaguaaaucguugagacu

SEQ ID NO: 716719 - RNA, 19 nt, Artificial Sequence
  Description of Artificial Sequence: Synthetic oligonucleotide
  Antisense strand to SEQ ID NO: 716718
agucucaacgauuuacuuu

SEQ ID NO: 716720 - RNA, 19 nt, Artificial Sequence
  Description of Artificial Sequence: Synthetic oligonucleotide
  Sense strand starting at position 2176 of SEQ ID NO: 586421
aaguaaaucguugagacug

SEQ ID NO: 716721 - RNA, 19 nt, Artificial Sequence
  Description of Artificial Sequence: Synthetic oligonucleotide
  Antisense strand to SEQ ID NO: 716720
cagucucaacgauuuacuu

SEQ ID NO: 716722 - RNA, 19 nt, Artificial Sequence
  Description of Artificial Sequence: Synthetic oligonucleotide
  Sense strand starting at position 2222 of SEQ ID NO: 586421
uaaugaugaucucugugua

SEQ ID NO: 716723 - RNA, 19 nt, Artificial Sequence
  Description of Artificial Sequence: Synthetic oligonucleotide
  Antisense strand to SEQ ID NO: 716722
uacacagagaucaucauua

SEQ ID NO: 716724 - RNA, 19 nt, Artificial Sequence
  Description of Artificial Sequence: Synthetic oligonucleotide
  Sense strand starting at position 2223 of SEQ ID NO: 586421
aaugaugaucucuguguaa

SEQ ID NO: 716725 - RNA, 19 nt, Artificial Sequence
  Description of Artificial Sequence: Synthetic oligonucleotide
  Antisense strand to SEQ ID NO: 716724
uuacacagagaucaucauu

SEQ ID NO: 716726 - RNA, 19 nt, Artificial Sequence
  Description of Artificial Sequence: Synthetic oligonucleotide
  Sense strand starting at position 2257 of SEQ ID NO: 586421
uuuccaaggauggguuaaa

SEQ ID NO: 716727 - RNA, 19 nt, Artificial Sequence
  Description of Artificial Sequence: Synthetic oligonucleotide
  Antisense strand to SEQ ID NO: 716726
uuuaacccauccuuggaaa

SEQ ID NO: 716728 - RNA, 19 nt, Artificial Sequence
  Description of Artificial Sequence: Synthetic oligonucleotide
  Sense strand starting at position 2258 of SEQ ID NO: 586421
uuccaaggauggguuaaau

SEQ ID NO: 716729 - RNA, 19 nt, Artificial Sequence
  Description of Artificial Sequence: Synthetic oligonucleotide
  Antisense strand to SEQ ID NO: 716728
auuuaacccauccuuggaa

SEQ ID NO: 716730 - RNA, 19 nt, Artificial Sequence
  Description of Artificial Sequence: Synthetic oligonucleotide
  Sense strand starting at position 2466 of SEQ ID NO: 586421
gaaaguggauuacuuguua

SEQ ID NO: 716731 - RNA, 19 nt, Artificial Sequence
  Description of Artificial Sequence: Synthetic oligonucleotide
  Antisense strand to SEQ ID NO: 716730
uaacaaguaauccacuuuc

SEQ ID NO: 716732 - RNA, 19 nt, Artificial Sequence
  Description of Artificial Sequence: Synthetic oligonucleotide
  Sense strand starting at position 2632 of SEQ ID NO: 586421
uggagaacuuuguugcuag

SEQ ID NO: 716733 - RNA, 19 nt, Artificial Sequence
  Description of Artificial Sequence: Synthetic oligonucleotide
  Antisense strand to SEQ ID NO: 716732
cuagcaacaaaguucucca

SEQ ID NO: 716734 - RNA, 19 nt, Artificial Sequence
  Description of Artificial Sequence: Synthetic oligonucleotide
  Sense strand starting at position 2680 of SEQ ID NO: 586421
gagacuugaccauggagca

SEQ ID NO: 716735 - RNA, 19 nt, Artificial Sequence
  Description of Artificial Sequence: Synthetic oligonucleotide
  Antisense strand to SEQ ID NO: 716734
ugcuccauggucaagucuc

SEQ ID NO: 716736 - RNA, 19 nt, Artificial Sequence
  Description of Artificial Sequence: Synthetic oligonucleotide
  Sense strand starting at position 2901 of SEQ ID NO: 586421
aaggguuguccugggacca

SEQ ID NO: 716737 - RNA, 19 nt, Artificial Sequence
  Description of Artificial Sequence: Synthetic oligonucleotide
  Antisense strand to SEQ ID NO: 716736
uggucccaggacaacccuu

SEQ ID NO: 716738 - RNA, 19 nt, Artificial Sequence
  Description of Artificial Sequence: Synthetic oligonucleotide
  Sense strand starting at position 2902 of SEQ ID NO: 586421
aggguuguccugggaccaa

SEQ ID NO: 716739 - RNA, 19 nt, Artificial Sequence
  Description of Artificial Sequence: Synthetic oligonucleotide
  Antisense strand to SEQ ID NO: 716738
uuggucccaggacaacccu

SEQ ID NO: 716740 - RNA, 19 nt, Artificial Sequence
  Description of Artificial Sequence: Synthetic oligonucleotide
  Sense strand starting at position 2916 of SEQ ID NO: 586421
accaaacuguucucuggaa

SEQ ID NO: 716741 - RNA, 19 nt, Artificial Sequence
  Description of Artificial Sequence: Synthetic oligonucleotide
  Antisense strand to SEQ ID NO: 716740
uuccagagaacaguuuggu

SEQ ID NO: 716742 - RNA, 19 nt, Artificial Sequence
  Description of Artificial Sequence: Synthetic oligonucleotide
  Sense strand starting at position 2918 of SEQ ID NO: 586421
caaacuguucucuggaaga

SEQ ID NO: 716743 - RNA, 19 nt, Artificial Sequence
  Description of Artificial Sequence: Synthetic oligonucleotide
  Antisense strand to SEQ ID NO: 716742
ucuuccagagaacaguuug

SEQ ID NO: 716744 - RNA, 19 nt, Artificial Sequence
  Description of Artificial Sequence: Synthetic oligonucleotide
  Sense strand starting at position 3137 of SEQ ID NO: 586421
acaaacaggugcucuguaa

SEQ ID NO: 716745 - RNA, 19 nt, Artificial Sequence
  Description of Artificial Sequence: Synthetic oligonucleotide
  Antisense strand to SEQ ID NO: 716744
uuacagagcaccuguuugu

SEQ ID NO: 716746 - RNA, 19 nt, Artificial Sequence
  Description of Artificial Sequence: Synthetic oligonucleotide
  Sense strand starting at position 3148 of SEQ ID NO: 586421
cucuguaauguccacugga

SEQ ID NO: 716747 - RNA, 19 nt, Artificial Sequence
  Description of Artificial Sequence: Synthetic oligonucleotide
  Antisense strand to SEQ ID NO: 716746
uccaguggacauuacagag

SEQ ID NO: 716748 - RNA, 19 nt, Artificial Sequence
  Description of Artificial Sequence: Synthetic oligonucleotide
  Sense strand starting at position 3469 of SEQ ID NO: 586421
ccaucaugcccagggaguu

SEQ ID NO: 716749 - RNA, 19 nt, Artificial Sequence
  Description of Artificial Sequence: Synthetic oligonucleotide
  Antisense strand to SEQ ID NO: 716748
aacucccugggcaugaugg

SEQ ID NO: 716750 - RNA, 19 nt, Artificial Sequence
  Description of Artificial Sequence: Synthetic oligonucleotide
  Sense strand starting at position 3709 of SEQ ID NO: 586421
gcuggauccuuucuuauuu

SEQ ID NO: 716751 - RNA, 19 nt, Artificial Sequence
  Description of Artificial Sequence: Synthetic oligonucleotide
  Antisense strand to SEQ ID NO: 716750
aaauaagaaaggauccagc

SEQ ID NO: 716752 - RNA, 19 nt, Artificial Sequence
  Description of Artificial Sequence: Synthetic oligonucleotide
  Sense strand starting at position 3772 of SEQ ID NO: 586421
aguagcucugaguaacgaa

SEQ ID NO: 716753 - RNA, 19 nt, Artificial Sequence
  Description of Artificial Sequence: Synthetic oligonucleotide
  Antisense strand to SEQ ID NO: 716752
uucguuacucagagcuacu

SEQ ID NO: 716754 - RNA, 19 nt, Artificial Sequence
  Description of Artificial Sequence: Synthetic oligonucleotide
  Sense strand starting at position 3787 of SEQ ID NO: 586421
cgaagacugcuaugaaauc

SEQ ID NO: 716755 - RNA, 19 nt, Artificial Sequence
  Description of Artificial Sequence: Synthetic oligonucleotide
  Antisense strand to SEQ ID NO: 716754
gauuucauagcagucuucg

SEQ ID NO: 716756 - RNA, 19 nt, Artificial Sequence
  Description of Artificial Sequence: Synthetic oligonucleotide
  Sense strand starting at position 3827 of SEQ ID NO: 586421
uugagauacuaaguuuggu

SEQ ID NO: 716757 - RNA, 19 nt, Artificial Sequence
  Description of Artificial Sequence: Synthetic oligonucleotide
  Antisense strand to SEQ ID NO: 716756
accaaacuuaguaucucaa

SEQ ID NO: 716758 - RNA, 19 nt, Artificial Sequence
  Description of Artificial Sequence: Synthetic oligonucleotide
  Sense strand starting at position 3830 of SEQ ID NO: 586421
agauacuaaguuugguaaa

SEQ ID NO: 716759 - RNA, 19 nt, Artificial Sequence
  Description of Artificial Sequence: Synthetic oligonucleotide
  Antisense strand to SEQ ID NO: 716758
uuuaccaaacuuaguaucu

SEQ ID NO: 716760 - RNA, 19 nt, Artificial Sequence
  Description of Artificial Sequence: Synthetic oligonucleotide
  Sense strand starting at position 3935 of SEQ ID NO: 586421
uugagaaauugucuuaaug

SEQ ID NO: 716761 - RNA, 19 nt, Artificial Sequence
  Description of Artificial Sequence: Synthetic oligonucleotide
  Antisense strand to SEQ ID NO: 716760
cauuaagacaauuucucaa

SEQ ID NO: 716762 - RNA, 19 nt, Artificial Sequence
  Description of Artificial Sequence: Synthetic oligonucleotide
  Sense strand starting at position 71 of SEQ ID NO: 586422
acacaaguguacuugaaua

SEQ ID NO: 716763 - RNA, 19 nt, Artificial Sequence
  Description of Artificial Sequence: Synthetic oligonucleotide
  Antisense strand to SEQ ID NO: 716762
uauucaaguacacuugugu

SEQ ID NO: 716764 - RNA, 19 nt, Artificial Sequence
  Description of Artificial Sequence: Synthetic oligonucleotide
  Sense strand starting at position 73 of SEQ ID NO: 586422
acaaguguacuugaauauu

SEQ ID NO: 716765 - RNA, 19 nt, Artificial Sequence
  Description of Artificial Sequence: Synthetic oligonucleotide
  Antisense strand to SEQ ID NO: 716764
aauauucaaguacacuugu

SEQ ID NO: 716766 - RNA, 19 nt, Artificial Sequence
  Description of Artificial Sequence: Synthetic oligonucleotide
  Sense strand starting at position 237 of SEQ ID NO: 586422
cgcuucugagguuacagaa

SEQ ID NO: 716767 - RNA, 19 nt, Artificial Sequence
  Description of Artificial Sequence: Synthetic oligonucleotide
  Antisense strand to SEQ ID NO: 716766
uucuguaaccucagaagcg

SEQ ID NO: 716768 - RNA, 19 nt, Artificial Sequence
  Description of Artificial Sequence: Synthetic oligonucleotide
  Sense strand starting at position 253 of SEQ ID NO: 586422
gaaagaaucugacuucugu

SEQ ID NO: 716769 - RNA, 19 nt, Artificial Sequence
  Description of Artificial Sequence: Synthetic oligonucleotide
  Antisense strand to SEQ ID NO: 716768
acagaagucagauucuuuc

SEQ ID NO: 716770 - RNA, 19 nt, Artificial Sequence
  Description of Artificial Sequence: Synthetic oligonucleotide
  Sense strand starting at position 447 of SEQ ID NO: 586422
acgccuagccuugagauga

SEQ ID NO: 716771 - RNA, 19 nt, Artificial Sequence
  Description of Artificial Sequence: Synthetic oligonucleotide
  Antisense strand to SEQ ID NO: 716770
ucaucucaaggcuaggcgu

SEQ ID NO: 716772 - RNA, 19 nt, Artificial Sequence
  Description of Artificial Sequence: Synthetic oligonucleotide
  Sense strand starting at position 451 of SEQ ID NO: 586422
cuagccuugagaugacuga

SEQ ID NO: 716773 - RNA, 19 nt, Artificial Sequence
  Description of Artificial Sequence: Synthetic oligonucleotide
  Antisense strand to SEQ ID NO: 716772
ucagucaucucaaggcuag

SEQ ID NO: 716774 - RNA, 19 nt, Artificial Sequence
  Description of Artificial Sequence: Synthetic oligonucleotide
  Sense strand starting at position 475 of SEQ ID NO: 586422
agucaauaccuugauuguu

SEQ ID NO: 716775 - RNA, 19 nt, Artificial Sequence
  Description of Artificial Sequence: Synthetic oligonucleotide
  Antisense strand to SEQ ID NO: 716774
aacaaucaagguauugacu

SEQ ID NO: 716776 - RNA, 19 nt, Artificial Sequence
  Description of Artificial Sequence: Synthetic oligonucleotide
  Sense strand starting at position 477 of SEQ ID NO: 586422
ucaauaccuugauuguuga

SEQ ID NO: 716777 - RNA, 19 nt, Artificial Sequence
  Description of Artificial Sequence: Synthetic oligonucleotide
  Antisense strand to SEQ ID NO: 716776
ucaacaaucaagguauuga

SEQ ID NO: 716778 - RNA, 19 nt, Artificial Sequence
  Description of Artificial Sequence: Synthetic oligonucleotide
  Sense strand starting at position 544 of SEQ ID NO: 586422
cuggauuccugaucacaga

SEQ ID NO: 716779 - RNA, 19 nt, Artificial Sequence
  Description of Artificial Sequence: Synthetic oligonucleotide
  Antisense strand to SEQ ID NO: 716778
ucugugaucaggaauccag

SEQ ID NO: 716780 - RNA, 19 nt, Artificial Sequence
  Description of Artificial Sequence: Synthetic oligonucleotide
  Sense strand starting at position 594 of SEQ ID NO: 586422
uuguuuguucgcuuugguu

SEQ ID NO: 716781 - RNA, 19 nt, Artificial Sequence
  Description of Artificial Sequence: Synthetic oligonucleotide
  Antisense strand to SEQ ID NO: 716780
aaccaaagcgaacaaacaa

SEQ ID NO: 716782 - RNA, 19 nt, Artificial Sequence
  Description of Artificial Sequence: Synthetic oligonucleotide
  Sense strand starting at position 639 of SEQ ID NO: 586422
uguuacauagcuuauagau

SEQ ID NO: 716783 - RNA, 19 nt, Artificial Sequence
  Description of Artificial Sequence: Synthetic oligonucleotide
  Antisense strand to SEQ ID NO: 716782
aucuauaagcuauguaaca

SEQ ID NO: 716784 - RNA, 19 nt, Artificial Sequence
  Description of Artificial Sequence: Synthetic oligonucleotide
  Sense strand starting at position 791 of SEQ ID NO: 586422
agaauacguacaggauaau

SEQ ID NO: 716785 - RNA, 19 nt, Artificial Sequence
  Description of Artificial Sequence: Synthetic oligonucleotide
  Antisense strand to SEQ ID NO: 716784
auuauccuguacguauucu

SEQ ID NO: 716786 - RNA, 19 nt, Artificial Sequence
  Description of Artificial Sequence: Synthetic oligonucleotide
  Sense strand starting at position 1064 of SEQ ID NO: 586422
agaccauucugagauauuu

SEQ ID NO: 716787 - RNA, 19 nt, Artificial Sequence
  Description of Artificial Sequence: Synthetic oligonucleotide
  Antisense strand to SEQ ID NO: 716786
aaauaucucagaauggucu

SEQ ID NO: 716788 - RNA, 19 nt, Artificial Sequence
  Description of Artificial Sequence: Synthetic oligonucleotide
  Sense strand starting at position 1144 of SEQ ID NO: 586422
uaguuuggaggaugaaagu

SEQ ID NO: 716789 - RNA, 19 nt, Artificial Sequence
  Description of Artificial Sequence: Synthetic oligonucleotide
  Antisense strand to SEQ ID NO: 716788
acuuucauccuccaaacua

SEQ ID NO: 716790 - RNA, 19 nt, Artificial Sequence
  Description of Artificial Sequence: Synthetic oligonucleotide
  Sense strand starting at position 1159 of SEQ ID NO: 586422
aagugauggaccgaugguu

SEQ ID NO: 716791 - RNA, 19 nt, Artificial Sequence
  Description of Artificial Sequence: Synthetic oligonucleotide
  Antisense strand to SEQ ID NO: 716790
aaccaucgguccaucacuu

SEQ ID NO: 716792 - RNA, 19 nt, Artificial Sequence
  Description of Artificial Sequence: Synthetic oligonucleotide
  Sense strand starting at position 1213 of SEQ ID NO: 586422
cgucuaguucgagcuguac

SEQ ID NO: 716793 - RNA, 19 nt, Artificial Sequence
  Description of Artificial Sequence: Synthetic oligonucleotide
  Antisense strand to SEQ ID NO: 716792
guacagcucgaacuagacg

SEQ ID NO: 716794 - RNA, 19 nt, Artificial Sequence
  Description of Artificial Sequence: Synthetic oligonucleotide
  Sense strand starting at position 1324 of SEQ ID NO: 586422
gccagcucucggcuguuua

SEQ ID NO: 716795 - RNA, 19 nt, Artificial Sequence
  Description of Artificial Sequence: Synthetic oligonucleotide
  Antisense strand to SEQ ID NO: 716794
uaaacagccgagagcuggc

SEQ ID NO: 716796 - RNA, 19 nt, Artificial Sequence
  Description of Artificial Sequence: Synthetic oligonucleotide
  Sense strand starting at position 1334 of SEQ ID NO: 586422
ggcuguuuaccagggaacu

SEQ ID NO: 716797 - RNA, 19 nt, Artificial Sequence
  Description of Artificial Sequence: Synthetic oligonucleotide
  Antisense strand to SEQ ID NO: 716796
aguucccugguaaacagcc

SEQ ID NO: 716798 - RNA, 19 nt, Artificial Sequence
  Description of Artificial Sequence: Synthetic oligonucleotide
  Sense strand starting at position 1336 of SEQ ID NO: 586422
cuguuuaccagggaacugu

SEQ ID NO: 716799 - RNA, 19 nt, Artificial Sequence
  Description of Artificial Sequence: Synthetic oligonucleotide
  Antisense strand to SEQ ID NO: 716798
acaguucccugguaaacag

SEQ ID NO: 716800 - RNA, 19 nt, Artificial Sequence
  Description of Artificial Sequence: Synthetic oligonucleotide
  Sense strand starting at position 1562 of SEQ ID NO: 586422
cccagcuggcgagaucaaa

SEQ ID NO: 716801 - RNA, 19 nt, Artificial Sequence
  Description of Artificial Sequence: Synthetic oligonucleotide
  Antisense strand to SEQ ID NO: 716800
uuugaucucgccagcuggg

SEQ ID NO: 716802 - RNA, 19 nt, Artificial Sequence
  Description of Artificial Sequence: Synthetic oligonucleotide
  Sense strand starting at position 2011 of SEQ ID NO: 586422
gcgguuguucccaggagga

SEQ ID NO: 716803 - RNA, 19 nt, Artificial Sequence
  Description of Artificial Sequence: Synthetic oligonucleotide
  Antisense strand to SEQ ID NO: 716802
uccuccugggaacaaccgc

SEQ ID NO: 716804 - RNA, 19 nt, Artificial Sequence
  Description of Artificial Sequence: Synthetic oligonucleotide
  Sense strand starting at position 2143 of SEQ ID NO: 586422
gcugauuggucgacgcgga

SEQ ID NO: 716805 - RNA, 19 nt, Artificial Sequence
  Description of Artificial Sequence: Synthetic oligonucleotide
  Antisense strand to SEQ ID NO: 716804
uccgcgucgaccaaucagc

SEQ ID NO: 716806 - RNA, 19 nt, Artificial Sequence
  Description of Artificial Sequence: Synthetic oligonucleotide
  Sense strand starting at position 2216 of SEQ ID NO: 586422
cgcagauguggcgccaaau

SEQ ID NO: 716807 - RNA, 19 nt, Artificial Sequence
  Description of Artificial Sequence: Synthetic oligonucleotide
  Antisense strand to SEQ ID NO: 716806
auuuggcgccacaucugcg

SEQ ID NO: 716808 - RNA, 19 nt, Artificial Sequence
  Description of Artificial Sequence: Synthetic oligonucleotide
  Sense strand starting at position 2271 of SEQ ID NO: 586422
gggagcaaauuguuaagaa

SEQ ID NO: 716809 - RNA, 19 nt, Artificial Sequence
  Description of Artificial Sequence: Synthetic oligonucleotide
  Antisense strand to SEQ ID NO: 716808
uucuuaacaauuugcuccc

SEQ ID NO: 716810 - RNA, 19 nt, Artificial Sequence
  Description of Artificial Sequence: Synthetic oligonucleotide
  Sense strand starting at position 2328 of SEQ ID NO: 586422
aagugacggccuugauaaa

SEQ ID NO: 716811 - RNA, 19 nt, Artificial Sequence
  Description of Artificial Sequence: Synthetic oligonucleotide
  Antisense strand to SEQ ID NO: 716810
uuuaucaaggccgucacuu

SEQ ID NO: 716812 - RNA, 19 nt, Artificial Sequence
  Description of Artificial Sequence: Synthetic oligonucleotide
  Sense strand starting at position 2329 of SEQ ID NO: 586422
agugacggccuugauaaau

SEQ ID NO: 716813 - RNA, 19 nt, Artificial Sequence
  Description of Artificial Sequence: Synthetic oligonucleotide
  Antisense strand to SEQ ID NO: 716812
auuuaucaaggccgucacu

SEQ ID NO: 716814 - RNA, 19 nt, Artificial Sequence
  Description of Artificial Sequence: Synthetic oligonucleotide
  Sense strand starting at position 2349 of SEQ ID NO: 586422
gcgagagauguuuauauaa

SEQ ID NO: 716815 - RNA, 19 nt, Artificial Sequence
  Description of Artificial Sequence: Synthetic oligonucleotide
  Antisense strand to SEQ ID NO: 716814
uuauauaaacaucucucgc

SEQ ID NO: 716816 - RNA, 19 nt, Artificial Sequence
  Description of Artificial Sequence: Synthetic oligonucleotide
  Sense strand starting at position 2392 of SEQ ID NO: 586422
acgagugaaaucuaucggu

SEQ ID NO: 716817 - RNA, 19 nt, Artificial Sequence
  Description of Artificial Sequence: Synthetic oligonucleotide
  Antisense strand to SEQ ID NO: 716816
accgauagauuucacucgu

SEQ ID NO: 716818 - RNA, 19 nt, Artificial Sequence
  Description of Artificial Sequence: Synthetic oligonucleotide
  Sense strand starting at position 2397 of SEQ ID NO: 586422
ugaaaucuaucgguucuag

SEQ ID NO: 716819 - RNA, 19 nt, Artificial Sequence
  Description of Artificial Sequence: Synthetic oligonucleotide
  Antisense strand to SEQ ID NO: 716818
cuagaaccgauagauuuca

SEQ ID NO: 716820 - RNA, 19 nt, Artificial Sequence
  Description of Artificial Sequence: Synthetic oligonucleotide
  Sense strand starting at position 2802 of SEQ ID NO: 586422
auuacauucguguaugaag

SEQ ID NO: 716821 - RNA, 19 nt, Artificial Sequence
  Description of Artificial Sequence: Synthetic oligonucleotide
  Antisense strand to SEQ ID NO: 716820
cuucauacacgaauguaau

SEQ ID NO: 716822 - RNA, 19 nt, Artificial Sequence
  Description of Artificial Sequence: Synthetic oligonucleotide
  Sense strand starting at position 2804 of SEQ ID NO: 586422
uacauucguguaugaagaa

SEQ ID NO: 716823 - RNA, 19 nt, Artificial Sequence
  Description of Artificial Sequence: Synthetic oligonucleotide
  Antisense strand to SEQ ID NO: 716822
uucuucauacacgaaugua

SEQ ID NO: 716824 - RNA, 19 nt, Artificial Sequence
  Description of Artificial Sequence: Synthetic oligonucleotide
  Sense strand starting at position 2853 of SEQ ID NO: 586422
gggcuaacgguggagaaau

SEQ ID NO: 716825 - RNA, 19 nt, Artificial Sequence
  Description of Artificial Sequence: Synthetic oligonucleotide
  Antisense strand to SEQ ID NO: 716824
auuucuccaccguuagccc

SEQ ID NO: 716826 - RNA, 19 nt, Artificial Sequence
  Description of Artificial Sequence: Synthetic oligonucleotide
  Sense strand starting at position 2863 of SEQ ID NO: 586422
uggagaaauugucuauuga

SEQ ID NO: 716827 - RNA, 19 nt, Artificial Sequence
  Description of Artificial Sequence: Synthetic oligonucleotide
  Antisense strand to SEQ ID NO: 716826
ucaauagacaauuucucca

SEQ ID NO: 716828 - RNA, 19 nt, Artificial Sequence
  Description of Artificial Sequence: Synthetic oligonucleotide
  Sense strand starting at position 2951 of SEQ ID NO: 586422
caguaaggcguugagaaug

SEQ ID NO: 716829 - RNA, 19 nt, Artificial Sequence
  Description of Artificial Sequence: Synthetic oligonucleotide
  Antisense strand to SEQ ID NO: 716828
cauucucaacgccuuacug

SEQ ID NO: 716830 - RNA, 19 nt, Artificial Sequence
  Description of Artificial Sequence: Synthetic oligonucleotide
  Sense strand starting at position 2961 of SEQ ID NO: 586422
uugagaauguuacuaacca

SEQ ID NO: 716831 - RNA, 19 nt, Artificial Sequence
  Description of Artificial Sequence: Synthetic oligonucleotide
  Antisense strand to SEQ ID NO: 716830
ugguuaguaacauucucaa

SEQ ID NO: 716832 - RNA, 19 nt, Artificial Sequence
  Description of Artificial Sequence: Synthetic oligonucleotide
  Sense strand starting at position 3158 of SEQ ID NO: 586422
acuaucuuccaggacugua

SEQ ID NO: 716833 - RNA, 19 nt, Artificial Sequence
  Description of Artificial Sequence: Synthetic oligonucleotide
  Antisense strand to SEQ ID NO: 716832
uacaguccuggaagauagu

SEQ ID NO: 716834 - RNA, 19 nt, Artificial Sequence
  Description of Artificial Sequence: Synthetic oligonucleotide
  Sense strand starting at position 3416 of SEQ ID NO: 586422
uuagaaggaccuugugauu

SEQ ID NO: 716835 - RNA, 19 nt, Artificial Sequence
  Description of Artificial Sequence: Synthetic oligonucleotide
  Antisense strand to SEQ ID NO: 716834
aaucacaagguccuucuaa

SEQ ID NO: 716836 - RNA, 19 nt, Artificial Sequence
  Description of Artificial Sequence: Synthetic oligonucleotide
  Sense strand starting at position 3439 of SEQ ID NO: 586422
ugugccuauccagauaauc

SEQ ID NO: 716837 - RNA, 19 nt, Artificial Sequence
  Description of Artificial Sequence: Synthetic oligonucleotide
  Antisense strand to SEQ ID NO: 716836
gauuaucuggauaggcaca

SEQ ID NO: 716838 - RNA, 19 nt, Artificial Sequence
  Description of Artificial Sequence: Synthetic oligonucleotide
  Sense strand starting at position 3527 of SEQ ID NO: 586422
ugccauguagcauugcgua

SEQ ID NO: 716839 - RNA, 19 nt, Artificial Sequence
  Description of Artificial Sequence: Synthetic oligonucleotide
  Antisense strand to SEQ ID NO: 716838
uacgcaaugcuacauggca

SEQ ID NO: 716840 - RNA, 19 nt, Artificial Sequence
  Description of Artificial Sequence: Synthetic oligonucleotide
  Sense strand starting at position 3568 of SEQ ID NO: 586422
ucuggacaucuguauuaau

SEQ ID NO: 716841 - RNA, 19 nt, Artificial Sequence
  Description of Artificial Sequence: Synthetic oligonucleotide
  Antisense strand to SEQ ID NO: 716840
auuaauacagauguccaga

SEQ ID NO: 716842 - RNA, 19 nt, Artificial Sequence
  Description of Artificial Sequence: Synthetic oligonucleotide
  Sense strand starting at position 394 of SEQ ID NO: 586423
agcaaagaauaugucuaaa

SEQ ID NO: 716843 - RNA, 19 nt, Artificial Sequence
  Description of Artificial Sequence: Synthetic oligonucleotide
  Antisense strand to SEQ ID NO: 716842
uuuagacauauucuuugcu

SEQ ID NO: 716844 - RNA, 19 nt, Artificial Sequence
  Description of Artificial Sequence: Synthetic oligonucleotide
  Sense strand starting at position 439 of SEQ ID NO: 586423
uacagugagcacggaauaa

SEQ ID NO: 716845 - RNA, 19 nt, Artificial Sequence
  Description of Artificial Sequence: Synthetic oligonucleotide
  Antisense strand to SEQ ID NO: 716844
uuauuccgugcucacugua

SEQ ID NO: 716846 - RNA, 19 nt, Artificial Sequence
  Description of Artificial Sequence: Synthetic oligonucleotide
  Sense strand starting at position 652 of SEQ ID NO: 586423
ugaaguagcggugaguuga

SEQ ID NO: 716847 - RNA, 19 nt, Artificial Sequence
  Description of Artificial Sequence: Synthetic oligonucleotide
  Antisense strand to SEQ ID NO: 716846
ucaacucaccgcuacuuca

SEQ ID NO: 716848 - RNA, 19 nt, Artificial Sequence
  Description of Artificial Sequence: Synthetic oligonucleotide
  Sense strand starting at position 921 of SEQ ID NO: 586423
ugcuuuagggcagaaucua

SEQ ID NO: 716849 - RNA, 19 nt, Artificial Sequence
  Description of Artificial Sequence: Synthetic oligonucleotide
  Antisense strand to SEQ ID NO: 716848
uagauucugcccuaaagca

SEQ ID NO: 716850 - RNA, 19 nt, Artificial Sequence
  Description of Artificial Sequence: Synthetic oligonucleotide
  Sense strand starting at position 1127 of SEQ ID NO: 586423
acaaucguccucuacaaga

SEQ ID NO: 716851 - RNA, 19 nt, Artificial Sequence
  Description of Artificial Sequence: Synthetic oligonucleotide
  Antisense strand to SEQ ID NO: 716850
ucuuguagaggacgauugu

SEQ ID NO: 716852 - RNA, 19 nt, Artificial Sequence
  Description of Artificial Sequence: Synthetic oligonucleotide
  Sense strand starting at position 1228 of SEQ ID NO: 586423
uggcaugccagugauuacu

SEQ ID NO: 716853 - RNA, 19 nt, Artificial Sequence
  Description of Artificial Sequence: Synthetic oligonucleotide
  Antisense strand to SEQ ID NO: 716852
aguaaucacuggcaugcca

SEQ ID NO: 716854 - RNA, 19 nt, Artificial Sequence
  Description of Artificial Sequence: Synthetic oligonucleotide
  Sense strand starting at position 1236 of SEQ ID NO: 586423
cagugauuacuggacguuu

SEQ ID NO: 716855 - RNA, 19 nt, Artificial Sequence
  Description of Artificial Sequence: Synthetic oligonucleotide
  Antisense strand to SEQ ID NO: 716854
aaacguccaguaaucacug

SEQ ID NO: 716856 - RNA, 19 nt, Artificial Sequence
  Description of Artificial Sequence: Synthetic oligonucleotide
  Sense strand starting at position 1417 of SEQ ID NO: 586423
caauacucggcagagcauu

SEQ ID NO: 716857 - RNA, 19 nt, Artificial Sequence
  Description of Artificial Sequence: Synthetic oligonucleotide
  Antisense strand to SEQ ID NO: 716856
aaugcucugccgaguauug

SEQ ID NO: 716858 - RNA, 19 nt, Artificial Sequence
  Description of Artificial Sequence: Synthetic oligonucleotide
  Sense strand starting at position 1423 of SEQ ID NO: 586423
ucggcagagcauugagaau

SEQ ID NO: 716859 - RNA, 19 nt, Artificial Sequence
  Description of Artificial Sequence: Synthetic oligonucleotide
  Antisense strand to SEQ ID NO: 716858
auucucaaugcucugccga

SEQ ID NO: 716860 - RNA, 19 nt, Artificial Sequence
  Description of Artificial Sequence: Synthetic oligonucleotide
  Sense strand starting at position 1616 of SEQ ID NO: 586423
ugaguaauaugucccggaa

SEQ ID NO: 716861 - RNA, 19 nt, Artificial Sequence
  Description of Artificial Sequence: Synthetic oligonucleotide
  Antisense strand to SEQ ID NO: 716860
uuccgggacauauuacuca

SEQ ID NO: 716862 - RNA, 19 nt, Artificial Sequence
  Description of Artificial Sequence: Synthetic oligonucleotide
  Sense strand starting at position 1620 of SEQ ID NO: 586423
uaauaugucccggaaagcu

SEQ ID NO: 716863 - RNA, 19 nt, Artificial Sequence
  Description of Artificial Sequence: Synthetic oligonucleotide
  Antisense strand to SEQ ID NO: 716862
agcuuuccgggacauauua

SEQ ID NO: 716864 - RNA, 19 nt, Artificial Sequence
  Description of Artificial Sequence: Synthetic oligonucleotide
  Sense strand starting at position 1656 of SEQ ID NO: 586423
cgaaaugugcccucgugca

SEQ ID NO: 716865 - RNA, 19 nt, Artificial Sequence
  Description of Artificial Sequence: Synthetic oligonucleotide
  Antisense strand to SEQ ID NO: 716864
ugcacgagggcacauuucg

SEQ ID NO: 716866 - RNA, 19 nt, Artificial Sequence
  Description of Artificial Sequence: Synthetic oligonucleotide
  Sense strand starting at position 2223 of SEQ ID NO: 586423
cuaggaggucucggaaacu

SEQ ID NO: 716867 - RNA, 19 nt, Artificial Sequence
  Description of Artificial Sequence: Synthetic oligonucleotide
  Antisense strand to SEQ ID NO: 716866
aguuuccgagaccuccuag

SEQ ID NO: 716868 - RNA, 19 nt, Artificial Sequence
  Description of Artificial Sequence: Synthetic oligonucleotide
  Sense strand starting at position 2504 of SEQ ID NO: 586423
gccaguuugcugucgcacu

SEQ ID NO: 716869 - RNA, 19 nt, Artificial Sequence
  Description of Artificial Sequence: Synthetic oligonucleotide
  Antisense strand to SEQ ID NO: 716868
agugcgacagcaaacuggc

SEQ ID NO: 716870 - RNA, 19 nt, Artificial Sequence
  Description of Artificial Sequence: Synthetic oligonucleotide
  Sense strand starting at position 2509 of SEQ ID NO: 586423
uuugcugucgcacuugaua

SEQ ID NO: 716871 - RNA, 19 nt, Artificial Sequence
  Description of Artificial Sequence: Synthetic oligonucleotide
  Antisense strand to SEQ ID NO: 716870
uaucaagugcgacagcaaa

SEQ ID NO: 716872 - RNA, 19 nt, Artificial Sequence
  Description of Artificial Sequence: Synthetic oligonucleotide
  Sense strand starting at position 2568 of SEQ ID NO: 586423
gcgaauaguucccuaacaa

SEQ ID NO: 716873 - RNA, 19 nt, Artificial Sequence
  Description of Artificial Sequence: Synthetic oligonucleotide
  Antisense strand to SEQ ID NO: 716872
uuguuagggaacuauucgc

SEQ ID NO: 716874 - RNA, 19 nt, Artificial Sequence
  Description of Artificial Sequence: Synthetic oligonucleotide
  Sense strand starting at position 2569 of SEQ ID NO: 586423
cgaauaguucccuaacaac

SEQ ID NO: 716875 - RNA, 19 nt, Artificial Sequence
  Description of Artificial Sequence: Synthetic oligonucleotide
  Antisense strand to SEQ ID NO: 716874
guuguuagggaacuauucg

SEQ ID NO: 716876 - RNA, 19 nt, Artificial Sequence
  Description of Artificial Sequence: Synthetic oligonucleotide
  Sense strand starting at position 2834 of SEQ ID NO: 586423
guuauauucuugcugggag

SEQ ID NO: 716877 - RNA, 19 nt, Artificial Sequence
  Description of Artificial Sequence: Synthetic oligonucleotide
  Antisense strand to SEQ ID NO: 716876
cucccagcaagaauauaac

SEQ ID NO: 716878 - RNA, 19 nt, Artificial Sequence
  Description of Artificial Sequence: Synthetic oligonucleotide
  Sense strand starting at position 2837 of SEQ ID NO: 586423
auauucuugcugggaggga

SEQ ID NO: 716879 - RNA, 19 nt, Artificial Sequence
  Description of Artificial Sequence: Synthetic oligonucleotide
  Antisense strand to SEQ ID NO: 716878
ucccucccagcaagaauau

SEQ ID NO: 716880 - RNA, 19 nt, Artificial Sequence
  Description of Artificial Sequence: Synthetic oligonucleotide
  Sense strand starting at position 2890 of SEQ ID NO: 586423
cgugcauggcuggagaaau

SEQ ID NO: 716881 - RNA, 19 nt, Artificial Sequence
  Description of Artificial Sequence: Synthetic oligonucleotide
  Antisense strand to SEQ ID NO: 716880
auuucuccagccaugcacg

SEQ ID NO: 716882 - RNA, 19 nt, Artificial Sequence
  Description of Artificial Sequence: Synthetic oligonucleotide
  Sense strand starting at position 2936 of SEQ ID NO: 586423
cucgaauuucuacgcaaga

SEQ ID NO: 716883 - RNA, 19 nt, Artificial Sequence
  Description of Artificial Sequence: Synthetic oligonucleotide
  Antisense strand to SEQ ID NO: 716882
ucuugcguagaaauucgag

SEQ ID NO: 716884 - RNA, 19 nt, Artificial Sequence
  Description of Artificial Sequence: Synthetic oligonucleotide
  Sense strand starting at position 3006 of SEQ ID NO: 586423
ugguguagucuggaguuua

SEQ ID NO: 716885 - RNA, 19 nt, Artificial Sequence
  Description of Artificial Sequence: Synthetic oligonucleotide
  Antisense strand to SEQ ID NO: 716884
uaaacuccagacuacacca

SEQ ID NO: 716886 - RNA, 19 nt, Artificial Sequence
  Description of Artificial Sequence: Synthetic oligonucleotide
  Sense strand starting at position 3017 of SEQ ID NO: 586423
ggaguuuaggaacgucuua

SEQ ID NO: 716887 - RNA, 19 nt, Artificial Sequence
  Description of Artificial Sequence: Synthetic oligonucleotide
  Antisense strand to SEQ ID NO: 716886
uaagacguuccuaaacucc

SEQ ID NO: 716888 - RNA, 19 nt, Artificial Sequence
  Description of Artificial Sequence: Synthetic oligonucleotide
  Sense strand starting at position 3028 of SEQ ID NO: 586423
acgucuuaccuaggaaagu

SEQ ID NO: 716889 - RNA, 19 nt, Artificial Sequence
  Description of Artificial Sequence: Synthetic oligonucleotide
  Antisense strand to SEQ ID NO: 716888
acuuuccuagguaagacgu

SEQ ID NO: 716890 - RNA, 19 nt, Artificial Sequence
  Description of Artificial Sequence: Synthetic oligonucleotide
  Sense strand starting at position 3041 of SEQ ID NO: 586423
gaaagugaugacugugcua

SEQ ID NO: 716891 - RNA, 19 nt, Artificial Sequence
  Description of Artificial Sequence: Synthetic oligonucleotide
  Antisense strand to SEQ ID NO: 716890
uagcacagucaucacuuuc

SEQ ID NO: 716892 - RNA, 19 nt, Artificial Sequence
  Description of Artificial Sequence: Synthetic oligonucleotide
  Sense strand starting at position 3043 of SEQ ID NO: 586423
aagugaugacugugcuaga

SEQ ID NO: 716893 - RNA, 19 nt, Artificial Sequence
  Description of Artificial Sequence: Synthetic oligonucleotide
  Antisense strand to SEQ ID NO: 716892
ucuagcacagucaucacuu

SEQ ID NO: 716894 - RNA, 19 nt, Artificial Sequence
  Description of Artificial Sequence: Synthetic oligonucleotide
  Sense strand starting at position 3044 of SEQ ID NO: 586423
agugaugacugugcuagaa

SEQ ID NO: 716895 - RNA, 19 nt, Artificial Sequence
  Description of Artificial Sequence: Synthetic oligonucleotide
  Antisense strand to SEQ ID NO: 716894
uucuagcacagucaucacu

SEQ ID NO: 716896 - RNA, 19 nt, Artificial Sequence
  Description of Artificial Sequence: Synthetic oligonucleotide
  Sense strand starting at position 3142 of SEQ ID NO: 586423
ggcuuuaguuucuuaauaa

SEQ ID NO: 716897 - RNA, 19 nt, Artificial Sequence
  Description of Artificial Sequence: Synthetic oligonucleotide
  Antisense strand to SEQ ID NO: 716896
uuauuaagaaacuaaagcc

SEQ ID NO: 716898 - RNA, 19 nt, Artificial Sequence
  Description of Artificial Sequence: Synthetic oligonucleotide
  Sense strand starting at position 3188 of SEQ ID NO: 586423
ggauauagugaacguccaa

SEQ ID NO: 716899 - RNA, 19 nt, Artificial Sequence
  Description of Artificial Sequence: Synthetic oligonucleotide
  Antisense strand to SEQ ID NO: 716898
uuggacguucacuauaucc

SEQ ID NO: 716900 - RNA, 19 nt, Artificial Sequence
  Description of Artificial Sequence: Synthetic oligonucleotide
  Sense strand starting at position 3214 of SEQ ID NO: 586423
ugucgaauuagugaguuaa

SEQ ID NO: 716901 - RNA, 19 nt, Artificial Sequence
  Description of Artificial Sequence: Synthetic oligonucleotide
  Antisense strand to SEQ ID NO: 716900
uuaacucacuaauucgaca

SEQ ID NO: 716902 - RNA, 19 nt, Artificial Sequence
  Description of Artificial Sequence: Synthetic oligonucleotide
  Sense strand starting at position 3216 of SEQ ID NO: 586423
ucgaauuagugaguuaaua

SEQ ID NO: 716903 - RNA, 19 nt, Artificial Sequence
  Description of Artificial Sequence: Synthetic oligonucleotide
  Antisense strand to SEQ ID NO: 716902
uauuaacucacuaauucga

SEQ ID NO: 716904 - RNA, 19 nt, Artificial Sequence
  Description of Artificial Sequence: Synthetic oligonucleotide
  Sense strand starting at position 3238 of SEQ ID NO: 586423
gacucuucggaggacuagu

SEQ ID NO: 716905 - RNA, 19 nt, Artificial Sequence
  Description of Artificial Sequence: Synthetic oligonucleotide
  Antisense strand to SEQ ID NO: 716904
acuaguccuccgaagaguc

SEQ ID NO: 716906 - RNA, 19 nt, Artificial Sequence
  Description of Artificial Sequence: Synthetic oligonucleotide
  Sense strand starting at position 3255 of SEQ ID NO: 586423
guggaaaucugauuggcag

SEQ ID NO: 716907 - RNA, 19 nt, Artificial Sequence
  Description of Artificial Sequence: Synthetic oligonucleotide
  Antisense strand to SEQ ID NO: 716906
cugccaaucagauuuccac

SEQ ID NO: 716908 - RNA, 19 nt, Artificial Sequence
  Description of Artificial Sequence: Synthetic oligonucleotide
  Sense strand starting at position 3256 of SEQ ID NO: 586423
uggaaaucugauuggcaga

SEQ ID NO: 716909 - RNA, 19 nt, Artificial Sequence
  Description of Artificial Sequence: Synthetic oligonucleotide
  Antisense strand to SEQ ID NO: 716908
ucugccaaucagauuucca

SEQ ID NO: 716910 - RNA, 19 nt, Artificial Sequence
  Description of Artificial Sequence: Synthetic oligonucleotide
  Sense strand starting at position 3257 of SEQ ID NO: 586423
ggaaaucugauuggcagag

SEQ ID NO: 716911 - RNA, 19 nt, Artificial Sequence
  Description of Artificial Sequence: Synthetic oligonucleotide
  Antisense strand to SEQ ID NO: 716910
cucugccaaucagauuucc

SEQ ID NO: 716912 - RNA, 19 nt, Artificial Sequence
  Description of Artificial Sequence: Synthetic oligonucleotide
  Sense strand starting at position 3311 of SEQ ID NO: 586423
aggagaaacuuacacagaa

SEQ ID NO: 716913 - RNA, 19 nt, Artificial Sequence
  Description of Artificial Sequence: Synthetic oligonucleotide
  Antisense strand to SEQ ID NO: 716912
uucuguguaaguuucuccu

SEQ ID NO: 716914 - RNA, 19 nt, Artificial Sequence
  Description of Artificial Sequence: Synthetic oligonucleotide
  Sense strand starting at position 3338 of SEQ ID NO: 586423
guggauaagacuugccaga

SEQ ID NO: 716915 - RNA, 19 nt, Artificial Sequence
  Description of Artificial Sequence: Synthetic oligonucleotide
  Antisense strand to SEQ ID NO: 716914
ucuggcaagucuuauccac

SEQ ID NO: 716916 - RNA, 19 nt, Artificial Sequence
  Description of Artificial Sequence: Synthetic oligonucleotide
  Sense strand starting at position 3340 of SEQ ID NO: 586423
ggauaagacuugccagaau

SEQ ID NO: 716917 - RNA, 19 nt, Artificial Sequence
  Description of Artificial Sequence: Synthetic oligonucleotide
  Antisense strand to SEQ ID NO: 716916
auucuggcaagucuuaucc

SEQ ID NO: 716918 - RNA, 19 nt, Artificial Sequence
  Description of Artificial Sequence: Synthetic oligonucleotide
  Sense strand starting at position 3471 of SEQ ID NO: 586423
gaaagugggucaguaaagu

SEQ ID NO: 716919 - RNA, 19 nt, Artificial Sequence
  Description of Artificial Sequence: Synthetic oligonucleotide
  Antisense strand to SEQ ID NO: 716918
acuuuacugacccacuuuc

SEQ ID NO: 716920 - RNA, 19 nt, Artificial Sequence
  Description of Artificial Sequence: Synthetic oligonucleotide
  Sense strand starting at position 3893 of SEQ ID NO: 586423
guacuacuauuguucuaaa

SEQ ID NO: 716921 - RNA, 19 nt, Artificial Sequence
  Description of Artificial Sequence: Synthetic oligonucleotide
  Antisense strand to SEQ ID NO: 716920
uuuagaacaauaguaguac

SEQ ID NO: 716922 - RNA, 19 nt, Artificial Sequence
  Description of Artificial Sequence: Synthetic oligonucleotide
  Sense strand starting at position 14 of SEQ ID NO: 586425
acuacuuuagauuggguga

SEQ ID NO: 716923 - RNA, 19 nt, Artificial Sequence
  Description of Artificial Sequence: Synthetic oligonucleotide
  Antisense strand to SEQ ID NO: 716922
ucacccaaucuaaaguagu

SEQ ID NO: 716924 - RNA, 19 nt, Artificial Sequence
  Description of Artificial Sequence: Synthetic oligonucleotide
  Sense strand starting at position 15 of SEQ ID NO: 586425
cuacuuuagauugggugau

SEQ ID NO: 716925 - RNA, 19 nt, Artificial Sequence
  Description of Artificial Sequence: Synthetic oligonucleotide
  Antisense strand to SEQ ID NO: 716924
aucacccaaucuaaaguag

SEQ ID NO: 716926 - RNA, 19 nt, Artificial Sequence
  Description of Artificial Sequence: Synthetic oligonucleotide
  Sense strand starting at position 17 of SEQ ID NO: 586425
acuuuagauugggugauag

SEQ ID NO: 716927 - RNA, 19 nt, Artificial Sequence
  Description of Artificial Sequence: Synthetic oligonucleotide
  Antisense strand to SEQ ID NO: 716926
cuaucacccaaucuaaagu

SEQ ID NO: 716928 - RNA, 19 nt, Artificial Sequence
  Description of Artificial Sequence: Synthetic oligonucleotide
  Sense strand starting at position 71 of SEQ ID NO: 586425
ccugaaaugcagugagcaa

SEQ ID NO: 716929 - RNA, 19 nt, Artificial Sequence
  Description of Artificial Sequence: Synthetic oligonucleotide
  Antisense strand to SEQ ID NO: 716928
uugcucacugcauuucagg

SEQ ID NO: 716930 - RNA, 19 nt, Artificial Sequence
  Description of Artificial Sequence: Synthetic oligonucleotide
  Sense strand starting at position 72 of SEQ ID NO: 586425
cugaaaugcagugagcaaa

SEQ ID NO: 716931 - RNA, 19 nt, Artificial Sequence
  Description of Artificial Sequence: Synthetic oligonucleotide
  Antisense strand to SEQ ID NO: 716930
uuugcucacugcauuucag

SEQ ID NO: 716932 - RNA, 19 nt, Artificial Sequence
  Description of Artificial Sequence: Synthetic oligonucleotide
  Sense strand starting at position 191 of SEQ ID NO: 586425
ccaguaaaucaaggugaua

SEQ ID NO: 716933 - RNA, 19 nt, Artificial Sequence
  Description of Artificial Sequence: Synthetic oligonucleotide
  Antisense strand to SEQ ID NO: 716932
uaucaccuugauuuacugg

SEQ ID NO: 716934 - RNA, 19 nt, Artificial Sequence
  Description of Artificial Sequence: Synthetic oligonucleotide
  Sense strand starting at position 193 of SEQ ID NO: 586425
aguaaaucaaggugauagu

SEQ ID NO: 716935 - RNA, 19 nt, Artificial Sequence
  Description of Artificial Sequence: Synthetic oligonucleotide
  Antisense strand to SEQ ID NO: 716934
acuaucaccuugauuuacu

SEQ ID NO: 716936 - RNA, 19 nt, Artificial Sequence
  Description of Artificial Sequence: Synthetic oligonucleotide
  Sense strand starting at position 194 of SEQ ID NO: 586425
guaaaucaaggugauaguu

SEQ ID NO: 716937 - RNA, 19 nt, Artificial Sequence
  Description of Artificial Sequence: Synthetic oligonucleotide
  Antisense strand to SEQ ID NO: 716936
aacuaucaccuugauuuac

SEQ ID NO: 716938 - RNA, 19 nt, Artificial Sequence
  Description of Artificial Sequence: Synthetic oligonucleotide
  Sense strand starting at position 332 of SEQ ID NO: 586425
ucaaaucugcccuaaugga

SEQ ID NO: 716939 - RNA, 19 nt, Artificial Sequence
  Description of Artificial Sequence: Synthetic oligonucleotide
  Antisense strand to SEQ ID NO: 716938
uccauuagggcagauuuga

SEQ ID NO: 716940 - RNA, 19 nt, Artificial Sequence
  Description of Artificial Sequence: Synthetic oligonucleotide
  Sense strand starting at position 891 of SEQ ID NO: 586425
agcaaagaauaugucuaaa

SEQ ID NO: 716941 - RNA, 19 nt, Artificial Sequence
  Description of Artificial Sequence: Synthetic oligonucleotide
  Antisense strand to SEQ ID NO: 716940
uuuagacauauucuuugcu

SEQ ID NO: 716942 - RNA, 19 nt, Artificial Sequence
  Description of Artificial Sequence: Synthetic oligonucleotide
  Sense strand starting at position 936 of SEQ ID NO: 586425
uacagugagcacggaauaa

SEQ ID NO: 716943 - RNA, 19 nt, Artificial Sequence
  Description of Artificial Sequence: Synthetic oligonucleotide
  Antisense strand to SEQ ID NO: 716942
uuauuccgugcucacugua

SEQ ID NO: 716944 - RNA, 19 nt, Artificial Sequence
  Description of Artificial Sequence: Synthetic oligonucleotide
  Sense strand starting at position 1418 of SEQ ID NO: 586425
ugcuuuagggcagaaucua

SEQ ID NO: 716945 - RNA, 19 nt, Artificial Sequence
  Description of Artificial Sequence: Synthetic oligonucleotide
  Antisense strand to SEQ ID NO: 716944
uagauucugcccuaaagca

SEQ ID NO: 716946 - RNA, 19 nt, Artificial Sequence
  Description of Artificial Sequence: Synthetic oligonucleotide
  Sense strand starting at position 1624 of SEQ ID NO: 586425
acaaucguccucuacaaga

SEQ ID NO: 716947 - RNA, 19 nt, Artificial Sequence
  Description of Artificial Sequence: Synthetic oligonucleotide
  Antisense strand to SEQ ID NO: 716946
ucuuguagaggacgauugu

SEQ ID NO: 716948 - RNA, 19 nt, Artificial Sequence
  Description of Artificial Sequence: Synthetic oligonucleotide
  Sense strand starting at position 1733 of SEQ ID NO: 586425
cagugauuacuggacguuu

SEQ ID NO: 716949 - RNA, 19 nt, Artificial Sequence
  Description of Artificial Sequence: Synthetic oligonucleotide
  Antisense strand to SEQ ID NO: 716948
aaacguccaguaaucacug

SEQ ID NO: 716950 - RNA, 19 nt, Artificial Sequence
  Description of Artificial Sequence: Synthetic oligonucleotide
  Sense strand starting at position 1914 of SEQ ID NO: 586425
caauacucggcagagcauu

SEQ ID NO: 716951 - RNA, 19 nt, Artificial Sequence
  Description of Artificial Sequence: Synthetic oligonucleotide
  Antisense strand to SEQ ID NO: 716950
aaugcucugccgaguauug

SEQ ID NO: 716952 - RNA, 19 nt, Artificial Sequence
  Description of Artificial Sequence: Synthetic oligonucleotide
  Sense strand starting at position 2113 of SEQ ID NO: 586425
ugaguaauaugucccggaa

SEQ ID NO: 716953 - RNA, 19 nt, Artificial Sequence
  Description of Artificial Sequence: Synthetic oligonucleotide
  Antisense strand to SEQ ID NO: 716952
uuccgggacauauuacuca

SEQ ID NO: 716954 - RNA, 19 nt, Artificial Sequence
  Description of Artificial Sequence: Synthetic oligonucleotide
  Sense strand starting at position 2117 of SEQ ID NO: 586425
uaauaugucccggaaagcu

SEQ ID NO: 716955 - RNA, 19 nt, Artificial Sequence
  Description of Artificial Sequence: Synthetic oligonucleotide
  Antisense strand to SEQ ID NO: 716954
agcuuuccgggacauauua

SEQ ID NO: 716956 - RNA, 19 nt, Artificial Sequence
  Description of Artificial Sequence: Synthetic oligonucleotide
  Sense strand starting at position 2153 of SEQ ID NO: 586425
cgaaaugugcccucgugca

SEQ ID NO: 716957 - RNA, 19 nt, Artificial Sequence
  Description of Artificial Sequence: Synthetic oligonucleotide
  Antisense strand to SEQ ID NO: 716956
ugcacgagggcacauuucg

SEQ ID NO: 716958 - RNA, 19 nt, Artificial Sequence
  Description of Artificial Sequence: Synthetic oligonucleotide
  Sense strand starting at position 2720 of SEQ ID NO: 586425
cuaggaggucucggaaacu

SEQ ID NO: 716959 - RNA, 19 nt, Artificial Sequence
  Description of Artificial Sequence: Synthetic oligonucleotide
  Antisense strand to SEQ ID NO: 716958
aguuuccgagaccuccuag

SEQ ID NO: 716960 - RNA, 19 nt, Artificial Sequence
  Description of Artificial Sequence: Synthetic oligonucleotide
  Sense strand starting at position 3001 of SEQ ID NO: 586425
gccaguuugcugucgcacu

SEQ ID NO: 716961 - RNA, 19 nt, Artificial Sequence
  Description of Artificial Sequence: Synthetic oligonucleotide
  Antisense strand to SEQ ID NO: 716960
agugcgacagcaaacuggc

SEQ ID NO: 716962 - RNA, 19 nt, Artificial Sequence
  Description of Artificial Sequence: Synthetic oligonucleotide
  Sense strand starting at position 3006 of SEQ ID NO: 586425
uuugcugucgcacuugaua

SEQ ID NO: 716963 - RNA, 19 nt, Artificial Sequence
  Description of Artificial Sequence: Synthetic oligonucleotide
  Antisense strand to SEQ ID NO: 716962
uaucaagugcgacagcaaa

SEQ ID NO: 716964 - RNA, 19 nt, Artificial Sequence
  Description of Artificial Sequence: Synthetic oligonucleotide
  Sense strand starting at position 3066 of SEQ ID NO: 586425
cgaauaguucccuaacaac

SEQ ID NO: 716965 - RNA, 19 nt, Artificial Sequence
  Description of Artificial Sequence: Synthetic oligonucleotide
  Antisense strand to SEQ ID NO: 716964
guuguuagggaacuauucg

SEQ ID NO: 716966 - RNA, 19 nt, Artificial Sequence
  Description of Artificial Sequence: Synthetic oligonucleotide
  Sense strand starting at position 3334 of SEQ ID NO: 586425
auauucuugcugggaggga

SEQ ID NO: 716967 - RNA, 19 nt, Artificial Sequence
  Description of Artificial Sequence: Synthetic oligonucleotide
  Antisense strand to SEQ ID NO: 716966
ucccucccagcaagaauau

SEQ ID NO: 716968 - RNA, 19 nt, Artificial Sequence
  Description of Artificial Sequence: Synthetic oligonucleotide
  Sense strand starting at position 3387 of SEQ ID NO: 586425
cgugcauggcuggagaaau

SEQ ID NO: 716969 - RNA, 19 nt, Artificial Sequence
  Description of Artificial Sequence: Synthetic oligonucleotide
  Antisense strand to SEQ ID NO: 716968
auuucuccagccaugcacg

SEQ ID NO: 716970 - RNA, 19 nt, Artificial Sequence
  Description of Artificial Sequence: Synthetic oligonucleotide
  Sense strand starting at position 3433 of SEQ ID NO: 586425
cucgaauuucuacgcaaga

SEQ ID NO: 716971 - RNA, 19 nt, Artificial Sequence
  Description of Artificial Sequence: Synthetic oligonucleotide
  Antisense strand to SEQ ID NO: 716970
ucuugcguagaaauucgag

SEQ ID NO: 716972 - RNA, 19 nt, Artificial Sequence
  Description of Artificial Sequence: Synthetic oligonucleotide
  Sense strand starting at position 3514 of SEQ ID NO: 586425
ggaguuuaggaacgucuua

SEQ ID NO: 716973 - RNA, 19 nt, Artificial Sequence
  Description of Artificial Sequence: Synthetic oligonucleotide
  Antisense strand to SEQ ID NO: 716972
uaagacguuccuaaacucc

SEQ ID NO: 716974 - RNA, 19 nt, Artificial Sequence
  Description of Artificial Sequence: Synthetic oligonucleotide
  Sense strand starting at position 3538 of SEQ ID NO: 586425
gaaagugaugacugugcua

SEQ ID NO: 716975 - RNA, 19 nt, Artificial Sequence
  Description of Artificial Sequence: Synthetic oligonucleotide
  Antisense strand to SEQ ID NO: 716974
uagcacagucaucacuuuc

SEQ ID NO: 716976 - RNA, 19 nt, Artificial Sequence
  Description of Artificial Sequence: Synthetic oligonucleotide
  Sense strand starting at position 3540 of SEQ ID NO: 586425
aagugaugacugugcuaga

SEQ ID NO: 716977 - RNA, 19 nt, Artificial Sequence
  Description of Artificial Sequence: Synthetic oligonucleotide
  Antisense strand to SEQ ID NO: 716976
ucuagcacagucaucacuu

SEQ ID NO: 716978 - RNA, 19 nt, Artificial Sequence
  Description of Artificial Sequence: Synthetic oligonucleotide
  Sense strand starting at position 3541 of SEQ ID NO: 586425
agugaugacugugcuagaa

SEQ ID NO: 716979 - RNA, 19 nt, Artificial Sequence
  Description of Artificial Sequence: Synthetic oligonucleotide
  Antisense strand to SEQ ID NO: 716978
uucuagcacagucaucacu

SEQ ID NO: 716980 - RNA, 19 nt, Artificial Sequence
  Description of Artificial Sequence: Synthetic oligonucleotide
  Sense strand starting at position 3685 of SEQ ID NO: 586425
ggauauagugaacguccaa

SEQ ID NO: 716981 - RNA, 19 nt, Artificial Sequence
  Description of Artificial Sequence: Synthetic oligonucleotide
  Antisense strand to SEQ ID NO: 716980
uuggacguucacuauaucc

SEQ ID NO: 716982 - RNA, 19 nt, Artificial Sequence
  Description of Artificial Sequence: Synthetic oligonucleotide
  Sense strand starting at position 3711 of SEQ ID NO: 586425
ugucgaauuagugaguuaa

SEQ ID NO: 716983 - RNA, 19 nt, Artificial Sequence
  Description of Artificial Sequence: Synthetic oligonucleotide
  Antisense strand to SEQ ID NO: 716982
uuaacucacuaauucgaca

SEQ ID NO: 716984 - RNA, 19 nt, Artificial Sequence
  Description of Artificial Sequence: Synthetic oligonucleotide
  Sense strand starting at position 3713 of SEQ ID NO: 586425
ucgaauuagugaguuaaua

SEQ ID NO: 716985 - RNA, 19 nt, Artificial Sequence
  Description of Artificial Sequence: Synthetic oligonucleotide
  Antisense strand to SEQ ID NO: 716984
uauuaacucacuaauucga

SEQ ID NO: 716986 - RNA, 19 nt, Artificial Sequence
  Description of Artificial Sequence: Synthetic oligonucleotide
  Sense strand starting at position 3735 of SEQ ID NO: 586425
gacucuucggaggacuagu

SEQ ID NO: 716987 - RNA, 19 nt, Artificial Sequence
  Description of Artificial Sequence: Synthetic oligonucleotide
  Antisense strand to SEQ ID NO: 716986
acuaguccuccgaagaguc

SEQ ID NO: 716988 - RNA, 19 nt, Artificial Sequence
  Description of Artificial Sequence: Synthetic oligonucleotide
  Sense strand starting at position 3752 of SEQ ID NO: 586425
guggaaaucugauuggcag

SEQ ID NO: 716989 - RNA, 19 nt, Artificial Sequence
  Description of Artificial Sequence: Synthetic oligonucleotide
  Antisense strand to SEQ ID NO: 716988
cugccaaucagauuuccac

SEQ ID NO: 716990 - RNA, 19 nt, Artificial Sequence
  Description of Artificial Sequence: Synthetic oligonucleotide
  Sense strand starting at position 3753 of SEQ ID NO: 586425
uggaaaucugauuggcaga

SEQ ID NO: 716991 - RNA, 19 nt, Artificial Sequence
  Description of Artificial Sequence: Synthetic oligonucleotide
  Antisense strand to SEQ ID NO: 716990
ucugccaaucagauuucca

SEQ ID NO: 716992 - RNA, 19 nt, Artificial Sequence
  Description of Artificial Sequence: Synthetic oligonucleotide
  Sense strand starting at position 3754 of SEQ ID NO: 586425
ggaaaucugauuggcagag

SEQ ID NO: 716993 - RNA, 19 nt, Artificial Sequence
  Description of Artificial Sequence: Synthetic oligonucleotide
  Antisense strand to SEQ ID NO: 716992
cucugccaaucagauuucc

SEQ ID NO: 716994 - RNA, 19 nt, Artificial Sequence
  Description of Artificial Sequence: Synthetic oligonucleotide
  Sense strand starting at position 3808 of SEQ ID NO: 586425
aggagaaacuuacacagaa

SEQ ID NO: 716995 - RNA, 19 nt, Artificial Sequence
  Description of Artificial Sequence: Synthetic oligonucleotide
  Antisense strand to SEQ ID NO: 716994
uucuguguaaguuucuccu

SEQ ID NO: 716996 - RNA, 19 nt, Artificial Sequence
  Description of Artificial Sequence: Synthetic oligonucleotide
  Sense strand starting at position 3835 of SEQ ID NO: 586425
guggauaagacuugccaga

SEQ ID NO: 716997 - RNA, 19 nt, Artificial Sequence
  Description of Artificial Sequence: Synthetic oligonucleotide
  Antisense strand to SEQ ID NO: 716996
ucuggcaagucuuauccac

SEQ ID NO: 716998 - RNA, 19 nt, Artificial Sequence
  Description of Artificial Sequence: Synthetic oligonucleotide
  Sense strand starting at position 3837 of SEQ ID NO: 586425
ggauaagacuugccagaau

SEQ ID NO: 716999 - RNA, 19 nt, Artificial Sequence
  Description of Artificial Sequence: Synthetic oligonucleotide
  Antisense strand to SEQ ID NO: 716998
auucuggcaagucuuaucc

SEQ ID NO: 717000 - RNA, 19 nt, Artificial Sequence
  Description of Artificial Sequence: Synthetic oligonucleotide
  Sense strand starting at position 3968 of SEQ ID NO: 586425
gaaagugggucaguaaagu

SEQ ID NO: 717001 - RNA, 19 nt, Artificial Sequence
  Description of Artificial Sequence: Synthetic oligonucleotide
  Antisense strand to SEQ ID NO: 717000
acuuuacugacccacuuuc

SEQ ID NO: 717002 - RNA, 19 nt, Artificial Sequence
  Description of Artificial Sequence: Synthetic oligonucleotide
  Sense strand starting at position 223 of SEQ ID NO: 586426
gccuuaucgggugucugua

SEQ ID NO: 717003 - RNA, 19 nt, Artificial Sequence
  Description of Artificial Sequence: Synthetic oligonucleotide
  Antisense strand to SEQ ID NO: 717002
uacagacacccgauaaggc

SEQ ID NO: 717004 - RNA, 19 nt, Artificial Sequence
  Description of Artificial Sequence: Synthetic oligonucleotide
  Sense strand starting at position 231 of SEQ ID NO: 586426
gggugucuguauccaggua

SEQ ID NO: 717005 - RNA, 19 nt, Artificial Sequence
  Description of Artificial Sequence: Synthetic oligonucleotide
  Antisense strand to SEQ ID NO: 717004
uaccuggauacagacaccc

SEQ ID NO: 717006 - RNA, 19 nt, Artificial Sequence
  Description of Artificial Sequence: Synthetic oligonucleotide
  Sense strand starting at position 251 of SEQ ID NO: 586426
ugcuaaugccgaugacuaa

SEQ ID NO: 717007 - RNA, 19 nt, Artificial Sequence
  Description of Artificial Sequence: Synthetic oligonucleotide
  Antisense strand to SEQ ID NO: 717006
uuagucaucggcauuagca

SEQ ID NO: 717008 - RNA, 19 nt, Artificial Sequence
  Description of Artificial Sequence: Synthetic oligonucleotide
  Sense strand starting at position 378 of SEQ ID NO: 586426
ugccacuugguuugauuga

SEQ ID NO: 717009 - RNA, 19 nt, Artificial Sequence
  Description of Artificial Sequence: Synthetic oligonucleotide
  Antisense strand to SEQ ID NO: 717008
ucaaucaaaccaaguggca

SEQ ID NO: 717010 - RNA, 19 nt, Artificial Sequence
  Description of Artificial Sequence: Synthetic oligonucleotide
  Sense strand starting at position 406 of SEQ ID NO: 586426
uugaauagcugacuuugaa

SEQ ID NO: 717011 - RNA, 19 nt, Artificial Sequence
  Description of Artificial Sequence: Synthetic oligonucleotide
  Antisense strand to SEQ ID NO: 717010
uucaaagucagcuauucaa

SEQ ID NO: 717012 - RNA, 19 nt, Artificial Sequence
  Description of Artificial Sequence: Synthetic oligonucleotide
  Sense strand starting at position 492 of SEQ ID NO: 586426
ggugguuuagacuacuauu

SEQ ID NO: 717013 - RNA, 19 nt, Artificial Sequence
  Description of Artificial Sequence: Synthetic oligonucleotide
  Antisense strand to SEQ ID NO: 717012
aauaguagucuaaaccacc

SEQ ID NO: 717014 - RNA, 19 nt, Artificial Sequence
  Description of Artificial Sequence: Synthetic oligonucleotide
  Sense strand starting at position 588 of SEQ ID NO: 586426
ggauguuagcaguagaaug

SEQ ID NO: 717015 - RNA, 19 nt, Artificial Sequence
  Description of Artificial Sequence: Synthetic oligonucleotide
  Antisense strand to SEQ ID NO: 717014
cauucuacugcuaacaucc

SEQ ID NO: 717016 - RNA, 19 nt, Artificial Sequence
  Description of Artificial Sequence: Synthetic oligonucleotide
  Sense strand starting at position 625 of SEQ ID NO: 586426
cucccagucuuucugacuu

SEQ ID NO: 717017 - RNA, 19 nt, Artificial Sequence
  Description of Artificial Sequence: Synthetic oligonucleotide
  Antisense strand to SEQ ID NO: 717016
aagucagaaagacugggag

SEQ ID NO: 717018 - RNA, 19 nt, Artificial Sequence
  Description of Artificial Sequence: Synthetic oligonucleotide
  Sense strand starting at position 648 of SEQ ID NO: 586426
gcaauaagauuugaaagcu

SEQ ID NO: 717019 - RNA, 19 nt, Artificial Sequence
  Description of Artificial Sequence: Synthetic oligonucleotide
  Antisense strand to SEQ ID NO: 717018
agcuuucaaaucuuauugc

SEQ ID NO: 717020 - RNA, 19 nt, Artificial Sequence
  Description of Artificial Sequence: Synthetic oligonucleotide
  Sense strand starting at position 785 of SEQ ID NO: 586426
uagggcagucucugagaua

SEQ ID NO: 717021 - RNA, 19 nt, Artificial Sequence
  Description of Artificial Sequence: Synthetic oligonucleotide
  Antisense strand to SEQ ID NO: 717020
uaucucagagacugcccua

SEQ ID NO: 717022 - RNA, 19 nt, Artificial Sequence
  Description of Artificial Sequence: Synthetic oligonucleotide
  Sense strand starting at position 869 of SEQ ID NO: 586426
uaguguauuucucagagag

SEQ ID NO: 717023 - RNA, 19 nt, Artificial Sequence
  Description of Artificial Sequence: Synthetic oligonucleotide
  Antisense strand to SEQ ID NO: 717022
cucucugagaaauacacua

SEQ ID NO: 717024 - RNA, 19 nt, Artificial Sequence
  Description of Artificial Sequence: Synthetic oligonucleotide
  Sense strand starting at position 887 of SEQ ID NO: 586426
gcagauucugugcaguacu

SEQ ID NO: 717025 - RNA, 19 nt, Artificial Sequence
  Description of Artificial Sequence: Synthetic oligonucleotide
  Antisense strand to SEQ ID NO: 717024
aguacugcacagaaucugc

SEQ ID NO: 717026 - RNA, 19 nt, Artificial Sequence
  Description of Artificial Sequence: Synthetic oligonucleotide
  Sense strand starting at position 890 of SEQ ID NO: 586426
gauucugugcaguacuaaa

SEQ ID NO: 717027 - RNA, 19 nt, Artificial Sequence
  Description of Artificial Sequence: Synthetic oligonucleotide
  Antisense strand to SEQ ID NO: 717026
uuuaguacugcacagaauc

SEQ ID NO: 717028 - RNA, 19 nt, Artificial Sequence
  Description of Artificial Sequence: Synthetic oligonucleotide
  Sense strand starting at position 1051 of SEQ ID NO: 586426
aggauucccgaguauguua

SEQ ID NO: 717029 - RNA, 19 nt, Artificial Sequence
  Description of Artificial Sequence: Synthetic oligonucleotide
  Antisense strand to SEQ ID NO: 717028
uaacauacucgggaauccu

SEQ ID NO: 717030 - RNA, 19 nt, Artificial Sequence
  Description of Artificial Sequence: Synthetic oligonucleotide
  Sense strand starting at position 1053 of SEQ ID NO: 586426
gauucccgaguauguuaaa

SEQ ID NO: 717031 - RNA, 19 nt, Artificial Sequence
  Description of Artificial Sequence: Synthetic oligonucleotide
  Antisense strand to SEQ ID NO: 717030
uuuaacauacucgggaauc

SEQ ID NO: 717032 - RNA, 19 nt, Artificial Sequence
  Description of Artificial Sequence: Synthetic oligonucleotide
  Sense strand starting at position 1086 of SEQ ID NO: 586426
aggaauaacucauagaaag

SEQ ID NO: 717033 - RNA, 19 nt, Artificial Sequence
  Description of Artificial Sequence: Synthetic oligonucleotide
  Antisense strand to SEQ ID NO: 717032
cuuucuaugaguuauuccu

SEQ ID NO: 717034 - RNA, 19 nt, Artificial Sequence
  Description of Artificial Sequence: Synthetic oligonucleotide
  Sense strand starting at position 1694 of SEQ ID NO: 586426
ccggcuccucccugacaaa

SEQ ID NO: 717035 - RNA, 19 nt, Artificial Sequence
  Description of Artificial Sequence: Synthetic oligonucleotide
  Antisense strand to SEQ ID NO: 717034
uuugucagggaggagccgg

SEQ ID NO: 717036 - RNA, 19 nt, Artificial Sequence
  Description of Artificial Sequence: Synthetic oligonucleotide
  Sense strand starting at position 2087 of SEQ ID NO: 586426
augagaaucuucuucugcu

SEQ ID NO: 717037 - RNA, 19 nt, Artificial Sequence
  Description of Artificial Sequence: Synthetic oligonucleotide
  Antisense strand to SEQ ID NO: 717036
agcagaagaagauucucau

SEQ ID NO: 717038 - RNA, 19 nt, Artificial Sequence
  Description of Artificial Sequence: Synthetic oligonucleotide
  Sense strand starting at position 2088 of SEQ ID NO: 586426
ugagaaucuucuucugcug

SEQ ID NO: 717039 - RNA, 19 nt, Artificial Sequence
  Description of Artificial Sequence: Synthetic oligonucleotide
  Antisense strand to SEQ ID NO: 717038
cagcagaagaagauucuca

SEQ ID NO: 717040 - RNA, 19 nt, Artificial Sequence
  Description of Artificial Sequence: Synthetic oligonucleotide
  Sense strand starting at position 2139 of SEQ ID NO: 586426
gggcguggucugagcaaug

SEQ ID NO: 717041 - RNA, 19 nt, Artificial Sequence
  Description of Artificial Sequence: Synthetic oligonucleotide
  Antisense strand to SEQ ID NO: 717040
cauugcucagaccacgccc

SEQ ID NO: 717042 - RNA, 19 nt, Artificial Sequence
  Description of Artificial Sequence: Synthetic oligonucleotide
  Sense strand starting at position 2177 of SEQ ID NO: 586426
agggaaguugauugacugu

SEQ ID NO: 717043 - RNA, 19 nt, Artificial Sequence
  Description of Artificial Sequence: Synthetic oligonucleotide
  Antisense strand to SEQ ID NO: 717042
acagucaaucaacuucccu

SEQ ID NO: 717044 - RNA, 19 nt, Artificial Sequence
  Description of Artificial Sequence: Synthetic oligonucleotide
  Sense strand starting at position 2180 of SEQ ID NO: 586426
gaaguugauugacuguaag

SEQ ID NO: 717045 - RNA, 19 nt, Artificial Sequence
  Description of Artificial Sequence: Synthetic oligonucleotide
  Antisense strand to SEQ ID NO: 717044
cuuacagucaaucaacuuc

SEQ ID NO: 717046 - RNA, 19 nt, Artificial Sequence
  Description of Artificial Sequence: Synthetic oligonucleotide
  Sense strand starting at position 2183 of SEQ ID NO: 586426
guugauugacuguaagguu

SEQ ID NO: 717047 - RNA, 19 nt, Artificial Sequence
  Description of Artificial Sequence: Synthetic oligonucleotide
  Antisense strand to SEQ ID NO: 717046
aaccuuacagucaaucaac

SEQ ID NO: 717048 - RNA, 19 nt, Artificial Sequence
  Description of Artificial Sequence: Synthetic oligonucleotide
  Sense strand starting at position 2228 of SEQ ID NO: 586426
cagcgaaggucucuuagau

SEQ ID NO: 717049 - RNA, 19 nt, Artificial Sequence
  Description of Artificial Sequence: Synthetic oligonucleotide
  Antisense strand to SEQ ID NO: 717048
aucuaagagaccuucgcug

SEQ ID NO: 717050 - RNA, 19 nt, Artificial Sequence
  Description of Artificial Sequence: Synthetic oligonucleotide
  Sense strand starting at position 2240 of SEQ ID NO: 586426
cuuagauucugagccguua

SEQ ID NO: 717051 - RNA, 19 nt, Artificial Sequence
  Description of Artificial Sequence: Synthetic oligonucleotide
  Antisense strand to SEQ ID NO: 717050
uaacggcucagaaucuaag

SEQ ID NO: 717052 - RNA, 19 nt, Artificial Sequence
  Description of Artificial Sequence: Synthetic oligonucleotide
  Sense strand starting at position 2296 of SEQ ID NO: 586426
ggaugaugugaaggguauc

SEQ ID NO: 717053 - RNA, 19 nt, Artificial Sequence
  Description of Artificial Sequence: Synthetic oligonucleotide
  Antisense strand to SEQ ID NO: 717052
gauacccuucacaucaucc

SEQ ID NO: 717054 - RNA, 19 nt, Artificial Sequence
  Description of Artificial Sequence: Synthetic oligonucleotide
  Sense strand starting at position 2297 of SEQ ID NO: 586426
gaugaugugaaggguauca

SEQ ID NO: 717055 - RNA, 19 nt, Artificial Sequence
  Description of Artificial Sequence: Synthetic oligonucleotide
  Antisense strand to SEQ ID NO: 717054
ugauacccuucacaucauc

SEQ ID NO: 717056 - RNA, 19 nt, Artificial Sequence
  Description of Artificial Sequence: Synthetic oligonucleotide
  Sense strand starting at position 2310 of SEQ ID NO: 586426
guaucaauuuguuucucuu

SEQ ID NO: 717057 - RNA, 19 nt, Artificial Sequence
  Description of Artificial Sequence: Synthetic oligonucleotide
  Antisense strand to SEQ ID NO: 717056
aagagaaacaaauugauac

SEQ ID NO: 717058 - RNA, 19 nt, Artificial Sequence
  Description of Artificial Sequence: Synthetic oligonucleotide
  Sense strand starting at position 2357 of SEQ ID NO: 586426
uuuacuagucaguaggauu

SEQ ID NO: 717059 - RNA, 19 nt, Artificial Sequence
  Description of Artificial Sequence: Synthetic oligonucleotide
  Antisense strand to SEQ ID NO: 717058
aauccuacugacuaguaaa

SEQ ID NO: 717060 - RNA, 19 nt, Artificial Sequence
  Description of Artificial Sequence: Synthetic oligonucleotide
  Sense strand starting at position 2416 of SEQ ID NO: 586426
uuaucaaaucccgggagga

SEQ ID NO: 717061 - RNA, 19 nt, Artificial Sequence
  Description of Artificial Sequence: Synthetic oligonucleotide
  Antisense strand to SEQ ID NO: 717060
uccucccgggauuugauaa

SEQ ID NO: 717062 - RNA, 19 nt, Artificial Sequence
  Description of Artificial Sequence: Synthetic oligonucleotide
  Sense strand starting at position 2703 of SEQ ID NO: 586426
ucucaagacuggucaggau

SEQ ID NO: 717063 - RNA, 19 nt, Artificial Sequence
  Description of Artificial Sequence: Synthetic oligonucleotide
  Antisense strand to SEQ ID NO: 717062
auccugaccagucuugaga

SEQ ID NO: 717064 - RNA, 19 nt, Artificial Sequence
  Description of Artificial Sequence: Synthetic oligonucleotide
  Sense strand starting at position 2852 of SEQ ID NO: 586426
gcacauaaauaagaagaua

SEQ ID NO: 717065 - RNA, 19 nt, Artificial Sequence
  Description of Artificial Sequence: Synthetic oligonucleotide
  Antisense strand to SEQ ID NO: 717064
uaucuucuuauuuaugugc

SEQ ID NO: 717066 - RNA, 19 nt, Artificial Sequence
  Description of Artificial Sequence: Synthetic oligonucleotide
  Sense strand starting at position 2957 of SEQ ID NO: 586426
aagggaggaucagauuaau

SEQ ID NO: 717067 - RNA, 19 nt, Artificial Sequence
  Description of Artificial Sequence: Synthetic oligonucleotide
  Antisense strand to SEQ ID NO: 717066
auuaaucugauccucccuu

SEQ ID NO: 717068 - RNA, 19 nt, Artificial Sequence
  Description of Artificial Sequence: Synthetic oligonucleotide
  Sense strand starting at position 3086 of SEQ ID NO: 586426
gaagguaauguuugaguug

SEQ ID NO: 717069 - RNA, 19 nt, Artificial Sequence
  Description of Artificial Sequence: Synthetic oligonucleotide
  Antisense strand to SEQ ID NO: 717068
caacucaaacauuaccuuc

SEQ ID NO: 717070 - RNA, 19 nt, Artificial Sequence
  Description of Artificial Sequence: Synthetic oligonucleotide
  Sense strand starting at position 3089 of SEQ ID NO: 586426
gguaauguuugaguuggau

SEQ ID NO: 717071 - RNA, 19 nt, Artificial Sequence
  Description of Artificial Sequence: Synthetic oligonucleotide
  Antisense strand to SEQ ID NO: 717070
auccaacucaaacauuacc

SEQ ID NO: 717072 - RNA, 19 nt, Artificial Sequence
  Description of Artificial Sequence: Synthetic oligonucleotide
  Sense strand starting at position 3092 of SEQ ID NO: 586426
aauguuugaguuggaucuu

SEQ ID NO: 717073 - RNA, 19 nt, Artificial Sequence
  Description of Artificial Sequence: Synthetic oligonucleotide
  Antisense strand to SEQ ID NO: 717072
aagauccaacucaaacauu

SEQ ID NO: 717074 - RNA, 19 nt, Artificial Sequence
  Description of Artificial Sequence: Synthetic oligonucleotide
  Sense strand starting at position 3214 of SEQ ID NO: 586426
uguggaauguugagaaggu

SEQ ID NO: 717075 - RNA, 19 nt, Artificial Sequence
  Description of Artificial Sequence: Synthetic oligonucleotide
  Antisense strand to SEQ ID NO: 717074
accuucucaacauuccaca

SEQ ID NO: 717076 - RNA, 19 nt, Artificial Sequence
  Description of Artificial Sequence: Synthetic oligonucleotide
  Sense strand starting at position 3218 of SEQ ID NO: 586426
gaauguugagaagguagau

SEQ ID NO: 717077 - RNA, 19 nt, Artificial Sequence
  Description of Artificial Sequence: Synthetic oligonucleotide
  Antisense strand to SEQ ID NO: 717076
aucuaccuucucaacauuc

SEQ ID NO: 717078 - RNA, 19 nt, Artificial Sequence
  Description of Artificial Sequence: Synthetic oligonucleotide
  Sense strand starting at position 3350 of SEQ ID NO: 586426
agcuuucugcacuggugaa

SEQ ID NO: 717079 - RNA, 19 nt, Artificial Sequence
  Description of Artificial Sequence: Synthetic oligonucleotide
  Antisense strand to SEQ ID NO: 717078
uucaccagugcagaaagcu

SEQ ID NO: 717080 - RNA, 19 nt, Artificial Sequence
  Description of Artificial Sequence: Synthetic oligonucleotide
  Sense strand starting at position 3934 of SEQ ID NO: 586426
ucccauauuggauagcuca

SEQ ID NO: 717081 - RNA, 19 nt, Artificial Sequence
  Description of Artificial Sequence: Synthetic oligonucleotide
  Antisense strand to SEQ ID NO: 717080
ugagcuauccaauauggga

SEQ ID NO: 717082 - RNA, 19 nt, Artificial Sequence
  Description of Artificial Sequence: Synthetic oligonucleotide
  Sense strand starting at position 226 of SEQ ID NO: 586427
gagagucuugcggaagaac

SEQ ID NO: 717083 - RNA, 19 nt, Artificial Sequence
  Description of Artificial Sequence: Synthetic oligonucleotide
  Antisense strand to SEQ ID NO: 717082
guucuuccgcaagacucuc

SEQ ID NO: 717084 - RNA, 19 nt, Artificial Sequence
  Description of Artificial Sequence: Synthetic oligonucleotide
  Sense strand starting at position 237 of SEQ ID NO: 586427
ggaagaacugcuugggucu

SEQ ID NO: 717085 - RNA, 19 nt, Artificial Sequence
  Description of Artificial Sequence: Synthetic oligonucleotide
  Antisense strand to SEQ ID NO: 717084
agacccaagcaguucuucc

SEQ ID NO: 717086 - RNA, 19 nt, Artificial Sequence
  Description of Artificial Sequence: Synthetic oligonucleotide
  Sense strand starting at position 238 of SEQ ID NO: 586427
gaagaacugcuugggucuu

SEQ ID NO: 717087 - RNA, 19 nt, Artificial Sequence
  Description of Artificial Sequence: Synthetic oligonucleotide
  Antisense strand to SEQ ID NO: 717086
aagacccaagcaguucuuc

SEQ ID NO: 717088 - RNA, 19 nt, Artificial Sequence
  Description of Artificial Sequence: Synthetic oligonucleotide
  Sense strand starting at position 314 of SEQ ID NO: 586427
cuuuauacucaugagguuu

SEQ ID NO: 717089 - RNA, 19 nt, Artificial Sequence
  Description of Artificial Sequence: Synthetic oligonucleotide
  Antisense strand to SEQ ID NO: 717088
aaaccucaugaguauaaag

SEQ ID NO: 717090 - RNA, 19 nt, Artificial Sequence
  Description of Artificial Sequence: Synthetic oligonucleotide
  Sense strand starting at position 634 of SEQ ID NO: 586427
ggagguggccuuugugaga

SEQ ID NO: 717091 - RNA, 19 nt, Artificial Sequence
  Description of Artificial Sequence: Synthetic oligonucleotide
  Antisense strand to SEQ ID NO: 717090
ucucacaaaggccaccucc

SEQ ID NO: 717092 - RNA, 19 nt, Artificial Sequence
  Description of Artificial Sequence: Synthetic oligonucleotide
  Sense strand starting at position 743 of SEQ ID NO: 586427
ggaaauaaaccgggucuca

SEQ ID NO: 717093 - RNA, 19 nt, Artificial Sequence
  Description of Artificial Sequence: Synthetic oligonucleotide
  Antisense strand to SEQ ID NO: 717092
ugagacccgguuuauuucc

SEQ ID NO: 717094 - RNA, 19 nt, Artificial Sequence
  Description of Artificial Sequence: Synthetic oligonucleotide
  Sense strand starting at position 752 of SEQ ID NO: 586427
ccgggucucagggaaauca

SEQ ID NO: 717095 - RNA, 19 nt, Artificial Sequence
  Description of Artificial Sequence: Synthetic oligonucleotide
  Antisense strand to SEQ ID NO: 717094
ugauuucccugagacccgg

SEQ ID NO: 717096 - RNA, 19 nt, Artificial Sequence
  Description of Artificial Sequence: Synthetic oligonucleotide
  Sense strand starting at position 772 of SEQ ID NO: 586427
gcuucuggagagugaguuu

SEQ ID NO: 717097 - RNA, 19 nt, Artificial Sequence
  Description of Artificial Sequence: Synthetic oligonucleotide
  Antisense strand to SEQ ID NO: 717096
aaacucacucuccagaagc

SEQ ID NO: 717098 - RNA, 19 nt, Artificial Sequence
  Description of Artificial Sequence: Synthetic oligonucleotide
  Sense strand starting at position 779 of SEQ ID NO: 586427
gagagugaguuuguuugua

SEQ ID NO: 717099 - RNA, 19 nt, Artificial Sequence
  Description of Artificial Sequence: Synthetic oligonucleotide
  Antisense strand to SEQ ID NO: 717098
uacaaacaaacucacucuc

SEQ ID NO: 717100 - RNA, 19 nt, Artificial Sequence
  Description of Artificial Sequence: Synthetic oligonucleotide
  Sense strand starting at position 837 of SEQ ID NO: 586427
gagguguaggcgggagaaa

SEQ ID NO: 717101 - RNA, 19 nt, Artificial Sequence
  Description of Artificial Sequence: Synthetic oligonucleotide
  Antisense strand to SEQ ID NO: 717100
uuucucccgccuacaccuc

SEQ ID NO: 717102 - RNA, 19 nt, Artificial Sequence
  Description of Artificial Sequence: Synthetic oligonucleotide
  Sense strand starting at position 838 of SEQ ID NO: 586427
agguguaggcgggagaaau

SEQ ID NO: 717103 - RNA, 19 nt, Artificial Sequence
  Description of Artificial Sequence: Synthetic oligonucleotide
  Antisense strand to SEQ ID NO: 717102
auuucucccgccuacaccu

SEQ ID NO: 717104 - RNA, 19 nt, Artificial Sequence
  Description of Artificial Sequence: Synthetic oligonucleotide
  Sense strand starting at position 1017 of SEQ ID NO: 586427
ccgcgucaaagguaaauaa

SEQ ID NO: 717105 - RNA, 19 nt, Artificial Sequence
  Description of Artificial Sequence: Synthetic oligonucleotide
  Antisense strand to SEQ ID NO: 717104
uuauuuaccuuugacgcgg

SEQ ID NO: 717106 - RNA, 19 nt, Artificial Sequence
  Description of Artificial Sequence: Synthetic oligonucleotide
  Sense strand starting at position 2221 of SEQ ID NO: 586427
gggcucucuccuggagaac

SEQ ID NO: 717107 - RNA, 19 nt, Artificial Sequence
  Description of Artificial Sequence: Synthetic oligonucleotide
  Antisense strand to SEQ ID NO: 717106
guucuccaggagagagccc

SEQ ID NO: 717108 - RNA, 19 nt, Artificial Sequence
  Description of Artificial Sequence: Synthetic oligonucleotide
  Sense strand starting at position 2286 of SEQ ID NO: 586427
cgagguucugguugaugga

SEQ ID NO: 717109 - RNA, 19 nt, Artificial Sequence
  Description of Artificial Sequence: Synthetic oligonucleotide
  Antisense strand to SEQ ID NO: 717108
uccaucaaccagaaccucg

SEQ ID NO: 717110 - RNA, 19 nt, Artificial Sequence
  Description of Artificial Sequence: Synthetic oligonucleotide
  Sense strand starting at position 2287 of SEQ ID NO: 586427
gagguucugguugauggau

SEQ ID NO: 717111 - RNA, 19 nt, Artificial Sequence
  Description of Artificial Sequence: Synthetic oligonucleotide
  Antisense strand to SEQ ID NO: 717110
auccaucaaccagaaccuc

SEQ ID NO: 717112 - RNA, 19 nt, Artificial Sequence
  Description of Artificial Sequence: Synthetic oligonucleotide
  Sense strand starting at position 2472 of SEQ ID NO: 586427
guuguuucgagugcgcuau

SEQ ID NO: 717113 - RNA, 19 nt, Artificial Sequence
  Description of Artificial Sequence: Synthetic oligonucleotide
  Antisense strand to SEQ ID NO: 717112
auagcgcacucgaaacaac

SEQ ID NO: 717114 - RNA, 19 nt, Artificial Sequence
  Description of Artificial Sequence: Synthetic oligonucleotide
  Sense strand starting at position 2524 of SEQ ID NO: 586427
aagugaaucguguagucca

SEQ ID NO: 717115 - RNA, 19 nt, Artificial Sequence
  Description of Artificial Sequence: Synthetic oligonucleotide
  Antisense strand to SEQ ID NO: 717114
uggacuacacgauucacuu

SEQ ID NO: 717116 - RNA, 19 nt, Artificial Sequence
  Description of Artificial Sequence: Synthetic oligonucleotide
  Sense strand starting at position 2690 of SEQ ID NO: 586427
agacaucgucuugaaucca

SEQ ID NO: 717117 - RNA, 19 nt, Artificial Sequence
  Description of Artificial Sequence: Synthetic oligonucleotide
  Antisense strand to SEQ ID NO: 717116
uggauucaagacgaugucu

SEQ ID NO: 717118 - RNA, 19 nt, Artificial Sequence
  Description of Artificial Sequence: Synthetic oligonucleotide
  Sense strand starting at position 2726 of SEQ ID NO: 586427
cgugaucuucucggacaaa

SEQ ID NO: 717119 - RNA, 19 nt, Artificial Sequence
  Description of Artificial Sequence: Synthetic oligonucleotide
  Antisense strand to SEQ ID NO: 717118
uuuguccgagaagaucacg

SEQ ID NO: 717120 - RNA, 19 nt, Artificial Sequence
  Description of Artificial Sequence: Synthetic oligonucleotide
  Sense strand starting at position 2852 of SEQ ID NO: 586427
cuaaguugcaaggguuaaa

SEQ ID NO: 717121 - RNA, 19 nt, Artificial Sequence
  Description of Artificial Sequence: Synthetic oligonucleotide
  Antisense strand to SEQ ID NO: 717120
uuuaacccuugcaacuuag

SEQ ID NO: 717122 - RNA, 19 nt, Artificial Sequence
  Description of Artificial Sequence: Synthetic oligonucleotide
  Sense strand starting at position 2866 of SEQ ID NO: 586427
uuaaaugagcacugugguu

SEQ ID NO: 717123 - RNA, 19 nt, Artificial Sequence
  Description of Artificial Sequence: Synthetic oligonucleotide
  Antisense strand to SEQ ID NO: 717122
aaccacagugcucauuuaa

SEQ ID NO: 717124 - RNA, 19 nt, Artificial Sequence
  Description of Artificial Sequence: Synthetic oligonucleotide
  Sense strand starting at position 2879 of SEQ ID NO: 586427
gugguuacagcagguaaga

SEQ ID NO: 717125 - RNA, 19 nt, Artificial Sequence
  Description of Artificial Sequence: Synthetic oligonucleotide
  Antisense strand to SEQ ID NO: 717124
ucuuaccugcuguaaccac

SEQ ID NO: 717126 - RNA, 19 nt, Artificial Sequence
  Description of Artificial Sequence: Synthetic oligonucleotide
  Sense strand starting at position 3112 of SEQ ID NO: 586427
cagggaggcuaagucuuau

SEQ ID NO: 717127 - RNA, 19 nt, Artificial Sequence
  Description of Artificial Sequence: Synthetic oligonucleotide
  Antisense strand to SEQ ID NO: 717126
auaagacuuagccucccug

SEQ ID NO: 717128 - RNA, 19 nt, Artificial Sequence
  Description of Artificial Sequence: Synthetic oligonucleotide
  Sense strand starting at position 3122 of SEQ ID NO: 586427
aagucuuauggaugcaacu

SEQ ID NO: 717129 - RNA, 19 nt, Artificial Sequence
  Description of Artificial Sequence: Synthetic oligonucleotide
  Antisense strand to SEQ ID NO: 717128
aguugcauccauaagacuu

SEQ ID NO: 717130 - RNA, 19 nt, Artificial Sequence
  Description of Artificial Sequence: Synthetic oligonucleotide
  Sense strand starting at position 3131 of SEQ ID NO: 586427
ggaugcaacuuucuaaccu

SEQ ID NO: 717131 - RNA, 19 nt, Artificial Sequence
  Description of Artificial Sequence: Synthetic oligonucleotide
  Antisense strand to SEQ ID NO: 717130
agguuagaaaguugcaucc

SEQ ID NO: 717132 - RNA, 19 nt, Artificial Sequence
  Description of Artificial Sequence: Synthetic oligonucleotide
  Sense strand starting at position 3185 of SEQ ID NO: 586427
ggcagaugaagaugugcaa

SEQ ID NO: 717133 - RNA, 19 nt, Artificial Sequence
  Description of Artificial Sequence: Synthetic oligonucleotide
  Antisense strand to SEQ ID NO: 717132
uugcacaucuucaucugcc

SEQ ID NO: 717134 - RNA, 19 nt, Artificial Sequence
  Description of Artificial Sequence: Synthetic oligonucleotide
  Sense strand starting at position 3269 of SEQ ID NO: 586427
cgguguaugugcaugaaga

SEQ ID NO: 717135 - RNA, 19 nt, Artificial Sequence
  Description of Artificial Sequence: Synthetic oligonucleotide
  Antisense strand to SEQ ID NO: 717134
ucuucaugcacauacaccg

SEQ ID NO: 717136 - RNA, 19 nt, Artificial Sequence
  Description of Artificial Sequence: Synthetic oligonucleotide
  Sense strand starting at position 3270 of SEQ ID NO: 586427
gguguaugugcaugaagaa

SEQ ID NO: 717137 - RNA, 19 nt, Artificial Sequence
  Description of Artificial Sequence: Synthetic oligonucleotide
  Antisense strand to SEQ ID NO: 717136
uucuucaugcacauacacc

SEQ ID NO: 717138 - RNA, 19 nt, Artificial Sequence
  Description of Artificial Sequence: Synthetic oligonucleotide
  Sense strand starting at position 3271 of SEQ ID NO: 586427
guguaugugcaugaagaaa

SEQ ID NO: 717139 - RNA, 19 nt, Artificial Sequence
  Description of Artificial Sequence: Synthetic oligonucleotide
  Antisense strand to SEQ ID NO: 717138
uuucuucaugcacauacac

SEQ ID NO: 717140 - RNA, 19 nt, Artificial Sequence
  Description of Artificial Sequence: Synthetic oligonucleotide
  Sense strand starting at position 3315 of SEQ ID NO: 586427
cgcgggaaggaaugagaua

SEQ ID NO: 717141 - RNA, 19 nt, Artificial Sequence
  Description of Artificial Sequence: Synthetic oligonucleotide
  Antisense strand to SEQ ID NO: 717140
uaucucauuccuucccgcg

SEQ ID NO: 717142 - RNA, 19 nt, Artificial Sequence
  Description of Artificial Sequence: Synthetic oligonucleotide
  Sense strand starting at position 3596 of SEQ ID NO: 586427
ccuauuguuugagcagaga

SEQ ID NO: 717143 - RNA, 19 nt, Artificial Sequence
  Description of Artificial Sequence: Synthetic oligonucleotide
  Antisense strand to SEQ ID NO: 717142
ucucugcucaaacaauagg

SEQ ID NO: 717144 - RNA, 19 nt, Artificial Sequence
  Description of Artificial Sequence: Synthetic oligonucleotide
  Sense strand starting at position 3661 of SEQ ID NO: 586427
gccauuaugcucuugccuu

SEQ ID NO: 717145 - RNA, 19 nt, Artificial Sequence
  Description of Artificial Sequence: Synthetic oligonucleotide
  Antisense strand to SEQ ID NO: 717144
aaggcaagagcauaauggc

SEQ ID NO: 717146 - RNA, 19 nt, Artificial Sequence
  Description of Artificial Sequence: Synthetic oligonucleotide
  Sense strand starting at position 3703 of SEQ ID NO: 586427
uauggcucucccugaguaa

SEQ ID NO: 717147 - RNA, 19 nt, Artificial Sequence
  Description of Artificial Sequence: Synthetic oligonucleotide
  Antisense strand to SEQ ID NO: 717146
uuacucagggagagccaua

SEQ ID NO: 717148 - RNA, 19 nt, Artificial Sequence
  Description of Artificial Sequence: Synthetic oligonucleotide
  Sense strand starting at position 3704 of SEQ ID NO: 586427
auggcucucccugaguaau

SEQ ID NO: 717149 - RNA, 19 nt, Artificial Sequence
  Description of Artificial Sequence: Synthetic oligonucleotide
  Antisense strand to SEQ ID NO: 717148
auuacucagggagagccau

SEQ ID NO: 717150 - RNA, 19 nt, Artificial Sequence
  Description of Artificial Sequence: Synthetic oligonucleotide
  Sense strand starting at position 3706 of SEQ ID NO: 586427
ggcucucccugaguaauac

SEQ ID NO: 717151 - RNA, 19 nt, Artificial Sequence
  Description of Artificial Sequence: Synthetic oligonucleotide
  Antisense strand to SEQ ID NO: 717150
guauuacucagggagagcc

SEQ ID NO: 717152 - RNA, 19 nt, Artificial Sequence
  Description of Artificial Sequence: Synthetic oligonucleotide
  Sense strand starting at position 3707 of SEQ ID NO: 586427
gcucucccugaguaauaca

SEQ ID NO: 717153 - RNA, 19 nt, Artificial Sequence
  Description of Artificial Sequence: Synthetic oligonucleotide
  Antisense strand to SEQ ID NO: 717152
uguauuacucagggagagc

SEQ ID NO: 717154 - RNA, 19 nt, Artificial Sequence
  Description of Artificial Sequence: Synthetic oligonucleotide
  Sense strand starting at position 3832 of SEQ ID NO: 586427
gauuuaacaugagggauuc

SEQ ID NO: 717155 - RNA, 19 nt, Artificial Sequence
  Description of Artificial Sequence: Synthetic oligonucleotide
  Antisense strand to SEQ ID NO: 717154
gaaucccucauguuaaauc

SEQ ID NO: 717156 - RNA, 19 nt, Artificial Sequence
  Description of Artificial Sequence: Synthetic oligonucleotide
  Sense strand starting at position 3875 of SEQ ID NO: 586427
cuugcauucugucuugaag

SEQ ID NO: 717157 - RNA, 19 nt, Artificial Sequence
  Description of Artificial Sequence: Synthetic oligonucleotide
  Antisense strand to SEQ ID NO: 717156
cuucaagacagaaugcaag

SEQ ID NO: 717158 - RNA, 19 nt, Artificial Sequence
  Description of Artificial Sequence: Synthetic oligonucleotide
  Sense strand starting at position 3878 of SEQ ID NO: 586427
gcauucugucuugaaggua

SEQ ID NO: 717159 - RNA, 19 nt, Artificial Sequence
  Description of Artificial Sequence: Synthetic oligonucleotide
  Antisense strand to SEQ ID NO: 717158
uaccuucaagacagaaugc

SEQ ID NO: 717160 - RNA, 19 nt, Artificial Sequence
  Description of Artificial Sequence: Synthetic oligonucleotide
  Sense strand starting at position 3974 of SEQ ID NO: 586427
cccuauaggucuucuuaua

SEQ ID NO: 717161 - RNA, 19 nt, Artificial Sequence
  Description of Artificial Sequence: Synthetic oligonucleotide
  Antisense strand to SEQ ID NO: 717160
uauaagaagaccuauaggg

SEQ ID NO: 717162 - RNA, 19 nt, Artificial Sequence
  Description of Artificial Sequence: Synthetic oligonucleotide
  Sense strand starting at position 218 of SEQ ID NO: 586428
uaguaaugcugagcccaaa

SEQ ID NO: 717163 - RNA, 19 nt, Artificial Sequence
  Description of Artificial Sequence: Synthetic oligonucleotide
  Antisense strand to SEQ ID NO: 717162
uuugggcucagcauuacua

SEQ ID NO: 717164 - RNA, 19 nt, Artificial Sequence
  Description of Artificial Sequence: Synthetic oligonucleotide
  Sense strand starting at position 278 of SEQ ID NO: 586428
agugauguauggccuuauu

SEQ ID NO: 717165 - RNA, 19 nt, Artificial Sequence
  Description of Artificial Sequence: Synthetic oligonucleotide
  Antisense strand to SEQ ID NO: 717164
aauaaggccauacaucacu

SEQ ID NO: 717166 - RNA, 19 nt, Artificial Sequence
  Description of Artificial Sequence: Synthetic oligonucleotide
  Sense strand starting at position 343 of SEQ ID NO: 586428
accaauuauuccguccuga

SEQ ID NO: 717167 - RNA, 19 nt, Artificial Sequence
  Description of Artificial Sequence: Synthetic oligonucleotide
  Antisense strand to SEQ ID NO: 717166
ucaggacggaauaauuggu

SEQ ID NO: 717168 - RNA, 19 nt, Artificial Sequence
  Description of Artificial Sequence: Synthetic oligonucleotide
  Sense strand starting at position 370 of SEQ ID NO: 586428
ggaggguuucuguauggga

SEQ ID NO: 717169 - RNA, 19 nt, Artificial Sequence
  Description of Artificial Sequence: Synthetic oligonucleotide
  Antisense strand to SEQ ID NO: 717168
ucccauacagaaacccucc

SEQ ID NO: 717170 - RNA, 19 nt, Artificial Sequence
  Description of Artificial Sequence: Synthetic oligonucleotide
  Sense strand starting at position 428 of SEQ ID NO: 586428
agagcugcucuaugaggaa

SEQ ID NO: 717171 - RNA, 19 nt, Artificial Sequence
  Description of Artificial Sequence: Synthetic oligonucleotide
  Antisense strand to SEQ ID NO: 717170
uuccucauagagcagcucu

SEQ ID NO: 717172 - RNA, 19 nt, Artificial Sequence
  Description of Artificial Sequence: Synthetic oligonucleotide
  Sense strand starting at position 496 of SEQ ID NO: 586428
uuccuaagaguccaugagu

SEQ ID NO: 717173 - RNA, 19 nt, Artificial Sequence
  Description of Artificial Sequence: Synthetic oligonucleotide
  Antisense strand to SEQ ID NO: 717172
acucauggacucuuaggaa

SEQ ID NO: 717174 - RNA, 19 nt, Artificial Sequence
  Description of Artificial Sequence: Synthetic oligonucleotide
  Sense strand starting at position 504 of SEQ ID NO: 586428
aguccaugagucugacuga

SEQ ID NO: 717175 - RNA, 19 nt, Artificial Sequence
  Description of Artificial Sequence: Synthetic oligonucleotide
  Antisense strand to SEQ ID NO: 717174
ucagucagacucauggacu

SEQ ID NO: 717176 - RNA, 19 nt, Artificial Sequence
  Description of Artificial Sequence: Synthetic oligonucleotide
  Sense strand starting at position 572 of SEQ ID NO: 586428
uuggguguguccucccaaa

SEQ ID NO: 717177 - RNA, 19 nt, Artificial Sequence
  Description of Artificial Sequence: Synthetic oligonucleotide
  Antisense strand to SEQ ID NO: 717176
uuugggaggacacacccaa

SEQ ID NO: 717178 - RNA, 19 nt, Artificial Sequence
  Description of Artificial Sequence: Synthetic oligonucleotide
  Sense strand starting at position 893 of SEQ ID NO: 586428
gagagucuugcggaagaac

SEQ ID NO: 717179 - RNA, 19 nt, Artificial Sequence
  Description of Artificial Sequence: Synthetic oligonucleotide
  Antisense strand to SEQ ID NO: 717178
guucuuccgcaagacucuc

SEQ ID NO: 717180 - RNA, 19 nt, Artificial Sequence
  Description of Artificial Sequence: Synthetic oligonucleotide
  Sense strand starting at position 904 of SEQ ID NO: 586428
ggaagaacugcuugggucu

SEQ ID NO: 717181 - RNA, 19 nt, Artificial Sequence
  Description of Artificial Sequence: Synthetic oligonucleotide
  Antisense strand to SEQ ID NO: 717180
agacccaagcaguucuucc

SEQ ID NO: 717182 - RNA, 19 nt, Artificial Sequence
  Description of Artificial Sequence: Synthetic oligonucleotide
  Sense strand starting at position 905 of SEQ ID NO: 586428
gaagaacugcuugggucuu

SEQ ID NO: 717183 - RNA, 19 nt, Artificial Sequence
  Description of Artificial Sequence: Synthetic oligonucleotide
  Antisense strand to SEQ ID NO: 717182
aagacccaagcaguucuuc

SEQ ID NO: 717184 - RNA, 19 nt, Artificial Sequence
  Description of Artificial Sequence: Synthetic oligonucleotide
  Sense strand starting at position 981 of SEQ ID NO: 586428
cuuuauacucaugagguuu

SEQ ID NO: 717185 - RNA, 19 nt, Artificial Sequence
  Description of Artificial Sequence: Synthetic oligonucleotide
  Antisense strand to SEQ ID NO: 717184
aaaccucaugaguauaaag

SEQ ID NO: 717186 - RNA, 19 nt, Artificial Sequence
  Description of Artificial Sequence: Synthetic oligonucleotide
  Sense strand starting at position 1301 of SEQ ID NO: 586428
ggagguggccuuugugaga

SEQ ID NO: 717187 - RNA, 19 nt, Artificial Sequence
  Description of Artificial Sequence: Synthetic oligonucleotide
  Antisense strand to SEQ ID NO: 717186
ucucacaaaggccaccucc

SEQ ID NO: 717188 - RNA, 19 nt, Artificial Sequence
  Description of Artificial Sequence: Synthetic oligonucleotide
  Sense strand starting at position 1410 of SEQ ID NO: 586428
ggaaauaaaccgggucuca

SEQ ID NO: 717189 - RNA, 19 nt, Artificial Sequence
  Description of Artificial Sequence: Synthetic oligonucleotide
  Antisense strand to SEQ ID NO: 717188
ugagacccgguuuauuucc

SEQ ID NO: 717190 - RNA, 19 nt, Artificial Sequence
  Description of Artificial Sequence: Synthetic oligonucleotide
  Sense strand starting at position 1419 of SEQ ID NO: 586428
ccgggucucagggaaauca

SEQ ID NO: 717191 - RNA, 19 nt, Artificial Sequence
  Description of Artificial Sequence: Synthetic oligonucleotide
  Antisense strand to SEQ ID NO: 717190
ugauuucccugagacccgg

SEQ ID NO: 717192 - RNA, 19 nt, Artificial Sequence
  Description of Artificial Sequence: Synthetic oligonucleotide
  Sense strand starting at position 1439 of SEQ ID NO: 586428
gcuucuggagagugaguuu

SEQ ID NO: 717193 - RNA, 19 nt, Artificial Sequence
  Description of Artificial Sequence: Synthetic oligonucleotide
  Antisense strand to SEQ ID NO: 717192
aaacucacucuccagaagc

SEQ ID NO: 717194 - RNA, 19 nt, Artificial Sequence
  Description of Artificial Sequence: Synthetic oligonucleotide
  Sense strand starting at position 1446 of SEQ ID NO: 586428
gagagugaguuuguuugua

SEQ ID NO: 717195 - RNA, 19 nt, Artificial Sequence
  Description of Artificial Sequence: Synthetic oligonucleotide
  Antisense strand to SEQ ID NO: 717194
uacaaacaaacucacucuc

SEQ ID NO: 717196 - RNA, 19 nt, Artificial Sequence
  Description of Artificial Sequence: Synthetic oligonucleotide
  Sense strand starting at position 1448 of SEQ ID NO: 586428
gagugaguuuguuuguaau

SEQ ID NO: 717197 - RNA, 19 nt, Artificial Sequence
  Description of Artificial Sequence: Synthetic oligonucleotide
  Antisense strand to SEQ ID NO: 717196
auuacaaacaaacucacuc

SEQ ID NO: 717198 - RNA, 19 nt, Artificial Sequence
  Description of Artificial Sequence: Synthetic oligonucleotide
  Sense strand starting at position 1504 of SEQ ID NO: 586428
gagguguaggcgggagaaa

SEQ ID NO: 717199 - RNA, 19 nt, Artificial Sequence
  Description of Artificial Sequence: Synthetic oligonucleotide
  Antisense strand to SEQ ID NO: 717198
uuucucccgccuacaccuc

SEQ ID NO: 717200 - RNA, 19 nt, Artificial Sequence
  Description of Artificial Sequence: Synthetic oligonucleotide
  Sense strand starting at position 1505 of SEQ ID NO: 586428
agguguaggcgggagaaau

SEQ ID NO: 717201 - RNA, 19 nt, Artificial Sequence
  Description of Artificial Sequence: Synthetic oligonucleotide
  Antisense strand to SEQ ID NO: 717200
auuucucccgccuacaccu

SEQ ID NO: 717202 - RNA, 19 nt, Artificial Sequence
  Description of Artificial Sequence: Synthetic oligonucleotide
  Sense strand starting at position 1684 of SEQ ID NO: 586428
ccgcgucaaagguaaauaa

SEQ ID NO: 717203 - RNA, 19 nt, Artificial Sequence
  Description of Artificial Sequence: Synthetic oligonucleotide
  Antisense strand to SEQ ID NO: 717202
uuauuuaccuuugacgcgg

SEQ ID NO: 717204 - RNA, 19 nt, Artificial Sequence
  Description of Artificial Sequence: Synthetic oligonucleotide
  Sense strand starting at position 2888 of SEQ ID NO: 586428
gggcucucuccuggagaac

SEQ ID NO: 717205 - RNA, 19 nt, Artificial Sequence
  Description of Artificial Sequence: Synthetic oligonucleotide
  Antisense strand to SEQ ID NO: 717204
guucuccaggagagagccc

SEQ ID NO: 717206 - RNA, 19 nt, Artificial Sequence
  Description of Artificial Sequence: Synthetic oligonucleotide
  Sense strand starting at position 2953 of SEQ ID NO: 586428
cgagguucugguugaugga

SEQ ID NO: 717207 - RNA, 19 nt, Artificial Sequence
  Description of Artificial Sequence: Synthetic oligonucleotide
  Antisense strand to SEQ ID NO: 717206
uccaucaaccagaaccucg

SEQ ID NO: 717208 - RNA, 19 nt, Artificial Sequence
  Description of Artificial Sequence: Synthetic oligonucleotide
  Sense strand starting at position 2954 of SEQ ID NO: 586428
gagguucugguugauggau

SEQ ID NO: 717209 - RNA, 19 nt, Artificial Sequence
  Description of Artificial Sequence: Synthetic oligonucleotide
  Antisense strand to SEQ ID NO: 717208
auccaucaaccagaaccuc

SEQ ID NO: 717210 - RNA, 19 nt, Artificial Sequence
  Description of Artificial Sequence: Synthetic oligonucleotide
  Sense strand starting at position 3139 of SEQ ID NO: 586428
guuguuucgagugcgcuau

SEQ ID NO: 717211 - RNA, 19 nt, Artificial Sequence
  Description of Artificial Sequence: Synthetic oligonucleotide
  Antisense strand to SEQ ID NO: 717210
auagcgcacucgaaacaac

SEQ ID NO: 717212 - RNA, 19 nt, Artificial Sequence
  Description of Artificial Sequence: Synthetic oligonucleotide
  Sense strand starting at position 3176 of SEQ ID NO: 586428
aggugaagucuuugcaagu

SEQ ID NO: 717213 - RNA, 19 nt, Artificial Sequence
  Description of Artificial Sequence: Synthetic oligonucleotide
  Antisense strand to SEQ ID NO: 717212
acuugcaaagacuucaccu

SEQ ID NO: 717214 - RNA, 19 nt, Artificial Sequence
  Description of Artificial Sequence: Synthetic oligonucleotide
  Sense strand starting at position 3191 of SEQ ID NO: 586428
aagugaaucguguagucca

SEQ ID NO: 717215 - RNA, 19 nt, Artificial Sequence
  Description of Artificial Sequence: Synthetic oligonucleotide
  Antisense strand to SEQ ID NO: 717214
uggacuacacgauucacuu

SEQ ID NO: 717216 - RNA, 19 nt, Artificial Sequence
  Description of Artificial Sequence: Synthetic oligonucleotide
  Sense strand starting at position 3357 of SEQ ID NO: 586428
agacaucgucuugaaucca

SEQ ID NO: 717217 - RNA, 19 nt, Artificial Sequence
  Description of Artificial Sequence: Synthetic oligonucleotide
  Antisense strand to SEQ ID NO: 717216
uggauucaagacgaugucu

SEQ ID NO: 717218 - RNA, 19 nt, Artificial Sequence
  Description of Artificial Sequence: Synthetic oligonucleotide
  Sense strand starting at position 3393 of SEQ ID NO: 586428
cgugaucuucucggacaaa

SEQ ID NO: 717219 - RNA, 19 nt, Artificial Sequence
  Description of Artificial Sequence: Synthetic oligonucleotide
  Antisense strand to SEQ ID NO: 717218
uuuguccgagaagaucacg

SEQ ID NO: 717220 - RNA, 19 nt, Artificial Sequence
  Description of Artificial Sequence: Synthetic oligonucleotide
  Sense strand starting at position 3519 of SEQ ID NO: 586428
cuaaguugcaaggguuaaa

SEQ ID NO: 717221 - RNA, 19 nt, Artificial Sequence
  Description of Artificial Sequence: Synthetic oligonucleotide
  Antisense strand to SEQ ID NO: 717220
uuuaacccuugcaacuuag

SEQ ID NO: 717222 - RNA, 19 nt, Artificial Sequence
  Description of Artificial Sequence: Synthetic oligonucleotide
  Sense strand starting at position 3533 of SEQ ID NO: 586428
uuaaaugagcacugugguu

SEQ ID NO: 717223 - RNA, 19 nt, Artificial Sequence
  Description of Artificial Sequence: Synthetic oligonucleotide
  Antisense strand to SEQ ID NO: 717222
aaccacagugcucauuuaa

SEQ ID NO: 717224 - RNA, 19 nt, Artificial Sequence
  Description of Artificial Sequence: Synthetic oligonucleotide
  Sense strand starting at position 3546 of SEQ ID NO: 586428
gugguuacagcagguaaga

SEQ ID NO: 717225 - RNA, 19 nt, Artificial Sequence
  Description of Artificial Sequence: Synthetic oligonucleotide
  Antisense strand to SEQ ID NO: 717224
ucuuaccugcuguaaccac

SEQ ID NO: 717226 - RNA, 19 nt, Artificial Sequence
  Description of Artificial Sequence: Synthetic oligonucleotide
  Sense strand starting at position 3779 of SEQ ID NO: 586428
cagggaggcuaagucuuau

SEQ ID NO: 717227 - RNA, 19 nt, Artificial Sequence
  Description of Artificial Sequence: Synthetic oligonucleotide
  Antisense strand to SEQ ID NO: 717226
auaagacuuagccucccug

SEQ ID NO: 717228 - RNA, 19 nt, Artificial Sequence
  Description of Artificial Sequence: Synthetic oligonucleotide
  Sense strand starting at position 3789 of SEQ ID NO: 586428
aagucuuauggaugcaacu

SEQ ID NO: 717229 - RNA, 19 nt, Artificial Sequence
  Description of Artificial Sequence: Synthetic oligonucleotide
  Antisense strand to SEQ ID NO: 717228
aguugcauccauaagacuu

SEQ ID NO: 717230 - RNA, 19 nt, Artificial Sequence
  Description of Artificial Sequence: Synthetic oligonucleotide
  Sense strand starting at position 3798 of SEQ ID NO: 586428
ggaugcaacuuucuaaccu

SEQ ID NO: 717231 - RNA, 19 nt, Artificial Sequence
  Description of Artificial Sequence: Synthetic oligonucleotide
  Antisense strand to SEQ ID NO: 717230
agguuagaaaguugcaucc

SEQ ID NO: 717232 - RNA, 19 nt, Artificial Sequence
  Description of Artificial Sequence: Synthetic oligonucleotide
  Sense strand starting at position 3852 of SEQ ID NO: 586428
ggcagaugaagaugugcaa

SEQ ID NO: 717233 - RNA, 19 nt, Artificial Sequence
  Description of Artificial Sequence: Synthetic oligonucleotide
  Antisense strand to SEQ ID NO: 717232
uugcacaucuucaucugcc

SEQ ID NO: 717234 - RNA, 19 nt, Artificial Sequence
  Description of Artificial Sequence: Synthetic oligonucleotide
  Sense strand starting at position 3936 of SEQ ID NO: 586428
cgguguaugugcaugaaga

SEQ ID NO: 717235 - RNA, 19 nt, Artificial Sequence
  Description of Artificial Sequence: Synthetic oligonucleotide
  Antisense strand to SEQ ID NO: 717234
ucuucaugcacauacaccg

SEQ ID NO: 717236 - RNA, 19 nt, Artificial Sequence
  Description of Artificial Sequence: Synthetic oligonucleotide
  Sense strand starting at position 3937 of SEQ ID NO: 586428
gguguaugugcaugaagaa

SEQ ID NO: 717237 - RNA, 19 nt, Artificial Sequence
  Description of Artificial Sequence: Synthetic oligonucleotide
  Antisense strand to SEQ ID NO: 717236
uucuucaugcacauacacc

SEQ ID NO: 717238 - RNA, 19 nt, Artificial Sequence
  Description of Artificial Sequence: Synthetic oligonucleotide
  Sense strand starting at position 3938 of SEQ ID NO: 586428
guguaugugcaugaagaaa

SEQ ID NO: 717239 - RNA, 19 nt, Artificial Sequence
  Description of Artificial Sequence: Synthetic oligonucleotide
  Antisense strand to SEQ ID NO: 717238
uuucuucaugcacauacac

SEQ ID NO: 717240 - RNA, 19 nt, Artificial Sequence
  Description of Artificial Sequence: Synthetic oligonucleotide
  Sense strand starting at position 3982 of SEQ ID NO: 586428
cgcgggaaggaaugagaua

SEQ ID NO: 717241 - RNA, 19 nt, Artificial Sequence
  Description of Artificial Sequence: Synthetic oligonucleotide
  Antisense strand to SEQ ID NO: 717240
uaucucauuccuucccgcg

SEQ ID NO: 717242 - RNA, 19 nt, Artificial Sequence
  Description of Artificial Sequence: Synthetic oligonucleotide
  Sense strand starting at position 27 of SEQ ID NO: 586429
ggaugcuccuaugcugaaa

SEQ ID NO: 717243 - RNA, 19 nt, Artificial Sequence
  Description of Artificial Sequence: Synthetic oligonucleotide
  Antisense strand to SEQ ID NO: 717242
uuucagcauaggagcaucc

SEQ ID NO: 717244 - RNA, 19 nt, Artificial Sequence
  Description of Artificial Sequence: Synthetic oligonucleotide
  Sense strand starting at position 35 of SEQ ID NO: 586429
cuaugcugaaaugguguua

SEQ ID NO: 717245 - RNA, 19 nt, Artificial Sequence
  Description of Artificial Sequence: Synthetic oligonucleotide
  Antisense strand to SEQ ID NO: 717244
uaacaccauuucagcauag

SEQ ID NO: 717246 - RNA, 19 nt, Artificial Sequence
  Description of Artificial Sequence: Synthetic oligonucleotide
  Sense strand starting at position 47 of SEQ ID NO: 586429
gguguuaugcuacauaauu

SEQ ID NO: 717247 - RNA, 19 nt, Artificial Sequence
  Description of Artificial Sequence: Synthetic oligonucleotide
  Antisense strand to SEQ ID NO: 717246
aauuauguagcauaacacc

SEQ ID NO: 717248 - RNA, 19 nt, Artificial Sequence
  Description of Artificial Sequence: Synthetic oligonucleotide
  Sense strand starting at position 131 of SEQ ID NO: 586429
gcuaucuuguaaucaagau

SEQ ID NO: 717249 - RNA, 19 nt, Artificial Sequence
  Description of Artificial Sequence: Synthetic oligonucleotide
  Antisense strand to SEQ ID NO: 717248
aucuugauuacaagauagc

SEQ ID NO: 717250 - RNA, 19 nt, Artificial Sequence
  Description of Artificial Sequence: Synthetic oligonucleotide
  Sense strand starting at position 383 of SEQ ID NO: 586429
aacagaugcgguuguuuaa

SEQ ID NO: 717251 - RNA, 19 nt, Artificial Sequence
  Description of Artificial Sequence: Synthetic oligonucleotide
  Antisense strand to SEQ ID NO: 717250
uuaaacaaccgcaucuguu

SEQ ID NO: 717252 - RNA, 19 nt, Artificial Sequence
  Description of Artificial Sequence: Synthetic oligonucleotide
  Sense strand starting at position 618 of SEQ ID NO: 586429
gcaagaacuggcuacuaca

SEQ ID NO: 717253 - RNA, 19 nt, Artificial Sequence
  Description of Artificial Sequence: Synthetic oligonucleotide
  Antisense strand to SEQ ID NO: 717252
uguaguagccaguucuugc

SEQ ID NO: 717254 - RNA, 19 nt, Artificial Sequence
  Description of Artificial Sequence: Synthetic oligonucleotide
  Sense strand starting at position 639 of SEQ ID NO: 586429
uggcaagugucaucauuuc

SEQ ID NO: 717255 - RNA, 19 nt, Artificial Sequence
  Description of Artificial Sequence: Synthetic oligonucleotide
  Antisense strand to SEQ ID NO: 717254
gaaaugaugacacuugcca

SEQ ID NO: 717256 - RNA, 19 nt, Artificial Sequence
  Description of Artificial Sequence: Synthetic oligonucleotide
  Sense strand starting at position 646 of SEQ ID NO: 586429
ugucaucauuucguaaaug

SEQ ID NO: 717257 - RNA, 19 nt, Artificial Sequence
  Description of Artificial Sequence: Synthetic oligonucleotide
  Antisense strand to SEQ ID NO: 717256
cauuuacgaaaugaugaca

SEQ ID NO: 717258 - RNA, 19 nt, Artificial Sequence
  Description of Artificial Sequence: Synthetic oligonucleotide
  Sense strand starting at position 663 of SEQ ID NO: 586429
uguuaagucuccuuuggug

SEQ ID NO: 717259 - RNA, 19 nt, Artificial Sequence
  Description of Artificial Sequence: Synthetic oligonucleotide
  Antisense strand to SEQ ID NO: 717258
caccaaaggagacuuaaca

SEQ ID NO: 717260 - RNA, 19 nt, Artificial Sequence
  Description of Artificial Sequence: Synthetic oligonucleotide
  Sense strand starting at position 670 of SEQ ID NO: 586429
ucuccuuuggugugagaca

SEQ ID NO: 717261 - RNA, 19 nt, Artificial Sequence
  Description of Artificial Sequence: Synthetic oligonucleotide
  Antisense strand to SEQ ID NO: 717260
ugucucacaccaaaggaga

SEQ ID NO: 717262 - RNA, 19 nt, Artificial Sequence
  Description of Artificial Sequence: Synthetic oligonucleotide
  Sense strand starting at position 964 of SEQ ID NO: 586429
uuugaaugccuuuagaauc

SEQ ID NO: 717263 - RNA, 19 nt, Artificial Sequence
  Description of Artificial Sequence: Synthetic oligonucleotide
  Antisense strand to SEQ ID NO: 717262
gauucuaaaggcauucaaa

SEQ ID NO: 717264 - RNA, 19 nt, Artificial Sequence
  Description of Artificial Sequence: Synthetic oligonucleotide
  Sense strand starting at position 1011 of SEQ ID NO: 586429
cucuuucugcuguaaguua

SEQ ID NO: 717265 - RNA, 19 nt, Artificial Sequence
  Description of Artificial Sequence: Synthetic oligonucleotide
  Antisense strand to SEQ ID NO: 717264
uaacuuacagcagaaagag

SEQ ID NO: 717266 - RNA, 19 nt, Artificial Sequence
  Description of Artificial Sequence: Synthetic oligonucleotide
  Sense strand starting at position 1019 of SEQ ID NO: 586429
gcuguaaguuauuuaugca

SEQ ID NO: 717267 - RNA, 19 nt, Artificial Sequence
  Description of Artificial Sequence: Synthetic oligonucleotide
  Antisense strand to SEQ ID NO: 717266
ugcauaaauaacuuacagc

SEQ ID NO: 717268 - RNA, 19 nt, Artificial Sequence
  Description of Artificial Sequence: Synthetic oligonucleotide
  Sense strand starting at position 1077 of SEQ ID NO: 586429
ccaguacucgcucacacau

SEQ ID NO: 717269 - RNA, 19 nt, Artificial Sequence
  Description of Artificial Sequence: Synthetic oligonucleotide
  Antisense strand to SEQ ID NO: 717268
augugugagcgaguacugg

SEQ ID NO: 717270 - RNA, 19 nt, Artificial Sequence
  Description of Artificial Sequence: Synthetic oligonucleotide
  Sense strand starting at position 1112 of SEQ ID NO: 586429
ucaauuaaucuguaagguu

SEQ ID NO: 717271 - RNA, 19 nt, Artificial Sequence
  Description of Artificial Sequence: Synthetic oligonucleotide
  Antisense strand to SEQ ID NO: 717270
aaccuuacagauuaauuga

SEQ ID NO: 717272 - RNA, 19 nt, Artificial Sequence
  Description of Artificial Sequence: Synthetic oligonucleotide
  Sense strand starting at position 1176 of SEQ ID NO: 586429
aaaguaacuuguucuaggu

SEQ ID NO: 717273 - RNA, 19 nt, Artificial Sequence
  Description of Artificial Sequence: Synthetic oligonucleotide
  Antisense strand to SEQ ID NO: 717272
accuagaacaaguuacuuu

SEQ ID NO: 717274 - RNA, 19 nt, Artificial Sequence
  Description of Artificial Sequence: Synthetic oligonucleotide
  Sense strand starting at position 1511 of SEQ ID NO: 586429
gggccuaagucuucggagu

SEQ ID NO: 717275 - RNA, 19 nt, Artificial Sequence
  Description of Artificial Sequence: Synthetic oligonucleotide
  Antisense strand to SEQ ID NO: 717274
acuccgaagacuuaggccc

SEQ ID NO: 717276 - RNA, 19 nt, Artificial Sequence
  Description of Artificial Sequence: Synthetic oligonucleotide
  Sense strand starting at position 1512 of SEQ ID NO: 586429
ggccuaagucuucggaguu

SEQ ID NO: 717277 - RNA, 19 nt, Artificial Sequence
  Description of Artificial Sequence: Synthetic oligonucleotide
  Antisense strand to SEQ ID NO: 717276
aacuccgaagacuuaggcc

SEQ ID NO: 717278 - RNA, 19 nt, Artificial Sequence
  Description of Artificial Sequence: Synthetic oligonucleotide
  Sense strand starting at position 2107 of SEQ ID NO: 586429
gcaggaguccggucguuca

SEQ ID NO: 717279 - RNA, 19 nt, Artificial Sequence
  Description of Artificial Sequence: Synthetic oligonucleotide
  Antisense strand to SEQ ID NO: 717278
ugaacgaccggacuccugc

SEQ ID NO: 717280 - RNA, 19 nt, Artificial Sequence
  Description of Artificial Sequence: Synthetic oligonucleotide
  Sense strand starting at position 2558 of SEQ ID NO: 586429
cugaaauacucauucgagg

SEQ ID NO: 717281 - RNA, 19 nt, Artificial Sequence
  Description of Artificial Sequence: Synthetic oligonucleotide
  Antisense strand to SEQ ID NO: 717280
ccucgaaugaguauuucag

SEQ ID NO: 717282 - RNA, 19 nt, Artificial Sequence
  Description of Artificial Sequence: Synthetic oligonucleotide
  Sense strand starting at position 2579 of SEQ ID NO: 586429
acacaaagauucucccgau

SEQ ID NO: 717283 - RNA, 19 nt, Artificial Sequence
  Description of Artificial Sequence: Synthetic oligonucleotide
  Antisense strand to SEQ ID NO: 717282
aucgggagaaucuuugugu

SEQ ID NO: 717284 - RNA, 19 nt, Artificial Sequence
  Description of Artificial Sequence: Synthetic oligonucleotide
  Sense strand starting at position 2585 of SEQ ID NO: 586429
agauucucccgaugcuuau

SEQ ID NO: 717285 - RNA, 19 nt, Artificial Sequence
  Description of Artificial Sequence: Synthetic oligonucleotide
  Antisense strand to SEQ ID NO: 717284
auaagcaucgggagaaucu

SEQ ID NO: 717286 - RNA, 19 nt, Artificial Sequence
  Description of Artificial Sequence: Synthetic oligonucleotide
  Sense strand starting at position 2874 of SEQ ID NO: 586429
cgucaaggagccuguuuau

SEQ ID NO: 717287 - RNA, 19 nt, Artificial Sequence
  Description of Artificial Sequence: Synthetic oligonucleotide
  Antisense strand to SEQ ID NO: 717286
auaaacaggcuccuugacg

SEQ ID NO: 717288 - RNA, 19 nt, Artificial Sequence
  Description of Artificial Sequence: Synthetic oligonucleotide
  Sense strand starting at position 2877 of SEQ ID NO: 586429
caaggagccuguuuauaaa

SEQ ID NO: 717289 - RNA, 19 nt, Artificial Sequence
  Description of Artificial Sequence: Synthetic oligonucleotide
  Antisense strand to SEQ ID NO: 717288
uuuauaaacaggcuccuug

SEQ ID NO: 717290 - RNA, 19 nt, Artificial Sequence
  Description of Artificial Sequence: Synthetic oligonucleotide
  Sense strand starting at position 2921 of SEQ ID NO: 586429
gggccaacuuuacugcaua

SEQ ID NO: 717291 - RNA, 19 nt, Artificial Sequence
  Description of Artificial Sequence: Synthetic oligonucleotide
  Antisense strand to SEQ ID NO: 717290
uaugcaguaaaguuggccc

SEQ ID NO: 717292 - RNA, 19 nt, Artificial Sequence
  Description of Artificial Sequence: Synthetic oligonucleotide
  Sense strand starting at position 3058 of SEQ ID NO: 586429
uagcaaguaucauuaggaa

SEQ ID NO: 717293 - RNA, 19 nt, Artificial Sequence
  Description of Artificial Sequence: Synthetic oligonucleotide
  Antisense strand to SEQ ID NO: 717292
uuccuaaugauacuugcua

SEQ ID NO: 717294 - RNA, 19 nt, Artificial Sequence
  Description of Artificial Sequence: Synthetic oligonucleotide
  Sense strand starting at position 3092 of SEQ ID NO: 586429
uuaggaucuucuccggacu

SEQ ID NO: 717295 - RNA, 19 nt, Artificial Sequence
  Description of Artificial Sequence: Synthetic oligonucleotide
  Antisense strand to SEQ ID NO: 717294
aguccggagaagauccuaa

SEQ ID NO: 717296 - RNA, 19 nt, Artificial Sequence
  Description of Artificial Sequence: Synthetic oligonucleotide
  Sense strand starting at position 3095 of SEQ ID NO: 586429
ggaucuucuccggacucuu

SEQ ID NO: 717297 - RNA, 19 nt, Artificial Sequence
  Description of Artificial Sequence: Synthetic oligonucleotide
  Antisense strand to SEQ ID NO: 717296
aagaguccggagaagaucc

SEQ ID NO: 717298 - RNA, 19 nt, Artificial Sequence
  Description of Artificial Sequence: Synthetic oligonucleotide
  Sense strand starting at position 3290 of SEQ ID NO: 586429
ugguucugcucccuacuaa

SEQ ID NO: 717299 - RNA, 19 nt, Artificial Sequence
  Description of Artificial Sequence: Synthetic oligonucleotide
  Antisense strand to SEQ ID NO: 717298
uuaguagggagcagaacca

SEQ ID NO: 717300 - RNA, 19 nt, Artificial Sequence
  Description of Artificial Sequence: Synthetic oligonucleotide
  Sense strand starting at position 3302 of SEQ ID NO: 586429
cuacuaaguguugauucuu

SEQ ID NO: 717301 - RNA, 19 nt, Artificial Sequence
  Description of Artificial Sequence: Synthetic oligonucleotide
  Antisense strand to SEQ ID NO: 717300
aagaaucaacacuuaguag

SEQ ID NO: 717302 - RNA, 19 nt, Artificial Sequence
  Description of Artificial Sequence: Synthetic oligonucleotide
  Sense strand starting at position 3310 of SEQ ID NO: 586429
uguugauucuuccucagua

SEQ ID NO: 717303 - RNA, 19 nt, Artificial Sequence
  Description of Artificial Sequence: Synthetic oligonucleotide
  Antisense strand to SEQ ID NO: 717302
uacugaggaagaaucaaca

SEQ ID NO: 717304 - RNA, 19 nt, Artificial Sequence
  Description of Artificial Sequence: Synthetic oligonucleotide
  Sense strand starting at position 3311 of SEQ ID NO: 586429
guugauucuuccucaguaa

SEQ ID NO: 717305 - RNA, 19 nt, Artificial Sequence
  Description of Artificial Sequence: Synthetic oligonucleotide
  Antisense strand to SEQ ID NO: 717304
uuacugaggaagaaucaac

SEQ ID NO: 717306 - RNA, 19 nt, Artificial Sequence
  Description of Artificial Sequence: Synthetic oligonucleotide
  Sense strand starting at position 3444 of SEQ ID NO: 586429
aggagaaccuauuaauauu

SEQ ID NO: 717307 - RNA, 19 nt, Artificial Sequence
  Description of Artificial Sequence: Synthetic oligonucleotide
  Antisense strand to SEQ ID NO: 717306
aauauuaauagguucuccu

SEQ ID NO: 717308 - RNA, 19 nt, Artificial Sequence
  Description of Artificial Sequence: Synthetic oligonucleotide
  Sense strand starting at position 3508 of SEQ ID NO: 586429
cuaggcauuugacagauau

SEQ ID NO: 717309 - RNA, 19 nt, Artificial Sequence
  Description of Artificial Sequence: Synthetic oligonucleotide
  Antisense strand to SEQ ID NO: 717308
auaucugucaaaugccuag

SEQ ID NO: 717310 - RNA, 19 nt, Artificial Sequence
  Description of Artificial Sequence: Synthetic oligonucleotide
  Sense strand starting at position 3556 of SEQ ID NO: 586429
gauaauaccugugagagaa

SEQ ID NO: 717311 - RNA, 19 nt, Artificial Sequence
  Description of Artificial Sequence: Synthetic oligonucleotide
  Antisense strand to SEQ ID NO: 717310
uucucucacagguauuauc

SEQ ID NO: 717312 - RNA, 19 nt, Artificial Sequence
  Description of Artificial Sequence: Synthetic oligonucleotide
  Sense strand starting at position 3558 of SEQ ID NO: 586429
uaauaccugugagagaaua

SEQ ID NO: 717313 - RNA, 19 nt, Artificial Sequence
  Description of Artificial Sequence: Synthetic oligonucleotide
  Antisense strand to SEQ ID NO: 717312
uauucucucacagguauua

SEQ ID NO: 717314 - RNA, 19 nt, Artificial Sequence
  Description of Artificial Sequence: Synthetic oligonucleotide
  Sense strand starting at position 3685 of SEQ ID NO: 586429
uuguguuuccuuuagaagu

SEQ ID NO: 717315 - RNA, 19 nt, Artificial Sequence
  Description of Artificial Sequence: Synthetic oligonucleotide
  Antisense strand to SEQ ID NO: 717314
acuucuaaaggaaacacaa

SEQ ID NO: 717316 - RNA, 19 nt, Artificial Sequence
  Description of Artificial Sequence: Synthetic oligonucleotide
  Sense strand starting at position 3861 of SEQ ID NO: 586429
guccaagacuucucaggau

SEQ ID NO: 717317 - RNA, 19 nt, Artificial Sequence
  Description of Artificial Sequence: Synthetic oligonucleotide
  Antisense strand to SEQ ID NO: 717316
auccugagaagucuuggac

SEQ ID NO: 717318 - RNA, 19 nt, Artificial Sequence
  Description of Artificial Sequence: Synthetic oligonucleotide
  Sense strand starting at position 3917 of SEQ ID NO: 586429
gcacaugugugaucugcua

SEQ ID NO: 717319 - RNA, 19 nt, Artificial Sequence
  Description of Artificial Sequence: Synthetic oligonucleotide
  Antisense strand to SEQ ID NO: 717318
uagcagaucacacaugugc

SEQ ID NO: 717320 - RNA, 19 nt, Artificial Sequence
  Description of Artificial Sequence: Synthetic oligonucleotide
  Sense strand starting at position 3977 of SEQ ID NO: 586429
ccgaauguucuaggcauaa

SEQ ID NO: 717321 - RNA, 19 nt, Artificial Sequence
  Description of Artificial Sequence: Synthetic oligonucleotide
  Antisense strand to SEQ ID NO: 717320
uuaugccuagaacauucgg

SEQ ID NO: 717322 - RNA, 19 nt, Artificial Sequence
  Description of Artificial Sequence: Synthetic oligonucleotide
  Sense strand starting at position 26 of SEQ ID NO: 586430
auuagacaauccgugucuu

SEQ ID NO: 717323 - RNA, 19 nt, Artificial Sequence
  Description of Artificial Sequence: Synthetic oligonucleotide
  Antisense strand to SEQ ID NO: 717322
aagacacggauugucuaau

SEQ ID NO: 717324 - RNA, 19 nt, Artificial Sequence
  Description of Artificial Sequence: Synthetic oligonucleotide
  Sense strand starting at position 100 of SEQ ID NO: 586430
accagaauacucugugcca

SEQ ID NO: 717325 - RNA, 19 nt, Artificial Sequence
  Description of Artificial Sequence: Synthetic oligonucleotide
  Antisense strand to SEQ ID NO: 717324
uggcacagaguauucuggu

SEQ ID NO: 717326 - RNA, 19 nt, Artificial Sequence
  Description of Artificial Sequence: Synthetic oligonucleotide
  Sense strand starting at position 101 of SEQ ID NO: 586430
ccagaauacucugugccau

SEQ ID NO: 717327 - RNA, 19 nt, Artificial Sequence
  Description of Artificial Sequence: Synthetic oligonucleotide
  Antisense strand to SEQ ID NO: 717326
auggcacagaguauucugg

SEQ ID NO: 717328 - RNA, 19 nt, Artificial Sequence
  Description of Artificial Sequence: Synthetic oligonucleotide
  Sense strand starting at position 103 of SEQ ID NO: 586430
agaauacucugugccauag

SEQ ID NO: 717329 - RNA, 19 nt, Artificial Sequence
  Description of Artificial Sequence: Synthetic oligonucleotide
  Antisense strand to SEQ ID NO: 717328
cuauggcacagaguauucu

SEQ ID NO: 717330 - RNA, 19 nt, Artificial Sequence
  Description of Artificial Sequence: Synthetic oligonucleotide
  Sense strand starting at position 115 of SEQ ID NO: 586430
gccauagcugcauaccaaa

SEQ ID NO: 717331 - RNA, 19 nt, Artificial Sequence
  Description of Artificial Sequence: Synthetic oligonucleotide
  Antisense strand to SEQ ID NO: 717330
uuugguaugcagcuauggc

SEQ ID NO: 717332 - RNA, 19 nt, Artificial Sequence
  Description of Artificial Sequence: Synthetic oligonucleotide
  Sense strand starting at position 178 of SEQ ID NO: 586430
aagcuaauuugguaaguuu

SEQ ID NO: 717333 - RNA, 19 nt, Artificial Sequence
  Description of Artificial Sequence: Synthetic oligonucleotide
  Antisense strand to SEQ ID NO: 717332
aaacuuaccaaauuagcuu

SEQ ID NO: 717334 - RNA, 19 nt, Artificial Sequence
  Description of Artificial Sequence: Synthetic oligonucleotide
  Sense strand starting at position 281 of SEQ ID NO: 586430
aaggucaggugaucucuaa

SEQ ID NO: 717335 - RNA, 19 nt, Artificial Sequence
  Description of Artificial Sequence: Synthetic oligonucleotide
  Antisense strand to SEQ ID NO: 717334
uuagagaucaccugaccuu

SEQ ID NO: 717336 - RNA, 19 nt, Artificial Sequence
  Description of Artificial Sequence: Synthetic oligonucleotide
  Sense strand starting at position 351 of SEQ ID NO: 586430
ggaugcuccuaugcugaaa

SEQ ID NO: 717337 - RNA, 19 nt, Artificial Sequence
  Description of Artificial Sequence: Synthetic oligonucleotide
  Antisense strand to SEQ ID NO: 717336
uuucagcauaggagcaucc

SEQ ID NO: 717338 - RNA, 19 nt, Artificial Sequence
  Description of Artificial Sequence: Synthetic oligonucleotide
  Sense strand starting at position 359 of SEQ ID NO: 586430
cuaugcugaaaugguguua

SEQ ID NO: 717339 - RNA, 19 nt, Artificial Sequence
  Description of Artificial Sequence: Synthetic oligonucleotide
  Antisense strand to SEQ ID NO: 717338
uaacaccauuucagcauag

SEQ ID NO: 717340 - RNA, 19 nt, Artificial Sequence
  Description of Artificial Sequence: Synthetic oligonucleotide
  Sense strand starting at position 371 of SEQ ID NO: 586430
gguguuaugcuacauaauu

SEQ ID NO: 717341 - RNA, 19 nt, Artificial Sequence
  Description of Artificial Sequence: Synthetic oligonucleotide
  Antisense strand to SEQ ID NO: 717340
aauuauguagcauaacacc

SEQ ID NO: 717342 - RNA, 19 nt, Artificial Sequence
  Description of Artificial Sequence: Synthetic oligonucleotide
  Sense strand starting at position 455 of SEQ ID NO: 586430
gcuaucuuguaaucaagau

SEQ ID NO: 717343 - RNA, 19 nt, Artificial Sequence
  Description of Artificial Sequence: Synthetic oligonucleotide
  Antisense strand to SEQ ID NO: 717342
aucuugauuacaagauagc

SEQ ID NO: 717344 - RNA, 19 nt, Artificial Sequence
  Description of Artificial Sequence: Synthetic oligonucleotide
  Sense strand starting at position 707 of SEQ ID NO: 586430
aacagaugcgguuguuuaa

SEQ ID NO: 717345 - RNA, 19 nt, Artificial Sequence
  Description of Artificial Sequence: Synthetic oligonucleotide
  Antisense strand to SEQ ID NO: 717344
uuaaacaaccgcaucuguu

SEQ ID NO: 717346 - RNA, 19 nt, Artificial Sequence
  Description of Artificial Sequence: Synthetic oligonucleotide
  Sense strand starting at position 942 of SEQ ID NO: 586430
gcaagaacuggcuacuaca

SEQ ID NO: 717347 - RNA, 19 nt, Artificial Sequence
  Description of Artificial Sequence: Synthetic oligonucleotide
  Antisense strand to SEQ ID NO: 717346
uguaguagccaguucuugc

SEQ ID NO: 717348 - RNA, 19 nt, Artificial Sequence
  Description of Artificial Sequence: Synthetic oligonucleotide
  Sense strand starting at position 963 of SEQ ID NO: 586430
uggcaagugucaucauuuc

SEQ ID NO: 717349 - RNA, 19 nt, Artificial Sequence
  Description of Artificial Sequence: Synthetic oligonucleotide
  Antisense strand to SEQ ID NO: 717348
gaaaugaugacacuugcca

SEQ ID NO: 717350 - RNA, 19 nt, Artificial Sequence
  Description of Artificial Sequence: Synthetic oligonucleotide
  Sense strand starting at position 970 of SEQ ID NO: 586430
ugucaucauuucguaaaug

SEQ ID NO: 717351 - RNA, 19 nt, Artificial Sequence
  Description of Artificial Sequence: Synthetic oligonucleotide
  Antisense strand to SEQ ID NO: 717350
cauuuacgaaaugaugaca

SEQ ID NO: 717352 - RNA, 19 nt, Artificial Sequence
  Description of Artificial Sequence: Synthetic oligonucleotide
  Sense strand starting at position 987 of SEQ ID NO: 586430
uguuaagucuccuuuggug

SEQ ID NO: 717353 - RNA, 19 nt, Artificial Sequence
  Description of Artificial Sequence: Synthetic oligonucleotide
  Antisense strand to SEQ ID NO: 717352
caccaaaggagacuuaaca

SEQ ID NO: 717354 - RNA, 19 nt, Artificial Sequence
  Description of Artificial Sequence: Synthetic oligonucleotide
  Sense strand starting at position 994 of SEQ ID NO: 586430
ucuccuuuggugugagaca

SEQ ID NO: 717355 - RNA, 19 nt, Artificial Sequence
  Description of Artificial Sequence: Synthetic oligonucleotide
  Antisense strand to SEQ ID NO: 717354
ugucucacaccaaaggaga

SEQ ID NO: 717356 - RNA, 19 nt, Artificial Sequence
  Description of Artificial Sequence: Synthetic oligonucleotide
  Sense strand starting at position 1288 of SEQ ID NO: 586430
uuugaaugccuuuagaauc

SEQ ID NO: 717357 - RNA, 19 nt, Artificial Sequence
  Description of Artificial Sequence: Synthetic oligonucleotide
  Antisense strand to SEQ ID NO: 717356
gauucuaaaggcauucaaa

SEQ ID NO: 717358 - RNA, 19 nt, Artificial Sequence
  Description of Artificial Sequence: Synthetic oligonucleotide
  Sense strand starting at position 1335 of SEQ ID NO: 586430
cucuuucugcuguaaguua

SEQ ID NO: 717359 - RNA, 19 nt, Artificial Sequence
  Description of Artificial Sequence: Synthetic oligonucleotide
  Antisense strand to SEQ ID NO: 717358
uaacuuacagcagaaagag

SEQ ID NO: 717360 - RNA, 19 nt, Artificial Sequence
  Description of Artificial Sequence: Synthetic oligonucleotide
  Sense strand starting at position 1343 of SEQ ID NO: 586430
gcuguaaguuauuuaugca

SEQ ID NO: 717361 - RNA, 19 nt, Artificial Sequence
  Description of Artificial Sequence: Synthetic oligonucleotide
  Antisense strand to SEQ ID NO: 717360
ugcauaaauaacuuacagc

SEQ ID NO: 717362 - RNA, 19 nt, Artificial Sequence
  Description of Artificial Sequence: Synthetic oligonucleotide
  Sense strand starting at position 1401 of SEQ ID NO: 586430
ccaguacucgcucacacau

SEQ ID NO: 717363 - RNA, 19 nt, Artificial Sequence
  Description of Artificial Sequence: Synthetic oligonucleotide
  Antisense strand to SEQ ID NO: 717362
augugugagcgaguacugg

SEQ ID NO: 717364 - RNA, 19 nt, Artificial Sequence
  Description of Artificial Sequence: Synthetic oligonucleotide
  Sense strand starting at position 1436 of SEQ ID NO: 586430
ucaauuaaucuguaagguu

SEQ ID NO: 717365 - RNA, 19 nt, Artificial Sequence
  Description of Artificial Sequence: Synthetic oligonucleotide
  Antisense strand to SEQ ID NO: 717364
aaccuuacagauuaauuga

SEQ ID NO: 717366 - RNA, 19 nt, Artificial Sequence
  Description of Artificial Sequence: Synthetic oligonucleotide
  Sense strand starting at position 1500 of SEQ ID NO: 586430
aaaguaacuuguucuaggu

SEQ ID NO: 717367 - RNA, 19 nt, Artificial Sequence
  Description of Artificial Sequence: Synthetic oligonucleotide
  Antisense strand to SEQ ID NO: 717366
accuagaacaaguuacuuu

SEQ ID NO: 717368 - RNA, 19 nt, Artificial Sequence
  Description of Artificial Sequence: Synthetic oligonucleotide
  Sense strand starting at position 2431 of SEQ ID NO: 586430
gcaggaguccggucguuca

SEQ ID NO: 717369 - RNA, 19 nt, Artificial Sequence
  Description of Artificial Sequence: Synthetic oligonucleotide
  Antisense strand to SEQ ID NO: 717368
ugaacgaccggacuccugc

SEQ ID NO: 717370 - RNA, 19 nt, Artificial Sequence
  Description of Artificial Sequence: Synthetic oligonucleotide
  Sense strand starting at position 2882 of SEQ ID NO: 586430
cugaaauacucauucgagg

SEQ ID NO: 717371 - RNA, 19 nt, Artificial Sequence
  Description of Artificial Sequence: Synthetic oligonucleotide
  Antisense strand to SEQ ID NO: 717370
ccucgaaugaguauuucag

SEQ ID NO: 717372 - RNA, 19 nt, Artificial Sequence
  Description of Artificial Sequence: Synthetic oligonucleotide
  Sense strand starting at position 2903 of SEQ ID NO: 586430
acacaaagauucucccgau

SEQ ID NO: 717373 - RNA, 19 nt, Artificial Sequence
  Description of Artificial Sequence: Synthetic oligonucleotide
  Antisense strand to SEQ ID NO: 717372
aucgggagaaucuuugugu

SEQ ID NO: 717374 - RNA, 19 nt, Artificial Sequence
  Description of Artificial Sequence: Synthetic oligonucleotide
  Sense strand starting at position 2909 of SEQ ID NO: 586430
agauucucccgaugcuuau

SEQ ID NO: 717375 - RNA, 19 nt, Artificial Sequence
  Description of Artificial Sequence: Synthetic oligonucleotide
  Antisense strand to SEQ ID NO: 717374
auaagcaucgggagaaucu

SEQ ID NO: 717376 - RNA, 19 nt, Artificial Sequence
  Description of Artificial Sequence: Synthetic oligonucleotide
  Sense strand starting at position 3201 of SEQ ID NO: 586430
caaggagccuguuuauaaa

SEQ ID NO: 717377 - RNA, 19 nt, Artificial Sequence
  Description of Artificial Sequence: Synthetic oligonucleotide
  Antisense strand to SEQ ID NO: 717376
uuuauaaacaggcuccuug

SEQ ID NO: 717378 - RNA, 19 nt, Artificial Sequence
  Description of Artificial Sequence: Synthetic oligonucleotide
  Sense strand starting at position 3245 of SEQ ID NO: 586430
gggccaacuuuacugcaua

SEQ ID NO: 717379 - RNA, 19 nt, Artificial Sequence
  Description of Artificial Sequence: Synthetic oligonucleotide
  Antisense strand to SEQ ID NO: 717378
uaugcaguaaaguuggccc

SEQ ID NO: 717380 - RNA, 19 nt, Artificial Sequence
  Description of Artificial Sequence: Synthetic oligonucleotide
  Sense strand starting at position 3382 of SEQ ID NO: 586430
uagcaaguaucauuaggaa

SEQ ID NO: 717381 - RNA, 19 nt, Artificial Sequence
  Description of Artificial Sequence: Synthetic oligonucleotide
  Antisense strand to SEQ ID NO: 717380
uuccuaaugauacuugcua

SEQ ID NO: 717382 - RNA, 19 nt, Artificial Sequence
  Description of Artificial Sequence: Synthetic oligonucleotide
  Sense strand starting at position 3416 of SEQ ID NO: 586430
uuaggaucuucuccggacu

SEQ ID NO: 717383 - RNA, 19 nt, Artificial Sequence
  Description of Artificial Sequence: Synthetic oligonucleotide
  Antisense strand to SEQ ID NO: 717382
aguccggagaagauccuaa

SEQ ID NO: 717384 - RNA, 19 nt, Artificial Sequence
  Description of Artificial Sequence: Synthetic oligonucleotide
  Sense strand starting at position 3419 of SEQ ID NO: 586430
ggaucuucuccggacucuu

SEQ ID NO: 717385 - RNA, 19 nt, Artificial Sequence
  Description of Artificial Sequence: Synthetic oligonucleotide
  Antisense strand to SEQ ID NO: 717384
aagaguccggagaagaucc

SEQ ID NO: 717386 - RNA, 19 nt, Artificial Sequence
  Description of Artificial Sequence: Synthetic oligonucleotide
  Sense strand starting at position 3614 of SEQ ID NO: 586430
ugguucugcucccuacuaa

SEQ ID NO: 717387 - RNA, 19 nt, Artificial Sequence
  Description of Artificial Sequence: Synthetic oligonucleotide
  Antisense strand to SEQ ID NO: 717386
uuaguagggagcagaacca

SEQ ID NO: 717388 - RNA, 19 nt, Artificial Sequence
  Description of Artificial Sequence: Synthetic oligonucleotide
  Sense strand starting at position 3626 of SEQ ID NO: 586430
cuacuaaguguugauucuu

SEQ ID NO: 717389 - RNA, 19 nt, Artificial Sequence
  Description of Artificial Sequence: Synthetic oligonucleotide
  Antisense strand to SEQ ID NO: 717388
aagaaucaacacuuaguag

SEQ ID NO: 717390 - RNA, 19 nt, Artificial Sequence
  Description of Artificial Sequence: Synthetic oligonucleotide
  Sense strand starting at position 3634 of SEQ ID NO: 586430
uguugauucuuccucagua

SEQ ID NO: 717391 - RNA, 19 nt, Artificial Sequence
  Description of Artificial Sequence: Synthetic oligonucleotide
  Antisense strand to SEQ ID NO: 717390
uacugaggaagaaucaaca

SEQ ID NO: 717392 - RNA, 19 nt, Artificial Sequence
  Description of Artificial Sequence: Synthetic oligonucleotide
  Sense strand starting at position 3635 of SEQ ID NO: 586430
guugauucuuccucaguaa

SEQ ID NO: 717393 - RNA, 19 nt, Artificial Sequence
  Description of Artificial Sequence: Synthetic oligonucleotide
  Antisense strand to SEQ ID NO: 717392
uuacugaggaagaaucaac

SEQ ID NO: 717394 - RNA, 19 nt, Artificial Sequence
  Description of Artificial Sequence: Synthetic oligonucleotide
  Sense strand starting at position 3768 of SEQ ID NO: 586430
aggagaaccuauuaauauu

SEQ ID NO: 717395 - RNA, 19 nt, Artificial Sequence
  Description of Artificial Sequence: Synthetic oligonucleotide
  Antisense strand to SEQ ID NO: 717394
aauauuaauagguucuccu

SEQ ID NO: 717396 - RNA, 19 nt, Artificial Sequence
  Description of Artificial Sequence: Synthetic oligonucleotide
  Sense strand starting at position 3832 of SEQ ID NO: 586430
cuaggcauuugacagauau

SEQ ID NO: 717397 - RNA, 19 nt, Artificial Sequence
  Description of Artificial Sequence: Synthetic oligonucleotide
  Antisense strand to SEQ ID NO: 717396
auaucugucaaaugccuag

SEQ ID NO: 717398 - RNA, 19 nt, Artificial Sequence
  Description of Artificial Sequence: Synthetic oligonucleotide
  Sense strand starting at position 3880 of SEQ ID NO: 586430
gauaauaccugugagagaa

SEQ ID NO: 717399 - RNA, 19 nt, Artificial Sequence
  Description of Artificial Sequence: Synthetic oligonucleotide
  Antisense strand to SEQ ID NO: 717398
uucucucacagguauuauc

SEQ ID NO: 717400 - RNA, 19 nt, Artificial Sequence
  Description of Artificial Sequence: Synthetic oligonucleotide
  Sense strand starting at position 3882 of SEQ ID NO: 586430
uaauaccugugagagaaua

SEQ ID NO: 717401 - RNA, 19 nt, Artificial Sequence
  Description of Artificial Sequence: Synthetic oligonucleotide
  Antisense strand to SEQ ID NO: 717400
uauucucucacagguauua

SEQ ID NO: 717402 - RNA, 19 nt, Artificial Sequence
  Description of Artificial Sequence: Synthetic oligonucleotide
  Sense strand starting at position 299 of SEQ ID NO: 586431
aaggguaucacuggauugu

SEQ ID NO: 717403 - RNA, 19 nt, Artificial Sequence
  Description of Artificial Sequence: Synthetic oligonucleotide
  Antisense strand to SEQ ID NO: 717402
acaauccagugauacccuu

SEQ ID NO: 717404 - RNA, 19 nt, Artificial Sequence
  Description of Artificial Sequence: Synthetic oligonucleotide
  Sense strand starting at position 300 of SEQ ID NO: 586431
aggguaucacuggauuguu

SEQ ID NO: 717405 - RNA, 19 nt, Artificial Sequence
  Description of Artificial Sequence: Synthetic oligonucleotide
  Antisense strand to SEQ ID NO: 717404
aacaauccagugauacccu

SEQ ID NO: 717406 - RNA, 19 nt, Artificial Sequence
  Description of Artificial Sequence: Synthetic oligonucleotide
  Sense strand starting at position 522 of SEQ ID NO: 586431
ugaagaaugcuguauuauu

SEQ ID NO: 717407 - RNA, 19 nt, Artificial Sequence
  Description of Artificial Sequence: Synthetic oligonucleotide
  Antisense strand to SEQ ID NO: 717406
aauaauacagcauucuuca

SEQ ID NO: 717408 - RNA, 19 nt, Artificial Sequence
  Description of Artificial Sequence: Synthetic oligonucleotide
  Sense strand starting at position 538 of SEQ ID NO: 586431
auuuguuucugggcaacga

SEQ ID NO: 717409 - RNA, 19 nt, Artificial Sequence
  Description of Artificial Sequence: Synthetic oligonucleotide
  Antisense strand to SEQ ID NO: 717408
ucguugcccagaaacaaau

SEQ ID NO: 717410 - RNA, 19 nt, Artificial Sequence
  Description of Artificial Sequence: Synthetic oligonucleotide
  Sense strand starting at position 539 of SEQ ID NO: 586431
uuuguuucugggcaacgau

SEQ ID NO: 717411 - RNA, 19 nt, Artificial Sequence
  Description of Artificial Sequence: Synthetic oligonucleotide
  Antisense strand to SEQ ID NO: 717410
aucguugcccagaaacaaa

SEQ ID NO: 717412 - RNA, 19 nt, Artificial Sequence
  Description of Artificial Sequence: Synthetic oligonucleotide
  Sense strand starting at position 589 of SEQ ID NO: 586431
cccuguuagagauguaagu

SEQ ID NO: 717413 - RNA, 19 nt, Artificial Sequence
  Description of Artificial Sequence: Synthetic oligonucleotide
  Antisense strand to SEQ ID NO: 717412
acuuacaucucuaacaggg

SEQ ID NO: 717414 - RNA, 19 nt, Artificial Sequence
  Description of Artificial Sequence: Synthetic oligonucleotide
  Sense strand starting at position 598 of SEQ ID NO: 586431
agauguaagucccuaaugu

SEQ ID NO: 717415 - RNA, 19 nt, Artificial Sequence
  Description of Artificial Sequence: Synthetic oligonucleotide
  Antisense strand to SEQ ID NO: 717414
acauuagggacuuacaucu

SEQ ID NO: 717416 - RNA, 19 nt, Artificial Sequence
  Description of Artificial Sequence: Synthetic oligonucleotide
  Sense strand starting at position 599 of SEQ ID NO: 586431
gauguaagucccuaauguc

SEQ ID NO: 717417 - RNA, 19 nt, Artificial Sequence
  Description of Artificial Sequence: Synthetic oligonucleotide
  Antisense strand to SEQ ID NO: 717416
gacauuagggacuuacauc

SEQ ID NO: 717418 - RNA, 19 nt, Artificial Sequence
  Description of Artificial Sequence: Synthetic oligonucleotide
  Sense strand starting at position 617 of SEQ ID NO: 586431
cacguuuaaccaugaggaa

SEQ ID NO: 717419 - RNA, 19 nt, Artificial Sequence
  Description of Artificial Sequence: Synthetic oligonucleotide
  Antisense strand to SEQ ID NO: 717418
uuccucaugguuaaacgug

SEQ ID NO: 717420 - RNA, 19 nt, Artificial Sequence
  Description of Artificial Sequence: Synthetic oligonucleotide
  Sense strand starting at position 733 of SEQ ID NO: 586431
cugacacuguccuugagaa

SEQ ID NO: 717421 - RNA, 19 nt, Artificial Sequence
  Description of Artificial Sequence: Synthetic oligonucleotide
  Antisense strand to SEQ ID NO: 717420
uucucaaggacagugucag

SEQ ID NO: 717422 - RNA, 19 nt, Artificial Sequence
  Description of Artificial Sequence: Synthetic oligonucleotide
  Sense strand starting at position 734 of SEQ ID NO: 586431
ugacacuguccuugagaag

SEQ ID NO: 717423 - RNA, 19 nt, Artificial Sequence
  Description of Artificial Sequence: Synthetic oligonucleotide
  Antisense strand to SEQ ID NO: 717422
cuucucaaggacaguguca

SEQ ID NO: 717424 - RNA, 19 nt, Artificial Sequence
  Description of Artificial Sequence: Synthetic oligonucleotide
  Sense strand starting at position 832 of SEQ ID NO: 586431
gaaggagccuguucuucuu

SEQ ID NO: 717425 - RNA, 19 nt, Artificial Sequence
  Description of Artificial Sequence: Synthetic oligonucleotide
  Antisense strand to SEQ ID NO: 717424
aagaagaacaggcuccuuc

SEQ ID NO: 717426 - RNA, 19 nt, Artificial Sequence
  Description of Artificial Sequence: Synthetic oligonucleotide
  Sense strand starting at position 869 of SEQ ID NO: 586431
gugaacucaguugacuuua

SEQ ID NO: 717427 - RNA, 19 nt, Artificial Sequence
  Description of Artificial Sequence: Synthetic oligonucleotide
  Antisense strand to SEQ ID NO: 717426
uaaagucaacugaguucac

SEQ ID NO: 717428 - RNA, 19 nt, Artificial Sequence
  Description of Artificial Sequence: Synthetic oligonucleotide
  Sense strand starting at position 881 of SEQ ID NO: 586431
gacuuuaggcaguggaaag

SEQ ID NO: 717429 - RNA, 19 nt, Artificial Sequence
  Description of Artificial Sequence: Synthetic oligonucleotide
  Antisense strand to SEQ ID NO: 717428
cuuuccacugccuaaaguc

SEQ ID NO: 717430 - RNA, 19 nt, Artificial Sequence
  Description of Artificial Sequence: Synthetic oligonucleotide
  Sense strand starting at position 904 of SEQ ID NO: 586431
ccguucauauuggugaaga

SEQ ID NO: 717431 - RNA, 19 nt, Artificial Sequence
  Description of Artificial Sequence: Synthetic oligonucleotide
  Antisense strand to SEQ ID NO: 717430
ucuucaccaauaugaacgg

SEQ ID NO: 717432 - RNA, 19 nt, Artificial Sequence
  Description of Artificial Sequence: Synthetic oligonucleotide
  Sense strand starting at position 906 of SEQ ID NO: 586431
guucauauuggugaagagu

SEQ ID NO: 717433 - RNA, 19 nt, Artificial Sequence
  Description of Artificial Sequence: Synthetic oligonucleotide
  Antisense strand to SEQ ID NO: 717432
acucuucaccaauaugaac

SEQ ID NO: 717434 - RNA, 19 nt, Artificial Sequence
  Description of Artificial Sequence: Synthetic oligonucleotide
  Sense strand starting at position 1000 of SEQ ID NO: 586431
gagccacucccagggaaau

SEQ ID NO: 717435 - RNA, 19 nt, Artificial Sequence
  Description of Artificial Sequence: Synthetic oligonucleotide
  Antisense strand to SEQ ID NO: 717434
auuucccugggaguggcuc

SEQ ID NO: 717436 - RNA, 19 nt, Artificial Sequence
  Description of Artificial Sequence: Synthetic oligonucleotide
  Sense strand starting at position 1066 of SEQ ID NO: 586431
ggaagucagugauaagaga

SEQ ID NO: 717437 - RNA, 19 nt, Artificial Sequence
  Description of Artificial Sequence: Synthetic oligonucleotide
  Antisense strand to SEQ ID NO: 717436
ucucuuaucacugacuucc

SEQ ID NO: 717438 - RNA, 19 nt, Artificial Sequence
  Description of Artificial Sequence: Synthetic oligonucleotide
  Sense strand starting at position 1395 of SEQ ID NO: 586431
augaguucucucugggaug

SEQ ID NO: 717439 - RNA, 19 nt, Artificial Sequence
  Description of Artificial Sequence: Synthetic oligonucleotide
  Antisense strand to SEQ ID NO: 717438
caucccagagagaacucau

SEQ ID NO: 717440 - RNA, 19 nt, Artificial Sequence
  Description of Artificial Sequence: Synthetic oligonucleotide
  Sense strand starting at position 1512 of SEQ ID NO: 586431
ggaacacgucaagaagcau

SEQ ID NO: 717441 - RNA, 19 nt, Artificial Sequence
  Description of Artificial Sequence: Synthetic oligonucleotide
  Antisense strand to SEQ ID NO: 717440
augcuucuugacguguucc

SEQ ID NO: 717442 - RNA, 19 nt, Artificial Sequence
  Description of Artificial Sequence: Synthetic oligonucleotide
  Sense strand starting at position 1807 of SEQ ID NO: 586431
cguucuucccagugagaug

SEQ ID NO: 717443 - RNA, 19 nt, Artificial Sequence
  Description of Artificial Sequence: Synthetic oligonucleotide
  Antisense strand to SEQ ID NO: 717442
caucucacugggaagaacg

SEQ ID NO: 717444 - RNA, 19 nt, Artificial Sequence
  Description of Artificial Sequence: Synthetic oligonucleotide
  Sense strand starting at position 1808 of SEQ ID NO: 586431
guucuucccagugagauga

SEQ ID NO: 717445 - RNA, 19 nt, Artificial Sequence
  Description of Artificial Sequence: Synthetic oligonucleotide
  Antisense strand to SEQ ID NO: 717444
ucaucucacugggaagaac

SEQ ID NO: 717446 - RNA, 19 nt, Artificial Sequence
  Description of Artificial Sequence: Synthetic oligonucleotide
  Sense strand starting at position 1849 of SEQ ID NO: 586431
uuugcagacgugcagaaau

SEQ ID NO: 717447 - RNA, 19 nt, Artificial Sequence
  Description of Artificial Sequence: Synthetic oligonucleotide
  Antisense strand to SEQ ID NO: 717446
auuucugcacgucugcaaa

SEQ ID NO: 717448 - RNA, 19 nt, Artificial Sequence
  Description of Artificial Sequence: Synthetic oligonucleotide
  Sense strand starting at position 1867 of SEQ ID NO: 586431
ugccuacucugccucagaa

SEQ ID NO: 717449 - RNA, 19 nt, Artificial Sequence
  Description of Artificial Sequence: Synthetic oligonucleotide
  Antisense strand to SEQ ID NO: 717448
uucugaggcagaguaggca

SEQ ID NO: 717450 - RNA, 19 nt, Artificial Sequence
  Description of Artificial Sequence: Synthetic oligonucleotide
  Sense strand starting at position 2059 of SEQ ID NO: 586431
uucuguacuugaguuccau

SEQ ID NO: 717451 - RNA, 19 nt, Artificial Sequence
  Description of Artificial Sequence: Synthetic oligonucleotide
  Antisense strand to SEQ ID NO: 717450
auggaacucaaguacagaa

SEQ ID NO: 717452 - RNA, 19 nt, Artificial Sequence
  Description of Artificial Sequence: Synthetic oligonucleotide
  Sense strand starting at position 2065 of SEQ ID NO: 586431
acuugaguuccauguguug

SEQ ID NO: 717453 - RNA, 19 nt, Artificial Sequence
  Description of Artificial Sequence: Synthetic oligonucleotide
  Antisense strand to SEQ ID NO: 717452
caacacauggaacucaagu

SEQ ID NO: 717454 - RNA, 19 nt, Artificial Sequence
  Description of Artificial Sequence: Synthetic oligonucleotide
  Sense strand starting at position 2067 of SEQ ID NO: 586431
uugaguuccauguguugga

SEQ ID NO: 717455 - RNA, 19 nt, Artificial Sequence
  Description of Artificial Sequence: Synthetic oligonucleotide
  Antisense strand to SEQ ID NO: 717454
uccaacacauggaacucaa

SEQ ID NO: 717456 - RNA, 19 nt, Artificial Sequence
  Description of Artificial Sequence: Synthetic oligonucleotide
  Sense strand starting at position 2068 of SEQ ID NO: 586431
ugaguuccauguguuggau

SEQ ID NO: 717457 - RNA, 19 nt, Artificial Sequence
  Description of Artificial Sequence: Synthetic oligonucleotide
  Antisense strand to SEQ ID NO: 717456
auccaacacauggaacuca

SEQ ID NO: 717458 - RNA, 19 nt, Artificial Sequence
  Description of Artificial Sequence: Synthetic oligonucleotide
  Sense strand starting at position 2083 of SEQ ID NO: 586431
ggaugcacccacuggaauu

SEQ ID NO: 717459 - RNA, 19 nt, Artificial Sequence
  Description of Artificial Sequence: Synthetic oligonucleotide
  Antisense strand to SEQ ID NO: 717458
aauuccagugggugcaucc

SEQ ID NO: 717460 - RNA, 19 nt, Artificial Sequence
  Description of Artificial Sequence: Synthetic oligonucleotide
  Sense strand starting at position 2319 of SEQ ID NO: 586431
ggagcuagacuaggacauu

SEQ ID NO: 717461 - RNA, 19 nt, Artificial Sequence
  Description of Artificial Sequence: Synthetic oligonucleotide
  Antisense strand to SEQ ID NO: 717460
aauguccuagucuagcucc

SEQ ID NO: 717462 - RNA, 19 nt, Artificial Sequence
  Description of Artificial Sequence: Synthetic oligonucleotide
  Sense strand starting at position 2447 of SEQ ID NO: 586431
gugaacgugcguagguaau

SEQ ID NO: 717463 - RNA, 19 nt, Artificial Sequence
  Description of Artificial Sequence: Synthetic oligonucleotide
  Antisense strand to SEQ ID NO: 717462
auuaccuacgcacguucac

SEQ ID NO: 717464 - RNA, 19 nt, Artificial Sequence
  Description of Artificial Sequence: Synthetic oligonucleotide
  Sense strand starting at position 2721 of SEQ ID NO: 586431
aaugcuaaagcuugaagga

SEQ ID NO: 717465 - RNA, 19 nt, Artificial Sequence
  Description of Artificial Sequence: Synthetic oligonucleotide
  Antisense strand to SEQ ID NO: 717464
uccuucaagcuuuagcauu

SEQ ID NO: 717466 - RNA, 19 nt, Artificial Sequence
  Description of Artificial Sequence: Synthetic oligonucleotide
  Sense strand starting at position 2746 of SEQ ID NO: 586431
aagauuaugucauccugug

SEQ ID NO: 717467 - RNA, 19 nt, Artificial Sequence
  Description of Artificial Sequence: Synthetic oligonucleotide
  Antisense strand to SEQ ID NO: 717466
cacaggaugacauaaucuu

SEQ ID NO: 717468 - RNA, 19 nt, Artificial Sequence
  Description of Artificial Sequence: Synthetic oligonucleotide
  Sense strand starting at position 3228 of SEQ ID NO: 586431
ccaguacgcucacuaauau

SEQ ID NO: 717469 - RNA, 19 nt, Artificial Sequence
  Description of Artificial Sequence: Synthetic oligonucleotide
  Antisense strand to SEQ ID NO: 717468
auauuagugagcguacugg

SEQ ID NO: 717470 - RNA, 19 nt, Artificial Sequence
  Description of Artificial Sequence: Synthetic oligonucleotide
  Sense strand starting at position 3255 of SEQ ID NO: 586431
gcuauuaggugcuuaauuu

SEQ ID NO: 717471 - RNA, 19 nt, Artificial Sequence
  Description of Artificial Sequence: Synthetic oligonucleotide
  Antisense strand to SEQ ID NO: 717470
aaauuaagcaccuaauagc

SEQ ID NO: 717472 - RNA, 19 nt, Artificial Sequence
  Description of Artificial Sequence: Synthetic oligonucleotide
  Sense strand starting at position 3371 of SEQ ID NO: 586431
agaaauguaacgugaauca

SEQ ID NO: 717473 - RNA, 19 nt, Artificial Sequence
  Description of Artificial Sequence: Synthetic oligonucleotide
  Antisense strand to SEQ ID NO: 717472
ugauucacguuacauuucu

SEQ ID NO: 717474 - RNA, 19 nt, Artificial Sequence
  Description of Artificial Sequence: Synthetic oligonucleotide
  Sense strand starting at position 3758 of SEQ ID NO: 586431
aagugcaaugaauaguaau

SEQ ID NO: 717475 - RNA, 19 nt, Artificial Sequence
  Description of Artificial Sequence: Synthetic oligonucleotide
  Antisense strand to SEQ ID NO: 717474
auuacuauucauugcacuu

SEQ ID NO: 717476 - RNA, 19 nt, Artificial Sequence
  Description of Artificial Sequence: Synthetic oligonucleotide
  Sense strand starting at position 3832 of SEQ ID NO: 586431
gauauaguauuagcaagau

SEQ ID NO: 717477 - RNA, 19 nt, Artificial Sequence
  Description of Artificial Sequence: Synthetic oligonucleotide
  Antisense strand to SEQ ID NO: 717476
aucuugcuaauacuauauc

SEQ ID NO: 717478 - RNA, 19 nt, Artificial Sequence
  Description of Artificial Sequence: Synthetic oligonucleotide
  Sense strand starting at position 3871 of SEQ ID NO: 586431
auauuuacaugaggucuuu

SEQ ID NO: 717479 - RNA, 19 nt, Artificial Sequence
  Description of Artificial Sequence: Synthetic oligonucleotide
  Antisense strand to SEQ ID NO: 717478
aaagaccucauguaaauau

SEQ ID NO: 717480 - RNA, 19 nt, Artificial Sequence
  Description of Artificial Sequence: Synthetic oligonucleotide
  Sense strand starting at position 3877 of SEQ ID NO: 586431
acaugaggucuuugaaauc

SEQ ID NO: 717481 - RNA, 19 nt, Artificial Sequence
  Description of Artificial Sequence: Synthetic oligonucleotide
  Antisense strand to SEQ ID NO: 717480
gauuucaaagaccucaugu

SEQ ID NO: 717482 - RNA, 19 nt, Artificial Sequence
  Description of Artificial Sequence: Synthetic oligonucleotide
  Sense strand starting at position 70 of SEQ ID NO: 586432
gacaaauggcagugguaua

SEQ ID NO: 717483 - RNA, 19 nt, Artificial Sequence
  Description of Artificial Sequence: Synthetic oligonucleotide
  Antisense strand to SEQ ID NO: 717482
uauaccacugccauuuguc

SEQ ID NO: 717484 - RNA, 19 nt, Artificial Sequence
  Description of Artificial Sequence: Synthetic oligonucleotide
  Sense strand starting at position 82 of SEQ ID NO: 586432
ugguauaugaagcaaguuu

SEQ ID NO: 717485 - RNA, 19 nt, Artificial Sequence
  Description of Artificial Sequence: Synthetic oligonucleotide
  Antisense strand to SEQ ID NO: 717484
aaacuugcuucauauacca

SEQ ID NO: 717486 - RNA, 19 nt, Artificial Sequence
  Description of Artificial Sequence: Synthetic oligonucleotide
  Sense strand starting at position 125 of SEQ ID NO: 586432
auccuuggcugucuauuua

SEQ ID NO: 717487 - RNA, 19 nt, Artificial Sequence
  Description of Artificial Sequence: Synthetic oligonucleotide
  Antisense strand to SEQ ID NO: 717486
uaaauagacagccaaggau

SEQ ID NO: 717488 - RNA, 19 nt, Artificial Sequence
  Description of Artificial Sequence: Synthetic oligonucleotide
  Sense strand starting at position 157 of SEQ ID NO: 586432
ggcaucucuguauacaaau

SEQ ID NO: 717489 - RNA, 19 nt, Artificial Sequence
  Description of Artificial Sequence: Synthetic oligonucleotide
  Antisense strand to SEQ ID NO: 717488
auuuguauacagagaugcc

SEQ ID NO: 717490 - RNA, 19 nt, Artificial Sequence
  Description of Artificial Sequence: Synthetic oligonucleotide
  Sense strand starting at position 617 of SEQ ID NO: 586432
ccaucagucccaggaagaa

SEQ ID NO: 717491 - RNA, 19 nt, Artificial Sequence
  Description of Artificial Sequence: Synthetic oligonucleotide
  Antisense strand to SEQ ID NO: 717490
uucuuccugggacugaugg

SEQ ID NO: 717492 - RNA, 19 nt, Artificial Sequence
  Description of Artificial Sequence: Synthetic oligonucleotide
  Sense strand starting at position 858 of SEQ ID NO: 586432
ccaggugauacccggaaca

SEQ ID NO: 717493 - RNA, 19 nt, Artificial Sequence
  Description of Artificial Sequence: Synthetic oligonucleotide
  Antisense strand to SEQ ID NO: 717492
uguuccggguaucaccugg

SEQ ID NO: 717494 - RNA, 19 nt, Artificial Sequence
  Description of Artificial Sequence: Synthetic oligonucleotide
  Sense strand starting at position 912 of SEQ ID NO: 586432
ggcugugagcaagaugaaa

SEQ ID NO: 717495 - RNA, 19 nt, Artificial Sequence
  Description of Artificial Sequence: Synthetic oligonucleotide
  Antisense strand to SEQ ID NO: 717494
uuucaucuugcucacagcc

SEQ ID NO: 717496 - RNA, 19 nt, Artificial Sequence
  Description of Artificial Sequence: Synthetic oligonucleotide
  Sense strand starting at position 914 of SEQ ID NO: 586432
cugugagcaagaugaaaug

SEQ ID NO: 717497 - RNA, 19 nt, Artificial Sequence
  Description of Artificial Sequence: Synthetic oligonucleotide
  Antisense strand to SEQ ID NO: 717496
cauuucaucuugcucacag

SEQ ID NO: 717498 - RNA, 19 nt, Artificial Sequence
  Description of Artificial Sequence: Synthetic oligonucleotide
  Sense strand starting at position 935 of SEQ ID NO: 586432
gauggacugccauaccauu

SEQ ID NO: 717499 - RNA, 19 nt, Artificial Sequence
  Description of Artificial Sequence: Synthetic oligonucleotide
  Antisense strand to SEQ ID NO: 717498
aaugguauggcaguccauc

SEQ ID NO: 717500 - RNA, 19 nt, Artificial Sequence
  Description of Artificial Sequence: Synthetic oligonucleotide
  Sense strand starting at position 941 of SEQ ID NO: 586432
cugccauaccauugaauga

SEQ ID NO: 717501 - RNA, 19 nt, Artificial Sequence
  Description of Artificial Sequence: Synthetic oligonucleotide
  Antisense strand to SEQ ID NO: 717500
ucauucaaugguauggcag

SEQ ID NO: 717502 - RNA, 19 nt, Artificial Sequence
  Description of Artificial Sequence: Synthetic oligonucleotide
  Sense strand starting at position 998 of SEQ ID NO: 586432
ugcuaaugacaacgggaua

SEQ ID NO: 717503 - RNA, 19 nt, Artificial Sequence
  Description of Artificial Sequence: Synthetic oligonucleotide
  Antisense strand to SEQ ID NO: 717502
uaucccguugucauuagca

SEQ ID NO: 717504 - RNA, 19 nt, Artificial Sequence
  Description of Artificial Sequence: Synthetic oligonucleotide
  Sense strand starting at position 999 of SEQ ID NO: 586432
gcuaaugacaacgggauaa

SEQ ID NO: 717505 - RNA, 19 nt, Artificial Sequence
  Description of Artificial Sequence: Synthetic oligonucleotide
  Antisense strand to SEQ ID NO: 717504
uuaucccguugucauuagc

SEQ ID NO: 717506 - RNA, 19 nt, Artificial Sequence
  Description of Artificial Sequence: Synthetic oligonucleotide
  Sense strand starting at position 1117 of SEQ ID NO: 586432
uuuaaauacuacucggaca

SEQ ID NO: 717507 - RNA, 19 nt, Artificial Sequence
  Description of Artificial Sequence: Synthetic oligonucleotide
  Antisense strand to SEQ ID NO: 717506
uguccgaguaguauuuaaa

SEQ ID NO: 717508 - RNA, 19 nt, Artificial Sequence
  Description of Artificial Sequence: Synthetic oligonucleotide
  Sense strand starting at position 1180 of SEQ ID NO: 586432
acuguaaauuagguuuaga

SEQ ID NO: 717509 - RNA, 19 nt, Artificial Sequence
  Description of Artificial Sequence: Synthetic oligonucleotide
  Antisense strand to SEQ ID NO: 717508
ucuaaaccuaauuuacagu

SEQ ID NO: 717510 - RNA, 19 nt, Artificial Sequence
  Description of Artificial Sequence: Synthetic oligonucleotide
  Sense strand starting at position 1220 of SEQ ID NO: 586432
gcacgucgaccacauuuau

SEQ ID NO: 717511 - RNA, 19 nt, Artificial Sequence
  Description of Artificial Sequence: Synthetic oligonucleotide
  Antisense strand to SEQ ID NO: 717510
auaaauguggucgacgugc

SEQ ID NO: 717512 - RNA, 19 nt, Artificial Sequence
  Description of Artificial Sequence: Synthetic oligonucleotide
  Sense strand starting at position 2007 of SEQ ID NO: 586432
cgggauagguaguucuaag

SEQ ID NO: 717513 - RNA, 19 nt, Artificial Sequence
  Description of Artificial Sequence: Synthetic oligonucleotide
  Antisense strand to SEQ ID NO: 717512
cuuagaacuaccuaucccg

SEQ ID NO: 717514 - RNA, 19 nt, Artificial Sequence
  Description of Artificial Sequence: Synthetic oligonucleotide
  Sense strand starting at position 2027 of SEQ ID NO: 586432
cgcagagcucugccucuua

SEQ ID NO: 717515 - RNA, 19 nt, Artificial Sequence
  Description of Artificial Sequence: Synthetic oligonucleotide
  Antisense strand to SEQ ID NO: 717514
uaagaggcagagcucugcg

SEQ ID NO: 717516 - RNA, 19 nt, Artificial Sequence
  Description of Artificial Sequence: Synthetic oligonucleotide
  Sense strand starting at position 2101 of SEQ ID NO: 586432
guuagaaucgcuggaaagg

SEQ ID NO: 717517 - RNA, 19 nt, Artificial Sequence
  Description of Artificial Sequence: Synthetic oligonucleotide
  Antisense strand to SEQ ID NO: 717516
ccuuuccagcgauucuaac

SEQ ID NO: 717518 - RNA, 19 nt, Artificial Sequence
  Description of Artificial Sequence: Synthetic oligonucleotide
  Sense strand starting at position 2133 of SEQ ID NO: 586432
ucucaagaccauuggcuau

SEQ ID NO: 717519 - RNA, 19 nt, Artificial Sequence
  Description of Artificial Sequence: Synthetic oligonucleotide
  Antisense strand to SEQ ID NO: 717518
auagccaauggucuugaga

SEQ ID NO: 717520 - RNA, 19 nt, Artificial Sequence
  Description of Artificial Sequence: Synthetic oligonucleotide
  Sense strand starting at position 2246 of SEQ ID NO: 586432
cgacuucuugguuggagag

SEQ ID NO: 717521 - RNA, 19 nt, Artificial Sequence
  Description of Artificial Sequence: Synthetic oligonucleotide
  Antisense strand to SEQ ID NO: 717520
cucuccaaccaagaagucg

SEQ ID NO: 717522 - RNA, 19 nt, Artificial Sequence
  Description of Artificial Sequence: Synthetic oligonucleotide
  Sense strand starting at position 2392 of SEQ ID NO: 586432
aggaguaaccucuguggau

SEQ ID NO: 717523 - RNA, 19 nt, Artificial Sequence
  Description of Artificial Sequence: Synthetic oligonucleotide
  Antisense strand to SEQ ID NO: 717522
auccacagagguuacuccu

SEQ ID NO: 717524 - RNA, 19 nt, Artificial Sequence
  Description of Artificial Sequence: Synthetic oligonucleotide
  Sense strand starting at position 2393 of SEQ ID NO: 586432
ggaguaaccucuguggaug

SEQ ID NO: 717525 - RNA, 19 nt, Artificial Sequence
  Description of Artificial Sequence: Synthetic oligonucleotide
  Antisense strand to SEQ ID NO: 717524
cauccacagagguuacucc

SEQ ID NO: 717526 - RNA, 19 nt, Artificial Sequence
  Description of Artificial Sequence: Synthetic oligonucleotide
  Sense strand starting at position 2404 of SEQ ID NO: 586432
uguggaugucaacauccaa

SEQ ID NO: 717527 - RNA, 19 nt, Artificial Sequence
  Description of Artificial Sequence: Synthetic oligonucleotide
  Antisense strand to SEQ ID NO: 717526
uuggauguugacauccaca

SEQ ID NO: 717528 - RNA, 19 nt, Artificial Sequence
  Description of Artificial Sequence: Synthetic oligonucleotide
  Sense strand starting at position 2455 of SEQ ID NO: 586432
cauggagaaugccuuggua

SEQ ID NO: 717529 - RNA, 19 nt, Artificial Sequence
  Description of Artificial Sequence: Synthetic oligonucleotide
  Antisense strand to SEQ ID NO: 717528
uaccaaggcauucuccaug

SEQ ID NO: 717530 - RNA, 19 nt, Artificial Sequence
  Description of Artificial Sequence: Synthetic oligonucleotide
  Sense strand starting at position 2457 of SEQ ID NO: 586432
uggagaaugccuugguaag

SEQ ID NO: 717531 - RNA, 19 nt, Artificial Sequence
  Description of Artificial Sequence: Synthetic oligonucleotide
  Antisense strand to SEQ ID NO: 717530
cuuaccaaggcauucucca

SEQ ID NO: 717532 - RNA, 19 nt, Artificial Sequence
  Description of Artificial Sequence: Synthetic oligonucleotide
  Sense strand starting at position 2458 of SEQ ID NO: 586432
ggagaaugccuugguaaga

SEQ ID NO: 717533 - RNA, 19 nt, Artificial Sequence
  Description of Artificial Sequence: Synthetic oligonucleotide
  Antisense strand to SEQ ID NO: 717532
ucuuaccaaggcauucucc

SEQ ID NO: 717534 - RNA, 19 nt, Artificial Sequence
  Description of Artificial Sequence: Synthetic oligonucleotide
  Sense strand starting at position 2459 of SEQ ID NO: 586432
gagaaugccuugguaagaa

SEQ ID NO: 717535 - RNA, 19 nt, Artificial Sequence
  Description of Artificial Sequence: Synthetic oligonucleotide
  Antisense strand to SEQ ID NO: 717534
uucuuaccaaggcauucuc

SEQ ID NO: 717536 - RNA, 19 nt, Artificial Sequence
  Description of Artificial Sequence: Synthetic oligonucleotide
  Sense strand starting at position 2507 of SEQ ID NO: 586432
ggaauugccucuuuggaag

SEQ ID NO: 717537 - RNA, 19 nt, Artificial Sequence
  Description of Artificial Sequence: Synthetic oligonucleotide
  Antisense strand to SEQ ID NO: 717536
cuuccaaagaggcaauucc

SEQ ID NO: 717538 - RNA, 19 nt, Artificial Sequence
  Description of Artificial Sequence: Synthetic oligonucleotide
  Sense strand starting at position 2722 of SEQ ID NO: 586432
cguguaaagaacuguauuu

SEQ ID NO: 717539 - RNA, 19 nt, Artificial Sequence
  Description of Artificial Sequence: Synthetic oligonucleotide
  Antisense strand to SEQ ID NO: 717538
aaauacaguucuuuacacg

SEQ ID NO: 717540 - RNA, 19 nt, Artificial Sequence
  Description of Artificial Sequence: Synthetic oligonucleotide
  Sense strand starting at position 2763 of SEQ ID NO: 586432
gauucugaguuaccaagaa

SEQ ID NO: 717541 - RNA, 19 nt, Artificial Sequence
  Description of Artificial Sequence: Synthetic oligonucleotide
  Antisense strand to SEQ ID NO: 717540
uucuugguaacucagaauc

SEQ ID NO: 717542 - RNA, 19 nt, Artificial Sequence
  Description of Artificial Sequence: Synthetic oligonucleotide
  Sense strand starting at position 2807 of SEQ ID NO: 586432
ugagaauagcauugaucuc

SEQ ID NO: 717543 - RNA, 19 nt, Artificial Sequence
  Description of Artificial Sequence: Synthetic oligonucleotide
  Antisense strand to SEQ ID NO: 717542
gagaucaaugcuauucuca

SEQ ID NO: 717544 - RNA, 19 nt, Artificial Sequence
  Description of Artificial Sequence: Synthetic oligonucleotide
  Sense strand starting at position 3003 of SEQ ID NO: 586432
gguucuaaaugacccuaua

SEQ ID NO: 717545 - RNA, 19 nt, Artificial Sequence
  Description of Artificial Sequence: Synthetic oligonucleotide
  Antisense strand to SEQ ID NO: 717544
uauagggucauuuagaacc

SEQ ID NO: 717546 - RNA, 19 nt, Artificial Sequence
  Description of Artificial Sequence: Synthetic oligonucleotide
  Sense strand starting at position 3071 of SEQ ID NO: 586432
auaauucuauaggcaguaa

SEQ ID NO: 717547 - RNA, 19 nt, Artificial Sequence
  Description of Artificial Sequence: Synthetic oligonucleotide
  Antisense strand to SEQ ID NO: 717546
uuacugccuauagaauuau

SEQ ID NO: 717548 - RNA, 19 nt, Artificial Sequence
  Description of Artificial Sequence: Synthetic oligonucleotide
  Sense strand starting at position 3303 of SEQ ID NO: 586432
gcuaucgugauagauagac

SEQ ID NO: 717549 - RNA, 19 nt, Artificial Sequence
  Description of Artificial Sequence: Synthetic oligonucleotide
  Antisense strand to SEQ ID NO: 717548
gucuaucuaucacgauagc

SEQ ID NO: 717550 - RNA, 19 nt, Artificial Sequence
  Description of Artificial Sequence: Synthetic oligonucleotide
  Sense strand starting at position 3327 of SEQ ID NO: 586432
uaaaguucucauggguaca

SEQ ID NO: 717551 - RNA, 19 nt, Artificial Sequence
  Description of Artificial Sequence: Synthetic oligonucleotide
  Antisense strand to SEQ ID NO: 717550
uguacccaugagaacuuua

SEQ ID NO: 717552 - RNA, 19 nt, Artificial Sequence
  Description of Artificial Sequence: Synthetic oligonucleotide
  Sense strand starting at position 3330 of SEQ ID NO: 586432
aguucucauggguacaagu

SEQ ID NO: 717553 - RNA, 19 nt, Artificial Sequence
  Description of Artificial Sequence: Synthetic oligonucleotide
  Antisense strand to SEQ ID NO: 717552
acuuguacccaugagaacu

SEQ ID NO: 717554 - RNA, 19 nt, Artificial Sequence
  Description of Artificial Sequence: Synthetic oligonucleotide
  Sense strand starting at position 3463 of SEQ ID NO: 586432
ggugaagacucacucauua

SEQ ID NO: 717555 - RNA, 19 nt, Artificial Sequence
  Description of Artificial Sequence: Synthetic oligonucleotide
  Antisense strand to SEQ ID NO: 717554
uaaugagugagucuucacc

SEQ ID NO: 717556 - RNA, 19 nt, Artificial Sequence
  Description of Artificial Sequence: Synthetic oligonucleotide
  Sense strand starting at position 3646 of SEQ ID NO: 586432
uugagaagguacucaaauu

SEQ ID NO: 717557 - RNA, 19 nt, Artificial Sequence
  Description of Artificial Sequence: Synthetic oligonucleotide
  Antisense strand to SEQ ID NO: 717556
aauuugaguaccuucucaa

SEQ ID NO: 717558 - RNA, 19 nt, Artificial Sequence
  Description of Artificial Sequence: Synthetic oligonucleotide
  Sense strand starting at position 3861 of SEQ ID NO: 586432
cugaucauacaauguugaa

SEQ ID NO: 717559 - RNA, 19 nt, Artificial Sequence
  Description of Artificial Sequence: Synthetic oligonucleotide
  Antisense strand to SEQ ID NO: 717558
uucaacauuguaugaucag

SEQ ID NO: 717560 - RNA, 19 nt, Artificial Sequence
  Description of Artificial Sequence: Synthetic oligonucleotide
  Sense strand starting at position 3942 of SEQ ID NO: 586432
acaguauaaugaguaucaa

SEQ ID NO: 717561 - RNA, 19 nt, Artificial Sequence
  Description of Artificial Sequence: Synthetic oligonucleotide
  Antisense strand to SEQ ID NO: 717560
uugauacucauuauacugu

SEQ ID NO: 717562 - RNA, 19 nt, Artificial Sequence
  Description of Artificial Sequence: Synthetic oligonucleotide
  Sense strand starting at position 124 of SEQ ID NO: 586433
gacuguuacgaggaucuga

SEQ ID NO: 717563 - RNA, 19 nt, Artificial Sequence
  Description of Artificial Sequence: Synthetic oligonucleotide
  Antisense strand to SEQ ID NO: 717562
ucagauccucguaacaguc

SEQ ID NO: 717564 - RNA, 19 nt, Artificial Sequence
  Description of Artificial Sequence: Synthetic oligonucleotide
  Sense strand starting at position 264 of SEQ ID NO: 586433
agcagaaggcgaugagaaa

SEQ ID NO: 717565 - RNA, 19 nt, Artificial Sequence
  Description of Artificial Sequence: Synthetic oligonucleotide
  Antisense strand to SEQ ID NO: 717564
uuucucaucgccuucugcu

SEQ ID NO: 717566 - RNA, 19 nt, Artificial Sequence
  Description of Artificial Sequence: Synthetic oligonucleotide
  Sense strand starting at position 316 of SEQ ID NO: 586433
ugaccuucugaguaacugu

SEQ ID NO: 717567 - RNA, 19 nt, Artificial Sequence
  Description of Artificial Sequence: Synthetic oligonucleotide
  Antisense strand to SEQ ID NO: 717566
acaguuacucagaagguca

SEQ ID NO: 717568 - RNA, 19 nt, Artificial Sequence
  Description of Artificial Sequence: Synthetic oligonucleotide
  Sense strand starting at position 458 of SEQ ID NO: 586433
aaaugaaauugagauggua

SEQ ID NO: 717569 - RNA, 19 nt, Artificial Sequence
  Description of Artificial Sequence: Synthetic oligonucleotide
  Antisense strand to SEQ ID NO: 717568
uaccaucucaauuucauuu

SEQ ID NO: 717570 - RNA, 19 nt, Artificial Sequence
  Description of Artificial Sequence: Synthetic oligonucleotide
  Sense strand starting at position 502 of SEQ ID NO: 586433
cuuggaugucagugaggac

SEQ ID NO: 717571 - RNA, 19 nt, Artificial Sequence
  Description of Artificial Sequence: Synthetic oligonucleotide
  Antisense strand to SEQ ID NO: 717570
guccucacugacauccaag

SEQ ID NO: 717572 - RNA, 19 nt, Artificial Sequence
  Description of Artificial Sequence: Synthetic oligonucleotide
  Sense strand starting at position 555 of SEQ ID NO: 586433
ggaagcccucucuaagagu

SEQ ID NO: 717573 - RNA, 19 nt, Artificial Sequence
  Description of Artificial Sequence: Synthetic oligonucleotide
  Antisense strand to SEQ ID NO: 717572
acucuuagagagggcuucc

SEQ ID NO: 717574 - RNA, 19 nt, Artificial Sequence
  Description of Artificial Sequence: Synthetic oligonucleotide
  Sense strand starting at position 626 of SEQ ID NO: 586433
gggugugucaauugauauc

SEQ ID NO: 717575 - RNA, 19 nt, Artificial Sequence
  Description of Artificial Sequence: Synthetic oligonucleotide
  Antisense strand to SEQ ID NO: 717574
gauaucaauugacacaccc

SEQ ID NO: 717576 - RNA, 19 nt, Artificial Sequence
  Description of Artificial Sequence: Synthetic oligonucleotide
  Sense strand starting at position 670 of SEQ ID NO: 586433
gcaggucaauuagccauaa

SEQ ID NO: 717577 - RNA, 19 nt, Artificial Sequence
  Description of Artificial Sequence: Synthetic oligonucleotide
  Antisense strand to SEQ ID NO: 717576
uuauggcuaauugaccugc

SEQ ID NO: 717578 - RNA, 19 nt, Artificial Sequence
  Description of Artificial Sequence: Synthetic oligonucleotide
  Sense strand starting at position 674 of SEQ ID NO: 586433
gucaauuagccauaaagac

SEQ ID NO: 717579 - RNA, 19 nt, Artificial Sequence
  Description of Artificial Sequence: Synthetic oligonucleotide
  Antisense strand to SEQ ID NO: 717578
gucuuuauggcuaauugac

SEQ ID NO: 717580 - RNA, 19 nt, Artificial Sequence
  Description of Artificial Sequence: Synthetic oligonucleotide
  Sense strand starting at position 854 of SEQ ID NO: 586433
ugcacauuguaucuauaug

SEQ ID NO: 717581 - RNA, 19 nt, Artificial Sequence
  Description of Artificial Sequence: Synthetic oligonucleotide
  Antisense strand to SEQ ID NO: 717580
cauauagauacaaugugca

SEQ ID NO: 717582 - RNA, 19 nt, Artificial Sequence
  Description of Artificial Sequence: Synthetic oligonucleotide
  Sense strand starting at position 860 of SEQ ID NO: 586433
uuguaucuauaugucagau

SEQ ID NO: 717583 - RNA, 19 nt, Artificial Sequence
  Description of Artificial Sequence: Synthetic oligonucleotide
  Antisense strand to SEQ ID NO: 717582
aucugacauauagauacaa

SEQ ID NO: 717584 - RNA, 19 nt, Artificial Sequence
  Description of Artificial Sequence: Synthetic oligonucleotide
  Sense strand starting at position 888 of SEQ ID NO: 586433
ggaagcugcccauauguua

SEQ ID NO: 717585 - RNA, 19 nt, Artificial Sequence
  Description of Artificial Sequence: Synthetic oligonucleotide
  Antisense strand to SEQ ID NO: 717584
uaacauaugggcagcuucc

SEQ ID NO: 717586 - RNA, 19 nt, Artificial Sequence
  Description of Artificial Sequence: Synthetic oligonucleotide
  Sense strand starting at position 928 of SEQ ID NO: 586433
cugcaaagaguaggucuua

SEQ ID NO: 717587 - RNA, 19 nt, Artificial Sequence
  Description of Artificial Sequence: Synthetic oligonucleotide
  Antisense strand to SEQ ID NO: 717586
uaagaccuacucuuugcag

SEQ ID NO: 717588 - RNA, 19 nt, Artificial Sequence
  Description of Artificial Sequence: Synthetic oligonucleotide
  Sense strand starting at position 1183 of SEQ ID NO: 586433
ugcugaaugagcuaaugua

SEQ ID NO: 717589 - RNA, 19 nt, Artificial Sequence
  Description of Artificial Sequence: Synthetic oligonucleotide
  Antisense strand to SEQ ID NO: 717588
uacauuagcucauucagca

SEQ ID NO: 717590 - RNA, 19 nt, Artificial Sequence
  Description of Artificial Sequence: Synthetic oligonucleotide
  Sense strand starting at position 1405 of SEQ ID NO: 586433
ggguuugaccgucaagaac

SEQ ID NO: 717591 - RNA, 19 nt, Artificial Sequence
  Description of Artificial Sequence: Synthetic oligonucleotide
  Antisense strand to SEQ ID NO: 717590
guucuugacggucaaaccc

SEQ ID NO: 717592 - RNA, 19 nt, Artificial Sequence
  Description of Artificial Sequence: Synthetic oligonucleotide
  Sense strand starting at position 1450 of SEQ ID NO: 586433
gggagaaguucuuuccgag

SEQ ID NO: 717593 - RNA, 19 nt, Artificial Sequence
  Description of Artificial Sequence: Synthetic oligonucleotide
  Antisense strand to SEQ ID NO: 717592
cucggaaagaacuucuccc

SEQ ID NO: 717594 - RNA, 19 nt, Artificial Sequence
  Description of Artificial Sequence: Synthetic oligonucleotide
  Sense strand starting at position 2200 of SEQ ID NO: 586433
uggcccuggucaucugaga

SEQ ID NO: 717595 - RNA, 19 nt, Artificial Sequence
  Description of Artificial Sequence: Synthetic oligonucleotide
  Antisense strand to SEQ ID NO: 717594
ucucagaugaccagggcca

SEQ ID NO: 717596 - RNA, 19 nt, Artificial Sequence
  Description of Artificial Sequence: Synthetic oligonucleotide
  Sense strand starting at position 2304 of SEQ ID NO: 586433
ggacuaaacucacagggaa

SEQ ID NO: 717597 - RNA, 19 nt, Artificial Sequence
  Description of Artificial Sequence: Synthetic oligonucleotide
  Antisense strand to SEQ ID NO: 717596
uucccugugaguuuagucc

SEQ ID NO: 717598 - RNA, 19 nt, Artificial Sequence
  Description of Artificial Sequence: Synthetic oligonucleotide
  Sense strand starting at position 2429 of SEQ ID NO: 586433
cuucuugggcaccgaaauu

SEQ ID NO: 717599 - RNA, 19 nt, Artificial Sequence
  Description of Artificial Sequence: Synthetic oligonucleotide
  Antisense strand to SEQ ID NO: 717598
aauuucggugcccaagaag

SEQ ID NO: 717600 - RNA, 19 nt, Artificial Sequence
  Description of Artificial Sequence: Synthetic oligonucleotide
  Sense strand starting at position 2475 of SEQ ID NO: 586433
gccugcuuucccguaauga

SEQ ID NO: 717601 - RNA, 19 nt, Artificial Sequence
  Description of Artificial Sequence: Synthetic oligonucleotide
  Antisense strand to SEQ ID NO: 717600
ucauuacgggaaagcaggc

SEQ ID NO: 717602 - RNA, 19 nt, Artificial Sequence
  Description of Artificial Sequence: Synthetic oligonucleotide
  Sense strand starting at position 2476 of SEQ ID NO: 586433
ccugcuuucccguaaugag

SEQ ID NO: 717603 - RNA, 19 nt, Artificial Sequence
  Description of Artificial Sequence: Synthetic oligonucleotide
  Antisense strand to SEQ ID NO: 717602
cucauuacgggaaagcagg

SEQ ID NO: 717604 - RNA, 19 nt, Artificial Sequence
  Description of Artificial Sequence: Synthetic oligonucleotide
  Sense strand starting at position 2485 of SEQ ID NO: 586433
ccguaaugagacugccauu

SEQ ID NO: 717605 - RNA, 19 nt, Artificial Sequence
  Description of Artificial Sequence: Synthetic oligonucleotide
  Antisense strand to SEQ ID NO: 717604
aauggcagucucauuacgg

SEQ ID NO: 717606 - RNA, 19 nt, Artificial Sequence
  Description of Artificial Sequence: Synthetic oligonucleotide
  Sense strand starting at position 2549 of SEQ ID NO: 586433
acaacuuccuggcuaggua

SEQ ID NO: 717607 - RNA, 19 nt, Artificial Sequence
  Description of Artificial Sequence: Synthetic oligonucleotide
  Antisense strand to SEQ ID NO: 717606
uaccuagccaggaaguugu

SEQ ID NO: 717608 - RNA, 19 nt, Artificial Sequence
  Description of Artificial Sequence: Synthetic oligonucleotide
  Sense strand starting at position 2651 of SEQ ID NO: 586433
ugggaaaguuggguuucua

SEQ ID NO: 717609 - RNA, 19 nt, Artificial Sequence
  Description of Artificial Sequence: Synthetic oligonucleotide
  Antisense strand to SEQ ID NO: 717608
uagaaacccaacuuuccca

SEQ ID NO: 717610 - RNA, 19 nt, Artificial Sequence
  Description of Artificial Sequence: Synthetic oligonucleotide
  Sense strand starting at position 2822 of SEQ ID NO: 586433
cccaguucugagggcuaca

SEQ ID NO: 717611 - RNA, 19 nt, Artificial Sequence
  Description of Artificial Sequence: Synthetic oligonucleotide
  Antisense strand to SEQ ID NO: 717610
uguagcccucagaacuggg

SEQ ID NO: 717612 - RNA, 19 nt, Artificial Sequence
  Description of Artificial Sequence: Synthetic oligonucleotide
  Sense strand starting at position 2983 of SEQ ID NO: 586433
aucaguuguauuggaauag

SEQ ID NO: 717613 - RNA, 19 nt, Artificial Sequence
  Description of Artificial Sequence: Synthetic oligonucleotide
  Antisense strand to SEQ ID NO: 717612
cuauuccaauacaacugau

SEQ ID NO: 717614 - RNA, 19 nt, Artificial Sequence
  Description of Artificial Sequence: Synthetic oligonucleotide
  Sense strand starting at position 3069 of SEQ ID NO: 586433
ucuggaauaccaggcauua

SEQ ID NO: 717615 - RNA, 19 nt, Artificial Sequence
  Description of Artificial Sequence: Synthetic oligonucleotide
  Antisense strand to SEQ ID NO: 717614
uaaugccugguauuccaga

SEQ ID NO: 717616 - RNA, 19 nt, Artificial Sequence
  Description of Artificial Sequence: Synthetic oligonucleotide
  Sense strand starting at position 3462 of SEQ ID NO: 586433
cuauacaguuacuuaugua

SEQ ID NO: 717617 - RNA, 19 nt, Artificial Sequence
  Description of Artificial Sequence: Synthetic oligonucleotide
  Antisense strand to SEQ ID NO: 717616
uacauaaguaacuguauag

SEQ ID NO: 717618 - RNA, 19 nt, Artificial Sequence
  Description of Artificial Sequence: Synthetic oligonucleotide
  Sense strand starting at position 3524 of SEQ ID NO: 586433
aaaggaaaguguucccaag

SEQ ID NO: 717619 - RNA, 19 nt, Artificial Sequence
  Description of Artificial Sequence: Synthetic oligonucleotide
  Antisense strand to SEQ ID NO: 717618
cuugggaacacuuuccuuu

SEQ ID NO: 717620 - RNA, 19 nt, Artificial Sequence
  Description of Artificial Sequence: Synthetic oligonucleotide
  Sense strand starting at position 3526 of SEQ ID NO: 586433
aggaaaguguucccaagca

SEQ ID NO: 717621 - RNA, 19 nt, Artificial Sequence
  Description of Artificial Sequence: Synthetic oligonucleotide
  Antisense strand to SEQ ID NO: 717620
ugcuugggaacacuuuccu

SEQ ID NO: 717622 - RNA, 19 nt, Artificial Sequence
  Description of Artificial Sequence: Synthetic oligonucleotide
  Sense strand starting at position 3729 of SEQ ID NO: 586433
ggcagauugcaccauaauc

SEQ ID NO: 717623 - RNA, 19 nt, Artificial Sequence
  Description of Artificial Sequence: Synthetic oligonucleotide
  Antisense strand to SEQ ID NO: 717622
gauuauggugcaaucugcc

SEQ ID NO: 717624 - RNA, 19 nt, Artificial Sequence
  Description of Artificial Sequence: Synthetic oligonucleotide
  Sense strand starting at position 3771 of SEQ ID NO: 586433
gugcaaugguucuuugaga

SEQ ID NO: 717625 - RNA, 19 nt, Artificial Sequence
  Description of Artificial Sequence: Synthetic oligonucleotide
  Antisense strand to SEQ ID NO: 717624
ucucaaagaaccauugcac

SEQ ID NO: 717626 - RNA, 19 nt, Artificial Sequence
  Description of Artificial Sequence: Synthetic oligonucleotide
  Sense strand starting at position 3772 of SEQ ID NO: 586433
ugcaaugguucuuugagaa

SEQ ID NO: 717627 - RNA, 19 nt, Artificial Sequence
  Description of Artificial Sequence: Synthetic oligonucleotide
  Antisense strand to SEQ ID NO: 717626
uucucaaagaaccauugca

SEQ ID NO: 717628 - RNA, 19 nt, Artificial Sequence
  Description of Artificial Sequence: Synthetic oligonucleotide
  Sense strand starting at position 3818 of SEQ ID NO: 586433
gagaaagagccaugugcuc

SEQ ID NO: 717629 - RNA, 19 nt, Artificial Sequence
  Description of Artificial Sequence: Synthetic oligonucleotide
  Antisense strand to SEQ ID NO: 717628
gagcacauggcucuuucuc

SEQ ID NO: 717630 - RNA, 19 nt, Artificial Sequence
  Description of Artificial Sequence: Synthetic oligonucleotide
  Sense strand starting at position 3831 of SEQ ID NO: 586433
gugcucuuauauguagaga

SEQ ID NO: 717631 - RNA, 19 nt, Artificial Sequence
  Description of Artificial Sequence: Synthetic oligonucleotide
  Antisense strand to SEQ ID NO: 717630
ucucuacauauaagagcac

SEQ ID NO: 717632 - RNA, 19 nt, Artificial Sequence
  Description of Artificial Sequence: Synthetic oligonucleotide
  Sense strand starting at position 3832 of SEQ ID NO: 586433
ugcucuuauauguagagag

SEQ ID NO: 717633 - RNA, 19 nt, Artificial Sequence
  Description of Artificial Sequence: Synthetic oligonucleotide
  Antisense strand to SEQ ID NO: 717632
cucucuacauauaagagca

SEQ ID NO: 717634 - RNA, 19 nt, Artificial Sequence
  Description of Artificial Sequence: Synthetic oligonucleotide
  Sense strand starting at position 3925 of SEQ ID NO: 586433
gauggaugauguguaauaa

SEQ ID NO: 717635 - RNA, 19 nt, Artificial Sequence
  Description of Artificial Sequence: Synthetic oligonucleotide
  Antisense strand to SEQ ID NO: 717634
uuauuacacaucauccauc

SEQ ID NO: 717636 - RNA, 19 nt, Artificial Sequence
  Description of Artificial Sequence: Synthetic oligonucleotide
  Sense strand starting at position 3948 of SEQ ID NO: 586433
agaauaacaugagacagau

SEQ ID NO: 717637 - RNA, 19 nt, Artificial Sequence
  Description of Artificial Sequence: Synthetic oligonucleotide
  Antisense strand to SEQ ID NO: 717636
aucugucucauguuauucu

SEQ ID NO: 717638 - RNA, 19 nt, Artificial Sequence
  Description of Artificial Sequence: Synthetic oligonucleotide
  Sense strand starting at position 3973 of SEQ ID NO: 586433
uccauaagagauuguguau

SEQ ID NO: 717639 - RNA, 19 nt, Artificial Sequence
  Description of Artificial Sequence: Synthetic oligonucleotide
  Antisense strand to SEQ ID NO: 717638
auacacaaucucuuaugga

SEQ ID NO: 717640 - RNA, 19 nt, Artificial Sequence
  Description of Artificial Sequence: Synthetic oligonucleotide
  Sense strand starting at position 3976 of SEQ ID NO: 586433
auaagagauuguguaucag

SEQ ID NO: 717641 - RNA, 19 nt, Artificial Sequence
  Description of Artificial Sequence: Synthetic oligonucleotide
  Antisense strand to SEQ ID NO: 717640
cugauacacaaucucuuau

SEQ ID NO: 717642 - RNA, 19 nt, Artificial Sequence
  Description of Artificial Sequence: Synthetic oligonucleotide
  Sense strand starting at position 474 of SEQ ID NO: 586434
uugagacuuggugggucua

SEQ ID NO: 717643 - RNA, 19 nt, Artificial Sequence
  Description of Artificial Sequence: Synthetic oligonucleotide
  Antisense strand to SEQ ID NO: 717642
uagacccaccaagucucaa

SEQ ID NO: 717644 - RNA, 19 nt, Artificial Sequence
  Description of Artificial Sequence: Synthetic oligonucleotide
  Sense strand starting at position 475 of SEQ ID NO: 586434
ugagacuuggugggucuau

SEQ ID NO: 717645 - RNA, 19 nt, Artificial Sequence
  Description of Artificial Sequence: Synthetic oligonucleotide
  Antisense strand to SEQ ID NO: 717644
auagacccaccaagucuca

SEQ ID NO: 717646 - RNA, 19 nt, Artificial Sequence
  Description of Artificial Sequence: Synthetic oligonucleotide
  Sense strand starting at position 575 of SEQ ID NO: 586434
ccuuuaucccucgauguca

SEQ ID NO: 717647 - RNA, 19 nt, Artificial Sequence
  Description of Artificial Sequence: Synthetic oligonucleotide
  Antisense strand to SEQ ID NO: 717646
ugacaucgagggauaaagg

SEQ ID NO: 717648 - RNA, 19 nt, Artificial Sequence
  Description of Artificial Sequence: Synthetic oligonucleotide
  Sense strand starting at position 584 of SEQ ID NO: 586434
cucgaugucaagcauagau

SEQ ID NO: 717649 - RNA, 19 nt, Artificial Sequence
  Description of Artificial Sequence: Synthetic oligonucleotide
  Antisense strand to SEQ ID NO: 717648
aucuaugcuugacaucgag

SEQ ID NO: 717650 - RNA, 19 nt, Artificial Sequence
  Description of Artificial Sequence: Synthetic oligonucleotide
  Sense strand starting at position 629 of SEQ ID NO: 586434
guccgaaauugcucauuua

SEQ ID NO: 717651 - RNA, 19 nt, Artificial Sequence
  Description of Artificial Sequence: Synthetic oligonucleotide
  Antisense strand to SEQ ID NO: 717650
uaaaugagcaauuucggac

SEQ ID NO: 717652 - RNA, 19 nt, Artificial Sequence
  Description of Artificial Sequence: Synthetic oligonucleotide
  Sense strand starting at position 994 of SEQ ID NO: 586434
ugaaguguaaaugagcuuu

SEQ ID NO: 717653 - RNA, 19 nt, Artificial Sequence
  Description of Artificial Sequence: Synthetic oligonucleotide
  Antisense strand to SEQ ID NO: 717652
aaagcucauuuacacuuca

SEQ ID NO: 717654 - RNA, 19 nt, Artificial Sequence
  Description of Artificial Sequence: Synthetic oligonucleotide
  Sense strand starting at position 1267 of SEQ ID NO: 586434
uggcaaggcugaucucaga

SEQ ID NO: 717655 - RNA, 19 nt, Artificial Sequence
  Description of Artificial Sequence: Synthetic oligonucleotide
  Antisense strand to SEQ ID NO: 717654
ucugagaucagccuugcca

SEQ ID NO: 717656 - RNA, 19 nt, Artificial Sequence
  Description of Artificial Sequence: Synthetic oligonucleotide
  Sense strand starting at position 1392 of SEQ ID NO: 586434
uggguuugagggugaacau

SEQ ID NO: 717657 - RNA, 19 nt, Artificial Sequence
  Description of Artificial Sequence: Synthetic oligonucleotide
  Antisense strand to SEQ ID NO: 717656
auguucacccucaaaccca

SEQ ID NO: 717658 - RNA, 19 nt, Artificial Sequence
  Description of Artificial Sequence: Synthetic oligonucleotide
  Sense strand starting at position 1474 of SEQ ID NO: 586434
cuugguaucguguaagauc

SEQ ID NO: 717659 - RNA, 19 nt, Artificial Sequence
  Description of Artificial Sequence: Synthetic oligonucleotide
  Antisense strand to SEQ ID NO: 717658
gaucuuacacgauaccaag

SEQ ID NO: 717660 - RNA, 19 nt, Artificial Sequence
  Description of Artificial Sequence: Synthetic oligonucleotide
  Sense strand starting at position 1483 of SEQ ID NO: 586434
guguaagaucgccagaauu

SEQ ID NO: 717661 - RNA, 19 nt, Artificial Sequence
  Description of Artificial Sequence: Synthetic oligonucleotide
  Antisense strand to SEQ ID NO: 717660
aauucuggcgaucuuacac

SEQ ID NO: 717662 - RNA, 19 nt, Artificial Sequence
  Description of Artificial Sequence: Synthetic oligonucleotide
  Sense strand starting at position 1874 of SEQ ID NO: 586434
cggagaagucugggaugcu

SEQ ID NO: 717663 - RNA, 19 nt, Artificial Sequence
  Description of Artificial Sequence: Synthetic oligonucleotide
  Antisense strand to SEQ ID NO: 717662
agcaucccagacuucuccg

SEQ ID NO: 717664 - RNA, 19 nt, Artificial Sequence
  Description of Artificial Sequence: Synthetic oligonucleotide
  Sense strand starting at position 2177 of SEQ ID NO: 586434
cucagauauuuauauguuc

SEQ ID NO: 717665 - RNA, 19 nt, Artificial Sequence
  Description of Artificial Sequence: Synthetic oligonucleotide
  Antisense strand to SEQ ID NO: 717664
gaacauauaaauaucugag

SEQ ID NO: 717666 - RNA, 19 nt, Artificial Sequence
  Description of Artificial Sequence: Synthetic oligonucleotide
  Sense strand starting at position 2322 of SEQ ID NO: 586434
aagggauugucucuugaga

SEQ ID NO: 717667 - RNA, 19 nt, Artificial Sequence
  Description of Artificial Sequence: Synthetic oligonucleotide
  Antisense strand to SEQ ID NO: 717666
ucucaagagacaaucccuu

SEQ ID NO: 717668 - RNA, 19 nt, Artificial Sequence
  Description of Artificial Sequence: Synthetic oligonucleotide
  Sense strand starting at position 2333 of SEQ ID NO: 586434
ucuugagacgcugauuaug

SEQ ID NO: 717669 - RNA, 19 nt, Artificial Sequence
  Description of Artificial Sequence: Synthetic oligonucleotide
  Antisense strand to SEQ ID NO: 717668
cauaaucagcgucucaaga

SEQ ID NO: 717670 - RNA, 19 nt, Artificial Sequence
  Description of Artificial Sequence: Synthetic oligonucleotide
  Sense strand starting at position 2335 of SEQ ID NO: 586434
uugagacgcugauuaugua

SEQ ID NO: 717671 - RNA, 19 nt, Artificial Sequence
  Description of Artificial Sequence: Synthetic oligonucleotide
  Antisense strand to SEQ ID NO: 717670
uacauaaucagcgucucaa

SEQ ID NO: 717672 - RNA, 19 nt, Artificial Sequence
  Description of Artificial Sequence: Synthetic oligonucleotide
  Sense strand starting at position 2409 of SEQ ID NO: 586434
cguucuuuccaacacuaga

SEQ ID NO: 717673 - RNA, 19 nt, Artificial Sequence
  Description of Artificial Sequence: Synthetic oligonucleotide
  Antisense strand to SEQ ID NO: 717672
ucuaguguuggaaagaacg

SEQ ID NO: 717674 - RNA, 19 nt, Artificial Sequence
  Description of Artificial Sequence: Synthetic oligonucleotide
  Sense strand starting at position 2448 of SEQ ID NO: 586434
ugccuuauguuuccaggga

SEQ ID NO: 717675 - RNA, 19 nt, Artificial Sequence
  Description of Artificial Sequence: Synthetic oligonucleotide
  Antisense strand to SEQ ID NO: 717674
ucccuggaaacauaaggca

SEQ ID NO: 717676 - RNA, 19 nt, Artificial Sequence
  Description of Artificial Sequence: Synthetic oligonucleotide
  Sense strand starting at position 2452 of SEQ ID NO: 586434
uuauguuuccagggaguuu

SEQ ID NO: 717677 - RNA, 19 nt, Artificial Sequence
  Description of Artificial Sequence: Synthetic oligonucleotide
  Antisense strand to SEQ ID NO: 717676
aaacucccuggaaacauaa

SEQ ID NO: 717678 - RNA, 19 nt, Artificial Sequence
  Description of Artificial Sequence: Synthetic oligonucleotide
  Sense strand starting at position 2471 of SEQ ID NO: 586434
ucagauuagcaacggugaa

SEQ ID NO: 717679 - RNA, 19 nt, Artificial Sequence
  Description of Artificial Sequence: Synthetic oligonucleotide
  Antisense strand to SEQ ID NO: 717678
uucaccguugcuaaucuga

SEQ ID NO: 717680 - RNA, 19 nt, Artificial Sequence
  Description of Artificial Sequence: Synthetic oligonucleotide
  Sense strand starting at position 2475 of SEQ ID NO: 586434
auuagcaacggugaaauaa

SEQ ID NO: 717681 - RNA, 19 nt, Artificial Sequence
  Description of Artificial Sequence: Synthetic oligonucleotide
  Antisense strand to SEQ ID NO: 717680
uuauuucaccguugcuaau

SEQ ID NO: 717682 - RNA, 19 nt, Artificial Sequence
  Description of Artificial Sequence: Synthetic oligonucleotide
  Sense strand starting at position 2541 of SEQ ID NO: 586434
gggcuucuaugauuagauc

SEQ ID NO: 717683 - RNA, 19 nt, Artificial Sequence
  Description of Artificial Sequence: Synthetic oligonucleotide
  Antisense strand to SEQ ID NO: 717682
gaucuaaucauagaagccc

SEQ ID NO: 717684 - RNA, 19 nt, Artificial Sequence
  Description of Artificial Sequence: Synthetic oligonucleotide
  Sense strand starting at position 2542 of SEQ ID NO: 586434
ggcuucuaugauuagauca

SEQ ID NO: 717685 - RNA, 19 nt, Artificial Sequence
  Description of Artificial Sequence: Synthetic oligonucleotide
  Antisense strand to SEQ ID NO: 717684
ugaucuaaucauagaagcc

SEQ ID NO: 717686 - RNA, 19 nt, Artificial Sequence
  Description of Artificial Sequence: Synthetic oligonucleotide
  Sense strand starting at position 2794 of SEQ ID NO: 586434
acccacgagucuucucaau

SEQ ID NO: 717687 - RNA, 19 nt, Artificial Sequence
  Description of Artificial Sequence: Synthetic oligonucleotide
  Antisense strand to SEQ ID NO: 717686
auugagaagacucgugggu

SEQ ID NO: 717688 - RNA, 19 nt, Artificial Sequence
  Description of Artificial Sequence: Synthetic oligonucleotide
  Sense strand starting at position 2796 of SEQ ID NO: 586434
ccacgagucuucucaauaa

SEQ ID NO: 717689 - RNA, 19 nt, Artificial Sequence
  Description of Artificial Sequence: Synthetic oligonucleotide
  Antisense strand to SEQ ID NO: 717688
uuauugagaagacucgugg

SEQ ID NO: 717690 - RNA, 19 nt, Artificial Sequence
  Description of Artificial Sequence: Synthetic oligonucleotide
  Sense strand starting at position 3046 of SEQ ID NO: 586434
acaguccuccgugaugaca

SEQ ID NO: 717691 - RNA, 19 nt, Artificial Sequence
  Description of Artificial Sequence: Synthetic oligonucleotide
  Antisense strand to SEQ ID NO: 717690
ugucaucacggaggacugu

SEQ ID NO: 717692 - RNA, 19 nt, Artificial Sequence
  Description of Artificial Sequence: Synthetic oligonucleotide
  Sense strand starting at position 3054 of SEQ ID NO: 586434
ccgugaugacaucauaguc

SEQ ID NO: 717693 - RNA, 19 nt, Artificial Sequence
  Description of Artificial Sequence: Synthetic oligonucleotide
  Antisense strand to SEQ ID NO: 717692
gacuaugaugucaucacgg

SEQ ID NO: 717694 - RNA, 19 nt, Artificial Sequence
  Description of Artificial Sequence: Synthetic oligonucleotide
  Sense strand starting at position 3118 of SEQ ID NO: 586434
ccaagucaucgcuaagagu

SEQ ID NO: 717695 - RNA, 19 nt, Artificial Sequence
  Description of Artificial Sequence: Synthetic oligonucleotide
  Antisense strand to SEQ ID NO: 717694
acucuuagcgaugacuugg

SEQ ID NO: 717696 - RNA, 19 nt, Artificial Sequence
  Description of Artificial Sequence: Synthetic oligonucleotide
  Sense strand starting at position 3127 of SEQ ID NO: 586434
cgcuaagagucauuacauu

SEQ ID NO: 717697 - RNA, 19 nt, Artificial Sequence
  Description of Artificial Sequence: Synthetic oligonucleotide
  Antisense strand to SEQ ID NO: 717696
aauguaaugacucuuagcg

SEQ ID NO: 717698 - RNA, 19 nt, Artificial Sequence
  Description of Artificial Sequence: Synthetic oligonucleotide
  Sense strand starting at position 3135 of SEQ ID NO: 586434
gucauuacauugcuacaca

SEQ ID NO: 717699 - RNA, 19 nt, Artificial Sequence
  Description of Artificial Sequence: Synthetic oligonucleotide
  Antisense strand to SEQ ID NO: 717698
uguguagcaauguaaugac

SEQ ID NO: 717700 - RNA, 19 nt, Artificial Sequence
  Description of Artificial Sequence: Synthetic oligonucleotide
  Sense strand starting at position 3237 of SEQ ID NO: 586434
cagauuacugaaugcaguu

SEQ ID NO: 717701 - RNA, 19 nt, Artificial Sequence
  Description of Artificial Sequence: Synthetic oligonucleotide
  Antisense strand to SEQ ID NO: 717700
aacugcauucaguaaucug

SEQ ID NO: 717702 - RNA, 19 nt, Artificial Sequence
  Description of Artificial Sequence: Synthetic oligonucleotide
  Sense strand starting at position 3250 of SEQ ID NO: 586434
gcaguugacuggguauaug

SEQ ID NO: 717703 - RNA, 19 nt, Artificial Sequence
  Description of Artificial Sequence: Synthetic oligonucleotide
  Antisense strand to SEQ ID NO: 717702
cauauacccagucaacugc

SEQ ID NO: 717704 - RNA, 19 nt, Artificial Sequence
  Description of Artificial Sequence: Synthetic oligonucleotide
  Sense strand starting at position 3253 of SEQ ID NO: 586434
guugacuggguauaugauu

SEQ ID NO: 717705 - RNA, 19 nt, Artificial Sequence
  Description of Artificial Sequence: Synthetic oligonucleotide
  Antisense strand to SEQ ID NO: 717704
aaucauauacccagucaac

SEQ ID NO: 717706 - RNA, 19 nt, Artificial Sequence
  Description of Artificial Sequence: Synthetic oligonucleotide
  Sense strand starting at position 3389 of SEQ ID NO: 586434
aguucaguggcacgauuua

SEQ ID NO: 717707 - RNA, 19 nt, Artificial Sequence
  Description of Artificial Sequence: Synthetic oligonucleotide
  Antisense strand to SEQ ID NO: 717706
uaaaucgugccacugaacu

SEQ ID NO: 717708 - RNA, 19 nt, Artificial Sequence
  Description of Artificial Sequence: Synthetic oligonucleotide
  Sense strand starting at position 3423 of SEQ ID NO: 586434
aauguucuuccuggaaaug

SEQ ID NO: 717709 - RNA, 19 nt, Artificial Sequence
  Description of Artificial Sequence: Synthetic oligonucleotide
  Antisense strand to SEQ ID NO: 717708
cauuuccaggaagaacauu

SEQ ID NO: 717710 - RNA, 19 nt, Artificial Sequence
  Description of Artificial Sequence: Synthetic oligonucleotide
  Sense strand starting at position 3483 of SEQ ID NO: 586434
gcacaaauucuacagguga

SEQ ID NO: 717711 - RNA, 19 nt, Artificial Sequence
  Description of Artificial Sequence: Synthetic oligonucleotide
  Antisense strand to SEQ ID NO: 717710
ucaccuguagaauuugugc

SEQ ID NO: 717712 - RNA, 19 nt, Artificial Sequence
  Description of Artificial Sequence: Synthetic oligonucleotide
  Sense strand starting at position 3512 of SEQ ID NO: 586434
gugauaguaauagaggcua

SEQ ID NO: 717713 - RNA, 19 nt, Artificial Sequence
  Description of Artificial Sequence: Synthetic oligonucleotide
  Antisense strand to SEQ ID NO: 717712
uagccucuauuacuaucac

SEQ ID NO: 717714 - RNA, 19 nt, Artificial Sequence
  Description of Artificial Sequence: Synthetic oligonucleotide
  Sense strand starting at position 3628 of SEQ ID NO: 586434
ccaacuuugcaaggcauua

SEQ ID NO: 717715 - RNA, 19 nt, Artificial Sequence
  Description of Artificial Sequence: Synthetic oligonucleotide
  Antisense strand to SEQ ID NO: 717714
uaaugccuugcaaaguugg

SEQ ID NO: 717716 - RNA, 19 nt, Artificial Sequence
  Description of Artificial Sequence: Synthetic oligonucleotide
  Sense strand starting at position 3720 of SEQ ID NO: 586434
augaguaugcaccaugaau

SEQ ID NO: 717717 - RNA, 19 nt, Artificial Sequence
  Description of Artificial Sequence: Synthetic oligonucleotide
  Antisense strand to SEQ ID NO: 717716
auucauggugcauacucau

SEQ ID NO: 717718 - RNA, 19 nt, Artificial Sequence
  Description of Artificial Sequence: Synthetic oligonucleotide
  Sense strand starting at position 3796 of SEQ ID NO: 586434
cagguaugucaauggauaa

SEQ ID NO: 717719 - RNA, 19 nt, Artificial Sequence
  Description of Artificial Sequence: Synthetic oligonucleotide
  Antisense strand to SEQ ID NO: 717718
uuauccauugacauaccug

SEQ ID NO: 717720 - RNA, 19 nt, Artificial Sequence
  Description of Artificial Sequence: Synthetic oligonucleotide
  Sense strand starting at position 3797 of SEQ ID NO: 586434
agguaugucaauggauaag

SEQ ID NO: 717721 - RNA, 19 nt, Artificial Sequence
  Description of Artificial Sequence: Synthetic oligonucleotide
  Antisense strand to SEQ ID NO: 717720
cuuauccauugacauaccu

SEQ ID NO: 717722 - RNA, 19 nt, Artificial Sequence
  Description of Artificial Sequence: Synthetic oligonucleotide
  Sense strand starting at position 141 of SEQ ID NO: 586435
ugaggugcuuucugccgaa

SEQ ID NO: 717723 - RNA, 19 nt, Artificial Sequence
  Description of Artificial Sequence: Synthetic oligonucleotide
  Antisense strand to SEQ ID NO: 717722
uucggcagaaagcaccuca

SEQ ID NO: 717724 - RNA, 19 nt, Artificial Sequence
  Description of Artificial Sequence: Synthetic oligonucleotide
  Sense strand starting at position 271 of SEQ ID NO: 586435
augcucugguucucaaauu

SEQ ID NO: 717725 - RNA, 19 nt, Artificial Sequence
  Description of Artificial Sequence: Synthetic oligonucleotide
  Antisense strand to SEQ ID NO: 717724
aauuugagaaccagagcau

SEQ ID NO: 717726 - RNA, 19 nt, Artificial Sequence
  Description of Artificial Sequence: Synthetic oligonucleotide
  Sense strand starting at position 272 of SEQ ID NO: 586435
ugcucugguucucaaauuu

SEQ ID NO: 717727 - RNA, 19 nt, Artificial Sequence
  Description of Artificial Sequence: Synthetic oligonucleotide
  Antisense strand to SEQ ID NO: 717726
aaauuugagaaccagagca

SEQ ID NO: 717728 - RNA, 19 nt, Artificial Sequence
  Description of Artificial Sequence: Synthetic oligonucleotide
  Sense strand starting at position 342 of SEQ ID NO: 586435
cagccaguguguuuagaca

SEQ ID NO: 717729 - RNA, 19 nt, Artificial Sequence
  Description of Artificial Sequence: Synthetic oligonucleotide
  Antisense strand to SEQ ID NO: 717728
ugucuaaacacacuggcug

SEQ ID NO: 717730 - RNA, 19 nt, Artificial Sequence
  Description of Artificial Sequence: Synthetic oligonucleotide
  Sense strand starting at position 444 of SEQ ID NO: 586435
ggguaaccuucggcaggua

SEQ ID NO: 717731 - RNA, 19 nt, Artificial Sequence
  Description of Artificial Sequence: Synthetic oligonucleotide
  Antisense strand to SEQ ID NO: 717730
uaccugccgaagguuaccc

SEQ ID NO: 717732 - RNA, 19 nt, Artificial Sequence
  Description of Artificial Sequence: Synthetic oligonucleotide
  Sense strand starting at position 456 of SEQ ID NO: 586435
gcagguaguuacuuauucu

SEQ ID NO: 717733 - RNA, 19 nt, Artificial Sequence
  Description of Artificial Sequence: Synthetic oligonucleotide
  Antisense strand to SEQ ID NO: 717732
agaauaaguaacuaccugc

SEQ ID NO: 717734 - RNA, 19 nt, Artificial Sequence
  Description of Artificial Sequence: Synthetic oligonucleotide
  Sense strand starting at position 473 of SEQ ID NO: 586435
cuggccuugucgugguuaa

SEQ ID NO: 717735 - RNA, 19 nt, Artificial Sequence
  Description of Artificial Sequence: Synthetic oligonucleotide
  Antisense strand to SEQ ID NO: 717734
uuaaccacgacaaggccag

SEQ ID NO: 717736 - RNA, 19 nt, Artificial Sequence
  Description of Artificial Sequence: Synthetic oligonucleotide
  Sense strand starting at position 474 of SEQ ID NO: 586435
uggccuugucgugguuaau

SEQ ID NO: 717737 - RNA, 19 nt, Artificial Sequence
  Description of Artificial Sequence: Synthetic oligonucleotide
  Antisense strand to SEQ ID NO: 717736
auuaaccacgacaaggcca

SEQ ID NO: 717738 - RNA, 19 nt, Artificial Sequence
  Description of Artificial Sequence: Synthetic oligonucleotide
  Sense strand starting at position 475 of SEQ ID NO: 586435
ggccuugucgugguuaaug

SEQ ID NO: 717739 - RNA, 19 nt, Artificial Sequence
  Description of Artificial Sequence: Synthetic oligonucleotide
  Antisense strand to SEQ ID NO: 717738
cauuaaccacgacaaggcc

SEQ ID NO: 717740 - RNA, 19 nt, Artificial Sequence
  Description of Artificial Sequence: Synthetic oligonucleotide
  Sense strand starting at position 477 of SEQ ID NO: 586435
ccuugucgugguuaauguu

SEQ ID NO: 717741 - RNA, 19 nt, Artificial Sequence
  Description of Artificial Sequence: Synthetic oligonucleotide
  Antisense strand to SEQ ID NO: 717740
aacauuaaccacgacaagg

SEQ ID NO: 717742 - RNA, 19 nt, Artificial Sequence
  Description of Artificial Sequence: Synthetic oligonucleotide
  Sense strand starting at position 493 of SEQ ID NO: 586435
guuccacugcuucggugua

SEQ ID NO: 717743 - RNA, 19 nt, Artificial Sequence
  Description of Artificial Sequence: Synthetic oligonucleotide
  Antisense strand to SEQ ID NO: 717742
uacaccgaagcaguggaac

SEQ ID NO: 717744 - RNA, 19 nt, Artificial Sequence
  Description of Artificial Sequence: Synthetic oligonucleotide
  Sense strand starting at position 566 of SEQ ID NO: 586435
gggcuuagccaggacaguu

SEQ ID NO: 717745 - RNA, 19 nt, Artificial Sequence
  Description of Artificial Sequence: Synthetic oligonucleotide
  Antisense strand to SEQ ID NO: 717744
aacuguccuggcuaagccc

SEQ ID NO: 717746 - RNA, 19 nt, Artificial Sequence
  Description of Artificial Sequence: Synthetic oligonucleotide
  Sense strand starting at position 603 of SEQ ID NO: 586435
guggcuucucgcccuuuau

SEQ ID NO: 717747 - RNA, 19 nt, Artificial Sequence
  Description of Artificial Sequence: Synthetic oligonucleotide
  Antisense strand to SEQ ID NO: 717746
auaaagggcgagaagccac

SEQ ID NO: 717748 - RNA, 19 nt, Artificial Sequence
  Description of Artificial Sequence: Synthetic oligonucleotide
  Sense strand starting at position 988 of SEQ ID NO: 586435
ggagguuauucuggagaca

SEQ ID NO: 717749 - RNA, 19 nt, Artificial Sequence
  Description of Artificial Sequence: Synthetic oligonucleotide
  Antisense strand to SEQ ID NO: 717748
ugucuccagaauaaccucc

SEQ ID NO: 717750 - RNA, 19 nt, Artificial Sequence
  Description of Artificial Sequence: Synthetic oligonucleotide
  Sense strand starting at position 3218 of SEQ ID NO: 586435
guguguucacgugagugca

SEQ ID NO: 717751 - RNA, 19 nt, Artificial Sequence
  Description of Artificial Sequence: Synthetic oligonucleotide
  Antisense strand to SEQ ID NO: 717750
ugcacucacgugaacacac

SEQ ID NO: 717752 - RNA, 19 nt, Artificial Sequence
  Description of Artificial Sequence: Synthetic oligonucleotide
  Sense strand starting at position 3230 of SEQ ID NO: 586435
gagugcaucucaucuguca

SEQ ID NO: 717753 - RNA, 19 nt, Artificial Sequence
  Description of Artificial Sequence: Synthetic oligonucleotide
  Antisense strand to SEQ ID NO: 717752
ugacagaugagaugcacuc

SEQ ID NO: 717754 - RNA, 19 nt, Artificial Sequence
  Description of Artificial Sequence: Synthetic oligonucleotide
  Sense strand starting at position 3260 of SEQ ID NO: 586435
gggagcggugcuuguacaa

SEQ ID NO: 717755 - RNA, 19 nt, Artificial Sequence
  Description of Artificial Sequence: Synthetic oligonucleotide
  Antisense strand to SEQ ID NO: 717754
uuguacaagcaccgcuccc

SEQ ID NO: 717756 - RNA, 19 nt, Artificial Sequence
  Description of Artificial Sequence: Synthetic oligonucleotide
  Sense strand starting at position 3323 of SEQ ID NO: 586435
cccuguagggaauaugagu

SEQ ID NO: 717757 - RNA, 19 nt, Artificial Sequence
  Description of Artificial Sequence: Synthetic oligonucleotide
  Antisense strand to SEQ ID NO: 717756
acucauauucccuacaggg

SEQ ID NO: 717758 - RNA, 19 nt, Artificial Sequence
  Description of Artificial Sequence: Synthetic oligonucleotide
  Sense strand starting at position 3336 of SEQ ID NO: 586435
augaguuaaucuggauguc

SEQ ID NO: 717759 - RNA, 19 nt, Artificial Sequence
  Description of Artificial Sequence: Synthetic oligonucleotide
  Antisense strand to SEQ ID NO: 717758
gacauccagauuaacucau

SEQ ID NO: 717760 - RNA, 19 nt, Artificial Sequence
  Description of Artificial Sequence: Synthetic oligonucleotide
  Sense strand starting at position 3337 of SEQ ID NO: 586435
ugaguuaaucuggauguca

SEQ ID NO: 717761 - RNA, 19 nt, Artificial Sequence
  Description of Artificial Sequence: Synthetic oligonucleotide
  Antisense strand to SEQ ID NO: 717760
ugacauccagauuaacuca

SEQ ID NO: 717762 - RNA, 19 nt, Artificial Sequence
  Description of Artificial Sequence: Synthetic oligonucleotide
  Sense strand starting at position 3361 of SEQ ID NO: 586435
agauguagucagggaggua

SEQ ID NO: 717763 - RNA, 19 nt, Artificial Sequence
  Description of Artificial Sequence: Synthetic oligonucleotide
  Antisense strand to SEQ ID NO: 717762
uaccucccugacuacaucu

SEQ ID NO: 717764 - RNA, 19 nt, Artificial Sequence
  Description of Artificial Sequence: Synthetic oligonucleotide
  Sense strand starting at position 3564 of SEQ ID NO: 586435
ucaguuuccucugauguga

SEQ ID NO: 717765 - RNA, 19 nt, Artificial Sequence
  Description of Artificial Sequence: Synthetic oligonucleotide
  Antisense strand to SEQ ID NO: 717764
ucacaucagaggaaacuga

SEQ ID NO: 717766 - RNA, 19 nt, Artificial Sequence
  Description of Artificial Sequence: Synthetic oligonucleotide
  Sense strand starting at position 3596 of SEQ ID NO: 586435
agcccauuguuccugagga

SEQ ID NO: 717767 - RNA, 19 nt, Artificial Sequence
  Description of Artificial Sequence: Synthetic oligonucleotide
  Antisense strand to SEQ ID NO: 717766
uccucaggaacaaugggcu

SEQ ID NO: 717768 - RNA, 19 nt, Artificial Sequence
  Description of Artificial Sequence: Synthetic oligonucleotide
  Sense strand starting at position 3597 of SEQ ID NO: 586435
gcccauuguuccugaggaa

SEQ ID NO: 717769 - RNA, 19 nt, Artificial Sequence
  Description of Artificial Sequence: Synthetic oligonucleotide
  Antisense strand to SEQ ID NO: 717768
uuccucaggaacaaugggc

SEQ ID NO: 717770 - RNA, 19 nt, Artificial Sequence
  Description of Artificial Sequence: Synthetic oligonucleotide
  Sense strand starting at position 3598 of SEQ ID NO: 586435
cccauuguuccugaggaau

SEQ ID NO: 717771 - RNA, 19 nt, Artificial Sequence
  Description of Artificial Sequence: Synthetic oligonucleotide
  Antisense strand to SEQ ID NO: 717770
auuccucaggaacaauggg

SEQ ID NO: 717772 - RNA, 19 nt, Artificial Sequence
  Description of Artificial Sequence: Synthetic oligonucleotide
  Sense strand starting at position 3600 of SEQ ID NO: 586435
cauuguuccugaggaauca

SEQ ID NO: 717773 - RNA, 19 nt, Artificial Sequence
  Description of Artificial Sequence: Synthetic oligonucleotide
  Antisense strand to SEQ ID NO: 717772
ugauuccucaggaacaaug

SEQ ID NO: 717774 - RNA, 19 nt, Artificial Sequence
  Description of Artificial Sequence: Synthetic oligonucleotide
  Sense strand starting at position 3680 of SEQ ID NO: 586435
gggagaaguuguuccaguc

SEQ ID NO: 717775 - RNA, 19 nt, Artificial Sequence
  Description of Artificial Sequence: Synthetic oligonucleotide
  Antisense strand to SEQ ID NO: 717774
gacuggaacaacuucuccc

SEQ ID NO: 717776 - RNA, 19 nt, Artificial Sequence
  Description of Artificial Sequence: Synthetic oligonucleotide
  Sense strand starting at position 3848 of SEQ ID NO: 586435
gugaguggaccucauccuu

SEQ ID NO: 717777 - RNA, 19 nt, Artificial Sequence
  Description of Artificial Sequence: Synthetic oligonucleotide
  Antisense strand to SEQ ID NO: 717776
aaggaugagguccacucac

SEQ ID NO: 717778 - RNA, 19 nt, Artificial Sequence
  Description of Artificial Sequence: Synthetic oligonucleotide
  Sense strand starting at position 3888 of SEQ ID NO: 586435
cagcacaucuguguguaga

SEQ ID NO: 717779 - RNA, 19 nt, Artificial Sequence
  Description of Artificial Sequence: Synthetic oligonucleotide
  Antisense strand to SEQ ID NO: 717778
ucuacacacagaugugcug

SEQ ID NO: 717780 - RNA, 19 nt, Artificial Sequence
  Description of Artificial Sequence: Synthetic oligonucleotide
  Sense strand starting at position 3890 of SEQ ID NO: 586435
gcacaucuguguguagaca

SEQ ID NO: 717781 - RNA, 19 nt, Artificial Sequence
  Description of Artificial Sequence: Synthetic oligonucleotide
  Antisense strand to SEQ ID NO: 717780
ugucuacacacagaugugc

SEQ ID NO: 717782 - RNA, 19 nt, Artificial Sequence
  Description of Artificial Sequence: Synthetic oligonucleotide
  Sense strand starting at position 17 of SEQ ID NO: 586436
uggccagcuuucuuugaga

SEQ ID NO: 717783 - RNA, 19 nt, Artificial Sequence
  Description of Artificial Sequence: Synthetic oligonucleotide
  Antisense strand to SEQ ID NO: 717782
ucucaaagaaagcuggcca

SEQ ID NO: 717784 - RNA, 19 nt, Artificial Sequence
  Description of Artificial Sequence: Synthetic oligonucleotide
  Sense strand starting at position 19 of SEQ ID NO: 586436
gccagcuuucuuugagaaa

SEQ ID NO: 717785 - RNA, 19 nt, Artificial Sequence
  Description of Artificial Sequence: Synthetic oligonucleotide
  Antisense strand to SEQ ID NO: 717784
uuucucaaagaaagcuggc

SEQ ID NO: 717786 - RNA, 19 nt, Artificial Sequence
  Description of Artificial Sequence: Synthetic oligonucleotide
  Sense strand starting at position 22 of SEQ ID NO: 586436
agcuuucuuugagaaagaa

SEQ ID NO: 717787 - RNA, 19 nt, Artificial Sequence
  Description of Artificial Sequence: Synthetic oligonucleotide
  Antisense strand to SEQ ID NO: 717786
uucuuucucaaagaaagcu

SEQ ID NO: 717788 - RNA, 19 nt, Artificial Sequence
  Description of Artificial Sequence: Synthetic oligonucleotide
  Sense strand starting at position 32 of SEQ ID NO: 586436
gagaaagaauucucgaguu

SEQ ID NO: 717789 - RNA, 19 nt, Artificial Sequence
  Description of Artificial Sequence: Synthetic oligonucleotide
  Antisense strand to SEQ ID NO: 717788
aacucgagaauucuuucuc

SEQ ID NO: 717790 - RNA, 19 nt, Artificial Sequence
  Description of Artificial Sequence: Synthetic oligonucleotide
  Sense strand starting at position 97 of SEQ ID NO: 586436
cuggguucugacuguaauc

SEQ ID NO: 717791 - RNA, 19 nt, Artificial Sequence
  Description of Artificial Sequence: Synthetic oligonucleotide
  Antisense strand to SEQ ID NO: 717790
gauuacagucagaacccag

SEQ ID NO: 717792 - RNA, 19 nt, Artificial Sequence
  Description of Artificial Sequence: Synthetic oligonucleotide
  Sense strand starting at position 99 of SEQ ID NO: 586436
ggguucugacuguaauccu

SEQ ID NO: 717793 - RNA, 19 nt, Artificial Sequence
  Description of Artificial Sequence: Synthetic oligonucleotide
  Antisense strand to SEQ ID NO: 717792
aggauuacagucagaaccc

SEQ ID NO: 717794 - RNA, 19 nt, Artificial Sequence
  Description of Artificial Sequence: Synthetic oligonucleotide
  Sense strand starting at position 255 of SEQ ID NO: 586436
guagaaauaucagucucuu

SEQ ID NO: 717795 - RNA, 19 nt, Artificial Sequence
  Description of Artificial Sequence: Synthetic oligonucleotide
  Antisense strand to SEQ ID NO: 717794
aagagacugauauuucuac

SEQ ID NO: 717796 - RNA, 19 nt, Artificial Sequence
  Description of Artificial Sequence: Synthetic oligonucleotide
  Sense strand starting at position 616 of SEQ ID NO: 586436
gugugagcauacucuaaga

SEQ ID NO: 717797 - RNA, 19 nt, Artificial Sequence
  Description of Artificial Sequence: Synthetic oligonucleotide
  Antisense strand to SEQ ID NO: 717796
ucuuagaguaugcucacac

SEQ ID NO: 717798 - RNA, 19 nt, Artificial Sequence
  Description of Artificial Sequence: Synthetic oligonucleotide
  Sense strand starting at position 618 of SEQ ID NO: 586436
gugagcauacucuaagauc

SEQ ID NO: 717799 - RNA, 19 nt, Artificial Sequence
  Description of Artificial Sequence: Synthetic oligonucleotide
  Antisense strand to SEQ ID NO: 717798
gaucuuagaguaugcucac

SEQ ID NO: 717800 - RNA, 19 nt, Artificial Sequence
  Description of Artificial Sequence: Synthetic oligonucleotide
  Sense strand starting at position 626 of SEQ ID NO: 586436
acucuaagaucagcugaau

SEQ ID NO: 717801 - RNA, 19 nt, Artificial Sequence
  Description of Artificial Sequence: Synthetic oligonucleotide
  Antisense strand to SEQ ID NO: 717800
auucagcugaucuuagagu

SEQ ID NO: 717802 - RNA, 19 nt, Artificial Sequence
  Description of Artificial Sequence: Synthetic oligonucleotide
  Sense strand starting at position 629 of SEQ ID NO: 586436
cuaagaucagcugaauggu

SEQ ID NO: 717803 - RNA, 19 nt, Artificial Sequence
  Description of Artificial Sequence: Synthetic oligonucleotide
  Antisense strand to SEQ ID NO: 717802
accauucagcugaucuuag

SEQ ID NO: 717804 - RNA, 19 nt, Artificial Sequence
  Description of Artificial Sequence: Synthetic oligonucleotide
  Sense strand starting at position 1246 of SEQ ID NO: 586436
cgagacccgucuuuacaau

SEQ ID NO: 717805 - RNA, 19 nt, Artificial Sequence
  Description of Artificial Sequence: Synthetic oligonucleotide
  Antisense strand to SEQ ID NO: 717804
auuguaaagacgggucucg

SEQ ID NO: 717806 - RNA, 19 nt, Artificial Sequence
  Description of Artificial Sequence: Synthetic oligonucleotide
  Sense strand starting at position 1247 of SEQ ID NO: 586436
gagacccgucuuuacaauu

SEQ ID NO: 717807 - RNA, 19 nt, Artificial Sequence
  Description of Artificial Sequence: Synthetic oligonucleotide
  Antisense strand to SEQ ID NO: 717806
aauuguaaagacgggucuc

SEQ ID NO: 717808 - RNA, 19 nt, Artificial Sequence
  Description of Artificial Sequence: Synthetic oligonucleotide
  Sense strand starting at position 1282 of SEQ ID NO: 586436
guugcaaaguuugggaacu

SEQ ID NO: 717809 - RNA, 19 nt, Artificial Sequence
  Description of Artificial Sequence: Synthetic oligonucleotide
  Antisense strand to SEQ ID NO: 717808
aguucccaaacuuugcaac

SEQ ID NO: 717810 - RNA, 19 nt, Artificial Sequence
  Description of Artificial Sequence: Synthetic oligonucleotide
  Sense strand starting at position 1283 of SEQ ID NO: 586436
uugcaaaguuugggaacua

SEQ ID NO: 717811 - RNA, 19 nt, Artificial Sequence
  Description of Artificial Sequence: Synthetic oligonucleotide
  Antisense strand to SEQ ID NO: 717810
uaguucccaaacuuugcaa

SEQ ID NO: 717812 - RNA, 19 nt, Artificial Sequence
  Description of Artificial Sequence: Synthetic oligonucleotide
  Sense strand starting at position 1493 of SEQ ID NO: 586436
augcacggugcuugacaua

SEQ ID NO: 717813 - RNA, 19 nt, Artificial Sequence
  Description of Artificial Sequence: Synthetic oligonucleotide
  Antisense strand to SEQ ID NO: 717812
uaugucaagcaccgugcau

SEQ ID NO: 717814 - RNA, 19 nt, Artificial Sequence
  Description of Artificial Sequence: Synthetic oligonucleotide
  Sense strand starting at position 1623 of SEQ ID NO: 586436
gacguugagcaucauggaa

SEQ ID NO: 717815 - RNA, 19 nt, Artificial Sequence
  Description of Artificial Sequence: Synthetic oligonucleotide
  Antisense strand to SEQ ID NO: 717814
uuccaugaugcucaacguc

SEQ ID NO: 717816 - RNA, 19 nt, Artificial Sequence
  Description of Artificial Sequence: Synthetic oligonucleotide
  Sense strand starting at position 1945 of SEQ ID NO: 586436
gcacgucacgcucggagaa

SEQ ID NO: 717817 - RNA, 19 nt, Artificial Sequence
  Description of Artificial Sequence: Synthetic oligonucleotide
  Antisense strand to SEQ ID NO: 717816
uucuccgagcgugacgugc

SEQ ID NO: 717818 - RNA, 19 nt, Artificial Sequence
  Description of Artificial Sequence: Synthetic oligonucleotide
  Sense strand starting at position 1957 of SEQ ID NO: 586436
cggagaagugccuccgcga

SEQ ID NO: 717819 - RNA, 19 nt, Artificial Sequence
  Description of Artificial Sequence: Synthetic oligonucleotide
  Antisense strand to SEQ ID NO: 717818
ucgcggaggcacuucuccg

SEQ ID NO: 717820 - RNA, 19 nt, Artificial Sequence
  Description of Artificial Sequence: Synthetic oligonucleotide
  Sense strand starting at position 2228 of SEQ ID NO: 586436
uguauuuaacgccgcugaa

SEQ ID NO: 717821 - RNA, 19 nt, Artificial Sequence
  Description of Artificial Sequence: Synthetic oligonucleotide
  Antisense strand to SEQ ID NO: 717820
uucagcggcguuaaauaca

SEQ ID NO: 717822 - RNA, 19 nt, Artificial Sequence
  Description of Artificial Sequence: Synthetic oligonucleotide
  Sense strand starting at position 3116 of SEQ ID NO: 586436
gcugcaaugugguaugauc

SEQ ID NO: 717823 - RNA, 19 nt, Artificial Sequence
  Description of Artificial Sequence: Synthetic oligonucleotide
  Antisense strand to SEQ ID NO: 717822
gaucauaccacauugcagc

SEQ ID NO: 717824 - RNA, 19 nt, Artificial Sequence
  Description of Artificial Sequence: Synthetic oligonucleotide
  Sense strand starting at position 3124 of SEQ ID NO: 586436
gugguaugaucacaccagu

SEQ ID NO: 717825 - RNA, 19 nt, Artificial Sequence
  Description of Artificial Sequence: Synthetic oligonucleotide
  Antisense strand to SEQ ID NO: 717824
acuggugugaucauaccac

SEQ ID NO: 717826 - RNA, 19 nt, Artificial Sequence
  Description of Artificial Sequence: Synthetic oligonucleotide
  Sense strand starting at position 3127 of SEQ ID NO: 586436
guaugaucacaccagugua

SEQ ID NO: 717827 - RNA, 19 nt, Artificial Sequence
  Description of Artificial Sequence: Synthetic oligonucleotide
  Antisense strand to SEQ ID NO: 717826
uacacuggugugaucauac

SEQ ID NO: 717828 - RNA, 19 nt, Artificial Sequence
  Description of Artificial Sequence: Synthetic oligonucleotide
  Sense strand starting at position 3333 of SEQ ID NO: 586436
gugcacaugcugcagaauu

SEQ ID NO: 717829 - RNA, 19 nt, Artificial Sequence
  Description of Artificial Sequence: Synthetic oligonucleotide
  Antisense strand to SEQ ID NO: 717828
aauucugcagcaugugcac

SEQ ID NO: 717830 - RNA, 19 nt, Artificial Sequence
  Description of Artificial Sequence: Synthetic oligonucleotide
  Sense strand starting at position 3403 of SEQ ID NO: 586436
ugcaguaucuaggcaaaua

SEQ ID NO: 717831 - RNA, 19 nt, Artificial Sequence
  Description of Artificial Sequence: Synthetic oligonucleotide
  Antisense strand to SEQ ID NO: 717830
uauuugccuagauacugca

SEQ ID NO: 717832 - RNA, 19 nt, Artificial Sequence
  Description of Artificial Sequence: Synthetic oligonucleotide
  Sense strand starting at position 3476 of SEQ ID NO: 586436
gaaucaaucugguaaugug

SEQ ID NO: 717833 - RNA, 19 nt, Artificial Sequence
  Description of Artificial Sequence: Synthetic oligonucleotide
  Antisense strand to SEQ ID NO: 717832
cacauuaccagauugauuc

SEQ ID NO: 717834 - RNA, 19 nt, Artificial Sequence
  Description of Artificial Sequence: Synthetic oligonucleotide
  Sense strand starting at position 3479 of SEQ ID NO: 586436
ucaaucugguaauguguaa

SEQ ID NO: 717835 - RNA, 19 nt, Artificial Sequence
  Description of Artificial Sequence: Synthetic oligonucleotide
  Antisense strand to SEQ ID NO: 717834
uuacacauuaccagauuga

SEQ ID NO: 717836 - RNA, 19 nt, Artificial Sequence
  Description of Artificial Sequence: Synthetic oligonucleotide
  Sense strand starting at position 3493 of SEQ ID NO: 586436
uguaaacaggcuugaagau

SEQ ID NO: 717837 - RNA, 19 nt, Artificial Sequence
  Description of Artificial Sequence: Synthetic oligonucleotide
  Antisense strand to SEQ ID NO: 717836
aucuucaagccuguuuaca

SEQ ID NO: 717838 - RNA, 19 nt, Artificial Sequence
  Description of Artificial Sequence: Synthetic oligonucleotide
  Sense strand starting at position 3502 of SEQ ID NO: 586436
gcuugaagaucagcuaaau

SEQ ID NO: 717839 - RNA, 19 nt, Artificial Sequence
  Description of Artificial Sequence: Synthetic oligonucleotide
  Antisense strand to SEQ ID NO: 717838
auuuagcugaucuucaagc

SEQ ID NO: 717840 - RNA, 19 nt, Artificial Sequence
  Description of Artificial Sequence: Synthetic oligonucleotide
  Sense strand starting at position 3519 of SEQ ID NO: 586436
auuuauucuuaggcuugua

SEQ ID NO: 717841 - RNA, 19 nt, Artificial Sequence
  Description of Artificial Sequence: Synthetic oligonucleotide
  Antisense strand to SEQ ID NO: 717840
uacaagccuaagaauaaau

SEQ ID NO: 717842 - RNA, 19 nt, Artificial Sequence
  Description of Artificial Sequence: Synthetic oligonucleotide
  Sense strand starting at position 3522 of SEQ ID NO: 586436
uauucuuaggcuuguagag

SEQ ID NO: 717843 - RNA, 19 nt, Artificial Sequence
  Description of Artificial Sequence: Synthetic oligonucleotide
  Antisense strand to SEQ ID NO: 717842
cucuacaagccuaagaaua

SEQ ID NO: 717844 - RNA, 19 nt, Artificial Sequence
  Description of Artificial Sequence: Synthetic oligonucleotide
  Sense strand starting at position 3524 of SEQ ID NO: 586436
uucuuaggcuuguagagau

SEQ ID NO: 717845 - RNA, 19 nt, Artificial Sequence
  Description of Artificial Sequence: Synthetic oligonucleotide
  Antisense strand to SEQ ID NO: 717844
aucucuacaagccuaagaa

SEQ ID NO: 717846 - RNA, 19 nt, Artificial Sequence
  Description of Artificial Sequence: Synthetic oligonucleotide
  Sense strand starting at position 3551 of SEQ ID NO: 586436
guggaaguuugucaguccu

SEQ ID NO: 717847 - RNA, 19 nt, Artificial Sequence
  Description of Artificial Sequence: Synthetic oligonucleotide
  Antisense strand to SEQ ID NO: 717846
aggacugacaaacuuccac

SEQ ID NO: 717848 - RNA, 19 nt, Artificial Sequence
  Description of Artificial Sequence: Synthetic oligonucleotide
  Sense strand starting at position 3553 of SEQ ID NO: 586436
ggaaguuugucaguccugu

SEQ ID NO: 717849 - RNA, 19 nt, Artificial Sequence
  Description of Artificial Sequence: Synthetic oligonucleotide
  Antisense strand to SEQ ID NO: 717848
acaggacugacaaacuucc

SEQ ID NO: 717850 - RNA, 19 nt, Artificial Sequence
  Description of Artificial Sequence: Synthetic oligonucleotide
  Sense strand starting at position 3575 of SEQ ID NO: 586436
uuugaacuauguggaaaga

SEQ ID NO: 717851 - RNA, 19 nt, Artificial Sequence
  Description of Artificial Sequence: Synthetic oligonucleotide
  Antisense strand to SEQ ID NO: 717850
ucuuuccacauaguucaaa

SEQ ID NO: 717852 - RNA, 19 nt, Artificial Sequence
  Description of Artificial Sequence: Synthetic oligonucleotide
  Sense strand starting at position 3604 of SEQ ID NO: 586436
ugagguaacaugugauuau

SEQ ID NO: 717853 - RNA, 19 nt, Artificial Sequence
  Description of Artificial Sequence: Synthetic oligonucleotide
  Antisense strand to SEQ ID NO: 717852
auaaucacauguuaccuca

SEQ ID NO: 717854 - RNA, 19 nt, Artificial Sequence
  Description of Artificial Sequence: Synthetic oligonucleotide
  Sense strand starting at position 3605 of SEQ ID NO: 586436
gagguaacaugugauuaua

SEQ ID NO: 717855 - RNA, 19 nt, Artificial Sequence
  Description of Artificial Sequence: Synthetic oligonucleotide
  Antisense strand to SEQ ID NO: 717854
uauaaucacauguuaccuc

SEQ ID NO: 717856 - RNA, 19 nt, Artificial Sequence
  Description of Artificial Sequence: Synthetic oligonucleotide
  Sense strand starting at position 3607 of SEQ ID NO: 586436
gguaacaugugauuauaua

SEQ ID NO: 717857 - RNA, 19 nt, Artificial Sequence
  Description of Artificial Sequence: Synthetic oligonucleotide
  Antisense strand to SEQ ID NO: 717856
uauauaaucacauguuacc

SEQ ID NO: 717858 - RNA, 19 nt, Artificial Sequence
  Description of Artificial Sequence: Synthetic oligonucleotide
  Sense strand starting at position 3641 of SEQ ID NO: 586436
guauauguauauguacaga

SEQ ID NO: 717859 - RNA, 19 nt, Artificial Sequence
  Description of Artificial Sequence: Synthetic oligonucleotide
  Antisense strand to SEQ ID NO: 717858
ucuguacauauacauauac

SEQ ID NO: 717860 - RNA, 19 nt, Artificial Sequence
  Description of Artificial Sequence: Synthetic oligonucleotide
  Sense strand starting at position 3874 of SEQ ID NO: 586436
gccacagccuucugaauag

SEQ ID NO: 717861 - RNA, 19 nt, Artificial Sequence
  Description of Artificial Sequence: Synthetic oligonucleotide
  Antisense strand to SEQ ID NO: 717860
cuauucagaaggcuguggc

SEQ ID NO: 717862 - RNA, 19 nt, Artificial Sequence
  Description of Artificial Sequence: Synthetic oligonucleotide
  Sense strand starting at position 202 of SEQ ID NO: 586437
aacucuucggaaggaaagu

SEQ ID NO: 717863 - RNA, 19 nt, Artificial Sequence
  Description of Artificial Sequence: Synthetic oligonucleotide
  Antisense strand to SEQ ID NO: 717862
acuuuccuuccgaagaguu

SEQ ID NO: 717864 - RNA, 19 nt, Artificial Sequence
  Description of Artificial Sequence: Synthetic oligonucleotide
  Sense strand starting at position 211 of SEQ ID NO: 586437
gaaggaaaguuuguuuccu

SEQ ID NO: 717865 - RNA, 19 nt, Artificial Sequence
  Description of Artificial Sequence: Synthetic oligonucleotide
  Antisense strand to SEQ ID NO: 717864
aggaaacaaacuuuccuuc

SEQ ID NO: 717866 - RNA, 19 nt, Artificial Sequence
  Description of Artificial Sequence: Synthetic oligonucleotide
  Sense strand starting at position 212 of SEQ ID NO: 586437
aaggaaaguuuguuuccuu

SEQ ID NO: 717867 - RNA, 19 nt, Artificial Sequence
  Description of Artificial Sequence: Synthetic oligonucleotide
  Antisense strand to SEQ ID NO: 717866
aaggaaacaaacuuuccuu

SEQ ID NO: 717868 - RNA, 19 nt, Artificial Sequence
  Description of Artificial Sequence: Synthetic oligonucleotide
  Sense strand starting at position 324 of SEQ ID NO: 586437
aaauucugacgucaguaaa

SEQ ID NO: 717869 - RNA, 19 nt, Artificial Sequence
  Description of Artificial Sequence: Synthetic oligonucleotide
  Antisense strand to SEQ ID NO: 717868
uuuacugacgucagaauuu

SEQ ID NO: 717870 - RNA, 19 nt, Artificial Sequence
  Description of Artificial Sequence: Synthetic oligonucleotide
  Sense strand starting at position 327 of SEQ ID NO: 586437
uucugacgucaguaaagga

SEQ ID NO: 717871 - RNA, 19 nt, Artificial Sequence
  Description of Artificial Sequence: Synthetic oligonucleotide
  Antisense strand to SEQ ID NO: 717870
uccuuuacugacgucagaa

SEQ ID NO: 717872 - RNA, 19 nt, Artificial Sequence
  Description of Artificial Sequence: Synthetic oligonucleotide
  Sense strand starting at position 371 of SEQ ID NO: 586437
uguugcaaguuauuuacga

SEQ ID NO: 717873 - RNA, 19 nt, Artificial Sequence
  Description of Artificial Sequence: Synthetic oligonucleotide
  Antisense strand to SEQ ID NO: 717872
ucguaaauaacuugcaaca

SEQ ID NO: 717874 - RNA, 19 nt, Artificial Sequence
  Description of Artificial Sequence: Synthetic oligonucleotide
  Sense strand starting at position 372 of SEQ ID NO: 586437
guugcaaguuauuuacgau

SEQ ID NO: 717875 - RNA, 19 nt, Artificial Sequence
  Description of Artificial Sequence: Synthetic oligonucleotide
  Antisense strand to SEQ ID NO: 717874
aucguaaauaacuugcaac

SEQ ID NO: 717876 - RNA, 19 nt, Artificial Sequence
  Description of Artificial Sequence: Synthetic oligonucleotide
  Sense strand starting at position 722 of SEQ ID NO: 586437
auacauaggucugcccuaa

SEQ ID NO: 717877 - RNA, 19 nt, Artificial Sequence
  Description of Artificial Sequence: Synthetic oligonucleotide
  Antisense strand to SEQ ID NO: 717876
uuagggcagaccuauguau

SEQ ID NO: 717878 - RNA, 19 nt, Artificial Sequence
  Description of Artificial Sequence: Synthetic oligonucleotide
  Sense strand starting at position 726 of SEQ ID NO: 586437
auaggucugcccuaacaug

SEQ ID NO: 717879 - RNA, 19 nt, Artificial Sequence
  Description of Artificial Sequence: Synthetic oligonucleotide
  Antisense strand to SEQ ID NO: 717878
cauguuagggcagaccuau

SEQ ID NO: 717880 - RNA, 19 nt, Artificial Sequence
  Description of Artificial Sequence: Synthetic oligonucleotide
  Sense strand starting at position 794 of SEQ ID NO: 586437
auauccaaguuaucaguca

SEQ ID NO: 717881 - RNA, 19 nt, Artificial Sequence
  Description of Artificial Sequence: Synthetic oligonucleotide
  Antisense strand to SEQ ID NO: 717880
ugacugauaacuuggauau

SEQ ID NO: 717882 - RNA, 19 nt, Artificial Sequence
  Description of Artificial Sequence: Synthetic oligonucleotide
  Sense strand starting at position 959 of SEQ ID NO: 586437
uuauucuucuggcucagaa

SEQ ID NO: 717883 - RNA, 19 nt, Artificial Sequence
  Description of Artificial Sequence: Synthetic oligonucleotide
  Antisense strand to SEQ ID NO: 717882
uucugagccagaagaauaa

SEQ ID NO: 717884 - RNA, 19 nt, Artificial Sequence
  Description of Artificial Sequence: Synthetic oligonucleotide
  Sense strand starting at position 961 of SEQ ID NO: 586437
auucuucuggcucagaaua

SEQ ID NO: 717885 - RNA, 19 nt, Artificial Sequence
  Description of Artificial Sequence: Synthetic oligonucleotide
  Antisense strand to SEQ ID NO: 717884
uauucugagccagaagaau

SEQ ID NO: 717886 - RNA, 19 nt, Artificial Sequence
  Description of Artificial Sequence: Synthetic oligonucleotide
  Sense strand starting at position 972 of SEQ ID NO: 586437
ucagaauauccaggcaguu

SEQ ID NO: 717887 - RNA, 19 nt, Artificial Sequence
  Description of Artificial Sequence: Synthetic oligonucleotide
  Antisense strand to SEQ ID NO: 717886
aacugccuggauauucuga

SEQ ID NO: 717888 - RNA, 19 nt, Artificial Sequence
  Description of Artificial Sequence: Synthetic oligonucleotide
  Sense strand starting at position 987 of SEQ ID NO: 586437
aguucuaaggguuacccaa

SEQ ID NO: 717889 - RNA, 19 nt, Artificial Sequence
  Description of Artificial Sequence: Synthetic oligonucleotide
  Antisense strand to SEQ ID NO: 717888
uuggguaacccuuagaacu

SEQ ID NO: 717890 - RNA, 19 nt, Artificial Sequence
  Description of Artificial Sequence: Synthetic oligonucleotide
  Sense strand starting at position 1234 of SEQ ID NO: 586437
ccagauuccggacgaucaa

SEQ ID NO: 717891 - RNA, 19 nt, Artificial Sequence
  Description of Artificial Sequence: Synthetic oligonucleotide
  Antisense strand to SEQ ID NO: 717890
uugaucguccggaaucugg

SEQ ID NO: 717892 - RNA, 19 nt, Artificial Sequence
  Description of Artificial Sequence: Synthetic oligonucleotide
  Sense strand starting at position 1344 of SEQ ID NO: 586437
gagcgacuccguuuccagu

SEQ ID NO: 717893 - RNA, 19 nt, Artificial Sequence
  Description of Artificial Sequence: Synthetic oligonucleotide
  Antisense strand to SEQ ID NO: 717892
acuggaaacggagucgcuc

SEQ ID NO: 717894 - RNA, 19 nt, Artificial Sequence
  Description of Artificial Sequence: Synthetic oligonucleotide
  Sense strand starting at position 1461 of SEQ ID NO: 586437
acucaauuacuggguuaau

SEQ ID NO: 717895 - RNA, 19 nt, Artificial Sequence
  Description of Artificial Sequence: Synthetic oligonucleotide
  Antisense strand to SEQ ID NO: 717894
auuaacccaguaauugagu

SEQ ID NO: 717896 - RNA, 19 nt, Artificial Sequence
  Description of Artificial Sequence: Synthetic oligonucleotide
  Sense strand starting at position 1462 of SEQ ID NO: 586437
cucaauuacuggguuaauu

SEQ ID NO: 717897 - RNA, 19 nt, Artificial Sequence
  Description of Artificial Sequence: Synthetic oligonucleotide
  Antisense strand to SEQ ID NO: 717896
aauuaacccaguaauugag

SEQ ID NO: 717898 - RNA, 19 nt, Artificial Sequence
  Description of Artificial Sequence: Synthetic oligonucleotide
  Sense strand starting at position 1549 of SEQ ID NO: 586437
gcuggaccucuguaucaau

SEQ ID NO: 717899 - RNA, 19 nt, Artificial Sequence
  Description of Artificial Sequence: Synthetic oligonucleotide
  Antisense strand to SEQ ID NO: 717898
auugauacagagguccagc

SEQ ID NO: 717900 - RNA, 19 nt, Artificial Sequence
  Description of Artificial Sequence: Synthetic oligonucleotide
  Sense strand starting at position 1559 of SEQ ID NO: 586437
uguaucaaucuagaguuag

SEQ ID NO: 717901 - RNA, 19 nt, Artificial Sequence
  Description of Artificial Sequence: Synthetic oligonucleotide
  Antisense strand to SEQ ID NO: 717900
cuaacucuagauugauaca

SEQ ID NO: 717902 - RNA, 19 nt, Artificial Sequence
  Description of Artificial Sequence: Synthetic oligonucleotide
  Sense strand starting at position 1608 of SEQ ID NO: 586437
ucuuaaauguuauuggaag

SEQ ID NO: 717903 - RNA, 19 nt, Artificial Sequence
  Description of Artificial Sequence: Synthetic oligonucleotide
  Antisense strand to SEQ ID NO: 717902
cuuccaauaacauuuaaga

SEQ ID NO: 717904 - RNA, 19 nt, Artificial Sequence
  Description of Artificial Sequence: Synthetic oligonucleotide
  Sense strand starting at position 2253 of SEQ ID NO: 586437
uggcuuauuucuuuguaca

SEQ ID NO: 717905 - RNA, 19 nt, Artificial Sequence
  Description of Artificial Sequence: Synthetic oligonucleotide
  Antisense strand to SEQ ID NO: 717904
uguacaaagaaauaagcca

SEQ ID NO: 717906 - RNA, 19 nt, Artificial Sequence
  Description of Artificial Sequence: Synthetic oligonucleotide
  Sense strand starting at position 2254 of SEQ ID NO: 586437
ggcuuauuucuuuguacag

SEQ ID NO: 717907 - RNA, 19 nt, Artificial Sequence
  Description of Artificial Sequence: Synthetic oligonucleotide
  Antisense strand to SEQ ID NO: 717906
cuguacaaagaaauaagcc

SEQ ID NO: 717908 - RNA, 19 nt, Artificial Sequence
  Description of Artificial Sequence: Synthetic oligonucleotide
  Sense strand starting at position 2680 of SEQ ID NO: 586437
gcuuuagcgcccucuguaa

SEQ ID NO: 717909 - RNA, 19 nt, Artificial Sequence
  Description of Artificial Sequence: Synthetic oligonucleotide
  Antisense strand to SEQ ID NO: 717908
uuacagagggcgcuaaagc

SEQ ID NO: 717910 - RNA, 19 nt, Artificial Sequence
  Description of Artificial Sequence: Synthetic oligonucleotide
  Sense strand starting at position 2914 of SEQ ID NO: 586437
cagauaaaugagugauccu

SEQ ID NO: 717911 - RNA, 19 nt, Artificial Sequence
  Description of Artificial Sequence: Synthetic oligonucleotide
  Antisense strand to SEQ ID NO: 717910
aggaucacucauuuaucug

SEQ ID NO: 717912 - RNA, 19 nt, Artificial Sequence
  Description of Artificial Sequence: Synthetic oligonucleotide
  Sense strand starting at position 3044 of SEQ ID NO: 586437
ggucuugcuccgucuccaa

SEQ ID NO: 717913 - RNA, 19 nt, Artificial Sequence
  Description of Artificial Sequence: Synthetic oligonucleotide
  Antisense strand to SEQ ID NO: 717912
uuggagacggagcaagacc

SEQ ID NO: 717914 - RNA, 19 nt, Artificial Sequence
  Description of Artificial Sequence: Synthetic oligonucleotide
  Sense strand starting at position 3447 of SEQ ID NO: 586437
uguguaggcaaguacaauu

SEQ ID NO: 717915 - RNA, 19 nt, Artificial Sequence
  Description of Artificial Sequence: Synthetic oligonucleotide
  Antisense strand to SEQ ID NO: 717914
aauuguacuugccuacaca

SEQ ID NO: 717916 - RNA, 19 nt, Artificial Sequence
  Description of Artificial Sequence: Synthetic oligonucleotide
  Sense strand starting at position 3568 of SEQ ID NO: 586437
aaauauugagcgugacgaa

SEQ ID NO: 717917 - RNA, 19 nt, Artificial Sequence
  Description of Artificial Sequence: Synthetic oligonucleotide
  Antisense strand to SEQ ID NO: 717916
uucgucacgcucaauauuu

SEQ ID NO: 717918 - RNA, 19 nt, Artificial Sequence
  Description of Artificial Sequence: Synthetic oligonucleotide
  Sense strand starting at position 3569 of SEQ ID NO: 586437
aauauugagcgugacgaau

SEQ ID NO: 717919 - RNA, 19 nt, Artificial Sequence
  Description of Artificial Sequence: Synthetic oligonucleotide
  Antisense strand to SEQ ID NO: 717918
auucgucacgcucaauauu

SEQ ID NO: 717920 - RNA, 19 nt, Artificial Sequence
  Description of Artificial Sequence: Synthetic oligonucleotide
  Sense strand starting at position 3575 of SEQ ID NO: 586437
gagcgugacgaauaagagu

SEQ ID NO: 717921 - RNA, 19 nt, Artificial Sequence
  Description of Artificial Sequence: Synthetic oligonucleotide
  Antisense strand to SEQ ID NO: 717920
acucuuauucgucacgcuc

SEQ ID NO: 717922 - RNA, 19 nt, Artificial Sequence
  Description of Artificial Sequence: Synthetic oligonucleotide
  Sense strand starting at position 3611 of SEQ ID NO: 586437
auguuauccugaccuuaca

SEQ ID NO: 717923 - RNA, 19 nt, Artificial Sequence
  Description of Artificial Sequence: Synthetic oligonucleotide
  Antisense strand to SEQ ID NO: 717922
uguaaggucaggauaacau

SEQ ID NO: 717924 - RNA, 19 nt, Artificial Sequence
  Description of Artificial Sequence: Synthetic oligonucleotide
  Sense strand starting at position 3627 of SEQ ID NO: 586437
acauaaagcugacagauuu

SEQ ID NO: 717925 - RNA, 19 nt, Artificial Sequence
  Description of Artificial Sequence: Synthetic oligonucleotide
  Antisense strand to SEQ ID NO: 717924
aaaucugucagcuuuaugu

SEQ ID NO: 717926 - RNA, 19 nt, Artificial Sequence
  Description of Artificial Sequence: Synthetic oligonucleotide
  Sense strand starting at position 3635 of SEQ ID NO: 586437
cugacagauuugcaaauua

SEQ ID NO: 717927 - RNA, 19 nt, Artificial Sequence
  Description of Artificial Sequence: Synthetic oligonucleotide
  Antisense strand to SEQ ID NO: 717926
uaauuugcaaaucugucag

SEQ ID NO: 717928 - RNA, 19 nt, Artificial Sequence
  Description of Artificial Sequence: Synthetic oligonucleotide
  Sense strand starting at position 3717 of SEQ ID NO: 586437
cccaauguguagcuaaauu

SEQ ID NO: 717929 - RNA, 19 nt, Artificial Sequence
  Description of Artificial Sequence: Synthetic oligonucleotide
  Antisense strand to SEQ ID NO: 717928
aauuuagcuacacauuggg

SEQ ID NO: 717930 - RNA, 19 nt, Artificial Sequence
  Description of Artificial Sequence: Synthetic oligonucleotide
  Sense strand starting at position 3765 of SEQ ID NO: 586437
auguaaauugccuaggcaa

SEQ ID NO: 717931 - RNA, 19 nt, Artificial Sequence
  Description of Artificial Sequence: Synthetic oligonucleotide
  Antisense strand to SEQ ID NO: 717930
uugccuaggcaauuuacau

SEQ ID NO: 717932 - RNA, 19 nt, Artificial Sequence
  Description of Artificial Sequence: Synthetic oligonucleotide
  Sense strand starting at position 3847 of SEQ ID NO: 586437
ugcugugauguauagguua

SEQ ID NO: 717933 - RNA, 19 nt, Artificial Sequence
  Description of Artificial Sequence: Synthetic oligonucleotide
  Antisense strand to SEQ ID NO: 717932
uaaccuauacaucacagca

SEQ ID NO: 717934 - RNA, 19 nt, Artificial Sequence
  Description of Artificial Sequence: Synthetic oligonucleotide
  Sense strand starting at position 3849 of SEQ ID NO: 586437
cugugauguauagguuaag

SEQ ID NO: 717935 - RNA, 19 nt, Artificial Sequence
  Description of Artificial Sequence: Synthetic oligonucleotide
  Antisense strand to SEQ ID NO: 717934
cuuaaccuauacaucacag

SEQ ID NO: 717936 - RNA, 19 nt, Artificial Sequence
  Description of Artificial Sequence: Synthetic oligonucleotide
  Sense strand starting at position 3850 of SEQ ID NO: 586437
ugugauguauagguuaaga

SEQ ID NO: 717937 - RNA, 19 nt, Artificial Sequence
  Description of Artificial Sequence: Synthetic oligonucleotide
  Antisense strand to SEQ ID NO: 717936
ucuuaaccuauacaucaca

SEQ ID NO: 717938 - RNA, 19 nt, Artificial Sequence
  Description of Artificial Sequence: Synthetic oligonucleotide
  Sense strand starting at position 3861 of SEQ ID NO: 586437
gguuaagaaugcuuucuuc

SEQ ID NO: 717939 - RNA, 19 nt, Artificial Sequence
  Description of Artificial Sequence: Synthetic oligonucleotide
  Antisense strand to SEQ ID NO: 717938
gaagaaagcauucuuaacc

SEQ ID NO: 717940 - RNA, 19 nt, Artificial Sequence
  Description of Artificial Sequence: Synthetic oligonucleotide
  Sense strand starting at position 3902 of SEQ ID NO: 586437
cuaacaguggcuuaauuaa

SEQ ID NO: 717941 - RNA, 19 nt, Artificial Sequence
  Description of Artificial Sequence: Synthetic oligonucleotide
  Antisense strand to SEQ ID NO: 717940
uuaauuaagccacuguuag

SEQ ID NO: 717942 - RNA, 19 nt, Artificial Sequence
  Description of Artificial Sequence: Synthetic oligonucleotide
  Sense strand starting at position 184 of SEQ ID NO: 586438
gguccucagguugagaacu

SEQ ID NO: 717943 - RNA, 19 nt, Artificial Sequence
  Description of Artificial Sequence: Synthetic oligonucleotide
  Antisense strand to SEQ ID NO: 717942
aguucucaaccugaggacc

SEQ ID NO: 717944 - RNA, 19 nt, Artificial Sequence
  Description of Artificial Sequence: Synthetic oligonucleotide
  Sense strand starting at position 194 of SEQ ID NO: 586438
uugagaacugcuggacuga

SEQ ID NO: 717945 - RNA, 19 nt, Artificial Sequence
  Description of Artificial Sequence: Synthetic oligonucleotide
  Antisense strand to SEQ ID NO: 717944
ucaguccagcaguucucaa

SEQ ID NO: 717946 - RNA, 19 nt, Artificial Sequence
  Description of Artificial Sequence: Synthetic oligonucleotide
  Sense strand starting at position 264 of SEQ ID NO: 586438
agucuuuauugaguugaga

SEQ ID NO: 717947 - RNA, 19 nt, Artificial Sequence
  Description of Artificial Sequence: Synthetic oligonucleotide
  Antisense strand to SEQ ID NO: 717946
ucucaacucaauaaagacu

SEQ ID NO: 717948 - RNA, 19 nt, Artificial Sequence
  Description of Artificial Sequence: Synthetic oligonucleotide
  Sense strand starting at position 342 of SEQ ID NO: 586438
gugacuuuauugguaaaca

SEQ ID NO: 717949 - RNA, 19 nt, Artificial Sequence
  Description of Artificial Sequence: Synthetic oligonucleotide
  Antisense strand to SEQ ID NO: 717948
uguuuaccaauaaagucac

SEQ ID NO: 717950 - RNA, 19 nt, Artificial Sequence
  Description of Artificial Sequence: Synthetic oligonucleotide
  Sense strand starting at position 381 of SEQ ID NO: 586438
acuaguagccucuagaaag

SEQ ID NO: 717951 - RNA, 19 nt, Artificial Sequence
  Description of Artificial Sequence: Synthetic oligonucleotide
  Antisense strand to SEQ ID NO: 717950
cuuucuagaggcuacuagu

SEQ ID NO: 717952 - RNA, 19 nt, Artificial Sequence
  Description of Artificial Sequence: Synthetic oligonucleotide
  Sense strand starting at position 398 of SEQ ID NO: 586438
agagguacaggucgaugaa

SEQ ID NO: 717953 - RNA, 19 nt, Artificial Sequence
  Description of Artificial Sequence: Synthetic oligonucleotide
  Antisense strand to SEQ ID NO: 717952
uucaucgaccuguaccucu

SEQ ID NO: 717954 - RNA, 19 nt, Artificial Sequence
  Description of Artificial Sequence: Synthetic oligonucleotide
  Sense strand starting at position 407 of SEQ ID NO: 586438
ggucgaugaagugaccaaa

SEQ ID NO: 717955 - RNA, 19 nt, Artificial Sequence
  Description of Artificial Sequence: Synthetic oligonucleotide
  Antisense strand to SEQ ID NO: 717954
uuuggucacuucaucgacc

SEQ ID NO: 717956 - RNA, 19 nt, Artificial Sequence
  Description of Artificial Sequence: Synthetic oligonucleotide
  Sense strand starting at position 473 of SEQ ID NO: 586438
ucaguaagugauuaacuuu

SEQ ID NO: 717957 - RNA, 19 nt, Artificial Sequence
  Description of Artificial Sequence: Synthetic oligonucleotide
  Antisense strand to SEQ ID NO: 717956
aaaguuaaucacuuacuga

SEQ ID NO: 717958 - RNA, 19 nt, Artificial Sequence
  Description of Artificial Sequence: Synthetic oligonucleotide
  Sense strand starting at position 517 of SEQ ID NO: 586438
gcugguacucuguaagaua

SEQ ID NO: 717959 - RNA, 19 nt, Artificial Sequence
  Description of Artificial Sequence: Synthetic oligonucleotide
  Antisense strand to SEQ ID NO: 717958
uaucuuacagaguaccagc

SEQ ID NO: 717960 - RNA, 19 nt, Artificial Sequence
  Description of Artificial Sequence: Synthetic oligonucleotide
  Sense strand starting at position 775 of SEQ ID NO: 586438
augucauuguauccauaua

SEQ ID NO: 717961 - RNA, 19 nt, Artificial Sequence
  Description of Artificial Sequence: Synthetic oligonucleotide
  Antisense strand to SEQ ID NO: 717960
uauauggauacaaugacau

SEQ ID NO: 717962 - RNA, 19 nt, Artificial Sequence
  Description of Artificial Sequence: Synthetic oligonucleotide
  Sense strand starting at position 1059 of SEQ ID NO: 586438
auagcaguucuauauuaca

SEQ ID NO: 717963 - RNA, 19 nt, Artificial Sequence
  Description of Artificial Sequence: Synthetic oligonucleotide
  Antisense strand to SEQ ID NO: 717962
uguaauauagaacugcuau

SEQ ID NO: 717964 - RNA, 19 nt, Artificial Sequence
  Description of Artificial Sequence: Synthetic oligonucleotide
  Sense strand starting at position 1233 of SEQ ID NO: 586438
cugugagagcaguagcaaa

SEQ ID NO: 717965 - RNA, 19 nt, Artificial Sequence
  Description of Artificial Sequence: Synthetic oligonucleotide
  Antisense strand to SEQ ID NO: 717964
uuugcuacugcucucacag

SEQ ID NO: 717966 - RNA, 19 nt, Artificial Sequence
  Description of Artificial Sequence: Synthetic oligonucleotide
  Sense strand starting at position 1324 of SEQ ID NO: 586438
uaguauaggcgacacuaaa

SEQ ID NO: 717967 - RNA, 19 nt, Artificial Sequence
  Description of Artificial Sequence: Synthetic oligonucleotide
  Antisense strand to SEQ ID NO: 717966
uuuagugucgccuauacua

SEQ ID NO: 717968 - RNA, 19 nt, Artificial Sequence
  Description of Artificial Sequence: Synthetic oligonucleotide
  Sense strand starting at position 2261 of SEQ ID NO: 586438
gccucaagggcagaacauu

SEQ ID NO: 717969 - RNA, 19 nt, Artificial Sequence
  Description of Artificial Sequence: Synthetic oligonucleotide
  Antisense strand to SEQ ID NO: 717968
aauguucugcccuugaggc

SEQ ID NO: 717970 - RNA, 19 nt, Artificial Sequence
  Description of Artificial Sequence: Synthetic oligonucleotide
  Sense strand starting at position 2306 of SEQ ID NO: 586438
gcgccaguuaggucaucuu

SEQ ID NO: 717971 - RNA, 19 nt, Artificial Sequence
  Description of Artificial Sequence: Synthetic oligonucleotide
  Antisense strand to SEQ ID NO: 717970
aagaugaccuaacuggcgc

SEQ ID NO: 717972 - RNA, 19 nt, Artificial Sequence
  Description of Artificial Sequence: Synthetic oligonucleotide
  Sense strand starting at position 2309 of SEQ ID NO: 586438
ccaguuaggucaucuuaua

SEQ ID NO: 717973 - RNA, 19 nt, Artificial Sequence
  Description of Artificial Sequence: Synthetic oligonucleotide
  Antisense strand to SEQ ID NO: 717972
uauaagaugaccuaacugg

SEQ ID NO: 717974 - RNA, 19 nt, Artificial Sequence
  Description of Artificial Sequence: Synthetic oligonucleotide
  Sense strand starting at position 2330 of SEQ ID NO: 586438
ucuugagauagcugagaug

SEQ ID NO: 717975 - RNA, 19 nt, Artificial Sequence
  Description of Artificial Sequence: Synthetic oligonucleotide
  Antisense strand to SEQ ID NO: 717974
caucucagcuaucucaaga

SEQ ID NO: 717976 - RNA, 19 nt, Artificial Sequence
  Description of Artificial Sequence: Synthetic oligonucleotide
  Sense strand starting at position 2382 of SEQ ID NO: 586438
guuugacuucuugaacccu

SEQ ID NO: 717977 - RNA, 19 nt, Artificial Sequence
  Description of Artificial Sequence: Synthetic oligonucleotide
  Antisense strand to SEQ ID NO: 717976
aggguucaagaagucaaac

SEQ ID NO: 717978 - RNA, 19 nt, Artificial Sequence
  Description of Artificial Sequence: Synthetic oligonucleotide
  Sense strand starting at position 2390 of SEQ ID NO: 586438
ucuugaacccuaggaaacu

SEQ ID NO: 717979 - RNA, 19 nt, Artificial Sequence
  Description of Artificial Sequence: Synthetic oligonucleotide
  Antisense strand to SEQ ID NO: 717978
aguuuccuaggguucaaga

SEQ ID NO: 717980 - RNA, 19 nt, Artificial Sequence
  Description of Artificial Sequence: Synthetic oligonucleotide
  Sense strand starting at position 2525 of SEQ ID NO: 586438
gauacacaaucguuagaaa

SEQ ID NO: 717981 - RNA, 19 nt, Artificial Sequence
  Description of Artificial Sequence: Synthetic oligonucleotide
  Antisense strand to SEQ ID NO: 717980
uuucuaacgauuguguauc

SEQ ID NO: 717982 - RNA, 19 nt, Artificial Sequence
  Description of Artificial Sequence: Synthetic oligonucleotide
  Sense strand starting at position 2563 of SEQ ID NO: 586438
uccuacaauuguguugaua

SEQ ID NO: 717983 - RNA, 19 nt, Artificial Sequence
  Description of Artificial Sequence: Synthetic oligonucleotide
  Antisense strand to SEQ ID NO: 717982
uaucaacacaauuguagga

SEQ ID NO: 717984 - RNA, 19 nt, Artificial Sequence
  Description of Artificial Sequence: Synthetic oligonucleotide
  Sense strand starting at position 2571 of SEQ ID NO: 586438
uuguguugauaauugggaa

SEQ ID NO: 717985 - RNA, 19 nt, Artificial Sequence
  Description of Artificial Sequence: Synthetic oligonucleotide
  Antisense strand to SEQ ID NO: 717984
uucccaauuaucaacacaa

SEQ ID NO: 717986 - RNA, 19 nt, Artificial Sequence
  Description of Artificial Sequence: Synthetic oligonucleotide
  Sense strand starting at position 2572 of SEQ ID NO: 586438
uguguugauaauugggaag

SEQ ID NO: 717987 - RNA, 19 nt, Artificial Sequence
  Description of Artificial Sequence: Synthetic oligonucleotide
  Antisense strand to SEQ ID NO: 717986
cuucccaauuaucaacaca

SEQ ID NO: 717988 - RNA, 19 nt, Artificial Sequence
  Description of Artificial Sequence: Synthetic oligonucleotide
  Sense strand starting at position 2583 of SEQ ID NO: 586438
uugggaaguuaauccaaau

SEQ ID NO: 717989 - RNA, 19 nt, Artificial Sequence
  Description of Artificial Sequence: Synthetic oligonucleotide
  Antisense strand to SEQ ID NO: 717988
auuuggauuaacuucccaa

SEQ ID NO: 717990 - RNA, 19 nt, Artificial Sequence
  Description of Artificial Sequence: Synthetic oligonucleotide
  Sense strand starting at position 2678 of SEQ ID NO: 586438
ccuaguauuugacagaaua

SEQ ID NO: 717991 - RNA, 19 nt, Artificial Sequence
  Description of Artificial Sequence: Synthetic oligonucleotide
  Antisense strand to SEQ ID NO: 717990
uauucugucaaauacuagg

SEQ ID NO: 717992 - RNA, 19 nt, Artificial Sequence
  Description of Artificial Sequence: Synthetic oligonucleotide
  Sense strand starting at position 2747 of SEQ ID NO: 586438
ugacuauaguguguuaaua

SEQ ID NO: 717993 - RNA, 19 nt, Artificial Sequence
  Description of Artificial Sequence: Synthetic oligonucleotide
  Antisense strand to SEQ ID NO: 717992
uauuaacacacuauaguca

SEQ ID NO: 717994 - RNA, 19 nt, Artificial Sequence
  Description of Artificial Sequence: Synthetic oligonucleotide
  Sense strand starting at position 3049 of SEQ ID NO: 586438
aggcacuuugcuuauuaua

SEQ ID NO: 717995 - RNA, 19 nt, Artificial Sequence
  Description of Artificial Sequence: Synthetic oligonucleotide
  Antisense strand to SEQ ID NO: 717994
uauaauaagcaaagugccu

SEQ ID NO: 717996 - RNA, 19 nt, Artificial Sequence
  Description of Artificial Sequence: Synthetic oligonucleotide
  Sense strand starting at position 3114 of SEQ ID NO: 586438
ugcuaugucucacugaaag

SEQ ID NO: 717997 - RNA, 19 nt, Artificial Sequence
  Description of Artificial Sequence: Synthetic oligonucleotide
  Antisense strand to SEQ ID NO: 717996
cuuucagugagacauagca

SEQ ID NO: 717998 - RNA, 19 nt, Artificial Sequence
  Description of Artificial Sequence: Synthetic oligonucleotide
  Sense strand starting at position 3155 of SEQ ID NO: 586438
gggaggucacgguguauuu

SEQ ID NO: 717999 - RNA, 19 nt, Artificial Sequence
  Description of Artificial Sequence: Synthetic oligonucleotide
  Antisense strand to SEQ ID NO: 717998
aaauacaccgugaccuccc

SEQ ID NO: 718000 - RNA, 19 nt, Artificial Sequence
  Description of Artificial Sequence: Synthetic oligonucleotide
  Sense strand starting at position 3183 of SEQ ID NO: 586438
caaucugcucuguaaccga

SEQ ID NO: 718001 - RNA, 19 nt, Artificial Sequence
  Description of Artificial Sequence: Synthetic oligonucleotide
  Antisense strand to SEQ ID NO: 718000
ucgguuacagagcagauug

SEQ ID NO: 718002 - RNA, 19 nt, Artificial Sequence
  Description of Artificial Sequence: Synthetic oligonucleotide
  Sense strand starting at position 3201 of SEQ ID NO: 586438
agccaaccagauuggaaau

SEQ ID NO: 718003 - RNA, 19 nt, Artificial Sequence
  Description of Artificial Sequence: Synthetic oligonucleotide
  Antisense strand to SEQ ID NO: 718002
auuuccaaucugguuggcu

SEQ ID NO: 718004 - RNA, 19 nt, Artificial Sequence
  Description of Artificial Sequence: Synthetic oligonucleotide
  Sense strand starting at position 3324 of SEQ ID NO: 586438
acccuuugguagguaauga

SEQ ID NO: 718005 - RNA, 19 nt, Artificial Sequence
  Description of Artificial Sequence: Synthetic oligonucleotide
  Antisense strand to SEQ ID NO: 718004
ucauuaccuaccaaagggu

SEQ ID NO: 718006 - RNA, 19 nt, Artificial Sequence
  Description of Artificial Sequence: Synthetic oligonucleotide
  Sense strand starting at position 3325 of SEQ ID NO: 586438
cccuuugguagguaaugaa

SEQ ID NO: 718007 - RNA, 19 nt, Artificial Sequence
  Description of Artificial Sequence: Synthetic oligonucleotide
  Antisense strand to SEQ ID NO: 718006
uucauuaccuaccaaaggg

SEQ ID NO: 718008 - RNA, 19 nt, Artificial Sequence
  Description of Artificial Sequence: Synthetic oligonucleotide
  Sense strand starting at position 3489 of SEQ ID NO: 586438
gucuauguccuggauacag

SEQ ID NO: 718009 - RNA, 19 nt, Artificial Sequence
  Description of Artificial Sequence: Synthetic oligonucleotide
  Antisense strand to SEQ ID NO: 718008
cuguauccaggacauagac

SEQ ID NO: 718010 - RNA, 19 nt, Artificial Sequence
  Description of Artificial Sequence: Synthetic oligonucleotide
  Sense strand starting at position 3491 of SEQ ID NO: 586438
cuauguccuggauacagua

SEQ ID NO: 718011 - RNA, 19 nt, Artificial Sequence
  Description of Artificial Sequence: Synthetic oligonucleotide
  Antisense strand to SEQ ID NO: 718010
uacuguauccaggacauag

SEQ ID NO: 718012 - RNA, 19 nt, Artificial Sequence
  Description of Artificial Sequence: Synthetic oligonucleotide
  Sense strand starting at position 3553 of SEQ ID NO: 586438
guaaaucacuucuuuagga

SEQ ID NO: 718013 - RNA, 19 nt, Artificial Sequence
  Description of Artificial Sequence: Synthetic oligonucleotide
  Antisense strand to SEQ ID NO: 718012
uccuaaagaagugauuuac

SEQ ID NO: 718014 - RNA, 19 nt, Artificial Sequence
  Description of Artificial Sequence: Synthetic oligonucleotide
  Sense strand starting at position 3607 of SEQ ID NO: 586438
gaguaaggauaacuuccua

SEQ ID NO: 718015 - RNA, 19 nt, Artificial Sequence
  Description of Artificial Sequence: Synthetic oligonucleotide
  Antisense strand to SEQ ID NO: 718014
uaggaaguuauccuuacuc

SEQ ID NO: 718016 - RNA, 19 nt, Artificial Sequence
  Description of Artificial Sequence: Synthetic oligonucleotide
  Sense strand starting at position 3714 of SEQ ID NO: 586438
ggagguauaagccaaaggu

SEQ ID NO: 718017 - RNA, 19 nt, Artificial Sequence
  Description of Artificial Sequence: Synthetic oligonucleotide
  Antisense strand to SEQ ID NO: 718016
accuuuggcuuauaccucc

SEQ ID NO: 718018 - RNA, 19 nt, Artificial Sequence
  Description of Artificial Sequence: Synthetic oligonucleotide
  Sense strand starting at position 3727 of SEQ ID NO: 586438
aaagguguuggcuauuaca

SEQ ID NO: 718019 - RNA, 19 nt, Artificial Sequence
  Description of Artificial Sequence: Synthetic oligonucleotide
  Antisense strand to SEQ ID NO: 718018
uguaauagccaacaccuuu

SEQ ID NO: 718020 - RNA, 19 nt, Artificial Sequence
  Description of Artificial Sequence: Synthetic oligonucleotide
  Sense strand starting at position 3911 of SEQ ID NO: 586438
gugaaacuugcucaagguc

SEQ ID NO: 718021 - RNA, 19 nt, Artificial Sequence
  Description of Artificial Sequence: Synthetic oligonucleotide
  Antisense strand to SEQ ID NO: 718020
gaccuugagcaaguuucac

SEQ ID NO: 718022 - RNA, 19 nt, Artificial Sequence
  Description of Artificial Sequence: Synthetic oligonucleotide
  Sense strand starting at position 56 of SEQ ID NO: 586439
gggcccaaugcugagagau

SEQ ID NO: 718023 - RNA, 19 nt, Artificial Sequence
  Description of Artificial Sequence: Synthetic oligonucleotide
  Antisense strand to SEQ ID NO: 718022
aucucucagcauugggccc

SEQ ID NO: 718024 - RNA, 19 nt, Artificial Sequence
  Description of Artificial Sequence: Synthetic oligonucleotide
  Sense strand starting at position 94 of SEQ ID NO: 586439
gucugugcagcgagaaaga

SEQ ID NO: 718025 - RNA, 19 nt, Artificial Sequence
  Description of Artificial Sequence: Synthetic oligonucleotide
  Antisense strand to SEQ ID NO: 718024
ucuuucucgcugcacagac

SEQ ID NO: 718026 - RNA, 19 nt, Artificial Sequence
  Description of Artificial Sequence: Synthetic oligonucleotide
  Sense strand starting at position 628 of SEQ ID NO: 586439
guuggauauucuuuguuga

SEQ ID NO: 718027 - RNA, 19 nt, Artificial Sequence
  Description of Artificial Sequence: Synthetic oligonucleotide
  Antisense strand to SEQ ID NO: 718026
ucaacaaagaauauccaac

SEQ ID NO: 718028 - RNA, 19 nt, Artificial Sequence
  Description of Artificial Sequence: Synthetic oligonucleotide
  Sense strand starting at position 629 of SEQ ID NO: 586439
uuggauauucuuuguugag

SEQ ID NO: 718029 - RNA, 19 nt, Artificial Sequence
  Description of Artificial Sequence: Synthetic oligonucleotide
  Antisense strand to SEQ ID NO: 718028
cucaacaaagaauauccaa

SEQ ID NO: 718030 - RNA, 19 nt, Artificial Sequence
  Description of Artificial Sequence: Synthetic oligonucleotide
  Sense strand starting at position 633 of SEQ ID NO: 586439
auauucuuuguugagggua

SEQ ID NO: 718031 - RNA, 19 nt, Artificial Sequence
  Description of Artificial Sequence: Synthetic oligonucleotide
  Antisense strand to SEQ ID NO: 718030
uacccucaacaaagaauau

SEQ ID NO: 718032 - RNA, 19 nt, Artificial Sequence
  Description of Artificial Sequence: Synthetic oligonucleotide
  Sense strand starting at position 638 of SEQ ID NO: 586439
cuuuguugaggguaggaua

SEQ ID NO: 718033 - RNA, 19 nt, Artificial Sequence
  Description of Artificial Sequence: Synthetic oligonucleotide
  Antisense strand to SEQ ID NO: 718032
uauccuacccucaacaaag

SEQ ID NO: 718034 - RNA, 19 nt, Artificial Sequence
  Description of Artificial Sequence: Synthetic oligonucleotide
  Sense strand starting at position 671 of SEQ ID NO: 586439
aaagaaugcuuaguagcau

SEQ ID NO: 718035 - RNA, 19 nt, Artificial Sequence
  Description of Artificial Sequence: Synthetic oligonucleotide
  Antisense strand to SEQ ID NO: 718034
augcuacuaagcauucuuu

SEQ ID NO: 718036 - RNA, 19 nt, Artificial Sequence
  Description of Artificial Sequence: Synthetic oligonucleotide
  Sense strand starting at position 725 of SEQ ID NO: 586439
cagccaaaucgugacaaua

SEQ ID NO: 718037 - RNA, 19 nt, Artificial Sequence
  Description of Artificial Sequence: Synthetic oligonucleotide
  Antisense strand to SEQ ID NO: 718036
uauugucacgauuuggcug

SEQ ID NO: 718038 - RNA, 19 nt, Artificial Sequence
  Description of Artificial Sequence: Synthetic oligonucleotide
  Sense strand starting at position 804 of SEQ ID NO: 586439
guugauagccacuauauug

SEQ ID NO: 718039 - RNA, 19 nt, Artificial Sequence
  Description of Artificial Sequence: Synthetic oligonucleotide
  Antisense strand to SEQ ID NO: 718038
caauauaguggcuaucaac

SEQ ID NO: 718040 - RNA, 19 nt, Artificial Sequence
  Description of Artificial Sequence: Synthetic oligonucleotide
  Sense strand starting at position 1021 of SEQ ID NO: 586439
acaggaagguccucucuaa

SEQ ID NO: 718041 - RNA, 19 nt, Artificial Sequence
  Description of Artificial Sequence: Synthetic oligonucleotide
  Antisense strand to SEQ ID NO: 718040
uuagagaggaccuuccugu

SEQ ID NO: 718042 - RNA, 19 nt, Artificial Sequence
  Description of Artificial Sequence: Synthetic oligonucleotide
  Sense strand starting at position 1113 of SEQ ID NO: 586439
gugccuguuagacaaggua

SEQ ID NO: 718043 - RNA, 19 nt, Artificial Sequence
  Description of Artificial Sequence: Synthetic oligonucleotide
  Antisense strand to SEQ ID NO: 718042
uaccuugucuaacaggcac

SEQ ID NO: 718044 - RNA, 19 nt, Artificial Sequence
  Description of Artificial Sequence: Synthetic oligonucleotide
  Sense strand starting at position 1285 of SEQ ID NO: 586439
ggugcuguucuuucgccaa

SEQ ID NO: 718045 - RNA, 19 nt, Artificial Sequence
  Description of Artificial Sequence: Synthetic oligonucleotide
  Antisense strand to SEQ ID NO: 718044
uuggcgaaagaacagcacc

SEQ ID NO: 718046 - RNA, 19 nt, Artificial Sequence
  Description of Artificial Sequence: Synthetic oligonucleotide
  Sense strand starting at position 1298 of SEQ ID NO: 586439
cgccaauccgcauuauugu

SEQ ID NO: 718047 - RNA, 19 nt, Artificial Sequence
  Description of Artificial Sequence: Synthetic oligonucleotide
  Antisense strand to SEQ ID NO: 718046
acaauaaugcggauuggcg

SEQ ID NO: 718048 - RNA, 19 nt, Artificial Sequence
  Description of Artificial Sequence: Synthetic oligonucleotide
  Sense strand starting at position 1307 of SEQ ID NO: 586439
gcauuauuguucucaagaa

SEQ ID NO: 718049 - RNA, 19 nt, Artificial Sequence
  Description of Artificial Sequence: Synthetic oligonucleotide
  Antisense strand to SEQ ID NO: 718048
uucuugagaacaauaaugc

SEQ ID NO: 718050 - RNA, 19 nt, Artificial Sequence
  Description of Artificial Sequence: Synthetic oligonucleotide
  Sense strand starting at position 1435 of SEQ ID NO: 586439
gaccuuucucccuggguga

SEQ ID NO: 718051 - RNA, 19 nt, Artificial Sequence
  Description of Artificial Sequence: Synthetic oligonucleotide
  Antisense strand to SEQ ID NO: 718050
ucacccagggagaaagguc

SEQ ID NO: 718052 - RNA, 19 nt, Artificial Sequence
  Description of Artificial Sequence: Synthetic oligonucleotide
  Sense strand starting at position 1452 of SEQ ID NO: 586439
gacagcugucuguaggaga

SEQ ID NO: 718053 - RNA, 19 nt, Artificial Sequence
  Description of Artificial Sequence: Synthetic oligonucleotide
  Antisense strand to SEQ ID NO: 718052
ucuccuacagacagcuguc

SEQ ID NO: 718054 - RNA, 19 nt, Artificial Sequence
  Description of Artificial Sequence: Synthetic oligonucleotide
  Sense strand starting at position 1578 of SEQ ID NO: 586439
uggacucucucagucauau

SEQ ID NO: 718055 - RNA, 19 nt, Artificial Sequence
  Description of Artificial Sequence: Synthetic oligonucleotide
  Antisense strand to SEQ ID NO: 718054
auaugacugagagagucca

SEQ ID NO: 718056 - RNA, 19 nt, Artificial Sequence
  Description of Artificial Sequence: Synthetic oligonucleotide
  Sense strand starting at position 1588 of SEQ ID NO: 586439
cagucauaucuugggaaca

SEQ ID NO: 718057 - RNA, 19 nt, Artificial Sequence
  Description of Artificial Sequence: Synthetic oligonucleotide
  Antisense strand to SEQ ID NO: 718056
uguucccaagauaugacug

SEQ ID NO: 718058 - RNA, 19 nt, Artificial Sequence
  Description of Artificial Sequence: Synthetic oligonucleotide
  Sense strand starting at position 1612 of SEQ ID NO: 586439
cgaagaaucaaagagugcu

SEQ ID NO: 718059 - RNA, 19 nt, Artificial Sequence
  Description of Artificial Sequence: Synthetic oligonucleotide
  Antisense strand to SEQ ID NO: 718058
agcacucuuugauucuucg

SEQ ID NO: 718060 - RNA, 19 nt, Artificial Sequence
  Description of Artificial Sequence: Synthetic oligonucleotide
  Sense strand starting at position 1615 of SEQ ID NO: 586439
agaaucaaagagugcuauu

SEQ ID NO: 718061 - RNA, 19 nt, Artificial Sequence
  Description of Artificial Sequence: Synthetic oligonucleotide
  Antisense strand to SEQ ID NO: 718060
aauagcacucuuugauucu

SEQ ID NO: 718062 - RNA, 19 nt, Artificial Sequence
  Description of Artificial Sequence: Synthetic oligonucleotide
  Sense strand starting at position 1996 of SEQ ID NO: 586439
gucagcucacaaugaugaa

SEQ ID NO: 718063 - RNA, 19 nt, Artificial Sequence
  Description of Artificial Sequence: Synthetic oligonucleotide
  Antisense strand to SEQ ID NO: 718062
uucaucauugugagcugac

SEQ ID NO: 718064 - RNA, 19 nt, Artificial Sequence
  Description of Artificial Sequence: Synthetic oligonucleotide
  Sense strand starting at position 2211 of SEQ ID NO: 586439
ucaggaagauccuuccacu

SEQ ID NO: 718065 - RNA, 19 nt, Artificial Sequence
  Description of Artificial Sequence: Synthetic oligonucleotide
  Antisense strand to SEQ ID NO: 718064
aguggaaggaucuuccuga

SEQ ID NO: 718066 - RNA, 19 nt, Artificial Sequence
  Description of Artificial Sequence: Synthetic oligonucleotide
  Sense strand starting at position 2372 of SEQ ID NO: 586439
ggaucugcagguuauggaa

SEQ ID NO: 718067 - RNA, 19 nt, Artificial Sequence
  Description of Artificial Sequence: Synthetic oligonucleotide
  Antisense strand to SEQ ID NO: 718066
uuccauaaccugcagaucc

SEQ ID NO: 718068 - RNA, 19 nt, Artificial Sequence
  Description of Artificial Sequence: Synthetic oligonucleotide
  Sense strand starting at position 2439 of SEQ ID NO: 586439
ugguuacuucugcaggacu

SEQ ID NO: 718069 - RNA, 19 nt, Artificial Sequence
  Description of Artificial Sequence: Synthetic oligonucleotide
  Antisense strand to SEQ ID NO: 718068
aguccugcagaaguaacca

SEQ ID NO: 718070 - RNA, 19 nt, Artificial Sequence
  Description of Artificial Sequence: Synthetic oligonucleotide
  Sense strand starting at position 2453 of SEQ ID NO: 586439
ggacuuacuucccuuagga

SEQ ID NO: 718071 - RNA, 19 nt, Artificial Sequence
  Description of Artificial Sequence: Synthetic oligonucleotide
  Antisense strand to SEQ ID NO: 718070
uccuaagggaaguaagucc

SEQ ID NO: 718072 - RNA, 19 nt, Artificial Sequence
  Description of Artificial Sequence: Synthetic oligonucleotide
  Sense strand starting at position 2499 of SEQ ID NO: 586439
auuaguuucuuauccagag

SEQ ID NO: 718073 - RNA, 19 nt, Artificial Sequence
  Description of Artificial Sequence: Synthetic oligonucleotide
  Antisense strand to SEQ ID NO: 718072
cucuggauaagaaacuaau

SEQ ID NO: 718074 - RNA, 19 nt, Artificial Sequence
  Description of Artificial Sequence: Synthetic oligonucleotide
  Sense strand starting at position 2701 of SEQ ID NO: 586439
aaggccauuccugggagaa

SEQ ID NO: 718075 - RNA, 19 nt, Artificial Sequence
  Description of Artificial Sequence: Synthetic oligonucleotide
  Antisense strand to SEQ ID NO: 718074
uucucccaggaauggccuu

SEQ ID NO: 718076 - RNA, 19 nt, Artificial Sequence
  Description of Artificial Sequence: Synthetic oligonucleotide
  Sense strand starting at position 2702 of SEQ ID NO: 586439
aggccauuccugggagaaa

SEQ ID NO: 718077 - RNA, 19 nt, Artificial Sequence
  Description of Artificial Sequence: Synthetic oligonucleotide
  Antisense strand to SEQ ID NO: 718076
uuucucccaggaauggccu

SEQ ID NO: 718078 - RNA, 19 nt, Artificial Sequence
  Description of Artificial Sequence: Synthetic oligonucleotide
  Sense strand starting at position 3505 of SEQ ID NO: 586439
uaaagcucauugguuuaga

SEQ ID NO: 718079 - RNA, 19 nt, Artificial Sequence
  Description of Artificial Sequence: Synthetic oligonucleotide
  Antisense strand to SEQ ID NO: 718078
ucuaaaccaaugagcuuua

SEQ ID NO: 718080 - RNA, 19 nt, Artificial Sequence
  Description of Artificial Sequence: Synthetic oligonucleotide
  Sense strand starting at position 3506 of SEQ ID NO: 586439
aaagcucauugguuuagau

SEQ ID NO: 718081 - RNA, 19 nt, Artificial Sequence
  Description of Artificial Sequence: Synthetic oligonucleotide
  Antisense strand to SEQ ID NO: 718080
aucuaaaccaaugagcuuu

SEQ ID NO: 718082 - RNA, 19 nt, Artificial Sequence
  Description of Artificial Sequence: Synthetic oligonucleotide
  Sense strand starting at position 3508 of SEQ ID NO: 586439
agcucauugguuuagauau

SEQ ID NO: 718083 - RNA, 19 nt, Artificial Sequence
  Description of Artificial Sequence: Synthetic oligonucleotide
  Antisense strand to SEQ ID NO: 718082
auaucuaaaccaaugagcu

SEQ ID NO: 718084 - RNA, 19 nt, Artificial Sequence
  Description of Artificial Sequence: Synthetic oligonucleotide
  Sense strand starting at position 3534 of SEQ ID NO: 586439
gaguauacuuggccacuga

SEQ ID NO: 718085 - RNA, 19 nt, Artificial Sequence
  Description of Artificial Sequence: Synthetic oligonucleotide
  Antisense strand to SEQ ID NO: 718084
ucaguggccaaguauacuc

SEQ ID NO: 718086 - RNA, 19 nt, Artificial Sequence
  Description of Artificial Sequence: Synthetic oligonucleotide
  Sense strand starting at position 3538 of SEQ ID NO: 586439
auacuuggccacugagaca

SEQ ID NO: 718087 - RNA, 19 nt, Artificial Sequence
  Description of Artificial Sequence: Synthetic oligonucleotide
  Antisense strand to SEQ ID NO: 718086
ugucucaguggccaaguau

SEQ ID NO: 718088 - RNA, 19 nt, Artificial Sequence
  Description of Artificial Sequence: Synthetic oligonucleotide
  Sense strand starting at position 3593 of SEQ ID NO: 586439
uccauacaagucuguuaag

SEQ ID NO: 718089 - RNA, 19 nt, Artificial Sequence
  Description of Artificial Sequence: Synthetic oligonucleotide
  Antisense strand to SEQ ID NO: 718088
cuuaacagacuuguaugga

SEQ ID NO: 718090 - RNA, 19 nt, Artificial Sequence
  Description of Artificial Sequence: Synthetic oligonucleotide
  Sense strand starting at position 3670 of SEQ ID NO: 586439
gcugauugugagcaaagga

SEQ ID NO: 718091 - RNA, 19 nt, Artificial Sequence
  Description of Artificial Sequence: Synthetic oligonucleotide
  Antisense strand to SEQ ID NO: 718090
uccuuugcucacaaucagc

SEQ ID NO: 718092 - RNA, 19 nt, Artificial Sequence
  Description of Artificial Sequence: Synthetic oligonucleotide
  Sense strand starting at position 3756 of SEQ ID NO: 586439
auucuagugcuuugggaag

SEQ ID NO: 718093 - RNA, 19 nt, Artificial Sequence
  Description of Artificial Sequence: Synthetic oligonucleotide
  Antisense strand to SEQ ID NO: 718092
cuucccaaagcacuagaau

SEQ ID NO: 718094 - RNA, 19 nt, Artificial Sequence
  Description of Artificial Sequence: Synthetic oligonucleotide
  Sense strand starting at position 3965 of SEQ ID NO: 586439
gugacagauacuuaguugu

SEQ ID NO: 718095 - RNA, 19 nt, Artificial Sequence
  Description of Artificial Sequence: Synthetic oligonucleotide
  Antisense strand to SEQ ID NO: 718094
acaacuaaguaucugucac

SEQ ID NO: 718096 - RNA, 19 nt, Artificial Sequence
  Description of Artificial Sequence: Synthetic oligonucleotide
  Sense strand starting at position 3967 of SEQ ID NO: 586439
gacagauacuuaguugucu

SEQ ID NO: 718097 - RNA, 19 nt, Artificial Sequence
  Description of Artificial Sequence: Synthetic oligonucleotide
  Antisense strand to SEQ ID NO: 718096
agacaacuaaguaucuguc

SEQ ID NO: 718098 - RNA, 19 nt, Artificial Sequence
  Description of Artificial Sequence: Synthetic oligonucleotide
  Sense strand starting at position 3968 of SEQ ID NO: 586439
acagauacuuaguugucua

SEQ ID NO: 718099 - RNA, 19 nt, Artificial Sequence
  Description of Artificial Sequence: Synthetic oligonucleotide
  Antisense strand to SEQ ID NO: 718098
uagacaacuaaguaucugu

SEQ ID NO: 718100 - RNA, 19 nt, Artificial Sequence
  Description of Artificial Sequence: Synthetic oligonucleotide
  Sense strand starting at position 3973 of SEQ ID NO: 586439
uacuuaguugucuauuagu

SEQ ID NO: 718101 - RNA, 19 nt, Artificial Sequence
  Description of Artificial Sequence: Synthetic oligonucleotide
  Antisense strand to SEQ ID NO: 718100
acuaauagacaacuaagua

SEQ ID NO: 718102 - RNA, 19 nt, Artificial Sequence
  Description of Artificial Sequence: Synthetic oligonucleotide
  Sense strand starting at position 57 of SEQ ID NO: 586440
agaugaaauuaagaccgaa

SEQ ID NO: 718103 - RNA, 19 nt, Artificial Sequence
  Description of Artificial Sequence: Synthetic oligonucleotide
  Antisense strand to SEQ ID NO: 718102
uucggucuuaauuucaucu

SEQ ID NO: 718104 - RNA, 19 nt, Artificial Sequence
  Description of Artificial Sequence: Synthetic oligonucleotide
  Sense strand starting at position 481 of SEQ ID NO: 586440
ggaugacaggcuugagaau

SEQ ID NO: 718105 - RNA, 19 nt, Artificial Sequence
  Description of Artificial Sequence: Synthetic oligonucleotide
  Antisense strand to SEQ ID NO: 718104
auucucaagccugucaucc

SEQ ID NO: 718106 - RNA, 19 nt, Artificial Sequence
  Description of Artificial Sequence: Synthetic oligonucleotide
  Sense strand starting at position 490 of SEQ ID NO: 586440
gcuugagaauaugacacaa

SEQ ID NO: 718107 - RNA, 19 nt, Artificial Sequence
  Description of Artificial Sequence: Synthetic oligonucleotide
  Antisense strand to SEQ ID NO: 718106
uugugucauauucucaagc

SEQ ID NO: 718108 - RNA, 19 nt, Artificial Sequence
  Description of Artificial Sequence: Synthetic oligonucleotide
  Sense strand starting at position 492 of SEQ ID NO: 586440
uugagaauaugacacaaua

SEQ ID NO: 718109 - RNA, 19 nt, Artificial Sequence
  Description of Artificial Sequence: Synthetic oligonucleotide
  Antisense strand to SEQ ID NO: 718108
uauugugucauauucucaa

SEQ ID NO: 718110 - RNA, 19 nt, Artificial Sequence
  Description of Artificial Sequence: Synthetic oligonucleotide
  Sense strand starting at position 515 of SEQ ID NO: 586440
ugggauaaauaucauacaa

SEQ ID NO: 718111 - RNA, 19 nt, Artificial Sequence
  Description of Artificial Sequence: Synthetic oligonucleotide
  Antisense strand to SEQ ID NO: 718110
uuguaugauauuuauccca

SEQ ID NO: 718112 - RNA, 19 nt, Artificial Sequence
  Description of Artificial Sequence: Synthetic oligonucleotide
  Sense strand starting at position 608 of SEQ ID NO: 586440
cagauugaguccuuaguga

SEQ ID NO: 718113 - RNA, 19 nt, Artificial Sequence
  Description of Artificial Sequence: Synthetic oligonucleotide
  Antisense strand to SEQ ID NO: 718112
ucacuaaggacucaaucug

SEQ ID NO: 718114 - RNA, 19 nt, Artificial Sequence
  Description of Artificial Sequence: Synthetic oligonucleotide
  Sense strand starting at position 616 of SEQ ID NO: 586440
guccuuagugacuagggaa

SEQ ID NO: 718115 - RNA, 19 nt, Artificial Sequence
  Description of Artificial Sequence: Synthetic oligonucleotide
  Antisense strand to SEQ ID NO: 718114
uucccuagucacuaaggac

SEQ ID NO: 718116 - RNA, 19 nt, Artificial Sequence
  Description of Artificial Sequence: Synthetic oligonucleotide
  Sense strand starting at position 731 of SEQ ID NO: 586440
uacuauauugcagguaaag

SEQ ID NO: 718117 - RNA, 19 nt, Artificial Sequence
  Description of Artificial Sequence: Synthetic oligonucleotide
  Antisense strand to SEQ ID NO: 718116
cuuuaccugcaauauagua

SEQ ID NO: 718118 - RNA, 19 nt, Artificial Sequence
  Description of Artificial Sequence: Synthetic oligonucleotide
  Sense strand starting at position 733 of SEQ ID NO: 586440
cuauauugcagguaaagug

SEQ ID NO: 718119 - RNA, 19 nt, Artificial Sequence
  Description of Artificial Sequence: Synthetic oligonucleotide
  Antisense strand to SEQ ID NO: 718118
cacuuuaccugcaauauag

SEQ ID NO: 718120 - RNA, 19 nt, Artificial Sequence
  Description of Artificial Sequence: Synthetic oligonucleotide
  Sense strand starting at position 1451 of SEQ ID NO: 586440
aaaggauacuggccucaga

SEQ ID NO: 718121 - RNA, 19 nt, Artificial Sequence
  Description of Artificial Sequence: Synthetic oligonucleotide
  Antisense strand to SEQ ID NO: 718120
ucugaggccaguauccuuu

SEQ ID NO: 718122 - RNA, 19 nt, Artificial Sequence
  Description of Artificial Sequence: Synthetic oligonucleotide
  Sense strand starting at position 1482 of SEQ ID NO: 586440
aaguuuagauggcauagga

SEQ ID NO: 718123 - RNA, 19 nt, Artificial Sequence
  Description of Artificial Sequence: Synthetic oligonucleotide
  Antisense strand to SEQ ID NO: 718122
uccuaugccaucuaaacuu

SEQ ID NO: 718124 - RNA, 19 nt, Artificial Sequence
  Description of Artificial Sequence: Synthetic oligonucleotide
  Sense strand starting at position 1514 of SEQ ID NO: 586440
gagaaagaauguugagaag

SEQ ID NO: 718125 - RNA, 19 nt, Artificial Sequence
  Description of Artificial Sequence: Synthetic oligonucleotide
  Antisense strand to SEQ ID NO: 718124
cuucucaacauucuuucuc

SEQ ID NO: 718126 - RNA, 19 nt, Artificial Sequence
  Description of Artificial Sequence: Synthetic oligonucleotide
  Sense strand starting at position 1713 of SEQ ID NO: 586440
acauaaguaugugcaaaua

SEQ ID NO: 718127 - RNA, 19 nt, Artificial Sequence
  Description of Artificial Sequence: Synthetic oligonucleotide
  Antisense strand to SEQ ID NO: 718126
uauuugcacauacuuaugu

SEQ ID NO: 718128 - RNA, 19 nt, Artificial Sequence
  Description of Artificial Sequence: Synthetic oligonucleotide
  Sense strand starting at position 1763 of SEQ ID NO: 586440
guggcaugaagcuguacua

SEQ ID NO: 718129 - RNA, 19 nt, Artificial Sequence
  Description of Artificial Sequence: Synthetic oligonucleotide
  Antisense strand to SEQ ID NO: 718128
uaguacagcuucaugccac

SEQ ID NO: 718130 - RNA, 19 nt, Artificial Sequence
  Description of Artificial Sequence: Synthetic oligonucleotide
  Sense strand starting at position 2068 of SEQ ID NO: 586440
caucccauuggucggaauu

SEQ ID NO: 718131 - RNA, 19 nt, Artificial Sequence
  Description of Artificial Sequence: Synthetic oligonucleotide
  Antisense strand to SEQ ID NO: 718130
aauuccgaccaaugggaug

SEQ ID NO: 718132 - RNA, 19 nt, Artificial Sequence
  Description of Artificial Sequence: Synthetic oligonucleotide
  Sense strand starting at position 2183 of SEQ ID NO: 586440
auuuaaggaugagggauau

SEQ ID NO: 718133 - RNA, 19 nt, Artificial Sequence
  Description of Artificial Sequence: Synthetic oligonucleotide
  Antisense strand to SEQ ID NO: 718132
auaucccucauccuuaaau

SEQ ID NO: 718134 - RNA, 19 nt, Artificial Sequence
  Description of Artificial Sequence: Synthetic oligonucleotide
  Sense strand starting at position 2193 of SEQ ID NO: 586440
gagggauauugauggacaa

SEQ ID NO: 718135 - RNA, 19 nt, Artificial Sequence
  Description of Artificial Sequence: Synthetic oligonucleotide
  Antisense strand to SEQ ID NO: 718134
uuguccaucaauaucccuc

SEQ ID NO: 718136 - RNA, 19 nt, Artificial Sequence
  Description of Artificial Sequence: Synthetic oligonucleotide
  Sense strand starting at position 2222 of SEQ ID NO: 586440
gugggaagaagcuauguca

SEQ ID NO: 718137 - RNA, 19 nt, Artificial Sequence
  Description of Artificial Sequence: Synthetic oligonucleotide
  Antisense strand to SEQ ID NO: 718136
ugacauagcuucuucccac

SEQ ID NO: 718138 - RNA, 19 nt, Artificial Sequence
  Description of Artificial Sequence: Synthetic oligonucleotide
  Sense strand starting at position 2225 of SEQ ID NO: 586440
ggaagaagcuaugucacag

SEQ ID NO: 718139 - RNA, 19 nt, Artificial Sequence
  Description of Artificial Sequence: Synthetic oligonucleotide
  Antisense strand to SEQ ID NO: 718138
cugugacauagcuucuucc

SEQ ID NO: 718140 - RNA, 19 nt, Artificial Sequence
  Description of Artificial Sequence: Synthetic oligonucleotide
  Sense strand starting at position 2256 of SEQ ID NO: 586440
ugccauacgcauuaaguau

SEQ ID NO: 718141 - RNA, 19 nt, Artificial Sequence
  Description of Artificial Sequence: Synthetic oligonucleotide
  Antisense strand to SEQ ID NO: 718140
auacuuaaugcguauggca

SEQ ID NO: 718142 - RNA, 19 nt, Artificial Sequence
  Description of Artificial Sequence: Synthetic oligonucleotide
  Sense strand starting at position 2262 of SEQ ID NO: 586440
acgcauuaaguauguaguu

SEQ ID NO: 718143 - RNA, 19 nt, Artificial Sequence
  Description of Artificial Sequence: Synthetic oligonucleotide
  Antisense strand to SEQ ID NO: 718142
aacuacauacuuaaugcgu

SEQ ID NO: 718144 - RNA, 19 nt, Artificial Sequence
  Description of Artificial Sequence: Synthetic oligonucleotide
  Sense strand starting at position 2264 of SEQ ID NO: 586440
gcauuaaguauguaguuua

SEQ ID NO: 718145 - RNA, 19 nt, Artificial Sequence
  Description of Artificial Sequence: Synthetic oligonucleotide
  Antisense strand to SEQ ID NO: 718144
uaaacuacauacuuaaugc

SEQ ID NO: 718146 - RNA, 19 nt, Artificial Sequence
  Description of Artificial Sequence: Synthetic oligonucleotide
  Sense strand starting at position 2328 of SEQ ID NO: 586440
gguuaagucagguggccaa

SEQ ID NO: 718147 - RNA, 19 nt, Artificial Sequence
  Description of Artificial Sequence: Synthetic oligonucleotide
  Antisense strand to SEQ ID NO: 718146
uuggccaccugacuuaacc

SEQ ID NO: 718148 - RNA, 19 nt, Artificial Sequence
  Description of Artificial Sequence: Synthetic oligonucleotide
  Sense strand starting at position 2374 of SEQ ID NO: 586440
auagccugauaauaaagaa

SEQ ID NO: 718149 - RNA, 19 nt, Artificial Sequence
  Description of Artificial Sequence: Synthetic oligonucleotide
  Antisense strand to SEQ ID NO: 718148
uucuuuauuaucaggcuau

SEQ ID NO: 718150 - RNA, 19 nt, Artificial Sequence
  Description of Artificial Sequence: Synthetic oligonucleotide
  Sense strand starting at position 2399 of SEQ ID NO: 586440
uuaauaauauuguccgugu

SEQ ID NO: 718151 - RNA, 19 nt, Artificial Sequence
  Description of Artificial Sequence: Synthetic oligonucleotide
  Antisense strand to SEQ ID NO: 718150
acacggacaauauuauuaa

SEQ ID NO: 718152 - RNA, 19 nt, Artificial Sequence
  Description of Artificial Sequence: Synthetic oligonucleotide
  Sense strand starting at position 2400 of SEQ ID NO: 586440
uaauaauauuguccguguu

SEQ ID NO: 718153 - RNA, 19 nt, Artificial Sequence
  Description of Artificial Sequence: Synthetic oligonucleotide
  Antisense strand to SEQ ID NO: 718152
aacacggacaauauuauua

SEQ ID NO: 718154 - RNA, 19 nt, Artificial Sequence
  Description of Artificial Sequence: Synthetic oligonucleotide
  Sense strand starting at position 2401 of SEQ ID NO: 586440
aauaauauuguccguguuc

SEQ ID NO: 718155 - RNA, 19 nt, Artificial Sequence
  Description of Artificial Sequence: Synthetic oligonucleotide
  Antisense strand to SEQ ID NO: 718154
gaacacggacaauauuauu

SEQ ID NO: 718156 - RNA, 19 nt, Artificial Sequence
  Description of Artificial Sequence: Synthetic oligonucleotide
  Sense strand starting at position 2402 of SEQ ID NO: 586440
auaauauuguccguguucu

SEQ ID NO: 718157 - RNA, 19 nt, Artificial Sequence
  Description of Artificial Sequence: Synthetic oligonucleotide
  Antisense strand to SEQ ID NO: 718156
agaacacggacaauauuau

SEQ ID NO: 718158 - RNA, 19 nt, Artificial Sequence
  Description of Artificial Sequence: Synthetic oligonucleotide
  Sense strand starting at position 2406 of SEQ ID NO: 586440
uauuguccguguucucaca

SEQ ID NO: 718159 - RNA, 19 nt, Artificial Sequence
  Description of Artificial Sequence: Synthetic oligonucleotide
  Antisense strand to SEQ ID NO: 718158
ugugagaacacggacaaua

SEQ ID NO: 718160 - RNA, 19 nt, Artificial Sequence
  Description of Artificial Sequence: Synthetic oligonucleotide
  Sense strand starting at position 2408 of SEQ ID NO: 586440
uuguccguguucucacaaa

SEQ ID NO: 718161 - RNA, 19 nt, Artificial Sequence
  Description of Artificial Sequence: Synthetic oligonucleotide
  Antisense strand to SEQ ID NO: 718160
uuugugagaacacggacaa

SEQ ID NO: 718162 - RNA, 19 nt, Artificial Sequence
  Description of Artificial Sequence: Synthetic oligonucleotide
  Sense strand starting at position 2567 of SEQ ID NO: 586440
agcacugucucauuagaga

SEQ ID NO: 718163 - RNA, 19 nt, Artificial Sequence
  Description of Artificial Sequence: Synthetic oligonucleotide
  Antisense strand to SEQ ID NO: 718162
ucucuaaugagacagugcu

SEQ ID NO: 718164 - RNA, 19 nt, Artificial Sequence
  Description of Artificial Sequence: Synthetic oligonucleotide
  Sense strand starting at position 2640 of SEQ ID NO: 586440
aggauuaccucaugagaau

SEQ ID NO: 718165 - RNA, 19 nt, Artificial Sequence
  Description of Artificial Sequence: Synthetic oligonucleotide
  Antisense strand to SEQ ID NO: 718164
auucucaugagguaauccu

SEQ ID NO: 718166 - RNA, 19 nt, Artificial Sequence
  Description of Artificial Sequence: Synthetic oligonucleotide
  Sense strand starting at position 2703 of SEQ ID NO: 586440
aggagacacucagccuuaa

SEQ ID NO: 718167 - RNA, 19 nt, Artificial Sequence
  Description of Artificial Sequence: Synthetic oligonucleotide
  Antisense strand to SEQ ID NO: 718166
uuaaggcugagugucuccu

SEQ ID NO: 718168 - RNA, 19 nt, Artificial Sequence
  Description of Artificial Sequence: Synthetic oligonucleotide
  Sense strand starting at position 2729 of SEQ ID NO: 586440
agaaauuggcccggugcaa

SEQ ID NO: 718169 - RNA, 19 nt, Artificial Sequence
  Description of Artificial Sequence: Synthetic oligonucleotide
  Antisense strand to SEQ ID NO: 718168
uugcaccgggccaauuucu

SEQ ID NO: 718170 - RNA, 19 nt, Artificial Sequence
  Description of Artificial Sequence: Synthetic oligonucleotide
  Sense strand starting at position 3686 of SEQ ID NO: 586440
guuucaguuguaggauaga

SEQ ID NO: 718171 - RNA, 19 nt, Artificial Sequence
  Description of Artificial Sequence: Synthetic oligonucleotide
  Antisense strand to SEQ ID NO: 718170
ucuauccuacaacugaaac

SEQ ID NO: 718172 - RNA, 19 nt, Artificial Sequence
  Description of Artificial Sequence: Synthetic oligonucleotide
  Sense strand starting at position 3718 of SEQ ID NO: 586440
gagauuuacuaugaggcau

SEQ ID NO: 718173 - RNA, 19 nt, Artificial Sequence
  Description of Artificial Sequence: Synthetic oligonucleotide
  Antisense strand to SEQ ID NO: 718172
augccucauaguaaaucuc

SEQ ID NO: 718174 - RNA, 19 nt, Artificial Sequence
  Description of Artificial Sequence: Synthetic oligonucleotide
  Sense strand starting at position 3720 of SEQ ID NO: 586440
gauuuacuaugaggcauca

SEQ ID NO: 718175 - RNA, 19 nt, Artificial Sequence
  Description of Artificial Sequence: Synthetic oligonucleotide
  Antisense strand to SEQ ID NO: 718174
ugaugccucauaguaaauc

SEQ ID NO: 718176 - RNA, 19 nt, Artificial Sequence
  Description of Artificial Sequence: Synthetic oligonucleotide
  Sense strand starting at position 3784 of SEQ ID NO: 586440
gaggguagaucuuauauug

SEQ ID NO: 718177 - RNA, 19 nt, Artificial Sequence
  Description of Artificial Sequence: Synthetic oligonucleotide
  Antisense strand to SEQ ID NO: 718176
caauauaagaucuacccuc

SEQ ID NO: 718178 - RNA, 19 nt, Artificial Sequence
  Description of Artificial Sequence: Synthetic oligonucleotide
  Sense strand starting at position 3898 of SEQ ID NO: 586440
guaugucuauggccuugau

SEQ ID NO: 718179 - RNA, 19 nt, Artificial Sequence
  Description of Artificial Sequence: Synthetic oligonucleotide
  Antisense strand to SEQ ID NO: 718178
aucaaggccauagacauac

SEQ ID NO: 718180 - RNA, 19 nt, Artificial Sequence
  Description of Artificial Sequence: Synthetic oligonucleotide
  Sense strand starting at position 3917 of SEQ ID NO: 586440
gguaguaagguuggcuuca

SEQ ID NO: 718181 - RNA, 19 nt, Artificial Sequence
  Description of Artificial Sequence: Synthetic oligonucleotide
  Antisense strand to SEQ ID NO: 718180
ugaagccaaccuuacuacc

SEQ ID NO: 718182 - RNA, 19 nt, Artificial Sequence
  Description of Artificial Sequence: Synthetic oligonucleotide
  Sense strand starting at position 363 of SEQ ID NO: 586441
agaagaaauuugcagcuga

SEQ ID NO: 718183 - RNA, 19 nt, Artificial Sequence
  Description of Artificial Sequence: Synthetic oligonucleotide
  Antisense strand to SEQ ID NO: 718182
ucagcugcaaauuucuucu

SEQ ID NO: 718184 - RNA, 19 nt, Artificial Sequence
  Description of Artificial Sequence: Synthetic oligonucleotide
  Sense strand starting at position 426 of SEQ ID NO: 586441
cuggacuucccauguuauu

SEQ ID NO: 718185 - RNA, 19 nt, Artificial Sequence
  Description of Artificial Sequence: Synthetic oligonucleotide
  Antisense strand to SEQ ID NO: 718184
aauaacaugggaaguccag

SEQ ID NO: 718186 - RNA, 19 nt, Artificial Sequence
  Description of Artificial Sequence: Synthetic oligonucleotide
  Sense strand starting at position 463 of SEQ ID NO: 586441
guauguuaggaaugagcuc

SEQ ID NO: 718187 - RNA, 19 nt, Artificial Sequence
  Description of Artificial Sequence: Synthetic oligonucleotide
  Antisense strand to SEQ ID NO: 718186
gagcucauuccuaacauac

SEQ ID NO: 718188 - RNA, 19 nt, Artificial Sequence
  Description of Artificial Sequence: Synthetic oligonucleotide
  Sense strand starting at position 613 of SEQ ID NO: 586441
ugugaagagucuccaaauu

SEQ ID NO: 718189 - RNA, 19 nt, Artificial Sequence
  Description of Artificial Sequence: Synthetic oligonucleotide
  Antisense strand to SEQ ID NO: 718188
aauuuggagacucuucaca

SEQ ID NO: 718190 - RNA, 19 nt, Artificial Sequence
  Description of Artificial Sequence: Synthetic oligonucleotide
  Sense strand starting at position 880 of SEQ ID NO: 586441
cagagagaaugccuugaau

SEQ ID NO: 718191 - RNA, 19 nt, Artificial Sequence
  Description of Artificial Sequence: Synthetic oligonucleotide
  Antisense strand to SEQ ID NO: 718190
auucaaggcauucucucug

SEQ ID NO: 718192 - RNA, 19 nt, Artificial Sequence
  Description of Artificial Sequence: Synthetic oligonucleotide
  Sense strand starting at position 947 of SEQ ID NO: 586441
ggcccaagcucucugacau

SEQ ID NO: 718193 - RNA, 19 nt, Artificial Sequence
  Description of Artificial Sequence: Synthetic oligonucleotide
  Antisense strand to SEQ ID NO: 718192
augucagagagcuugggcc

SEQ ID NO: 718194 - RNA, 19 nt, Artificial Sequence
  Description of Artificial Sequence: Synthetic oligonucleotide
  Sense strand starting at position 948 of SEQ ID NO: 586441
gcccaagcucucugacaua

SEQ ID NO: 718195 - RNA, 19 nt, Artificial Sequence
  Description of Artificial Sequence: Synthetic oligonucleotide
  Antisense strand to SEQ ID NO: 718194
uaugucagagagcuugggc

SEQ ID NO: 718196 - RNA, 19 nt, Artificial Sequence
  Description of Artificial Sequence: Synthetic oligonucleotide
  Sense strand starting at position 963 of SEQ ID NO: 586441
cauagagcuugcuuagaca

SEQ ID NO: 718197 - RNA, 19 nt, Artificial Sequence
  Description of Artificial Sequence: Synthetic oligonucleotide
  Antisense strand to SEQ ID NO: 718196
ugucuaagcaagcucuaug

SEQ ID NO: 718198 - RNA, 19 nt, Artificial Sequence
  Description of Artificial Sequence: Synthetic oligonucleotide
  Sense strand starting at position 1092 of SEQ ID NO: 586441
ggcugauuaacugguuaug

SEQ ID NO: 718199 - RNA, 19 nt, Artificial Sequence
  Description of Artificial Sequence: Synthetic oligonucleotide
  Antisense strand to SEQ ID NO: 718198
cauaaccaguuaaucagcc

SEQ ID NO: 718200 - RNA, 19 nt, Artificial Sequence
  Description of Artificial Sequence: Synthetic oligonucleotide
  Sense strand starting at position 1094 of SEQ ID NO: 586441
cugauuaacugguuaugcu

SEQ ID NO: 718201 - RNA, 19 nt, Artificial Sequence
  Description of Artificial Sequence: Synthetic oligonucleotide
  Antisense strand to SEQ ID NO: 718200
agcauaaccaguuaaucag

SEQ ID NO: 718202 - RNA, 19 nt, Artificial Sequence
  Description of Artificial Sequence: Synthetic oligonucleotide
  Sense strand starting at position 1170 of SEQ ID NO: 586441
gcguuaagacuugauacuu

SEQ ID NO: 718203 - RNA, 19 nt, Artificial Sequence
  Description of Artificial Sequence: Synthetic oligonucleotide
  Antisense strand to SEQ ID NO: 718202
aaguaucaagucuuaacgc

SEQ ID NO: 718204 - RNA, 19 nt, Artificial Sequence
  Description of Artificial Sequence: Synthetic oligonucleotide
  Sense strand starting at position 1230 of SEQ ID NO: 586441
gcucacuuccauuggucau

SEQ ID NO: 718205 - RNA, 19 nt, Artificial Sequence
  Description of Artificial Sequence: Synthetic oligonucleotide
  Antisense strand to SEQ ID NO: 718204
augaccaauggaagugagc

SEQ ID NO: 718206 - RNA, 19 nt, Artificial Sequence
  Description of Artificial Sequence: Synthetic oligonucleotide
  Sense strand starting at position 1292 of SEQ ID NO: 586441
cuauuuacccagugucuuu

SEQ ID NO: 718207 - RNA, 19 nt, Artificial Sequence
  Description of Artificial Sequence: Synthetic oligonucleotide
  Antisense strand to SEQ ID NO: 718206
aaagacacuggguaaauag

SEQ ID NO: 718208 - RNA, 19 nt, Artificial Sequence
  Description of Artificial Sequence: Synthetic oligonucleotide
  Sense strand starting at position 2046 of SEQ ID NO: 586441
aaggaaugugauggugaca

SEQ ID NO: 718209 - RNA, 19 nt, Artificial Sequence
  Description of Artificial Sequence: Synthetic oligonucleotide
  Antisense strand to SEQ ID NO: 718208
ugucaccaucacauuccuu

SEQ ID NO: 718210 - RNA, 19 nt, Artificial Sequence
  Description of Artificial Sequence: Synthetic oligonucleotide
  Sense strand starting at position 2312 of SEQ ID NO: 586441
accaaacuuccaugggacu

SEQ ID NO: 718211 - RNA, 19 nt, Artificial Sequence
  Description of Artificial Sequence: Synthetic oligonucleotide
  Antisense strand to SEQ ID NO: 718210
agucccauggaaguuuggu

SEQ ID NO: 718212 - RNA, 19 nt, Artificial Sequence
  Description of Artificial Sequence: Synthetic oligonucleotide
  Sense strand starting at position 2313 of SEQ ID NO: 586441
ccaaacuuccaugggacuu

SEQ ID NO: 718213 - RNA, 19 nt, Artificial Sequence
  Description of Artificial Sequence: Synthetic oligonucleotide
  Antisense strand to SEQ ID NO: 718212
aagucccauggaaguuugg

SEQ ID NO: 718214 - RNA, 19 nt, Artificial Sequence
  Description of Artificial Sequence: Synthetic oligonucleotide
  Sense strand starting at position 2459 of SEQ ID NO: 586441
gcuuauuuauuuggaaaca

SEQ ID NO: 718215 - RNA, 19 nt, Artificial Sequence
  Description of Artificial Sequence: Synthetic oligonucleotide
  Antisense strand to SEQ ID NO: 718214
uguuuccaaauaaauaagc

SEQ ID NO: 718216 - RNA, 19 nt, Artificial Sequence
  Description of Artificial Sequence: Synthetic oligonucleotide
  Sense strand starting at position 2536 of SEQ ID NO: 586441
acgagagcugguuguuaca

SEQ ID NO: 718217 - RNA, 19 nt, Artificial Sequence
  Description of Artificial Sequence: Synthetic oligonucleotide
  Antisense strand to SEQ ID NO: 718216
uguaacaaccagcucucgu

SEQ ID NO: 718218 - RNA, 19 nt, Artificial Sequence
  Description of Artificial Sequence: Synthetic oligonucleotide
  Sense strand starting at position 2538 of SEQ ID NO: 586441
gagagcugguuguuacauu

SEQ ID NO: 718219 - RNA, 19 nt, Artificial Sequence
  Description of Artificial Sequence: Synthetic oligonucleotide
  Antisense strand to SEQ ID NO: 718218
aauguaacaaccagcucuc

SEQ ID NO: 718220 - RNA, 19 nt, Artificial Sequence
  Description of Artificial Sequence: Synthetic oligonucleotide
  Sense strand starting at position 3115 of SEQ ID NO: 586441
gggcgaucgcuugaaucug

SEQ ID NO: 718221 - RNA, 19 nt, Artificial Sequence
  Description of Artificial Sequence: Synthetic oligonucleotide
  Antisense strand to SEQ ID NO: 718220
cagauucaagcgaucgccc

SEQ ID NO: 718222 - RNA, 19 nt, Artificial Sequence
  Description of Artificial Sequence: Synthetic oligonucleotide
  Sense strand starting at position 3288 of SEQ ID NO: 586441
cuuguuagcuagcuugaaa

SEQ ID NO: 718223 - RNA, 19 nt, Artificial Sequence
  Description of Artificial Sequence: Synthetic oligonucleotide
  Antisense strand to SEQ ID NO: 718222
uuucaagcuagcuaacaag

SEQ ID NO: 718224 - RNA, 19 nt, Artificial Sequence
  Description of Artificial Sequence: Synthetic oligonucleotide
  Sense strand starting at position 3291 of SEQ ID NO: 586441
guuagcuagcuugaaauca

SEQ ID NO: 718225 - RNA, 19 nt, Artificial Sequence
  Description of Artificial Sequence: Synthetic oligonucleotide
  Antisense strand to SEQ ID NO: 718224
ugauuucaagcuagcuaac

SEQ ID NO: 718226 - RNA, 19 nt, Artificial Sequence
  Description of Artificial Sequence: Synthetic oligonucleotide
  Sense strand starting at position 3316 of SEQ ID NO: 586441
gcuacaaaucaggguuuga

SEQ ID NO: 718227 - RNA, 19 nt, Artificial Sequence
  Description of Artificial Sequence: Synthetic oligonucleotide
  Antisense strand to SEQ ID NO: 718226
ucaaacccugauuuguagc

SEQ ID NO: 718228 - RNA, 19 nt, Artificial Sequence
  Description of Artificial Sequence: Synthetic oligonucleotide
  Sense strand starting at position 3321 of SEQ ID NO: 586441
aaaucaggguuugauuuau

SEQ ID NO: 718229 - RNA, 19 nt, Artificial Sequence
  Description of Artificial Sequence: Synthetic oligonucleotide
  Antisense strand to SEQ ID NO: 718228
auaaaucaaacccugauuu

SEQ ID NO: 718230 - RNA, 19 nt, Artificial Sequence
  Description of Artificial Sequence: Synthetic oligonucleotide
  Sense strand starting at position 3331 of SEQ ID NO: 586441
uugauuuauuguucuguug

SEQ ID NO: 718231 - RNA, 19 nt, Artificial Sequence
  Description of Artificial Sequence: Synthetic oligonucleotide
  Antisense strand to SEQ ID NO: 718230
caacagaacaauaaaucaa

SEQ ID NO: 718232 - RNA, 19 nt, Artificial Sequence
  Description of Artificial Sequence: Synthetic oligonucleotide
  Sense strand starting at position 3343 of SEQ ID NO: 586441
ucuguugauugucuaaacu

SEQ ID NO: 718233 - RNA, 19 nt, Artificial Sequence
  Description of Artificial Sequence: Synthetic oligonucleotide
  Antisense strand to SEQ ID NO: 718232
aguuuagacaaucaacaga

SEQ ID NO: 718234 - RNA, 19 nt, Artificial Sequence
  Description of Artificial Sequence: Synthetic oligonucleotide
  Sense strand starting at position 3397 of SEQ ID NO: 586441
acuuaaagaugugucugua

SEQ ID NO: 718235 - RNA, 19 nt, Artificial Sequence
  Description of Artificial Sequence: Synthetic oligonucleotide
  Antisense strand to SEQ ID NO: 718234
uacagacacaucuuuaagu

SEQ ID NO: 718236 - RNA, 19 nt, Artificial Sequence
  Description of Artificial Sequence: Synthetic oligonucleotide
  Sense strand starting at position 3406 of SEQ ID NO: 586441
ugugucuguagcuauuaua

SEQ ID NO: 718237 - RNA, 19 nt, Artificial Sequence
  Description of Artificial Sequence: Synthetic oligonucleotide
  Antisense strand to SEQ ID NO: 718236
uauaauagcuacagacaca

SEQ ID NO: 718238 - RNA, 19 nt, Artificial Sequence
  Description of Artificial Sequence: Synthetic oligonucleotide
  Sense strand starting at position 3456 of SEQ ID NO: 586441
cuuccaguauuugaagacu

SEQ ID NO: 718239 - RNA, 19 nt, Artificial Sequence
  Description of Artificial Sequence: Synthetic oligonucleotide
  Antisense strand to SEQ ID NO: 718238
agucuucaaauacuggaag

SEQ ID NO: 718240 - RNA, 19 nt, Artificial Sequence
  Description of Artificial Sequence: Synthetic oligonucleotide
  Sense strand starting at position 3554 of SEQ ID NO: 586441
ugccuugcucauuaaugua

SEQ ID NO: 718241 - RNA, 19 nt, Artificial Sequence
  Description of Artificial Sequence: Synthetic oligonucleotide
  Antisense strand to SEQ ID NO: 718240
uacauuaaugagcaaggca

SEQ ID NO: 718242 - RNA, 19 nt, Artificial Sequence
  Description of Artificial Sequence: Synthetic oligonucleotide
  Sense strand starting at position 3610 of SEQ ID NO: 586441
cuugcuugucaguugcaau

SEQ ID NO: 718243 - RNA, 19 nt, Artificial Sequence
  Description of Artificial Sequence: Synthetic oligonucleotide
  Antisense strand to SEQ ID NO: 718242
auugcaacugacaagcaag

SEQ ID NO: 718244 - RNA, 19 nt, Artificial Sequence
  Description of Artificial Sequence: Synthetic oligonucleotide
  Sense strand starting at position 3617 of SEQ ID NO: 586441
gucaguugcaaucauaggu

SEQ ID NO: 718245 - RNA, 19 nt, Artificial Sequence
  Description of Artificial Sequence: Synthetic oligonucleotide
  Antisense strand to SEQ ID NO: 718244
accuaugauugcaacugac

SEQ ID NO: 718246 - RNA, 19 nt, Artificial Sequence
  Description of Artificial Sequence: Synthetic oligonucleotide
  Sense strand starting at position 3625 of SEQ ID NO: 586441
caaucauagguuggcuaga

SEQ ID NO: 718247 - RNA, 19 nt, Artificial Sequence
  Description of Artificial Sequence: Synthetic oligonucleotide
  Antisense strand to SEQ ID NO: 718246
ucuagccaaccuaugauug

SEQ ID NO: 718248 - RNA, 19 nt, Artificial Sequence
  Description of Artificial Sequence: Synthetic oligonucleotide
  Sense strand starting at position 3626 of SEQ ID NO: 586441
aaucauagguuggcuagaa

SEQ ID NO: 718249 - RNA, 19 nt, Artificial Sequence
  Description of Artificial Sequence: Synthetic oligonucleotide
  Antisense strand to SEQ ID NO: 718248
uucuagccaaccuaugauu

SEQ ID NO: 718250 - RNA, 19 nt, Artificial Sequence
  Description of Artificial Sequence: Synthetic oligonucleotide
  Sense strand starting at position 3627 of SEQ ID NO: 586441
aucauagguuggcuagaaa

SEQ ID NO: 718251 - RNA, 19 nt, Artificial Sequence
  Description of Artificial Sequence: Synthetic oligonucleotide
  Antisense strand to SEQ ID NO: 718250
uuucuagccaaccuaugau

SEQ ID NO: 718252 - RNA, 19 nt, Artificial Sequence
  Description of Artificial Sequence: Synthetic oligonucleotide
  Sense strand starting at position 3639 of SEQ ID NO: 586441
cuagaaauaucagcguuug

SEQ ID NO: 718253 - RNA, 19 nt, Artificial Sequence
  Description of Artificial Sequence: Synthetic oligonucleotide
  Antisense strand to SEQ ID NO: 718252
caaacgcugauauuucuag

SEQ ID NO: 718254 - RNA, 19 nt, Artificial Sequence
  Description of Artificial Sequence: Synthetic oligonucleotide
  Sense strand starting at position 3640 of SEQ ID NO: 586441
uagaaauaucagcguuuga

SEQ ID NO: 718255 - RNA, 19 nt, Artificial Sequence
  Description of Artificial Sequence: Synthetic oligonucleotide
  Antisense strand to SEQ ID NO: 718254
ucaaacgcugauauuucua

SEQ ID NO: 718256 - RNA, 19 nt, Artificial Sequence
  Description of Artificial Sequence: Synthetic oligonucleotide
  Sense strand starting at position 3644 of SEQ ID NO: 586441
aauaucagcguuugacaaa

SEQ ID NO: 718257 - RNA, 19 nt, Artificial Sequence
  Description of Artificial Sequence: Synthetic oligonucleotide
  Antisense strand to SEQ ID NO: 718256
uuugucaaacgcugauauu

SEQ ID NO: 718258 - RNA, 19 nt, Artificial Sequence
  Description of Artificial Sequence: Synthetic oligonucleotide
  Sense strand starting at position 3684 of SEQ ID NO: 586441
agaaucaacuggucauaug

SEQ ID NO: 718259 - RNA, 19 nt, Artificial Sequence
  Description of Artificial Sequence: Synthetic oligonucleotide
  Antisense strand to SEQ ID NO: 718258
cauaugaccaguugauucu

SEQ ID NO: 718260 - RNA, 19 nt, Artificial Sequence
  Description of Artificial Sequence: Synthetic oligonucleotide
  Sense strand starting at position 3787 of SEQ ID NO: 586441
auuguuugaacuuaggagu

SEQ ID NO: 718261 - RNA, 19 nt, Artificial Sequence
  Description of Artificial Sequence: Synthetic oligonucleotide
  Antisense strand to SEQ ID NO: 718260
acuccuaaguucaaacaau

SEQ ID NO: 718262 - RNA, 19 nt, Artificial Sequence
  Description of Artificial Sequence: Synthetic oligonucleotide
  Sense strand starting at position 381 of SEQ ID NO: 586442
agaagaaauuugcagcuga

SEQ ID NO: 718263 - RNA, 19 nt, Artificial Sequence
  Description of Artificial Sequence: Synthetic oligonucleotide
  Antisense strand to SEQ ID NO: 718262
ucagcugcaaauuucuucu

SEQ ID NO: 718264 - RNA, 19 nt, Artificial Sequence
  Description of Artificial Sequence: Synthetic oligonucleotide
  Sense strand starting at position 444 of SEQ ID NO: 586442
cuggacuucccauguuauu

SEQ ID NO: 718265 - RNA, 19 nt, Artificial Sequence
  Description of Artificial Sequence: Synthetic oligonucleotide
  Antisense strand to SEQ ID NO: 718264
aauaacaugggaaguccag

SEQ ID NO: 718266 - RNA, 19 nt, Artificial Sequence
  Description of Artificial Sequence: Synthetic oligonucleotide
  Sense strand starting at position 481 of SEQ ID NO: 586442
guauguuaggaaugagcuc

SEQ ID NO: 718267 - RNA, 19 nt, Artificial Sequence
  Description of Artificial Sequence: Synthetic oligonucleotide
  Antisense strand to SEQ ID NO: 718266
gagcucauuccuaacauac

SEQ ID NO: 718268 - RNA, 19 nt, Artificial Sequence
  Description of Artificial Sequence: Synthetic oligonucleotide
  Sense strand starting at position 631 of SEQ ID NO: 586442
ugugaagagucuccaaauu

SEQ ID NO: 718269 - RNA, 19 nt, Artificial Sequence
  Description of Artificial Sequence: Synthetic oligonucleotide
  Antisense strand to SEQ ID NO: 718268
aauuuggagacucuucaca

SEQ ID NO: 718270 - RNA, 19 nt, Artificial Sequence
  Description of Artificial Sequence: Synthetic oligonucleotide
  Sense strand starting at position 898 of SEQ ID NO: 586442
cagagagaaugccuugaau

SEQ ID NO: 718271 - RNA, 19 nt, Artificial Sequence
  Description of Artificial Sequence: Synthetic oligonucleotide
  Antisense strand to SEQ ID NO: 718270
auucaaggcauucucucug

SEQ ID NO: 718272 - RNA, 19 nt, Artificial Sequence
  Description of Artificial Sequence: Synthetic oligonucleotide
  Sense strand starting at position 965 of SEQ ID NO: 586442
ggcccaagcucucugacau

SEQ ID NO: 718273 - RNA, 19 nt, Artificial Sequence
  Description of Artificial Sequence: Synthetic oligonucleotide
  Antisense strand to SEQ ID NO: 718272
augucagagagcuugggcc

SEQ ID NO: 718274 - RNA, 19 nt, Artificial Sequence
  Description of Artificial Sequence: Synthetic oligonucleotide
  Sense strand starting at position 966 of SEQ ID NO: 586442
gcccaagcucucugacaua

SEQ ID NO: 718275 - RNA, 19 nt, Artificial Sequence
  Description of Artificial Sequence: Synthetic oligonucleotide
  Antisense strand to SEQ ID NO: 718274
uaugucagagagcuugggc

SEQ ID NO: 718276 - RNA, 19 nt, Artificial Sequence
  Description of Artificial Sequence: Synthetic oligonucleotide
  Sense strand starting at position 981 of SEQ ID NO: 586442
cauagagcuugcuuagaca

SEQ ID NO: 718277 - RNA, 19 nt, Artificial Sequence
  Description of Artificial Sequence: Synthetic oligonucleotide
  Antisense strand to SEQ ID NO: 718276
ugucuaagcaagcucuaug

SEQ ID NO: 718278 - RNA, 19 nt, Artificial Sequence
  Description of Artificial Sequence: Synthetic oligonucleotide
  Sense strand starting at position 1110 of SEQ ID NO: 586442
ggcugauuaacugguuaug

SEQ ID NO: 718279 - RNA, 19 nt, Artificial Sequence
  Description of Artificial Sequence: Synthetic oligonucleotide
  Antisense strand to SEQ ID NO: 718278
cauaaccaguuaaucagcc

SEQ ID NO: 718280 - RNA, 19 nt, Artificial Sequence
  Description of Artificial Sequence: Synthetic oligonucleotide
  Sense strand starting at position 1112 of SEQ ID NO: 586442
cugauuaacugguuaugcu

SEQ ID NO: 718281 - RNA, 19 nt, Artificial Sequence
  Description of Artificial Sequence: Synthetic oligonucleotide
  Antisense strand to SEQ ID NO: 718280
agcauaaccaguuaaucag

SEQ ID NO: 718282 - RNA, 19 nt, Artificial Sequence
  Description of Artificial Sequence: Synthetic oligonucleotide
  Sense strand starting at position 1188 of SEQ ID NO: 586442
gcguuaagacuugauacuu

SEQ ID NO: 718283 - RNA, 19 nt, Artificial Sequence
  Description of Artificial Sequence: Synthetic oligonucleotide
  Antisense strand to SEQ ID NO: 718282
aaguaucaagucuuaacgc

SEQ ID NO: 718284 - RNA, 19 nt, Artificial Sequence
  Description of Artificial Sequence: Synthetic oligonucleotide
  Sense strand starting at position 1248 of SEQ ID NO: 586442
gcucacuuccauuggucau

SEQ ID NO: 718285 - RNA, 19 nt, Artificial Sequence
  Description of Artificial Sequence: Synthetic oligonucleotide
  Antisense strand to SEQ ID NO: 718284
augaccaauggaagugagc

SEQ ID NO: 718286 - RNA, 19 nt, Artificial Sequence
  Description of Artificial Sequence: Synthetic oligonucleotide
  Sense strand starting at position 1310 of SEQ ID NO: 586442
cuauuuacccagugucuuu

SEQ ID NO: 718287 - RNA, 19 nt, Artificial Sequence
  Description of Artificial Sequence: Synthetic oligonucleotide
  Antisense strand to SEQ ID NO: 718286
aaagacacuggguaaauag

SEQ ID NO: 718288 - RNA, 19 nt, Artificial Sequence
  Description of Artificial Sequence: Synthetic oligonucleotide
  Sense strand starting at position 2064 of SEQ ID NO: 586442
aaggaaugugauggugaca

SEQ ID NO: 718289 - RNA, 19 nt, Artificial Sequence
  Description of Artificial Sequence: Synthetic oligonucleotide
  Antisense strand to SEQ ID NO: 718288
ugucaccaucacauuccuu

SEQ ID NO: 718290 - RNA, 19 nt, Artificial Sequence
  Description of Artificial Sequence: Synthetic oligonucleotide
  Sense strand starting at position 2330 of SEQ ID NO: 586442
accaaacuuccaugggacu

SEQ ID NO: 718291 - RNA, 19 nt, Artificial Sequence
  Description of Artificial Sequence: Synthetic oligonucleotide
  Antisense strand to SEQ ID NO: 718290
agucccauggaaguuuggu

SEQ ID NO: 718292 - RNA, 19 nt, Artificial Sequence
  Description of Artificial Sequence: Synthetic oligonucleotide
  Sense strand starting at position 2331 of SEQ ID NO: 586442
ccaaacuuccaugggacuu

SEQ ID NO: 718293 - RNA, 19 nt, Artificial Sequence
  Description of Artificial Sequence: Synthetic oligonucleotide
  Antisense strand to SEQ ID NO: 718292
aagucccauggaaguuugg

SEQ ID NO: 718294 - RNA, 19 nt, Artificial Sequence
  Description of Artificial Sequence: Synthetic oligonucleotide
  Sense strand starting at position 2477 of SEQ ID NO: 586442
gcuuauuuauuuggaaaca

SEQ ID NO: 718295 - RNA, 19 nt, Artificial Sequence
  Description of Artificial Sequence: Synthetic oligonucleotide
  Antisense strand to SEQ ID NO: 718294
uguuuccaaauaaauaagc

SEQ ID NO: 718296 - RNA, 19 nt, Artificial Sequence
  Description of Artificial Sequence: Synthetic oligonucleotide
  Sense strand starting at position 2554 of SEQ ID NO: 586442
acgagagcugguuguuaca

SEQ ID NO: 718297 - RNA, 19 nt, Artificial Sequence
  Description of Artificial Sequence: Synthetic oligonucleotide
  Antisense strand to SEQ ID NO: 718296
uguaacaaccagcucucgu

SEQ ID NO: 718298 - RNA, 19 nt, Artificial Sequence
  Description of Artificial Sequence: Synthetic oligonucleotide
  Sense strand starting at position 2556 of SEQ ID NO: 586442
gagagcugguuguuacauu

SEQ ID NO: 718299 - RNA, 19 nt, Artificial Sequence
  Description of Artificial Sequence: Synthetic oligonucleotide
  Antisense strand to SEQ ID NO: 718298
aauguaacaaccagcucuc

SEQ ID NO: 718300 - RNA, 19 nt, Artificial Sequence
  Description of Artificial Sequence: Synthetic oligonucleotide
  Sense strand starting at position 3133 of SEQ ID NO: 586442
gggcgaucgcuugaaucug

SEQ ID NO: 718301 - RNA, 19 nt, Artificial Sequence
  Description of Artificial Sequence: Synthetic oligonucleotide
  Antisense strand to SEQ ID NO: 718300
cagauucaagcgaucgccc

SEQ ID NO: 718302 - RNA, 19 nt, Artificial Sequence
  Description of Artificial Sequence: Synthetic oligonucleotide
  Sense strand starting at position 3306 of SEQ ID NO: 586442
cuuguuagcuagcuugaaa

SEQ ID NO: 718303 - RNA, 19 nt, Artificial Sequence
  Description of Artificial Sequence: Synthetic oligonucleotide
  Antisense strand to SEQ ID NO: 718302
uuucaagcuagcuaacaag

SEQ ID NO: 718304 - RNA, 19 nt, Artificial Sequence
  Description of Artificial Sequence: Synthetic oligonucleotide
  Sense strand starting at position 3309 of SEQ ID NO: 586442
guuagcuagcuugaaauca

SEQ ID NO: 718305 - RNA, 19 nt, Artificial Sequence
  Description of Artificial Sequence: Synthetic oligonucleotide
  Antisense strand to SEQ ID NO: 718304
ugauuucaagcuagcuaac

SEQ ID NO: 718306 - RNA, 19 nt, Artificial Sequence
  Description of Artificial Sequence: Synthetic oligonucleotide
  Sense strand starting at position 3334 of SEQ ID NO: 586442
gcuacaaaucaggguuuga

SEQ ID NO: 718307 - RNA, 19 nt, Artificial Sequence
  Description of Artificial Sequence: Synthetic oligonucleotide
  Antisense strand to SEQ ID NO: 718306
ucaaacccugauuuguagc

SEQ ID NO: 718308 - RNA, 19 nt, Artificial Sequence
  Description of Artificial Sequence: Synthetic oligonucleotide
  Sense strand starting at position 3339 of SEQ ID NO: 586442
aaaucaggguuugauuuau

SEQ ID NO: 718309 - RNA, 19 nt, Artificial Sequence
  Description of Artificial Sequence: Synthetic oligonucleotide
  Antisense strand to SEQ ID NO: 718308
auaaaucaaacccugauuu

SEQ ID NO: 718310 - RNA, 19 nt, Artificial Sequence
  Description of Artificial Sequence: Synthetic oligonucleotide
  Sense strand starting at position 3349 of SEQ ID NO: 586442
uugauuuauuguucuguug

SEQ ID NO: 718311 - RNA, 19 nt, Artificial Sequence
  Description of Artificial Sequence: Synthetic oligonucleotide
  Antisense strand to SEQ ID NO: 718310
caacagaacaauaaaucaa

SEQ ID NO: 718312 - RNA, 19 nt, Artificial Sequence
  Description of Artificial Sequence: Synthetic oligonucleotide
  Sense strand starting at position 3361 of SEQ ID NO: 586442
ucuguugauugucuaaacu

SEQ ID NO: 718313 - RNA, 19 nt, Artificial Sequence
  Description of Artificial Sequence: Synthetic oligonucleotide
  Antisense strand to SEQ ID NO: 718312
aguuuagacaaucaacaga

SEQ ID NO: 718314 - RNA, 19 nt, Artificial Sequence
  Description of Artificial Sequence: Synthetic oligonucleotide
  Sense strand starting at position 3415 of SEQ ID NO: 586442
acuuaaagaugugucugua

SEQ ID NO: 718315 - RNA, 19 nt, Artificial Sequence
  Description of Artificial Sequence: Synthetic oligonucleotide
  Antisense strand to SEQ ID NO: 718314
uacagacacaucuuuaagu

SEQ ID NO: 718316 - RNA, 19 nt, Artificial Sequence
  Description of Artificial Sequence: Synthetic oligonucleotide
  Sense strand starting at position 3424 of SEQ ID NO: 586442
ugugucuguagcuauuaua

SEQ ID NO: 718317 - RNA, 19 nt, Artificial Sequence
  Description of Artificial Sequence: Synthetic oligonucleotide
  Antisense strand to SEQ ID NO: 718316
uauaauagcuacagacaca

SEQ ID NO: 718318 - RNA, 19 nt, Artificial Sequence
  Description of Artificial Sequence: Synthetic oligonucleotide
  Sense strand starting at position 3474 of SEQ ID NO: 586442
cuuccaguauuugaagacu

SEQ ID NO: 718319 - RNA, 19 nt, Artificial Sequence
  Description of Artificial Sequence: Synthetic oligonucleotide
  Antisense strand to SEQ ID NO: 718318
agucuucaaauacuggaag

SEQ ID NO: 718320 - RNA, 19 nt, Artificial Sequence
  Description of Artificial Sequence: Synthetic oligonucleotide
  Sense strand starting at position 3572 of SEQ ID NO: 586442
ugccuugcucauuaaugua

SEQ ID NO: 718321 - RNA, 19 nt, Artificial Sequence
  Description of Artificial Sequence: Synthetic oligonucleotide
  Antisense strand to SEQ ID NO: 718320
uacauuaaugagcaaggca

SEQ ID NO: 718322 - RNA, 19 nt, Artificial Sequence
  Description of Artificial Sequence: Synthetic oligonucleotide
  Sense strand starting at position 3628 of SEQ ID NO: 586442
cuugcuugucaguugcaau

SEQ ID NO: 718323 - RNA, 19 nt, Artificial Sequence
  Description of Artificial Sequence: Synthetic oligonucleotide
  Antisense strand to SEQ ID NO: 718322
auugcaacugacaagcaag

SEQ ID NO: 718324 - RNA, 19 nt, Artificial Sequence
  Description of Artificial Sequence: Synthetic oligonucleotide
  Sense strand starting at position 3635 of SEQ ID NO: 586442
gucaguugcaaucauaggu

SEQ ID NO: 718325 - RNA, 19 nt, Artificial Sequence
  Description of Artificial Sequence: Synthetic oligonucleotide
  Antisense strand to SEQ ID NO: 718324
accuaugauugcaacugac

SEQ ID NO: 718326 - RNA, 19 nt, Artificial Sequence
  Description of Artificial Sequence: Synthetic oligonucleotide
  Sense strand starting at position 3643 of SEQ ID NO: 586442
caaucauagguuggcuaga

SEQ ID NO: 718327 - RNA, 19 nt, Artificial Sequence
  Description of Artificial Sequence: Synthetic oligonucleotide
  Antisense strand to SEQ ID NO: 718326
ucuagccaaccuaugauug

SEQ ID NO: 718328 - RNA, 19 nt, Artificial Sequence
  Description of Artificial Sequence: Synthetic oligonucleotide
  Sense strand starting at position 3644 of SEQ ID NO: 586442
aaucauagguuggcuagaa

SEQ ID NO: 718329 - RNA, 19 nt, Artificial Sequence
  Description of Artificial Sequence: Synthetic oligonucleotide
  Antisense strand to SEQ ID NO: 718328
uucuagccaaccuaugauu

SEQ ID NO: 718330 - RNA, 19 nt, Artificial Sequence
  Description of Artificial Sequence: Synthetic oligonucleotide
  Sense strand starting at position 3645 of SEQ ID NO: 586442
aucauagguuggcuagaaa

SEQ ID NO: 718331 - RNA, 19 nt, Artificial Sequence
  Description of Artificial Sequence: Synthetic oligonucleotide
  Antisense strand to SEQ ID NO: 718330
uuucuagccaaccuaugau

SEQ ID NO: 718332 - RNA, 19 nt, Artificial Sequence
  Description of Artificial Sequence: Synthetic oligonucleotide
  Sense strand starting at position 3657 of SEQ ID NO: 586442
cuagaaauaucagcguuug

SEQ ID NO: 718333 - RNA, 19 nt, Artificial Sequence
  Description of Artificial Sequence: Synthetic oligonucleotide
  Antisense strand to SEQ ID NO: 718332
caaacgcugauauuucuag

SEQ ID NO: 718334 - RNA, 19 nt, Artificial Sequence
  Description of Artificial Sequence: Synthetic oligonucleotide
  Sense strand starting at position 3658 of SEQ ID NO: 586442
uagaaauaucagcguuuga

SEQ ID NO: 718335 - RNA, 19 nt, Artificial Sequence
  Description of Artificial Sequence: Synthetic oligonucleotide
  Antisense strand to SEQ ID NO: 718334
ucaaacgcugauauuucua

SEQ ID NO: 718336 - RNA, 19 nt, Artificial Sequence
  Description of Artificial Sequence: Synthetic oligonucleotide
  Sense strand starting at position 3662 of SEQ ID NO: 586442
aauaucagcguuugacaaa

SEQ ID NO: 718337 - RNA, 19 nt, Artificial Sequence
  Description of Artificial Sequence: Synthetic oligonucleotide
  Antisense strand to SEQ ID NO: 718336
uuugucaaacgcugauauu

SEQ ID NO: 718338 - RNA, 19 nt, Artificial Sequence
  Description of Artificial Sequence: Synthetic oligonucleotide
  Sense strand starting at position 3702 of SEQ ID NO: 586442
agaaucaacuggucauaug

SEQ ID NO: 718339 - RNA, 19 nt, Artificial Sequence
  Description of Artificial Sequence: Synthetic oligonucleotide
  Antisense strand to SEQ ID NO: 718338
cauaugaccaguugauucu

SEQ ID NO: 718340 - RNA, 19 nt, Artificial Sequence
  Description of Artificial Sequence: Synthetic oligonucleotide
  Sense strand starting at position 3805 of SEQ ID NO: 586442
auuguuugaacuuaggagu

SEQ ID NO: 718341 - RNA, 19 nt, Artificial Sequence
  Description of Artificial Sequence: Synthetic oligonucleotide
  Antisense strand to SEQ ID NO: 718340
acuccuaaguucaaacaau

SEQ ID NO: 718342 - RNA, 19 nt, Artificial Sequence
  Description of Artificial Sequence: Synthetic oligonucleotide
  Sense strand starting at position 198 of SEQ ID NO: 586443
ggguuacuuggugaauucu

SEQ ID NO: 718343 - RNA, 19 nt, Artificial Sequence
  Description of Artificial Sequence: Synthetic oligonucleotide
  Antisense strand to SEQ ID NO: 718342
agaauucaccaaguaaccc

SEQ ID NO: 718344 - RNA, 19 nt, Artificial Sequence
  Description of Artificial Sequence: Synthetic oligonucleotide
  Sense strand starting at position 206 of SEQ ID NO: 586443
uggugaauucuccaccuuu

SEQ ID NO: 718345 - RNA, 19 nt, Artificial Sequence
  Description of Artificial Sequence: Synthetic oligonucleotide
  Antisense strand to SEQ ID NO: 718344
aaagguggagaauucacca

SEQ ID NO: 718346 - RNA, 19 nt, Artificial Sequence
  Description of Artificial Sequence: Synthetic oligonucleotide
  Sense strand starting at position 231 of SEQ ID NO: 586443
ucccguuuccugagcggga

SEQ ID NO: 718347 - RNA, 19 nt, Artificial Sequence
  Description of Artificial Sequence: Synthetic oligonucleotide
  Antisense strand to SEQ ID NO: 718346
ucccgcucaggaaacggga

SEQ ID NO: 718348 - RNA, 19 nt, Artificial Sequence
  Description of Artificial Sequence: Synthetic oligonucleotide
  Sense strand starting at position 232 of SEQ ID NO: 586443
cccguuuccugagcgggaa

SEQ ID NO: 718349 - RNA, 19 nt, Artificial Sequence
  Description of Artificial Sequence: Synthetic oligonucleotide
  Antisense strand to SEQ ID NO: 718348
uucccgcucaggaaacggg

SEQ ID NO: 718350 - RNA, 19 nt, Artificial Sequence
  Description of Artificial Sequence: Synthetic oligonucleotide
  Sense strand starting at position 246 of SEQ ID NO: 586443
gggaaggugugcuagaguu

SEQ ID NO: 718351 - RNA, 19 nt, Artificial Sequence
  Description of Artificial Sequence: Synthetic oligonucleotide
  Antisense strand to SEQ ID NO: 718350
aacucuagcacaccuuccc

SEQ ID NO: 718352 - RNA, 19 nt, Artificial Sequence
  Description of Artificial Sequence: Synthetic oligonucleotide
  Sense strand starting at position 248 of SEQ ID NO: 586443
gaaggugugcuagaguuua

SEQ ID NO: 718353 - RNA, 19 nt, Artificial Sequence
  Description of Artificial Sequence: Synthetic oligonucleotide
  Antisense strand to SEQ ID NO: 718352
uaaacucuagcacaccuuc

SEQ ID NO: 718354 - RNA, 19 nt, Artificial Sequence
  Description of Artificial Sequence: Synthetic oligonucleotide
  Sense strand starting at position 256 of SEQ ID NO: 586443
gcuagaguuuaagugcaaa

SEQ ID NO: 718355 - RNA, 19 nt, Artificial Sequence
  Description of Artificial Sequence: Synthetic oligonucleotide
  Antisense strand to SEQ ID NO: 718354
uuugcacuuaaacucuagc

SEQ ID NO: 718356 - RNA, 19 nt, Artificial Sequence
  Description of Artificial Sequence: Synthetic oligonucleotide
  Sense strand starting at position 295 of SEQ ID NO: 586443
ucauguggcuaugagguau

SEQ ID NO: 718357 - RNA, 19 nt, Artificial Sequence
  Description of Artificial Sequence: Synthetic oligonucleotide
  Antisense strand to SEQ ID NO: 718356
auaccucauagccacauga

SEQ ID NO: 718358 - RNA, 19 nt, Artificial Sequence
  Description of Artificial Sequence: Synthetic oligonucleotide
  Sense strand starting at position 299 of SEQ ID NO: 586443
guggcuaugagguaucgaa

SEQ ID NO: 718359 - RNA, 19 nt, Artificial Sequence
  Description of Artificial Sequence: Synthetic oligonucleotide
  Antisense strand to SEQ ID NO: 718358
uucgauaccucauagccac

SEQ ID NO: 718360 - RNA, 19 nt, Artificial Sequence
  Description of Artificial Sequence: Synthetic oligonucleotide
  Sense strand starting at position 307 of SEQ ID NO: 586443
gagguaucgaaacgguuug

SEQ ID NO: 718361 - RNA, 19 nt, Artificial Sequence
  Description of Artificial Sequence: Synthetic oligonucleotide
  Antisense strand to SEQ ID NO: 718360
caaaccguuucgauaccuc

SEQ ID NO: 718362 - RNA, 19 nt, Artificial Sequence
  Description of Artificial Sequence: Synthetic oligonucleotide
  Sense strand starting at position 318 of SEQ ID NO: 586443
acgguuuguagggaguaca

SEQ ID NO: 718363 - RNA, 19 nt, Artificial Sequence
  Description of Artificial Sequence: Synthetic oligonucleotide
  Antisense strand to SEQ ID NO: 718362
uguacucccuacaaaccgu

SEQ ID NO: 718364 - RNA, 19 nt, Artificial Sequence
  Description of Artificial Sequence: Synthetic oligonucleotide
  Sense strand starting at position 377 of SEQ ID NO: 586443
gacaaauuaugguggcuuc

SEQ ID NO: 718365 - RNA, 19 nt, Artificial Sequence
  Description of Artificial Sequence: Synthetic oligonucleotide
  Antisense strand to SEQ ID NO: 718364
gaagccaccauaauuuguc

SEQ ID NO: 718366 - RNA, 19 nt, Artificial Sequence
  Description of Artificial Sequence: Synthetic oligonucleotide
  Sense strand starting at position 380 of SEQ ID NO: 586443
aaauuaugguggcuuccua

SEQ ID NO: 718367 - RNA, 19 nt, Artificial Sequence
  Description of Artificial Sequence: Synthetic oligonucleotide
  Antisense strand to SEQ ID NO: 718366
uaggaagccaccauaauuu

SEQ ID NO: 718368 - RNA, 19 nt, Artificial Sequence
  Description of Artificial Sequence: Synthetic oligonucleotide
  Sense strand starting at position 401 of SEQ ID NO: 586443
gcacucuauuagcaggaau

SEQ ID NO: 718369 - RNA, 19 nt, Artificial Sequence
  Description of Artificial Sequence: Synthetic oligonucleotide
  Antisense strand to SEQ ID NO: 718368
auuccugcuaauagagugc

SEQ ID NO: 718370 - RNA, 19 nt, Artificial Sequence
  Description of Artificial Sequence: Synthetic oligonucleotide
  Sense strand starting at position 403 of SEQ ID NO: 586443
acucuauuagcaggaaucu

SEQ ID NO: 718371 - RNA, 19 nt, Artificial Sequence
  Description of Artificial Sequence: Synthetic oligonucleotide
  Antisense strand to SEQ ID NO: 718370
agauuccugcuaauagagu

SEQ ID NO: 718372 - RNA, 19 nt, Artificial Sequence
  Description of Artificial Sequence: Synthetic oligonucleotide
  Sense strand starting at position 451 of SEQ ID NO: 586443
gugcguucgacucaugaug

SEQ ID NO: 718373 - RNA, 19 nt, Artificial Sequence
  Description of Artificial Sequence: Synthetic oligonucleotide
  Antisense strand to SEQ ID NO: 718372
caucaugagucgaacgcac

SEQ ID NO: 718374 - RNA, 19 nt, Artificial Sequence
  Description of Artificial Sequence: Synthetic oligonucleotide
  Sense strand starting at position 465 of SEQ ID NO: 586443
ugaugucugccgcagacau

SEQ ID NO: 718375 - RNA, 19 nt, Artificial Sequence
  Description of Artificial Sequence: Synthetic oligonucleotide
  Antisense strand to SEQ ID NO: 718374
augucugcggcagacauca

SEQ ID NO: 718376 - RNA, 19 nt, Artificial Sequence
  Description of Artificial Sequence: Synthetic oligonucleotide
  Sense strand starting at position 499 of SEQ ID NO: 586443
gcaagcguuccugggcaaa

SEQ ID NO: 718377 - RNA, 19 nt, Artificial Sequence
  Description of Artificial Sequence: Synthetic oligonucleotide
  Antisense strand to SEQ ID NO: 718376
uuugcccaggaacgcuugc

SEQ ID NO: 718378 - RNA, 19 nt, Artificial Sequence
  Description of Artificial Sequence: Synthetic oligonucleotide
  Sense strand starting at position 641 of SEQ ID NO: 586443
acacguggauggugugaau

SEQ ID NO: 718379 - RNA, 19 nt, Artificial Sequence
  Description of Artificial Sequence: Synthetic oligonucleotide
  Antisense strand to SEQ ID NO: 718378
auucacaccauccacgugu

SEQ ID NO: 718380 - RNA, 19 nt, Artificial Sequence
  Description of Artificial Sequence: Synthetic oligonucleotide
  Sense strand starting at position 650 of SEQ ID NO: 586443
uggugugaaugucaaagga

SEQ ID NO: 718381 - RNA, 19 nt, Artificial Sequence
  Description of Artificial Sequence: Synthetic oligonucleotide
  Antisense strand to SEQ ID NO: 718380
uccuuugacauucacacca

SEQ ID NO: 718382 - RNA, 19 nt, Artificial Sequence
  Description of Artificial Sequence: Synthetic oligonucleotide
  Sense strand starting at position 671 of SEQ ID NO: 586443
ggcaguuucggaugaugag

SEQ ID NO: 718383 - RNA, 19 nt, Artificial Sequence
  Description of Artificial Sequence: Synthetic oligonucleotide
  Antisense strand to SEQ ID NO: 718382
cucaucauccgaaacugcc

SEQ ID NO: 718384 - RNA, 19 nt, Artificial Sequence
  Description of Artificial Sequence: Synthetic oligonucleotide
  Sense strand starting at position 840 of SEQ ID NO: 586443
gcucuucgccuguuccaga

SEQ ID NO: 718385 - RNA, 19 nt, Artificial Sequence
  Description of Artificial Sequence: Synthetic oligonucleotide
  Antisense strand to SEQ ID NO: 718384
ucuggaacaggcgaagagc

SEQ ID NO: 718386 - RNA, 19 nt, Artificial Sequence
  Description of Artificial Sequence: Synthetic oligonucleotide
  Sense strand starting at position 943 of SEQ ID NO: 586443
ggcuguacuggagggauca

SEQ ID NO: 718387 - RNA, 19 nt, Artificial Sequence
  Description of Artificial Sequence: Synthetic oligonucleotide
  Antisense strand to SEQ ID NO: 718386
ugaucccuccaguacagcc

SEQ ID NO: 718388 - RNA, 19 nt, Artificial Sequence
  Description of Artificial Sequence: Synthetic oligonucleotide
  Sense strand starting at position 1128 of SEQ ID NO: 586443
gggccuguggucagagcaa

SEQ ID NO: 718389 - RNA, 19 nt, Artificial Sequence
  Description of Artificial Sequence: Synthetic oligonucleotide
  Antisense strand to SEQ ID NO: 718388
uugcucugaccacaggccc

SEQ ID NO: 718390 - RNA, 19 nt, Artificial Sequence
  Description of Artificial Sequence: Synthetic oligonucleotide
  Sense strand starting at position 1195 of SEQ ID NO: 586443
cuuccacgccuuugaaaca

SEQ ID NO: 718391 - RNA, 19 nt, Artificial Sequence
  Description of Artificial Sequence: Synthetic oligonucleotide
  Antisense strand to SEQ ID NO: 718390
uguuucaaaggcguggaag

SEQ ID NO: 718392 - RNA, 19 nt, Artificial Sequence
  Description of Artificial Sequence: Synthetic oligonucleotide
  Sense strand starting at position 1372 of SEQ ID NO: 586443
uaaguuaagcccgagguca

SEQ ID NO: 718393 - RNA, 19 nt, Artificial Sequence
  Description of Artificial Sequence: Synthetic oligonucleotide
  Antisense strand to SEQ ID NO: 718392
ugaccucgggcuuaacuua

SEQ ID NO: 718394 - RNA, 19 nt, Artificial Sequence
  Description of Artificial Sequence: Synthetic oligonucleotide
  Sense strand starting at position 1374 of SEQ ID NO: 586443
aguuaagcccgaggucauu

SEQ ID NO: 718395 - RNA, 19 nt, Artificial Sequence
  Description of Artificial Sequence: Synthetic oligonucleotide
  Antisense strand to SEQ ID NO: 718394
aaugaccucgggcuuaacu

SEQ ID NO: 718396 - RNA, 19 nt, Artificial Sequence
  Description of Artificial Sequence: Synthetic oligonucleotide
  Sense strand starting at position 1384 of SEQ ID NO: 586443
gaggucauuaaccggguua

SEQ ID NO: 718397 - RNA, 19 nt, Artificial Sequence
  Description of Artificial Sequence: Synthetic oligonucleotide
  Antisense strand to SEQ ID NO: 718396
uaacccgguuaaugaccuc

SEQ ID NO: 718398 - RNA, 19 nt, Artificial Sequence
  Description of Artificial Sequence: Synthetic oligonucleotide
  Sense strand starting at position 1386 of SEQ ID NO: 586443
ggucauuaaccggguuagu

SEQ ID NO: 718399 - RNA, 19 nt, Artificial Sequence
  Description of Artificial Sequence: Synthetic oligonucleotide
  Antisense strand to SEQ ID NO: 718398
acuaacccgguuaaugacc

SEQ ID NO: 718400 - RNA, 19 nt, Artificial Sequence
  Description of Artificial Sequence: Synthetic oligonucleotide
  Sense strand starting at position 1576 of SEQ ID NO: 586443
uggcuucgucucucuaagu

SEQ ID NO: 718401 - RNA, 19 nt, Artificial Sequence
  Description of Artificial Sequence: Synthetic oligonucleotide
  Antisense strand to SEQ ID NO: 718400
acuuagagagacgaagcca

SEQ ID NO: 718402 - RNA, 19 nt, Artificial Sequence
  Description of Artificial Sequence: Synthetic oligonucleotide
  Sense strand starting at position 1594 of SEQ ID NO: 586443
ucuccucacccgugaaaug

SEQ ID NO: 718403 - RNA, 19 nt, Artificial Sequence
  Description of Artificial Sequence: Synthetic oligonucleotide
  Antisense strand to SEQ ID NO: 718402
cauuucacgggugaggaga

SEQ ID NO: 718404 - RNA, 19 nt, Artificial Sequence
  Description of Artificial Sequence: Synthetic oligonucleotide
  Sense strand starting at position 1595 of SEQ ID NO: 586443
cuccucacccgugaaauga

SEQ ID NO: 718405 - RNA, 19 nt, Artificial Sequence
  Description of Artificial Sequence: Synthetic oligonucleotide
  Antisense strand to SEQ ID NO: 718404
ucauuucacgggugaggag

SEQ ID NO: 718406 - RNA, 19 nt, Artificial Sequence
  Description of Artificial Sequence: Synthetic oligonucleotide
  Sense strand starting at position 1951 of SEQ ID NO: 586443
gcagcuaucggucuucgga

SEQ ID NO: 718407 - RNA, 19 nt, Artificial Sequence
  Description of Artificial Sequence: Synthetic oligonucleotide
  Antisense strand to SEQ ID NO: 718406
uccgaagaccgauagcugc

SEQ ID NO: 718408 - RNA, 19 nt, Artificial Sequence
  Description of Artificial Sequence: Synthetic oligonucleotide
  Sense strand starting at position 1953 of SEQ ID NO: 586443
agcuaucggucuucggaga

SEQ ID NO: 718409 - RNA, 19 nt, Artificial Sequence
  Description of Artificial Sequence: Synthetic oligonucleotide
  Antisense strand to SEQ ID NO: 718408
ucuccgaagaccgauagcu

SEQ ID NO: 718410 - RNA, 19 nt, Artificial Sequence
  Description of Artificial Sequence: Synthetic oligonucleotide
  Sense strand starting at position 2962 of SEQ ID NO: 586443
gcagcugcccuugguagau

SEQ ID NO: 718411 - RNA, 19 nt, Artificial Sequence
  Description of Artificial Sequence: Synthetic oligonucleotide
  Antisense strand to SEQ ID NO: 718410
aucuaccaagggcagcugc

SEQ ID NO: 718412 - RNA, 19 nt, Artificial Sequence
  Description of Artificial Sequence: Synthetic oligonucleotide
  Sense strand starting at position 3331 of SEQ ID NO: 586443
gccaccugcucugaaucau

SEQ ID NO: 718413 - RNA, 19 nt, Artificial Sequence
  Description of Artificial Sequence: Synthetic oligonucleotide
  Antisense strand to SEQ ID NO: 718412
augauucagagcagguggc

SEQ ID NO: 718414 - RNA, 19 nt, Artificial Sequence
  Description of Artificial Sequence: Synthetic oligonucleotide
  Sense strand starting at position 3337 of SEQ ID NO: 586443
ugcucugaaucauugagga

SEQ ID NO: 718415 - RNA, 19 nt, Artificial Sequence
  Description of Artificial Sequence: Synthetic oligonucleotide
  Antisense strand to SEQ ID NO: 718414
uccucaaugauucagagca

SEQ ID NO: 718416 - RNA, 19 nt, Artificial Sequence
  Description of Artificial Sequence: Synthetic oligonucleotide
  Sense strand starting at position 3341 of SEQ ID NO: 586443
cugaaucauugaggaauuu

SEQ ID NO: 718417 - RNA, 19 nt, Artificial Sequence
  Description of Artificial Sequence: Synthetic oligonucleotide
  Antisense strand to SEQ ID NO: 718416
aaauuccucaaugauucag

SEQ ID NO: 718418 - RNA, 19 nt, Artificial Sequence
  Description of Artificial Sequence: Synthetic oligonucleotide
  Sense strand starting at position 3442 of SEQ ID NO: 586443
gcuugaccucugugucuca

SEQ ID NO: 718419 - RNA, 19 nt, Artificial Sequence
  Description of Artificial Sequence: Synthetic oligonucleotide
  Antisense strand to SEQ ID NO: 718418
ugagacacagaggucaagc

SEQ ID NO: 718420 - RNA, 19 nt, Artificial Sequence
  Description of Artificial Sequence: Synthetic oligonucleotide
  Sense strand starting at position 3913 of SEQ ID NO: 586443
aguccuaacuuucugucau

SEQ ID NO: 718421 - RNA, 19 nt, Artificial Sequence
  Description of Artificial Sequence: Synthetic oligonucleotide
  Antisense strand to SEQ ID NO: 718420
augacagaaaguuaggacu

SEQ ID NO: 718422 - RNA, 19 nt, Artificial Sequence
  Description of Artificial Sequence: Synthetic oligonucleotide
  Sense strand starting at position 55 of SEQ ID NO: 586444
auuaauauaugccuggcaa

SEQ ID NO: 718423 - RNA, 19 nt, Artificial Sequence
  Description of Artificial Sequence: Synthetic oligonucleotide
  Antisense strand to SEQ ID NO: 718422
uugccaggcauauauuaau

SEQ ID NO: 718424 - RNA, 19 nt, Artificial Sequence
  Description of Artificial Sequence: Synthetic oligonucleotide
  Sense strand starting at position 89 of SEQ ID NO: 586444
gaagucaacuugguuaucu

SEQ ID NO: 718425 - RNA, 19 nt, Artificial Sequence
  Description of Artificial Sequence: Synthetic oligonucleotide
  Antisense strand to SEQ ID NO: 718424
agauaaccaaguugacuuc

SEQ ID NO: 718426 - RNA, 19 nt, Artificial Sequence
  Description of Artificial Sequence: Synthetic oligonucleotide
  Sense strand starting at position 99 of SEQ ID NO: 586444
ugguuaucucuguaccuac

SEQ ID NO: 718427 - RNA, 19 nt, Artificial Sequence
  Description of Artificial Sequence: Synthetic oligonucleotide
  Antisense strand to SEQ ID NO: 718426
guagguacagagauaacca

SEQ ID NO: 718428 - RNA, 19 nt, Artificial Sequence
  Description of Artificial Sequence: Synthetic oligonucleotide
  Sense strand starting at position 127 of SEQ ID NO: 586444
acugacugcuacuugagaa

SEQ ID NO: 718429 - RNA, 19 nt, Artificial Sequence
  Description of Artificial Sequence: Synthetic oligonucleotide
  Antisense strand to SEQ ID NO: 718428
uucucaaguagcagucagu

SEQ ID NO: 718430 - RNA, 19 nt, Artificial Sequence
  Description of Artificial Sequence: Synthetic oligonucleotide
  Sense strand starting at position 193 of SEQ ID NO: 586444
agcacaauuguauagaggu

SEQ ID NO: 718431 - RNA, 19 nt, Artificial Sequence
  Description of Artificial Sequence: Synthetic oligonucleotide
  Antisense strand to SEQ ID NO: 718430
accucuauacaauugugcu

SEQ ID NO: 718432 - RNA, 19 nt, Artificial Sequence
  Description of Artificial Sequence: Synthetic oligonucleotide
  Sense strand starting at position 308 of SEQ ID NO: 586444
agacaucuguuauuaacag

SEQ ID NO: 718433 - RNA, 19 nt, Artificial Sequence
  Description of Artificial Sequence: Synthetic oligonucleotide
  Antisense strand to SEQ ID NO: 718432
cuguuaauaacagaugucu

SEQ ID NO: 718434 - RNA, 19 nt, Artificial Sequence
  Description of Artificial Sequence: Synthetic oligonucleotide
  Sense strand starting at position 356 of SEQ ID NO: 586444
gucuuaaagcuagauauau

SEQ ID NO: 718435 - RNA, 19 nt, Artificial Sequence
  Description of Artificial Sequence: Synthetic oligonucleotide
  Antisense strand to SEQ ID NO: 718434
auauaucuagcuuuaagac

SEQ ID NO: 718436 - RNA, 19 nt, Artificial Sequence
  Description of Artificial Sequence: Synthetic oligonucleotide
  Sense strand starting at position 478 of SEQ ID NO: 586444
uuaauaauauguguuggga

SEQ ID NO: 718437 - RNA, 19 nt, Artificial Sequence
  Description of Artificial Sequence: Synthetic oligonucleotide
  Antisense strand to SEQ ID NO: 718436
ucccaacacauauuauuaa

SEQ ID NO: 718438 - RNA, 19 nt, Artificial Sequence
  Description of Artificial Sequence: Synthetic oligonucleotide
  Sense strand starting at position 660 of SEQ ID NO: 586444
auaauaauaugucuuggag

SEQ ID NO: 718439 - RNA, 19 nt, Artificial Sequence
  Description of Artificial Sequence: Synthetic oligonucleotide
  Antisense strand to SEQ ID NO: 718438
cuccaagacauauuauuau

SEQ ID NO: 718440 - RNA, 19 nt, Artificial Sequence
  Description of Artificial Sequence: Synthetic oligonucleotide
  Sense strand starting at position 663 of SEQ ID NO: 586444
auaauaugucuuggaggac

SEQ ID NO: 718441 - RNA, 19 nt, Artificial Sequence
  Description of Artificial Sequence: Synthetic oligonucleotide
  Antisense strand to SEQ ID NO: 718440
guccuccaagacauauuau

SEQ ID NO: 718442 - RNA, 19 nt, Artificial Sequence
  Description of Artificial Sequence: Synthetic oligonucleotide
  Sense strand starting at position 666 of SEQ ID NO: 586444
auaugucuuggaggacauu

SEQ ID NO: 718443 - RNA, 19 nt, Artificial Sequence
  Description of Artificial Sequence: Synthetic oligonucleotide
  Antisense strand to SEQ ID NO: 718442
aauguccuccaagacauau

SEQ ID NO: 718444 - RNA, 19 nt, Artificial Sequence
  Description of Artificial Sequence: Synthetic oligonucleotide
  Sense strand starting at position 685 of SEQ ID NO: 586444
ucuucuuaguagguacaga

SEQ ID NO: 718445 - RNA, 19 nt, Artificial Sequence
  Description of Artificial Sequence: Synthetic oligonucleotide
  Antisense strand to SEQ ID NO: 718444
ucuguaccuacuaagaaga

SEQ ID NO: 718446 - RNA, 19 nt, Artificial Sequence
  Description of Artificial Sequence: Synthetic oligonucleotide
  Sense strand starting at position 723 of SEQ ID NO: 586444
ugccucauucgcuuaguca

SEQ ID NO: 718447 - RNA, 19 nt, Artificial Sequence
  Description of Artificial Sequence: Synthetic oligonucleotide
  Antisense strand to SEQ ID NO: 718446
ugacuaagcgaaugaggca

SEQ ID NO: 718448 - RNA, 19 nt, Artificial Sequence
  Description of Artificial Sequence: Synthetic oligonucleotide
  Sense strand starting at position 806 of SEQ ID NO: 586444
ugaacacaugugcaaguau

SEQ ID NO: 718449 - RNA, 19 nt, Artificial Sequence
  Description of Artificial Sequence: Synthetic oligonucleotide
  Antisense strand to SEQ ID NO: 718448
auacuugcacauguguuca

SEQ ID NO: 718450 - RNA, 19 nt, Artificial Sequence
  Description of Artificial Sequence: Synthetic oligonucleotide
  Sense strand starting at position 847 of SEQ ID NO: 586444
aguagaaaugcuugguuaa

SEQ ID NO: 718451 - RNA, 19 nt, Artificial Sequence
  Description of Artificial Sequence: Synthetic oligonucleotide
  Antisense strand to SEQ ID NO: 718450
uuaaccaagcauuucuacu

SEQ ID NO: 718452 - RNA, 19 nt, Artificial Sequence
  Description of Artificial Sequence: Synthetic oligonucleotide
  Sense strand starting at position 848 of SEQ ID NO: 586444
guagaaaugcuugguuaaa

SEQ ID NO: 718453 - RNA, 19 nt, Artificial Sequence
  Description of Artificial Sequence: Synthetic oligonucleotide
  Antisense strand to SEQ ID NO: 718452
uuuaaccaagcauuucuac

SEQ ID NO: 718454 - RNA, 19 nt, Artificial Sequence
  Description of Artificial Sequence: Synthetic oligonucleotide
  Sense strand starting at position 849 of SEQ ID NO: 586444
uagaaaugcuugguuaaag

SEQ ID NO: 718455 - RNA, 19 nt, Artificial Sequence
  Description of Artificial Sequence: Synthetic oligonucleotide
  Antisense strand to SEQ ID NO: 718454
cuuuaaccaagcauuucua

SEQ ID NO: 718456 - RNA, 19 nt, Artificial Sequence
  Description of Artificial Sequence: Synthetic oligonucleotide
  Sense strand starting at position 860 of SEQ ID NO: 586444
gguuaaaggguacauguau

SEQ ID NO: 718457 - RNA, 19 nt, Artificial Sequence
  Description of Artificial Sequence: Synthetic oligonucleotide
  Antisense strand to SEQ ID NO: 718456
auacauguacccuuuaacc

SEQ ID NO: 718458 - RNA, 19 nt, Artificial Sequence
  Description of Artificial Sequence: Synthetic oligonucleotide
  Sense strand starting at position 1115 of SEQ ID NO: 586444
accaacuauuuguagagaa

SEQ ID NO: 718459 - RNA, 19 nt, Artificial Sequence
  Description of Artificial Sequence: Synthetic oligonucleotide
  Antisense strand to SEQ ID NO: 718458
uucucuacaaauaguuggu

SEQ ID NO: 718460 - RNA, 19 nt, Artificial Sequence
  Description of Artificial Sequence: Synthetic oligonucleotide
  Sense strand starting at position 1268 of SEQ ID NO: 586444
aggcaauccugguugagag

SEQ ID NO: 718461 - RNA, 19 nt, Artificial Sequence
  Description of Artificial Sequence: Synthetic oligonucleotide
  Antisense strand to SEQ ID NO: 718460
cucucaaccaggauugccu

SEQ ID NO: 718462 - RNA, 19 nt, Artificial Sequence
  Description of Artificial Sequence: Synthetic oligonucleotide
  Sense strand starting at position 1280 of SEQ ID NO: 586444
uugagaggguccuuaccuu

SEQ ID NO: 718463 - RNA, 19 nt, Artificial Sequence
  Description of Artificial Sequence: Synthetic oligonucleotide
  Antisense strand to SEQ ID NO: 718462
aagguaaggacccucucaa

SEQ ID NO: 718464 - RNA, 19 nt, Artificial Sequence
  Description of Artificial Sequence: Synthetic oligonucleotide
  Sense strand starting at position 1422 of SEQ ID NO: 586444
uccuuaucuuaggugacua

SEQ ID NO: 718465 - RNA, 19 nt, Artificial Sequence
  Description of Artificial Sequence: Synthetic oligonucleotide
  Antisense strand to SEQ ID NO: 718464
uagucaccuaagauaagga

SEQ ID NO: 718466 - RNA, 19 nt, Artificial Sequence
  Description of Artificial Sequence: Synthetic oligonucleotide
  Sense strand starting at position 1540 of SEQ ID NO: 586444
agguacuucuuguccaaac

SEQ ID NO: 718467 - RNA, 19 nt, Artificial Sequence
  Description of Artificial Sequence: Synthetic oligonucleotide
  Antisense strand to SEQ ID NO: 718466
guuuggacaagaaguaccu

SEQ ID NO: 718468 - RNA, 19 nt, Artificial Sequence
  Description of Artificial Sequence: Synthetic oligonucleotide
  Sense strand starting at position 1542 of SEQ ID NO: 586444
guacuucuuguccaaaccu

SEQ ID NO: 718469 - RNA, 19 nt, Artificial Sequence
  Description of Artificial Sequence: Synthetic oligonucleotide
  Antisense strand to SEQ ID NO: 718468
agguuuggacaagaaguac

SEQ ID NO: 718470 - RNA, 19 nt, Artificial Sequence
  Description of Artificial Sequence: Synthetic oligonucleotide
  Sense strand starting at position 1688 of SEQ ID NO: 586444
cgccuacaaguccgaauuu

SEQ ID NO: 718471 - RNA, 19 nt, Artificial Sequence
  Description of Artificial Sequence: Synthetic oligonucleotide
  Antisense strand to SEQ ID NO: 718470
aaauucggacuuguaggcg

SEQ ID NO: 718472 - RNA, 19 nt, Artificial Sequence
  Description of Artificial Sequence: Synthetic oligonucleotide
  Sense strand starting at position 1857 of SEQ ID NO: 586444
cgcagaccugaggaaugua

SEQ ID NO: 718473 - RNA, 19 nt, Artificial Sequence
  Description of Artificial Sequence: Synthetic oligonucleotide
  Antisense strand to SEQ ID NO: 718472
uacauuccucaggucugcg

SEQ ID NO: 718474 - RNA, 19 nt, Artificial Sequence
  Description of Artificial Sequence: Synthetic oligonucleotide
  Sense strand starting at position 1860 of SEQ ID NO: 586444
agaccugaggaauguaguu

SEQ ID NO: 718475 - RNA, 19 nt, Artificial Sequence
  Description of Artificial Sequence: Synthetic oligonucleotide
  Antisense strand to SEQ ID NO: 718474
aacuacauuccucaggucu

SEQ ID NO: 718476 - RNA, 19 nt, Artificial Sequence
  Description of Artificial Sequence: Synthetic oligonucleotide
  Sense strand starting at position 1865 of SEQ ID NO: 586444
ugaggaauguaguucuccu

SEQ ID NO: 718477 - RNA, 19 nt, Artificial Sequence
  Description of Artificial Sequence: Synthetic oligonucleotide
  Antisense strand to SEQ ID NO: 718476
aggagaacuacauuccuca

SEQ ID NO: 718478 - RNA, 19 nt, Artificial Sequence
  Description of Artificial Sequence: Synthetic oligonucleotide
  Sense strand starting at position 2735 of SEQ ID NO: 586444
gcugacuauacugguauga

SEQ ID NO: 718479 - RNA, 19 nt, Artificial Sequence
  Description of Artificial Sequence: Synthetic oligonucleotide
  Antisense strand to SEQ ID NO: 718478
ucauaccaguauagucagc

SEQ ID NO: 718480 - RNA, 19 nt, Artificial Sequence
  Description of Artificial Sequence: Synthetic oligonucleotide
  Sense strand starting at position 2785 of SEQ ID NO: 586444
gcgucacagcggaggauua

SEQ ID NO: 718481 - RNA, 19 nt, Artificial Sequence
  Description of Artificial Sequence: Synthetic oligonucleotide
  Antisense strand to SEQ ID NO: 718480
uaauccuccgcugugacgc

SEQ ID NO: 718482 - RNA, 19 nt, Artificial Sequence
  Description of Artificial Sequence: Synthetic oligonucleotide
  Sense strand starting at position 2869 of SEQ ID NO: 586444
agggauucucccgauugug

SEQ ID NO: 718483 - RNA, 19 nt, Artificial Sequence
  Description of Artificial Sequence: Synthetic oligonucleotide
  Antisense strand to SEQ ID NO: 718482
cacaaucgggagaaucccu

SEQ ID NO: 718484 - RNA, 19 nt, Artificial Sequence
  Description of Artificial Sequence: Synthetic oligonucleotide
  Sense strand starting at position 2872 of SEQ ID NO: 586444
gauucucccgauuguggaa

SEQ ID NO: 718485 - RNA, 19 nt, Artificial Sequence
  Description of Artificial Sequence: Synthetic oligonucleotide
  Antisense strand to SEQ ID NO: 718484
uuccacaaucgggagaauc

SEQ ID NO: 718486 - RNA, 19 nt, Artificial Sequence
  Description of Artificial Sequence: Synthetic oligonucleotide
  Sense strand starting at position 3123 of SEQ ID NO: 586444
aaaguugaucgguacauua

SEQ ID NO: 718487 - RNA, 19 nt, Artificial Sequence
  Description of Artificial Sequence: Synthetic oligonucleotide
  Antisense strand to SEQ ID NO: 718486
uaauguaccgaucaacuuu

SEQ ID NO: 718488 - RNA, 19 nt, Artificial Sequence
  Description of Artificial Sequence: Synthetic oligonucleotide
  Sense strand starting at position 3125 of SEQ ID NO: 586444
aguugaucgguacauuaaa

SEQ ID NO: 718489 - RNA, 19 nt, Artificial Sequence
  Description of Artificial Sequence: Synthetic oligonucleotide
  Antisense strand to SEQ ID NO: 718488
uuuaauguaccgaucaacu

SEQ ID NO: 718490 - RNA, 19 nt, Artificial Sequence
  Description of Artificial Sequence: Synthetic oligonucleotide
  Sense strand starting at position 3341 of SEQ ID NO: 586444
uuaaauguagcuggacaga

SEQ ID NO: 718491 - RNA, 19 nt, Artificial Sequence
  Description of Artificial Sequence: Synthetic oligonucleotide
  Antisense strand to SEQ ID NO: 718490
ucuguccagcuacauuuaa

SEQ ID NO: 718492 - RNA, 19 nt, Artificial Sequence
  Description of Artificial Sequence: Synthetic oligonucleotide
  Sense strand starting at position 3445 of SEQ ID NO: 586444
acauguaguuuauccugaa

SEQ ID NO: 718493 - RNA, 19 nt, Artificial Sequence
  Description of Artificial Sequence: Synthetic oligonucleotide
  Antisense strand to SEQ ID NO: 718492
uucaggauaaacuacaugu

SEQ ID NO: 718494 - RNA, 19 nt, Artificial Sequence
  Description of Artificial Sequence: Synthetic oligonucleotide
  Sense strand starting at position 3583 of SEQ ID NO: 586444
ggaucuaucuuccuggaag

SEQ ID NO: 718495 - RNA, 19 nt, Artificial Sequence
  Description of Artificial Sequence: Synthetic oligonucleotide
  Antisense strand to SEQ ID NO: 718494
cuuccaggaagauagaucc

SEQ ID NO: 718496 - RNA, 19 nt, Artificial Sequence
  Description of Artificial Sequence: Synthetic oligonucleotide
  Sense strand starting at position 3585 of SEQ ID NO: 586444
aucuaucuuccuggaagag

SEQ ID NO: 718497 - RNA, 19 nt, Artificial Sequence
  Description of Artificial Sequence: Synthetic oligonucleotide
  Antisense strand to SEQ ID NO: 718496
cucuuccaggaagauagau

SEQ ID NO: 718498 - RNA, 19 nt, Artificial Sequence
  Description of Artificial Sequence: Synthetic oligonucleotide
  Sense strand starting at position 3586 of SEQ ID NO: 586444
ucuaucuuccuggaagagu

SEQ ID NO: 718499 - RNA, 19 nt, Artificial Sequence
  Description of Artificial Sequence: Synthetic oligonucleotide
  Antisense strand to SEQ ID NO: 718498
acucuuccaggaagauaga

SEQ ID NO: 718500 - RNA, 19 nt, Artificial Sequence
  Description of Artificial Sequence: Synthetic oligonucleotide
  Sense strand starting at position 3595 of SEQ ID NO: 586444
cuggaagaguagguuucaa

SEQ ID NO: 718501 - RNA, 19 nt, Artificial Sequence
  Description of Artificial Sequence: Synthetic oligonucleotide
  Antisense strand to SEQ ID NO: 718500
uugaaaccuacucuuccag

SEQ ID NO: 718502 - RNA, 19 nt, Artificial Sequence
  Description of Artificial Sequence: Synthetic oligonucleotide
  Sense strand starting at position 328 of SEQ ID NO: 586445
auuaauauaugccuggcaa

SEQ ID NO: 718503 - RNA, 19 nt, Artificial Sequence
  Description of Artificial Sequence: Synthetic oligonucleotide
  Antisense strand to SEQ ID NO: 718502
uugccaggcauauauuaau

SEQ ID NO: 718504 - RNA, 19 nt, Artificial Sequence
  Description of Artificial Sequence: Synthetic oligonucleotide
  Sense strand starting at position 362 of SEQ ID NO: 586445
gaagucaacuugguuaucu

SEQ ID NO: 718505 - RNA, 19 nt, Artificial Sequence
  Description of Artificial Sequence: Synthetic oligonucleotide
  Antisense strand to SEQ ID NO: 718504
agauaaccaaguugacuuc

SEQ ID NO: 718506 - RNA, 19 nt, Artificial Sequence
  Description of Artificial Sequence: Synthetic oligonucleotide
  Sense strand starting at position 372 of SEQ ID NO: 586445
ugguuaucucuguaccuac

SEQ ID NO: 718507 - RNA, 19 nt, Artificial Sequence
  Description of Artificial Sequence: Synthetic oligonucleotide
  Antisense strand to SEQ ID NO: 718506
guagguacagagauaacca

SEQ ID NO: 718508 - RNA, 19 nt, Artificial Sequence
  Description of Artificial Sequence: Synthetic oligonucleotide
  Sense strand starting at position 400 of SEQ ID NO: 586445
acugacugcuacuugagaa

SEQ ID NO: 718509 - RNA, 19 nt, Artificial Sequence
  Description of Artificial Sequence: Synthetic oligonucleotide
  Antisense strand to SEQ ID NO: 718508
uucucaaguagcagucagu

SEQ ID NO: 718510 - RNA, 19 nt, Artificial Sequence
  Description of Artificial Sequence: Synthetic oligonucleotide
  Sense strand starting at position 466 of SEQ ID NO: 586445
agcacaauuguauagaggu

SEQ ID NO: 718511 - RNA, 19 nt, Artificial Sequence
  Description of Artificial Sequence: Synthetic oligonucleotide
  Antisense strand to SEQ ID NO: 718510
accucuauacaauugugcu

SEQ ID NO: 718512 - RNA, 19 nt, Artificial Sequence
  Description of Artificial Sequence: Synthetic oligonucleotide
  Sense strand starting at position 581 of SEQ ID NO: 586445
agacaucuguuauuaacag

SEQ ID NO: 718513 - RNA, 19 nt, Artificial Sequence
  Description of Artificial Sequence: Synthetic oligonucleotide
  Antisense strand to SEQ ID NO: 718512
cuguuaauaacagaugucu

SEQ ID NO: 718514 - RNA, 19 nt, Artificial Sequence
  Description of Artificial Sequence: Synthetic oligonucleotide
  Sense strand starting at position 629 of SEQ ID NO: 586445
gucuuaaagcuagauauau

SEQ ID NO: 718515 - RNA, 19 nt, Artificial Sequence
  Description of Artificial Sequence: Synthetic oligonucleotide
  Antisense strand to SEQ ID NO: 718514
auauaucuagcuuuaagac

SEQ ID NO: 718516 - RNA, 19 nt, Artificial Sequence
  Description of Artificial Sequence: Synthetic oligonucleotide
  Sense strand starting at position 751 of SEQ ID NO: 586445
uuaauaauauguguuggga

SEQ ID NO: 718517 - RNA, 19 nt, Artificial Sequence
  Description of Artificial Sequence: Synthetic oligonucleotide
  Antisense strand to SEQ ID NO: 718516
ucccaacacauauuauuaa

SEQ ID NO: 718518 - RNA, 19 nt, Artificial Sequence
  Description of Artificial Sequence: Synthetic oligonucleotide
  Sense strand starting at position 933 of SEQ ID NO: 586445
auaauaauaugucuuggag

SEQ ID NO: 718519 - RNA, 19 nt, Artificial Sequence
  Description of Artificial Sequence: Synthetic oligonucleotide
  Antisense strand to SEQ ID NO: 718518
cuccaagacauauuauuau

SEQ ID NO: 718520 - RNA, 19 nt, Artificial Sequence
  Description of Artificial Sequence: Synthetic oligonucleotide
  Sense strand starting at position 936 of SEQ ID NO: 586445
auaauaugucuuggaggac

SEQ ID NO: 718521 - RNA, 19 nt, Artificial Sequence
  Description of Artificial Sequence: Synthetic oligonucleotide
  Antisense strand to SEQ ID NO: 718520
guccuccaagacauauuau

SEQ ID NO: 718522 - RNA, 19 nt, Artificial Sequence
  Description of Artificial Sequence: Synthetic oligonucleotide
  Sense strand starting at position 939 of SEQ ID NO: 586445
auaugucuuggaggacauu

SEQ ID NO: 718523 - RNA, 19 nt, Artificial Sequence
  Description of Artificial Sequence: Synthetic oligonucleotide
  Antisense strand to SEQ ID NO: 718522
aauguccuccaagacauau

SEQ ID NO: 718524 - RNA, 19 nt, Artificial Sequence
  Description of Artificial Sequence: Synthetic oligonucleotide
  Sense strand starting at position 958 of SEQ ID NO: 586445
ucuucuuaguagguacaga

SEQ ID NO: 718525 - RNA, 19 nt, Artificial Sequence
  Description of Artificial Sequence: Synthetic oligonucleotide
  Antisense strand to SEQ ID NO: 718524
ucuguaccuacuaagaaga

SEQ ID NO: 718526 - RNA, 19 nt, Artificial Sequence
  Description of Artificial Sequence: Synthetic oligonucleotide
  Sense strand starting at position 996 of SEQ ID NO: 586445
ugccucauucgcuuaguca

SEQ ID NO: 718527 - RNA, 19 nt, Artificial Sequence
  Description of Artificial Sequence: Synthetic oligonucleotide
  Antisense strand to SEQ ID NO: 718526
ugacuaagcgaaugaggca

SEQ ID NO: 718528 - RNA, 19 nt, Artificial Sequence
  Description of Artificial Sequence: Synthetic oligonucleotide
  Sense strand starting at position 1079 of SEQ ID NO: 586445
ugaacacaugugcaaguau

SEQ ID NO: 718529 - RNA, 19 nt, Artificial Sequence
  Description of Artificial Sequence: Synthetic oligonucleotide
  Antisense strand to SEQ ID NO: 718528
auacuugcacauguguuca

SEQ ID NO: 718530 - RNA, 19 nt, Artificial Sequence
  Description of Artificial Sequence: Synthetic oligonucleotide
  Sense strand starting at position 1120 of SEQ ID NO: 586445
aguagaaaugcuugguuaa

SEQ ID NO: 718531 - RNA, 19 nt, Artificial Sequence
  Description of Artificial Sequence: Synthetic oligonucleotide
  Antisense strand to SEQ ID NO: 718530
uuaaccaagcauuucuacu

SEQ ID NO: 718532 - RNA, 19 nt, Artificial Sequence
  Description of Artificial Sequence: Synthetic oligonucleotide
  Sense strand starting at position 1121 of SEQ ID NO: 586445
guagaaaugcuugguuaaa

SEQ ID NO: 718533 - RNA, 19 nt, Artificial Sequence
  Description of Artificial Sequence: Synthetic oligonucleotide
  Antisense strand to SEQ ID NO: 718532
uuuaaccaagcauuucuac

SEQ ID NO: 718534 - RNA, 19 nt, Artificial Sequence
  Description of Artificial Sequence: Synthetic oligonucleotide
  Sense strand starting at position 1122 of SEQ ID NO: 586445
uagaaaugcuugguuaaag

SEQ ID NO: 718535 - RNA, 19 nt, Artificial Sequence
  Description of Artificial Sequence: Synthetic oligonucleotide
  Antisense strand to SEQ ID NO: 718534
cuuuaaccaagcauuucua

SEQ ID NO: 718536 - RNA, 19 nt, Artificial Sequence
  Description of Artificial Sequence: Synthetic oligonucleotide
  Sense strand starting at position 1133 of SEQ ID NO: 586445
gguuaaaggguacauguau

SEQ ID NO: 718537 - RNA, 19 nt, Artificial Sequence
  Description of Artificial Sequence: Synthetic oligonucleotide
  Antisense strand to SEQ ID NO: 718536
auacauguacccuuuaacc

SEQ ID NO: 718538 - RNA, 19 nt, Artificial Sequence
  Description of Artificial Sequence: Synthetic oligonucleotide
  Sense strand starting at position 1388 of SEQ ID NO: 586445
accaacuauuuguagagaa

SEQ ID NO: 718539 - RNA, 19 nt, Artificial Sequence
  Description of Artificial Sequence: Synthetic oligonucleotide
  Antisense strand to SEQ ID NO: 718538
uucucuacaaauaguuggu

SEQ ID NO: 718540 - RNA, 19 nt, Artificial Sequence
  Description of Artificial Sequence: Synthetic oligonucleotide
  Sense strand starting at position 1541 of SEQ ID NO: 586445
aggcaauccugguugagag

SEQ ID NO: 718541 - RNA, 19 nt, Artificial Sequence
  Description of Artificial Sequence: Synthetic oligonucleotide
  Antisense strand to SEQ ID NO: 718540
cucucaaccaggauugccu

SEQ ID NO: 718542 - RNA, 19 nt, Artificial Sequence
  Description of Artificial Sequence: Synthetic oligonucleotide
  Sense strand starting at position 1553 of SEQ ID NO: 586445
uugagaggguccuuaccuu

SEQ ID NO: 718543 - RNA, 19 nt, Artificial Sequence
  Description of Artificial Sequence: Synthetic oligonucleotide
  Antisense strand to SEQ ID NO: 718542
aagguaaggacccucucaa

SEQ ID NO: 718544 - RNA, 19 nt, Artificial Sequence
  Description of Artificial Sequence: Synthetic oligonucleotide
  Sense strand starting at position 1695 of SEQ ID NO: 586445
uccuuaucuuaggugacua

SEQ ID NO: 718545 - RNA, 19 nt, Artificial Sequence
  Description of Artificial Sequence: Synthetic oligonucleotide
  Antisense strand to SEQ ID NO: 718544
uagucaccuaagauaagga

SEQ ID NO: 718546 - RNA, 19 nt, Artificial Sequence
  Description of Artificial Sequence: Synthetic oligonucleotide
  Sense strand starting at position 1813 of SEQ ID NO: 586445
agguacuucuuguccaaac

SEQ ID NO: 718547 - RNA, 19 nt, Artificial Sequence
  Description of Artificial Sequence: Synthetic oligonucleotide
  Antisense strand to SEQ ID NO: 718546
guuuggacaagaaguaccu

SEQ ID NO: 718548 - RNA, 19 nt, Artificial Sequence
  Description of Artificial Sequence: Synthetic oligonucleotide
  Sense strand starting at position 1815 of SEQ ID NO: 586445
guacuucuuguccaaaccu

SEQ ID NO: 718549 - RNA, 19 nt, Artificial Sequence
  Description of Artificial Sequence: Synthetic oligonucleotide
  Antisense strand to SEQ ID NO: 718548
agguuuggacaagaaguac

SEQ ID NO: 718550 - RNA, 19 nt, Artificial Sequence
  Description of Artificial Sequence: Synthetic oligonucleotide
  Sense strand starting at position 1961 of SEQ ID NO: 586445
cgccuacaaguccgaauuu

SEQ ID NO: 718551 - RNA, 19 nt, Artificial Sequence
  Description of Artificial Sequence: Synthetic oligonucleotide
  Antisense strand to SEQ ID NO: 718550
aaauucggacuuguaggcg

SEQ ID NO: 718552 - RNA, 19 nt, Artificial Sequence
  Description of Artificial Sequence: Synthetic oligonucleotide
  Sense strand starting at position 2130 of SEQ ID NO: 586445
cgcagaccugaggaaugua

SEQ ID NO: 718553 - RNA, 19 nt, Artificial Sequence
  Description of Artificial Sequence: Synthetic oligonucleotide
  Antisense strand to SEQ ID NO: 718552
uacauuccucaggucugcg

SEQ ID NO: 718554 - RNA, 19 nt, Artificial Sequence
  Description of Artificial Sequence: Synthetic oligonucleotide
  Sense strand starting at position 2133 of SEQ ID NO: 586445
agaccugaggaauguaguu

SEQ ID NO: 718555 - RNA, 19 nt, Artificial Sequence
  Description of Artificial Sequence: Synthetic oligonucleotide
  Antisense strand to SEQ ID NO: 718554
aacuacauuccucaggucu

SEQ ID NO: 718556 - RNA, 19 nt, Artificial Sequence
  Description of Artificial Sequence: Synthetic oligonucleotide
  Sense strand starting at position 2138 of SEQ ID NO: 586445
ugaggaauguaguucuccu

SEQ ID NO: 718557 - RNA, 19 nt, Artificial Sequence
  Description of Artificial Sequence: Synthetic oligonucleotide
  Antisense strand to SEQ ID NO: 718556
aggagaacuacauuccuca

SEQ ID NO: 718558 - RNA, 19 nt, Artificial Sequence
  Description of Artificial Sequence: Synthetic oligonucleotide
  Sense strand starting at position 3008 of SEQ ID NO: 586445
gcugacuauacugguauga

SEQ ID NO: 718559 - RNA, 19 nt, Artificial Sequence
  Description of Artificial Sequence: Synthetic oligonucleotide
  Antisense strand to SEQ ID NO: 718558
ucauaccaguauagucagc

SEQ ID NO: 718560 - RNA, 19 nt, Artificial Sequence
  Description of Artificial Sequence: Synthetic oligonucleotide
  Sense strand starting at position 3058 of SEQ ID NO: 586445
gcgucacagcggaggauua

SEQ ID NO: 718561 - RNA, 19 nt, Artificial Sequence
  Description of Artificial Sequence: Synthetic oligonucleotide
  Antisense strand to SEQ ID NO: 718560
uaauccuccgcugugacgc

SEQ ID NO: 718562 - RNA, 19 nt, Artificial Sequence
  Description of Artificial Sequence: Synthetic oligonucleotide
  Sense strand starting at position 3142 of SEQ ID NO: 586445
agggauucucccgauugug

SEQ ID NO: 718563 - RNA, 19 nt, Artificial Sequence
  Description of Artificial Sequence: Synthetic oligonucleotide
  Antisense strand to SEQ ID NO: 718562
cacaaucgggagaaucccu

SEQ ID NO: 718564 - RNA, 19 nt, Artificial Sequence
  Description of Artificial Sequence: Synthetic oligonucleotide
  Sense strand starting at position 3145 of SEQ ID NO: 586445
gauucucccgauuguggaa

SEQ ID NO: 718565 - RNA, 19 nt, Artificial Sequence
  Description of Artificial Sequence: Synthetic oligonucleotide
  Antisense strand to SEQ ID NO: 718564
uuccacaaucgggagaauc

SEQ ID NO: 718566 - RNA, 19 nt, Artificial Sequence
  Description of Artificial Sequence: Synthetic oligonucleotide
  Sense strand starting at position 3396 of SEQ ID NO: 586445
aaaguugaucgguacauua

SEQ ID NO: 718567 - RNA, 19 nt, Artificial Sequence
  Description of Artificial Sequence: Synthetic oligonucleotide
  Antisense strand to SEQ ID NO: 718566
uaauguaccgaucaacuuu

SEQ ID NO: 718568 - RNA, 19 nt, Artificial Sequence
  Description of Artificial Sequence: Synthetic oligonucleotide
  Sense strand starting at position 3398 of SEQ ID NO: 586445
aguugaucgguacauuaaa

SEQ ID NO: 718569 - RNA, 19 nt, Artificial Sequence
  Description of Artificial Sequence: Synthetic oligonucleotide
  Antisense strand to SEQ ID NO: 718568
uuuaauguaccgaucaacu

SEQ ID NO: 718570 - RNA, 19 nt, Artificial Sequence
  Description of Artificial Sequence: Synthetic oligonucleotide
  Sense strand starting at position 3614 of SEQ ID NO: 586445
uuaaauguagcuggacaga

SEQ ID NO: 718571 - RNA, 19 nt, Artificial Sequence
  Description of Artificial Sequence: Synthetic oligonucleotide
  Antisense strand to SEQ ID NO: 718570
ucuguccagcuacauuuaa

SEQ ID NO: 718572 - RNA, 19 nt, Artificial Sequence
  Description of Artificial Sequence: Synthetic oligonucleotide
  Sense strand starting at position 3718 of SEQ ID NO: 586445
acauguaguuuauccugaa

SEQ ID NO: 718573 - RNA, 19 nt, Artificial Sequence
  Description of Artificial Sequence: Synthetic oligonucleotide
  Antisense strand to SEQ ID NO: 718572
uucaggauaaacuacaugu

SEQ ID NO: 718574 - RNA, 19 nt, Artificial Sequence
  Description of Artificial Sequence: Synthetic oligonucleotide
  Sense strand starting at position 3856 of SEQ ID NO: 586445
ggaucuaucuuccuggaag

SEQ ID NO: 718575 - RNA, 19 nt, Artificial Sequence
  Description of Artificial Sequence: Synthetic oligonucleotide
  Antisense strand to SEQ ID NO: 718574
cuuccaggaagauagaucc

SEQ ID NO: 718576 - RNA, 19 nt, Artificial Sequence
  Description of Artificial Sequence: Synthetic oligonucleotide
  Sense strand starting at position 3858 of SEQ ID NO: 586445
aucuaucuuccuggaagag

SEQ ID NO: 718577 - RNA, 19 nt, Artificial Sequence
  Description of Artificial Sequence: Synthetic oligonucleotide
  Antisense strand to SEQ ID NO: 718576
cucuuccaggaagauagau

SEQ ID NO: 718578 - RNA, 19 nt, Artificial Sequence
  Description of Artificial Sequence: Synthetic oligonucleotide
  Sense strand starting at position 3859 of SEQ ID NO: 586445
ucuaucuuccuggaagagu

SEQ ID NO: 718579 - RNA, 19 nt, Artificial Sequence
  Description of Artificial Sequence: Synthetic oligonucleotide
  Antisense strand to SEQ ID NO: 718578
acucuuccaggaagauaga

SEQ ID NO: 718580 - RNA, 19 nt, Artificial Sequence
  Description of Artificial Sequence: Synthetic oligonucleotide
  Sense strand starting at position 3868 of SEQ ID NO: 586445
cuggaagaguagguuucaa

SEQ ID NO: 718581 - RNA, 19 nt, Artificial Sequence
  Description of Artificial Sequence: Synthetic oligonucleotide
  Antisense strand to SEQ ID NO: 718580
uugaaaccuacucuuccag

SEQ ID NO: 718582 - RNA, 19 nt, Artificial Sequence
  Description of Artificial Sequence: Synthetic oligonucleotide
  Sense strand starting at position 871 of SEQ ID NO: 586446
ggcuuuaagcuguaauucu

SEQ ID NO: 718583 - RNA, 19 nt, Artificial Sequence
  Description of Artificial Sequence: Synthetic oligonucleotide
  Antisense strand to SEQ ID NO: 718582
agaauuacagcuuaaagcc

SEQ ID NO: 718584 - RNA, 19 nt, Artificial Sequence
  Description of Artificial Sequence: Synthetic oligonucleotide
  Sense strand starting at position 878 of SEQ ID NO: 586446
agcuguaauucuguaagac

SEQ ID NO: 718585 - RNA, 19 nt, Artificial Sequence
  Description of Artificial Sequence: Synthetic oligonucleotide
  Antisense strand to SEQ ID NO: 718584
gucuuacagaauuacagcu

SEQ ID NO: 718586 - RNA, 19 nt, Artificial Sequence
  Description of Artificial Sequence: Synthetic oligonucleotide
  Sense strand starting at position 879 of SEQ ID NO: 586446
gcuguaauucuguaagacc

SEQ ID NO: 718587 - RNA, 19 nt, Artificial Sequence
  Description of Artificial Sequence: Synthetic oligonucleotide
  Antisense strand to SEQ ID NO: 718586
ggucuuacagaauuacagc

SEQ ID NO: 718588 - RNA, 19 nt, Artificial Sequence
  Description of Artificial Sequence: Synthetic oligonucleotide
  Sense strand starting at position 882 of SEQ ID NO: 586446
guaauucuguaagaccaag

SEQ ID NO: 718589 - RNA, 19 nt, Artificial Sequence
  Description of Artificial Sequence: Synthetic oligonucleotide
  Antisense strand to SEQ ID NO: 718588
cuuggucuuacagaauuac

SEQ ID NO: 718590 - RNA, 19 nt, Artificial Sequence
  Description of Artificial Sequence: Synthetic oligonucleotide
  Sense strand starting at position 992 of SEQ ID NO: 586446
accguuccuugucaaucaa

SEQ ID NO: 718591 - RNA, 19 nt, Artificial Sequence
  Description of Artificial Sequence: Synthetic oligonucleotide
  Antisense strand to SEQ ID NO: 718590
uugauugacaaggaacggu

SEQ ID NO: 718592 - RNA, 19 nt, Artificial Sequence
  Description of Artificial Sequence: Synthetic oligonucleotide
  Sense strand starting at position 1021 of SEQ ID NO: 586446
gggucauuucuaggccgca

SEQ ID NO: 718593 - RNA, 19 nt, Artificial Sequence
  Description of Artificial Sequence: Synthetic oligonucleotide
  Antisense strand to SEQ ID NO: 718592
ugcggccuagaaaugaccc

SEQ ID NO: 718594 - RNA, 19 nt, Artificial Sequence
  Description of Artificial Sequence: Synthetic oligonucleotide
  Sense strand starting at position 1022 of SEQ ID NO: 586446
ggucauuucuaggccgcau

SEQ ID NO: 718595 - RNA, 19 nt, Artificial Sequence
  Description of Artificial Sequence: Synthetic oligonucleotide
  Antisense strand to SEQ ID NO: 718594
augcggccuagaaaugacc

SEQ ID NO: 718596 - RNA, 19 nt, Artificial Sequence
  Description of Artificial Sequence: Synthetic oligonucleotide
  Sense strand starting at position 1161 of SEQ ID NO: 586446
gcuccuaaaucugcgaagu

SEQ ID NO: 718597 - RNA, 19 nt, Artificial Sequence
  Description of Artificial Sequence: Synthetic oligonucleotide
  Antisense strand to SEQ ID NO: 718596
acuucgcagauuuaggagc

SEQ ID NO: 718598 - RNA, 19 nt, Artificial Sequence
  Description of Artificial Sequence: Synthetic oligonucleotide
  Sense strand starting at position 1162 of SEQ ID NO: 586446
cuccuaaaucugcgaagug

SEQ ID NO: 718599 - RNA, 19 nt, Artificial Sequence
  Description of Artificial Sequence: Synthetic oligonucleotide
  Antisense strand to SEQ ID NO: 718598
cacuucgcagauuuaggag

SEQ ID NO: 718600 - RNA, 19 nt, Artificial Sequence
  Description of Artificial Sequence: Synthetic oligonucleotide
  Sense strand starting at position 1376 of SEQ ID NO: 586446
gggaaagaauuccagggua

SEQ ID NO: 718601 - RNA, 19 nt, Artificial Sequence
  Description of Artificial Sequence: Synthetic oligonucleotide
  Antisense strand to SEQ ID NO: 718600
uacccuggaauucuuuccc

SEQ ID NO: 718602 - RNA, 19 nt, Artificial Sequence
  Description of Artificial Sequence: Synthetic oligonucleotide
  Sense strand starting at position 1379 of SEQ ID NO: 586446
aaagaauuccaggguacgu

SEQ ID NO: 718603 - RNA, 19 nt, Artificial Sequence
  Description of Artificial Sequence: Synthetic oligonucleotide
  Antisense strand to SEQ ID NO: 718602
acguacccuggaauucuuu

SEQ ID NO: 718604 - RNA, 19 nt, Artificial Sequence
  Description of Artificial Sequence: Synthetic oligonucleotide
  Sense strand starting at position 1399 of SEQ ID NO: 586446
guaagucccucaggugaaa

SEQ ID NO: 718605 - RNA, 19 nt, Artificial Sequence
  Description of Artificial Sequence: Synthetic oligonucleotide
  Antisense strand to SEQ ID NO: 718604
uuucaccugagggacuuac

SEQ ID NO: 718606 - RNA, 19 nt, Artificial Sequence
  Description of Artificial Sequence: Synthetic oligonucleotide
  Sense strand starting at position 1639 of SEQ ID NO: 586446
aacucuggcgaucaggaau

SEQ ID NO: 718607 - RNA, 19 nt, Artificial Sequence
  Description of Artificial Sequence: Synthetic oligonucleotide
  Antisense strand to SEQ ID NO: 718606
auuccugaucgccagaguu

SEQ ID NO: 718608 - RNA, 19 nt, Artificial Sequence
  Description of Artificial Sequence: Synthetic oligonucleotide
  Sense strand starting at position 1679 of SEQ ID NO: 586446
gcuugugccuuccgagaca

SEQ ID NO: 718609 - RNA, 19 nt, Artificial Sequence
  Description of Artificial Sequence: Synthetic oligonucleotide
  Antisense strand to SEQ ID NO: 718608
ugucucggaaggcacaagc

SEQ ID NO: 718610 - RNA, 19 nt, Artificial Sequence
  Description of Artificial Sequence: Synthetic oligonucleotide
  Sense strand starting at position 2287 of SEQ ID NO: 586446
cacugucuuucgugugcaa

SEQ ID NO: 718611 - RNA, 19 nt, Artificial Sequence
  Description of Artificial Sequence: Synthetic oligonucleotide
  Antisense strand to SEQ ID NO: 718610
uugcacacgaaagacagug

SEQ ID NO: 718612 - RNA, 19 nt, Artificial Sequence
  Description of Artificial Sequence: Synthetic oligonucleotide
  Sense strand starting at position 2288 of SEQ ID NO: 586446
acugucuuucgugugcaaa

SEQ ID NO: 718613 - RNA, 19 nt, Artificial Sequence
  Description of Artificial Sequence: Synthetic oligonucleotide
  Antisense strand to SEQ ID NO: 718612
uuugcacacgaaagacagu

SEQ ID NO: 718614 - RNA, 19 nt, Artificial Sequence
  Description of Artificial Sequence: Synthetic oligonucleotide
  Sense strand starting at position 2289 of SEQ ID NO: 586446
cugucuuucgugugcaaac

SEQ ID NO: 718615 - RNA, 19 nt, Artificial Sequence
  Description of Artificial Sequence: Synthetic oligonucleotide
  Antisense strand to SEQ ID NO: 718614
guuugcacacgaaagacag

SEQ ID NO: 718616 - RNA, 19 nt, Artificial Sequence
  Description of Artificial Sequence: Synthetic oligonucleotide
  Sense strand starting at position 2374 of SEQ ID NO: 586446
cccgaaacuugccucucau

SEQ ID NO: 718617 - RNA, 19 nt, Artificial Sequence
  Description of Artificial Sequence: Synthetic oligonucleotide
  Antisense strand to SEQ ID NO: 718616
augagaggcaaguuucggg

SEQ ID NO: 718618 - RNA, 19 nt, Artificial Sequence
  Description of Artificial Sequence: Synthetic oligonucleotide
  Sense strand starting at position 2494 of SEQ ID NO: 586446
gaaacuaucccuggaaugu

SEQ ID NO: 718619 - RNA, 19 nt, Artificial Sequence
  Description of Artificial Sequence: Synthetic oligonucleotide
  Antisense strand to SEQ ID NO: 718618
acauuccagggauaguuuc

SEQ ID NO: 718620 - RNA, 19 nt, Artificial Sequence
  Description of Artificial Sequence: Synthetic oligonucleotide
  Sense strand starting at position 2498 of SEQ ID NO: 586446
cuaucccuggaaugugaua

SEQ ID NO: 718621 - RNA, 19 nt, Artificial Sequence
  Description of Artificial Sequence: Synthetic oligonucleotide
  Antisense strand to SEQ ID NO: 718620
uaucacauuccagggauag

SEQ ID NO: 718622 - RNA, 19 nt, Artificial Sequence
  Description of Artificial Sequence: Synthetic oligonucleotide
  Sense strand starting at position 2500 of SEQ ID NO: 586446
aucccuggaaugugauaga

SEQ ID NO: 718623 - RNA, 19 nt, Artificial Sequence
  Description of Artificial Sequence: Synthetic oligonucleotide
  Antisense strand to SEQ ID NO: 718622
ucuaucacauuccagggau

SEQ ID NO: 718624 - RNA, 19 nt, Artificial Sequence
  Description of Artificial Sequence: Synthetic oligonucleotide
  Sense strand starting at position 2510 of SEQ ID NO: 586446
ugugauagacacugacuga

SEQ ID NO: 718625 - RNA, 19 nt, Artificial Sequence
  Description of Artificial Sequence: Synthetic oligonucleotide
  Antisense strand to SEQ ID NO: 718624
ucagucagugucuaucaca

SEQ ID NO: 718626 - RNA, 19 nt, Artificial Sequence
  Description of Artificial Sequence: Synthetic oligonucleotide
  Sense strand starting at position 2569 of SEQ ID NO: 586446
uacuuaagcguuugcguuu

SEQ ID NO: 718627 - RNA, 19 nt, Artificial Sequence
  Description of Artificial Sequence: Synthetic oligonucleotide
  Antisense strand to SEQ ID NO: 718626
aaacgcaaacgcuuaagua

SEQ ID NO: 718628 - RNA, 19 nt, Artificial Sequence
  Description of Artificial Sequence: Synthetic oligonucleotide
  Sense strand starting at position 3067 of SEQ ID NO: 586446
auaaacauuuccuggagac

SEQ ID NO: 718629 - RNA, 19 nt, Artificial Sequence
  Description of Artificial Sequence: Synthetic oligonucleotide
  Antisense strand to SEQ ID NO: 718628
gucuccaggaaauguuuau

SEQ ID NO: 718630 - RNA, 19 nt, Artificial Sequence
  Description of Artificial Sequence: Synthetic oligonucleotide
  Sense strand starting at position 3746 of SEQ ID NO: 586446
agaacuggguuugaauacu

SEQ ID NO: 718631 - RNA, 19 nt, Artificial Sequence
  Description of Artificial Sequence: Synthetic oligonucleotide
  Antisense strand to SEQ ID NO: 718630
aguauucaaacccaguucu

SEQ ID NO: 718632 - RNA, 19 nt, Artificial Sequence
  Description of Artificial Sequence: Synthetic oligonucleotide
  Sense strand starting at position 3752 of SEQ ID NO: 586446
ggguuugaauacuggaacu

SEQ ID NO: 718633 - RNA, 19 nt, Artificial Sequence
  Description of Artificial Sequence: Synthetic oligonucleotide
  Antisense strand to SEQ ID NO: 718632
aguuccaguauucaaaccc

SEQ ID NO: 718634 - RNA, 19 nt, Artificial Sequence
  Description of Artificial Sequence: Synthetic oligonucleotide
  Sense strand starting at position 3764 of SEQ ID NO: 586446
uggaacuaauucuggguga

SEQ ID NO: 718635 - RNA, 19 nt, Artificial Sequence
  Description of Artificial Sequence: Synthetic oligonucleotide
  Antisense strand to SEQ ID NO: 718634
ucacccagaauuaguucca

SEQ ID NO: 718636 - RNA, 19 nt, Artificial Sequence
  Description of Artificial Sequence: Synthetic oligonucleotide
  Sense strand starting at position 3840 of SEQ ID NO: 586446
uagcguaaacagcagaaau

SEQ ID NO: 718637 - RNA, 19 nt, Artificial Sequence
  Description of Artificial Sequence: Synthetic oligonucleotide
  Antisense strand to SEQ ID NO: 718636
auuucugcuguuuacgcua

SEQ ID NO: 718638 - RNA, 19 nt, Artificial Sequence
  Description of Artificial Sequence: Synthetic oligonucleotide
  Sense strand starting at position 3842 of SEQ ID NO: 586446
gcguaaacagcagaaaugu

SEQ ID NO: 718639 - RNA, 19 nt, Artificial Sequence
  Description of Artificial Sequence: Synthetic oligonucleotide
  Antisense strand to SEQ ID NO: 718638
acauuucugcuguuuacgc

SEQ ID NO: 718640 - RNA, 19 nt, Artificial Sequence
  Description of Artificial Sequence: Synthetic oligonucleotide
  Sense strand starting at position 3851 of SEQ ID NO: 586446
gcagaaaugucuucucuca

SEQ ID NO: 718641 - RNA, 19 nt, Artificial Sequence
  Description of Artificial Sequence: Synthetic oligonucleotide
  Antisense strand to SEQ ID NO: 718640
ugagagaagacauuucugc

SEQ ID NO: 718642 - RNA, 19 nt, Artificial Sequence
  Description of Artificial Sequence: Synthetic oligonucleotide
  Sense strand starting at position 3890 of SEQ ID NO: 586446
cguaaauaaagaugauagu

SEQ ID NO: 718643 - RNA, 19 nt, Artificial Sequence
  Description of Artificial Sequence: Synthetic oligonucleotide
  Antisense strand to SEQ ID NO: 718642
acuaucaucuuuauuuacg

SEQ ID NO: 718644 - RNA, 19 nt, Artificial Sequence
  Description of Artificial Sequence: Synthetic oligonucleotide
  Sense strand starting at position 3896 of SEQ ID NO: 586446
uaaagaugauaguggauca

SEQ ID NO: 718645 - RNA, 19 nt, Artificial Sequence
  Description of Artificial Sequence: Synthetic oligonucleotide
  Antisense strand to SEQ ID NO: 718644
ugauccacuaucaucuuua

SEQ ID NO: 718646 - RNA, 19 nt, Artificial Sequence
  Description of Artificial Sequence: Synthetic oligonucleotide
  Sense strand starting at position 69 of SEQ ID NO: 586447
cuuagauuauacucgacau

SEQ ID NO: 718647 - RNA, 19 nt, Artificial Sequence
  Description of Artificial Sequence: Synthetic oligonucleotide
  Antisense strand to SEQ ID NO: 718646
augucgaguauaaucuaag

SEQ ID NO: 718648 - RNA, 19 nt, Artificial Sequence
  Description of Artificial Sequence: Synthetic oligonucleotide
  Sense strand starting at position 71 of SEQ ID NO: 586447
uagauuauacucgacaugu

SEQ ID NO: 718649 - RNA, 19 nt, Artificial Sequence
  Description of Artificial Sequence: Synthetic oligonucleotide
  Antisense strand to SEQ ID NO: 718648
acaugucgaguauaaucua

SEQ ID NO: 718650 - RNA, 19 nt, Artificial Sequence
  Description of Artificial Sequence: Synthetic oligonucleotide
  Sense strand starting at position 73 of SEQ ID NO: 586447
gauuauacucgacauguga

SEQ ID NO: 718651 - RNA, 19 nt, Artificial Sequence
  Description of Artificial Sequence: Synthetic oligonucleotide
  Antisense strand to SEQ ID NO: 718650
ucacaugucgaguauaauc

SEQ ID NO: 718652 - RNA, 19 nt, Artificial Sequence
  Description of Artificial Sequence: Synthetic oligonucleotide
  Sense strand starting at position 127 of SEQ ID NO: 586447
acauuugcuucuuagugag

SEQ ID NO: 718653 - RNA, 19 nt, Artificial Sequence
  Description of Artificial Sequence: Synthetic oligonucleotide
  Antisense strand to SEQ ID NO: 718652
cucacuaagaagcaaaugu

SEQ ID NO: 718654 - RNA, 19 nt, Artificial Sequence
  Description of Artificial Sequence: Synthetic oligonucleotide
  Sense strand starting at position 158 of SEQ ID NO: 586447
gcaaccuugcaucagugau

SEQ ID NO: 718655 - RNA, 19 nt, Artificial Sequence
  Description of Artificial Sequence: Synthetic oligonucleotide
  Antisense strand to SEQ ID NO: 718654
aucacugaugcaagguugc

SEQ ID NO: 718656 - RNA, 19 nt, Artificial Sequence
  Description of Artificial Sequence: Synthetic oligonucleotide
  Sense strand starting at position 256 of SEQ ID NO: 586447
ccucacagcucagugaauu

SEQ ID NO: 718657 - RNA, 19 nt, Artificial Sequence
  Description of Artificial Sequence: Synthetic oligonucleotide
  Antisense strand to SEQ ID NO: 718656
aauucacugagcugugagg

SEQ ID NO: 718658 - RNA, 19 nt, Artificial Sequence
  Description of Artificial Sequence: Synthetic oligonucleotide
  Sense strand starting at position 664 of SEQ ID NO: 586447
uuaaucucccagugagugu

SEQ ID NO: 718659 - RNA, 19 nt, Artificial Sequence
  Description of Artificial Sequence: Synthetic oligonucleotide
  Antisense strand to SEQ ID NO: 718658
acacucacugggagauuaa

SEQ ID NO: 718660 - RNA, 19 nt, Artificial Sequence
  Description of Artificial Sequence: Synthetic oligonucleotide
  Sense strand starting at position 719 of SEQ ID NO: 586447
ggguuuauggcaugguucu

SEQ ID NO: 718661 - RNA, 19 nt, Artificial Sequence
  Description of Artificial Sequence: Synthetic oligonucleotide
  Antisense strand to SEQ ID NO: 718660
agaaccaugccauaaaccc

SEQ ID NO: 718662 - RNA, 19 nt, Artificial Sequence
  Description of Artificial Sequence: Synthetic oligonucleotide
  Sense strand starting at position 763 of SEQ ID NO: 586447
aagggcauugguugucaca

SEQ ID NO: 718663 - RNA, 19 nt, Artificial Sequence
  Description of Artificial Sequence: Synthetic oligonucleotide
  Antisense strand to SEQ ID NO: 718662
ugugacaaccaaugcccuu

SEQ ID NO: 718664 - RNA, 19 nt, Artificial Sequence
  Description of Artificial Sequence: Synthetic oligonucleotide
  Sense strand starting at position 765 of SEQ ID NO: 586447
gggcauugguugucacaau

SEQ ID NO: 718665 - RNA, 19 nt, Artificial Sequence
  Description of Artificial Sequence: Synthetic oligonucleotide
  Antisense strand to SEQ ID NO: 718664
auugugacaaccaaugccc

SEQ ID NO: 718666 - RNA, 19 nt, Artificial Sequence
  Description of Artificial Sequence: Synthetic oligonucleotide
  Sense strand starting at position 821 of SEQ ID NO: 586447
caggguugcugcuuaaaca

SEQ ID NO: 718667 - RNA, 19 nt, Artificial Sequence
  Description of Artificial Sequence: Synthetic oligonucleotide
  Antisense strand to SEQ ID NO: 718666
uguuuaagcagcaacccug

SEQ ID NO: 718668 - RNA, 19 nt, Artificial Sequence
  Description of Artificial Sequence: Synthetic oligonucleotide
  Sense strand starting at position 822 of SEQ ID NO: 586447
aggguugcugcuuaaacau

SEQ ID NO: 718669 - RNA, 19 nt, Artificial Sequence
  Description of Artificial Sequence: Synthetic oligonucleotide
  Antisense strand to SEQ ID NO: 718668
auguuuaagcagcaacccu

SEQ ID NO: 718670 - RNA, 19 nt, Artificial Sequence
  Description of Artificial Sequence: Synthetic oligonucleotide
  Sense strand starting at position 889 of SEQ ID NO: 586447
gaauaucaacagugaguuc

SEQ ID NO: 718671 - RNA, 19 nt, Artificial Sequence
  Description of Artificial Sequence: Synthetic oligonucleotide
  Antisense strand to SEQ ID NO: 718670
gaacucacuguugauauuc

SEQ ID NO: 718672 - RNA, 19 nt, Artificial Sequence
  Description of Artificial Sequence: Synthetic oligonucleotide
  Sense strand starting at position 975 of SEQ ID NO: 586447
cgggaagugucuguguaca

SEQ ID NO: 718673 - RNA, 19 nt, Artificial Sequence
  Description of Artificial Sequence: Synthetic oligonucleotide
  Antisense strand to SEQ ID NO: 718672
uguacacagacacuucccg

SEQ ID NO: 718674 - RNA, 19 nt, Artificial Sequence
  Description of Artificial Sequence: Synthetic oligonucleotide
  Sense strand starting at position 977 of SEQ ID NO: 586447
ggaagugucuguguacaga

SEQ ID NO: 718675 - RNA, 19 nt, Artificial Sequence
  Description of Artificial Sequence: Synthetic oligonucleotide
  Antisense strand to SEQ ID NO: 718674
ucuguacacagacacuucc

SEQ ID NO: 718676 - RNA, 19 nt, Artificial Sequence
  Description of Artificial Sequence: Synthetic oligonucleotide
  Sense strand starting at position 1042 of SEQ ID NO: 586447
cgaagacuuggaggaagua

SEQ ID NO: 718677 - RNA, 19 nt, Artificial Sequence
  Description of Artificial Sequence: Synthetic oligonucleotide
  Antisense strand to SEQ ID NO: 718676
uacuuccuccaagucuucg

SEQ ID NO: 718678 - RNA, 19 nt, Artificial Sequence
  Description of Artificial Sequence: Synthetic oligonucleotide
  Sense strand starting at position 1087 of SEQ ID NO: 586447
ccguuucuuccggagaaag

SEQ ID NO: 718679 - RNA, 19 nt, Artificial Sequence
  Description of Artificial Sequence: Synthetic oligonucleotide
  Antisense strand to SEQ ID NO: 718678
cuuucuccggaagaaacgg

SEQ ID NO: 718680 - RNA, 19 nt, Artificial Sequence
  Description of Artificial Sequence: Synthetic oligonucleotide
  Sense strand starting at position 2042 of SEQ ID NO: 586447
ugugaccuguucccuuuaa

SEQ ID NO: 718681 - RNA, 19 nt, Artificial Sequence
  Description of Artificial Sequence: Synthetic oligonucleotide
  Antisense strand to SEQ ID NO: 718680
uuaaagggaacaggucaca

SEQ ID NO: 718682 - RNA, 19 nt, Artificial Sequence
  Description of Artificial Sequence: Synthetic oligonucleotide
  Sense strand starting at position 2043 of SEQ ID NO: 586447
gugaccuguucccuuuaau

SEQ ID NO: 718683 - RNA, 19 nt, Artificial Sequence
  Description of Artificial Sequence: Synthetic oligonucleotide
  Antisense strand to SEQ ID NO: 718682
auuaaagggaacaggucac

SEQ ID NO: 718684 - RNA, 19 nt, Artificial Sequence
  Description of Artificial Sequence: Synthetic oligonucleotide
  Sense strand starting at position 2054 of SEQ ID NO: 586447
ccuuuaaucuugcccagga

SEQ ID NO: 718685 - RNA, 19 nt, Artificial Sequence
  Description of Artificial Sequence: Synthetic oligonucleotide
  Antisense strand to SEQ ID NO: 718684
uccugggcaagauuaaagg

SEQ ID NO: 718686 - RNA, 19 nt, Artificial Sequence
  Description of Artificial Sequence: Synthetic oligonucleotide
  Sense strand starting at position 2158 of SEQ ID NO: 586447
gugugaauuacugguaggu

SEQ ID NO: 718687 - RNA, 19 nt, Artificial Sequence
  Description of Artificial Sequence: Synthetic oligonucleotide
  Antisense strand to SEQ ID NO: 718686
accuaccaguaauucacac

SEQ ID NO: 718688 - RNA, 19 nt, Artificial Sequence
  Description of Artificial Sequence: Synthetic oligonucleotide
  Sense strand starting at position 2162 of SEQ ID NO: 586447
gaauuacugguaggugaca

SEQ ID NO: 718689 - RNA, 19 nt, Artificial Sequence
  Description of Artificial Sequence: Synthetic oligonucleotide
  Antisense strand to SEQ ID NO: 718688
ugucaccuaccaguaauuc

SEQ ID NO: 718690 - RNA, 19 nt, Artificial Sequence
  Description of Artificial Sequence: Synthetic oligonucleotide
  Sense strand starting at position 2229 of SEQ ID NO: 586447
agcacuaacucuguagaga

SEQ ID NO: 718691 - RNA, 19 nt, Artificial Sequence
  Description of Artificial Sequence: Synthetic oligonucleotide
  Antisense strand to SEQ ID NO: 718690
ucucuacagaguuagugcu

SEQ ID NO: 718692 - RNA, 19 nt, Artificial Sequence
  Description of Artificial Sequence: Synthetic oligonucleotide
  Sense strand starting at position 2230 of SEQ ID NO: 586447
gcacuaacucuguagagaa

SEQ ID NO: 718693 - RNA, 19 nt, Artificial Sequence
  Description of Artificial Sequence: Synthetic oligonucleotide
  Antisense strand to SEQ ID NO: 718692
uucucuacagaguuagugc

SEQ ID NO: 718694 - RNA, 19 nt, Artificial Sequence
  Description of Artificial Sequence: Synthetic oligonucleotide
  Sense strand starting at position 2277 of SEQ ID NO: 586447
ggccaaggccucuagggau

SEQ ID NO: 718695 - RNA, 19 nt, Artificial Sequence
  Description of Artificial Sequence: Synthetic oligonucleotide
  Antisense strand to SEQ ID NO: 718694
aucccuagaggccuuggcc

SEQ ID NO: 718696 - RNA, 19 nt, Artificial Sequence
  Description of Artificial Sequence: Synthetic oligonucleotide
  Sense strand starting at position 2290 of SEQ ID NO: 586447
agggauugguagcucaaga

SEQ ID NO: 718697 - RNA, 19 nt, Artificial Sequence
  Description of Artificial Sequence: Synthetic oligonucleotide
  Antisense strand to SEQ ID NO: 718696
ucuugagcuaccaaucccu

SEQ ID NO: 718698 - RNA, 19 nt, Artificial Sequence
  Description of Artificial Sequence: Synthetic oligonucleotide
  Sense strand starting at position 2295 of SEQ ID NO: 586447
uugguagcucaagaguaua

SEQ ID NO: 718699 - RNA, 19 nt, Artificial Sequence
  Description of Artificial Sequence: Synthetic oligonucleotide
  Antisense strand to SEQ ID NO: 718698
uauacucuugagcuaccaa

SEQ ID NO: 718700 - RNA, 19 nt, Artificial Sequence
  Description of Artificial Sequence: Synthetic oligonucleotide
  Sense strand starting at position 2332 of SEQ ID NO: 586447
cucaguuugacaggugaga

SEQ ID NO: 718701 - RNA, 19 nt, Artificial Sequence
  Description of Artificial Sequence: Synthetic oligonucleotide
  Antisense strand to SEQ ID NO: 718700
ucucaccugucaaacugag

SEQ ID NO: 718702 - RNA, 19 nt, Artificial Sequence
  Description of Artificial Sequence: Synthetic oligonucleotide
  Sense strand starting at position 2334 of SEQ ID NO: 586447
caguuugacaggugagaug

SEQ ID NO: 718703 - RNA, 19 nt, Artificial Sequence
  Description of Artificial Sequence: Synthetic oligonucleotide
  Antisense strand to SEQ ID NO: 718702
caucucaccugucaaacug

SEQ ID NO: 718704 - RNA, 19 nt, Artificial Sequence
  Description of Artificial Sequence: Synthetic oligonucleotide
  Sense strand starting at position 2354 of SEQ ID NO: 586447
agaggugacugugcuaaua

SEQ ID NO: 718705 - RNA, 19 nt, Artificial Sequence
  Description of Artificial Sequence: Synthetic oligonucleotide
  Antisense strand to SEQ ID NO: 718704
uauuagcacagucaccucu

SEQ ID NO: 718706 - RNA, 19 nt, Artificial Sequence
  Description of Artificial Sequence: Synthetic oligonucleotide
  Sense strand starting at position 2367 of SEQ ID NO: 586447
cuaauaaucguuuagcuca

SEQ ID NO: 718707 - RNA, 19 nt, Artificial Sequence
  Description of Artificial Sequence: Synthetic oligonucleotide
  Antisense strand to SEQ ID NO: 718706
ugagcuaaacgauuauuag

SEQ ID NO: 718708 - RNA, 19 nt, Artificial Sequence
  Description of Artificial Sequence: Synthetic oligonucleotide
  Sense strand starting at position 2370 of SEQ ID NO: 586447
auaaucguuuagcucacaa

SEQ ID NO: 718709 - RNA, 19 nt, Artificial Sequence
  Description of Artificial Sequence: Synthetic oligonucleotide
  Antisense strand to SEQ ID NO: 718708
uugugagcuaaacgauuau

SEQ ID NO: 718710 - RNA, 19 nt, Artificial Sequence
  Description of Artificial Sequence: Synthetic oligonucleotide
  Sense strand starting at position 2709 of SEQ ID NO: 586447
cgagaaugauacccaguuu

SEQ ID NO: 718711 - RNA, 19 nt, Artificial Sequence
  Description of Artificial Sequence: Synthetic oligonucleotide
  Antisense strand to SEQ ID NO: 718710
aaacuggguaucauucucg

SEQ ID NO: 718712 - RNA, 19 nt, Artificial Sequence
  Description of Artificial Sequence: Synthetic oligonucleotide
  Sense strand starting at position 2769 of SEQ ID NO: 586447
gagggacaguaacaucauu

SEQ ID NO: 718713 - RNA, 19 nt, Artificial Sequence
  Description of Artificial Sequence: Synthetic oligonucleotide
  Antisense strand to SEQ ID NO: 718712
aaugauguuacugucccuc

SEQ ID NO: 718714 - RNA, 19 nt, Artificial Sequence
  Description of Artificial Sequence: Synthetic oligonucleotide
  Sense strand starting at position 2828 of SEQ ID NO: 586447
uggauuuccucugaaagcu

SEQ ID NO: 718715 - RNA, 19 nt, Artificial Sequence
  Description of Artificial Sequence: Synthetic oligonucleotide
  Antisense strand to SEQ ID NO: 718714
agcuuucagaggaaaucca

SEQ ID NO: 718716 - RNA, 19 nt, Artificial Sequence
  Description of Artificial Sequence: Synthetic oligonucleotide
  Sense strand starting at position 2855 of SEQ ID NO: 586447
cucccagggucucugauau

SEQ ID NO: 718717 - RNA, 19 nt, Artificial Sequence
  Description of Artificial Sequence: Synthetic oligonucleotide
  Antisense strand to SEQ ID NO: 718716
auaucagagacccugggag

SEQ ID NO: 718718 - RNA, 19 nt, Artificial Sequence
  Description of Artificial Sequence: Synthetic oligonucleotide
  Sense strand starting at position 2868 of SEQ ID NO: 586447
ugauauuagcuuugucuua

SEQ ID NO: 718719 - RNA, 19 nt, Artificial Sequence
  Description of Artificial Sequence: Synthetic oligonucleotide
  Antisense strand to SEQ ID NO: 718718
uaagacaaagcuaauauca

SEQ ID NO: 718720 - RNA, 19 nt, Artificial Sequence
  Description of Artificial Sequence: Synthetic oligonucleotide
  Sense strand starting at position 2892 of SEQ ID NO: 586447
ggugacauuuaucaggaga

SEQ ID NO: 718721 - RNA, 19 nt, Artificial Sequence
  Description of Artificial Sequence: Synthetic oligonucleotide
  Antisense strand to SEQ ID NO: 718720
ucuccugauaaaugucacc

SEQ ID NO: 718722 - RNA, 19 nt, Artificial Sequence
  Description of Artificial Sequence: Synthetic oligonucleotide
  Sense strand starting at position 2894 of SEQ ID NO: 586447
ugacauuuaucaggagaaa

SEQ ID NO: 718723 - RNA, 19 nt, Artificial Sequence
  Description of Artificial Sequence: Synthetic oligonucleotide
  Antisense strand to SEQ ID NO: 718722
uuucuccugauaaauguca

SEQ ID NO: 718724 - RNA, 19 nt, Artificial Sequence
  Description of Artificial Sequence: Synthetic oligonucleotide
  Sense strand starting at position 3121 of SEQ ID NO: 586447
ggaugccugagauggaauu

SEQ ID NO: 718725 - RNA, 19 nt, Artificial Sequence
  Description of Artificial Sequence: Synthetic oligonucleotide
  Antisense strand to SEQ ID NO: 718724
aauuccaucucaggcaucc

SEQ ID NO: 718726 - RNA, 19 nt, Artificial Sequence
  Description of Artificial Sequence: Synthetic oligonucleotide
  Sense strand starting at position 123 of SEQ ID NO: 586448
acgagagguugugaauaga

SEQ ID NO: 718727 - RNA, 19 nt, Artificial Sequence
  Description of Artificial Sequence: Synthetic oligonucleotide
  Antisense strand to SEQ ID NO: 718726
ucuauucacaaccucucgu

SEQ ID NO: 718728 - RNA, 19 nt, Artificial Sequence
  Description of Artificial Sequence: Synthetic oligonucleotide
  Sense strand starting at position 1144 of SEQ ID NO: 586448
agaccugguuucuagagca

SEQ ID NO: 718729 - RNA, 19 nt, Artificial Sequence
  Description of Artificial Sequence: Synthetic oligonucleotide
  Antisense strand to SEQ ID NO: 718728
ugcucuagaaaccaggucu

SEQ ID NO: 718730 - RNA, 19 nt, Artificial Sequence
  Description of Artificial Sequence: Synthetic oligonucleotide
  Sense strand starting at position 1181 of SEQ ID NO: 586448
ugcuguucgcucuugcuaa

SEQ ID NO: 718731 - RNA, 19 nt, Artificial Sequence
  Description of Artificial Sequence: Synthetic oligonucleotide
  Antisense strand to SEQ ID NO: 718730
uuagcaagagcgaacagca

SEQ ID NO: 718732 - RNA, 19 nt, Artificial Sequence
  Description of Artificial Sequence: Synthetic oligonucleotide
  Sense strand starting at position 1238 of SEQ ID NO: 586448
gcaccaagggcguguucua

SEQ ID NO: 718733 - RNA, 19 nt, Artificial Sequence
  Description of Artificial Sequence: Synthetic oligonucleotide
  Antisense strand to SEQ ID NO: 718732
uagaacacgcccuuggugc

SEQ ID NO: 718734 - RNA, 19 nt, Artificial Sequence
  Description of Artificial Sequence: Synthetic oligonucleotide
  Sense strand starting at position 1248 of SEQ ID NO: 586448
cguguucuaggcggugaga

SEQ ID NO: 718735 - RNA, 19 nt, Artificial Sequence
  Description of Artificial Sequence: Synthetic oligonucleotide
  Antisense strand to SEQ ID NO: 718734
ucucaccgccuagaacacg

SEQ ID NO: 718736 - RNA, 19 nt, Artificial Sequence
  Description of Artificial Sequence: Synthetic oligonucleotide
  Sense strand starting at position 1322 of SEQ ID NO: 586448
gggagcuccucgggugaga

SEQ ID NO: 718737 - RNA, 19 nt, Artificial Sequence
  Description of Artificial Sequence: Synthetic oligonucleotide
  Antisense strand to SEQ ID NO: 718736
ucucacccgaggagcuccc

SEQ ID NO: 718738 - RNA, 19 nt, Artificial Sequence
  Description of Artificial Sequence: Synthetic oligonucleotide
  Sense strand starting at position 1650 of SEQ ID NO: 586448
gucuuaaaguucuagcuca

SEQ ID NO: 718739 - RNA, 19 nt, Artificial Sequence
  Description of Artificial Sequence: Synthetic oligonucleotide
  Antisense strand to SEQ ID NO: 718738
ugagcuagaacuuuaagac

SEQ ID NO: 718740 - RNA, 19 nt, Artificial Sequence
  Description of Artificial Sequence: Synthetic oligonucleotide
  Sense strand starting at position 1994 of SEQ ID NO: 586448
uggcgagcgcucuauccuu

SEQ ID NO: 718741 - RNA, 19 nt, Artificial Sequence
  Description of Artificial Sequence: Synthetic oligonucleotide
  Antisense strand to SEQ ID NO: 718740
aaggauagagcgcucgcca

SEQ ID NO: 718742 - RNA, 19 nt, Artificial Sequence
  Description of Artificial Sequence: Synthetic oligonucleotide
  Sense strand starting at position 2020 of SEQ ID NO: 586448
ucccuucucucgucagacu

SEQ ID NO: 718743 - RNA, 19 nt, Artificial Sequence
  Description of Artificial Sequence: Synthetic oligonucleotide
  Antisense strand to SEQ ID NO: 718742
agucugacgagagaaggga

SEQ ID NO: 718744 - RNA, 19 nt, Artificial Sequence
  Description of Artificial Sequence: Synthetic oligonucleotide
  Sense strand starting at position 2421 of SEQ ID NO: 586448
guagcuacgaccugucaga

SEQ ID NO: 718745 - RNA, 19 nt, Artificial Sequence
  Description of Artificial Sequence: Synthetic oligonucleotide
  Antisense strand to SEQ ID NO: 718744
ucugacaggucguagcuac

SEQ ID NO: 718746 - RNA, 19 nt, Artificial Sequence
  Description of Artificial Sequence: Synthetic oligonucleotide
  Sense strand starting at position 2635 of SEQ ID NO: 586448
cgugcuucucguuugcaca

SEQ ID NO: 718747 - RNA, 19 nt, Artificial Sequence
  Description of Artificial Sequence: Synthetic oligonucleotide
  Antisense strand to SEQ ID NO: 718746
ugugcaaacgagaagcacg

SEQ ID NO: 718748 - RNA, 19 nt, Artificial Sequence
  Description of Artificial Sequence: Synthetic oligonucleotide
  Sense strand starting at position 2638 of SEQ ID NO: 586448
gcuucucguuugcacagaa

SEQ ID NO: 718749 - RNA, 19 nt, Artificial Sequence
  Description of Artificial Sequence: Synthetic oligonucleotide
  Antisense strand to SEQ ID NO: 718748
uucugugcaaacgagaagc

SEQ ID NO: 718750 - RNA, 19 nt, Artificial Sequence
  Description of Artificial Sequence: Synthetic oligonucleotide
  Sense strand starting at position 2678 of SEQ ID NO: 586448
gggagagauuccuccuuuc

SEQ ID NO: 718751 - RNA, 19 nt, Artificial Sequence
  Description of Artificial Sequence: Synthetic oligonucleotide
  Antisense strand to SEQ ID NO: 718750
gaaaggaggaaucucuccc

SEQ ID NO: 718752 - RNA, 19 nt, Artificial Sequence
  Description of Artificial Sequence: Synthetic oligonucleotide
  Sense strand starting at position 2744 of SEQ ID NO: 586448
cugguuggcuuauuuacau

SEQ ID NO: 718753 - RNA, 19 nt, Artificial Sequence
  Description of Artificial Sequence: Synthetic oligonucleotide
  Antisense strand to SEQ ID NO: 718752
auguaaauaagccaaccag

SEQ ID NO: 718754 - RNA, 19 nt, Artificial Sequence
  Description of Artificial Sequence: Synthetic oligonucleotide
  Sense strand starting at position 2779 of SEQ ID NO: 586448
cuccaaucggucuaugaag

SEQ ID NO: 718755 - RNA, 19 nt, Artificial Sequence
  Description of Artificial Sequence: Synthetic oligonucleotide
  Antisense strand to SEQ ID NO: 718754
cuucauagaccgauuggag

SEQ ID NO: 718756 - RNA, 19 nt, Artificial Sequence
  Description of Artificial Sequence: Synthetic oligonucleotide
  Sense strand starting at position 2921 of SEQ ID NO: 586448
cgagguuucugcuuucugu

SEQ ID NO: 718757 - RNA, 19 nt, Artificial Sequence
  Description of Artificial Sequence: Synthetic oligonucleotide
  Antisense strand to SEQ ID NO: 718756
acagaaagcagaaaccucg

SEQ ID NO: 718758 - RNA, 19 nt, Artificial Sequence
  Description of Artificial Sequence: Synthetic oligonucleotide
  Sense strand starting at position 3043 of SEQ ID NO: 586448
cugagcucuuccgccuauu

SEQ ID NO: 718759 - RNA, 19 nt, Artificial Sequence
  Description of Artificial Sequence: Synthetic oligonucleotide
  Antisense strand to SEQ ID NO: 718758
aauaggcggaagagcucag

SEQ ID NO: 718760 - RNA, 19 nt, Artificial Sequence
  Description of Artificial Sequence: Synthetic oligonucleotide
  Sense strand starting at position 3071 of SEQ ID NO: 586448
cggcuuaucugagauuccu

SEQ ID NO: 718761 - RNA, 19 nt, Artificial Sequence
  Description of Artificial Sequence: Synthetic oligonucleotide
  Antisense strand to SEQ ID NO: 718760
aggaaucucagauaagccg

SEQ ID NO: 718762 - RNA, 19 nt, Artificial Sequence
  Description of Artificial Sequence: Synthetic oligonucleotide
  Sense strand starting at position 3276 of SEQ ID NO: 586448
gcaggaucuguccaaccau

SEQ ID NO: 718763 - RNA, 19 nt, Artificial Sequence
  Description of Artificial Sequence: Synthetic oligonucleotide
  Antisense strand to SEQ ID NO: 718762
augguuggacagauccugc

SEQ ID NO: 718764 - RNA, 19 nt, Artificial Sequence
  Description of Artificial Sequence: Synthetic oligonucleotide
  Sense strand starting at position 3335 of SEQ ID NO: 586448
ggacuuaacugugacaggu

SEQ ID NO: 718765 - RNA, 19 nt, Artificial Sequence
  Description of Artificial Sequence: Synthetic oligonucleotide
  Antisense strand to SEQ ID NO: 718764
accugucacaguuaagucc

SEQ ID NO: 718766 - RNA, 19 nt, Artificial Sequence
  Description of Artificial Sequence: Synthetic oligonucleotide
  Sense strand starting at position 3507 of SEQ ID NO: 586448
ggaggauagugcuuacuuc

SEQ ID NO: 718767 - RNA, 19 nt, Artificial Sequence
  Description of Artificial Sequence: Synthetic oligonucleotide
  Antisense strand to SEQ ID NO: 718766
gaaguaagcacuauccucc

SEQ ID NO: 718768 - RNA, 19 nt, Artificial Sequence
  Description of Artificial Sequence: Synthetic oligonucleotide
  Sense strand starting at position 3508 of SEQ ID NO: 586448
gaggauagugcuuacuucu

SEQ ID NO: 718769 - RNA, 19 nt, Artificial Sequence
  Description of Artificial Sequence: Synthetic oligonucleotide
  Antisense strand to SEQ ID NO: 718768
agaaguaagcacuauccuc

SEQ ID NO: 718770 - RNA, 19 nt, Artificial Sequence
  Description of Artificial Sequence: Synthetic oligonucleotide
  Sense strand starting at position 3515 of SEQ ID NO: 586448
gugcuuacuucucccuaag

SEQ ID NO: 718771 - RNA, 19 nt, Artificial Sequence
  Description of Artificial Sequence: Synthetic oligonucleotide
  Antisense strand to SEQ ID NO: 718770
cuuagggagaaguaagcac

SEQ ID NO: 718772 - RNA, 19 nt, Artificial Sequence
  Description of Artificial Sequence: Synthetic oligonucleotide
  Sense strand starting at position 24 of SEQ ID NO: 586449
gccuauuucugugugcaau

SEQ ID NO: 718773 - RNA, 19 nt, Artificial Sequence
  Description of Artificial Sequence: Synthetic oligonucleotide
  Antisense strand to SEQ ID NO: 718772
auugcacacagaaauaggc

SEQ ID NO: 718774 - RNA, 19 nt, Artificial Sequence
  Description of Artificial Sequence: Synthetic oligonucleotide
  Sense strand starting at position 26 of SEQ ID NO: 586449
cuauuucugugugcaauga

SEQ ID NO: 718775 - RNA, 19 nt, Artificial Sequence
  Description of Artificial Sequence: Synthetic oligonucleotide
  Antisense strand to SEQ ID NO: 718774
ucauugcacacagaaauag

SEQ ID NO: 718776 - RNA, 19 nt, Artificial Sequence
  Description of Artificial Sequence: Synthetic oligonucleotide
  Sense strand starting at position 47 of SEQ ID NO: 586449
ggcgaaauaaaguguugga

SEQ ID NO: 718777 - RNA, 19 nt, Artificial Sequence
  Description of Artificial Sequence: Synthetic oligonucleotide
  Antisense strand to SEQ ID NO: 718776
uccaacacuuuauuucgcc

SEQ ID NO: 718778 - RNA, 19 nt, Artificial Sequence
  Description of Artificial Sequence: Synthetic oligonucleotide
  Sense strand starting at position 84 of SEQ ID NO: 586449
ccuuuaggauuacugaauu

SEQ ID NO: 718779 - RNA, 19 nt, Artificial Sequence
  Description of Artificial Sequence: Synthetic oligonucleotide
  Antisense strand to SEQ ID NO: 718778
aauucaguaauccuaaagg

SEQ ID NO: 718780 - RNA, 19 nt, Artificial Sequence
  Description of Artificial Sequence: Synthetic oligonucleotide
  Sense strand starting at position 184 of SEQ ID NO: 586449
gcacgucaccuagaaggaa

SEQ ID NO: 718781 - RNA, 19 nt, Artificial Sequence
  Description of Artificial Sequence: Synthetic oligonucleotide
  Antisense strand to SEQ ID NO: 718780
uuccuucuaggugacgugc

SEQ ID NO: 718782 - RNA, 19 nt, Artificial Sequence
  Description of Artificial Sequence: Synthetic oligonucleotide
  Sense strand starting at position 346 of SEQ ID NO: 586449
agccauuagagugaaagcu

SEQ ID NO: 718783 - RNA, 19 nt, Artificial Sequence
  Description of Artificial Sequence: Synthetic oligonucleotide
  Antisense strand to SEQ ID NO: 718782
agcuuucacucuaauggcu

SEQ ID NO: 718784 - RNA, 19 nt, Artificial Sequence
  Description of Artificial Sequence: Synthetic oligonucleotide
  Sense strand starting at position 355 of SEQ ID NO: 586449
agugaaagcuaucuuuccu

SEQ ID NO: 718785 - RNA, 19 nt, Artificial Sequence
  Description of Artificial Sequence: Synthetic oligonucleotide
  Antisense strand to SEQ ID NO: 718784
aggaaagauagcuuucacu

SEQ ID NO: 718786 - RNA, 19 nt, Artificial Sequence
  Description of Artificial Sequence: Synthetic oligonucleotide
  Sense strand starting at position 1100 of SEQ ID NO: 586449
gcuccaaagucugccauuu

SEQ ID NO: 718787 - RNA, 19 nt, Artificial Sequence
  Description of Artificial Sequence: Synthetic oligonucleotide
  Antisense strand to SEQ ID NO: 718786
aaauggcagacuuuggagc

SEQ ID NO: 718788 - RNA, 19 nt, Artificial Sequence
  Description of Artificial Sequence: Synthetic oligonucleotide
  Sense strand starting at position 1243 of SEQ ID NO: 586449
gcggucgcguagauaugaa

SEQ ID NO: 718789 - RNA, 19 nt, Artificial Sequence
  Description of Artificial Sequence: Synthetic oligonucleotide
  Antisense strand to SEQ ID NO: 718788
uucauaucuacgcgaccgc

SEQ ID NO: 718790 - RNA, 19 nt, Artificial Sequence
  Description of Artificial Sequence: Synthetic oligonucleotide
  Sense strand starting at position 1477 of SEQ ID NO: 586449
cucggucaugaaggagaua

SEQ ID NO: 718791 - RNA, 19 nt, Artificial Sequence
  Description of Artificial Sequence: Synthetic oligonucleotide
  Antisense strand to SEQ ID NO: 718790
uaucuccuucaugaccgag

SEQ ID NO: 718792 - RNA, 19 nt, Artificial Sequence
  Description of Artificial Sequence: Synthetic oligonucleotide
  Sense strand starting at position 2316 of SEQ ID NO: 586449
gcuccuuaucucguguagu

SEQ ID NO: 718793 - RNA, 19 nt, Artificial Sequence
  Description of Artificial Sequence: Synthetic oligonucleotide
  Antisense strand to SEQ ID NO: 718792
acuacacgagauaaggagc

SEQ ID NO: 718794 - RNA, 19 nt, Artificial Sequence
  Description of Artificial Sequence: Synthetic oligonucleotide
  Sense strand starting at position 2318 of SEQ ID NO: 586449
uccuuaucucguguaguuc

SEQ ID NO: 718795 - RNA, 19 nt, Artificial Sequence
  Description of Artificial Sequence: Synthetic oligonucleotide
  Antisense strand to SEQ ID NO: 718794
gaacuacacgagauaagga

SEQ ID NO: 718796 - RNA, 19 nt, Artificial Sequence
  Description of Artificial Sequence: Synthetic oligonucleotide
  Sense strand starting at position 2326 of SEQ ID NO: 586449
ucguguaguucuuuaauuu

SEQ ID NO: 718797 - RNA, 19 nt, Artificial Sequence
  Description of Artificial Sequence: Synthetic oligonucleotide
  Antisense strand to SEQ ID NO: 718796
aaauuaaagaacuacacga

SEQ ID NO: 718798 - RNA, 19 nt, Artificial Sequence
  Description of Artificial Sequence: Synthetic oligonucleotide
  Sense strand starting at position 2327 of SEQ ID NO: 586449
cguguaguucuuuaauuuc

SEQ ID NO: 718799 - RNA, 19 nt, Artificial Sequence
  Description of Artificial Sequence: Synthetic oligonucleotide
  Antisense strand to SEQ ID NO: 718798
gaaauuaaagaacuacacg

SEQ ID NO: 718800 - RNA, 19 nt, Artificial Sequence
  Description of Artificial Sequence: Synthetic oligonucleotide
  Sense strand starting at position 2355 of SEQ ID NO: 586449
uuucaaagcgaggauguuu

SEQ ID NO: 718801 - RNA, 19 nt, Artificial Sequence
  Description of Artificial Sequence: Synthetic oligonucleotide
  Antisense strand to SEQ ID NO: 718800
aaacauccucgcuuugaaa

SEQ ID NO: 718802 - RNA, 19 nt, Artificial Sequence
  Description of Artificial Sequence: Synthetic oligonucleotide
  Sense strand starting at position 2382 of SEQ ID NO: 586449
gauggcuucuccuugacuu

SEQ ID NO: 718803 - RNA, 19 nt, Artificial Sequence
  Description of Artificial Sequence: Synthetic oligonucleotide
  Antisense strand to SEQ ID NO: 718802
aagucaaggagaagccauc

SEQ ID NO: 718804 - RNA, 19 nt, Artificial Sequence
  Description of Artificial Sequence: Synthetic oligonucleotide
  Sense strand starting at position 2392 of SEQ ID NO: 586449
ccuugacuucaggguagga

SEQ ID NO: 718805 - RNA, 19 nt, Artificial Sequence
  Description of Artificial Sequence: Synthetic oligonucleotide
  Antisense strand to SEQ ID NO: 718804
uccuacccugaagucaagg

SEQ ID NO: 718806 - RNA, 19 nt, Artificial Sequence
  Description of Artificial Sequence: Synthetic oligonucleotide
  Sense strand starting at position 2686 of SEQ ID NO: 586449
ucuaaagucuguuuggaug

SEQ ID NO: 718807 - RNA, 19 nt, Artificial Sequence
  Description of Artificial Sequence: Synthetic oligonucleotide
  Antisense strand to SEQ ID NO: 718806
cauccaaacagacuuuaga

SEQ ID NO: 718808 - RNA, 19 nt, Artificial Sequence
  Description of Artificial Sequence: Synthetic oligonucleotide
  Sense strand starting at position 2702 of SEQ ID NO: 586449
augcaaucagcguaacaau

SEQ ID NO: 718809 - RNA, 19 nt, Artificial Sequence
  Description of Artificial Sequence: Synthetic oligonucleotide
  Antisense strand to SEQ ID NO: 718808
auuguuacgcugauugcau

SEQ ID NO: 718810 - RNA, 19 nt, Artificial Sequence
  Description of Artificial Sequence: Synthetic oligonucleotide
  Sense strand starting at position 2932 of SEQ ID NO: 586449
gcgauuugcccuugauaag

SEQ ID NO: 718811 - RNA, 19 nt, Artificial Sequence
  Description of Artificial Sequence: Synthetic oligonucleotide
  Antisense strand to SEQ ID NO: 718810
cuuaucaagggcaaaucgc

SEQ ID NO: 718812 - RNA, 19 nt, Artificial Sequence
  Description of Artificial Sequence: Synthetic oligonucleotide
  Sense strand starting at position 3009 of SEQ ID NO: 586449
ucgaguauuuguucccgaa

SEQ ID NO: 718813 - RNA, 19 nt, Artificial Sequence
  Description of Artificial Sequence: Synthetic oligonucleotide
  Antisense strand to SEQ ID NO: 718812
uucgggaacaaauacucga

SEQ ID NO: 718814 - RNA, 19 nt, Artificial Sequence
  Description of Artificial Sequence: Synthetic oligonucleotide
  Sense strand starting at position 3016 of SEQ ID NO: 586449
uuuguucccgaacaaagaa

SEQ ID NO: 718815 - RNA, 19 nt, Artificial Sequence
  Description of Artificial Sequence: Synthetic oligonucleotide
  Antisense strand to SEQ ID NO: 718814
uucuuuguucgggaacaaa

SEQ ID NO: 718816 - RNA, 19 nt, Artificial Sequence
  Description of Artificial Sequence: Synthetic oligonucleotide
  Sense strand starting at position 3077 of SEQ ID NO: 586449
uguauuguccuacaguaag

SEQ ID NO: 718817 - RNA, 19 nt, Artificial Sequence
  Description of Artificial Sequence: Synthetic oligonucleotide
  Antisense strand to SEQ ID NO: 718816
cuuacuguaggacaauaca

SEQ ID NO: 718818 - RNA, 19 nt, Artificial Sequence
  Description of Artificial Sequence: Synthetic oligonucleotide
  Sense strand starting at position 3091 of SEQ ID NO: 586449
guaagacuuaagugcagaa

SEQ ID NO: 718819 - RNA, 19 nt, Artificial Sequence
  Description of Artificial Sequence: Synthetic oligonucleotide
  Antisense strand to SEQ ID NO: 718818
uucugcacuuaagucuuac

SEQ ID NO: 718820 - RNA, 19 nt, Artificial Sequence
  Description of Artificial Sequence: Synthetic oligonucleotide
  Sense strand starting at position 3147 of SEQ ID NO: 586449
gcuaucguuagaucguuau

SEQ ID NO: 718821 - RNA, 19 nt, Artificial Sequence
  Description of Artificial Sequence: Synthetic oligonucleotide
  Antisense strand to SEQ ID NO: 718820
auaacgaucuaacgauagc

SEQ ID NO: 718822 - RNA, 19 nt, Artificial Sequence
  Description of Artificial Sequence: Synthetic oligonucleotide
  Sense strand starting at position 3224 of SEQ ID NO: 586449
uuauauuaucucgaguauc

SEQ ID NO: 718823 - RNA, 19 nt, Artificial Sequence
  Description of Artificial Sequence: Synthetic oligonucleotide
  Antisense strand to SEQ ID NO: 718822
gauacucgagauaauauaa

SEQ ID NO: 718824 - RNA, 19 nt, Artificial Sequence
  Description of Artificial Sequence: Synthetic oligonucleotide
  Sense strand starting at position 3340 of SEQ ID NO: 586449
uugugucaaagugacagau

SEQ ID NO: 718825 - RNA, 19 nt, Artificial Sequence
  Description of Artificial Sequence: Synthetic oligonucleotide
  Antisense strand to SEQ ID NO: 718824
aucugucacuuugacacaa

SEQ ID NO: 718826 - RNA, 19 nt, Artificial Sequence
  Description of Artificial Sequence: Synthetic oligonucleotide
  Sense strand starting at position 3373 of SEQ ID NO: 586449
aaagguagauuggaagaaa

SEQ ID NO: 718827 - RNA, 19 nt, Artificial Sequence
  Description of Artificial Sequence: Synthetic oligonucleotide
  Antisense strand to SEQ ID NO: 718826
uuucuuccaaucuaccuuu

SEQ ID NO: 718828 - RNA, 19 nt, Artificial Sequence
  Description of Artificial Sequence: Synthetic oligonucleotide
  Sense strand starting at position 3445 of SEQ ID NO: 586449
gacgucagucccuauuaag

SEQ ID NO: 718829 - RNA, 19 nt, Artificial Sequence
  Description of Artificial Sequence: Synthetic oligonucleotide
  Antisense strand to SEQ ID NO: 718828
cuuaauagggacugacguc

SEQ ID NO: 718830 - RNA, 19 nt, Artificial Sequence
  Description of Artificial Sequence: Synthetic oligonucleotide
  Sense strand starting at position 3467 of SEQ ID NO: 586449
guaaguugugguuaugaug

SEQ ID NO: 718831 - RNA, 19 nt, Artificial Sequence
  Description of Artificial Sequence: Synthetic oligonucleotide
  Antisense strand to SEQ ID NO: 718830
caucauaaccacaacuuac

SEQ ID NO: 718832 - RNA, 19 nt, Artificial Sequence
  Description of Artificial Sequence: Synthetic oligonucleotide
  Sense strand starting at position 3571 of SEQ ID NO: 586449
ccucuauguguguaaucaa

SEQ ID NO: 718833 - RNA, 19 nt, Artificial Sequence
  Description of Artificial Sequence: Synthetic oligonucleotide
  Antisense strand to SEQ ID NO: 718832
uugauuacacacauagagg

SEQ ID NO: 718834 - RNA, 19 nt, Artificial Sequence
  Description of Artificial Sequence: Synthetic oligonucleotide
  Sense strand starting at position 3742 of SEQ ID NO: 586449
gugauccuggaagauguua

SEQ ID NO: 718835 - RNA, 19 nt, Artificial Sequence
  Description of Artificial Sequence: Synthetic oligonucleotide
  Antisense strand to SEQ ID NO: 718834
uaacaucuuccaggaucac

SEQ ID NO: 718836 - RNA, 19 nt, Artificial Sequence
  Description of Artificial Sequence: Synthetic oligonucleotide
  Sense strand starting at position 3765 of SEQ ID NO: 586449
gaaugagaucuuugguugu

SEQ ID NO: 718837 - RNA, 19 nt, Artificial Sequence
  Description of Artificial Sequence: Synthetic oligonucleotide
  Antisense strand to SEQ ID NO: 718836
acaaccaaagaucucauuc

SEQ ID NO: 718838 - RNA, 19 nt, Artificial Sequence
  Description of Artificial Sequence: Synthetic oligonucleotide
  Sense strand starting at position 3767 of SEQ ID NO: 586449
augagaucuuugguuguua

SEQ ID NO: 718839 - RNA, 19 nt, Artificial Sequence
  Description of Artificial Sequence: Synthetic oligonucleotide
  Antisense strand to SEQ ID NO: 718838
uaacaaccaaagaucucau

SEQ ID NO: 718840 - RNA, 19 nt, Artificial Sequence
  Description of Artificial Sequence: Synthetic oligonucleotide
  Sense strand starting at position 3768 of SEQ ID NO: 586449
ugagaucuuugguuguuac

SEQ ID NO: 718841 - RNA, 19 nt, Artificial Sequence
  Description of Artificial Sequence: Synthetic oligonucleotide
  Antisense strand to SEQ ID NO: 718840
guaacaaccaaagaucuca

SEQ ID NO: 718842 - RNA, 19 nt, Artificial Sequence
  Description of Artificial Sequence: Synthetic oligonucleotide
  Sense strand starting at position 3769 of SEQ ID NO: 586449
gagaucuuugguuguuacu

SEQ ID NO: 718843 - RNA, 19 nt, Artificial Sequence
  Description of Artificial Sequence: Synthetic oligonucleotide
  Antisense strand to SEQ ID NO: 718842
aguaacaaccaaagaucuc

SEQ ID NO: 718844 - RNA, 19 nt, Artificial Sequence
  Description of Artificial Sequence: Synthetic oligonucleotide
  Sense strand starting at position 3776 of SEQ ID NO: 586449
uugguuguuacuuaguuga

SEQ ID NO: 718845 - RNA, 19 nt, Artificial Sequence
  Description of Artificial Sequence: Synthetic oligonucleotide
  Antisense strand to SEQ ID NO: 718844
ucaacuaaguaacaaccaa

SEQ ID NO: 718846 - RNA, 19 nt, Artificial Sequence
  Description of Artificial Sequence: Synthetic oligonucleotide
  Sense strand starting at position 3779 of SEQ ID NO: 586449
guuguuacuuaguugauuu

SEQ ID NO: 718847 - RNA, 19 nt, Artificial Sequence
  Description of Artificial Sequence: Synthetic oligonucleotide
  Antisense strand to SEQ ID NO: 718846
aaaucaacuaaguaacaac

SEQ ID NO: 718848 - RNA, 19 nt, Artificial Sequence
  Description of Artificial Sequence: Synthetic oligonucleotide
  Sense strand starting at position 3854 of SEQ ID NO: 586449
uggcuaugaagcuaguaaa

SEQ ID NO: 718849 - RNA, 19 nt, Artificial Sequence
  Description of Artificial Sequence: Synthetic oligonucleotide
  Antisense strand to SEQ ID NO: 718848
uuuacuagcuucauagcca

SEQ ID NO: 718850 - RNA, 19 nt, Artificial Sequence
  Description of Artificial Sequence: Synthetic oligonucleotide
  Sense strand starting at position 3911 of SEQ ID NO: 586449
gcuugcuaacccucguuua

SEQ ID NO: 718851 - RNA, 19 nt, Artificial Sequence
  Description of Artificial Sequence: Synthetic oligonucleotide
  Antisense strand to SEQ ID NO: 718850
uaaacgaggguuagcaagc

SEQ ID NO: 718852 - RNA, 19 nt, Artificial Sequence
  Description of Artificial Sequence: Synthetic oligonucleotide
  Sense strand starting at position 31 of SEQ ID NO: 586450
ugaugccguuuccuuaaau

SEQ ID NO: 718853 - RNA, 19 nt, Artificial Sequence
  Description of Artificial Sequence: Synthetic oligonucleotide
  Antisense strand to SEQ ID NO: 718852
auuuaaggaaacggcauca

SEQ ID NO: 718854 - RNA, 19 nt, Artificial Sequence
  Description of Artificial Sequence: Synthetic oligonucleotide
  Sense strand starting at position 32 of SEQ ID NO: 586450
gaugccguuuccuuaaauu

SEQ ID NO: 718855 - RNA, 19 nt, Artificial Sequence
  Description of Artificial Sequence: Synthetic oligonucleotide
  Antisense strand to SEQ ID NO: 718854
aauuuaaggaaacggcauc

SEQ ID NO: 718856 - RNA, 19 nt, Artificial Sequence
  Description of Artificial Sequence: Synthetic oligonucleotide
  Sense strand starting at position 160 of SEQ ID NO: 586450
gggaguuagaauggcaaca

SEQ ID NO: 718857 - RNA, 19 nt, Artificial Sequence
  Description of Artificial Sequence: Synthetic oligonucleotide
  Antisense strand to SEQ ID NO: 718856
uguugccauucuaacuccc

SEQ ID NO: 718858 - RNA, 19 nt, Artificial Sequence
  Description of Artificial Sequence: Synthetic oligonucleotide
  Sense strand starting at position 162 of SEQ ID NO: 586450
gaguuagaauggcaacaaa

SEQ ID NO: 718859 - RNA, 19 nt, Artificial Sequence
  Description of Artificial Sequence: Synthetic oligonucleotide
  Antisense strand to SEQ ID NO: 718858
uuuguugccauucuaacuc

SEQ ID NO: 718860 - RNA, 19 nt, Artificial Sequence
  Description of Artificial Sequence: Synthetic oligonucleotide
  Sense strand starting at position 264 of SEQ ID NO: 586450
agagacauuuccugguuug

SEQ ID NO: 718861 - RNA, 19 nt, Artificial Sequence
  Description of Artificial Sequence: Synthetic oligonucleotide
  Antisense strand to SEQ ID NO: 718860
caaaccaggaaaugucucu

SEQ ID NO: 718862 - RNA, 19 nt, Artificial Sequence
  Description of Artificial Sequence: Synthetic oligonucleotide
  Sense strand starting at position 267 of SEQ ID NO: 586450
gacauuuccugguuugcau

SEQ ID NO: 718863 - RNA, 19 nt, Artificial Sequence
  Description of Artificial Sequence: Synthetic oligonucleotide
  Antisense strand to SEQ ID NO: 718862
augcaaaccaggaaauguc

SEQ ID NO: 718864 - RNA, 19 nt, Artificial Sequence
  Description of Artificial Sequence: Synthetic oligonucleotide
  Sense strand starting at position 331 of SEQ ID NO: 586450
uuuguagcccgcguguauu

SEQ ID NO: 718865 - RNA, 19 nt, Artificial Sequence
  Description of Artificial Sequence: Synthetic oligonucleotide
  Antisense strand to SEQ ID NO: 718864
aauacacgcgggcuacaaa

SEQ ID NO: 718866 - RNA, 19 nt, Artificial Sequence
  Description of Artificial Sequence: Synthetic oligonucleotide
  Sense strand starting at position 341 of SEQ ID NO: 586450
gcguguauucggguaugag

SEQ ID NO: 718867 - RNA, 19 nt, Artificial Sequence
  Description of Artificial Sequence: Synthetic oligonucleotide
  Antisense strand to SEQ ID NO: 718866
cucauacccgaauacacgc

SEQ ID NO: 718868 - RNA, 19 nt, Artificial Sequence
  Description of Artificial Sequence: Synthetic oligonucleotide
  Sense strand starting at position 342 of SEQ ID NO: 586450
cguguauucggguaugagu

SEQ ID NO: 718869 - RNA, 19 nt, Artificial Sequence
  Description of Artificial Sequence: Synthetic oligonucleotide
  Antisense strand to SEQ ID NO: 718868
acucauacccgaauacacg

SEQ ID NO: 718870 - RNA, 19 nt, Artificial Sequence
  Description of Artificial Sequence: Synthetic oligonucleotide
  Sense strand starting at position 351 of SEQ ID NO: 586450
ggguaugaguguuuaaagu

SEQ ID NO: 718871 - RNA, 19 nt, Artificial Sequence
  Description of Artificial Sequence: Synthetic oligonucleotide
  Antisense strand to SEQ ID NO: 718870
acuuuaaacacucauaccc

SEQ ID NO: 718872 - RNA, 19 nt, Artificial Sequence
  Description of Artificial Sequence: Synthetic oligonucleotide
  Sense strand starting at position 357 of SEQ ID NO: 586450
gaguguuuaaaguggaacu

SEQ ID NO: 718873 - RNA, 19 nt, Artificial Sequence
  Description of Artificial Sequence: Synthetic oligonucleotide
  Antisense strand to SEQ ID NO: 718872
aguuccacuuuaaacacuc

SEQ ID NO: 718874 - RNA, 19 nt, Artificial Sequence
  Description of Artificial Sequence: Synthetic oligonucleotide
  Sense strand starting at position 358 of SEQ ID NO: 586450
aguguuuaaaguggaacuu

SEQ ID NO: 718875 - RNA, 19 nt, Artificial Sequence
  Description of Artificial Sequence: Synthetic oligonucleotide
  Antisense strand to SEQ ID NO: 718874
aaguuccacuuuaaacacu

SEQ ID NO: 718876 - RNA, 19 nt, Artificial Sequence
  Description of Artificial Sequence: Synthetic oligonucleotide
  Sense strand starting at position 389 of SEQ ID NO: 586450
uugccacacugguuacauu

SEQ ID NO: 718877 - RNA, 19 nt, Artificial Sequence
  Description of Artificial Sequence: Synthetic oligonucleotide
  Antisense strand to SEQ ID NO: 718876
aauguaaccaguguggcaa

SEQ ID NO: 718878 - RNA, 19 nt, Artificial Sequence
  Description of Artificial Sequence: Synthetic oligonucleotide
  Sense strand starting at position 399 of SEQ ID NO: 586450
gguuacauuugugagguuu

SEQ ID NO: 718879 - RNA, 19 nt, Artificial Sequence
  Description of Artificial Sequence: Synthetic oligonucleotide
  Antisense strand to SEQ ID NO: 718878
aaaccucacaaauguaacc

SEQ ID NO: 718880 - RNA, 19 nt, Artificial Sequence
  Description of Artificial Sequence: Synthetic oligonucleotide
  Sense strand starting at position 468 of SEQ ID NO: 586450
augugaaguucugcaagcu

SEQ ID NO: 718881 - RNA, 19 nt, Artificial Sequence
  Description of Artificial Sequence: Synthetic oligonucleotide
  Antisense strand to SEQ ID NO: 718880
agcuugcagaacuucacau

SEQ ID NO: 718882 - RNA, 19 nt, Artificial Sequence
  Description of Artificial Sequence: Synthetic oligonucleotide
  Sense strand starting at position 569 of SEQ ID NO: 586450
uuaaaugaacguuauccua

SEQ ID NO: 718883 - RNA, 19 nt, Artificial Sequence
  Description of Artificial Sequence: Synthetic oligonucleotide
  Antisense strand to SEQ ID NO: 718882
uaggauaacguucauuuaa

SEQ ID NO: 718884 - RNA, 19 nt, Artificial Sequence
  Description of Artificial Sequence: Synthetic oligonucleotide
  Sense strand starting at position 578 of SEQ ID NO: 586450
cguuauccuaaagaguaag

SEQ ID NO: 718885 - RNA, 19 nt, Artificial Sequence
  Description of Artificial Sequence: Synthetic oligonucleotide
  Antisense strand to SEQ ID NO: 718884
cuuacucuuuaggauaacg

SEQ ID NO: 718886 - RNA, 19 nt, Artificial Sequence
  Description of Artificial Sequence: Synthetic oligonucleotide
  Sense strand starting at position 629 of SEQ ID NO: 586450
gaagcaaacuaggugaaau

SEQ ID NO: 718887 - RNA, 19 nt, Artificial Sequence
  Description of Artificial Sequence: Synthetic oligonucleotide
  Antisense strand to SEQ ID NO: 718886
auuucaccuaguuugcuuc

SEQ ID NO: 718888 - RNA, 19 nt, Artificial Sequence
  Description of Artificial Sequence: Synthetic oligonucleotide
  Sense strand starting at position 639 of SEQ ID NO: 586450
aggugaaauugagacagau

SEQ ID NO: 718889 - RNA, 19 nt, Artificial Sequence
  Description of Artificial Sequence: Synthetic oligonucleotide
  Antisense strand to SEQ ID NO: 718888
aucugucucaauuucaccu

SEQ ID NO: 718890 - RNA, 19 nt, Artificial Sequence
  Description of Artificial Sequence: Synthetic oligonucleotide
  Sense strand starting at position 659 of SEQ ID NO: 586450
aacacaccugcgugugaau

SEQ ID NO: 718891 - RNA, 19 nt, Artificial Sequence
  Description of Artificial Sequence: Synthetic oligonucleotide
  Antisense strand to SEQ ID NO: 718890
auucacacgcagguguguu

SEQ ID NO: 718892 - RNA, 19 nt, Artificial Sequence
  Description of Artificial Sequence: Synthetic oligonucleotide
  Sense strand starting at position 674 of SEQ ID NO: 586450
gaaugaucuugugccugca

SEQ ID NO: 718893 - RNA, 19 nt, Artificial Sequence
  Description of Artificial Sequence: Synthetic oligonucleotide
  Antisense strand to SEQ ID NO: 718892
ugcaggcacaagaucauuc

SEQ ID NO: 718894 - RNA, 19 nt, Artificial Sequence
  Description of Artificial Sequence: Synthetic oligonucleotide
  Sense strand starting at position 699 of SEQ ID NO: 586450
gcuugcuugccugaaaccu

SEQ ID NO: 718895 - RNA, 19 nt, Artificial Sequence
  Description of Artificial Sequence: Synthetic oligonucleotide
  Antisense strand to SEQ ID NO: 718894
agguuucaggcaagcaagc

SEQ ID NO: 718896 - RNA, 19 nt, Artificial Sequence
  Description of Artificial Sequence: Synthetic oligonucleotide
  Sense strand starting at position 761 of SEQ ID NO: 586450
cuggcaugugacggguuaa

SEQ ID NO: 718897 - RNA, 19 nt, Artificial Sequence
  Description of Artificial Sequence: Synthetic oligonucleotide
  Antisense strand to SEQ ID NO: 718896
uuaacccgucacaugccag

SEQ ID NO: 718898 - RNA, 19 nt, Artificial Sequence
  Description of Artificial Sequence: Synthetic oligonucleotide
  Sense strand starting at position 776 of SEQ ID NO: 586450
uuaaguuauagugcgcauu

SEQ ID NO: 718899 - RNA, 19 nt, Artificial Sequence
  Description of Artificial Sequence: Synthetic oligonucleotide
  Antisense strand to SEQ ID NO: 718898
aaugcgcacuauaacuuaa

SEQ ID NO: 718900 - RNA, 19 nt, Artificial Sequence
  Description of Artificial Sequence: Synthetic oligonucleotide
  Sense strand starting at position 778 of SEQ ID NO: 586450
aaguuauagugcgcauuaa

SEQ ID NO: 718901 - RNA, 19 nt, Artificial Sequence
  Description of Artificial Sequence: Synthetic oligonucleotide
  Antisense strand to SEQ ID NO: 718900
uuaaugcgcacuauaacuu

SEQ ID NO: 718902 - RNA, 19 nt, Artificial Sequence
  Description of Artificial Sequence: Synthetic oligonucleotide
  Sense strand starting at position 779 of SEQ ID NO: 586450
aguuauagugcgcauuaaa

SEQ ID NO: 718903 - RNA, 19 nt, Artificial Sequence
  Description of Artificial Sequence: Synthetic oligonucleotide
  Antisense strand to SEQ ID NO: 718902
uuuaaugcgcacuauaacu

SEQ ID NO: 718904 - RNA, 19 nt, Artificial Sequence
  Description of Artificial Sequence: Synthetic oligonucleotide
  Sense strand starting at position 823 of SEQ ID NO: 586450
acagguuagccgcacaagu

SEQ ID NO: 718905 - RNA, 19 nt, Artificial Sequence
  Description of Artificial Sequence: Synthetic oligonucleotide
  Antisense strand to SEQ ID NO: 718904
acuugugcggcuaaccugu

SEQ ID NO: 718906 - RNA, 19 nt, Artificial Sequence
  Description of Artificial Sequence: Synthetic oligonucleotide
  Sense strand starting at position 825 of SEQ ID NO: 586450
agguuagccgcacaaguaa

SEQ ID NO: 718907 - RNA, 19 nt, Artificial Sequence
  Description of Artificial Sequence: Synthetic oligonucleotide
  Antisense strand to SEQ ID NO: 718906
uuacuugugcggcuaaccu

SEQ ID NO: 718908 - RNA, 19 nt, Artificial Sequence
  Description of Artificial Sequence: Synthetic oligonucleotide
  Sense strand starting at position 878 of SEQ ID NO: 586450
ggaagagaaucuuaacaaa

SEQ ID NO: 718909 - RNA, 19 nt, Artificial Sequence
  Description of Artificial Sequence: Synthetic oligonucleotide
  Antisense strand to SEQ ID NO: 718908
uuuguuaagauucucuucc

SEQ ID NO: 718910 - RNA, 19 nt, Artificial Sequence
  Description of Artificial Sequence: Synthetic oligonucleotide
  Sense strand starting at position 1118 of SEQ ID NO: 586450
guacuugccuuuccacaca

SEQ ID NO: 718911 - RNA, 19 nt, Artificial Sequence
  Description of Artificial Sequence: Synthetic oligonucleotide
  Antisense strand to SEQ ID NO: 718910
uguguggaaaggcaaguac

SEQ ID NO: 718912 - RNA, 19 nt, Artificial Sequence
  Description of Artificial Sequence: Synthetic oligonucleotide
  Sense strand starting at position 1842 of SEQ ID NO: 586450
aggguuuggacgugcucau

SEQ ID NO: 718913 - RNA, 19 nt, Artificial Sequence
  Description of Artificial Sequence: Synthetic oligonucleotide
  Antisense strand to SEQ ID NO: 718912
augagcacguccaaacccu

SEQ ID NO: 718914 - RNA, 19 nt, Artificial Sequence
  Description of Artificial Sequence: Synthetic oligonucleotide
  Sense strand starting at position 1914 of SEQ ID NO: 586450
agcuacuguccaugucuga

SEQ ID NO: 718915 - RNA, 19 nt, Artificial Sequence
  Description of Artificial Sequence: Synthetic oligonucleotide
  Antisense strand to SEQ ID NO: 718914
ucagacauggacaguagcu

SEQ ID NO: 718916 - RNA, 19 nt, Artificial Sequence
  Description of Artificial Sequence: Synthetic oligonucleotide
  Sense strand starting at position 2315 of SEQ ID NO: 586450
uucauuggugagugagguu

SEQ ID NO: 718917 - RNA, 19 nt, Artificial Sequence
  Description of Artificial Sequence: Synthetic oligonucleotide
  Antisense strand to SEQ ID NO: 718916
aaccucacucaccaaugaa

SEQ ID NO: 718918 - RNA, 19 nt, Artificial Sequence
  Description of Artificial Sequence: Synthetic oligonucleotide
  Sense strand starting at position 2501 of SEQ ID NO: 586450
ccaagcaaaucugagauca

SEQ ID NO: 718919 - RNA, 19 nt, Artificial Sequence
  Description of Artificial Sequence: Synthetic oligonucleotide
  Antisense strand to SEQ ID NO: 718918
ugaucucagauuugcuugg

SEQ ID NO: 718920 - RNA, 19 nt, Artificial Sequence
  Description of Artificial Sequence: Synthetic oligonucleotide
  Sense strand starting at position 2525 of SEQ ID NO: 586450
cucguuuagcucuaaguga

SEQ ID NO: 718921 - RNA, 19 nt, Artificial Sequence
  Description of Artificial Sequence: Synthetic oligonucleotide
  Antisense strand to SEQ ID NO: 718920
ucacuuagagcuaaacgag

SEQ ID NO: 718922 - RNA, 19 nt, Artificial Sequence
  Description of Artificial Sequence: Synthetic oligonucleotide
  Sense strand starting at position 2555 of SEQ ID NO: 586450
aucauugugcaagggcuaa

SEQ ID NO: 718923 - RNA, 19 nt, Artificial Sequence
  Description of Artificial Sequence: Synthetic oligonucleotide
  Antisense strand to SEQ ID NO: 718922
uuagcccuugcacaaugau

SEQ ID NO: 718924 - RNA, 19 nt, Artificial Sequence
  Description of Artificial Sequence: Synthetic oligonucleotide
  Sense strand starting at position 2661 of SEQ ID NO: 586450
ggcagugaaauccgagguu

SEQ ID NO: 718925 - RNA, 19 nt, Artificial Sequence
  Description of Artificial Sequence: Synthetic oligonucleotide
  Antisense strand to SEQ ID NO: 718924
aaccucggauuucacugcc

SEQ ID NO: 718926 - RNA, 19 nt, Artificial Sequence
  Description of Artificial Sequence: Synthetic oligonucleotide
  Sense strand starting at position 3879 of SEQ ID NO: 586450
acuagaaacccuggcauua

SEQ ID NO: 718927 - RNA, 19 nt, Artificial Sequence
  Description of Artificial Sequence: Synthetic oligonucleotide
  Antisense strand to SEQ ID NO: 718926
uaaugccaggguuucuagu

SEQ ID NO: 718928 - RNA, 19 nt, Artificial Sequence
  Description of Artificial Sequence: Synthetic oligonucleotide
  Sense strand starting at position 3894 of SEQ ID NO: 586450
auuauuaagucccugagca

SEQ ID NO: 718929 - RNA, 19 nt, Artificial Sequence
  Description of Artificial Sequence: Synthetic oligonucleotide
  Antisense strand to SEQ ID NO: 718928
ugcucagggacuuaauaau

SEQ ID NO: 718930 - RNA, 19 nt, Artificial Sequence
  Description of Artificial Sequence: Synthetic oligonucleotide
  Sense strand starting at position 3895 of SEQ ID NO: 586450
uuauuaagucccugagcaa

SEQ ID NO: 718931 - RNA, 19 nt, Artificial Sequence
  Description of Artificial Sequence: Synthetic oligonucleotide
  Antisense strand to SEQ ID NO: 718930
uugcucagggacuuaauaa

SEQ ID NO: 718932 - RNA, 19 nt, Artificial Sequence
  Description of Artificial Sequence: Synthetic oligonucleotide
  Sense strand starting at position 343 of SEQ ID NO: 586451
ccaggaguauuaccaauag

SEQ ID NO: 718933 - RNA, 19 nt, Artificial Sequence
  Description of Artificial Sequence: Synthetic oligonucleotide
  Antisense strand to SEQ ID NO: 718932
cuauugguaauacuccugg

SEQ ID NO: 718934 - RNA, 19 nt, Artificial Sequence
  Description of Artificial Sequence: Synthetic oligonucleotide
  Sense strand starting at position 412 of SEQ ID NO: 586451
gauggagcaugccugagau

SEQ ID NO: 718935 - RNA, 19 nt, Artificial Sequence
  Description of Artificial Sequence: Synthetic oligonucleotide
  Antisense strand to SEQ ID NO: 718934
aucucaggcaugcuccauc

SEQ ID NO: 718936 - RNA, 19 nt, Artificial Sequence
  Description of Artificial Sequence: Synthetic oligonucleotide
  Sense strand starting at position 426 of SEQ ID NO: 586451
gagauacugucucuaaaug

SEQ ID NO: 718937 - RNA, 19 nt, Artificial Sequence
  Description of Artificial Sequence: Synthetic oligonucleotide
  Antisense strand to SEQ ID NO: 718936
cauuuagagacaguaucuc

SEQ ID NO: 718938 - RNA, 19 nt, Artificial Sequence
  Description of Artificial Sequence: Synthetic oligonucleotide
  Sense strand starting at position 511 of SEQ ID NO: 586451
ggcuuuccaaaguaugaga

SEQ ID NO: 718939 - RNA, 19 nt, Artificial Sequence
  Description of Artificial Sequence: Synthetic oligonucleotide
  Antisense strand to SEQ ID NO: 718938
ucucauacuuuggaaagcc

SEQ ID NO: 718940 - RNA, 19 nt, Artificial Sequence
  Description of Artificial Sequence: Synthetic oligonucleotide
  Sense strand starting at position 513 of SEQ ID NO: 586451
cuuuccaaaguaugagaca

SEQ ID NO: 718941 - RNA, 19 nt, Artificial Sequence
  Description of Artificial Sequence: Synthetic oligonucleotide
  Antisense strand to SEQ ID NO: 718940
ugucucauacuuuggaaag

SEQ ID NO: 718942 - RNA, 19 nt, Artificial Sequence
  Description of Artificial Sequence: Synthetic oligonucleotide
  Sense strand starting at position 608 of SEQ ID NO: 586451
ggaguaggcgauuaagucu

SEQ ID NO: 718943 - RNA, 19 nt, Artificial Sequence
  Description of Artificial Sequence: Synthetic oligonucleotide
  Antisense strand to SEQ ID NO: 718942
agacuuaaucgccuacucc

SEQ ID NO: 718944 - RNA, 19 nt, Artificial Sequence
  Description of Artificial Sequence: Synthetic oligonucleotide
  Sense strand starting at position 664 of SEQ ID NO: 586451
uaauuuggauggugaggau

SEQ ID NO: 718945 - RNA, 19 nt, Artificial Sequence
  Description of Artificial Sequence: Synthetic oligonucleotide
  Antisense strand to SEQ ID NO: 718944
auccucaccauccaaauua

SEQ ID NO: 718946 - RNA, 19 nt, Artificial Sequence
  Description of Artificial Sequence: Synthetic oligonucleotide
  Sense strand starting at position 868 of SEQ ID NO: 586451
uccagauauuugggauuaa

SEQ ID NO: 718947 - RNA, 19 nt, Artificial Sequence
  Description of Artificial Sequence: Synthetic oligonucleotide
  Antisense strand to SEQ ID NO: 718946
uuaaucccaaauaucugga

SEQ ID NO: 718948 - RNA, 19 nt, Artificial Sequence
  Description of Artificial Sequence: Synthetic oligonucleotide
  Sense strand starting at position 869 of SEQ ID NO: 586451
ccagauauuugggauuaag

SEQ ID NO: 718949 - RNA, 19 nt, Artificial Sequence
  Description of Artificial Sequence: Synthetic oligonucleotide
  Antisense strand to SEQ ID NO: 718948
cuuaaucccaaauaucugg

SEQ ID NO: 718950 - RNA, 19 nt, Artificial Sequence
  Description of Artificial Sequence: Synthetic oligonucleotide
  Sense strand starting at position 886 of SEQ ID NO: 586451
agaacuagauuacuugcua

SEQ ID NO: 718951 - RNA, 19 nt, Artificial Sequence
  Description of Artificial Sequence: Synthetic oligonucleotide
  Antisense strand to SEQ ID NO: 718950
uagcaaguaaucuaguucu

SEQ ID NO: 718952 - RNA, 19 nt, Artificial Sequence
  Description of Artificial Sequence: Synthetic oligonucleotide
  Sense strand starting at position 919 of SEQ ID NO: 586451
ccucuuuagccaugagaag

SEQ ID NO: 718953 - RNA, 19 nt, Artificial Sequence
  Description of Artificial Sequence: Synthetic oligonucleotide
  Antisense strand to SEQ ID NO: 718952
cuucucauggcuaaagagg

SEQ ID NO: 718954 - RNA, 19 nt, Artificial Sequence
  Description of Artificial Sequence: Synthetic oligonucleotide
  Sense strand starting at position 992 of SEQ ID NO: 586451
ugaacaucgccuuaucuuu

SEQ ID NO: 718955 - RNA, 19 nt, Artificial Sequence
  Description of Artificial Sequence: Synthetic oligonucleotide
  Antisense strand to SEQ ID NO: 718954
aaagauaaggcgauguuca

SEQ ID NO: 718956 - RNA, 19 nt, Artificial Sequence
  Description of Artificial Sequence: Synthetic oligonucleotide
  Sense strand starting at position 1091 of SEQ ID NO: 586451
uaggucuggcauuaacaaa

SEQ ID NO: 718957 - RNA, 19 nt, Artificial Sequence
  Description of Artificial Sequence: Synthetic oligonucleotide
  Antisense strand to SEQ ID NO: 718956
uuuguuaaugccagaccua

SEQ ID NO: 718958 - RNA, 19 nt, Artificial Sequence
  Description of Artificial Sequence: Synthetic oligonucleotide
  Sense strand starting at position 1128 of SEQ ID NO: 586451
agugacuuccaguggauac

SEQ ID NO: 718959 - RNA, 19 nt, Artificial Sequence
  Description of Artificial Sequence: Synthetic oligonucleotide
  Antisense strand to SEQ ID NO: 718958
guauccacuggaagucacu

SEQ ID NO: 718960 - RNA, 19 nt, Artificial Sequence
  Description of Artificial Sequence: Synthetic oligonucleotide
  Sense strand starting at position 1129 of SEQ ID NO: 586451
gugacuuccaguggauaca

SEQ ID NO: 718961 - RNA, 19 nt, Artificial Sequence
  Description of Artificial Sequence: Synthetic oligonucleotide
  Antisense strand to SEQ ID NO: 718960
uguauccacuggaagucac

SEQ ID NO: 718962 - RNA, 19 nt, Artificial Sequence
  Description of Artificial Sequence: Synthetic oligonucleotide
  Sense strand starting at position 1174 of SEQ ID NO: 586451
gucauauuuauguggucau

SEQ ID NO: 718963 - RNA, 19 nt, Artificial Sequence
  Description of Artificial Sequence: Synthetic oligonucleotide
  Antisense strand to SEQ ID NO: 718962
augaccacauaaauaugac

SEQ ID NO: 718964 - RNA, 19 nt, Artificial Sequence
  Description of Artificial Sequence: Synthetic oligonucleotide
  Sense strand starting at position 1185 of SEQ ID NO: 586451
guggucauauuugagaaga

SEQ ID NO: 718965 - RNA, 19 nt, Artificial Sequence
  Description of Artificial Sequence: Synthetic oligonucleotide
  Antisense strand to SEQ ID NO: 718964
ucuucucaaauaugaccac

SEQ ID NO: 718966 - RNA, 19 nt, Artificial Sequence
  Description of Artificial Sequence: Synthetic oligonucleotide
  Sense strand starting at position 1271 of SEQ ID NO: 586451
ucagguuaauguuuauaga

SEQ ID NO: 718967 - RNA, 19 nt, Artificial Sequence
  Description of Artificial Sequence: Synthetic oligonucleotide
  Antisense strand to SEQ ID NO: 718966
ucuauaaacauuaaccuga

SEQ ID NO: 718968 - RNA, 19 nt, Artificial Sequence
  Description of Artificial Sequence: Synthetic oligonucleotide
  Sense strand starting at position 1272 of SEQ ID NO: 586451
cagguuaauguuuauagau

SEQ ID NO: 718969 - RNA, 19 nt, Artificial Sequence
  Description of Artificial Sequence: Synthetic oligonucleotide
  Antisense strand to SEQ ID NO: 718968
aucuauaaacauuaaccug

SEQ ID NO: 718970 - RNA, 19 nt, Artificial Sequence
  Description of Artificial Sequence: Synthetic oligonucleotide
  Sense strand starting at position 1417 of SEQ ID NO: 586451
auguuagauuugccacuuu

SEQ ID NO: 718971 - RNA, 19 nt, Artificial Sequence
  Description of Artificial Sequence: Synthetic oligonucleotide
  Antisense strand to SEQ ID NO: 718970
aaaguggcaaaucuaacau

SEQ ID NO: 718972 - RNA, 19 nt, Artificial Sequence
  Description of Artificial Sequence: Synthetic oligonucleotide
  Sense strand starting at position 1711 of SEQ ID NO: 586451
uuuggacuucuuugaacac

SEQ ID NO: 718973 - RNA, 19 nt, Artificial Sequence
  Description of Artificial Sequence: Synthetic oligonucleotide
  Antisense strand to SEQ ID NO: 718972
guguucaaagaaguccaaa

SEQ ID NO: 718974 - RNA, 19 nt, Artificial Sequence
  Description of Artificial Sequence: Synthetic oligonucleotide
  Sense strand starting at position 1753 of SEQ ID NO: 586451
ucgggagcugaauagucaa

SEQ ID NO: 718975 - RNA, 19 nt, Artificial Sequence
  Description of Artificial Sequence: Synthetic oligonucleotide
  Antisense strand to SEQ ID NO: 718974
uugacuauucagcucccga

SEQ ID NO: 718976 - RNA, 19 nt, Artificial Sequence
  Description of Artificial Sequence: Synthetic oligonucleotide
  Sense strand starting at position 1830 of SEQ ID NO: 586451
ucuagucucacugggcaga

SEQ ID NO: 718977 - RNA, 19 nt, Artificial Sequence
  Description of Artificial Sequence: Synthetic oligonucleotide
  Antisense strand to SEQ ID NO: 718976
ucugcccagugagacuaga

SEQ ID NO: 718978 - RNA, 19 nt, Artificial Sequence
  Description of Artificial Sequence: Synthetic oligonucleotide
  Sense strand starting at position 2191 of SEQ ID NO: 586451
guacacagccaacaagauu

SEQ ID NO: 718979 - RNA, 19 nt, Artificial Sequence
  Description of Artificial Sequence: Synthetic oligonucleotide
  Antisense strand to SEQ ID NO: 718978
aaucuuguuggcuguguac

SEQ ID NO: 718980 - RNA, 19 nt, Artificial Sequence
  Description of Artificial Sequence: Synthetic oligonucleotide
  Sense strand starting at position 2244 of SEQ ID NO: 586451
agucuugcauuucuaaagu

SEQ ID NO: 718981 - RNA, 19 nt, Artificial Sequence
  Description of Artificial Sequence: Synthetic oligonucleotide
  Antisense strand to SEQ ID NO: 718980
acuuuagaaaugcaagacu

SEQ ID NO: 718982 - RNA, 19 nt, Artificial Sequence
  Description of Artificial Sequence: Synthetic oligonucleotide
  Sense strand starting at position 2271 of SEQ ID NO: 586451
auacuuacgcuugaaguaa

SEQ ID NO: 718983 - RNA, 19 nt, Artificial Sequence
  Description of Artificial Sequence: Synthetic oligonucleotide
  Antisense strand to SEQ ID NO: 718982
uuacuucaagcguaaguau

SEQ ID NO: 718984 - RNA, 19 nt, Artificial Sequence
  Description of Artificial Sequence: Synthetic oligonucleotide
  Sense strand starting at position 2340 of SEQ ID NO: 586451
agagcuaguuauccaaacu

SEQ ID NO: 718985 - RNA, 19 nt, Artificial Sequence
  Description of Artificial Sequence: Synthetic oligonucleotide
  Antisense strand to SEQ ID NO: 718984
aguuuggauaacuagcucu

SEQ ID NO: 718986 - RNA, 19 nt, Artificial Sequence
  Description of Artificial Sequence: Synthetic oligonucleotide
  Sense strand starting at position 2458 of SEQ ID NO: 586451
gugaaaucuuaagcacuuu

SEQ ID NO: 718987 - RNA, 19 nt, Artificial Sequence
  Description of Artificial Sequence: Synthetic oligonucleotide
  Antisense strand to SEQ ID NO: 718986
aaagugcuuaagauuucac

SEQ ID NO: 718988 - RNA, 19 nt, Artificial Sequence
  Description of Artificial Sequence: Synthetic oligonucleotide
  Sense strand starting at position 2478 of SEQ ID NO: 586451
agaaguuucuaaguguaac

SEQ ID NO: 718989 - RNA, 19 nt, Artificial Sequence
  Description of Artificial Sequence: Synthetic oligonucleotide
  Antisense strand to SEQ ID NO: 718988
guuacacuuagaaacuucu

SEQ ID NO: 718990 - RNA, 19 nt, Artificial Sequence
  Description of Artificial Sequence: Synthetic oligonucleotide
  Sense strand starting at position 2481 of SEQ ID NO: 586451
aguuucuaaguguaacaaa

SEQ ID NO: 718991 - RNA, 19 nt, Artificial Sequence
  Description of Artificial Sequence: Synthetic oligonucleotide
  Antisense strand to SEQ ID NO: 718990
uuuguuacacuuagaaacu

SEQ ID NO: 718992 - RNA, 19 nt, Artificial Sequence
  Description of Artificial Sequence: Synthetic oligonucleotide
  Sense strand starting at position 2596 of SEQ ID NO: 586451
guccguagcauaguguaua

SEQ ID NO: 718993 - RNA, 19 nt, Artificial Sequence
  Description of Artificial Sequence: Synthetic oligonucleotide
  Antisense strand to SEQ ID NO: 718992
uauacacuaugcuacggac

SEQ ID NO: 718994 - RNA, 19 nt, Artificial Sequence
  Description of Artificial Sequence: Synthetic oligonucleotide
  Sense strand starting at position 2736 of SEQ ID NO: 586451
aaaugugaaucuuugagcu

SEQ ID NO: 718995 - RNA, 19 nt, Artificial Sequence
  Description of Artificial Sequence: Synthetic oligonucleotide
  Antisense strand to SEQ ID NO: 718994
agcucaaagauucacauuu

SEQ ID NO: 718996 - RNA, 19 nt, Artificial Sequence
  Description of Artificial Sequence: Synthetic oligonucleotide
  Sense strand starting at position 3241 of SEQ ID NO: 586451
uuacucuuccaugacugua

SEQ ID NO: 718997 - RNA, 19 nt, Artificial Sequence
  Description of Artificial Sequence: Synthetic oligonucleotide
  Antisense strand to SEQ ID NO: 718996
uacagucauggaagaguaa

SEQ ID NO: 718998 - RNA, 19 nt, Artificial Sequence
  Description of Artificial Sequence: Synthetic oligonucleotide
  Sense strand starting at position 3253 of SEQ ID NO: 586451
gacuguauuuauucucgca

SEQ ID NO: 718999 - RNA, 19 nt, Artificial Sequence
  Description of Artificial Sequence: Synthetic oligonucleotide
  Antisense strand to SEQ ID NO: 718998
ugcgagaauaaauacaguc

SEQ ID NO: 719000 - RNA, 19 nt, Artificial Sequence
  Description of Artificial Sequence: Synthetic oligonucleotide
  Sense strand starting at position 3255 of SEQ ID NO: 586451
cuguauuuauucucgcaua

SEQ ID NO: 719001 - RNA, 19 nt, Artificial Sequence
  Description of Artificial Sequence: Synthetic oligonucleotide
  Antisense strand to SEQ ID NO: 719000
uaugcgagaauaaauacag

SEQ ID NO: 719002 - RNA, 19 nt, Artificial Sequence
  Description of Artificial Sequence: Synthetic oligonucleotide
  Sense strand starting at position 3301 of SEQ ID NO: 586451
aucuaccucugaucaugua

SEQ ID NO: 719003 - RNA, 19 nt, Artificial Sequence
  Description of Artificial Sequence: Synthetic oligonucleotide
  Antisense strand to SEQ ID NO: 719002
uacaugaucagagguagau

SEQ ID NO: 719004 - RNA, 19 nt, Artificial Sequence
  Description of Artificial Sequence: Synthetic oligonucleotide
  Sense strand starting at position 3317 of SEQ ID NO: 586451
guaaacagaucaucagcuu

SEQ ID NO: 719005 - RNA, 19 nt, Artificial Sequence
  Description of Artificial Sequence: Synthetic oligonucleotide
  Antisense strand to SEQ ID NO: 719004
aagcugaugaucuguuuac

SEQ ID NO: 719006 - RNA, 19 nt, Artificial Sequence
  Description of Artificial Sequence: Synthetic oligonucleotide
  Sense strand starting at position 3356 of SEQ ID NO: 586451
agcuguagcggaggaauuu

SEQ ID NO: 719007 - RNA, 19 nt, Artificial Sequence
  Description of Artificial Sequence: Synthetic oligonucleotide
  Antisense strand to SEQ ID NO: 719006
aaauuccuccgcuacagcu

SEQ ID NO: 719008 - RNA, 19 nt, Artificial Sequence
  Description of Artificial Sequence: Synthetic oligonucleotide
  Sense strand starting at position 3388 of SEQ ID NO: 586451
cucauacaggaaugauagu

SEQ ID NO: 719009 - RNA, 19 nt, Artificial Sequence
  Description of Artificial Sequence: Synthetic oligonucleotide
  Antisense strand to SEQ ID NO: 719008
acuaucauuccuguaugag

SEQ ID NO: 719010 - RNA, 19 nt, Artificial Sequence
  Description of Artificial Sequence: Synthetic oligonucleotide
  Sense strand starting at position 3394 of SEQ ID NO: 586451
caggaaugauagucaugca

SEQ ID NO: 719011 - RNA, 19 nt, Artificial Sequence
  Description of Artificial Sequence: Synthetic oligonucleotide
  Antisense strand to SEQ ID NO: 719010
ugcaugacuaucauuccug

SEQ ID NO: 719012 - RNA, 19 nt, Artificial Sequence
  Description of Artificial Sequence: Synthetic oligonucleotide
  Sense strand starting at position 175 of SEQ ID NO: 586452
uguaucauauugcuagaua

SEQ ID NO: 719013 - RNA, 19 nt, Artificial Sequence
  Description of Artificial Sequence: Synthetic oligonucleotide
  Antisense strand to SEQ ID NO: 719012
uaucuagcaauaugauaca

SEQ ID NO: 719014 - RNA, 19 nt, Artificial Sequence
  Description of Artificial Sequence: Synthetic oligonucleotide
  Sense strand starting at position 332 of SEQ ID NO: 586452
guacaacagccagguuuaa

SEQ ID NO: 719015 - RNA, 19 nt, Artificial Sequence
  Description of Artificial Sequence: Synthetic oligonucleotide
  Antisense strand to SEQ ID NO: 719014
uuaaaccuggcuguuguac

SEQ ID NO: 719016 - RNA, 19 nt, Artificial Sequence
  Description of Artificial Sequence: Synthetic oligonucleotide
  Sense strand starting at position 382 of SEQ ID NO: 586452
agacauuugucacauugua

SEQ ID NO: 719017 - RNA, 19 nt, Artificial Sequence
  Description of Artificial Sequence: Synthetic oligonucleotide
  Antisense strand to SEQ ID NO: 719016
uacaaugugacaaaugucu

SEQ ID NO: 719018 - RNA, 19 nt, Artificial Sequence
  Description of Artificial Sequence: Synthetic oligonucleotide
  Sense strand starting at position 398 of SEQ ID NO: 586452
guaaguagguguucacaaa

SEQ ID NO: 719019 - RNA, 19 nt, Artificial Sequence
  Description of Artificial Sequence: Synthetic oligonucleotide
  Antisense strand to SEQ ID NO: 719018
uuugugaacaccuacuuac

SEQ ID NO: 719020 - RNA, 19 nt, Artificial Sequence
  Description of Artificial Sequence: Synthetic oligonucleotide
  Sense strand starting at position 442 of SEQ ID NO: 586452
acuuaagauccagagcuuu

SEQ ID NO: 719021 - RNA, 19 nt, Artificial Sequence
  Description of Artificial Sequence: Synthetic oligonucleotide
  Antisense strand to SEQ ID NO: 719020
aaagcucuggaucuuaagu

SEQ ID NO: 719022 - RNA, 19 nt, Artificial Sequence
  Description of Artificial Sequence: Synthetic oligonucleotide
  Sense strand starting at position 718 of SEQ ID NO: 586452
ucuaccauaccucagaguu

SEQ ID NO: 719023 - RNA, 19 nt, Artificial Sequence
  Description of Artificial Sequence: Synthetic oligonucleotide
  Antisense strand to SEQ ID NO: 719022
aacucugagguaugguaga

SEQ ID NO: 719024 - RNA, 19 nt, Artificial Sequence
  Description of Artificial Sequence: Synthetic oligonucleotide
  Sense strand starting at position 736 of SEQ ID NO: 586452
ucuagucacuguucucaga

SEQ ID NO: 719025 - RNA, 19 nt, Artificial Sequence
  Description of Artificial Sequence: Synthetic oligonucleotide
  Antisense strand to SEQ ID NO: 719024
ucugagaacagugacuaga

SEQ ID NO: 719026 - RNA, 19 nt, Artificial Sequence
  Description of Artificial Sequence: Synthetic oligonucleotide
  Sense strand starting at position 891 of SEQ ID NO: 586452
accauugucuuguuuacca

SEQ ID NO: 719027 - RNA, 19 nt, Artificial Sequence
  Description of Artificial Sequence: Synthetic oligonucleotide
  Antisense strand to SEQ ID NO: 719026
ugguaaacaagacaauggu

SEQ ID NO: 719028 - RNA, 19 nt, Artificial Sequence
  Description of Artificial Sequence: Synthetic oligonucleotide
  Sense strand starting at position 933 of SEQ ID NO: 586452
uggccuuuccuagaucuaa

SEQ ID NO: 719029 - RNA, 19 nt, Artificial Sequence
  Description of Artificial Sequence: Synthetic oligonucleotide
  Antisense strand to SEQ ID NO: 719028
uuagaucuaggaaaggcca

SEQ ID NO: 719030 - RNA, 19 nt, Artificial Sequence
  Description of Artificial Sequence: Synthetic oligonucleotide
  Sense strand starting at position 1037 of SEQ ID NO: 586452
uuaucugucuuccuagaca

SEQ ID NO: 719031 - RNA, 19 nt, Artificial Sequence
  Description of Artificial Sequence: Synthetic oligonucleotide
  Antisense strand to SEQ ID NO: 719030
ugucuaggaagacagauaa

SEQ ID NO: 719032 - RNA, 19 nt, Artificial Sequence
  Description of Artificial Sequence: Synthetic oligonucleotide
  Sense strand starting at position 1040 of SEQ ID NO: 586452
ucugucuuccuagacaguu

SEQ ID NO: 719033 - RNA, 19 nt, Artificial Sequence
  Description of Artificial Sequence: Synthetic oligonucleotide
  Antisense strand to SEQ ID NO: 719032
aacugucuaggaagacaga

SEQ ID NO: 719034 - RNA, 19 nt, Artificial Sequence
  Description of Artificial Sequence: Synthetic oligonucleotide
  Sense strand starting at position 1059 of SEQ ID NO: 586452
ggcuucugcagggaggaau

SEQ ID NO: 719035 - RNA, 19 nt, Artificial Sequence
  Description of Artificial Sequence: Synthetic oligonucleotide
  Antisense strand to SEQ ID NO: 719034
auuccucccugcagaagcc

SEQ ID NO: 719036 - RNA, 19 nt, Artificial Sequence
  Description of Artificial Sequence: Synthetic oligonucleotide
  Sense strand starting at position 1098 of SEQ ID NO: 586452
uugucuuaguaccuagaau

SEQ ID NO: 719037 - RNA, 19 nt, Artificial Sequence
  Description of Artificial Sequence: Synthetic oligonucleotide
  Antisense strand to SEQ ID NO: 719036
auucuagguacuaagacaa

SEQ ID NO: 719038 - RNA, 19 nt, Artificial Sequence
  Description of Artificial Sequence: Synthetic oligonucleotide
  Sense strand starting at position 1109 of SEQ ID NO: 586452
ccuagaauacaguguccuu

SEQ ID NO: 719039 - RNA, 19 nt, Artificial Sequence
  Description of Artificial Sequence: Synthetic oligonucleotide
  Antisense strand to SEQ ID NO: 719038
aaggacacuguauucuagg

SEQ ID NO: 719040 - RNA, 19 nt, Artificial Sequence
  Description of Artificial Sequence: Synthetic oligonucleotide
  Sense strand starting at position 1114 of SEQ ID NO: 586452
aauacaguguccuuuggaa

SEQ ID NO: 719041 - RNA, 19 nt, Artificial Sequence
  Description of Artificial Sequence: Synthetic oligonucleotide
  Antisense strand to SEQ ID NO: 719040
uuccaaaggacacuguauu

SEQ ID NO: 719042 - RNA, 19 nt, Artificial Sequence
  Description of Artificial Sequence: Synthetic oligonucleotide
  Sense strand starting at position 1116 of SEQ ID NO: 586452
uacaguguccuuuggaaua

SEQ ID NO: 719043 - RNA, 19 nt, Artificial Sequence
  Description of Artificial Sequence: Synthetic oligonucleotide
  Antisense strand to SEQ ID NO: 719042
uauuccaaaggacacugua

SEQ ID NO: 719044 - RNA, 19 nt, Artificial Sequence
  Description of Artificial Sequence: Synthetic oligonucleotide
  Sense strand starting at position 1127 of SEQ ID NO: 586452
uuggaauaauagcuacuaa

SEQ ID NO: 719045 - RNA, 19 nt, Artificial Sequence
  Description of Artificial Sequence: Synthetic oligonucleotide
  Antisense strand to SEQ ID NO: 719044
uuaguagcuauuauuccaa

SEQ ID NO: 719046 - RNA, 19 nt, Artificial Sequence
  Description of Artificial Sequence: Synthetic oligonucleotide
  Sense strand starting at position 1194 of SEQ ID NO: 586452
auaggauucuguucuugau

SEQ ID NO: 719047 - RNA, 19 nt, Artificial Sequence
  Description of Artificial Sequence: Synthetic oligonucleotide
  Antisense strand to SEQ ID NO: 719046
aucaagaacagaauccuau

SEQ ID NO: 719048 - RNA, 19 nt, Artificial Sequence
  Description of Artificial Sequence: Synthetic oligonucleotide
  Sense strand starting at position 1440 of SEQ ID NO: 586452
ucuucugauuccucacgau

SEQ ID NO: 719049 - RNA, 19 nt, Artificial Sequence
  Description of Artificial Sequence: Synthetic oligonucleotide
  Antisense strand to SEQ ID NO: 719048
aucgugaggaaucagaaga

SEQ ID NO: 719050 - RNA, 19 nt, Artificial Sequence
  Description of Artificial Sequence: Synthetic oligonucleotide
  Sense strand starting at position 1673 of SEQ ID NO: 586452
uuccuaauccuggaugagu

SEQ ID NO: 719051 - RNA, 19 nt, Artificial Sequence
  Description of Artificial Sequence: Synthetic oligonucleotide
  Antisense strand to SEQ ID NO: 719050
acucauccaggauuaggaa

SEQ ID NO: 719052 - RNA, 19 nt, Artificial Sequence
  Description of Artificial Sequence: Synthetic oligonucleotide
  Sense strand starting at position 2125 of SEQ ID NO: 586452
cuuauuacaucauugugca

SEQ ID NO: 719053 - RNA, 19 nt, Artificial Sequence
  Description of Artificial Sequence: Synthetic oligonucleotide
  Antisense strand to SEQ ID NO: 719052
ugcacaaugauguaauaag

SEQ ID NO: 719054 - RNA, 19 nt, Artificial Sequence
  Description of Artificial Sequence: Synthetic oligonucleotide
  Sense strand starting at position 2179 of SEQ ID NO: 586452
caaggaggcgauggaaauu

SEQ ID NO: 719055 - RNA, 19 nt, Artificial Sequence
  Description of Artificial Sequence: Synthetic oligonucleotide
  Antisense strand to SEQ ID NO: 719054
aauuuccaucgccuccuug

SEQ ID NO: 719056 - RNA, 19 nt, Artificial Sequence
  Description of Artificial Sequence: Synthetic oligonucleotide
  Sense strand starting at position 2185 of SEQ ID NO: 586452
ggcgauggaaauugaauga

SEQ ID NO: 719057 - RNA, 19 nt, Artificial Sequence
  Description of Artificial Sequence: Synthetic oligonucleotide
  Antisense strand to SEQ ID NO: 719056
ucauucaauuuccaucgcc

SEQ ID NO: 719058 - RNA, 19 nt, Artificial Sequence
  Description of Artificial Sequence: Synthetic oligonucleotide
  Sense strand starting at position 2207 of SEQ ID NO: 586452
uucgaaggauucccauaga

SEQ ID NO: 719059 - RNA, 19 nt, Artificial Sequence
  Description of Artificial Sequence: Synthetic oligonucleotide
  Antisense strand to SEQ ID NO: 719058
ucuaugggaauccuucgaa

SEQ ID NO: 719060 - RNA, 19 nt, Artificial Sequence
  Description of Artificial Sequence: Synthetic oligonucleotide
  Sense strand starting at position 2551 of SEQ ID NO: 586452
gcagucugcgcuccauaca

SEQ ID NO: 719061 - RNA, 19 nt, Artificial Sequence
  Description of Artificial Sequence: Synthetic oligonucleotide
  Antisense strand to SEQ ID NO: 719060
uguauggagcgcagacugc

SEQ ID NO: 719062 - RNA, 19 nt, Artificial Sequence
  Description of Artificial Sequence: Synthetic oligonucleotide
  Sense strand starting at position 2592 of SEQ ID NO: 586452
auguucccuggcugaaaga

SEQ ID NO: 719063 - RNA, 19 nt, Artificial Sequence
  Description of Artificial Sequence: Synthetic oligonucleotide
  Antisense strand to SEQ ID NO: 719062
ucuuucagccagggaacau

SEQ ID NO: 719064 - RNA, 19 nt, Artificial Sequence
  Description of Artificial Sequence: Synthetic oligonucleotide
  Sense strand starting at position 2635 of SEQ ID NO: 586452
ugacaugcauguuuaagau

SEQ ID NO: 719065 - RNA, 19 nt, Artificial Sequence
  Description of Artificial Sequence: Synthetic oligonucleotide
  Antisense strand to SEQ ID NO: 719064
aucuuaaacaugcauguca

SEQ ID NO: 719066 - RNA, 19 nt, Artificial Sequence
  Description of Artificial Sequence: Synthetic oligonucleotide
  Sense strand starting at position 2665 of SEQ ID NO: 586452
gaggacaccuguucugacu

SEQ ID NO: 719067 - RNA, 19 nt, Artificial Sequence
  Description of Artificial Sequence: Synthetic oligonucleotide
  Antisense strand to SEQ ID NO: 719066
agucagaacagguguccuc

SEQ ID NO: 719068 - RNA, 19 nt, Artificial Sequence
  Description of Artificial Sequence: Synthetic oligonucleotide
  Sense strand starting at position 2671 of SEQ ID NO: 586452
accuguucugacugagucu

SEQ ID NO: 719069 - RNA, 19 nt, Artificial Sequence
  Description of Artificial Sequence: Synthetic oligonucleotide
  Antisense strand to SEQ ID NO: 719068
agacucagucagaacaggu

SEQ ID NO: 719070 - RNA, 19 nt, Artificial Sequence
  Description of Artificial Sequence: Synthetic oligonucleotide
  Sense strand starting at position 2732 of SEQ ID NO: 586452
gacagcugucugcugugua

SEQ ID NO: 719071 - RNA, 19 nt, Artificial Sequence
  Description of Artificial Sequence: Synthetic oligonucleotide
  Antisense strand to SEQ ID NO: 719070
uacacagcagacagcuguc

SEQ ID NO: 719072 - RNA, 19 nt, Artificial Sequence
  Description of Artificial Sequence: Synthetic oligonucleotide
  Sense strand starting at position 2799 of SEQ ID NO: 586452
uuuguucuggagcaagguu

SEQ ID NO: 719073 - RNA, 19 nt, Artificial Sequence
  Description of Artificial Sequence: Synthetic oligonucleotide
  Antisense strand to SEQ ID NO: 719072
aaccuugcuccagaacaaa

SEQ ID NO: 719074 - RNA, 19 nt, Artificial Sequence
  Description of Artificial Sequence: Synthetic oligonucleotide
  Sense strand starting at position 2892 of SEQ ID NO: 586452
uggccucugcaguaaauaa

SEQ ID NO: 719075 - RNA, 19 nt, Artificial Sequence
  Description of Artificial Sequence: Synthetic oligonucleotide
  Antisense strand to SEQ ID NO: 719074
uuauuuacugcagaggcca

SEQ ID NO: 719076 - RNA, 19 nt, Artificial Sequence
  Description of Artificial Sequence: Synthetic oligonucleotide
  Sense strand starting at position 2939 of SEQ ID NO: 586452
ggagguuggcgggaaaucu

SEQ ID NO: 719077 - RNA, 19 nt, Artificial Sequence
  Description of Artificial Sequence: Synthetic oligonucleotide
  Antisense strand to SEQ ID NO: 719076
agauuucccgccaaccucc

SEQ ID NO: 719078 - RNA, 19 nt, Artificial Sequence
  Description of Artificial Sequence: Synthetic oligonucleotide
  Sense strand starting at position 3045 of SEQ ID NO: 586452
cuucauugucgagagaugc

SEQ ID NO: 719079 - RNA, 19 nt, Artificial Sequence
  Description of Artificial Sequence: Synthetic oligonucleotide
  Antisense strand to SEQ ID NO: 719078
gcaucucucgacaaugaag

SEQ ID NO: 719080 - RNA, 19 nt, Artificial Sequence
  Description of Artificial Sequence: Synthetic oligonucleotide
  Sense strand starting at position 3306 of SEQ ID NO: 586452
agcacaugauguuuaaaca

SEQ ID NO: 719081 - RNA, 19 nt, Artificial Sequence
  Description of Artificial Sequence: Synthetic oligonucleotide
  Antisense strand to SEQ ID NO: 719080
uguuuaaacaucaugugcu

SEQ ID NO: 719082 - RNA, 19 nt, Artificial Sequence
  Description of Artificial Sequence: Synthetic oligonucleotide
  Sense strand starting at position 3307 of SEQ ID NO: 586452
gcacaugauguuuaaacau

SEQ ID NO: 719083 - RNA, 19 nt, Artificial Sequence
  Description of Artificial Sequence: Synthetic oligonucleotide
  Antisense strand to SEQ ID NO: 719082
auguuuaaacaucaugugc

SEQ ID NO: 719084 - RNA, 19 nt, Artificial Sequence
  Description of Artificial Sequence: Synthetic oligonucleotide
  Sense strand starting at position 3648 of SEQ ID NO: 586452
cguguauauuuagaaauga

SEQ ID NO: 719085 - RNA, 19 nt, Artificial Sequence
  Description of Artificial Sequence: Synthetic oligonucleotide
  Antisense strand to SEQ ID NO: 719084
ucauuucuaaauauacacg

SEQ ID NO: 719086 - RNA, 19 nt, Artificial Sequence
  Description of Artificial Sequence: Synthetic oligonucleotide
  Sense strand starting at position 3672 of SEQ ID NO: 586452
uagauacuauuuggguaau

SEQ ID NO: 719087 - RNA, 19 nt, Artificial Sequence
  Description of Artificial Sequence: Synthetic oligonucleotide
  Antisense strand to SEQ ID NO: 719086
auuacccaaauaguaucua

SEQ ID NO: 719088 - RNA, 19 nt, Artificial Sequence
  Description of Artificial Sequence: Synthetic oligonucleotide
  Sense strand starting at position 3673 of SEQ ID NO: 586452
agauacuauuuggguaaug

SEQ ID NO: 719089 - RNA, 19 nt, Artificial Sequence
  Description of Artificial Sequence: Synthetic oligonucleotide
  Antisense strand to SEQ ID NO: 719088
cauuacccaaauaguaucu

SEQ ID NO: 719090 - RNA, 19 nt, Artificial Sequence
  Description of Artificial Sequence: Synthetic oligonucleotide
  Sense strand starting at position 3688 of SEQ ID NO: 586452
aauguuagggauggaaagu

SEQ ID NO: 719091 - RNA, 19 nt, Artificial Sequence
  Description of Artificial Sequence: Synthetic oligonucleotide
  Antisense strand to SEQ ID NO: 719090
acuuuccaucccuaacauu

SEQ ID NO: 719092 - RNA, 19 nt, Artificial Sequence
  Description of Artificial Sequence: Synthetic oligonucleotide
  Sense strand starting at position 65 of SEQ ID NO: 586453
cugacugugugcuuauaaa

SEQ ID NO: 719093 - RNA, 19 nt, Artificial Sequence
  Description of Artificial Sequence: Synthetic oligonucleotide
  Antisense strand to SEQ ID NO: 719092
uuuauaagcacacagucag

SEQ ID NO: 719094 - RNA, 19 nt, Artificial Sequence
  Description of Artificial Sequence: Synthetic oligonucleotide
  Sense strand starting at position 108 of SEQ ID NO: 586453
cagagaaacuaagugguua

SEQ ID NO: 719095 - RNA, 19 nt, Artificial Sequence
  Description of Artificial Sequence: Synthetic oligonucleotide
  Antisense strand to SEQ ID NO: 719094
uaaccacuuaguuucucug

SEQ ID NO: 719096 - RNA, 19 nt, Artificial Sequence
  Description of Artificial Sequence: Synthetic oligonucleotide
  Sense strand starting at position 112 of SEQ ID NO: 586453
gaaacuaagugguuaagua

SEQ ID NO: 719097 - RNA, 19 nt, Artificial Sequence
  Description of Artificial Sequence: Synthetic oligonucleotide
  Antisense strand to SEQ ID NO: 719096
uacuuaaccacuuaguuuc

SEQ ID NO: 719098 - RNA, 19 nt, Artificial Sequence
  Description of Artificial Sequence: Synthetic oligonucleotide
  Sense strand starting at position 113 of SEQ ID NO: 586453
aaacuaagugguuaaguau

SEQ ID NO: 719099 - RNA, 19 nt, Artificial Sequence
  Description of Artificial Sequence: Synthetic oligonucleotide
  Antisense strand to SEQ ID NO: 719098
auacuuaaccacuuaguuu

SEQ ID NO: 719100 - RNA, 19 nt, Artificial Sequence
  Description of Artificial Sequence: Synthetic oligonucleotide
  Sense strand starting at position 129 of SEQ ID NO: 586453
uauuguggccucugacaaa

SEQ ID NO: 719101 - RNA, 19 nt, Artificial Sequence
  Description of Artificial Sequence: Synthetic oligonucleotide
  Antisense strand to SEQ ID NO: 719100
uuugucagaggccacaaua

SEQ ID NO: 719102 - RNA, 19 nt, Artificial Sequence
  Description of Artificial Sequence: Synthetic oligonucleotide
  Sense strand starting at position 380 of SEQ ID NO: 586453
ggauguugaugcaggagaa

SEQ ID NO: 719103 - RNA, 19 nt, Artificial Sequence
  Description of Artificial Sequence: Synthetic oligonucleotide
  Antisense strand to SEQ ID NO: 719102
uucuccugcaucaacaucc

SEQ ID NO: 719104 - RNA, 19 nt, Artificial Sequence
  Description of Artificial Sequence: Synthetic oligonucleotide
  Sense strand starting at position 381 of SEQ ID NO: 586453
gauguugaugcaggagaau

SEQ ID NO: 719105 - RNA, 19 nt, Artificial Sequence
  Description of Artificial Sequence: Synthetic oligonucleotide
  Antisense strand to SEQ ID NO: 719104
auucuccugcaucaacauc

SEQ ID NO: 719106 - RNA, 19 nt, Artificial Sequence
  Description of Artificial Sequence: Synthetic oligonucleotide
  Sense strand starting at position 637 of SEQ ID NO: 586453
aggagcuucuagucccaau

SEQ ID NO: 719107 - RNA, 19 nt, Artificial Sequence
  Description of Artificial Sequence: Synthetic oligonucleotide
  Antisense strand to SEQ ID NO: 719106
auugggacuagaagcuccu

SEQ ID NO: 719108 - RNA, 19 nt, Artificial Sequence
  Description of Artificial Sequence: Synthetic oligonucleotide
  Sense strand starting at position 659 of SEQ ID NO: 586453
gccauuaacugauuaguug

SEQ ID NO: 719109 - RNA, 19 nt, Artificial Sequence
  Description of Artificial Sequence: Synthetic oligonucleotide
  Antisense strand to SEQ ID NO: 719108
caacuaaucaguuaauggc

SEQ ID NO: 719110 - RNA, 19 nt, Artificial Sequence
  Description of Artificial Sequence: Synthetic oligonucleotide
  Sense strand starting at position 689 of SEQ ID NO: 586453
gucacuuucccagaucaag

SEQ ID NO: 719111 - RNA, 19 nt, Artificial Sequence
  Description of Artificial Sequence: Synthetic oligonucleotide
  Antisense strand to SEQ ID NO: 719110
cuugaucugggaaagugac

SEQ ID NO: 719112 - RNA, 19 nt, Artificial Sequence
  Description of Artificial Sequence: Synthetic oligonucleotide
  Sense strand starting at position 731 of SEQ ID NO: 586453
cuacacucugucuggcaaa

SEQ ID NO: 719113 - RNA, 19 nt, Artificial Sequence
  Description of Artificial Sequence: Synthetic oligonucleotide
  Antisense strand to SEQ ID NO: 719112
uuugccagacagaguguag

SEQ ID NO: 719114 - RNA, 19 nt, Artificial Sequence
  Description of Artificial Sequence: Synthetic oligonucleotide
  Sense strand starting at position 817 of SEQ ID NO: 586453
aguaaaucuaccggagaca

SEQ ID NO: 719115 - RNA, 19 nt, Artificial Sequence
  Description of Artificial Sequence: Synthetic oligonucleotide
  Antisense strand to SEQ ID NO: 719114
ugucuccgguagauuuacu

SEQ ID NO: 719116 - RNA, 19 nt, Artificial Sequence
  Description of Artificial Sequence: Synthetic oligonucleotide
  Sense strand starting at position 837 of SEQ ID NO: 586453
cucagaggugccuggacua

SEQ ID NO: 719117 - RNA, 19 nt, Artificial Sequence
  Description of Artificial Sequence: Synthetic oligonucleotide
  Antisense strand to SEQ ID NO: 719116
uaguccaggcaccucugag

SEQ ID NO: 719118 - RNA, 19 nt, Artificial Sequence
  Description of Artificial Sequence: Synthetic oligonucleotide
  Sense strand starting at position 938 of SEQ ID NO: 586453
uacggaugucaucauugua

SEQ ID NO: 719119 - RNA, 19 nt, Artificial Sequence
  Description of Artificial Sequence: Synthetic oligonucleotide
  Antisense strand to SEQ ID NO: 719118
uacaaugaugacauccgua

SEQ ID NO: 719120 - RNA, 19 nt, Artificial Sequence
  Description of Artificial Sequence: Synthetic oligonucleotide
  Sense strand starting at position 941 of SEQ ID NO: 586453
ggaugucaucauuguacuu

SEQ ID NO: 719121 - RNA, 19 nt, Artificial Sequence
  Description of Artificial Sequence: Synthetic oligonucleotide
  Antisense strand to SEQ ID NO: 719120
aaguacaaugaugacaucc

SEQ ID NO: 719122 - RNA, 19 nt, Artificial Sequence
  Description of Artificial Sequence: Synthetic oligonucleotide
  Sense strand starting at position 1018 of SEQ ID NO: 586453
gccuucucagacugaaauu

SEQ ID NO: 719123 - RNA, 19 nt, Artificial Sequence
  Description of Artificial Sequence: Synthetic oligonucleotide
  Antisense strand to SEQ ID NO: 719122
aauuucagucugagaaggc

SEQ ID NO: 719124 - RNA, 19 nt, Artificial Sequence
  Description of Artificial Sequence: Synthetic oligonucleotide
  Sense strand starting at position 1342 of SEQ ID NO: 586453
caguaaacacgcugucaga

SEQ ID NO: 719125 - RNA, 19 nt, Artificial Sequence
  Description of Artificial Sequence: Synthetic oligonucleotide
  Antisense strand to SEQ ID NO: 719124
ucugacagcguguuuacug

SEQ ID NO: 719126 - RNA, 19 nt, Artificial Sequence
  Description of Artificial Sequence: Synthetic oligonucleotide
  Sense strand starting at position 1540 of SEQ ID NO: 586453
ccuuaugauggucacugua

SEQ ID NO: 719127 - RNA, 19 nt, Artificial Sequence
  Description of Artificial Sequence: Synthetic oligonucleotide
  Antisense strand to SEQ ID NO: 719126
uacagugaccaucauaagg

SEQ ID NO: 719128 - RNA, 19 nt, Artificial Sequence
  Description of Artificial Sequence: Synthetic oligonucleotide
  Sense strand starting at position 1542 of SEQ ID NO: 586453
uuaugauggucacuguauu

SEQ ID NO: 719129 - RNA, 19 nt, Artificial Sequence
  Description of Artificial Sequence: Synthetic oligonucleotide
  Antisense strand to SEQ ID NO: 719128
aauacagugaccaucauaa

SEQ ID NO: 719130 - RNA, 19 nt, Artificial Sequence
  Description of Artificial Sequence: Synthetic oligonucleotide
  Sense strand starting at position 1607 of SEQ ID NO: 586453
cccagaucccgucagucua

SEQ ID NO: 719131 - RNA, 19 nt, Artificial Sequence
  Description of Artificial Sequence: Synthetic oligonucleotide
  Antisense strand to SEQ ID NO: 719130
uagacugacgggaucuggg

SEQ ID NO: 719132 - RNA, 19 nt, Artificial Sequence
  Description of Artificial Sequence: Synthetic oligonucleotide
  Sense strand starting at position 2177 of SEQ ID NO: 586453
gaggcuucccuagggaaac

SEQ ID NO: 719133 - RNA, 19 nt, Artificial Sequence
  Description of Artificial Sequence: Synthetic oligonucleotide
  Antisense strand to SEQ ID NO: 719132
guuucccuagggaagccuc

SEQ ID NO: 719134 - RNA, 19 nt, Artificial Sequence
  Description of Artificial Sequence: Synthetic oligonucleotide
  Sense strand starting at position 2249 of SEQ ID NO: 586453
uggguagcugaccagagau

SEQ ID NO: 719135 - RNA, 19 nt, Artificial Sequence
  Description of Artificial Sequence: Synthetic oligonucleotide
  Antisense strand to SEQ ID NO: 719134
aucucuggucagcuaccca

SEQ ID NO: 719136 - RNA, 19 nt, Artificial Sequence
  Description of Artificial Sequence: Synthetic oligonucleotide
  Sense strand starting at position 2299 of SEQ ID NO: 586453
cucagaaaucuaggaccuu

SEQ ID NO: 719137 - RNA, 19 nt, Artificial Sequence
  Description of Artificial Sequence: Synthetic oligonucleotide
  Antisense strand to SEQ ID NO: 719136
aagguccuagauuucugag

SEQ ID NO: 719138 - RNA, 19 nt, Artificial Sequence
  Description of Artificial Sequence: Synthetic oligonucleotide
  Sense strand starting at position 2593 of SEQ ID NO: 586453
gugaguuaucgcgccacug

SEQ ID NO: 719139 - RNA, 19 nt, Artificial Sequence
  Description of Artificial Sequence: Synthetic oligonucleotide
  Antisense strand to SEQ ID NO: 719138
caguggcgcgauaacucac

SEQ ID NO: 719140 - RNA, 19 nt, Artificial Sequence
  Description of Artificial Sequence: Synthetic oligonucleotide
  Sense strand starting at position 2696 of SEQ ID NO: 586453
ugacucucacaaugcaaga

SEQ ID NO: 719141 - RNA, 19 nt, Artificial Sequence
  Description of Artificial Sequence: Synthetic oligonucleotide
  Antisense strand to SEQ ID NO: 719140
ucuugcauugugagaguca

SEQ ID NO: 719142 - RNA, 19 nt, Artificial Sequence
  Description of Artificial Sequence: Synthetic oligonucleotide
  Sense strand starting at position 2720 of SEQ ID NO: 586453
ggcaacuggaucuguaaac

SEQ ID NO: 719143 - RNA, 19 nt, Artificial Sequence
  Description of Artificial Sequence: Synthetic oligonucleotide
  Antisense strand to SEQ ID NO: 719142
guuuacagauccaguugcc

SEQ ID NO: 719144 - RNA, 19 nt, Artificial Sequence
  Description of Artificial Sequence: Synthetic oligonucleotide
  Sense strand starting at position 2769 of SEQ ID NO: 586453
acacuaucaacgggaaguu

SEQ ID NO: 719145 - RNA, 19 nt, Artificial Sequence
  Description of Artificial Sequence: Synthetic oligonucleotide
  Antisense strand to SEQ ID NO: 719144
aacuucccguugauagugu

SEQ ID NO: 719146 - RNA, 19 nt, Artificial Sequence
  Description of Artificial Sequence: Synthetic oligonucleotide
  Sense strand starting at position 2770 of SEQ ID NO: 586453
cacuaucaacgggaaguuu

SEQ ID NO: 719147 - RNA, 19 nt, Artificial Sequence
  Description of Artificial Sequence: Synthetic oligonucleotide
  Antisense strand to SEQ ID NO: 719146
aaacuucccguugauagug

SEQ ID NO: 719148 - RNA, 19 nt, Artificial Sequence
  Description of Artificial Sequence: Synthetic oligonucleotide
  Sense strand starting at position 2925 of SEQ ID NO: 586453
gagcuaucagagcauggga

SEQ ID NO: 719149 - RNA, 19 nt, Artificial Sequence
  Description of Artificial Sequence: Synthetic oligonucleotide
  Antisense strand to SEQ ID NO: 719148
ucccaugcucugauagcuc

SEQ ID NO: 719150 - RNA, 19 nt, Artificial Sequence
  Description of Artificial Sequence: Synthetic oligonucleotide
  Sense strand starting at position 3032 of SEQ ID NO: 586453
gucacauuggaguguaagu

SEQ ID NO: 719151 - RNA, 19 nt, Artificial Sequence
  Description of Artificial Sequence: Synthetic oligonucleotide
  Antisense strand to SEQ ID NO: 719150
acuuacacuccaaugugac

SEQ ID NO: 719152 - RNA, 19 nt, Artificial Sequence
  Description of Artificial Sequence: Synthetic oligonucleotide
  Sense strand starting at position 3062 of SEQ ID NO: 586453
agagacuuaccuugcuuau

SEQ ID NO: 719153 - RNA, 19 nt, Artificial Sequence
  Description of Artificial Sequence: Synthetic oligonucleotide
  Antisense strand to SEQ ID NO: 719152
auaagcaagguaagucucu

SEQ ID NO: 719154 - RNA, 19 nt, Artificial Sequence
  Description of Artificial Sequence: Synthetic oligonucleotide
  Sense strand starting at position 3201 of SEQ ID NO: 586453
acaccuuccgcguuugcaa

SEQ ID NO: 719155 - RNA, 19 nt, Artificial Sequence
  Description of Artificial Sequence: Synthetic oligonucleotide
  Antisense strand to SEQ ID NO: 719154
uugcaaacgcggaaggugu

SEQ ID NO: 719156 - RNA, 19 nt, Artificial Sequence
  Description of Artificial Sequence: Synthetic oligonucleotide
  Sense strand starting at position 3202 of SEQ ID NO: 586453
caccuuccgcguuugcaaa

SEQ ID NO: 719157 - RNA, 19 nt, Artificial Sequence
  Description of Artificial Sequence: Synthetic oligonucleotide
  Antisense strand to SEQ ID NO: 719156
uuugcaaacgcggaaggug

SEQ ID NO: 719158 - RNA, 19 nt, Artificial Sequence
  Description of Artificial Sequence: Synthetic oligonucleotide
  Sense strand starting at position 3612 of SEQ ID NO: 586453
cagcuaggcuggucugaaa

SEQ ID NO: 719159 - RNA, 19 nt, Artificial Sequence
  Description of Artificial Sequence: Synthetic oligonucleotide
  Antisense strand to SEQ ID NO: 719158
uuucagaccagccuagcug

SEQ ID NO: 719160 - RNA, 19 nt, Artificial Sequence
  Description of Artificial Sequence: Synthetic oligonucleotide
  Sense strand starting at position 3734 of SEQ ID NO: 586453
auagucucgugaguuagaa

SEQ ID NO: 719161 - RNA, 19 nt, Artificial Sequence
  Description of Artificial Sequence: Synthetic oligonucleotide
  Antisense strand to SEQ ID NO: 719160
uucuaacucacgagacuau

SEQ ID NO: 719162 - RNA, 19 nt, Artificial Sequence
  Description of Artificial Sequence: Synthetic oligonucleotide
  Sense strand starting at position 3736 of SEQ ID NO: 586453
agucucgugaguuagaaag

SEQ ID NO: 719163 - RNA, 19 nt, Artificial Sequence
  Description of Artificial Sequence: Synthetic oligonucleotide
  Antisense strand to SEQ ID NO: 719162
cuuucuaacucacgagacu

SEQ ID NO: 719164 - RNA, 19 nt, Artificial Sequence
  Description of Artificial Sequence: Synthetic oligonucleotide
  Sense strand starting at position 3777 of SEQ ID NO: 586453
uggcguggaugguugaaau

SEQ ID NO: 719165 - RNA, 19 nt, Artificial Sequence
  Description of Artificial Sequence: Synthetic oligonucleotide
  Antisense strand to SEQ ID NO: 719164
auuucaaccauccacgcca

SEQ ID NO: 719166 - RNA, 19 nt, Artificial Sequence
  Description of Artificial Sequence: Synthetic oligonucleotide
  Sense strand starting at position 3779 of SEQ ID NO: 586453
gcguggaugguugaaauga

SEQ ID NO: 719167 - RNA, 19 nt, Artificial Sequence
  Description of Artificial Sequence: Synthetic oligonucleotide
  Antisense strand to SEQ ID NO: 719166
ucauuucaaccauccacgc

SEQ ID NO: 719168 - RNA, 19 nt, Artificial Sequence
  Description of Artificial Sequence: Synthetic oligonucleotide
  Sense strand starting at position 3811 of SEQ ID NO: 586453
cucuguaagccuugagaga

SEQ ID NO: 719169 - RNA, 19 nt, Artificial Sequence
  Description of Artificial Sequence: Synthetic oligonucleotide
  Antisense strand to SEQ ID NO: 719168
ucucucaaggcuuacagag

SEQ ID NO: 719170 - RNA, 19 nt, Artificial Sequence
  Description of Artificial Sequence: Synthetic oligonucleotide
  Sense strand starting at position 3812 of SEQ ID NO: 586453
ucuguaagccuugagagaa

SEQ ID NO: 719171 - RNA, 19 nt, Artificial Sequence
  Description of Artificial Sequence: Synthetic oligonucleotide
  Antisense strand to SEQ ID NO: 719170
uucucucaaggcuuacaga

SEQ ID NO: 719172 - RNA, 19 nt, Artificial Sequence
  Description of Artificial Sequence: Synthetic oligonucleotide
  Sense strand starting at position 67 of SEQ ID NO: 586454
agaagucaggcugagucua

SEQ ID NO: 719173 - RNA, 19 nt, Artificial Sequence
  Description of Artificial Sequence: Synthetic oligonucleotide
  Antisense strand to SEQ ID NO: 719172
uagacucagccugacuucu

SEQ ID NO: 719174 - RNA, 19 nt, Artificial Sequence
  Description of Artificial Sequence: Synthetic oligonucleotide
  Sense strand starting at position 69 of SEQ ID NO: 586454
aagucaggcugagucuaaa

SEQ ID NO: 719175 - RNA, 19 nt, Artificial Sequence
  Description of Artificial Sequence: Synthetic oligonucleotide
  Antisense strand to SEQ ID NO: 719174
uuuagacucagccugacuu

SEQ ID NO: 719176 - RNA, 19 nt, Artificial Sequence
  Description of Artificial Sequence: Synthetic oligonucleotide
  Sense strand starting at position 307 of SEQ ID NO: 586454
aaaggcaguuuauuagaaa

SEQ ID NO: 719177 - RNA, 19 nt, Artificial Sequence
  Description of Artificial Sequence: Synthetic oligonucleotide
  Antisense strand to SEQ ID NO: 719176
uuucuaauaaacugccuuu

SEQ ID NO: 719178 - RNA, 19 nt, Artificial Sequence
  Description of Artificial Sequence: Synthetic oligonucleotide
  Sense strand starting at position 444 of SEQ ID NO: 586454
caauuauggucucugggaa

SEQ ID NO: 719179 - RNA, 19 nt, Artificial Sequence
  Description of Artificial Sequence: Synthetic oligonucleotide
  Antisense strand to SEQ ID NO: 719178
uucccagagaccauaauug

SEQ ID NO: 719180 - RNA, 19 nt, Artificial Sequence
  Description of Artificial Sequence: Synthetic oligonucleotide
  Sense strand starting at position 553 of SEQ ID NO: 586454
ugcauuauuuacuugucuu

SEQ ID NO: 719181 - RNA, 19 nt, Artificial Sequence
  Description of Artificial Sequence: Synthetic oligonucleotide
  Antisense strand to SEQ ID NO: 719180
aagacaaguaaauaaugca

SEQ ID NO: 719182 - RNA, 19 nt, Artificial Sequence
  Description of Artificial Sequence: Synthetic oligonucleotide
  Sense strand starting at position 740 of SEQ ID NO: 586454
cccagaacauggcuuaaca

SEQ ID NO: 719183 - RNA, 19 nt, Artificial Sequence
  Description of Artificial Sequence: Synthetic oligonucleotide
  Antisense strand to SEQ ID NO: 719182
uguuaagccauguucuggg

SEQ ID NO: 719184 - RNA, 19 nt, Artificial Sequence
  Description of Artificial Sequence: Synthetic oligonucleotide
  Sense strand starting at position 751 of SEQ ID NO: 586454
gcuuaacaucaaggaaaug

SEQ ID NO: 719185 - RNA, 19 nt, Artificial Sequence
  Description of Artificial Sequence: Synthetic oligonucleotide
  Antisense strand to SEQ ID NO: 719184
cauuuccuugauguuaagc

SEQ ID NO: 719186 - RNA, 19 nt, Artificial Sequence
  Description of Artificial Sequence: Synthetic oligonucleotide
  Sense strand starting at position 800 of SEQ ID NO: 586454
ggaaccgaugccuaauuga

SEQ ID NO: 719187 - RNA, 19 nt, Artificial Sequence
  Description of Artificial Sequence: Synthetic oligonucleotide
  Antisense strand to SEQ ID NO: 719186
ucaauuaggcaucgguucc

SEQ ID NO: 719188 - RNA, 19 nt, Artificial Sequence
  Description of Artificial Sequence: Synthetic oligonucleotide
  Sense strand starting at position 821 of SEQ ID NO: 586454
aucauuaggcuguaaacca

SEQ ID NO: 719189 - RNA, 19 nt, Artificial Sequence
  Description of Artificial Sequence: Synthetic oligonucleotide
  Antisense strand to SEQ ID NO: 719188
ugguuuacagccuaaugau

SEQ ID NO: 719190 - RNA, 19 nt, Artificial Sequence
  Description of Artificial Sequence: Synthetic oligonucleotide
  Sense strand starting at position 847 of SEQ ID NO: 586454
guuccaauuucuucguuua

SEQ ID NO: 719191 - RNA, 19 nt, Artificial Sequence
  Description of Artificial Sequence: Synthetic oligonucleotide
  Antisense strand to SEQ ID NO: 719190
uaaacgaagaaauuggaac

SEQ ID NO: 719192 - RNA, 19 nt, Artificial Sequence
  Description of Artificial Sequence: Synthetic oligonucleotide
  Sense strand starting at position 1021 of SEQ ID NO: 586454
agaaguaggucagugaaac

SEQ ID NO: 719193 - RNA, 19 nt, Artificial Sequence
  Description of Artificial Sequence: Synthetic oligonucleotide
  Antisense strand to SEQ ID NO: 719192
guuucacugaccuacuucu

SEQ ID NO: 719194 - RNA, 19 nt, Artificial Sequence
  Description of Artificial Sequence: Synthetic oligonucleotide
  Sense strand starting at position 1033 of SEQ ID NO: 586454
gugaaacggcauuaguaua

SEQ ID NO: 719195 - RNA, 19 nt, Artificial Sequence
  Description of Artificial Sequence: Synthetic oligonucleotide
  Antisense strand to SEQ ID NO: 719194
uauacuaaugccguuucac

SEQ ID NO: 719196 - RNA, 19 nt, Artificial Sequence
  Description of Artificial Sequence: Synthetic oligonucleotide
  Sense strand starting at position 1462 of SEQ ID NO: 586454
gugaguggauucuuaauua

SEQ ID NO: 719197 - RNA, 19 nt, Artificial Sequence
  Description of Artificial Sequence: Synthetic oligonucleotide
  Antisense strand to SEQ ID NO: 719196
uaauuaagaauccacucac

SEQ ID NO: 719198 - RNA, 19 nt, Artificial Sequence
  Description of Artificial Sequence: Synthetic oligonucleotide
  Sense strand starting at position 1466 of SEQ ID NO: 586454
guggauucuuaauuacuau

SEQ ID NO: 719199 - RNA, 19 nt, Artificial Sequence
  Description of Artificial Sequence: Synthetic oligonucleotide
  Antisense strand to SEQ ID NO: 719198
auaguaauuaagaauccac

SEQ ID NO: 719200 - RNA, 19 nt, Artificial Sequence
  Description of Artificial Sequence: Synthetic oligonucleotide
  Sense strand starting at position 1502 of SEQ ID NO: 586454
auuacuuacguggagugaa

SEQ ID NO: 719201 - RNA, 19 nt, Artificial Sequence
  Description of Artificial Sequence: Synthetic oligonucleotide
  Antisense strand to SEQ ID NO: 719200
uucacuccacguaaguaau

SEQ ID NO: 719202 - RNA, 19 nt, Artificial Sequence
  Description of Artificial Sequence: Synthetic oligonucleotide
  Sense strand starting at position 1505 of SEQ ID NO: 586454
acuuacguggagugaaaua

SEQ ID NO: 719203 - RNA, 19 nt, Artificial Sequence
  Description of Artificial Sequence: Synthetic oligonucleotide
  Antisense strand to SEQ ID NO: 719202
uauuucacuccacguaagu

SEQ ID NO: 719204 - RNA, 19 nt, Artificial Sequence
  Description of Artificial Sequence: Synthetic oligonucleotide
  Sense strand starting at position 1681 of SEQ ID NO: 586454
gaccgcguuccacaagaaa

SEQ ID NO: 719205 - RNA, 19 nt, Artificial Sequence
  Description of Artificial Sequence: Synthetic oligonucleotide
  Antisense strand to SEQ ID NO: 719204
uuucuuguggaacgcgguc

SEQ ID NO: 719206 - RNA, 19 nt, Artificial Sequence
  Description of Artificial Sequence: Synthetic oligonucleotide
  Sense strand starting at position 2073 of SEQ ID NO: 586454
ccuagagcccgguggauuu

SEQ ID NO: 719207 - RNA, 19 nt, Artificial Sequence
  Description of Artificial Sequence: Synthetic oligonucleotide
  Antisense strand to SEQ ID NO: 719206
aaauccaccgggcucuagg

SEQ ID NO: 719208 - RNA, 19 nt, Artificial Sequence
  Description of Artificial Sequence: Synthetic oligonucleotide
  Sense strand starting at position 2161 of SEQ ID NO: 586454
auuuaucucugugaagaac

SEQ ID NO: 719209 - RNA, 19 nt, Artificial Sequence
  Description of Artificial Sequence: Synthetic oligonucleotide
  Antisense strand to SEQ ID NO: 719208
guucuucacagagauaaau

SEQ ID NO: 719210 - RNA, 19 nt, Artificial Sequence
  Description of Artificial Sequence: Synthetic oligonucleotide
  Sense strand starting at position 2232 of SEQ ID NO: 586454
ccaggaaagacucguuuac

SEQ ID NO: 719211 - RNA, 19 nt, Artificial Sequence
  Description of Artificial Sequence: Synthetic oligonucleotide
  Antisense strand to SEQ ID NO: 719210
guaaacgagucuuuccugg

SEQ ID NO: 719212 - RNA, 19 nt, Artificial Sequence
  Description of Artificial Sequence: Synthetic oligonucleotide
  Sense strand starting at position 2234 of SEQ ID NO: 586454
aggaaagacucguuuacuc

SEQ ID NO: 719213 - RNA, 19 nt, Artificial Sequence
  Description of Artificial Sequence: Synthetic oligonucleotide
  Antisense strand to SEQ ID NO: 719212
gaguaaacgagucuuuccu

SEQ ID NO: 719214 - RNA, 19 nt, Artificial Sequence
  Description of Artificial Sequence: Synthetic oligonucleotide
  Sense strand starting at position 2236 of SEQ ID NO: 586454
gaaagacucguuuacucuc

SEQ ID NO: 719215 - RNA, 19 nt, Artificial Sequence
  Description of Artificial Sequence: Synthetic oligonucleotide
  Antisense strand to SEQ ID NO: 719214
gagaguaaacgagucuuuc

SEQ ID NO: 719216 - RNA, 19 nt, Artificial Sequence
  Description of Artificial Sequence: Synthetic oligonucleotide
  Sense strand starting at position 2306 of SEQ ID NO: 586454
gcuuauaaacuguaaagac

SEQ ID NO: 719217 - RNA, 19 nt, Artificial Sequence
  Description of Artificial Sequence: Synthetic oligonucleotide
  Antisense strand to SEQ ID NO: 719216
gucuuuacaguuuauaagc

SEQ ID NO: 719218 - RNA, 19 nt, Artificial Sequence
  Description of Artificial Sequence: Synthetic oligonucleotide
  Sense strand starting at position 2326 of SEQ ID NO: 586454
gacauacugcuugaggguu

SEQ ID NO: 719219 - RNA, 19 nt, Artificial Sequence
  Description of Artificial Sequence: Synthetic oligonucleotide
  Antisense strand to SEQ ID NO: 719218
aacccucaagcaguauguc

SEQ ID NO: 719220 - RNA, 19 nt, Artificial Sequence
  Description of Artificial Sequence: Synthetic oligonucleotide
  Sense strand starting at position 2434 of SEQ ID NO: 586454
ggagauauuaacuguccug

SEQ ID NO: 719221 - RNA, 19 nt, Artificial Sequence
  Description of Artificial Sequence: Synthetic oligonucleotide
  Antisense strand to SEQ ID NO: 719220
caggacaguuaauaucucc

SEQ ID NO: 719222 - RNA, 19 nt, Artificial Sequence
  Description of Artificial Sequence: Synthetic oligonucleotide
  Sense strand starting at position 2524 of SEQ ID NO: 586454
cgucauguuauggcugcua

SEQ ID NO: 719223 - RNA, 19 nt, Artificial Sequence
  Description of Artificial Sequence: Synthetic oligonucleotide
  Antisense strand to SEQ ID NO: 719222
uagcagccauaacaugacg

SEQ ID NO: 719224 - RNA, 19 nt, Artificial Sequence
  Description of Artificial Sequence: Synthetic oligonucleotide
  Sense strand starting at position 2559 of SEQ ID NO: 586454
guuaccuuacaggguaaau

SEQ ID NO: 719225 - RNA, 19 nt, Artificial Sequence
  Description of Artificial Sequence: Synthetic oligonucleotide
  Antisense strand to SEQ ID NO: 719224
auuuacccuguaagguaac

SEQ ID NO: 719226 - RNA, 19 nt, Artificial Sequence
  Description of Artificial Sequence: Synthetic oligonucleotide
  Sense strand starting at position 2571 of SEQ ID NO: 586454
gguaaauaaugaguuucga

SEQ ID NO: 719227 - RNA, 19 nt, Artificial Sequence
  Description of Artificial Sequence: Synthetic oligonucleotide
  Antisense strand to SEQ ID NO: 719226
ucgaaacucauuauuuacc

SEQ ID NO: 719228 - RNA, 19 nt, Artificial Sequence
  Description of Artificial Sequence: Synthetic oligonucleotide
  Sense strand starting at position 2595 of SEQ ID NO: 586454
agacuuccgcuuuaaagaa

SEQ ID NO: 719229 - RNA, 19 nt, Artificial Sequence
  Description of Artificial Sequence: Synthetic oligonucleotide
  Antisense strand to SEQ ID NO: 719228
uucuuuaaagcggaagucu

SEQ ID NO: 719230 - RNA, 19 nt, Artificial Sequence
  Description of Artificial Sequence: Synthetic oligonucleotide
  Sense strand starting at position 2612 of SEQ ID NO: 586454
aagaaaugguaaucauggu

SEQ ID NO: 719231 - RNA, 19 nt, Artificial Sequence
  Description of Artificial Sequence: Synthetic oligonucleotide
  Antisense strand to SEQ ID NO: 719230
accaugauuaccauuucuu

SEQ ID NO: 719232 - RNA, 19 nt, Artificial Sequence
  Description of Artificial Sequence: Synthetic oligonucleotide
  Sense strand starting at position 2618 of SEQ ID NO: 586454
ugguaaucaugguuacgaa

SEQ ID NO: 719233 - RNA, 19 nt, Artificial Sequence
  Description of Artificial Sequence: Synthetic oligonucleotide
  Antisense strand to SEQ ID NO: 719232
uucguaaccaugauuacca

SEQ ID NO: 719234 - RNA, 19 nt, Artificial Sequence
  Description of Artificial Sequence: Synthetic oligonucleotide
  Sense strand starting at position 2619 of SEQ ID NO: 586454
gguaaucaugguuacgaau

SEQ ID NO: 719235 - RNA, 19 nt, Artificial Sequence
  Description of Artificial Sequence: Synthetic oligonucleotide
  Antisense strand to SEQ ID NO: 719234
auucguaaccaugauuacc

SEQ ID NO: 719236 - RNA, 19 nt, Artificial Sequence
  Description of Artificial Sequence: Synthetic oligonucleotide
  Sense strand starting at position 2977 of SEQ ID NO: 586454
ccacuuaaucuguaguuaa

SEQ ID NO: 719237 - RNA, 19 nt, Artificial Sequence
  Description of Artificial Sequence: Synthetic oligonucleotide
  Antisense strand to SEQ ID NO: 719236
uuaacuacagauuaagugg

SEQ ID NO: 719238 - RNA, 19 nt, Artificial Sequence
  Description of Artificial Sequence: Synthetic oligonucleotide
  Sense strand starting at position 3038 of SEQ ID NO: 586454
acucuaugugcauaggaau

SEQ ID NO: 719239 - RNA, 19 nt, Artificial Sequence
  Description of Artificial Sequence: Synthetic oligonucleotide
  Antisense strand to SEQ ID NO: 719238
auuccuaugcacauagagu

SEQ ID NO: 719240 - RNA, 19 nt, Artificial Sequence
  Description of Artificial Sequence: Synthetic oligonucleotide
  Sense strand starting at position 3110 of SEQ ID NO: 586454
gugcaagauucugcauuuc

SEQ ID NO: 719241 - RNA, 19 nt, Artificial Sequence
  Description of Artificial Sequence: Synthetic oligonucleotide
  Antisense strand to SEQ ID NO: 719240
gaaaugcagaaucuugcac

SEQ ID NO: 719242 - RNA, 19 nt, Artificial Sequence
  Description of Artificial Sequence: Synthetic oligonucleotide
  Sense strand starting at position 3188 of SEQ ID NO: 586454
gaccuuagagucuggacaa

SEQ ID NO: 719243 - RNA, 19 nt, Artificial Sequence
  Description of Artificial Sequence: Synthetic oligonucleotide
  Antisense strand to SEQ ID NO: 719242
uuguccagacucuaagguc

SEQ ID NO: 719244 - RNA, 19 nt, Artificial Sequence
  Description of Artificial Sequence: Synthetic oligonucleotide
  Sense strand starting at position 3200 of SEQ ID NO: 586454
uggacaacaucuguuuaca

SEQ ID NO: 719245 - RNA, 19 nt, Artificial Sequence
  Description of Artificial Sequence: Synthetic oligonucleotide
  Antisense strand to SEQ ID NO: 719244
uguaaacagauguugucca

SEQ ID NO: 719246 - RNA, 19 nt, Artificial Sequence
  Description of Artificial Sequence: Synthetic oligonucleotide
  Sense strand starting at position 3214 of SEQ ID NO: 586454
uuacacuggccucauagua

SEQ ID NO: 719247 - RNA, 19 nt, Artificial Sequence
  Description of Artificial Sequence: Synthetic oligonucleotide
  Antisense strand to SEQ ID NO: 719246
uacuaugaggccaguguaa

SEQ ID NO: 719248 - RNA, 19 nt, Artificial Sequence
  Description of Artificial Sequence: Synthetic oligonucleotide
  Sense strand starting at position 3304 of SEQ ID NO: 586454
gcagcuuuggaacaagaau

SEQ ID NO: 719249 - RNA, 19 nt, Artificial Sequence
  Description of Artificial Sequence: Synthetic oligonucleotide
  Antisense strand to SEQ ID NO: 719248
auucuuguuccaaagcugc

SEQ ID NO: 719250 - RNA, 19 nt, Artificial Sequence
  Description of Artificial Sequence: Synthetic oligonucleotide
  Sense strand starting at position 3337 of SEQ ID NO: 586454
aggagguaucgugagaggu

SEQ ID NO: 719251 - RNA, 19 nt, Artificial Sequence
  Description of Artificial Sequence: Synthetic oligonucleotide
  Antisense strand to SEQ ID NO: 719250
accucucacgauaccuccu

SEQ ID NO: 719252 - RNA, 19 nt, Artificial Sequence
  Description of Artificial Sequence: Synthetic oligonucleotide
  Sense strand starting at position 43 of SEQ ID NO: 586455
guauccugcucagugcuau

SEQ ID NO: 719253 - RNA, 19 nt, Artificial Sequence
  Description of Artificial Sequence: Synthetic oligonucleotide
  Antisense strand to SEQ ID NO: 719252
auagcacugagcaggauac

SEQ ID NO: 719254 - RNA, 19 nt, Artificial Sequence
  Description of Artificial Sequence: Synthetic oligonucleotide
  Sense strand starting at position 47 of SEQ ID NO: 586455
ccugcucagugcuaucagu

SEQ ID NO: 719255 - RNA, 19 nt, Artificial Sequence
  Description of Artificial Sequence: Synthetic oligonucleotide
  Antisense strand to SEQ ID NO: 719254
acugauagcacugagcagg

SEQ ID NO: 719256 - RNA, 19 nt, Artificial Sequence
  Description of Artificial Sequence: Synthetic oligonucleotide
  Sense strand starting at position 49 of SEQ ID NO: 586455
ugcucagugcuaucaguuu

SEQ ID NO: 719257 - RNA, 19 nt, Artificial Sequence
  Description of Artificial Sequence: Synthetic oligonucleotide
  Antisense strand to SEQ ID NO: 719256
aaacugauagcacugagca

SEQ ID NO: 719258 - RNA, 19 nt, Artificial Sequence
  Description of Artificial Sequence: Synthetic oligonucleotide
  Sense strand starting at position 335 of SEQ ID NO: 586455
aggucagucuccuccacua

SEQ ID NO: 719259 - RNA, 19 nt, Artificial Sequence
  Description of Artificial Sequence: Synthetic oligonucleotide
  Antisense strand to SEQ ID NO: 719258
uaguggaggagacugaccu

SEQ ID NO: 719260 - RNA, 19 nt, Artificial Sequence
  Description of Artificial Sequence: Synthetic oligonucleotide
  Sense strand starting at position 337 of SEQ ID NO: 586455
gucagucuccuccacuaca

SEQ ID NO: 719261 - RNA, 19 nt, Artificial Sequence
  Description of Artificial Sequence: Synthetic oligonucleotide
  Antisense strand to SEQ ID NO: 719260
uguaguggaggagacugac

SEQ ID NO: 719262 - RNA, 19 nt, Artificial Sequence
  Description of Artificial Sequence: Synthetic oligonucleotide
  Sense strand starting at position 392 of SEQ ID NO: 586455
cugaguacauccucucuuu

SEQ ID NO: 719263 - RNA, 19 nt, Artificial Sequence
  Description of Artificial Sequence: Synthetic oligonucleotide
  Antisense strand to SEQ ID NO: 719262
aaagagaggauguacucag

SEQ ID NO: 719264 - RNA, 19 nt, Artificial Sequence
  Description of Artificial Sequence: Synthetic oligonucleotide
  Sense strand starting at position 419 of SEQ ID NO: 586455
uauugugggaaguaaguau

SEQ ID NO: 719265 - RNA, 19 nt, Artificial Sequence
  Description of Artificial Sequence: Synthetic oligonucleotide
  Antisense strand to SEQ ID NO: 719264
auacuuacuucccacaaua

SEQ ID NO: 719266 - RNA, 19 nt, Artificial Sequence
  Description of Artificial Sequence: Synthetic oligonucleotide
  Sense strand starting at position 423 of SEQ ID NO: 586455
gugggaaguaaguauucga

SEQ ID NO: 719267 - RNA, 19 nt, Artificial Sequence
  Description of Artificial Sequence: Synthetic oligonucleotide
  Antisense strand to SEQ ID NO: 719266
ucgaauacuuacuucccac

SEQ ID NO: 719268 - RNA, 19 nt, Artificial Sequence
  Description of Artificial Sequence: Synthetic oligonucleotide
  Sense strand starting at position 426 of SEQ ID NO: 586455
ggaaguaaguauucgauug

SEQ ID NO: 719269 - RNA, 19 nt, Artificial Sequence
  Description of Artificial Sequence: Synthetic oligonucleotide
  Antisense strand to SEQ ID NO: 719268
caaucgaauacuuacuucc

SEQ ID NO: 719270 - RNA, 19 nt, Artificial Sequence
  Description of Artificial Sequence: Synthetic oligonucleotide
  Sense strand starting at position 428 of SEQ ID NO: 586455
aaguaaguauucgauugag

SEQ ID NO: 719271 - RNA, 19 nt, Artificial Sequence
  Description of Artificial Sequence: Synthetic oligonucleotide
  Antisense strand to SEQ ID NO: 719270
cucaaucgaauacuuacuu

SEQ ID NO: 719272 - RNA, 19 nt, Artificial Sequence
  Description of Artificial Sequence: Synthetic oligonucleotide
  Sense strand starting at position 431 of SEQ ID NO: 586455
uaaguauucgauugaguuu

SEQ ID NO: 719273 - RNA, 19 nt, Artificial Sequence
  Description of Artificial Sequence: Synthetic oligonucleotide
  Antisense strand to SEQ ID NO: 719272
aaacucaaucgaauacuua

SEQ ID NO: 719274 - RNA, 19 nt, Artificial Sequence
  Description of Artificial Sequence: Synthetic oligonucleotide
  Sense strand starting at position 470 of SEQ ID NO: 586455
aaacauucccagugguuag

SEQ ID NO: 719275 - RNA, 19 nt, Artificial Sequence
  Description of Artificial Sequence: Synthetic oligonucleotide
  Antisense strand to SEQ ID NO: 719274
cuaaccacugggaauguuu

SEQ ID NO: 719276 - RNA, 19 nt, Artificial Sequence
  Description of Artificial Sequence: Synthetic oligonucleotide
  Sense strand starting at position 473 of SEQ ID NO: 586455
cauucccagugguuaguua

SEQ ID NO: 719277 - RNA, 19 nt, Artificial Sequence
  Description of Artificial Sequence: Synthetic oligonucleotide
  Antisense strand to SEQ ID NO: 719276
uaacuaaccacugggaaug

SEQ ID NO: 719278 - RNA, 19 nt, Artificial Sequence
  Description of Artificial Sequence: Synthetic oligonucleotide
  Sense strand starting at position 474 of SEQ ID NO: 586455
auucccagugguuaguuaa

SEQ ID NO: 719279 - RNA, 19 nt, Artificial Sequence
  Description of Artificial Sequence: Synthetic oligonucleotide
  Antisense strand to SEQ ID NO: 719278
uuaacuaaccacugggaau

SEQ ID NO: 719280 - RNA, 19 nt, Artificial Sequence
  Description of Artificial Sequence: Synthetic oligonucleotide
  Sense strand starting at position 485 of SEQ ID NO: 586455
uuaguuaagucagagugca

SEQ ID NO: 719281 - RNA, 19 nt, Artificial Sequence
  Description of Artificial Sequence: Synthetic oligonucleotide
  Antisense strand to SEQ ID NO: 719280
ugcacucugacuuaacuaa

SEQ ID NO: 719282 - RNA, 19 nt, Artificial Sequence
  Description of Artificial Sequence: Synthetic oligonucleotide
  Sense strand starting at position 506 of SEQ ID NO: 586455
gauuauaccuugcccguua

SEQ ID NO: 719283 - RNA, 19 nt, Artificial Sequence
  Description of Artificial Sequence: Synthetic oligonucleotide
  Antisense strand to SEQ ID NO: 719282
uaacgggcaagguauaauc

SEQ ID NO: 719284 - RNA, 19 nt, Artificial Sequence
  Description of Artificial Sequence: Synthetic oligonucleotide
  Sense strand starting at position 556 of SEQ ID NO: 586455
gagagaacauggcuguguu

SEQ ID NO: 719285 - RNA, 19 nt, Artificial Sequence
  Description of Artificial Sequence: Synthetic oligonucleotide
  Antisense strand to SEQ ID NO: 719284
aacacagccauguucucuc

SEQ ID NO: 719286 - RNA, 19 nt, Artificial Sequence
  Description of Artificial Sequence: Synthetic oligonucleotide
  Sense strand starting at position 557 of SEQ ID NO: 586455
agagaacauggcuguguua

SEQ ID NO: 719287 - RNA, 19 nt, Artificial Sequence
  Description of Artificial Sequence: Synthetic oligonucleotide
  Antisense strand to SEQ ID NO: 719286
uaacacagccauguucucu

SEQ ID NO: 719288 - RNA, 19 nt, Artificial Sequence
  Description of Artificial Sequence: Synthetic oligonucleotide
  Sense strand starting at position 973 of SEQ ID NO: 586455
guucaagagcuuugcggaa

SEQ ID NO: 719289 - RNA, 19 nt, Artificial Sequence
  Description of Artificial Sequence: Synthetic oligonucleotide
  Antisense strand to SEQ ID NO: 719288
uuccgcaaagcucuugaac

SEQ ID NO: 719290 - RNA, 19 nt, Artificial Sequence
  Description of Artificial Sequence: Synthetic oligonucleotide
  Sense strand starting at position 977 of SEQ ID NO: 586455
aagagcuuugcggaagcau

SEQ ID NO: 719291 - RNA, 19 nt, Artificial Sequence
  Description of Artificial Sequence: Synthetic oligonucleotide
  Antisense strand to SEQ ID NO: 719290
augcuuccgcaaagcucuu

SEQ ID NO: 719292 - RNA, 19 nt, Artificial Sequence
  Description of Artificial Sequence: Synthetic oligonucleotide
  Sense strand starting at position 1016 of SEQ ID NO: 586455
gucccuagcuuucgucuua

SEQ ID NO: 719293 - RNA, 19 nt, Artificial Sequence
  Description of Artificial Sequence: Synthetic oligonucleotide
  Antisense strand to SEQ ID NO: 719292
uaagacgaaagcuagggac

SEQ ID NO: 719294 - RNA, 19 nt, Artificial Sequence
  Description of Artificial Sequence: Synthetic oligonucleotide
  Sense strand starting at position 1017 of SEQ ID NO: 586455
ucccuagcuuucgucuuaa

SEQ ID NO: 719295 - RNA, 19 nt, Artificial Sequence
  Description of Artificial Sequence: Synthetic oligonucleotide
  Antisense strand to SEQ ID NO: 719294
uuaagacgaaagcuaggga

SEQ ID NO: 719296 - RNA, 19 nt, Artificial Sequence
  Description of Artificial Sequence: Synthetic oligonucleotide
  Sense strand starting at position 1193 of SEQ ID NO: 586455
gguggaucgcgccuguaaa

SEQ ID NO: 719297 - RNA, 19 nt, Artificial Sequence
  Description of Artificial Sequence: Synthetic oligonucleotide
  Antisense strand to SEQ ID NO: 719296
uuuacaggcgcgauccacc

SEQ ID NO: 719298 - RNA, 19 nt, Artificial Sequence
  Description of Artificial Sequence: Synthetic oligonucleotide
  Sense strand starting at position 1194 of SEQ ID NO: 586455
guggaucgcgccuguaaau

SEQ ID NO: 719299 - RNA, 19 nt, Artificial Sequence
  Description of Artificial Sequence: Synthetic oligonucleotide
  Antisense strand to SEQ ID NO: 719298
auuuacaggcgcgauccac

SEQ ID NO: 719300 - RNA, 19 nt, Artificial Sequence
  Description of Artificial Sequence: Synthetic oligonucleotide
  Sense strand starting at position 1426 of SEQ ID NO: 586455
cauggauccugaggacaaa

SEQ ID NO: 719301 - RNA, 19 nt, Artificial Sequence
  Description of Artificial Sequence: Synthetic oligonucleotide
  Antisense strand to SEQ ID NO: 719300
uuuguccucaggauccaug

SEQ ID NO: 719302 - RNA, 19 nt, Artificial Sequence
  Description of Artificial Sequence: Synthetic oligonucleotide
  Sense strand starting at position 2602 of SEQ ID NO: 586455
ucucuuccauuguguucua

SEQ ID NO: 719303 - RNA, 19 nt, Artificial Sequence
  Description of Artificial Sequence: Synthetic oligonucleotide
  Antisense strand to SEQ ID NO: 719302
uagaacacaauggaagaga

SEQ ID NO: 719304 - RNA, 19 nt, Artificial Sequence
  Description of Artificial Sequence: Synthetic oligonucleotide
  Sense strand starting at position 2605 of SEQ ID NO: 586455
cuuccauuguguucuagag

SEQ ID NO: 719305 - RNA, 19 nt, Artificial Sequence
  Description of Artificial Sequence: Synthetic oligonucleotide
  Antisense strand to SEQ ID NO: 719304
cucuagaacacaauggaag

SEQ ID NO: 719306 - RNA, 19 nt, Artificial Sequence
  Description of Artificial Sequence: Synthetic oligonucleotide
  Sense strand starting at position 2607 of SEQ ID NO: 586455
uccauuguguucuagagaa

SEQ ID NO: 719307 - RNA, 19 nt, Artificial Sequence
  Description of Artificial Sequence: Synthetic oligonucleotide
  Antisense strand to SEQ ID NO: 719306
uucucuagaacacaaugga

SEQ ID NO: 719308 - RNA, 19 nt, Artificial Sequence
  Description of Artificial Sequence: Synthetic oligonucleotide
  Sense strand starting at position 2609 of SEQ ID NO: 586455
cauuguguucuagagaauu

SEQ ID NO: 719309 - RNA, 19 nt, Artificial Sequence
  Description of Artificial Sequence: Synthetic oligonucleotide
  Antisense strand to SEQ ID NO: 719308
aauucucuagaacacaaug

SEQ ID NO: 719310 - RNA, 19 nt, Artificial Sequence
  Description of Artificial Sequence: Synthetic oligonucleotide
  Sense strand starting at position 2842 of SEQ ID NO: 586455
gaaagaugguuuguagcuu

SEQ ID NO: 719311 - RNA, 19 nt, Artificial Sequence
  Description of Artificial Sequence: Synthetic oligonucleotide
  Antisense strand to SEQ ID NO: 719310
aagcuacaaaccaucuuuc

SEQ ID NO: 719312 - RNA, 19 nt, Artificial Sequence
  Description of Artificial Sequence: Synthetic oligonucleotide
  Sense strand starting at position 2850 of SEQ ID NO: 586455
guuuguagcuuuguugcua

SEQ ID NO: 719313 - RNA, 19 nt, Artificial Sequence
  Description of Artificial Sequence: Synthetic oligonucleotide
  Antisense strand to SEQ ID NO: 719312
uagcaacaaagcuacaaac

SEQ ID NO: 719314 - RNA, 19 nt, Artificial Sequence
  Description of Artificial Sequence: Synthetic oligonucleotide
  Sense strand starting at position 3482 of SEQ ID NO: 586455
ugcuguuuaugugaaauuc

SEQ ID NO: 719315 - RNA, 19 nt, Artificial Sequence
  Description of Artificial Sequence: Synthetic oligonucleotide
  Antisense strand to SEQ ID NO: 719314
gaauuucacauaaacagca

SEQ ID NO: 719316 - RNA, 19 nt, Artificial Sequence
  Description of Artificial Sequence: Synthetic oligonucleotide
  Sense strand starting at position 3577 of SEQ ID NO: 586455
gagggagcuuucuggaauc

SEQ ID NO: 719317 - RNA, 19 nt, Artificial Sequence
  Description of Artificial Sequence: Synthetic oligonucleotide
  Antisense strand to SEQ ID NO: 719316
gauuccagaaagcucccuc

SEQ ID NO: 719318 - RNA, 19 nt, Artificial Sequence
  Description of Artificial Sequence: Synthetic oligonucleotide
  Sense strand starting at position 3579 of SEQ ID NO: 586455
gggagcuuucuggaaucac

SEQ ID NO: 719319 - RNA, 19 nt, Artificial Sequence
  Description of Artificial Sequence: Synthetic oligonucleotide
  Antisense strand to SEQ ID NO: 719318
gugauuccagaaagcuccc

SEQ ID NO: 719320 - RNA, 19 nt, Artificial Sequence
  Description of Artificial Sequence: Synthetic oligonucleotide
  Sense strand starting at position 3601 of SEQ ID NO: 586455
acaucuuguucuugagagu

SEQ ID NO: 719321 - RNA, 19 nt, Artificial Sequence
  Description of Artificial Sequence: Synthetic oligonucleotide
  Antisense strand to SEQ ID NO: 719320
acucucaagaacaagaugu

SEQ ID NO: 719322 - RNA, 19 nt, Artificial Sequence
  Description of Artificial Sequence: Synthetic oligonucleotide
  Sense strand starting at position 3608 of SEQ ID NO: 586455
guucuugagagugggugua

SEQ ID NO: 719323 - RNA, 19 nt, Artificial Sequence
  Description of Artificial Sequence: Synthetic oligonucleotide
  Antisense strand to SEQ ID NO: 719322
uacacccacucucaagaac

SEQ ID NO: 719324 - RNA, 19 nt, Artificial Sequence
  Description of Artificial Sequence: Synthetic oligonucleotide
  Sense strand starting at position 3610 of SEQ ID NO: 586455
ucuugagaguggguguaua

SEQ ID NO: 719325 - RNA, 19 nt, Artificial Sequence
  Description of Artificial Sequence: Synthetic oligonucleotide
  Antisense strand to SEQ ID NO: 719324
uauacacccacucucaaga

SEQ ID NO: 719326 - RNA, 19 nt, Artificial Sequence
  Description of Artificial Sequence: Synthetic oligonucleotide
  Sense strand starting at position 3622 of SEQ ID NO: 586455
guguauauacaucaagugu

SEQ ID NO: 719327 - RNA, 19 nt, Artificial Sequence
  Description of Artificial Sequence: Synthetic oligonucleotide
  Antisense strand to SEQ ID NO: 719326
acacuugauguauauacac

SEQ ID NO: 719328 - RNA, 19 nt, Artificial Sequence
  Description of Artificial Sequence: Synthetic oligonucleotide
  Sense strand starting at position 74 of SEQ ID NO: 586456
aguguaauaucuguaagaa

SEQ ID NO: 719329 - RNA, 19 nt, Artificial Sequence
  Description of Artificial Sequence: Synthetic oligonucleotide
  Antisense strand to SEQ ID NO: 719328
uucuuacagauauuacacu

SEQ ID NO: 719330 - RNA, 19 nt, Artificial Sequence
  Description of Artificial Sequence: Synthetic oligonucleotide
  Sense strand starting at position 75 of SEQ ID NO: 586456
guguaauaucuguaagaau

SEQ ID NO: 719331 - RNA, 19 nt, Artificial Sequence
  Description of Artificial Sequence: Synthetic oligonucleotide
  Antisense strand to SEQ ID NO: 719330
auucuuacagauauuacac

SEQ ID NO: 719332 - RNA, 19 nt, Artificial Sequence
  Description of Artificial Sequence: Synthetic oligonucleotide
  Sense strand starting at position 123 of SEQ ID NO: 586456
guauccugcucagugcuau

SEQ ID NO: 719333 - RNA, 19 nt, Artificial Sequence
  Description of Artificial Sequence: Synthetic oligonucleotide
  Antisense strand to SEQ ID NO: 719332
auagcacugagcaggauac

SEQ ID NO: 719334 - RNA, 19 nt, Artificial Sequence
  Description of Artificial Sequence: Synthetic oligonucleotide
  Sense strand starting at position 127 of SEQ ID NO: 586456
ccugcucagugcuaucagu

SEQ ID NO: 719335 - RNA, 19 nt, Artificial Sequence
  Description of Artificial Sequence: Synthetic oligonucleotide
  Antisense strand to SEQ ID NO: 719334
acugauagcacugagcagg

SEQ ID NO: 719336 - RNA, 19 nt, Artificial Sequence
  Description of Artificial Sequence: Synthetic oligonucleotide
  Sense strand starting at position 129 of SEQ ID NO: 586456
ugcucagugcuaucaguuu

SEQ ID NO: 719337 - RNA, 19 nt, Artificial Sequence
  Description of Artificial Sequence: Synthetic oligonucleotide
  Antisense strand to SEQ ID NO: 719336
aaacugauagcacugagca

SEQ ID NO: 719338 - RNA, 19 nt, Artificial Sequence
  Description of Artificial Sequence: Synthetic oligonucleotide
  Sense strand starting at position 415 of SEQ ID NO: 586456
aggucagucuccuccacua

SEQ ID NO: 719339 - RNA, 19 nt, Artificial Sequence
  Description of Artificial Sequence: Synthetic oligonucleotide
  Antisense strand to SEQ ID NO: 719338
uaguggaggagacugaccu

SEQ ID NO: 719340 - RNA, 19 nt, Artificial Sequence
  Description of Artificial Sequence: Synthetic oligonucleotide
  Sense strand starting at position 417 of SEQ ID NO: 586456
gucagucuccuccacuaca

SEQ ID NO: 719341 - RNA, 19 nt, Artificial Sequence
  Description of Artificial Sequence: Synthetic oligonucleotide
  Antisense strand to SEQ ID NO: 719340
uguaguggaggagacugac

SEQ ID NO: 719342 - RNA, 19 nt, Artificial Sequence
  Description of Artificial Sequence: Synthetic oligonucleotide
  Sense strand starting at position 472 of SEQ ID NO: 586456
cugaguacauccucucuuu

SEQ ID NO: 719343 - RNA, 19 nt, Artificial Sequence
  Description of Artificial Sequence: Synthetic oligonucleotide
  Antisense strand to SEQ ID NO: 719342
aaagagaggauguacucag

SEQ ID NO: 719344 - RNA, 19 nt, Artificial Sequence
  Description of Artificial Sequence: Synthetic oligonucleotide
  Sense strand starting at position 499 of SEQ ID NO: 586456
uauugugggaaguaaguau

SEQ ID NO: 719345 - RNA, 19 nt, Artificial Sequence
  Description of Artificial Sequence: Synthetic oligonucleotide
  Antisense strand to SEQ ID NO: 719344
auacuuacuucccacaaua

SEQ ID NO: 719346 - RNA, 19 nt, Artificial Sequence
  Description of Artificial Sequence: Synthetic oligonucleotide
  Sense strand starting at position 503 of SEQ ID NO: 586456
gugggaaguaaguauucga

SEQ ID NO: 719347 - RNA, 19 nt, Artificial Sequence
  Description of Artificial Sequence: Synthetic oligonucleotide
  Antisense strand to SEQ ID NO: 719346
ucgaauacuuacuucccac

SEQ ID NO: 719348 - RNA, 19 nt, Artificial Sequence
  Description of Artificial Sequence: Synthetic oligonucleotide
  Sense strand starting at position 506 of SEQ ID NO: 586456
ggaaguaaguauucgauug

SEQ ID NO: 719349 - RNA, 19 nt, Artificial Sequence
  Description of Artificial Sequence: Synthetic oligonucleotide
  Antisense strand to SEQ ID NO: 719348
caaucgaauacuuacuucc

SEQ ID NO: 719350 - RNA, 19 nt, Artificial Sequence
  Description of Artificial Sequence: Synthetic oligonucleotide
  Sense strand starting at position 508 of SEQ ID NO: 586456
aaguaaguauucgauugag

SEQ ID NO: 719351 - RNA, 19 nt, Artificial Sequence
  Description of Artificial Sequence: Synthetic oligonucleotide
  Antisense strand to SEQ ID NO: 719350
cucaaucgaauacuuacuu

SEQ ID NO: 719352 - RNA, 19 nt, Artificial Sequence
  Description of Artificial Sequence: Synthetic oligonucleotide
  Sense strand starting at position 511 of SEQ ID NO: 586456
uaaguauucgauugaguuu

SEQ ID NO: 719353 - RNA, 19 nt, Artificial Sequence
  Description of Artificial Sequence: Synthetic oligonucleotide
  Antisense strand to SEQ ID NO: 719352
aaacucaaucgaauacuua

SEQ ID NO: 719354 - RNA, 19 nt, Artificial Sequence
  Description of Artificial Sequence: Synthetic oligonucleotide
  Sense strand starting at position 550 of SEQ ID NO: 586456
aaacauucccagugguuag

SEQ ID NO: 719355 - RNA, 19 nt, Artificial Sequence
  Description of Artificial Sequence: Synthetic oligonucleotide
  Antisense strand to SEQ ID NO: 719354
cuaaccacugggaauguuu

SEQ ID NO: 719356 - RNA, 19 nt, Artificial Sequence
  Description of Artificial Sequence: Synthetic oligonucleotide
  Sense strand starting at position 553 of SEQ ID NO: 586456
cauucccagugguuaguua

SEQ ID NO: 719357 - RNA, 19 nt, Artificial Sequence
  Description of Artificial Sequence: Synthetic oligonucleotide
  Antisense strand to SEQ ID NO: 719356
uaacuaaccacugggaaug

SEQ ID NO: 719358 - RNA, 19 nt, Artificial Sequence
  Description of Artificial Sequence: Synthetic oligonucleotide
  Sense strand starting at position 554 of SEQ ID NO: 586456
auucccagugguuaguuaa

SEQ ID NO: 719359 - RNA, 19 nt, Artificial Sequence
  Description of Artificial Sequence: Synthetic oligonucleotide
  Antisense strand to SEQ ID NO: 719358
uuaacuaaccacugggaau

SEQ ID NO: 719360 - RNA, 19 nt, Artificial Sequence
  Description of Artificial Sequence: Synthetic oligonucleotide
  Sense strand starting at position 565 of SEQ ID NO: 586456
uuaguuaagucagagugca

SEQ ID NO: 719361 - RNA, 19 nt, Artificial Sequence
  Description of Artificial Sequence: Synthetic oligonucleotide
  Antisense strand to SEQ ID NO: 719360
ugcacucugacuuaacuaa

SEQ ID NO: 719362 - RNA, 19 nt, Artificial Sequence
  Description of Artificial Sequence: Synthetic oligonucleotide
  Sense strand starting at position 586 of SEQ ID NO: 586456
gauuauaccuugcccguua

SEQ ID NO: 719363 - RNA, 19 nt, Artificial Sequence
  Description of Artificial Sequence: Synthetic oligonucleotide
  Antisense strand to SEQ ID NO: 719362
uaacgggcaagguauaauc

SEQ ID NO: 719364 - RNA, 19 nt, Artificial Sequence
  Description of Artificial Sequence: Synthetic oligonucleotide
  Sense strand starting at position 636 of SEQ ID NO: 586456
gagagaacauggcuguguu

SEQ ID NO: 719365 - RNA, 19 nt, Artificial Sequence
  Description of Artificial Sequence: Synthetic oligonucleotide
  Antisense strand to SEQ ID NO: 719364
aacacagccauguucucuc

SEQ ID NO: 719366 - RNA, 19 nt, Artificial Sequence
  Description of Artificial Sequence: Synthetic oligonucleotide
  Sense strand starting at position 637 of SEQ ID NO: 586456
agagaacauggcuguguua

SEQ ID NO: 719367 - RNA, 19 nt, Artificial Sequence
  Description of Artificial Sequence: Synthetic oligonucleotide
  Antisense strand to SEQ ID NO: 719366
uaacacagccauguucucu

SEQ ID NO: 719368 - RNA, 19 nt, Artificial Sequence
  Description of Artificial Sequence: Synthetic oligonucleotide
  Sense strand starting at position 1053 of SEQ ID NO: 586456
guucaagagcuuugcggaa

SEQ ID NO: 719369 - RNA, 19 nt, Artificial Sequence
  Description of Artificial Sequence: Synthetic oligonucleotide
  Antisense strand to SEQ ID NO: 719368
uuccgcaaagcucuugaac

SEQ ID NO: 719370 - RNA, 19 nt, Artificial Sequence
  Description of Artificial Sequence: Synthetic oligonucleotide
  Sense strand starting at position 1057 of SEQ ID NO: 586456
aagagcuuugcggaagcau

SEQ ID NO: 719371 - RNA, 19 nt, Artificial Sequence
  Description of Artificial Sequence: Synthetic oligonucleotide
  Antisense strand to SEQ ID NO: 719370
augcuuccgcaaagcucuu

SEQ ID NO: 719372 - RNA, 19 nt, Artificial Sequence
  Description of Artificial Sequence: Synthetic oligonucleotide
  Sense strand starting at position 1096 of SEQ ID NO: 586456
gucccuagcuuucgucuua

SEQ ID NO: 719373 - RNA, 19 nt, Artificial Sequence
  Description of Artificial Sequence: Synthetic oligonucleotide
  Antisense strand to SEQ ID NO: 719372
uaagacgaaagcuagggac

SEQ ID NO: 719374 - RNA, 19 nt, Artificial Sequence
  Description of Artificial Sequence: Synthetic oligonucleotide
  Sense strand starting at position 1097 of SEQ ID NO: 586456
ucccuagcuuucgucuuaa

SEQ ID NO: 719375 - RNA, 19 nt, Artificial Sequence
  Description of Artificial Sequence: Synthetic oligonucleotide
  Antisense strand to SEQ ID NO: 719374
uuaagacgaaagcuaggga

SEQ ID NO: 719376 - RNA, 19 nt, Artificial Sequence
  Description of Artificial Sequence: Synthetic oligonucleotide
  Sense strand starting at position 1273 of SEQ ID NO: 586456
gguggaucgcgccuguaaa

SEQ ID NO: 719377 - RNA, 19 nt, Artificial Sequence
  Description of Artificial Sequence: Synthetic oligonucleotide
  Antisense strand to SEQ ID NO: 719376
uuuacaggcgcgauccacc

SEQ ID NO: 719378 - RNA, 19 nt, Artificial Sequence
  Description of Artificial Sequence: Synthetic oligonucleotide
  Sense strand starting at position 1274 of SEQ ID NO: 586456
guggaucgcgccuguaaau

SEQ ID NO: 719379 - RNA, 19 nt, Artificial Sequence
  Description of Artificial Sequence: Synthetic oligonucleotide
  Antisense strand to SEQ ID NO: 719378
auuuacaggcgcgauccac

SEQ ID NO: 719380 - RNA, 19 nt, Artificial Sequence
  Description of Artificial Sequence: Synthetic oligonucleotide
  Sense strand starting at position 1506 of SEQ ID NO: 586456
cauggauccugaggacaaa

SEQ ID NO: 719381 - RNA, 19 nt, Artificial Sequence
  Description of Artificial Sequence: Synthetic oligonucleotide
  Antisense strand to SEQ ID NO: 719380
uuuguccucaggauccaug

SEQ ID NO: 719382 - RNA, 19 nt, Artificial Sequence
  Description of Artificial Sequence: Synthetic oligonucleotide
  Sense strand starting at position 2682 of SEQ ID NO: 586456
ucucuuccauuguguucua

SEQ ID NO: 719383 - RNA, 19 nt, Artificial Sequence
  Description of Artificial Sequence: Synthetic oligonucleotide
  Antisense strand to SEQ ID NO: 719382
uagaacacaauggaagaga

SEQ ID NO: 719384 - RNA, 19 nt, Artificial Sequence
  Description of Artificial Sequence: Synthetic oligonucleotide
  Sense strand starting at position 2685 of SEQ ID NO: 586456
cuuccauuguguucuagag

SEQ ID NO: 719385 - RNA, 19 nt, Artificial Sequence
  Description of Artificial Sequence: Synthetic oligonucleotide
  Antisense strand to SEQ ID NO: 719384
cucuagaacacaauggaag

SEQ ID NO: 719386 - RNA, 19 nt, Artificial Sequence
  Description of Artificial Sequence: Synthetic oligonucleotide
  Sense strand starting at position 2687 of SEQ ID NO: 586456
uccauuguguucuagagaa

SEQ ID NO: 719387 - RNA, 19 nt, Artificial Sequence
  Description of Artificial Sequence: Synthetic oligonucleotide
  Antisense strand to SEQ ID NO: 719386
uucucuagaacacaaugga

SEQ ID NO: 719388 - RNA, 19 nt, Artificial Sequence
  Description of Artificial Sequence: Synthetic oligonucleotide
  Sense strand starting at position 2689 of SEQ ID NO: 586456
cauuguguucuagagaauu

SEQ ID NO: 719389 - RNA, 19 nt, Artificial Sequence
  Description of Artificial Sequence: Synthetic oligonucleotide
  Antisense strand to SEQ ID NO: 719388
aauucucuagaacacaaug

SEQ ID NO: 719390 - RNA, 19 nt, Artificial Sequence
  Description of Artificial Sequence: Synthetic oligonucleotide
  Sense strand starting at position 2922 of SEQ ID NO: 586456
gaaagaugguuuguagcuu

SEQ ID NO: 719391 - RNA, 19 nt, Artificial Sequence
  Description of Artificial Sequence: Synthetic oligonucleotide
  Antisense strand to SEQ ID NO: 719390
aagcuacaaaccaucuuuc

SEQ ID NO: 719392 - RNA, 19 nt, Artificial Sequence
  Description of Artificial Sequence: Synthetic oligonucleotide
  Sense strand starting at position 2930 of SEQ ID NO: 586456
guuuguagcuuuguugcua

SEQ ID NO: 719393 - RNA, 19 nt, Artificial Sequence
  Description of Artificial Sequence: Synthetic oligonucleotide
  Antisense strand to SEQ ID NO: 719392
uagcaacaaagcuacaaac

SEQ ID NO: 719394 - RNA, 19 nt, Artificial Sequence
  Description of Artificial Sequence: Synthetic oligonucleotide
  Sense strand starting at position 3562 of SEQ ID NO: 586456
ugcuguuuaugugaaauuc

SEQ ID NO: 719395 - RNA, 19 nt, Artificial Sequence
  Description of Artificial Sequence: Synthetic oligonucleotide
  Antisense strand to SEQ ID NO: 719394
gaauuucacauaaacagca

SEQ ID NO: 719396 - RNA, 19 nt, Artificial Sequence
  Description of Artificial Sequence: Synthetic oligonucleotide
  Sense strand starting at position 3657 of SEQ ID NO: 586456
gagggagcuuucuggaauc

SEQ ID NO: 719397 - RNA, 19 nt, Artificial Sequence
  Description of Artificial Sequence: Synthetic oligonucleotide
  Antisense strand to SEQ ID NO: 719396
gauuccagaaagcucccuc

SEQ ID NO: 719398 - RNA, 19 nt, Artificial Sequence
  Description of Artificial Sequence: Synthetic oligonucleotide
  Sense strand starting at position 3659 of SEQ ID NO: 586456
gggagcuuucuggaaucac

SEQ ID NO: 719399 - RNA, 19 nt, Artificial Sequence
  Description of Artificial Sequence: Synthetic oligonucleotide
  Antisense strand to SEQ ID NO: 719398
gugauuccagaaagcuccc

SEQ ID NO: 719400 - RNA, 19 nt, Artificial Sequence
  Description of Artificial Sequence: Synthetic oligonucleotide
  Sense strand starting at position 3681 of SEQ ID NO: 586456
acaucuuguucuugagagu

SEQ ID NO: 719401 - RNA, 19 nt, Artificial Sequence
  Description of Artificial Sequence: Synthetic oligonucleotide
  Antisense strand to SEQ ID NO: 719400
acucucaagaacaagaugu

SEQ ID NO: 719402 - RNA, 19 nt, Artificial Sequence
  Description of Artificial Sequence: Synthetic oligonucleotide
  Sense strand starting at position 3688 of SEQ ID NO: 586456
guucuugagagugggugua

SEQ ID NO: 719403 - RNA, 19 nt, Artificial Sequence
  Description of Artificial Sequence: Synthetic oligonucleotide
  Antisense strand to SEQ ID NO: 719402
uacacccacucucaagaac

SEQ ID NO: 719404 - RNA, 19 nt, Artificial Sequence
  Description of Artificial Sequence: Synthetic oligonucleotide
  Sense strand starting at position 3690 of SEQ ID NO: 586456
ucuugagaguggguguaua

SEQ ID NO: 719405 - RNA, 19 nt, Artificial Sequence
  Description of Artificial Sequence: Synthetic oligonucleotide
  Antisense strand to SEQ ID NO: 719404
uauacacccacucucaaga

SEQ ID NO: 719406 - RNA, 19 nt, Artificial Sequence
  Description of Artificial Sequence: Synthetic oligonucleotide
  Sense strand starting at position 3702 of SEQ ID NO: 586456
guguauauacaucaagugu

SEQ ID NO: 719407 - RNA, 19 nt, Artificial Sequence
  Description of Artificial Sequence: Synthetic oligonucleotide
  Antisense strand to SEQ ID NO: 719406
acacuugauguauauacac

SEQ ID NO: 719408 - RNA, 19 nt, Artificial Sequence
  Description of Artificial Sequence: Synthetic oligonucleotide
  Sense strand starting at position 341 of SEQ ID NO: 586457
uugcuagugccacauacua

SEQ ID NO: 719409 - RNA, 19 nt, Artificial Sequence
  Description of Artificial Sequence: Synthetic oligonucleotide
  Antisense strand to SEQ ID NO: 719408
uaguauguggcacuagcaa

SEQ ID NO: 719410 - RNA, 19 nt, Artificial Sequence
  Description of Artificial Sequence: Synthetic oligonucleotide
  Sense strand starting at position 483 of SEQ ID NO: 586457
cugaucuaguguucgcgaa

SEQ ID NO: 719411 - RNA, 19 nt, Artificial Sequence
  Description of Artificial Sequence: Synthetic oligonucleotide
  Antisense strand to SEQ ID NO: 719410
uucgcgaacacuagaucag

SEQ ID NO: 719412 - RNA, 19 nt, Artificial Sequence
  Description of Artificial Sequence: Synthetic oligonucleotide
  Sense strand starting at position 484 of SEQ ID NO: 586457
ugaucuaguguucgcgaag

SEQ ID NO: 719413 - RNA, 19 nt, Artificial Sequence
  Description of Artificial Sequence: Synthetic oligonucleotide
  Antisense strand to SEQ ID NO: 719412
cuucgcgaacacuagauca

SEQ ID NO: 719414 - RNA, 19 nt, Artificial Sequence
  Description of Artificial Sequence: Synthetic oligonucleotide
  Sense strand starting at position 487 of SEQ ID NO: 586457
ucuaguguucgcgaaggga

SEQ ID NO: 719415 - RNA, 19 nt, Artificial Sequence
  Description of Artificial Sequence: Synthetic oligonucleotide
  Antisense strand to SEQ ID NO: 719414
ucccuucgcgaacacuaga

SEQ ID NO: 719416 - RNA, 19 nt, Artificial Sequence
  Description of Artificial Sequence: Synthetic oligonucleotide
  Sense strand starting at position 489 of SEQ ID NO: 586457
uaguguucgcgaagggaag

SEQ ID NO: 719417 - RNA, 19 nt, Artificial Sequence
  Description of Artificial Sequence: Synthetic oligonucleotide
  Antisense strand to SEQ ID NO: 719416
cuucccuucgcgaacacua

SEQ ID NO: 719418 - RNA, 19 nt, Artificial Sequence
  Description of Artificial Sequence: Synthetic oligonucleotide
  Sense strand starting at position 517 of SEQ ID NO: 586457
agaccaggguuuguaacaa

SEQ ID NO: 719419 - RNA, 19 nt, Artificial Sequence
  Description of Artificial Sequence: Synthetic oligonucleotide
  Antisense strand to SEQ ID NO: 719418
uuguuacaaacccuggucu

SEQ ID NO: 719420 - RNA, 19 nt, Artificial Sequence
  Description of Artificial Sequence: Synthetic oligonucleotide
  Sense strand starting at position 567 of SEQ ID NO: 586457
cgaagagaggccuguuaac

SEQ ID NO: 719421 - RNA, 19 nt, Artificial Sequence
  Description of Artificial Sequence: Synthetic oligonucleotide
  Antisense strand to SEQ ID NO: 719420
guuaacaggccucucuucg

SEQ ID NO: 719422 - RNA, 19 nt, Artificial Sequence
  Description of Artificial Sequence: Synthetic oligonucleotide
  Sense strand starting at position 647 of SEQ ID NO: 586457
gaaggaguucugggcuuga

SEQ ID NO: 719423 - RNA, 19 nt, Artificial Sequence
  Description of Artificial Sequence: Synthetic oligonucleotide
  Antisense strand to SEQ ID NO: 719422
ucaagcccagaacuccuuc

SEQ ID NO: 719424 - RNA, 19 nt, Artificial Sequence
  Description of Artificial Sequence: Synthetic oligonucleotide
  Sense strand starting at position 651 of SEQ ID NO: 586457
gaguucugggcuugauaua

SEQ ID NO: 719425 - RNA, 19 nt, Artificial Sequence
  Description of Artificial Sequence: Synthetic oligonucleotide
  Antisense strand to SEQ ID NO: 719424
uauaucaagcccagaacuc

SEQ ID NO: 719426 - RNA, 19 nt, Artificial Sequence
  Description of Artificial Sequence: Synthetic oligonucleotide
  Sense strand starting at position 652 of SEQ ID NO: 586457
aguucugggcuugauauag

SEQ ID NO: 719427 - RNA, 19 nt, Artificial Sequence
  Description of Artificial Sequence: Synthetic oligonucleotide
  Antisense strand to SEQ ID NO: 719426
cuauaucaagcccagaacu

SEQ ID NO: 719428 - RNA, 19 nt, Artificial Sequence
  Description of Artificial Sequence: Synthetic oligonucleotide
  Sense strand starting at position 663 of SEQ ID NO: 586457
ugauauagggccugguaua

SEQ ID NO: 719429 - RNA, 19 nt, Artificial Sequence
  Description of Artificial Sequence: Synthetic oligonucleotide
  Antisense strand to SEQ ID NO: 719428
uauaccaggcccuauauca

SEQ ID NO: 719430 - RNA, 19 nt, Artificial Sequence
  Description of Artificial Sequence: Synthetic oligonucleotide
  Sense strand starting at position 664 of SEQ ID NO: 586457
gauauagggccugguauaa

SEQ ID NO: 719431 - RNA, 19 nt, Artificial Sequence
  Description of Artificial Sequence: Synthetic oligonucleotide
  Antisense strand to SEQ ID NO: 719430
uuauaccaggcccuauauc

SEQ ID NO: 719432 - RNA, 19 nt, Artificial Sequence
  Description of Artificial Sequence: Synthetic oligonucleotide
  Sense strand starting at position 714 of SEQ ID NO: 586457
ccacgagaggugucguguu

SEQ ID NO: 719433 - RNA, 19 nt, Artificial Sequence
  Description of Artificial Sequence: Synthetic oligonucleotide
  Antisense strand to SEQ ID NO: 719432
aacacgacaccucucgugg

SEQ ID NO: 719434 - RNA, 19 nt, Artificial Sequence
  Description of Artificial Sequence: Synthetic oligonucleotide
  Sense strand starting at position 718 of SEQ ID NO: 586457
gagaggugucguguugugu

SEQ ID NO: 719435 - RNA, 19 nt, Artificial Sequence
  Description of Artificial Sequence: Synthetic oligonucleotide
  Antisense strand to SEQ ID NO: 719434
acacaacacgacaccucuc

SEQ ID NO: 719436 - RNA, 19 nt, Artificial Sequence
  Description of Artificial Sequence: Synthetic oligonucleotide
  Sense strand starting at position 719 of SEQ ID NO: 586457
agaggugucguguuguguu

SEQ ID NO: 719437 - RNA, 19 nt, Artificial Sequence
  Description of Artificial Sequence: Synthetic oligonucleotide
  Antisense strand to SEQ ID NO: 719436
aacacaacacgacaccucu

SEQ ID NO: 719438 - RNA, 19 nt, Artificial Sequence
  Description of Artificial Sequence: Synthetic oligonucleotide
  Sense strand starting at position 946 of SEQ ID NO: 586457
agacucuggaguuggauua

SEQ ID NO: 719439 - RNA, 19 nt, Artificial Sequence
  Description of Artificial Sequence: Synthetic oligonucleotide
  Antisense strand to SEQ ID NO: 719438
uaauccaacuccagagucu

SEQ ID NO: 719440 - RNA, 19 nt, Artificial Sequence
  Description of Artificial Sequence: Synthetic oligonucleotide
  Sense strand starting at position 947 of SEQ ID NO: 586457
gacucuggaguuggauuaa

SEQ ID NO: 719441 - RNA, 19 nt, Artificial Sequence
  Description of Artificial Sequence: Synthetic oligonucleotide
  Antisense strand to SEQ ID NO: 719440
uuaauccaacuccagaguc

SEQ ID NO: 719442 - RNA, 19 nt, Artificial Sequence
  Description of Artificial Sequence: Synthetic oligonucleotide
  Sense strand starting at position 1056 of SEQ ID NO: 586457
acaagacugcuguacaauu

SEQ ID NO: 719443 - RNA, 19 nt, Artificial Sequence
  Description of Artificial Sequence: Synthetic oligonucleotide
  Antisense strand to SEQ ID NO: 719442
aauuguacagcagucuugu

SEQ ID NO: 719444 - RNA, 19 nt, Artificial Sequence
  Description of Artificial Sequence: Synthetic oligonucleotide
  Sense strand starting at position 1123 of SEQ ID NO: 586457
uuguuaacagcucauugua

SEQ ID NO: 719445 - RNA, 19 nt, Artificial Sequence
  Description of Artificial Sequence: Synthetic oligonucleotide
  Antisense strand to SEQ ID NO: 719444
uacaaugagcuguuaacaa

SEQ ID NO: 719446 - RNA, 19 nt, Artificial Sequence
  Description of Artificial Sequence: Synthetic oligonucleotide
  Sense strand starting at position 1165 of SEQ ID NO: 586457
aucauuguucugugugaga

SEQ ID NO: 719447 - RNA, 19 nt, Artificial Sequence
  Description of Artificial Sequence: Synthetic oligonucleotide
  Antisense strand to SEQ ID NO: 719446
ucucacacagaacaaugau

SEQ ID NO: 719448 - RNA, 19 nt, Artificial Sequence
  Description of Artificial Sequence: Synthetic oligonucleotide
  Sense strand starting at position 1167 of SEQ ID NO: 586457
cauuguucugugugagaag

SEQ ID NO: 719449 - RNA, 19 nt, Artificial Sequence
  Description of Artificial Sequence: Synthetic oligonucleotide
  Antisense strand to SEQ ID NO: 719448
cuucucacacagaacaaug

SEQ ID NO: 719450 - RNA, 19 nt, Artificial Sequence
  Description of Artificial Sequence: Synthetic oligonucleotide
  Sense strand starting at position 1184 of SEQ ID NO: 586457
agcaccaucugacuagauu

SEQ ID NO: 719451 - RNA, 19 nt, Artificial Sequence
  Description of Artificial Sequence: Synthetic oligonucleotide
  Antisense strand to SEQ ID NO: 719450
aaucuagucagauggugcu

SEQ ID NO: 719452 - RNA, 19 nt, Artificial Sequence
  Description of Artificial Sequence: Synthetic oligonucleotide
  Sense strand starting at position 1185 of SEQ ID NO: 586457
gcaccaucugacuagauuc

SEQ ID NO: 719453 - RNA, 19 nt, Artificial Sequence
  Description of Artificial Sequence: Synthetic oligonucleotide
  Antisense strand to SEQ ID NO: 719452
gaaucuagucagauggugc

SEQ ID NO: 719454 - RNA, 19 nt, Artificial Sequence
  Description of Artificial Sequence: Synthetic oligonucleotide
  Sense strand starting at position 1193 of SEQ ID NO: 586457
ugacuagauucccaaggga

SEQ ID NO: 719455 - RNA, 19 nt, Artificial Sequence
  Description of Artificial Sequence: Synthetic oligonucleotide
  Antisense strand to SEQ ID NO: 719454
ucccuugggaaucuaguca

SEQ ID NO: 719456 - RNA, 19 nt, Artificial Sequence
  Description of Artificial Sequence: Synthetic oligonucleotide
  Sense strand starting at position 2154 of SEQ ID NO: 586457
cugugaucuccggacaagg

SEQ ID NO: 719457 - RNA, 19 nt, Artificial Sequence
  Description of Artificial Sequence: Synthetic oligonucleotide
  Antisense strand to SEQ ID NO: 719456
ccuuguccggagaucacag

SEQ ID NO: 719458 - RNA, 19 nt, Artificial Sequence
  Description of Artificial Sequence: Synthetic oligonucleotide
  Sense strand starting at position 2361 of SEQ ID NO: 586457
uauggucuaccuugaaaga

SEQ ID NO: 719459 - RNA, 19 nt, Artificial Sequence
  Description of Artificial Sequence: Synthetic oligonucleotide
  Antisense strand to SEQ ID NO: 719458
ucuuucaagguagaccaua

SEQ ID NO: 719460 - RNA, 19 nt, Artificial Sequence
  Description of Artificial Sequence: Synthetic oligonucleotide
  Sense strand starting at position 2742 of SEQ ID NO: 586457
gcauguauugcgagaggcu

SEQ ID NO: 719461 - RNA, 19 nt, Artificial Sequence
  Description of Artificial Sequence: Synthetic oligonucleotide
  Antisense strand to SEQ ID NO: 719460
agccucucgcaauacaugc

SEQ ID NO: 719462 - RNA, 19 nt, Artificial Sequence
  Description of Artificial Sequence: Synthetic oligonucleotide
  Sense strand starting at position 2764 of SEQ ID NO: 586457
gugacacuugucuaggcaa

SEQ ID NO: 719463 - RNA, 19 nt, Artificial Sequence
  Description of Artificial Sequence: Synthetic oligonucleotide
  Antisense strand to SEQ ID NO: 719462
uugccuagacaagugucac

SEQ ID NO: 719464 - RNA, 19 nt, Artificial Sequence
  Description of Artificial Sequence: Synthetic oligonucleotide
  Sense strand starting at position 2831 of SEQ ID NO: 586457
gugagcugauacuugcaga

SEQ ID NO: 719465 - RNA, 19 nt, Artificial Sequence
  Description of Artificial Sequence: Synthetic oligonucleotide
  Antisense strand to SEQ ID NO: 719464
ucugcaaguaucagcucac

SEQ ID NO: 719466 - RNA, 19 nt, Artificial Sequence
  Description of Artificial Sequence: Synthetic oligonucleotide
  Sense strand starting at position 2917 of SEQ ID NO: 586457
aggaauccauuagaguaau

SEQ ID NO: 719467 - RNA, 19 nt, Artificial Sequence
  Description of Artificial Sequence: Synthetic oligonucleotide
  Antisense strand to SEQ ID NO: 719466
auuacucuaauggauuccu

SEQ ID NO: 719468 - RNA, 19 nt, Artificial Sequence
  Description of Artificial Sequence: Synthetic oligonucleotide
  Sense strand starting at position 2923 of SEQ ID NO: 586457
ccauuagaguaaucagaug

SEQ ID NO: 719469 - RNA, 19 nt, Artificial Sequence
  Description of Artificial Sequence: Synthetic oligonucleotide
  Antisense strand to SEQ ID NO: 719468
caucugauuacucuaaugg

SEQ ID NO: 719470 - RNA, 19 nt, Artificial Sequence
  Description of Artificial Sequence: Synthetic oligonucleotide
  Sense strand starting at position 2950 of SEQ ID NO: 586457
auuggaauuggguguuaua

SEQ ID NO: 719471 - RNA, 19 nt, Artificial Sequence
  Description of Artificial Sequence: Synthetic oligonucleotide
  Antisense strand to SEQ ID NO: 719470
uauaacacccaauuccaau

SEQ ID NO: 719472 - RNA, 19 nt, Artificial Sequence
  Description of Artificial Sequence: Synthetic oligonucleotide
  Sense strand starting at position 3543 of SEQ ID NO: 586457
aggugagcuucuguaaauu

SEQ ID NO: 719473 - RNA, 19 nt, Artificial Sequence
  Description of Artificial Sequence: Synthetic oligonucleotide
  Antisense strand to SEQ ID NO: 719472
aauuuacagaagcucaccu

SEQ ID NO: 719474 - RNA, 19 nt, Artificial Sequence
  Description of Artificial Sequence: Synthetic oligonucleotide
  Sense strand starting at position 3568 of SEQ ID NO: 586457
augucaguguucucuguaa

SEQ ID NO: 719475 - RNA, 19 nt, Artificial Sequence
  Description of Artificial Sequence: Synthetic oligonucleotide
  Antisense strand to SEQ ID NO: 719474
uuacagagaacacugacau

SEQ ID NO: 719476 - RNA, 19 nt, Artificial Sequence
  Description of Artificial Sequence: Synthetic oligonucleotide
  Sense strand starting at position 3570 of SEQ ID NO: 586457
gucaguguucucuguaaga

SEQ ID NO: 719477 - RNA, 19 nt, Artificial Sequence
  Description of Artificial Sequence: Synthetic oligonucleotide
  Antisense strand to SEQ ID NO: 719476
ucuuacagagaacacugac

SEQ ID NO: 719478 - RNA, 19 nt, Artificial Sequence
  Description of Artificial Sequence: Synthetic oligonucleotide
  Sense strand starting at position 3572 of SEQ ID NO: 586457
caguguucucuguaagaug

SEQ ID NO: 719479 - RNA, 19 nt, Artificial Sequence
  Description of Artificial Sequence: Synthetic oligonucleotide
  Antisense strand to SEQ ID NO: 719478
caucuuacagagaacacug

SEQ ID NO: 719480 - RNA, 19 nt, Artificial Sequence
  Description of Artificial Sequence: Synthetic oligonucleotide
  Sense strand starting at position 3628 of SEQ ID NO: 586457
gguuucagggaucgaauga

SEQ ID NO: 719481 - RNA, 19 nt, Artificial Sequence
  Description of Artificial Sequence: Synthetic oligonucleotide
  Antisense strand to SEQ ID NO: 719480
ucauucgaucccugaaacc

SEQ ID NO: 719482 - RNA, 19 nt, Artificial Sequence
  Description of Artificial Sequence: Synthetic oligonucleotide
  Sense strand starting at position 3635 of SEQ ID NO: 586457
gggaucgaaugagaaacua

SEQ ID NO: 719483 - RNA, 19 nt, Artificial Sequence
  Description of Artificial Sequence: Synthetic oligonucleotide
  Antisense strand to SEQ ID NO: 719482
uaguuucucauucgauccc

SEQ ID NO: 719484 - RNA, 19 nt, Artificial Sequence
  Description of Artificial Sequence: Synthetic oligonucleotide
  Sense strand starting at position 3686 of SEQ ID NO: 586457
cuuagagcuuauucuagaa

SEQ ID NO: 719485 - RNA, 19 nt, Artificial Sequence
  Description of Artificial Sequence: Synthetic oligonucleotide
  Antisense strand to SEQ ID NO: 719484
uucuagaauaagcucuaag

SEQ ID NO: 719486 - RNA, 19 nt, Artificial Sequence
  Description of Artificial Sequence: Synthetic oligonucleotide
  Sense strand starting at position 3757 of SEQ ID NO: 586457
aagaucauguggccauaga

SEQ ID NO: 719487 - RNA, 19 nt, Artificial Sequence
  Description of Artificial Sequence: Synthetic oligonucleotide
  Antisense strand to SEQ ID NO: 719486
ucuauggccacaugaucuu

SEQ ID NO: 719488 - RNA, 19 nt, Artificial Sequence
  Description of Artificial Sequence: Synthetic oligonucleotide
  Sense strand starting at position 44 of SEQ ID NO: 586458
gcaggccauggcugauaaa

SEQ ID NO: 719489 - RNA, 19 nt, Artificial Sequence
  Description of Artificial Sequence: Synthetic oligonucleotide
  Antisense strand to SEQ ID NO: 719488
uuuaucagccauggccugc

SEQ ID NO: 719490 - RNA, 19 nt, Artificial Sequence
  Description of Artificial Sequence: Synthetic oligonucleotide
  Sense strand starting at position 95 of SEQ ID NO: 586458
guaauuagccucuauggca

SEQ ID NO: 719491 - RNA, 19 nt, Artificial Sequence
  Description of Artificial Sequence: Synthetic oligonucleotide
  Antisense strand to SEQ ID NO: 719490
ugccauagaggcuaauuac

SEQ ID NO: 719492 - RNA, 19 nt, Artificial Sequence
  Description of Artificial Sequence: Synthetic oligonucleotide
  Sense strand starting at position 161 of SEQ ID NO: 586458
cugaucagccucugaaauu

SEQ ID NO: 719493 - RNA, 19 nt, Artificial Sequence
  Description of Artificial Sequence: Synthetic oligonucleotide
  Antisense strand to SEQ ID NO: 719492
aauuucagaggcugaucag

SEQ ID NO: 719494 - RNA, 19 nt, Artificial Sequence
  Description of Artificial Sequence: Synthetic oligonucleotide
  Sense strand starting at position 162 of SEQ ID NO: 586458
ugaucagccucugaaauuu

SEQ ID NO: 719495 - RNA, 19 nt, Artificial Sequence
  Description of Artificial Sequence: Synthetic oligonucleotide
  Antisense strand to SEQ ID NO: 719494
aaauuucagaggcugauca

SEQ ID NO: 719496 - RNA, 19 nt, Artificial Sequence
  Description of Artificial Sequence: Synthetic oligonucleotide
  Sense strand starting at position 170 of SEQ ID NO: 586458
cucugaaauuuguaaagca

SEQ ID NO: 719497 - RNA, 19 nt, Artificial Sequence
  Description of Artificial Sequence: Synthetic oligonucleotide
  Antisense strand to SEQ ID NO: 719496
ugcuuuacaaauuucagag

SEQ ID NO: 719498 - RNA, 19 nt, Artificial Sequence
  Description of Artificial Sequence: Synthetic oligonucleotide
  Sense strand starting at position 178 of SEQ ID NO: 586458
uuuguaaagcacugugaca

SEQ ID NO: 719499 - RNA, 19 nt, Artificial Sequence
  Description of Artificial Sequence: Synthetic oligonucleotide
  Antisense strand to SEQ ID NO: 719498
ugucacagugcuuuacaaa

SEQ ID NO: 719500 - RNA, 19 nt, Artificial Sequence
  Description of Artificial Sequence: Synthetic oligonucleotide
  Sense strand starting at position 228 of SEQ ID NO: 586458
uugacaaaguugcuggaau

SEQ ID NO: 719501 - RNA, 19 nt, Artificial Sequence
  Description of Artificial Sequence: Synthetic oligonucleotide
  Antisense strand to SEQ ID NO: 719500
auuccagcaacuuugucaa

SEQ ID NO: 719502 - RNA, 19 nt, Artificial Sequence
  Description of Artificial Sequence: Synthetic oligonucleotide
  Sense strand starting at position 270 of SEQ ID NO: 586458
gucaaacacuauccaaagu

SEQ ID NO: 719503 - RNA, 19 nt, Artificial Sequence
  Description of Artificial Sequence: Synthetic oligonucleotide
  Antisense strand to SEQ ID NO: 719502
acuuuggauaguguuugac

SEQ ID NO: 719504 - RNA, 19 nt, Artificial Sequence
  Description of Artificial Sequence: Synthetic oligonucleotide
  Sense strand starting at position 324 of SEQ ID NO: 586458
ccagcucucuuggcauuaa

SEQ ID NO: 719505 - RNA, 19 nt, Artificial Sequence
  Description of Artificial Sequence: Synthetic oligonucleotide
  Antisense strand to SEQ ID NO: 719504
uuaaugccaagagagcugg

SEQ ID NO: 719506 - RNA, 19 nt, Artificial Sequence
  Description of Artificial Sequence: Synthetic oligonucleotide
  Sense strand starting at position 358 of SEQ ID NO: 586458
acuguaccuccuugacauc

SEQ ID NO: 719507 - RNA, 19 nt, Artificial Sequence
  Description of Artificial Sequence: Synthetic oligonucleotide
  Antisense strand to SEQ ID NO: 719506
gaugucaaggagguacagu

SEQ ID NO: 719508 - RNA, 19 nt, Artificial Sequence
  Description of Artificial Sequence: Synthetic oligonucleotide
  Sense strand starting at position 410 of SEQ ID NO: 586458
ugagguuuauaacuggaua

SEQ ID NO: 719509 - RNA, 19 nt, Artificial Sequence
  Description of Artificial Sequence: Synthetic oligonucleotide
  Antisense strand to SEQ ID NO: 719508
uauccaguuauaaaccuca

SEQ ID NO: 719510 - RNA, 19 nt, Artificial Sequence
  Description of Artificial Sequence: Synthetic oligonucleotide
  Sense strand starting at position 477 of SEQ ID NO: 586458
ugucuuccugcagaaccau

SEQ ID NO: 719511 - RNA, 19 nt, Artificial Sequence
  Description of Artificial Sequence: Synthetic oligonucleotide
  Antisense strand to SEQ ID NO: 719510
augguucugcaggaagaca

SEQ ID NO: 719512 - RNA, 19 nt, Artificial Sequence
  Description of Artificial Sequence: Synthetic oligonucleotide
  Sense strand starting at position 525 of SEQ ID NO: 586458
acaagagccuaugaagaaa

SEQ ID NO: 719513 - RNA, 19 nt, Artificial Sequence
  Description of Artificial Sequence: Synthetic oligonucleotide
  Antisense strand to SEQ ID NO: 719512
uuucuucauaggcucuugu

SEQ ID NO: 719514 - RNA, 19 nt, Artificial Sequence
  Description of Artificial Sequence: Synthetic oligonucleotide
  Sense strand starting at position 594 of SEQ ID NO: 586458
acgccuaucguccuagcua

SEQ ID NO: 719515 - RNA, 19 nt, Artificial Sequence
  Description of Artificial Sequence: Synthetic oligonucleotide
  Antisense strand to SEQ ID NO: 719514
uagcuaggacgauaggcgu

SEQ ID NO: 719516 - RNA, 19 nt, Artificial Sequence
  Description of Artificial Sequence: Synthetic oligonucleotide
  Sense strand starting at position 661 of SEQ ID NO: 586458
ugcagaaagccacgaucau

SEQ ID NO: 719517 - RNA, 19 nt, Artificial Sequence
  Description of Artificial Sequence: Synthetic oligonucleotide
  Antisense strand to SEQ ID NO: 719516
augaucguggcuuucugca

SEQ ID NO: 719518 - RNA, 19 nt, Artificial Sequence
  Description of Artificial Sequence: Synthetic oligonucleotide
  Sense strand starting at position 826 of SEQ ID NO: 586458
ucagcauggacagaguauu

SEQ ID NO: 719519 - RNA, 19 nt, Artificial Sequence
  Description of Artificial Sequence: Synthetic oligonucleotide
  Antisense strand to SEQ ID NO: 719518
aauacucuguccaugcuga

SEQ ID NO: 719520 - RNA, 19 nt, Artificial Sequence
  Description of Artificial Sequence: Synthetic oligonucleotide
  Sense strand starting at position 1098 of SEQ ID NO: 586458
gggaaugucuuucccuaga

SEQ ID NO: 719521 - RNA, 19 nt, Artificial Sequence
  Description of Artificial Sequence: Synthetic oligonucleotide
  Antisense strand to SEQ ID NO: 719520
ucuagggaaagacauuccc

SEQ ID NO: 719522 - RNA, 19 nt, Artificial Sequence
  Description of Artificial Sequence: Synthetic oligonucleotide
  Sense strand starting at position 1103 of SEQ ID NO: 586458
ugucuuucccuagaaugga

SEQ ID NO: 719523 - RNA, 19 nt, Artificial Sequence
  Description of Artificial Sequence: Synthetic oligonucleotide
  Antisense strand to SEQ ID NO: 719522
uccauucuagggaaagaca

SEQ ID NO: 719524 - RNA, 19 nt, Artificial Sequence
  Description of Artificial Sequence: Synthetic oligonucleotide
  Sense strand starting at position 1489 of SEQ ID NO: 586458
ccaaaucucuggucugguu

SEQ ID NO: 719525 - RNA, 19 nt, Artificial Sequence
  Description of Artificial Sequence: Synthetic oligonucleotide
  Antisense strand to SEQ ID NO: 719524
aaccagaccagagauuugg

SEQ ID NO: 719526 - RNA, 19 nt, Artificial Sequence
  Description of Artificial Sequence: Synthetic oligonucleotide
  Sense strand starting at position 1501 of SEQ ID NO: 586458
ucugguucuggagaacugu

SEQ ID NO: 719527 - RNA, 19 nt, Artificial Sequence
  Description of Artificial Sequence: Synthetic oligonucleotide
  Antisense strand to SEQ ID NO: 719526
acaguucuccagaaccaga

SEQ ID NO: 719528 - RNA, 19 nt, Artificial Sequence
  Description of Artificial Sequence: Synthetic oligonucleotide
  Sense strand starting at position 1524 of SEQ ID NO: 586458
agacuuguucuuugaaacg

SEQ ID NO: 719529 - RNA, 19 nt, Artificial Sequence
  Description of Artificial Sequence: Synthetic oligonucleotide
  Antisense strand to SEQ ID NO: 719528
cguuucaaagaacaagucu

SEQ ID NO: 719530 - RNA, 19 nt, Artificial Sequence
  Description of Artificial Sequence: Synthetic oligonucleotide
  Sense strand starting at position 1690 of SEQ ID NO: 586458
aucucacuucuggguagua

SEQ ID NO: 719531 - RNA, 19 nt, Artificial Sequence
  Description of Artificial Sequence: Synthetic oligonucleotide
  Antisense strand to SEQ ID NO: 719530
uacuacccagaagugagau

SEQ ID NO: 719532 - RNA, 19 nt, Artificial Sequence
  Description of Artificial Sequence: Synthetic oligonucleotide
  Sense strand starting at position 1723 of SEQ ID NO: 586458
uguuccugccagugggaau

SEQ ID NO: 719533 - RNA, 19 nt, Artificial Sequence
  Description of Artificial Sequence: Synthetic oligonucleotide
  Antisense strand to SEQ ID NO: 719532
auucccacuggcaggaaca

SEQ ID NO: 719534 - RNA, 19 nt, Artificial Sequence
  Description of Artificial Sequence: Synthetic oligonucleotide
  Sense strand starting at position 1724 of SEQ ID NO: 586458
guuccugccagugggaaua

SEQ ID NO: 719535 - RNA, 19 nt, Artificial Sequence
  Description of Artificial Sequence: Synthetic oligonucleotide
  Antisense strand to SEQ ID NO: 719534
uauucccacuggcaggaac

SEQ ID NO: 719536 - RNA, 19 nt, Artificial Sequence
  Description of Artificial Sequence: Synthetic oligonucleotide
  Sense strand starting at position 1838 of SEQ ID NO: 586458
ccaguaauuugggauagua

SEQ ID NO: 719537 - RNA, 19 nt, Artificial Sequence
  Description of Artificial Sequence: Synthetic oligonucleotide
  Antisense strand to SEQ ID NO: 719536
uacuaucccaaauuacugg

SEQ ID NO: 719538 - RNA, 19 nt, Artificial Sequence
  Description of Artificial Sequence: Synthetic oligonucleotide
  Sense strand starting at position 2066 of SEQ ID NO: 586458
uguggucaaucccuaaauc

SEQ ID NO: 719539 - RNA, 19 nt, Artificial Sequence
  Description of Artificial Sequence: Synthetic oligonucleotide
  Antisense strand to SEQ ID NO: 719538
gauuuagggauugaccaca

SEQ ID NO: 719540 - RNA, 19 nt, Artificial Sequence
  Description of Artificial Sequence: Synthetic oligonucleotide
  Sense strand starting at position 2087 of SEQ ID NO: 586458
augcgugggagauagaaua

SEQ ID NO: 719541 - RNA, 19 nt, Artificial Sequence
  Description of Artificial Sequence: Synthetic oligonucleotide
  Antisense strand to SEQ ID NO: 719540
uauucuaucucccacgcau

SEQ ID NO: 719542 - RNA, 19 nt, Artificial Sequence
  Description of Artificial Sequence: Synthetic oligonucleotide
  Sense strand starting at position 2239 of SEQ ID NO: 586458
aguguaauagcucaaucuu

SEQ ID NO: 719543 - RNA, 19 nt, Artificial Sequence
  Description of Artificial Sequence: Synthetic oligonucleotide
  Antisense strand to SEQ ID NO: 719542
aagauugagcuauuacacu

SEQ ID NO: 719544 - RNA, 19 nt, Artificial Sequence
  Description of Artificial Sequence: Synthetic oligonucleotide
  Sense strand starting at position 2507 of SEQ ID NO: 586458
agcauuaauguguacuaaa

SEQ ID NO: 719545 - RNA, 19 nt, Artificial Sequence
  Description of Artificial Sequence: Synthetic oligonucleotide
  Antisense strand to SEQ ID NO: 719544
uuuaguacacauuaaugcu

SEQ ID NO: 719546 - RNA, 19 nt, Artificial Sequence
  Description of Artificial Sequence: Synthetic oligonucleotide
  Sense strand starting at position 2543 of SEQ ID NO: 586458
agcaacuuugcagagauau

SEQ ID NO: 719547 - RNA, 19 nt, Artificial Sequence
  Description of Artificial Sequence: Synthetic oligonucleotide
  Antisense strand to SEQ ID NO: 719546
auaucucugcaaaguugcu

SEQ ID NO: 719548 - RNA, 19 nt, Artificial Sequence
  Description of Artificial Sequence: Synthetic oligonucleotide
  Sense strand starting at position 2717 of SEQ ID NO: 586458
uuuguuauguggcugauga

SEQ ID NO: 719549 - RNA, 19 nt, Artificial Sequence
  Description of Artificial Sequence: Synthetic oligonucleotide
  Antisense strand to SEQ ID NO: 719548
ucaucagccacauaacaaa

SEQ ID NO: 719550 - RNA, 19 nt, Artificial Sequence
  Description of Artificial Sequence: Synthetic oligonucleotide
  Sense strand starting at position 2718 of SEQ ID NO: 586458
uuguuauguggcugaugac

SEQ ID NO: 719551 - RNA, 19 nt, Artificial Sequence
  Description of Artificial Sequence: Synthetic oligonucleotide
  Antisense strand to SEQ ID NO: 719550
gucaucagccacauaacaa

SEQ ID NO: 719552 - RNA, 19 nt, Artificial Sequence
  Description of Artificial Sequence: Synthetic oligonucleotide
  Sense strand starting at position 2719 of SEQ ID NO: 586458
uguuauguggcugaugaca

SEQ ID NO: 719553 - RNA, 19 nt, Artificial Sequence
  Description of Artificial Sequence: Synthetic oligonucleotide
  Antisense strand to SEQ ID NO: 719552
ugucaucagccacauaaca

SEQ ID NO: 719554 - RNA, 19 nt, Artificial Sequence
  Description of Artificial Sequence: Synthetic oligonucleotide
  Sense strand starting at position 3147 of SEQ ID NO: 586458
auggcacugcuuuaaacuu

SEQ ID NO: 719555 - RNA, 19 nt, Artificial Sequence
  Description of Artificial Sequence: Synthetic oligonucleotide
  Antisense strand to SEQ ID NO: 719554
aaguuuaaagcagugccau

SEQ ID NO: 719556 - RNA, 19 nt, Artificial Sequence
  Description of Artificial Sequence: Synthetic oligonucleotide
  Sense strand starting at position 3193 of SEQ ID NO: 586458
cccuaaugcucuguuuaag

SEQ ID NO: 719557 - RNA, 19 nt, Artificial Sequence
  Description of Artificial Sequence: Synthetic oligonucleotide
  Antisense strand to SEQ ID NO: 719556
cuuaaacagagcauuaggg

SEQ ID NO: 719558 - RNA, 19 nt, Artificial Sequence
  Description of Artificial Sequence: Synthetic oligonucleotide
  Sense strand starting at position 3792 of SEQ ID NO: 586458
uuguaagcuggcuaucacu

SEQ ID NO: 719559 - RNA, 19 nt, Artificial Sequence
  Description of Artificial Sequence: Synthetic oligonucleotide
  Antisense strand to SEQ ID NO: 719558
agugauagccagcuuacaa

SEQ ID NO: 719560 - RNA, 19 nt, Artificial Sequence
  Description of Artificial Sequence: Synthetic oligonucleotide
  Sense strand starting at position 3798 of SEQ ID NO: 586458
gcuggcuaucacuaucagu

SEQ ID NO: 719561 - RNA, 19 nt, Artificial Sequence
  Description of Artificial Sequence: Synthetic oligonucleotide
  Antisense strand to SEQ ID NO: 719560
acugauagugauagccagc

SEQ ID NO: 719562 - RNA, 19 nt, Artificial Sequence
  Description of Artificial Sequence: Synthetic oligonucleotide
  Sense strand starting at position 3866 of SEQ ID NO: 586458
ucaugugcugcacaaugaa

SEQ ID NO: 719563 - RNA, 19 nt, Artificial Sequence
  Description of Artificial Sequence: Synthetic oligonucleotide
  Antisense strand to SEQ ID NO: 719562
uucauugugcagcacauga

SEQ ID NO: 719564 - RNA, 19 nt, Artificial Sequence
  Description of Artificial Sequence: Synthetic oligonucleotide
  Sense strand starting at position 3909 of SEQ ID NO: 586458
auaugagaguggucccaug

SEQ ID NO: 719565 - RNA, 19 nt, Artificial Sequence
  Description of Artificial Sequence: Synthetic oligonucleotide
  Antisense strand to SEQ ID NO: 719564
caugggaccacucucauau

SEQ ID NO: 719566 - RNA, 19 nt, Artificial Sequence
  Description of Artificial Sequence: Synthetic oligonucleotide
  Sense strand starting at position 3936 of SEQ ID NO: 586458
auaucaugucuuuacugua

SEQ ID NO: 719567 - RNA, 19 nt, Artificial Sequence
  Description of Artificial Sequence: Synthetic oligonucleotide
  Antisense strand to SEQ ID NO: 719566
uacaguaaagacaugauau

SEQ ID NO: 719568 - RNA, 19 nt, Artificial Sequence
  Description of Artificial Sequence: Synthetic oligonucleotide
  Sense strand starting at position 30 of SEQ ID NO: 586459
aggacugacuccucucuga

SEQ ID NO: 719569 - RNA, 19 nt, Artificial Sequence
  Description of Artificial Sequence: Synthetic oligonucleotide
  Antisense strand to SEQ ID NO: 719568
ucagagaggagucaguccu

SEQ ID NO: 719570 - RNA, 19 nt, Artificial Sequence
  Description of Artificial Sequence: Synthetic oligonucleotide
  Sense strand starting at position 133 of SEQ ID NO: 586459
cuggaaagcucagagacau

SEQ ID NO: 719571 - RNA, 19 nt, Artificial Sequence
  Description of Artificial Sequence: Synthetic oligonucleotide
  Antisense strand to SEQ ID NO: 719570
augucucugagcuuuccag

SEQ ID NO: 719572 - RNA, 19 nt, Artificial Sequence
  Description of Artificial Sequence: Synthetic oligonucleotide
  Sense strand starting at position 144 of SEQ ID NO: 586459
agagacaucugcuguguca

SEQ ID NO: 719573 - RNA, 19 nt, Artificial Sequence
  Description of Artificial Sequence: Synthetic oligonucleotide
  Antisense strand to SEQ ID NO: 719572
ugacacagcagaugucucu

SEQ ID NO: 719574 - RNA, 19 nt, Artificial Sequence
  Description of Artificial Sequence: Synthetic oligonucleotide
  Sense strand starting at position 169 of SEQ ID NO: 586459
cagggcuauuuccaggaca

SEQ ID NO: 719575 - RNA, 19 nt, Artificial Sequence
  Description of Artificial Sequence: Synthetic oligonucleotide
  Antisense strand to SEQ ID NO: 719574
uguccuggaaauagcccug

SEQ ID NO: 719576 - RNA, 19 nt, Artificial Sequence
  Description of Artificial Sequence: Synthetic oligonucleotide
  Sense strand starting at position 351 of SEQ ID NO: 586459
ggagaaaucucagggaaca

SEQ ID NO: 719577 - RNA, 19 nt, Artificial Sequence
  Description of Artificial Sequence: Synthetic oligonucleotide
  Antisense strand to SEQ ID NO: 719576
uguucccugagauuucucc

SEQ ID NO: 719578 - RNA, 19 nt, Artificial Sequence
  Description of Artificial Sequence: Synthetic oligonucleotide
  Sense strand starting at position 436 of SEQ ID NO: 586459
aggaccucguccugcaaau

SEQ ID NO: 719579 - RNA, 19 nt, Artificial Sequence
  Description of Artificial Sequence: Synthetic oligonucleotide
  Antisense strand to SEQ ID NO: 719578
auuugcaggacgagguccu

SEQ ID NO: 719580 - RNA, 19 nt, Artificial Sequence
  Description of Artificial Sequence: Synthetic oligonucleotide
  Sense strand starting at position 2301 of SEQ ID NO: 586459
acaccaaacugucaggaau

SEQ ID NO: 719581 - RNA, 19 nt, Artificial Sequence
  Description of Artificial Sequence: Synthetic oligonucleotide
  Antisense strand to SEQ ID NO: 719580
auuccugacaguuuggugu

SEQ ID NO: 719582 - RNA, 19 nt, Artificial Sequence
  Description of Artificial Sequence: Synthetic oligonucleotide
  Sense strand starting at position 2303 of SEQ ID NO: 586459
accaaacugucaggaauga

SEQ ID NO: 719583 - RNA, 19 nt, Artificial Sequence
  Description of Artificial Sequence: Synthetic oligonucleotide
  Antisense strand to SEQ ID NO: 719582
ucauuccugacaguuuggu

SEQ ID NO: 719584 - RNA, 19 nt, Artificial Sequence
  Description of Artificial Sequence: Synthetic oligonucleotide
  Sense strand starting at position 2369 of SEQ ID NO: 586459
aacugaggccagugauuag

SEQ ID NO: 719585 - RNA, 19 nt, Artificial Sequence
  Description of Artificial Sequence: Synthetic oligonucleotide
  Antisense strand to SEQ ID NO: 719584
cuaaucacuggccucaguu

SEQ ID NO: 719586 - RNA, 19 nt, Artificial Sequence
  Description of Artificial Sequence: Synthetic oligonucleotide
  Sense strand starting at position 2514 of SEQ ID NO: 586459
gugugugcuugugcagaga

SEQ ID NO: 719587 - RNA, 19 nt, Artificial Sequence
  Description of Artificial Sequence: Synthetic oligonucleotide
  Antisense strand to SEQ ID NO: 719586
ucucugcacaagcacacac

SEQ ID NO: 719588 - RNA, 19 nt, Artificial Sequence
  Description of Artificial Sequence: Synthetic oligonucleotide
  Sense strand starting at position 2612 of SEQ ID NO: 586459
ccagccauugcuugacuuu

SEQ ID NO: 719589 - RNA, 19 nt, Artificial Sequence
  Description of Artificial Sequence: Synthetic oligonucleotide
  Antisense strand to SEQ ID NO: 719588
aaagucaagcaauggcugg

SEQ ID NO: 719590 - RNA, 19 nt, Artificial Sequence
  Description of Artificial Sequence: Synthetic oligonucleotide
  Sense strand starting at position 2615 of SEQ ID NO: 586459
gccauugcuugacuuuaca

SEQ ID NO: 719591 - RNA, 19 nt, Artificial Sequence
  Description of Artificial Sequence: Synthetic oligonucleotide
  Antisense strand to SEQ ID NO: 719590
uguaaagucaagcaauggc

SEQ ID NO: 719592 - RNA, 19 nt, Artificial Sequence
  Description of Artificial Sequence: Synthetic oligonucleotide
  Sense strand starting at position 2618 of SEQ ID NO: 586459
auugcuugacuuuacagau

SEQ ID NO: 719593 - RNA, 19 nt, Artificial Sequence
  Description of Artificial Sequence: Synthetic oligonucleotide
  Antisense strand to SEQ ID NO: 719592
aucuguaaagucaagcaau

SEQ ID NO: 719594 - RNA, 19 nt, Artificial Sequence
  Description of Artificial Sequence: Synthetic oligonucleotide
  Sense strand starting at position 2807 of SEQ ID NO: 586459
gucugacucaacugagaug

SEQ ID NO: 719595 - RNA, 19 nt, Artificial Sequence
  Description of Artificial Sequence: Synthetic oligonucleotide
  Antisense strand to SEQ ID NO: 719594
caucucaguugagucagac

SEQ ID NO: 719596 - RNA, 19 nt, Artificial Sequence
  Description of Artificial Sequence: Synthetic oligonucleotide
  Sense strand starting at position 2810 of SEQ ID NO: 586459
ugacucaacugagaugaua

SEQ ID NO: 719597 - RNA, 19 nt, Artificial Sequence
  Description of Artificial Sequence: Synthetic oligonucleotide
  Antisense strand to SEQ ID NO: 719596
uaucaucucaguugaguca

SEQ ID NO: 719598 - RNA, 19 nt, Artificial Sequence
  Description of Artificial Sequence: Synthetic oligonucleotide
  Sense strand starting at position 2901 of SEQ ID NO: 586459
ggcagauccugccagggaa

SEQ ID NO: 719599 - RNA, 19 nt, Artificial Sequence
  Description of Artificial Sequence: Synthetic oligonucleotide
  Antisense strand to SEQ ID NO: 719598
uucccuggcaggaucugcc

SEQ ID NO: 719600 - RNA, 19 nt, Artificial Sequence
  Description of Artificial Sequence: Synthetic oligonucleotide
  Sense strand starting at position 3480 of SEQ ID NO: 586459
cgugcugggccuagagaau

SEQ ID NO: 719601 - RNA, 19 nt, Artificial Sequence
  Description of Artificial Sequence: Synthetic oligonucleotide
  Antisense strand to SEQ ID NO: 719600
auucucuaggcccagcacg

SEQ ID NO: 719602 - RNA, 19 nt, Artificial Sequence
  Description of Artificial Sequence: Synthetic oligonucleotide
  Sense strand starting at position 3516 of SEQ ID NO: 586459
ggauccauucugcaacuuu

SEQ ID NO: 719603 - RNA, 19 nt, Artificial Sequence
  Description of Artificial Sequence: Synthetic oligonucleotide
  Antisense strand to SEQ ID NO: 719602
aaaguugcagaauggaucc

SEQ ID NO: 719604 - RNA, 19 nt, Artificial Sequence
  Description of Artificial Sequence: Synthetic oligonucleotide
  Sense strand starting at position 3643 of SEQ ID NO: 586459
cauaucugagccugagaag

SEQ ID NO: 719605 - RNA, 19 nt, Artificial Sequence
  Description of Artificial Sequence: Synthetic oligonucleotide
  Antisense strand to SEQ ID NO: 719604
cuucucaggcucagauaug

SEQ ID NO: 719606 - RNA, 19 nt, Artificial Sequence
  Description of Artificial Sequence: Synthetic oligonucleotide
  Sense strand starting at position 3644 of SEQ ID NO: 586459
auaucugagccugagaagu

SEQ ID NO: 719607 - RNA, 19 nt, Artificial Sequence
  Description of Artificial Sequence: Synthetic oligonucleotide
  Antisense strand to SEQ ID NO: 719606
acuucucaggcucagauau

SEQ ID NO: 719608 - RNA, 19 nt, Artificial Sequence
  Description of Artificial Sequence: Synthetic oligonucleotide
  Sense strand starting at position 3646 of SEQ ID NO: 586459
aucugagccugagaaguuu

SEQ ID NO: 719609 - RNA, 19 nt, Artificial Sequence
  Description of Artificial Sequence: Synthetic oligonucleotide
  Antisense strand to SEQ ID NO: 719608
aaacuucucaggcucagau

SEQ ID NO: 719610 - RNA, 19 nt, Artificial Sequence
  Description of Artificial Sequence: Synthetic oligonucleotide
  Sense strand starting at position 3654 of SEQ ID NO: 586459
cugagaaguuucuuuaagc

SEQ ID NO: 719611 - RNA, 19 nt, Artificial Sequence
  Description of Artificial Sequence: Synthetic oligonucleotide
  Antisense strand to SEQ ID NO: 719610
gcuuaaagaaacuucucag

SEQ ID NO: 719612 - RNA, 19 nt, Artificial Sequence
  Description of Artificial Sequence: Synthetic oligonucleotide
  Sense strand starting at position 3655 of SEQ ID NO: 586459
ugagaaguuucuuuaagcc

SEQ ID NO: 719613 - RNA, 19 nt, Artificial Sequence
  Description of Artificial Sequence: Synthetic oligonucleotide
  Antisense strand to SEQ ID NO: 719612
ggcuuaaagaaacuucuca

SEQ ID NO: 719614 - RNA, 19 nt, Artificial Sequence
  Description of Artificial Sequence: Synthetic oligonucleotide
  Sense strand starting at position 3661 of SEQ ID NO: 586459
guuucuuuaagccagggaa

SEQ ID NO: 719615 - RNA, 19 nt, Artificial Sequence
  Description of Artificial Sequence: Synthetic oligonucleotide
  Antisense strand to SEQ ID NO: 719614
uucccuggcuuaaagaaac

SEQ ID NO: 719616 - RNA, 19 nt, Artificial Sequence
  Description of Artificial Sequence: Synthetic oligonucleotide
  Sense strand starting at position 3665 of SEQ ID NO: 586459
cuuuaagccagggaagguu

SEQ ID NO: 719617 - RNA, 19 nt, Artificial Sequence
  Description of Artificial Sequence: Synthetic oligonucleotide
  Antisense strand to SEQ ID NO: 719616
aaccuucccuggcuuaaag

SEQ ID NO: 719618 - RNA, 19 nt, Artificial Sequence
  Description of Artificial Sequence: Synthetic oligonucleotide
  Sense strand starting at position 3748 of SEQ ID NO: 586459
aagggauagugagcaucuu

SEQ ID NO: 719619 - RNA, 19 nt, Artificial Sequence
  Description of Artificial Sequence: Synthetic oligonucleotide
  Antisense strand to SEQ ID NO: 719618
aagaugcucacuaucccuu

SEQ ID NO: 719620 - RNA, 19 nt, Artificial Sequence
  Description of Artificial Sequence: Synthetic oligonucleotide
  Sense strand starting at position 3749 of SEQ ID NO: 586459
agggauagugagcaucuuu

SEQ ID NO: 719621 - RNA, 19 nt, Artificial Sequence
  Description of Artificial Sequence: Synthetic oligonucleotide
  Antisense strand to SEQ ID NO: 719620
aaagaugcucacuaucccu

SEQ ID NO: 719622 - RNA, 19 nt, Artificial Sequence
  Description of Artificial Sequence: Synthetic oligonucleotide
  Sense strand starting at position 3844 of SEQ ID NO: 586459
gggcaaugcuuaugaugac

SEQ ID NO: 719623 - RNA, 19 nt, Artificial Sequence
  Description of Artificial Sequence: Synthetic oligonucleotide
  Antisense strand to SEQ ID NO: 719622
gucaucauaagcauugccc

SEQ ID NO: 719624 - RNA, 19 nt, Artificial Sequence
  Description of Artificial Sequence: Synthetic oligonucleotide
  Sense strand starting at position 3845 of SEQ ID NO: 586459
ggcaaugcuuaugaugaca

SEQ ID NO: 719625 - RNA, 19 nt, Artificial Sequence
  Description of Artificial Sequence: Synthetic oligonucleotide
  Antisense strand to SEQ ID NO: 719624
ugucaucauaagcauugcc

SEQ ID NO: 719626 - RNA, 19 nt, Artificial Sequence
  Description of Artificial Sequence: Synthetic oligonucleotide
  Sense strand starting at position 3875 of SEQ ID NO: 586459
augaaauugccugguccuu

SEQ ID NO: 719627 - RNA, 19 nt, Artificial Sequence
  Description of Artificial Sequence: Synthetic oligonucleotide
  Antisense strand to SEQ ID NO: 719626
aaggaccaggcaauuucau

SEQ ID NO: 719628 - RNA, 19 nt, Artificial Sequence
  Description of Artificial Sequence: Synthetic oligonucleotide
  Sense strand starting at position 3877 of SEQ ID NO: 586459
gaaauugccugguccuuag

SEQ ID NO: 719629 - RNA, 19 nt, Artificial Sequence
  Description of Artificial Sequence: Synthetic oligonucleotide
  Antisense strand to SEQ ID NO: 719628
cuaaggaccaggcaauuuc

SEQ ID NO: 719630 - RNA, 19 nt, Artificial Sequence
  Description of Artificial Sequence: Synthetic oligonucleotide
  Sense strand starting at position 64 of SEQ ID NO: 586460
aaacacuggugaugaguua

SEQ ID NO: 719631 - RNA, 19 nt, Artificial Sequence
  Description of Artificial Sequence: Synthetic oligonucleotide
  Antisense strand to SEQ ID NO: 719630
uaacucaucaccaguguuu

SEQ ID NO: 719632 - RNA, 19 nt, Artificial Sequence
  Description of Artificial Sequence: Synthetic oligonucleotide
  Sense strand starting at position 71 of SEQ ID NO: 586460
ggugaugaguuagaggcaa

SEQ ID NO: 719633 - RNA, 19 nt, Artificial Sequence
  Description of Artificial Sequence: Synthetic oligonucleotide
  Antisense strand to SEQ ID NO: 719632
uugccucuaacucaucacc

SEQ ID NO: 719634 - RNA, 19 nt, Artificial Sequence
  Description of Artificial Sequence: Synthetic oligonucleotide
  Sense strand starting at position 73 of SEQ ID NO: 586460
ugaugaguuagaggcaauc

SEQ ID NO: 719635 - RNA, 19 nt, Artificial Sequence
  Description of Artificial Sequence: Synthetic oligonucleotide
  Antisense strand to SEQ ID NO: 719634
gauugccucuaacucauca

SEQ ID NO: 719636 - RNA, 19 nt, Artificial Sequence
  Description of Artificial Sequence: Synthetic oligonucleotide
  Sense strand starting at position 139 of SEQ ID NO: 586460
aggcuuucuccugaucaac

SEQ ID NO: 719637 - RNA, 19 nt, Artificial Sequence
  Description of Artificial Sequence: Synthetic oligonucleotide
  Antisense strand to SEQ ID NO: 719636
guugaucaggagaaagccu

SEQ ID NO: 719638 - RNA, 19 nt, Artificial Sequence
  Description of Artificial Sequence: Synthetic oligonucleotide
  Sense strand starting at position 892 of SEQ ID NO: 586460
gcgguuaaccuugcguguu

SEQ ID NO: 719639 - RNA, 19 nt, Artificial Sequence
  Description of Artificial Sequence: Synthetic oligonucleotide
  Antisense strand to SEQ ID NO: 719638
aacacgcaagguuaaccgc

SEQ ID NO: 719640 - RNA, 19 nt, Artificial Sequence
  Description of Artificial Sequence: Synthetic oligonucleotide
  Sense strand starting at position 893 of SEQ ID NO: 586460
cgguuaaccuugcguguuu

SEQ ID NO: 719641 - RNA, 19 nt, Artificial Sequence
  Description of Artificial Sequence: Synthetic oligonucleotide
  Antisense strand to SEQ ID NO: 719640
aaacacgcaagguuaaccg

SEQ ID NO: 719642 - RNA, 19 nt, Artificial Sequence
  Description of Artificial Sequence: Synthetic oligonucleotide
  Sense strand starting at position 894 of SEQ ID NO: 586460
gguuaaccuugcguguuua

SEQ ID NO: 719643 - RNA, 19 nt, Artificial Sequence
  Description of Artificial Sequence: Synthetic oligonucleotide
  Antisense strand to SEQ ID NO: 719642
uaaacacgcaagguuaacc

SEQ ID NO: 719644 - RNA, 19 nt, Artificial Sequence
  Description of Artificial Sequence: Synthetic oligonucleotide
  Sense strand starting at position 2352 of SEQ ID NO: 586460
gagccugggucauuggaga

SEQ ID NO: 719645 - RNA, 19 nt, Artificial Sequence
  Description of Artificial Sequence: Synthetic oligonucleotide
  Antisense strand to SEQ ID NO: 719644
ucuccaaugacccaggcuc

SEQ ID NO: 719646 - RNA, 19 nt, Artificial Sequence
  Description of Artificial Sequence: Synthetic oligonucleotide
  Sense strand starting at position 2375 of SEQ ID NO: 586460
gacggaugaccucagcagu

SEQ ID NO: 719647 - RNA, 19 nt, Artificial Sequence
  Description of Artificial Sequence: Synthetic oligonucleotide
  Antisense strand to SEQ ID NO: 719646
acugcugaggucauccguc

SEQ ID NO: 719648 - RNA, 19 nt, Artificial Sequence
  Description of Artificial Sequence: Synthetic oligonucleotide
  Sense strand starting at position 2737 of SEQ ID NO: 586460
agugccaggccugaucauu

SEQ ID NO: 719649 - RNA, 19 nt, Artificial Sequence
  Description of Artificial Sequence: Synthetic oligonucleotide
  Antisense strand to SEQ ID NO: 719648
aaugaucaggccuggcacu

SEQ ID NO: 719650 - RNA, 19 nt, Artificial Sequence
  Description of Artificial Sequence: Synthetic oligonucleotide
  Sense strand starting at position 2776 of SEQ ID NO: 586460
gucaucauacucuacugua

SEQ ID NO: 719651 - RNA, 19 nt, Artificial Sequence
  Description of Artificial Sequence: Synthetic oligonucleotide
  Antisense strand to SEQ ID NO: 719650
uacaguagaguaugaugac

SEQ ID NO: 719652 - RNA, 19 nt, Artificial Sequence
  Description of Artificial Sequence: Synthetic oligonucleotide
  Sense strand starting at position 2808 of SEQ ID NO: 586460
ugagauccaucccugaauc

SEQ ID NO: 719653 - RNA, 19 nt, Artificial Sequence
  Description of Artificial Sequence: Synthetic oligonucleotide
  Antisense strand to SEQ ID NO: 719652
gauucagggauggaucuca

SEQ ID NO: 719654 - RNA, 19 nt, Artificial Sequence
  Description of Artificial Sequence: Synthetic oligonucleotide
  Sense strand starting at position 3520 of SEQ ID NO: 586460
uggucagacuaguccugaa

SEQ ID NO: 719655 - RNA, 19 nt, Artificial Sequence
  Description of Artificial Sequence: Synthetic oligonucleotide
  Antisense strand to SEQ ID NO: 719654
uucaggacuagucugacca

SEQ ID NO: 719656 - RNA, 19 nt, Artificial Sequence
  Description of Artificial Sequence: Synthetic oligonucleotide
  Sense strand starting at position 57 of SEQ ID NO: 586461
ugagcauauucugugaaau

SEQ ID NO: 719657 - RNA, 19 nt, Artificial Sequence
  Description of Artificial Sequence: Synthetic oligonucleotide
  Antisense strand to SEQ ID NO: 719656
auuucacagaauaugcuca

SEQ ID NO: 719658 - RNA, 19 nt, Artificial Sequence
  Description of Artificial Sequence: Synthetic oligonucleotide
  Sense strand starting at position 58 of SEQ ID NO: 586461
gagcauauucugugaaauu

SEQ ID NO: 719659 - RNA, 19 nt, Artificial Sequence
  Description of Artificial Sequence: Synthetic oligonucleotide
  Antisense strand to SEQ ID NO: 719658
aauuucacagaauaugcuc

SEQ ID NO: 719660 - RNA, 19 nt, Artificial Sequence
  Description of Artificial Sequence: Synthetic oligonucleotide
  Sense strand starting at position 168 of SEQ ID NO: 586461
aucucuguuagguauagga

SEQ ID NO: 719661 - RNA, 19 nt, Artificial Sequence
  Description of Artificial Sequence: Synthetic oligonucleotide
  Antisense strand to SEQ ID NO: 719660
uccuauaccuaacagagau

SEQ ID NO: 719662 - RNA, 19 nt, Artificial Sequence
  Description of Artificial Sequence: Synthetic oligonucleotide
  Sense strand starting at position 243 of SEQ ID NO: 586461
aguauacuuuguuuccaaa

SEQ ID NO: 719663 - RNA, 19 nt, Artificial Sequence
  Description of Artificial Sequence: Synthetic oligonucleotide
  Antisense strand to SEQ ID NO: 719662
uuuggaaacaaaguauacu

SEQ ID NO: 719664 - RNA, 19 nt, Artificial Sequence
  Description of Artificial Sequence: Synthetic oligonucleotide
  Sense strand starting at position 342 of SEQ ID NO: 586461
gauuuaaagucagaacagu

SEQ ID NO: 719665 - RNA, 19 nt, Artificial Sequence
  Description of Artificial Sequence: Synthetic oligonucleotide
  Antisense strand to SEQ ID NO: 719664
acuguucugacuuuaaauc

SEQ ID NO: 719666 - RNA, 19 nt, Artificial Sequence
  Description of Artificial Sequence: Synthetic oligonucleotide
  Sense strand starting at position 409 of SEQ ID NO: 586461
cacacuauugacggugaaa

SEQ ID NO: 719667 - RNA, 19 nt, Artificial Sequence
  Description of Artificial Sequence: Synthetic oligonucleotide
  Antisense strand to SEQ ID NO: 719666
uuucaccgucaauagugug

SEQ ID NO: 719668 - RNA, 19 nt, Artificial Sequence
  Description of Artificial Sequence: Synthetic oligonucleotide
  Sense strand starting at position 411 of SEQ ID NO: 586461
cacuauugacggugaaagu

SEQ ID NO: 719669 - RNA, 19 nt, Artificial Sequence
  Description of Artificial Sequence: Synthetic oligonucleotide
  Antisense strand to SEQ ID NO: 719668
acuuucaccgucaauagug

SEQ ID NO: 719670 - RNA, 19 nt, Artificial Sequence
  Description of Artificial Sequence: Synthetic oligonucleotide
  Sense strand starting at position 420 of SEQ ID NO: 586461
cggugaaagugauucaaga

SEQ ID NO: 719671 - RNA, 19 nt, Artificial Sequence
  Description of Artificial Sequence: Synthetic oligonucleotide
  Antisense strand to SEQ ID NO: 719670
ucuugaaucacuuucaccg

SEQ ID NO: 719672 - RNA, 19 nt, Artificial Sequence
  Description of Artificial Sequence: Synthetic oligonucleotide
  Sense strand starting at position 561 of SEQ ID NO: 586461
gcguuauuaccugaaggug

SEQ ID NO: 719673 - RNA, 19 nt, Artificial Sequence
  Description of Artificial Sequence: Synthetic oligonucleotide
  Antisense strand to SEQ ID NO: 719672
caccuucagguaauaacgc

SEQ ID NO: 719674 - RNA, 19 nt, Artificial Sequence
  Description of Artificial Sequence: Synthetic oligonucleotide
  Sense strand starting at position 608 of SEQ ID NO: 586461
gcuguugguguugcaguaa

SEQ ID NO: 719675 - RNA, 19 nt, Artificial Sequence
  Description of Artificial Sequence: Synthetic oligonucleotide
  Antisense strand to SEQ ID NO: 719674
uuacugcaacaccaacagc

SEQ ID NO: 719676 - RNA, 19 nt, Artificial Sequence
  Description of Artificial Sequence: Synthetic oligonucleotide
  Sense strand starting at position 631 of SEQ ID NO: 586461
uugcucaugucacugggaa

SEQ ID NO: 719677 - RNA, 19 nt, Artificial Sequence
  Description of Artificial Sequence: Synthetic oligonucleotide
  Antisense strand to SEQ ID NO: 719676
uucccagugacaugagcaa

SEQ ID NO: 719678 - RNA, 19 nt, Artificial Sequence
  Description of Artificial Sequence: Synthetic oligonucleotide
  Sense strand starting at position 632 of SEQ ID NO: 586461
ugcucaugucacugggaaa

SEQ ID NO: 719679 - RNA, 19 nt, Artificial Sequence
  Description of Artificial Sequence: Synthetic oligonucleotide
  Antisense strand to SEQ ID NO: 719678
uuucccagugacaugagca

SEQ ID NO: 719680 - RNA, 19 nt, Artificial Sequence
  Description of Artificial Sequence: Synthetic oligonucleotide
  Sense strand starting at position 821 of SEQ ID NO: 586461
gcccuaugaugggcccaau

SEQ ID NO: 719681 - RNA, 19 nt, Artificial Sequence
  Description of Artificial Sequence: Synthetic oligonucleotide
  Antisense strand to SEQ ID NO: 719680
auugggcccaucauagggc

SEQ ID NO: 719682 - RNA, 19 nt, Artificial Sequence
  Description of Artificial Sequence: Synthetic oligonucleotide
  Sense strand starting at position 926 of SEQ ID NO: 586461
uuuaacugacacgaguauu

SEQ ID NO: 719683 - RNA, 19 nt, Artificial Sequence
  Description of Artificial Sequence: Synthetic oligonucleotide
  Antisense strand to SEQ ID NO: 719682
aauacucgugucaguuaaa

SEQ ID NO: 719684 - RNA, 19 nt, Artificial Sequence
  Description of Artificial Sequence: Synthetic oligonucleotide
  Sense strand starting at position 1005 of SEQ ID NO: 586461
caauguguauuccuggaaa

SEQ ID NO: 719685 - RNA, 19 nt, Artificial Sequence
  Description of Artificial Sequence: Synthetic oligonucleotide
  Antisense strand to SEQ ID NO: 719684
uuuccaggaauacacauug

SEQ ID NO: 719686 - RNA, 19 nt, Artificial Sequence
  Description of Artificial Sequence: Synthetic oligonucleotide
  Sense strand starting at position 1007 of SEQ ID NO: 586461
auguguauuccuggaaaua

SEQ ID NO: 719687 - RNA, 19 nt, Artificial Sequence
  Description of Artificial Sequence: Synthetic oligonucleotide
  Antisense strand to SEQ ID NO: 719686
uauuuccaggaauacacau

SEQ ID NO: 719688 - RNA, 19 nt, Artificial Sequence
  Description of Artificial Sequence: Synthetic oligonucleotide
  Sense strand starting at position 1008 of SEQ ID NO: 586461
uguguauuccuggaaauau

SEQ ID NO: 719689 - RNA, 19 nt, Artificial Sequence
  Description of Artificial Sequence: Synthetic oligonucleotide
  Antisense strand to SEQ ID NO: 719688
auauuuccaggaauacaca

SEQ ID NO: 719690 - RNA, 19 nt, Artificial Sequence
  Description of Artificial Sequence: Synthetic oligonucleotide
  Sense strand starting at position 1140 of SEQ ID NO: 586461
uuuguacaagcuuagcaaa

SEQ ID NO: 719691 - RNA, 19 nt, Artificial Sequence
  Description of Artificial Sequence: Synthetic oligonucleotide
  Antisense strand to SEQ ID NO: 719690
uuugcuaagcuuguacaaa

SEQ ID NO: 719692 - RNA, 19 nt, Artificial Sequence
  Description of Artificial Sequence: Synthetic oligonucleotide
  Sense strand starting at position 1289 of SEQ ID NO: 586461
gcaagaugacaugguuauu

SEQ ID NO: 719693 - RNA, 19 nt, Artificial Sequence
  Description of Artificial Sequence: Synthetic oligonucleotide
  Antisense strand to SEQ ID NO: 719692
aauaaccaugucaucuugc

SEQ ID NO: 719694 - RNA, 19 nt, Artificial Sequence
  Description of Artificial Sequence: Synthetic oligonucleotide
  Sense strand starting at position 1294 of SEQ ID NO: 586461
augacaugguuauuaucaa

SEQ ID NO: 719695 - RNA, 19 nt, Artificial Sequence
  Description of Artificial Sequence: Synthetic oligonucleotide
  Antisense strand to SEQ ID NO: 719694
uugauaauaaccaugucau

SEQ ID NO: 719696 - RNA, 19 nt, Artificial Sequence
  Description of Artificial Sequence: Synthetic oligonucleotide
  Sense strand starting at position 1388 of SEQ ID NO: 586461
uuuauuugcugucuuuacu

SEQ ID NO: 719697 - RNA, 19 nt, Artificial Sequence
  Description of Artificial Sequence: Synthetic oligonucleotide
  Antisense strand to SEQ ID NO: 719696
aguaaagacagcaaauaaa

SEQ ID NO: 719698 - RNA, 19 nt, Artificial Sequence
  Description of Artificial Sequence: Synthetic oligonucleotide
  Sense strand starting at position 1630 of SEQ ID NO: 586461
uaacguaccuucucuggaa

SEQ ID NO: 719699 - RNA, 19 nt, Artificial Sequence
  Description of Artificial Sequence: Synthetic oligonucleotide
  Antisense strand to SEQ ID NO: 719698
uuccagagaagguacguua

SEQ ID NO: 719700 - RNA, 19 nt, Artificial Sequence
  Description of Artificial Sequence: Synthetic oligonucleotide
  Sense strand starting at position 1631 of SEQ ID NO: 586461
aacguaccuucucuggaaa

SEQ ID NO: 719701 - RNA, 19 nt, Artificial Sequence
  Description of Artificial Sequence: Synthetic oligonucleotide
  Antisense strand to SEQ ID NO: 719700
uuuccagagaagguacguu

SEQ ID NO: 719702 - RNA, 19 nt, Artificial Sequence
  Description of Artificial Sequence: Synthetic oligonucleotide
  Sense strand starting at position 1632 of SEQ ID NO: 586461
acguaccuucucuggaaau

SEQ ID NO: 719703 - RNA, 19 nt, Artificial Sequence
  Description of Artificial Sequence: Synthetic oligonucleotide
  Antisense strand to SEQ ID NO: 719702
auuuccagagaagguacgu

SEQ ID NO: 719704 - RNA, 19 nt, Artificial Sequence
  Description of Artificial Sequence: Synthetic oligonucleotide
  Sense strand starting at position 2204 of SEQ ID NO: 586461
cccuuauuaggacaagcuu

SEQ ID NO: 719705 - RNA, 19 nt, Artificial Sequence
  Description of Artificial Sequence: Synthetic oligonucleotide
  Antisense strand to SEQ ID NO: 719704
aagcuuguccuaauaaggg

SEQ ID NO: 719706 - RNA, 19 nt, Artificial Sequence
  Description of Artificial Sequence: Synthetic oligonucleotide
  Sense strand starting at position 2212 of SEQ ID NO: 586461
aggacaagcuuaccauuau

SEQ ID NO: 719707 - RNA, 19 nt, Artificial Sequence
  Description of Artificial Sequence: Synthetic oligonucleotide
  Antisense strand to SEQ ID NO: 719706
auaaugguaagcuuguccu

SEQ ID NO: 719708 - RNA, 19 nt, Artificial Sequence
  Description of Artificial Sequence: Synthetic oligonucleotide
  Sense strand starting at position 2252 of SEQ ID NO: 586461
uccagugcucugcaauuua

SEQ ID NO: 719709 - RNA, 19 nt, Artificial Sequence
  Description of Artificial Sequence: Synthetic oligonucleotide
  Antisense strand to SEQ ID NO: 719708
uaaauugcagagcacugga

SEQ ID NO: 719710 - RNA, 19 nt, Artificial Sequence
  Description of Artificial Sequence: Synthetic oligonucleotide
  Sense strand starting at position 2401 of SEQ ID NO: 586461
agcagauguuaaucaagcu

SEQ ID NO: 719711 - RNA, 19 nt, Artificial Sequence
  Description of Artificial Sequence: Synthetic oligonucleotide
  Antisense strand to SEQ ID NO: 719710
agcuugauuaacaucugcu

SEQ ID NO: 719712 - RNA, 19 nt, Artificial Sequence
  Description of Artificial Sequence: Synthetic oligonucleotide
  Sense strand starting at position 2423 of SEQ ID NO: 586461
gccuuugaacacuagauac

SEQ ID NO: 719713 - RNA, 19 nt, Artificial Sequence
  Description of Artificial Sequence: Synthetic oligonucleotide
  Antisense strand to SEQ ID NO: 719712
guaucuaguguucaaaggc

SEQ ID NO: 719714 - RNA, 19 nt, Artificial Sequence
  Description of Artificial Sequence: Synthetic oligonucleotide
  Sense strand starting at position 2832 of SEQ ID NO: 586461
gagaaaugguagccucaaa

SEQ ID NO: 719715 - RNA, 19 nt, Artificial Sequence
  Description of Artificial Sequence: Synthetic oligonucleotide
  Antisense strand to SEQ ID NO: 719714
uuugaggcuaccauuucuc

SEQ ID NO: 719716 - RNA, 19 nt, Artificial Sequence
  Description of Artificial Sequence: Synthetic oligonucleotide
  Sense strand starting at position 2893 of SEQ ID NO: 586461
cuuacugaagcugguaaau

SEQ ID NO: 719717 - RNA, 19 nt, Artificial Sequence
  Description of Artificial Sequence: Synthetic oligonucleotide
  Antisense strand to SEQ ID NO: 719716
auuuaccagcuucaguaag

SEQ ID NO: 719718 - RNA, 19 nt, Artificial Sequence
  Description of Artificial Sequence: Synthetic oligonucleotide
  Sense strand starting at position 2937 of SEQ ID NO: 586461
cuccuauugcaagaacuga

SEQ ID NO: 719719 - RNA, 19 nt, Artificial Sequence
  Description of Artificial Sequence: Synthetic oligonucleotide
  Antisense strand to SEQ ID NO: 719718
ucaguucuugcaauaggag

SEQ ID NO: 719720 - RNA, 19 nt, Artificial Sequence
  Description of Artificial Sequence: Synthetic oligonucleotide
  Sense strand starting at position 2983 of SEQ ID NO: 586461
caggaacgacacugucuua

SEQ ID NO: 719721 - RNA, 19 nt, Artificial Sequence
  Description of Artificial Sequence: Synthetic oligonucleotide
  Antisense strand to SEQ ID NO: 719720
uaagacagugucguuccug

SEQ ID NO: 719722 - RNA, 19 nt, Artificial Sequence
  Description of Artificial Sequence: Synthetic oligonucleotide
  Sense strand starting at position 2986 of SEQ ID NO: 586461
gaacgacacugucuuaguu

SEQ ID NO: 719723 - RNA, 19 nt, Artificial Sequence
  Description of Artificial Sequence: Synthetic oligonucleotide
  Antisense strand to SEQ ID NO: 719722
aacuaagacagugucguuc

SEQ ID NO: 719724 - RNA, 19 nt, Artificial Sequence
  Description of Artificial Sequence: Synthetic oligonucleotide
  Sense strand starting at position 3136 of SEQ ID NO: 586461
gcacuucgaagagaucuuu

SEQ ID NO: 719725 - RNA, 19 nt, Artificial Sequence
  Description of Artificial Sequence: Synthetic oligonucleotide
  Antisense strand to SEQ ID NO: 719724
aaagaucucuucgaagugc

SEQ ID NO: 719726 - RNA, 19 nt, Artificial Sequence
  Description of Artificial Sequence: Synthetic oligonucleotide
  Sense strand starting at position 3205 of SEQ ID NO: 586461
ugaguaacaucugccacua

SEQ ID NO: 719727 - RNA, 19 nt, Artificial Sequence
  Description of Artificial Sequence: Synthetic oligonucleotide
  Antisense strand to SEQ ID NO: 719726
uaguggcagauguuacuca

SEQ ID NO: 719728 - RNA, 19 nt, Artificial Sequence
  Description of Artificial Sequence: Synthetic oligonucleotide
  Sense strand starting at position 3622 of SEQ ID NO: 586461
uuauaugagcaauaguaac

SEQ ID NO: 719729 - RNA, 19 nt, Artificial Sequence
  Description of Artificial Sequence: Synthetic oligonucleotide
  Antisense strand to SEQ ID NO: 719728
guuacuauugcucauauaa

SEQ ID NO: 719730 - RNA, 19 nt, Artificial Sequence
  Description of Artificial Sequence: Synthetic oligonucleotide
  Sense strand starting at position 3656 of SEQ ID NO: 586461
auuaaacaacugcgaauau

SEQ ID NO: 719731 - RNA, 19 nt, Artificial Sequence
  Description of Artificial Sequence: Synthetic oligonucleotide
  Antisense strand to SEQ ID NO: 719730
auauucgcaguuguuuaau

SEQ ID NO: 719732 - RNA, 19 nt, Artificial Sequence
  Description of Artificial Sequence: Synthetic oligonucleotide
  Sense strand starting at position 3803 of SEQ ID NO: 586461
gacuuuauguacuccagag

SEQ ID NO: 719733 - RNA, 19 nt, Artificial Sequence
  Description of Artificial Sequence: Synthetic oligonucleotide
  Antisense strand to SEQ ID NO: 719732
cucuggaguacauaaaguc

SEQ ID NO: 719734 - RNA, 19 nt, Artificial Sequence
  Description of Artificial Sequence: Synthetic oligonucleotide
  Sense strand starting at position 3916 of SEQ ID NO: 586461
gcaauagugccuuaucaac

SEQ ID NO: 719735 - RNA, 19 nt, Artificial Sequence
  Description of Artificial Sequence: Synthetic oligonucleotide
  Antisense strand to SEQ ID NO: 719734
guugauaaggcacuauugc

SEQ ID NO: 719736 - RNA, 19 nt, Artificial Sequence
  Description of Artificial Sequence: Synthetic oligonucleotide
  Sense strand starting at position 17 of SEQ ID NO: 586462
gacugaaguuucucaguca

SEQ ID NO: 719737 - RNA, 19 nt, Artificial Sequence
  Description of Artificial Sequence: Synthetic oligonucleotide
  Antisense strand to SEQ ID NO: 719736
ugacugagaaacuucaguc

SEQ ID NO: 719738 - RNA, 19 nt, Artificial Sequence
  Description of Artificial Sequence: Synthetic oligonucleotide
  Sense strand starting at position 24 of SEQ ID NO: 586462
guuucucagucaucugaag

SEQ ID NO: 719739 - RNA, 19 nt, Artificial Sequence
  Description of Artificial Sequence: Synthetic oligonucleotide
  Antisense strand to SEQ ID NO: 719738
cuucagaugacugagaaac

SEQ ID NO: 719740 - RNA, 19 nt, Artificial Sequence
  Description of Artificial Sequence: Synthetic oligonucleotide
  Sense strand starting at position 30 of SEQ ID NO: 586462
cagucaucugaagggcaua

SEQ ID NO: 719741 - RNA, 19 nt, Artificial Sequence
  Description of Artificial Sequence: Synthetic oligonucleotide
  Antisense strand to SEQ ID NO: 719740
uaugcccuucagaugacug

SEQ ID NO: 719742 - RNA, 19 nt, Artificial Sequence
  Description of Artificial Sequence: Synthetic oligonucleotide
  Sense strand starting at position 31 of SEQ ID NO: 586462
agucaucugaagggcauaa

SEQ ID NO: 719743 - RNA, 19 nt, Artificial Sequence
  Description of Artificial Sequence: Synthetic oligonucleotide
  Antisense strand to SEQ ID NO: 719742
uuaugcccuucagaugacu

SEQ ID NO: 719744 - RNA, 19 nt, Artificial Sequence
  Description of Artificial Sequence: Synthetic oligonucleotide
  Sense strand starting at position 150 of SEQ ID NO: 586462
augccuccagaguacuaaa

SEQ ID NO: 719745 - RNA, 19 nt, Artificial Sequence
  Description of Artificial Sequence: Synthetic oligonucleotide
  Antisense strand to SEQ ID NO: 719744
uuuaguacucuggaggcau

SEQ ID NO: 719746 - RNA, 19 nt, Artificial Sequence
  Description of Artificial Sequence: Synthetic oligonucleotide
  Sense strand starting at position 389 of SEQ ID NO: 586462
uagggaaauuaggaggaau

SEQ ID NO: 719747 - RNA, 19 nt, Artificial Sequence
  Description of Artificial Sequence: Synthetic oligonucleotide
  Antisense strand to SEQ ID NO: 719746
auuccuccuaauuucccua

SEQ ID NO: 719748 - RNA, 19 nt, Artificial Sequence
  Description of Artificial Sequence: Synthetic oligonucleotide
  Sense strand starting at position 425 of SEQ ID NO: 586462
gugugauauuuccugcgaa

SEQ ID NO: 719749 - RNA, 19 nt, Artificial Sequence
  Description of Artificial Sequence: Synthetic oligonucleotide
  Antisense strand to SEQ ID NO: 719748
uucgcaggaaauaucacac

SEQ ID NO: 719750 - RNA, 19 nt, Artificial Sequence
  Description of Artificial Sequence: Synthetic oligonucleotide
  Sense strand starting at position 506 of SEQ ID NO: 586462
aagcuaauccugggacugu

SEQ ID NO: 719751 - RNA, 19 nt, Artificial Sequence
  Description of Artificial Sequence: Synthetic oligonucleotide
  Antisense strand to SEQ ID NO: 719750
acagucccaggauuagcuu

SEQ ID NO: 719752 - RNA, 19 nt, Artificial Sequence
  Description of Artificial Sequence: Synthetic oligonucleotide
  Sense strand starting at position 519 of SEQ ID NO: 586462
gacugugguaggcauauaa

SEQ ID NO: 719753 - RNA, 19 nt, Artificial Sequence
  Description of Artificial Sequence: Synthetic oligonucleotide
  Antisense strand to SEQ ID NO: 719752
uuauaugccuaccacaguc

SEQ ID NO: 719754 - RNA, 19 nt, Artificial Sequence
  Description of Artificial Sequence: Synthetic oligonucleotide
  Sense strand starting at position 529 of SEQ ID NO: 586462
ggcauauaauuccuaugau

SEQ ID NO: 719755 - RNA, 19 nt, Artificial Sequence
  Description of Artificial Sequence: Synthetic oligonucleotide
  Antisense strand to SEQ ID NO: 719754
aucauaggaauuauaugcc

SEQ ID NO: 719756 - RNA, 19 nt, Artificial Sequence
  Description of Artificial Sequence: Synthetic oligonucleotide
  Sense strand starting at position 578 of SEQ ID NO: 586462
auacuuauugucugugaaa

SEQ ID NO: 719757 - RNA, 19 nt, Artificial Sequence
  Description of Artificial Sequence: Synthetic oligonucleotide
  Antisense strand to SEQ ID NO: 719756
uuucacagacaauaaguau

SEQ ID NO: 719758 - RNA, 19 nt, Artificial Sequence
  Description of Artificial Sequence: Synthetic oligonucleotide
  Sense strand starting at position 766 of SEQ ID NO: 586462
gugggcauuugcuuuaacu

SEQ ID NO: 719759 - RNA, 19 nt, Artificial Sequence
  Description of Artificial Sequence: Synthetic oligonucleotide
  Antisense strand to SEQ ID NO: 719758
aguuaaagcaaaugcccac

SEQ ID NO: 719760 - RNA, 19 nt, Artificial Sequence
  Description of Artificial Sequence: Synthetic oligonucleotide
  Sense strand starting at position 894 of SEQ ID NO: 586462
uuaggcauuuaguuuaagu

SEQ ID NO: 719761 - RNA, 19 nt, Artificial Sequence
  Description of Artificial Sequence: Synthetic oligonucleotide
  Antisense strand to SEQ ID NO: 719760
acuuaaacuaaaugccuaa

SEQ ID NO: 719762 - RNA, 19 nt, Artificial Sequence
  Description of Artificial Sequence: Synthetic oligonucleotide
  Sense strand starting at position 1042 of SEQ ID NO: 586462
agacuugagucagugaaga

SEQ ID NO: 719763 - RNA, 19 nt, Artificial Sequence
  Description of Artificial Sequence: Synthetic oligonucleotide
  Antisense strand to SEQ ID NO: 719762
ucuucacugacucaagucu

SEQ ID NO: 719764 - RNA, 19 nt, Artificial Sequence
  Description of Artificial Sequence: Synthetic oligonucleotide
  Sense strand starting at position 1055 of SEQ ID NO: 586462
ugaagaaugaaguggcuau

SEQ ID NO: 719765 - RNA, 19 nt, Artificial Sequence
  Description of Artificial Sequence: Synthetic oligonucleotide
  Antisense strand to SEQ ID NO: 719764
auagccacuucauucuuca

SEQ ID NO: 719766 - RNA, 19 nt, Artificial Sequence
  Description of Artificial Sequence: Synthetic oligonucleotide
  Sense strand starting at position 1311 of SEQ ID NO: 586462
gaucguaguguuuacauga

SEQ ID NO: 719767 - RNA, 19 nt, Artificial Sequence
  Description of Artificial Sequence: Synthetic oligonucleotide
  Antisense strand to SEQ ID NO: 719766
ucauguaaacacuacgauc

SEQ ID NO: 719768 - RNA, 19 nt, Artificial Sequence
  Description of Artificial Sequence: Synthetic oligonucleotide
  Sense strand starting at position 1463 of SEQ ID NO: 586462
gcaaguaucaaguaaugug

SEQ ID NO: 719769 - RNA, 19 nt, Artificial Sequence
  Description of Artificial Sequence: Synthetic oligonucleotide
  Antisense strand to SEQ ID NO: 719768
cacauuacuugauacuugc

SEQ ID NO: 719770 - RNA, 19 nt, Artificial Sequence
  Description of Artificial Sequence: Synthetic oligonucleotide
  Sense strand starting at position 1591 of SEQ ID NO: 586462
cugugagcuuaauuaauau

SEQ ID NO: 719771 - RNA, 19 nt, Artificial Sequence
  Description of Artificial Sequence: Synthetic oligonucleotide
  Antisense strand to SEQ ID NO: 719770
auauuaauuaagcucacag

SEQ ID NO: 719772 - RNA, 19 nt, Artificial Sequence
  Description of Artificial Sequence: Synthetic oligonucleotide
  Sense strand starting at position 1635 of SEQ ID NO: 586462
acugguaugacguaacuaa

SEQ ID NO: 719773 - RNA, 19 nt, Artificial Sequence
  Description of Artificial Sequence: Synthetic oligonucleotide
  Antisense strand to SEQ ID NO: 719772
uuaguuacgucauaccagu

SEQ ID NO: 719774 - RNA, 19 nt, Artificial Sequence
  Description of Artificial Sequence: Synthetic oligonucleotide
  Sense strand starting at position 1639 of SEQ ID NO: 586462
guaugacguaacuaauaug

SEQ ID NO: 719775 - RNA, 19 nt, Artificial Sequence
  Description of Artificial Sequence: Synthetic oligonucleotide
  Antisense strand to SEQ ID NO: 719774
cauauuaguuacgucauac

SEQ ID NO: 719776 - RNA, 19 nt, Artificial Sequence
  Description of Artificial Sequence: Synthetic oligonucleotide
  Sense strand starting at position 2085 of SEQ ID NO: 586462
gagacagcaucuuuagaag

SEQ ID NO: 719777 - RNA, 19 nt, Artificial Sequence
  Description of Artificial Sequence: Synthetic oligonucleotide
  Antisense strand to SEQ ID NO: 719776
cuucuaaagaugcugucuc

SEQ ID NO: 719778 - RNA, 19 nt, Artificial Sequence
  Description of Artificial Sequence: Synthetic oligonucleotide
  Sense strand starting at position 2126 of SEQ ID NO: 586462
auagucauuuaccaaggaa

SEQ ID NO: 719779 - RNA, 19 nt, Artificial Sequence
  Description of Artificial Sequence: Synthetic oligonucleotide
  Antisense strand to SEQ ID NO: 719778
uuccuugguaaaugacuau

SEQ ID NO: 719780 - RNA, 19 nt, Artificial Sequence
  Description of Artificial Sequence: Synthetic oligonucleotide
  Sense strand starting at position 2167 of SEQ ID NO: 586462
uccagaugcuaaucauuga

SEQ ID NO: 719781 - RNA, 19 nt, Artificial Sequence
  Description of Artificial Sequence: Synthetic oligonucleotide
  Antisense strand to SEQ ID NO: 719780
ucaaugauuagcaucugga

SEQ ID NO: 719782 - RNA, 19 nt, Artificial Sequence
  Description of Artificial Sequence: Synthetic oligonucleotide
  Sense strand starting at position 2170 of SEQ ID NO: 586462
agaugcuaaucauugaaau

SEQ ID NO: 719783 - RNA, 19 nt, Artificial Sequence
  Description of Artificial Sequence: Synthetic oligonucleotide
  Antisense strand to SEQ ID NO: 719782
auuucaaugauuagcaucu

SEQ ID NO: 719784 - RNA, 19 nt, Artificial Sequence
  Description of Artificial Sequence: Synthetic oligonucleotide
  Sense strand starting at position 2249 of SEQ ID NO: 586462
cauauagcauggucaauag

SEQ ID NO: 719785 - RNA, 19 nt, Artificial Sequence
  Description of Artificial Sequence: Synthetic oligonucleotide
  Antisense strand to SEQ ID NO: 719784
cuauugaccaugcuauaug

SEQ ID NO: 719786 - RNA, 19 nt, Artificial Sequence
  Description of Artificial Sequence: Synthetic oligonucleotide
  Sense strand starting at position 2253 of SEQ ID NO: 586462
uagcauggucaauagcauu

SEQ ID NO: 719787 - RNA, 19 nt, Artificial Sequence
  Description of Artificial Sequence: Synthetic oligonucleotide
  Antisense strand to SEQ ID NO: 719786
aaugcuauugaccaugcua

SEQ ID NO: 719788 - RNA, 19 nt, Artificial Sequence
  Description of Artificial Sequence: Synthetic oligonucleotide
  Sense strand starting at position 2445 of SEQ ID NO: 586462
aaggcuguuguuuaaugau

SEQ ID NO: 719789 - RNA, 19 nt, Artificial Sequence
  Description of Artificial Sequence: Synthetic oligonucleotide
  Antisense strand to SEQ ID NO: 719788
aucauuaaacaacagccuu

SEQ ID NO: 719790 - RNA, 19 nt, Artificial Sequence
  Description of Artificial Sequence: Synthetic oligonucleotide
  Sense strand starting at position 2455 of SEQ ID NO: 586462
uuuaaugaugcacagcuaa

SEQ ID NO: 719791 - RNA, 19 nt, Artificial Sequence
  Description of Artificial Sequence: Synthetic oligonucleotide
  Antisense strand to SEQ ID NO: 719790
uuagcugugcaucauuaaa

SEQ ID NO: 719792 - RNA, 19 nt, Artificial Sequence
  Description of Artificial Sequence: Synthetic oligonucleotide
  Sense strand starting at position 2607 of SEQ ID NO: 586462
cugcaaacacgucagauau

SEQ ID NO: 719793 - RNA, 19 nt, Artificial Sequence
  Description of Artificial Sequence: Synthetic oligonucleotide
  Antisense strand to SEQ ID NO: 719792
auaucugacguguuugcag

SEQ ID NO: 719794 - RNA, 19 nt, Artificial Sequence
  Description of Artificial Sequence: Synthetic oligonucleotide
  Sense strand starting at position 2699 of SEQ ID NO: 586462
cugggaaguaauuaagcuu

SEQ ID NO: 719795 - RNA, 19 nt, Artificial Sequence
  Description of Artificial Sequence: Synthetic oligonucleotide
  Antisense strand to SEQ ID NO: 719794
aagcuuaauuacuucccag

SEQ ID NO: 719796 - RNA, 19 nt, Artificial Sequence
  Description of Artificial Sequence: Synthetic oligonucleotide
  Sense strand starting at position 2702 of SEQ ID NO: 586462
ggaaguaauuaagcuuaug

SEQ ID NO: 719797 - RNA, 19 nt, Artificial Sequence
  Description of Artificial Sequence: Synthetic oligonucleotide
  Antisense strand to SEQ ID NO: 719796
cauaagcuuaauuacuucc

SEQ ID NO: 719798 - RNA, 19 nt, Artificial Sequence
  Description of Artificial Sequence: Synthetic oligonucleotide
  Sense strand starting at position 2705 of SEQ ID NO: 586462
aguaauuaagcuuaugcau

SEQ ID NO: 719799 - RNA, 19 nt, Artificial Sequence
  Description of Artificial Sequence: Synthetic oligonucleotide
  Antisense strand to SEQ ID NO: 719798
augcauaagcuuaauuacu

SEQ ID NO: 719800 - RNA, 19 nt, Artificial Sequence
  Description of Artificial Sequence: Synthetic oligonucleotide
  Sense strand starting at position 2858 of SEQ ID NO: 586462
aucacuaaugauugugcua

SEQ ID NO: 719801 - RNA, 19 nt, Artificial Sequence
  Description of Artificial Sequence: Synthetic oligonucleotide
  Antisense strand to SEQ ID NO: 719800
uagcacaaucauuagugau

SEQ ID NO: 719802 - RNA, 19 nt, Artificial Sequence
  Description of Artificial Sequence: Synthetic oligonucleotide
  Sense strand starting at position 2979 of SEQ ID NO: 586462
cugccaagaucaguggaaa

SEQ ID NO: 719803 - RNA, 19 nt, Artificial Sequence
  Description of Artificial Sequence: Synthetic oligonucleotide
  Antisense strand to SEQ ID NO: 719802
uuuccacugaucuuggcag

SEQ ID NO: 719804 - RNA, 19 nt, Artificial Sequence
  Description of Artificial Sequence: Synthetic oligonucleotide
  Sense strand starting at position 2980 of SEQ ID NO: 586462
ugccaagaucaguggaaau

SEQ ID NO: 719805 - RNA, 19 nt, Artificial Sequence
  Description of Artificial Sequence: Synthetic oligonucleotide
  Antisense strand to SEQ ID NO: 719804
auuuccacugaucuuggca

SEQ ID NO: 719806 - RNA, 19 nt, Artificial Sequence
  Description of Artificial Sequence: Synthetic oligonucleotide
  Sense strand starting at position 3360 of SEQ ID NO: 586462
ucuuccugucauggagaaa

SEQ ID NO: 719807 - RNA, 19 nt, Artificial Sequence
  Description of Artificial Sequence: Synthetic oligonucleotide
  Antisense strand to SEQ ID NO: 719806
uuucuccaugacaggaaga

SEQ ID NO: 719808 - RNA, 19 nt, Artificial Sequence
  Description of Artificial Sequence: Synthetic oligonucleotide
  Sense strand starting at position 3663 of SEQ ID NO: 586462
acuuaaagcuguuuggaua

SEQ ID NO: 719809 - RNA, 19 nt, Artificial Sequence
  Description of Artificial Sequence: Synthetic oligonucleotide
  Antisense strand to SEQ ID NO: 719808
uauccaaacagcuuuaagu

SEQ ID NO: 719810 - RNA, 19 nt, Artificial Sequence
  Description of Artificial Sequence: Synthetic oligonucleotide
  Sense strand starting at position 3664 of SEQ ID NO: 586462
cuuaaagcuguuuggauaa

SEQ ID NO: 719811 - RNA, 19 nt, Artificial Sequence
  Description of Artificial Sequence: Synthetic oligonucleotide
  Antisense strand to SEQ ID NO: 719810
uuauccaaacagcuuuaag

SEQ ID NO: 719812 - RNA, 19 nt, Artificial Sequence
  Description of Artificial Sequence: Synthetic oligonucleotide
  Sense strand starting at position 3750 of SEQ ID NO: 586462
gcgaaauguguuuauaaac

SEQ ID NO: 719813 - RNA, 19 nt, Artificial Sequence
  Description of Artificial Sequence: Synthetic oligonucleotide
  Antisense strand to SEQ ID NO: 719812
guuuauaaacacauuucgc

SEQ ID NO: 719814 - RNA, 19 nt, Artificial Sequence
  Description of Artificial Sequence: Synthetic oligonucleotide
  Sense strand starting at position 3880 of SEQ ID NO: 586462
uucugagauuaggcagcua

SEQ ID NO: 719815 - RNA, 19 nt, Artificial Sequence
  Description of Artificial Sequence: Synthetic oligonucleotide
  Antisense strand to SEQ ID NO: 719814
uagcugccuaaucucagaa

SEQ ID NO: 719816 - RNA, 19 nt, Artificial Sequence
  Description of Artificial Sequence: Synthetic oligonucleotide
  Sense strand starting at position 528 of SEQ ID NO: 586463
ggaucaaaggccuggcuaa

SEQ ID NO: 719817 - RNA, 19 nt, Artificial Sequence
  Description of Artificial Sequence: Synthetic oligonucleotide
  Antisense strand to SEQ ID NO: 719816
uuagccaggccuuugaucc

SEQ ID NO: 719818 - RNA, 19 nt, Artificial Sequence
  Description of Artificial Sequence: Synthetic oligonucleotide
  Sense strand starting at position 2301 of SEQ ID NO: 586463
gagguuugaggucacgaug

SEQ ID NO: 719819 - RNA, 19 nt, Artificial Sequence
  Description of Artificial Sequence: Synthetic oligonucleotide
  Antisense strand to SEQ ID NO: 719818
caucgugaccucaaaccuc

SEQ ID NO: 719820 - RNA, 19 nt, Artificial Sequence
  Description of Artificial Sequence: Synthetic oligonucleotide
  Sense strand starting at position 2399 of SEQ ID NO: 586463
agcacauagccuuacagaa

SEQ ID NO: 719821 - RNA, 19 nt, Artificial Sequence
  Description of Artificial Sequence: Synthetic oligonucleotide
  Antisense strand to SEQ ID NO: 719820
uucuguaaggcuaugugcu

SEQ ID NO: 719822 - RNA, 19 nt, Artificial Sequence
  Description of Artificial Sequence: Synthetic oligonucleotide
  Sense strand starting at position 2543 of SEQ ID NO: 586463
ggcccuccuaugcagagau

SEQ ID NO: 719823 - RNA, 19 nt, Artificial Sequence
  Description of Artificial Sequence: Synthetic oligonucleotide
  Antisense strand to SEQ ID NO: 719822
aucucugcauaggagggcc

SEQ ID NO: 719824 - RNA, 19 nt, Artificial Sequence
  Description of Artificial Sequence: Synthetic oligonucleotide
  Sense strand starting at position 2651 of SEQ ID NO: 586463
caaauaggucuccgggaga

SEQ ID NO: 719825 - RNA, 19 nt, Artificial Sequence
  Description of Artificial Sequence: Synthetic oligonucleotide
  Antisense strand to SEQ ID NO: 719824
ucucccggagaccuauuug

SEQ ID NO: 719826 - RNA, 19 nt, Artificial Sequence
  Description of Artificial Sequence: Synthetic oligonucleotide
  Sense strand starting at position 2663 of SEQ ID NO: 586463
cgggagagugguugaguca

SEQ ID NO: 719827 - RNA, 19 nt, Artificial Sequence
  Description of Artificial Sequence: Synthetic oligonucleotide
  Antisense strand to SEQ ID NO: 719826
ugacucaaccacucucccg

SEQ ID NO: 719828 - RNA, 19 nt, Artificial Sequence
  Description of Artificial Sequence: Synthetic oligonucleotide
  Sense strand starting at position 2675 of SEQ ID NO: 586463
ugagucaguggccgacauu

SEQ ID NO: 719829 - RNA, 19 nt, Artificial Sequence
  Description of Artificial Sequence: Synthetic oligonucleotide
  Antisense strand to SEQ ID NO: 719828
aaugucggccacugacuca

SEQ ID NO: 719830 - RNA, 19 nt, Artificial Sequence
  Description of Artificial Sequence: Synthetic oligonucleotide
  Sense strand starting at position 2749 of SEQ ID NO: 586463
aggaauugguguucucguu

SEQ ID NO: 719831 - RNA, 19 nt, Artificial Sequence
  Description of Artificial Sequence: Synthetic oligonucleotide
  Antisense strand to SEQ ID NO: 719830
aacgagaacaccaauuccu

SEQ ID NO: 719832 - RNA, 19 nt, Artificial Sequence
  Description of Artificial Sequence: Synthetic oligonucleotide
  Sense strand starting at position 3354 of SEQ ID NO: 586463
ugacguuguggcuguuaau

SEQ ID NO: 719833 - RNA, 19 nt, Artificial Sequence
  Description of Artificial Sequence: Synthetic oligonucleotide
  Antisense strand to SEQ ID NO: 719832
auuaacagccacaacguca

SEQ ID NO: 719834 - RNA, 19 nt, Artificial Sequence
  Description of Artificial Sequence: Synthetic oligonucleotide
  Sense strand starting at position 3446 of SEQ ID NO: 586463
ugcccugagccauauacua

SEQ ID NO: 719835 - RNA, 19 nt, Artificial Sequence
  Description of Artificial Sequence: Synthetic oligonucleotide
  Antisense strand to SEQ ID NO: 719834
uaguauauggcucagggca

SEQ ID NO: 719836 - RNA, 19 nt, Artificial Sequence
  Description of Artificial Sequence: Synthetic oligonucleotide
  Sense strand starting at position 3451 of SEQ ID NO: 586463
ugagccauauacuauggaa

SEQ ID NO: 719837 - RNA, 19 nt, Artificial Sequence
  Description of Artificial Sequence: Synthetic oligonucleotide
  Antisense strand to SEQ ID NO: 719836
uuccauaguauauggcuca

SEQ ID NO: 719838 - RNA, 19 nt, Artificial Sequence
  Description of Artificial Sequence: Synthetic oligonucleotide
  Sense strand starting at position 3477 of SEQ ID NO: 586463
agguuuagcugggugugau

SEQ ID NO: 719839 - RNA, 19 nt, Artificial Sequence
  Description of Artificial Sequence: Synthetic oligonucleotide
  Antisense strand to SEQ ID NO: 719838
aucacacccagcuaaaccu

SEQ ID NO: 719840 - RNA, 19 nt, Artificial Sequence
  Description of Artificial Sequence: Synthetic oligonucleotide
  Sense strand starting at position 3478 of SEQ ID NO: 586463
gguuuagcugggugugaug

SEQ ID NO: 719841 - RNA, 19 nt, Artificial Sequence
  Description of Artificial Sequence: Synthetic oligonucleotide
  Antisense strand to SEQ ID NO: 719840
caucacacccagcuaaacc

SEQ ID NO: 719842 - RNA, 19 nt, Artificial Sequence
  Description of Artificial Sequence: Synthetic oligonucleotide
  Sense strand starting at position 3692 of SEQ ID NO: 586463
auagcaagaucucaucuag

SEQ ID NO: 719843 - RNA, 19 nt, Artificial Sequence
  Description of Artificial Sequence: Synthetic oligonucleotide
  Antisense strand to SEQ ID NO: 719842
cuagaugagaucuugcuau

SEQ ID NO: 719844 - RNA, 19 nt, Artificial Sequence
  Description of Artificial Sequence: Synthetic oligonucleotide
  Sense strand starting at position 3778 of SEQ ID NO: 586463
cuugaaugccucuggugau

SEQ ID NO: 719845 - RNA, 19 nt, Artificial Sequence
  Description of Artificial Sequence: Synthetic oligonucleotide
  Antisense strand to SEQ ID NO: 719844
aucaccagaggcauucaag

SEQ ID NO: 719846 - RNA, 19 nt, Artificial Sequence
  Description of Artificial Sequence: Synthetic oligonucleotide
  Sense strand starting at position 3779 of SEQ ID NO: 586463
uugaaugccucuggugaug

SEQ ID NO: 719847 - RNA, 19 nt, Artificial Sequence
  Description of Artificial Sequence: Synthetic oligonucleotide
  Antisense strand to SEQ ID NO: 719846
caucaccagaggcauucaa

SEQ ID NO: 719848 - RNA, 19 nt, Artificial Sequence
  Description of Artificial Sequence: Synthetic oligonucleotide
  Sense strand starting at position 3829 of SEQ ID NO: 586463
gcaggugauagguguuugu

SEQ ID NO: 719849 - RNA, 19 nt, Artificial Sequence
  Description of Artificial Sequence: Synthetic oligonucleotide
  Antisense strand to SEQ ID NO: 719848
acaaacaccuaucaccugc

SEQ ID NO: 719850 - RNA, 19 nt, Artificial Sequence
  Description of Artificial Sequence: Synthetic oligonucleotide
  Sense strand starting at position 3832 of SEQ ID NO: 586463
ggugauagguguuuguccu

SEQ ID NO: 719851 - RNA, 19 nt, Artificial Sequence
  Description of Artificial Sequence: Synthetic oligonucleotide
  Antisense strand to SEQ ID NO: 719850
aggacaaacaccuaucacc

SEQ ID NO: 719852 - RNA, 19 nt, Artificial Sequence
  Description of Artificial Sequence: Synthetic oligonucleotide
  Sense strand starting at position 3838 of SEQ ID NO: 586463
agguguuuguccugcucua

SEQ ID NO: 719853 - RNA, 19 nt, Artificial Sequence
  Description of Artificial Sequence: Synthetic oligonucleotide
  Antisense strand to SEQ ID NO: 719852
uagagcaggacaaacaccu

SEQ ID NO: 719854 - RNA, 19 nt, Artificial Sequence
  Description of Artificial Sequence: Synthetic oligonucleotide
  Sense strand starting at position 3851 of SEQ ID NO: 586463
gcucuagauuggguacaga

SEQ ID NO: 719855 - RNA, 19 nt, Artificial Sequence
  Description of Artificial Sequence: Synthetic oligonucleotide
  Antisense strand to SEQ ID NO: 719854
ucuguacccaaucuagagc

SEQ ID NO: 719856 - RNA, 19 nt, Artificial Sequence
  Description of Artificial Sequence: Synthetic oligonucleotide
  Sense strand starting at position 3864 of SEQ ID NO: 586463
uacagaugugagugaguga

SEQ ID NO: 719857 - RNA, 19 nt, Artificial Sequence
  Description of Artificial Sequence: Synthetic oligonucleotide
  Antisense strand to SEQ ID NO: 719856
ucacucacucacaucugua

SEQ ID NO: 719858 - RNA, 19 nt, Artificial Sequence
  Description of Artificial Sequence: Synthetic oligonucleotide
  Sense strand starting at position 3875 of SEQ ID NO: 586463
gugagugagcccuggucca

SEQ ID NO: 719859 - RNA, 19 nt, Artificial Sequence
  Description of Artificial Sequence: Synthetic oligonucleotide
  Antisense strand to SEQ ID NO: 719858
uggaccagggcucacucac

SEQ ID NO: 719860 - RNA, 19 nt, Artificial Sequence
  Description of Artificial Sequence: Synthetic oligonucleotide
  Sense strand starting at position 3906 of SEQ ID NO: 586463
ggaaauguguccuugugga

SEQ ID NO: 719861 - RNA, 19 nt, Artificial Sequence
  Description of Artificial Sequence: Synthetic oligonucleotide
  Antisense strand to SEQ ID NO: 719860
uccacaaggacacauuucc

SEQ ID NO: 719862 - RNA, 19 nt, Artificial Sequence
  Description of Artificial Sequence: Synthetic oligonucleotide
  Sense strand starting at position 3910 of SEQ ID NO: 586463
auguguccuuguggacaga

SEQ ID NO: 719863 - RNA, 19 nt, Artificial Sequence
  Description of Artificial Sequence: Synthetic oligonucleotide
  Antisense strand to SEQ ID NO: 719862
ucuguccacaaggacacau

SEQ ID NO: 719864 - RNA, 19 nt, Artificial Sequence
  Description of Artificial Sequence: Synthetic oligonucleotide
  Sense strand starting at position 513 of SEQ ID NO: 586464
aagagaucucugggcccuu

SEQ ID NO: 719865 - RNA, 19 nt, Artificial Sequence
  Description of Artificial Sequence: Synthetic oligonucleotide
  Antisense strand to SEQ ID NO: 719864
aagggcccagagaucucuu

SEQ ID NO: 719866 - RNA, 19 nt, Artificial Sequence
  Description of Artificial Sequence: Synthetic oligonucleotide
  Sense strand starting at position 543 of SEQ ID NO: 586464
gccagauggcacuauccaa

SEQ ID NO: 719867 - RNA, 19 nt, Artificial Sequence
  Description of Artificial Sequence: Synthetic oligonucleotide
  Antisense strand to SEQ ID NO: 719866
uuggauagugccaucuggc

SEQ ID NO: 719868 - RNA, 19 nt, Artificial Sequence
  Description of Artificial Sequence: Synthetic oligonucleotide
  Sense strand starting at position 650 of SEQ ID NO: 586464
aaagaaacgcuuuggugua

SEQ ID NO: 719869 - RNA, 19 nt, Artificial Sequence
  Description of Artificial Sequence: Synthetic oligonucleotide
  Antisense strand to SEQ ID NO: 719868
uacaccaaagcguuucuuu

SEQ ID NO: 719870 - RNA, 19 nt, Artificial Sequence
  Description of Artificial Sequence: Synthetic oligonucleotide
  Sense strand starting at position 847 of SEQ ID NO: 586464
ugugaucaaccuuguuaua

SEQ ID NO: 719871 - RNA, 19 nt, Artificial Sequence
  Description of Artificial Sequence: Synthetic oligonucleotide
  Antisense strand to SEQ ID NO: 719870
uauaacaagguugaucaca

SEQ ID NO: 719872 - RNA, 19 nt, Artificial Sequence
  Description of Artificial Sequence: Synthetic oligonucleotide
  Sense strand starting at position 849 of SEQ ID NO: 586464
ugaucaaccuuguuauaag

SEQ ID NO: 719873 - RNA, 19 nt, Artificial Sequence
  Description of Artificial Sequence: Synthetic oligonucleotide
  Antisense strand to SEQ ID NO: 719872
cuuauaacaagguugauca

SEQ ID NO: 719874 - RNA, 19 nt, Artificial Sequence
  Description of Artificial Sequence: Synthetic oligonucleotide
  Sense strand starting at position 1238 of SEQ ID NO: 586464
ggcaauagggucugugaac

SEQ ID NO: 719875 - RNA, 19 nt, Artificial Sequence
  Description of Artificial Sequence: Synthetic oligonucleotide
  Antisense strand to SEQ ID NO: 719874
guucacagacccuauugcc

SEQ ID NO: 719876 - RNA, 19 nt, Artificial Sequence
  Description of Artificial Sequence: Synthetic oligonucleotide
  Sense strand starting at position 1239 of SEQ ID NO: 586464
gcaauagggucugugaaca

SEQ ID NO: 719877 - RNA, 19 nt, Artificial Sequence
  Description of Artificial Sequence: Synthetic oligonucleotide
  Antisense strand to SEQ ID NO: 719876
uguucacagacccuauugc

SEQ ID NO: 719878 - RNA, 19 nt, Artificial Sequence
  Description of Artificial Sequence: Synthetic oligonucleotide
  Sense strand starting at position 1301 of SEQ ID NO: 586464
cuaggaaagugauuagguu

SEQ ID NO: 719879 - RNA, 19 nt, Artificial Sequence
  Description of Artificial Sequence: Synthetic oligonucleotide
  Antisense strand to SEQ ID NO: 719878
aaccuaaucacuuuccuag

SEQ ID NO: 719880 - RNA, 19 nt, Artificial Sequence
  Description of Artificial Sequence: Synthetic oligonucleotide
  Sense strand starting at position 1307 of SEQ ID NO: 586464
aagugauuagguugagagu

SEQ ID NO: 719881 - RNA, 19 nt, Artificial Sequence
  Description of Artificial Sequence: Synthetic oligonucleotide
  Antisense strand to SEQ ID NO: 719880
acucucaaccuaaucacuu

SEQ ID NO: 719882 - RNA, 19 nt, Artificial Sequence
  Description of Artificial Sequence: Synthetic oligonucleotide
  Sense strand starting at position 1308 of SEQ ID NO: 586464
agugauuagguugagagua

SEQ ID NO: 719883 - RNA, 19 nt, Artificial Sequence
  Description of Artificial Sequence: Synthetic oligonucleotide
  Antisense strand to SEQ ID NO: 719882
uacucucaaccuaaucacu

SEQ ID NO: 719884 - RNA, 19 nt, Artificial Sequence
  Description of Artificial Sequence: Synthetic oligonucleotide
  Sense strand starting at position 2014 of SEQ ID NO: 586464
agcauuaauccauggccua

SEQ ID NO: 719885 - RNA, 19 nt, Artificial Sequence
  Description of Artificial Sequence: Synthetic oligonucleotide
  Antisense strand to SEQ ID NO: 719884
uaggccauggauuaaugcu

SEQ ID NO: 719886 - RNA, 19 nt, Artificial Sequence
  Description of Artificial Sequence: Synthetic oligonucleotide
  Sense strand starting at position 2015 of SEQ ID NO: 586464
gcauuaauccauggccuag

SEQ ID NO: 719887 - RNA, 19 nt, Artificial Sequence
  Description of Artificial Sequence: Synthetic oligonucleotide
  Antisense strand to SEQ ID NO: 719886
cuaggccauggauuaaugc

SEQ ID NO: 719888 - RNA, 19 nt, Artificial Sequence
  Description of Artificial Sequence: Synthetic oligonucleotide
  Sense strand starting at position 2055 of SEQ ID NO: 586464
cgguguuugccuuccuauu

SEQ ID NO: 719889 - RNA, 19 nt, Artificial Sequence
  Description of Artificial Sequence: Synthetic oligonucleotide
  Antisense strand to SEQ ID NO: 719888
aauaggaaggcaaacaccg

SEQ ID NO: 719890 - RNA, 19 nt, Artificial Sequence
  Description of Artificial Sequence: Synthetic oligonucleotide
  Sense strand starting at position 2170 of SEQ ID NO: 586464
ucauucugguaacaggaua

SEQ ID NO: 719891 - RNA, 19 nt, Artificial Sequence
  Description of Artificial Sequence: Synthetic oligonucleotide
  Antisense strand to SEQ ID NO: 719890
uauccuguuaccagaauga

SEQ ID NO: 719892 - RNA, 19 nt, Artificial Sequence
  Description of Artificial Sequence: Synthetic oligonucleotide
  Sense strand starting at position 2357 of SEQ ID NO: 586464
ccuaguuaaucaguugaca

SEQ ID NO: 719893 - RNA, 19 nt, Artificial Sequence
  Description of Artificial Sequence: Synthetic oligonucleotide
  Antisense strand to SEQ ID NO: 719892
ugucaacugauuaacuagg

SEQ ID NO: 719894 - RNA, 19 nt, Artificial Sequence
  Description of Artificial Sequence: Synthetic oligonucleotide
  Sense strand starting at position 2360 of SEQ ID NO: 586464
aguuaaucaguugacauca

SEQ ID NO: 719895 - RNA, 19 nt, Artificial Sequence
  Description of Artificial Sequence: Synthetic oligonucleotide
  Antisense strand to SEQ ID NO: 719894
ugaugucaacugauuaacu

SEQ ID NO: 719896 - RNA, 19 nt, Artificial Sequence
  Description of Artificial Sequence: Synthetic oligonucleotide
  Sense strand starting at position 2493 of SEQ ID NO: 586464
acaucuggcugggcagaua

SEQ ID NO: 719897 - RNA, 19 nt, Artificial Sequence
  Description of Artificial Sequence: Synthetic oligonucleotide
  Antisense strand to SEQ ID NO: 719896
uaucugcccagccagaugu

SEQ ID NO: 719898 - RNA, 19 nt, Artificial Sequence
  Description of Artificial Sequence: Synthetic oligonucleotide
  Sense strand starting at position 2538 of SEQ ID NO: 586464
uccaaagaaucucugaguu

SEQ ID NO: 719899 - RNA, 19 nt, Artificial Sequence
  Description of Artificial Sequence: Synthetic oligonucleotide
  Antisense strand to SEQ ID NO: 719898
aacucagagauucuuugga

SEQ ID NO: 719900 - RNA, 19 nt, Artificial Sequence
  Description of Artificial Sequence: Synthetic oligonucleotide
  Sense strand starting at position 2542 of SEQ ID NO: 586464
aagaaucucugaguuauag

SEQ ID NO: 719901 - RNA, 19 nt, Artificial Sequence
  Description of Artificial Sequence: Synthetic oligonucleotide
  Antisense strand to SEQ ID NO: 719900
cuauaacucagagauucuu

SEQ ID NO: 719902 - RNA, 19 nt, Artificial Sequence
  Description of Artificial Sequence: Synthetic oligonucleotide
  Sense strand starting at position 2552 of SEQ ID NO: 586464
gaguuauagucucuuggac

SEQ ID NO: 719903 - RNA, 19 nt, Artificial Sequence
  Description of Artificial Sequence: Synthetic oligonucleotide
  Antisense strand to SEQ ID NO: 719902
guccaagagacuauaacuc

SEQ ID NO: 719904 - RNA, 19 nt, Artificial Sequence
  Description of Artificial Sequence: Synthetic oligonucleotide
  Sense strand starting at position 2566 of SEQ ID NO: 586464
uggacucacuuccugcaaa

SEQ ID NO: 719905 - RNA, 19 nt, Artificial Sequence
  Description of Artificial Sequence: Synthetic oligonucleotide
  Antisense strand to SEQ ID NO: 719904
uuugcaggaagugagucca

SEQ ID NO: 719906 - RNA, 19 nt, Artificial Sequence
  Description of Artificial Sequence: Synthetic oligonucleotide
  Sense strand starting at position 2658 of SEQ ID NO: 586464
augaguucugccuaagccu

SEQ ID NO: 719907 - RNA, 19 nt, Artificial Sequence
  Description of Artificial Sequence: Synthetic oligonucleotide
  Antisense strand to SEQ ID NO: 719906
aggcuuaggcagaacucau

SEQ ID NO: 719908 - RNA, 19 nt, Artificial Sequence
  Description of Artificial Sequence: Synthetic oligonucleotide
  Sense strand starting at position 2780 of SEQ ID NO: 586464
gagugcaucucaguugacu

SEQ ID NO: 719909 - RNA, 19 nt, Artificial Sequence
  Description of Artificial Sequence: Synthetic oligonucleotide
  Antisense strand to SEQ ID NO: 719908
agucaacugagaugcacuc

SEQ ID NO: 719910 - RNA, 19 nt, Artificial Sequence
  Description of Artificial Sequence: Synthetic oligonucleotide
  Sense strand starting at position 2872 of SEQ ID NO: 586464
ucuccaugcccagguaauu

SEQ ID NO: 719911 - RNA, 19 nt, Artificial Sequence
  Description of Artificial Sequence: Synthetic oligonucleotide
  Antisense strand to SEQ ID NO: 719910
aauuaccugggcauggaga

SEQ ID NO: 719912 - RNA, 19 nt, Artificial Sequence
  Description of Artificial Sequence: Synthetic oligonucleotide
  Sense strand starting at position 3084 of SEQ ID NO: 586464
gcaagagucucaguggugu

SEQ ID NO: 719913 - RNA, 19 nt, Artificial Sequence
  Description of Artificial Sequence: Synthetic oligonucleotide
  Antisense strand to SEQ ID NO: 719912
acaccacugagacucuugc

SEQ ID NO: 719914 - RNA, 19 nt, Artificial Sequence
  Description of Artificial Sequence: Synthetic oligonucleotide
  Sense strand starting at position 3170 of SEQ ID NO: 586464
ggcagaauucccuggguaa

SEQ ID NO: 719915 - RNA, 19 nt, Artificial Sequence
  Description of Artificial Sequence: Synthetic oligonucleotide
  Antisense strand to SEQ ID NO: 719914
uuacccagggaauucugcc

SEQ ID NO: 719916 - RNA, 19 nt, Artificial Sequence
  Description of Artificial Sequence: Synthetic oligonucleotide
  Sense strand starting at position 3171 of SEQ ID NO: 586464
gcagaauucccuggguaau

SEQ ID NO: 719917 - RNA, 19 nt, Artificial Sequence
  Description of Artificial Sequence: Synthetic oligonucleotide
  Antisense strand to SEQ ID NO: 719916
auuacccagggaauucugc

SEQ ID NO: 719918 - RNA, 19 nt, Artificial Sequence
  Description of Artificial Sequence: Synthetic oligonucleotide
  Sense strand starting at position 3172 of SEQ ID NO: 586464
cagaauucccuggguaauu

SEQ ID NO: 719919 - RNA, 19 nt, Artificial Sequence
  Description of Artificial Sequence: Synthetic oligonucleotide
  Antisense strand to SEQ ID NO: 719918
aauuacccagggaauucug

SEQ ID NO: 719920 - RNA, 19 nt, Artificial Sequence
  Description of Artificial Sequence: Synthetic oligonucleotide
  Sense strand starting at position 3496 of SEQ ID NO: 586464
ggccuccucuggguaauuu

SEQ ID NO: 719921 - RNA, 19 nt, Artificial Sequence
  Description of Artificial Sequence: Synthetic oligonucleotide
  Antisense strand to SEQ ID NO: 719920
aaauuacccagaggaggcc

SEQ ID NO: 719922 - RNA, 19 nt, Artificial Sequence
  Description of Artificial Sequence: Synthetic oligonucleotide
  Sense strand starting at position 3523 of SEQ ID NO: 586464
cauauuguugggcaucaga

SEQ ID NO: 719923 - RNA, 19 nt, Artificial Sequence
  Description of Artificial Sequence: Synthetic oligonucleotide
  Antisense strand to SEQ ID NO: 719922
ucugaugcccaacaauaug

SEQ ID NO: 719924 - RNA, 19 nt, Artificial Sequence
  Description of Artificial Sequence: Synthetic oligonucleotide
  Sense strand starting at position 3526 of SEQ ID NO: 586464
auuguugggcaucagacua

SEQ ID NO: 719925 - RNA, 19 nt, Artificial Sequence
  Description of Artificial Sequence: Synthetic oligonucleotide
  Antisense strand to SEQ ID NO: 719924
uagucugaugcccaacaau

SEQ ID NO: 719926 - RNA, 19 nt, Artificial Sequence
  Description of Artificial Sequence: Synthetic oligonucleotide
  Sense strand starting at position 3534 of SEQ ID NO: 586464
gcaucagacuaguccugau

SEQ ID NO: 719927 - RNA, 19 nt, Artificial Sequence
  Description of Artificial Sequence: Synthetic oligonucleotide
  Antisense strand to SEQ ID NO: 719926
aucaggacuagucugaugc

SEQ ID NO: 719928 - RNA, 19 nt, Artificial Sequence
  Description of Artificial Sequence: Synthetic oligonucleotide
  Sense strand starting at position 3564 of SEQ ID NO: 586464
ucugaaauguaccucagga

SEQ ID NO: 719929 - RNA, 19 nt, Artificial Sequence
  Description of Artificial Sequence: Synthetic oligonucleotide
  Antisense strand to SEQ ID NO: 719928
uccugagguacauuucaga

SEQ ID NO: 719930 - RNA, 19 nt, Artificial Sequence
  Description of Artificial Sequence: Synthetic oligonucleotide
  Sense strand starting at position 3574 of SEQ ID NO: 586464
accucaggauucguauuau

SEQ ID NO: 719931 - RNA, 19 nt, Artificial Sequence
  Description of Artificial Sequence: Synthetic oligonucleotide
  Antisense strand to SEQ ID NO: 719930
auaauacgaauccugaggu

SEQ ID NO: 719932 - RNA, 19 nt, Artificial Sequence
  Description of Artificial Sequence: Synthetic oligonucleotide
  Sense strand starting at position 3648 of SEQ ID NO: 586464
gcucuaaguagcuacgaga

SEQ ID NO: 719933 - RNA, 19 nt, Artificial Sequence
  Description of Artificial Sequence: Synthetic oligonucleotide
  Antisense strand to SEQ ID NO: 719932
ucucguagcuacuuagagc

SEQ ID NO: 719934 - RNA, 19 nt, Artificial Sequence
  Description of Artificial Sequence: Synthetic oligonucleotide
  Sense strand starting at position 3659 of SEQ ID NO: 586464
cuacgagaaugaugggaaa

SEQ ID NO: 719935 - RNA, 19 nt, Artificial Sequence
  Description of Artificial Sequence: Synthetic oligonucleotide
  Antisense strand to SEQ ID NO: 719934
uuucccaucauucucguag

SEQ ID NO: 719936 - RNA, 19 nt, Artificial Sequence
  Description of Artificial Sequence: Synthetic oligonucleotide
  Sense strand starting at position 3662 of SEQ ID NO: 586464
cgagaaugaugggaaacaa

SEQ ID NO: 719937 - RNA, 19 nt, Artificial Sequence
  Description of Artificial Sequence: Synthetic oligonucleotide
  Antisense strand to SEQ ID NO: 719936
uuguuucccaucauucucg

SEQ ID NO: 719938 - RNA, 19 nt, Artificial Sequence
  Description of Artificial Sequence: Synthetic oligonucleotide
  Sense strand starting at position 3767 of SEQ ID NO: 586464
cuguaaacccuacaguauu

SEQ ID NO: 719939 - RNA, 19 nt, Artificial Sequence
  Description of Artificial Sequence: Synthetic oligonucleotide
  Antisense strand to SEQ ID NO: 719938
aauacuguaggguuuacag

SEQ ID NO: 719940 - RNA, 19 nt, Artificial Sequence
  Description of Artificial Sequence: Synthetic oligonucleotide
  Sense strand starting at position 3880 of SEQ ID NO: 586464
gucucuugguacccaguaa

SEQ ID NO: 719941 - RNA, 19 nt, Artificial Sequence
  Description of Artificial Sequence: Synthetic oligonucleotide
  Antisense strand to SEQ ID NO: 719940
uuacuggguaccaagagac

SEQ ID NO: 719942 - RNA, 19 nt, Artificial Sequence
  Description of Artificial Sequence: Synthetic oligonucleotide
  Sense strand starting at position 3884 of SEQ ID NO: 586464
cuugguacccaguaaccua

SEQ ID NO: 719943 - RNA, 19 nt, Artificial Sequence
  Description of Artificial Sequence: Synthetic oligonucleotide
  Antisense strand to SEQ ID NO: 719942
uagguuacuggguaccaag

SEQ ID NO: 719944 - RNA, 19 nt, Artificial Sequence
  Description of Artificial Sequence: Synthetic oligonucleotide
  Sense strand starting at position 126 of SEQ ID NO: 586465
aggacagauccuugccuua

SEQ ID NO: 719945 - RNA, 19 nt, Artificial Sequence
  Description of Artificial Sequence: Synthetic oligonucleotide
  Antisense strand to SEQ ID NO: 719944
uaaggcaaggaucuguccu

SEQ ID NO: 719946 - RNA, 19 nt, Artificial Sequence
  Description of Artificial Sequence: Synthetic oligonucleotide
  Sense strand starting at position 128 of SEQ ID NO: 586465
gacagauccuugccuuagu

SEQ ID NO: 719947 - RNA, 19 nt, Artificial Sequence
  Description of Artificial Sequence: Synthetic oligonucleotide
  Antisense strand to SEQ ID NO: 719946
acuaaggcaaggaucuguc

SEQ ID NO: 719948 - RNA, 19 nt, Artificial Sequence
  Description of Artificial Sequence: Synthetic oligonucleotide
  Sense strand starting at position 137 of SEQ ID NO: 586465
uugccuuagugaccuaguu

SEQ ID NO: 719949 - RNA, 19 nt, Artificial Sequence
  Description of Artificial Sequence: Synthetic oligonucleotide
  Antisense strand to SEQ ID NO: 719948
aacuaggucacuaaggcaa

SEQ ID NO: 719950 - RNA, 19 nt, Artificial Sequence
  Description of Artificial Sequence: Synthetic oligonucleotide
  Sense strand starting at position 147 of SEQ ID NO: 586465
gaccuaguuccagggcuuu

SEQ ID NO: 719951 - RNA, 19 nt, Artificial Sequence
  Description of Artificial Sequence: Synthetic oligonucleotide
  Antisense strand to SEQ ID NO: 719950
aaagcccuggaacuagguc

SEQ ID NO: 719952 - RNA, 19 nt, Artificial Sequence
  Description of Artificial Sequence: Synthetic oligonucleotide
  Sense strand starting at position 160 of SEQ ID NO: 586465
ggcuuugacagcuaguaca

SEQ ID NO: 719953 - RNA, 19 nt, Artificial Sequence
  Description of Artificial Sequence: Synthetic oligonucleotide
  Antisense strand to SEQ ID NO: 719952
uguacuagcugucaaagcc

SEQ ID NO: 719954 - RNA, 19 nt, Artificial Sequence
  Description of Artificial Sequence: Synthetic oligonucleotide
  Sense strand starting at position 179 of SEQ ID NO: 586465
gagggucuggccugucaca

SEQ ID NO: 719955 - RNA, 19 nt, Artificial Sequence
  Description of Artificial Sequence: Synthetic oligonucleotide
  Antisense strand to SEQ ID NO: 719954
ugugacaggccagacccuc

SEQ ID NO: 719956 - RNA, 19 nt, Artificial Sequence
  Description of Artificial Sequence: Synthetic oligonucleotide
  Sense strand starting at position 260 of SEQ ID NO: 586465
uggugaggucacgguucaa

SEQ ID NO: 719957 - RNA, 19 nt, Artificial Sequence
  Description of Artificial Sequence: Synthetic oligonucleotide
  Antisense strand to SEQ ID NO: 719956
uugaaccgugaccucacca

SEQ ID NO: 719958 - RNA, 19 nt, Artificial Sequence
  Description of Artificial Sequence: Synthetic oligonucleotide
  Sense strand starting at position 345 of SEQ ID NO: 586465
accugugucaaucguugaa

SEQ ID NO: 719959 - RNA, 19 nt, Artificial Sequence
  Description of Artificial Sequence: Synthetic oligonucleotide
  Antisense strand to SEQ ID NO: 719958
uucaacgauugacacaggu

SEQ ID NO: 719960 - RNA, 19 nt, Artificial Sequence
  Description of Artificial Sequence: Synthetic oligonucleotide
  Sense strand starting at position 348 of SEQ ID NO: 586465
ugugucaaucguugaagga

SEQ ID NO: 719961 - RNA, 19 nt, Artificial Sequence
  Description of Artificial Sequence: Synthetic oligonucleotide
  Antisense strand to SEQ ID NO: 719960
uccuucaacgauugacaca

SEQ ID NO: 719962 - RNA, 19 nt, Artificial Sequence
  Description of Artificial Sequence: Synthetic oligonucleotide
  Sense strand starting at position 349 of SEQ ID NO: 586465
gugucaaucguugaaggac

SEQ ID NO: 719963 - RNA, 19 nt, Artificial Sequence
  Description of Artificial Sequence: Synthetic oligonucleotide
  Antisense strand to SEQ ID NO: 719962
guccuucaacgauugacac

SEQ ID NO: 719964 - RNA, 19 nt, Artificial Sequence
  Description of Artificial Sequence: Synthetic oligonucleotide
  Sense strand starting at position 352 of SEQ ID NO: 586465
ucaaucguugaaggacaau

SEQ ID NO: 719965 - RNA, 19 nt, Artificial Sequence
  Description of Artificial Sequence: Synthetic oligonucleotide
  Antisense strand to SEQ ID NO: 719964
auuguccuucaacgauuga

SEQ ID NO: 719966 - RNA, 19 nt, Artificial Sequence
  Description of Artificial Sequence: Synthetic oligonucleotide
  Sense strand starting at position 1150 of SEQ ID NO: 586465
acagcugauugcugccaua

SEQ ID NO: 719967 - RNA, 19 nt, Artificial Sequence
  Description of Artificial Sequence: Synthetic oligonucleotide
  Antisense strand to SEQ ID NO: 719966
uauggcagcaaucagcugu

SEQ ID NO: 719968 - RNA, 19 nt, Artificial Sequence
  Description of Artificial Sequence: Synthetic oligonucleotide
  Sense strand starting at position 1405 of SEQ ID NO: 586465
cuauguccaucuuucugau

SEQ ID NO: 719969 - RNA, 19 nt, Artificial Sequence
  Description of Artificial Sequence: Synthetic oligonucleotide
  Antisense strand to SEQ ID NO: 719968
aucagaaagauggacauag

SEQ ID NO: 719970 - RNA, 19 nt, Artificial Sequence
  Description of Artificial Sequence: Synthetic oligonucleotide
  Sense strand starting at position 1408 of SEQ ID NO: 586465
uguccaucuuucugauuua

SEQ ID NO: 719971 - RNA, 19 nt, Artificial Sequence
  Description of Artificial Sequence: Synthetic oligonucleotide
  Antisense strand to SEQ ID NO: 719970
uaaaucagaaagauggaca

SEQ ID NO: 719972 - RNA, 19 nt, Artificial Sequence
  Description of Artificial Sequence: Synthetic oligonucleotide
  Sense strand starting at position 1471 of SEQ ID NO: 586465
gcuucuagcuucugcaaca

SEQ ID NO: 719973 - RNA, 19 nt, Artificial Sequence
  Description of Artificial Sequence: Synthetic oligonucleotide
  Antisense strand to SEQ ID NO: 719972
uguugcagaagcuagaagc

SEQ ID NO: 719974 - RNA, 19 nt, Artificial Sequence
  Description of Artificial Sequence: Synthetic oligonucleotide
  Sense strand starting at position 2341 of SEQ ID NO: 586465
agaucagugucgggacaaa

SEQ ID NO: 719975 - RNA, 19 nt, Artificial Sequence
  Description of Artificial Sequence: Synthetic oligonucleotide
  Antisense strand to SEQ ID NO: 719974
uuugucccgacacugaucu

SEQ ID NO: 719976 - RNA, 19 nt, Artificial Sequence
  Description of Artificial Sequence: Synthetic oligonucleotide
  Sense strand starting at position 2428 of SEQ ID NO: 586465
gacccagucucagugaaau

SEQ ID NO: 719977 - RNA, 19 nt, Artificial Sequence
  Description of Artificial Sequence: Synthetic oligonucleotide
  Antisense strand to SEQ ID NO: 719976
auuucacugagacuggguc

SEQ ID NO: 719978 - RNA, 19 nt, Artificial Sequence
  Description of Artificial Sequence: Synthetic oligonucleotide
  Sense strand starting at position 2434 of SEQ ID NO: 586465
gucucagugaaaugggaaa

SEQ ID NO: 719979 - RNA, 19 nt, Artificial Sequence
  Description of Artificial Sequence: Synthetic oligonucleotide
  Antisense strand to SEQ ID NO: 719978
uuucccauuucacugagac

SEQ ID NO: 719980 - RNA, 19 nt, Artificial Sequence
  Description of Artificial Sequence: Synthetic oligonucleotide
  Sense strand starting at position 2611 of SEQ ID NO: 586465
ccagcaggcauguguuaga

SEQ ID NO: 719981 - RNA, 19 nt, Artificial Sequence
  Description of Artificial Sequence: Synthetic oligonucleotide
  Antisense strand to SEQ ID NO: 719980
ucuaacacaugccugcugg

SEQ ID NO: 719982 - RNA, 19 nt, Artificial Sequence
  Description of Artificial Sequence: Synthetic oligonucleotide
  Sense strand starting at position 2624 of SEQ ID NO: 586465
guuagagggugcucuuuca

SEQ ID NO: 719983 - RNA, 19 nt, Artificial Sequence
  Description of Artificial Sequence: Synthetic oligonucleotide
  Antisense strand to SEQ ID NO: 719982
ugaaagagcacccucuaac

SEQ ID NO: 719984 - RNA, 19 nt, Artificial Sequence
  Description of Artificial Sequence: Synthetic oligonucleotide
  Sense strand starting at position 2640 of SEQ ID NO: 586465
ucaguuuagccuuguaggu

SEQ ID NO: 719985 - RNA, 19 nt, Artificial Sequence
  Description of Artificial Sequence: Synthetic oligonucleotide
  Antisense strand to SEQ ID NO: 719984
accuacaaggcuaaacuga

SEQ ID NO: 719986 - RNA, 19 nt, Artificial Sequence
  Description of Artificial Sequence: Synthetic oligonucleotide
  Sense strand starting at position 2660 of SEQ ID NO: 586465
gcuuguguuagucagcugu

SEQ ID NO: 719987 - RNA, 19 nt, Artificial Sequence
  Description of Artificial Sequence: Synthetic oligonucleotide
  Antisense strand to SEQ ID NO: 719986
acagcugacuaacacaagc

SEQ ID NO: 719988 - RNA, 19 nt, Artificial Sequence
  Description of Artificial Sequence: Synthetic oligonucleotide
  Sense strand starting at position 2662 of SEQ ID NO: 586465
uuguguuagucagcuguua

SEQ ID NO: 719989 - RNA, 19 nt, Artificial Sequence
  Description of Artificial Sequence: Synthetic oligonucleotide
  Antisense strand to SEQ ID NO: 719988
uaacagcugacuaacacaa

SEQ ID NO: 719990 - RNA, 19 nt, Artificial Sequence
  Description of Artificial Sequence: Synthetic oligonucleotide
  Sense strand starting at position 2664 of SEQ ID NO: 586465
guguuagucagcuguuaga

SEQ ID NO: 719991 - RNA, 19 nt, Artificial Sequence
  Description of Artificial Sequence: Synthetic oligonucleotide
  Antisense strand to SEQ ID NO: 719990
ucuaacagcugacuaacac

SEQ ID NO: 719992 - RNA, 19 nt, Artificial Sequence
  Description of Artificial Sequence: Synthetic oligonucleotide
  Sense strand starting at position 2990 of SEQ ID NO: 586465
ugugucucugcccacuaua

SEQ ID NO: 719993 - RNA, 19 nt, Artificial Sequence
  Description of Artificial Sequence: Synthetic oligonucleotide
  Antisense strand to SEQ ID NO: 719992
uauagugggcagagacaca

SEQ ID NO: 719994 - RNA, 19 nt, Artificial Sequence
  Description of Artificial Sequence: Synthetic oligonucleotide
  Sense strand starting at position 3231 of SEQ ID NO: 586465
aaggaucacugguccugaa

SEQ ID NO: 719995 - RNA, 19 nt, Artificial Sequence
  Description of Artificial Sequence: Synthetic oligonucleotide
  Antisense strand to SEQ ID NO: 719994
uucaggaccagugauccuu

SEQ ID NO: 719996 - RNA, 19 nt, Artificial Sequence
  Description of Artificial Sequence: Synthetic oligonucleotide
  Sense strand starting at position 3610 of SEQ ID NO: 586465
gcauuucuccaggguccuu

SEQ ID NO: 719997 - RNA, 19 nt, Artificial Sequence
  Description of Artificial Sequence: Synthetic oligonucleotide
  Antisense strand to SEQ ID NO: 719996
aaggacccuggagaaaugc

SEQ ID NO: 719998 - RNA, 19 nt, Artificial Sequence
  Description of Artificial Sequence: Synthetic oligonucleotide
  Sense strand starting at position 3845 of SEQ ID NO: 586465
ccacacauuuccugggaau

SEQ ID NO: 719999 - RNA, 19 nt, Artificial Sequence
  Description of Artificial Sequence: Synthetic oligonucleotide
  Antisense strand to SEQ ID NO: 719998
auucccaggaaaugugugg

SEQ ID NO: 720000 - RNA, 19 nt, Artificial Sequence
  Description of Artificial Sequence: Synthetic oligonucleotide
  Sense strand starting at position 3903 of SEQ ID NO: 586465
gaaagaaguuccuguuaau

SEQ ID NO: 720001 - RNA, 19 nt, Artificial Sequence
  Description of Artificial Sequence: Synthetic oligonucleotide
  Antisense strand to SEQ ID NO: 720000
auuaacaggaacuucuuuc

SEQ ID NO: 720002 - RNA, 19 nt, Artificial Sequence
  Description of Artificial Sequence: Synthetic oligonucleotide
  Sense strand starting at position 3906 of SEQ ID NO: 586465
agaaguuccuguuaaucca

SEQ ID NO: 720003 - RNA, 19 nt, Artificial Sequence
  Description of Artificial Sequence: Synthetic oligonucleotide
  Antisense strand to SEQ ID NO: 720002
uggauuaacaggaacuucu

SEQ ID NO: 720004 - RNA, 19 nt, Artificial Sequence
  Description of Artificial Sequence: Synthetic oligonucleotide
  Sense strand starting at position 3946 of SEQ ID NO: 586465
aggauaaacugcgugguua

SEQ ID NO: 720005 - RNA, 19 nt, Artificial Sequence
  Description of Artificial Sequence: Synthetic oligonucleotide
  Antisense strand to SEQ ID NO: 720004
uaaccacgcaguuuauccu

SEQ ID NO: 720006 - RNA, 19 nt, Artificial Sequence
  Description of Artificial Sequence: Synthetic oligonucleotide
  Sense strand starting at position 3947 of SEQ ID NO: 586465
ggauaaacugcgugguuau

SEQ ID NO: 720007 - RNA, 19 nt, Artificial Sequence
  Description of Artificial Sequence: Synthetic oligonucleotide
  Antisense strand to SEQ ID NO: 720006
auaaccacgcaguuuaucc

SEQ ID NO: 720008 - RNA, 19 nt, Artificial Sequence
  Description of Artificial Sequence: Synthetic oligonucleotide
  Sense strand starting at position 3948 of SEQ ID NO: 586465
gauaaacugcgugguuauu

SEQ ID NO: 720009 - RNA, 19 nt, Artificial Sequence
  Description of Artificial Sequence: Synthetic oligonucleotide
  Antisense strand to SEQ ID NO: 720008
aauaaccacgcaguuuauc

SEQ ID NO: 720010 - RNA, 19 nt, Artificial Sequence
  Description of Artificial Sequence: Synthetic oligonucleotide
  Sense strand starting at position 2259 of SEQ ID NO: 586466
agaguaggauugcucugaa

SEQ ID NO: 720011 - RNA, 19 nt, Artificial Sequence
  Description of Artificial Sequence: Synthetic oligonucleotide
  Antisense strand to SEQ ID NO: 720010
uucagagcaauccuacucu

SEQ ID NO: 720012 - RNA, 19 nt, Artificial Sequence
  Description of Artificial Sequence: Synthetic oligonucleotide
  Sense strand starting at position 2262 of SEQ ID NO: 586466
guaggauugcucugaagcg

SEQ ID NO: 720013 - RNA, 19 nt, Artificial Sequence
  Description of Artificial Sequence: Synthetic oligonucleotide
  Antisense strand to SEQ ID NO: 720012
cgcuucagagcaauccuac

SEQ ID NO: 720014 - RNA, 19 nt, Artificial Sequence
  Description of Artificial Sequence: Synthetic oligonucleotide
  Sense strand starting at position 2321 of SEQ ID NO: 586466
cgaggauacguaggagaau

SEQ ID NO: 720015 - RNA, 19 nt, Artificial Sequence
  Description of Artificial Sequence: Synthetic oligonucleotide
  Antisense strand to SEQ ID NO: 720014
auucuccuacguauccucg

SEQ ID NO: 720016 - RNA, 19 nt, Artificial Sequence
  Description of Artificial Sequence: Synthetic oligonucleotide
  Sense strand starting at position 2330 of SEQ ID NO: 586466
guaggagaauggucccaua

SEQ ID NO: 720017 - RNA, 19 nt, Artificial Sequence
  Description of Artificial Sequence: Synthetic oligonucleotide
  Antisense strand to SEQ ID NO: 720016
uaugggaccauucuccuac

SEQ ID NO: 720018 - RNA, 19 nt, Artificial Sequence
  Description of Artificial Sequence: Synthetic oligonucleotide
  Sense strand starting at position 2333 of SEQ ID NO: 586466
ggagaauggucccauaugc

SEQ ID NO: 720019 - RNA, 19 nt, Artificial Sequence
  Description of Artificial Sequence: Synthetic oligonucleotide
  Antisense strand to SEQ ID NO: 720018
gcauaugggaccauucucc

SEQ ID NO: 720020 - RNA, 19 nt, Artificial Sequence
  Description of Artificial Sequence: Synthetic oligonucleotide
  Sense strand starting at position 2344 of SEQ ID NO: 586466
ccauaugcugcuggagaua

SEQ ID NO: 720021 - RNA, 19 nt, Artificial Sequence
  Description of Artificial Sequence: Synthetic oligonucleotide
  Antisense strand to SEQ ID NO: 720020
uaucuccagcagcauaugg

SEQ ID NO: 720022 - RNA, 19 nt, Artificial Sequence
  Description of Artificial Sequence: Synthetic oligonucleotide
  Sense strand starting at position 2444 of SEQ ID NO: 586466
gcugguuaccaacagcaaa

SEQ ID NO: 720023 - RNA, 19 nt, Artificial Sequence
  Description of Artificial Sequence: Synthetic oligonucleotide
  Antisense strand to SEQ ID NO: 720022
uuugcuguugguaaccagc

SEQ ID NO: 720024 - RNA, 19 nt, Artificial Sequence
  Description of Artificial Sequence: Synthetic oligonucleotide
  Sense strand starting at position 2465 of SEQ ID NO: 586466
ggguucugcuuccagaaca

SEQ ID NO: 720025 - RNA, 19 nt, Artificial Sequence
  Description of Artificial Sequence: Synthetic oligonucleotide
  Antisense strand to SEQ ID NO: 720024
uguucuggaagcagaaccc

SEQ ID NO: 720026 - RNA, 19 nt, Artificial Sequence
  Description of Artificial Sequence: Synthetic oligonucleotide
  Sense strand starting at position 2481 of SEQ ID NO: 586466
acagaugccuuugacuuaa

SEQ ID NO: 720027 - RNA, 19 nt, Artificial Sequence
  Description of Artificial Sequence: Synthetic oligonucleotide
  Antisense strand to SEQ ID NO: 720026
uuaagucaaaggcaucugu

SEQ ID NO: 720028 - RNA, 19 nt, Artificial Sequence
  Description of Artificial Sequence: Synthetic oligonucleotide
  Sense strand starting at position 2517 of SEQ ID NO: 586466
uugaguuugugucugucga

SEQ ID NO: 720029 - RNA, 19 nt, Artificial Sequence
  Description of Artificial Sequence: Synthetic oligonucleotide
  Antisense strand to SEQ ID NO: 720028
ucgacagacacaaacucaa

SEQ ID NO: 720030 - RNA, 19 nt, Artificial Sequence
  Description of Artificial Sequence: Synthetic oligonucleotide
  Sense strand starting at position 2706 of SEQ ID NO: 586466
cuaucauucuucuuggagu

SEQ ID NO: 720031 - RNA, 19 nt, Artificial Sequence
  Description of Artificial Sequence: Synthetic oligonucleotide
  Antisense strand to SEQ ID NO: 720030
acuccaagaagaaugauag

SEQ ID NO: 720032 - RNA, 19 nt, Artificial Sequence
  Description of Artificial Sequence: Synthetic oligonucleotide
  Sense strand starting at position 2708 of SEQ ID NO: 586466
aucauucuucuuggaguca

SEQ ID NO: 720033 - RNA, 19 nt, Artificial Sequence
  Description of Artificial Sequence: Synthetic oligonucleotide
  Antisense strand to SEQ ID NO: 720032
ugacuccaagaagaaugau

SEQ ID NO: 720034 - RNA, 19 nt, Artificial Sequence
  Description of Artificial Sequence: Synthetic oligonucleotide
  Sense strand starting at position 2709 of SEQ ID NO: 586466
ucauucuucuuggagucaa

SEQ ID NO: 720035 - RNA, 19 nt, Artificial Sequence
  Description of Artificial Sequence: Synthetic oligonucleotide
  Antisense strand to SEQ ID NO: 720034
uugacuccaagaagaauga

SEQ ID NO: 720036 - RNA, 19 nt, Artificial Sequence
  Description of Artificial Sequence: Synthetic oligonucleotide
  Sense strand starting at position 3020 of SEQ ID NO: 586466
acgccaguuuaauaaacaa

SEQ ID NO: 720037 - RNA, 19 nt, Artificial Sequence
  Description of Artificial Sequence: Synthetic oligonucleotide
  Antisense strand to SEQ ID NO: 720036
uuguuuauuaaacuggcgu

SEQ ID NO: 720038 - RNA, 19 nt, Artificial Sequence
  Description of Artificial Sequence: Synthetic oligonucleotide
  Sense strand starting at position 3097 of SEQ ID NO: 586466
acagcauaauccgucucaa

SEQ ID NO: 720039 - RNA, 19 nt, Artificial Sequence
  Description of Artificial Sequence: Synthetic oligonucleotide
  Antisense strand to SEQ ID NO: 720038
uugagacggauuaugcugu

SEQ ID NO: 720040 - RNA, 19 nt, Artificial Sequence
  Description of Artificial Sequence: Synthetic oligonucleotide
  Sense strand starting at position 3112 of SEQ ID NO: 586466
ucaacagacgcacauuaau

SEQ ID NO: 720041 - RNA, 19 nt, Artificial Sequence
  Description of Artificial Sequence: Synthetic oligonucleotide
  Antisense strand to SEQ ID NO: 720040
auuaaugugcgucuguuga

SEQ ID NO: 720042 - RNA, 19 nt, Artificial Sequence
  Description of Artificial Sequence: Synthetic oligonucleotide
  Sense strand starting at position 3153 of SEQ ID NO: 586466
uuuaaaugaugguuugacu

SEQ ID NO: 720043 - RNA, 19 nt, Artificial Sequence
  Description of Artificial Sequence: Synthetic oligonucleotide
  Antisense strand to SEQ ID NO: 720042
agucaaaccaucauuuaaa

SEQ ID NO: 720044 - RNA, 19 nt, Artificial Sequence
  Description of Artificial Sequence: Synthetic oligonucleotide
  Sense strand starting at position 3156 of SEQ ID NO: 586466
aaaugaugguuugacuaug

SEQ ID NO: 720045 - RNA, 19 nt, Artificial Sequence
  Description of Artificial Sequence: Synthetic oligonucleotide
  Antisense strand to SEQ ID NO: 720044
cauagucaaaccaucauuu

SEQ ID NO: 720046 - RNA, 19 nt, Artificial Sequence
  Description of Artificial Sequence: Synthetic oligonucleotide
  Sense strand starting at position 3161 of SEQ ID NO: 586466
augguuugacuauguaauu

SEQ ID NO: 720047 - RNA, 19 nt, Artificial Sequence
  Description of Artificial Sequence: Synthetic oligonucleotide
  Antisense strand to SEQ ID NO: 720046
aauuacauagucaaaccau

SEQ ID NO: 720048 - RNA, 19 nt, Artificial Sequence
  Description of Artificial Sequence: Synthetic oligonucleotide
  Sense strand starting at position 3162 of SEQ ID NO: 586466
ugguuugacuauguaauuc

SEQ ID NO: 720049 - RNA, 19 nt, Artificial Sequence
  Description of Artificial Sequence: Synthetic oligonucleotide
  Antisense strand to SEQ ID NO: 720048
gaauuacauagucaaacca

SEQ ID NO: 720050 - RNA, 19 nt, Artificial Sequence
  Description of Artificial Sequence: Synthetic oligonucleotide
  Sense strand starting at position 3196 of SEQ ID NO: 586466
gugccauuggacuauuaau

SEQ ID NO: 720051 - RNA, 19 nt, Artificial Sequence
  Description of Artificial Sequence: Synthetic oligonucleotide
  Antisense strand to SEQ ID NO: 720050
auuaauaguccaauggcac

SEQ ID NO: 720052 - RNA, 19 nt, Artificial Sequence
  Description of Artificial Sequence: Synthetic oligonucleotide
  Sense strand starting at position 3242 of SEQ ID NO: 586466
gugaucagacucuaucuca

SEQ ID NO: 720053 - RNA, 19 nt, Artificial Sequence
  Description of Artificial Sequence: Synthetic oligonucleotide
  Antisense strand to SEQ ID NO: 720052
ugagauagagucugaucac

SEQ ID NO: 720054 - RNA, 19 nt, Artificial Sequence
  Description of Artificial Sequence: Synthetic oligonucleotide
  Sense strand starting at position 3250 of SEQ ID NO: 586466
acucuaucucagcguacuu

SEQ ID NO: 720055 - RNA, 19 nt, Artificial Sequence
  Description of Artificial Sequence: Synthetic oligonucleotide
  Antisense strand to SEQ ID NO: 720054
aaguacgcugagauagagu

SEQ ID NO: 720056 - RNA, 19 nt, Artificial Sequence
  Description of Artificial Sequence: Synthetic oligonucleotide
  Sense strand starting at position 3425 of SEQ ID NO: 586466
gcaaaucacuuguuacagu

SEQ ID NO: 720057 - RNA, 19 nt, Artificial Sequence
  Description of Artificial Sequence: Synthetic oligonucleotide
  Antisense strand to SEQ ID NO: 720056
acuguaacaagugauuugc

SEQ ID NO: 720058 - RNA, 19 nt, Artificial Sequence
  Description of Artificial Sequence: Synthetic oligonucleotide
  Sense strand starting at position 3635 of SEQ ID NO: 586466
aaacguuugggccaaauua

SEQ ID NO: 720059 - RNA, 19 nt, Artificial Sequence
  Description of Artificial Sequence: Synthetic oligonucleotide
  Antisense strand to SEQ ID NO: 720058
uaauuuggcccaaacguuu

SEQ ID NO: 720060 - RNA, 19 nt, Artificial Sequence
  Description of Artificial Sequence: Synthetic oligonucleotide
  Sense strand starting at position 3700 of SEQ ID NO: 586466
gggagugauuccaggguga

SEQ ID NO: 720061 - RNA, 19 nt, Artificial Sequence
  Description of Artificial Sequence: Synthetic oligonucleotide
  Antisense strand to SEQ ID NO: 720060
ucacccuggaaucacuccc

SEQ ID NO: 720062 - RNA, 19 nt, Artificial Sequence
  Description of Artificial Sequence: Synthetic oligonucleotide
  Sense strand starting at position 3702 of SEQ ID NO: 586466
gagugauuccagggugacu

SEQ ID NO: 720063 - RNA, 19 nt, Artificial Sequence
  Description of Artificial Sequence: Synthetic oligonucleotide
  Antisense strand to SEQ ID NO: 720062
agucacccuggaaucacuc

SEQ ID NO: 720064 - RNA, 19 nt, Artificial Sequence
  Description of Artificial Sequence: Synthetic oligonucleotide
  Sense strand starting at position 3778 of SEQ ID NO: 586466
aaagguuacuacuuagaug

SEQ ID NO: 720065 - RNA, 19 nt, Artificial Sequence
  Description of Artificial Sequence: Synthetic oligonucleotide
  Antisense strand to SEQ ID NO: 720064
caucuaaguaguaaccuuu

SEQ ID NO: 720066 - RNA, 19 nt, Artificial Sequence
  Description of Artificial Sequence: Synthetic oligonucleotide
  Sense strand starting at position 3785 of SEQ ID NO: 586466
acuacuuagauggguguua

SEQ ID NO: 720067 - RNA, 19 nt, Artificial Sequence
  Description of Artificial Sequence: Synthetic oligonucleotide
  Antisense strand to SEQ ID NO: 720066
uaacacccaucuaaguagu

SEQ ID NO: 720068 - RNA, 19 nt, Artificial Sequence
  Description of Artificial Sequence: Synthetic oligonucleotide
  Sense strand starting at position 3787 of SEQ ID NO: 586466
uacuuagauggguguuacu

SEQ ID NO: 720069 - RNA, 19 nt, Artificial Sequence
  Description of Artificial Sequence: Synthetic oligonucleotide
  Antisense strand to SEQ ID NO: 720068
aguaacacccaucuaagua

SEQ ID NO: 720070 - RNA, 19 nt, Artificial Sequence
  Description of Artificial Sequence: Synthetic oligonucleotide
  Sense strand starting at position 3794 of SEQ ID NO: 586466
auggguguuacuuguacua

SEQ ID NO: 720071 - RNA, 19 nt, Artificial Sequence
  Description of Artificial Sequence: Synthetic oligonucleotide
  Antisense strand to SEQ ID NO: 720070
uaguacaaguaacacccau

SEQ ID NO: 720072 - RNA, 19 nt, Artificial Sequence
  Description of Artificial Sequence: Synthetic oligonucleotide
  Sense strand starting at position 3816 of SEQ ID NO: 586466
gcuaacaagucucugagaa

SEQ ID NO: 720073 - RNA, 19 nt, Artificial Sequence
  Description of Artificial Sequence: Synthetic oligonucleotide
  Antisense strand to SEQ ID NO: 720072
uucucagagacuuguuagc

SEQ ID NO: 720074 - RNA, 19 nt, Artificial Sequence
  Description of Artificial Sequence: Synthetic oligonucleotide
  Sense strand starting at position 3817 of SEQ ID NO: 586466
cuaacaagucucugagaau

SEQ ID NO: 720075 - RNA, 19 nt, Artificial Sequence
  Description of Artificial Sequence: Synthetic oligonucleotide
  Antisense strand to SEQ ID NO: 720074
auucucagagacuuguuag

SEQ ID NO: 720076 - RNA, 19 nt, Artificial Sequence
  Description of Artificial Sequence: Synthetic oligonucleotide
  Sense strand starting at position 3820 of SEQ ID NO: 586466
acaagucucugagaauuuc

SEQ ID NO: 720077 - RNA, 19 nt, Artificial Sequence
  Description of Artificial Sequence: Synthetic oligonucleotide
  Antisense strand to SEQ ID NO: 720076
gaaauucucagagacuugu

SEQ ID NO: 720078 - RNA, 19 nt, Artificial Sequence
  Description of Artificial Sequence: Synthetic oligonucleotide
  Sense strand starting at position 3847 of SEQ ID NO: 586466
gcauguuggugucuauaaa

SEQ ID NO: 720079 - RNA, 19 nt, Artificial Sequence
  Description of Artificial Sequence: Synthetic oligonucleotide
  Antisense strand to SEQ ID NO: 720078
uuuauagacaccaacaugc

SEQ ID NO: 720080 - RNA, 19 nt, Artificial Sequence
  Description of Artificial Sequence: Synthetic oligonucleotide
  Sense strand starting at position 3848 of SEQ ID NO: 586466
cauguuggugucuauaaag

SEQ ID NO: 720081 - RNA, 19 nt, Artificial Sequence
  Description of Artificial Sequence: Synthetic oligonucleotide
  Antisense strand to SEQ ID NO: 720080
cuuuauagacaccaacaug

SEQ ID NO: 720082 - RNA, 19 nt, Artificial Sequence
  Description of Artificial Sequence: Synthetic oligonucleotide
  Sense strand starting at position 3875 of SEQ ID NO: 586466
gucauaucuuuaccugcua

SEQ ID NO: 720083 - RNA, 19 nt, Artificial Sequence
  Description of Artificial Sequence: Synthetic oligonucleotide
  Antisense strand to SEQ ID NO: 720082
uagcagguaaagauaugac

SEQ ID NO: 720084 - RNA, 19 nt, Artificial Sequence
  Description of Artificial Sequence: Synthetic oligonucleotide
  Sense strand starting at position 3901 of SEQ ID NO: 586466
augacaucuguuugucuca

SEQ ID NO: 720085 - RNA, 19 nt, Artificial Sequence
  Description of Artificial Sequence: Synthetic oligonucleotide
  Antisense strand to SEQ ID NO: 720084
ugagacaaacagaugucau

SEQ ID NO: 720086 - RNA, 19 nt, Artificial Sequence
  Description of Artificial Sequence: Synthetic oligonucleotide
  Sense strand starting at position 3903 of SEQ ID NO: 586466
gacaucuguuugucucaga

SEQ ID NO: 720087 - RNA, 19 nt, Artificial Sequence
  Description of Artificial Sequence: Synthetic oligonucleotide
  Antisense strand to SEQ ID NO: 720086
ucugagacaaacagauguc

SEQ ID NO: 720088 - RNA, 19 nt, Artificial Sequence
  Description of Artificial Sequence: Synthetic oligonucleotide
  Sense strand starting at position 3904 of SEQ ID NO: 586466
acaucuguuugucucagau

SEQ ID NO: 720089 - RNA, 19 nt, Artificial Sequence
  Description of Artificial Sequence: Synthetic oligonucleotide
  Antisense strand to SEQ ID NO: 720088
aucugagacaaacagaugu

SEQ ID NO: 720090 - RNA, 19 nt, Artificial Sequence
  Description of Artificial Sequence: Synthetic oligonucleotide
  Sense strand starting at position 2924 of SEQ ID NO: 586467
aggcuucccacguguggaa

SEQ ID NO: 720091 - RNA, 19 nt, Artificial Sequence
  Description of Artificial Sequence: Synthetic oligonucleotide
  Antisense strand to SEQ ID NO: 720090
uuccacacgugggaagccu

SEQ ID NO: 720092 - RNA, 19 nt, Artificial Sequence
  Description of Artificial Sequence: Synthetic oligonucleotide
  Sense strand starting at position 2937 of SEQ ID NO: 586467
guggaagucugccuuguac

SEQ ID NO: 720093 - RNA, 19 nt, Artificial Sequence
  Description of Artificial Sequence: Synthetic oligonucleotide
  Antisense strand to SEQ ID NO: 720092
guacaaggcagacuuccac

SEQ ID NO: 720094 - RNA, 19 nt, Artificial Sequence
  Description of Artificial Sequence: Synthetic oligonucleotide
  Sense strand starting at position 3037 of SEQ ID NO: 586467
uucuguaaugcaggcagau

SEQ ID NO: 720095 - RNA, 19 nt, Artificial Sequence
  Description of Artificial Sequence: Synthetic oligonucleotide
  Antisense strand to SEQ ID NO: 720094
aucugccugcauuacagaa

SEQ ID NO: 720096 - RNA, 19 nt, Artificial Sequence
  Description of Artificial Sequence: Synthetic oligonucleotide
  Sense strand starting at position 3039 of SEQ ID NO: 586467
cuguaaugcaggcagauaa

SEQ ID NO: 720097 - RNA, 19 nt, Artificial Sequence
  Description of Artificial Sequence: Synthetic oligonucleotide
  Antisense strand to SEQ ID NO: 720096
uuaucugccugcauuacag

SEQ ID NO: 720098 - RNA, 19 nt, Artificial Sequence
  Description of Artificial Sequence: Synthetic oligonucleotide
  Sense strand starting at position 3049 of SEQ ID NO: 586467
ggcagauaauccuacuguu

SEQ ID NO: 720099 - RNA, 19 nt, Artificial Sequence
  Description of Artificial Sequence: Synthetic oligonucleotide
  Antisense strand to SEQ ID NO: 720098
aacaguaggauuaucugcc

SEQ ID NO: 720100 - RNA, 19 nt, Artificial Sequence
  Description of Artificial Sequence: Synthetic oligonucleotide
  Sense strand starting at position 3146 of SEQ ID NO: 586467
ccucgucucuaauaaagaa

SEQ ID NO: 720101 - RNA, 19 nt, Artificial Sequence
  Description of Artificial Sequence: Synthetic oligonucleotide
  Antisense strand to SEQ ID NO: 720100
uucuuuauuagagacgagg

SEQ ID NO: 720102 - RNA, 19 nt, Artificial Sequence
  Description of Artificial Sequence: Synthetic oligonucleotide
  Sense strand starting at position 3538 of SEQ ID NO: 586467
gcaccugaaucugaucgau

SEQ ID NO: 720103 - RNA, 19 nt, Artificial Sequence
  Description of Artificial Sequence: Synthetic oligonucleotide
  Antisense strand to SEQ ID NO: 720102
aucgaucagauucaggugc

SEQ ID NO: 720104 - RNA, 19 nt, Artificial Sequence
  Description of Artificial Sequence: Synthetic oligonucleotide
  Sense strand starting at position 3540 of SEQ ID NO: 586467
accugaaucugaucgauca

SEQ ID NO: 720105 - RNA, 19 nt, Artificial Sequence
  Description of Artificial Sequence: Synthetic oligonucleotide
  Antisense strand to SEQ ID NO: 720104
ugaucgaucagauucaggu

SEQ ID NO: 720106 - RNA, 19 nt, Artificial Sequence
  Description of Artificial Sequence: Synthetic oligonucleotide
  Sense strand starting at position 3588 of SEQ ID NO: 586467
ucagcaauccaagaaugcu

SEQ ID NO: 720107 - RNA, 19 nt, Artificial Sequence
  Description of Artificial Sequence: Synthetic oligonucleotide
  Antisense strand to SEQ ID NO: 720106
agcauucuuggauugcuga

SEQ ID NO: 720108 - RNA, 19 nt, Artificial Sequence
  Description of Artificial Sequence: Synthetic oligonucleotide
  Sense strand starting at position 3594 of SEQ ID NO: 586467
auccaagaaugcuacguua

SEQ ID NO: 720109 - RNA, 19 nt, Artificial Sequence
  Description of Artificial Sequence: Synthetic oligonucleotide
  Antisense strand to SEQ ID NO: 720108
uaacguagcauucuuggau

SEQ ID NO: 720110 - RNA, 19 nt, Artificial Sequence
  Description of Artificial Sequence: Synthetic oligonucleotide
  Sense strand starting at position 3602 of SEQ ID NO: 586467
augcuacguuauccuuauu

SEQ ID NO: 720111 - RNA, 19 nt, Artificial Sequence
  Description of Artificial Sequence: Synthetic oligonucleotide
  Antisense strand to SEQ ID NO: 720110
aauaaggauaacguagcau

SEQ ID NO: 720112 - RNA, 19 nt, Artificial Sequence
  Description of Artificial Sequence: Synthetic oligonucleotide
  Sense strand starting at position 3607 of SEQ ID NO: 586467
acguuauccuuauuuccca

SEQ ID NO: 720113 - RNA, 19 nt, Artificial Sequence
  Description of Artificial Sequence: Synthetic oligonucleotide
  Antisense strand to SEQ ID NO: 720112
ugggaaauaaggauaacgu

SEQ ID NO: 720114 - RNA, 19 nt, Artificial Sequence
  Description of Artificial Sequence: Synthetic oligonucleotide
  Sense strand starting at position 3675 of SEQ ID NO: 586467
gcuacuaaguguuccauuu

SEQ ID NO: 720115 - RNA, 19 nt, Artificial Sequence
  Description of Artificial Sequence: Synthetic oligonucleotide
  Antisense strand to SEQ ID NO: 720114
aaauggaacacuuaguagc

SEQ ID NO: 720116 - RNA, 19 nt, Artificial Sequence
  Description of Artificial Sequence: Synthetic oligonucleotide
  Sense strand starting at position 3683 of SEQ ID NO: 586467
guguuccauuugugauugu

SEQ ID NO: 720117 - RNA, 19 nt, Artificial Sequence
  Description of Artificial Sequence: Synthetic oligonucleotide
  Antisense strand to SEQ ID NO: 720116
acaaucacaaauggaacac

SEQ ID NO: 720118 - RNA, 19 nt, Artificial Sequence
  Description of Artificial Sequence: Synthetic oligonucleotide
  Sense strand starting at position 3687 of SEQ ID NO: 586467
uccauuugugauugucugu

SEQ ID NO: 720119 - RNA, 19 nt, Artificial Sequence
  Description of Artificial Sequence: Synthetic oligonucleotide
  Antisense strand to SEQ ID NO: 720118
acagacaaucacaaaugga

SEQ ID NO: 720120 - RNA, 19 nt, Artificial Sequence
  Description of Artificial Sequence: Synthetic oligonucleotide
  Sense strand starting at position 3694 of SEQ ID NO: 586467
gugauugucuguuccggaa

SEQ ID NO: 720121 - RNA, 19 nt, Artificial Sequence
  Description of Artificial Sequence: Synthetic oligonucleotide
  Antisense strand to SEQ ID NO: 720120
uuccggaacagacaaucac

SEQ ID NO: 720122 - RNA, 19 nt, Artificial Sequence
  Description of Artificial Sequence: Synthetic oligonucleotide
  Sense strand starting at position 3812 of SEQ ID NO: 586467
cuuagaaacugccaugguu

SEQ ID NO: 720123 - RNA, 19 nt, Artificial Sequence
  Description of Artificial Sequence: Synthetic oligonucleotide
  Antisense strand to SEQ ID NO: 720122
aaccauggcaguuucuaag

SEQ ID NO: 720124 - RNA, 19 nt, Artificial Sequence
  Description of Artificial Sequence: Synthetic oligonucleotide
  Sense strand starting at position 3835 of SEQ ID NO: 586467
gguagcucugugggugaaa

SEQ ID NO: 720125 - RNA, 19 nt, Artificial Sequence
  Description of Artificial Sequence: Synthetic oligonucleotide
  Antisense strand to SEQ ID NO: 720124
uuucacccacagagcuacc

SEQ ID NO: 720126 - RNA, 19 nt, Artificial Sequence
  Description of Artificial Sequence: Synthetic oligonucleotide
  Sense strand starting at position 3836 of SEQ ID NO: 586467
guagcucugugggugaaau

SEQ ID NO: 720127 - RNA, 19 nt, Artificial Sequence
  Description of Artificial Sequence: Synthetic oligonucleotide
  Antisense strand to SEQ ID NO: 720126
auuucacccacagagcuac

SEQ ID NO: 720128 - RNA, 19 nt, Artificial Sequence
  Description of Artificial Sequence: Synthetic oligonucleotide
  Sense strand starting at position 3837 of SEQ ID NO: 586467
uagcucugugggugaaauc

SEQ ID NO: 720129 - RNA, 19 nt, Artificial Sequence
  Description of Artificial Sequence: Synthetic oligonucleotide
  Antisense strand to SEQ ID NO: 720128
gauuucacccacagagcua

SEQ ID NO: 720130 - RNA, 19 nt, Artificial Sequence
  Description of Artificial Sequence: Synthetic oligonucleotide
  Sense strand starting at position 3944 of SEQ ID NO: 586467
cuauucucuuggccuggaa

SEQ ID NO: 720131 - RNA, 19 nt, Artificial Sequence
  Description of Artificial Sequence: Synthetic oligonucleotide
  Antisense strand to SEQ ID NO: 720130
uuccaggccaagagaauag

SEQ ID NO: 720132 - RNA, 19 nt, Artificial Sequence
  Description of Artificial Sequence: Synthetic oligonucleotide
  Sense strand starting at position 3947 of SEQ ID NO: 586467
uucucuuggccuggaaaca

SEQ ID NO: 720133 - RNA, 19 nt, Artificial Sequence
  Description of Artificial Sequence: Synthetic oligonucleotide
  Antisense strand to SEQ ID NO: 720132
uguuuccaggccaagagaa

SEQ ID NO: 720134 - RNA, 19 nt, Artificial Sequence
  Description of Artificial Sequence: Synthetic oligonucleotide
  Sense strand starting at position 123 of SEQ ID NO: 586468
ggaggcuucugaguccuca

SEQ ID NO: 720135 - RNA, 19 nt, Artificial Sequence
  Description of Artificial Sequence: Synthetic oligonucleotide
  Antisense strand to SEQ ID NO: 720134
ugaggacucagaagccucc

SEQ ID NO: 720136 - RNA, 19 nt, Artificial Sequence
  Description of Artificial Sequence: Synthetic oligonucleotide
  Sense strand starting at position 252 of SEQ ID NO: 586468
gugcaaagccaauggucau

SEQ ID NO: 720137 - RNA, 19 nt, Artificial Sequence
  Description of Artificial Sequence: Synthetic oligonucleotide
  Antisense strand to SEQ ID NO: 720136
augaccauuggcuuugcac

SEQ ID NO: 720138 - RNA, 19 nt, Artificial Sequence
  Description of Artificial Sequence: Synthetic oligonucleotide
  Sense strand starting at position 476 of SEQ ID NO: 586468
cucacagucuugguugagu

SEQ ID NO: 720139 - RNA, 19 nt, Artificial Sequence
  Description of Artificial Sequence: Synthetic oligonucleotide
  Antisense strand to SEQ ID NO: 720138
acucaaccaagacugugag

SEQ ID NO: 720140 - RNA, 19 nt, Artificial Sequence
  Description of Artificial Sequence: Synthetic oligonucleotide
  Sense strand starting at position 520 of SEQ ID NO: 586468
gccucugucagcgucuaga

SEQ ID NO: 720141 - RNA, 19 nt, Artificial Sequence
  Description of Artificial Sequence: Synthetic oligonucleotide
  Antisense strand to SEQ ID NO: 720140
ucuagacgcugacagaggc

SEQ ID NO: 720142 - RNA, 19 nt, Artificial Sequence
  Description of Artificial Sequence: Synthetic oligonucleotide
  Sense strand starting at position 559 of SEQ ID NO: 586468
agggaagucuaaggagaga

SEQ ID NO: 720143 - RNA, 19 nt, Artificial Sequence
  Description of Artificial Sequence: Synthetic oligonucleotide
  Antisense strand to SEQ ID NO: 720142
ucucuccuuagacuucccu

SEQ ID NO: 720144 - RNA, 19 nt, Artificial Sequence
  Description of Artificial Sequence: Synthetic oligonucleotide
  Sense strand starting at position 734 of SEQ ID NO: 586468
uacaguugucccugagccu

SEQ ID NO: 720145 - RNA, 19 nt, Artificial Sequence
  Description of Artificial Sequence: Synthetic oligonucleotide
  Antisense strand to SEQ ID NO: 720144
aggcucagggacaacugua

SEQ ID NO: 720146 - RNA, 19 nt, Artificial Sequence
  Description of Artificial Sequence: Synthetic oligonucleotide
  Sense strand starting at position 735 of SEQ ID NO: 586468
acaguugucccugagccuu

SEQ ID NO: 720147 - RNA, 19 nt, Artificial Sequence
  Description of Artificial Sequence: Synthetic oligonucleotide
  Antisense strand to SEQ ID NO: 720146
aaggcucagggacaacugu

SEQ ID NO: 720148 - RNA, 19 nt, Artificial Sequence
  Description of Artificial Sequence: Synthetic oligonucleotide
  Sense strand starting at position 785 of SEQ ID NO: 586468
ccagcucgugaaugaaaca

SEQ ID NO: 720149 - RNA, 19 nt, Artificial Sequence
  Description of Artificial Sequence: Synthetic oligonucleotide
  Antisense strand to SEQ ID NO: 720148
uguuucauucacgagcugg

SEQ ID NO: 720150 - RNA, 19 nt, Artificial Sequence
  Description of Artificial Sequence: Synthetic oligonucleotide
  Sense strand starting at position 870 of SEQ ID NO: 586468
gaaccugguuuccuccaga

SEQ ID NO: 720151 - RNA, 19 nt, Artificial Sequence
  Description of Artificial Sequence: Synthetic oligonucleotide
  Antisense strand to SEQ ID NO: 720150
ucuggaggaaaccagguuc

SEQ ID NO: 720152 - RNA, 19 nt, Artificial Sequence
  Description of Artificial Sequence: Synthetic oligonucleotide
  Sense strand starting at position 891 of SEQ ID NO: 586468
cccucuggcugucacagau

SEQ ID NO: 720153 - RNA, 19 nt, Artificial Sequence
  Description of Artificial Sequence: Synthetic oligonucleotide
  Antisense strand to SEQ ID NO: 720152
aucugugacagccagaggg

SEQ ID NO: 720154 - RNA, 19 nt, Artificial Sequence
  Description of Artificial Sequence: Synthetic oligonucleotide
  Sense strand starting at position 944 of SEQ ID NO: 586468
gaagccauacagugggaau

SEQ ID NO: 720155 - RNA, 19 nt, Artificial Sequence
  Description of Artificial Sequence: Synthetic oligonucleotide
  Antisense strand to SEQ ID NO: 720154
auucccacuguauggcuuc

SEQ ID NO: 720156 - RNA, 19 nt, Artificial Sequence
  Description of Artificial Sequence: Synthetic oligonucleotide
  Sense strand starting at position 1027 of SEQ ID NO: 586468
guggcauugcaauggguaa

SEQ ID NO: 720157 - RNA, 19 nt, Artificial Sequence
  Description of Artificial Sequence: Synthetic oligonucleotide
  Antisense strand to SEQ ID NO: 720156
uuacccauugcaaugccac

SEQ ID NO: 720158 - RNA, 19 nt, Artificial Sequence
  Description of Artificial Sequence: Synthetic oligonucleotide
  Sense strand starting at position 1029 of SEQ ID NO: 586468
ggcauugcaauggguaaga

SEQ ID NO: 720159 - RNA, 19 nt, Artificial Sequence
  Description of Artificial Sequence: Synthetic oligonucleotide
  Antisense strand to SEQ ID NO: 720158
ucuuacccauugcaaugcc

SEQ ID NO: 720160 - RNA, 19 nt, Artificial Sequence
  Description of Artificial Sequence: Synthetic oligonucleotide
  Sense strand starting at position 1042 of SEQ ID NO: 586468
guaagagccauuggguuau

SEQ ID NO: 720161 - RNA, 19 nt, Artificial Sequence
  Description of Artificial Sequence: Synthetic oligonucleotide
  Antisense strand to SEQ ID NO: 720160
auaacccaauggcucuuac

SEQ ID NO: 720162 - RNA, 19 nt, Artificial Sequence
  Description of Artificial Sequence: Synthetic oligonucleotide
  Sense strand starting at position 1044 of SEQ ID NO: 586468
aagagccauuggguuauaa

SEQ ID NO: 720163 - RNA, 19 nt, Artificial Sequence
  Description of Artificial Sequence: Synthetic oligonucleotide
  Antisense strand to SEQ ID NO: 720162
uuauaacccaauggcucuu

SEQ ID NO: 720164 - RNA, 19 nt, Artificial Sequence
  Description of Artificial Sequence: Synthetic oligonucleotide
  Sense strand starting at position 1046 of SEQ ID NO: 586468
gagccauuggguuauaaau

SEQ ID NO: 720165 - RNA, 19 nt, Artificial Sequence
  Description of Artificial Sequence: Synthetic oligonucleotide
  Antisense strand to SEQ ID NO: 720164
auuuauaacccaauggcuc

SEQ ID NO: 720166 - RNA, 19 nt, Artificial Sequence
  Description of Artificial Sequence: Synthetic oligonucleotide
  Sense strand starting at position 1048 of SEQ ID NO: 586468
gccauuggguuauaaauuc

SEQ ID NO: 720167 - RNA, 19 nt, Artificial Sequence
  Description of Artificial Sequence: Synthetic oligonucleotide
  Antisense strand to SEQ ID NO: 720166
gaauuuauaacccaauggc

SEQ ID NO: 720168 - RNA, 19 nt, Artificial Sequence
  Description of Artificial Sequence: Synthetic oligonucleotide
  Sense strand starting at position 1128 of SEQ ID NO: 586468
ggagacguguggcuacuua

SEQ ID NO: 720169 - RNA, 19 nt, Artificial Sequence
  Description of Artificial Sequence: Synthetic oligonucleotide
  Antisense strand to SEQ ID NO: 720168
uaaguagccacacgucucc

SEQ ID NO: 720170 - RNA, 19 nt, Artificial Sequence
  Description of Artificial Sequence: Synthetic oligonucleotide
  Sense strand starting at position 1132 of SEQ ID NO: 586468
acguguggcuacuuauaaa

SEQ ID NO: 720171 - RNA, 19 nt, Artificial Sequence
  Description of Artificial Sequence: Synthetic oligonucleotide
  Antisense strand to SEQ ID NO: 720170
uuuauaaguagccacacgu

SEQ ID NO: 720172 - RNA, 19 nt, Artificial Sequence
  Description of Artificial Sequence: Synthetic oligonucleotide
  Sense strand starting at position 1376 of SEQ ID NO: 586468
gcccgagcuuccuaaucaa

SEQ ID NO: 720173 - RNA, 19 nt, Artificial Sequence
  Description of Artificial Sequence: Synthetic oligonucleotide
  Antisense strand to SEQ ID NO: 720172
uugauuaggaagcucgggc

SEQ ID NO: 720174 - RNA, 19 nt, Artificial Sequence
  Description of Artificial Sequence: Synthetic oligonucleotide
  Sense strand starting at position 1954 of SEQ ID NO: 586468
agcuuugaucgcgguucua

SEQ ID NO: 720175 - RNA, 19 nt, Artificial Sequence
  Description of Artificial Sequence: Synthetic oligonucleotide
  Antisense strand to SEQ ID NO: 720174
uagaaccgcgaucaaagcu

SEQ ID NO: 720176 - RNA, 19 nt, Artificial Sequence
  Description of Artificial Sequence: Synthetic oligonucleotide
  Sense strand starting at position 2014 of SEQ ID NO: 586468
ccagacuccucuuggaaga

SEQ ID NO: 720177 - RNA, 19 nt, Artificial Sequence
  Description of Artificial Sequence: Synthetic oligonucleotide
  Antisense strand to SEQ ID NO: 720176
ucuuccaagaggagucugg

SEQ ID NO: 720178 - RNA, 19 nt, Artificial Sequence
  Description of Artificial Sequence: Synthetic oligonucleotide
  Sense strand starting at position 2016 of SEQ ID NO: 586468
agacuccucuuggaagaca

SEQ ID NO: 720179 - RNA, 19 nt, Artificial Sequence
  Description of Artificial Sequence: Synthetic oligonucleotide
  Antisense strand to SEQ ID NO: 720178
ugucuuccaagaggagucu

SEQ ID NO: 720180 - RNA, 19 nt, Artificial Sequence
  Description of Artificial Sequence: Synthetic oligonucleotide
  Sense strand starting at position 2061 of SEQ ID NO: 586468
gggaaucaauccuaccauu

SEQ ID NO: 720181 - RNA, 19 nt, Artificial Sequence
  Description of Artificial Sequence: Synthetic oligonucleotide
  Antisense strand to SEQ ID NO: 720180
aaugguaggauugauuccc

SEQ ID NO: 720182 - RNA, 19 nt, Artificial Sequence
  Description of Artificial Sequence: Synthetic oligonucleotide
  Sense strand starting at position 2086 of SEQ ID NO: 586468
uggcuugccgcagaacaaa

SEQ ID NO: 720183 - RNA, 19 nt, Artificial Sequence
  Description of Artificial Sequence: Synthetic oligonucleotide
  Antisense strand to SEQ ID NO: 720182
uuuguucugcggcaagcca

SEQ ID NO: 720184 - RNA, 19 nt, Artificial Sequence
  Description of Artificial Sequence: Synthetic oligonucleotide
  Sense strand starting at position 2141 of SEQ ID NO: 586468
aggagaaagugauauuuga

SEQ ID NO: 720185 - RNA, 19 nt, Artificial Sequence
  Description of Artificial Sequence: Synthetic oligonucleotide
  Antisense strand to SEQ ID NO: 720184
ucaaauaucacuuucuccu

SEQ ID NO: 720186 - RNA, 19 nt, Artificial Sequence
  Description of Artificial Sequence: Synthetic oligonucleotide
  Sense strand starting at position 2638 of SEQ ID NO: 586468
ccacaauucucccuguugu

SEQ ID NO: 720187 - RNA, 19 nt, Artificial Sequence
  Description of Artificial Sequence: Synthetic oligonucleotide
  Antisense strand to SEQ ID NO: 720186
acaacagggagaauugugg

SEQ ID NO: 720188 - RNA, 19 nt, Artificial Sequence
  Description of Artificial Sequence: Synthetic oligonucleotide
  Sense strand starting at position 2908 of SEQ ID NO: 586468
cauggaguuugugaaggau

SEQ ID NO: 720189 - RNA, 19 nt, Artificial Sequence
  Description of Artificial Sequence: Synthetic oligonucleotide
  Antisense strand to SEQ ID NO: 720188
auccuucacaaacuccaug

SEQ ID NO: 720190 - RNA, 19 nt, Artificial Sequence
  Description of Artificial Sequence: Synthetic oligonucleotide
  Sense strand starting at position 2910 of SEQ ID NO: 586468
uggaguuugugaaggaugu

SEQ ID NO: 720191 - RNA, 19 nt, Artificial Sequence
  Description of Artificial Sequence: Synthetic oligonucleotide
  Antisense strand to SEQ ID NO: 720190
acauccuucacaaacucca

SEQ ID NO: 720192 - RNA, 19 nt, Artificial Sequence
  Description of Artificial Sequence: Synthetic oligonucleotide
  Sense strand starting at position 2920 of SEQ ID NO: 586468
gaaggauguggguggcaga

SEQ ID NO: 720193 - RNA, 19 nt, Artificial Sequence
  Description of Artificial Sequence: Synthetic oligonucleotide
  Antisense strand to SEQ ID NO: 720192
ucugccacccacauccuuc

SEQ ID NO: 720194 - RNA, 19 nt, Artificial Sequence
  Description of Artificial Sequence: Synthetic oligonucleotide
  Sense strand starting at position 2933 of SEQ ID NO: 586468
ggcagaggucacgagauga

SEQ ID NO: 720195 - RNA, 19 nt, Artificial Sequence
  Description of Artificial Sequence: Synthetic oligonucleotide
  Antisense strand to SEQ ID NO: 720194
ucaucucgugaccucugcc

SEQ ID NO: 720196 - RNA, 19 nt, Artificial Sequence
  Description of Artificial Sequence: Synthetic oligonucleotide
  Sense strand starting at position 3081 of SEQ ID NO: 586468
ugguccauuucugagacca

SEQ ID NO: 720197 - RNA, 19 nt, Artificial Sequence
  Description of Artificial Sequence: Synthetic oligonucleotide
  Antisense strand to SEQ ID NO: 720196
uggucucagaaauggacca

SEQ ID NO: 720198 - RNA, 19 nt, Artificial Sequence
  Description of Artificial Sequence: Synthetic oligonucleotide
  Sense strand starting at position 3083 of SEQ ID NO: 586468
guccauuucugagaccaga

SEQ ID NO: 720199 - RNA, 19 nt, Artificial Sequence
  Description of Artificial Sequence: Synthetic oligonucleotide
  Antisense strand to SEQ ID NO: 720198
ucuggucucagaaauggac

SEQ ID NO: 720200 - RNA, 19 nt, Artificial Sequence
  Description of Artificial Sequence: Synthetic oligonucleotide
  Sense strand starting at position 3523 of SEQ ID NO: 586468
aggaugguuugggugugaa

SEQ ID NO: 720201 - RNA, 19 nt, Artificial Sequence
  Description of Artificial Sequence: Synthetic oligonucleotide
  Antisense strand to SEQ ID NO: 720200
uucacacccaaaccauccu

SEQ ID NO: 720202 - RNA, 19 nt, Artificial Sequence
  Description of Artificial Sequence: Synthetic oligonucleotide
  Sense strand starting at position 3524 of SEQ ID NO: 586468
ggaugguuugggugugaaa

SEQ ID NO: 720203 - RNA, 19 nt, Artificial Sequence
  Description of Artificial Sequence: Synthetic oligonucleotide
  Antisense strand to SEQ ID NO: 720202
uuucacacccaaaccaucc

SEQ ID NO: 720204 - RNA, 19 nt, Artificial Sequence
  Description of Artificial Sequence: Synthetic oligonucleotide
  Sense strand starting at position 3721 of SEQ ID NO: 586468
cuggcauccucaucugcaa

SEQ ID NO: 720205 - RNA, 19 nt, Artificial Sequence
  Description of Artificial Sequence: Synthetic oligonucleotide
  Antisense strand to SEQ ID NO: 720204
uugcagaugaggaugccag

SEQ ID NO: 720206 - RNA, 19 nt, Artificial Sequence
  Description of Artificial Sequence: Synthetic oligonucleotide
  Sense strand starting at position 3940 of SEQ ID NO: 586468
gagagaucaugaugggaga

SEQ ID NO: 720207 - RNA, 19 nt, Artificial Sequence
  Description of Artificial Sequence: Synthetic oligonucleotide
  Antisense strand to SEQ ID NO: 720206
ucucccaucaugaucucuc

SEQ ID NO: 720208 - RNA, 19 nt, Artificial Sequence
  Description of Artificial Sequence: Synthetic oligonucleotide
  Sense strand starting at position 72 of SEQ ID NO: 586469
cugggacacuuccugcuua

SEQ ID NO: 720209 - RNA, 19 nt, Artificial Sequence
  Description of Artificial Sequence: Synthetic oligonucleotide
  Antisense strand to SEQ ID NO: 720208
uaagcaggaagugucccag

SEQ ID NO: 720210 - RNA, 19 nt, Artificial Sequence
  Description of Artificial Sequence: Synthetic oligonucleotide
  Sense strand starting at position 337 of SEQ ID NO: 586469
ccugcuuauccugauguga

SEQ ID NO: 720211 - RNA, 19 nt, Artificial Sequence
  Description of Artificial Sequence: Synthetic oligonucleotide
  Antisense strand to SEQ ID NO: 720210
ucacaucaggauaagcagg

SEQ ID NO: 720212 - RNA, 19 nt, Artificial Sequence
  Description of Artificial Sequence: Synthetic oligonucleotide
  Sense strand starting at position 345 of SEQ ID NO: 586469
uccugaugugauuaugcau

SEQ ID NO: 720213 - RNA, 19 nt, Artificial Sequence
  Description of Artificial Sequence: Synthetic oligonucleotide
  Antisense strand to SEQ ID NO: 720212
augcauaaucacaucagga

SEQ ID NO: 720214 - RNA, 19 nt, Artificial Sequence
  Description of Artificial Sequence: Synthetic oligonucleotide
  Sense strand starting at position 348 of SEQ ID NO: 586469
ugaugugauuaugcauucu

SEQ ID NO: 720215 - RNA, 19 nt, Artificial Sequence
  Description of Artificial Sequence: Synthetic oligonucleotide
  Antisense strand to SEQ ID NO: 720214
agaaugcauaaucacauca

SEQ ID NO: 720216 - RNA, 19 nt, Artificial Sequence
  Description of Artificial Sequence: Synthetic oligonucleotide
  Sense strand starting at position 757 of SEQ ID NO: 586469
gagcgaaaugagugucuau

SEQ ID NO: 720217 - RNA, 19 nt, Artificial Sequence
  Description of Artificial Sequence: Synthetic oligonucleotide
  Antisense strand to SEQ ID NO: 720216
auagacacucauuucgcuc

SEQ ID NO: 720218 - RNA, 19 nt, Artificial Sequence
  Description of Artificial Sequence: Synthetic oligonucleotide
  Sense strand starting at position 768 of SEQ ID NO: 586469
gugucuauggcccaugaca

SEQ ID NO: 720219 - RNA, 19 nt, Artificial Sequence
  Description of Artificial Sequence: Synthetic oligonucleotide
  Antisense strand to SEQ ID NO: 720218
ugucaugggccauagacac

SEQ ID NO: 720220 - RNA, 19 nt, Artificial Sequence
  Description of Artificial Sequence: Synthetic oligonucleotide
  Sense strand starting at position 938 of SEQ ID NO: 586469
ggucauggguaagaugaga

SEQ ID NO: 720221 - RNA, 19 nt, Artificial Sequence
  Description of Artificial Sequence: Synthetic oligonucleotide
  Antisense strand to SEQ ID NO: 720220
ucucaucuuacccaugacc

SEQ ID NO: 720222 - RNA, 19 nt, Artificial Sequence
  Description of Artificial Sequence: Synthetic oligonucleotide
  Sense strand starting at position 1095 of SEQ ID NO: 586469
agaggaagccgucagacau

SEQ ID NO: 720223 - RNA, 19 nt, Artificial Sequence
  Description of Artificial Sequence: Synthetic oligonucleotide
  Antisense strand to SEQ ID NO: 720222
augucugacggcuuccucu

SEQ ID NO: 720224 - RNA, 19 nt, Artificial Sequence
  Description of Artificial Sequence: Synthetic oligonucleotide
  Sense strand starting at position 1201 of SEQ ID NO: 586469
ggugcaauuccacacaacu

SEQ ID NO: 720225 - RNA, 19 nt, Artificial Sequence
  Description of Artificial Sequence: Synthetic oligonucleotide
  Antisense strand to SEQ ID NO: 720224
aguuguguggaauugcacc

SEQ ID NO: 720226 - RNA, 19 nt, Artificial Sequence
  Description of Artificial Sequence: Synthetic oligonucleotide
  Sense strand starting at position 1356 of SEQ ID NO: 586469
uugacuuuggcuuagugau

SEQ ID NO: 720227 - RNA, 19 nt, Artificial Sequence
  Description of Artificial Sequence: Synthetic oligonucleotide
  Antisense strand to SEQ ID NO: 720226
aucacuaagccaaagucaa

SEQ ID NO: 720228 - RNA, 19 nt, Artificial Sequence
  Description of Artificial Sequence: Synthetic oligonucleotide
  Sense strand starting at position 1425 of SEQ ID NO: 586469
guaugugugaacuauucua

SEQ ID NO: 720229 - RNA, 19 nt, Artificial Sequence
  Description of Artificial Sequence: Synthetic oligonucleotide
  Antisense strand to SEQ ID NO: 720228
uagaauaguucacacauac

SEQ ID NO: 720230 - RNA, 19 nt, Artificial Sequence
  Description of Artificial Sequence: Synthetic oligonucleotide
  Sense strand starting at position 1529 of SEQ ID NO: 586469
gugugccuccguccuaaau

SEQ ID NO: 720231 - RNA, 19 nt, Artificial Sequence
  Description of Artificial Sequence: Synthetic oligonucleotide
  Antisense strand to SEQ ID NO: 720230
auuuaggacggaggcacac

SEQ ID NO: 720232 - RNA, 19 nt, Artificial Sequence
  Description of Artificial Sequence: Synthetic oligonucleotide
  Sense strand starting at position 2121 of SEQ ID NO: 586469
cugaguccucccuagcguu

SEQ ID NO: 720233 - RNA, 19 nt, Artificial Sequence
  Description of Artificial Sequence: Synthetic oligonucleotide
  Antisense strand to SEQ ID NO: 720232
aacgcuagggaggacucag

SEQ ID NO: 720234 - RNA, 19 nt, Artificial Sequence
  Description of Artificial Sequence: Synthetic oligonucleotide
  Sense strand starting at position 2440 of SEQ ID NO: 586469
gcgggaucgcgccugugaa

SEQ ID NO: 720235 - RNA, 19 nt, Artificial Sequence
  Description of Artificial Sequence: Synthetic oligonucleotide
  Antisense strand to SEQ ID NO: 720234
uucacaggcgcgaucccgc

SEQ ID NO: 720236 - RNA, 19 nt, Artificial Sequence
  Description of Artificial Sequence: Synthetic oligonucleotide
  Sense strand starting at position 2578 of SEQ ID NO: 586469
uguagauuaagguguaaag

SEQ ID NO: 720237 - RNA, 19 nt, Artificial Sequence
  Description of Artificial Sequence: Synthetic oligonucleotide
  Antisense strand to SEQ ID NO: 720236
cuuuacaccuuaaucuaca

SEQ ID NO: 720238 - RNA, 19 nt, Artificial Sequence
  Description of Artificial Sequence: Synthetic oligonucleotide
  Sense strand starting at position 2615 of SEQ ID NO: 586469
acacucauaccuuggugau

SEQ ID NO: 720239 - RNA, 19 nt, Artificial Sequence
  Description of Artificial Sequence: Synthetic oligonucleotide
  Antisense strand to SEQ ID NO: 720238
aucaccaagguaugagugu

SEQ ID NO: 720240 - RNA, 19 nt, Artificial Sequence
  Description of Artificial Sequence: Synthetic oligonucleotide
  Sense strand starting at position 2617 of SEQ ID NO: 586469
acucauaccuuggugauaa

SEQ ID NO: 720241 - RNA, 19 nt, Artificial Sequence
  Description of Artificial Sequence: Synthetic oligonucleotide
  Antisense strand to SEQ ID NO: 720240
uuaucaccaagguaugagu

SEQ ID NO: 720242 - RNA, 19 nt, Artificial Sequence
  Description of Artificial Sequence: Synthetic oligonucleotide
  Sense strand starting at position 2629 of SEQ ID NO: 586469
gugauaauagugcaaugua

SEQ ID NO: 720243 - RNA, 19 nt, Artificial Sequence
  Description of Artificial Sequence: Synthetic oligonucleotide
  Antisense strand to SEQ ID NO: 720242
uacauugcacuauuaucac

SEQ ID NO: 720244 - RNA, 19 nt, Artificial Sequence
  Description of Artificial Sequence: Synthetic oligonucleotide
  Sense strand starting at position 2632 of SEQ ID NO: 586469
auaauagugcaauguauac

SEQ ID NO: 720245 - RNA, 19 nt, Artificial Sequence
  Description of Artificial Sequence: Synthetic oligonucleotide
  Antisense strand to SEQ ID NO: 720244
guauacauugcacuauuau

SEQ ID NO: 720246 - RNA, 19 nt, Artificial Sequence
  Description of Artificial Sequence: Synthetic oligonucleotide
  Sense strand starting at position 3167 of SEQ ID NO: 586469
ccaugcuugugucuugauu

SEQ ID NO: 720247 - RNA, 19 nt, Artificial Sequence
  Description of Artificial Sequence: Synthetic oligonucleotide
  Antisense strand to SEQ ID NO: 720246
aaucaagacacaagcaugg

SEQ ID NO: 720248 - RNA, 19 nt, Artificial Sequence
  Description of Artificial Sequence: Synthetic oligonucleotide
  Sense strand starting at position 3173 of SEQ ID NO: 586469
uugugucuugauuggagau

SEQ ID NO: 720249 - RNA, 19 nt, Artificial Sequence
  Description of Artificial Sequence: Synthetic oligonucleotide
  Antisense strand to SEQ ID NO: 720248
aucuccaaucaagacacaa

SEQ ID NO: 720250 - RNA, 19 nt, Artificial Sequence
  Description of Artificial Sequence: Synthetic oligonucleotide
  Sense strand starting at position 3174 of SEQ ID NO: 586469
ugugucuugauuggagauu

SEQ ID NO: 720251 - RNA, 19 nt, Artificial Sequence
  Description of Artificial Sequence: Synthetic oligonucleotide
  Antisense strand to SEQ ID NO: 720250
aaucuccaaucaagacaca

SEQ ID NO: 720252 - RNA, 19 nt, Artificial Sequence
  Description of Artificial Sequence: Synthetic oligonucleotide
  Sense strand starting at position 3183 of SEQ ID NO: 586469
auuggagauugacagauau

SEQ ID NO: 720253 - RNA, 19 nt, Artificial Sequence
  Description of Artificial Sequence: Synthetic oligonucleotide
  Antisense strand to SEQ ID NO: 720252
auaucugucaaucuccaau

SEQ ID NO: 720254 - RNA, 19 nt, Artificial Sequence
  Description of Artificial Sequence: Synthetic oligonucleotide
  Sense strand starting at position 3244 of SEQ ID NO: 586469
acagguaucuuugcccagu

SEQ ID NO: 720255 - RNA, 19 nt, Artificial Sequence
  Description of Artificial Sequence: Synthetic oligonucleotide
  Antisense strand to SEQ ID NO: 720254
acugggcaaagauaccugu

SEQ ID NO: 720256 - RNA, 19 nt, Artificial Sequence
  Description of Artificial Sequence: Synthetic oligonucleotide
  Sense strand starting at position 3245 of SEQ ID NO: 586469
cagguaucuuugcccaguu

SEQ ID NO: 720257 - RNA, 19 nt, Artificial Sequence
  Description of Artificial Sequence: Synthetic oligonucleotide
  Antisense strand to SEQ ID NO: 720256
aacugggcaaagauaccug

SEQ ID NO: 720258 - RNA, 19 nt, Artificial Sequence
  Description of Artificial Sequence: Synthetic oligonucleotide
  Sense strand starting at position 3246 of SEQ ID NO: 586469
agguaucuuugcccaguuu

SEQ ID NO: 720259 - RNA, 19 nt, Artificial Sequence
  Description of Artificial Sequence: Synthetic oligonucleotide
  Antisense strand to SEQ ID NO: 720258
aaacugggcaaagauaccu

SEQ ID NO: 720260 - RNA, 19 nt, Artificial Sequence
  Description of Artificial Sequence: Synthetic oligonucleotide
  Sense strand starting at position 3271 of SEQ ID NO: 586469
augguugcagcucauguaa

SEQ ID NO: 720261 - RNA, 19 nt, Artificial Sequence
  Description of Artificial Sequence: Synthetic oligonucleotide
  Antisense strand to SEQ ID NO: 720260
uuacaugagcugcaaccau

SEQ ID NO: 720262 - RNA, 19 nt, Artificial Sequence
  Description of Artificial Sequence: Synthetic oligonucleotide
  Sense strand starting at position 3710 of SEQ ID NO: 586469
uaccaagauuuccagguga

SEQ ID NO: 720263 - RNA, 19 nt, Artificial Sequence
  Description of Artificial Sequence: Synthetic oligonucleotide
  Antisense strand to SEQ ID NO: 720262
ucaccuggaaaucuuggua

SEQ ID NO: 720264 - RNA, 19 nt, Artificial Sequence
  Description of Artificial Sequence: Synthetic oligonucleotide
  Sense strand starting at position 3748 of SEQ ID NO: 586469
uugaaaucaugcucuagga

SEQ ID NO: 720265 - RNA, 19 nt, Artificial Sequence
  Description of Artificial Sequence: Synthetic oligonucleotide
  Antisense strand to SEQ ID NO: 720264
uccuagagcaugauuucaa

SEQ ID NO: 720266 - RNA, 19 nt, Artificial Sequence
  Description of Artificial Sequence: Synthetic oligonucleotide
  Sense strand starting at position 3763 of SEQ ID NO: 586469
aggauuaaucagggcaugu

SEQ ID NO: 720267 - RNA, 19 nt, Artificial Sequence
  Description of Artificial Sequence: Synthetic oligonucleotide
  Antisense strand to SEQ ID NO: 720266
acaugcccugauuaauccu

SEQ ID NO: 720268 - RNA, 19 nt, Artificial Sequence
  Description of Artificial Sequence: Synthetic oligonucleotide
  Sense strand starting at position 3767 of SEQ ID NO: 586469
uuaaucagggcauguaaau

SEQ ID NO: 720269 - RNA, 19 nt, Artificial Sequence
  Description of Artificial Sequence: Synthetic oligonucleotide
  Antisense strand to SEQ ID NO: 720268
auuuacaugcccugauuaa

SEQ ID NO: 720270 - RNA, 19 nt, Artificial Sequence
  Description of Artificial Sequence: Synthetic oligonucleotide
  Sense strand starting at position 3776 of SEQ ID NO: 586469
gcauguaaauuuccauugu

SEQ ID NO: 720271 - RNA, 19 nt, Artificial Sequence
  Description of Artificial Sequence: Synthetic oligonucleotide
  Antisense strand to SEQ ID NO: 720270
acaauggaaauuuacaugc

SEQ ID NO: 720272 - RNA, 19 nt, Artificial Sequence
  Description of Artificial Sequence: Synthetic oligonucleotide
  Sense strand starting at position 3802 of SEQ ID NO: 586469
ucuccugacccuugauagu

SEQ ID NO: 720273 - RNA, 19 nt, Artificial Sequence
  Description of Artificial Sequence: Synthetic oligonucleotide
  Antisense strand to SEQ ID NO: 720272
acuaucaagggucaggaga

SEQ ID NO: 720274 - RNA, 19 nt, Artificial Sequence
  Description of Artificial Sequence: Synthetic oligonucleotide
  Sense strand starting at position 3849 of SEQ ID NO: 586469
augaguaugagaugcaucu

SEQ ID NO: 720275 - RNA, 19 nt, Artificial Sequence
  Description of Artificial Sequence: Synthetic oligonucleotide
  Antisense strand to SEQ ID NO: 720274
agaugcaucucauacucau

SEQ ID NO: 720276 - RNA, 19 nt, Artificial Sequence
  Description of Artificial Sequence: Synthetic oligonucleotide
  Sense strand starting at position 3851 of SEQ ID NO: 586469
gaguaugagaugcaucugu

SEQ ID NO: 720277 - RNA, 19 nt, Artificial Sequence
  Description of Artificial Sequence: Synthetic oligonucleotide
  Antisense strand to SEQ ID NO: 720276
acagaugcaucucauacuc

SEQ ID NO: 720278 - RNA, 19 nt, Artificial Sequence
  Description of Artificial Sequence: Synthetic oligonucleotide
  Sense strand starting at position 3856 of SEQ ID NO: 586469
ugagaugcaucuguuuauu

SEQ ID NO: 720279 - RNA, 19 nt, Artificial Sequence
  Description of Artificial Sequence: Synthetic oligonucleotide
  Antisense strand to SEQ ID NO: 720278
aauaaacagaugcaucuca

SEQ ID NO: 720280 - RNA, 19 nt, Artificial Sequence
  Description of Artificial Sequence: Synthetic oligonucleotide
  Sense strand starting at position 3893 of SEQ ID NO: 586469
ccugauuaaugugcaauaa

SEQ ID NO: 720281 - RNA, 19 nt, Artificial Sequence
  Description of Artificial Sequence: Synthetic oligonucleotide
  Antisense strand to SEQ ID NO: 720280
uuauugcacauuaaucagg

SEQ ID NO: 720282 - RNA, 19 nt, Artificial Sequence
  Description of Artificial Sequence: Synthetic oligonucleotide
  Sense strand starting at position 3894 of SEQ ID NO: 586469
cugauuaaugugcaauaau

SEQ ID NO: 720283 - RNA, 19 nt, Artificial Sequence
  Description of Artificial Sequence: Synthetic oligonucleotide
  Antisense strand to SEQ ID NO: 720282
auuauugcacauuaaucag

SEQ ID NO: 720284 - RNA, 19 nt, Artificial Sequence
  Description of Artificial Sequence: Synthetic oligonucleotide
  Sense strand starting at position 3923 of SEQ ID NO: 586469
uuauucucguaauugagga

SEQ ID NO: 720285 - RNA, 19 nt, Artificial Sequence
  Description of Artificial Sequence: Synthetic oligonucleotide
  Antisense strand to SEQ ID NO: 720284
uccucaauuacgagaauaa

SEQ ID NO: 720286 - RNA, 19 nt, Artificial Sequence
  Description of Artificial Sequence: Synthetic oligonucleotide
  Sense strand starting at position 3925 of SEQ ID NO: 586469
auucucguaauugaggauu

SEQ ID NO: 720287 - RNA, 19 nt, Artificial Sequence
  Description of Artificial Sequence: Synthetic oligonucleotide
  Antisense strand to SEQ ID NO: 720286
aauccucaauuacgagaau

SEQ ID NO: 720288 - RNA, 19 nt, Artificial Sequence
  Description of Artificial Sequence: Synthetic oligonucleotide
  Sense strand starting at position 332 of SEQ ID NO: 586470
gggaauucucuuuagacgu

SEQ ID NO: 720289 - RNA, 19 nt, Artificial Sequence
  Description of Artificial Sequence: Synthetic oligonucleotide
  Antisense strand to SEQ ID NO: 720288
acgucuaaagagaauuccc

SEQ ID NO: 720290 - RNA, 19 nt, Artificial Sequence
  Description of Artificial Sequence: Synthetic oligonucleotide
  Sense strand starting at position 339 of SEQ ID NO: 586470
cucuuuagacgugaacacu

SEQ ID NO: 720291 - RNA, 19 nt, Artificial Sequence
  Description of Artificial Sequence: Synthetic oligonucleotide
  Antisense strand to SEQ ID NO: 720290
aguguucacgucuaaagag

SEQ ID NO: 720292 - RNA, 19 nt, Artificial Sequence
  Description of Artificial Sequence: Synthetic oligonucleotide
  Sense strand starting at position 342 of SEQ ID NO: 586470
uuuagacgugaacacuuau

SEQ ID NO: 720293 - RNA, 19 nt, Artificial Sequence
  Description of Artificial Sequence: Synthetic oligonucleotide
  Antisense strand to SEQ ID NO: 720292
auaaguguucacgucuaaa

SEQ ID NO: 720294 - RNA, 19 nt, Artificial Sequence
  Description of Artificial Sequence: Synthetic oligonucleotide
  Sense strand starting at position 490 of SEQ ID NO: 586470
cuaucaagagaucgaugua

SEQ ID NO: 720295 - RNA, 19 nt, Artificial Sequence
  Description of Artificial Sequence: Synthetic oligonucleotide
  Antisense strand to SEQ ID NO: 720294
uacaucgaucucuugauag

SEQ ID NO: 720296 - RNA, 19 nt, Artificial Sequence
  Description of Artificial Sequence: Synthetic oligonucleotide
  Sense strand starting at position 723 of SEQ ID NO: 586470
gcuaauagucaccaacaug

SEQ ID NO: 720297 - RNA, 19 nt, Artificial Sequence
  Description of Artificial Sequence: Synthetic oligonucleotide
  Antisense strand to SEQ ID NO: 720296
cauguuggugacuauuagc

SEQ ID NO: 720298 - RNA, 19 nt, Artificial Sequence
  Description of Artificial Sequence: Synthetic oligonucleotide
  Sense strand starting at position 1157 of SEQ ID NO: 586470
acaugaccaugcuuuagau

SEQ ID NO: 720299 - RNA, 19 nt, Artificial Sequence
  Description of Artificial Sequence: Synthetic oligonucleotide
  Antisense strand to SEQ ID NO: 720298
aucuaaagcauggucaugu

SEQ ID NO: 720300 - RNA, 19 nt, Artificial Sequence
  Description of Artificial Sequence: Synthetic oligonucleotide
  Sense strand starting at position 1342 of SEQ ID NO: 586470
ugccgugcccaguuuauaa

SEQ ID NO: 720301 - RNA, 19 nt, Artificial Sequence
  Description of Artificial Sequence: Synthetic oligonucleotide
  Antisense strand to SEQ ID NO: 720300
uuauaaacugggcacggca

SEQ ID NO: 720302 - RNA, 19 nt, Artificial Sequence
  Description of Artificial Sequence: Synthetic oligonucleotide
  Sense strand starting at position 1377 of SEQ ID NO: 586470
cuagcuuuccuaggaccau

SEQ ID NO: 720303 - RNA, 19 nt, Artificial Sequence
  Description of Artificial Sequence: Synthetic oligonucleotide
  Antisense strand to SEQ ID NO: 720302
augguccuaggaaagcuag

SEQ ID NO: 720304 - RNA, 19 nt, Artificial Sequence
  Description of Artificial Sequence: Synthetic oligonucleotide
  Sense strand starting at position 1426 of SEQ ID NO: 586470
acuuuaugacacugcuaag

SEQ ID NO: 720305 - RNA, 19 nt, Artificial Sequence
  Description of Artificial Sequence: Synthetic oligonucleotide
  Antisense strand to SEQ ID NO: 720304
cuuagcagugucauaaagu

SEQ ID NO: 720306 - RNA, 19 nt, Artificial Sequence
  Description of Artificial Sequence: Synthetic oligonucleotide
  Sense strand starting at position 1444 of SEQ ID NO: 586470
gggccuuuauuucccuauu

SEQ ID NO: 720307 - RNA, 19 nt, Artificial Sequence
  Description of Artificial Sequence: Synthetic oligonucleotide
  Antisense strand to SEQ ID NO: 720306
aauagggaaauaaaggccc

SEQ ID NO: 720308 - RNA, 19 nt, Artificial Sequence
  Description of Artificial Sequence: Synthetic oligonucleotide
  Sense strand starting at position 1475 of SEQ ID NO: 586470
guaauacagucacuguaua

SEQ ID NO: 720309 - RNA, 19 nt, Artificial Sequence
  Description of Artificial Sequence: Synthetic oligonucleotide
  Antisense strand to SEQ ID NO: 720308
uauacagugacuguauuac

SEQ ID NO: 720310 - RNA, 19 nt, Artificial Sequence
  Description of Artificial Sequence: Synthetic oligonucleotide
  Sense strand starting at position 1598 of SEQ ID NO: 586470
ggaggcuacuccuucuuua

SEQ ID NO: 720311 - RNA, 19 nt, Artificial Sequence
  Description of Artificial Sequence: Synthetic oligonucleotide
  Antisense strand to SEQ ID NO: 720310
uaaagaaggaguagccucc

SEQ ID NO: 720312 - RNA, 19 nt, Artificial Sequence
  Description of Artificial Sequence: Synthetic oligonucleotide
  Sense strand starting at position 1671 of SEQ ID NO: 586470
gacgcagugauuugaugua

SEQ ID NO: 720313 - RNA, 19 nt, Artificial Sequence
  Description of Artificial Sequence: Synthetic oligonucleotide
  Antisense strand to SEQ ID NO: 720312
uacaucaaaucacugcguc

SEQ ID NO: 720314 - RNA, 19 nt, Artificial Sequence
  Description of Artificial Sequence: Synthetic oligonucleotide
  Sense strand starting at position 2120 of SEQ ID NO: 586470
cucauauuaggugaggcua

SEQ ID NO: 720315 - RNA, 19 nt, Artificial Sequence
  Description of Artificial Sequence: Synthetic oligonucleotide
  Antisense strand to SEQ ID NO: 720314
uagccucaccuaauaugag

SEQ ID NO: 720316 - RNA, 19 nt, Artificial Sequence
  Description of Artificial Sequence: Synthetic oligonucleotide
  Sense strand starting at position 2135 of SEQ ID NO: 586470
gcuagaauccagggugacu

SEQ ID NO: 720317 - RNA, 19 nt, Artificial Sequence
  Description of Artificial Sequence: Synthetic oligonucleotide
  Antisense strand to SEQ ID NO: 720316
agucacccuggauucuagc

SEQ ID NO: 720318 - RNA, 19 nt, Artificial Sequence
  Description of Artificial Sequence: Synthetic oligonucleotide
  Sense strand starting at position 2146 of SEQ ID NO: 586470
gggugacucucuucucuag

SEQ ID NO: 720319 - RNA, 19 nt, Artificial Sequence
  Description of Artificial Sequence: Synthetic oligonucleotide
  Antisense strand to SEQ ID NO: 720318
cuagagaagagagucaccc

SEQ ID NO: 720320 - RNA, 19 nt, Artificial Sequence
  Description of Artificial Sequence: Synthetic oligonucleotide
  Sense strand starting at position 2286 of SEQ ID NO: 586470
gugcaaucucugcaaucuc

SEQ ID NO: 720321 - RNA, 19 nt, Artificial Sequence
  Description of Artificial Sequence: Synthetic oligonucleotide
  Antisense strand to SEQ ID NO: 720320
gagauugcagagauugcac

SEQ ID NO: 720322 - RNA, 19 nt, Artificial Sequence
  Description of Artificial Sequence: Synthetic oligonucleotide
  Sense strand starting at position 2612 of SEQ ID NO: 586470
agaugagccaaaggguuau

SEQ ID NO: 720323 - RNA, 19 nt, Artificial Sequence
  Description of Artificial Sequence: Synthetic oligonucleotide
  Antisense strand to SEQ ID NO: 720322
auaacccuuuggcucaucu

SEQ ID NO: 720324 - RNA, 19 nt, Artificial Sequence
  Description of Artificial Sequence: Synthetic oligonucleotide
  Sense strand starting at position 2624 of SEQ ID NO: 586470
ggguuauuugauugccuuu

SEQ ID NO: 720325 - RNA, 19 nt, Artificial Sequence
  Description of Artificial Sequence: Synthetic oligonucleotide
  Antisense strand to SEQ ID NO: 720324
aaaggcaaucaaauaaccc

SEQ ID NO: 720326 - RNA, 19 nt, Artificial Sequence
  Description of Artificial Sequence: Synthetic oligonucleotide
  Sense strand starting at position 2667 of SEQ ID NO: 586470
acauuuagaugucaguaca

SEQ ID NO: 720327 - RNA, 19 nt, Artificial Sequence
  Description of Artificial Sequence: Synthetic oligonucleotide
  Antisense strand to SEQ ID NO: 720326
uguacugacaucuaaaugu

SEQ ID NO: 720328 - RNA, 19 nt, Artificial Sequence
  Description of Artificial Sequence: Synthetic oligonucleotide
  Sense strand starting at position 2670 of SEQ ID NO: 586470
uuuagaugucaguacacaa

SEQ ID NO: 720329 - RNA, 19 nt, Artificial Sequence
  Description of Artificial Sequence: Synthetic oligonucleotide
  Antisense strand to SEQ ID NO: 720328
uuguguacugacaucuaaa

SEQ ID NO: 720330 - RNA, 19 nt, Artificial Sequence
  Description of Artificial Sequence: Synthetic oligonucleotide
  Sense strand starting at position 2691 of SEQ ID NO: 586470
ucagccaaaugcuugugaa

SEQ ID NO: 720331 - RNA, 19 nt, Artificial Sequence
  Description of Artificial Sequence: Synthetic oligonucleotide
  Antisense strand to SEQ ID NO: 720330
uucacaagcauuuggcuga

SEQ ID NO: 720332 - RNA, 19 nt, Artificial Sequence
  Description of Artificial Sequence: Synthetic oligonucleotide
  Sense strand starting at position 2692 of SEQ ID NO: 586470
cagccaaaugcuugugaaa

SEQ ID NO: 720333 - RNA, 19 nt, Artificial Sequence
  Description of Artificial Sequence: Synthetic oligonucleotide
  Antisense strand to SEQ ID NO: 720332
uuucacaagcauuuggcug

SEQ ID NO: 720334 - RNA, 19 nt, Artificial Sequence
  Description of Artificial Sequence: Synthetic oligonucleotide
  Sense strand starting at position 2950 of SEQ ID NO: 586470
acuggaguuucugcagaaa

SEQ ID NO: 720335 - RNA, 19 nt, Artificial Sequence
  Description of Artificial Sequence: Synthetic oligonucleotide
  Antisense strand to SEQ ID NO: 720334
uuucugcagaaacuccagu

SEQ ID NO: 720336 - RNA, 19 nt, Artificial Sequence
  Description of Artificial Sequence: Synthetic oligonucleotide
  Sense strand starting at position 2962 of SEQ ID NO: 586470
gcagaaagagcuugcugau

SEQ ID NO: 720337 - RNA, 19 nt, Artificial Sequence
  Description of Artificial Sequence: Synthetic oligonucleotide
  Antisense strand to SEQ ID NO: 720336
aucagcaagcucuuucugc

SEQ ID NO: 720338 - RNA, 19 nt, Artificial Sequence
  Description of Artificial Sequence: Synthetic oligonucleotide
  Sense strand starting at position 2988 of SEQ ID NO: 586470
ccugaauuuccacgcaugu

SEQ ID NO: 720339 - RNA, 19 nt, Artificial Sequence
  Description of Artificial Sequence: Synthetic oligonucleotide
  Antisense strand to SEQ ID NO: 720338
acaugcguggaaauucagg

SEQ ID NO: 720340 - RNA, 19 nt, Artificial Sequence
  Description of Artificial Sequence: Synthetic oligonucleotide
  Sense strand starting at position 3064 of SEQ ID NO: 586470
gagauaacugcgcaugucu

SEQ ID NO: 720341 - RNA, 19 nt, Artificial Sequence
  Description of Artificial Sequence: Synthetic oligonucleotide
  Antisense strand to SEQ ID NO: 720340
agacaugcgcaguuaucuc

SEQ ID NO: 720342 - RNA, 19 nt, Artificial Sequence
  Description of Artificial Sequence: Synthetic oligonucleotide
  Sense strand starting at position 3255 of SEQ ID NO: 586470
ucugaaacccagugucuua

SEQ ID NO: 720343 - RNA, 19 nt, Artificial Sequence
  Description of Artificial Sequence: Synthetic oligonucleotide
  Antisense strand to SEQ ID NO: 720342
uaagacacuggguuucaga

SEQ ID NO: 720344 - RNA, 19 nt, Artificial Sequence
  Description of Artificial Sequence: Synthetic oligonucleotide
  Sense strand starting at position 3258 of SEQ ID NO: 586470
gaaacccagugucuuagua

SEQ ID NO: 720345 - RNA, 19 nt, Artificial Sequence
  Description of Artificial Sequence: Synthetic oligonucleotide
  Antisense strand to SEQ ID NO: 720344
uacuaagacacuggguuuc

SEQ ID NO: 720346 - RNA, 19 nt, Artificial Sequence
  Description of Artificial Sequence: Synthetic oligonucleotide
  Sense strand starting at position 3262 of SEQ ID NO: 586470
cccagugucuuaguauuua

SEQ ID NO: 720347 - RNA, 19 nt, Artificial Sequence
  Description of Artificial Sequence: Synthetic oligonucleotide
  Antisense strand to SEQ ID NO: 720346
uaaauacuaagacacuggg

SEQ ID NO: 720348 - RNA, 19 nt, Artificial Sequence
  Description of Artificial Sequence: Synthetic oligonucleotide
  Sense strand starting at position 3494 of SEQ ID NO: 586470
aauguccaucuguaguaga

SEQ ID NO: 720349 - RNA, 19 nt, Artificial Sequence
  Description of Artificial Sequence: Synthetic oligonucleotide
  Antisense strand to SEQ ID NO: 720348
ucuacuacagauggacauu

SEQ ID NO: 720350 - RNA, 19 nt, Artificial Sequence
  Description of Artificial Sequence: Synthetic oligonucleotide
  Sense strand starting at position 3632 of SEQ ID NO: 586470
augggagagcgcgauucua

SEQ ID NO: 720351 - RNA, 19 nt, Artificial Sequence
  Description of Artificial Sequence: Synthetic oligonucleotide
  Antisense strand to SEQ ID NO: 720350
uagaaucgcgcucucccau

SEQ ID NO: 720352 - RNA, 19 nt, Artificial Sequence
  Description of Artificial Sequence: Synthetic oligonucleotide
  Sense strand starting at position 3642 of SEQ ID NO: 586470
gcgauucuauuucugugaa

SEQ ID NO: 720353 - RNA, 19 nt, Artificial Sequence
  Description of Artificial Sequence: Synthetic oligonucleotide
  Antisense strand to SEQ ID NO: 720352
uucacagaaauagaaucgc

SEQ ID NO: 720354 - RNA, 19 nt, Artificial Sequence
  Description of Artificial Sequence: Synthetic oligonucleotide
  Sense strand starting at position 3655 of SEQ ID NO: 586470
ugugaaguuucugcagaac

SEQ ID NO: 720355 - RNA, 19 nt, Artificial Sequence
  Description of Artificial Sequence: Synthetic oligonucleotide
  Antisense strand to SEQ ID NO: 720354
guucugcagaaacuucaca

SEQ ID NO: 720356 - RNA, 19 nt, Artificial Sequence
  Description of Artificial Sequence: Synthetic oligonucleotide
  Sense strand starting at position 3789 of SEQ ID NO: 586470
guguuugggagccagaaca

SEQ ID NO: 720357 - RNA, 19 nt, Artificial Sequence
  Description of Artificial Sequence: Synthetic oligonucleotide
  Antisense strand to SEQ ID NO: 720356
uguucuggcucccaaacac

SEQ ID NO: 720358 - RNA, 19 nt, Artificial Sequence
  Description of Artificial Sequence: Synthetic oligonucleotide
  Sense strand starting at position 3806 of SEQ ID NO: 586470
caggauugcugguuacuga

SEQ ID NO: 720359 - RNA, 19 nt, Artificial Sequence
  Description of Artificial Sequence: Synthetic oligonucleotide
  Antisense strand to SEQ ID NO: 720358
ucaguaaccagcaauccug

SEQ ID NO: 720360 - RNA, 19 nt, Artificial Sequence
  Description of Artificial Sequence: Synthetic oligonucleotide
  Sense strand starting at position 3845 of SEQ ID NO: 586470
uuuggagugcuggaauguu

SEQ ID NO: 720361 - RNA, 19 nt, Artificial Sequence
  Description of Artificial Sequence: Synthetic oligonucleotide
  Antisense strand to SEQ ID NO: 720360
aacauuccagcacuccaaa

SEQ ID NO: 720362 - RNA, 19 nt, Artificial Sequence
  Description of Artificial Sequence: Synthetic oligonucleotide
  Sense strand starting at position 3925 of SEQ ID NO: 586470
ugggcuggucacugaaagu

SEQ ID NO: 720363 - RNA, 19 nt, Artificial Sequence
  Description of Artificial Sequence: Synthetic oligonucleotide
  Antisense strand to SEQ ID NO: 720362
acuuucagugaccagccca

SEQ ID NO: 720364 - RNA, 19 nt, Artificial Sequence
  Description of Artificial Sequence: Synthetic oligonucleotide
  Sense strand starting at position 3931 of SEQ ID NO: 586470
ggucacugaaaguguauau

SEQ ID NO: 720365 - RNA, 19 nt, Artificial Sequence
  Description of Artificial Sequence: Synthetic oligonucleotide
  Antisense strand to SEQ ID NO: 720364
auauacacuuucagugacc

SEQ ID NO: 720366 - RNA, 19 nt, Artificial Sequence
  Description of Artificial Sequence: Synthetic oligonucleotide
  Sense strand starting at position 3935 of SEQ ID NO: 586470
acugaaaguguauauacuu

SEQ ID NO: 720367 - RNA, 19 nt, Artificial Sequence
  Description of Artificial Sequence: Synthetic oligonucleotide
  Antisense strand to SEQ ID NO: 720366
aaguauauacacuuucagu

SEQ ID NO: 720368 - RNA, 19 nt, Artificial Sequence
  Description of Artificial Sequence: Synthetic oligonucleotide
  Sense strand starting at position 202 of SEQ ID NO: 586471
agaauaugcaaucgguguu

SEQ ID NO: 720369 - RNA, 19 nt, Artificial Sequence
  Description of Artificial Sequence: Synthetic oligonucleotide
  Antisense strand to SEQ ID NO: 720368
aacaccgauugcauauucu

SEQ ID NO: 720370 - RNA, 19 nt, Artificial Sequence
  Description of Artificial Sequence: Synthetic oligonucleotide
  Sense strand starting at position 216 of SEQ ID NO: 586471
guguucugacaccaaucau

SEQ ID NO: 720371 - RNA, 19 nt, Artificial Sequence
  Description of Artificial Sequence: Synthetic oligonucleotide
  Antisense strand to SEQ ID NO: 720370
augauuggugucagaacac

SEQ ID NO: 720372 - RNA, 19 nt, Artificial Sequence
  Description of Artificial Sequence: Synthetic oligonucleotide
  Sense strand starting at position 334 of SEQ ID NO: 586471
cugaauuugcggcagcuau

SEQ ID NO: 720373 - RNA, 19 nt, Artificial Sequence
  Description of Artificial Sequence: Synthetic oligonucleotide
  Antisense strand to SEQ ID NO: 720372
auagcugccgcaaauucag

SEQ ID NO: 720374 - RNA, 19 nt, Artificial Sequence
  Description of Artificial Sequence: Synthetic oligonucleotide
  Sense strand starting at position 359 of SEQ ID NO: 586471
augaauuauuuccgagaua

SEQ ID NO: 720375 - RNA, 19 nt, Artificial Sequence
  Description of Artificial Sequence: Synthetic oligonucleotide
  Antisense strand to SEQ ID NO: 720374
uaucucggaaauaauucau

SEQ ID NO: 720376 - RNA, 19 nt, Artificial Sequence
  Description of Artificial Sequence: Synthetic oligonucleotide
  Sense strand starting at position 360 of SEQ ID NO: 586471
ugaauuauuuccgagauag

SEQ ID NO: 720377 - RNA, 19 nt, Artificial Sequence
  Description of Artificial Sequence: Synthetic oligonucleotide
  Antisense strand to SEQ ID NO: 720376
cuaucucggaaauaauuca

SEQ ID NO: 720378 - RNA, 19 nt, Artificial Sequence
  Description of Artificial Sequence: Synthetic oligonucleotide
  Sense strand starting at position 446 of SEQ ID NO: 586471
guuuacuacuaagucauga

SEQ ID NO: 720379 - RNA, 19 nt, Artificial Sequence
  Description of Artificial Sequence: Synthetic oligonucleotide
  Antisense strand to SEQ ID NO: 720378
ucaugacuuaguaguaaac

SEQ ID NO: 720380 - RNA, 19 nt, Artificial Sequence
  Description of Artificial Sequence: Synthetic oligonucleotide
  Sense strand starting at position 490 of SEQ ID NO: 586471
ggcucucccuaauugcaua

SEQ ID NO: 720381 - RNA, 19 nt, Artificial Sequence
  Description of Artificial Sequence: Synthetic oligonucleotide
  Antisense strand to SEQ ID NO: 720380
uaugcaauuagggagagcc

SEQ ID NO: 720382 - RNA, 19 nt, Artificial Sequence
  Description of Artificial Sequence: Synthetic oligonucleotide
  Sense strand starting at position 495 of SEQ ID NO: 586471
ucccuaauugcauauggga

SEQ ID NO: 720383 - RNA, 19 nt, Artificial Sequence
  Description of Artificial Sequence: Synthetic oligonucleotide
  Antisense strand to SEQ ID NO: 720382
ucccauaugcaauuaggga

SEQ ID NO: 720384 - RNA, 19 nt, Artificial Sequence
  Description of Artificial Sequence: Synthetic oligonucleotide
  Sense strand starting at position 509 of SEQ ID NO: 586471
ugggaaucaucugaaauaa

SEQ ID NO: 720385 - RNA, 19 nt, Artificial Sequence
  Description of Artificial Sequence: Synthetic oligonucleotide
  Antisense strand to SEQ ID NO: 720384
uuauuucagaugauuccca

SEQ ID NO: 720386 - RNA, 19 nt, Artificial Sequence
  Description of Artificial Sequence: Synthetic oligonucleotide
  Sense strand starting at position 550 of SEQ ID NO: 586471
uucuaaacucuauggcagu

SEQ ID NO: 720387 - RNA, 19 nt, Artificial Sequence
  Description of Artificial Sequence: Synthetic oligonucleotide
  Antisense strand to SEQ ID NO: 720386
acugccauagaguuuagaa

SEQ ID NO: 720388 - RNA, 19 nt, Artificial Sequence
  Description of Artificial Sequence: Synthetic oligonucleotide
  Sense strand starting at position 561 of SEQ ID NO: 586471
auggcagugcccuaggaaa

SEQ ID NO: 720389 - RNA, 19 nt, Artificial Sequence
  Description of Artificial Sequence: Synthetic oligonucleotide
  Antisense strand to SEQ ID NO: 720388
uuuccuagggcacugccau

SEQ ID NO: 720390 - RNA, 19 nt, Artificial Sequence
  Description of Artificial Sequence: Synthetic oligonucleotide
  Sense strand starting at position 695 of SEQ ID NO: 586471
cuuaguuucccagguuuac

SEQ ID NO: 720391 - RNA, 19 nt, Artificial Sequence
  Description of Artificial Sequence: Synthetic oligonucleotide
  Antisense strand to SEQ ID NO: 720390
guaaaccugggaaacuaag

SEQ ID NO: 720392 - RNA, 19 nt, Artificial Sequence
  Description of Artificial Sequence: Synthetic oligonucleotide
  Sense strand starting at position 720 of SEQ ID NO: 586471
agggcucacugguuccaaa

SEQ ID NO: 720393 - RNA, 19 nt, Artificial Sequence
  Description of Artificial Sequence: Synthetic oligonucleotide
  Antisense strand to SEQ ID NO: 720392
uuuggaaccagugagcccu

SEQ ID NO: 720394 - RNA, 19 nt, Artificial Sequence
  Description of Artificial Sequence: Synthetic oligonucleotide
  Sense strand starting at position 1188 of SEQ ID NO: 586471
guuccagggagucauccaa

SEQ ID NO: 720395 - RNA, 19 nt, Artificial Sequence
  Description of Artificial Sequence: Synthetic oligonucleotide
  Antisense strand to SEQ ID NO: 720394
uuggaugacucccuggaac

SEQ ID NO: 720396 - RNA, 19 nt, Artificial Sequence
  Description of Artificial Sequence: Synthetic oligonucleotide
  Sense strand starting at position 2024 of SEQ ID NO: 586471
ggacacuucuguuucuguu

SEQ ID NO: 720397 - RNA, 19 nt, Artificial Sequence
  Description of Artificial Sequence: Synthetic oligonucleotide
  Antisense strand to SEQ ID NO: 720396
aacagaaacagaagugucc

SEQ ID NO: 720398 - RNA, 19 nt, Artificial Sequence
  Description of Artificial Sequence: Synthetic oligonucleotide
  Sense strand starting at position 2328 of SEQ ID NO: 586471
gcaagaggugccugauaag

SEQ ID NO: 720399 - RNA, 19 nt, Artificial Sequence
  Description of Artificial Sequence: Synthetic oligonucleotide
  Antisense strand to SEQ ID NO: 720398
cuuaucaggcaccucuugc

SEQ ID NO: 720400 - RNA, 19 nt, Artificial Sequence
  Description of Artificial Sequence: Synthetic oligonucleotide
  Sense strand starting at position 2338 of SEQ ID NO: 586471
ccugauaagucuuucugcu

SEQ ID NO: 720401 - RNA, 19 nt, Artificial Sequence
  Description of Artificial Sequence: Synthetic oligonucleotide
  Antisense strand to SEQ ID NO: 720400
agcagaaagacuuaucagg

SEQ ID NO: 720402 - RNA, 19 nt, Artificial Sequence
  Description of Artificial Sequence: Synthetic oligonucleotide
  Sense strand starting at position 2340 of SEQ ID NO: 586471
ugauaagucuuucugcuug

SEQ ID NO: 720403 - RNA, 19 nt, Artificial Sequence
  Description of Artificial Sequence: Synthetic oligonucleotide
  Antisense strand to SEQ ID NO: 720402
caagcagaaagacuuauca

SEQ ID NO: 720404 - RNA, 19 nt, Artificial Sequence
  Description of Artificial Sequence: Synthetic oligonucleotide
  Sense strand starting at position 2511 of SEQ ID NO: 586471
aaaugauguguugguuaua

SEQ ID NO: 720405 - RNA, 19 nt, Artificial Sequence
  Description of Artificial Sequence: Synthetic oligonucleotide
  Antisense strand to SEQ ID NO: 720404
uauaaccaacacaucauuu

SEQ ID NO: 720406 - RNA, 19 nt, Artificial Sequence
  Description of Artificial Sequence: Synthetic oligonucleotide
  Sense strand starting at position 2512 of SEQ ID NO: 586471
aaugauguguugguuauaa

SEQ ID NO: 720407 - RNA, 19 nt, Artificial Sequence
  Description of Artificial Sequence: Synthetic oligonucleotide
  Antisense strand to SEQ ID NO: 720406
uuauaaccaacacaucauu

SEQ ID NO: 720408 - RNA, 19 nt, Artificial Sequence
  Description of Artificial Sequence: Synthetic oligonucleotide
  Sense strand starting at position 2621 of SEQ ID NO: 586471
gggaguguuaacuggugca

SEQ ID NO: 720409 - RNA, 19 nt, Artificial Sequence
  Description of Artificial Sequence: Synthetic oligonucleotide
  Antisense strand to SEQ ID NO: 720408
ugcaccaguuaacacuccc

SEQ ID NO: 720410 - RNA, 19 nt, Artificial Sequence
  Description of Artificial Sequence: Synthetic oligonucleotide
  Sense strand starting at position 2719 of SEQ ID NO: 586471
aguagacgggcucaguaua

SEQ ID NO: 720411 - RNA, 19 nt, Artificial Sequence
  Description of Artificial Sequence: Synthetic oligonucleotide
  Antisense strand to SEQ ID NO: 720410
uauacugagcccgucuacu

SEQ ID NO: 720412 - RNA, 19 nt, Artificial Sequence
  Description of Artificial Sequence: Synthetic oligonucleotide
  Sense strand starting at position 2724 of SEQ ID NO: 586471
acgggcucaguauaaugaa

SEQ ID NO: 720413 - RNA, 19 nt, Artificial Sequence
  Description of Artificial Sequence: Synthetic oligonucleotide
  Antisense strand to SEQ ID NO: 720412
uucauuauacugagcccgu

SEQ ID NO: 720414 - RNA, 19 nt, Artificial Sequence
  Description of Artificial Sequence: Synthetic oligonucleotide
  Sense strand starting at position 2750 of SEQ ID NO: 586471
uuccuaauggugugaaagu

SEQ ID NO: 720415 - RNA, 19 nt, Artificial Sequence
  Description of Artificial Sequence: Synthetic oligonucleotide
  Antisense strand to SEQ ID NO: 720414
acuuucacaccauuaggaa

SEQ ID NO: 720416 - RNA, 19 nt, Artificial Sequence
  Description of Artificial Sequence: Synthetic oligonucleotide
  Sense strand starting at position 2760 of SEQ ID NO: 586471
ugugaaaguccauguuauu

SEQ ID NO: 720417 - RNA, 19 nt, Artificial Sequence
  Description of Artificial Sequence: Synthetic oligonucleotide
  Antisense strand to SEQ ID NO: 720416
aauaacauggacuuucaca

SEQ ID NO: 720418 - RNA, 19 nt, Artificial Sequence
  Description of Artificial Sequence: Synthetic oligonucleotide
  Sense strand starting at position 2772 of SEQ ID NO: 586471
uguuauuucucuucccguu

SEQ ID NO: 720419 - RNA, 19 nt, Artificial Sequence
  Description of Artificial Sequence: Synthetic oligonucleotide
  Antisense strand to SEQ ID NO: 720418
aacgggaagagaaauaaca

SEQ ID NO: 720420 - RNA, 19 nt, Artificial Sequence
  Description of Artificial Sequence: Synthetic oligonucleotide
  Sense strand starting at position 2797 of SEQ ID NO: 586471
ugcaguucuggagaaguac

SEQ ID NO: 720421 - RNA, 19 nt, Artificial Sequence
  Description of Artificial Sequence: Synthetic oligonucleotide
  Antisense strand to SEQ ID NO: 720420
guacuucuccagaacugca

SEQ ID NO: 720422 - RNA, 19 nt, Artificial Sequence
  Description of Artificial Sequence: Synthetic oligonucleotide
  Sense strand starting at position 2833 of SEQ ID NO: 586471
caggguggguugcuuaaga

SEQ ID NO: 720423 - RNA, 19 nt, Artificial Sequence
  Description of Artificial Sequence: Synthetic oligonucleotide
  Antisense strand to SEQ ID NO: 720422
ucuuaagcaacccacccug

SEQ ID NO: 720424 - RNA, 19 nt, Artificial Sequence
  Description of Artificial Sequence: Synthetic oligonucleotide
  Sense strand starting at position 3507 of SEQ ID NO: 586471
agucauuauuucugaaagg

SEQ ID NO: 720425 - RNA, 19 nt, Artificial Sequence
  Description of Artificial Sequence: Synthetic oligonucleotide
  Antisense strand to SEQ ID NO: 720424
ccuuucagaaauaaugacu

SEQ ID NO: 720426 - RNA, 19 nt, Artificial Sequence
  Description of Artificial Sequence: Synthetic oligonucleotide
  Sense strand starting at position 3620 of SEQ ID NO: 586471
gugucugcacaauaaugau

SEQ ID NO: 720427 - RNA, 19 nt, Artificial Sequence
  Description of Artificial Sequence: Synthetic oligonucleotide
  Antisense strand to SEQ ID NO: 720426
aucauuauugugcagacac

SEQ ID NO: 720428 - RNA, 19 nt, Artificial Sequence
  Description of Artificial Sequence: Synthetic oligonucleotide
  Sense strand starting at position 3668 of SEQ ID NO: 586471
uguaccaguuaguucuaau

SEQ ID NO: 720429 - RNA, 19 nt, Artificial Sequence
  Description of Artificial Sequence: Synthetic oligonucleotide
  Antisense strand to SEQ ID NO: 720428
auuagaacuaacugguaca

SEQ ID NO: 720430 - RNA, 19 nt, Artificial Sequence
  Description of Artificial Sequence: Synthetic oligonucleotide
  Sense strand starting at position 3671 of SEQ ID NO: 586471
accaguuaguucuaauuua

SEQ ID NO: 720431 - RNA, 19 nt, Artificial Sequence
  Description of Artificial Sequence: Synthetic oligonucleotide
  Antisense strand to SEQ ID NO: 720430
uaaauuagaacuaacuggu

SEQ ID NO: 720432 - RNA, 19 nt, Artificial Sequence
  Description of Artificial Sequence: Synthetic oligonucleotide
  Sense strand starting at position 3705 of SEQ ID NO: 586471
ucaccaauuuagugagaua

SEQ ID NO: 720433 - RNA, 19 nt, Artificial Sequence
  Description of Artificial Sequence: Synthetic oligonucleotide
  Antisense strand to SEQ ID NO: 720432
uaucucacuaaauugguga

SEQ ID NO: 720434 - RNA, 19 nt, Artificial Sequence
  Description of Artificial Sequence: Synthetic oligonucleotide
  Sense strand starting at position 3708 of SEQ ID NO: 586471
ccaauuuagugagauaggu

SEQ ID NO: 720435 - RNA, 19 nt, Artificial Sequence
  Description of Artificial Sequence: Synthetic oligonucleotide
  Antisense strand to SEQ ID NO: 720434
accuaucucacuaaauugg

SEQ ID NO: 720436 - RNA, 19 nt, Artificial Sequence
  Description of Artificial Sequence: Synthetic oligonucleotide
  Sense strand starting at position 3712 of SEQ ID NO: 586471
uuuagugagauagguucua

SEQ ID NO: 720437 - RNA, 19 nt, Artificial Sequence
  Description of Artificial Sequence: Synthetic oligonucleotide
  Antisense strand to SEQ ID NO: 720436
uagaaccuaucucacuaaa

SEQ ID NO: 720438 - RNA, 19 nt, Artificial Sequence
  Description of Artificial Sequence: Synthetic oligonucleotide
  Sense strand starting at position 3926 of SEQ ID NO: 586471
ccuaguauuguguauguau

SEQ ID NO: 720439 - RNA, 19 nt, Artificial Sequence
  Description of Artificial Sequence: Synthetic oligonucleotide
  Antisense strand to SEQ ID NO: 720438
auacauacacaauacuagg

SEQ ID NO: 720440 - RNA, 19 nt, Artificial Sequence
  Description of Artificial Sequence: Synthetic oligonucleotide
  Sense strand starting at position 3928 of SEQ ID NO: 586471
uaguauuguguauguauga

SEQ ID NO: 720441 - RNA, 19 nt, Artificial Sequence
  Description of Artificial Sequence: Synthetic oligonucleotide
  Antisense strand to SEQ ID NO: 720440
ucauacauacacaauacua

SEQ ID NO: 720442 - RNA, 19 nt, Artificial Sequence
  Description of Artificial Sequence: Synthetic oligonucleotide
  Sense strand starting at position 3929 of SEQ ID NO: 586471
aguauuguguauguaugau

SEQ ID NO: 720443 - RNA, 19 nt, Artificial Sequence
  Description of Artificial Sequence: Synthetic oligonucleotide
  Antisense strand to SEQ ID NO: 720442
aucauacauacacaauacu

SEQ ID NO: 720444 - RNA, 19 nt, Artificial Sequence
  Description of Artificial Sequence: Synthetic oligonucleotide
  Sense strand starting at position 3935 of SEQ ID NO: 586471
guguauguaugaucauaua

SEQ ID NO: 720445 - RNA, 19 nt, Artificial Sequence
  Description of Artificial Sequence: Synthetic oligonucleotide
  Antisense strand to SEQ ID NO: 720444
uauaugaucauacauacac

SEQ ID NO: 720446 - RNA, 19 nt, Artificial Sequence
  Description of Artificial Sequence: Synthetic oligonucleotide
  Sense strand starting at position 3975 of SEQ ID NO: 586471
ucauuucuuugagggaaau

SEQ ID NO: 720447 - RNA, 19 nt, Artificial Sequence
  Description of Artificial Sequence: Synthetic oligonucleotide
  Antisense strand to SEQ ID NO: 720446
auuucccucaaagaaauga

SEQ ID NO: 720448 - RNA, 19 nt, Artificial Sequence
  Description of Artificial Sequence: Synthetic oligonucleotide
  Sense strand starting at position 106 of SEQ ID NO: 586472
ucaucaucauaagucagua

SEQ ID NO: 720449 - RNA, 19 nt, Artificial Sequence
  Description of Artificial Sequence: Synthetic oligonucleotide
  Antisense strand to SEQ ID NO: 720448
uacugacuuaugaugauga

SEQ ID NO: 720450 - RNA, 19 nt, Artificial Sequence
  Description of Artificial Sequence: Synthetic oligonucleotide
  Sense strand starting at position 371 of SEQ ID NO: 586472
aggaaagaguauuauuaac

SEQ ID NO: 720451 - RNA, 19 nt, Artificial Sequence
  Description of Artificial Sequence: Synthetic oligonucleotide
  Antisense strand to SEQ ID NO: 720450
guuaauaauacucuuuccu

SEQ ID NO: 720452 - RNA, 19 nt, Artificial Sequence
  Description of Artificial Sequence: Synthetic oligonucleotide
  Sense strand starting at position 548 of SEQ ID NO: 586472
aggcacuguccacaaauau

SEQ ID NO: 720453 - RNA, 19 nt, Artificial Sequence
  Description of Artificial Sequence: Synthetic oligonucleotide
  Antisense strand to SEQ ID NO: 720452
auauuuguggacagugccu

SEQ ID NO: 720454 - RNA, 19 nt, Artificial Sequence
  Description of Artificial Sequence: Synthetic oligonucleotide
  Sense strand starting at position 966 of SEQ ID NO: 586472
gggaguaggagucagucuu

SEQ ID NO: 720455 - RNA, 19 nt, Artificial Sequence
  Description of Artificial Sequence: Synthetic oligonucleotide
  Antisense strand to SEQ ID NO: 720454
aagacugacuccuacuccc

SEQ ID NO: 720456 - RNA, 19 nt, Artificial Sequence
  Description of Artificial Sequence: Synthetic oligonucleotide
  Sense strand starting at position 976 of SEQ ID NO: 586472
gucagucuugaccaagaca

SEQ ID NO: 720457 - RNA, 19 nt, Artificial Sequence
  Description of Artificial Sequence: Synthetic oligonucleotide
  Antisense strand to SEQ ID NO: 720456
ugucuuggucaagacugac

SEQ ID NO: 720458 - RNA, 19 nt, Artificial Sequence
  Description of Artificial Sequence: Synthetic oligonucleotide
  Sense strand starting at position 1189 of SEQ ID NO: 586472
gcauuuguggcaugacacu

SEQ ID NO: 720459 - RNA, 19 nt, Artificial Sequence
  Description of Artificial Sequence: Synthetic oligonucleotide
  Antisense strand to SEQ ID NO: 720458
agugucaugccacaaaugc

SEQ ID NO: 720460 - RNA, 19 nt, Artificial Sequence
  Description of Artificial Sequence: Synthetic oligonucleotide
  Sense strand starting at position 1219 of SEQ ID NO: 586472
uguagacauguguauauug

SEQ ID NO: 720461 - RNA, 19 nt, Artificial Sequence
  Description of Artificial Sequence: Synthetic oligonucleotide
  Antisense strand to SEQ ID NO: 720460
caauauacacaugucuaca

SEQ ID NO: 720462 - RNA, 19 nt, Artificial Sequence
  Description of Artificial Sequence: Synthetic oligonucleotide
  Sense strand starting at position 1253 of SEQ ID NO: 586472
cuuuacaucuugguucuua

SEQ ID NO: 720463 - RNA, 19 nt, Artificial Sequence
  Description of Artificial Sequence: Synthetic oligonucleotide
  Antisense strand to SEQ ID NO: 720462
uaagaaccaagauguaaag

SEQ ID NO: 720464 - RNA, 19 nt, Artificial Sequence
  Description of Artificial Sequence: Synthetic oligonucleotide
  Sense strand starting at position 1254 of SEQ ID NO: 586472
uuuacaucuugguucuuau

SEQ ID NO: 720465 - RNA, 19 nt, Artificial Sequence
  Description of Artificial Sequence: Synthetic oligonucleotide
  Antisense strand to SEQ ID NO: 720464
auaagaaccaagauguaaa

SEQ ID NO: 720466 - RNA, 19 nt, Artificial Sequence
  Description of Artificial Sequence: Synthetic oligonucleotide
  Sense strand starting at position 1263 of SEQ ID NO: 586472
ugguucuuauugcuuugaa

SEQ ID NO: 720467 - RNA, 19 nt, Artificial Sequence
  Description of Artificial Sequence: Synthetic oligonucleotide
  Antisense strand to SEQ ID NO: 720466
uucaaagcaauaagaacca

SEQ ID NO: 720468 - RNA, 19 nt, Artificial Sequence
  Description of Artificial Sequence: Synthetic oligonucleotide
  Sense strand starting at position 1264 of SEQ ID NO: 586472
gguucuuauugcuuugaau

SEQ ID NO: 720469 - RNA, 19 nt, Artificial Sequence
  Description of Artificial Sequence: Synthetic oligonucleotide
  Antisense strand to SEQ ID NO: 720468
auucaaagcaauaagaacc

SEQ ID NO: 720470 - RNA, 19 nt, Artificial Sequence
  Description of Artificial Sequence: Synthetic oligonucleotide
  Sense strand starting at position 2061 of SEQ ID NO: 586472
ccggaauuacugggagcuu

SEQ ID NO: 720471 - RNA, 19 nt, Artificial Sequence
  Description of Artificial Sequence: Synthetic oligonucleotide
  Antisense strand to SEQ ID NO: 720470
aagcucccaguaauuccgg

SEQ ID NO: 720472 - RNA, 19 nt, Artificial Sequence
  Description of Artificial Sequence: Synthetic oligonucleotide
  Sense strand starting at position 2128 of SEQ ID NO: 586472
uggucucaggccuagaauu

SEQ ID NO: 720473 - RNA, 19 nt, Artificial Sequence
  Description of Artificial Sequence: Synthetic oligonucleotide
  Antisense strand to SEQ ID NO: 720472
aauucuaggccugagacca

SEQ ID NO: 720474 - RNA, 19 nt, Artificial Sequence
  Description of Artificial Sequence: Synthetic oligonucleotide
  Sense strand starting at position 2217 of SEQ ID NO: 586472
gaguguaucccaugcaaua

SEQ ID NO: 720475 - RNA, 19 nt, Artificial Sequence
  Description of Artificial Sequence: Synthetic oligonucleotide
  Antisense strand to SEQ ID NO: 720474
uauugcaugggauacacuc

SEQ ID NO: 720476 - RNA, 19 nt, Artificial Sequence
  Description of Artificial Sequence: Synthetic oligonucleotide
  Sense strand starting at position 2230 of SEQ ID NO: 586472
gcaauaaugguuuauccga

SEQ ID NO: 720477 - RNA, 19 nt, Artificial Sequence
  Description of Artificial Sequence: Synthetic oligonucleotide
  Antisense strand to SEQ ID NO: 720476
ucggauaaaccauuauugc

SEQ ID NO: 720478 - RNA, 19 nt, Artificial Sequence
  Description of Artificial Sequence: Synthetic oligonucleotide
  Sense strand starting at position 2232 of SEQ ID NO: 586472
aauaaugguuuauccgaga

SEQ ID NO: 720479 - RNA, 19 nt, Artificial Sequence
  Description of Artificial Sequence: Synthetic oligonucleotide
  Antisense strand to SEQ ID NO: 720478
ucucggauaaaccauuauu

SEQ ID NO: 720480 - RNA, 19 nt, Artificial Sequence
  Description of Artificial Sequence: Synthetic oligonucleotide
  Sense strand starting at position 2238 of SEQ ID NO: 586472
gguuuauccgagaggcguu

SEQ ID NO: 720481 - RNA, 19 nt, Artificial Sequence
  Description of Artificial Sequence: Synthetic oligonucleotide
  Antisense strand to SEQ ID NO: 720480
aacgccucucggauaaacc

SEQ ID NO: 720482 - RNA, 19 nt, Artificial Sequence
  Description of Artificial Sequence: Synthetic oligonucleotide
  Sense strand starting at position 2602 of SEQ ID NO: 586472
cuggcaaucuuacuuagga

SEQ ID NO: 720483 - RNA, 19 nt, Artificial Sequence
  Description of Artificial Sequence: Synthetic oligonucleotide
  Antisense strand to SEQ ID NO: 720482
uccuaaguaagauugccag

SEQ ID NO: 720484 - RNA, 19 nt, Artificial Sequence
  Description of Artificial Sequence: Synthetic oligonucleotide
  Sense strand starting at position 2711 of SEQ ID NO: 586472
guuuauggacaucgacaaa

SEQ ID NO: 720485 - RNA, 19 nt, Artificial Sequence
  Description of Artificial Sequence: Synthetic oligonucleotide
  Antisense strand to SEQ ID NO: 720484
uuugucgauguccauaaac

SEQ ID NO: 720486 - RNA, 19 nt, Artificial Sequence
  Description of Artificial Sequence: Synthetic oligonucleotide
  Sense strand starting at position 2826 of SEQ ID NO: 586472
uggauaauaucguugcaaa

SEQ ID NO: 720487 - RNA, 19 nt, Artificial Sequence
  Description of Artificial Sequence: Synthetic oligonucleotide
  Antisense strand to SEQ ID NO: 720486
uuugcaacgauauuaucca

SEQ ID NO: 720488 - RNA, 19 nt, Artificial Sequence
  Description of Artificial Sequence: Synthetic oligonucleotide
  Sense strand starting at position 2827 of SEQ ID NO: 586472
ggauaauaucguugcaaau

SEQ ID NO: 720489 - RNA, 19 nt, Artificial Sequence
  Description of Artificial Sequence: Synthetic oligonucleotide
  Antisense strand to SEQ ID NO: 720488
auuugcaacgauauuaucc

SEQ ID NO: 720490 - RNA, 19 nt, Artificial Sequence
  Description of Artificial Sequence: Synthetic oligonucleotide
  Sense strand starting at position 2854 of SEQ ID NO: 586472
cucugaagaguauaccgau

SEQ ID NO: 720491 - RNA, 19 nt, Artificial Sequence
  Description of Artificial Sequence: Synthetic oligonucleotide
  Antisense strand to SEQ ID NO: 720490
aucgguauacucuucagag

SEQ ID NO: 720492 - RNA, 19 nt, Artificial Sequence
  Description of Artificial Sequence: Synthetic oligonucleotide
  Sense strand starting at position 3095 of SEQ ID NO: 586472
cuggguuuccuagacuuag

SEQ ID NO: 720493 - RNA, 19 nt, Artificial Sequence
  Description of Artificial Sequence: Synthetic oligonucleotide
  Antisense strand to SEQ ID NO: 720492
cuaagucuaggaaacccag

SEQ ID NO: 720494 - RNA, 19 nt, Artificial Sequence
  Description of Artificial Sequence: Synthetic oligonucleotide
  Sense strand starting at position 3105 of SEQ ID NO: 586472
uagacuuaguauccuugga

SEQ ID NO: 720495 - RNA, 19 nt, Artificial Sequence
  Description of Artificial Sequence: Synthetic oligonucleotide
  Antisense strand to SEQ ID NO: 720494
uccaaggauacuaagucua

SEQ ID NO: 720496 - RNA, 19 nt, Artificial Sequence
  Description of Artificial Sequence: Synthetic oligonucleotide
  Sense strand starting at position 3107 of SEQ ID NO: 586472
gacuuaguauccuuggaaa

SEQ ID NO: 720497 - RNA, 19 nt, Artificial Sequence
  Description of Artificial Sequence: Synthetic oligonucleotide
  Antisense strand to SEQ ID NO: 720496
uuuccaaggauacuaaguc

SEQ ID NO: 720498 - RNA, 19 nt, Artificial Sequence
  Description of Artificial Sequence: Synthetic oligonucleotide
  Sense strand starting at position 3109 of SEQ ID NO: 586472
cuuaguauccuuggaaagg

SEQ ID NO: 720499 - RNA, 19 nt, Artificial Sequence
  Description of Artificial Sequence: Synthetic oligonucleotide
  Antisense strand to SEQ ID NO: 720498
ccuuuccaaggauacuaag

SEQ ID NO: 720500 - RNA, 19 nt, Artificial Sequence
  Description of Artificial Sequence: Synthetic oligonucleotide
  Sense strand starting at position 3239 of SEQ ID NO: 586472
uacuguuaauuggugauca

SEQ ID NO: 720501 - RNA, 19 nt, Artificial Sequence
  Description of Artificial Sequence: Synthetic oligonucleotide
  Antisense strand to SEQ ID NO: 720500
ugaucaccaauuaacagua

SEQ ID NO: 720502 - RNA, 19 nt, Artificial Sequence
  Description of Artificial Sequence: Synthetic oligonucleotide
  Sense strand starting at position 3241 of SEQ ID NO: 586472
cuguuaauuggugaucaac

SEQ ID NO: 720503 - RNA, 19 nt, Artificial Sequence
  Description of Artificial Sequence: Synthetic oligonucleotide
  Antisense strand to SEQ ID NO: 720502
guugaucaccaauuaacag

SEQ ID NO: 720504 - RNA, 19 nt, Artificial Sequence
  Description of Artificial Sequence: Synthetic oligonucleotide
  Sense strand starting at position 3403 of SEQ ID NO: 586472
auaaguuuccaggacuguu

SEQ ID NO: 720505 - RNA, 19 nt, Artificial Sequence
  Description of Artificial Sequence: Synthetic oligonucleotide
  Antisense strand to SEQ ID NO: 720504
aacaguccuggaaacuuau

SEQ ID NO: 720506 - RNA, 19 nt, Artificial Sequence
  Description of Artificial Sequence: Synthetic oligonucleotide
  Sense strand starting at position 3465 of SEQ ID NO: 586472
uaaagaguguugucucacu

SEQ ID NO: 720507 - RNA, 19 nt, Artificial Sequence
  Description of Artificial Sequence: Synthetic oligonucleotide
  Antisense strand to SEQ ID NO: 720506
agugagacaacacucuuua

SEQ ID NO: 720508 - RNA, 19 nt, Artificial Sequence
  Description of Artificial Sequence: Synthetic oligonucleotide
  Sense strand starting at position 3470 of SEQ ID NO: 586472
aguguugucucacuuuaga

SEQ ID NO: 720509 - RNA, 19 nt, Artificial Sequence
  Description of Artificial Sequence: Synthetic oligonucleotide
  Antisense strand to SEQ ID NO: 720508
ucuaaagugagacaacacu

SEQ ID NO: 720510 - RNA, 19 nt, Artificial Sequence
  Description of Artificial Sequence: Synthetic oligonucleotide
  Sense strand starting at position 3473 of SEQ ID NO: 586472
guugucucacuuuagaaca

SEQ ID NO: 720511 - RNA, 19 nt, Artificial Sequence
  Description of Artificial Sequence: Synthetic oligonucleotide
  Antisense strand to SEQ ID NO: 720510
uguucuaaagugagacaac

SEQ ID NO: 720512 - RNA, 19 nt, Artificial Sequence
  Description of Artificial Sequence: Synthetic oligonucleotide
  Sense strand starting at position 3481 of SEQ ID NO: 586472
acuuuagaacaaugcugaa

SEQ ID NO: 720513 - RNA, 19 nt, Artificial Sequence
  Description of Artificial Sequence: Synthetic oligonucleotide
  Antisense strand to SEQ ID NO: 720512
uucagcauuguucuaaagu

SEQ ID NO: 720514 - RNA, 19 nt, Artificial Sequence
  Description of Artificial Sequence: Synthetic oligonucleotide
  Sense strand starting at position 3544 of SEQ ID NO: 586472
ugauucuucugagccagag

SEQ ID NO: 720515 - RNA, 19 nt, Artificial Sequence
  Description of Artificial Sequence: Synthetic oligonucleotide
  Antisense strand to SEQ ID NO: 720514
cucuggcucagaagaauca

SEQ ID NO: 720516 - RNA, 19 nt, Artificial Sequence
  Description of Artificial Sequence: Synthetic oligonucleotide
  Sense strand starting at position 3610 of SEQ ID NO: 586472
uucuguuugaagcggaaca

SEQ ID NO: 720517 - RNA, 19 nt, Artificial Sequence
  Description of Artificial Sequence: Synthetic oligonucleotide
  Antisense strand to SEQ ID NO: 720516
uguuccgcuucaaacagaa

SEQ ID NO: 720518 - RNA, 19 nt, Artificial Sequence
  Description of Artificial Sequence: Synthetic oligonucleotide
  Sense strand starting at position 3611 of SEQ ID NO: 586472
ucuguuugaagcggaacau

SEQ ID NO: 720519 - RNA, 19 nt, Artificial Sequence
  Description of Artificial Sequence: Synthetic oligonucleotide
  Antisense strand to SEQ ID NO: 720518
auguuccgcuucaaacaga

SEQ ID NO: 720520 - RNA, 19 nt, Artificial Sequence
  Description of Artificial Sequence: Synthetic oligonucleotide
  Sense strand starting at position 3612 of SEQ ID NO: 586472
cuguuugaagcggaacaua

SEQ ID NO: 720521 - RNA, 19 nt, Artificial Sequence
  Description of Artificial Sequence: Synthetic oligonucleotide
  Antisense strand to SEQ ID NO: 720520
uauguuccgcuucaaacag

SEQ ID NO: 720522 - RNA, 19 nt, Artificial Sequence
  Description of Artificial Sequence: Synthetic oligonucleotide
  Sense strand starting at position 3677 of SEQ ID NO: 586472
auauuauugccagaggcag

SEQ ID NO: 720523 - RNA, 19 nt, Artificial Sequence
  Description of Artificial Sequence: Synthetic oligonucleotide
  Antisense strand to SEQ ID NO: 720522
cugccucuggcaauaauau

SEQ ID NO: 720524 - RNA, 19 nt, Artificial Sequence
  Description of Artificial Sequence: Synthetic oligonucleotide
  Sense strand starting at position 3964 of SEQ ID NO: 586472
uccaguaaaucugucuuau

SEQ ID NO: 720525 - RNA, 19 nt, Artificial Sequence
  Description of Artificial Sequence: Synthetic oligonucleotide
  Antisense strand to SEQ ID NO: 720524
auaagacagauuuacugga

SEQ ID NO: 720526 - RNA, 19 nt, Artificial Sequence
  Description of Artificial Sequence: Synthetic oligonucleotide
  Sense strand starting at position 3981 of SEQ ID NO: 586472
auguuaguguaauucccau

SEQ ID NO: 720527 - RNA, 19 nt, Artificial Sequence
  Description of Artificial Sequence: Synthetic oligonucleotide
  Antisense strand to SEQ ID NO: 720526
augggaauuacacuaacau

SEQ ID NO: 720528 - RNA, 19 nt, Artificial Sequence
  Description of Artificial Sequence: Synthetic oligonucleotide
  Sense strand starting at position 429 of SEQ ID NO: 586473
aagugagauuuccaagcca

SEQ ID NO: 720529 - RNA, 19 nt, Artificial Sequence
  Description of Artificial Sequence: Synthetic oligonucleotide
  Antisense strand to SEQ ID NO: 720528
uggcuuggaaaucucacuu

SEQ ID NO: 720530 - RNA, 19 nt, Artificial Sequence
  Description of Artificial Sequence: Synthetic oligonucleotide
  Sense strand starting at position 499 of SEQ ID NO: 586473
ccuugagcucagugccaaa

SEQ ID NO: 720531 - RNA, 19 nt, Artificial Sequence
  Description of Artificial Sequence: Synthetic oligonucleotide
  Antisense strand to SEQ ID NO: 720530
uuuggcacugagcucaagg

SEQ ID NO: 720532 - RNA, 19 nt, Artificial Sequence
  Description of Artificial Sequence: Synthetic oligonucleotide
  Sense strand starting at position 657 of SEQ ID NO: 586473
agucacaaucgugggcaaa

SEQ ID NO: 720533 - RNA, 19 nt, Artificial Sequence
  Description of Artificial Sequence: Synthetic oligonucleotide
  Antisense strand to SEQ ID NO: 720532
uuugcccacgauugugacu

SEQ ID NO: 720534 - RNA, 19 nt, Artificial Sequence
  Description of Artificial Sequence: Synthetic oligonucleotide
  Sense strand starting at position 658 of SEQ ID NO: 586473
gucacaaucgugggcaaau

SEQ ID NO: 720535 - RNA, 19 nt, Artificial Sequence
  Description of Artificial Sequence: Synthetic oligonucleotide
  Antisense strand to SEQ ID NO: 720534
auuugcccacgauugugac

SEQ ID NO: 720536 - RNA, 19 nt, Artificial Sequence
  Description of Artificial Sequence: Synthetic oligonucleotide
  Sense strand starting at position 659 of SEQ ID NO: 586473
ucacaaucgugggcaaaug

SEQ ID NO: 720537 - RNA, 19 nt, Artificial Sequence
  Description of Artificial Sequence: Synthetic oligonucleotide
  Antisense strand to SEQ ID NO: 720536
cauuugcccacgauuguga

SEQ ID NO: 720538 - RNA, 19 nt, Artificial Sequence
  Description of Artificial Sequence: Synthetic oligonucleotide
  Sense strand starting at position 720 of SEQ ID NO: 586473
ggcucaggguccuuaaaca

SEQ ID NO: 720539 - RNA, 19 nt, Artificial Sequence
  Description of Artificial Sequence: Synthetic oligonucleotide
  Antisense strand to SEQ ID NO: 720538
uguuuaaggacccugagcc

SEQ ID NO: 720540 - RNA, 19 nt, Artificial Sequence
  Description of Artificial Sequence: Synthetic oligonucleotide
  Sense strand starting at position 1508 of SEQ ID NO: 586473
gcccgaaguugucuuccga

SEQ ID NO: 720541 - RNA, 19 nt, Artificial Sequence
  Description of Artificial Sequence: Synthetic oligonucleotide
  Antisense strand to SEQ ID NO: 720540
ucggaagacaacuucgggc

SEQ ID NO: 720542 - RNA, 19 nt, Artificial Sequence
  Description of Artificial Sequence: Synthetic oligonucleotide
  Sense strand starting at position 1601 of SEQ ID NO: 586473
cuuaccuggucuuggagaa

SEQ ID NO: 720543 - RNA, 19 nt, Artificial Sequence
  Description of Artificial Sequence: Synthetic oligonucleotide
  Antisense strand to SEQ ID NO: 720542
uucuccaagaccagguaag

SEQ ID NO: 720544 - RNA, 19 nt, Artificial Sequence
  Description of Artificial Sequence: Synthetic oligonucleotide
  Sense strand starting at position 2472 of SEQ ID NO: 586473
gggaguucguagcaaggga

SEQ ID NO: 720545 - RNA, 19 nt, Artificial Sequence
  Description of Artificial Sequence: Synthetic oligonucleotide
  Antisense strand to SEQ ID NO: 720544
ucccuugcuacgaacuccc

SEQ ID NO: 720546 - RNA, 19 nt, Artificial Sequence
  Description of Artificial Sequence: Synthetic oligonucleotide
  Sense strand starting at position 2629 of SEQ ID NO: 586473
gcuggugagugacuguaau

SEQ ID NO: 720547 - RNA, 19 nt, Artificial Sequence
  Description of Artificial Sequence: Synthetic oligonucleotide
  Antisense strand to SEQ ID NO: 720546
auuacagucacucaccagc

SEQ ID NO: 720548 - RNA, 19 nt, Artificial Sequence
  Description of Artificial Sequence: Synthetic oligonucleotide
  Sense strand starting at position 2740 of SEQ ID NO: 586473
aggcaauagagugagaguu

SEQ ID NO: 720549 - RNA, 19 nt, Artificial Sequence
  Description of Artificial Sequence: Synthetic oligonucleotide
  Antisense strand to SEQ ID NO: 720548
aacucucacucuauugccu

SEQ ID NO: 720550 - RNA, 19 nt, Artificial Sequence
  Description of Artificial Sequence: Synthetic oligonucleotide
  Sense strand starting at position 2742 of SEQ ID NO: 586473
gcaauagagugagaguuca

SEQ ID NO: 720551 - RNA, 19 nt, Artificial Sequence
  Description of Artificial Sequence: Synthetic oligonucleotide
  Antisense strand to SEQ ID NO: 720550
ugaacucucacucuauugc

SEQ ID NO: 720552 - RNA, 19 nt, Artificial Sequence
  Description of Artificial Sequence: Synthetic oligonucleotide
  Sense strand starting at position 3238 of SEQ ID NO: 586473
acaaguuggucacaggacu

SEQ ID NO: 720553 - RNA, 19 nt, Artificial Sequence
  Description of Artificial Sequence: Synthetic oligonucleotide
  Antisense strand to SEQ ID NO: 720552
aguccugugaccaacuugu

SEQ ID NO: 720554 - RNA, 19 nt, Artificial Sequence
  Description of Artificial Sequence: Synthetic oligonucleotide
  Sense strand starting at position 2620 of SEQ ID NO: 586474
gggaguucguagcaagaga

SEQ ID NO: 720555 - RNA, 19 nt, Artificial Sequence
  Description of Artificial Sequence: Synthetic oligonucleotide
  Antisense strand to SEQ ID NO: 720554
ucucuugcuacgaacuccc

SEQ ID NO: 720556 - RNA, 19 nt, Artificial Sequence
  Description of Artificial Sequence: Synthetic oligonucleotide
  Sense strand starting at position 70 of SEQ ID NO: 586475
cccggcuuccuaugguuua

SEQ ID NO: 720557 - RNA, 19 nt, Artificial Sequence
  Description of Artificial Sequence: Synthetic oligonucleotide
  Antisense strand to SEQ ID NO: 720556
uaaaccauaggaagccggg

SEQ ID NO: 720558 - RNA, 19 nt, Artificial Sequence
  Description of Artificial Sequence: Synthetic oligonucleotide
  Sense strand starting at position 127 of SEQ ID NO: 586475
auuuauuauuagggacaga

SEQ ID NO: 720559 - RNA, 19 nt, Artificial Sequence
  Description of Artificial Sequence: Synthetic oligonucleotide
  Antisense strand to SEQ ID NO: 720558
ucugucccuaauaauaaau

SEQ ID NO: 720560 - RNA, 19 nt, Artificial Sequence
  Description of Artificial Sequence: Synthetic oligonucleotide
  Sense strand starting at position 242 of SEQ ID NO: 586475
cugcguccaggcuuuauua

SEQ ID NO: 720561 - RNA, 19 nt, Artificial Sequence
  Description of Artificial Sequence: Synthetic oligonucleotide
  Antisense strand to SEQ ID NO: 720560
uaauaaagccuggacgcag

SEQ ID NO: 720562 - RNA, 19 nt, Artificial Sequence
  Description of Artificial Sequence: Synthetic oligonucleotide
  Sense strand starting at position 243 of SEQ ID NO: 586475
ugcguccaggcuuuauuau

SEQ ID NO: 720563 - RNA, 19 nt, Artificial Sequence
  Description of Artificial Sequence: Synthetic oligonucleotide
  Antisense strand to SEQ ID NO: 720562
auaauaaagccuggacgca

SEQ ID NO: 720564 - RNA, 19 nt, Artificial Sequence
  Description of Artificial Sequence: Synthetic oligonucleotide
  Sense strand starting at position 300 of SEQ ID NO: 586475
ccaugugucuauuaacauu

SEQ ID NO: 720565 - RNA, 19 nt, Artificial Sequence
  Description of Artificial Sequence: Synthetic oligonucleotide
  Antisense strand to SEQ ID NO: 720564
aauguuaauagacacaugg

SEQ ID NO: 720566 - RNA, 19 nt, Artificial Sequence
  Description of Artificial Sequence: Synthetic oligonucleotide
  Sense strand starting at position 368 of SEQ ID NO: 586475
accuccuuugaggagucau

SEQ ID NO: 720567 - RNA, 19 nt, Artificial Sequence
  Description of Artificial Sequence: Synthetic oligonucleotide
  Antisense strand to SEQ ID NO: 720566
augacuccucaaaggaggu

SEQ ID NO: 720568 - RNA, 19 nt, Artificial Sequence
  Description of Artificial Sequence: Synthetic oligonucleotide
  Sense strand starting at position 380 of SEQ ID NO: 586475
gagucauacugccaacugu

SEQ ID NO: 720569 - RNA, 19 nt, Artificial Sequence
  Description of Artificial Sequence: Synthetic oligonucleotide
  Antisense strand to SEQ ID NO: 720568
acaguuggcaguaugacuc

SEQ ID NO: 720570 - RNA, 19 nt, Artificial Sequence
  Description of Artificial Sequence: Synthetic oligonucleotide
  Sense strand starting at position 397 of SEQ ID NO: 586475
gucuguuugcguuuccacu

SEQ ID NO: 720571 - RNA, 19 nt, Artificial Sequence
  Description of Artificial Sequence: Synthetic oligonucleotide
  Antisense strand to SEQ ID NO: 720570
aguggaaacgcaaacagac

SEQ ID NO: 720572 - RNA, 19 nt, Artificial Sequence
  Description of Artificial Sequence: Synthetic oligonucleotide
  Sense strand starting at position 404 of SEQ ID NO: 586475
ugcguuuccacuugaauag

SEQ ID NO: 720573 - RNA, 19 nt, Artificial Sequence
  Description of Artificial Sequence: Synthetic oligonucleotide
  Antisense strand to SEQ ID NO: 720572
cuauucaaguggaaacgca

SEQ ID NO: 720574 - RNA, 19 nt, Artificial Sequence
  Description of Artificial Sequence: Synthetic oligonucleotide
  Sense strand starting at position 449 of SEQ ID NO: 586475
guccuaaacugcucugaau

SEQ ID NO: 720575 - RNA, 19 nt, Artificial Sequence
  Description of Artificial Sequence: Synthetic oligonucleotide
  Antisense strand to SEQ ID NO: 720574
auucagagcaguuuaggac

SEQ ID NO: 720576 - RNA, 19 nt, Artificial Sequence
  Description of Artificial Sequence: Synthetic oligonucleotide
  Sense strand starting at position 482 of SEQ ID NO: 586475
ccuccugaauuacugguaa

SEQ ID NO: 720577 - RNA, 19 nt, Artificial Sequence
  Description of Artificial Sequence: Synthetic oligonucleotide
  Antisense strand to SEQ ID NO: 720576
uuaccaguaauucaggagg

SEQ ID NO: 720578 - RNA, 19 nt, Artificial Sequence
  Description of Artificial Sequence: Synthetic oligonucleotide
  Sense strand starting at position 529 of SEQ ID NO: 586475
acugaugucucucaacagu

SEQ ID NO: 720579 - RNA, 19 nt, Artificial Sequence
  Description of Artificial Sequence: Synthetic oligonucleotide
  Antisense strand to SEQ ID NO: 720578
acuguugagagacaucagu

SEQ ID NO: 720580 - RNA, 19 nt, Artificial Sequence
  Description of Artificial Sequence: Synthetic oligonucleotide
  Sense strand starting at position 1054 of SEQ ID NO: 586475
gcgaguuuaacacacaguu

SEQ ID NO: 720581 - RNA, 19 nt, Artificial Sequence
  Description of Artificial Sequence: Synthetic oligonucleotide
  Antisense strand to SEQ ID NO: 720580
aacuguguguuaaacucgc

SEQ ID NO: 720582 - RNA, 19 nt, Artificial Sequence
  Description of Artificial Sequence: Synthetic oligonucleotide
  Sense strand starting at position 1112 of SEQ ID NO: 586475
aaagcaacucuggguaagu

SEQ ID NO: 720583 - RNA, 19 nt, Artificial Sequence
  Description of Artificial Sequence: Synthetic oligonucleotide
  Antisense strand to SEQ ID NO: 720582
acuuacccagaguugcuuu

SEQ ID NO: 720584 - RNA, 19 nt, Artificial Sequence
  Description of Artificial Sequence: Synthetic oligonucleotide
  Sense strand starting at position 1137 of SEQ ID NO: 586475
aggcuuugcuguuugaaug

SEQ ID NO: 720585 - RNA, 19 nt, Artificial Sequence
  Description of Artificial Sequence: Synthetic oligonucleotide
  Antisense strand to SEQ ID NO: 720584
cauucaaacagcaaagccu

SEQ ID NO: 720586 - RNA, 19 nt, Artificial Sequence
  Description of Artificial Sequence: Synthetic oligonucleotide
  Sense strand starting at position 1138 of SEQ ID NO: 586475
ggcuuugcuguuugaaugu

SEQ ID NO: 720587 - RNA, 19 nt, Artificial Sequence
  Description of Artificial Sequence: Synthetic oligonucleotide
  Antisense strand to SEQ ID NO: 720586
acauucaaacagcaaagcc

SEQ ID NO: 720588 - RNA, 19 nt, Artificial Sequence
  Description of Artificial Sequence: Synthetic oligonucleotide
  Sense strand starting at position 1170 of SEQ ID NO: 586475
ugcaaauaucaaggugaug

SEQ ID NO: 720589 - RNA, 19 nt, Artificial Sequence
  Description of Artificial Sequence: Synthetic oligonucleotide
  Antisense strand to SEQ ID NO: 720588
caucaccuugauauuugca

SEQ ID NO: 720590 - RNA, 19 nt, Artificial Sequence
  Description of Artificial Sequence: Synthetic oligonucleotide
  Sense strand starting at position 1175 of SEQ ID NO: 586475
auaucaaggugaugaauuu

SEQ ID NO: 720591 - RNA, 19 nt, Artificial Sequence
  Description of Artificial Sequence: Synthetic oligonucleotide
  Antisense strand to SEQ ID NO: 720590
aaauucaucaccuugauau

SEQ ID NO: 720592 - RNA, 19 nt, Artificial Sequence
  Description of Artificial Sequence: Synthetic oligonucleotide
  Sense strand starting at position 1205 of SEQ ID NO: 586475
cguccaauccacugaaguu

SEQ ID NO: 720593 - RNA, 19 nt, Artificial Sequence
  Description of Artificial Sequence: Synthetic oligonucleotide
  Antisense strand to SEQ ID NO: 720592
aacuucaguggauuggacg

SEQ ID NO: 720594 - RNA, 19 nt, Artificial Sequence
  Description of Artificial Sequence: Synthetic oligonucleotide
  Sense strand starting at position 1257 of SEQ ID NO: 586475
gccugaacuuagugcugau

SEQ ID NO: 720595 - RNA, 19 nt, Artificial Sequence
  Description of Artificial Sequence: Synthetic oligonucleotide
  Antisense strand to SEQ ID NO: 720594
aucagcacuaaguucaggc

SEQ ID NO: 720596 - RNA, 19 nt, Artificial Sequence
  Description of Artificial Sequence: Synthetic oligonucleotide
  Sense strand starting at position 1260 of SEQ ID NO: 586475
ugaacuuagugcugauaac

SEQ ID NO: 720597 - RNA, 19 nt, Artificial Sequence
  Description of Artificial Sequence: Synthetic oligonucleotide
  Antisense strand to SEQ ID NO: 720596
guuaucagcacuaaguuca

SEQ ID NO: 720598 - RNA, 19 nt, Artificial Sequence
  Description of Artificial Sequence: Synthetic oligonucleotide
  Sense strand starting at position 1261 of SEQ ID NO: 586475
gaacuuagugcugauaacu

SEQ ID NO: 720599 - RNA, 19 nt, Artificial Sequence
  Description of Artificial Sequence: Synthetic oligonucleotide
  Antisense strand to SEQ ID NO: 720598
aguuaucagcacuaaguuc

SEQ ID NO: 720600 - RNA, 19 nt, Artificial Sequence
  Description of Artificial Sequence: Synthetic oligonucleotide
  Sense strand starting at position 1269 of SEQ ID NO: 586475
ugcugauaacucuaaguac

SEQ ID NO: 720601 - RNA, 19 nt, Artificial Sequence
  Description of Artificial Sequence: Synthetic oligonucleotide
  Antisense strand to SEQ ID NO: 720600
guacuuagaguuaucagca

SEQ ID NO: 720602 - RNA, 19 nt, Artificial Sequence
  Description of Artificial Sequence: Synthetic oligonucleotide
  Sense strand starting at position 1318 of SEQ ID NO: 586475
acuccaagacguuaaguga

SEQ ID NO: 720603 - RNA, 19 nt, Artificial Sequence
  Description of Artificial Sequence: Synthetic oligonucleotide
  Antisense strand to SEQ ID NO: 720602
ucacuuaacgucuuggagu

SEQ ID NO: 720604 - RNA, 19 nt, Artificial Sequence
  Description of Artificial Sequence: Synthetic oligonucleotide
  Sense strand starting at position 1327 of SEQ ID NO: 586475
cguuaagugauuugaccuc

SEQ ID NO: 720605 - RNA, 19 nt, Artificial Sequence
  Description of Artificial Sequence: Synthetic oligonucleotide
  Antisense strand to SEQ ID NO: 720604
gaggucaaaucacuuaacg

SEQ ID NO: 720606 - RNA, 19 nt, Artificial Sequence
  Description of Artificial Sequence: Synthetic oligonucleotide
  Sense strand starting at position 1389 of SEQ ID NO: 586475
gggacaaugcuuuacucuu

SEQ ID NO: 720607 - RNA, 19 nt, Artificial Sequence
  Description of Artificial Sequence: Synthetic oligonucleotide
  Antisense strand to SEQ ID NO: 720606
aagaguaaagcauuguccc

SEQ ID NO: 720608 - RNA, 19 nt, Artificial Sequence
  Description of Artificial Sequence: Synthetic oligonucleotide
  Sense strand starting at position 2490 of SEQ ID NO: 586475
cggagaucucuugaggcca

SEQ ID NO: 720609 - RNA, 19 nt, Artificial Sequence
  Description of Artificial Sequence: Synthetic oligonucleotide
  Antisense strand to SEQ ID NO: 720608
uggccucaagagaucuccg

SEQ ID NO: 720610 - RNA, 19 nt, Artificial Sequence
  Description of Artificial Sequence: Synthetic oligonucleotide
  Sense strand starting at position 2706 of SEQ ID NO: 586475
acguccuguagcgaaagaa

SEQ ID NO: 720611 - RNA, 19 nt, Artificial Sequence
  Description of Artificial Sequence: Synthetic oligonucleotide
  Antisense strand to SEQ ID NO: 720610
uucuuucgcuacaggacgu

SEQ ID NO: 720612 - RNA, 19 nt, Artificial Sequence
  Description of Artificial Sequence: Synthetic oligonucleotide
  Sense strand starting at position 3025 of SEQ ID NO: 586475
gggaguccuugguaccuua

SEQ ID NO: 720613 - RNA, 19 nt, Artificial Sequence
  Description of Artificial Sequence: Synthetic oligonucleotide
  Antisense strand to SEQ ID NO: 720612
uaagguaccaaggacuccc

SEQ ID NO: 720614 - RNA, 19 nt, Artificial Sequence
  Description of Artificial Sequence: Synthetic oligonucleotide
  Sense strand starting at position 3085 of SEQ ID NO: 586475
ugaugauuggaccgagugu

SEQ ID NO: 720615 - RNA, 19 nt, Artificial Sequence
  Description of Artificial Sequence: Synthetic oligonucleotide
  Antisense strand to SEQ ID NO: 720614
acacucgguccaaucauca

SEQ ID NO: 720616 - RNA, 19 nt, Artificial Sequence
  Description of Artificial Sequence: Synthetic oligonucleotide
  Sense strand starting at position 3096 of SEQ ID NO: 586475
ccgaguguguuaaguguca

SEQ ID NO: 720617 - RNA, 19 nt, Artificial Sequence
  Description of Artificial Sequence: Synthetic oligonucleotide
  Antisense strand to SEQ ID NO: 720616
ugacacuuaacacacucgg

SEQ ID NO: 720618 - RNA, 19 nt, Artificial Sequence
  Description of Artificial Sequence: Synthetic oligonucleotide
  Sense strand starting at position 3098 of SEQ ID NO: 586475
gaguguguuaagugucaaa

SEQ ID NO: 720619 - RNA, 19 nt, Artificial Sequence
  Description of Artificial Sequence: Synthetic oligonucleotide
  Antisense strand to SEQ ID NO: 720618
uuugacacuuaacacacuc

SEQ ID NO: 720620 - RNA, 19 nt, Artificial Sequence
  Description of Artificial Sequence: Synthetic oligonucleotide
  Sense strand starting at position 3118 of SEQ ID NO: 586475
uggacagguucaugagaca

SEQ ID NO: 720621 - RNA, 19 nt, Artificial Sequence
  Description of Artificial Sequence: Synthetic oligonucleotide
  Antisense strand to SEQ ID NO: 720620
ugucucaugaaccugucca

SEQ ID NO: 720622 - RNA, 19 nt, Artificial Sequence
  Description of Artificial Sequence: Synthetic oligonucleotide
  Sense strand starting at position 3172 of SEQ ID NO: 586475
guggcugugaauuagagga

SEQ ID NO: 720623 - RNA, 19 nt, Artificial Sequence
  Description of Artificial Sequence: Synthetic oligonucleotide
  Antisense strand to SEQ ID NO: 720622
uccucuaauucacagccac

SEQ ID NO: 720624 - RNA, 19 nt, Artificial Sequence
  Description of Artificial Sequence: Synthetic oligonucleotide
  Sense strand starting at position 3174 of SEQ ID NO: 586475
ggcugugaauuagaggaua

SEQ ID NO: 720625 - RNA, 19 nt, Artificial Sequence
  Description of Artificial Sequence: Synthetic oligonucleotide
  Antisense strand to SEQ ID NO: 720624
uauccucuaauucacagcc

SEQ ID NO: 720626 - RNA, 19 nt, Artificial Sequence
  Description of Artificial Sequence: Synthetic oligonucleotide
  Sense strand starting at position 3255 of SEQ ID NO: 586475
gcaucccugucuugaggaa

SEQ ID NO: 720627 - RNA, 19 nt, Artificial Sequence
  Description of Artificial Sequence: Synthetic oligonucleotide
  Antisense strand to SEQ ID NO: 720626
uuccucaagacagggaugc

SEQ ID NO: 720628 - RNA, 19 nt, Artificial Sequence
  Description of Artificial Sequence: Synthetic oligonucleotide
  Sense strand starting at position 3325 of SEQ ID NO: 586475
auguguccuccaggaagau

SEQ ID NO: 720629 - RNA, 19 nt, Artificial Sequence
  Description of Artificial Sequence: Synthetic oligonucleotide
  Antisense strand to SEQ ID NO: 720628
aucuuccuggaggacacau

SEQ ID NO: 720630 - RNA, 19 nt, Artificial Sequence
  Description of Artificial Sequence: Synthetic oligonucleotide
  Sense strand starting at position 3326 of SEQ ID NO: 586475
uguguccuccaggaagauu

SEQ ID NO: 720631 - RNA, 19 nt, Artificial Sequence
  Description of Artificial Sequence: Synthetic oligonucleotide
  Antisense strand to SEQ ID NO: 720630
aaucuuccuggaggacaca

SEQ ID NO: 720632 - RNA, 19 nt, Artificial Sequence
  Description of Artificial Sequence: Synthetic oligonucleotide
  Sense strand starting at position 3745 of SEQ ID NO: 586475
gggagaaccugggagaagu

SEQ ID NO: 720633 - RNA, 19 nt, Artificial Sequence
  Description of Artificial Sequence: Synthetic oligonucleotide
  Antisense strand to SEQ ID NO: 720632
acuucucccagguucuccc

SEQ ID NO: 720634 - RNA, 19 nt, Artificial Sequence
  Description of Artificial Sequence: Synthetic oligonucleotide
  Sense strand starting at position 3784 of SEQ ID NO: 586475
ggagcauuuccaggccagu

SEQ ID NO: 720635 - RNA, 19 nt, Artificial Sequence
  Description of Artificial Sequence: Synthetic oligonucleotide
  Antisense strand to SEQ ID NO: 720634
acuggccuggaaaugcucc

SEQ ID NO: 720636 - RNA, 19 nt, Artificial Sequence
  Description of Artificial Sequence: Synthetic oligonucleotide
  Sense strand starting at position 68 of SEQ ID NO: 586476
cucuaucuguuccuuauga

SEQ ID NO: 720637 - RNA, 19 nt, Artificial Sequence
  Description of Artificial Sequence: Synthetic oligonucleotide
  Antisense strand to SEQ ID NO: 720636
ucauaaggaacagauagag

SEQ ID NO: 720638 - RNA, 19 nt, Artificial Sequence
  Description of Artificial Sequence: Synthetic oligonucleotide
  Sense strand starting at position 69 of SEQ ID NO: 586476
ucuaucuguuccuuaugau

SEQ ID NO: 720639 - RNA, 19 nt, Artificial Sequence
  Description of Artificial Sequence: Synthetic oligonucleotide
  Antisense strand to SEQ ID NO: 720638
aucauaaggaacagauaga

SEQ ID NO: 720640 - RNA, 19 nt, Artificial Sequence
  Description of Artificial Sequence: Synthetic oligonucleotide
  Sense strand starting at position 70 of SEQ ID NO: 586476
cuaucuguuccuuaugauc

SEQ ID NO: 720641 - RNA, 19 nt, Artificial Sequence
  Description of Artificial Sequence: Synthetic oligonucleotide
  Antisense strand to SEQ ID NO: 720640
gaucauaaggaacagauag

SEQ ID NO: 720642 - RNA, 19 nt, Artificial Sequence
  Description of Artificial Sequence: Synthetic oligonucleotide
  Sense strand starting at position 95 of SEQ ID NO: 586476
agaagaugcuauucugacu

SEQ ID NO: 720643 - RNA, 19 nt, Artificial Sequence
  Description of Artificial Sequence: Synthetic oligonucleotide
  Antisense strand to SEQ ID NO: 720642
agucagaauagcaucuucu

SEQ ID NO: 720644 - RNA, 19 nt, Artificial Sequence
  Description of Artificial Sequence: Synthetic oligonucleotide
  Sense strand starting at position 121 of SEQ ID NO: 586476
cugggucuuccugauccaa

SEQ ID NO: 720645 - RNA, 19 nt, Artificial Sequence
  Description of Artificial Sequence: Synthetic oligonucleotide
  Antisense strand to SEQ ID NO: 720644
uuggaucaggaagacccag

SEQ ID NO: 720646 - RNA, 19 nt, Artificial Sequence
  Description of Artificial Sequence: Synthetic oligonucleotide
  Sense strand starting at position 251 of SEQ ID NO: 586476
ugauuaacccuuuggacaa

SEQ ID NO: 720647 - RNA, 19 nt, Artificial Sequence
  Description of Artificial Sequence: Synthetic oligonucleotide
  Antisense strand to SEQ ID NO: 720646
uuguccaaaggguuaauca

SEQ ID NO: 720648 - RNA, 19 nt, Artificial Sequence
  Description of Artificial Sequence: Synthetic oligonucleotide
  Sense strand starting at position 258 of SEQ ID NO: 586476
cccuuuggacaaugucaga

SEQ ID NO: 720649 - RNA, 19 nt, Artificial Sequence
  Description of Artificial Sequence: Synthetic oligonucleotide
  Antisense strand to SEQ ID NO: 720648
ucugacauuguccaaaggg

SEQ ID NO: 720650 - RNA, 19 nt, Artificial Sequence
  Description of Artificial Sequence: Synthetic oligonucleotide
  Sense strand starting at position 300 of SEQ ID NO: 586476
agaauuaucucugcuggca

SEQ ID NO: 720651 - RNA, 19 nt, Artificial Sequence
  Description of Artificial Sequence: Synthetic oligonucleotide
  Antisense strand to SEQ ID NO: 720650
ugccagcagagauaauucu

SEQ ID NO: 720652 - RNA, 19 nt, Artificial Sequence
  Description of Artificial Sequence: Synthetic oligonucleotide
  Sense strand starting at position 404 of SEQ ID NO: 586476
ggaugcaaugaaugguuga

SEQ ID NO: 720653 - RNA, 19 nt, Artificial Sequence
  Description of Artificial Sequence: Synthetic oligonucleotide
  Antisense strand to SEQ ID NO: 720652
ucaaccauucauugcaucc

SEQ ID NO: 720654 - RNA, 19 nt, Artificial Sequence
  Description of Artificial Sequence: Synthetic oligonucleotide
  Sense strand starting at position 430 of SEQ ID NO: 586476
cgguuccauccugauacua

SEQ ID NO: 720655 - RNA, 19 nt, Artificial Sequence
  Description of Artificial Sequence: Synthetic oligonucleotide
  Antisense strand to SEQ ID NO: 720654
uaguaucaggauggaaccg

SEQ ID NO: 720656 - RNA, 19 nt, Artificial Sequence
  Description of Artificial Sequence: Synthetic oligonucleotide
  Sense strand starting at position 519 of SEQ ID NO: 586476
uuguauaagcuuuggaacu

SEQ ID NO: 720657 - RNA, 19 nt, Artificial Sequence
  Description of Artificial Sequence: Synthetic oligonucleotide
  Antisense strand to SEQ ID NO: 720656
aguuccaaagcuuauacaa

SEQ ID NO: 720658 - RNA, 19 nt, Artificial Sequence
  Description of Artificial Sequence: Synthetic oligonucleotide
  Sense strand starting at position 544 of SEQ ID NO: 586476
accugaaucugucuagcca

SEQ ID NO: 720659 - RNA, 19 nt, Artificial Sequence
  Description of Artificial Sequence: Synthetic oligonucleotide
  Antisense strand to SEQ ID NO: 720658
uggcuagacagauucaggu

SEQ ID NO: 720660 - RNA, 19 nt, Artificial Sequence
  Description of Artificial Sequence: Synthetic oligonucleotide
  Sense strand starting at position 548 of SEQ ID NO: 586476
gaaucugucuagccagaag

SEQ ID NO: 720661 - RNA, 19 nt, Artificial Sequence
  Description of Artificial Sequence: Synthetic oligonucleotide
  Antisense strand to SEQ ID NO: 720660
cuucuggcuagacagauuc

SEQ ID NO: 720662 - RNA, 19 nt, Artificial Sequence
  Description of Artificial Sequence: Synthetic oligonucleotide
  Sense strand starting at position 551 of SEQ ID NO: 586476
ucugucuagccagaagaaa

SEQ ID NO: 720663 - RNA, 19 nt, Artificial Sequence
  Description of Artificial Sequence: Synthetic oligonucleotide
  Antisense strand to SEQ ID NO: 720662
uuucuucuggcuagacaga

SEQ ID NO: 720664 - RNA, 19 nt, Artificial Sequence
  Description of Artificial Sequence: Synthetic oligonucleotide
  Sense strand starting at position 701 of SEQ ID NO: 586476
gcccuugaauuaucuguca

SEQ ID NO: 720665 - RNA, 19 nt, Artificial Sequence
  Description of Artificial Sequence: Synthetic oligonucleotide
  Antisense strand to SEQ ID NO: 720664
ugacagauaauucaagggc

SEQ ID NO: 720666 - RNA, 19 nt, Artificial Sequence
  Description of Artificial Sequence: Synthetic oligonucleotide
  Sense strand starting at position 704 of SEQ ID NO: 586476
cuugaauuaucugucagcu

SEQ ID NO: 720667 - RNA, 19 nt, Artificial Sequence
  Description of Artificial Sequence: Synthetic oligonucleotide
  Antisense strand to SEQ ID NO: 720666
agcugacagauaauucaag

SEQ ID NO: 720668 - RNA, 19 nt, Artificial Sequence
  Description of Artificial Sequence: Synthetic oligonucleotide
  Sense strand starting at position 822 of SEQ ID NO: 586476
gugugcuaggccuccugua

SEQ ID NO: 720669 - RNA, 19 nt, Artificial Sequence
  Description of Artificial Sequence: Synthetic oligonucleotide
  Antisense strand to SEQ ID NO: 720668
uacaggaggccuagcacac

SEQ ID NO: 720670 - RNA, 19 nt, Artificial Sequence
  Description of Artificial Sequence: Synthetic oligonucleotide
  Sense strand starting at position 883 of SEQ ID NO: 586476
agcucugaaucugccaauu

SEQ ID NO: 720671 - RNA, 19 nt, Artificial Sequence
  Description of Artificial Sequence: Synthetic oligonucleotide
  Antisense strand to SEQ ID NO: 720670
aauuggcagauucagagcu

SEQ ID NO: 720672 - RNA, 19 nt, Artificial Sequence
  Description of Artificial Sequence: Synthetic oligonucleotide
  Sense strand starting at position 1004 of SEQ ID NO: 586476
ccuuuagggucaguaugau

SEQ ID NO: 720673 - RNA, 19 nt, Artificial Sequence
  Description of Artificial Sequence: Synthetic oligonucleotide
  Antisense strand to SEQ ID NO: 720672
aucauacugacccuaaagg

SEQ ID NO: 720674 - RNA, 19 nt, Artificial Sequence
  Description of Artificial Sequence: Synthetic oligonucleotide
  Sense strand starting at position 1010 of SEQ ID NO: 586476
gggucaguaugaucuccuu

SEQ ID NO: 720675 - RNA, 19 nt, Artificial Sequence
  Description of Artificial Sequence: Synthetic oligonucleotide
  Antisense strand to SEQ ID NO: 720674
aaggagaucauacugaccc

SEQ ID NO: 720676 - RNA, 19 nt, Artificial Sequence
  Description of Artificial Sequence: Synthetic oligonucleotide
  Sense strand starting at position 1013 of SEQ ID NO: 586476
ucaguaugaucuccuuaga

SEQ ID NO: 720677 - RNA, 19 nt, Artificial Sequence
  Description of Artificial Sequence: Synthetic oligonucleotide
  Antisense strand to SEQ ID NO: 720676
ucuaaggagaucauacuga

SEQ ID NO: 720678 - RNA, 19 nt, Artificial Sequence
  Description of Artificial Sequence: Synthetic oligonucleotide
  Sense strand starting at position 1016 of SEQ ID NO: 586476
guaugaucuccuuagaagc

SEQ ID NO: 720679 - RNA, 19 nt, Artificial Sequence
  Description of Artificial Sequence: Synthetic oligonucleotide
  Antisense strand to SEQ ID NO: 720678
gcuucuaaggagaucauac

SEQ ID NO: 720680 - RNA, 19 nt, Artificial Sequence
  Description of Artificial Sequence: Synthetic oligonucleotide
  Sense strand starting at position 1044 of SEQ ID NO: 586476
cccuccauugcugaauuga

SEQ ID NO: 720681 - RNA, 19 nt, Artificial Sequence
  Description of Artificial Sequence: Synthetic oligonucleotide
  Antisense strand to SEQ ID NO: 720680
ucaauucagcaauggaggg

SEQ ID NO: 720682 - RNA, 19 nt, Artificial Sequence
  Description of Artificial Sequence: Synthetic oligonucleotide
  Sense strand starting at position 1177 of SEQ ID NO: 586476
aagucuugauggcuaggau

SEQ ID NO: 720683 - RNA, 19 nt, Artificial Sequence
  Description of Artificial Sequence: Synthetic oligonucleotide
  Antisense strand to SEQ ID NO: 720682
auccuagccaucaagacuu

SEQ ID NO: 720684 - RNA, 19 nt, Artificial Sequence
  Description of Artificial Sequence: Synthetic oligonucleotide
  Sense strand starting at position 1337 of SEQ ID NO: 586476
gaucuaaaggucugggacu

SEQ ID NO: 720685 - RNA, 19 nt, Artificial Sequence
  Description of Artificial Sequence: Synthetic oligonucleotide
  Antisense strand to SEQ ID NO: 720684
agucccagaccuuuagauc

SEQ ID NO: 720686 - RNA, 19 nt, Artificial Sequence
  Description of Artificial Sequence: Synthetic oligonucleotide
  Sense strand starting at position 1395 of SEQ ID NO: 586476
gcagguuccugucuggaau

SEQ ID NO: 720687 - RNA, 19 nt, Artificial Sequence
  Description of Artificial Sequence: Synthetic oligonucleotide
  Antisense strand to SEQ ID NO: 720686
auuccagacaggaaccugc

SEQ ID NO: 720688 - RNA, 19 nt, Artificial Sequence
  Description of Artificial Sequence: Synthetic oligonucleotide
  Sense strand starting at position 1396 of SEQ ID NO: 586476
cagguuccugucuggaauu

SEQ ID NO: 720689 - RNA, 19 nt, Artificial Sequence
  Description of Artificial Sequence: Synthetic oligonucleotide
  Antisense strand to SEQ ID NO: 720688
aauuccagacaggaaccug

SEQ ID NO: 720690 - RNA, 19 nt, Artificial Sequence
  Description of Artificial Sequence: Synthetic oligonucleotide
  Sense strand starting at position 1455 of SEQ ID NO: 586476
gcacuuaccgggcagacuu

SEQ ID NO: 720691 - RNA, 19 nt, Artificial Sequence
  Description of Artificial Sequence: Synthetic oligonucleotide
  Antisense strand to SEQ ID NO: 720690
aagucugcccgguaagugc

SEQ ID NO: 720692 - RNA, 19 nt, Artificial Sequence
  Description of Artificial Sequence: Synthetic oligonucleotide
  Sense strand starting at position 3028 of SEQ ID NO: 586476
guggguaauuuccuugagu

SEQ ID NO: 720693 - RNA, 19 nt, Artificial Sequence
  Description of Artificial Sequence: Synthetic oligonucleotide
  Antisense strand to SEQ ID NO: 720692
acucaaggaaauuacccac

SEQ ID NO: 720694 - RNA, 19 nt, Artificial Sequence
  Description of Artificial Sequence: Synthetic oligonucleotide
  Sense strand starting at position 3030 of SEQ ID NO: 586476
ggguaauuuccuugagugc

SEQ ID NO: 720695 - RNA, 19 nt, Artificial Sequence
  Description of Artificial Sequence: Synthetic oligonucleotide
  Antisense strand to SEQ ID NO: 720694
gcacucaaggaaauuaccc

SEQ ID NO: 720696 - RNA, 19 nt, Artificial Sequence
  Description of Artificial Sequence: Synthetic oligonucleotide
  Sense strand starting at position 3469 of SEQ ID NO: 586476
ccgcuaauugcagaugacu

SEQ ID NO: 720697 - RNA, 19 nt, Artificial Sequence
  Description of Artificial Sequence: Synthetic oligonucleotide
  Antisense strand to SEQ ID NO: 720696
agucaucugcaauuagcgg

SEQ ID NO: 720698 - RNA, 19 nt, Artificial Sequence
  Description of Artificial Sequence: Synthetic oligonucleotide
  Sense strand starting at position 3551 of SEQ ID NO: 586476
cccaauucccagcaguaga

SEQ ID NO: 720699 - RNA, 19 nt, Artificial Sequence
  Description of Artificial Sequence: Synthetic oligonucleotide
  Antisense strand to SEQ ID NO: 720698
ucuacugcugggaauuggg

SEQ ID NO: 720700 - RNA, 19 nt, Artificial Sequence
  Description of Artificial Sequence: Synthetic oligonucleotide
  Sense strand starting at position 3570 of SEQ ID NO: 586476
guugucaaucuagaggcaa

SEQ ID NO: 720701 - RNA, 19 nt, Artificial Sequence
  Description of Artificial Sequence: Synthetic oligonucleotide
  Antisense strand to SEQ ID NO: 720700
uugccucuagauugacaac

SEQ ID NO: 720702 - RNA, 19 nt, Artificial Sequence
  Description of Artificial Sequence: Synthetic oligonucleotide
  Sense strand starting at position 3593 of SEQ ID NO: 586476
cagacaguuuggcuugaua

SEQ ID NO: 720703 - RNA, 19 nt, Artificial Sequence
  Description of Artificial Sequence: Synthetic oligonucleotide
  Antisense strand to SEQ ID NO: 720702
uaucaagccaaacugucug

SEQ ID NO: 720704 - RNA, 19 nt, Artificial Sequence
  Description of Artificial Sequence: Synthetic oligonucleotide
  Sense strand starting at position 3595 of SEQ ID NO: 586476
gacaguuuggcuugauagc

SEQ ID NO: 720705 - RNA, 19 nt, Artificial Sequence
  Description of Artificial Sequence: Synthetic oligonucleotide
  Antisense strand to SEQ ID NO: 720704
gcuaucaagccaaacuguc

SEQ ID NO: 720706 - RNA, 19 nt, Artificial Sequence
  Description of Artificial Sequence: Synthetic oligonucleotide
  Sense strand starting at position 3712 of SEQ ID NO: 586476
agugucaucuggucacaag

SEQ ID NO: 720707 - RNA, 19 nt, Artificial Sequence
  Description of Artificial Sequence: Synthetic oligonucleotide
  Antisense strand to SEQ ID NO: 720706
cuugugaccagaugacacu

SEQ ID NO: 720708 - RNA, 19 nt, Artificial Sequence
  Description of Artificial Sequence: Synthetic oligonucleotide
  Sense strand starting at position 3730 of SEQ ID NO: 586476
ggaaauuguuauucaggug

SEQ ID NO: 720709 - RNA, 19 nt, Artificial Sequence
  Description of Artificial Sequence: Synthetic oligonucleotide
  Antisense strand to SEQ ID NO: 720708
caccugaauaacaauuucc

SEQ ID NO: 720710 - RNA, 19 nt, Artificial Sequence
  Description of Artificial Sequence: Synthetic oligonucleotide
  Sense strand starting at position 3902 of SEQ ID NO: 586476
gagggaacucugggucuca

SEQ ID NO: 720711 - RNA, 19 nt, Artificial Sequence
  Description of Artificial Sequence: Synthetic oligonucleotide
  Antisense strand to SEQ ID NO: 720710
ugagacccagaguucccuc

SEQ ID NO: 720712 - RNA, 19 nt, Artificial Sequence
  Description of Artificial Sequence: Synthetic oligonucleotide
  Sense strand starting at position 3956 of SEQ ID NO: 586476
ccuagugaacacuguuaaa

SEQ ID NO: 720713 - RNA, 19 nt, Artificial Sequence
  Description of Artificial Sequence: Synthetic oligonucleotide
  Antisense strand to SEQ ID NO: 720712
uuuaacaguguucacuagg

SEQ ID NO: 720714 - RNA, 19 nt, Artificial Sequence
  Description of Artificial Sequence: Synthetic oligonucleotide
  Sense strand starting at position 3971 of SEQ ID NO: 586476
uaaagucaggcugauguau

SEQ ID NO: 720715 - RNA, 19 nt, Artificial Sequence
  Description of Artificial Sequence: Synthetic oligonucleotide
  Antisense strand to SEQ ID NO: 720714
auacaucagccugacuuua

SEQ ID NO: 720716 - RNA, 19 nt, Artificial Sequence
  Description of Artificial Sequence: Synthetic oligonucleotide
  Sense strand starting at position 40 of SEQ ID NO: 586477
uccaauauuccuggaaguu

SEQ ID NO: 720717 - RNA, 19 nt, Artificial Sequence
  Description of Artificial Sequence: Synthetic oligonucleotide
  Antisense strand to SEQ ID NO: 720716
aacuuccaggaauauugga

SEQ ID NO: 720718 - RNA, 19 nt, Artificial Sequence
  Description of Artificial Sequence: Synthetic oligonucleotide
  Sense strand starting at position 41 of SEQ ID NO: 586477
ccaauauuccuggaaguuc

SEQ ID NO: 720719 - RNA, 19 nt, Artificial Sequence
  Description of Artificial Sequence: Synthetic oligonucleotide
  Antisense strand to SEQ ID NO: 720718
gaacuuccaggaauauugg

SEQ ID NO: 720720 - RNA, 19 nt, Artificial Sequence
  Description of Artificial Sequence: Synthetic oligonucleotide
  Sense strand starting at position 142 of SEQ ID NO: 586477
caggcacaucuugaguaaa

SEQ ID NO: 720721 - RNA, 19 nt, Artificial Sequence
  Description of Artificial Sequence: Synthetic oligonucleotide
  Antisense strand to SEQ ID NO: 720720
uuuacucaagaugugccug

SEQ ID NO: 720722 - RNA, 19 nt, Artificial Sequence
  Description of Artificial Sequence: Synthetic oligonucleotide
  Sense strand starting at position 511 of SEQ ID NO: 586477
aggucaauggcugauguuu

SEQ ID NO: 720723 - RNA, 19 nt, Artificial Sequence
  Description of Artificial Sequence: Synthetic oligonucleotide
  Antisense strand to SEQ ID NO: 720722
aaacaucagccauugaccu

SEQ ID NO: 720724 - RNA, 19 nt, Artificial Sequence
  Description of Artificial Sequence: Synthetic oligonucleotide
  Sense strand starting at position 517 of SEQ ID NO: 586477
auggcugauguuugaaaga

SEQ ID NO: 720725 - RNA, 19 nt, Artificial Sequence
  Description of Artificial Sequence: Synthetic oligonucleotide
  Antisense strand to SEQ ID NO: 720724
ucuuucaaacaucagccau

SEQ ID NO: 720726 - RNA, 19 nt, Artificial Sequence
  Description of Artificial Sequence: Synthetic oligonucleotide
  Sense strand starting at position 567 of SEQ ID NO: 586477
uguaacugagccuggaaau

SEQ ID NO: 720727 - RNA, 19 nt, Artificial Sequence
  Description of Artificial Sequence: Synthetic oligonucleotide
  Antisense strand to SEQ ID NO: 720726
auuuccaggcucaguuaca

SEQ ID NO: 720728 - RNA, 19 nt, Artificial Sequence
  Description of Artificial Sequence: Synthetic oligonucleotide
  Sense strand starting at position 568 of SEQ ID NO: 586477
guaacugagccuggaaaug

SEQ ID NO: 720729 - RNA, 19 nt, Artificial Sequence
  Description of Artificial Sequence: Synthetic oligonucleotide
  Antisense strand to SEQ ID NO: 720728
cauuuccaggcucaguuac

SEQ ID NO: 720730 - RNA, 19 nt, Artificial Sequence
  Description of Artificial Sequence: Synthetic oligonucleotide
  Sense strand starting at position 639 of SEQ ID NO: 586477
ugauucuucucaucucgaa

SEQ ID NO: 720731 - RNA, 19 nt, Artificial Sequence
  Description of Artificial Sequence: Synthetic oligonucleotide
  Antisense strand to SEQ ID NO: 720730
uucgagaugagaagaauca

SEQ ID NO: 720732 - RNA, 19 nt, Artificial Sequence
  Description of Artificial Sequence: Synthetic oligonucleotide
  Sense strand starting at position 1042 of SEQ ID NO: 586477
gggacuucuccugagugac

SEQ ID NO: 720733 - RNA, 19 nt, Artificial Sequence
  Description of Artificial Sequence: Synthetic oligonucleotide
  Antisense strand to SEQ ID NO: 720732
gucacucaggagaaguccc

SEQ ID NO: 720734 - RNA, 19 nt, Artificial Sequence
  Description of Artificial Sequence: Synthetic oligonucleotide
  Sense strand starting at position 1054 of SEQ ID NO: 586477
gagugacuguagccaaaga

SEQ ID NO: 720735 - RNA, 19 nt, Artificial Sequence
  Description of Artificial Sequence: Synthetic oligonucleotide
  Antisense strand to SEQ ID NO: 720734
ucuuuggcuacagucacuc

SEQ ID NO: 720736 - RNA, 19 nt, Artificial Sequence
  Description of Artificial Sequence: Synthetic oligonucleotide
  Sense strand starting at position 1055 of SEQ ID NO: 586477
agugacuguagccaaagaa

SEQ ID NO: 720737 - RNA, 19 nt, Artificial Sequence
  Description of Artificial Sequence: Synthetic oligonucleotide
  Antisense strand to SEQ ID NO: 720736
uucuuuggcuacagucacu

SEQ ID NO: 720738 - RNA, 19 nt, Artificial Sequence
  Description of Artificial Sequence: Synthetic oligonucleotide
  Sense strand starting at position 1298 of SEQ ID NO: 586477
agugcuauccucgcuguga

SEQ ID NO: 720739 - RNA, 19 nt, Artificial Sequence
  Description of Artificial Sequence: Synthetic oligonucleotide
  Antisense strand to SEQ ID NO: 720738
ucacagcgaggauagcacu

SEQ ID NO: 720740 - RNA, 19 nt, Artificial Sequence
  Description of Artificial Sequence: Synthetic oligonucleotide
  Sense strand starting at position 1710 of SEQ ID NO: 586477
cuaguuaucccggaccuaa

SEQ ID NO: 720741 - RNA, 19 nt, Artificial Sequence
  Description of Artificial Sequence: Synthetic oligonucleotide
  Antisense strand to SEQ ID NO: 720740
uuagguccgggauaacuag

SEQ ID NO: 720742 - RNA, 19 nt, Artificial Sequence
  Description of Artificial Sequence: Synthetic oligonucleotide
  Sense strand starting at position 2400 of SEQ ID NO: 586477
aggcauacagccuaauagu

SEQ ID NO: 720743 - RNA, 19 nt, Artificial Sequence
  Description of Artificial Sequence: Synthetic oligonucleotide
  Antisense strand to SEQ ID NO: 720742
acuauuaggcuguaugccu

SEQ ID NO: 720744 - RNA, 19 nt, Artificial Sequence
  Description of Artificial Sequence: Synthetic oligonucleotide
  Sense strand starting at position 2498 of SEQ ID NO: 586477
gcuauauaccaggagcuca

SEQ ID NO: 720745 - RNA, 19 nt, Artificial Sequence
  Description of Artificial Sequence: Synthetic oligonucleotide
  Antisense strand to SEQ ID NO: 720744
ugagcuccugguauauagc

SEQ ID NO: 720746 - RNA, 19 nt, Artificial Sequence
  Description of Artificial Sequence: Synthetic oligonucleotide
  Sense strand starting at position 2527 of SEQ ID NO: 586477
gcuauuuagucuuuacagu

SEQ ID NO: 720747 - RNA, 19 nt, Artificial Sequence
  Description of Artificial Sequence: Synthetic oligonucleotide
  Antisense strand to SEQ ID NO: 720746
acuguaaagacuaaauagc

SEQ ID NO: 720748 - RNA, 19 nt, Artificial Sequence
  Description of Artificial Sequence: Synthetic oligonucleotide
  Sense strand starting at position 2652 of SEQ ID NO: 586477
gaguucuaaucagucugau

SEQ ID NO: 720749 - RNA, 19 nt, Artificial Sequence
  Description of Artificial Sequence: Synthetic oligonucleotide
  Antisense strand to SEQ ID NO: 720748
aucagacugauuagaacuc

SEQ ID NO: 720750 - RNA, 19 nt, Artificial Sequence
  Description of Artificial Sequence: Synthetic oligonucleotide
  Sense strand starting at position 2815 of SEQ ID NO: 586477
uaugaaaguuaagaggaaa

SEQ ID NO: 720751 - RNA, 19 nt, Artificial Sequence
  Description of Artificial Sequence: Synthetic oligonucleotide
  Antisense strand to SEQ ID NO: 720750
uuuccucuuaacuuucaua

SEQ ID NO: 720752 - RNA, 19 nt, Artificial Sequence
  Description of Artificial Sequence: Synthetic oligonucleotide
  Sense strand starting at position 2871 of SEQ ID NO: 586477
auaauacuuugggauuuga

SEQ ID NO: 720753 - RNA, 19 nt, Artificial Sequence
  Description of Artificial Sequence: Synthetic oligonucleotide
  Antisense strand to SEQ ID NO: 720752
ucaaaucccaaaguauuau

SEQ ID NO: 720754 - RNA, 19 nt, Artificial Sequence
  Description of Artificial Sequence: Synthetic oligonucleotide
  Sense strand starting at position 2959 of SEQ ID NO: 586477
ugcaaagaccuguagggua

SEQ ID NO: 720755 - RNA, 19 nt, Artificial Sequence
  Description of Artificial Sequence: Synthetic oligonucleotide
  Antisense strand to SEQ ID NO: 720754
uacccuacaggucuuugca

SEQ ID NO: 720756 - RNA, 19 nt, Artificial Sequence
  Description of Artificial Sequence: Synthetic oligonucleotide
  Sense strand starting at position 2981 of SEQ ID NO: 586477
gaguuugacucacccagaa

SEQ ID NO: 720757 - RNA, 19 nt, Artificial Sequence
  Description of Artificial Sequence: Synthetic oligonucleotide
  Antisense strand to SEQ ID NO: 720756
uucugggugagucaaacuc

SEQ ID NO: 720758 - RNA, 19 nt, Artificial Sequence
  Description of Artificial Sequence: Synthetic oligonucleotide
  Sense strand starting at position 3086 of SEQ ID NO: 586477
uuuaucuuggguuauagua

SEQ ID NO: 720759 - RNA, 19 nt, Artificial Sequence
  Description of Artificial Sequence: Synthetic oligonucleotide
  Antisense strand to SEQ ID NO: 720758
uacuauaacccaagauaaa

SEQ ID NO: 720760 - RNA, 19 nt, Artificial Sequence
  Description of Artificial Sequence: Synthetic oligonucleotide
  Sense strand starting at position 3132 of SEQ ID NO: 586477
gugggaugucaucaagacu

SEQ ID NO: 720761 - RNA, 19 nt, Artificial Sequence
  Description of Artificial Sequence: Synthetic oligonucleotide
  Antisense strand to SEQ ID NO: 720760
agucuugaugacaucccac

SEQ ID NO: 720762 - RNA, 19 nt, Artificial Sequence
  Description of Artificial Sequence: Synthetic oligonucleotide
  Sense strand starting at position 3135 of SEQ ID NO: 586477
ggaugucaucaagacuugu

SEQ ID NO: 720763 - RNA, 19 nt, Artificial Sequence
  Description of Artificial Sequence: Synthetic oligonucleotide
  Antisense strand to SEQ ID NO: 720762
acaagucuugaugacaucc

SEQ ID NO: 720764 - RNA, 19 nt, Artificial Sequence
  Description of Artificial Sequence: Synthetic oligonucleotide
  Sense strand starting at position 3143 of SEQ ID NO: 586477
ucaagacuuguaugacaug

SEQ ID NO: 720765 - RNA, 19 nt, Artificial Sequence
  Description of Artificial Sequence: Synthetic oligonucleotide
  Antisense strand to SEQ ID NO: 720764
caugucauacaagucuuga

SEQ ID NO: 720766 - RNA, 19 nt, Artificial Sequence
  Description of Artificial Sequence: Synthetic oligonucleotide
  Sense strand starting at position 3148 of SEQ ID NO: 586477
acuuguaugacauguugga

SEQ ID NO: 720767 - RNA, 19 nt, Artificial Sequence
  Description of Artificial Sequence: Synthetic oligonucleotide
  Antisense strand to SEQ ID NO: 720766
uccaacaugucauacaagu

SEQ ID NO: 720768 - RNA, 19 nt, Artificial Sequence
  Description of Artificial Sequence: Synthetic oligonucleotide
  Sense strand starting at position 3152 of SEQ ID NO: 586477
guaugacauguuggaggga

SEQ ID NO: 720769 - RNA, 19 nt, Artificial Sequence
  Description of Artificial Sequence: Synthetic oligonucleotide
  Antisense strand to SEQ ID NO: 720768
ucccuccaacaugucauac

SEQ ID NO: 720770 - RNA, 19 nt, Artificial Sequence
  Description of Artificial Sequence: Synthetic oligonucleotide
  Sense strand starting at position 3240 of SEQ ID NO: 586477
aagcaaagaggcugauaaa

SEQ ID NO: 720771 - RNA, 19 nt, Artificial Sequence
  Description of Artificial Sequence: Synthetic oligonucleotide
  Antisense strand to SEQ ID NO: 720770
uuuaucagccucuuugcuu

SEQ ID NO: 720772 - RNA, 19 nt, Artificial Sequence
  Description of Artificial Sequence: Synthetic oligonucleotide
  Sense strand starting at position 3276 of SEQ ID NO: 586477
ugaccuaacuuggugaaca

SEQ ID NO: 720773 - RNA, 19 nt, Artificial Sequence
  Description of Artificial Sequence: Synthetic oligonucleotide
  Antisense strand to SEQ ID NO: 720772
uguucaccaaguuagguca

SEQ ID NO: 720774 - RNA, 19 nt, Artificial Sequence
  Description of Artificial Sequence: Synthetic oligonucleotide
  Sense strand starting at position 3349 of SEQ ID NO: 586477
agccuucuuagggaugcaa

SEQ ID NO: 720775 - RNA, 19 nt, Artificial Sequence
  Description of Artificial Sequence: Synthetic oligonucleotide
  Antisense strand to SEQ ID NO: 720774
uugcaucccuaagaaggcu

SEQ ID NO: 720776 - RNA, 19 nt, Artificial Sequence
  Description of Artificial Sequence: Synthetic oligonucleotide
  Sense strand starting at position 3361 of SEQ ID NO: 586477
gaugcaagucuaugacuga

SEQ ID NO: 720777 - RNA, 19 nt, Artificial Sequence
  Description of Artificial Sequence: Synthetic oligonucleotide
  Antisense strand to SEQ ID NO: 720776
ucagucauagacuugcauc

SEQ ID NO: 720778 - RNA, 19 nt, Artificial Sequence
  Description of Artificial Sequence: Synthetic oligonucleotide
  Sense strand starting at position 3364 of SEQ ID NO: 586477
gcaagucuaugacugaaga

SEQ ID NO: 720779 - RNA, 19 nt, Artificial Sequence
  Description of Artificial Sequence: Synthetic oligonucleotide
  Antisense strand to SEQ ID NO: 720778
ucuucagucauagacuugc

SEQ ID NO: 720780 - RNA, 19 nt, Artificial Sequence
  Description of Artificial Sequence: Synthetic oligonucleotide
  Sense strand starting at position 3491 of SEQ ID NO: 586477
uucucaguggcccaaauaa

SEQ ID NO: 720781 - RNA, 19 nt, Artificial Sequence
  Description of Artificial Sequence: Synthetic oligonucleotide
  Antisense strand to SEQ ID NO: 720780
uuauuugggccacugagaa

SEQ ID NO: 720782 - RNA, 19 nt, Artificial Sequence
  Description of Artificial Sequence: Synthetic oligonucleotide
  Sense strand starting at position 3623 of SEQ ID NO: 586477
aguuaugaggagugcugaa

SEQ ID NO: 720783 - RNA, 19 nt, Artificial Sequence
  Description of Artificial Sequence: Synthetic oligonucleotide
  Antisense strand to SEQ ID NO: 720782
uucagcacuccucauaacu

SEQ ID NO: 720784 - RNA, 19 nt, Artificial Sequence
  Description of Artificial Sequence: Synthetic oligonucleotide
  Sense strand starting at position 3675 of SEQ ID NO: 586477
ugaacuaaagccugaaauc

SEQ ID NO: 720785 - RNA, 19 nt, Artificial Sequence
  Description of Artificial Sequence: Synthetic oligonucleotide
  Antisense strand to SEQ ID NO: 720784
gauuucaggcuuuaguuca

SEQ ID NO: 720786 - RNA, 19 nt, Artificial Sequence
  Description of Artificial Sequence: Synthetic oligonucleotide
  Sense strand starting at position 3774 of SEQ ID NO: 586477
ucaguuuaccucgagucca

SEQ ID NO: 720787 - RNA, 19 nt, Artificial Sequence
  Description of Artificial Sequence: Synthetic oligonucleotide
  Antisense strand to SEQ ID NO: 720786
uggacucgagguaaacuga

SEQ ID NO: 720788 - RNA, 19 nt, Artificial Sequence
  Description of Artificial Sequence: Synthetic oligonucleotide
  Sense strand starting at position 3859 of SEQ ID NO: 586477
gagaaucuaucaguccagu

SEQ ID NO: 720789 - RNA, 19 nt, Artificial Sequence
  Description of Artificial Sequence: Synthetic oligonucleotide
  Antisense strand to SEQ ID NO: 720788
acuggacugauagauucuc

SEQ ID NO: 720790 - RNA, 19 nt, Artificial Sequence
  Description of Artificial Sequence: Synthetic oligonucleotide
  Sense strand starting at position 3889 of SEQ ID NO: 586477
agcauuuguuaggccuaau

SEQ ID NO: 720791 - RNA, 19 nt, Artificial Sequence
  Description of Artificial Sequence: Synthetic oligonucleotide
  Antisense strand to SEQ ID NO: 720790
auuaggccuaacaaaugcu

SEQ ID NO: 720792 - RNA, 19 nt, Artificial Sequence
  Description of Artificial Sequence: Synthetic oligonucleotide
  Sense strand starting at position 3903 of SEQ ID NO: 586477
cuaauaaugccuggcaaug

SEQ ID NO: 720793 - RNA, 19 nt, Artificial Sequence
  Description of Artificial Sequence: Synthetic oligonucleotide
  Antisense strand to SEQ ID NO: 720792
cauugccaggcauuauuag

SEQ ID NO: 720794 - RNA, 19 nt, Artificial Sequence
  Description of Artificial Sequence: Synthetic oligonucleotide
  Sense strand starting at position 3927 of SEQ ID NO: 586477
gucuccaccgcagaagaau

SEQ ID NO: 720795 - RNA, 19 nt, Artificial Sequence
  Description of Artificial Sequence: Synthetic oligonucleotide
  Antisense strand to SEQ ID NO: 720794
auucuucugcgguggagac

SEQ ID NO: 720796 - RNA, 19 nt, Artificial Sequence
  Description of Artificial Sequence: Synthetic oligonucleotide
  Sense strand starting at position 23 of SEQ ID NO: 586478
ugcagaagccagugauacu

SEQ ID NO: 720797 - RNA, 19 nt, Artificial Sequence
  Description of Artificial Sequence: Synthetic oligonucleotide
  Antisense strand to SEQ ID NO: 720796
aguaucacuggcuucugca

SEQ ID NO: 720798 - RNA, 19 nt, Artificial Sequence
  Description of Artificial Sequence: Synthetic oligonucleotide
  Sense strand starting at position 45 of SEQ ID NO: 586478
ccugccuuuguuuagaauu

SEQ ID NO: 720799 - RNA, 19 nt, Artificial Sequence
  Description of Artificial Sequence: Synthetic oligonucleotide
  Antisense strand to SEQ ID NO: 720798
aauucuaaacaaaggcagg

SEQ ID NO: 720800 - RNA, 19 nt, Artificial Sequence
  Description of Artificial Sequence: Synthetic oligonucleotide
  Sense strand starting at position 64 of SEQ ID NO: 586478
ugguauguuguccaucaua

SEQ ID NO: 720801 - RNA, 19 nt, Artificial Sequence
  Description of Artificial Sequence: Synthetic oligonucleotide
  Antisense strand to SEQ ID NO: 720800
uaugauggacaacauacca

SEQ ID NO: 720802 - RNA, 19 nt, Artificial Sequence
  Description of Artificial Sequence: Synthetic oligonucleotide
  Sense strand starting at position 122 of SEQ ID NO: 586478
auaucuugaugauugaugu

SEQ ID NO: 720803 - RNA, 19 nt, Artificial Sequence
  Description of Artificial Sequence: Synthetic oligonucleotide
  Antisense strand to SEQ ID NO: 720802
acaucaaucaucaagauau

SEQ ID NO: 720804 - RNA, 19 nt, Artificial Sequence
  Description of Artificial Sequence: Synthetic oligonucleotide
  Sense strand starting at position 187 of SEQ ID NO: 586478
acucuuggcccugacaaga

SEQ ID NO: 720805 - RNA, 19 nt, Artificial Sequence
  Description of Artificial Sequence: Synthetic oligonucleotide
  Antisense strand to SEQ ID NO: 720804
ucuugucagggccaagagu

SEQ ID NO: 720806 - RNA, 19 nt, Artificial Sequence
  Description of Artificial Sequence: Synthetic oligonucleotide
  Sense strand starting at position 200 of SEQ ID NO: 586478
acaagaaugucagugacuu

SEQ ID NO: 720807 - RNA, 19 nt, Artificial Sequence
  Description of Artificial Sequence: Synthetic oligonucleotide
  Antisense strand to SEQ ID NO: 720806
aagucacugacauucuugu

SEQ ID NO: 720808 - RNA, 19 nt, Artificial Sequence
  Description of Artificial Sequence: Synthetic oligonucleotide
  Sense strand starting at position 201 of SEQ ID NO: 586478
caagaaugucagugacuuc

SEQ ID NO: 720809 - RNA, 19 nt, Artificial Sequence
  Description of Artificial Sequence: Synthetic oligonucleotide
  Antisense strand to SEQ ID NO: 720808
gaagucacugacauucuug

SEQ ID NO: 720810 - RNA, 19 nt, Artificial Sequence
  Description of Artificial Sequence: Synthetic oligonucleotide
  Sense strand starting at position 211 of SEQ ID NO: 586478
agugacuucccaggauucu

SEQ ID NO: 720811 - RNA, 19 nt, Artificial Sequence
  Description of Artificial Sequence: Synthetic oligonucleotide
  Antisense strand to SEQ ID NO: 720810
agaauccugggaagucacu

SEQ ID NO: 720812 - RNA, 19 nt, Artificial Sequence
  Description of Artificial Sequence: Synthetic oligonucleotide
  Sense strand starting at position 349 of SEQ ID NO: 586478
cucacaugccacugugaau

SEQ ID NO: 720813 - RNA, 19 nt, Artificial Sequence
  Description of Artificial Sequence: Synthetic oligonucleotide
  Antisense strand to SEQ ID NO: 720812
auucacaguggcaugugag

SEQ ID NO: 720814 - RNA, 19 nt, Artificial Sequence
  Description of Artificial Sequence: Synthetic oligonucleotide
  Sense strand starting at position 390 of SEQ ID NO: 586478
ugcuguggccuuuauuaaa

SEQ ID NO: 720815 - RNA, 19 nt, Artificial Sequence
  Description of Artificial Sequence: Synthetic oligonucleotide
  Antisense strand to SEQ ID NO: 720814
uuuaauaaaggccacagca

SEQ ID NO: 720816 - RNA, 19 nt, Artificial Sequence
  Description of Artificial Sequence: Synthetic oligonucleotide
  Sense strand starting at position 777 of SEQ ID NO: 586478
aucauuagcucugccagaa

SEQ ID NO: 720817 - RNA, 19 nt, Artificial Sequence
  Description of Artificial Sequence: Synthetic oligonucleotide
  Antisense strand to SEQ ID NO: 720816
uucuggcagagcuaaugau

SEQ ID NO: 720818 - RNA, 19 nt, Artificial Sequence
  Description of Artificial Sequence: Synthetic oligonucleotide
  Sense strand starting at position 1123 of SEQ ID NO: 586478
aggcaucuuugacuuguca

SEQ ID NO: 720819 - RNA, 19 nt, Artificial Sequence
  Description of Artificial Sequence: Synthetic oligonucleotide
  Antisense strand to SEQ ID NO: 720818
ugacaagucaaagaugccu

SEQ ID NO: 720820 - RNA, 19 nt, Artificial Sequence
  Description of Artificial Sequence: Synthetic oligonucleotide
  Sense strand starting at position 1127 of SEQ ID NO: 586478
aucuuugacuugucaccau

SEQ ID NO: 720821 - RNA, 19 nt, Artificial Sequence
  Description of Artificial Sequence: Synthetic oligonucleotide
  Antisense strand to SEQ ID NO: 720820
auggugacaagucaaagau

SEQ ID NO: 720822 - RNA, 19 nt, Artificial Sequence
  Description of Artificial Sequence: Synthetic oligonucleotide
  Sense strand starting at position 1131 of SEQ ID NO: 586478
uugacuugucaccaugucu

SEQ ID NO: 720823 - RNA, 19 nt, Artificial Sequence
  Description of Artificial Sequence: Synthetic oligonucleotide
  Antisense strand to SEQ ID NO: 720822
agacauggugacaagucaa

SEQ ID NO: 720824 - RNA, 19 nt, Artificial Sequence
  Description of Artificial Sequence: Synthetic oligonucleotide
  Sense strand starting at position 1176 of SEQ ID NO: 586478
gugggcuuuguccacaaga

SEQ ID NO: 720825 - RNA, 19 nt, Artificial Sequence
  Description of Artificial Sequence: Synthetic oligonucleotide
  Antisense strand to SEQ ID NO: 720824
ucuuguggacaaagcccac

SEQ ID NO: 720826 - RNA, 19 nt, Artificial Sequence
  Description of Artificial Sequence: Synthetic oligonucleotide
  Sense strand starting at position 1368 of SEQ ID NO: 586478
gcaagacccuucucaaaga

SEQ ID NO: 720827 - RNA, 19 nt, Artificial Sequence
  Description of Artificial Sequence: Synthetic oligonucleotide
  Antisense strand to SEQ ID NO: 720826
ucuuugagaagggucuugc

SEQ ID NO: 720828 - RNA, 19 nt, Artificial Sequence
  Description of Artificial Sequence: Synthetic oligonucleotide
  Sense strand starting at position 1381 of SEQ ID NO: 586478
caaagagccugugcauaaa

SEQ ID NO: 720829 - RNA, 19 nt, Artificial Sequence
  Description of Artificial Sequence: Synthetic oligonucleotide
  Antisense strand to SEQ ID NO: 720828
uuuaugcacaggcucuuug

SEQ ID NO: 720830 - RNA, 19 nt, Artificial Sequence
  Description of Artificial Sequence: Synthetic oligonucleotide
  Sense strand starting at position 1478 of SEQ ID NO: 586478
cgagauaccuucuccuucu

SEQ ID NO: 720831 - RNA, 19 nt, Artificial Sequence
  Description of Artificial Sequence: Synthetic oligonucleotide
  Antisense strand to SEQ ID NO: 720830
agaaggagaagguaucucg

SEQ ID NO: 720832 - RNA, 19 nt, Artificial Sequence
  Description of Artificial Sequence: Synthetic oligonucleotide
  Sense strand starting at position 1581 of SEQ ID NO: 586478
ggcuucugaaguggaaaua

SEQ ID NO: 720833 - RNA, 19 nt, Artificial Sequence
  Description of Artificial Sequence: Synthetic oligonucleotide
  Antisense strand to SEQ ID NO: 720832
uauuuccacuucagaagcc

SEQ ID NO: 720834 - RNA, 19 nt, Artificial Sequence
  Description of Artificial Sequence: Synthetic oligonucleotide
  Sense strand starting at position 1593 of SEQ ID NO: 586478
ggaaauauccaaggcuucu

SEQ ID NO: 720835 - RNA, 19 nt, Artificial Sequence
  Description of Artificial Sequence: Synthetic oligonucleotide
  Antisense strand to SEQ ID NO: 720834
agaagccuuggauauuucc

SEQ ID NO: 720836 - RNA, 19 nt, Artificial Sequence
  Description of Artificial Sequence: Synthetic oligonucleotide
  Sense strand starting at position 1646 of SEQ ID NO: 586478
gggagaaugugguucuccu

SEQ ID NO: 720837 - RNA, 19 nt, Artificial Sequence
  Description of Artificial Sequence: Synthetic oligonucleotide
  Antisense strand to SEQ ID NO: 720836
aggagaaccacauucuccc

SEQ ID NO: 720838 - RNA, 19 nt, Artificial Sequence
  Description of Artificial Sequence: Synthetic oligonucleotide
  Sense strand starting at position 1764 of SEQ ID NO: 586478
ccuggauguucuccaggca

SEQ ID NO: 720839 - RNA, 19 nt, Artificial Sequence
  Description of Artificial Sequence: Synthetic oligonucleotide
  Antisense strand to SEQ ID NO: 720838
ugccuggagaacauccagg

SEQ ID NO: 720840 - RNA, 19 nt, Artificial Sequence
  Description of Artificial Sequence: Synthetic oligonucleotide
  Sense strand starting at position 1875 of SEQ ID NO: 586478
ugggaaauguccucucccu

SEQ ID NO: 720841 - RNA, 19 nt, Artificial Sequence
  Description of Artificial Sequence: Synthetic oligonucleotide
  Antisense strand to SEQ ID NO: 720840
agggagaggacauuuccca

SEQ ID NO: 720842 - RNA, 19 nt, Artificial Sequence
  Description of Artificial Sequence: Synthetic oligonucleotide
  Sense strand starting at position 2212 of SEQ ID NO: 586478
gccuguuaagccuuugcca

SEQ ID NO: 720843 - RNA, 19 nt, Artificial Sequence
  Description of Artificial Sequence: Synthetic oligonucleotide
  Antisense strand to SEQ ID NO: 720842
uggcaaaggcuuaacaggc

SEQ ID NO: 720844 - RNA, 19 nt, Artificial Sequence
  Description of Artificial Sequence: Synthetic oligonucleotide
  Sense strand starting at position 2272 of SEQ ID NO: 586478
uccuguucugaugagcaga

SEQ ID NO: 720845 - RNA, 19 nt, Artificial Sequence
  Description of Artificial Sequence: Synthetic oligonucleotide
  Antisense strand to SEQ ID NO: 720844
ucugcucaucagaacagga

SEQ ID NO: 720846 - RNA, 19 nt, Artificial Sequence
  Description of Artificial Sequence: Synthetic oligonucleotide
  Sense strand starting at position 2394 of SEQ ID NO: 586478
gcuguaaacucuccagaga

SEQ ID NO: 720847 - RNA, 19 nt, Artificial Sequence
  Description of Artificial Sequence: Synthetic oligonucleotide
  Antisense strand to SEQ ID NO: 720846
ucucuggagaguuuacagc

SEQ ID NO: 720848 - RNA, 19 nt, Artificial Sequence
  Description of Artificial Sequence: Synthetic oligonucleotide
  Sense strand starting at position 2602 of SEQ ID NO: 586478
ugagguugacacugucaga

SEQ ID NO: 720849 - RNA, 19 nt, Artificial Sequence
  Description of Artificial Sequence: Synthetic oligonucleotide
  Antisense strand to SEQ ID NO: 720848
ucugacagugucaaccuca

SEQ ID NO: 720850 - RNA, 19 nt, Artificial Sequence
  Description of Artificial Sequence: Synthetic oligonucleotide
  Sense strand starting at position 2801 of SEQ ID NO: 586478
cucagucaauagucuggaa

SEQ ID NO: 720851 - RNA, 19 nt, Artificial Sequence
  Description of Artificial Sequence: Synthetic oligonucleotide
  Antisense strand to SEQ ID NO: 720850
uuccagacuauugacugag

SEQ ID NO: 720852 - RNA, 19 nt, Artificial Sequence
  Description of Artificial Sequence: Synthetic oligonucleotide
  Sense strand starting at position 2803 of SEQ ID NO: 586478
cagucaauagucuggaaca

SEQ ID NO: 720853 - RNA, 19 nt, Artificial Sequence
  Description of Artificial Sequence: Synthetic oligonucleotide
  Antisense strand to SEQ ID NO: 720852
uguuccagacuauugacug

SEQ ID NO: 720854 - RNA, 19 nt, Artificial Sequence
  Description of Artificial Sequence: Synthetic oligonucleotide
  Sense strand starting at position 2936 of SEQ ID NO: 586478
ggguagugucgguauagac

SEQ ID NO: 720855 - RNA, 19 nt, Artificial Sequence
  Description of Artificial Sequence: Synthetic oligonucleotide
  Antisense strand to SEQ ID NO: 720854
gucuauaccgacacuaccc

SEQ ID NO: 720856 - RNA, 19 nt, Artificial Sequence
  Description of Artificial Sequence: Synthetic oligonucleotide
  Sense strand starting at position 3030 of SEQ ID NO: 586478
gugcgaucucuccagacag

SEQ ID NO: 720857 - RNA, 19 nt, Artificial Sequence
  Description of Artificial Sequence: Synthetic oligonucleotide
  Antisense strand to SEQ ID NO: 720856
cugucuggagagaucgcac

SEQ ID NO: 720858 - RNA, 19 nt, Artificial Sequence
  Description of Artificial Sequence: Synthetic oligonucleotide
  Sense strand starting at position 3032 of SEQ ID NO: 586478
gcgaucucuccagacagau

SEQ ID NO: 720859 - RNA, 19 nt, Artificial Sequence
  Description of Artificial Sequence: Synthetic oligonucleotide
  Antisense strand to SEQ ID NO: 720858
aucugucuggagagaucgc

SEQ ID NO: 720860 - RNA, 19 nt, Artificial Sequence
  Description of Artificial Sequence: Synthetic oligonucleotide
  Sense strand starting at position 3045 of SEQ ID NO: 586478
acagaugugcuguaacacu

SEQ ID NO: 720861 - RNA, 19 nt, Artificial Sequence
  Description of Artificial Sequence: Synthetic oligonucleotide
  Antisense strand to SEQ ID NO: 720860
aguguuacagcacaucugu

SEQ ID NO: 720862 - RNA, 19 nt, Artificial Sequence
  Description of Artificial Sequence: Synthetic oligonucleotide
  Sense strand starting at position 3288 of SEQ ID NO: 586478
cugccaacacgagaaguuu

SEQ ID NO: 720863 - RNA, 19 nt, Artificial Sequence
  Description of Artificial Sequence: Synthetic oligonucleotide
  Antisense strand to SEQ ID NO: 720862
aaacuucucguguuggcag

SEQ ID NO: 720864 - RNA, 19 nt, Artificial Sequence
  Description of Artificial Sequence: Synthetic oligonucleotide
  Sense strand starting at position 3296 of SEQ ID NO: 586478
acgagaaguuuggcuuuau

SEQ ID NO: 720865 - RNA, 19 nt, Artificial Sequence
  Description of Artificial Sequence: Synthetic oligonucleotide
  Antisense strand to SEQ ID NO: 720864
auaaagccaaacuucucgu

SEQ ID NO: 720866 - RNA, 19 nt, Artificial Sequence
  Description of Artificial Sequence: Synthetic oligonucleotide
  Sense strand starting at position 3300 of SEQ ID NO: 586478
gaaguuuggcuuuaucuug

SEQ ID NO: 720867 - RNA, 19 nt, Artificial Sequence
  Description of Artificial Sequence: Synthetic oligonucleotide
  Antisense strand to SEQ ID NO: 720866
caagauaaagccaaacuuc

SEQ ID NO: 720868 - RNA, 19 nt, Artificial Sequence
  Description of Artificial Sequence: Synthetic oligonucleotide
  Sense strand starting at position 3480 of SEQ ID NO: 586478
ggauuaucuucugccuaug

SEQ ID NO: 720869 - RNA, 19 nt, Artificial Sequence
  Description of Artificial Sequence: Synthetic oligonucleotide
  Antisense strand to SEQ ID NO: 720868
cauaggcagaagauaaucc

SEQ ID NO: 720870 - RNA, 19 nt, Artificial Sequence
  Description of Artificial Sequence: Synthetic oligonucleotide
  Sense strand starting at position 3491 of SEQ ID NO: 586478
ugccuauggacuuggagaa

SEQ ID NO: 720871 - RNA, 19 nt, Artificial Sequence
  Description of Artificial Sequence: Synthetic oligonucleotide
  Antisense strand to SEQ ID NO: 720870
uucuccaaguccauaggca

SEQ ID NO: 720872 - RNA, 19 nt, Artificial Sequence
  Description of Artificial Sequence: Synthetic oligonucleotide
  Sense strand starting at position 3492 of SEQ ID NO: 586478
gccuauggacuuggagaaa

SEQ ID NO: 720873 - RNA, 19 nt, Artificial Sequence
  Description of Artificial Sequence: Synthetic oligonucleotide
  Antisense strand to SEQ ID NO: 720872
uuucuccaaguccauaggc

SEQ ID NO: 720874 - RNA, 19 nt, Artificial Sequence
  Description of Artificial Sequence: Synthetic oligonucleotide
  Sense strand starting at position 3957 of SEQ ID NO: 586478
cccacugcucuggaauguu

SEQ ID NO: 720875 - RNA, 19 nt, Artificial Sequence
  Description of Artificial Sequence: Synthetic oligonucleotide
  Antisense strand to SEQ ID NO: 720874
aacauuccagagcaguggg

SEQ ID NO: 720876 - RNA, 19 nt, Artificial Sequence
  Description of Artificial Sequence: Synthetic oligonucleotide
  Sense strand starting at position 40 of SEQ ID NO: 586479
ggcuuucccaagcagugua

SEQ ID NO: 720877 - RNA, 19 nt, Artificial Sequence
  Description of Artificial Sequence: Synthetic oligonucleotide
  Antisense strand to SEQ ID NO: 720876
uacacugcuugggaaagcc

SEQ ID NO: 720878 - RNA, 19 nt, Artificial Sequence
  Description of Artificial Sequence: Synthetic oligonucleotide
  Sense strand starting at position 103 of SEQ ID NO: 586479
agguguagccucggaagaa

SEQ ID NO: 720879 - RNA, 19 nt, Artificial Sequence
  Description of Artificial Sequence: Synthetic oligonucleotide
  Antisense strand to SEQ ID NO: 720878
uucuuccgaggcuacaccu

SEQ ID NO: 720880 - RNA, 19 nt, Artificial Sequence
  Description of Artificial Sequence: Synthetic oligonucleotide
  Sense strand starting at position 316 of SEQ ID NO: 586479
agcagaugcucacugaaug

SEQ ID NO: 720881 - RNA, 19 nt, Artificial Sequence
  Description of Artificial Sequence: Synthetic oligonucleotide
  Antisense strand to SEQ ID NO: 720880
cauucagugagcaucugcu

SEQ ID NO: 720882 - RNA, 19 nt, Artificial Sequence
  Description of Artificial Sequence: Synthetic oligonucleotide
  Sense strand starting at position 407 of SEQ ID NO: 586479
gaaagaaccucagucaagu

SEQ ID NO: 720883 - RNA, 19 nt, Artificial Sequence
  Description of Artificial Sequence: Synthetic oligonucleotide
  Antisense strand to SEQ ID NO: 720882
acuugacugagguucuuuc

SEQ ID NO: 720884 - RNA, 19 nt, Artificial Sequence
  Description of Artificial Sequence: Synthetic oligonucleotide
  Sense strand starting at position 686 of SEQ ID NO: 586479
cuuggugaaagcgauaaga

SEQ ID NO: 720885 - RNA, 19 nt, Artificial Sequence
  Description of Artificial Sequence: Synthetic oligonucleotide
  Antisense strand to SEQ ID NO: 720884
ucuuaucgcuuucaccaag

SEQ ID NO: 720886 - RNA, 19 nt, Artificial Sequence
  Description of Artificial Sequence: Synthetic oligonucleotide
  Sense strand starting at position 688 of SEQ ID NO: 586479
uggugaaagcgauaagagu

SEQ ID NO: 720887 - RNA, 19 nt, Artificial Sequence
  Description of Artificial Sequence: Synthetic oligonucleotide
  Antisense strand to SEQ ID NO: 720886
acucuuaucgcuuucacca

SEQ ID NO: 720888 - RNA, 19 nt, Artificial Sequence
  Description of Artificial Sequence: Synthetic oligonucleotide
  Sense strand starting at position 696 of SEQ ID NO: 586479
gcgauaagagucuagacuu

SEQ ID NO: 720889 - RNA, 19 nt, Artificial Sequence
  Description of Artificial Sequence: Synthetic oligonucleotide
  Antisense strand to SEQ ID NO: 720888
aagucuagacucuuaucgc

SEQ ID NO: 720890 - RNA, 19 nt, Artificial Sequence
  Description of Artificial Sequence: Synthetic oligonucleotide
  Sense strand starting at position 704 of SEQ ID NO: 586479
agucuagacuuauucugaa

SEQ ID NO: 720891 - RNA, 19 nt, Artificial Sequence
  Description of Artificial Sequence: Synthetic oligonucleotide
  Antisense strand to SEQ ID NO: 720890
uucagaauaagucuagacu

SEQ ID NO: 720892 - RNA, 19 nt, Artificial Sequence
  Description of Artificial Sequence: Synthetic oligonucleotide
  Sense strand starting at position 808 of SEQ ID NO: 586479
gggaucuuggucugggcau

SEQ ID NO: 720893 - RNA, 19 nt, Artificial Sequence
  Description of Artificial Sequence: Synthetic oligonucleotide
  Antisense strand to SEQ ID NO: 720892
augcccagaccaagauccc

SEQ ID NO: 720894 - RNA, 19 nt, Artificial Sequence
  Description of Artificial Sequence: Synthetic oligonucleotide
  Sense strand starting at position 990 of SEQ ID NO: 586479
guuggauagcagugggaga

SEQ ID NO: 720895 - RNA, 19 nt, Artificial Sequence
  Description of Artificial Sequence: Synthetic oligonucleotide
  Antisense strand to SEQ ID NO: 720894
ucucccacugcuauccaac

SEQ ID NO: 720896 - RNA, 19 nt, Artificial Sequence
  Description of Artificial Sequence: Synthetic oligonucleotide
  Sense strand starting at position 1135 of SEQ ID NO: 586479
gcagauguggacugaggaa

SEQ ID NO: 720897 - RNA, 19 nt, Artificial Sequence
  Description of Artificial Sequence: Synthetic oligonucleotide
  Antisense strand to SEQ ID NO: 720896
uuccucaguccacaucugc

SEQ ID NO: 720898 - RNA, 19 nt, Artificial Sequence
  Description of Artificial Sequence: Synthetic oligonucleotide
  Sense strand starting at position 1150 of SEQ ID NO: 586479
ggaacugucuauuccagca

SEQ ID NO: 720899 - RNA, 19 nt, Artificial Sequence
  Description of Artificial Sequence: Synthetic oligonucleotide
  Antisense strand to SEQ ID NO: 720898
ugcuggaauagacaguucc

SEQ ID NO: 720900 - RNA, 19 nt, Artificial Sequence
  Description of Artificial Sequence: Synthetic oligonucleotide
  Sense strand starting at position 1327 of SEQ ID NO: 586479
uggcuauguacacagaagu

SEQ ID NO: 720901 - RNA, 19 nt, Artificial Sequence
  Description of Artificial Sequence: Synthetic oligonucleotide
  Antisense strand to SEQ ID NO: 720900
acuucuguguacauagcca

SEQ ID NO: 720902 - RNA, 19 nt, Artificial Sequence
  Description of Artificial Sequence: Synthetic oligonucleotide
  Sense strand starting at position 1513 of SEQ ID NO: 586479
caccguuagcuccaggaau

SEQ ID NO: 720903 - RNA, 19 nt, Artificial Sequence
  Description of Artificial Sequence: Synthetic oligonucleotide
  Antisense strand to SEQ ID NO: 720902
auuccuggagcuaacggug

SEQ ID NO: 720904 - RNA, 19 nt, Artificial Sequence
  Description of Artificial Sequence: Synthetic oligonucleotide
  Sense strand starting at position 1515 of SEQ ID NO: 586479
ccguuagcuccaggaauaa

SEQ ID NO: 720905 - RNA, 19 nt, Artificial Sequence
  Description of Artificial Sequence: Synthetic oligonucleotide
  Antisense strand to SEQ ID NO: 720904
uuauuccuggagcuaacgg

SEQ ID NO: 720906 - RNA, 19 nt, Artificial Sequence
  Description of Artificial Sequence: Synthetic oligonucleotide
  Sense strand starting at position 1751 of SEQ ID NO: 586479
agugcaaagucccuaacuu

SEQ ID NO: 720907 - RNA, 19 nt, Artificial Sequence
  Description of Artificial Sequence: Synthetic oligonucleotide
  Antisense strand to SEQ ID NO: 720906
aaguuagggacuuugcacu

SEQ ID NO: 720908 - RNA, 19 nt, Artificial Sequence
  Description of Artificial Sequence: Synthetic oligonucleotide
  Sense strand starting at position 1752 of SEQ ID NO: 586479
gugcaaagucccuaacuuu

SEQ ID NO: 720909 - RNA, 19 nt, Artificial Sequence
  Description of Artificial Sequence: Synthetic oligonucleotide
  Antisense strand to SEQ ID NO: 720908
aaaguuagggacuuugcac

SEQ ID NO: 720910 - RNA, 19 nt, Artificial Sequence
  Description of Artificial Sequence: Synthetic oligonucleotide
  Sense strand starting at position 1770 of SEQ ID NO: 586479
uggugugacccuuaccaga

SEQ ID NO: 720911 - RNA, 19 nt, Artificial Sequence
  Description of Artificial Sequence: Synthetic oligonucleotide
  Antisense strand to SEQ ID NO: 720910
ucugguaagggucacacca

SEQ ID NO: 720912 - RNA, 19 nt, Artificial Sequence
  Description of Artificial Sequence: Synthetic oligonucleotide
  Sense strand starting at position 1772 of SEQ ID NO: 586479
gugugacccuuaccagagu

SEQ ID NO: 720913 - RNA, 19 nt, Artificial Sequence
  Description of Artificial Sequence: Synthetic oligonucleotide
  Antisense strand to SEQ ID NO: 720912
acucugguaagggucacac

SEQ ID NO: 720914 - RNA, 19 nt, Artificial Sequence
  Description of Artificial Sequence: Synthetic oligonucleotide
  Sense strand starting at position 1848 of SEQ ID NO: 586479
agagguagaugcuuuggga

SEQ ID NO: 720915 - RNA, 19 nt, Artificial Sequence
  Description of Artificial Sequence: Synthetic oligonucleotide
  Antisense strand to SEQ ID NO: 720914
ucccaaagcaucuaccucu

SEQ ID NO: 720916 - RNA, 19 nt, Artificial Sequence
  Description of Artificial Sequence: Synthetic oligonucleotide
  Sense strand starting at position 2072 of SEQ ID NO: 586479
aggccauguggguaacagu

SEQ ID NO: 720917 - RNA, 19 nt, Artificial Sequence
  Description of Artificial Sequence: Synthetic oligonucleotide
  Antisense strand to SEQ ID NO: 720916
acuguuacccacauggccu

SEQ ID NO: 720918 - RNA, 19 nt, Artificial Sequence
  Description of Artificial Sequence: Synthetic oligonucleotide
  Sense strand starting at position 2126 of SEQ ID NO: 586479
ggccacacucugugaacau

SEQ ID NO: 720919 - RNA, 19 nt, Artificial Sequence
  Description of Artificial Sequence: Synthetic oligonucleotide
  Antisense strand to SEQ ID NO: 720918
auguucacagaguguggcc

SEQ ID NO: 720920 - RNA, 19 nt, Artificial Sequence
  Description of Artificial Sequence: Synthetic oligonucleotide
  Sense strand starting at position 2595 of SEQ ID NO: 586479
gagugacauccacaugcua

SEQ ID NO: 720921 - RNA, 19 nt, Artificial Sequence
  Description of Artificial Sequence: Synthetic oligonucleotide
  Antisense strand to SEQ ID NO: 720920
uagcauguggaugucacuc

SEQ ID NO: 720922 - RNA, 19 nt, Artificial Sequence
  Description of Artificial Sequence: Synthetic oligonucleotide
  Sense strand starting at position 2680 of SEQ ID NO: 586479
gagggugccuugucagaau

SEQ ID NO: 720923 - RNA, 19 nt, Artificial Sequence
  Description of Artificial Sequence: Synthetic oligonucleotide
  Antisense strand to SEQ ID NO: 720922
auucugacaaggcacccuc

SEQ ID NO: 720924 - RNA, 19 nt, Artificial Sequence
  Description of Artificial Sequence: Synthetic oligonucleotide
  Sense strand starting at position 2710 of SEQ ID NO: 586479
cgccaauggccagagugau

SEQ ID NO: 720925 - RNA, 19 nt, Artificial Sequence
  Description of Artificial Sequence: Synthetic oligonucleotide
  Antisense strand to SEQ ID NO: 720924
aucacucuggccauuggcg

SEQ ID NO: 720926 - RNA, 19 nt, Artificial Sequence
  Description of Artificial Sequence: Synthetic oligonucleotide
  Sense strand starting at position 3004 of SEQ ID NO: 586479
ggcugaggauguguacaaa

SEQ ID NO: 720927 - RNA, 19 nt, Artificial Sequence
  Description of Artificial Sequence: Synthetic oligonucleotide
  Antisense strand to SEQ ID NO: 720926
uuuguacacauccucagcc

SEQ ID NO: 720928 - RNA, 19 nt, Artificial Sequence
  Description of Artificial Sequence: Synthetic oligonucleotide
  Sense strand starting at position 3047 of SEQ ID NO: 586479
cccuuucuugguugacuga

SEQ ID NO: 720929 - RNA, 19 nt, Artificial Sequence
  Description of Artificial Sequence: Synthetic oligonucleotide
  Antisense strand to SEQ ID NO: 720928
ucagucaaccaagaaaggg

SEQ ID NO: 720930 - RNA, 19 nt, Artificial Sequence
  Description of Artificial Sequence: Synthetic oligonucleotide
  Sense strand starting at position 3321 of SEQ ID NO: 586479
ggaguugagagucauugua

SEQ ID NO: 720931 - RNA, 19 nt, Artificial Sequence
  Description of Artificial Sequence: Synthetic oligonucleotide
  Antisense strand to SEQ ID NO: 720930
uacaaugacucucaacucc

SEQ ID NO: 720932 - RNA, 19 nt, Artificial Sequence
  Description of Artificial Sequence: Synthetic oligonucleotide
  Sense strand starting at position 3386 of SEQ ID NO: 586479
uccagaaccuguccagaga

SEQ ID NO: 720933 - RNA, 19 nt, Artificial Sequence
  Description of Artificial Sequence: Synthetic oligonucleotide
  Antisense strand to SEQ ID NO: 720932
ucucuggacagguucugga

SEQ ID NO: 720934 - RNA, 19 nt, Artificial Sequence
  Description of Artificial Sequence: Synthetic oligonucleotide
  Sense strand starting at position 3510 of SEQ ID NO: 586479
ugaacauuguuucugcuua

SEQ ID NO: 720935 - RNA, 19 nt, Artificial Sequence
  Description of Artificial Sequence: Synthetic oligonucleotide
  Antisense strand to SEQ ID NO: 720934
uaagcagaaacaauguuca

SEQ ID NO: 720936 - RNA, 19 nt, Artificial Sequence
  Description of Artificial Sequence: Synthetic oligonucleotide
  Sense strand starting at position 3515 of SEQ ID NO: 586479
auuguuucugcuuagagcu

SEQ ID NO: 720937 - RNA, 19 nt, Artificial Sequence
  Description of Artificial Sequence: Synthetic oligonucleotide
  Antisense strand to SEQ ID NO: 720936
agcucuaagcagaaacaau

SEQ ID NO: 720938 - RNA, 19 nt, Artificial Sequence
  Description of Artificial Sequence: Synthetic oligonucleotide
  Sense strand starting at position 3562 of SEQ ID NO: 586479
gggcuaggaugucucagua

SEQ ID NO: 720939 - RNA, 19 nt, Artificial Sequence
  Description of Artificial Sequence: Synthetic oligonucleotide
  Antisense strand to SEQ ID NO: 720938
uacugagacauccuagccc

SEQ ID NO: 720940 - RNA, 19 nt, Artificial Sequence
  Description of Artificial Sequence: Synthetic oligonucleotide
  Sense strand starting at position 3566 of SEQ ID NO: 586479
uaggaugucucaguagaua

SEQ ID NO: 720941 - RNA, 19 nt, Artificial Sequence
  Description of Artificial Sequence: Synthetic oligonucleotide
  Antisense strand to SEQ ID NO: 720940
uaucuacugagacauccua

SEQ ID NO: 720942 - RNA, 19 nt, Artificial Sequence
  Description of Artificial Sequence: Synthetic oligonucleotide
  Sense strand starting at position 3571 of SEQ ID NO: 586479
ugucucaguagauagugaa

SEQ ID NO: 720943 - RNA, 19 nt, Artificial Sequence
  Description of Artificial Sequence: Synthetic oligonucleotide
  Antisense strand to SEQ ID NO: 720942
uucacuaucuacugagaca

SEQ ID NO: 720944 - RNA, 19 nt, Artificial Sequence
  Description of Artificial Sequence: Synthetic oligonucleotide
  Sense strand starting at position 3679 of SEQ ID NO: 586479
caggguucugauugacaga

SEQ ID NO: 720945 - RNA, 19 nt, Artificial Sequence
  Description of Artificial Sequence: Synthetic oligonucleotide
  Antisense strand to SEQ ID NO: 720944
ucugucaaucagaacccug

SEQ ID NO: 720946 - RNA, 19 nt, Artificial Sequence
  Description of Artificial Sequence: Synthetic oligonucleotide
  Sense strand starting at position 3744 of SEQ ID NO: 586479
aaguuuggugauggauauu

SEQ ID NO: 720947 - RNA, 19 nt, Artificial Sequence
  Description of Artificial Sequence: Synthetic oligonucleotide
  Antisense strand to SEQ ID NO: 720946
aauauccaucaccaaacuu

SEQ ID NO: 720948 - RNA, 19 nt, Artificial Sequence
  Description of Artificial Sequence: Synthetic oligonucleotide
  Sense strand starting at position 3816 of SEQ ID NO: 586479
acaggagguugguuaaaua

SEQ ID NO: 720949 - RNA, 19 nt, Artificial Sequence
  Description of Artificial Sequence: Synthetic oligonucleotide
  Antisense strand to SEQ ID NO: 720948
uauuuaaccaaccuccugu

SEQ ID NO: 720950 - RNA, 19 nt, Artificial Sequence
  Description of Artificial Sequence: Synthetic oligonucleotide
  Sense strand starting at position 3846 of SEQ ID NO: 586479
acuuacauguagucauuaa

SEQ ID NO: 720951 - RNA, 19 nt, Artificial Sequence
  Description of Artificial Sequence: Synthetic oligonucleotide
  Antisense strand to SEQ ID NO: 720950
uuaaugacuacauguaagu

SEQ ID NO: 720952 - RNA, 19 nt, Artificial Sequence
  Description of Artificial Sequence: Synthetic oligonucleotide
  Sense strand starting at position 3883 of SEQ ID NO: 586479
gcucuauuggcauggaaag

SEQ ID NO: 720953 - RNA, 19 nt, Artificial Sequence
  Description of Artificial Sequence: Synthetic oligonucleotide
  Antisense strand to SEQ ID NO: 720952
cuuuccaugccaauagagc

SEQ ID NO: 720954 - RNA, 19 nt, Artificial Sequence
  Description of Artificial Sequence: Synthetic oligonucleotide
  Sense strand starting at position 3884 of SEQ ID NO: 586479
cucuauuggcauggaaaga

SEQ ID NO: 720955 - RNA, 19 nt, Artificial Sequence
  Description of Artificial Sequence: Synthetic oligonucleotide
  Antisense strand to SEQ ID NO: 720954
ucuuuccaugccaauagag

SEQ ID NO: 720956 - RNA, 19 nt, Artificial Sequence
  Description of Artificial Sequence: Synthetic oligonucleotide
  Sense strand starting at position 176 of SEQ ID NO: 586480
ccugaaccauaagagauaa

SEQ ID NO: 720957 - RNA, 19 nt, Artificial Sequence
  Description of Artificial Sequence: Synthetic oligonucleotide
  Antisense strand to SEQ ID NO: 720956
uuaucucuuaugguucagg

SEQ ID NO: 720958 - RNA, 19 nt, Artificial Sequence
  Description of Artificial Sequence: Synthetic oligonucleotide
  Sense strand starting at position 234 of SEQ ID NO: 586480
acugaacauucugcaguaa

SEQ ID NO: 720959 - RNA, 19 nt, Artificial Sequence
  Description of Artificial Sequence: Synthetic oligonucleotide
  Antisense strand to SEQ ID NO: 720958
uuacugcagaauguucagu

SEQ ID NO: 720960 - RNA, 19 nt, Artificial Sequence
  Description of Artificial Sequence: Synthetic oligonucleotide
  Sense strand starting at position 249 of SEQ ID NO: 586480
guaacuguaugacagcaaa

SEQ ID NO: 720961 - RNA, 19 nt, Artificial Sequence
  Description of Artificial Sequence: Synthetic oligonucleotide
  Antisense strand to SEQ ID NO: 720960
uuugcugucauacaguuac

SEQ ID NO: 720962 - RNA, 19 nt, Artificial Sequence
  Description of Artificial Sequence: Synthetic oligonucleotide
  Sense strand starting at position 414 of SEQ ID NO: 586480
gcaggugucaccgagccua

SEQ ID NO: 720963 - RNA, 19 nt, Artificial Sequence
  Description of Artificial Sequence: Synthetic oligonucleotide
  Antisense strand to SEQ ID NO: 720962
uaggcucggugacaccugc

SEQ ID NO: 720964 - RNA, 19 nt, Artificial Sequence
  Description of Artificial Sequence: Synthetic oligonucleotide
  Sense strand starting at position 2450 of SEQ ID NO: 586480
gccauugagcuauacaguu

SEQ ID NO: 720965 - RNA, 19 nt, Artificial Sequence
  Description of Artificial Sequence: Synthetic oligonucleotide
  Antisense strand to SEQ ID NO: 720964
aacuguauagcucaauggc

SEQ ID NO: 720966 - RNA, 19 nt, Artificial Sequence
  Description of Artificial Sequence: Synthetic oligonucleotide
  Sense strand starting at position 2519 of SEQ ID NO: 586480
cgcggcucacgcuuguaaa

SEQ ID NO: 720967 - RNA, 19 nt, Artificial Sequence
  Description of Artificial Sequence: Synthetic oligonucleotide
  Antisense strand to SEQ ID NO: 720966
uuuacaagcgugagccgcg

SEQ ID NO: 720968 - RNA, 19 nt, Artificial Sequence
  Description of Artificial Sequence: Synthetic oligonucleotide
  Sense strand starting at position 2826 of SEQ ID NO: 586480
gggcguuccuccucuuuga

SEQ ID NO: 720969 - RNA, 19 nt, Artificial Sequence
  Description of Artificial Sequence: Synthetic oligonucleotide
  Antisense strand to SEQ ID NO: 720968
ucaaagaggaggaacgccc

SEQ ID NO: 720970 - RNA, 19 nt, Artificial Sequence
  Description of Artificial Sequence: Synthetic oligonucleotide
  Sense strand starting at position 2829 of SEQ ID NO: 586480
cguuccuccucuuugaaag

SEQ ID NO: 720971 - RNA, 19 nt, Artificial Sequence
  Description of Artificial Sequence: Synthetic oligonucleotide
  Antisense strand to SEQ ID NO: 720970
cuuucaaagaggaggaacg

SEQ ID NO: 720972 - RNA, 19 nt, Artificial Sequence
  Description of Artificial Sequence: Synthetic oligonucleotide
  Sense strand starting at position 3057 of SEQ ID NO: 586480
acggcuuggcuguaagaau

SEQ ID NO: 720973 - RNA, 19 nt, Artificial Sequence
  Description of Artificial Sequence: Synthetic oligonucleotide
  Antisense strand to SEQ ID NO: 720972
auucuuacagccaagccgu

SEQ ID NO: 720974 - RNA, 19 nt, Artificial Sequence
  Description of Artificial Sequence: Synthetic oligonucleotide
  Sense strand starting at position 3095 of SEQ ID NO: 586480
gccguucgguccgaagacu

SEQ ID NO: 720975 - RNA, 19 nt, Artificial Sequence
  Description of Artificial Sequence: Synthetic oligonucleotide
  Antisense strand to SEQ ID NO: 720974
agucuucggaccgaacggc

SEQ ID NO: 720976 - RNA, 19 nt, Artificial Sequence
  Description of Artificial Sequence: Synthetic oligonucleotide
  Sense strand starting at position 3106 of SEQ ID NO: 586480
cgaagacuccuccguugga

SEQ ID NO: 720977 - RNA, 19 nt, Artificial Sequence
  Description of Artificial Sequence: Synthetic oligonucleotide
  Antisense strand to SEQ ID NO: 720976
uccaacggaggagucuucg

SEQ ID NO: 720978 - RNA, 19 nt, Artificial Sequence
  Description of Artificial Sequence: Synthetic oligonucleotide
  Sense strand starting at position 3107 of SEQ ID NO: 586480
gaagacuccuccguuggau

SEQ ID NO: 720979 - RNA, 19 nt, Artificial Sequence
  Description of Artificial Sequence: Synthetic oligonucleotide
  Antisense strand to SEQ ID NO: 720978
auccaacggaggagucuuc

SEQ ID NO: 720980 - RNA, 19 nt, Artificial Sequence
  Description of Artificial Sequence: Synthetic oligonucleotide
  Sense strand starting at position 3147 of SEQ ID NO: 586480
acagguuagcauuguuuau

SEQ ID NO: 720981 - RNA, 19 nt, Artificial Sequence
  Description of Artificial Sequence: Synthetic oligonucleotide
  Antisense strand to SEQ ID NO: 720980
auaaacaaugcuaaccugu

SEQ ID NO: 720982 - RNA, 19 nt, Artificial Sequence
  Description of Artificial Sequence: Synthetic oligonucleotide
  Sense strand starting at position 3149 of SEQ ID NO: 586480
agguuagcauuguuuauaa

SEQ ID NO: 720983 - RNA, 19 nt, Artificial Sequence
  Description of Artificial Sequence: Synthetic oligonucleotide
  Antisense strand to SEQ ID NO: 720982
uuauaaacaaugcuaaccu

SEQ ID NO: 720984 - RNA, 19 nt, Artificial Sequence
  Description of Artificial Sequence: Synthetic oligonucleotide
  Sense strand starting at position 3215 of SEQ ID NO: 586480
acaugauccagccgugcau

SEQ ID NO: 720985 - RNA, 19 nt, Artificial Sequence
  Description of Artificial Sequence: Synthetic oligonucleotide
  Antisense strand to SEQ ID NO: 720984
augcacggcuggaucaugu

SEQ ID NO: 720986 - RNA, 19 nt, Artificial Sequence
  Description of Artificial Sequence: Synthetic oligonucleotide
  Sense strand starting at position 3328 of SEQ ID NO: 586480
gugcuaucgucugugaccu

SEQ ID NO: 720987 - RNA, 19 nt, Artificial Sequence
  Description of Artificial Sequence: Synthetic oligonucleotide
  Antisense strand to SEQ ID NO: 720986
aggucacagacgauagcac

SEQ ID NO: 720988 - RNA, 19 nt, Artificial Sequence
  Description of Artificial Sequence: Synthetic oligonucleotide
  Sense strand starting at position 107 of SEQ ID NO: 586481
uucugugguccuggaagau

SEQ ID NO: 720989 - RNA, 19 nt, Artificial Sequence
  Description of Artificial Sequence: Synthetic oligonucleotide
  Antisense strand to SEQ ID NO: 720988
aucuuccaggaccacagaa

SEQ ID NO: 720990 - RNA, 19 nt, Artificial Sequence
  Description of Artificial Sequence: Synthetic oligonucleotide
  Sense strand starting at position 467 of SEQ ID NO: 586481
cuuccuacaguugggaaau

SEQ ID NO: 720991 - RNA, 19 nt, Artificial Sequence
  Description of Artificial Sequence: Synthetic oligonucleotide
  Antisense strand to SEQ ID NO: 720990
auuucccaacuguaggaag

SEQ ID NO: 720992 - RNA, 19 nt, Artificial Sequence
  Description of Artificial Sequence: Synthetic oligonucleotide
  Sense strand starting at position 477 of SEQ ID NO: 586481
uugggaaauucccuaccuu

SEQ ID NO: 720993 - RNA, 19 nt, Artificial Sequence
  Description of Artificial Sequence: Synthetic oligonucleotide
  Antisense strand to SEQ ID NO: 720992
aagguagggaauuucccaa

SEQ ID NO: 720994 - RNA, 19 nt, Artificial Sequence
  Description of Artificial Sequence: Synthetic oligonucleotide
  Sense strand starting at position 491 of SEQ ID NO: 586481
accuuacgaguuugggaau

SEQ ID NO: 720995 - RNA, 19 nt, Artificial Sequence
  Description of Artificial Sequence: Synthetic oligonucleotide
  Antisense strand to SEQ ID NO: 720994
auucccaaacucguaaggu

SEQ ID NO: 720996 - RNA, 19 nt, Artificial Sequence
  Description of Artificial Sequence: Synthetic oligonucleotide
  Sense strand starting at position 674 of SEQ ID NO: 586481
cagagaggcugacacauuu

SEQ ID NO: 720997 - RNA, 19 nt, Artificial Sequence
  Description of Artificial Sequence: Synthetic oligonucleotide
  Antisense strand to SEQ ID NO: 720996
aaaugugucagccucucug

SEQ ID NO: 720998 - RNA, 19 nt, Artificial Sequence
  Description of Artificial Sequence: Synthetic oligonucleotide
  Sense strand starting at position 809 of SEQ ID NO: 586481
gcugguucuguugugugau

SEQ ID NO: 720999 - RNA, 19 nt, Artificial Sequence
  Description of Artificial Sequence: Synthetic oligonucleotide
  Antisense strand to SEQ ID NO: 720998
aucacacaacagaaccagc

SEQ ID NO: 721000 - RNA, 19 nt, Artificial Sequence
  Description of Artificial Sequence: Synthetic oligonucleotide
  Sense strand starting at position 911 of SEQ ID NO: 586481
ugagcucuccaauagccuu

SEQ ID NO: 721001 - RNA, 19 nt, Artificial Sequence
  Description of Artificial Sequence: Synthetic oligonucleotide
  Antisense strand to SEQ ID NO: 721000
aaggcuauuggagagcuca

SEQ ID NO: 721002 - RNA, 19 nt, Artificial Sequence
  Description of Artificial Sequence: Synthetic oligonucleotide
  Sense strand starting at position 998 of SEQ ID NO: 586481
cuaagaacucacgauguua

SEQ ID NO: 721003 - RNA, 19 nt, Artificial Sequence
  Description of Artificial Sequence: Synthetic oligonucleotide
  Antisense strand to SEQ ID NO: 721002
uaacaucgugaguucuuag

SEQ ID NO: 721004 - RNA, 19 nt, Artificial Sequence
  Description of Artificial Sequence: Synthetic oligonucleotide
  Sense strand starting at position 1013 of SEQ ID NO: 586481
guuagcagagaucauguuu

SEQ ID NO: 721005 - RNA, 19 nt, Artificial Sequence
  Description of Artificial Sequence: Synthetic oligonucleotide
  Antisense strand to SEQ ID NO: 721004
aaacaugaucucugcuaac

SEQ ID NO: 721006 - RNA, 19 nt, Artificial Sequence
  Description of Artificial Sequence: Synthetic oligonucleotide
  Sense strand starting at position 1019 of SEQ ID NO: 586481
agagaucauguuugucuca

SEQ ID NO: 721007 - RNA, 19 nt, Artificial Sequence
  Description of Artificial Sequence: Synthetic oligonucleotide
  Antisense strand to SEQ ID NO: 721006
ugagacaaacaugaucucu

SEQ ID NO: 721008 - RNA, 19 nt, Artificial Sequence
  Description of Artificial Sequence: Synthetic oligonucleotide
  Sense strand starting at position 1020 of SEQ ID NO: 586481
gagaucauguuugucucau

SEQ ID NO: 721009 - RNA, 19 nt, Artificial Sequence
  Description of Artificial Sequence: Synthetic oligonucleotide
  Antisense strand to SEQ ID NO: 721008
augagacaaacaugaucuc

SEQ ID NO: 721010 - RNA, 19 nt, Artificial Sequence
  Description of Artificial Sequence: Synthetic oligonucleotide
  Sense strand starting at position 1032 of SEQ ID NO: 586481
gucucauucgacgcuguca

SEQ ID NO: 721011 - RNA, 19 nt, Artificial Sequence
  Description of Artificial Sequence: Synthetic oligonucleotide
  Antisense strand to SEQ ID NO: 721010
ugacagcgucgaaugagac

SEQ ID NO: 721012 - RNA, 19 nt, Artificial Sequence
  Description of Artificial Sequence: Synthetic oligonucleotide
  Sense strand starting at position 1083 of SEQ ID NO: 586481
guccuacagacugagaguu

SEQ ID NO: 721013 - RNA, 19 nt, Artificial Sequence
  Description of Artificial Sequence: Synthetic oligonucleotide
  Antisense strand to SEQ ID NO: 721012
aacucucagucuguaggac

SEQ ID NO: 721014 - RNA, 19 nt, Artificial Sequence
  Description of Artificial Sequence: Synthetic oligonucleotide
  Sense strand starting at position 1091 of SEQ ID NO: 586481
gacugagaguuccucgaaa

SEQ ID NO: 721015 - RNA, 19 nt, Artificial Sequence
  Description of Artificial Sequence: Synthetic oligonucleotide
  Antisense strand to SEQ ID NO: 721014
uuucgaggaacucucaguc

SEQ ID NO: 721016 - RNA, 19 nt, Artificial Sequence
  Description of Artificial Sequence: Synthetic oligonucleotide
  Sense strand starting at position 1093 of SEQ ID NO: 586481
cugagaguuccucgaaaca

SEQ ID NO: 721017 - RNA, 19 nt, Artificial Sequence
  Description of Artificial Sequence: Synthetic oligonucleotide
  Antisense strand to SEQ ID NO: 721016
uguuucgaggaacucucag

SEQ ID NO: 721018 - RNA, 19 nt, Artificial Sequence
  Description of Artificial Sequence: Synthetic oligonucleotide
  Sense strand starting at position 1144 of SEQ ID NO: 586481
uguuaagugccggaagaau

SEQ ID NO: 721019 - RNA, 19 nt, Artificial Sequence
  Description of Artificial Sequence: Synthetic oligonucleotide
  Antisense strand to SEQ ID NO: 721018
auucuuccggcacuuaaca

SEQ ID NO: 721020 - RNA, 19 nt, Artificial Sequence
  Description of Artificial Sequence: Synthetic oligonucleotide
  Sense strand starting at position 1152 of SEQ ID NO: 586481
gccggaagaauauguacua

SEQ ID NO: 721021 - RNA, 19 nt, Artificial Sequence
  Description of Artificial Sequence: Synthetic oligonucleotide
  Antisense strand to SEQ ID NO: 721020
uaguacauauucuuccggc

SEQ ID NO: 721022 - RNA, 19 nt, Artificial Sequence
  Description of Artificial Sequence: Synthetic oligonucleotide
  Sense strand starting at position 1153 of SEQ ID NO: 586481
ccggaagaauauguacuaa

SEQ ID NO: 721023 - RNA, 19 nt, Artificial Sequence
  Description of Artificial Sequence: Synthetic oligonucleotide
  Antisense strand to SEQ ID NO: 721022
uuaguacauauucuuccgg

SEQ ID NO: 721024 - RNA, 19 nt, Artificial Sequence
  Description of Artificial Sequence: Synthetic oligonucleotide
  Sense strand starting at position 1344 of SEQ ID NO: 586481
ugagaagugcuguaacaaa

SEQ ID NO: 721025 - RNA, 19 nt, Artificial Sequence
  Description of Artificial Sequence: Synthetic oligonucleotide
  Antisense strand to SEQ ID NO: 721024
uuuguuacagcacuucuca

SEQ ID NO: 721026 - RNA, 19 nt, Artificial Sequence
  Description of Artificial Sequence: Synthetic oligonucleotide
  Sense strand starting at position 2020 of SEQ ID NO: 586481
gagcgagcgcucuccugau

SEQ ID NO: 721027 - RNA, 19 nt, Artificial Sequence
  Description of Artificial Sequence: Synthetic oligonucleotide
  Antisense strand to SEQ ID NO: 721026
aucaggagagcgcucgcuc

SEQ ID NO: 721028 - RNA, 19 nt, Artificial Sequence
  Description of Artificial Sequence: Synthetic oligonucleotide
  Sense strand starting at position 2119 of SEQ ID NO: 586481
ucagaaauagucuguccug

SEQ ID NO: 721029 - RNA, 19 nt, Artificial Sequence
  Description of Artificial Sequence: Synthetic oligonucleotide
  Antisense strand to SEQ ID NO: 721028
caggacagacuauuucuga

SEQ ID NO: 721030 - RNA, 19 nt, Artificial Sequence
  Description of Artificial Sequence: Synthetic oligonucleotide
  Sense strand starting at position 2120 of SEQ ID NO: 586481
cagaaauagucuguccuga

SEQ ID NO: 721031 - RNA, 19 nt, Artificial Sequence
  Description of Artificial Sequence: Synthetic oligonucleotide
  Antisense strand to SEQ ID NO: 721030
ucaggacagacuauuucug

SEQ ID NO: 721032 - RNA, 19 nt, Artificial Sequence
  Description of Artificial Sequence: Synthetic oligonucleotide
  Sense strand starting at position 2122 of SEQ ID NO: 586481
gaaauagucuguccugaag

SEQ ID NO: 721033 - RNA, 19 nt, Artificial Sequence
  Description of Artificial Sequence: Synthetic oligonucleotide
  Antisense strand to SEQ ID NO: 721032
cuucaggacagacuauuuc

SEQ ID NO: 721034 - RNA, 19 nt, Artificial Sequence
  Description of Artificial Sequence: Synthetic oligonucleotide
  Sense strand starting at position 2125 of SEQ ID NO: 586481
auagucuguccugaagcaa

SEQ ID NO: 721035 - RNA, 19 nt, Artificial Sequence
  Description of Artificial Sequence: Synthetic oligonucleotide
  Antisense strand to SEQ ID NO: 721034
uugcuucaggacagacuau

SEQ ID NO: 721036 - RNA, 19 nt, Artificial Sequence
  Description of Artificial Sequence: Synthetic oligonucleotide
  Sense strand starting at position 2344 of SEQ ID NO: 586481
ggaaguucuggucagaucu

SEQ ID NO: 721037 - RNA, 19 nt, Artificial Sequence
  Description of Artificial Sequence: Synthetic oligonucleotide
  Antisense strand to SEQ ID NO: 721036
agaucugaccagaacuucc

SEQ ID NO: 721038 - RNA, 19 nt, Artificial Sequence
  Description of Artificial Sequence: Synthetic oligonucleotide
  Sense strand starting at position 2355 of SEQ ID NO: 586481
ucagaucugaggcgaaaca

SEQ ID NO: 721039 - RNA, 19 nt, Artificial Sequence
  Description of Artificial Sequence: Synthetic oligonucleotide
  Antisense strand to SEQ ID NO: 721038
uguuucgccucagaucuga

SEQ ID NO: 721040 - RNA, 19 nt, Artificial Sequence
  Description of Artificial Sequence: Synthetic oligonucleotide
  Sense strand starting at position 2493 of SEQ ID NO: 586481
cccagcacuggucaucaau

SEQ ID NO: 721041 - RNA, 19 nt, Artificial Sequence
  Description of Artificial Sequence: Synthetic oligonucleotide
  Antisense strand to SEQ ID NO: 721040
auugaugaccagugcuggg

SEQ ID NO: 721042 - RNA, 19 nt, Artificial Sequence
  Description of Artificial Sequence: Synthetic oligonucleotide
  Sense strand starting at position 2621 of SEQ ID NO: 586481
gccauuuacuagccaagua

SEQ ID NO: 721043 - RNA, 19 nt, Artificial Sequence
  Description of Artificial Sequence: Synthetic oligonucleotide
  Antisense strand to SEQ ID NO: 721042
uacuuggcuaguaaauggc

SEQ ID NO: 721044 - RNA, 19 nt, Artificial Sequence
  Description of Artificial Sequence: Synthetic oligonucleotide
  Sense strand starting at position 2693 of SEQ ID NO: 586481
auaaguuagggucacagua

SEQ ID NO: 721045 - RNA, 19 nt, Artificial Sequence
  Description of Artificial Sequence: Synthetic oligonucleotide
  Antisense strand to SEQ ID NO: 721044
uacugugacccuaacuuau

SEQ ID NO: 721046 - RNA, 19 nt, Artificial Sequence
  Description of Artificial Sequence: Synthetic oligonucleotide
  Sense strand starting at position 2754 of SEQ ID NO: 586481
cacacauccuggguguauu

SEQ ID NO: 721047 - RNA, 19 nt, Artificial Sequence
  Description of Artificial Sequence: Synthetic oligonucleotide
  Antisense strand to SEQ ID NO: 721046
aauacacccaggaugugug

SEQ ID NO: 721048 - RNA, 19 nt, Artificial Sequence
  Description of Artificial Sequence: Synthetic oligonucleotide
  Sense strand starting at position 2817 of SEQ ID NO: 586481
aggaacauugucuauccuu

SEQ ID NO: 721049 - RNA, 19 nt, Artificial Sequence
  Description of Artificial Sequence: Synthetic oligonucleotide
  Antisense strand to SEQ ID NO: 721048
aaggauagacaauguuccu

SEQ ID NO: 721050 - RNA, 19 nt, Artificial Sequence
  Description of Artificial Sequence: Synthetic oligonucleotide
  Sense strand starting at position 3179 of SEQ ID NO: 586481
auugguggugacuauuaca

SEQ ID NO: 721051 - RNA, 19 nt, Artificial Sequence
  Description of Artificial Sequence: Synthetic oligonucleotide
  Antisense strand to SEQ ID NO: 721050
uguaauagucaccaccaau

SEQ ID NO: 721052 - RNA, 19 nt, Artificial Sequence
  Description of Artificial Sequence: Synthetic oligonucleotide
  Sense strand starting at position 3239 of SEQ ID NO: 586481
gguauuccgccuuucuagu

SEQ ID NO: 721053 - RNA, 19 nt, Artificial Sequence
  Description of Artificial Sequence: Synthetic oligonucleotide
  Antisense strand to SEQ ID NO: 721052
acuagaaaggcggaauacc

SEQ ID NO: 721054 - RNA, 19 nt, Artificial Sequence
  Description of Artificial Sequence: Synthetic oligonucleotide
  Sense strand starting at position 3313 of SEQ ID NO: 586481
aggaaacaguucucuuuac

SEQ ID NO: 721055 - RNA, 19 nt, Artificial Sequence
  Description of Artificial Sequence: Synthetic oligonucleotide
  Antisense strand to SEQ ID NO: 721054
guaaagagaacuguuuccu

SEQ ID NO: 721056 - RNA, 19 nt, Artificial Sequence
  Description of Artificial Sequence: Synthetic oligonucleotide
  Sense strand starting at position 3314 of SEQ ID NO: 586481
ggaaacaguucucuuuaca

SEQ ID NO: 721057 - RNA, 19 nt, Artificial Sequence
  Description of Artificial Sequence: Synthetic oligonucleotide
  Antisense strand to SEQ ID NO: 721056
uguaaagagaacuguuucc

SEQ ID NO: 721058 - RNA, 19 nt, Artificial Sequence
  Description of Artificial Sequence: Synthetic oligonucleotide
  Sense strand starting at position 3390 of SEQ ID NO: 586481
ccaggaucaucagugauau

SEQ ID NO: 721059 - RNA, 19 nt, Artificial Sequence
  Description of Artificial Sequence: Synthetic oligonucleotide
  Antisense strand to SEQ ID NO: 721058
auaucacugaugauccugg

SEQ ID NO: 721060 - RNA, 19 nt, Artificial Sequence
  Description of Artificial Sequence: Synthetic oligonucleotide
  Sense strand starting at position 3391 of SEQ ID NO: 586481
caggaucaucagugauauc

SEQ ID NO: 721061 - RNA, 19 nt, Artificial Sequence
  Description of Artificial Sequence: Synthetic oligonucleotide
  Antisense strand to SEQ ID NO: 721060
gauaucacugaugauccug

SEQ ID NO: 721062 - RNA, 19 nt, Artificial Sequence
  Description of Artificial Sequence: Synthetic oligonucleotide
  Sense strand starting at position 3467 of SEQ ID NO: 586481
aggauuacugcugguuaca

SEQ ID NO: 721063 - RNA, 19 nt, Artificial Sequence
  Description of Artificial Sequence: Synthetic oligonucleotide
  Antisense strand to SEQ ID NO: 721062
uguaaccagcaguaauccu

SEQ ID NO: 721064 - RNA, 19 nt, Artificial Sequence
  Description of Artificial Sequence: Synthetic oligonucleotide
  Sense strand starting at position 3469 of SEQ ID NO: 586481
gauuacugcugguuacaau

SEQ ID NO: 721065 - RNA, 19 nt, Artificial Sequence
  Description of Artificial Sequence: Synthetic oligonucleotide
  Antisense strand to SEQ ID NO: 721064
auuguaaccagcaguaauc

SEQ ID NO: 721066 - RNA, 19 nt, Artificial Sequence
  Description of Artificial Sequence: Synthetic oligonucleotide
  Sense strand starting at position 3470 of SEQ ID NO: 586481
auuacugcugguuacaauu

SEQ ID NO: 721067 - RNA, 19 nt, Artificial Sequence
  Description of Artificial Sequence: Synthetic oligonucleotide
  Antisense strand to SEQ ID NO: 721066
aauuguaaccagcaguaau

SEQ ID NO: 721068 - RNA, 19 nt, Artificial Sequence
  Description of Artificial Sequence: Synthetic oligonucleotide
  Sense strand starting at position 396 of SEQ ID NO: 586482
ugcccacaccucuaagaga

SEQ ID NO: 721069 - RNA, 19 nt, Artificial Sequence
  Description of Artificial Sequence: Synthetic oligonucleotide
  Antisense strand to SEQ ID NO: 721068
ucucuuagaggugugggca

SEQ ID NO: 721070 - RNA, 19 nt, Artificial Sequence
  Description of Artificial Sequence: Synthetic oligonucleotide
  Sense strand starting at position 460 of SEQ ID NO: 586482
ggcauagggccagauguaa

SEQ ID NO: 721071 - RNA, 19 nt, Artificial Sequence
  Description of Artificial Sequence: Synthetic oligonucleotide
  Antisense strand to SEQ ID NO: 721070
uuacaucuggcccuaugcc

SEQ ID NO: 721072 - RNA, 19 nt, Artificial Sequence
  Description of Artificial Sequence: Synthetic oligonucleotide
  Sense strand starting at position 513 of SEQ ID NO: 586482
aaggauagaucguucuaag

SEQ ID NO: 721073 - RNA, 19 nt, Artificial Sequence
  Description of Artificial Sequence: Synthetic oligonucleotide
  Antisense strand to SEQ ID NO: 721072
cuuagaacgaucuauccuu

SEQ ID NO: 721074 - RNA, 19 nt, Artificial Sequence
  Description of Artificial Sequence: Synthetic oligonucleotide
  Sense strand starting at position 551 of SEQ ID NO: 586482
cugaauuaggacuggcgaa

SEQ ID NO: 721075 - RNA, 19 nt, Artificial Sequence
  Description of Artificial Sequence: Synthetic oligonucleotide
  Antisense strand to SEQ ID NO: 721074
uucgccaguccuaauucag

SEQ ID NO: 721076 - RNA, 19 nt, Artificial Sequence
  Description of Artificial Sequence: Synthetic oligonucleotide
  Sense strand starting at position 552 of SEQ ID NO: 586482
ugaauuaggacuggcgaaa

SEQ ID NO: 721077 - RNA, 19 nt, Artificial Sequence
  Description of Artificial Sequence: Synthetic oligonucleotide
  Antisense strand to SEQ ID NO: 721076
uuucgccaguccuaauuca

SEQ ID NO: 721078 - RNA, 19 nt, Artificial Sequence
  Description of Artificial Sequence: Synthetic oligonucleotide
  Sense strand starting at position 1125 of SEQ ID NO: 586482
aucccagaaccuugugacu

SEQ ID NO: 721079 - RNA, 19 nt, Artificial Sequence
  Description of Artificial Sequence: Synthetic oligonucleotide
  Antisense strand to SEQ ID NO: 721078
agucacaagguucugggau

SEQ ID NO: 721080 - RNA, 19 nt, Artificial Sequence
  Description of Artificial Sequence: Synthetic oligonucleotide
  Sense strand starting at position 1170 of SEQ ID NO: 586482
caguaaccuccuggaaagu

SEQ ID NO: 721081 - RNA, 19 nt, Artificial Sequence
  Description of Artificial Sequence: Synthetic oligonucleotide
  Antisense strand to SEQ ID NO: 721080
acuuuccaggagguuacug

SEQ ID NO: 721082 - RNA, 19 nt, Artificial Sequence
  Description of Artificial Sequence: Synthetic oligonucleotide
  Sense strand starting at position 1171 of SEQ ID NO: 586482
aguaaccuccuggaaaguu

SEQ ID NO: 721083 - RNA, 19 nt, Artificial Sequence
  Description of Artificial Sequence: Synthetic oligonucleotide
  Antisense strand to SEQ ID NO: 721082
aacuuuccaggagguuacu

SEQ ID NO: 721084 - RNA, 19 nt, Artificial Sequence
  Description of Artificial Sequence: Synthetic oligonucleotide
  Sense strand starting at position 1429 of SEQ ID NO: 586482
cagggagucauagggcuaa

SEQ ID NO: 721085 - RNA, 19 nt, Artificial Sequence
  Description of Artificial Sequence: Synthetic oligonucleotide
  Antisense strand to SEQ ID NO: 721084
uuagcccuaugacucccug

SEQ ID NO: 721086 - RNA, 19 nt, Artificial Sequence
  Description of Artificial Sequence: Synthetic oligonucleotide
  Sense strand starting at position 1658 of SEQ ID NO: 586482
ccuggaaggacauguuaau

SEQ ID NO: 721087 - RNA, 19 nt, Artificial Sequence
  Description of Artificial Sequence: Synthetic oligonucleotide
  Antisense strand to SEQ ID NO: 721086
auuaacauguccuuccagg

SEQ ID NO: 721088 - RNA, 19 nt, Artificial Sequence
  Description of Artificial Sequence: Synthetic oligonucleotide
  Sense strand starting at position 2102 of SEQ ID NO: 586482
gacacagaccgcugaauau

SEQ ID NO: 721089 - RNA, 19 nt, Artificial Sequence
  Description of Artificial Sequence: Synthetic oligonucleotide
  Antisense strand to SEQ ID NO: 721088
auauucagcggucuguguc

SEQ ID NO: 721090 - RNA, 19 nt, Artificial Sequence
  Description of Artificial Sequence: Synthetic oligonucleotide
  Sense strand starting at position 2227 of SEQ ID NO: 586482
gcuauaagucugcuugugu

SEQ ID NO: 721091 - RNA, 19 nt, Artificial Sequence
  Description of Artificial Sequence: Synthetic oligonucleotide
  Antisense strand to SEQ ID NO: 721090
acacaagcagacuuauagc

SEQ ID NO: 721092 - RNA, 19 nt, Artificial Sequence
  Description of Artificial Sequence: Synthetic oligonucleotide
  Sense strand starting at position 2284 of SEQ ID NO: 586482
acaggucacuuggucaaua

SEQ ID NO: 721093 - RNA, 19 nt, Artificial Sequence
  Description of Artificial Sequence: Synthetic oligonucleotide
  Antisense strand to SEQ ID NO: 721092
uauugaccaagugaccugu

SEQ ID NO: 721094 - RNA, 19 nt, Artificial Sequence
  Description of Artificial Sequence: Synthetic oligonucleotide
  Sense strand starting at position 2286 of SEQ ID NO: 586482
aggucacuuggucaauauu

SEQ ID NO: 721095 - RNA, 19 nt, Artificial Sequence
  Description of Artificial Sequence: Synthetic oligonucleotide
  Antisense strand to SEQ ID NO: 721094
aauauugaccaagugaccu

SEQ ID NO: 721096 - RNA, 19 nt, Artificial Sequence
  Description of Artificial Sequence: Synthetic oligonucleotide
  Sense strand starting at position 2361 of SEQ ID NO: 586482
cucagauugaugggaucuu

SEQ ID NO: 721097 - RNA, 19 nt, Artificial Sequence
  Description of Artificial Sequence: Synthetic oligonucleotide
  Antisense strand to SEQ ID NO: 721096
aagaucccaucaaucugag

SEQ ID NO: 721098 - RNA, 19 nt, Artificial Sequence
  Description of Artificial Sequence: Synthetic oligonucleotide
  Sense strand starting at position 2510 of SEQ ID NO: 586482
uaugguauuaguggagaug

SEQ ID NO: 721099 - RNA, 19 nt, Artificial Sequence
  Description of Artificial Sequence: Synthetic oligonucleotide
  Antisense strand to SEQ ID NO: 721098
caucuccacuaauaccaua

SEQ ID NO: 721100 - RNA, 19 nt, Artificial Sequence
  Description of Artificial Sequence: Synthetic oligonucleotide
  Sense strand starting at position 2529 of SEQ ID NO: 586482
gaggguuggaauggucuua

SEQ ID NO: 721101 - RNA, 19 nt, Artificial Sequence
  Description of Artificial Sequence: Synthetic oligonucleotide
  Antisense strand to SEQ ID NO: 721100
uaagaccauuccaacccuc

SEQ ID NO: 721102 - RNA, 19 nt, Artificial Sequence
  Description of Artificial Sequence: Synthetic oligonucleotide
  Sense strand starting at position 2541 of SEQ ID NO: 586482
ggucuuaggaaaggaagua

SEQ ID NO: 721103 - RNA, 19 nt, Artificial Sequence
  Description of Artificial Sequence: Synthetic oligonucleotide
  Antisense strand to SEQ ID NO: 721102
uacuuccuuuccuaagacc

SEQ ID NO: 721104 - RNA, 19 nt, Artificial Sequence
  Description of Artificial Sequence: Synthetic oligonucleotide
  Sense strand starting at position 2551 of SEQ ID NO: 586482
aaggaaguaugaucuguaa

SEQ ID NO: 721105 - RNA, 19 nt, Artificial Sequence
  Description of Artificial Sequence: Synthetic oligonucleotide
  Antisense strand to SEQ ID NO: 721104
uuacagaucauacuuccuu

SEQ ID NO: 721106 - RNA, 19 nt, Artificial Sequence
  Description of Artificial Sequence: Synthetic oligonucleotide
  Sense strand starting at position 2555 of SEQ ID NO: 586482
aaguaugaucuguaagcac

SEQ ID NO: 721107 - RNA, 19 nt, Artificial Sequence
  Description of Artificial Sequence: Synthetic oligonucleotide
  Antisense strand to SEQ ID NO: 721106
gugcuuacagaucauacuu

SEQ ID NO: 721108 - RNA, 19 nt, Artificial Sequence
  Description of Artificial Sequence: Synthetic oligonucleotide
  Sense strand starting at position 2764 of SEQ ID NO: 586482
ggauucaugggucaagcca

SEQ ID NO: 721109 - RNA, 19 nt, Artificial Sequence
  Description of Artificial Sequence: Synthetic oligonucleotide
  Antisense strand to SEQ ID NO: 721108
uggcuugacccaugaaucc

SEQ ID NO: 721110 - RNA, 19 nt, Artificial Sequence
  Description of Artificial Sequence: Synthetic oligonucleotide
  Sense strand starting at position 2798 of SEQ ID NO: 586482
ggacaacucucaucgguag

SEQ ID NO: 721111 - RNA, 19 nt, Artificial Sequence
  Description of Artificial Sequence: Synthetic oligonucleotide
  Antisense strand to SEQ ID NO: 721110
cuaccgaugagaguugucc

SEQ ID NO: 721112 - RNA, 19 nt, Artificial Sequence
  Description of Artificial Sequence: Synthetic oligonucleotide
  Sense strand starting at position 2802 of SEQ ID NO: 586482
aacucucaucgguagcaga

SEQ ID NO: 721113 - RNA, 19 nt, Artificial Sequence
  Description of Artificial Sequence: Synthetic oligonucleotide
  Antisense strand to SEQ ID NO: 721112
ucugcuaccgaugagaguu

SEQ ID NO: 721114 - RNA, 19 nt, Artificial Sequence
  Description of Artificial Sequence: Synthetic oligonucleotide
  Sense strand starting at position 2975 of SEQ ID NO: 586482
agaugucaccucugaaaga

SEQ ID NO: 721115 - RNA, 19 nt, Artificial Sequence
  Description of Artificial Sequence: Synthetic oligonucleotide
  Antisense strand to SEQ ID NO: 721114
ucuuucagaggugacaucu

SEQ ID NO: 721116 - RNA, 19 nt, Artificial Sequence
  Description of Artificial Sequence: Synthetic oligonucleotide
  Sense strand starting at position 2996 of SEQ ID NO: 586482
ugaauaucccaguagccga

SEQ ID NO: 721117 - RNA, 19 nt, Artificial Sequence
  Description of Artificial Sequence: Synthetic oligonucleotide
  Antisense strand to SEQ ID NO: 721116
ucggcuacugggauauuca

SEQ ID NO: 721118 - RNA, 19 nt, Artificial Sequence
  Description of Artificial Sequence: Synthetic oligonucleotide
  Sense strand starting at position 3069 of SEQ ID NO: 586482
gcuagaacaccagacaugu

SEQ ID NO: 721119 - RNA, 19 nt, Artificial Sequence
  Description of Artificial Sequence: Synthetic oligonucleotide
  Antisense strand to SEQ ID NO: 721118
acaugucugguguucuagc

SEQ ID NO: 721120 - RNA, 19 nt, Artificial Sequence
  Description of Artificial Sequence: Synthetic oligonucleotide
  Sense strand starting at position 3093 of SEQ ID NO: 586482
gcccgaucacaucaugaau

SEQ ID NO: 721121 - RNA, 19 nt, Artificial Sequence
  Description of Artificial Sequence: Synthetic oligonucleotide
  Antisense strand to SEQ ID NO: 721120
auucaugaugugaucgggc

SEQ ID NO: 721122 - RNA, 19 nt, Artificial Sequence
  Description of Artificial Sequence: Synthetic oligonucleotide
  Sense strand starting at position 3096 of SEQ ID NO: 586482
cgaucacaucaugaauguu

SEQ ID NO: 721123 - RNA, 19 nt, Artificial Sequence
  Description of Artificial Sequence: Synthetic oligonucleotide
  Antisense strand to SEQ ID NO: 721122
aacauucaugaugugaucg

SEQ ID NO: 721124 - RNA, 19 nt, Artificial Sequence
  Description of Artificial Sequence: Synthetic oligonucleotide
  Sense strand starting at position 3099 of SEQ ID NO: 586482
ucacaucaugaauguugaa

SEQ ID NO: 721125 - RNA, 19 nt, Artificial Sequence
  Description of Artificial Sequence: Synthetic oligonucleotide
  Antisense strand to SEQ ID NO: 721124
uucaacauucaugauguga

SEQ ID NO: 721126 - RNA, 19 nt, Artificial Sequence
  Description of Artificial Sequence: Synthetic oligonucleotide
  Sense strand starting at position 3285 of SEQ ID NO: 586482
ucaugagcuuaacugugaa

SEQ ID NO: 721127 - RNA, 19 nt, Artificial Sequence
  Description of Artificial Sequence: Synthetic oligonucleotide
  Antisense strand to SEQ ID NO: 721126
uucacaguuaagcucauga

SEQ ID NO: 721128 - RNA, 19 nt, Artificial Sequence
  Description of Artificial Sequence: Synthetic oligonucleotide
  Sense strand starting at position 3288 of SEQ ID NO: 586482
ugagcuuaacugugaaaug

SEQ ID NO: 721129 - RNA, 19 nt, Artificial Sequence
  Description of Artificial Sequence: Synthetic oligonucleotide
  Antisense strand to SEQ ID NO: 721128
cauuucacaguuaagcuca

SEQ ID NO: 721130 - RNA, 19 nt, Artificial Sequence
  Description of Artificial Sequence: Synthetic oligonucleotide
  Sense strand starting at position 3499 of SEQ ID NO: 586482
uacgauuaaucacuguuga

SEQ ID NO: 721131 - RNA, 19 nt, Artificial Sequence
  Description of Artificial Sequence: Synthetic oligonucleotide
  Antisense strand to SEQ ID NO: 721130
ucaacagugauuaaucgua

SEQ ID NO: 721132 - RNA, 19 nt, Artificial Sequence
  Description of Artificial Sequence: Synthetic oligonucleotide
  Sense strand starting at position 3500 of SEQ ID NO: 586482
acgauuaaucacuguugau

SEQ ID NO: 721133 - RNA, 19 nt, Artificial Sequence
  Description of Artificial Sequence: Synthetic oligonucleotide
  Antisense strand to SEQ ID NO: 721132
aucaacagugauuaaucgu

SEQ ID NO: 721134 - RNA, 19 nt, Artificial Sequence
  Description of Artificial Sequence: Synthetic oligonucleotide
  Sense strand starting at position 3512 of SEQ ID NO: 586482
uguugauaauuagcaucaa

SEQ ID NO: 721135 - RNA, 19 nt, Artificial Sequence
  Description of Artificial Sequence: Synthetic oligonucleotide
  Antisense strand to SEQ ID NO: 721134
uugaugcuaauuaucaaca

SEQ ID NO: 721136 - RNA, 19 nt, Artificial Sequence
  Description of Artificial Sequence: Synthetic oligonucleotide
  Sense strand starting at position 3538 of SEQ ID NO: 586482
agcauuaaugauggcuaau

SEQ ID NO: 721137 - RNA, 19 nt, Artificial Sequence
  Description of Artificial Sequence: Synthetic oligonucleotide
  Antisense strand to SEQ ID NO: 721136
auuagccaucauuaaugcu

SEQ ID NO: 721138 - RNA, 19 nt, Artificial Sequence
  Description of Artificial Sequence: Synthetic oligonucleotide
  Sense strand starting at position 3554 of SEQ ID NO: 586482
aauuauugagguugauagu

SEQ ID NO: 721139 - RNA, 19 nt, Artificial Sequence
  Description of Artificial Sequence: Synthetic oligonucleotide
  Antisense strand to SEQ ID NO: 721138
acuaucaaccucaauaauu

SEQ ID NO: 721140 - RNA, 19 nt, Artificial Sequence
  Description of Artificial Sequence: Synthetic oligonucleotide
  Sense strand starting at position 3587 of SEQ ID NO: 586482
guuauuacugucuaaacga

SEQ ID NO: 721141 - RNA, 19 nt, Artificial Sequence
  Description of Artificial Sequence: Synthetic oligonucleotide
  Antisense strand to SEQ ID NO: 721140
ucguuuagacaguaauaac

SEQ ID NO: 721142 - RNA, 19 nt, Artificial Sequence
  Description of Artificial Sequence: Synthetic oligonucleotide
  Sense strand starting at position 3609 of SEQ ID NO: 586482
guuccuaaccuggagcaau

SEQ ID NO: 721143 - RNA, 19 nt, Artificial Sequence
  Description of Artificial Sequence: Synthetic oligonucleotide
  Antisense strand to SEQ ID NO: 721142
auugcuccagguuaggaac

SEQ ID NO: 721144 - RNA, 19 nt, Artificial Sequence
  Description of Artificial Sequence: Synthetic oligonucleotide
  Sense strand starting at position 3727 of SEQ ID NO: 586482
cugguaucgaaugaguaga

SEQ ID NO: 721145 - RNA, 19 nt, Artificial Sequence
  Description of Artificial Sequence: Synthetic oligonucleotide
  Antisense strand to SEQ ID NO: 721144
ucuacucauucgauaccag

SEQ ID NO: 721146 - RNA, 19 nt, Artificial Sequence
  Description of Artificial Sequence: Synthetic oligonucleotide
  Sense strand starting at position 3729 of SEQ ID NO: 586482
gguaucgaaugaguagaga

SEQ ID NO: 721147 - RNA, 19 nt, Artificial Sequence
  Description of Artificial Sequence: Synthetic oligonucleotide
  Antisense strand to SEQ ID NO: 721146
ucucuacucauucgauacc

SEQ ID NO: 721148 - RNA, 19 nt, Artificial Sequence
  Description of Artificial Sequence: Synthetic oligonucleotide
  Sense strand starting at position 115 of SEQ ID NO: 586483
cuucgaugcuucuuuggua

SEQ ID NO: 721149 - RNA, 19 nt, Artificial Sequence
  Description of Artificial Sequence: Synthetic oligonucleotide
  Antisense strand to SEQ ID NO: 721148
uaccaaagaagcaucgaag

SEQ ID NO: 721150 - RNA, 19 nt, Artificial Sequence
  Description of Artificial Sequence: Synthetic oligonucleotide
  Sense strand starting at position 116 of SEQ ID NO: 586483
uucgaugcuucuuugguaa

SEQ ID NO: 721151 - RNA, 19 nt, Artificial Sequence
  Description of Artificial Sequence: Synthetic oligonucleotide
  Antisense strand to SEQ ID NO: 721150
uuaccaaagaagcaucgaa

SEQ ID NO: 721152 - RNA, 19 nt, Artificial Sequence
  Description of Artificial Sequence: Synthetic oligonucleotide
  Sense strand starting at position 357 of SEQ ID NO: 586483
gggagaaguuucucugagg

SEQ ID NO: 721153 - RNA, 19 nt, Artificial Sequence
  Description of Artificial Sequence: Synthetic oligonucleotide
  Antisense strand to SEQ ID NO: 721152
ccucagagaaacuucuccc

SEQ ID NO: 721154 - RNA, 19 nt, Artificial Sequence
  Description of Artificial Sequence: Synthetic oligonucleotide
  Sense strand starting at position 360 of SEQ ID NO: 586483
agaaguuucucugaggagg

SEQ ID NO: 721155 - RNA, 19 nt, Artificial Sequence
  Description of Artificial Sequence: Synthetic oligonucleotide
  Antisense strand to SEQ ID NO: 721154
ccuccucagagaaacuucu

SEQ ID NO: 721156 - RNA, 19 nt, Artificial Sequence
  Description of Artificial Sequence: Synthetic oligonucleotide
  Sense strand starting at position 362 of SEQ ID NO: 586483
aaguuucucugaggaggga

SEQ ID NO: 721157 - RNA, 19 nt, Artificial Sequence
  Description of Artificial Sequence: Synthetic oligonucleotide
  Antisense strand to SEQ ID NO: 721156
ucccuccucagagaaacuu

SEQ ID NO: 721158 - RNA, 19 nt, Artificial Sequence
  Description of Artificial Sequence: Synthetic oligonucleotide
  Sense strand starting at position 539 of SEQ ID NO: 586483
accuguuccuccucaguca

SEQ ID NO: 721159 - RNA, 19 nt, Artificial Sequence
  Description of Artificial Sequence: Synthetic oligonucleotide
  Antisense strand to SEQ ID NO: 721158
ugacugaggaggaacaggu

SEQ ID NO: 721160 - RNA, 19 nt, Artificial Sequence
  Description of Artificial Sequence: Synthetic oligonucleotide
  Sense strand starting at position 733 of SEQ ID NO: 586483
ccuuguucuccuugacgua

SEQ ID NO: 721161 - RNA, 19 nt, Artificial Sequence
  Description of Artificial Sequence: Synthetic oligonucleotide
  Antisense strand to SEQ ID NO: 721160
uacgucaaggagaacaagg

SEQ ID NO: 721162 - RNA, 19 nt, Artificial Sequence
  Description of Artificial Sequence: Synthetic oligonucleotide
  Sense strand starting at position 782 of SEQ ID NO: 586483
guagucagccagcuuguau

SEQ ID NO: 721163 - RNA, 19 nt, Artificial Sequence
  Description of Artificial Sequence: Synthetic oligonucleotide
  Antisense strand to SEQ ID NO: 721162
auacaagcuggcugacuac

SEQ ID NO: 721164 - RNA, 19 nt, Artificial Sequence
  Description of Artificial Sequence: Synthetic oligonucleotide
  Sense strand starting at position 908 of SEQ ID NO: 586483
gacugugcuuucucgaauc

SEQ ID NO: 721165 - RNA, 19 nt, Artificial Sequence
  Description of Artificial Sequence: Synthetic oligonucleotide
  Antisense strand to SEQ ID NO: 721164
gauucgagaaagcacaguc

SEQ ID NO: 721166 - RNA, 19 nt, Artificial Sequence
  Description of Artificial Sequence: Synthetic oligonucleotide
  Sense strand starting at position 1221 of SEQ ID NO: 586483
ccacucacaccaugaguua

SEQ ID NO: 721167 - RNA, 19 nt, Artificial Sequence
  Description of Artificial Sequence: Synthetic oligonucleotide
  Antisense strand to SEQ ID NO: 721166
uaacucauggugugagugg

SEQ ID NO: 721168 - RNA, 19 nt, Artificial Sequence
  Description of Artificial Sequence: Synthetic oligonucleotide
  Sense strand starting at position 1243 of SEQ ID NO: 586483
agagaugaguccagacggu

SEQ ID NO: 721169 - RNA, 19 nt, Artificial Sequence
  Description of Artificial Sequence: Synthetic oligonucleotide
  Antisense strand to SEQ ID NO: 721168
accgucuggacucaucucu

SEQ ID NO: 721170 - RNA, 19 nt, Artificial Sequence
  Description of Artificial Sequence: Synthetic oligonucleotide
  Sense strand starting at position 1247 of SEQ ID NO: 586483
augaguccagacggugaaa

SEQ ID NO: 721171 - RNA, 19 nt, Artificial Sequence
  Description of Artificial Sequence: Synthetic oligonucleotide
  Antisense strand to SEQ ID NO: 721170
uuucaccgucuggacucau

SEQ ID NO: 721172 - RNA, 19 nt, Artificial Sequence
  Description of Artificial Sequence: Synthetic oligonucleotide
  Sense strand starting at position 1414 of SEQ ID NO: 586483
ugggaauuggucugaccuc

SEQ ID NO: 721173 - RNA, 19 nt, Artificial Sequence
  Description of Artificial Sequence: Synthetic oligonucleotide
  Antisense strand to SEQ ID NO: 721172
gaggucagaccaauuccca

SEQ ID NO: 721174 - RNA, 19 nt, Artificial Sequence
  Description of Artificial Sequence: Synthetic oligonucleotide
  Sense strand starting at position 1415 of SEQ ID NO: 586483
gggaauuggucugaccuca

SEQ ID NO: 721175 - RNA, 19 nt, Artificial Sequence
  Description of Artificial Sequence: Synthetic oligonucleotide
  Antisense strand to SEQ ID NO: 721174
ugaggucagaccaauuccc

SEQ ID NO: 721176 - RNA, 19 nt, Artificial Sequence
  Description of Artificial Sequence: Synthetic oligonucleotide
  Sense strand starting at position 1420 of SEQ ID NO: 586483
uuggucugaccucaguaga

SEQ ID NO: 721177 - RNA, 19 nt, Artificial Sequence
  Description of Artificial Sequence: Synthetic oligonucleotide
  Antisense strand to SEQ ID NO: 721176
ucuacugaggucagaccaa

SEQ ID NO: 721178 - RNA, 19 nt, Artificial Sequence
  Description of Artificial Sequence: Synthetic oligonucleotide
  Sense strand starting at position 1667 of SEQ ID NO: 586483
ggacguucagggcaaagau

SEQ ID NO: 721179 - RNA, 19 nt, Artificial Sequence
  Description of Artificial Sequence: Synthetic oligonucleotide
  Antisense strand to SEQ ID NO: 721178
aucuuugcccugaacgucc

SEQ ID NO: 721180 - RNA, 19 nt, Artificial Sequence
  Description of Artificial Sequence: Synthetic oligonucleotide
  Sense strand starting at position 1726 of SEQ ID NO: 586483
acaaauagcuuacagagaa

SEQ ID NO: 721181 - RNA, 19 nt, Artificial Sequence
  Description of Artificial Sequence: Synthetic oligonucleotide
  Antisense strand to SEQ ID NO: 721180
uucucuguaagcuauuugu

SEQ ID NO: 721182 - RNA, 19 nt, Artificial Sequence
  Description of Artificial Sequence: Synthetic oligonucleotide
  Sense strand starting at position 1744 of SEQ ID NO: 586483
aaaggucaguuacggagaa

SEQ ID NO: 721183 - RNA, 19 nt, Artificial Sequence
  Description of Artificial Sequence: Synthetic oligonucleotide
  Antisense strand to SEQ ID NO: 721182
uucuccguaacugaccuuu

SEQ ID NO: 721184 - RNA, 19 nt, Artificial Sequence
  Description of Artificial Sequence: Synthetic oligonucleotide
  Sense strand starting at position 1745 of SEQ ID NO: 586483
aaggucaguuacggagaaa

SEQ ID NO: 721185 - RNA, 19 nt, Artificial Sequence
  Description of Artificial Sequence: Synthetic oligonucleotide
  Antisense strand to SEQ ID NO: 721184
uuucuccguaacugaccuu

SEQ ID NO: 721186 - RNA, 19 nt, Artificial Sequence
  Description of Artificial Sequence: Synthetic oligonucleotide
  Sense strand starting at position 1998 of SEQ ID NO: 586483
aucaauaauggaggcuuaa

SEQ ID NO: 721187 - RNA, 19 nt, Artificial Sequence
  Description of Artificial Sequence: Synthetic oligonucleotide
  Antisense strand to SEQ ID NO: 721186
uuaagccuccauuauugau

SEQ ID NO: 721188 - RNA, 19 nt, Artificial Sequence
  Description of Artificial Sequence: Synthetic oligonucleotide
  Sense strand starting at position 2035 of SEQ ID NO: 586483
gaacgaggaucucaggaua

SEQ ID NO: 721189 - RNA, 19 nt, Artificial Sequence
  Description of Artificial Sequence: Synthetic oligonucleotide
  Antisense strand to SEQ ID NO: 721188
uauccugagauccucguuc

SEQ ID NO: 721190 - RNA, 19 nt, Artificial Sequence
  Description of Artificial Sequence: Synthetic oligonucleotide
  Sense strand starting at position 2074 of SEQ ID NO: 586483
ggcaccaucagguggaaau

SEQ ID NO: 721191 - RNA, 19 nt, Artificial Sequence
  Description of Artificial Sequence: Synthetic oligonucleotide
  Antisense strand to SEQ ID NO: 721190
auuuccaccugauggugcc

SEQ ID NO: 721192 - RNA, 19 nt, Artificial Sequence
  Description of Artificial Sequence: Synthetic oligonucleotide
  Sense strand starting at position 2075 of SEQ ID NO: 586483
gcaccaucagguggaaaua

SEQ ID NO: 721193 - RNA, 19 nt, Artificial Sequence
  Description of Artificial Sequence: Synthetic oligonucleotide
  Antisense strand to SEQ ID NO: 721192
uauuuccaccugauggugc

SEQ ID NO: 721194 - RNA, 19 nt, Artificial Sequence
  Description of Artificial Sequence: Synthetic oligonucleotide
  Sense strand starting at position 2088 of SEQ ID NO: 586483
gaaauaaggucagggcaau

SEQ ID NO: 721195 - RNA, 19 nt, Artificial Sequence
  Description of Artificial Sequence: Synthetic oligonucleotide
  Antisense strand to SEQ ID NO: 721194
auugcccugaccuuauuuc

SEQ ID NO: 721196 - RNA, 19 nt, Artificial Sequence
  Description of Artificial Sequence: Synthetic oligonucleotide
  Sense strand starting at position 2301 of SEQ ID NO: 586483
gccacagucugggaaagaa

SEQ ID NO: 721197 - RNA, 19 nt, Artificial Sequence
  Description of Artificial Sequence: Synthetic oligonucleotide
  Antisense strand to SEQ ID NO: 721196
uucuuucccagacuguggc

SEQ ID NO: 721198 - RNA, 19 nt, Artificial Sequence
  Description of Artificial Sequence: Synthetic oligonucleotide
  Sense strand starting at position 2511 of SEQ ID NO: 586483
guggugguguguuccauga

SEQ ID NO: 721199 - RNA, 19 nt, Artificial Sequence
  Description of Artificial Sequence: Synthetic oligonucleotide
  Antisense strand to SEQ ID NO: 721198
ucauggaacacaccaccac

SEQ ID NO: 721200 - RNA, 19 nt, Artificial Sequence
  Description of Artificial Sequence: Synthetic oligonucleotide
  Sense strand starting at position 2515 of SEQ ID NO: 586483
ugguguguuccaugacaug

SEQ ID NO: 721201 - RNA, 19 nt, Artificial Sequence
  Description of Artificial Sequence: Synthetic oligonucleotide
  Antisense strand to SEQ ID NO: 721200
caugucauggaacacacca

SEQ ID NO: 721202 - RNA, 19 nt, Artificial Sequence
  Description of Artificial Sequence: Synthetic oligonucleotide
  Sense strand starting at position 2663 of SEQ ID NO: 586483
ucaugaggucucuagagca

SEQ ID NO: 721203 - RNA, 19 nt, Artificial Sequence
  Description of Artificial Sequence: Synthetic oligonucleotide
  Antisense strand to SEQ ID NO: 721202
ugcucuagagaccucauga

SEQ ID NO: 721204 - RNA, 19 nt, Artificial Sequence
  Description of Artificial Sequence: Synthetic oligonucleotide
  Sense strand starting at position 2676 of SEQ ID NO: 586483
agagcagucacucauugag

SEQ ID NO: 721205 - RNA, 19 nt, Artificial Sequence
  Description of Artificial Sequence: Synthetic oligonucleotide
  Antisense strand to SEQ ID NO: 721204
cucaaugagugacugcucu

SEQ ID NO: 721206 - RNA, 19 nt, Artificial Sequence
  Description of Artificial Sequence: Synthetic oligonucleotide
  Sense strand starting at position 2679 of SEQ ID NO: 586483
gcagucacucauugaggga

SEQ ID NO: 721207 - RNA, 19 nt, Artificial Sequence
  Description of Artificial Sequence: Synthetic oligonucleotide
  Antisense strand to SEQ ID NO: 721206
ucccucaaugagugacugc

SEQ ID NO: 721208 - RNA, 19 nt, Artificial Sequence
  Description of Artificial Sequence: Synthetic oligonucleotide
  Sense strand starting at position 2809 of SEQ ID NO: 586483
caccaaugugaguguacuu

SEQ ID NO: 721209 - RNA, 19 nt, Artificial Sequence
  Description of Artificial Sequence: Synthetic oligonucleotide
  Antisense strand to SEQ ID NO: 721208
aaguacacucacauuggug

SEQ ID NO: 721210 - RNA, 19 nt, Artificial Sequence
  Description of Artificial Sequence: Synthetic oligonucleotide
  Sense strand starting at position 2814 of SEQ ID NO: 586483
augugaguguacuuaguaa

SEQ ID NO: 721211 - RNA, 19 nt, Artificial Sequence
  Description of Artificial Sequence: Synthetic oligonucleotide
  Antisense strand to SEQ ID NO: 721210
uuacuaaguacacucacau

SEQ ID NO: 721212 - RNA, 19 nt, Artificial Sequence
  Description of Artificial Sequence: Synthetic oligonucleotide
  Sense strand starting at position 2818 of SEQ ID NO: 586483
gaguguacuuaguaacaca

SEQ ID NO: 721213 - RNA, 19 nt, Artificial Sequence
  Description of Artificial Sequence: Synthetic oligonucleotide
  Antisense strand to SEQ ID NO: 721212
uguguuacuaaguacacuc

SEQ ID NO: 721214 - RNA, 19 nt, Artificial Sequence
  Description of Artificial Sequence: Synthetic oligonucleotide
  Sense strand starting at position 3641 of SEQ ID NO: 586483
ggcugugucuuggcugcaa

SEQ ID NO: 721215 - RNA, 19 nt, Artificial Sequence
  Description of Artificial Sequence: Synthetic oligonucleotide
  Antisense strand to SEQ ID NO: 721214
uugcagccaagacacagcc

SEQ ID NO: 721216 - RNA, 19 nt, Artificial Sequence
  Description of Artificial Sequence: Synthetic oligonucleotide
  Sense strand starting at position 3674 of SEQ ID NO: 586483
gggaaugguucaugcagac

SEQ ID NO: 721217 - RNA, 19 nt, Artificial Sequence
  Description of Artificial Sequence: Synthetic oligonucleotide
  Antisense strand to SEQ ID NO: 721216
gucugcaugaaccauuccc

SEQ ID NO: 721218 - RNA, 19 nt, Artificial Sequence
  Description of Artificial Sequence: Synthetic oligonucleotide
  Sense strand starting at position 3756 of SEQ ID NO: 586483
ccgccuucuugggaagaaa

SEQ ID NO: 721219 - RNA, 19 nt, Artificial Sequence
  Description of Artificial Sequence: Synthetic oligonucleotide
  Antisense strand to SEQ ID NO: 721218
uuucuucccaagaaggcgg

SEQ ID NO: 721220 - RNA, 19 nt, Artificial Sequence
  Description of Artificial Sequence: Synthetic oligonucleotide
  Sense strand starting at position 3781 of SEQ ID NO: 586483
gagugagguuaacucucua

SEQ ID NO: 721221 - RNA, 19 nt, Artificial Sequence
  Description of Artificial Sequence: Synthetic oligonucleotide
  Antisense strand to SEQ ID NO: 721220
uagagaguuaaccucacuc

SEQ ID NO: 721222 - RNA, 19 nt, Artificial Sequence
  Description of Artificial Sequence: Synthetic oligonucleotide
  Sense strand starting at position 3785 of SEQ ID NO: 586483
gagguuaacucucuaggca

SEQ ID NO: 721223 - RNA, 19 nt, Artificial Sequence
  Description of Artificial Sequence: Synthetic oligonucleotide
  Antisense strand to SEQ ID NO: 721222
ugccuagagaguuaaccuc

SEQ ID NO: 721224 - RNA, 19 nt, Artificial Sequence
  Description of Artificial Sequence: Synthetic oligonucleotide
  Sense strand starting at position 3954 of SEQ ID NO: 586483
uggccaagucuagagacau

SEQ ID NO: 721225 - RNA, 19 nt, Artificial Sequence
  Description of Artificial Sequence: Synthetic oligonucleotide
  Antisense strand to SEQ ID NO: 721224
augucucuagacuuggcca

SEQ ID NO: 721226 - RNA, 19 nt, Artificial Sequence
  Description of Artificial Sequence: Synthetic oligonucleotide
  Sense strand starting at position 3964 of SEQ ID NO: 586483
uagagacauucuggguugu

SEQ ID NO: 721227 - RNA, 19 nt, Artificial Sequence
  Description of Artificial Sequence: Synthetic oligonucleotide
  Antisense strand to SEQ ID NO: 721226
acaacccagaaugucucua

SEQ ID NO: 721228 - RNA, 19 nt, Artificial Sequence
  Description of Artificial Sequence: Synthetic oligonucleotide
  Sense strand starting at position 77 of SEQ ID NO: 586484
guggcugaccugggaagaa

SEQ ID NO: 721229 - RNA, 19 nt, Artificial Sequence
  Description of Artificial Sequence: Synthetic oligonucleotide
  Antisense strand to SEQ ID NO: 721228
uucuucccaggucagccac

SEQ ID NO: 721230 - RNA, 19 nt, Artificial Sequence
  Description of Artificial Sequence: Synthetic oligonucleotide
  Sense strand starting at position 216 of SEQ ID NO: 586484
gauaucugugcuggagaga

SEQ ID NO: 721231 - RNA, 19 nt, Artificial Sequence
  Description of Artificial Sequence: Synthetic oligonucleotide
  Antisense strand to SEQ ID NO: 721230
ucucuccagcacagauauc

SEQ ID NO: 721232 - RNA, 19 nt, Artificial Sequence
  Description of Artificial Sequence: Synthetic oligonucleotide
  Sense strand starting at position 279 of SEQ ID NO: 586484
ugugauuaugcugaaaucu

SEQ ID NO: 721233 - RNA, 19 nt, Artificial Sequence
  Description of Artificial Sequence: Synthetic oligonucleotide
  Antisense strand to SEQ ID NO: 721232
agauuucagcauaaucaca

SEQ ID NO: 721234 - RNA, 19 nt, Artificial Sequence
  Description of Artificial Sequence: Synthetic oligonucleotide
  Sense strand starting at position 295 of SEQ ID NO: 586484
ucuaacauuguguaauaca

SEQ ID NO: 721235 - RNA, 19 nt, Artificial Sequence
  Description of Artificial Sequence: Synthetic oligonucleotide
  Antisense strand to SEQ ID NO: 721234
uguauuacacaauguuaga

SEQ ID NO: 721236 - RNA, 19 nt, Artificial Sequence
  Description of Artificial Sequence: Synthetic oligonucleotide
  Sense strand starting at position 634 of SEQ ID NO: 586484
cuugucuuugauugaagga

SEQ ID NO: 721237 - RNA, 19 nt, Artificial Sequence
  Description of Artificial Sequence: Synthetic oligonucleotide
  Antisense strand to SEQ ID NO: 721236
uccuucaaucaaagacaag

SEQ ID NO: 721238 - RNA, 19 nt, Artificial Sequence
  Description of Artificial Sequence: Synthetic oligonucleotide
  Sense strand starting at position 674 of SEQ ID NO: 586484
auauuaaaucuagagcugu

SEQ ID NO: 721239 - RNA, 19 nt, Artificial Sequence
  Description of Artificial Sequence: Synthetic oligonucleotide
  Antisense strand to SEQ ID NO: 721238
acagcucuagauuuaauau

SEQ ID NO: 721240 - RNA, 19 nt, Artificial Sequence
  Description of Artificial Sequence: Synthetic oligonucleotide
  Sense strand starting at position 755 of SEQ ID NO: 586484
gccuuaugugauuaauuau

SEQ ID NO: 721241 - RNA, 19 nt, Artificial Sequence
  Description of Artificial Sequence: Synthetic oligonucleotide
  Antisense strand to SEQ ID NO: 721240
auaauuaaucacauaaggc

SEQ ID NO: 721242 - RNA, 19 nt, Artificial Sequence
  Description of Artificial Sequence: Synthetic oligonucleotide
  Sense strand starting at position 823 of SEQ ID NO: 586484
ugaagaaacaguugcaaga

SEQ ID NO: 721243 - RNA, 19 nt, Artificial Sequence
  Description of Artificial Sequence: Synthetic oligonucleotide
  Antisense strand to SEQ ID NO: 721242
ucuugcaacuguuucuuca

SEQ ID NO: 721244 - RNA, 19 nt, Artificial Sequence
  Description of Artificial Sequence: Synthetic oligonucleotide
  Sense strand starting at position 925 of SEQ ID NO: 586484
uggauaggccuuuggaauu

SEQ ID NO: 721245 - RNA, 19 nt, Artificial Sequence
  Description of Artificial Sequence: Synthetic oligonucleotide
  Antisense strand to SEQ ID NO: 721244
aauuccaaaggccuaucca

SEQ ID NO: 721246 - RNA, 19 nt, Artificial Sequence
  Description of Artificial Sequence: Synthetic oligonucleotide
  Sense strand starting at position 1035 of SEQ ID NO: 586484
ggcccuuaaucauugagga

SEQ ID NO: 721247 - RNA, 19 nt, Artificial Sequence
  Description of Artificial Sequence: Synthetic oligonucleotide
  Antisense strand to SEQ ID NO: 721246
uccucaaugauuaagggcc

SEQ ID NO: 721248 - RNA, 19 nt, Artificial Sequence
  Description of Artificial Sequence: Synthetic oligonucleotide
  Sense strand starting at position 1036 of SEQ ID NO: 586484
gcccuuaaucauugaggaa

SEQ ID NO: 721249 - RNA, 19 nt, Artificial Sequence
  Description of Artificial Sequence: Synthetic oligonucleotide
  Antisense strand to SEQ ID NO: 721248
uuccucaaugauuaagggc

SEQ ID NO: 721250 - RNA, 19 nt, Artificial Sequence
  Description of Artificial Sequence: Synthetic oligonucleotide
  Sense strand starting at position 1270 of SEQ ID NO: 586484
uauuguacagaugggaauu

SEQ ID NO: 721251 - RNA, 19 nt, Artificial Sequence
  Description of Artificial Sequence: Synthetic oligonucleotide
  Antisense strand to SEQ ID NO: 721250
aauucccaucuguacaaua

SEQ ID NO: 721252 - RNA, 19 nt, Artificial Sequence
  Description of Artificial Sequence: Synthetic oligonucleotide
  Sense strand starting at position 1310 of SEQ ID NO: 586484
gcaggagaagcuugaauua

SEQ ID NO: 721253 - RNA, 19 nt, Artificial Sequence
  Description of Artificial Sequence: Synthetic oligonucleotide
  Antisense strand to SEQ ID NO: 721252
uaauucaagcuucuccugc

SEQ ID NO: 721254 - RNA, 19 nt, Artificial Sequence
  Description of Artificial Sequence: Synthetic oligonucleotide
  Sense strand starting at position 1447 of SEQ ID NO: 586484
cagucuugucacgucguaa

SEQ ID NO: 721255 - RNA, 19 nt, Artificial Sequence
  Description of Artificial Sequence: Synthetic oligonucleotide
  Antisense strand to SEQ ID NO: 721254
uuacgacgugacaagacug

SEQ ID NO: 721256 - RNA, 19 nt, Artificial Sequence
  Description of Artificial Sequence: Synthetic oligonucleotide
  Sense strand starting at position 1448 of SEQ ID NO: 586484
agucuugucacgucguaac

SEQ ID NO: 721257 - RNA, 19 nt, Artificial Sequence
  Description of Artificial Sequence: Synthetic oligonucleotide
  Antisense strand to SEQ ID NO: 721256
guuacgacgugacaagacu

SEQ ID NO: 721258 - RNA, 19 nt, Artificial Sequence
  Description of Artificial Sequence: Synthetic oligonucleotide
  Sense strand starting at position 1528 of SEQ ID NO: 586484
gagcuugaggaauguuuaa

SEQ ID NO: 721259 - RNA, 19 nt, Artificial Sequence
  Description of Artificial Sequence: Synthetic oligonucleotide
  Antisense strand to SEQ ID NO: 721258
uuaaacauuccucaagcuc

SEQ ID NO: 721260 - RNA, 19 nt, Artificial Sequence
  Description of Artificial Sequence: Synthetic oligonucleotide
  Sense strand starting at position 1731 of SEQ ID NO: 586484
uugauuguuccagaucuug

SEQ ID NO: 721261 - RNA, 19 nt, Artificial Sequence
  Description of Artificial Sequence: Synthetic oligonucleotide
  Antisense strand to SEQ ID NO: 721260
caagaucuggaacaaucaa

SEQ ID NO: 721262 - RNA, 19 nt, Artificial Sequence
  Description of Artificial Sequence: Synthetic oligonucleotide
  Sense strand starting at position 2036 of SEQ ID NO: 586484
agaaacauuucccauugag

SEQ ID NO: 721263 - RNA, 19 nt, Artificial Sequence
  Description of Artificial Sequence: Synthetic oligonucleotide
  Antisense strand to SEQ ID NO: 721262
cucaaugggaaauguuucu

SEQ ID NO: 721264 - RNA, 19 nt, Artificial Sequence
  Description of Artificial Sequence: Synthetic oligonucleotide
  Sense strand starting at position 2206 of SEQ ID NO: 586484
auugauuacugagcuaauc

SEQ ID NO: 721265 - RNA, 19 nt, Artificial Sequence
  Description of Artificial Sequence: Synthetic oligonucleotide
  Antisense strand to SEQ ID NO: 721264
gauuagcucaguaaucaau

SEQ ID NO: 721266 - RNA, 19 nt, Artificial Sequence
  Description of Artificial Sequence: Synthetic oligonucleotide
  Sense strand starting at position 2398 of SEQ ID NO: 586484
ucuuaucauucucugagag

SEQ ID NO: 721267 - RNA, 19 nt, Artificial Sequence
  Description of Artificial Sequence: Synthetic oligonucleotide
  Antisense strand to SEQ ID NO: 721266
cucucagagaaugauaaga

SEQ ID NO: 721268 - RNA, 19 nt, Artificial Sequence
  Description of Artificial Sequence: Synthetic oligonucleotide
  Sense strand starting at position 2399 of SEQ ID NO: 586484
cuuaucauucucugagaga

SEQ ID NO: 721269 - RNA, 19 nt, Artificial Sequence
  Description of Artificial Sequence: Synthetic oligonucleotide
  Antisense strand to SEQ ID NO: 721268
ucucucagagaaugauaag

SEQ ID NO: 721270 - RNA, 19 nt, Artificial Sequence
  Description of Artificial Sequence: Synthetic oligonucleotide
  Sense strand starting at position 2516 of SEQ ID NO: 586484
uagucuagucgucuauguu

SEQ ID NO: 721271 - RNA, 19 nt, Artificial Sequence
  Description of Artificial Sequence: Synthetic oligonucleotide
  Antisense strand to SEQ ID NO: 721270
aacauagacgacuagacua

SEQ ID NO: 721272 - RNA, 19 nt, Artificial Sequence
  Description of Artificial Sequence: Synthetic oligonucleotide
  Sense strand starting at position 2573 of SEQ ID NO: 586484
gcaucaugaggucagcaaa

SEQ ID NO: 721273 - RNA, 19 nt, Artificial Sequence
  Description of Artificial Sequence: Synthetic oligonucleotide
  Antisense strand to SEQ ID NO: 721272
uuugcugaccucaugaugc

SEQ ID NO: 721274 - RNA, 19 nt, Artificial Sequence
  Description of Artificial Sequence: Synthetic oligonucleotide
  Sense strand starting at position 2597 of SEQ ID NO: 586484
gaaucacugggugguaaga

SEQ ID NO: 721275 - RNA, 19 nt, Artificial Sequence
  Description of Artificial Sequence: Synthetic oligonucleotide
  Antisense strand to SEQ ID NO: 721274
ucuuaccacccagugauuc

SEQ ID NO: 721276 - RNA, 19 nt, Artificial Sequence
  Description of Artificial Sequence: Synthetic oligonucleotide
  Sense strand starting at position 2724 of SEQ ID NO: 586484
agacaauaacccgagucuu

SEQ ID NO: 721277 - RNA, 19 nt, Artificial Sequence
  Description of Artificial Sequence: Synthetic oligonucleotide
  Antisense strand to SEQ ID NO: 721276
aagacucggguuauugucu

SEQ ID NO: 721278 - RNA, 19 nt, Artificial Sequence
  Description of Artificial Sequence: Synthetic oligonucleotide
  Sense strand starting at position 2735 of SEQ ID NO: 586484
cgagucuuacccuacugga

SEQ ID NO: 721279 - RNA, 19 nt, Artificial Sequence
  Description of Artificial Sequence: Synthetic oligonucleotide
  Antisense strand to SEQ ID NO: 721278
uccaguaggguaagacucg

SEQ ID NO: 721280 - RNA, 19 nt, Artificial Sequence
  Description of Artificial Sequence: Synthetic oligonucleotide
  Sense strand starting at position 2848 of SEQ ID NO: 586484
cagagucuccuggauaucu

SEQ ID NO: 721281 - RNA, 19 nt, Artificial Sequence
  Description of Artificial Sequence: Synthetic oligonucleotide
  Antisense strand to SEQ ID NO: 721280
agauauccaggagacucug

SEQ ID NO: 721282 - RNA, 19 nt, Artificial Sequence
  Description of Artificial Sequence: Synthetic oligonucleotide
  Sense strand starting at position 3104 of SEQ ID NO: 586484
ccacauagaucagcuuuga

SEQ ID NO: 721283 - RNA, 19 nt, Artificial Sequence
  Description of Artificial Sequence: Synthetic oligonucleotide
  Antisense strand to SEQ ID NO: 721282
ucaaagcugaucuaugugg

SEQ ID NO: 721284 - RNA, 19 nt, Artificial Sequence
  Description of Artificial Sequence: Synthetic oligonucleotide
  Sense strand starting at position 3108 of SEQ ID NO: 586484
auagaucagcuuugaauaa

SEQ ID NO: 721285 - RNA, 19 nt, Artificial Sequence
  Description of Artificial Sequence: Synthetic oligonucleotide
  Antisense strand to SEQ ID NO: 721284
uuauucaaagcugaucuau

SEQ ID NO: 721286 - RNA, 19 nt, Artificial Sequence
  Description of Artificial Sequence: Synthetic oligonucleotide
  Sense strand starting at position 3119 of SEQ ID NO: 586484
uugaauaagucuuugauac

SEQ ID NO: 721287 - RNA, 19 nt, Artificial Sequence
  Description of Artificial Sequence: Synthetic oligonucleotide
  Antisense strand to SEQ ID NO: 721286
guaucaaagacuuauucaa

SEQ ID NO: 721288 - RNA, 19 nt, Artificial Sequence
  Description of Artificial Sequence: Synthetic oligonucleotide
  Sense strand starting at position 3120 of SEQ ID NO: 586484
ugaauaagucuuugauacu

SEQ ID NO: 721289 - RNA, 19 nt, Artificial Sequence
  Description of Artificial Sequence: Synthetic oligonucleotide
  Antisense strand to SEQ ID NO: 721288
aguaucaaagacuuauuca

SEQ ID NO: 721290 - RNA, 19 nt, Artificial Sequence
  Description of Artificial Sequence: Synthetic oligonucleotide
  Sense strand starting at position 3189 of SEQ ID NO: 586484
ggccauuuauuguuuccau

SEQ ID NO: 721291 - RNA, 19 nt, Artificial Sequence
  Description of Artificial Sequence: Synthetic oligonucleotide
  Antisense strand to SEQ ID NO: 721290
auggaaacaauaaauggcc

SEQ ID NO: 721292 - RNA, 19 nt, Artificial Sequence
  Description of Artificial Sequence: Synthetic oligonucleotide
  Sense strand starting at position 3255 of SEQ ID NO: 586484
ggguuuaucugacuacaaa

SEQ ID NO: 721293 - RNA, 19 nt, Artificial Sequence
  Description of Artificial Sequence: Synthetic oligonucleotide
  Antisense strand to SEQ ID NO: 721292
uuuguagucagauaaaccc

SEQ ID NO: 721294 - RNA, 19 nt, Artificial Sequence
  Description of Artificial Sequence: Synthetic oligonucleotide
  Sense strand starting at position 3339 of SEQ ID NO: 586484
caaucaaugucaguuagga

SEQ ID NO: 721295 - RNA, 19 nt, Artificial Sequence
  Description of Artificial Sequence: Synthetic oligonucleotide
  Antisense strand to SEQ ID NO: 721294
uccuaacugacauugauug

SEQ ID NO: 721296 - RNA, 19 nt, Artificial Sequence
  Description of Artificial Sequence: Synthetic oligonucleotide
  Sense strand starting at position 3398 of SEQ ID NO: 586484
gugagacaacucugugaug

SEQ ID NO: 721297 - RNA, 19 nt, Artificial Sequence
  Description of Artificial Sequence: Synthetic oligonucleotide
  Antisense strand to SEQ ID NO: 721296
caucacagaguugucucac

SEQ ID NO: 721298 - RNA, 19 nt, Artificial Sequence
  Description of Artificial Sequence: Synthetic oligonucleotide
  Sense strand starting at position 3400 of SEQ ID NO: 586484
gagacaacucugugaugua

SEQ ID NO: 721299 - RNA, 19 nt, Artificial Sequence
  Description of Artificial Sequence: Synthetic oligonucleotide
  Antisense strand to SEQ ID NO: 721298
uacaucacagaguugucuc

SEQ ID NO: 721300 - RNA, 19 nt, Artificial Sequence
  Description of Artificial Sequence: Synthetic oligonucleotide
  Sense strand starting at position 3412 of SEQ ID NO: 586484
ugauguacugcauacaaau

SEQ ID NO: 721301 - RNA, 19 nt, Artificial Sequence
  Description of Artificial Sequence: Synthetic oligonucleotide
  Antisense strand to SEQ ID NO: 721300
auuuguaugcaguacauca

SEQ ID NO: 721302 - RNA, 19 nt, Artificial Sequence
  Description of Artificial Sequence: Synthetic oligonucleotide
  Sense strand starting at position 3580 of SEQ ID NO: 586484
gggaucuucuuccuauuga

SEQ ID NO: 721303 - RNA, 19 nt, Artificial Sequence
  Description of Artificial Sequence: Synthetic oligonucleotide
  Antisense strand to SEQ ID NO: 721302
ucaauaggaagaagauccc

SEQ ID NO: 721304 - RNA, 19 nt, Artificial Sequence
  Description of Artificial Sequence: Synthetic oligonucleotide
  Sense strand starting at position 3636 of SEQ ID NO: 586484
cuauuagcucuugauuaug

SEQ ID NO: 721305 - RNA, 19 nt, Artificial Sequence
  Description of Artificial Sequence: Synthetic oligonucleotide
  Antisense strand to SEQ ID NO: 721304
cauaaucaagagcuaauag

SEQ ID NO: 721306 - RNA, 19 nt, Artificial Sequence
  Description of Artificial Sequence: Synthetic oligonucleotide
  Sense strand starting at position 3856 of SEQ ID NO: 586484
uuauaaaugcagugaagaa

SEQ ID NO: 721307 - RNA, 19 nt, Artificial Sequence
  Description of Artificial Sequence: Synthetic oligonucleotide
  Antisense strand to SEQ ID NO: 721306
uucuucacugcauuuauaa

SEQ ID NO: 721308 - RNA, 19 nt, Artificial Sequence
  Description of Artificial Sequence: Synthetic oligonucleotide
  Sense strand starting at position 77 of SEQ ID NO: 586485
guggcugaccugggaagaa

SEQ ID NO: 721309 - RNA, 19 nt, Artificial Sequence
  Description of Artificial Sequence: Synthetic oligonucleotide
  Antisense strand to SEQ ID NO: 721308
uucuucccaggucagccac

SEQ ID NO: 721310 - RNA, 19 nt, Artificial Sequence
  Description of Artificial Sequence: Synthetic oligonucleotide
  Sense strand starting at position 216 of SEQ ID NO: 586485
gauaucugugcuggagaga

SEQ ID NO: 721311 - RNA, 19 nt, Artificial Sequence
  Description of Artificial Sequence: Synthetic oligonucleotide
  Antisense strand to SEQ ID NO: 721310
ucucuccagcacagauauc

SEQ ID NO: 721312 - RNA, 19 nt, Artificial Sequence
  Description of Artificial Sequence: Synthetic oligonucleotide
  Sense strand starting at position 279 of SEQ ID NO: 586485
ugugauuaugcugaaaucu

SEQ ID NO: 721313 - RNA, 19 nt, Artificial Sequence
  Description of Artificial Sequence: Synthetic oligonucleotide
  Antisense strand to SEQ ID NO: 721312
agauuucagcauaaucaca

SEQ ID NO: 721314 - RNA, 19 nt, Artificial Sequence
  Description of Artificial Sequence: Synthetic oligonucleotide
  Sense strand starting at position 295 of SEQ ID NO: 586485
ucuaacauuguguaauaca

SEQ ID NO: 721315 - RNA, 19 nt, Artificial Sequence
  Description of Artificial Sequence: Synthetic oligonucleotide
  Antisense strand to SEQ ID NO: 721314
uguauuacacaauguuaga

SEQ ID NO: 721316 - RNA, 19 nt, Artificial Sequence
  Description of Artificial Sequence: Synthetic oligonucleotide
  Sense strand starting at position 634 of SEQ ID NO: 586485
cuugucuuugauugaagga

SEQ ID NO: 721317 - RNA, 19 nt, Artificial Sequence
  Description of Artificial Sequence: Synthetic oligonucleotide
  Antisense strand to SEQ ID NO: 721316
uccuucaaucaaagacaag

SEQ ID NO: 721318 - RNA, 19 nt, Artificial Sequence
  Description of Artificial Sequence: Synthetic oligonucleotide
  Sense strand starting at position 674 of SEQ ID NO: 586485
auauuaaaucuagagcugu

SEQ ID NO: 721319 - RNA, 19 nt, Artificial Sequence
  Description of Artificial Sequence: Synthetic oligonucleotide
  Antisense strand to SEQ ID NO: 721318
acagcucuagauuuaauau

SEQ ID NO: 721320 - RNA, 19 nt, Artificial Sequence
  Description of Artificial Sequence: Synthetic oligonucleotide
  Sense strand starting at position 755 of SEQ ID NO: 586485
gccuuaugugauuaauuau

SEQ ID NO: 721321 - RNA, 19 nt, Artificial Sequence
  Description of Artificial Sequence: Synthetic oligonucleotide
  Antisense strand to SEQ ID NO: 721320
auaauuaaucacauaaggc

SEQ ID NO: 721322 - RNA, 19 nt, Artificial Sequence
  Description of Artificial Sequence: Synthetic oligonucleotide
  Sense strand starting at position 823 of SEQ ID NO: 586485
ugaagaaacaguugcaaga

SEQ ID NO: 721323 - RNA, 19 nt, Artificial Sequence
  Description of Artificial Sequence: Synthetic oligonucleotide
  Antisense strand to SEQ ID NO: 721322
ucuugcaacuguuucuuca

SEQ ID NO: 721324 - RNA, 19 nt, Artificial Sequence
  Description of Artificial Sequence: Synthetic oligonucleotide
  Sense strand starting at position 925 of SEQ ID NO: 586485
uggauaggccuuuggaauu

SEQ ID NO: 721325 - RNA, 19 nt, Artificial Sequence
  Description of Artificial Sequence: Synthetic oligonucleotide
  Antisense strand to SEQ ID NO: 721324
aauuccaaaggccuaucca

SEQ ID NO: 721326 - RNA, 19 nt, Artificial Sequence
  Description of Artificial Sequence: Synthetic oligonucleotide
  Sense strand starting at position 1035 of SEQ ID NO: 586485
ggcccuuaaucauugagga

SEQ ID NO: 721327 - RNA, 19 nt, Artificial Sequence
  Description of Artificial Sequence: Synthetic oligonucleotide
  Antisense strand to SEQ ID NO: 721326
uccucaaugauuaagggcc

SEQ ID NO: 721328 - RNA, 19 nt, Artificial Sequence
  Description of Artificial Sequence: Synthetic oligonucleotide
  Sense strand starting at position 1036 of SEQ ID NO: 586485
gcccuuaaucauugaggaa

SEQ ID NO: 721329 - RNA, 19 nt, Artificial Sequence
  Description of Artificial Sequence: Synthetic oligonucleotide
  Antisense strand to SEQ ID NO: 721328
uuccucaaugauuaagggc

SEQ ID NO: 721330 - RNA, 19 nt, Artificial Sequence
  Description of Artificial Sequence: Synthetic oligonucleotide
  Sense strand starting at position 1270 of SEQ ID NO: 586485
uauuguacagaugggaauu

SEQ ID NO: 721331 - RNA, 19 nt, Artificial Sequence
  Description of Artificial Sequence: Synthetic oligonucleotide
  Antisense strand to SEQ ID NO: 721330
aauucccaucuguacaaua

SEQ ID NO: 721332 - RNA, 19 nt, Artificial Sequence
  Description of Artificial Sequence: Synthetic oligonucleotide
  Sense strand starting at position 1310 of SEQ ID NO: 586485
gcaggagaagcuugaauua

SEQ ID NO: 721333 - RNA, 19 nt, Artificial Sequence
  Description of Artificial Sequence: Synthetic oligonucleotide
  Antisense strand to SEQ ID NO: 721332
uaauucaagcuucuccugc

SEQ ID NO: 721334 - RNA, 19 nt, Artificial Sequence
  Description of Artificial Sequence: Synthetic oligonucleotide
  Sense strand starting at position 1447 of SEQ ID NO: 586485
cagucuugucacgucguaa

SEQ ID NO: 721335 - RNA, 19 nt, Artificial Sequence
  Description of Artificial Sequence: Synthetic oligonucleotide
  Antisense strand to SEQ ID NO: 721334
uuacgacgugacaagacug

SEQ ID NO: 721336 - RNA, 19 nt, Artificial Sequence
  Description of Artificial Sequence: Synthetic oligonucleotide
  Sense strand starting at position 1448 of SEQ ID NO: 586485
agucuugucacgucguaac

SEQ ID NO: 721337 - RNA, 19 nt, Artificial Sequence
  Description of Artificial Sequence: Synthetic oligonucleotide
  Antisense strand to SEQ ID NO: 721336
guuacgacgugacaagacu

SEQ ID NO: 721338 - RNA, 19 nt, Artificial Sequence
  Description of Artificial Sequence: Synthetic oligonucleotide
  Sense strand starting at position 1528 of SEQ ID NO: 586485
gagcuugaggaauguuuaa

SEQ ID NO: 721339 - RNA, 19 nt, Artificial Sequence
  Description of Artificial Sequence: Synthetic oligonucleotide
  Antisense strand to SEQ ID NO: 721338
uuaaacauuccucaagcuc

SEQ ID NO: 721340 - RNA, 19 nt, Artificial Sequence
  Description of Artificial Sequence: Synthetic oligonucleotide
  Sense strand starting at position 1731 of SEQ ID NO: 586485
uugauuguuccagaucuug

SEQ ID NO: 721341 - RNA, 19 nt, Artificial Sequence
  Description of Artificial Sequence: Synthetic oligonucleotide
  Antisense strand to SEQ ID NO: 721340
caagaucuggaacaaucaa

SEQ ID NO: 721342 - RNA, 19 nt, Artificial Sequence
  Description of Artificial Sequence: Synthetic oligonucleotide
  Sense strand starting at position 2036 of SEQ ID NO: 586485
agaaacauuucccauugag

SEQ ID NO: 721343 - RNA, 19 nt, Artificial Sequence
  Description of Artificial Sequence: Synthetic oligonucleotide
  Antisense strand to SEQ ID NO: 721342
cucaaugggaaauguuucu

SEQ ID NO: 721344 - RNA, 19 nt, Artificial Sequence
  Description of Artificial Sequence: Synthetic oligonucleotide
  Sense strand starting at position 2206 of SEQ ID NO: 586485
auugauuacugagcuaauc

SEQ ID NO: 721345 - RNA, 19 nt, Artificial Sequence
  Description of Artificial Sequence: Synthetic oligonucleotide
  Antisense strand to SEQ ID NO: 721344
gauuagcucaguaaucaau

SEQ ID NO: 721346 - RNA, 19 nt, Artificial Sequence
  Description of Artificial Sequence: Synthetic oligonucleotide
  Sense strand starting at position 2398 of SEQ ID NO: 586485
ucuuaucauucucugagag

SEQ ID NO: 721347 - RNA, 19 nt, Artificial Sequence
  Description of Artificial Sequence: Synthetic oligonucleotide
  Antisense strand to SEQ ID NO: 721346
cucucagagaaugauaaga

SEQ ID NO: 721348 - RNA, 19 nt, Artificial Sequence
  Description of Artificial Sequence: Synthetic oligonucleotide
  Sense strand starting at position 2399 of SEQ ID NO: 586485
cuuaucauucucugagaga

SEQ ID NO: 721349 - RNA, 19 nt, Artificial Sequence
  Description of Artificial Sequence: Synthetic oligonucleotide
  Antisense strand to SEQ ID NO: 721348
ucucucagagaaugauaag

SEQ ID NO: 721350 - RNA, 19 nt, Artificial Sequence
  Description of Artificial Sequence: Synthetic oligonucleotide
  Sense strand starting at position 2516 of SEQ ID NO: 586485
uagucuagucgucuauguu

SEQ ID NO: 721351 - RNA, 19 nt, Artificial Sequence
  Description of Artificial Sequence: Synthetic oligonucleotide
  Antisense strand to SEQ ID NO: 721350
aacauagacgacuagacua

SEQ ID NO: 721352 - RNA, 19 nt, Artificial Sequence
  Description of Artificial Sequence: Synthetic oligonucleotide
  Sense strand starting at position 2573 of SEQ ID NO: 586485
gcaucaugaggucagcaaa

SEQ ID NO: 721353 - RNA, 19 nt, Artificial Sequence
  Description of Artificial Sequence: Synthetic oligonucleotide
  Antisense strand to SEQ ID NO: 721352
uuugcugaccucaugaugc

SEQ ID NO: 721354 - RNA, 19 nt, Artificial Sequence
  Description of Artificial Sequence: Synthetic oligonucleotide
  Sense strand starting at position 2597 of SEQ ID NO: 586485
gaaucacugggugguaaga

SEQ ID NO: 721355 - RNA, 19 nt, Artificial Sequence
  Description of Artificial Sequence: Synthetic oligonucleotide
  Antisense strand to SEQ ID NO: 721354
ucuuaccacccagugauuc

SEQ ID NO: 721356 - RNA, 19 nt, Artificial Sequence
  Description of Artificial Sequence: Synthetic oligonucleotide
  Sense strand starting at position 2724 of SEQ ID NO: 586485
agacaauaacccgagucuu

SEQ ID NO: 721357 - RNA, 19 nt, Artificial Sequence
  Description of Artificial Sequence: Synthetic oligonucleotide
  Antisense strand to SEQ ID NO: 721356
aagacucggguuauugucu

SEQ ID NO: 721358 - RNA, 19 nt, Artificial Sequence
  Description of Artificial Sequence: Synthetic oligonucleotide
  Sense strand starting at position 2735 of SEQ ID NO: 586485
cgagucuuacccuacugga

SEQ ID NO: 721359 - RNA, 19 nt, Artificial Sequence
  Description of Artificial Sequence: Synthetic oligonucleotide
  Antisense strand to SEQ ID NO: 721358
uccaguaggguaagacucg

SEQ ID NO: 721360 - RNA, 19 nt, Artificial Sequence
  Description of Artificial Sequence: Synthetic oligonucleotide
  Sense strand starting at position 2848 of SEQ ID NO: 586485
cagagucuccuggauaucu

SEQ ID NO: 721361 - RNA, 19 nt, Artificial Sequence
  Description of Artificial Sequence: Synthetic oligonucleotide
  Antisense strand to SEQ ID NO: 721360
agauauccaggagacucug

SEQ ID NO: 721362 - RNA, 19 nt, Artificial Sequence
  Description of Artificial Sequence: Synthetic oligonucleotide
  Sense strand starting at position 3104 of SEQ ID NO: 586485
ccacauagaucagcuuuga

SEQ ID NO: 721363 - RNA, 19 nt, Artificial Sequence
  Description of Artificial Sequence: Synthetic oligonucleotide
  Antisense strand to SEQ ID NO: 721362
ucaaagcugaucuaugugg

SEQ ID NO: 721364 - RNA, 19 nt, Artificial Sequence
  Description of Artificial Sequence: Synthetic oligonucleotide
  Sense strand starting at position 3108 of SEQ ID NO: 586485
auagaucagcuuugaauaa

SEQ ID NO: 721365 - RNA, 19 nt, Artificial Sequence
  Description of Artificial Sequence: Synthetic oligonucleotide
  Antisense strand to SEQ ID NO: 721364
uuauucaaagcugaucuau

SEQ ID NO: 721366 - RNA, 19 nt, Artificial Sequence
  Description of Artificial Sequence: Synthetic oligonucleotide
  Sense strand starting at position 3119 of SEQ ID NO: 586485
uugaauaagucuuugauac

SEQ ID NO: 721367 - RNA, 19 nt, Artificial Sequence
  Description of Artificial Sequence: Synthetic oligonucleotide
  Antisense strand to SEQ ID NO: 721366
guaucaaagacuuauucaa

SEQ ID NO: 721368 - RNA, 19 nt, Artificial Sequence
  Description of Artificial Sequence: Synthetic oligonucleotide
  Sense strand starting at position 3120 of SEQ ID NO: 586485
ugaauaagucuuugauacu

SEQ ID NO: 721369 - RNA, 19 nt, Artificial Sequence
  Description of Artificial Sequence: Synthetic oligonucleotide
  Antisense strand to SEQ ID NO: 721368
aguaucaaagacuuauuca

SEQ ID NO: 721370 - RNA, 19 nt, Artificial Sequence
  Description of Artificial Sequence: Synthetic oligonucleotide
  Sense strand starting at position 3189 of SEQ ID NO: 586485
ggccauuuauuguuuccau

SEQ ID NO: 721371 - RNA, 19 nt, Artificial Sequence
  Description of Artificial Sequence: Synthetic oligonucleotide
  Antisense strand to SEQ ID NO: 721370
auggaaacaauaaauggcc

SEQ ID NO: 721372 - RNA, 19 nt, Artificial Sequence
  Description of Artificial Sequence: Synthetic oligonucleotide
  Sense strand starting at position 3255 of SEQ ID NO: 586485
ggguuuaucugacuacaaa

SEQ ID NO: 721373 - RNA, 19 nt, Artificial Sequence
  Description of Artificial Sequence: Synthetic oligonucleotide
  Antisense strand to SEQ ID NO: 721372
uuuguagucagauaaaccc

SEQ ID NO: 721374 - RNA, 19 nt, Artificial Sequence
  Description of Artificial Sequence: Synthetic oligonucleotide
  Sense strand starting at position 3339 of SEQ ID NO: 586485
caaucaaugucaguuagga

SEQ ID NO: 721375 - RNA, 19 nt, Artificial Sequence
  Description of Artificial Sequence: Synthetic oligonucleotide
  Antisense strand to SEQ ID NO: 721374
uccuaacugacauugauug

SEQ ID NO: 721376 - RNA, 19 nt, Artificial Sequence
  Description of Artificial Sequence: Synthetic oligonucleotide
  Sense strand starting at position 3398 of SEQ ID NO: 586485
gugagacaacucugugaug

SEQ ID NO: 721377 - RNA, 19 nt, Artificial Sequence
  Description of Artificial Sequence: Synthetic oligonucleotide
  Antisense strand to SEQ ID NO: 721376
caucacagaguugucucac

SEQ ID NO: 721378 - RNA, 19 nt, Artificial Sequence
  Description of Artificial Sequence: Synthetic oligonucleotide
  Sense strand starting at position 3400 of SEQ ID NO: 586485
gagacaacucugugaugua

SEQ ID NO: 721379 - RNA, 19 nt, Artificial Sequence
  Description of Artificial Sequence: Synthetic oligonucleotide
  Antisense strand to SEQ ID NO: 721378
uacaucacagaguugucuc

SEQ ID NO: 721380 - RNA, 19 nt, Artificial Sequence
  Description of Artificial Sequence: Synthetic oligonucleotide
  Sense strand starting at position 3412 of SEQ ID NO: 586485
ugauguacugcauacaaau

SEQ ID NO: 721381 - RNA, 19 nt, Artificial Sequence
  Description of Artificial Sequence: Synthetic oligonucleotide
  Antisense strand to SEQ ID NO: 721380
auuuguaugcaguacauca

SEQ ID NO: 721382 - RNA, 19 nt, Artificial Sequence
  Description of Artificial Sequence: Synthetic oligonucleotide
  Sense strand starting at position 3580 of SEQ ID NO: 586485
gggaucuucuuccuauuga

SEQ ID NO: 721383 - RNA, 19 nt, Artificial Sequence
  Description of Artificial Sequence: Synthetic oligonucleotide
  Antisense strand to SEQ ID NO: 721382
ucaauaggaagaagauccc

SEQ ID NO: 721384 - RNA, 19 nt, Artificial Sequence
  Description of Artificial Sequence: Synthetic oligonucleotide
  Sense strand starting at position 3636 of SEQ ID NO: 586485
cuauuagcucuugauuaug

SEQ ID NO: 721385 - RNA, 19 nt, Artificial Sequence
  Description of Artificial Sequence: Synthetic oligonucleotide
  Antisense strand to SEQ ID NO: 721384
cauaaucaagagcuaauag

SEQ ID NO: 721386 - RNA, 19 nt, Artificial Sequence
  Description of Artificial Sequence: Synthetic oligonucleotide
  Sense strand starting at position 3856 of SEQ ID NO: 586485
uuauaaaugcagugaagaa

SEQ ID NO: 721387 - RNA, 19 nt, Artificial Sequence
  Description of Artificial Sequence: Synthetic oligonucleotide
  Antisense strand to SEQ ID NO: 721386
uucuucacugcauuuauaa

SEQ ID NO: 721388 - RNA, 19 nt, Artificial Sequence
  Description of Artificial Sequence: Synthetic oligonucleotide
  Sense strand starting at position 101 of SEQ ID NO: 586486
uuggauccuggugaguauu

SEQ ID NO: 721389 - RNA, 19 nt, Artificial Sequence
  Description of Artificial Sequence: Synthetic oligonucleotide
  Antisense strand to SEQ ID NO: 721388
aauacucaccaggauccaa

SEQ ID NO: 721390 - RNA, 19 nt, Artificial Sequence
  Description of Artificial Sequence: Synthetic oligonucleotide
  Sense strand starting at position 484 of SEQ ID NO: 586486
agcugugggaguuagaaua

SEQ ID NO: 721391 - RNA, 19 nt, Artificial Sequence
  Description of Artificial Sequence: Synthetic oligonucleotide
  Antisense strand to SEQ ID NO: 721390
uauucuaacucccacagcu

SEQ ID NO: 721392 - RNA, 19 nt, Artificial Sequence
  Description of Artificial Sequence: Synthetic oligonucleotide
  Sense strand starting at position 646 of SEQ ID NO: 586486
auugguguuccugagaaac

SEQ ID NO: 721393 - RNA, 19 nt, Artificial Sequence
  Description of Artificial Sequence: Synthetic oligonucleotide
  Antisense strand to SEQ ID NO: 721392
guuucucaggaacaccaau

SEQ ID NO: 721394 - RNA, 19 nt, Artificial Sequence
  Description of Artificial Sequence: Synthetic oligonucleotide
  Sense strand starting at position 1041 of SEQ ID NO: 586486
aggccaagauccuuauauu

SEQ ID NO: 721395 - RNA, 19 nt, Artificial Sequence
  Description of Artificial Sequence: Synthetic oligonucleotide
  Antisense strand to SEQ ID NO: 721394
aauauaaggaucuuggccu

SEQ ID NO: 721396 - RNA, 19 nt, Artificial Sequence
  Description of Artificial Sequence: Synthetic oligonucleotide
  Sense strand starting at position 1113 of SEQ ID NO: 586486
aggaaugacuuccuacuuu

SEQ ID NO: 721397 - RNA, 19 nt, Artificial Sequence
  Description of Artificial Sequence: Synthetic oligonucleotide
  Antisense strand to SEQ ID NO: 721396
aaaguaggaagucauuccu

SEQ ID NO: 721398 - RNA, 19 nt, Artificial Sequence
  Description of Artificial Sequence: Synthetic oligonucleotide
  Sense strand starting at position 1407 of SEQ ID NO: 586486
ugagucuuugcugagagac

SEQ ID NO: 721399 - RNA, 19 nt, Artificial Sequence
  Description of Artificial Sequence: Synthetic oligonucleotide
  Antisense strand to SEQ ID NO: 721398
gucucucagcaaagacuca

SEQ ID NO: 721400 - RNA, 19 nt, Artificial Sequence
  Description of Artificial Sequence: Synthetic oligonucleotide
  Sense strand starting at position 1456 of SEQ ID NO: 586486
ccgugcaguccuuuaagcu

SEQ ID NO: 721401 - RNA, 19 nt, Artificial Sequence
  Description of Artificial Sequence: Synthetic oligonucleotide
  Antisense strand to SEQ ID NO: 721400
agcuuaaaggacugcacgg

SEQ ID NO: 721402 - RNA, 19 nt, Artificial Sequence
  Description of Artificial Sequence: Synthetic oligonucleotide
  Sense strand starting at position 1463 of SEQ ID NO: 586486
guccuuuaagcuggaaaua

SEQ ID NO: 721403 - RNA, 19 nt, Artificial Sequence
  Description of Artificial Sequence: Synthetic oligonucleotide
  Antisense strand to SEQ ID NO: 721402
uauuuccagcuuaaaggac

SEQ ID NO: 721404 - RNA, 19 nt, Artificial Sequence
  Description of Artificial Sequence: Synthetic oligonucleotide
  Sense strand starting at position 1493 of SEQ ID NO: 586486
auccauuaauggcuugaau

SEQ ID NO: 721405 - RNA, 19 nt, Artificial Sequence
  Description of Artificial Sequence: Synthetic oligonucleotide
  Antisense strand to SEQ ID NO: 721404
auucaagccauuaauggau

SEQ ID NO: 721406 - RNA, 19 nt, Artificial Sequence
  Description of Artificial Sequence: Synthetic oligonucleotide
  Sense strand starting at position 1575 of SEQ ID NO: 586486
gagaaauaucgguacguuu

SEQ ID NO: 721407 - RNA, 19 nt, Artificial Sequence
  Description of Artificial Sequence: Synthetic oligonucleotide
  Antisense strand to SEQ ID NO: 721406
aaacguaccgauauuucuc

SEQ ID NO: 721408 - RNA, 19 nt, Artificial Sequence
  Description of Artificial Sequence: Synthetic oligonucleotide
  Sense strand starting at position 1656 of SEQ ID NO: 586486
acugaaagccaccgauuaa

SEQ ID NO: 721409 - RNA, 19 nt, Artificial Sequence
  Description of Artificial Sequence: Synthetic oligonucleotide
  Antisense strand to SEQ ID NO: 721408
uuaaucgguggcuuucagu

SEQ ID NO: 721410 - RNA, 19 nt, Artificial Sequence
  Description of Artificial Sequence: Synthetic oligonucleotide
  Sense strand starting at position 1667 of SEQ ID NO: 586486
ccgauuaaugcccaaauuc

SEQ ID NO: 721411 - RNA, 19 nt, Artificial Sequence
  Description of Artificial Sequence: Synthetic oligonucleotide
  Antisense strand to SEQ ID NO: 721410
gaauuugggcauuaaucgg

SEQ ID NO: 721412 - RNA, 19 nt, Artificial Sequence
  Description of Artificial Sequence: Synthetic oligonucleotide
  Sense strand starting at position 1772 of SEQ ID NO: 586486
guaaacuggcuccacuuaa

SEQ ID NO: 721413 - RNA, 19 nt, Artificial Sequence
  Description of Artificial Sequence: Synthetic oligonucleotide
  Antisense strand to SEQ ID NO: 721412
uuaaguggagccaguuuac

SEQ ID NO: 721414 - RNA, 19 nt, Artificial Sequence
  Description of Artificial Sequence: Synthetic oligonucleotide
  Sense strand starting at position 2133 of SEQ ID NO: 586486
uggaaaguuaaucaguagu

SEQ ID NO: 721415 - RNA, 19 nt, Artificial Sequence
  Description of Artificial Sequence: Synthetic oligonucleotide
  Antisense strand to SEQ ID NO: 721414
acuacugauuaacuuucca

SEQ ID NO: 721416 - RNA, 19 nt, Artificial Sequence
  Description of Artificial Sequence: Synthetic oligonucleotide
  Sense strand starting at position 2135 of SEQ ID NO: 586486
gaaaguuaaucaguaguua

SEQ ID NO: 721417 - RNA, 19 nt, Artificial Sequence
  Description of Artificial Sequence: Synthetic oligonucleotide
  Antisense strand to SEQ ID NO: 721416
uaacuacugauuaacuuuc

SEQ ID NO: 721418 - RNA, 19 nt, Artificial Sequence
  Description of Artificial Sequence: Synthetic oligonucleotide
  Sense strand starting at position 2146 of SEQ ID NO: 586486
aguaguuauuugcugucau

SEQ ID NO: 721419 - RNA, 19 nt, Artificial Sequence
  Description of Artificial Sequence: Synthetic oligonucleotide
  Antisense strand to SEQ ID NO: 721418
augacagcaaauaacuacu

SEQ ID NO: 721420 - RNA, 19 nt, Artificial Sequence
  Description of Artificial Sequence: Synthetic oligonucleotide
  Sense strand starting at position 2240 of SEQ ID NO: 586486
caugaaugccaaggaaguu

SEQ ID NO: 721421 - RNA, 19 nt, Artificial Sequence
  Description of Artificial Sequence: Synthetic oligonucleotide
  Antisense strand to SEQ ID NO: 721420
aacuuccuuggcauucaug

SEQ ID NO: 721422 - RNA, 19 nt, Artificial Sequence
  Description of Artificial Sequence: Synthetic oligonucleotide
  Sense strand starting at position 2300 of SEQ ID NO: 586486
uuagaaguuugucuagaug

SEQ ID NO: 721423 - RNA, 19 nt, Artificial Sequence
  Description of Artificial Sequence: Synthetic oligonucleotide
  Antisense strand to SEQ ID NO: 721422
caucuagacaaacuucuaa

SEQ ID NO: 721424 - RNA, 19 nt, Artificial Sequence
  Description of Artificial Sequence: Synthetic oligonucleotide
  Sense strand starting at position 2303 of SEQ ID NO: 586486
gaaguuugucuagaugcaa

SEQ ID NO: 721425 - RNA, 19 nt, Artificial Sequence
  Description of Artificial Sequence: Synthetic oligonucleotide
  Antisense strand to SEQ ID NO: 721424
uugcaucuagacaaacuuc

SEQ ID NO: 721426 - RNA, 19 nt, Artificial Sequence
  Description of Artificial Sequence: Synthetic oligonucleotide
  Sense strand starting at position 2337 of SEQ ID NO: 586486
gggcuuaaaccucauugac

SEQ ID NO: 721427 - RNA, 19 nt, Artificial Sequence
  Description of Artificial Sequence: Synthetic oligonucleotide
  Antisense strand to SEQ ID NO: 721426
gucaaugagguuuaagccc

SEQ ID NO: 721428 - RNA, 19 nt, Artificial Sequence
  Description of Artificial Sequence: Synthetic oligonucleotide
  Sense strand starting at position 2484 of SEQ ID NO: 586486
uuguaaggaucauuaacca

SEQ ID NO: 721429 - RNA, 19 nt, Artificial Sequence
  Description of Artificial Sequence: Synthetic oligonucleotide
  Antisense strand to SEQ ID NO: 721428
ugguuaaugauccuuacaa

SEQ ID NO: 721430 - RNA, 19 nt, Artificial Sequence
  Description of Artificial Sequence: Synthetic oligonucleotide
  Sense strand starting at position 2559 of SEQ ID NO: 586486
cuguccagcucuguaauuu

SEQ ID NO: 721431 - RNA, 19 nt, Artificial Sequence
  Description of Artificial Sequence: Synthetic oligonucleotide
  Antisense strand to SEQ ID NO: 721430
aaauuacagagcuggacag

SEQ ID NO: 721432 - RNA, 19 nt, Artificial Sequence
  Description of Artificial Sequence: Synthetic oligonucleotide
  Sense strand starting at position 2560 of SEQ ID NO: 586486
uguccagcucuguaauuuc

SEQ ID NO: 721433 - RNA, 19 nt, Artificial Sequence
  Description of Artificial Sequence: Synthetic oligonucleotide
  Antisense strand to SEQ ID NO: 721432
gaaauuacagagcuggaca

SEQ ID NO: 721434 - RNA, 19 nt, Artificial Sequence
  Description of Artificial Sequence: Synthetic oligonucleotide
  Sense strand starting at position 2620 of SEQ ID NO: 586486
auaguaauacucuggagug

SEQ ID NO: 721435 - RNA, 19 nt, Artificial Sequence
  Description of Artificial Sequence: Synthetic oligonucleotide
  Antisense strand to SEQ ID NO: 721434
cacuccagaguauuacuau

SEQ ID NO: 721436 - RNA, 19 nt, Artificial Sequence
  Description of Artificial Sequence: Synthetic oligonucleotide
  Sense strand starting at position 2622 of SEQ ID NO: 586486
aguaauacucuggaguguu

SEQ ID NO: 721437 - RNA, 19 nt, Artificial Sequence
  Description of Artificial Sequence: Synthetic oligonucleotide
  Antisense strand to SEQ ID NO: 721436
aacacuccagaguauuacu

SEQ ID NO: 721438 - RNA, 19 nt, Artificial Sequence
  Description of Artificial Sequence: Synthetic oligonucleotide
  Sense strand starting at position 2798 of SEQ ID NO: 586486
aguuuccagguuuaucaua

SEQ ID NO: 721439 - RNA, 19 nt, Artificial Sequence
  Description of Artificial Sequence: Synthetic oligonucleotide
  Antisense strand to SEQ ID NO: 721438
uaugauaaaccuggaaacu

SEQ ID NO: 721440 - RNA, 19 nt, Artificial Sequence
  Description of Artificial Sequence: Synthetic oligonucleotide
  Sense strand starting at position 2800 of SEQ ID NO: 586486
uuuccagguuuaucauaga

SEQ ID NO: 721441 - RNA, 19 nt, Artificial Sequence
  Description of Artificial Sequence: Synthetic oligonucleotide
  Antisense strand to SEQ ID NO: 721440
ucuaugauaaaccuggaaa

SEQ ID NO: 721442 - RNA, 19 nt, Artificial Sequence
  Description of Artificial Sequence: Synthetic oligonucleotide
  Sense strand starting at position 2811 of SEQ ID NO: 586486
aucauagacucaguugcaa

SEQ ID NO: 721443 - RNA, 19 nt, Artificial Sequence
  Description of Artificial Sequence: Synthetic oligonucleotide
  Antisense strand to SEQ ID NO: 721442
uugcaacugagucuaugau

SEQ ID NO: 721444 - RNA, 19 nt, Artificial Sequence
  Description of Artificial Sequence: Synthetic oligonucleotide
  Sense strand starting at position 2980 of SEQ ID NO: 586486
ugauguugguuauuggaaa

SEQ ID NO: 721445 - RNA, 19 nt, Artificial Sequence
  Description of Artificial Sequence: Synthetic oligonucleotide
  Antisense strand to SEQ ID NO: 721444
uuuccaauaaccaacauca

SEQ ID NO: 721446 - RNA, 19 nt, Artificial Sequence
  Description of Artificial Sequence: Synthetic oligonucleotide
  Sense strand starting at position 3175 of SEQ ID NO: 586486
auaagugauauguacaugu

SEQ ID NO: 721447 - RNA, 19 nt, Artificial Sequence
  Description of Artificial Sequence: Synthetic oligonucleotide
  Antisense strand to SEQ ID NO: 721446
acauguacauaucacuuau

SEQ ID NO: 721448 - RNA, 19 nt, Artificial Sequence
  Description of Artificial Sequence: Synthetic oligonucleotide
  Sense strand starting at position 3177 of SEQ ID NO: 586486
aagugauauguacauguac

SEQ ID NO: 721449 - RNA, 19 nt, Artificial Sequence
  Description of Artificial Sequence: Synthetic oligonucleotide
  Antisense strand to SEQ ID NO: 721448
guacauguacauaucacuu

SEQ ID NO: 721450 - RNA, 19 nt, Artificial Sequence
  Description of Artificial Sequence: Synthetic oligonucleotide
  Sense strand starting at position 3204 of SEQ ID NO: 586486
agguuuggguuccuaggaa

SEQ ID NO: 721451 - RNA, 19 nt, Artificial Sequence
  Description of Artificial Sequence: Synthetic oligonucleotide
  Antisense strand to SEQ ID NO: 721450
uuccuaggaacccaaaccu

SEQ ID NO: 721452 - RNA, 19 nt, Artificial Sequence
  Description of Artificial Sequence: Synthetic oligonucleotide
  Sense strand starting at position 3332 of SEQ ID NO: 586486
gugagacugagauguaguc

SEQ ID NO: 721453 - RNA, 19 nt, Artificial Sequence
  Description of Artificial Sequence: Synthetic oligonucleotide
  Antisense strand to SEQ ID NO: 721452
gacuacaucucagucucac

SEQ ID NO: 721454 - RNA, 19 nt, Artificial Sequence
  Description of Artificial Sequence: Synthetic oligonucleotide
  Sense strand starting at position 3441 of SEQ ID NO: 586486
augcaaacuuccucuggaa

SEQ ID NO: 721455 - RNA, 19 nt, Artificial Sequence
  Description of Artificial Sequence: Synthetic oligonucleotide
  Antisense strand to SEQ ID NO: 721454
uuccagaggaaguuugcau

SEQ ID NO: 721456 - RNA, 19 nt, Artificial Sequence
  Description of Artificial Sequence: Synthetic oligonucleotide
  Sense strand starting at position 3642 of SEQ ID NO: 586486
uuuagaucaucuguagaga

SEQ ID NO: 721457 - RNA, 19 nt, Artificial Sequence
  Description of Artificial Sequence: Synthetic oligonucleotide
  Antisense strand to SEQ ID NO: 721456
ucucuacagaugaucuaaa

SEQ ID NO: 721458 - RNA, 19 nt, Artificial Sequence
  Description of Artificial Sequence: Synthetic oligonucleotide
  Sense strand starting at position 3772 of SEQ ID NO: 586486
guucuaguaagugauguga

SEQ ID NO: 721459 - RNA, 19 nt, Artificial Sequence
  Description of Artificial Sequence: Synthetic oligonucleotide
  Antisense strand to SEQ ID NO: 721458
ucacaucacuuacuagaac

SEQ ID NO: 721460 - RNA, 19 nt, Artificial Sequence
  Description of Artificial Sequence: Synthetic oligonucleotide
  Sense strand starting at position 3795 of SEQ ID NO: 586486
agccuuaaaggaggaguaa

SEQ ID NO: 721461 - RNA, 19 nt, Artificial Sequence
  Description of Artificial Sequence: Synthetic oligonucleotide
  Antisense strand to SEQ ID NO: 721460
uuacuccuccuuuaaggcu

SEQ ID NO: 721462 - RNA, 19 nt, Artificial Sequence
  Description of Artificial Sequence: Synthetic oligonucleotide
  Sense strand starting at position 3872 of SEQ ID NO: 586486
uuuagaguacuaugacauu

SEQ ID NO: 721463 - RNA, 19 nt, Artificial Sequence
  Description of Artificial Sequence: Synthetic oligonucleotide
  Antisense strand to SEQ ID NO: 721462
aaugucauaguacucuaaa

SEQ ID NO: 721464 - RNA, 19 nt, Artificial Sequence
  Description of Artificial Sequence: Synthetic oligonucleotide
  Sense strand starting at position 3969 of SEQ ID NO: 586486
ugcagucauauugagaugu

SEQ ID NO: 721465 - RNA, 19 nt, Artificial Sequence
  Description of Artificial Sequence: Synthetic oligonucleotide
  Antisense strand to SEQ ID NO: 721464
acaucucaauaugacugca

SEQ ID NO: 721466 - RNA, 19 nt, Artificial Sequence
  Description of Artificial Sequence: Synthetic oligonucleotide
  Sense strand starting at position 3980 of SEQ ID NO: 586486
ugagauguauuugacaauu

SEQ ID NO: 721467 - RNA, 19 nt, Artificial Sequence
  Description of Artificial Sequence: Synthetic oligonucleotide
  Antisense strand to SEQ ID NO: 721466
aauugucaaauacaucuca

SEQ ID NO: 721468 - RNA, 19 nt, Artificial Sequence
  Description of Artificial Sequence: Synthetic oligonucleotide
  Sense strand starting at position 110 of SEQ ID NO: 586487
cugucaauuguauacaacu

SEQ ID NO: 721469 - RNA, 19 nt, Artificial Sequence
  Description of Artificial Sequence: Synthetic oligonucleotide
  Antisense strand to SEQ ID NO: 721468
aguuguauacaauugacag

SEQ ID NO: 721470 - RNA, 19 nt, Artificial Sequence
  Description of Artificial Sequence: Synthetic oligonucleotide
  Sense strand starting at position 131 of SEQ ID NO: 586487
acaggcuucuaauugauca

SEQ ID NO: 721471 - RNA, 19 nt, Artificial Sequence
  Description of Artificial Sequence: Synthetic oligonucleotide
  Antisense strand to SEQ ID NO: 721470
ugaucaauuagaagccugu

SEQ ID NO: 721472 - RNA, 19 nt, Artificial Sequence
  Description of Artificial Sequence: Synthetic oligonucleotide
  Sense strand starting at position 336 of SEQ ID NO: 586487
cucaauguucuggaaaucu

SEQ ID NO: 721473 - RNA, 19 nt, Artificial Sequence
  Description of Artificial Sequence: Synthetic oligonucleotide
  Antisense strand to SEQ ID NO: 721472
agauuuccagaacauugag

SEQ ID NO: 721474 - RNA, 19 nt, Artificial Sequence
  Description of Artificial Sequence: Synthetic oligonucleotide
  Sense strand starting at position 345 of SEQ ID NO: 586487
cuggaaaucuaggcuccuu

SEQ ID NO: 721475 - RNA, 19 nt, Artificial Sequence
  Description of Artificial Sequence: Synthetic oligonucleotide
  Antisense strand to SEQ ID NO: 721474
aaggagccuagauuuccag

SEQ ID NO: 721476 - RNA, 19 nt, Artificial Sequence
  Description of Artificial Sequence: Synthetic oligonucleotide
  Sense strand starting at position 528 of SEQ ID NO: 586487
cccagaggcuucuuacaga

SEQ ID NO: 721477 - RNA, 19 nt, Artificial Sequence
  Description of Artificial Sequence: Synthetic oligonucleotide
  Antisense strand to SEQ ID NO: 721476
ucuguaagaagccucuggg

SEQ ID NO: 721478 - RNA, 19 nt, Artificial Sequence
  Description of Artificial Sequence: Synthetic oligonucleotide
  Sense strand starting at position 562 of SEQ ID NO: 586487
ggaaguuaauugcuugauu

SEQ ID NO: 721479 - RNA, 19 nt, Artificial Sequence
  Description of Artificial Sequence: Synthetic oligonucleotide
  Antisense strand to SEQ ID NO: 721478
aaucaagcaauuaacuucc

SEQ ID NO: 721480 - RNA, 19 nt, Artificial Sequence
  Description of Artificial Sequence: Synthetic oligonucleotide
  Sense strand starting at position 601 of SEQ ID NO: 586487
acuacaagcuuugugauga

SEQ ID NO: 721481 - RNA, 19 nt, Artificial Sequence
  Description of Artificial Sequence: Synthetic oligonucleotide
  Antisense strand to SEQ ID NO: 721480
ucaucacaaagcuuguagu

SEQ ID NO: 721482 - RNA, 19 nt, Artificial Sequence
  Description of Artificial Sequence: Synthetic oligonucleotide
  Sense strand starting at position 632 of SEQ ID NO: 586487
ugucuuguauuucucauua

SEQ ID NO: 721483 - RNA, 19 nt, Artificial Sequence
  Description of Artificial Sequence: Synthetic oligonucleotide
  Antisense strand to SEQ ID NO: 721482
uaaugagaaauacaagaca

SEQ ID NO: 721484 - RNA, 19 nt, Artificial Sequence
  Description of Artificial Sequence: Synthetic oligonucleotide
  Sense strand starting at position 665 of SEQ ID NO: 586487
gcacaauacugggcaaaga

SEQ ID NO: 721485 - RNA, 19 nt, Artificial Sequence
  Description of Artificial Sequence: Synthetic oligonucleotide
  Antisense strand to SEQ ID NO: 721484
ucuuugcccaguauugugc

SEQ ID NO: 721486 - RNA, 19 nt, Artificial Sequence
  Description of Artificial Sequence: Synthetic oligonucleotide
  Sense strand starting at position 676 of SEQ ID NO: 586487
ggcaaagaaugguuaucga

SEQ ID NO: 721487 - RNA, 19 nt, Artificial Sequence
  Description of Artificial Sequence: Synthetic oligonucleotide
  Antisense strand to SEQ ID NO: 721486
ucgauaaccauucuuugcc

SEQ ID NO: 721488 - RNA, 19 nt, Artificial Sequence
  Description of Artificial Sequence: Synthetic oligonucleotide
  Sense strand starting at position 679 of SEQ ID NO: 586487
aaagaaugguuaucgauca

SEQ ID NO: 721489 - RNA, 19 nt, Artificial Sequence
  Description of Artificial Sequence: Synthetic oligonucleotide
  Antisense strand to SEQ ID NO: 721488
ugaucgauaaccauucuuu

SEQ ID NO: 721490 - RNA, 19 nt, Artificial Sequence
  Description of Artificial Sequence: Synthetic oligonucleotide
  Sense strand starting at position 684 of SEQ ID NO: 586487
augguuaucgaucauuguu

SEQ ID NO: 721491 - RNA, 19 nt, Artificial Sequence
  Description of Artificial Sequence: Synthetic oligonucleotide
  Antisense strand to SEQ ID NO: 721490
aacaaugaucgauaaccau

SEQ ID NO: 721492 - RNA, 19 nt, Artificial Sequence
  Description of Artificial Sequence: Synthetic oligonucleotide
  Sense strand starting at position 738 of SEQ ID NO: 586487
uuugauugaucauuauguc

SEQ ID NO: 721493 - RNA, 19 nt, Artificial Sequence
  Description of Artificial Sequence: Synthetic oligonucleotide
  Antisense strand to SEQ ID NO: 721492
gacauaaugaucaaucaaa

SEQ ID NO: 721494 - RNA, 19 nt, Artificial Sequence
  Description of Artificial Sequence: Synthetic oligonucleotide
  Sense strand starting at position 809 of SEQ ID NO: 586487
uguaguguuauagaaacau

SEQ ID NO: 721495 - RNA, 19 nt, Artificial Sequence
  Description of Artificial Sequence: Synthetic oligonucleotide
  Antisense strand to SEQ ID NO: 721494
auguuucuauaacacuaca

SEQ ID NO: 721496 - RNA, 19 nt, Artificial Sequence
  Description of Artificial Sequence: Synthetic oligonucleotide
  Sense strand starting at position 813 of SEQ ID NO: 586487
guguuauagaaacauggua

SEQ ID NO: 721497 - RNA, 19 nt, Artificial Sequence
  Description of Artificial Sequence: Synthetic oligonucleotide
  Antisense strand to SEQ ID NO: 721496
uaccauguuucuauaacac

SEQ ID NO: 721498 - RNA, 19 nt, Artificial Sequence
  Description of Artificial Sequence: Synthetic oligonucleotide
  Sense strand starting at position 900 of SEQ ID NO: 586487
cucuuauuggagcagacuu

SEQ ID NO: 721499 - RNA, 19 nt, Artificial Sequence
  Description of Artificial Sequence: Synthetic oligonucleotide
  Antisense strand to SEQ ID NO: 721498
aagucugcuccaauaagag

SEQ ID NO: 721500 - RNA, 19 nt, Artificial Sequence
  Description of Artificial Sequence: Synthetic oligonucleotide
  Sense strand starting at position 907 of SEQ ID NO: 586487
uggagcagacuuugaacaa

SEQ ID NO: 721501 - RNA, 19 nt, Artificial Sequence
  Description of Artificial Sequence: Synthetic oligonucleotide
  Antisense strand to SEQ ID NO: 721500
uuguucaaagucugcucca

SEQ ID NO: 721502 - RNA, 19 nt, Artificial Sequence
  Description of Artificial Sequence: Synthetic oligonucleotide
  Sense strand starting at position 1054 of SEQ ID NO: 586487
ggaaacagcuucuuguaaa

SEQ ID NO: 721503 - RNA, 19 nt, Artificial Sequence
  Description of Artificial Sequence: Synthetic oligonucleotide
  Antisense strand to SEQ ID NO: 721502
uuuacaagaagcuguuucc

SEQ ID NO: 721504 - RNA, 19 nt, Artificial Sequence
  Description of Artificial Sequence: Synthetic oligonucleotide
  Sense strand starting at position 1235 of SEQ ID NO: 586487
ugcugcucugcuguuaaua

SEQ ID NO: 721505 - RNA, 19 nt, Artificial Sequence
  Description of Artificial Sequence: Synthetic oligonucleotide
  Antisense strand to SEQ ID NO: 721504
uauuaacagcagagcagca

SEQ ID NO: 721506 - RNA, 19 nt, Artificial Sequence
  Description of Artificial Sequence: Synthetic oligonucleotide
  Sense strand starting at position 1418 of SEQ ID NO: 586487
gagcucaaugcccaguaaa

SEQ ID NO: 721507 - RNA, 19 nt, Artificial Sequence
  Description of Artificial Sequence: Synthetic oligonucleotide
  Antisense strand to SEQ ID NO: 721506
uuuacugggcauugagcuc

SEQ ID NO: 721508 - RNA, 19 nt, Artificial Sequence
  Description of Artificial Sequence: Synthetic oligonucleotide
  Sense strand starting at position 1715 of SEQ ID NO: 586487
acaaguauccucugagcag

SEQ ID NO: 721509 - RNA, 19 nt, Artificial Sequence
  Description of Artificial Sequence: Synthetic oligonucleotide
  Antisense strand to SEQ ID NO: 721508
cugcucagaggauacuugu

SEQ ID NO: 721510 - RNA, 19 nt, Artificial Sequence
  Description of Artificial Sequence: Synthetic oligonucleotide
  Sense strand starting at position 1729 of SEQ ID NO: 586487
agcagcaaucucuggaaga

SEQ ID NO: 721511 - RNA, 19 nt, Artificial Sequence
  Description of Artificial Sequence: Synthetic oligonucleotide
  Antisense strand to SEQ ID NO: 721510
ucuuccagagauugcugcu

SEQ ID NO: 721512 - RNA, 19 nt, Artificial Sequence
  Description of Artificial Sequence: Synthetic oligonucleotide
  Sense strand starting at position 1822 of SEQ ID NO: 586487
gcgagaauauagucugaaa

SEQ ID NO: 721513 - RNA, 19 nt, Artificial Sequence
  Description of Artificial Sequence: Synthetic oligonucleotide
  Antisense strand to SEQ ID NO: 721512
uuucagacuauauucucgc

SEQ ID NO: 721514 - RNA, 19 nt, Artificial Sequence
  Description of Artificial Sequence: Synthetic oligonucleotide
  Sense strand starting at position 1841 of SEQ ID NO: 586487
acauguuuaccagacgauu

SEQ ID NO: 721515 - RNA, 19 nt, Artificial Sequence
  Description of Artificial Sequence: Synthetic oligonucleotide
  Antisense strand to SEQ ID NO: 721514
aaucgucugguaaacaugu

SEQ ID NO: 721516 - RNA, 19 nt, Artificial Sequence
  Description of Artificial Sequence: Synthetic oligonucleotide
  Sense strand starting at position 2432 of SEQ ID NO: 586487
acuagagaguuaucaguua

SEQ ID NO: 721517 - RNA, 19 nt, Artificial Sequence
  Description of Artificial Sequence: Synthetic oligonucleotide
  Antisense strand to SEQ ID NO: 721516
uaacugauaacucucuagu

SEQ ID NO: 721518 - RNA, 19 nt, Artificial Sequence
  Description of Artificial Sequence: Synthetic oligonucleotide
  Sense strand starting at position 2439 of SEQ ID NO: 586487
aguuaucaguuauucugaa

SEQ ID NO: 721519 - RNA, 19 nt, Artificial Sequence
  Description of Artificial Sequence: Synthetic oligonucleotide
  Antisense strand to SEQ ID NO: 721518
uucagaauaacugauaacu

SEQ ID NO: 721520 - RNA, 19 nt, Artificial Sequence
  Description of Artificial Sequence: Synthetic oligonucleotide
  Sense strand starting at position 2440 of SEQ ID NO: 586487
guuaucaguuauucugaaa

SEQ ID NO: 721521 - RNA, 19 nt, Artificial Sequence
  Description of Artificial Sequence: Synthetic oligonucleotide
  Antisense strand to SEQ ID NO: 721520
uuucagaauaacugauaac

SEQ ID NO: 721522 - RNA, 19 nt, Artificial Sequence
  Description of Artificial Sequence: Synthetic oligonucleotide
  Sense strand starting at position 2556 of SEQ ID NO: 586487
cacaguguguccuuauuuc

SEQ ID NO: 721523 - RNA, 19 nt, Artificial Sequence
  Description of Artificial Sequence: Synthetic oligonucleotide
  Antisense strand to SEQ ID NO: 721522
gaaauaaggacacacugug

SEQ ID NO: 721524 - RNA, 19 nt, Artificial Sequence
  Description of Artificial Sequence: Synthetic oligonucleotide
  Sense strand starting at position 2577 of SEQ ID NO: 586487
ggguauguccaugagucau

SEQ ID NO: 721525 - RNA, 19 nt, Artificial Sequence
  Description of Artificial Sequence: Synthetic oligonucleotide
  Antisense strand to SEQ ID NO: 721524
augacucauggacauaccc

SEQ ID NO: 721526 - RNA, 19 nt, Artificial Sequence
  Description of Artificial Sequence: Synthetic oligonucleotide
  Sense strand starting at position 2590 of SEQ ID NO: 586487
agucaucugcuagaagcaa

SEQ ID NO: 721527 - RNA, 19 nt, Artificial Sequence
  Description of Artificial Sequence: Synthetic oligonucleotide
  Antisense strand to SEQ ID NO: 721526
uugcuucuagcagaugacu

SEQ ID NO: 721528 - RNA, 19 nt, Artificial Sequence
  Description of Artificial Sequence: Synthetic oligonucleotide
  Sense strand starting at position 2664 of SEQ ID NO: 586487
ugagaugguccuggaacca

SEQ ID NO: 721529 - RNA, 19 nt, Artificial Sequence
  Description of Artificial Sequence: Synthetic oligonucleotide
  Antisense strand to SEQ ID NO: 721528
ugguuccaggaccaucuca

SEQ ID NO: 721530 - RNA, 19 nt, Artificial Sequence
  Description of Artificial Sequence: Synthetic oligonucleotide
  Sense strand starting at position 2911 of SEQ ID NO: 586487
auacauuucuuugaggaua

SEQ ID NO: 721531 - RNA, 19 nt, Artificial Sequence
  Description of Artificial Sequence: Synthetic oligonucleotide
  Antisense strand to SEQ ID NO: 721530
uauccucaaagaaauguau

SEQ ID NO: 721532 - RNA, 19 nt, Artificial Sequence
  Description of Artificial Sequence: Synthetic oligonucleotide
  Sense strand starting at position 2913 of SEQ ID NO: 586487
acauuucuuugaggauaga

SEQ ID NO: 721533 - RNA, 19 nt, Artificial Sequence
  Description of Artificial Sequence: Synthetic oligonucleotide
  Antisense strand to SEQ ID NO: 721532
ucuauccucaaagaaaugu

SEQ ID NO: 721534 - RNA, 19 nt, Artificial Sequence
  Description of Artificial Sequence: Synthetic oligonucleotide
  Sense strand starting at position 3073 of SEQ ID NO: 586487
cuugguuugacaggcaaac

SEQ ID NO: 721535 - RNA, 19 nt, Artificial Sequence
  Description of Artificial Sequence: Synthetic oligonucleotide
  Antisense strand to SEQ ID NO: 721534
guuugccugucaaaccaag

SEQ ID NO: 721536 - RNA, 19 nt, Artificial Sequence
  Description of Artificial Sequence: Synthetic oligonucleotide
  Sense strand starting at position 3135 of SEQ ID NO: 586487
gcgauucugaacugagaua

SEQ ID NO: 721537 - RNA, 19 nt, Artificial Sequence
  Description of Artificial Sequence: Synthetic oligonucleotide
  Antisense strand to SEQ ID NO: 721536
uaucucaguucagaaucgc

SEQ ID NO: 721538 - RNA, 19 nt, Artificial Sequence
  Description of Artificial Sequence: Synthetic oligonucleotide
  Sense strand starting at position 3188 of SEQ ID NO: 586487
gccuaaaccuggcuagaag

SEQ ID NO: 721539 - RNA, 19 nt, Artificial Sequence
  Description of Artificial Sequence: Synthetic oligonucleotide
  Antisense strand to SEQ ID NO: 721538
cuucuagccagguuuaggc

SEQ ID NO: 721540 - RNA, 19 nt, Artificial Sequence
  Description of Artificial Sequence: Synthetic oligonucleotide
  Sense strand starting at position 3196 of SEQ ID NO: 586487
cuggcuagaagguauauau

SEQ ID NO: 721541 - RNA, 19 nt, Artificial Sequence
  Description of Artificial Sequence: Synthetic oligonucleotide
  Antisense strand to SEQ ID NO: 721540
auauauaccuucuagccag

SEQ ID NO: 721542 - RNA, 19 nt, Artificial Sequence
  Description of Artificial Sequence: Synthetic oligonucleotide
  Sense strand starting at position 3267 of SEQ ID NO: 586487
cuauuaaagcacuggauca

SEQ ID NO: 721543 - RNA, 19 nt, Artificial Sequence
  Description of Artificial Sequence: Synthetic oligonucleotide
  Antisense strand to SEQ ID NO: 721542
ugauccagugcuuuaauag

SEQ ID NO: 721544 - RNA, 19 nt, Artificial Sequence
  Description of Artificial Sequence: Synthetic oligonucleotide
  Sense strand starting at position 3274 of SEQ ID NO: 586487
agcacuggaucauuacuua

SEQ ID NO: 721545 - RNA, 19 nt, Artificial Sequence
  Description of Artificial Sequence: Synthetic oligonucleotide
  Antisense strand to SEQ ID NO: 721544
uaaguaaugauccagugcu

SEQ ID NO: 721546 - RNA, 19 nt, Artificial Sequence
  Description of Artificial Sequence: Synthetic oligonucleotide
  Sense strand starting at position 3394 of SEQ ID NO: 586487
uaaagcaauguguagacaa

SEQ ID NO: 721547 - RNA, 19 nt, Artificial Sequence
  Description of Artificial Sequence: Synthetic oligonucleotide
  Antisense strand to SEQ ID NO: 721546
uugucuacacauugcuuua

SEQ ID NO: 721548 - RNA, 19 nt, Artificial Sequence
  Description of Artificial Sequence: Synthetic oligonucleotide
  Sense strand starting at position 11 of SEQ ID NO: 586488
gucacauauuuacaaugga

SEQ ID NO: 721549 - RNA, 19 nt, Artificial Sequence
  Description of Artificial Sequence: Synthetic oligonucleotide
  Antisense strand to SEQ ID NO: 721548
uccauuguaaauaugugac

SEQ ID NO: 721550 - RNA, 19 nt, Artificial Sequence
  Description of Artificial Sequence: Synthetic oligonucleotide
  Sense strand starting at position 60 of SEQ ID NO: 586488
uguauuguccuugauucca

SEQ ID NO: 721551 - RNA, 19 nt, Artificial Sequence
  Description of Artificial Sequence: Synthetic oligonucleotide
  Antisense strand to SEQ ID NO: 721550
uggaaucaaggacaauaca

SEQ ID NO: 721552 - RNA, 19 nt, Artificial Sequence
  Description of Artificial Sequence: Synthetic oligonucleotide
  Sense strand starting at position 69 of SEQ ID NO: 586488
cuugauuccacagguggaa

SEQ ID NO: 721553 - RNA, 19 nt, Artificial Sequence
  Description of Artificial Sequence: Synthetic oligonucleotide
  Antisense strand to SEQ ID NO: 721552
uuccaccuguggaaucaag

SEQ ID NO: 721554 - RNA, 19 nt, Artificial Sequence
  Description of Artificial Sequence: Synthetic oligonucleotide
  Sense strand starting at position 120 of SEQ ID NO: 586488
cuuggaacauguguacaau

SEQ ID NO: 721555 - RNA, 19 nt, Artificial Sequence
  Description of Artificial Sequence: Synthetic oligonucleotide
  Antisense strand to SEQ ID NO: 721554
auuguacacauguuccaag

SEQ ID NO: 721556 - RNA, 19 nt, Artificial Sequence
  Description of Artificial Sequence: Synthetic oligonucleotide
  Sense strand starting at position 356 of SEQ ID NO: 586488
gccaaugaccagcaacaau

SEQ ID NO: 721557 - RNA, 19 nt, Artificial Sequence
  Description of Artificial Sequence: Synthetic oligonucleotide
  Antisense strand to SEQ ID NO: 721556
auuguugcuggucauuggc

SEQ ID NO: 721558 - RNA, 19 nt, Artificial Sequence
  Description of Artificial Sequence: Synthetic oligonucleotide
  Sense strand starting at position 389 of SEQ ID NO: 586488
aagcuuucugaguggauca

SEQ ID NO: 721559 - RNA, 19 nt, Artificial Sequence
  Description of Artificial Sequence: Synthetic oligonucleotide
  Antisense strand to SEQ ID NO: 721558
ugauccacucagaaagcuu

SEQ ID NO: 721560 - RNA, 19 nt, Artificial Sequence
  Description of Artificial Sequence: Synthetic oligonucleotide
  Sense strand starting at position 405 of SEQ ID NO: 586488
ucaggcugcauugaggaau

SEQ ID NO: 721561 - RNA, 19 nt, Artificial Sequence
  Description of Artificial Sequence: Synthetic oligonucleotide
  Antisense strand to SEQ ID NO: 721560
auuccucaaugcagccuga

SEQ ID NO: 721562 - RNA, 19 nt, Artificial Sequence
  Description of Artificial Sequence: Synthetic oligonucleotide
  Sense strand starting at position 408 of SEQ ID NO: 586488
ggcugcauugaggaauaca

SEQ ID NO: 721563 - RNA, 19 nt, Artificial Sequence
  Description of Artificial Sequence: Synthetic oligonucleotide
  Antisense strand to SEQ ID NO: 721562
uguauuccucaaugcagcc

SEQ ID NO: 721564 - RNA, 19 nt, Artificial Sequence
  Description of Artificial Sequence: Synthetic oligonucleotide
  Sense strand starting at position 466 of SEQ ID NO: 586488
gugagucagaaaggauacu

SEQ ID NO: 721565 - RNA, 19 nt, Artificial Sequence
  Description of Artificial Sequence: Synthetic oligonucleotide
  Antisense strand to SEQ ID NO: 721564
aguauccuuucugacucac

SEQ ID NO: 721566 - RNA, 19 nt, Artificial Sequence
  Description of Artificial Sequence: Synthetic oligonucleotide
  Sense strand starting at position 624 of SEQ ID NO: 586488
aggcgucuucuccaaagga

SEQ ID NO: 721567 - RNA, 19 nt, Artificial Sequence
  Description of Artificial Sequence: Synthetic oligonucleotide
  Antisense strand to SEQ ID NO: 721566
uccuuuggagaagacgccu

SEQ ID NO: 721568 - RNA, 19 nt, Artificial Sequence
  Description of Artificial Sequence: Synthetic oligonucleotide
  Sense strand starting at position 944 of SEQ ID NO: 586488
gcccauguauuuccaggua

SEQ ID NO: 721569 - RNA, 19 nt, Artificial Sequence
  Description of Artificial Sequence: Synthetic oligonucleotide
  Antisense strand to SEQ ID NO: 721568
uaccuggaaauacaugggc

SEQ ID NO: 721570 - RNA, 19 nt, Artificial Sequence
  Description of Artificial Sequence: Synthetic oligonucleotide
  Sense strand starting at position 1176 of SEQ ID NO: 586488
gcuugucugagacauggua

SEQ ID NO: 721571 - RNA, 19 nt, Artificial Sequence
  Description of Artificial Sequence: Synthetic oligonucleotide
  Antisense strand to SEQ ID NO: 721570
uaccaugucucagacaagc

SEQ ID NO: 721572 - RNA, 19 nt, Artificial Sequence
  Description of Artificial Sequence: Synthetic oligonucleotide
  Sense strand starting at position 1341 of SEQ ID NO: 586488
gccuuacucccugagaguu

SEQ ID NO: 721573 - RNA, 19 nt, Artificial Sequence
  Description of Artificial Sequence: Synthetic oligonucleotide
  Antisense strand to SEQ ID NO: 721572
aacucucagggaguaaggc

SEQ ID NO: 721574 - RNA, 19 nt, Artificial Sequence
  Description of Artificial Sequence: Synthetic oligonucleotide
  Sense strand starting at position 1363 of SEQ ID NO: 586488
uggagaucgacuuggcuaa

SEQ ID NO: 721575 - RNA, 19 nt, Artificial Sequence
  Description of Artificial Sequence: Synthetic oligonucleotide
  Antisense strand to SEQ ID NO: 721574
uuagccaagucgaucucca

SEQ ID NO: 721576 - RNA, 19 nt, Artificial Sequence
  Description of Artificial Sequence: Synthetic oligonucleotide
  Sense strand starting at position 1367 of SEQ ID NO: 586488
gaucgacuuggcuaaguaa

SEQ ID NO: 721577 - RNA, 19 nt, Artificial Sequence
  Description of Artificial Sequence: Synthetic oligonucleotide
  Antisense strand to SEQ ID NO: 721576
uuacuuagccaagucgauc

SEQ ID NO: 721578 - RNA, 19 nt, Artificial Sequence
  Description of Artificial Sequence: Synthetic oligonucleotide
  Sense strand starting at position 1626 of SEQ ID NO: 586488
cccaguucuccuuaccaga

SEQ ID NO: 721579 - RNA, 19 nt, Artificial Sequence
  Description of Artificial Sequence: Synthetic oligonucleotide
  Antisense strand to SEQ ID NO: 721578
ucugguaaggagaacuggg

SEQ ID NO: 721580 - RNA, 19 nt, Artificial Sequence
  Description of Artificial Sequence: Synthetic oligonucleotide
  Sense strand starting at position 2134 of SEQ ID NO: 586488
ggucccuagugacuggaaa

SEQ ID NO: 721581 - RNA, 19 nt, Artificial Sequence
  Description of Artificial Sequence: Synthetic oligonucleotide
  Antisense strand to SEQ ID NO: 721580
uuuccagucacuagggacc

SEQ ID NO: 721582 - RNA, 19 nt, Artificial Sequence
  Description of Artificial Sequence: Synthetic oligonucleotide
  Sense strand starting at position 2136 of SEQ ID NO: 586488
ucccuagugacuggaaagu

SEQ ID NO: 721583 - RNA, 19 nt, Artificial Sequence
  Description of Artificial Sequence: Synthetic oligonucleotide
  Antisense strand to SEQ ID NO: 721582
acuuuccagucacuaggga

SEQ ID NO: 721584 - RNA, 19 nt, Artificial Sequence
  Description of Artificial Sequence: Synthetic oligonucleotide
  Sense strand starting at position 2419 of SEQ ID NO: 586488
gguugaaagcagggugaua

SEQ ID NO: 721585 - RNA, 19 nt, Artificial Sequence
  Description of Artificial Sequence: Synthetic oligonucleotide
  Antisense strand to SEQ ID NO: 721584
uaucacccugcuuucaacc

SEQ ID NO: 721586 - RNA, 19 nt, Artificial Sequence
  Description of Artificial Sequence: Synthetic oligonucleotide
  Sense strand starting at position 2562 of SEQ ID NO: 586488
aaggcaauuaugcgaugga

SEQ ID NO: 721587 - RNA, 19 nt, Artificial Sequence
  Description of Artificial Sequence: Synthetic oligonucleotide
  Antisense strand to SEQ ID NO: 721586
uccaucgcauaauugccuu

SEQ ID NO: 721588 - RNA, 19 nt, Artificial Sequence
  Description of Artificial Sequence: Synthetic oligonucleotide
  Sense strand starting at position 2565 of SEQ ID NO: 586488
gcaauuaugcgauggagaa

SEQ ID NO: 721589 - RNA, 19 nt, Artificial Sequence
  Description of Artificial Sequence: Synthetic oligonucleotide
  Antisense strand to SEQ ID NO: 721588
uucuccaucgcauaauugc

SEQ ID NO: 721590 - RNA, 19 nt, Artificial Sequence
  Description of Artificial Sequence: Synthetic oligonucleotide
  Sense strand starting at position 2566 of SEQ ID NO: 586488
caauuaugcgauggagaac

SEQ ID NO: 721591 - RNA, 19 nt, Artificial Sequence
  Description of Artificial Sequence: Synthetic oligonucleotide
  Antisense strand to SEQ ID NO: 721590
guucuccaucgcauaauug

SEQ ID NO: 721592 - RNA, 19 nt, Artificial Sequence
  Description of Artificial Sequence: Synthetic oligonucleotide
  Sense strand starting at position 2608 of SEQ ID NO: 586488
cgucauggcccagagaauc

SEQ ID NO: 721593 - RNA, 19 nt, Artificial Sequence
  Description of Artificial Sequence: Synthetic oligonucleotide
  Antisense strand to SEQ ID NO: 721592
gauucucugggccaugacg

SEQ ID NO: 721594 - RNA, 19 nt, Artificial Sequence
  Description of Artificial Sequence: Synthetic oligonucleotide
  Sense strand starting at position 2673 of SEQ ID NO: 586488
ugguaacaauugucuaaga

SEQ ID NO: 721595 - RNA, 19 nt, Artificial Sequence
  Description of Artificial Sequence: Synthetic oligonucleotide
  Antisense strand to SEQ ID NO: 721594
ucuuagacaauuguuacca

SEQ ID NO: 721596 - RNA, 19 nt, Artificial Sequence
  Description of Artificial Sequence: Synthetic oligonucleotide
  Sense strand starting at position 2674 of SEQ ID NO: 586488
gguaacaauugucuaagac

SEQ ID NO: 721597 - RNA, 19 nt, Artificial Sequence
  Description of Artificial Sequence: Synthetic oligonucleotide
  Antisense strand to SEQ ID NO: 721596
gucuuagacaauuguuacc

SEQ ID NO: 721598 - RNA, 19 nt, Artificial Sequence
  Description of Artificial Sequence: Synthetic oligonucleotide
  Sense strand starting at position 2675 of SEQ ID NO: 586488
guaacaauugucuaagacu

SEQ ID NO: 721599 - RNA, 19 nt, Artificial Sequence
  Description of Artificial Sequence: Synthetic oligonucleotide
  Antisense strand to SEQ ID NO: 721598
agucuuagacaauuguuac

SEQ ID NO: 721600 - RNA, 19 nt, Artificial Sequence
  Description of Artificial Sequence: Synthetic oligonucleotide
  Sense strand starting at position 2775 of SEQ ID NO: 586488
auuauugaauguccauuga

SEQ ID NO: 721601 - RNA, 19 nt, Artificial Sequence
  Description of Artificial Sequence: Synthetic oligonucleotide
  Antisense strand to SEQ ID NO: 721600
ucaauggacauucaauaau

SEQ ID NO: 721602 - RNA, 19 nt, Artificial Sequence
  Description of Artificial Sequence: Synthetic oligonucleotide
  Sense strand starting at position 2779 of SEQ ID NO: 586488
uugaauguccauugaacca

SEQ ID NO: 721603 - RNA, 19 nt, Artificial Sequence
  Description of Artificial Sequence: Synthetic oligonucleotide
  Antisense strand to SEQ ID NO: 721602
ugguucaauggacauucaa

SEQ ID NO: 721604 - RNA, 19 nt, Artificial Sequence
  Description of Artificial Sequence: Synthetic oligonucleotide
  Sense strand starting at position 2794 of SEQ ID NO: 586488
accagaaugugaucuggau

SEQ ID NO: 721605 - RNA, 19 nt, Artificial Sequence
  Description of Artificial Sequence: Synthetic oligonucleotide
  Antisense strand to SEQ ID NO: 721604
auccagaucacauucuggu

SEQ ID NO: 721606 - RNA, 19 nt, Artificial Sequence
  Description of Artificial Sequence: Synthetic oligonucleotide
  Sense strand starting at position 2848 of SEQ ID NO: 586488
agggaugccaccugguuau

SEQ ID NO: 721607 - RNA, 19 nt, Artificial Sequence
  Description of Artificial Sequence: Synthetic oligonucleotide
  Antisense strand to SEQ ID NO: 721606
auaaccagguggcaucccu

SEQ ID NO: 721608 - RNA, 19 nt, Artificial Sequence
  Description of Artificial Sequence: Synthetic oligonucleotide
  Sense strand starting at position 3052 of SEQ ID NO: 586488
gaggaagauuugcaacuca

SEQ ID NO: 721609 - RNA, 19 nt, Artificial Sequence
  Description of Artificial Sequence: Synthetic oligonucleotide
  Antisense strand to SEQ ID NO: 721608
ugaguugcaaaucuuccuc

SEQ ID NO: 721610 - RNA, 19 nt, Artificial Sequence
  Description of Artificial Sequence: Synthetic oligonucleotide
  Sense strand starting at position 3248 of SEQ ID NO: 586488
uugcauuacaaaggguaga

SEQ ID NO: 721611 - RNA, 19 nt, Artificial Sequence
  Description of Artificial Sequence: Synthetic oligonucleotide
  Antisense strand to SEQ ID NO: 721610
ucuacccuuuguaaugcaa

SEQ ID NO: 721612 - RNA, 19 nt, Artificial Sequence
  Description of Artificial Sequence: Synthetic oligonucleotide
  Sense strand starting at position 3280 of SEQ ID NO: 586488
cuuacaagguuucuaaaga

SEQ ID NO: 721613 - RNA, 19 nt, Artificial Sequence
  Description of Artificial Sequence: Synthetic oligonucleotide
  Antisense strand to SEQ ID NO: 721612
ucuuuagaaaccuuguaag

SEQ ID NO: 721614 - RNA, 19 nt, Artificial Sequence
  Description of Artificial Sequence: Synthetic oligonucleotide
  Sense strand starting at position 3471 of SEQ ID NO: 586488
cagaaagugggcuguaauc

SEQ ID NO: 721615 - RNA, 19 nt, Artificial Sequence
  Description of Artificial Sequence: Synthetic oligonucleotide
  Antisense strand to SEQ ID NO: 721614
gauuacagcccacuuucug

SEQ ID NO: 721616 - RNA, 19 nt, Artificial Sequence
  Description of Artificial Sequence: Synthetic oligonucleotide
  Sense strand starting at position 3481 of SEQ ID NO: 586488
gcuguaaucugaccaggau

SEQ ID NO: 721617 - RNA, 19 nt, Artificial Sequence
  Description of Artificial Sequence: Synthetic oligonucleotide
  Antisense strand to SEQ ID NO: 721616
auccuggucagauuacagc

SEQ ID NO: 721618 - RNA, 19 nt, Artificial Sequence
  Description of Artificial Sequence: Synthetic oligonucleotide
  Sense strand starting at position 3818 of SEQ ID NO: 586488
ccucuuauggcucaaagag

SEQ ID NO: 721619 - RNA, 19 nt, Artificial Sequence
  Description of Artificial Sequence: Synthetic oligonucleotide
  Antisense strand to SEQ ID NO: 721618
cucuuugagccauaagagg

SEQ ID NO: 721620 - RNA, 19 nt, Artificial Sequence
  Description of Artificial Sequence: Synthetic oligonucleotide
  Sense strand starting at position 3864 of SEQ ID NO: 586488
uuaacuggucucuaucagu

SEQ ID NO: 721621 - RNA, 19 nt, Artificial Sequence
  Description of Artificial Sequence: Synthetic oligonucleotide
  Antisense strand to SEQ ID NO: 721620
acugauagagaccaguuaa

SEQ ID NO: 721622 - RNA, 19 nt, Artificial Sequence
  Description of Artificial Sequence: Synthetic oligonucleotide
  Sense strand starting at position 3916 of SEQ ID NO: 586488
agggacugucuuuagguca

SEQ ID NO: 721623 - RNA, 19 nt, Artificial Sequence
  Description of Artificial Sequence: Synthetic oligonucleotide
  Antisense strand to SEQ ID NO: 721622
ugaccuaaagacagucccu

SEQ ID NO: 721624 - RNA, 19 nt, Artificial Sequence
  Description of Artificial Sequence: Synthetic oligonucleotide
  Sense strand starting at position 3919 of SEQ ID NO: 586488
gacugucuuuaggucagga

SEQ ID NO: 721625 - RNA, 19 nt, Artificial Sequence
  Description of Artificial Sequence: Synthetic oligonucleotide
  Antisense strand to SEQ ID NO: 721624
uccugaccuaaagacaguc

SEQ ID NO: 721626 - RNA, 19 nt, Artificial Sequence
  Description of Artificial Sequence: Synthetic oligonucleotide
  Sense strand starting at position 3942 of SEQ ID NO: 586488
gcuagaacuuagcccuaga

SEQ ID NO: 721627 - RNA, 19 nt, Artificial Sequence
  Description of Artificial Sequence: Synthetic oligonucleotide
  Antisense strand to SEQ ID NO: 721626
ucuagggcuaaguucuagc

SEQ ID NO: 721628 - RNA, 19 nt, Artificial Sequence
  Description of Artificial Sequence: Synthetic oligonucleotide
  Sense strand starting at position 30 of SEQ ID NO: 586489
guuacagaggacugggauu

SEQ ID NO: 721629 - RNA, 19 nt, Artificial Sequence
  Description of Artificial Sequence: Synthetic oligonucleotide
  Antisense strand to SEQ ID NO: 721628
aaucccaguccucuguaac

SEQ ID NO: 721630 - RNA, 19 nt, Artificial Sequence
  Description of Artificial Sequence: Synthetic oligonucleotide
  Sense strand starting at position 123 of SEQ ID NO: 586489
agcaucccaucaguaagaa

SEQ ID NO: 721631 - RNA, 19 nt, Artificial Sequence
  Description of Artificial Sequence: Synthetic oligonucleotide
  Antisense strand to SEQ ID NO: 721630
uucuuacugaugggaugcu

SEQ ID NO: 721632 - RNA, 19 nt, Artificial Sequence
  Description of Artificial Sequence: Synthetic oligonucleotide
  Sense strand starting at position 124 of SEQ ID NO: 586489
gcaucccaucaguaagaau

SEQ ID NO: 721633 - RNA, 19 nt, Artificial Sequence
  Description of Artificial Sequence: Synthetic oligonucleotide
  Antisense strand to SEQ ID NO: 721632
auucuuacugaugggaugc

SEQ ID NO: 721634 - RNA, 19 nt, Artificial Sequence
  Description of Artificial Sequence: Synthetic oligonucleotide
  Sense strand starting at position 136 of SEQ ID NO: 586489
uaagaauguugggccugaa

SEQ ID NO: 721635 - RNA, 19 nt, Artificial Sequence
  Description of Artificial Sequence: Synthetic oligonucleotide
  Antisense strand to SEQ ID NO: 721634
uucaggcccaacauucuua

SEQ ID NO: 721636 - RNA, 19 nt, Artificial Sequence
  Description of Artificial Sequence: Synthetic oligonucleotide
  Sense strand starting at position 151 of SEQ ID NO: 586489
ugaacuagaugccugugaa

SEQ ID NO: 721637 - RNA, 19 nt, Artificial Sequence
  Description of Artificial Sequence: Synthetic oligonucleotide
  Antisense strand to SEQ ID NO: 721636
uucacaggcaucuaguuca

SEQ ID NO: 721638 - RNA, 19 nt, Artificial Sequence
  Description of Artificial Sequence: Synthetic oligonucleotide
  Sense strand starting at position 152 of SEQ ID NO: 586489
gaacuagaugccugugaau

SEQ ID NO: 721639 - RNA, 19 nt, Artificial Sequence
  Description of Artificial Sequence: Synthetic oligonucleotide
  Antisense strand to SEQ ID NO: 721638
auucacaggcaucuaguuc

SEQ ID NO: 721640 - RNA, 19 nt, Artificial Sequence
  Description of Artificial Sequence: Synthetic oligonucleotide
  Sense strand starting at position 414 of SEQ ID NO: 586489
ccagaucauguaggacauu

SEQ ID NO: 721641 - RNA, 19 nt, Artificial Sequence
  Description of Artificial Sequence: Synthetic oligonucleotide
  Antisense strand to SEQ ID NO: 721640
aauguccuacaugaucugg

SEQ ID NO: 721642 - RNA, 19 nt, Artificial Sequence
  Description of Artificial Sequence: Synthetic oligonucleotide
  Sense strand starting at position 588 of SEQ ID NO: 586489
agaaguauauaugcggaua

SEQ ID NO: 721643 - RNA, 19 nt, Artificial Sequence
  Description of Artificial Sequence: Synthetic oligonucleotide
  Antisense strand to SEQ ID NO: 721642
uauccgcauauauacuucu

SEQ ID NO: 721644 - RNA, 19 nt, Artificial Sequence
  Description of Artificial Sequence: Synthetic oligonucleotide
  Sense strand starting at position 591 of SEQ ID NO: 586489
aguauauaugcggauauug

SEQ ID NO: 721645 - RNA, 19 nt, Artificial Sequence
  Description of Artificial Sequence: Synthetic oligonucleotide
  Antisense strand to SEQ ID NO: 721644
caauauccgcauauauacu

SEQ ID NO: 721646 - RNA, 19 nt, Artificial Sequence
  Description of Artificial Sequence: Synthetic oligonucleotide
  Sense strand starting at position 601 of SEQ ID NO: 586489
cggauauugcuuuaugauu

SEQ ID NO: 721647 - RNA, 19 nt, Artificial Sequence
  Description of Artificial Sequence: Synthetic oligonucleotide
  Antisense strand to SEQ ID NO: 721646
aaucauaaagcaauauccg

SEQ ID NO: 721648 - RNA, 19 nt, Artificial Sequence
  Description of Artificial Sequence: Synthetic oligonucleotide
  Sense strand starting at position 609 of SEQ ID NO: 586489
gcuuuaugauugguaaaga

SEQ ID NO: 721649 - RNA, 19 nt, Artificial Sequence
  Description of Artificial Sequence: Synthetic oligonucleotide
  Antisense strand to SEQ ID NO: 721648
ucuuuaccaaucauaaagc

SEQ ID NO: 721650 - RNA, 19 nt, Artificial Sequence
  Description of Artificial Sequence: Synthetic oligonucleotide
  Sense strand starting at position 673 of SEQ ID NO: 586489
ucuguugacuuucuaggaa

SEQ ID NO: 721651 - RNA, 19 nt, Artificial Sequence
  Description of Artificial Sequence: Synthetic oligonucleotide
  Antisense strand to SEQ ID NO: 721650
uuccuagaaagucaacaga

SEQ ID NO: 721652 - RNA, 19 nt, Artificial Sequence
  Description of Artificial Sequence: Synthetic oligonucleotide
  Sense strand starting at position 676 of SEQ ID NO: 586489
guugacuuucuaggaagaa

SEQ ID NO: 721653 - RNA, 19 nt, Artificial Sequence
  Description of Artificial Sequence: Synthetic oligonucleotide
  Antisense strand to SEQ ID NO: 721652
uucuuccuagaaagucaac

SEQ ID NO: 721654 - RNA, 19 nt, Artificial Sequence
  Description of Artificial Sequence: Synthetic oligonucleotide
  Sense strand starting at position 829 of SEQ ID NO: 586489
ccuuacaucccugguggaa

SEQ ID NO: 721655 - RNA, 19 nt, Artificial Sequence
  Description of Artificial Sequence: Synthetic oligonucleotide
  Antisense strand to SEQ ID NO: 721654
uuccaccagggauguaagg

SEQ ID NO: 721656 - RNA, 19 nt, Artificial Sequence
  Description of Artificial Sequence: Synthetic oligonucleotide
  Sense strand starting at position 1142 of SEQ ID NO: 586489
agaagcaucuugccaaaua

SEQ ID NO: 721657 - RNA, 19 nt, Artificial Sequence
  Description of Artificial Sequence: Synthetic oligonucleotide
  Antisense strand to SEQ ID NO: 721656
uauuuggcaagaugcuucu

SEQ ID NO: 721658 - RNA, 19 nt, Artificial Sequence
  Description of Artificial Sequence: Synthetic oligonucleotide
  Sense strand starting at position 1686 of SEQ ID NO: 586489
gagaccugcccuugaaaga

SEQ ID NO: 721659 - RNA, 19 nt, Artificial Sequence
  Description of Artificial Sequence: Synthetic oligonucleotide
  Antisense strand to SEQ ID NO: 721658
ucuuucaagggcaggucuc

SEQ ID NO: 721660 - RNA, 19 nt, Artificial Sequence
  Description of Artificial Sequence: Synthetic oligonucleotide
  Sense strand starting at position 1752 of SEQ ID NO: 586489
gccuuccugagucagaaga

SEQ ID NO: 721661 - RNA, 19 nt, Artificial Sequence
  Description of Artificial Sequence: Synthetic oligonucleotide
  Antisense strand to SEQ ID NO: 721660
ucuucugacucaggaaggc

SEQ ID NO: 721662 - RNA, 19 nt, Artificial Sequence
  Description of Artificial Sequence: Synthetic oligonucleotide
  Sense strand starting at position 1814 of SEQ ID NO: 586489
gauaccaguggugggauua

SEQ ID NO: 721663 - RNA, 19 nt, Artificial Sequence
  Description of Artificial Sequence: Synthetic oligonucleotide
  Antisense strand to SEQ ID NO: 721662
uaaucccaccacugguauc

SEQ ID NO: 721664 - RNA, 19 nt, Artificial Sequence
  Description of Artificial Sequence: Synthetic oligonucleotide
  Sense strand starting at position 1815 of SEQ ID NO: 586489
auaccaguggugggauuau

SEQ ID NO: 721665 - RNA, 19 nt, Artificial Sequence
  Description of Artificial Sequence: Synthetic oligonucleotide
  Antisense strand to SEQ ID NO: 721664
auaaucccaccacugguau

SEQ ID NO: 721666 - RNA, 19 nt, Artificial Sequence
  Description of Artificial Sequence: Synthetic oligonucleotide
  Sense strand starting at position 1908 of SEQ ID NO: 586489
aggagugacuuucccugau

SEQ ID NO: 721667 - RNA, 19 nt, Artificial Sequence
  Description of Artificial Sequence: Synthetic oligonucleotide
  Antisense strand to SEQ ID NO: 721666
aucagggaaagucacuccu

SEQ ID NO: 721668 - RNA, 19 nt, Artificial Sequence
  Description of Artificial Sequence: Synthetic oligonucleotide
  Sense strand starting at position 1912 of SEQ ID NO: 586489
gugacuuucccugaucucu

SEQ ID NO: 721669 - RNA, 19 nt, Artificial Sequence
  Description of Artificial Sequence: Synthetic oligonucleotide
  Antisense strand to SEQ ID NO: 721668
agagaucagggaaagucac

SEQ ID NO: 721670 - RNA, 19 nt, Artificial Sequence
  Description of Artificial Sequence: Synthetic oligonucleotide
  Sense strand starting at position 1956 of SEQ ID NO: 586489
agggaacuucuaugccuca

SEQ ID NO: 721671 - RNA, 19 nt, Artificial Sequence
  Description of Artificial Sequence: Synthetic oligonucleotide
  Antisense strand to SEQ ID NO: 721670
ugaggcauagaaguucccu

SEQ ID NO: 721672 - RNA, 19 nt, Artificial Sequence
  Description of Artificial Sequence: Synthetic oligonucleotide
  Sense strand starting at position 2026 of SEQ ID NO: 586489
uuaauaguuucucucagga

SEQ ID NO: 721673 - RNA, 19 nt, Artificial Sequence
  Description of Artificial Sequence: Synthetic oligonucleotide
  Antisense strand to SEQ ID NO: 721672
uccugagagaaacuauuaa

SEQ ID NO: 721674 - RNA, 19 nt, Artificial Sequence
  Description of Artificial Sequence: Synthetic oligonucleotide
  Sense strand starting at position 2063 of SEQ ID NO: 586489
accucuaaggcaugaauca

SEQ ID NO: 721675 - RNA, 19 nt, Artificial Sequence
  Description of Artificial Sequence: Synthetic oligonucleotide
  Antisense strand to SEQ ID NO: 721674
ugauucaugccuuagaggu

SEQ ID NO: 721676 - RNA, 19 nt, Artificial Sequence
  Description of Artificial Sequence: Synthetic oligonucleotide
  Sense strand starting at position 2064 of SEQ ID NO: 586489
ccucuaaggcaugaaucau

SEQ ID NO: 721677 - RNA, 19 nt, Artificial Sequence
  Description of Artificial Sequence: Synthetic oligonucleotide
  Antisense strand to SEQ ID NO: 721676
augauucaugccuuagagg

SEQ ID NO: 721678 - RNA, 19 nt, Artificial Sequence
  Description of Artificial Sequence: Synthetic oligonucleotide
  Sense strand starting at position 2070 of SEQ ID NO: 586489
aggcaugaaucauugguaa

SEQ ID NO: 721679 - RNA, 19 nt, Artificial Sequence
  Description of Artificial Sequence: Synthetic oligonucleotide
  Antisense strand to SEQ ID NO: 721678
uuaccaaugauucaugccu

SEQ ID NO: 721680 - RNA, 19 nt, Artificial Sequence
  Description of Artificial Sequence: Synthetic oligonucleotide
  Sense strand starting at position 2337 of SEQ ID NO: 586489
augauauuguuaccacaug

SEQ ID NO: 721681 - RNA, 19 nt, Artificial Sequence
  Description of Artificial Sequence: Synthetic oligonucleotide
  Antisense strand to SEQ ID NO: 721680
caugugguaacaauaucau

SEQ ID NO: 721682 - RNA, 19 nt, Artificial Sequence
  Description of Artificial Sequence: Synthetic oligonucleotide
  Sense strand starting at position 2835 of SEQ ID NO: 586489
gguguaacaugauuaauuc

SEQ ID NO: 721683 - RNA, 19 nt, Artificial Sequence
  Description of Artificial Sequence: Synthetic oligonucleotide
  Antisense strand to SEQ ID NO: 721682
gaauuaaucauguuacacc

SEQ ID NO: 721684 - RNA, 19 nt, Artificial Sequence
  Description of Artificial Sequence: Synthetic oligonucleotide
  Sense strand starting at position 2836 of SEQ ID NO: 586489
guguaacaugauuaauucu

SEQ ID NO: 721685 - RNA, 19 nt, Artificial Sequence
  Description of Artificial Sequence: Synthetic oligonucleotide
  Antisense strand to SEQ ID NO: 721684
agaauuaaucauguuacac

SEQ ID NO: 721686 - RNA, 19 nt, Artificial Sequence
  Description of Artificial Sequence: Synthetic oligonucleotide
  Sense strand starting at position 3200 of SEQ ID NO: 586489
ugccuaaguguuuagaaag

SEQ ID NO: 721687 - RNA, 19 nt, Artificial Sequence
  Description of Artificial Sequence: Synthetic oligonucleotide
  Antisense strand to SEQ ID NO: 721686
cuuucuaaacacuuaggca

SEQ ID NO: 721688 - RNA, 19 nt, Artificial Sequence
  Description of Artificial Sequence: Synthetic oligonucleotide
  Sense strand starting at position 3396 of SEQ ID NO: 586489
gguaaucuggccuaaucua

SEQ ID NO: 721689 - RNA, 19 nt, Artificial Sequence
  Description of Artificial Sequence: Synthetic oligonucleotide
  Antisense strand to SEQ ID NO: 721688
uagauuaggccagauuacc

SEQ ID NO: 721690 - RNA, 19 nt, Artificial Sequence
  Description of Artificial Sequence: Synthetic oligonucleotide
  Sense strand starting at position 3404 of SEQ ID NO: 586489
ggccuaaucuaauugauac

SEQ ID NO: 721691 - RNA, 19 nt, Artificial Sequence
  Description of Artificial Sequence: Synthetic oligonucleotide
  Antisense strand to SEQ ID NO: 721690
guaucaauuagauuaggcc

SEQ ID NO: 721692 - RNA, 19 nt, Artificial Sequence
  Description of Artificial Sequence: Synthetic oligonucleotide
  Sense strand starting at position 3524 of SEQ ID NO: 586489
uugugaacuuaaguaugga

SEQ ID NO: 721693 - RNA, 19 nt, Artificial Sequence
  Description of Artificial Sequence: Synthetic oligonucleotide
  Antisense strand to SEQ ID NO: 721692
uccauacuuaaguucacaa

SEQ ID NO: 721694 - RNA, 19 nt, Artificial Sequence
  Description of Artificial Sequence: Synthetic oligonucleotide
  Sense strand starting at position 3552 of SEQ ID NO: 586489
gauugaaaucaagguggcu

SEQ ID NO: 721695 - RNA, 19 nt, Artificial Sequence
  Description of Artificial Sequence: Synthetic oligonucleotide
  Antisense strand to SEQ ID NO: 721694
agccaccuugauuucaauc

SEQ ID NO: 721696 - RNA, 19 nt, Artificial Sequence
  Description of Artificial Sequence: Synthetic oligonucleotide
  Sense strand starting at position 3555 of SEQ ID NO: 586489
ugaaaucaagguggcuuua

SEQ ID NO: 721697 - RNA, 19 nt, Artificial Sequence
  Description of Artificial Sequence: Synthetic oligonucleotide
  Antisense strand to SEQ ID NO: 721696
uaaagccaccuugauuuca

SEQ ID NO: 721698 - RNA, 19 nt, Artificial Sequence
  Description of Artificial Sequence: Synthetic oligonucleotide
  Sense strand starting at position 3565 of SEQ ID NO: 586489
guggcuuuacuccagagaa

SEQ ID NO: 721699 - RNA, 19 nt, Artificial Sequence
  Description of Artificial Sequence: Synthetic oligonucleotide
  Antisense strand to SEQ ID NO: 721698
uucucuggaguaaagccac

SEQ ID NO: 721700 - RNA, 19 nt, Artificial Sequence
  Description of Artificial Sequence: Synthetic oligonucleotide
  Sense strand starting at position 3669 of SEQ ID NO: 586489
uggcuuaauccagaaauuc

SEQ ID NO: 721701 - RNA, 19 nt, Artificial Sequence
  Description of Artificial Sequence: Synthetic oligonucleotide
  Antisense strand to SEQ ID NO: 721700
gaauuucuggauuaagcca

SEQ ID NO: 721702 - RNA, 19 nt, Artificial Sequence
  Description of Artificial Sequence: Synthetic oligonucleotide
  Sense strand starting at position 3734 of SEQ ID NO: 586489
gagaguauggcugagagcu

SEQ ID NO: 721703 - RNA, 19 nt, Artificial Sequence
  Description of Artificial Sequence: Synthetic oligonucleotide
  Antisense strand to SEQ ID NO: 721702
agcucucagccauacucuc

SEQ ID NO: 721704 - RNA, 19 nt, Artificial Sequence
  Description of Artificial Sequence: Synthetic oligonucleotide
  Sense strand starting at position 3926 of SEQ ID NO: 586489
ggaggacuucucuaugcua

SEQ ID NO: 721705 - RNA, 19 nt, Artificial Sequence
  Description of Artificial Sequence: Synthetic oligonucleotide
  Antisense strand to SEQ ID NO: 721704
uagcauagagaaguccucc

SEQ ID NO: 721706 - RNA, 19 nt, Artificial Sequence
  Description of Artificial Sequence: Synthetic oligonucleotide
  Sense strand starting at position 3929 of SEQ ID NO: 586489
ggacuucucuaugcuaaca

SEQ ID NO: 721707 - RNA, 19 nt, Artificial Sequence
  Description of Artificial Sequence: Synthetic oligonucleotide
  Antisense strand to SEQ ID NO: 721706
uguuagcauagagaagucc

SEQ ID NO: 721708 - RNA, 19 nt, Artificial Sequence
  Description of Artificial Sequence: Synthetic oligonucleotide
  Sense strand starting at position 93 of SEQ ID NO: 586490
ugcaaucagcaguaugaau

SEQ ID NO: 721709 - RNA, 19 nt, Artificial Sequence
  Description of Artificial Sequence: Synthetic oligonucleotide
  Antisense strand to SEQ ID NO: 721708
auucauacugcugauugca

SEQ ID NO: 721710 - RNA, 19 nt, Artificial Sequence
  Description of Artificial Sequence: Synthetic oligonucleotide
  Sense strand starting at position 116 of SEQ ID NO: 586490
cccaguucuguuggacaaa

SEQ ID NO: 721711 - RNA, 19 nt, Artificial Sequence
  Description of Artificial Sequence: Synthetic oligonucleotide
  Antisense strand to SEQ ID NO: 721710
uuuguccaacagaacuggg

SEQ ID NO: 721712 - RNA, 19 nt, Artificial Sequence
  Description of Artificial Sequence: Synthetic oligonucleotide
  Sense strand starting at position 337 of SEQ ID NO: 586490
uuugaaggcuguuuaugaa

SEQ ID NO: 721713 - RNA, 19 nt, Artificial Sequence
  Description of Artificial Sequence: Synthetic oligonucleotide
  Antisense strand to SEQ ID NO: 721712
uucauaaacagccuucaaa

SEQ ID NO: 721714 - RNA, 19 nt, Artificial Sequence
  Description of Artificial Sequence: Synthetic oligonucleotide
  Sense strand starting at position 346 of SEQ ID NO: 586490
uguuuaugaaauuguggaa

SEQ ID NO: 721715 - RNA, 19 nt, Artificial Sequence
  Description of Artificial Sequence: Synthetic oligonucleotide
  Antisense strand to SEQ ID NO: 721714
uuccacaauuucauaaaca

SEQ ID NO: 721716 - RNA, 19 nt, Artificial Sequence
  Description of Artificial Sequence: Synthetic oligonucleotide
  Sense strand starting at position 423 of SEQ ID NO: 586490
ugauguaaugucugacauu

SEQ ID NO: 721717 - RNA, 19 nt, Artificial Sequence
  Description of Artificial Sequence: Synthetic oligonucleotide
  Antisense strand to SEQ ID NO: 721716
aaugucagacauuacauca

SEQ ID NO: 721718 - RNA, 19 nt, Artificial Sequence
  Description of Artificial Sequence: Synthetic oligonucleotide
  Sense strand starting at position 456 of SEQ ID NO: 586490
cugugauagaguugagaau

SEQ ID NO: 721719 - RNA, 19 nt, Artificial Sequence
  Description of Artificial Sequence: Synthetic oligonucleotide
  Antisense strand to SEQ ID NO: 721718
auucucaacucuaucacag

SEQ ID NO: 721720 - RNA, 19 nt, Artificial Sequence
  Description of Artificial Sequence: Synthetic oligonucleotide
  Sense strand starting at position 505 of SEQ ID NO: 586490
aauugauaacugugagauu

SEQ ID NO: 721721 - RNA, 19 nt, Artificial Sequence
  Description of Artificial Sequence: Synthetic oligonucleotide
  Antisense strand to SEQ ID NO: 721720
aaucucacaguuaucaauu

SEQ ID NO: 721722 - RNA, 19 nt, Artificial Sequence
  Description of Artificial Sequence: Synthetic oligonucleotide
  Sense strand starting at position 506 of SEQ ID NO: 586490
auugauaacugugagauuu

SEQ ID NO: 721723 - RNA, 19 nt, Artificial Sequence
  Description of Artificial Sequence: Synthetic oligonucleotide
  Antisense strand to SEQ ID NO: 721722
aaaucucacaguuaucaau

SEQ ID NO: 721724 - RNA, 19 nt, Artificial Sequence
  Description of Artificial Sequence: Synthetic oligonucleotide
  Sense strand starting at position 885 of SEQ ID NO: 586490
cuacucucaggccaugauu

SEQ ID NO: 721725 - RNA, 19 nt, Artificial Sequence
  Description of Artificial Sequence: Synthetic oligonucleotide
  Antisense strand to SEQ ID NO: 721724
aaucauggccugagaguag

SEQ ID NO: 721726 - RNA, 19 nt, Artificial Sequence
  Description of Artificial Sequence: Synthetic oligonucleotide
  Sense strand starting at position 888 of SEQ ID NO: 586490
cucucaggccaugauucua

SEQ ID NO: 721727 - RNA, 19 nt, Artificial Sequence
  Description of Artificial Sequence: Synthetic oligonucleotide
  Antisense strand to SEQ ID NO: 721726
uagaaucauggccugagag

SEQ ID NO: 721728 - RNA, 19 nt, Artificial Sequence
  Description of Artificial Sequence: Synthetic oligonucleotide
  Sense strand starting at position 1335 of SEQ ID NO: 586490
uagagugauuucuauaaag

SEQ ID NO: 721729 - RNA, 19 nt, Artificial Sequence
  Description of Artificial Sequence: Synthetic oligonucleotide
  Antisense strand to SEQ ID NO: 721728
cuuuauagaaaucacucua

SEQ ID NO: 721730 - RNA, 19 nt, Artificial Sequence
  Description of Artificial Sequence: Synthetic oligonucleotide
  Sense strand starting at position 1465 of SEQ ID NO: 586490
ucuaguguuccuccgccau

SEQ ID NO: 721731 - RNA, 19 nt, Artificial Sequence
  Description of Artificial Sequence: Synthetic oligonucleotide
  Antisense strand to SEQ ID NO: 721730
auggcggaggaacacuaga

SEQ ID NO: 721732 - RNA, 19 nt, Artificial Sequence
  Description of Artificial Sequence: Synthetic oligonucleotide
  Sense strand starting at position 1480 of SEQ ID NO: 586490
ccaugagugaucuggguac

SEQ ID NO: 721733 - RNA, 19 nt, Artificial Sequence
  Description of Artificial Sequence: Synthetic oligonucleotide
  Antisense strand to SEQ ID NO: 721732
guacccagaucacucaugg

SEQ ID NO: 721734 - RNA, 19 nt, Artificial Sequence
  Description of Artificial Sequence: Synthetic oligonucleotide
  Sense strand starting at position 1597 of SEQ ID NO: 586490
uuacaaaucugucuuagga

SEQ ID NO: 721735 - RNA, 19 nt, Artificial Sequence
  Description of Artificial Sequence: Synthetic oligonucleotide
  Antisense strand to SEQ ID NO: 721734
uccuaagacagauuuguaa

SEQ ID NO: 721736 - RNA, 19 nt, Artificial Sequence
  Description of Artificial Sequence: Synthetic oligonucleotide
  Sense strand starting at position 1628 of SEQ ID NO: 586490
uuaugaagguuaucaggca

SEQ ID NO: 721737 - RNA, 19 nt, Artificial Sequence
  Description of Artificial Sequence: Synthetic oligonucleotide
  Antisense strand to SEQ ID NO: 721736
ugccugauaaccuucauaa

SEQ ID NO: 721738 - RNA, 19 nt, Artificial Sequence
  Description of Artificial Sequence: Synthetic oligonucleotide
  Sense strand starting at position 2095 of SEQ ID NO: 586490
ccauaaucuggugauugcu

SEQ ID NO: 721739 - RNA, 19 nt, Artificial Sequence
  Description of Artificial Sequence: Synthetic oligonucleotide
  Antisense strand to SEQ ID NO: 721738
agcaaucaccagauuaugg

SEQ ID NO: 721740 - RNA, 19 nt, Artificial Sequence
  Description of Artificial Sequence: Synthetic oligonucleotide
  Sense strand starting at position 2192 of SEQ ID NO: 586490
guuauagugauggaugcaa

SEQ ID NO: 721741 - RNA, 19 nt, Artificial Sequence
  Description of Artificial Sequence: Synthetic oligonucleotide
  Antisense strand to SEQ ID NO: 721740
uugcauccaucacuauaac

SEQ ID NO: 721742 - RNA, 19 nt, Artificial Sequence
  Description of Artificial Sequence: Synthetic oligonucleotide
  Sense strand starting at position 2335 of SEQ ID NO: 586490
gccauuuccaagcguagag

SEQ ID NO: 721743 - RNA, 19 nt, Artificial Sequence
  Description of Artificial Sequence: Synthetic oligonucleotide
  Antisense strand to SEQ ID NO: 721742
cucuacgcuuggaaauggc

SEQ ID NO: 721744 - RNA, 19 nt, Artificial Sequence
  Description of Artificial Sequence: Synthetic oligonucleotide
  Sense strand starting at position 2402 of SEQ ID NO: 586490
ucaggaaggccucaaguua

SEQ ID NO: 721745 - RNA, 19 nt, Artificial Sequence
  Description of Artificial Sequence: Synthetic oligonucleotide
  Antisense strand to SEQ ID NO: 721744
uaacuugaggccuuccuga

SEQ ID NO: 721746 - RNA, 19 nt, Artificial Sequence
  Description of Artificial Sequence: Synthetic oligonucleotide
  Sense strand starting at position 2764 of SEQ ID NO: 586490
cacgguugaccagauauuc

SEQ ID NO: 721747 - RNA, 19 nt, Artificial Sequence
  Description of Artificial Sequence: Synthetic oligonucleotide
  Antisense strand to SEQ ID NO: 721746
gaauaucuggucaaccgug

SEQ ID NO: 721748 - RNA, 19 nt, Artificial Sequence
  Description of Artificial Sequence: Synthetic oligonucleotide
  Sense strand starting at position 2797 of SEQ ID NO: 586490
agaauacuauguuuagagu

SEQ ID NO: 721749 - RNA, 19 nt, Artificial Sequence
  Description of Artificial Sequence: Synthetic oligonucleotide
  Antisense strand to SEQ ID NO: 721748
acucuaaacauaguauucu

SEQ ID NO: 721750 - RNA, 19 nt, Artificial Sequence
  Description of Artificial Sequence: Synthetic oligonucleotide
  Sense strand starting at position 2798 of SEQ ID NO: 586490
gaauacuauguuuagaguu

SEQ ID NO: 721751 - RNA, 19 nt, Artificial Sequence
  Description of Artificial Sequence: Synthetic oligonucleotide
  Antisense strand to SEQ ID NO: 721750
aacucuaaacauaguauuc

SEQ ID NO: 721752 - RNA, 19 nt, Artificial Sequence
  Description of Artificial Sequence: Synthetic oligonucleotide
  Sense strand starting at position 2974 of SEQ ID NO: 586490
cgcuaaguaggauauaucu

SEQ ID NO: 721753 - RNA, 19 nt, Artificial Sequence
  Description of Artificial Sequence: Synthetic oligonucleotide
  Antisense strand to SEQ ID NO: 721752
agauauauccuacuuagcg

SEQ ID NO: 721754 - RNA, 19 nt, Artificial Sequence
  Description of Artificial Sequence: Synthetic oligonucleotide
  Sense strand starting at position 2982 of SEQ ID NO: 586490
aggauauaucugcaucuuc

SEQ ID NO: 721755 - RNA, 19 nt, Artificial Sequence
  Description of Artificial Sequence: Synthetic oligonucleotide
  Antisense strand to SEQ ID NO: 721754
gaagaugcagauauauccu

SEQ ID NO: 721756 - RNA, 19 nt, Artificial Sequence
  Description of Artificial Sequence: Synthetic oligonucleotide
  Sense strand starting at position 3107 of SEQ ID NO: 586490
gucugaaaccaguauccau

SEQ ID NO: 721757 - RNA, 19 nt, Artificial Sequence
  Description of Artificial Sequence: Synthetic oligonucleotide
  Antisense strand to SEQ ID NO: 721756
auggauacugguuucagac

SEQ ID NO: 721758 - RNA, 19 nt, Artificial Sequence
  Description of Artificial Sequence: Synthetic oligonucleotide
  Sense strand starting at position 3122 of SEQ ID NO: 586490
ccaucaauacuuggucgaa

SEQ ID NO: 721759 - RNA, 19 nt, Artificial Sequence
  Description of Artificial Sequence: Synthetic oligonucleotide
  Antisense strand to SEQ ID NO: 721758
uucgaccaaguauugaugg

SEQ ID NO: 721760 - RNA, 19 nt, Artificial Sequence
  Description of Artificial Sequence: Synthetic oligonucleotide
  Sense strand starting at position 3123 of SEQ ID NO: 586490
caucaauacuuggucgaag

SEQ ID NO: 721761 - RNA, 19 nt, Artificial Sequence
  Description of Artificial Sequence: Synthetic oligonucleotide
  Antisense strand to SEQ ID NO: 721760
cuucgaccaaguauugaug

SEQ ID NO: 721762 - RNA, 19 nt, Artificial Sequence
  Description of Artificial Sequence: Synthetic oligonucleotide
  Sense strand starting at position 3124 of SEQ ID NO: 586490
aucaauacuuggucgaaga

SEQ ID NO: 721763 - RNA, 19 nt, Artificial Sequence
  Description of Artificial Sequence: Synthetic oligonucleotide
  Antisense strand to SEQ ID NO: 721762
ucuucgaccaaguauugau

SEQ ID NO: 721764 - RNA, 19 nt, Artificial Sequence
  Description of Artificial Sequence: Synthetic oligonucleotide
  Sense strand starting at position 3125 of SEQ ID NO: 586490
ucaauacuuggucgaagag

SEQ ID NO: 721765 - RNA, 19 nt, Artificial Sequence
  Description of Artificial Sequence: Synthetic oligonucleotide
  Antisense strand to SEQ ID NO: 721764
cucuucgaccaaguauuga

SEQ ID NO: 721766 - RNA, 19 nt, Artificial Sequence
  Description of Artificial Sequence: Synthetic oligonucleotide
  Sense strand starting at position 3187 of SEQ ID NO: 586490
uaguauguuccgccaacgu

SEQ ID NO: 721767 - RNA, 19 nt, Artificial Sequence
  Description of Artificial Sequence: Synthetic oligonucleotide
  Antisense strand to SEQ ID NO: 721766
acguuggcggaacauacua

SEQ ID NO: 721768 - RNA, 19 nt, Artificial Sequence
  Description of Artificial Sequence: Synthetic oligonucleotide
  Sense strand starting at position 3214 of SEQ ID NO: 586490
acgagcuccaaguagaaau

SEQ ID NO: 721769 - RNA, 19 nt, Artificial Sequence
  Description of Artificial Sequence: Synthetic oligonucleotide
  Antisense strand to SEQ ID NO: 721768
auuucuacuuggagcucgu

SEQ ID NO: 721770 - RNA, 19 nt, Artificial Sequence
  Description of Artificial Sequence: Synthetic oligonucleotide
  Sense strand starting at position 3234 of SEQ ID NO: 586490
ggaagaggauuugacaagu

SEQ ID NO: 721771 - RNA, 19 nt, Artificial Sequence
  Description of Artificial Sequence: Synthetic oligonucleotide
  Antisense strand to SEQ ID NO: 721770
acuugucaaauccucuucc

SEQ ID NO: 721772 - RNA, 19 nt, Artificial Sequence
  Description of Artificial Sequence: Synthetic oligonucleotide
  Sense strand starting at position 3332 of SEQ ID NO: 586490
uaaagaacgccugaaaguu

SEQ ID NO: 721773 - RNA, 19 nt, Artificial Sequence
  Description of Artificial Sequence: Synthetic oligonucleotide
  Antisense strand to SEQ ID NO: 721772
aacuuucaggcguucuuua

SEQ ID NO: 721774 - RNA, 19 nt, Artificial Sequence
  Description of Artificial Sequence: Synthetic oligonucleotide
  Sense strand starting at position 3383 of SEQ ID NO: 586490
ccggcaucccaauauuaca

SEQ ID NO: 721775 - RNA, 19 nt, Artificial Sequence
  Description of Artificial Sequence: Synthetic oligonucleotide
  Antisense strand to SEQ ID NO: 721774
uguaauauugggaugccgg

SEQ ID NO: 721776 - RNA, 19 nt, Artificial Sequence
  Description of Artificial Sequence: Synthetic oligonucleotide
  Sense strand starting at position 3666 of SEQ ID NO: 586490
uugguuaagcauggacaga

SEQ ID NO: 721777 - RNA, 19 nt, Artificial Sequence
  Description of Artificial Sequence: Synthetic oligonucleotide
  Antisense strand to SEQ ID NO: 721776
ucuguccaugcuuaaccaa

SEQ ID NO: 721778 - RNA, 19 nt, Artificial Sequence
  Description of Artificial Sequence: Synthetic oligonucleotide
  Sense strand starting at position 3692 of SEQ ID NO: 586490
ggcuguguaugauuuccca

SEQ ID NO: 721779 - RNA, 19 nt, Artificial Sequence
  Description of Artificial Sequence: Synthetic oligonucleotide
  Antisense strand to SEQ ID NO: 721778
ugggaaaucauacacagcc

SEQ ID NO: 721780 - RNA, 19 nt, Artificial Sequence
  Description of Artificial Sequence: Synthetic oligonucleotide
  Sense strand starting at position 3696 of SEQ ID NO: 586490
guguaugauuucccacagu

SEQ ID NO: 721781 - RNA, 19 nt, Artificial Sequence
  Description of Artificial Sequence: Synthetic oligonucleotide
  Antisense strand to SEQ ID NO: 721780
acugugggaaaucauacac

SEQ ID NO: 721782 - RNA, 19 nt, Artificial Sequence
  Description of Artificial Sequence: Synthetic oligonucleotide
  Sense strand starting at position 3896 of SEQ ID NO: 586490
cuuauagcccauuggauau

SEQ ID NO: 721783 - RNA, 19 nt, Artificial Sequence
  Description of Artificial Sequence: Synthetic oligonucleotide
  Antisense strand to SEQ ID NO: 721782
auauccaaugggcuauaag

SEQ ID NO: 721784 - RNA, 19 nt, Artificial Sequence
  Description of Artificial Sequence: Synthetic oligonucleotide
  Sense strand starting at position 3960 of SEQ ID NO: 586490
agguguagacucugggauu

SEQ ID NO: 721785 - RNA, 19 nt, Artificial Sequence
  Description of Artificial Sequence: Synthetic oligonucleotide
  Antisense strand to SEQ ID NO: 721784
aaucccagagucuacaccu

SEQ ID NO: 721786 - RNA, 19 nt, Artificial Sequence
  Description of Artificial Sequence: Synthetic oligonucleotide
  Sense strand starting at position 3982 of SEQ ID NO: 586490
gcaagugugcuugucucca

SEQ ID NO: 721787 - RNA, 19 nt, Artificial Sequence
  Description of Artificial Sequence: Synthetic oligonucleotide
  Antisense strand to SEQ ID NO: 721786
uggagacaagcacacuugc

SEQ ID NO: 721788 - RNA, 19 nt, Artificial Sequence
  Description of Artificial Sequence: Synthetic oligonucleotide
  Sense strand starting at position 39 of SEQ ID NO: 586491
gcagguagaucccucgaga

SEQ ID NO: 721789 - RNA, 19 nt, Artificial Sequence
  Description of Artificial Sequence: Synthetic oligonucleotide
  Antisense strand to SEQ ID NO: 721788
ucucgagggaucuaccugc

SEQ ID NO: 721790 - RNA, 19 nt, Artificial Sequence
  Description of Artificial Sequence: Synthetic oligonucleotide
  Sense strand starting at position 42 of SEQ ID NO: 586491
gguagaucccucgagauca

SEQ ID NO: 721791 - RNA, 19 nt, Artificial Sequence
  Description of Artificial Sequence: Synthetic oligonucleotide
  Antisense strand to SEQ ID NO: 721790
ugaucucgagggaucuacc

SEQ ID NO: 721792 - RNA, 19 nt, Artificial Sequence
  Description of Artificial Sequence: Synthetic oligonucleotide
  Sense strand starting at position 326 of SEQ ID NO: 586491
gugagaugucucuguaaau

SEQ ID NO: 721793 - RNA, 19 nt, Artificial Sequence
  Description of Artificial Sequence: Synthetic oligonucleotide
  Antisense strand to SEQ ID NO: 721792
auuuacagagacaucucac

SEQ ID NO: 721794 - RNA, 19 nt, Artificial Sequence
  Description of Artificial Sequence: Synthetic oligonucleotide
  Sense strand starting at position 327 of SEQ ID NO: 586491
ugagaugucucuguaaauu

SEQ ID NO: 721795 - RNA, 19 nt, Artificial Sequence
  Description of Artificial Sequence: Synthetic oligonucleotide
  Antisense strand to SEQ ID NO: 721794
aauuuacagagacaucuca

SEQ ID NO: 721796 - RNA, 19 nt, Artificial Sequence
  Description of Artificial Sequence: Synthetic oligonucleotide
  Sense strand starting at position 401 of SEQ ID NO: 586491
cucccacaggucugaagaa

SEQ ID NO: 721797 - RNA, 19 nt, Artificial Sequence
  Description of Artificial Sequence: Synthetic oligonucleotide
  Antisense strand to SEQ ID NO: 721796
uucuucagaccugugggag

SEQ ID NO: 721798 - RNA, 19 nt, Artificial Sequence
  Description of Artificial Sequence: Synthetic oligonucleotide
  Sense strand starting at position 478 of SEQ ID NO: 586491
ugaccaaaccaaugagucu

SEQ ID NO: 721799 - RNA, 19 nt, Artificial Sequence
  Description of Artificial Sequence: Synthetic oligonucleotide
  Antisense strand to SEQ ID NO: 721798
agacucauugguuugguca

SEQ ID NO: 721800 - RNA, 19 nt, Artificial Sequence
  Description of Artificial Sequence: Synthetic oligonucleotide
  Sense strand starting at position 487 of SEQ ID NO: 586491
caaugagucuuggcuggac

SEQ ID NO: 721801 - RNA, 19 nt, Artificial Sequence
  Description of Artificial Sequence: Synthetic oligonucleotide
  Antisense strand to SEQ ID NO: 721800
guccagccaagacucauug

SEQ ID NO: 721802 - RNA, 19 nt, Artificial Sequence
  Description of Artificial Sequence: Synthetic oligonucleotide
  Sense strand starting at position 752 of SEQ ID NO: 586491
aagagagcguucuuccuau

SEQ ID NO: 721803 - RNA, 19 nt, Artificial Sequence
  Description of Artificial Sequence: Synthetic oligonucleotide
  Antisense strand to SEQ ID NO: 721802
auaggaagaacgcucucuu

SEQ ID NO: 721804 - RNA, 19 nt, Artificial Sequence
  Description of Artificial Sequence: Synthetic oligonucleotide
  Sense strand starting at position 1012 of SEQ ID NO: 586491
ggaccagguuggcugaaau

SEQ ID NO: 721805 - RNA, 19 nt, Artificial Sequence
  Description of Artificial Sequence: Synthetic oligonucleotide
  Antisense strand to SEQ ID NO: 721804
auuucagccaaccuggucc

SEQ ID NO: 721806 - RNA, 19 nt, Artificial Sequence
  Description of Artificial Sequence: Synthetic oligonucleotide
  Sense strand starting at position 1023 of SEQ ID NO: 586491
gcugaaauguaggugaaau

SEQ ID NO: 721807 - RNA, 19 nt, Artificial Sequence
  Description of Artificial Sequence: Synthetic oligonucleotide
  Antisense strand to SEQ ID NO: 721806
auuucaccuacauuucagc

SEQ ID NO: 721808 - RNA, 19 nt, Artificial Sequence
  Description of Artificial Sequence: Synthetic oligonucleotide
  Sense strand starting at position 1024 of SEQ ID NO: 586491
cugaaauguaggugaaauc

SEQ ID NO: 721809 - RNA, 19 nt, Artificial Sequence
  Description of Artificial Sequence: Synthetic oligonucleotide
  Antisense strand to SEQ ID NO: 721808
gauuucaccuacauuucag

SEQ ID NO: 721810 - RNA, 19 nt, Artificial Sequence
  Description of Artificial Sequence: Synthetic oligonucleotide
  Sense strand starting at position 1354 of SEQ ID NO: 586491
ucucauagaugucugggaa

SEQ ID NO: 721811 - RNA, 19 nt, Artificial Sequence
  Description of Artificial Sequence: Synthetic oligonucleotide
  Antisense strand to SEQ ID NO: 721810
uucccagacaucuaugaga

SEQ ID NO: 721812 - RNA, 19 nt, Artificial Sequence
  Description of Artificial Sequence: Synthetic oligonucleotide
  Sense strand starting at position 1355 of SEQ ID NO: 586491
cucauagaugucugggaau

SEQ ID NO: 721813 - RNA, 19 nt, Artificial Sequence
  Description of Artificial Sequence: Synthetic oligonucleotide
  Antisense strand to SEQ ID NO: 721812
auucccagacaucuaugag

SEQ ID NO: 721814 - RNA, 19 nt, Artificial Sequence
  Description of Artificial Sequence: Synthetic oligonucleotide
  Sense strand starting at position 1357 of SEQ ID NO: 586491
cauagaugucugggaauau

SEQ ID NO: 721815 - RNA, 19 nt, Artificial Sequence
  Description of Artificial Sequence: Synthetic oligonucleotide
  Antisense strand to SEQ ID NO: 721814
auauucccagacaucuaug

SEQ ID NO: 721816 - RNA, 19 nt, Artificial Sequence
  Description of Artificial Sequence: Synthetic oligonucleotide
  Sense strand starting at position 1358 of SEQ ID NO: 586491
auagaugucugggaauaug

SEQ ID NO: 721817 - RNA, 19 nt, Artificial Sequence
  Description of Artificial Sequence: Synthetic oligonucleotide
  Antisense strand to SEQ ID NO: 721816
cauauucccagacaucuau

SEQ ID NO: 721818 - RNA, 19 nt, Artificial Sequence
  Description of Artificial Sequence: Synthetic oligonucleotide
  Sense strand starting at position 2189 of SEQ ID NO: 586491
guuccuguuccugagagga

SEQ ID NO: 721819 - RNA, 19 nt, Artificial Sequence
  Description of Artificial Sequence: Synthetic oligonucleotide
  Antisense strand to SEQ ID NO: 721818
uccucucaggaacaggaac

SEQ ID NO: 721820 - RNA, 19 nt, Artificial Sequence
  Description of Artificial Sequence: Synthetic oligonucleotide
  Sense strand starting at position 2367 of SEQ ID NO: 586491
gcugcuucucagggaauga

SEQ ID NO: 721821 - RNA, 19 nt, Artificial Sequence
  Description of Artificial Sequence: Synthetic oligonucleotide
  Antisense strand to SEQ ID NO: 721820
ucauucccugagaagcagc

SEQ ID NO: 721822 - RNA, 19 nt, Artificial Sequence
  Description of Artificial Sequence: Synthetic oligonucleotide
  Sense strand starting at position 2417 of SEQ ID NO: 586491
gcuagacuucgaugcuuuc

SEQ ID NO: 721823 - RNA, 19 nt, Artificial Sequence
  Description of Artificial Sequence: Synthetic oligonucleotide
  Antisense strand to SEQ ID NO: 721822
gaaagcaucgaagucuagc

SEQ ID NO: 721824 - RNA, 19 nt, Artificial Sequence
  Description of Artificial Sequence: Synthetic oligonucleotide
  Sense strand starting at position 2469 of SEQ ID NO: 586491
agaacauaguguccaaacu

SEQ ID NO: 721825 - RNA, 19 nt, Artificial Sequence
  Description of Artificial Sequence: Synthetic oligonucleotide
  Antisense strand to SEQ ID NO: 721824
aguuuggacacuauguucu

SEQ ID NO: 721826 - RNA, 19 nt, Artificial Sequence
  Description of Artificial Sequence: Synthetic oligonucleotide
  Sense strand starting at position 2539 of SEQ ID NO: 586491
aaauguuuacuaggguaaa

SEQ ID NO: 721827 - RNA, 19 nt, Artificial Sequence
  Description of Artificial Sequence: Synthetic oligonucleotide
  Antisense strand to SEQ ID NO: 721826
uuuacccuaguaaacauuu

SEQ ID NO: 721828 - RNA, 19 nt, Artificial Sequence
  Description of Artificial Sequence: Synthetic oligonucleotide
  Sense strand starting at position 2596 of SEQ ID NO: 586491
aaguguauagcccacagua

SEQ ID NO: 721829 - RNA, 19 nt, Artificial Sequence
  Description of Artificial Sequence: Synthetic oligonucleotide
  Antisense strand to SEQ ID NO: 721828
uacugugggcuauacacuu

SEQ ID NO: 721830 - RNA, 19 nt, Artificial Sequence
  Description of Artificial Sequence: Synthetic oligonucleotide
  Sense strand starting at position 2598 of SEQ ID NO: 586491
guguauagcccacaguaga

SEQ ID NO: 721831 - RNA, 19 nt, Artificial Sequence
  Description of Artificial Sequence: Synthetic oligonucleotide
  Antisense strand to SEQ ID NO: 721830
ucuacugugggcuauacac

SEQ ID NO: 721832 - RNA, 19 nt, Artificial Sequence
  Description of Artificial Sequence: Synthetic oligonucleotide
  Sense strand starting at position 2639 of SEQ ID NO: 586491
gccagaucugcaggacuuu

SEQ ID NO: 721833 - RNA, 19 nt, Artificial Sequence
  Description of Artificial Sequence: Synthetic oligonucleotide
  Antisense strand to SEQ ID NO: 721832
aaaguccugcagaucuggc

SEQ ID NO: 721834 - RNA, 19 nt, Artificial Sequence
  Description of Artificial Sequence: Synthetic oligonucleotide
  Sense strand starting at position 2718 of SEQ ID NO: 586491
ccggguaaccaccguucua

SEQ ID NO: 721835 - RNA, 19 nt, Artificial Sequence
  Description of Artificial Sequence: Synthetic oligonucleotide
  Antisense strand to SEQ ID NO: 721834
uagaacggugguuacccgg

SEQ ID NO: 721836 - RNA, 19 nt, Artificial Sequence
  Description of Artificial Sequence: Synthetic oligonucleotide
  Sense strand starting at position 3067 of SEQ ID NO: 586491
ggcaacgucagauacucau

SEQ ID NO: 721837 - RNA, 19 nt, Artificial Sequence
  Description of Artificial Sequence: Synthetic oligonucleotide
  Antisense strand to SEQ ID NO: 721836
augaguaucugacguugcc

SEQ ID NO: 721838 - RNA, 19 nt, Artificial Sequence
  Description of Artificial Sequence: Synthetic oligonucleotide
  Sense strand starting at position 3071 of SEQ ID NO: 586491
acgucagauacucauguga

SEQ ID NO: 721839 - RNA, 19 nt, Artificial Sequence
  Description of Artificial Sequence: Synthetic oligonucleotide
  Antisense strand to SEQ ID NO: 721838
ucacaugaguaucugacgu

SEQ ID NO: 721840 - RNA, 19 nt, Artificial Sequence
  Description of Artificial Sequence: Synthetic oligonucleotide
  Sense strand starting at position 3113 of SEQ ID NO: 586491
uccugagacugagcagaau

SEQ ID NO: 721841 - RNA, 19 nt, Artificial Sequence
  Description of Artificial Sequence: Synthetic oligonucleotide
  Antisense strand to SEQ ID NO: 721840
auucugcucagucucagga

SEQ ID NO: 721842 - RNA, 19 nt, Artificial Sequence
  Description of Artificial Sequence: Synthetic oligonucleotide
  Sense strand starting at position 3124 of SEQ ID NO: 586491
agcagaaugcccuagaggu

SEQ ID NO: 721843 - RNA, 19 nt, Artificial Sequence
  Description of Artificial Sequence: Synthetic oligonucleotide
  Antisense strand to SEQ ID NO: 721842
accucuagggcauucugcu

SEQ ID NO: 721844 - RNA, 19 nt, Artificial Sequence
  Description of Artificial Sequence: Synthetic oligonucleotide
  Sense strand starting at position 3221 of SEQ ID NO: 586491
gggacuggagcucaaguua

SEQ ID NO: 721845 - RNA, 19 nt, Artificial Sequence
  Description of Artificial Sequence: Synthetic oligonucleotide
  Antisense strand to SEQ ID NO: 721844
uaacuugagcuccaguccc

SEQ ID NO: 721846 - RNA, 19 nt, Artificial Sequence
  Description of Artificial Sequence: Synthetic oligonucleotide
  Sense strand starting at position 3335 of SEQ ID NO: 586491
auaugaagucucuacagua

SEQ ID NO: 721847 - RNA, 19 nt, Artificial Sequence
  Description of Artificial Sequence: Synthetic oligonucleotide
  Antisense strand to SEQ ID NO: 721846
uacuguagagacuucauau

SEQ ID NO: 721848 - RNA, 19 nt, Artificial Sequence
  Description of Artificial Sequence: Synthetic oligonucleotide
  Sense strand starting at position 3452 of SEQ ID NO: 586491
ugcucuaccuuguuaugaa

SEQ ID NO: 721849 - RNA, 19 nt, Artificial Sequence
  Description of Artificial Sequence: Synthetic oligonucleotide
  Antisense strand to SEQ ID NO: 721848
uucauaacaagguagagca

SEQ ID NO: 721850 - RNA, 19 nt, Artificial Sequence
  Description of Artificial Sequence: Synthetic oligonucleotide
  Sense strand starting at position 3461 of SEQ ID NO: 586491
uuguuaugaaccugaggga

SEQ ID NO: 721851 - RNA, 19 nt, Artificial Sequence
  Description of Artificial Sequence: Synthetic oligonucleotide
  Antisense strand to SEQ ID NO: 721850
ucccucagguucauaacaa

SEQ ID NO: 721852 - RNA, 19 nt, Artificial Sequence
  Description of Artificial Sequence: Synthetic oligonucleotide
  Sense strand starting at position 3474 of SEQ ID NO: 586491
gagggaaacccugguuaug

SEQ ID NO: 721853 - RNA, 19 nt, Artificial Sequence
  Description of Artificial Sequence: Synthetic oligonucleotide
  Antisense strand to SEQ ID NO: 721852
cauaaccaggguuucccuc

SEQ ID NO: 721854 - RNA, 19 nt, Artificial Sequence
  Description of Artificial Sequence: Synthetic oligonucleotide
  Sense strand starting at position 3476 of SEQ ID NO: 586491
gggaaacccugguuaugcu

SEQ ID NO: 721855 - RNA, 19 nt, Artificial Sequence
  Description of Artificial Sequence: Synthetic oligonucleotide
  Antisense strand to SEQ ID NO: 721854
agcauaaccaggguuuccc

SEQ ID NO: 721856 - RNA, 19 nt, Artificial Sequence
  Description of Artificial Sequence: Synthetic oligonucleotide
  Sense strand starting at position 3577 of SEQ ID NO: 586491
cuaccugucuccucauuga

SEQ ID NO: 721857 - RNA, 19 nt, Artificial Sequence
  Description of Artificial Sequence: Synthetic oligonucleotide
  Antisense strand to SEQ ID NO: 721856
ucaaugaggagacagguag

SEQ ID NO: 721858 - RNA, 19 nt, Artificial Sequence
  Description of Artificial Sequence: Synthetic oligonucleotide
  Sense strand starting at position 3581 of SEQ ID NO: 586491
cugucuccucauugaaaga

SEQ ID NO: 721859 - RNA, 19 nt, Artificial Sequence
  Description of Artificial Sequence: Synthetic oligonucleotide
  Antisense strand to SEQ ID NO: 721858
ucuuucaaugaggagacag

SEQ ID NO: 721860 - RNA, 19 nt, Artificial Sequence
  Description of Artificial Sequence: Synthetic oligonucleotide
  Sense strand starting at position 3810 of SEQ ID NO: 586491
cagggauugcucuaaguaa

SEQ ID NO: 721861 - RNA, 19 nt, Artificial Sequence
  Description of Artificial Sequence: Synthetic oligonucleotide
  Antisense strand to SEQ ID NO: 721860
uuacuuagagcaaucccug

SEQ ID NO: 721862 - RNA, 19 nt, Artificial Sequence
  Description of Artificial Sequence: Synthetic oligonucleotide
  Sense strand starting at position 3865 of SEQ ID NO: 586491
agucgauuauuugcugagu

SEQ ID NO: 721863 - RNA, 19 nt, Artificial Sequence
  Description of Artificial Sequence: Synthetic oligonucleotide
  Antisense strand to SEQ ID NO: 721862
acucagcaaauaaucgacu

SEQ ID NO: 721864 - RNA, 19 nt, Artificial Sequence
  Description of Artificial Sequence: Synthetic oligonucleotide
  Sense strand starting at position 3866 of SEQ ID NO: 586491
gucgauuauuugcugaguu

SEQ ID NO: 721865 - RNA, 19 nt, Artificial Sequence
  Description of Artificial Sequence: Synthetic oligonucleotide
  Antisense strand to SEQ ID NO: 721864
aacucagcaaauaaucgac

SEQ ID NO: 721866 - RNA, 19 nt, Artificial Sequence
  Description of Artificial Sequence: Synthetic oligonucleotide
  Sense strand starting at position 3964 of SEQ ID NO: 586491
ugguuuggcaccgaucuga

SEQ ID NO: 721867 - RNA, 19 nt, Artificial Sequence
  Description of Artificial Sequence: Synthetic oligonucleotide
  Antisense strand to SEQ ID NO: 721866
ucagaucggugccaaacca

SEQ ID NO: 721868 - RNA, 19 nt, Artificial Sequence
  Description of Artificial Sequence: Synthetic oligonucleotide
  Sense strand starting at position 68 of SEQ ID NO: 586492
acucgagaagacugauauu

SEQ ID NO: 721869 - RNA, 19 nt, Artificial Sequence
  Description of Artificial Sequence: Synthetic oligonucleotide
  Antisense strand to SEQ ID NO: 721868
aauaucagucuucucgagu

SEQ ID NO: 721870 - RNA, 19 nt, Artificial Sequence
  Description of Artificial Sequence: Synthetic oligonucleotide
  Sense strand starting at position 149 of SEQ ID NO: 586492
ucagcauaucagcaguaga

SEQ ID NO: 721871 - RNA, 19 nt, Artificial Sequence
  Description of Artificial Sequence: Synthetic oligonucleotide
  Antisense strand to SEQ ID NO: 721870
ucuacugcugauaugcuga

SEQ ID NO: 721872 - RNA, 19 nt, Artificial Sequence
  Description of Artificial Sequence: Synthetic oligonucleotide
  Sense strand starting at position 152 of SEQ ID NO: 586492
gcauaucagcaguagaacu

SEQ ID NO: 721873 - RNA, 19 nt, Artificial Sequence
  Description of Artificial Sequence: Synthetic oligonucleotide
  Antisense strand to SEQ ID NO: 721872
aguucuacugcugauaugc

SEQ ID NO: 721874 - RNA, 19 nt, Artificial Sequence
  Description of Artificial Sequence: Synthetic oligonucleotide
  Sense strand starting at position 231 of SEQ ID NO: 586492
gcaugaguugcugcaguuc

SEQ ID NO: 721875 - RNA, 19 nt, Artificial Sequence
  Description of Artificial Sequence: Synthetic oligonucleotide
  Antisense strand to SEQ ID NO: 721874
gaacugcagcaacucaugc

SEQ ID NO: 721876 - RNA, 19 nt, Artificial Sequence
  Description of Artificial Sequence: Synthetic oligonucleotide
  Sense strand starting at position 240 of SEQ ID NO: 586492
gcugcaguucuggagacaa

SEQ ID NO: 721877 - RNA, 19 nt, Artificial Sequence
  Description of Artificial Sequence: Synthetic oligonucleotide
  Antisense strand to SEQ ID NO: 721876
uugucuccagaacugcagc

SEQ ID NO: 721878 - RNA, 19 nt, Artificial Sequence
  Description of Artificial Sequence: Synthetic oligonucleotide
  Sense strand starting at position 242 of SEQ ID NO: 586492
ugcaguucuggagacaauu

SEQ ID NO: 721879 - RNA, 19 nt, Artificial Sequence
  Description of Artificial Sequence: Synthetic oligonucleotide
  Antisense strand to SEQ ID NO: 721878
aauugucuccagaacugca

SEQ ID NO: 721880 - RNA, 19 nt, Artificial Sequence
  Description of Artificial Sequence: Synthetic oligonucleotide
  Sense strand starting at position 315 of SEQ ID NO: 586492
cagagcuaucagugaucaa

SEQ ID NO: 721881 - RNA, 19 nt, Artificial Sequence
  Description of Artificial Sequence: Synthetic oligonucleotide
  Antisense strand to SEQ ID NO: 721880
uugaucacugauagcucug

SEQ ID NO: 721882 - RNA, 19 nt, Artificial Sequence
  Description of Artificial Sequence: Synthetic oligonucleotide
  Sense strand starting at position 370 of SEQ ID NO: 586492
uaaggauauggccggguau

SEQ ID NO: 721883 - RNA, 19 nt, Artificial Sequence
  Description of Artificial Sequence: Synthetic oligonucleotide
  Antisense strand to SEQ ID NO: 721882
auacccggccauauccuua

SEQ ID NO: 721884 - RNA, 19 nt, Artificial Sequence
  Description of Artificial Sequence: Synthetic oligonucleotide
  Sense strand starting at position 371 of SEQ ID NO: 586492
aaggauauggccggguauu

SEQ ID NO: 721885 - RNA, 19 nt, Artificial Sequence
  Description of Artificial Sequence: Synthetic oligonucleotide
  Antisense strand to SEQ ID NO: 721884
aauacccggccauauccuu

SEQ ID NO: 721886 - RNA, 19 nt, Artificial Sequence
  Description of Artificial Sequence: Synthetic oligonucleotide
  Sense strand starting at position 419 of SEQ ID NO: 586492
ugacuuauauaugcuugaa

SEQ ID NO: 721887 - RNA, 19 nt, Artificial Sequence
  Description of Artificial Sequence: Synthetic oligonucleotide
  Antisense strand to SEQ ID NO: 721886
uucaagcauauauaaguca

SEQ ID NO: 721888 - RNA, 19 nt, Artificial Sequence
  Description of Artificial Sequence: Synthetic oligonucleotide
  Sense strand starting at position 441 of SEQ ID NO: 586492
cagaguuucuggcuuauga

SEQ ID NO: 721889 - RNA, 19 nt, Artificial Sequence
  Description of Artificial Sequence: Synthetic oligonucleotide
  Antisense strand to SEQ ID NO: 721888
ucauaagccagaaacucug

SEQ ID NO: 721890 - RNA, 19 nt, Artificial Sequence
  Description of Artificial Sequence: Synthetic oligonucleotide
  Sense strand starting at position 443 of SEQ ID NO: 586492
gaguuucuggcuuaugaca

SEQ ID NO: 721891 - RNA, 19 nt, Artificial Sequence
  Description of Artificial Sequence: Synthetic oligonucleotide
  Antisense strand to SEQ ID NO: 721890
ugucauaagccagaaacuc

SEQ ID NO: 721892 - RNA, 19 nt, Artificial Sequence
  Description of Artificial Sequence: Synthetic oligonucleotide
  Sense strand starting at position 981 of SEQ ID NO: 586492
ccuuguucgcuggaaggaa

SEQ ID NO: 721893 - RNA, 19 nt, Artificial Sequence
  Description of Artificial Sequence: Synthetic oligonucleotide
  Antisense strand to SEQ ID NO: 721892
uuccuuccagcgaacaagg

SEQ ID NO: 721894 - RNA, 19 nt, Artificial Sequence
  Description of Artificial Sequence: Synthetic oligonucleotide
  Sense strand starting at position 1092 of SEQ ID NO: 586492
ccuagaaccugguuaccua

SEQ ID NO: 721895 - RNA, 19 nt, Artificial Sequence
  Description of Artificial Sequence: Synthetic oligonucleotide
  Antisense strand to SEQ ID NO: 721894
uagguaaccagguucuagg

SEQ ID NO: 721896 - RNA, 19 nt, Artificial Sequence
  Description of Artificial Sequence: Synthetic oligonucleotide
  Sense strand starting at position 1102 of SEQ ID NO: 586492
gguuaccuacuuuguaaca

SEQ ID NO: 721897 - RNA, 19 nt, Artificial Sequence
  Description of Artificial Sequence: Synthetic oligonucleotide
  Antisense strand to SEQ ID NO: 721896
uguuacaaaguagguaacc

SEQ ID NO: 721898 - RNA, 19 nt, Artificial Sequence
  Description of Artificial Sequence: Synthetic oligonucleotide
  Sense strand starting at position 1129 of SEQ ID NO: 586492
uuguacuucccagaaaggu

SEQ ID NO: 721899 - RNA, 19 nt, Artificial Sequence
  Description of Artificial Sequence: Synthetic oligonucleotide
  Antisense strand to SEQ ID NO: 721898
accuuucugggaaguacaa

SEQ ID NO: 721900 - RNA, 19 nt, Artificial Sequence
  Description of Artificial Sequence: Synthetic oligonucleotide
  Sense strand starting at position 1412 of SEQ ID NO: 586492
caaacauggucuuuaggaa

SEQ ID NO: 721901 - RNA, 19 nt, Artificial Sequence
  Description of Artificial Sequence: Synthetic oligonucleotide
  Antisense strand to SEQ ID NO: 721900
uuccuaaagaccauguuug

SEQ ID NO: 721902 - RNA, 19 nt, Artificial Sequence
  Description of Artificial Sequence: Synthetic oligonucleotide
  Sense strand starting at position 1455 of SEQ ID NO: 586492
cagauugcagguuauacua

SEQ ID NO: 721903 - RNA, 19 nt, Artificial Sequence
  Description of Artificial Sequence: Synthetic oligonucleotide
  Antisense strand to SEQ ID NO: 721902
uaguauaaccugcaaucug

SEQ ID NO: 721904 - RNA, 19 nt, Artificial Sequence
  Description of Artificial Sequence: Synthetic oligonucleotide
  Sense strand starting at position 1684 of SEQ ID NO: 586492
gauaauucccagugccaga

SEQ ID NO: 721905 - RNA, 19 nt, Artificial Sequence
  Description of Artificial Sequence: Synthetic oligonucleotide
  Antisense strand to SEQ ID NO: 721904
ucuggcacugggaauuauc

SEQ ID NO: 721906 - RNA, 19 nt, Artificial Sequence
  Description of Artificial Sequence: Synthetic oligonucleotide
  Sense strand starting at position 1697 of SEQ ID NO: 586492
gccagaucacgugauacag

SEQ ID NO: 721907 - RNA, 19 nt, Artificial Sequence
  Description of Artificial Sequence: Synthetic oligonucleotide
  Antisense strand to SEQ ID NO: 721906
cuguaucacgugaucuggc

SEQ ID NO: 721908 - RNA, 19 nt, Artificial Sequence
  Description of Artificial Sequence: Synthetic oligonucleotide
  Sense strand starting at position 1703 of SEQ ID NO: 586492
ucacgugauacagagugaa

SEQ ID NO: 721909 - RNA, 19 nt, Artificial Sequence
  Description of Artificial Sequence: Synthetic oligonucleotide
  Antisense strand to SEQ ID NO: 721908
uucacucuguaucacguga

SEQ ID NO: 721910 - RNA, 19 nt, Artificial Sequence
  Description of Artificial Sequence: Synthetic oligonucleotide
  Sense strand starting at position 1833 of SEQ ID NO: 586492
cugggugugacacacgaau

SEQ ID NO: 721911 - RNA, 19 nt, Artificial Sequence
  Description of Artificial Sequence: Synthetic oligonucleotide
  Antisense strand to SEQ ID NO: 721910
auucgugugucacacccag

SEQ ID NO: 721912 - RNA, 19 nt, Artificial Sequence
  Description of Artificial Sequence: Synthetic oligonucleotide
  Sense strand starting at position 1835 of SEQ ID NO: 586492
gggugugacacacgaauuc

SEQ ID NO: 721913 - RNA, 19 nt, Artificial Sequence
  Description of Artificial Sequence: Synthetic oligonucleotide
  Antisense strand to SEQ ID NO: 721912
gaauucgugugucacaccc

SEQ ID NO: 721914 - RNA, 19 nt, Artificial Sequence
  Description of Artificial Sequence: Synthetic oligonucleotide
  Sense strand starting at position 2019 of SEQ ID NO: 586492
acaagagaucaguguuguu

SEQ ID NO: 721915 - RNA, 19 nt, Artificial Sequence
  Description of Artificial Sequence: Synthetic oligonucleotide
  Antisense strand to SEQ ID NO: 721914
aacaacacugaucucuugu

SEQ ID NO: 721916 - RNA, 19 nt, Artificial Sequence
  Description of Artificial Sequence: Synthetic oligonucleotide
  Sense strand starting at position 2119 of SEQ ID NO: 586492
ccaaguaucugacugauua

SEQ ID NO: 721917 - RNA, 19 nt, Artificial Sequence
  Description of Artificial Sequence: Synthetic oligonucleotide
  Antisense strand to SEQ ID NO: 721916
uaaucagucagauacuugg

SEQ ID NO: 721918 - RNA, 19 nt, Artificial Sequence
  Description of Artificial Sequence: Synthetic oligonucleotide
  Sense strand starting at position 2123 of SEQ ID NO: 586492
guaucugacugauuaaaua

SEQ ID NO: 721919 - RNA, 19 nt, Artificial Sequence
  Description of Artificial Sequence: Synthetic oligonucleotide
  Antisense strand to SEQ ID NO: 721918
uauuuaaucagucagauac

SEQ ID NO: 721920 - RNA, 19 nt, Artificial Sequence
  Description of Artificial Sequence: Synthetic oligonucleotide
  Sense strand starting at position 2191 of SEQ ID NO: 586492
aaauaauaacagugagugu

SEQ ID NO: 721921 - RNA, 19 nt, Artificial Sequence
  Description of Artificial Sequence: Synthetic oligonucleotide
  Antisense strand to SEQ ID NO: 721920
acacucacuguuauuauuu

SEQ ID NO: 721922 - RNA, 19 nt, Artificial Sequence
  Description of Artificial Sequence: Synthetic oligonucleotide
  Sense strand starting at position 2554 of SEQ ID NO: 586492
cucccaucacagugguaaa

SEQ ID NO: 721923 - RNA, 19 nt, Artificial Sequence
  Description of Artificial Sequence: Synthetic oligonucleotide
  Antisense strand to SEQ ID NO: 721922
uuuaccacugugaugggag

SEQ ID NO: 721924 - RNA, 19 nt, Artificial Sequence
  Description of Artificial Sequence: Synthetic oligonucleotide
  Sense strand starting at position 2597 of SEQ ID NO: 586492
gcuagaugugauggaugaa

SEQ ID NO: 721925 - RNA, 19 nt, Artificial Sequence
  Description of Artificial Sequence: Synthetic oligonucleotide
  Antisense strand to SEQ ID NO: 721924
uucauccaucacaucuagc

SEQ ID NO: 721926 - RNA, 19 nt, Artificial Sequence
  Description of Artificial Sequence: Synthetic oligonucleotide
  Sense strand starting at position 2661 of SEQ ID NO: 586492
ggccuuacaagcugaggaa

SEQ ID NO: 721927 - RNA, 19 nt, Artificial Sequence
  Description of Artificial Sequence: Synthetic oligonucleotide
  Antisense strand to SEQ ID NO: 721926
uuccucagcuuguaaggcc

SEQ ID NO: 721928 - RNA, 19 nt, Artificial Sequence
  Description of Artificial Sequence: Synthetic oligonucleotide
  Sense strand starting at position 2682 of SEQ ID NO: 586492
agagaacauuuggaaggua

SEQ ID NO: 721929 - RNA, 19 nt, Artificial Sequence
  Description of Artificial Sequence: Synthetic oligonucleotide
  Antisense strand to SEQ ID NO: 721928
uaccuuccaaauguucucu

SEQ ID NO: 721930 - RNA, 19 nt, Artificial Sequence
  Description of Artificial Sequence: Synthetic oligonucleotide
  Sense strand starting at position 2705 of SEQ ID NO: 586492
agcagaauuuaccagaauu

SEQ ID NO: 721931 - RNA, 19 nt, Artificial Sequence
  Description of Artificial Sequence: Synthetic oligonucleotide
  Antisense strand to SEQ ID NO: 721930
aauucugguaaauucugcu

SEQ ID NO: 721932 - RNA, 19 nt, Artificial Sequence
  Description of Artificial Sequence: Synthetic oligonucleotide
  Sense strand starting at position 2797 of SEQ ID NO: 586492
uuguuccuugggcauauua

SEQ ID NO: 721933 - RNA, 19 nt, Artificial Sequence
  Description of Artificial Sequence: Synthetic oligonucleotide
  Antisense strand to SEQ ID NO: 721932
uaauaugcccaaggaacaa

SEQ ID NO: 721934 - RNA, 19 nt, Artificial Sequence
  Description of Artificial Sequence: Synthetic oligonucleotide
  Sense strand starting at position 3017 of SEQ ID NO: 586492
cucagaagaccauguggua

SEQ ID NO: 721935 - RNA, 19 nt, Artificial Sequence
  Description of Artificial Sequence: Synthetic oligonucleotide
  Antisense strand to SEQ ID NO: 721934
uaccacauggucuucugag

SEQ ID NO: 721936 - RNA, 19 nt, Artificial Sequence
  Description of Artificial Sequence: Synthetic oligonucleotide
  Sense strand starting at position 3056 of SEQ ID NO: 586492
augcauaugcuagaaccua

SEQ ID NO: 721937 - RNA, 19 nt, Artificial Sequence
  Description of Artificial Sequence: Synthetic oligonucleotide
  Antisense strand to SEQ ID NO: 721936
uagguucuagcauaugcau

SEQ ID NO: 721938 - RNA, 19 nt, Artificial Sequence
  Description of Artificial Sequence: Synthetic oligonucleotide
  Sense strand starting at position 3208 of SEQ ID NO: 586492
ugaguagcacuaugaaauc

SEQ ID NO: 721939 - RNA, 19 nt, Artificial Sequence
  Description of Artificial Sequence: Synthetic oligonucleotide
  Antisense strand to SEQ ID NO: 721938
gauuucauagugcuacuca

SEQ ID NO: 721940 - RNA, 19 nt, Artificial Sequence
  Description of Artificial Sequence: Synthetic oligonucleotide
  Sense strand starting at position 3628 of SEQ ID NO: 586492
gaaacagggucacuauguu

SEQ ID NO: 721941 - RNA, 19 nt, Artificial Sequence
  Description of Artificial Sequence: Synthetic oligonucleotide
  Antisense strand to SEQ ID NO: 721940
aacauagugacccuguuuc

SEQ ID NO: 721942 - RNA, 19 nt, Artificial Sequence
  Description of Artificial Sequence: Synthetic oligonucleotide
  Sense strand starting at position 3784 of SEQ ID NO: 586492
cugugcuaauuuguaauua

SEQ ID NO: 721943 - RNA, 19 nt, Artificial Sequence
  Description of Artificial Sequence: Synthetic oligonucleotide
  Antisense strand to SEQ ID NO: 721942
uaauuacaaauuagcacag

SEQ ID NO: 721944 - RNA, 19 nt, Artificial Sequence
  Description of Artificial Sequence: Synthetic oligonucleotide
  Sense strand starting at position 3807 of SEQ ID NO: 586492
uuaucauagggauguacau

SEQ ID NO: 721945 - RNA, 19 nt, Artificial Sequence
  Description of Artificial Sequence: Synthetic oligonucleotide
  Antisense strand to SEQ ID NO: 721944
auguacaucccuaugauaa

SEQ ID NO: 721946 - RNA, 19 nt, Artificial Sequence
  Description of Artificial Sequence: Synthetic oligonucleotide
  Sense strand starting at position 3920 of SEQ ID NO: 586492
guggaagugcuguacucaa

SEQ ID NO: 721947 - RNA, 19 nt, Artificial Sequence
  Description of Artificial Sequence: Synthetic oligonucleotide
  Antisense strand to SEQ ID NO: 721946
uugaguacagcacuuccac

SEQ ID NO: 721948 - RNA, 19 nt, Artificial Sequence
  Description of Artificial Sequence: Synthetic oligonucleotide
  Sense strand starting at position 281 of SEQ ID NO: 586493
agugcucugaugcaugaau

SEQ ID NO: 721949 - RNA, 19 nt, Artificial Sequence
  Description of Artificial Sequence: Synthetic oligonucleotide
  Antisense strand to SEQ ID NO: 721948
auucaugcaucagagcacu

SEQ ID NO: 721950 - RNA, 19 nt, Artificial Sequence
  Description of Artificial Sequence: Synthetic oligonucleotide
  Sense strand starting at position 283 of SEQ ID NO: 586493
ugcucugaugcaugaauau

SEQ ID NO: 721951 - RNA, 19 nt, Artificial Sequence
  Description of Artificial Sequence: Synthetic oligonucleotide
  Antisense strand to SEQ ID NO: 721950
auauucaugcaucagagca

SEQ ID NO: 721952 - RNA, 19 nt, Artificial Sequence
  Description of Artificial Sequence: Synthetic oligonucleotide
  Sense strand starting at position 501 of SEQ ID NO: 586493
aaauacuaucccgguaguu

SEQ ID NO: 721953 - RNA, 19 nt, Artificial Sequence
  Description of Artificial Sequence: Synthetic oligonucleotide
  Antisense strand to SEQ ID NO: 721952
aacuaccgggauaguauuu

SEQ ID NO: 721954 - RNA, 19 nt, Artificial Sequence
  Description of Artificial Sequence: Synthetic oligonucleotide
  Sense strand starting at position 503 of SEQ ID NO: 586493
auacuaucccgguaguuac

SEQ ID NO: 721955 - RNA, 19 nt, Artificial Sequence
  Description of Artificial Sequence: Synthetic oligonucleotide
  Antisense strand to SEQ ID NO: 721954
guaacuaccgggauaguau

SEQ ID NO: 721956 - RNA, 19 nt, Artificial Sequence
  Description of Artificial Sequence: Synthetic oligonucleotide
  Sense strand starting at position 599 of SEQ ID NO: 586493
guuugugugcguguuaagu

SEQ ID NO: 721957 - RNA, 19 nt, Artificial Sequence
  Description of Artificial Sequence: Synthetic oligonucleotide
  Antisense strand to SEQ ID NO: 721956
acuuaacacgcacacaaac

SEQ ID NO: 721958 - RNA, 19 nt, Artificial Sequence
  Description of Artificial Sequence: Synthetic oligonucleotide
  Sense strand starting at position 609 of SEQ ID NO: 586493
guguuaaguguuucgccca

SEQ ID NO: 721959 - RNA, 19 nt, Artificial Sequence
  Description of Artificial Sequence: Synthetic oligonucleotide
  Antisense strand to SEQ ID NO: 721958
ugggcgaaacacuuaacac

SEQ ID NO: 721960 - RNA, 19 nt, Artificial Sequence
  Description of Artificial Sequence: Synthetic oligonucleotide
  Sense strand starting at position 736 of SEQ ID NO: 586493
cggcaugagggucaaauaa

SEQ ID NO: 721961 - RNA, 19 nt, Artificial Sequence
  Description of Artificial Sequence: Synthetic oligonucleotide
  Antisense strand to SEQ ID NO: 721960
uuauuugacccucaugccg

SEQ ID NO: 721962 - RNA, 19 nt, Artificial Sequence
  Description of Artificial Sequence: Synthetic oligonucleotide
  Sense strand starting at position 833 of SEQ ID NO: 586493
ucgauaaugcacuagcaaa

SEQ ID NO: 721963 - RNA, 19 nt, Artificial Sequence
  Description of Artificial Sequence: Synthetic oligonucleotide
  Antisense strand to SEQ ID NO: 721962
uuugcuagugcauuaucga

SEQ ID NO: 721964 - RNA, 19 nt, Artificial Sequence
  Description of Artificial Sequence: Synthetic oligonucleotide
  Sense strand starting at position 2018 of SEQ ID NO: 586493
gagcauuuccauuggcuua

SEQ ID NO: 721965 - RNA, 19 nt, Artificial Sequence
  Description of Artificial Sequence: Synthetic oligonucleotide
  Antisense strand to SEQ ID NO: 721964
uaagccaauggaaaugcuc

SEQ ID NO: 721966 - RNA, 19 nt, Artificial Sequence
  Description of Artificial Sequence: Synthetic oligonucleotide
  Sense strand starting at position 2044 of SEQ ID NO: 586493
cccacuagaacucgaguga

SEQ ID NO: 721967 - RNA, 19 nt, Artificial Sequence
  Description of Artificial Sequence: Synthetic oligonucleotide
  Antisense strand to SEQ ID NO: 721966
ucacucgaguucuaguggg

SEQ ID NO: 721968 - RNA, 19 nt, Artificial Sequence
  Description of Artificial Sequence: Synthetic oligonucleotide
  Sense strand starting at position 2045 of SEQ ID NO: 586493
ccacuagaacucgagugau

SEQ ID NO: 721969 - RNA, 19 nt, Artificial Sequence
  Description of Artificial Sequence: Synthetic oligonucleotide
  Antisense strand to SEQ ID NO: 721968
aucacucgaguucuagugg

SEQ ID NO: 721970 - RNA, 19 nt, Artificial Sequence
  Description of Artificial Sequence: Synthetic oligonucleotide
  Sense strand starting at position 2055 of SEQ ID NO: 586493
ucgagugauugguucugga

SEQ ID NO: 721971 - RNA, 19 nt, Artificial Sequence
  Description of Artificial Sequence: Synthetic oligonucleotide
  Antisense strand to SEQ ID NO: 721970
uccagaaccaaucacucga

SEQ ID NO: 721972 - RNA, 19 nt, Artificial Sequence
  Description of Artificial Sequence: Synthetic oligonucleotide
  Sense strand starting at position 2088 of SEQ ID NO: 586493
agcaguguccaaugacaau

SEQ ID NO: 721973 - RNA, 19 nt, Artificial Sequence
  Description of Artificial Sequence: Synthetic oligonucleotide
  Antisense strand to SEQ ID NO: 721972
auugucauuggacacugcu

SEQ ID NO: 721974 - RNA, 19 nt, Artificial Sequence
  Description of Artificial Sequence: Synthetic oligonucleotide
  Sense strand starting at position 2185 of SEQ ID NO: 586493
aguugacagccuugaggua

SEQ ID NO: 721975 - RNA, 19 nt, Artificial Sequence
  Description of Artificial Sequence: Synthetic oligonucleotide
  Antisense strand to SEQ ID NO: 721974
uaccucaaggcugucaacu

SEQ ID NO: 721976 - RNA, 19 nt, Artificial Sequence
  Description of Artificial Sequence: Synthetic oligonucleotide
  Sense strand starting at position 2186 of SEQ ID NO: 586493
guugacagccuugagguaa

SEQ ID NO: 721977 - RNA, 19 nt, Artificial Sequence
  Description of Artificial Sequence: Synthetic oligonucleotide
  Antisense strand to SEQ ID NO: 721976
uuaccucaaggcugucaac

SEQ ID NO: 721978 - RNA, 19 nt, Artificial Sequence
  Description of Artificial Sequence: Synthetic oligonucleotide
  Sense strand starting at position 2311 of SEQ ID NO: 586493
ccgucuguaugacuugaga

SEQ ID NO: 721979 - RNA, 19 nt, Artificial Sequence
  Description of Artificial Sequence: Synthetic oligonucleotide
  Antisense strand to SEQ ID NO: 721978
ucucaagucauacagacgg

SEQ ID NO: 721980 - RNA, 19 nt, Artificial Sequence
  Description of Artificial Sequence: Synthetic oligonucleotide
  Sense strand starting at position 2313 of SEQ ID NO: 586493
gucuguaugacuugagaca

SEQ ID NO: 721981 - RNA, 19 nt, Artificial Sequence
  Description of Artificial Sequence: Synthetic oligonucleotide
  Antisense strand to SEQ ID NO: 721980
ugucucaagucauacagac

SEQ ID NO: 721982 - RNA, 19 nt, Artificial Sequence
  Description of Artificial Sequence: Synthetic oligonucleotide
  Sense strand starting at position 2531 of SEQ ID NO: 586493
auuuguaguuaugcaguga

SEQ ID NO: 721983 - RNA, 19 nt, Artificial Sequence
  Description of Artificial Sequence: Synthetic oligonucleotide
  Antisense strand to SEQ ID NO: 721982
ucacugcauaacuacaaau

SEQ ID NO: 721984 - RNA, 19 nt, Artificial Sequence
  Description of Artificial Sequence: Synthetic oligonucleotide
  Sense strand starting at position 2532 of SEQ ID NO: 586493
uuuguaguuaugcagugaa

SEQ ID NO: 721985 - RNA, 19 nt, Artificial Sequence
  Description of Artificial Sequence: Synthetic oligonucleotide
  Antisense strand to SEQ ID NO: 721984
uucacugcauaacuacaaa

SEQ ID NO: 721986 - RNA, 19 nt, Artificial Sequence
  Description of Artificial Sequence: Synthetic oligonucleotide
  Sense strand starting at position 2617 of SEQ ID NO: 586493
augucauuacaccaucagu

SEQ ID NO: 721987 - RNA, 19 nt, Artificial Sequence
  Description of Artificial Sequence: Synthetic oligonucleotide
  Antisense strand to SEQ ID NO: 721986
acugaugguguaaugacau

SEQ ID NO: 721988 - RNA, 19 nt, Artificial Sequence
  Description of Artificial Sequence: Synthetic oligonucleotide
  Sense strand starting at position 2622 of SEQ ID NO: 586493
auuacaccaucaguuagau

SEQ ID NO: 721989 - RNA, 19 nt, Artificial Sequence
  Description of Artificial Sequence: Synthetic oligonucleotide
  Antisense strand to SEQ ID NO: 721988
aucuaacugaugguguaau

SEQ ID NO: 721990 - RNA, 19 nt, Artificial Sequence
  Description of Artificial Sequence: Synthetic oligonucleotide
  Sense strand starting at position 2680 of SEQ ID NO: 586493
agcuucuugggaggaauaa

SEQ ID NO: 721991 - RNA, 19 nt, Artificial Sequence
  Description of Artificial Sequence: Synthetic oligonucleotide
  Antisense strand to SEQ ID NO: 721990
uuauuccucccaagaagcu

SEQ ID NO: 721992 - RNA, 19 nt, Artificial Sequence
  Description of Artificial Sequence: Synthetic oligonucleotide
  Sense strand starting at position 2713 of SEQ ID NO: 586493
guaauaauccauuguggua

SEQ ID NO: 721993 - RNA, 19 nt, Artificial Sequence
  Description of Artificial Sequence: Synthetic oligonucleotide
  Antisense strand to SEQ ID NO: 721992
uaccacaauggauuauuac

SEQ ID NO: 721994 - RNA, 19 nt, Artificial Sequence
  Description of Artificial Sequence: Synthetic oligonucleotide
  Sense strand starting at position 2757 of SEQ ID NO: 586493
acugaaagcguacaaagau

SEQ ID NO: 721995 - RNA, 19 nt, Artificial Sequence
  Description of Artificial Sequence: Synthetic oligonucleotide
  Antisense strand to SEQ ID NO: 721994
aucuuuguacgcuuucagu

SEQ ID NO: 721996 - RNA, 19 nt, Artificial Sequence
  Description of Artificial Sequence: Synthetic oligonucleotide
  Sense strand starting at position 2828 of SEQ ID NO: 586493
aaccuuaaucgggagcaau

SEQ ID NO: 721997 - RNA, 19 nt, Artificial Sequence
  Description of Artificial Sequence: Synthetic oligonucleotide
  Antisense strand to SEQ ID NO: 721996
auugcucccgauuaagguu

SEQ ID NO: 721998 - RNA, 19 nt, Artificial Sequence
  Description of Artificial Sequence: Synthetic oligonucleotide
  Sense strand starting at position 2831 of SEQ ID NO: 586493
cuuaaucgggagcaauuaa

SEQ ID NO: 721999 - RNA, 19 nt, Artificial Sequence
  Description of Artificial Sequence: Synthetic oligonucleotide
  Antisense strand to SEQ ID NO: 721998
uuaauugcucccgauuaag

SEQ ID NO: 722000 - RNA, 19 nt, Artificial Sequence
  Description of Artificial Sequence: Synthetic oligonucleotide
  Sense strand starting at position 2898 of SEQ ID NO: 586493
agagaagcacaaugucaaa

SEQ ID NO: 722001 - RNA, 19 nt, Artificial Sequence
  Description of Artificial Sequence: Synthetic oligonucleotide
  Antisense strand to SEQ ID NO: 722000
uuugacauugugcuucucu

SEQ ID NO: 722002 - RNA, 19 nt, Artificial Sequence
  Description of Artificial Sequence: Synthetic oligonucleotide
  Sense strand starting at position 2944 of SEQ ID NO: 586493
cugacaagcuuccucugau

SEQ ID NO: 722003 - RNA, 19 nt, Artificial Sequence
  Description of Artificial Sequence: Synthetic oligonucleotide
  Antisense strand to SEQ ID NO: 722002
aucagaggaagcuugucag

SEQ ID NO: 722004 - RNA, 19 nt, Artificial Sequence
  Description of Artificial Sequence: Synthetic oligonucleotide
  Sense strand starting at position 2945 of SEQ ID NO: 586493
ugacaagcuuccucugauu

SEQ ID NO: 722005 - RNA, 19 nt, Artificial Sequence
  Description of Artificial Sequence: Synthetic oligonucleotide
  Antisense strand to SEQ ID NO: 722004
aaucagaggaagcuuguca

SEQ ID NO: 722006 - RNA, 19 nt, Artificial Sequence
  Description of Artificial Sequence: Synthetic oligonucleotide
  Sense strand starting at position 3023 of SEQ ID NO: 586493
guguguucagacgagaaag

SEQ ID NO: 722007 - RNA, 19 nt, Artificial Sequence
  Description of Artificial Sequence: Synthetic oligonucleotide
  Antisense strand to SEQ ID NO: 722006
cuuucucgucugaacacac

SEQ ID NO: 722008 - RNA, 19 nt, Artificial Sequence
  Description of Artificial Sequence: Synthetic oligonucleotide
  Sense strand starting at position 3123 of SEQ ID NO: 586493
gugauaguuccucaguuua

SEQ ID NO: 722009 - RNA, 19 nt, Artificial Sequence
  Description of Artificial Sequence: Synthetic oligonucleotide
  Antisense strand to SEQ ID NO: 722008
uaaacugaggaacuaucac

SEQ ID NO: 722010 - RNA, 19 nt, Artificial Sequence
  Description of Artificial Sequence: Synthetic oligonucleotide
  Sense strand starting at position 3197 of SEQ ID NO: 586493
agaacauuauguguguuaa

SEQ ID NO: 722011 - RNA, 19 nt, Artificial Sequence
  Description of Artificial Sequence: Synthetic oligonucleotide
  Antisense strand to SEQ ID NO: 722010
uuaacacacauaauguucu

SEQ ID NO: 722012 - RNA, 19 nt, Artificial Sequence
  Description of Artificial Sequence: Synthetic oligonucleotide
  Sense strand starting at position 3198 of SEQ ID NO: 586493
gaacauuauguguguuaau

SEQ ID NO: 722013 - RNA, 19 nt, Artificial Sequence
  Description of Artificial Sequence: Synthetic oligonucleotide
  Antisense strand to SEQ ID NO: 722012
auuaacacacauaauguuc

SEQ ID NO: 722014 - RNA, 19 nt, Artificial Sequence
  Description of Artificial Sequence: Synthetic oligonucleotide
  Sense strand starting at position 3274 of SEQ ID NO: 586493
ucaguuguggcauaaauaa

SEQ ID NO: 722015 - RNA, 19 nt, Artificial Sequence
  Description of Artificial Sequence: Synthetic oligonucleotide
  Antisense strand to SEQ ID NO: 722014
uuauuuaugccacaacuga

SEQ ID NO: 722016 - RNA, 19 nt, Artificial Sequence
  Description of Artificial Sequence: Synthetic oligonucleotide
  Sense strand starting at position 3305 of SEQ ID NO: 586493
gagaucacauaguuaguau

SEQ ID NO: 722017 - RNA, 19 nt, Artificial Sequence
  Description of Artificial Sequence: Synthetic oligonucleotide
  Antisense strand to SEQ ID NO: 722016
auacuaacuaugugaucuc

SEQ ID NO: 722018 - RNA, 19 nt, Artificial Sequence
  Description of Artificial Sequence: Synthetic oligonucleotide
  Sense strand starting at position 3356 of SEQ ID NO: 586493
ggcucaagagucugaggaa

SEQ ID NO: 722019 - RNA, 19 nt, Artificial Sequence
  Description of Artificial Sequence: Synthetic oligonucleotide
  Antisense strand to SEQ ID NO: 722018
uuccucagacucuugagcc

SEQ ID NO: 722020 - RNA, 19 nt, Artificial Sequence
  Description of Artificial Sequence: Synthetic oligonucleotide
  Sense strand starting at position 3369 of SEQ ID NO: 586493
gaggaagcacucugcuaua

SEQ ID NO: 722021 - RNA, 19 nt, Artificial Sequence
  Description of Artificial Sequence: Synthetic oligonucleotide
  Antisense strand to SEQ ID NO: 722020
uauagcagagugcuuccuc

SEQ ID NO: 722022 - RNA, 19 nt, Artificial Sequence
  Description of Artificial Sequence: Synthetic oligonucleotide
  Sense strand starting at position 3412 of SEQ ID NO: 586493
gguacauaaucuguagagu

SEQ ID NO: 722023 - RNA, 19 nt, Artificial Sequence
  Description of Artificial Sequence: Synthetic oligonucleotide
  Antisense strand to SEQ ID NO: 722022
acucuacagauuauguacc

SEQ ID NO: 722024 - RNA, 19 nt, Artificial Sequence
  Description of Artificial Sequence: Synthetic oligonucleotide
  Sense strand starting at position 3413 of SEQ ID NO: 586493
guacauaaucuguagagua

SEQ ID NO: 722025 - RNA, 19 nt, Artificial Sequence
  Description of Artificial Sequence: Synthetic oligonucleotide
  Antisense strand to SEQ ID NO: 722024
uacucuacagauuauguac

SEQ ID NO: 722026 - RNA, 19 nt, Artificial Sequence
  Description of Artificial Sequence: Synthetic oligonucleotide
  Sense strand starting at position 3415 of SEQ ID NO: 586493
acauaaucuguagaguauu

SEQ ID NO: 722027 - RNA, 19 nt, Artificial Sequence
  Description of Artificial Sequence: Synthetic oligonucleotide
  Antisense strand to SEQ ID NO: 722026
aauacucuacagauuaugu

SEQ ID NO: 722028 - RNA, 19 nt, Artificial Sequence
  Description of Artificial Sequence: Synthetic oligonucleotide
  Sense strand starting at position 46 of SEQ ID NO: 586494
cugaaauacuguucugcuu

SEQ ID NO: 722029 - RNA, 19 nt, Artificial Sequence
  Description of Artificial Sequence: Synthetic oligonucleotide
  Antisense strand to SEQ ID NO: 722028
aagcagaacaguauuucag

SEQ ID NO: 722030 - RNA, 19 nt, Artificial Sequence
  Description of Artificial Sequence: Synthetic oligonucleotide
  Sense strand starting at position 149 of SEQ ID NO: 586494
uuaagaaacugucagacua

SEQ ID NO: 722031 - RNA, 19 nt, Artificial Sequence
  Description of Artificial Sequence: Synthetic oligonucleotide
  Antisense strand to SEQ ID NO: 722030
uagucugacaguuucuuaa

SEQ ID NO: 722032 - RNA, 19 nt, Artificial Sequence
  Description of Artificial Sequence: Synthetic oligonucleotide
  Sense strand starting at position 275 of SEQ ID NO: 586494
uuaggucaauucuuguaga

SEQ ID NO: 722033 - RNA, 19 nt, Artificial Sequence
  Description of Artificial Sequence: Synthetic oligonucleotide
  Antisense strand to SEQ ID NO: 722032
ucuacaagaauugaccuaa

SEQ ID NO: 722034 - RNA, 19 nt, Artificial Sequence
  Description of Artificial Sequence: Synthetic oligonucleotide
  Sense strand starting at position 276 of SEQ ID NO: 586494
uaggucaauucuuguagau

SEQ ID NO: 722035 - RNA, 19 nt, Artificial Sequence
  Description of Artificial Sequence: Synthetic oligonucleotide
  Antisense strand to SEQ ID NO: 722034
aucuacaagaauugaccua

SEQ ID NO: 722036 - RNA, 19 nt, Artificial Sequence
  Description of Artificial Sequence: Synthetic oligonucleotide
  Sense strand starting at position 278 of SEQ ID NO: 586494
ggucaauucuuguagauuu

SEQ ID NO: 722037 - RNA, 19 nt, Artificial Sequence
  Description of Artificial Sequence: Synthetic oligonucleotide
  Antisense strand to SEQ ID NO: 722036
aaaucuacaagaauugacc

SEQ ID NO: 722038 - RNA, 19 nt, Artificial Sequence
  Description of Artificial Sequence: Synthetic oligonucleotide
  Sense strand starting at position 285 of SEQ ID NO: 586494
ucuuguagauuucggucua

SEQ ID NO: 722039 - RNA, 19 nt, Artificial Sequence
  Description of Artificial Sequence: Synthetic oligonucleotide
  Antisense strand to SEQ ID NO: 722038
uagaccgaaaucuacaaga

SEQ ID NO: 722040 - RNA, 19 nt, Artificial Sequence
  Description of Artificial Sequence: Synthetic oligonucleotide
  Sense strand starting at position 286 of SEQ ID NO: 586494
cuuguagauuucggucuau

SEQ ID NO: 722041 - RNA, 19 nt, Artificial Sequence
  Description of Artificial Sequence: Synthetic oligonucleotide
  Antisense strand to SEQ ID NO: 722040
auagaccgaaaucuacaag

SEQ ID NO: 722042 - RNA, 19 nt, Artificial Sequence
  Description of Artificial Sequence: Synthetic oligonucleotide
  Sense strand starting at position 298 of SEQ ID NO: 586494
ggucuauaauaugcuaaga

SEQ ID NO: 722043 - RNA, 19 nt, Artificial Sequence
  Description of Artificial Sequence: Synthetic oligonucleotide
  Antisense strand to SEQ ID NO: 722042
ucuuagcauauuauagacc

SEQ ID NO: 722044 - RNA, 19 nt, Artificial Sequence
  Description of Artificial Sequence: Synthetic oligonucleotide
  Sense strand starting at position 350 of SEQ ID NO: 586494
gaugaaugguuccugccuu

SEQ ID NO: 722045 - RNA, 19 nt, Artificial Sequence
  Description of Artificial Sequence: Synthetic oligonucleotide
  Antisense strand to SEQ ID NO: 722044
aaggcaggaaccauucauc

SEQ ID NO: 722046 - RNA, 19 nt, Artificial Sequence
  Description of Artificial Sequence: Synthetic oligonucleotide
  Sense strand starting at position 555 of SEQ ID NO: 586494
aggccuaauuacucgaauu

SEQ ID NO: 722047 - RNA, 19 nt, Artificial Sequence
  Description of Artificial Sequence: Synthetic oligonucleotide
  Antisense strand to SEQ ID NO: 722046
aauucgaguaauuaggccu

SEQ ID NO: 722048 - RNA, 19 nt, Artificial Sequence
  Description of Artificial Sequence: Synthetic oligonucleotide
  Sense strand starting at position 586 of SEQ ID NO: 586494
uauauacugugcucuggaa

SEQ ID NO: 722049 - RNA, 19 nt, Artificial Sequence
  Description of Artificial Sequence: Synthetic oligonucleotide
  Antisense strand to SEQ ID NO: 722048
uuccagagcacaguauaua

SEQ ID NO: 722050 - RNA, 19 nt, Artificial Sequence
  Description of Artificial Sequence: Synthetic oligonucleotide
  Sense strand starting at position 588 of SEQ ID NO: 586494
uauacugugcucuggaaag

SEQ ID NO: 722051 - RNA, 19 nt, Artificial Sequence
  Description of Artificial Sequence: Synthetic oligonucleotide
  Antisense strand to SEQ ID NO: 722050
cuuuccagagcacaguaua

SEQ ID NO: 722052 - RNA, 19 nt, Artificial Sequence
  Description of Artificial Sequence: Synthetic oligonucleotide
  Sense strand starting at position 685 of SEQ ID NO: 586494
auggcacugccauguauuu

SEQ ID NO: 722053 - RNA, 19 nt, Artificial Sequence
  Description of Artificial Sequence: Synthetic oligonucleotide
  Antisense strand to SEQ ID NO: 722052
aaauacauggcagugccau

SEQ ID NO: 722054 - RNA, 19 nt, Artificial Sequence
  Description of Artificial Sequence: Synthetic oligonucleotide
  Sense strand starting at position 732 of SEQ ID NO: 586494
acuaaaggguucuuugacu

SEQ ID NO: 722055 - RNA, 19 nt, Artificial Sequence
  Description of Artificial Sequence: Synthetic oligonucleotide
  Antisense strand to SEQ ID NO: 722054
agucaaagaacccuuuagu

SEQ ID NO: 722056 - RNA, 19 nt, Artificial Sequence
  Description of Artificial Sequence: Synthetic oligonucleotide
  Sense strand starting at position 739 of SEQ ID NO: 586494
gguucuuugacuuggagac

SEQ ID NO: 722057 - RNA, 19 nt, Artificial Sequence
  Description of Artificial Sequence: Synthetic oligonucleotide
  Antisense strand to SEQ ID NO: 722056
gucuccaagucaaagaacc

SEQ ID NO: 722058 - RNA, 19 nt, Artificial Sequence
  Description of Artificial Sequence: Synthetic oligonucleotide
  Sense strand starting at position 1117 of SEQ ID NO: 586494
uucggacaaucugcuuaaa

SEQ ID NO: 722059 - RNA, 19 nt, Artificial Sequence
  Description of Artificial Sequence: Synthetic oligonucleotide
  Antisense strand to SEQ ID NO: 722058
uuuaagcagauuguccgaa

SEQ ID NO: 722060 - RNA, 19 nt, Artificial Sequence
  Description of Artificial Sequence: Synthetic oligonucleotide
  Sense strand starting at position 1151 of SEQ ID NO: 586494
ucugcaaguuugggaucaa

SEQ ID NO: 722061 - RNA, 19 nt, Artificial Sequence
  Description of Artificial Sequence: Synthetic oligonucleotide
  Antisense strand to SEQ ID NO: 722060
uugaucccaaacuugcaga

SEQ ID NO: 722062 - RNA, 19 nt, Artificial Sequence
  Description of Artificial Sequence: Synthetic oligonucleotide
  Sense strand starting at position 1152 of SEQ ID NO: 586494
cugcaaguuugggaucaau

SEQ ID NO: 722063 - RNA, 19 nt, Artificial Sequence
  Description of Artificial Sequence: Synthetic oligonucleotide
  Antisense strand to SEQ ID NO: 722062
auugaucccaaacuugcag

SEQ ID NO: 722064 - RNA, 19 nt, Artificial Sequence
  Description of Artificial Sequence: Synthetic oligonucleotide
  Sense strand starting at position 1208 of SEQ ID NO: 586494
gcugcuacucaagaaagua

SEQ ID NO: 722065 - RNA, 19 nt, Artificial Sequence
  Description of Artificial Sequence: Synthetic oligonucleotide
  Antisense strand to SEQ ID NO: 722064
uacuuucuugaguagcagc

SEQ ID NO: 722066 - RNA, 19 nt, Artificial Sequence
  Description of Artificial Sequence: Synthetic oligonucleotide
  Sense strand starting at position 1233 of SEQ ID NO: 586494
cccugcugcucuguguaaa

SEQ ID NO: 722067 - RNA, 19 nt, Artificial Sequence
  Description of Artificial Sequence: Synthetic oligonucleotide
  Antisense strand to SEQ ID NO: 722066
uuuacacagagcagcaggg

SEQ ID NO: 722068 - RNA, 19 nt, Artificial Sequence
  Description of Artificial Sequence: Synthetic oligonucleotide
  Sense strand starting at position 1234 of SEQ ID NO: 586494
ccugcugcucuguguaaac

SEQ ID NO: 722069 - RNA, 19 nt, Artificial Sequence
  Description of Artificial Sequence: Synthetic oligonucleotide
  Antisense strand to SEQ ID NO: 722068
guuuacacagagcagcagg

SEQ ID NO: 722070 - RNA, 19 nt, Artificial Sequence
  Description of Artificial Sequence: Synthetic oligonucleotide
  Sense strand starting at position 1265 of SEQ ID NO: 586494
augauuauugcauggacca

SEQ ID NO: 722071 - RNA, 19 nt, Artificial Sequence
  Description of Artificial Sequence: Synthetic oligonucleotide
  Antisense strand to SEQ ID NO: 722070
ugguccaugcaauaaucau

SEQ ID NO: 722072 - RNA, 19 nt, Artificial Sequence
  Description of Artificial Sequence: Synthetic oligonucleotide
  Sense strand starting at position 1613 of SEQ ID NO: 586494
cggaguucuucugaacccu

SEQ ID NO: 722073 - RNA, 19 nt, Artificial Sequence
  Description of Artificial Sequence: Synthetic oligonucleotide
  Antisense strand to SEQ ID NO: 722072
aggguucagaagaacuccg

SEQ ID NO: 722074 - RNA, 19 nt, Artificial Sequence
  Description of Artificial Sequence: Synthetic oligonucleotide
  Sense strand starting at position 1734 of SEQ ID NO: 586494
ucggacucuucggaaagga

SEQ ID NO: 722075 - RNA, 19 nt, Artificial Sequence
  Description of Artificial Sequence: Synthetic oligonucleotide
  Antisense strand to SEQ ID NO: 722074
uccuuuccgaagaguccga

SEQ ID NO: 722076 - RNA, 19 nt, Artificial Sequence
  Description of Artificial Sequence: Synthetic oligonucleotide
  Sense strand starting at position 2297 of SEQ ID NO: 586494
gagugacaguucugauuug

SEQ ID NO: 722077 - RNA, 19 nt, Artificial Sequence
  Description of Artificial Sequence: Synthetic oligonucleotide
  Antisense strand to SEQ ID NO: 722076
caaaucagaacugucacuc

SEQ ID NO: 722078 - RNA, 19 nt, Artificial Sequence
  Description of Artificial Sequence: Synthetic oligonucleotide
  Sense strand starting at position 2382 of SEQ ID NO: 586494
ccaaucgacuuucuggaaa

SEQ ID NO: 722079 - RNA, 19 nt, Artificial Sequence
  Description of Artificial Sequence: Synthetic oligonucleotide
  Antisense strand to SEQ ID NO: 722078
uuuccagaaagucgauugg

SEQ ID NO: 722080 - RNA, 19 nt, Artificial Sequence
  Description of Artificial Sequence: Synthetic oligonucleotide
  Sense strand starting at position 2745 of SEQ ID NO: 586494
uggagugcugcucgccuua

SEQ ID NO: 722081 - RNA, 19 nt, Artificial Sequence
  Description of Artificial Sequence: Synthetic oligonucleotide
  Antisense strand to SEQ ID NO: 722080
uaaggcgagcagcacucca

SEQ ID NO: 722082 - RNA, 19 nt, Artificial Sequence
  Description of Artificial Sequence: Synthetic oligonucleotide
  Sense strand starting at position 2747 of SEQ ID NO: 586494
gagugcugcucgccuuacu

SEQ ID NO: 722083 - RNA, 19 nt, Artificial Sequence
  Description of Artificial Sequence: Synthetic oligonucleotide
  Antisense strand to SEQ ID NO: 722082
aguaaggcgagcagcacuc

SEQ ID NO: 722084 - RNA, 19 nt, Artificial Sequence
  Description of Artificial Sequence: Synthetic oligonucleotide
  Sense strand starting at position 3402 of SEQ ID NO: 586494
gcgggaugaugccuuugga

SEQ ID NO: 722085 - RNA, 19 nt, Artificial Sequence
  Description of Artificial Sequence: Synthetic oligonucleotide
  Antisense strand to SEQ ID NO: 722084
uccaaaggcaucaucccgc

SEQ ID NO: 722086 - RNA, 19 nt, Artificial Sequence
  Description of Artificial Sequence: Synthetic oligonucleotide
  Sense strand starting at position 3405 of SEQ ID NO: 586494
ggaugaugccuuuggaagu

SEQ ID NO: 722087 - RNA, 19 nt, Artificial Sequence
  Description of Artificial Sequence: Synthetic oligonucleotide
  Antisense strand to SEQ ID NO: 722086
acuuccaaaggcaucaucc

SEQ ID NO: 722088 - RNA, 19 nt, Artificial Sequence
  Description of Artificial Sequence: Synthetic oligonucleotide
  Sense strand starting at position 3406 of SEQ ID NO: 586494
gaugaugccuuuggaaguu

SEQ ID NO: 722089 - RNA, 19 nt, Artificial Sequence
  Description of Artificial Sequence: Synthetic oligonucleotide
  Antisense strand to SEQ ID NO: 722088
aacuuccaaaggcaucauc

SEQ ID NO: 722090 - RNA, 19 nt, Artificial Sequence
  Description of Artificial Sequence: Synthetic oligonucleotide
  Sense strand starting at position 3555 of SEQ ID NO: 586494
cuuggagccuggucucuaa

SEQ ID NO: 722091 - RNA, 19 nt, Artificial Sequence
  Description of Artificial Sequence: Synthetic oligonucleotide
  Antisense strand to SEQ ID NO: 722090
uuagagaccaggcuccaag

SEQ ID NO: 722092 - RNA, 19 nt, Artificial Sequence
  Description of Artificial Sequence: Synthetic oligonucleotide
  Sense strand starting at position 3875 of SEQ ID NO: 586494
aagugucuugacugaagga

SEQ ID NO: 722093 - RNA, 19 nt, Artificial Sequence
  Description of Artificial Sequence: Synthetic oligonucleotide
  Antisense strand to SEQ ID NO: 722092
uccuucagucaagacacuu

SEQ ID NO: 722094 - RNA, 19 nt, Artificial Sequence
  Description of Artificial Sequence: Synthetic oligonucleotide
  Sense strand starting at position 3894 of SEQ ID NO: 586494
agaguguggguggaugaau

SEQ ID NO: 722095 - RNA, 19 nt, Artificial Sequence
  Description of Artificial Sequence: Synthetic oligonucleotide
  Antisense strand to SEQ ID NO: 722094
auucauccacccacacucu

SEQ ID NO: 722096 - RNA, 19 nt, Artificial Sequence
  Description of Artificial Sequence: Synthetic oligonucleotide
  Sense strand starting at position 3903 of SEQ ID NO: 586494
guggaugaaugaugagcua

SEQ ID NO: 722097 - RNA, 19 nt, Artificial Sequence
  Description of Artificial Sequence: Synthetic oligonucleotide
  Antisense strand to SEQ ID NO: 722096
uagcucaucauucauccac

SEQ ID NO: 722098 - RNA, 19 nt, Artificial Sequence
  Description of Artificial Sequence: Synthetic oligonucleotide
  Sense strand starting at position 3906 of SEQ ID NO: 586494
gaugaaugaugagcuauua

SEQ ID NO: 722099 - RNA, 19 nt, Artificial Sequence
  Description of Artificial Sequence: Synthetic oligonucleotide
  Antisense strand to SEQ ID NO: 722098
uaauagcucaucauucauc

SEQ ID NO: 722100 - RNA, 19 nt, Artificial Sequence
  Description of Artificial Sequence: Synthetic oligonucleotide
  Sense strand starting at position 3948 of SEQ ID NO: 586494
ucaaaugcuuaacugaaga

SEQ ID NO: 722101 - RNA, 19 nt, Artificial Sequence
  Description of Artificial Sequence: Synthetic oligonucleotide
  Antisense strand to SEQ ID NO: 722100
ucuucaguuaagcauuuga

SEQ ID NO: 722102 - RNA, 19 nt, Artificial Sequence
  Description of Artificial Sequence: Synthetic oligonucleotide
  Sense strand starting at position 3953 of SEQ ID NO: 586494
ugcuuaacugaagaaucuu

SEQ ID NO: 722103 - RNA, 19 nt, Artificial Sequence
  Description of Artificial Sequence: Synthetic oligonucleotide
  Antisense strand to SEQ ID NO: 722102
aagauucuucaguuaagca

SEQ ID NO: 722104 - RNA, 19 nt, Artificial Sequence
  Description of Artificial Sequence: Synthetic oligonucleotide
  Sense strand starting at position 3974 of SEQ ID NO: 586494
aacgaaauugaggguggua

SEQ ID NO: 722105 - RNA, 19 nt, Artificial Sequence
  Description of Artificial Sequence: Synthetic oligonucleotide
  Antisense strand to SEQ ID NO: 722104
uaccacccucaauuucguu

SEQ ID NO: 722106 - RNA, 19 nt, Artificial Sequence
  Description of Artificial Sequence: Synthetic oligonucleotide
  Sense strand starting at position 3976 of SEQ ID NO: 586494
cgaaauugagggugguauu

SEQ ID NO: 722107 - RNA, 19 nt, Artificial Sequence
  Description of Artificial Sequence: Synthetic oligonucleotide
  Antisense strand to SEQ ID NO: 722106
aauaccacccucaauuucg

SEQ ID NO: 722108 - RNA, 19 nt, Artificial Sequence
  Description of Artificial Sequence: Synthetic oligonucleotide
  Sense strand starting at position 241 of SEQ ID NO: 586495
accagacaucugugccaca

SEQ ID NO: 722109 - RNA, 19 nt, Artificial Sequence
  Description of Artificial Sequence: Synthetic oligonucleotide
  Antisense strand to SEQ ID NO: 722108
uguggcacagaugucuggu

SEQ ID NO: 722110 - RNA, 19 nt, Artificial Sequence
  Description of Artificial Sequence: Synthetic oligonucleotide
  Sense strand starting at position 285 of SEQ ID NO: 586495
auggcagaauuugagauau

SEQ ID NO: 722111 - RNA, 19 nt, Artificial Sequence
  Description of Artificial Sequence: Synthetic oligonucleotide
  Antisense strand to SEQ ID NO: 722110
auaucucaaauucugccau

SEQ ID NO: 722112 - RNA, 19 nt, Artificial Sequence
  Description of Artificial Sequence: Synthetic oligonucleotide
  Sense strand starting at position 396 of SEQ ID NO: 586495
agcaucgcccuccagaauu

SEQ ID NO: 722113 - RNA, 19 nt, Artificial Sequence
  Description of Artificial Sequence: Synthetic oligonucleotide
  Antisense strand to SEQ ID NO: 722112
aauucuggagggcgaugcu

SEQ ID NO: 722114 - RNA, 19 nt, Artificial Sequence
  Description of Artificial Sequence: Synthetic oligonucleotide
  Sense strand starting at position 430 of SEQ ID NO: 586495
accgaauuccuaggauaca

SEQ ID NO: 722115 - RNA, 19 nt, Artificial Sequence
  Description of Artificial Sequence: Synthetic oligonucleotide
  Antisense strand to SEQ ID NO: 722114
uguauccuaggaauucggu

SEQ ID NO: 722116 - RNA, 19 nt, Artificial Sequence
  Description of Artificial Sequence: Synthetic oligonucleotide
  Sense strand starting at position 552 of SEQ ID NO: 586495
uugaccgaauccuugaauu

SEQ ID NO: 722117 - RNA, 19 nt, Artificial Sequence
  Description of Artificial Sequence: Synthetic oligonucleotide
  Antisense strand to SEQ ID NO: 722116
aauucaaggauucggucaa

SEQ ID NO: 722118 - RNA, 19 nt, Artificial Sequence
  Description of Artificial Sequence: Synthetic oligonucleotide
  Sense strand starting at position 689 of SEQ ID NO: 586495
gauagugcugaguaccuaa

SEQ ID NO: 722119 - RNA, 19 nt, Artificial Sequence
  Description of Artificial Sequence: Synthetic oligonucleotide
  Antisense strand to SEQ ID NO: 722118
uuagguacucagcacuauc

SEQ ID NO: 722120 - RNA, 19 nt, Artificial Sequence
  Description of Artificial Sequence: Synthetic oligonucleotide
  Sense strand starting at position 965 of SEQ ID NO: 586495
ggcagagaaaccugugaaa

SEQ ID NO: 722121 - RNA, 19 nt, Artificial Sequence
  Description of Artificial Sequence: Synthetic oligonucleotide
  Antisense strand to SEQ ID NO: 722120
uuucacagguuucucugcc

SEQ ID NO: 722122 - RNA, 19 nt, Artificial Sequence
  Description of Artificial Sequence: Synthetic oligonucleotide
  Sense strand starting at position 1072 of SEQ ID NO: 586495
guuguaagggcuucguguu

SEQ ID NO: 722123 - RNA, 19 nt, Artificial Sequence
  Description of Artificial Sequence: Synthetic oligonucleotide
  Antisense strand to SEQ ID NO: 722122
aacacgaagcccuuacaac

SEQ ID NO: 722124 - RNA, 19 nt, Artificial Sequence
  Description of Artificial Sequence: Synthetic oligonucleotide
  Sense strand starting at position 1114 of SEQ ID NO: 586495
cugacuuagggucgucaca

SEQ ID NO: 722125 - RNA, 19 nt, Artificial Sequence
  Description of Artificial Sequence: Synthetic oligonucleotide
  Antisense strand to SEQ ID NO: 722124
ugugacgacccuaagucag

SEQ ID NO: 722126 - RNA, 19 nt, Artificial Sequence
  Description of Artificial Sequence: Synthetic oligonucleotide
  Sense strand starting at position 1116 of SEQ ID NO: 586495
gacuuagggucgucacaga

SEQ ID NO: 722127 - RNA, 19 nt, Artificial Sequence
  Description of Artificial Sequence: Synthetic oligonucleotide
  Antisense strand to SEQ ID NO: 722126
ucugugacgacccuaaguc

SEQ ID NO: 722128 - RNA, 19 nt, Artificial Sequence
  Description of Artificial Sequence: Synthetic oligonucleotide
  Sense strand starting at position 1242 of SEQ ID NO: 586495
ccacuuuccucacugagga

SEQ ID NO: 722129 - RNA, 19 nt, Artificial Sequence
  Description of Artificial Sequence: Synthetic oligonucleotide
  Antisense strand to SEQ ID NO: 722128
uccucagugaggaaagugg

SEQ ID NO: 722130 - RNA, 19 nt, Artificial Sequence
  Description of Artificial Sequence: Synthetic oligonucleotide
  Sense strand starting at position 1353 of SEQ ID NO: 586495
gugugaguagccuaacugu

SEQ ID NO: 722131 - RNA, 19 nt, Artificial Sequence
  Description of Artificial Sequence: Synthetic oligonucleotide
  Antisense strand to SEQ ID NO: 722130
acaguuaggcuacucacac

SEQ ID NO: 722132 - RNA, 19 nt, Artificial Sequence
  Description of Artificial Sequence: Synthetic oligonucleotide
  Sense strand starting at position 1397 of SEQ ID NO: 586495
ccuucuauucuggaguuag

SEQ ID NO: 722133 - RNA, 19 nt, Artificial Sequence
  Description of Artificial Sequence: Synthetic oligonucleotide
  Antisense strand to SEQ ID NO: 722132
cuaacuccagaauagaagg

SEQ ID NO: 722134 - RNA, 19 nt, Artificial Sequence
  Description of Artificial Sequence: Synthetic oligonucleotide
  Sense strand starting at position 1819 of SEQ ID NO: 586495
gucuccugcuccucagaaa

SEQ ID NO: 722135 - RNA, 19 nt, Artificial Sequence
  Description of Artificial Sequence: Synthetic oligonucleotide
  Antisense strand to SEQ ID NO: 722134
uuucugaggagcaggagac

SEQ ID NO: 722136 - RNA, 19 nt, Artificial Sequence
  Description of Artificial Sequence: Synthetic oligonucleotide
  Sense strand starting at position 2002 of SEQ ID NO: 586495
cucgaauauucugcugaca

SEQ ID NO: 722137 - RNA, 19 nt, Artificial Sequence
  Description of Artificial Sequence: Synthetic oligonucleotide
  Antisense strand to SEQ ID NO: 722136
ugucagcagaauauucgag

SEQ ID NO: 722138 - RNA, 19 nt, Artificial Sequence
  Description of Artificial Sequence: Synthetic oligonucleotide
  Sense strand starting at position 2170 of SEQ ID NO: 586495
gcuugcugacggcacaaau

SEQ ID NO: 722139 - RNA, 19 nt, Artificial Sequence
  Description of Artificial Sequence: Synthetic oligonucleotide
  Antisense strand to SEQ ID NO: 722138
auuugugccgucagcaagc

SEQ ID NO: 722140 - RNA, 19 nt, Artificial Sequence
  Description of Artificial Sequence: Synthetic oligonucleotide
  Sense strand starting at position 2272 of SEQ ID NO: 586495
uuccuauggcccugccaaa

SEQ ID NO: 722141 - RNA, 19 nt, Artificial Sequence
  Description of Artificial Sequence: Synthetic oligonucleotide
  Antisense strand to SEQ ID NO: 722140
uuuggcagggccauaggaa

SEQ ID NO: 722142 - RNA, 19 nt, Artificial Sequence
  Description of Artificial Sequence: Synthetic oligonucleotide
  Sense strand starting at position 2353 of SEQ ID NO: 586495
cugcucuauggcugaggau

SEQ ID NO: 722143 - RNA, 19 nt, Artificial Sequence
  Description of Artificial Sequence: Synthetic oligonucleotide
  Antisense strand to SEQ ID NO: 722142
auccucagccauagagcag

SEQ ID NO: 722144 - RNA, 19 nt, Artificial Sequence
  Description of Artificial Sequence: Synthetic oligonucleotide
  Sense strand starting at position 2426 of SEQ ID NO: 586495
uaaggcuagcucgaaacaa

SEQ ID NO: 722145 - RNA, 19 nt, Artificial Sequence
  Description of Artificial Sequence: Synthetic oligonucleotide
  Antisense strand to SEQ ID NO: 722144
uuguuucgagcuagccuua

SEQ ID NO: 722146 - RNA, 19 nt, Artificial Sequence
  Description of Artificial Sequence: Synthetic oligonucleotide
  Sense strand starting at position 2555 of SEQ ID NO: 586495
gggcuuguccaggaaacca

SEQ ID NO: 722147 - RNA, 19 nt, Artificial Sequence
  Description of Artificial Sequence: Synthetic oligonucleotide
  Antisense strand to SEQ ID NO: 722146
ugguuuccuggacaagccc

SEQ ID NO: 722148 - RNA, 19 nt, Artificial Sequence
  Description of Artificial Sequence: Synthetic oligonucleotide
  Sense strand starting at position 2676 of SEQ ID NO: 586495
ggaccucugcacugagauc

SEQ ID NO: 722149 - RNA, 19 nt, Artificial Sequence
  Description of Artificial Sequence: Synthetic oligonucleotide
  Antisense strand to SEQ ID NO: 722148
gaucucagugcagaggucc

SEQ ID NO: 722150 - RNA, 19 nt, Artificial Sequence
  Description of Artificial Sequence: Synthetic oligonucleotide
  Sense strand starting at position 2768 of SEQ ID NO: 586495
uuuagagucuugguuaaag

SEQ ID NO: 722151 - RNA, 19 nt, Artificial Sequence
  Description of Artificial Sequence: Synthetic oligonucleotide
  Antisense strand to SEQ ID NO: 722150
cuuuaaccaagacucuaaa

SEQ ID NO: 722152 - RNA, 19 nt, Artificial Sequence
  Description of Artificial Sequence: Synthetic oligonucleotide
  Sense strand starting at position 2770 of SEQ ID NO: 586495
uagagucuugguuaaagug

SEQ ID NO: 722153 - RNA, 19 nt, Artificial Sequence
  Description of Artificial Sequence: Synthetic oligonucleotide
  Antisense strand to SEQ ID NO: 722152
cacuuuaaccaagacucua

SEQ ID NO: 722154 - RNA, 19 nt, Artificial Sequence
  Description of Artificial Sequence: Synthetic oligonucleotide
  Sense strand starting at position 2854 of SEQ ID NO: 586495
uaaagugaggcuugccuau

SEQ ID NO: 722155 - RNA, 19 nt, Artificial Sequence
  Description of Artificial Sequence: Synthetic oligonucleotide
  Antisense strand to SEQ ID NO: 722154
auaggcaagccucacuuua

SEQ ID NO: 722156 - RNA, 19 nt, Artificial Sequence
  Description of Artificial Sequence: Synthetic oligonucleotide
  Sense strand starting at position 2866 of SEQ ID NO: 586495
ugccuauacuuucuagaag

SEQ ID NO: 722157 - RNA, 19 nt, Artificial Sequence
  Description of Artificial Sequence: Synthetic oligonucleotide
  Antisense strand to SEQ ID NO: 722156
cuucuagaaaguauaggca

SEQ ID NO: 722158 - RNA, 19 nt, Artificial Sequence
  Description of Artificial Sequence: Synthetic oligonucleotide
  Sense strand starting at position 2910 of SEQ ID NO: 586495
uccucugauugguugagua

SEQ ID NO: 722159 - RNA, 19 nt, Artificial Sequence
  Description of Artificial Sequence: Synthetic oligonucleotide
  Antisense strand to SEQ ID NO: 722158
uacucaaccaaucagagga

SEQ ID NO: 722160 - RNA, 19 nt, Artificial Sequence
  Description of Artificial Sequence: Synthetic oligonucleotide
  Sense strand starting at position 2912 of SEQ ID NO: 586495
cucugauugguugaguauu

SEQ ID NO: 722161 - RNA, 19 nt, Artificial Sequence
  Description of Artificial Sequence: Synthetic oligonucleotide
  Antisense strand to SEQ ID NO: 722160
aauacucaaccaaucagag

SEQ ID NO: 722162 - RNA, 19 nt, Artificial Sequence
  Description of Artificial Sequence: Synthetic oligonucleotide
  Sense strand starting at position 3238 of SEQ ID NO: 586495
caggcagucugguuuauua

SEQ ID NO: 722163 - RNA, 19 nt, Artificial Sequence
  Description of Artificial Sequence: Synthetic oligonucleotide
  Antisense strand to SEQ ID NO: 722162
uaauaaaccagacugccug

SEQ ID NO: 722164 - RNA, 19 nt, Artificial Sequence
  Description of Artificial Sequence: Synthetic oligonucleotide
  Sense strand starting at position 3240 of SEQ ID NO: 586495
ggcagucugguuuauuauu

SEQ ID NO: 722165 - RNA, 19 nt, Artificial Sequence
  Description of Artificial Sequence: Synthetic oligonucleotide
  Antisense strand to SEQ ID NO: 722164
aauaauaaaccagacugcc

SEQ ID NO: 722166 - RNA, 19 nt, Artificial Sequence
  Description of Artificial Sequence: Synthetic oligonucleotide
  Sense strand starting at position 3273 of SEQ ID NO: 586495
ucugauauugcugaccaga

SEQ ID NO: 722167 - RNA, 19 nt, Artificial Sequence
  Description of Artificial Sequence: Synthetic oligonucleotide
  Antisense strand to SEQ ID NO: 722166
ucuggucagcaauaucaga

SEQ ID NO: 722168 - RNA, 19 nt, Artificial Sequence
  Description of Artificial Sequence: Synthetic oligonucleotide
  Sense strand starting at position 3296 of SEQ ID NO: 586495
aguugagauuccguaugaa

SEQ ID NO: 722169 - RNA, 19 nt, Artificial Sequence
  Description of Artificial Sequence: Synthetic oligonucleotide
  Antisense strand to SEQ ID NO: 722168
uucauacggaaucucaacu

SEQ ID NO: 722170 - RNA, 19 nt, Artificial Sequence
  Description of Artificial Sequence: Synthetic oligonucleotide
  Sense strand starting at position 3299 of SEQ ID NO: 586495
ugagauuccguaugaaguc

SEQ ID NO: 722171 - RNA, 19 nt, Artificial Sequence
  Description of Artificial Sequence: Synthetic oligonucleotide
  Antisense strand to SEQ ID NO: 722170
gacuucauacggaaucuca

SEQ ID NO: 722172 - RNA, 19 nt, Artificial Sequence
  Description of Artificial Sequence: Synthetic oligonucleotide
  Sense strand starting at position 3329 of SEQ ID NO: 586495
uuaccugaauccucugaga

SEQ ID NO: 722173 - RNA, 19 nt, Artificial Sequence
  Description of Artificial Sequence: Synthetic oligonucleotide
  Antisense strand to SEQ ID NO: 722172
ucucagaggauucagguaa

SEQ ID NO: 722174 - RNA, 19 nt, Artificial Sequence
  Description of Artificial Sequence: Synthetic oligonucleotide
  Sense strand starting at position 3331 of SEQ ID NO: 586495
accugaauccucugagacg

SEQ ID NO: 722175 - RNA, 19 nt, Artificial Sequence
  Description of Artificial Sequence: Synthetic oligonucleotide
  Antisense strand to SEQ ID NO: 722174
cgucucagaggauucaggu

SEQ ID NO: 722176 - RNA, 19 nt, Artificial Sequence
  Description of Artificial Sequence: Synthetic oligonucleotide
  Sense strand starting at position 3416 of SEQ ID NO: 586495
ugggcuuugucucugacau

SEQ ID NO: 722177 - RNA, 19 nt, Artificial Sequence
  Description of Artificial Sequence: Synthetic oligonucleotide
  Antisense strand to SEQ ID NO: 722176
augucagagacaaagccca

SEQ ID NO: 722178 - RNA, 19 nt, Artificial Sequence
  Description of Artificial Sequence: Synthetic oligonucleotide
  Sense strand starting at position 3417 of SEQ ID NO: 586495
gggcuuugucucugacaug

SEQ ID NO: 722179 - RNA, 19 nt, Artificial Sequence
  Description of Artificial Sequence: Synthetic oligonucleotide
  Antisense strand to SEQ ID NO: 722178
caugucagagacaaagccc

SEQ ID NO: 722180 - RNA, 19 nt, Artificial Sequence
  Description of Artificial Sequence: Synthetic oligonucleotide
  Sense strand starting at position 3424 of SEQ ID NO: 586495
gucucugacaugugaauga

SEQ ID NO: 722181 - RNA, 19 nt, Artificial Sequence
  Description of Artificial Sequence: Synthetic oligonucleotide
  Antisense strand to SEQ ID NO: 722180
ucauucacaugucagagac

SEQ ID NO: 722182 - RNA, 19 nt, Artificial Sequence
  Description of Artificial Sequence: Synthetic oligonucleotide
  Sense strand starting at position 3545 of SEQ ID NO: 586495
uuugcuuuauuucucugua

SEQ ID NO: 722183 - RNA, 19 nt, Artificial Sequence
  Description of Artificial Sequence: Synthetic oligonucleotide
  Antisense strand to SEQ ID NO: 722182
uacagagaaauaaagcaaa

SEQ ID NO: 722184 - RNA, 19 nt, Artificial Sequence
  Description of Artificial Sequence: Synthetic oligonucleotide
  Sense strand starting at position 3557 of SEQ ID NO: 586495
cucuguaaacuguagguga

SEQ ID NO: 722185 - RNA, 19 nt, Artificial Sequence
  Description of Artificial Sequence: Synthetic oligonucleotide
  Antisense strand to SEQ ID NO: 722184
ucaccuacaguuuacagag

SEQ ID NO: 722186 - RNA, 19 nt, Artificial Sequence
  Description of Artificial Sequence: Synthetic oligonucleotide
  Sense strand starting at position 3739 of SEQ ID NO: 586495
gcuuaagcacgcguuaguu

SEQ ID NO: 722187 - RNA, 19 nt, Artificial Sequence
  Description of Artificial Sequence: Synthetic oligonucleotide
  Antisense strand to SEQ ID NO: 722186
aacuaacgcgugcuuaagc

SEQ ID NO: 722188 - RNA, 19 nt, Artificial Sequence
  Description of Artificial Sequence: Synthetic oligonucleotide
  Sense strand starting at position 38 of SEQ ID NO: 586496
cggcuuucuccacagucau

SEQ ID NO: 722189 - RNA, 19 nt, Artificial Sequence
  Description of Artificial Sequence: Synthetic oligonucleotide
  Antisense strand to SEQ ID NO: 722188
augacuguggagaaagccg

SEQ ID NO: 722190 - RNA, 19 nt, Artificial Sequence
  Description of Artificial Sequence: Synthetic oligonucleotide
  Sense strand starting at position 439 of SEQ ID NO: 586496
cagcguauucguuaggaga

SEQ ID NO: 722191 - RNA, 19 nt, Artificial Sequence
  Description of Artificial Sequence: Synthetic oligonucleotide
  Antisense strand to SEQ ID NO: 722190
ucuccuaacgaauacgcug

SEQ ID NO: 722192 - RNA, 19 nt, Artificial Sequence
  Description of Artificial Sequence: Synthetic oligonucleotide
  Sense strand starting at position 440 of SEQ ID NO: 586496
agcguauucguuaggagau

SEQ ID NO: 722193 - RNA, 19 nt, Artificial Sequence
  Description of Artificial Sequence: Synthetic oligonucleotide
  Antisense strand to SEQ ID NO: 722192
aucuccuaacgaauacgcu

SEQ ID NO: 722194 - RNA, 19 nt, Artificial Sequence
  Description of Artificial Sequence: Synthetic oligonucleotide
  Sense strand starting at position 913 of SEQ ID NO: 586496
cccagaaucacgugaguga

SEQ ID NO: 722195 - RNA, 19 nt, Artificial Sequence
  Description of Artificial Sequence: Synthetic oligonucleotide
  Antisense strand to SEQ ID NO: 722194
ucacucacgugauucuggg

SEQ ID NO: 722196 - RNA, 19 nt, Artificial Sequence
  Description of Artificial Sequence: Synthetic oligonucleotide
  Sense strand starting at position 914 of SEQ ID NO: 586496
ccagaaucacgugagugaa

SEQ ID NO: 722197 - RNA, 19 nt, Artificial Sequence
  Description of Artificial Sequence: Synthetic oligonucleotide
  Antisense strand to SEQ ID NO: 722196
uucacucacgugauucugg

SEQ ID NO: 722198 - RNA, 19 nt, Artificial Sequence
  Description of Artificial Sequence: Synthetic oligonucleotide
  Sense strand starting at position 916 of SEQ ID NO: 586496
agaaucacgugagugaaau

SEQ ID NO: 722199 - RNA, 19 nt, Artificial Sequence
  Description of Artificial Sequence: Synthetic oligonucleotide
  Antisense strand to SEQ ID NO: 722198
auuucacucacgugauucu

SEQ ID NO: 722200 - RNA, 19 nt, Artificial Sequence
  Description of Artificial Sequence: Synthetic oligonucleotide
  Sense strand starting at position 917 of SEQ ID NO: 586496
gaaucacgugagugaaauu

SEQ ID NO: 722201 - RNA, 19 nt, Artificial Sequence
  Description of Artificial Sequence: Synthetic oligonucleotide
  Antisense strand to SEQ ID NO: 722200
aauuucacucacgugauuc

SEQ ID NO: 722202 - RNA, 19 nt, Artificial Sequence
  Description of Artificial Sequence: Synthetic oligonucleotide
  Sense strand starting at position 977 of SEQ ID NO: 586496
ggcugugcuucuuuggaga

SEQ ID NO: 722203 - RNA, 19 nt, Artificial Sequence
  Description of Artificial Sequence: Synthetic oligonucleotide
  Antisense strand to SEQ ID NO: 722202
ucuccaaagaagcacagcc

SEQ ID NO: 722204 - RNA, 19 nt, Artificial Sequence
  Description of Artificial Sequence: Synthetic oligonucleotide
  Sense strand starting at position 1015 of SEQ ID NO: 586496
agaucuguggccgaggagu

SEQ ID NO: 722205 - RNA, 19 nt, Artificial Sequence
  Description of Artificial Sequence: Synthetic oligonucleotide
  Antisense strand to SEQ ID NO: 722204
acuccucggccacagaucu

SEQ ID NO: 722206 - RNA, 19 nt, Artificial Sequence
  Description of Artificial Sequence: Synthetic oligonucleotide
  Sense strand starting at position 1188 of SEQ ID NO: 586496
agaauaaagcccugcucaa

SEQ ID NO: 722207 - RNA, 19 nt, Artificial Sequence
  Description of Artificial Sequence: Synthetic oligonucleotide
  Antisense strand to SEQ ID NO: 722206
uugagcagggcuuuauucu

SEQ ID NO: 722208 - RNA, 19 nt, Artificial Sequence
  Description of Artificial Sequence: Synthetic oligonucleotide
  Sense strand starting at position 1453 of SEQ ID NO: 586496
augugaacuccuugcauau

SEQ ID NO: 722209 - RNA, 19 nt, Artificial Sequence
  Description of Artificial Sequence: Synthetic oligonucleotide
  Antisense strand to SEQ ID NO: 722208
auaugcaaggaguucacau

SEQ ID NO: 722210 - RNA, 19 nt, Artificial Sequence
  Description of Artificial Sequence: Synthetic oligonucleotide
  Sense strand starting at position 1474 of SEQ ID NO: 586496
cggccuuccacagaaguuu

SEQ ID NO: 722211 - RNA, 19 nt, Artificial Sequence
  Description of Artificial Sequence: Synthetic oligonucleotide
  Antisense strand to SEQ ID NO: 722210
aaacuucuguggaaggccg

SEQ ID NO: 722212 - RNA, 19 nt, Artificial Sequence
  Description of Artificial Sequence: Synthetic oligonucleotide
  Sense strand starting at position 1488 of SEQ ID NO: 586496
aguuuaucagccuguccaa

SEQ ID NO: 722213 - RNA, 19 nt, Artificial Sequence
  Description of Artificial Sequence: Synthetic oligonucleotide
  Antisense strand to SEQ ID NO: 722212
uuggacaggcugauaaacu

SEQ ID NO: 722214 - RNA, 19 nt, Artificial Sequence
  Description of Artificial Sequence: Synthetic oligonucleotide
  Sense strand starting at position 1650 of SEQ ID NO: 586496
ugggaaacauucuccguuu

SEQ ID NO: 722215 - RNA, 19 nt, Artificial Sequence
  Description of Artificial Sequence: Synthetic oligonucleotide
  Antisense strand to SEQ ID NO: 722214
aaacggagaauguuuccca

SEQ ID NO: 722216 - RNA, 19 nt, Artificial Sequence
  Description of Artificial Sequence: Synthetic oligonucleotide
  Sense strand starting at position 1651 of SEQ ID NO: 586496
gggaaacauucuccguuuc

SEQ ID NO: 722217 - RNA, 19 nt, Artificial Sequence
  Description of Artificial Sequence: Synthetic oligonucleotide
  Antisense strand to SEQ ID NO: 722216
gaaacggagaauguuuccc

SEQ ID NO: 722218 - RNA, 19 nt, Artificial Sequence
  Description of Artificial Sequence: Synthetic oligonucleotide
  Sense strand starting at position 1861 of SEQ ID NO: 586496
uuccaagcucacuggagaa

SEQ ID NO: 722219 - RNA, 19 nt, Artificial Sequence
  Description of Artificial Sequence: Synthetic oligonucleotide
  Antisense strand to SEQ ID NO: 722218
uucuccagugagcuuggaa

SEQ ID NO: 722220 - RNA, 19 nt, Artificial Sequence
  Description of Artificial Sequence: Synthetic oligonucleotide
  Sense strand starting at position 1937 of SEQ ID NO: 586496
cugugagugugcucucaag

SEQ ID NO: 722221 - RNA, 19 nt, Artificial Sequence
  Description of Artificial Sequence: Synthetic oligonucleotide
  Antisense strand to SEQ ID NO: 722220
cuugagagcacacucacag

SEQ ID NO: 722222 - RNA, 19 nt, Artificial Sequence
  Description of Artificial Sequence: Synthetic oligonucleotide
  Sense strand starting at position 1943 of SEQ ID NO: 586496
gugugcucucaaggaggaa

SEQ ID NO: 722223 - RNA, 19 nt, Artificial Sequence
  Description of Artificial Sequence: Synthetic oligonucleotide
  Antisense strand to SEQ ID NO: 722222
uuccuccuugagagcacac

SEQ ID NO: 722224 - RNA, 19 nt, Artificial Sequence
  Description of Artificial Sequence: Synthetic oligonucleotide
  Sense strand starting at position 2080 of SEQ ID NO: 586496
aggagcuuuccugguggaa

SEQ ID NO: 722225 - RNA, 19 nt, Artificial Sequence
  Description of Artificial Sequence: Synthetic oligonucleotide
  Antisense strand to SEQ ID NO: 722224
uuccaccaggaaagcuccu

SEQ ID NO: 722226 - RNA, 19 nt, Artificial Sequence
  Description of Artificial Sequence: Synthetic oligonucleotide
  Sense strand starting at position 2109 of SEQ ID NO: 586496
gcacgaagacccugagcuu

SEQ ID NO: 722227 - RNA, 19 nt, Artificial Sequence
  Description of Artificial Sequence: Synthetic oligonucleotide
  Antisense strand to SEQ ID NO: 722226
aagcucagggucuucgugc

SEQ ID NO: 722228 - RNA, 19 nt, Artificial Sequence
  Description of Artificial Sequence: Synthetic oligonucleotide
  Sense strand starting at position 2169 of SEQ ID NO: 586496
gcguguaggagagaugacu

SEQ ID NO: 722229 - RNA, 19 nt, Artificial Sequence
  Description of Artificial Sequence: Synthetic oligonucleotide
  Antisense strand to SEQ ID NO: 722228
agucaucucuccuacacgc

SEQ ID NO: 722230 - RNA, 19 nt, Artificial Sequence
  Description of Artificial Sequence: Synthetic oligonucleotide
  Sense strand starting at position 2559 of SEQ ID NO: 586496
cguccaaucccagagacau

SEQ ID NO: 722231 - RNA, 19 nt, Artificial Sequence
  Description of Artificial Sequence: Synthetic oligonucleotide
  Antisense strand to SEQ ID NO: 722230
augucucugggauuggacg

SEQ ID NO: 722232 - RNA, 19 nt, Artificial Sequence
  Description of Artificial Sequence: Synthetic oligonucleotide
  Sense strand starting at position 2676 of SEQ ID NO: 586496
ugcugagacuuuccaugag

SEQ ID NO: 722233 - RNA, 19 nt, Artificial Sequence
  Description of Artificial Sequence: Synthetic oligonucleotide
  Antisense strand to SEQ ID NO: 722232
cucauggaaagucucagca

SEQ ID NO: 722234 - RNA, 19 nt, Artificial Sequence
  Description of Artificial Sequence: Synthetic oligonucleotide
  Sense strand starting at position 2746 of SEQ ID NO: 586496
agcaacucugcgucuaagu

SEQ ID NO: 722235 - RNA, 19 nt, Artificial Sequence
  Description of Artificial Sequence: Synthetic oligonucleotide
  Antisense strand to SEQ ID NO: 722234
acuuagacgcagaguugcu

SEQ ID NO: 722236 - RNA, 19 nt, Artificial Sequence
  Description of Artificial Sequence: Synthetic oligonucleotide
  Sense strand starting at position 2747 of SEQ ID NO: 586496
gcaacucugcgucuaagua

SEQ ID NO: 722237 - RNA, 19 nt, Artificial Sequence
  Description of Artificial Sequence: Synthetic oligonucleotide
  Antisense strand to SEQ ID NO: 722236
uacuuagacgcagaguugc

SEQ ID NO: 722238 - RNA, 19 nt, Artificial Sequence
  Description of Artificial Sequence: Synthetic oligonucleotide
  Sense strand starting at position 2762 of SEQ ID NO: 586496
aguacacaucccggagaga

SEQ ID NO: 722239 - RNA, 19 nt, Artificial Sequence
  Description of Artificial Sequence: Synthetic oligonucleotide
  Antisense strand to SEQ ID NO: 722238
ucucuccgggauguguacu

SEQ ID NO: 722240 - RNA, 19 nt, Artificial Sequence
  Description of Artificial Sequence: Synthetic oligonucleotide
  Sense strand starting at position 2876 of SEQ ID NO: 586496
gggaacggaucagcaauua

SEQ ID NO: 722241 - RNA, 19 nt, Artificial Sequence
  Description of Artificial Sequence: Synthetic oligonucleotide
  Antisense strand to SEQ ID NO: 722240
uaauugcugauccguuccc

SEQ ID NO: 722242 - RNA, 19 nt, Artificial Sequence
  Description of Artificial Sequence: Synthetic oligonucleotide
  Sense strand starting at position 2881 of SEQ ID NO: 586496
cggaucagcaauuauggua

SEQ ID NO: 722243 - RNA, 19 nt, Artificial Sequence
  Description of Artificial Sequence: Synthetic oligonucleotide
  Antisense strand to SEQ ID NO: 722242
uaccauaauugcugauccg

SEQ ID NO: 722244 - RNA, 19 nt, Artificial Sequence
  Description of Artificial Sequence: Synthetic oligonucleotide
  Sense strand starting at position 2889 of SEQ ID NO: 586496
caauuaugguaaguaaugu

SEQ ID NO: 722245 - RNA, 19 nt, Artificial Sequence
  Description of Artificial Sequence: Synthetic oligonucleotide
  Antisense strand to SEQ ID NO: 722244
acauuacuuaccauaauug

SEQ ID NO: 722246 - RNA, 19 nt, Artificial Sequence
  Description of Artificial Sequence: Synthetic oligonucleotide
  Sense strand starting at position 2899 of SEQ ID NO: 586496
aaguaaugugacgguggaa

SEQ ID NO: 722247 - RNA, 19 nt, Artificial Sequence
  Description of Artificial Sequence: Synthetic oligonucleotide
  Antisense strand to SEQ ID NO: 722246
uuccaccgucacauuacuu

SEQ ID NO: 722248 - RNA, 19 nt, Artificial Sequence
  Description of Artificial Sequence: Synthetic oligonucleotide
  Sense strand starting at position 2901 of SEQ ID NO: 586496
guaaugugacgguggaaag

SEQ ID NO: 722249 - RNA, 19 nt, Artificial Sequence
  Description of Artificial Sequence: Synthetic oligonucleotide
  Antisense strand to SEQ ID NO: 722248
cuuuccaccgucacauuac

SEQ ID NO: 722250 - RNA, 19 nt, Artificial Sequence
  Description of Artificial Sequence: Synthetic oligonucleotide
  Sense strand starting at position 2902 of SEQ ID NO: 586496
uaaugugacgguggaaaga

SEQ ID NO: 722251 - RNA, 19 nt, Artificial Sequence
  Description of Artificial Sequence: Synthetic oligonucleotide
  Antisense strand to SEQ ID NO: 722250
ucuuuccaccgucacauua

SEQ ID NO: 722252 - RNA, 19 nt, Artificial Sequence
  Description of Artificial Sequence: Synthetic oligonucleotide
  Sense strand starting at position 2960 of SEQ ID NO: 586496
acaugugcugcucaccaaa

SEQ ID NO: 722253 - RNA, 19 nt, Artificial Sequence
  Description of Artificial Sequence: Synthetic oligonucleotide
  Antisense strand to SEQ ID NO: 722252
uuuggugagcagcacaugu

SEQ ID NO: 722254 - RNA, 19 nt, Artificial Sequence
  Description of Artificial Sequence: Synthetic oligonucleotide
  Sense strand starting at position 3407 of SEQ ID NO: 586496
caggguuuccucgguggga

SEQ ID NO: 722255 - RNA, 19 nt, Artificial Sequence
  Description of Artificial Sequence: Synthetic oligonucleotide
  Antisense strand to SEQ ID NO: 722254
ucccaccgaggaaacccug

SEQ ID NO: 722256 - RNA, 19 nt, Artificial Sequence
  Description of Artificial Sequence: Synthetic oligonucleotide
  Sense strand starting at position 3408 of SEQ ID NO: 586496
aggguuuccucggugggaa

SEQ ID NO: 722257 - RNA, 19 nt, Artificial Sequence
  Description of Artificial Sequence: Synthetic oligonucleotide
  Antisense strand to SEQ ID NO: 722256
uucccaccgaggaaacccu

SEQ ID NO: 722258 - RNA, 19 nt, Artificial Sequence
  Description of Artificial Sequence: Synthetic oligonucleotide
  Sense strand starting at position 3409 of SEQ ID NO: 586496
ggguuuccucggugggaag

SEQ ID NO: 722259 - RNA, 19 nt, Artificial Sequence
  Description of Artificial Sequence: Synthetic oligonucleotide
  Antisense strand to SEQ ID NO: 722258
cuucccaccgaggaaaccc

SEQ ID NO: 722260 - RNA, 19 nt, Artificial Sequence
  Description of Artificial Sequence: Synthetic oligonucleotide
  Sense strand starting at position 3439 of SEQ ID NO: 586496
cagugacagugagaaugau

SEQ ID NO: 722261 - RNA, 19 nt, Artificial Sequence
  Description of Artificial Sequence: Synthetic oligonucleotide
  Antisense strand to SEQ ID NO: 722260
aucauucucacugucacug

SEQ ID NO: 722262 - RNA, 19 nt, Artificial Sequence
  Description of Artificial Sequence: Synthetic oligonucleotide
  Sense strand starting at position 3445 of SEQ ID NO: 586496
cagugagaaugauauugaa

SEQ ID NO: 722263 - RNA, 19 nt, Artificial Sequence
  Description of Artificial Sequence: Synthetic oligonucleotide
  Antisense strand to SEQ ID NO: 722262
uucaauaucauucucacug

SEQ ID NO: 722264 - RNA, 19 nt, Artificial Sequence
  Description of Artificial Sequence: Synthetic oligonucleotide
  Sense strand starting at position 3498 of SEQ ID NO: 586496
acaggucuagcacacauua

SEQ ID NO: 722265 - RNA, 19 nt, Artificial Sequence
  Description of Artificial Sequence: Synthetic oligonucleotide
  Antisense strand to SEQ ID NO: 722264
uaaugugugcuagaccugu

SEQ ID NO: 722266 - RNA, 19 nt, Artificial Sequence
  Description of Artificial Sequence: Synthetic oligonucleotide
  Sense strand starting at position 3965 of SEQ ID NO: 586496
gccuccugauagcugaaau

SEQ ID NO: 722267 - RNA, 19 nt, Artificial Sequence
  Description of Artificial Sequence: Synthetic oligonucleotide
  Antisense strand to SEQ ID NO: 722266
auuucagcuaucaggaggc

SEQ ID NO: 722268 - RNA, 19 nt, Artificial Sequence
  Description of Artificial Sequence: Synthetic oligonucleotide
  Sense strand starting at position 414 of SEQ ID NO: 586497
uggugauaaugagcuauua

SEQ ID NO: 722269 - RNA, 19 nt, Artificial Sequence
  Description of Artificial Sequence: Synthetic oligonucleotide
  Antisense strand to SEQ ID NO: 722268
uaauagcucauuaucacca

SEQ ID NO: 722270 - RNA, 19 nt, Artificial Sequence
  Description of Artificial Sequence: Synthetic oligonucleotide
  Sense strand starting at position 435 of SEQ ID NO: 586497
aauguuuagguuugcuaau

SEQ ID NO: 722271 - RNA, 19 nt, Artificial Sequence
  Description of Artificial Sequence: Synthetic oligonucleotide
  Antisense strand to SEQ ID NO: 722270
auuagcaaaccuaaacauu

SEQ ID NO: 722272 - RNA, 19 nt, Artificial Sequence
  Description of Artificial Sequence: Synthetic oligonucleotide
  Sense strand starting at position 543 of SEQ ID NO: 586497
uggauuugcuuggagacca

SEQ ID NO: 722273 - RNA, 19 nt, Artificial Sequence
  Description of Artificial Sequence: Synthetic oligonucleotide
  Antisense strand to SEQ ID NO: 722272
uggucuccaagcaaaucca

SEQ ID NO: 722274 - RNA, 19 nt, Artificial Sequence
  Description of Artificial Sequence: Synthetic oligonucleotide
  Sense strand starting at position 575 of SEQ ID NO: 586497
ggugaauaggauuggcaca

SEQ ID NO: 722275 - RNA, 19 nt, Artificial Sequence
  Description of Artificial Sequence: Synthetic oligonucleotide
  Antisense strand to SEQ ID NO: 722274
ugugccaauccuauucacc

SEQ ID NO: 722276 - RNA, 19 nt, Artificial Sequence
  Description of Artificial Sequence: Synthetic oligonucleotide
  Sense strand starting at position 593 of SEQ ID NO: 586497
agaauugaugacugcuuua

SEQ ID NO: 722277 - RNA, 19 nt, Artificial Sequence
  Description of Artificial Sequence: Synthetic oligonucleotide
  Antisense strand to SEQ ID NO: 722276
uaaagcagucaucaauucu

SEQ ID NO: 722278 - RNA, 19 nt, Artificial Sequence
  Description of Artificial Sequence: Synthetic oligonucleotide
  Sense strand starting at position 596 of SEQ ID NO: 586497
auugaugacugcuuuaguu

SEQ ID NO: 722279 - RNA, 19 nt, Artificial Sequence
  Description of Artificial Sequence: Synthetic oligonucleotide
  Antisense strand to SEQ ID NO: 722278
aacuaaagcagucaucaau

SEQ ID NO: 722280 - RNA, 19 nt, Artificial Sequence
  Description of Artificial Sequence: Synthetic oligonucleotide
  Sense strand starting at position 888 of SEQ ID NO: 586497
caaaucuuccagugggaaa

SEQ ID NO: 722281 - RNA, 19 nt, Artificial Sequence
  Description of Artificial Sequence: Synthetic oligonucleotide
  Antisense strand to SEQ ID NO: 722280
uuucccacuggaagauuug

SEQ ID NO: 722282 - RNA, 19 nt, Artificial Sequence
  Description of Artificial Sequence: Synthetic oligonucleotide
  Sense strand starting at position 1205 of SEQ ID NO: 586497
ccacuacuucgggaggcua

SEQ ID NO: 722283 - RNA, 19 nt, Artificial Sequence
  Description of Artificial Sequence: Synthetic oligonucleotide
  Antisense strand to SEQ ID NO: 722282
uagccucccgaaguagugg

SEQ ID NO: 722284 - RNA, 19 nt, Artificial Sequence
  Description of Artificial Sequence: Synthetic oligonucleotide
  Sense strand starting at position 1531 of SEQ ID NO: 586497
gaggauguugucgaagaug

SEQ ID NO: 722285 - RNA, 19 nt, Artificial Sequence
  Description of Artificial Sequence: Synthetic oligonucleotide
  Antisense strand to SEQ ID NO: 722284
caucuucgacaacauccuc

SEQ ID NO: 722286 - RNA, 19 nt, Artificial Sequence
  Description of Artificial Sequence: Synthetic oligonucleotide
  Sense strand starting at position 2099 of SEQ ID NO: 586497
ggcucaucucgccaaggga

SEQ ID NO: 722287 - RNA, 19 nt, Artificial Sequence
  Description of Artificial Sequence: Synthetic oligonucleotide
  Antisense strand to SEQ ID NO: 722286
ucccuuggcgagaugagcc

SEQ ID NO: 722288 - RNA, 19 nt, Artificial Sequence
  Description of Artificial Sequence: Synthetic oligonucleotide
  Sense strand starting at position 2281 of SEQ ID NO: 586497
uuauaauugcucugagugg

SEQ ID NO: 722289 - RNA, 19 nt, Artificial Sequence
  Description of Artificial Sequence: Synthetic oligonucleotide
  Antisense strand to SEQ ID NO: 722288
ccacucagagcaauuauaa

SEQ ID NO: 722290 - RNA, 19 nt, Artificial Sequence
  Description of Artificial Sequence: Synthetic oligonucleotide
  Sense strand starting at position 2285 of SEQ ID NO: 586497
aauugcucugaguggacau

SEQ ID NO: 722291 - RNA, 19 nt, Artificial Sequence
  Description of Artificial Sequence: Synthetic oligonucleotide
  Antisense strand to SEQ ID NO: 722290
auguccacucagagcaauu

SEQ ID NO: 722292 - RNA, 19 nt, Artificial Sequence
  Description of Artificial Sequence: Synthetic oligonucleotide
  Sense strand starting at position 2374 of SEQ ID NO: 586497
gaaagauucucccuugguu

SEQ ID NO: 722293 - RNA, 19 nt, Artificial Sequence
  Description of Artificial Sequence: Synthetic oligonucleotide
  Antisense strand to SEQ ID NO: 722292
aaccaagggagaaucuuuc

SEQ ID NO: 722294 - RNA, 19 nt, Artificial Sequence
  Description of Artificial Sequence: Synthetic oligonucleotide
  Sense strand starting at position 2382 of SEQ ID NO: 586497
cucccuugguucccagauu

SEQ ID NO: 722295 - RNA, 19 nt, Artificial Sequence
  Description of Artificial Sequence: Synthetic oligonucleotide
  Antisense strand to SEQ ID NO: 722294
aaucugggaaccaagggag

SEQ ID NO: 722296 - RNA, 19 nt, Artificial Sequence
  Description of Artificial Sequence: Synthetic oligonucleotide
  Sense strand starting at position 2434 of SEQ ID NO: 586497
agcccaaaggcugggaaau

SEQ ID NO: 722297 - RNA, 19 nt, Artificial Sequence
  Description of Artificial Sequence: Synthetic oligonucleotide
  Antisense strand to SEQ ID NO: 722296
auuucccagccuuugggcu

SEQ ID NO: 722298 - RNA, 19 nt, Artificial Sequence
  Description of Artificial Sequence: Synthetic oligonucleotide
  Sense strand starting at position 2475 of SEQ ID NO: 586497
cgucguauucccuccgaug

SEQ ID NO: 722299 - RNA, 19 nt, Artificial Sequence
  Description of Artificial Sequence: Synthetic oligonucleotide
  Antisense strand to SEQ ID NO: 722298
caucggagggaauacgacg

SEQ ID NO: 722300 - RNA, 19 nt, Artificial Sequence
  Description of Artificial Sequence: Synthetic oligonucleotide
  Sense strand starting at position 2489 of SEQ ID NO: 586497
cgaugaucuuguuucuaca

SEQ ID NO: 722301 - RNA, 19 nt, Artificial Sequence
  Description of Artificial Sequence: Synthetic oligonucleotide
  Antisense strand to SEQ ID NO: 722300
uguagaaacaagaucaucg

SEQ ID NO: 722302 - RNA, 19 nt, Artificial Sequence
  Description of Artificial Sequence: Synthetic oligonucleotide
  Sense strand starting at position 2558 of SEQ ID NO: 586497
acaugcacccuuugagagu

SEQ ID NO: 722303 - RNA, 19 nt, Artificial Sequence
  Description of Artificial Sequence: Synthetic oligonucleotide
  Antisense strand to SEQ ID NO: 722302
acucucaaagggugcaugu

SEQ ID NO: 722304 - RNA, 19 nt, Artificial Sequence
  Description of Artificial Sequence: Synthetic oligonucleotide
  Sense strand starting at position 2650 of SEQ ID NO: 586497
uaugucucacagugauuga

SEQ ID NO: 722305 - RNA, 19 nt, Artificial Sequence
  Description of Artificial Sequence: Synthetic oligonucleotide
  Antisense strand to SEQ ID NO: 722304
ucaaucacugugagacaua

SEQ ID NO: 722306 - RNA, 19 nt, Artificial Sequence
  Description of Artificial Sequence: Synthetic oligonucleotide
  Sense strand starting at position 2654 of SEQ ID NO: 586497
ucucacagugauugagaga

SEQ ID NO: 722307 - RNA, 19 nt, Artificial Sequence
  Description of Artificial Sequence: Synthetic oligonucleotide
  Antisense strand to SEQ ID NO: 722306
ucucucaaucacugugaga

SEQ ID NO: 722308 - RNA, 19 nt, Artificial Sequence
  Description of Artificial Sequence: Synthetic oligonucleotide
  Sense strand starting at position 2717 of SEQ ID NO: 586497
ccaguuacuagguguacua

SEQ ID NO: 722309 - RNA, 19 nt, Artificial Sequence
  Description of Artificial Sequence: Synthetic oligonucleotide
  Antisense strand to SEQ ID NO: 722308
uaguacaccuaguaacugg

SEQ ID NO: 722310 - RNA, 19 nt, Artificial Sequence
  Description of Artificial Sequence: Synthetic oligonucleotide
  Sense strand starting at position 2726 of SEQ ID NO: 586497
agguguacuaguugcauaa

SEQ ID NO: 722311 - RNA, 19 nt, Artificial Sequence
  Description of Artificial Sequence: Synthetic oligonucleotide
  Antisense strand to SEQ ID NO: 722310
uuaugcaacuaguacaccu

SEQ ID NO: 722312 - RNA, 19 nt, Artificial Sequence
  Description of Artificial Sequence: Synthetic oligonucleotide
  Sense strand starting at position 2730 of SEQ ID NO: 586497
guacuaguugcauaacuuu

SEQ ID NO: 722313 - RNA, 19 nt, Artificial Sequence
  Description of Artificial Sequence: Synthetic oligonucleotide
  Antisense strand to SEQ ID NO: 722312
aaaguuaugcaacuaguac

SEQ ID NO: 722314 - RNA, 19 nt, Artificial Sequence
  Description of Artificial Sequence: Synthetic oligonucleotide
  Sense strand starting at position 2832 of SEQ ID NO: 586497
cauugacgacauugguuau

SEQ ID NO: 722315 - RNA, 19 nt, Artificial Sequence
  Description of Artificial Sequence: Synthetic oligonucleotide
  Antisense strand to SEQ ID NO: 722314
auaaccaaugucgucaaug

SEQ ID NO: 722316 - RNA, 19 nt, Artificial Sequence
  Description of Artificial Sequence: Synthetic oligonucleotide
  Sense strand starting at position 2843 of SEQ ID NO: 586497
uugguuauggcuugacauu

SEQ ID NO: 722317 - RNA, 19 nt, Artificial Sequence
  Description of Artificial Sequence: Synthetic oligonucleotide
  Antisense strand to SEQ ID NO: 722316
aaugucaagccauaaccaa

SEQ ID NO: 722318 - RNA, 19 nt, Artificial Sequence
  Description of Artificial Sequence: Synthetic oligonucleotide
  Sense strand starting at position 2844 of SEQ ID NO: 586497
ugguuauggcuugacauug

SEQ ID NO: 722319 - RNA, 19 nt, Artificial Sequence
  Description of Artificial Sequence: Synthetic oligonucleotide
  Antisense strand to SEQ ID NO: 722318
caaugucaagccauaacca

SEQ ID NO: 722320 - RNA, 19 nt, Artificial Sequence
  Description of Artificial Sequence: Synthetic oligonucleotide
  Sense strand starting at position 2849 of SEQ ID NO: 586497
auggcuugacauugcucaa

SEQ ID NO: 722321 - RNA, 19 nt, Artificial Sequence
  Description of Artificial Sequence: Synthetic oligonucleotide
  Antisense strand to SEQ ID NO: 722320
uugagcaaugucaagccau

SEQ ID NO: 722322 - RNA, 19 nt, Artificial Sequence
  Description of Artificial Sequence: Synthetic oligonucleotide
  Sense strand starting at position 2852 of SEQ ID NO: 586497
gcuugacauugcucaaauc

SEQ ID NO: 722323 - RNA, 19 nt, Artificial Sequence
  Description of Artificial Sequence: Synthetic oligonucleotide
  Antisense strand to SEQ ID NO: 722322
gauuugagcaaugucaagc

SEQ ID NO: 722324 - RNA, 19 nt, Artificial Sequence
  Description of Artificial Sequence: Synthetic oligonucleotide
  Sense strand starting at position 2860 of SEQ ID NO: 586497
uugcucaaaucgucaugaa

SEQ ID NO: 722325 - RNA, 19 nt, Artificial Sequence
  Description of Artificial Sequence: Synthetic oligonucleotide
  Antisense strand to SEQ ID NO: 722324
uucaugacgauuugagcaa

SEQ ID NO: 722326 - RNA, 19 nt, Artificial Sequence
  Description of Artificial Sequence: Synthetic oligonucleotide
  Sense strand starting at position 2861 of SEQ ID NO: 586497
ugcucaaaucgucaugaag

SEQ ID NO: 722327 - RNA, 19 nt, Artificial Sequence
  Description of Artificial Sequence: Synthetic oligonucleotide
  Antisense strand to SEQ ID NO: 722326
cuucaugacgauuugagca

SEQ ID NO: 722328 - RNA, 19 nt, Artificial Sequence
  Description of Artificial Sequence: Synthetic oligonucleotide
  Sense strand starting at position 2948 of SEQ ID NO: 586497
gagaucagcugauuacaga

SEQ ID NO: 722329 - RNA, 19 nt, Artificial Sequence
  Description of Artificial Sequence: Synthetic oligonucleotide
  Antisense strand to SEQ ID NO: 722328
ucuguaaucagcugaucuc

SEQ ID NO: 722330 - RNA, 19 nt, Artificial Sequence
  Description of Artificial Sequence: Synthetic oligonucleotide
  Sense strand starting at position 3010 of SEQ ID NO: 586497
gagcucagguaucccuuaa

SEQ ID NO: 722331 - RNA, 19 nt, Artificial Sequence
  Description of Artificial Sequence: Synthetic oligonucleotide
  Antisense strand to SEQ ID NO: 722330
uuaagggauaccugagcuc

SEQ ID NO: 722332 - RNA, 19 nt, Artificial Sequence
  Description of Artificial Sequence: Synthetic oligonucleotide
  Sense strand starting at position 3014 of SEQ ID NO: 586497
ucagguaucccuuaagauu

SEQ ID NO: 722333 - RNA, 19 nt, Artificial Sequence
  Description of Artificial Sequence: Synthetic oligonucleotide
  Antisense strand to SEQ ID NO: 722332
aaucuuaagggauaccuga

SEQ ID NO: 722334 - RNA, 19 nt, Artificial Sequence
  Description of Artificial Sequence: Synthetic oligonucleotide
  Sense strand starting at position 3268 of SEQ ID NO: 586497
cuagaaggauguuuccgau

SEQ ID NO: 722335 - RNA, 19 nt, Artificial Sequence
  Description of Artificial Sequence: Synthetic oligonucleotide
  Antisense strand to SEQ ID NO: 722334
aucggaaacauccuucuag

SEQ ID NO: 722336 - RNA, 19 nt, Artificial Sequence
  Description of Artificial Sequence: Synthetic oligonucleotide
  Sense strand starting at position 3274 of SEQ ID NO: 586497
ggauguuuccgauguuauc

SEQ ID NO: 722337 - RNA, 19 nt, Artificial Sequence
  Description of Artificial Sequence: Synthetic oligonucleotide
  Antisense strand to SEQ ID NO: 722336
gauaacaucggaaacaucc

SEQ ID NO: 722338 - RNA, 19 nt, Artificial Sequence
  Description of Artificial Sequence: Synthetic oligonucleotide
  Sense strand starting at position 3306 of SEQ ID NO: 586497
augguuucagguuguagau

SEQ ID NO: 722339 - RNA, 19 nt, Artificial Sequence
  Description of Artificial Sequence: Synthetic oligonucleotide
  Antisense strand to SEQ ID NO: 722338
aucuacaaccugaaaccau

SEQ ID NO: 722340 - RNA, 19 nt, Artificial Sequence
  Description of Artificial Sequence: Synthetic oligonucleotide
  Sense strand starting at position 3333 of SEQ ID NO: 586497
uugaucuauccugaguuga

SEQ ID NO: 722341 - RNA, 19 nt, Artificial Sequence
  Description of Artificial Sequence: Synthetic oligonucleotide
  Antisense strand to SEQ ID NO: 722340
ucaacucaggauagaucaa

SEQ ID NO: 722342 - RNA, 19 nt, Artificial Sequence
  Description of Artificial Sequence: Synthetic oligonucleotide
  Sense strand starting at position 3335 of SEQ ID NO: 586497
gaucuauccugaguugauu

SEQ ID NO: 722343 - RNA, 19 nt, Artificial Sequence
  Description of Artificial Sequence: Synthetic oligonucleotide
  Antisense strand to SEQ ID NO: 722342
aaucaacucaggauagauc

SEQ ID NO: 722344 - RNA, 19 nt, Artificial Sequence
  Description of Artificial Sequence: Synthetic oligonucleotide
  Sense strand starting at position 3572 of SEQ ID NO: 586497
uugugacgauagccuuaua

SEQ ID NO: 722345 - RNA, 19 nt, Artificial Sequence
  Description of Artificial Sequence: Synthetic oligonucleotide
  Antisense strand to SEQ ID NO: 722344
uauaaggcuaucgucacaa

SEQ ID NO: 722346 - RNA, 19 nt, Artificial Sequence
  Description of Artificial Sequence: Synthetic oligonucleotide
  Sense strand starting at position 3961 of SEQ ID NO: 586497
uagaaagucuugcuuguuu

SEQ ID NO: 722347 - RNA, 19 nt, Artificial Sequence
  Description of Artificial Sequence: Synthetic oligonucleotide
  Antisense strand to SEQ ID NO: 722346
aaacaagcaagacuuucua

SEQ ID NO: 722348 - RNA, 19 nt, Artificial Sequence
  Description of Artificial Sequence: Synthetic oligonucleotide
  Sense strand starting at position 109 of SEQ ID NO: 586498
aguacugguuuagagaaau

SEQ ID NO: 722349 - RNA, 19 nt, Artificial Sequence
  Description of Artificial Sequence: Synthetic oligonucleotide
  Antisense strand to SEQ ID NO: 722348
auuucucuaaaccaguacu

SEQ ID NO: 722350 - RNA, 19 nt, Artificial Sequence
  Description of Artificial Sequence: Synthetic oligonucleotide
  Sense strand starting at position 127 of SEQ ID NO: 586498
uaagaauucuggccgggca

SEQ ID NO: 722351 - RNA, 19 nt, Artificial Sequence
  Description of Artificial Sequence: Synthetic oligonucleotide
  Antisense strand to SEQ ID NO: 722350
ugcccggccagaauucuua

SEQ ID NO: 722352 - RNA, 19 nt, Artificial Sequence
  Description of Artificial Sequence: Synthetic oligonucleotide
  Sense strand starting at position 128 of SEQ ID NO: 586498
aagaauucuggccgggcaa

SEQ ID NO: 722353 - RNA, 19 nt, Artificial Sequence
  Description of Artificial Sequence: Synthetic oligonucleotide
  Antisense strand to SEQ ID NO: 722352
uugcccggccagaauucuu

SEQ ID NO: 722354 - RNA, 19 nt, Artificial Sequence
  Description of Artificial Sequence: Synthetic oligonucleotide
  Sense strand starting at position 538 of SEQ ID NO: 586498
acuuaugaugacugucaag

SEQ ID NO: 722355 - RNA, 19 nt, Artificial Sequence
  Description of Artificial Sequence: Synthetic oligonucleotide
  Antisense strand to SEQ ID NO: 722354
cuugacagucaucauaagu

SEQ ID NO: 722356 - RNA, 19 nt, Artificial Sequence
  Description of Artificial Sequence: Synthetic oligonucleotide
  Sense strand starting at position 541 of SEQ ID NO: 586498
uaugaugacugucaagauu

SEQ ID NO: 722357 - RNA, 19 nt, Artificial Sequence
  Description of Artificial Sequence: Synthetic oligonucleotide
  Antisense strand to SEQ ID NO: 722356
aaucuugacagucaucaua

SEQ ID NO: 722358 - RNA, 19 nt, Artificial Sequence
  Description of Artificial Sequence: Synthetic oligonucleotide
  Sense strand starting at position 562 of SEQ ID NO: 586498
acuucugguucuguauuau

SEQ ID NO: 722359 - RNA, 19 nt, Artificial Sequence
  Description of Artificial Sequence: Synthetic oligonucleotide
  Antisense strand to SEQ ID NO: 722358
auaauacagaaccagaagu

SEQ ID NO: 722360 - RNA, 19 nt, Artificial Sequence
  Description of Artificial Sequence: Synthetic oligonucleotide
  Sense strand starting at position 598 of SEQ ID NO: 586498
agucuuaaucuagaacagu

SEQ ID NO: 722361 - RNA, 19 nt, Artificial Sequence
  Description of Artificial Sequence: Synthetic oligonucleotide
  Antisense strand to SEQ ID NO: 722360
acuguucuagauuaagacu

SEQ ID NO: 722362 - RNA, 19 nt, Artificial Sequence
  Description of Artificial Sequence: Synthetic oligonucleotide
  Sense strand starting at position 607 of SEQ ID NO: 586498
cuagaacagugguccuuaa

SEQ ID NO: 722363 - RNA, 19 nt, Artificial Sequence
  Description of Artificial Sequence: Synthetic oligonucleotide
  Antisense strand to SEQ ID NO: 722362
uuaaggaccacuguucuag

SEQ ID NO: 722364 - RNA, 19 nt, Artificial Sequence
  Description of Artificial Sequence: Synthetic oligonucleotide
  Sense strand starting at position 621 of SEQ ID NO: 586498
cuuaacuaacgcuguauuu

SEQ ID NO: 722365 - RNA, 19 nt, Artificial Sequence
  Description of Artificial Sequence: Synthetic oligonucleotide
  Antisense strand to SEQ ID NO: 722364
aaauacagcguuaguuaag

SEQ ID NO: 722366 - RNA, 19 nt, Artificial Sequence
  Description of Artificial Sequence: Synthetic oligonucleotide
  Sense strand starting at position 648 of SEQ ID NO: 586498
gaggacuucuagcaauaug

SEQ ID NO: 722367 - RNA, 19 nt, Artificial Sequence
  Description of Artificial Sequence: Synthetic oligonucleotide
  Antisense strand to SEQ ID NO: 722366
cauauugcuagaaguccuc

SEQ ID NO: 722368 - RNA, 19 nt, Artificial Sequence
  Description of Artificial Sequence: Synthetic oligonucleotide
  Sense strand starting at position 804 of SEQ ID NO: 586498
ccgugcuaagaucaagaca

SEQ ID NO: 722369 - RNA, 19 nt, Artificial Sequence
  Description of Artificial Sequence: Synthetic oligonucleotide
  Antisense strand to SEQ ID NO: 722368
ugucuugaucuuagcacgg

SEQ ID NO: 722370 - RNA, 19 nt, Artificial Sequence
  Description of Artificial Sequence: Synthetic oligonucleotide
  Sense strand starting at position 940 of SEQ ID NO: 586498
uugcuuuaaacauggugga

SEQ ID NO: 722371 - RNA, 19 nt, Artificial Sequence
  Description of Artificial Sequence: Synthetic oligonucleotide
  Antisense strand to SEQ ID NO: 722370
uccaccauguuuaaagcaa

SEQ ID NO: 722372 - RNA, 19 nt, Artificial Sequence
  Description of Artificial Sequence: Synthetic oligonucleotide
  Sense strand starting at position 941 of SEQ ID NO: 586498
ugcuuuaaacaugguggau

SEQ ID NO: 722373 - RNA, 19 nt, Artificial Sequence
  Description of Artificial Sequence: Synthetic oligonucleotide
  Antisense strand to SEQ ID NO: 722372
auccaccauguuuaaagca

SEQ ID NO: 722374 - RNA, 19 nt, Artificial Sequence
  Description of Artificial Sequence: Synthetic oligonucleotide
  Sense strand starting at position 961 of SEQ ID NO: 586498
gcuggcucaaacuaagagu

SEQ ID NO: 722375 - RNA, 19 nt, Artificial Sequence
  Description of Artificial Sequence: Synthetic oligonucleotide
  Antisense strand to SEQ ID NO: 722374
acucuuaguuugagccagc

SEQ ID NO: 722376 - RNA, 19 nt, Artificial Sequence
  Description of Artificial Sequence: Synthetic oligonucleotide
  Sense strand starting at position 1422 of SEQ ID NO: 586498
acaagcaguccuuggaaau

SEQ ID NO: 722377 - RNA, 19 nt, Artificial Sequence
  Description of Artificial Sequence: Synthetic oligonucleotide
  Antisense strand to SEQ ID NO: 722376
auuuccaaggacugcuugu

SEQ ID NO: 722378 - RNA, 19 nt, Artificial Sequence
  Description of Artificial Sequence: Synthetic oligonucleotide
  Sense strand starting at position 1423 of SEQ ID NO: 586498
caagcaguccuuggaaaug

SEQ ID NO: 722379 - RNA, 19 nt, Artificial Sequence
  Description of Artificial Sequence: Synthetic oligonucleotide
  Antisense strand to SEQ ID NO: 722378
cauuuccaaggacugcuug

SEQ ID NO: 722380 - RNA, 19 nt, Artificial Sequence
  Description of Artificial Sequence: Synthetic oligonucleotide
  Sense strand starting at position 1446 of SEQ ID NO: 586498
ugaagauucugagaaauuu

SEQ ID NO: 722381 - RNA, 19 nt, Artificial Sequence
  Description of Artificial Sequence: Synthetic oligonucleotide
  Antisense strand to SEQ ID NO: 722380
aaauuucucagaaucuuca

SEQ ID NO: 722382 - RNA, 19 nt, Artificial Sequence
  Description of Artificial Sequence: Synthetic oligonucleotide
  Sense strand starting at position 1481 of SEQ ID NO: 586498
ccuagagugugagaagaaa

SEQ ID NO: 722383 - RNA, 19 nt, Artificial Sequence
  Description of Artificial Sequence: Synthetic oligonucleotide
  Antisense strand to SEQ ID NO: 722382
uuucuucucacacucuagg

SEQ ID NO: 722384 - RNA, 19 nt, Artificial Sequence
  Description of Artificial Sequence: Synthetic oligonucleotide
  Sense strand starting at position 1626 of SEQ ID NO: 586498
ccacguagcguuucacgaa

SEQ ID NO: 722385 - RNA, 19 nt, Artificial Sequence
  Description of Artificial Sequence: Synthetic oligonucleotide
  Antisense strand to SEQ ID NO: 722384
uucgugaaacgcuacgugg

SEQ ID NO: 722386 - RNA, 19 nt, Artificial Sequence
  Description of Artificial Sequence: Synthetic oligonucleotide
  Sense strand starting at position 1633 of SEQ ID NO: 586498
gcguuucacgaacagaaca

SEQ ID NO: 722387 - RNA, 19 nt, Artificial Sequence
  Description of Artificial Sequence: Synthetic oligonucleotide
  Antisense strand to SEQ ID NO: 722386
uguucuguucgugaaacgc

SEQ ID NO: 722388 - RNA, 19 nt, Artificial Sequence
  Description of Artificial Sequence: Synthetic oligonucleotide
  Sense strand starting at position 1674 of SEQ ID NO: 586498
uugcguguaccuggcaaau

SEQ ID NO: 722389 - RNA, 19 nt, Artificial Sequence
  Description of Artificial Sequence: Synthetic oligonucleotide
  Antisense strand to SEQ ID NO: 722388
auuugccagguacacgcaa

SEQ ID NO: 722390 - RNA, 19 nt, Artificial Sequence
  Description of Artificial Sequence: Synthetic oligonucleotide
  Sense strand starting at position 2012 of SEQ ID NO: 586498
gcacucugggcaugagaaa

SEQ ID NO: 722391 - RNA, 19 nt, Artificial Sequence
  Description of Artificial Sequence: Synthetic oligonucleotide
  Antisense strand to SEQ ID NO: 722390
uuucucaugcccagagugc

SEQ ID NO: 722392 - RNA, 19 nt, Artificial Sequence
  Description of Artificial Sequence: Synthetic oligonucleotide
  Sense strand starting at position 2229 of SEQ ID NO: 586498
cacgaaagcauccgaguga

SEQ ID NO: 722393 - RNA, 19 nt, Artificial Sequence
  Description of Artificial Sequence: Synthetic oligonucleotide
  Antisense strand to SEQ ID NO: 722392
ucacucggaugcuuucgug

SEQ ID NO: 722394 - RNA, 19 nt, Artificial Sequence
  Description of Artificial Sequence: Synthetic oligonucleotide
  Sense strand starting at position 2233 of SEQ ID NO: 586498
aaagcauccgagugaagug

SEQ ID NO: 722395 - RNA, 19 nt, Artificial Sequence
  Description of Artificial Sequence: Synthetic oligonucleotide
  Antisense strand to SEQ ID NO: 722394
cacuucacucggaugcuuu

SEQ ID NO: 722396 - RNA, 19 nt, Artificial Sequence
  Description of Artificial Sequence: Synthetic oligonucleotide
  Sense strand starting at position 3144 of SEQ ID NO: 586498
gguaauuucuuuccguuua

SEQ ID NO: 722397 - RNA, 19 nt, Artificial Sequence
  Description of Artificial Sequence: Synthetic oligonucleotide
  Antisense strand to SEQ ID NO: 722396
uaaacggaaagaaauuacc

SEQ ID NO: 722398 - RNA, 19 nt, Artificial Sequence
  Description of Artificial Sequence: Synthetic oligonucleotide
  Sense strand starting at position 3313 of SEQ ID NO: 586498
guuucagggccgugagaaa

SEQ ID NO: 722399 - RNA, 19 nt, Artificial Sequence
  Description of Artificial Sequence: Synthetic oligonucleotide
  Antisense strand to SEQ ID NO: 722398
uuucucacggcccugaaac

SEQ ID NO: 722400 - RNA, 19 nt, Artificial Sequence
  Description of Artificial Sequence: Synthetic oligonucleotide
  Sense strand starting at position 3521 of SEQ ID NO: 586498
aggauuuccucguaaccua

SEQ ID NO: 722401 - RNA, 19 nt, Artificial Sequence
  Description of Artificial Sequence: Synthetic oligonucleotide
  Antisense strand to SEQ ID NO: 722400
uagguuacgaggaaauccu

SEQ ID NO: 722402 - RNA, 19 nt, Artificial Sequence
  Description of Artificial Sequence: Synthetic oligonucleotide
  Sense strand starting at position 3607 of SEQ ID NO: 586498
agccaaucuccacaucgua

SEQ ID NO: 722403 - RNA, 19 nt, Artificial Sequence
  Description of Artificial Sequence: Synthetic oligonucleotide
  Antisense strand to SEQ ID NO: 722402
uacgauguggagauuggcu

SEQ ID NO: 722404 - RNA, 19 nt, Artificial Sequence
  Description of Artificial Sequence: Synthetic oligonucleotide
  Sense strand starting at position 3626 of SEQ ID NO: 586498
gcagaucuccucuagagca

SEQ ID NO: 722405 - RNA, 19 nt, Artificial Sequence
  Description of Artificial Sequence: Synthetic oligonucleotide
  Antisense strand to SEQ ID NO: 722404
ugcucuagaggagaucugc

SEQ ID NO: 722406 - RNA, 19 nt, Artificial Sequence
  Description of Artificial Sequence: Synthetic oligonucleotide
  Sense strand starting at position 3675 of SEQ ID NO: 586498
caauauuuaugaccguguu

SEQ ID NO: 722407 - RNA, 19 nt, Artificial Sequence
  Description of Artificial Sequence: Synthetic oligonucleotide
  Antisense strand to SEQ ID NO: 722406
aacacggucauaaauauug

SEQ ID NO: 722408 - RNA, 19 nt, Artificial Sequence
  Description of Artificial Sequence: Synthetic oligonucleotide
  Sense strand starting at position 3676 of SEQ ID NO: 586498
aauauuuaugaccguguuu

SEQ ID NO: 722409 - RNA, 19 nt, Artificial Sequence
  Description of Artificial Sequence: Synthetic oligonucleotide
  Antisense strand to SEQ ID NO: 722408
aaacacggucauaaauauu

SEQ ID NO: 722410 - RNA, 19 nt, Artificial Sequence
  Description of Artificial Sequence: Synthetic oligonucleotide
  Sense strand starting at position 3678 of SEQ ID NO: 586498
uauuuaugaccguguuugu

SEQ ID NO: 722411 - RNA, 19 nt, Artificial Sequence
  Description of Artificial Sequence: Synthetic oligonucleotide
  Antisense strand to SEQ ID NO: 722410
acaaacacggucauaaaua

SEQ ID NO: 722412 - RNA, 19 nt, Artificial Sequence
  Description of Artificial Sequence: Synthetic oligonucleotide
  Sense strand starting at position 3681 of SEQ ID NO: 586498
uuaugaccguguuuguaac

SEQ ID NO: 722413 - RNA, 19 nt, Artificial Sequence
  Description of Artificial Sequence: Synthetic oligonucleotide
  Antisense strand to SEQ ID NO: 722412
guuacaaacacggucauaa

SEQ ID NO: 722414 - RNA, 19 nt, Artificial Sequence
  Description of Artificial Sequence: Synthetic oligonucleotide
  Sense strand starting at position 3688 of SEQ ID NO: 586498
cguguuuguaacuccugua

SEQ ID NO: 722415 - RNA, 19 nt, Artificial Sequence
  Description of Artificial Sequence: Synthetic oligonucleotide
  Antisense strand to SEQ ID NO: 722414
uacaggaguuacaaacacg

SEQ ID NO: 722416 - RNA, 19 nt, Artificial Sequence
  Description of Artificial Sequence: Synthetic oligonucleotide
  Sense strand starting at position 3796 of SEQ ID NO: 586498
uguaacaaucggcggagau

SEQ ID NO: 722417 - RNA, 19 nt, Artificial Sequence
  Description of Artificial Sequence: Synthetic oligonucleotide
  Antisense strand to SEQ ID NO: 722416
aucuccgccgauuguuaca

SEQ ID NO: 722418 - RNA, 19 nt, Artificial Sequence
  Description of Artificial Sequence: Synthetic oligonucleotide
  Sense strand starting at position 3797 of SEQ ID NO: 586498
guaacaaucggcggagaua

SEQ ID NO: 722419 - RNA, 19 nt, Artificial Sequence
  Description of Artificial Sequence: Synthetic oligonucleotide
  Antisense strand to SEQ ID NO: 722418
uaucuccgccgauuguuac

SEQ ID NO: 722420 - RNA, 19 nt, Artificial Sequence
  Description of Artificial Sequence: Synthetic oligonucleotide
  Sense strand starting at position 3798 of SEQ ID NO: 586498
uaacaaucggcggagauaa

SEQ ID NO: 722421 - RNA, 19 nt, Artificial Sequence
  Description of Artificial Sequence: Synthetic oligonucleotide
  Antisense strand to SEQ ID NO: 722420
uuaucuccgccgauuguua

SEQ ID NO: 722422 - RNA, 19 nt, Artificial Sequence
  Description of Artificial Sequence: Synthetic oligonucleotide
  Sense strand starting at position 3862 of SEQ ID NO: 586498
ugagcagaggcuuaagauc

SEQ ID NO: 722423 - RNA, 19 nt, Artificial Sequence
  Description of Artificial Sequence: Synthetic oligonucleotide
  Antisense strand to SEQ ID NO: 722422
gaucuuaagccucugcuca

SEQ ID NO: 722424 - RNA, 19 nt, Artificial Sequence
  Description of Artificial Sequence: Synthetic oligonucleotide
  Sense strand starting at position 3933 of SEQ ID NO: 586498
agcguuaacugauuagaaa

SEQ ID NO: 722425 - RNA, 19 nt, Artificial Sequence
  Description of Artificial Sequence: Synthetic oligonucleotide
  Antisense strand to SEQ ID NO: 722424
uuucuaaucaguuaacgcu

SEQ ID NO: 722426 - RNA, 19 nt, Artificial Sequence
  Description of Artificial Sequence: Synthetic oligonucleotide
  Sense strand starting at position 3972 of SEQ ID NO: 586498
aaacaugguccuugaugua

SEQ ID NO: 722427 - RNA, 19 nt, Artificial Sequence
  Description of Artificial Sequence: Synthetic oligonucleotide
  Antisense strand to SEQ ID NO: 722426
uacaucaaggaccauguuu

SEQ ID NO: 722428 - RNA, 19 nt, Artificial Sequence
  Description of Artificial Sequence: Synthetic oligonucleotide
  Sense strand starting at position 9 of SEQ ID NO: 586499
uugcuuuaaacauggugga

SEQ ID NO: 722429 - RNA, 19 nt, Artificial Sequence
  Description of Artificial Sequence: Synthetic oligonucleotide
  Antisense strand to SEQ ID NO: 722428
uccaccauguuuaaagcaa

SEQ ID NO: 722430 - RNA, 19 nt, Artificial Sequence
  Description of Artificial Sequence: Synthetic oligonucleotide
  Sense strand starting at position 10 of SEQ ID NO: 586499
ugcuuuaaacaugguggau

SEQ ID NO: 722431 - RNA, 19 nt, Artificial Sequence
  Description of Artificial Sequence: Synthetic oligonucleotide
  Antisense strand to SEQ ID NO: 722430
auccaccauguuuaaagca

SEQ ID NO: 722432 - RNA, 19 nt, Artificial Sequence
  Description of Artificial Sequence: Synthetic oligonucleotide
  Sense strand starting at position 30 of SEQ ID NO: 586499
gcuggcucaaacuaagagu

SEQ ID NO: 722433 - RNA, 19 nt, Artificial Sequence
  Description of Artificial Sequence: Synthetic oligonucleotide
  Antisense strand to SEQ ID NO: 722432
acucuuaguuugagccagc

SEQ ID NO: 722434 - RNA, 19 nt, Artificial Sequence
  Description of Artificial Sequence: Synthetic oligonucleotide
  Sense strand starting at position 491 of SEQ ID NO: 586499
acaagcaguccuuggaaau

SEQ ID NO: 722435 - RNA, 19 nt, Artificial Sequence
  Description of Artificial Sequence: Synthetic oligonucleotide
  Antisense strand to SEQ ID NO: 722434
auuuccaaggacugcuugu

SEQ ID NO: 722436 - RNA, 19 nt, Artificial Sequence
  Description of Artificial Sequence: Synthetic oligonucleotide
  Sense strand starting at position 492 of SEQ ID NO: 586499
caagcaguccuuggaaaug

SEQ ID NO: 722437 - RNA, 19 nt, Artificial Sequence
  Description of Artificial Sequence: Synthetic oligonucleotide
  Antisense strand to SEQ ID NO: 722436
cauuuccaaggacugcuug

SEQ ID NO: 722438 - RNA, 19 nt, Artificial Sequence
  Description of Artificial Sequence: Synthetic oligonucleotide
  Sense strand starting at position 515 of SEQ ID NO: 586499
ugaagauucugagaaauuu

SEQ ID NO: 722439 - RNA, 19 nt, Artificial Sequence
  Description of Artificial Sequence: Synthetic oligonucleotide
  Antisense strand to SEQ ID NO: 722438
aaauuucucagaaucuuca

SEQ ID NO: 722440 - RNA, 19 nt, Artificial Sequence
  Description of Artificial Sequence: Synthetic oligonucleotide
  Sense strand starting at position 695 of SEQ ID NO: 586499
ccacguagcguuucacgaa

SEQ ID NO: 722441 - RNA, 19 nt, Artificial Sequence
  Description of Artificial Sequence: Synthetic oligonucleotide
  Antisense strand to SEQ ID NO: 722440
uucgugaaacgcuacgugg

SEQ ID NO: 722442 - RNA, 19 nt, Artificial Sequence
  Description of Artificial Sequence: Synthetic oligonucleotide
  Sense strand starting at position 702 of SEQ ID NO: 586499
gcguuucacgaacagaaca

SEQ ID NO: 722443 - RNA, 19 nt, Artificial Sequence
  Description of Artificial Sequence: Synthetic oligonucleotide
  Antisense strand to SEQ ID NO: 722442
uguucuguucgugaaacgc

SEQ ID NO: 722444 - RNA, 19 nt, Artificial Sequence
  Description of Artificial Sequence: Synthetic oligonucleotide
  Sense strand starting at position 1081 of SEQ ID NO: 586499
gcacucugggcaugagaaa

SEQ ID NO: 722445 - RNA, 19 nt, Artificial Sequence
  Description of Artificial Sequence: Synthetic oligonucleotide
  Antisense strand to SEQ ID NO: 722444
uuucucaugcccagagugc

SEQ ID NO: 722446 - RNA, 19 nt, Artificial Sequence
  Description of Artificial Sequence: Synthetic oligonucleotide
  Sense strand starting at position 1302 of SEQ ID NO: 586499
aaagcauccgagugaagug

SEQ ID NO: 722447 - RNA, 19 nt, Artificial Sequence
  Description of Artificial Sequence: Synthetic oligonucleotide
  Antisense strand to SEQ ID NO: 722446
cacuucacucggaugcuuu

SEQ ID NO: 722448 - RNA, 19 nt, Artificial Sequence
  Description of Artificial Sequence: Synthetic oligonucleotide
  Sense strand starting at position 2213 of SEQ ID NO: 586499
gguaauuucuuuccguuua

SEQ ID NO: 722449 - RNA, 19 nt, Artificial Sequence
  Description of Artificial Sequence: Synthetic oligonucleotide
  Antisense strand to SEQ ID NO: 722448
uaaacggaaagaaauuacc

SEQ ID NO: 722450 - RNA, 19 nt, Artificial Sequence
  Description of Artificial Sequence: Synthetic oligonucleotide
  Sense strand starting at position 2676 of SEQ ID NO: 586499
agccaaucuccacaucgua

SEQ ID NO: 722451 - RNA, 19 nt, Artificial Sequence
  Description of Artificial Sequence: Synthetic oligonucleotide
  Antisense strand to SEQ ID NO: 722450
uacgauguggagauuggcu

SEQ ID NO: 722452 - RNA, 19 nt, Artificial Sequence
  Description of Artificial Sequence: Synthetic oligonucleotide
  Sense strand starting at position 2695 of SEQ ID NO: 586499
gcagaucuccucuagagca

SEQ ID NO: 722453 - RNA, 19 nt, Artificial Sequence
  Description of Artificial Sequence: Synthetic oligonucleotide
  Antisense strand to SEQ ID NO: 722452
ugcucuagaggagaucugc

SEQ ID NO: 722454 - RNA, 19 nt, Artificial Sequence
  Description of Artificial Sequence: Synthetic oligonucleotide
  Sense strand starting at position 2744 of SEQ ID NO: 586499
caauauuuaugaccguguu

SEQ ID NO: 722455 - RNA, 19 nt, Artificial Sequence
  Description of Artificial Sequence: Synthetic oligonucleotide
  Antisense strand to SEQ ID NO: 722454
aacacggucauaaauauug

SEQ ID NO: 722456 - RNA, 19 nt, Artificial Sequence
  Description of Artificial Sequence: Synthetic oligonucleotide
  Sense strand starting at position 2745 of SEQ ID NO: 586499
aauauuuaugaccguguuu

SEQ ID NO: 722457 - RNA, 19 nt, Artificial Sequence
  Description of Artificial Sequence: Synthetic oligonucleotide
  Antisense strand to SEQ ID NO: 722456
aaacacggucauaaauauu

SEQ ID NO: 722458 - RNA, 19 nt, Artificial Sequence
  Description of Artificial Sequence: Synthetic oligonucleotide
  Sense strand starting at position 2747 of SEQ ID NO: 586499
uauuuaugaccguguuugu

SEQ ID NO: 722459 - RNA, 19 nt, Artificial Sequence
  Description of Artificial Sequence: Synthetic oligonucleotide
  Antisense strand to SEQ ID NO: 722458
acaaacacggucauaaaua

SEQ ID NO: 722460 - RNA, 19 nt, Artificial Sequence
  Description of Artificial Sequence: Synthetic oligonucleotide
  Sense strand starting at position 2757 of SEQ ID NO: 586499
cguguuuguaacuccugua

SEQ ID NO: 722461 - RNA, 19 nt, Artificial Sequence
  Description of Artificial Sequence: Synthetic oligonucleotide
  Antisense strand to SEQ ID NO: 722460
uacaggaguuacaaacacg

SEQ ID NO: 722462 - RNA, 19 nt, Artificial Sequence
  Description of Artificial Sequence: Synthetic oligonucleotide
  Sense strand starting at position 2866 of SEQ ID NO: 586499
guaacaaucggcggagaua

SEQ ID NO: 722463 - RNA, 19 nt, Artificial Sequence
  Description of Artificial Sequence: Synthetic oligonucleotide
  Antisense strand to SEQ ID NO: 722462
uaucuccgccgauuguuac

SEQ ID NO: 722464 - RNA, 19 nt, Artificial Sequence
  Description of Artificial Sequence: Synthetic oligonucleotide
  Sense strand starting at position 2867 of SEQ ID NO: 586499
uaacaaucggcggagauaa

SEQ ID NO: 722465 - RNA, 19 nt, Artificial Sequence
  Description of Artificial Sequence: Synthetic oligonucleotide
  Antisense strand to SEQ ID NO: 722464
uuaucuccgccgauuguua

SEQ ID NO: 722466 - RNA, 19 nt, Artificial Sequence
  Description of Artificial Sequence: Synthetic oligonucleotide
  Sense strand starting at position 2931 of SEQ ID NO: 586499
ugagcagaggcuuaagauc

SEQ ID NO: 722467 - RNA, 19 nt, Artificial Sequence
  Description of Artificial Sequence: Synthetic oligonucleotide
  Antisense strand to SEQ ID NO: 722466
gaucuuaagccucugcuca

SEQ ID NO: 722468 - RNA, 19 nt, Artificial Sequence
  Description of Artificial Sequence: Synthetic oligonucleotide
  Sense strand starting at position 3002 of SEQ ID NO: 586499
agcguuaacugauuagaaa

SEQ ID NO: 722469 - RNA, 19 nt, Artificial Sequence
  Description of Artificial Sequence: Synthetic oligonucleotide
  Antisense strand to SEQ ID NO: 722468
uuucuaaucaguuaacgcu

SEQ ID NO: 722470 - RNA, 19 nt, Artificial Sequence
  Description of Artificial Sequence: Synthetic oligonucleotide
  Sense strand starting at position 3041 of SEQ ID NO: 586499
aaacaugguccuugaugua

SEQ ID NO: 722471 - RNA, 19 nt, Artificial Sequence
  Description of Artificial Sequence: Synthetic oligonucleotide
  Antisense strand to SEQ ID NO: 722470
uacaucaaggaccauguuu

SEQ ID NO: 722472 - RNA, 19 nt, Artificial Sequence
  Description of Artificial Sequence: Synthetic oligonucleotide
  Sense strand starting at position 3176 of SEQ ID NO: 586499
auagcuuucgaguagguca

SEQ ID NO: 722473 - RNA, 19 nt, Artificial Sequence
  Description of Artificial Sequence: Synthetic oligonucleotide
  Antisense strand to SEQ ID NO: 722472
ugaccuacucgaaagcuau

SEQ ID NO: 722474 - RNA, 19 nt, Artificial Sequence
  Description of Artificial Sequence: Synthetic oligonucleotide
  Sense strand starting at position 3360 of SEQ ID NO: 586499
cuuuaaauguacuuaguca

SEQ ID NO: 722475 - RNA, 19 nt, Artificial Sequence
  Description of Artificial Sequence: Synthetic oligonucleotide
  Antisense strand to SEQ ID NO: 722474
ugacuaaguacauuuaaag

SEQ ID NO: 722476 - RNA, 19 nt, Artificial Sequence
  Description of Artificial Sequence: Synthetic oligonucleotide
  Sense strand starting at position 3408 of SEQ ID NO: 586499
aaugcuaauguguaucaga

SEQ ID NO: 722477 - RNA, 19 nt, Artificial Sequence
  Description of Artificial Sequence: Synthetic oligonucleotide
  Antisense strand to SEQ ID NO: 722476
ucugauacacauuagcauu

SEQ ID NO: 722478 - RNA, 19 nt, Artificial Sequence
  Description of Artificial Sequence: Synthetic oligonucleotide
  Sense strand starting at position 3419 of SEQ ID NO: 586499
guaucagaacucuggaauu

SEQ ID NO: 722479 - RNA, 19 nt, Artificial Sequence
  Description of Artificial Sequence: Synthetic oligonucleotide
  Antisense strand to SEQ ID NO: 722478
aauuccagaguucugauac

SEQ ID NO: 722480 - RNA, 19 nt, Artificial Sequence
  Description of Artificial Sequence: Synthetic oligonucleotide
  Sense strand starting at position 3495 of SEQ ID NO: 586499
uauggugagucuuuccuau

SEQ ID NO: 722481 - RNA, 19 nt, Artificial Sequence
  Description of Artificial Sequence: Synthetic oligonucleotide
  Antisense strand to SEQ ID NO: 722480
auaggaaagacucaccaua

SEQ ID NO: 722482 - RNA, 19 nt, Artificial Sequence
  Description of Artificial Sequence: Synthetic oligonucleotide
  Sense strand starting at position 3497 of SEQ ID NO: 586499
uggugagucuuuccuauua

SEQ ID NO: 722483 - RNA, 19 nt, Artificial Sequence
  Description of Artificial Sequence: Synthetic oligonucleotide
  Antisense strand to SEQ ID NO: 722482
uaauaggaaagacucacca

SEQ ID NO: 722484 - RNA, 19 nt, Artificial Sequence
  Description of Artificial Sequence: Synthetic oligonucleotide
  Sense strand starting at position 3569 of SEQ ID NO: 586499
ggcugaauauugguagaaa

SEQ ID NO: 722485 - RNA, 19 nt, Artificial Sequence
  Description of Artificial Sequence: Synthetic oligonucleotide
  Antisense strand to SEQ ID NO: 722484
uuucuaccaauauucagcc

SEQ ID NO: 722486 - RNA, 19 nt, Artificial Sequence
  Description of Artificial Sequence: Synthetic oligonucleotide
  Sense strand starting at position 3600 of SEQ ID NO: 586499
uuguguuucggagaaauga

SEQ ID NO: 722487 - RNA, 19 nt, Artificial Sequence
  Description of Artificial Sequence: Synthetic oligonucleotide
  Antisense strand to SEQ ID NO: 722486
ucauuucuccgaaacacaa

SEQ ID NO: 722488 - RNA, 19 nt, Artificial Sequence
  Description of Artificial Sequence: Synthetic oligonucleotide
  Sense strand starting at position 3611 of SEQ ID NO: 586499
agaaaugaaguauguguaa

SEQ ID NO: 722489 - RNA, 19 nt, Artificial Sequence
  Description of Artificial Sequence: Synthetic oligonucleotide
  Antisense strand to SEQ ID NO: 722488
uuacacauacuucauuucu

SEQ ID NO: 722490 - RNA, 19 nt, Artificial Sequence
  Description of Artificial Sequence: Synthetic oligonucleotide
  Sense strand starting at position 3620 of SEQ ID NO: 586499
guauguguaacagaaguuu

SEQ ID NO: 722491 - RNA, 19 nt, Artificial Sequence
  Description of Artificial Sequence: Synthetic oligonucleotide
  Antisense strand to SEQ ID NO: 722490
aaacuucuguuacacauac

SEQ ID NO: 722492 - RNA, 19 nt, Artificial Sequence
  Description of Artificial Sequence: Synthetic oligonucleotide
  Sense strand starting at position 3626 of SEQ ID NO: 586499
guaacagaaguuugucaaa

SEQ ID NO: 722493 - RNA, 19 nt, Artificial Sequence
  Description of Artificial Sequence: Synthetic oligonucleotide
  Antisense strand to SEQ ID NO: 722492
uuugacaaacuucuguuac

SEQ ID NO: 722494 - RNA, 19 nt, Artificial Sequence
  Description of Artificial Sequence: Synthetic oligonucleotide
  Sense strand starting at position 3665 of SEQ ID NO: 586499
cuuugaaguuagucaaaua

SEQ ID NO: 722495 - RNA, 19 nt, Artificial Sequence
  Description of Artificial Sequence: Synthetic oligonucleotide
  Antisense strand to SEQ ID NO: 722494
uauuugacuaacuucaaag

SEQ ID NO: 722496 - RNA, 19 nt, Artificial Sequence
  Description of Artificial Sequence: Synthetic oligonucleotide
  Sense strand starting at position 3787 of SEQ ID NO: 586499
gggaaauucuaagauaaga

SEQ ID NO: 722497 - RNA, 19 nt, Artificial Sequence
  Description of Artificial Sequence: Synthetic oligonucleotide
  Antisense strand to SEQ ID NO: 722496
ucuuaucuuagaauuuccc

SEQ ID NO: 722498 - RNA, 19 nt, Artificial Sequence
  Description of Artificial Sequence: Synthetic oligonucleotide
  Sense strand starting at position 3827 of SEQ ID NO: 586499
aggaaaugauaacaggaua

SEQ ID NO: 722499 - RNA, 19 nt, Artificial Sequence
  Description of Artificial Sequence: Synthetic oligonucleotide
  Antisense strand to SEQ ID NO: 722498
uauccuguuaucauuuccu

SEQ ID NO: 722500 - RNA, 19 nt, Artificial Sequence
  Description of Artificial Sequence: Synthetic oligonucleotide
  Sense strand starting at position 3902 of SEQ ID NO: 586499
gccugaguggcugaaacaa

SEQ ID NO: 722501 - RNA, 19 nt, Artificial Sequence
  Description of Artificial Sequence: Synthetic oligonucleotide
  Antisense strand to SEQ ID NO: 722500
uuguuucagccacucaggc

SEQ ID NO: 722502 - RNA, 19 nt, Artificial Sequence
  Description of Artificial Sequence: Synthetic oligonucleotide
  Sense strand starting at position 3912 of SEQ ID NO: 586499
cugaaacaauaggaauaua

SEQ ID NO: 722503 - RNA, 19 nt, Artificial Sequence
  Description of Artificial Sequence: Synthetic oligonucleotide
  Antisense strand to SEQ ID NO: 722502
uauauuccuauuguuucag

SEQ ID NO: 722504 - RNA, 19 nt, Artificial Sequence
  Description of Artificial Sequence: Synthetic oligonucleotide
  Sense strand starting at position 3926 of SEQ ID NO: 586499
auauauuucucaccguucu

SEQ ID NO: 722505 - RNA, 19 nt, Artificial Sequence
  Description of Artificial Sequence: Synthetic oligonucleotide
  Antisense strand to SEQ ID NO: 722504
agaacggugagaaauauau

SEQ ID NO: 722506 - RNA, 19 nt, Artificial Sequence
  Description of Artificial Sequence: Synthetic oligonucleotide
  Sense strand starting at position 3959 of SEQ ID NO: 586499
cuaagauuaaggugccagu

SEQ ID NO: 722507 - RNA, 19 nt, Artificial Sequence
  Description of Artificial Sequence: Synthetic oligonucleotide
  Antisense strand to SEQ ID NO: 722506
acuggcaccuuaaucuuag

SEQ ID NO: 722508 - RNA, 19 nt, Artificial Sequence
  Description of Artificial Sequence: Synthetic oligonucleotide
  Sense strand starting at position 45 of SEQ ID NO: 586500
gugguaagugcacauaaca

SEQ ID NO: 722509 - RNA, 19 nt, Artificial Sequence
  Description of Artificial Sequence: Synthetic oligonucleotide
  Antisense strand to SEQ ID NO: 722508
uguuaugugcacuuaccac

SEQ ID NO: 722510 - RNA, 19 nt, Artificial Sequence
  Description of Artificial Sequence: Synthetic oligonucleotide
  Sense strand starting at position 292 of SEQ ID NO: 586500
cugauaugcuuaucucaag

SEQ ID NO: 722511 - RNA, 19 nt, Artificial Sequence
  Description of Artificial Sequence: Synthetic oligonucleotide
  Antisense strand to SEQ ID NO: 722510
cuugagauaagcauaucag

SEQ ID NO: 722512 - RNA, 19 nt, Artificial Sequence
  Description of Artificial Sequence: Synthetic oligonucleotide
  Sense strand starting at position 293 of SEQ ID NO: 586500
ugauaugcuuaucucaaga

SEQ ID NO: 722513 - RNA, 19 nt, Artificial Sequence
  Description of Artificial Sequence: Synthetic oligonucleotide
  Antisense strand to SEQ ID NO: 722512
ucuugagauaagcauauca

SEQ ID NO: 722514 - RNA, 19 nt, Artificial Sequence
  Description of Artificial Sequence: Synthetic oligonucleotide
  Sense strand starting at position 298 of SEQ ID NO: 586500
ugcuuaucucaagagucau

SEQ ID NO: 722515 - RNA, 19 nt, Artificial Sequence
  Description of Artificial Sequence: Synthetic oligonucleotide
  Antisense strand to SEQ ID NO: 722514
augacucuugagauaagca

SEQ ID NO: 722516 - RNA, 19 nt, Artificial Sequence
  Description of Artificial Sequence: Synthetic oligonucleotide
  Sense strand starting at position 507 of SEQ ID NO: 586500
auucuuaugucauugaucu

SEQ ID NO: 722517 - RNA, 19 nt, Artificial Sequence
  Description of Artificial Sequence: Synthetic oligonucleotide
  Antisense strand to SEQ ID NO: 722516
agaucaaugacauaagaau

SEQ ID NO: 722518 - RNA, 19 nt, Artificial Sequence
  Description of Artificial Sequence: Synthetic oligonucleotide
  Sense strand starting at position 508 of SEQ ID NO: 586500
uucuuaugucauugaucuu

SEQ ID NO: 722519 - RNA, 19 nt, Artificial Sequence
  Description of Artificial Sequence: Synthetic oligonucleotide
  Antisense strand to SEQ ID NO: 722518
aagaucaaugacauaagaa

SEQ ID NO: 722520 - RNA, 19 nt, Artificial Sequence
  Description of Artificial Sequence: Synthetic oligonucleotide
  Sense strand starting at position 511 of SEQ ID NO: 586500
uuaugucauugaucuuagu

SEQ ID NO: 722521 - RNA, 19 nt, Artificial Sequence
  Description of Artificial Sequence: Synthetic oligonucleotide
  Antisense strand to SEQ ID NO: 722520
acuaagaucaaugacauaa

SEQ ID NO: 722522 - RNA, 19 nt, Artificial Sequence
  Description of Artificial Sequence: Synthetic oligonucleotide
  Sense strand starting at position 547 of SEQ ID NO: 586500
augaauuuguaagaaugcu

SEQ ID NO: 722523 - RNA, 19 nt, Artificial Sequence
  Description of Artificial Sequence: Synthetic oligonucleotide
  Antisense strand to SEQ ID NO: 722522
agcauucuuacaaauucau

SEQ ID NO: 722524 - RNA, 19 nt, Artificial Sequence
  Description of Artificial Sequence: Synthetic oligonucleotide
  Sense strand starting at position 634 of SEQ ID NO: 586500
aacagaauucuauggugug

SEQ ID NO: 722525 - RNA, 19 nt, Artificial Sequence
  Description of Artificial Sequence: Synthetic oligonucleotide
  Antisense strand to SEQ ID NO: 722524
cacaccauagaauucuguu

SEQ ID NO: 722526 - RNA, 19 nt, Artificial Sequence
  Description of Artificial Sequence: Synthetic oligonucleotide
  Sense strand starting at position 640 of SEQ ID NO: 586500
auucuaugguguguuagga

SEQ ID NO: 722527 - RNA, 19 nt, Artificial Sequence
  Description of Artificial Sequence: Synthetic oligonucleotide
  Antisense strand to SEQ ID NO: 722526
uccuaacacaccauagaau

SEQ ID NO: 722528 - RNA, 19 nt, Artificial Sequence
  Description of Artificial Sequence: Synthetic oligonucleotide
  Sense strand starting at position 649 of SEQ ID NO: 586500
uguguuaggaagcauauau

SEQ ID NO: 722529 - RNA, 19 nt, Artificial Sequence
  Description of Artificial Sequence: Synthetic oligonucleotide
  Antisense strand to SEQ ID NO: 722528
auauaugcuuccuaacaca

SEQ ID NO: 722530 - RNA, 19 nt, Artificial Sequence
  Description of Artificial Sequence: Synthetic oligonucleotide
  Sense strand starting at position 718 of SEQ ID NO: 586500
uggguaguuacugacaagu

SEQ ID NO: 722531 - RNA, 19 nt, Artificial Sequence
  Description of Artificial Sequence: Synthetic oligonucleotide
  Antisense strand to SEQ ID NO: 722530
acuugucaguaacuaccca

SEQ ID NO: 722532 - RNA, 19 nt, Artificial Sequence
  Description of Artificial Sequence: Synthetic oligonucleotide
  Sense strand starting at position 776 of SEQ ID NO: 586500
gggcaaggauguuuccuuu

SEQ ID NO: 722533 - RNA, 19 nt, Artificial Sequence
  Description of Artificial Sequence: Synthetic oligonucleotide
  Antisense strand to SEQ ID NO: 722532
aaaggaaacauccuugccc

SEQ ID NO: 722534 - RNA, 19 nt, Artificial Sequence
  Description of Artificial Sequence: Synthetic oligonucleotide
  Sense strand starting at position 949 of SEQ ID NO: 586500
gaggaaauuuguuauguga

SEQ ID NO: 722535 - RNA, 19 nt, Artificial Sequence
  Description of Artificial Sequence: Synthetic oligonucleotide
  Antisense strand to SEQ ID NO: 722534
ucacauaacaaauuuccuc

SEQ ID NO: 722536 - RNA, 19 nt, Artificial Sequence
  Description of Artificial Sequence: Synthetic oligonucleotide
  Sense strand starting at position 962 of SEQ ID NO: 586500
augugaaauaugcacgauu

SEQ ID NO: 722537 - RNA, 19 nt, Artificial Sequence
  Description of Artificial Sequence: Synthetic oligonucleotide
  Antisense strand to SEQ ID NO: 722536
aaucgugcauauuucacau

SEQ ID NO: 722538 - RNA, 19 nt, Artificial Sequence
  Description of Artificial Sequence: Synthetic oligonucleotide
  Sense strand starting at position 964 of SEQ ID NO: 586500
gugaaauaugcacgauucu

SEQ ID NO: 722539 - RNA, 19 nt, Artificial Sequence
  Description of Artificial Sequence: Synthetic oligonucleotide
  Antisense strand to SEQ ID NO: 722538
agaaucgugcauauuucac

SEQ ID NO: 722540 - RNA, 19 nt, Artificial Sequence
  Description of Artificial Sequence: Synthetic oligonucleotide
  Sense strand starting at position 1073 of SEQ ID NO: 586500
cuuuauauaggucaucauu

SEQ ID NO: 722541 - RNA, 19 nt, Artificial Sequence
  Description of Artificial Sequence: Synthetic oligonucleotide
  Antisense strand to SEQ ID NO: 722540
aaugaugaccuauauaaag

SEQ ID NO: 722542 - RNA, 19 nt, Artificial Sequence
  Description of Artificial Sequence: Synthetic oligonucleotide
  Sense strand starting at position 1276 of SEQ ID NO: 586500
uccugaccugaaugaauau

SEQ ID NO: 722543 - RNA, 19 nt, Artificial Sequence
  Description of Artificial Sequence: Synthetic oligonucleotide
  Antisense strand to SEQ ID NO: 722542
auauucauucaggucagga

SEQ ID NO: 722544 - RNA, 19 nt, Artificial Sequence
  Description of Artificial Sequence: Synthetic oligonucleotide
  Sense strand starting at position 1353 of SEQ ID NO: 586500
ggcaguauucaggagccua

SEQ ID NO: 722545 - RNA, 19 nt, Artificial Sequence
  Description of Artificial Sequence: Synthetic oligonucleotide
  Antisense strand to SEQ ID NO: 722544
uaggcuccugaauacugcc

SEQ ID NO: 722546 - RNA, 19 nt, Artificial Sequence
  Description of Artificial Sequence: Synthetic oligonucleotide
  Sense strand starting at position 1361 of SEQ ID NO: 586500
ucaggagccuaaguaauau

SEQ ID NO: 722547 - RNA, 19 nt, Artificial Sequence
  Description of Artificial Sequence: Synthetic oligonucleotide
  Antisense strand to SEQ ID NO: 722546
auauuacuuaggcuccuga

SEQ ID NO: 722548 - RNA, 19 nt, Artificial Sequence
  Description of Artificial Sequence: Synthetic oligonucleotide
  Sense strand starting at position 1572 of SEQ ID NO: 586500
aaaugauuagggugcaaua

SEQ ID NO: 722549 - RNA, 19 nt, Artificial Sequence
  Description of Artificial Sequence: Synthetic oligonucleotide
  Antisense strand to SEQ ID NO: 722548
uauugcacccuaaucauuu

SEQ ID NO: 722550 - RNA, 19 nt, Artificial Sequence
  Description of Artificial Sequence: Synthetic oligonucleotide
  Sense strand starting at position 2012 of SEQ ID NO: 586500
agauacuugucaguuuaua

SEQ ID NO: 722551 - RNA, 19 nt, Artificial Sequence
  Description of Artificial Sequence: Synthetic oligonucleotide
  Antisense strand to SEQ ID NO: 722550
uauaaacugacaaguaucu

SEQ ID NO: 722552 - RNA, 19 nt, Artificial Sequence
  Description of Artificial Sequence: Synthetic oligonucleotide
  Sense strand starting at position 2127 of SEQ ID NO: 586500
cucuaagauucugcuuuga

SEQ ID NO: 722553 - RNA, 19 nt, Artificial Sequence
  Description of Artificial Sequence: Synthetic oligonucleotide
  Antisense strand to SEQ ID NO: 722552
ucaaagcagaaucuuagag

SEQ ID NO: 722554 - RNA, 19 nt, Artificial Sequence
  Description of Artificial Sequence: Synthetic oligonucleotide
  Sense strand starting at position 2129 of SEQ ID NO: 586500
cuaagauucugcuuugacu

SEQ ID NO: 722555 - RNA, 19 nt, Artificial Sequence
  Description of Artificial Sequence: Synthetic oligonucleotide
  Antisense strand to SEQ ID NO: 722554
agucaaagcagaaucuuag

SEQ ID NO: 722556 - RNA, 19 nt, Artificial Sequence
  Description of Artificial Sequence: Synthetic oligonucleotide
  Sense strand starting at position 2149 of SEQ ID NO: 586500
aggagaugcuuucucaucu

SEQ ID NO: 722557 - RNA, 19 nt, Artificial Sequence
  Description of Artificial Sequence: Synthetic oligonucleotide
  Antisense strand to SEQ ID NO: 722556
agaugagaaagcaucuccu

SEQ ID NO: 722558 - RNA, 19 nt, Artificial Sequence
  Description of Artificial Sequence: Synthetic oligonucleotide
  Sense strand starting at position 2150 of SEQ ID NO: 586500
ggagaugcuuucucaucug

SEQ ID NO: 722559 - RNA, 19 nt, Artificial Sequence
  Description of Artificial Sequence: Synthetic oligonucleotide
  Antisense strand to SEQ ID NO: 722558
cagaugagaaagcaucucc

SEQ ID NO: 722560 - RNA, 19 nt, Artificial Sequence
  Description of Artificial Sequence: Synthetic oligonucleotide
  Sense strand starting at position 2499 of SEQ ID NO: 586500
acauguaaguuauccaacu

SEQ ID NO: 722561 - RNA, 19 nt, Artificial Sequence
  Description of Artificial Sequence: Synthetic oligonucleotide
  Antisense strand to SEQ ID NO: 722560
aguuggauaacuuacaugu

SEQ ID NO: 722562 - RNA, 19 nt, Artificial Sequence
  Description of Artificial Sequence: Synthetic oligonucleotide
  Sense strand starting at position 2522 of SEQ ID NO: 586500
uggucuaccuaugcuuaga

SEQ ID NO: 722563 - RNA, 19 nt, Artificial Sequence
  Description of Artificial Sequence: Synthetic oligonucleotide
  Antisense strand to SEQ ID NO: 722562
ucuaagcauagguagacca

SEQ ID NO: 722564 - RNA, 19 nt, Artificial Sequence
  Description of Artificial Sequence: Synthetic oligonucleotide
  Sense strand starting at position 2570 of SEQ ID NO: 586500
agcaucugucagggaacaa

SEQ ID NO: 722565 - RNA, 19 nt, Artificial Sequence
  Description of Artificial Sequence: Synthetic oligonucleotide
  Antisense strand to SEQ ID NO: 722564
uuguucccugacagaugcu

SEQ ID NO: 722566 - RNA, 19 nt, Artificial Sequence
  Description of Artificial Sequence: Synthetic oligonucleotide
  Sense strand starting at position 2783 of SEQ ID NO: 586500
ugguguagacacugaacua

SEQ ID NO: 722567 - RNA, 19 nt, Artificial Sequence
  Description of Artificial Sequence: Synthetic oligonucleotide
  Antisense strand to SEQ ID NO: 722566
uaguucagugucuacacca

SEQ ID NO: 722568 - RNA, 19 nt, Artificial Sequence
  Description of Artificial Sequence: Synthetic oligonucleotide
  Sense strand starting at position 2873 of SEQ ID NO: 586500
cugauuugguaccaaggga

SEQ ID NO: 722569 - RNA, 19 nt, Artificial Sequence
  Description of Artificial Sequence: Synthetic oligonucleotide
  Antisense strand to SEQ ID NO: 722568
ucccuugguaccaaaucag

SEQ ID NO: 722570 - RNA, 19 nt, Artificial Sequence
  Description of Artificial Sequence: Synthetic oligonucleotide
  Sense strand starting at position 3072 of SEQ ID NO: 586500
cauaaagugcuugguagau

SEQ ID NO: 722571 - RNA, 19 nt, Artificial Sequence
  Description of Artificial Sequence: Synthetic oligonucleotide
  Antisense strand to SEQ ID NO: 722570
aucuaccaagcacuuuaug

SEQ ID NO: 722572 - RNA, 19 nt, Artificial Sequence
  Description of Artificial Sequence: Synthetic oligonucleotide
  Sense strand starting at position 3078 of SEQ ID NO: 586500
gugcuugguagauagucaa

SEQ ID NO: 722573 - RNA, 19 nt, Artificial Sequence
  Description of Artificial Sequence: Synthetic oligonucleotide
  Antisense strand to SEQ ID NO: 722572
uugacuaucuaccaagcac

SEQ ID NO: 722574 - RNA, 19 nt, Artificial Sequence
  Description of Artificial Sequence: Synthetic oligonucleotide
  Sense strand starting at position 3081 of SEQ ID NO: 586500
cuugguagauagucaauca

SEQ ID NO: 722575 - RNA, 19 nt, Artificial Sequence
  Description of Artificial Sequence: Synthetic oligonucleotide
  Antisense strand to SEQ ID NO: 722574
ugauugacuaucuaccaag

SEQ ID NO: 722576 - RNA, 19 nt, Artificial Sequence
  Description of Artificial Sequence: Synthetic oligonucleotide
  Sense strand starting at position 3157 of SEQ ID NO: 586500
gggauuugugaaugugcuu

SEQ ID NO: 722577 - RNA, 19 nt, Artificial Sequence
  Description of Artificial Sequence: Synthetic oligonucleotide
  Antisense strand to SEQ ID NO: 722576
aagcacauucacaaauccc

SEQ ID NO: 722578 - RNA, 19 nt, Artificial Sequence
  Description of Artificial Sequence: Synthetic oligonucleotide
  Sense strand starting at position 3233 of SEQ ID NO: 586500
ugggaucaugugcaaaguu

SEQ ID NO: 722579 - RNA, 19 nt, Artificial Sequence
  Description of Artificial Sequence: Synthetic oligonucleotide
  Antisense strand to SEQ ID NO: 722578
aacuuugcacaugauccca

SEQ ID NO: 722580 - RNA, 19 nt, Artificial Sequence
  Description of Artificial Sequence: Synthetic oligonucleotide
  Sense strand starting at position 3637 of SEQ ID NO: 586500
agaauucuugcauguucua

SEQ ID NO: 722581 - RNA, 19 nt, Artificial Sequence
  Description of Artificial Sequence: Synthetic oligonucleotide
  Antisense strand to SEQ ID NO: 722580
uagaacaugcaagaauucu

SEQ ID NO: 722582 - RNA, 19 nt, Artificial Sequence
  Description of Artificial Sequence: Synthetic oligonucleotide
  Sense strand starting at position 3649 of SEQ ID NO: 586500
uguucuauggcagaaacga

SEQ ID NO: 722583 - RNA, 19 nt, Artificial Sequence
  Description of Artificial Sequence: Synthetic oligonucleotide
  Antisense strand to SEQ ID NO: 722582
ucguuucugccauagaaca

SEQ ID NO: 722584 - RNA, 19 nt, Artificial Sequence
  Description of Artificial Sequence: Synthetic oligonucleotide
  Sense strand starting at position 3769 of SEQ ID NO: 586500
aggcuuccuaaugggauua

SEQ ID NO: 722585 - RNA, 19 nt, Artificial Sequence
  Description of Artificial Sequence: Synthetic oligonucleotide
  Antisense strand to SEQ ID NO: 722584
uaaucccauuaggaagccu

SEQ ID NO: 722586 - RNA, 19 nt, Artificial Sequence
  Description of Artificial Sequence: Synthetic oligonucleotide
  Sense strand starting at position 3868 of SEQ ID NO: 586500
uguuguaaccaguaauguu

SEQ ID NO: 722587 - RNA, 19 nt, Artificial Sequence
  Description of Artificial Sequence: Synthetic oligonucleotide
  Antisense strand to SEQ ID NO: 722586
aacauuacugguuacaaca

SEQ ID NO: 722588 - RNA, 19 nt, Artificial Sequence
  Description of Artificial Sequence: Synthetic oligonucleotide
  Sense strand starting at position 89 of SEQ ID NO: 586501
gagagcaccucauugguga

SEQ ID NO: 722589 - RNA, 19 nt, Artificial Sequence
  Description of Artificial Sequence: Synthetic oligonucleotide
  Antisense strand to SEQ ID NO: 722588
ucaccaaugaggugcucuc

SEQ ID NO: 722590 - RNA, 19 nt, Artificial Sequence
  Description of Artificial Sequence: Synthetic oligonucleotide
  Sense strand starting at position 90 of SEQ ID NO: 586501
agagcaccucauuggugaa

SEQ ID NO: 722591 - RNA, 19 nt, Artificial Sequence
  Description of Artificial Sequence: Synthetic oligonucleotide
  Antisense strand to SEQ ID NO: 722590
uucaccaaugaggugcucu

SEQ ID NO: 722592 - RNA, 19 nt, Artificial Sequence
  Description of Artificial Sequence: Synthetic oligonucleotide
  Sense strand starting at position 92 of SEQ ID NO: 586501
agcaccucauuggugaaau

SEQ ID NO: 722593 - RNA, 19 nt, Artificial Sequence
  Description of Artificial Sequence: Synthetic oligonucleotide
  Antisense strand to SEQ ID NO: 722592
auuucaccaaugaggugcu

SEQ ID NO: 722594 - RNA, 19 nt, Artificial Sequence
  Description of Artificial Sequence: Synthetic oligonucleotide
  Sense strand starting at position 93 of SEQ ID NO: 586501
gcaccucauuggugaaaug

SEQ ID NO: 722595 - RNA, 19 nt, Artificial Sequence
  Description of Artificial Sequence: Synthetic oligonucleotide
  Antisense strand to SEQ ID NO: 722594
cauuucaccaaugaggugc

SEQ ID NO: 722596 - RNA, 19 nt, Artificial Sequence
  Description of Artificial Sequence: Synthetic oligonucleotide
  Sense strand starting at position 238 of SEQ ID NO: 586501
gguggcuguuuacaggauu

SEQ ID NO: 722597 - RNA, 19 nt, Artificial Sequence
  Description of Artificial Sequence: Synthetic oligonucleotide
  Antisense strand to SEQ ID NO: 722596
aauccuguaaacagccacc

SEQ ID NO: 722598 - RNA, 19 nt, Artificial Sequence
  Description of Artificial Sequence: Synthetic oligonucleotide
  Sense strand starting at position 441 of SEQ ID NO: 586501
ggagccgcucucgaguaau

SEQ ID NO: 722599 - RNA, 19 nt, Artificial Sequence
  Description of Artificial Sequence: Synthetic oligonucleotide
  Antisense strand to SEQ ID NO: 722598
auuacucgagagcggcucc

SEQ ID NO: 722600 - RNA, 19 nt, Artificial Sequence
  Description of Artificial Sequence: Synthetic oligonucleotide
  Sense strand starting at position 443 of SEQ ID NO: 586501
agccgcucucgaguaauua

SEQ ID NO: 722601 - RNA, 19 nt, Artificial Sequence
  Description of Artificial Sequence: Synthetic oligonucleotide
  Antisense strand to SEQ ID NO: 722600
uaauuacucgagagcggcu

SEQ ID NO: 722602 - RNA, 19 nt, Artificial Sequence
  Description of Artificial Sequence: Synthetic oligonucleotide
  Sense strand starting at position 444 of SEQ ID NO: 586501
gccgcucucgaguaauuac

SEQ ID NO: 722603 - RNA, 19 nt, Artificial Sequence
  Description of Artificial Sequence: Synthetic oligonucleotide
  Antisense strand to SEQ ID NO: 722602
guaauuacucgagagcggc

SEQ ID NO: 722604 - RNA, 19 nt, Artificial Sequence
  Description of Artificial Sequence: Synthetic oligonucleotide
  Sense strand starting at position 832 of SEQ ID NO: 586501
ggcagaacuccuuacucua

SEQ ID NO: 722605 - RNA, 19 nt, Artificial Sequence
  Description of Artificial Sequence: Synthetic oligonucleotide
  Antisense strand to SEQ ID NO: 722604
uagaguaaggaguucugcc

SEQ ID NO: 722606 - RNA, 19 nt, Artificial Sequence
  Description of Artificial Sequence: Synthetic oligonucleotide
  Sense strand starting at position 1019 of SEQ ID NO: 586501
cccagacucuagggauaua

SEQ ID NO: 722607 - RNA, 19 nt, Artificial Sequence
  Description of Artificial Sequence: Synthetic oligonucleotide
  Antisense strand to SEQ ID NO: 722606
uauaucccuagagucuggg

SEQ ID NO: 722608 - RNA, 19 nt, Artificial Sequence
  Description of Artificial Sequence: Synthetic oligonucleotide
  Sense strand starting at position 1043 of SEQ ID NO: 586501
cggcgcuccauagagaaau

SEQ ID NO: 722609 - RNA, 19 nt, Artificial Sequence
  Description of Artificial Sequence: Synthetic oligonucleotide
  Antisense strand to SEQ ID NO: 722608
auuucucuauggagcgccg

SEQ ID NO: 722610 - RNA, 19 nt, Artificial Sequence
  Description of Artificial Sequence: Synthetic oligonucleotide
  Sense strand starting at position 1045 of SEQ ID NO: 586501
gcgcuccauagagaaauga

SEQ ID NO: 722611 - RNA, 19 nt, Artificial Sequence
  Description of Artificial Sequence: Synthetic oligonucleotide
  Antisense strand to SEQ ID NO: 722610
ucauuucucuauggagcgc

SEQ ID NO: 722612 - RNA, 19 nt, Artificial Sequence
  Description of Artificial Sequence: Synthetic oligonucleotide
  Sense strand starting at position 2211 of SEQ ID NO: 586501
ggaggugguacuggcauau

SEQ ID NO: 722613 - RNA, 19 nt, Artificial Sequence
  Description of Artificial Sequence: Synthetic oligonucleotide
  Antisense strand to SEQ ID NO: 722612
auaugccaguaccaccucc

SEQ ID NO: 722614 - RNA, 19 nt, Artificial Sequence
  Description of Artificial Sequence: Synthetic oligonucleotide
  Sense strand starting at position 2431 of SEQ ID NO: 586501
gcgcgauuccgagaaaguc

SEQ ID NO: 722615 - RNA, 19 nt, Artificial Sequence
  Description of Artificial Sequence: Synthetic oligonucleotide
  Antisense strand to SEQ ID NO: 722614
gacuuucucggaaucgcgc

SEQ ID NO: 722616 - RNA, 19 nt, Artificial Sequence
  Description of Artificial Sequence: Synthetic oligonucleotide
  Sense strand starting at position 2486 of SEQ ID NO: 586501
ccgggaaugccaugagaag

SEQ ID NO: 722617 - RNA, 19 nt, Artificial Sequence
  Description of Artificial Sequence: Synthetic oligonucleotide
  Antisense strand to SEQ ID NO: 722616
cuucucauggcauucccgg

SEQ ID NO: 722618 - RNA, 19 nt, Artificial Sequence
  Description of Artificial Sequence: Synthetic oligonucleotide
  Sense strand starting at position 2503 of SEQ ID NO: 586501
agggucguguccaggcauu

SEQ ID NO: 722619 - RNA, 19 nt, Artificial Sequence
  Description of Artificial Sequence: Synthetic oligonucleotide
  Antisense strand to SEQ ID NO: 722618
aaugccuggacacgacccu

SEQ ID NO: 722620 - RNA, 19 nt, Artificial Sequence
  Description of Artificial Sequence: Synthetic oligonucleotide
  Sense strand starting at position 2562 of SEQ ID NO: 586501
agggcuugccacugaaaua

SEQ ID NO: 722621 - RNA, 19 nt, Artificial Sequence
  Description of Artificial Sequence: Synthetic oligonucleotide
  Antisense strand to SEQ ID NO: 722620
uauuucaguggcaagcccu

SEQ ID NO: 722622 - RNA, 19 nt, Artificial Sequence
  Description of Artificial Sequence: Synthetic oligonucleotide
  Sense strand starting at position 3076 of SEQ ID NO: 586501
gcugacauauguuaagucu

SEQ ID NO: 722623 - RNA, 19 nt, Artificial Sequence
  Description of Artificial Sequence: Synthetic oligonucleotide
  Antisense strand to SEQ ID NO: 722622
agacuuaacauaugucagc

SEQ ID NO: 722624 - RNA, 19 nt, Artificial Sequence
  Description of Artificial Sequence: Synthetic oligonucleotide
  Sense strand starting at position 3085 of SEQ ID NO: 586501
uguuaagucucacaauacu

SEQ ID NO: 722625 - RNA, 19 nt, Artificial Sequence
  Description of Artificial Sequence: Synthetic oligonucleotide
  Antisense strand to SEQ ID NO: 722624
aguauugugagacuuaaca

SEQ ID NO: 722626 - RNA, 19 nt, Artificial Sequence
  Description of Artificial Sequence: Synthetic oligonucleotide
  Sense strand starting at position 3091 of SEQ ID NO: 586501
gucucacaauacugggaaa

SEQ ID NO: 722627 - RNA, 19 nt, Artificial Sequence
  Description of Artificial Sequence: Synthetic oligonucleotide
  Antisense strand to SEQ ID NO: 722626
uuucccaguauugugagac

SEQ ID NO: 722628 - RNA, 19 nt, Artificial Sequence
  Description of Artificial Sequence: Synthetic oligonucleotide
  Sense strand starting at position 3094 of SEQ ID NO: 586501
ucacaauacugggaaauua

SEQ ID NO: 722629 - RNA, 19 nt, Artificial Sequence
  Description of Artificial Sequence: Synthetic oligonucleotide
  Antisense strand to SEQ ID NO: 722628
uaauuucccaguauuguga

SEQ ID NO: 722630 - RNA, 19 nt, Artificial Sequence
  Description of Artificial Sequence: Synthetic oligonucleotide
  Sense strand starting at position 3103 of SEQ ID NO: 586501
ugggaaauuaagugcuaac

SEQ ID NO: 722631 - RNA, 19 nt, Artificial Sequence
  Description of Artificial Sequence: Synthetic oligonucleotide
  Antisense strand to SEQ ID NO: 722630
guuagcacuuaauuuccca

SEQ ID NO: 722632 - RNA, 19 nt, Artificial Sequence
  Description of Artificial Sequence: Synthetic oligonucleotide
  Sense strand starting at position 3483 of SEQ ID NO: 586501
ggcugcagaguuuagauau

SEQ ID NO: 722633 - RNA, 19 nt, Artificial Sequence
  Description of Artificial Sequence: Synthetic oligonucleotide
  Antisense strand to SEQ ID NO: 722632
auaucuaaacucugcagcc

SEQ ID NO: 722634 - RNA, 19 nt, Artificial Sequence
  Description of Artificial Sequence: Synthetic oligonucleotide
  Sense strand starting at position 3534 of SEQ ID NO: 586501
ccaguuuaucuguaugagc

SEQ ID NO: 722635 - RNA, 19 nt, Artificial Sequence
  Description of Artificial Sequence: Synthetic oligonucleotide
  Antisense strand to SEQ ID NO: 722634
gcucauacagauaaacugg

SEQ ID NO: 722636 - RNA, 19 nt, Artificial Sequence
  Description of Artificial Sequence: Synthetic oligonucleotide
  Sense strand starting at position 3536 of SEQ ID NO: 586501
aguuuaucuguaugagccu

SEQ ID NO: 722637 - RNA, 19 nt, Artificial Sequence
  Description of Artificial Sequence: Synthetic oligonucleotide
  Antisense strand to SEQ ID NO: 722636
aggcucauacagauaaacu

SEQ ID NO: 722638 - RNA, 19 nt, Artificial Sequence
  Description of Artificial Sequence: Synthetic oligonucleotide
  Sense strand starting at position 3574 of SEQ ID NO: 586501
cagggaccuugccuguaaa

SEQ ID NO: 722639 - RNA, 19 nt, Artificial Sequence
  Description of Artificial Sequence: Synthetic oligonucleotide
  Antisense strand to SEQ ID NO: 722638
uuuacaggcaaggucccug

SEQ ID NO: 722640 - RNA, 19 nt, Artificial Sequence
  Description of Artificial Sequence: Synthetic oligonucleotide
  Sense strand starting at position 3661 of SEQ ID NO: 586501
cuccaagucccggauucuu

SEQ ID NO: 722641 - RNA, 19 nt, Artificial Sequence
  Description of Artificial Sequence: Synthetic oligonucleotide
  Antisense strand to SEQ ID NO: 722640
aagaauccgggacuuggag

SEQ ID NO: 722642 - RNA, 19 nt, Artificial Sequence
  Description of Artificial Sequence: Synthetic oligonucleotide
  Sense strand starting at position 3669 of SEQ ID NO: 586501
cccggauucuuacugagaa

SEQ ID NO: 722643 - RNA, 19 nt, Artificial Sequence
  Description of Artificial Sequence: Synthetic oligonucleotide
  Antisense strand to SEQ ID NO: 722642
uucucaguaagaauccggg

SEQ ID NO: 722644 - RNA, 19 nt, Artificial Sequence
  Description of Artificial Sequence: Synthetic oligonucleotide
  Sense strand starting at position 3670 of SEQ ID NO: 586501
ccggauucuuacugagaac

SEQ ID NO: 722645 - RNA, 19 nt, Artificial Sequence
  Description of Artificial Sequence: Synthetic oligonucleotide
  Antisense strand to SEQ ID NO: 722644
guucucaguaagaauccgg

SEQ ID NO: 722646 - RNA, 19 nt, Artificial Sequence
  Description of Artificial Sequence: Synthetic oligonucleotide
  Sense strand starting at position 3699 of SEQ ID NO: 586501
guggaaaugcuuugggaag

SEQ ID NO: 722647 - RNA, 19 nt, Artificial Sequence
  Description of Artificial Sequence: Synthetic oligonucleotide
  Antisense strand to SEQ ID NO: 722646
cuucccaaagcauuuccac

SEQ ID NO: 722648 - RNA, 19 nt, Artificial Sequence
  Description of Artificial Sequence: Synthetic oligonucleotide
  Sense strand starting at position 3700 of SEQ ID NO: 586501
uggaaaugcuuugggaagu

SEQ ID NO: 722649 - RNA, 19 nt, Artificial Sequence
  Description of Artificial Sequence: Synthetic oligonucleotide
  Antisense strand to SEQ ID NO: 722648
acuucccaaagcauuucca

SEQ ID NO: 722650 - RNA, 19 nt, Artificial Sequence
  Description of Artificial Sequence: Synthetic oligonucleotide
  Sense strand starting at position 3701 of SEQ ID NO: 586501
ggaaaugcuuugggaaguu

SEQ ID NO: 722651 - RNA, 19 nt, Artificial Sequence
  Description of Artificial Sequence: Synthetic oligonucleotide
  Antisense strand to SEQ ID NO: 722650
aacuucccaaagcauuucc

SEQ ID NO: 722652 - RNA, 19 nt, Artificial Sequence
  Description of Artificial Sequence: Synthetic oligonucleotide
  Sense strand starting at position 64 of SEQ ID NO: 586502
auauuagaaccuugcauag

SEQ ID NO: 722653 - RNA, 19 nt, Artificial Sequence
  Description of Artificial Sequence: Synthetic oligonucleotide
  Antisense strand to SEQ ID NO: 722652
cuaugcaagguucuaauau

SEQ ID NO: 722654 - RNA, 19 nt, Artificial Sequence
  Description of Artificial Sequence: Synthetic oligonucleotide
  Sense strand starting at position 177 of SEQ ID NO: 586502
ugggaacuucgccauccau

SEQ ID NO: 722655 - RNA, 19 nt, Artificial Sequence
  Description of Artificial Sequence: Synthetic oligonucleotide
  Antisense strand to SEQ ID NO: 722654
auggauggcgaaguuccca

SEQ ID NO: 722656 - RNA, 19 nt, Artificial Sequence
  Description of Artificial Sequence: Synthetic oligonucleotide
  Sense strand starting at position 347 of SEQ ID NO: 586502
ggauuuggaugugaaaggu

SEQ ID NO: 722657 - RNA, 19 nt, Artificial Sequence
  Description of Artificial Sequence: Synthetic oligonucleotide
  Antisense strand to SEQ ID NO: 722656
accuuucacauccaaaucc

SEQ ID NO: 722658 - RNA, 19 nt, Artificial Sequence
  Description of Artificial Sequence: Synthetic oligonucleotide
  Sense strand starting at position 351 of SEQ ID NO: 586502
uuggaugugaaagguuaaa

SEQ ID NO: 722659 - RNA, 19 nt, Artificial Sequence
  Description of Artificial Sequence: Synthetic oligonucleotide
  Antisense strand to SEQ ID NO: 722658
uuuaaccuuucacauccaa

SEQ ID NO: 722660 - RNA, 19 nt, Artificial Sequence
  Description of Artificial Sequence: Synthetic oligonucleotide
  Sense strand starting at position 438 of SEQ ID NO: 586502
ugaagacucuugcccuuaa

SEQ ID NO: 722661 - RNA, 19 nt, Artificial Sequence
  Description of Artificial Sequence: Synthetic oligonucleotide
  Antisense strand to SEQ ID NO: 722660
uuaagggcaagagucuuca

SEQ ID NO: 722662 - RNA, 19 nt, Artificial Sequence
  Description of Artificial Sequence: Synthetic oligonucleotide
  Sense strand starting at position 481 of SEQ ID NO: 586502
aaggcaagugagcauauua

SEQ ID NO: 722663 - RNA, 19 nt, Artificial Sequence
  Description of Artificial Sequence: Synthetic oligonucleotide
  Antisense strand to SEQ ID NO: 722662
uaauaugcucacuugccuu

SEQ ID NO: 722664 - RNA, 19 nt, Artificial Sequence
  Description of Artificial Sequence: Synthetic oligonucleotide
  Sense strand starting at position 586 of SEQ ID NO: 586502
aggaaagguuaauuaucuu

SEQ ID NO: 722665 - RNA, 19 nt, Artificial Sequence
  Description of Artificial Sequence: Synthetic oligonucleotide
  Antisense strand to SEQ ID NO: 722664
aagauaauuaaccuuuccu

SEQ ID NO: 722666 - RNA, 19 nt, Artificial Sequence
  Description of Artificial Sequence: Synthetic oligonucleotide
  Sense strand starting at position 642 of SEQ ID NO: 586502
ggaugccugauugaguuaa

SEQ ID NO: 722667 - RNA, 19 nt, Artificial Sequence
  Description of Artificial Sequence: Synthetic oligonucleotide
  Antisense strand to SEQ ID NO: 722666
uuaacucaaucaggcaucc

SEQ ID NO: 722668 - RNA, 19 nt, Artificial Sequence
  Description of Artificial Sequence: Synthetic oligonucleotide
  Sense strand starting at position 671 of SEQ ID NO: 586502
gggauuagugucugaagga

SEQ ID NO: 722669 - RNA, 19 nt, Artificial Sequence
  Description of Artificial Sequence: Synthetic oligonucleotide
  Antisense strand to SEQ ID NO: 722668
uccuucagacacuaauccc

SEQ ID NO: 722670 - RNA, 19 nt, Artificial Sequence
  Description of Artificial Sequence: Synthetic oligonucleotide
  Sense strand starting at position 690 of SEQ ID NO: 586502
aggucuugaugaccaguaa

SEQ ID NO: 722671 - RNA, 19 nt, Artificial Sequence
  Description of Artificial Sequence: Synthetic oligonucleotide
  Antisense strand to SEQ ID NO: 722670
uuacuggucaucaagaccu

SEQ ID NO: 722672 - RNA, 19 nt, Artificial Sequence
  Description of Artificial Sequence: Synthetic oligonucleotide
  Sense strand starting at position 691 of SEQ ID NO: 586502
ggucuugaugaccaguaag

SEQ ID NO: 722673 - RNA, 19 nt, Artificial Sequence
  Description of Artificial Sequence: Synthetic oligonucleotide
  Antisense strand to SEQ ID NO: 722672
cuuacuggucaucaagacc

SEQ ID NO: 722674 - RNA, 19 nt, Artificial Sequence
  Description of Artificial Sequence: Synthetic oligonucleotide
  Sense strand starting at position 742 of SEQ ID NO: 586502
cguuucaguggagaauauu

SEQ ID NO: 722675 - RNA, 19 nt, Artificial Sequence
  Description of Artificial Sequence: Synthetic oligonucleotide
  Antisense strand to SEQ ID NO: 722674
aauauucuccacugaaacg

SEQ ID NO: 722676 - RNA, 19 nt, Artificial Sequence
  Description of Artificial Sequence: Synthetic oligonucleotide
  Sense strand starting at position 757 of SEQ ID NO: 586502
uauugaauacugggucaua

SEQ ID NO: 722677 - RNA, 19 nt, Artificial Sequence
  Description of Artificial Sequence: Synthetic oligonucleotide
  Antisense strand to SEQ ID NO: 722676
uaugacccaguauucaaua

SEQ ID NO: 722678 - RNA, 19 nt, Artificial Sequence
  Description of Artificial Sequence: Synthetic oligonucleotide
  Sense strand starting at position 758 of SEQ ID NO: 586502
auugaauacugggucauau

SEQ ID NO: 722679 - RNA, 19 nt, Artificial Sequence
  Description of Artificial Sequence: Synthetic oligonucleotide
  Antisense strand to SEQ ID NO: 722678
auaugacccaguauucaau

SEQ ID NO: 722680 - RNA, 19 nt, Artificial Sequence
  Description of Artificial Sequence: Synthetic oligonucleotide
  Sense strand starting at position 760 of SEQ ID NO: 586502
ugaauacugggucauaugu

SEQ ID NO: 722681 - RNA, 19 nt, Artificial Sequence
  Description of Artificial Sequence: Synthetic oligonucleotide
  Antisense strand to SEQ ID NO: 722680
acauaugacccaguauuca

SEQ ID NO: 722682 - RNA, 19 nt, Artificial Sequence
  Description of Artificial Sequence: Synthetic oligonucleotide
  Sense strand starting at position 784 of SEQ ID NO: 586502
augaaaugguaaucucuau

SEQ ID NO: 722683 - RNA, 19 nt, Artificial Sequence
  Description of Artificial Sequence: Synthetic oligonucleotide
  Antisense strand to SEQ ID NO: 722682
auagagauuaccauuucau

SEQ ID NO: 722684 - RNA, 19 nt, Artificial Sequence
  Description of Artificial Sequence: Synthetic oligonucleotide
  Sense strand starting at position 902 of SEQ ID NO: 586502
guauuaaucgcauacuaau

SEQ ID NO: 722685 - RNA, 19 nt, Artificial Sequence
  Description of Artificial Sequence: Synthetic oligonucleotide
  Antisense strand to SEQ ID NO: 722684
auuaguaugcgauuaauac

SEQ ID NO: 722686 - RNA, 19 nt, Artificial Sequence
  Description of Artificial Sequence: Synthetic oligonucleotide
  Sense strand starting at position 990 of SEQ ID NO: 586502
ccaaauuucgguggacugu

SEQ ID NO: 722687 - RNA, 19 nt, Artificial Sequence
  Description of Artificial Sequence: Synthetic oligonucleotide
  Antisense strand to SEQ ID NO: 722686
acaguccaccgaaauuugg

SEQ ID NO: 722688 - RNA, 19 nt, Artificial Sequence
  Description of Artificial Sequence: Synthetic oligonucleotide
  Sense strand starting at position 1183 of SEQ ID NO: 586502
agcugucuaauggaaagca

SEQ ID NO: 722689 - RNA, 19 nt, Artificial Sequence
  Description of Artificial Sequence: Synthetic oligonucleotide
  Antisense strand to SEQ ID NO: 722688
ugcuuuccauuagacagcu

SEQ ID NO: 722690 - RNA, 19 nt, Artificial Sequence
  Description of Artificial Sequence: Synthetic oligonucleotide
  Sense strand starting at position 1398 of SEQ ID NO: 586502
uacuguuacuaagcaggaa

SEQ ID NO: 722691 - RNA, 19 nt, Artificial Sequence
  Description of Artificial Sequence: Synthetic oligonucleotide
  Antisense strand to SEQ ID NO: 722690
uuccugcuuaguaacagua

SEQ ID NO: 722692 - RNA, 19 nt, Artificial Sequence
  Description of Artificial Sequence: Synthetic oligonucleotide
  Sense strand starting at position 2236 of SEQ ID NO: 586502
guaauaaaugcauagugga

SEQ ID NO: 722693 - RNA, 19 nt, Artificial Sequence
  Description of Artificial Sequence: Synthetic oligonucleotide
  Antisense strand to SEQ ID NO: 722692
uccacuaugcauuuauuac

SEQ ID NO: 722694 - RNA, 19 nt, Artificial Sequence
  Description of Artificial Sequence: Synthetic oligonucleotide
  Sense strand starting at position 2310 of SEQ ID NO: 586502
agaaauacccaccaguguu

SEQ ID NO: 722695 - RNA, 19 nt, Artificial Sequence
  Description of Artificial Sequence: Synthetic oligonucleotide
  Antisense strand to SEQ ID NO: 722694
aacacugguggguauuucu

SEQ ID NO: 722696 - RNA, 19 nt, Artificial Sequence
  Description of Artificial Sequence: Synthetic oligonucleotide
  Sense strand starting at position 2322 of SEQ ID NO: 586502
caguguucugcucauuugu

SEQ ID NO: 722697 - RNA, 19 nt, Artificial Sequence
  Description of Artificial Sequence: Synthetic oligonucleotide
  Antisense strand to SEQ ID NO: 722696
acaaaugagcagaacacug

SEQ ID NO: 722698 - RNA, 19 nt, Artificial Sequence
  Description of Artificial Sequence: Synthetic oligonucleotide
  Sense strand starting at position 2472 of SEQ ID NO: 586502
agcagcagaguuuguauuu

SEQ ID NO: 722699 - RNA, 19 nt, Artificial Sequence
  Description of Artificial Sequence: Synthetic oligonucleotide
  Antisense strand to SEQ ID NO: 722698
aaauacaaacucugcugcu

SEQ ID NO: 722700 - RNA, 19 nt, Artificial Sequence
  Description of Artificial Sequence: Synthetic oligonucleotide
  Sense strand starting at position 2523 of SEQ ID NO: 586502
gggugcaucaaaggaugau

SEQ ID NO: 722701 - RNA, 19 nt, Artificial Sequence
  Description of Artificial Sequence: Synthetic oligonucleotide
  Antisense strand to SEQ ID NO: 722700
aucauccuuugaugcaccc

SEQ ID NO: 722702 - RNA, 19 nt, Artificial Sequence
  Description of Artificial Sequence: Synthetic oligonucleotide
  Sense strand starting at position 2526 of SEQ ID NO: 586502
ugcaucaaaggaugauaua

SEQ ID NO: 722703 - RNA, 19 nt, Artificial Sequence
  Description of Artificial Sequence: Synthetic oligonucleotide
  Antisense strand to SEQ ID NO: 722702
uauaucauccuuugaugca

SEQ ID NO: 722704 - RNA, 19 nt, Artificial Sequence
  Description of Artificial Sequence: Synthetic oligonucleotide
  Sense strand starting at position 2568 of SEQ ID NO: 586502
uagaguucuuaaccgaaag

SEQ ID NO: 722705 - RNA, 19 nt, Artificial Sequence
  Description of Artificial Sequence: Synthetic oligonucleotide
  Antisense strand to SEQ ID NO: 722704
cuuucgguuaagaacucua

SEQ ID NO: 722706 - RNA, 19 nt, Artificial Sequence
  Description of Artificial Sequence: Synthetic oligonucleotide
  Sense strand starting at position 2655 of SEQ ID NO: 586502
cugaaccuuccuggaugua

SEQ ID NO: 722707 - RNA, 19 nt, Artificial Sequence
  Description of Artificial Sequence: Synthetic oligonucleotide
  Antisense strand to SEQ ID NO: 722706
uacauccaggaagguucag

SEQ ID NO: 722708 - RNA, 19 nt, Artificial Sequence
  Description of Artificial Sequence: Synthetic oligonucleotide
  Sense strand starting at position 2866 of SEQ ID NO: 586502
agaaaccuucccuagcagu

SEQ ID NO: 722709 - RNA, 19 nt, Artificial Sequence
  Description of Artificial Sequence: Synthetic oligonucleotide
  Antisense strand to SEQ ID NO: 722708
acugcuagggaagguuucu

SEQ ID NO: 722710 - RNA, 19 nt, Artificial Sequence
  Description of Artificial Sequence: Synthetic oligonucleotide
  Sense strand starting at position 2930 of SEQ ID NO: 586502
gucaaaggcaagugaaaua

SEQ ID NO: 722711 - RNA, 19 nt, Artificial Sequence
  Description of Artificial Sequence: Synthetic oligonucleotide
  Antisense strand to SEQ ID NO: 722710
uauuucacuugccuuugac

SEQ ID NO: 722712 - RNA, 19 nt, Artificial Sequence
  Description of Artificial Sequence: Synthetic oligonucleotide
  Sense strand starting at position 2990 of SEQ ID NO: 586502
accauucccuguuuaggaa

SEQ ID NO: 722713 - RNA, 19 nt, Artificial Sequence
  Description of Artificial Sequence: Synthetic oligonucleotide
  Antisense strand to SEQ ID NO: 722712
uuccuaaacagggaauggu

SEQ ID NO: 722714 - RNA, 19 nt, Artificial Sequence
  Description of Artificial Sequence: Synthetic oligonucleotide
  Sense strand starting at position 3132 of SEQ ID NO: 586502
acaggccaucacugaagaa

SEQ ID NO: 722715 - RNA, 19 nt, Artificial Sequence
  Description of Artificial Sequence: Synthetic oligonucleotide
  Antisense strand to SEQ ID NO: 722714
uucuucagugauggccugu

SEQ ID NO: 722716 - RNA, 19 nt, Artificial Sequence
  Description of Artificial Sequence: Synthetic oligonucleotide
  Sense strand starting at position 3251 of SEQ ID NO: 586502
uugguaugucuauauauga

SEQ ID NO: 722717 - RNA, 19 nt, Artificial Sequence
  Description of Artificial Sequence: Synthetic oligonucleotide
  Antisense strand to SEQ ID NO: 722716
ucauauauagacauaccaa

SEQ ID NO: 722718 - RNA, 19 nt, Artificial Sequence
  Description of Artificial Sequence: Synthetic oligonucleotide
  Sense strand starting at position 3361 of SEQ ID NO: 586502
acugaaguuuacuuguaaa

SEQ ID NO: 722719 - RNA, 19 nt, Artificial Sequence
  Description of Artificial Sequence: Synthetic oligonucleotide
  Antisense strand to SEQ ID NO: 722718
uuuacaaguaaacuucagu

SEQ ID NO: 722720 - RNA, 19 nt, Artificial Sequence
  Description of Artificial Sequence: Synthetic oligonucleotide
  Sense strand starting at position 3489 of SEQ ID NO: 586502
gaaaguaaucaacgugaau

SEQ ID NO: 722721 - RNA, 19 nt, Artificial Sequence
  Description of Artificial Sequence: Synthetic oligonucleotide
  Antisense strand to SEQ ID NO: 722720
auucacguugauuacuuuc

SEQ ID NO: 722722 - RNA, 19 nt, Artificial Sequence
  Description of Artificial Sequence: Synthetic oligonucleotide
  Sense strand starting at position 3502 of SEQ ID NO: 586502
gugaauguggccuaaauua

SEQ ID NO: 722723 - RNA, 19 nt, Artificial Sequence
  Description of Artificial Sequence: Synthetic oligonucleotide
  Antisense strand to SEQ ID NO: 722722
uaauuuaggccacauucac

SEQ ID NO: 722724 - RNA, 19 nt, Artificial Sequence
  Description of Artificial Sequence: Synthetic oligonucleotide
  Sense strand starting at position 3770 of SEQ ID NO: 586502
uguuaauguguguuuguuc

SEQ ID NO: 722725 - RNA, 19 nt, Artificial Sequence
  Description of Artificial Sequence: Synthetic oligonucleotide
  Antisense strand to SEQ ID NO: 722724
gaacaaacacacauuaaca

SEQ ID NO: 722726 - RNA, 19 nt, Artificial Sequence
  Description of Artificial Sequence: Synthetic oligonucleotide
  Sense strand starting at position 3819 of SEQ ID NO: 586502
ugaaguuucuuucccauga

SEQ ID NO: 722727 - RNA, 19 nt, Artificial Sequence
  Description of Artificial Sequence: Synthetic oligonucleotide
  Antisense strand to SEQ ID NO: 722726
ucaugggaaagaaacuuca

SEQ ID NO: 722728 - RNA, 19 nt, Artificial Sequence
  Description of Artificial Sequence: Synthetic oligonucleotide
  Sense strand starting at position 3846 of SEQ ID NO: 586502
aguugcuuagagggauaaa

SEQ ID NO: 722729 - RNA, 19 nt, Artificial Sequence
  Description of Artificial Sequence: Synthetic oligonucleotide
  Antisense strand to SEQ ID NO: 722728
uuuaucccucuaagcaacu

SEQ ID NO: 722730 - RNA, 19 nt, Artificial Sequence
  Description of Artificial Sequence: Synthetic oligonucleotide
  Sense strand starting at position 3867 of SEQ ID NO: 586502
cuuauaagcccauauuggu

SEQ ID NO: 722731 - RNA, 19 nt, Artificial Sequence
  Description of Artificial Sequence: Synthetic oligonucleotide
  Antisense strand to SEQ ID NO: 722730
accaauaugggcuuauaag

SEQ ID NO: 722732 - RNA, 19 nt, Artificial Sequence
  Description of Artificial Sequence: Synthetic oligonucleotide
  Sense strand starting at position 181 of SEQ ID NO: 586503
agucuaugauacucuggua

SEQ ID NO: 722733 - RNA, 19 nt, Artificial Sequence
  Description of Artificial Sequence: Synthetic oligonucleotide
  Antisense strand to SEQ ID NO: 722732
uaccagaguaucauagacu

SEQ ID NO: 722734 - RNA, 19 nt, Artificial Sequence
  Description of Artificial Sequence: Synthetic oligonucleotide
  Sense strand starting at position 221 of SEQ ID NO: 586503
aggguacauguauauguau

SEQ ID NO: 722735 - RNA, 19 nt, Artificial Sequence
  Description of Artificial Sequence: Synthetic oligonucleotide
  Antisense strand to SEQ ID NO: 722734
auacauauacauguacccu

SEQ ID NO: 722736 - RNA, 19 nt, Artificial Sequence
  Description of Artificial Sequence: Synthetic oligonucleotide
  Sense strand starting at position 299 of SEQ ID NO: 586503
auuaaauugguuugacuuc

SEQ ID NO: 722737 - RNA, 19 nt, Artificial Sequence
  Description of Artificial Sequence: Synthetic oligonucleotide
  Antisense strand to SEQ ID NO: 722736
gaagucaaaccaauuuaau

SEQ ID NO: 722738 - RNA, 19 nt, Artificial Sequence
  Description of Artificial Sequence: Synthetic oligonucleotide
  Sense strand starting at position 356 of SEQ ID NO: 586503
cccaaagccugauuaauga

SEQ ID NO: 722739 - RNA, 19 nt, Artificial Sequence
  Description of Artificial Sequence: Synthetic oligonucleotide
  Antisense strand to SEQ ID NO: 722738
ucauuaaucaggcuuuggg

SEQ ID NO: 722740 - RNA, 19 nt, Artificial Sequence
  Description of Artificial Sequence: Synthetic oligonucleotide
  Sense strand starting at position 606 of SEQ ID NO: 586503
uucuaagccuuaguaauga

SEQ ID NO: 722741 - RNA, 19 nt, Artificial Sequence
  Description of Artificial Sequence: Synthetic oligonucleotide
  Antisense strand to SEQ ID NO: 722740
ucauuacuaaggcuuagaa

SEQ ID NO: 722742 - RNA, 19 nt, Artificial Sequence
  Description of Artificial Sequence: Synthetic oligonucleotide
  Sense strand starting at position 810 of SEQ ID NO: 586503
aaauuaugagauugcuguu

SEQ ID NO: 722743 - RNA, 19 nt, Artificial Sequence
  Description of Artificial Sequence: Synthetic oligonucleotide
  Antisense strand to SEQ ID NO: 722742
aacagcaaucucauaauuu

SEQ ID NO: 722744 - RNA, 19 nt, Artificial Sequence
  Description of Artificial Sequence: Synthetic oligonucleotide
  Sense strand starting at position 933 of SEQ ID NO: 586503
guuuauuccuuugccauuu

SEQ ID NO: 722745 - RNA, 19 nt, Artificial Sequence
  Description of Artificial Sequence: Synthetic oligonucleotide
  Antisense strand to SEQ ID NO: 722744
aaauggcaaaggaauaaac

SEQ ID NO: 722746 - RNA, 19 nt, Artificial Sequence
  Description of Artificial Sequence: Synthetic oligonucleotide
  Sense strand starting at position 979 of SEQ ID NO: 586503
ugguaacccuuuccaagau

SEQ ID NO: 722747 - RNA, 19 nt, Artificial Sequence
  Description of Artificial Sequence: Synthetic oligonucleotide
  Antisense strand to SEQ ID NO: 722746
aucuuggaaaggguuacca

SEQ ID NO: 722748 - RNA, 19 nt, Artificial Sequence
  Description of Artificial Sequence: Synthetic oligonucleotide
  Sense strand starting at position 1016 of SEQ ID NO: 586503
aggaaccagugaguucuua

SEQ ID NO: 722749 - RNA, 19 nt, Artificial Sequence
  Description of Artificial Sequence: Synthetic oligonucleotide
  Antisense strand to SEQ ID NO: 722748
uaagaacucacugguuccu

SEQ ID NO: 722750 - RNA, 19 nt, Artificial Sequence
  Description of Artificial Sequence: Synthetic oligonucleotide
  Sense strand starting at position 1061 of SEQ ID NO: 586503
agaagaguagaauguacuu

SEQ ID NO: 722751 - RNA, 19 nt, Artificial Sequence
  Description of Artificial Sequence: Synthetic oligonucleotide
  Antisense strand to SEQ ID NO: 722750
aaguacauucuacucuucu

SEQ ID NO: 722752 - RNA, 19 nt, Artificial Sequence
  Description of Artificial Sequence: Synthetic oligonucleotide
  Sense strand starting at position 1066 of SEQ ID NO: 586503
aguagaauguacuuaugua

SEQ ID NO: 722753 - RNA, 19 nt, Artificial Sequence
  Description of Artificial Sequence: Synthetic oligonucleotide
  Antisense strand to SEQ ID NO: 722752
uacauaaguacauucuacu

SEQ ID NO: 722754 - RNA, 19 nt, Artificial Sequence
  Description of Artificial Sequence: Synthetic oligonucleotide
  Sense strand starting at position 1067 of SEQ ID NO: 586503
guagaauguacuuauguau

SEQ ID NO: 722755 - RNA, 19 nt, Artificial Sequence
  Description of Artificial Sequence: Synthetic oligonucleotide
  Antisense strand to SEQ ID NO: 722754
auacauaaguacauucuac

SEQ ID NO: 722756 - RNA, 19 nt, Artificial Sequence
  Description of Artificial Sequence: Synthetic oligonucleotide
  Sense strand starting at position 1111 of SEQ ID NO: 586503
uugacaucauagcuuaaag

SEQ ID NO: 722757 - RNA, 19 nt, Artificial Sequence
  Description of Artificial Sequence: Synthetic oligonucleotide
  Antisense strand to SEQ ID NO: 722756
cuuuaagcuaugaugucaa

SEQ ID NO: 722758 - RNA, 19 nt, Artificial Sequence
  Description of Artificial Sequence: Synthetic oligonucleotide
  Sense strand starting at position 1227 of SEQ ID NO: 586503
auugcaugcguauauuuau

SEQ ID NO: 722759 - RNA, 19 nt, Artificial Sequence
  Description of Artificial Sequence: Synthetic oligonucleotide
  Antisense strand to SEQ ID NO: 722758
auaaauauacgcaugcaau

SEQ ID NO: 722760 - RNA, 19 nt, Artificial Sequence
  Description of Artificial Sequence: Synthetic oligonucleotide
  Sense strand starting at position 1447 of SEQ ID NO: 586503
ugggcuuggccagaggaaa

SEQ ID NO: 722761 - RNA, 19 nt, Artificial Sequence
  Description of Artificial Sequence: Synthetic oligonucleotide
  Antisense strand to SEQ ID NO: 722760
uuuccucuggccaagccca

SEQ ID NO: 722762 - RNA, 19 nt, Artificial Sequence
  Description of Artificial Sequence: Synthetic oligonucleotide
  Sense strand starting at position 1773 of SEQ ID NO: 586503
gcugaagauguagaagguu

SEQ ID NO: 722763 - RNA, 19 nt, Artificial Sequence
  Description of Artificial Sequence: Synthetic oligonucleotide
  Antisense strand to SEQ ID NO: 722762
aaccuucuacaucuucagc

SEQ ID NO: 722764 - RNA, 19 nt, Artificial Sequence
  Description of Artificial Sequence: Synthetic oligonucleotide
  Sense strand starting at position 1802 of SEQ ID NO: 586503
caugaauugcuggaguuau

SEQ ID NO: 722765 - RNA, 19 nt, Artificial Sequence
  Description of Artificial Sequence: Synthetic oligonucleotide
  Antisense strand to SEQ ID NO: 722764
auaacuccagcaauucaug

SEQ ID NO: 722766 - RNA, 19 nt, Artificial Sequence
  Description of Artificial Sequence: Synthetic oligonucleotide
  Sense strand starting at position 2320 of SEQ ID NO: 586503
guacccguagaauggaaau

SEQ ID NO: 722767 - RNA, 19 nt, Artificial Sequence
  Description of Artificial Sequence: Synthetic oligonucleotide
  Antisense strand to SEQ ID NO: 722766
auuuccauucuacggguac

SEQ ID NO: 722768 - RNA, 19 nt, Artificial Sequence
  Description of Artificial Sequence: Synthetic oligonucleotide
  Sense strand starting at position 2556 of SEQ ID NO: 586503
caauuagaccagugaguaa

SEQ ID NO: 722769 - RNA, 19 nt, Artificial Sequence
  Description of Artificial Sequence: Synthetic oligonucleotide
  Antisense strand to SEQ ID NO: 722768
uuacucacuggucuaauug

SEQ ID NO: 722770 - RNA, 19 nt, Artificial Sequence
  Description of Artificial Sequence: Synthetic oligonucleotide
  Sense strand starting at position 2598 of SEQ ID NO: 586503
gugauaguccuaugaaauu

SEQ ID NO: 722771 - RNA, 19 nt, Artificial Sequence
  Description of Artificial Sequence: Synthetic oligonucleotide
  Antisense strand to SEQ ID NO: 722770
aauuucauaggacuaucac

SEQ ID NO: 722772 - RNA, 19 nt, Artificial Sequence
  Description of Artificial Sequence: Synthetic oligonucleotide
  Sense strand starting at position 2607 of SEQ ID NO: 586503
cuaugaaauugccugggaa

SEQ ID NO: 722773 - RNA, 19 nt, Artificial Sequence
  Description of Artificial Sequence: Synthetic oligonucleotide
  Antisense strand to SEQ ID NO: 722772
uucccaggcaauuucauag

SEQ ID NO: 722774 - RNA, 19 nt, Artificial Sequence
  Description of Artificial Sequence: Synthetic oligonucleotide
  Sense strand starting at position 2608 of SEQ ID NO: 586503
uaugaaauugccugggaaa

SEQ ID NO: 722775 - RNA, 19 nt, Artificial Sequence
  Description of Artificial Sequence: Synthetic oligonucleotide
  Antisense strand to SEQ ID NO: 722774
uuucccaggcaauuucaua

SEQ ID NO: 722776 - RNA, 19 nt, Artificial Sequence
  Description of Artificial Sequence: Synthetic oligonucleotide
  Sense strand starting at position 2620 of SEQ ID NO: 586503
ugggaaagauuucagugua

SEQ ID NO: 722777 - RNA, 19 nt, Artificial Sequence
  Description of Artificial Sequence: Synthetic oligonucleotide
  Antisense strand to SEQ ID NO: 722776
uacacugaaaucuuuccca

SEQ ID NO: 722778 - RNA, 19 nt, Artificial Sequence
  Description of Artificial Sequence: Synthetic oligonucleotide
  Sense strand starting at position 2949 of SEQ ID NO: 586503
guaggaauuucgcucuguc

SEQ ID NO: 722779 - RNA, 19 nt, Artificial Sequence
  Description of Artificial Sequence: Synthetic oligonucleotide
  Antisense strand to SEQ ID NO: 722778
gacagagcgaaauuccuac

SEQ ID NO: 722780 - RNA, 19 nt, Artificial Sequence
  Description of Artificial Sequence: Synthetic oligonucleotide
  Sense strand starting at position 3141 of SEQ ID NO: 586503
uggucucaaguuuaagaua

SEQ ID NO: 722781 - RNA, 19 nt, Artificial Sequence
  Description of Artificial Sequence: Synthetic oligonucleotide
  Antisense strand to SEQ ID NO: 722780
uaucuuaaacuugagacca

SEQ ID NO: 722782 - RNA, 19 nt, Artificial Sequence
  Description of Artificial Sequence: Synthetic oligonucleotide
  Sense strand starting at position 3293 of SEQ ID NO: 586503
gguuauuucuuccuguaua

SEQ ID NO: 722783 - RNA, 19 nt, Artificial Sequence
  Description of Artificial Sequence: Synthetic oligonucleotide
  Antisense strand to SEQ ID NO: 722782
uauacaggaagaaauaacc

SEQ ID NO: 722784 - RNA, 19 nt, Artificial Sequence
  Description of Artificial Sequence: Synthetic oligonucleotide
  Sense strand starting at position 3515 of SEQ ID NO: 586503
uuaggaaacucguuaaagu

SEQ ID NO: 722785 - RNA, 19 nt, Artificial Sequence
  Description of Artificial Sequence: Synthetic oligonucleotide
  Antisense strand to SEQ ID NO: 722784
acuuuaacgaguuuccuaa

SEQ ID NO: 722786 - RNA, 19 nt, Artificial Sequence
  Description of Artificial Sequence: Synthetic oligonucleotide
  Sense strand starting at position 3516 of SEQ ID NO: 586503
uaggaaacucguuaaaguu

SEQ ID NO: 722787 - RNA, 19 nt, Artificial Sequence
  Description of Artificial Sequence: Synthetic oligonucleotide
  Antisense strand to SEQ ID NO: 722786
aacuuuaacgaguuuccua

SEQ ID NO: 722788 - RNA, 19 nt, Artificial Sequence
  Description of Artificial Sequence: Synthetic oligonucleotide
  Sense strand starting at position 3522 of SEQ ID NO: 586503
acucguuaaaguuaugagu

SEQ ID NO: 722789 - RNA, 19 nt, Artificial Sequence
  Description of Artificial Sequence: Synthetic oligonucleotide
  Antisense strand to SEQ ID NO: 722788
acucauaacuuuaacgagu

SEQ ID NO: 722790 - RNA, 19 nt, Artificial Sequence
  Description of Artificial Sequence: Synthetic oligonucleotide
  Sense strand starting at position 3571 of SEQ ID NO: 586503
uuguguuggguuuagaauu

SEQ ID NO: 722791 - RNA, 19 nt, Artificial Sequence
  Description of Artificial Sequence: Synthetic oligonucleotide
  Antisense strand to SEQ ID NO: 722790
aauucuaaacccaacacaa

SEQ ID NO: 722792 - RNA, 19 nt, Artificial Sequence
  Description of Artificial Sequence: Synthetic oligonucleotide
  Sense strand starting at position 3663 of SEQ ID NO: 586503
augugacacugaccaaauu

SEQ ID NO: 722793 - RNA, 19 nt, Artificial Sequence
  Description of Artificial Sequence: Synthetic oligonucleotide
  Antisense strand to SEQ ID NO: 722792
aauuuggucagugucacau

SEQ ID NO: 722794 - RNA, 19 nt, Artificial Sequence
  Description of Artificial Sequence: Synthetic oligonucleotide
  Sense strand starting at position 3699 of SEQ ID NO: 586503
cuuaguuuacagggaaaua

SEQ ID NO: 722795 - RNA, 19 nt, Artificial Sequence
  Description of Artificial Sequence: Synthetic oligonucleotide
  Antisense strand to SEQ ID NO: 722794
uauuucccuguaaacuaag

SEQ ID NO: 722796 - RNA, 19 nt, Artificial Sequence
  Description of Artificial Sequence: Synthetic oligonucleotide
  Sense strand starting at position 3776 of SEQ ID NO: 586503
agguaaggacuuuguaaug

SEQ ID NO: 722797 - RNA, 19 nt, Artificial Sequence
  Description of Artificial Sequence: Synthetic oligonucleotide
  Antisense strand to SEQ ID NO: 722796
cauuacaaaguccuuaccu

SEQ ID NO: 722798 - RNA, 19 nt, Artificial Sequence
  Description of Artificial Sequence: Synthetic oligonucleotide
  Sense strand starting at position 3785 of SEQ ID NO: 586503
cuuuguaauggcguguagu

SEQ ID NO: 722799 - RNA, 19 nt, Artificial Sequence
  Description of Artificial Sequence: Synthetic oligonucleotide
  Antisense strand to SEQ ID NO: 722798
acuacacgccauuacaaag

SEQ ID NO: 722800 - RNA, 19 nt, Artificial Sequence
  Description of Artificial Sequence: Synthetic oligonucleotide
  Sense strand starting at position 3821 of SEQ ID NO: 586503
acguguuagcugguguuau

SEQ ID NO: 722801 - RNA, 19 nt, Artificial Sequence
  Description of Artificial Sequence: Synthetic oligonucleotide
  Antisense strand to SEQ ID NO: 722800
auaacaccagcuaacacgu

SEQ ID NO: 722802 - RNA, 19 nt, Artificial Sequence
  Description of Artificial Sequence: Synthetic oligonucleotide
  Sense strand starting at position 3893 of SEQ ID NO: 586503
ccauauaauguaugugauc

SEQ ID NO: 722803 - RNA, 19 nt, Artificial Sequence
  Description of Artificial Sequence: Synthetic oligonucleotide
  Antisense strand to SEQ ID NO: 722802
gaucacauacauuauaugg

SEQ ID NO: 722804 - RNA, 19 nt, Artificial Sequence
  Description of Artificial Sequence: Synthetic oligonucleotide
  Sense strand starting at position 3910 of SEQ ID NO: 586503
ucuuauaggugcucuaaag

SEQ ID NO: 722805 - RNA, 19 nt, Artificial Sequence
  Description of Artificial Sequence: Synthetic oligonucleotide
  Antisense strand to SEQ ID NO: 722804
cuuuagagcaccuauaaga

SEQ ID NO: 722806 - RNA, 19 nt, Artificial Sequence
  Description of Artificial Sequence: Synthetic oligonucleotide
  Sense strand starting at position 3958 of SEQ ID NO: 586503
aggagaucaugcguacaua

SEQ ID NO: 722807 - RNA, 19 nt, Artificial Sequence
  Description of Artificial Sequence: Synthetic oligonucleotide
  Antisense strand to SEQ ID NO: 722806
uauguacgcaugaucuccu

SEQ ID NO: 722808 - RNA, 19 nt, Artificial Sequence
  Description of Artificial Sequence: Synthetic oligonucleotide
  Sense strand starting at position 3959 of SEQ ID NO: 586503
ggagaucaugcguacauaa

SEQ ID NO: 722809 - RNA, 19 nt, Artificial Sequence
  Description of Artificial Sequence: Synthetic oligonucleotide
  Antisense strand to SEQ ID NO: 722808
uuauguacgcaugaucucc

SEQ ID NO: 722810 - RNA, 19 nt, Artificial Sequence
  Description of Artificial Sequence: Synthetic oligonucleotide
  Sense strand starting at position 3961 of SEQ ID NO: 586503
agaucaugcguacauaauu

SEQ ID NO: 722811 - RNA, 19 nt, Artificial Sequence
  Description of Artificial Sequence: Synthetic oligonucleotide
  Antisense strand to SEQ ID NO: 722810
aauuauguacgcaugaucu

SEQ ID NO: 722812 - RNA, 19 nt, Artificial Sequence
  Description of Artificial Sequence: Synthetic oligonucleotide
  Sense strand starting at position 36 of SEQ ID NO: 586504
gugaguaaagcucaggaua

SEQ ID NO: 722813 - RNA, 19 nt, Artificial Sequence
  Description of Artificial Sequence: Synthetic oligonucleotide
  Antisense strand to SEQ ID NO: 722812
uauccugagcuuuacucac

SEQ ID NO: 722814 - RNA, 19 nt, Artificial Sequence
  Description of Artificial Sequence: Synthetic oligonucleotide
  Sense strand starting at position 163 of SEQ ID NO: 586504
uaggucagaagugguugaa

SEQ ID NO: 722815 - RNA, 19 nt, Artificial Sequence
  Description of Artificial Sequence: Synthetic oligonucleotide
  Antisense strand to SEQ ID NO: 722814
uucaaccacuucugaccua

SEQ ID NO: 722816 - RNA, 19 nt, Artificial Sequence
  Description of Artificial Sequence: Synthetic oligonucleotide
  Sense strand starting at position 166 of SEQ ID NO: 586504
gucagaagugguugaagcu

SEQ ID NO: 722817 - RNA, 19 nt, Artificial Sequence
  Description of Artificial Sequence: Synthetic oligonucleotide
  Antisense strand to SEQ ID NO: 722816
agcuucaaccacuucugac

SEQ ID NO: 722818 - RNA, 19 nt, Artificial Sequence
  Description of Artificial Sequence: Synthetic oligonucleotide
  Sense strand starting at position 244 of SEQ ID NO: 586504
cagagagccaucgguagau

SEQ ID NO: 722819 - RNA, 19 nt, Artificial Sequence
  Description of Artificial Sequence: Synthetic oligonucleotide
  Antisense strand to SEQ ID NO: 722818
aucuaccgauggcucucug

SEQ ID NO: 722820 - RNA, 19 nt, Artificial Sequence
  Description of Artificial Sequence: Synthetic oligonucleotide
  Sense strand starting at position 246 of SEQ ID NO: 586504
gagagccaucgguagauga

SEQ ID NO: 722821 - RNA, 19 nt, Artificial Sequence
  Description of Artificial Sequence: Synthetic oligonucleotide
  Antisense strand to SEQ ID NO: 722820
ucaucuaccgauggcucuc

SEQ ID NO: 722822 - RNA, 19 nt, Artificial Sequence
  Description of Artificial Sequence: Synthetic oligonucleotide
  Sense strand starting at position 341 of SEQ ID NO: 586504
aggagcugugcccagaaau

SEQ ID NO: 722823 - RNA, 19 nt, Artificial Sequence
  Description of Artificial Sequence: Synthetic oligonucleotide
  Antisense strand to SEQ ID NO: 722822
auuucugggcacagcuccu

SEQ ID NO: 722824 - RNA, 19 nt, Artificial Sequence
  Description of Artificial Sequence: Synthetic oligonucleotide
  Sense strand starting at position 417 of SEQ ID NO: 586504
agaacaggccauugaauau

SEQ ID NO: 722825 - RNA, 19 nt, Artificial Sequence
  Description of Artificial Sequence: Synthetic oligonucleotide
  Antisense strand to SEQ ID NO: 722824
auauucaauggccuguucu

SEQ ID NO: 722826 - RNA, 19 nt, Artificial Sequence
  Description of Artificial Sequence: Synthetic oligonucleotide
  Sense strand starting at position 504 of SEQ ID NO: 586504
cugagagcaucuccagaaa

SEQ ID NO: 722827 - RNA, 19 nt, Artificial Sequence
  Description of Artificial Sequence: Synthetic oligonucleotide
  Antisense strand to SEQ ID NO: 722826
uuucuggagaugcucucag

SEQ ID NO: 722828 - RNA, 19 nt, Artificial Sequence
  Description of Artificial Sequence: Synthetic oligonucleotide
  Sense strand starting at position 1185 of SEQ ID NO: 586504
ccauuagccacgggaucau

SEQ ID NO: 722829 - RNA, 19 nt, Artificial Sequence
  Description of Artificial Sequence: Synthetic oligonucleotide
  Antisense strand to SEQ ID NO: 722828
augaucccguggcuaaugg

SEQ ID NO: 722830 - RNA, 19 nt, Artificial Sequence
  Description of Artificial Sequence: Synthetic oligonucleotide
  Sense strand starting at position 1225 of SEQ ID NO: 586504
ggccaagucaguggucaga

SEQ ID NO: 722831 - RNA, 19 nt, Artificial Sequence
  Description of Artificial Sequence: Synthetic oligonucleotide
  Antisense strand to SEQ ID NO: 722830
ucugaccacugacuuggcc

SEQ ID NO: 722832 - RNA, 19 nt, Artificial Sequence
  Description of Artificial Sequence: Synthetic oligonucleotide
  Sense strand starting at position 1227 of SEQ ID NO: 586504
ccaagucaguggucagagu

SEQ ID NO: 722833 - RNA, 19 nt, Artificial Sequence
  Description of Artificial Sequence: Synthetic oligonucleotide
  Antisense strand to SEQ ID NO: 722832
acucugaccacugacuugg

SEQ ID NO: 722834 - RNA, 19 nt, Artificial Sequence
  Description of Artificial Sequence: Synthetic oligonucleotide
  Sense strand starting at position 1340 of SEQ ID NO: 586504
ggguuacuuggugagcaau

SEQ ID NO: 722835 - RNA, 19 nt, Artificial Sequence
  Description of Artificial Sequence: Synthetic oligonucleotide
  Antisense strand to SEQ ID NO: 722834
auugcucaccaaguaaccc

SEQ ID NO: 722836 - RNA, 19 nt, Artificial Sequence
  Description of Artificial Sequence: Synthetic oligonucleotide
  Sense strand starting at position 1342 of SEQ ID NO: 586504
guuacuuggugagcaauaa

SEQ ID NO: 722837 - RNA, 19 nt, Artificial Sequence
  Description of Artificial Sequence: Synthetic oligonucleotide
  Antisense strand to SEQ ID NO: 722836
uuauugcucaccaaguaac

SEQ ID NO: 722838 - RNA, 19 nt, Artificial Sequence
  Description of Artificial Sequence: Synthetic oligonucleotide
  Sense strand starting at position 1343 of SEQ ID NO: 586504
uuacuuggugagcaauaaa

SEQ ID NO: 722839 - RNA, 19 nt, Artificial Sequence
  Description of Artificial Sequence: Synthetic oligonucleotide
  Antisense strand to SEQ ID NO: 722838
uuuauugcucaccaaguaa

SEQ ID NO: 722840 - RNA, 19 nt, Artificial Sequence
  Description of Artificial Sequence: Synthetic oligonucleotide
  Sense strand starting at position 1346 of SEQ ID NO: 586504
cuuggugagcaauaaagua

SEQ ID NO: 722841 - RNA, 19 nt, Artificial Sequence
  Description of Artificial Sequence: Synthetic oligonucleotide
  Antisense strand to SEQ ID NO: 722840
uacuuuauugcucaccaag

SEQ ID NO: 722842 - RNA, 19 nt, Artificial Sequence
  Description of Artificial Sequence: Synthetic oligonucleotide
  Sense strand starting at position 1396 of SEQ ID NO: 586504
ggagaacauggcugugaag

SEQ ID NO: 722843 - RNA, 19 nt, Artificial Sequence
  Description of Artificial Sequence: Synthetic oligonucleotide
  Antisense strand to SEQ ID NO: 722842
cuucacagccauguucucc

SEQ ID NO: 722844 - RNA, 19 nt, Artificial Sequence
  Description of Artificial Sequence: Synthetic oligonucleotide
  Sense strand starting at position 1398 of SEQ ID NO: 586504
agaacauggcugugaagaa

SEQ ID NO: 722845 - RNA, 19 nt, Artificial Sequence
  Description of Artificial Sequence: Synthetic oligonucleotide
  Antisense strand to SEQ ID NO: 722844
uucuucacagccauguucu

SEQ ID NO: 722846 - RNA, 19 nt, Artificial Sequence
  Description of Artificial Sequence: Synthetic oligonucleotide
  Sense strand starting at position 1470 of SEQ ID NO: 586504
gaguaagagcgcuauucuu

SEQ ID NO: 722847 - RNA, 19 nt, Artificial Sequence
  Description of Artificial Sequence: Synthetic oligonucleotide
  Antisense strand to SEQ ID NO: 722846
aagaauagcgcucuuacuc

SEQ ID NO: 722848 - RNA, 19 nt, Artificial Sequence
  Description of Artificial Sequence: Synthetic oligonucleotide
  Sense strand starting at position 1487 of SEQ ID NO: 586504
uuugcauaggaggguuauu

SEQ ID NO: 722849 - RNA, 19 nt, Artificial Sequence
  Description of Artificial Sequence: Synthetic oligonucleotide
  Antisense strand to SEQ ID NO: 722848
aauaacccuccuaugcaaa

SEQ ID NO: 722850 - RNA, 19 nt, Artificial Sequence
  Description of Artificial Sequence: Synthetic oligonucleotide
  Sense strand starting at position 1492 of SEQ ID NO: 586504
auaggaggguuauugugau

SEQ ID NO: 722851 - RNA, 19 nt, Artificial Sequence
  Description of Artificial Sequence: Synthetic oligonucleotide
  Antisense strand to SEQ ID NO: 722850
aucacaauaacccuccuau

SEQ ID NO: 722852 - RNA, 19 nt, Artificial Sequence
  Description of Artificial Sequence: Synthetic oligonucleotide
  Sense strand starting at position 1502 of SEQ ID NO: 586504
uauugugaucccgguaagg

SEQ ID NO: 722853 - RNA, 19 nt, Artificial Sequence
  Description of Artificial Sequence: Synthetic oligonucleotide
  Antisense strand to SEQ ID NO: 722852
ccuuaccgggaucacaaua

SEQ ID NO: 722854 - RNA, 19 nt, Artificial Sequence
  Description of Artificial Sequence: Synthetic oligonucleotide
  Sense strand starting at position 1504 of SEQ ID NO: 586504
uugugaucccgguaaggaa

SEQ ID NO: 722855 - RNA, 19 nt, Artificial Sequence
  Description of Artificial Sequence: Synthetic oligonucleotide
  Antisense strand to SEQ ID NO: 722854
uuccuuaccgggaucacaa

SEQ ID NO: 722856 - RNA, 19 nt, Artificial Sequence
  Description of Artificial Sequence: Synthetic oligonucleotide
  Sense strand starting at position 1538 of SEQ ID NO: 586504
cagacauuacugugggaug

SEQ ID NO: 722857 - RNA, 19 nt, Artificial Sequence
  Description of Artificial Sequence: Synthetic oligonucleotide
  Antisense strand to SEQ ID NO: 722856
caucccacaguaaugucug

SEQ ID NO: 722858 - RNA, 19 nt, Artificial Sequence
  Description of Artificial Sequence: Synthetic oligonucleotide
  Sense strand starting at position 1566 of SEQ ID NO: 586504
guauaacggucacucugaa

SEQ ID NO: 722859 - RNA, 19 nt, Artificial Sequence
  Description of Artificial Sequence: Synthetic oligonucleotide
  Antisense strand to SEQ ID NO: 722858
uucagagugaccguuauac

SEQ ID NO: 722860 - RNA, 19 nt, Artificial Sequence
  Description of Artificial Sequence: Synthetic oligonucleotide
  Sense strand starting at position 1587 of SEQ ID NO: 586504
ggaagagaguuauugugag

SEQ ID NO: 722861 - RNA, 19 nt, Artificial Sequence
  Description of Artificial Sequence: Synthetic oligonucleotide
  Antisense strand to SEQ ID NO: 722860
cucacaauaacucucuucc

SEQ ID NO: 722862 - RNA, 19 nt, Artificial Sequence
  Description of Artificial Sequence: Synthetic oligonucleotide
  Sense strand starting at position 1595 of SEQ ID NO: 586504
guuauugugagaugaggag

SEQ ID NO: 722863 - RNA, 19 nt, Artificial Sequence
  Description of Artificial Sequence: Synthetic oligonucleotide
  Antisense strand to SEQ ID NO: 722862
cuccucaucucacaauaac

SEQ ID NO: 722864 - RNA, 19 nt, Artificial Sequence
  Description of Artificial Sequence: Synthetic oligonucleotide
  Sense strand starting at position 1960 of SEQ ID NO: 586504
cugaauaccgagcacgaua

SEQ ID NO: 722865 - RNA, 19 nt, Artificial Sequence
  Description of Artificial Sequence: Synthetic oligonucleotide
  Antisense strand to SEQ ID NO: 722864
uaucgugcucgguauucag

SEQ ID NO: 722866 - RNA, 19 nt, Artificial Sequence
  Description of Artificial Sequence: Synthetic oligonucleotide
  Sense strand starting at position 2237 of SEQ ID NO: 586504
gccuauggcaauugagaag

SEQ ID NO: 722867 - RNA, 19 nt, Artificial Sequence
  Description of Artificial Sequence: Synthetic oligonucleotide
  Antisense strand to SEQ ID NO: 722866
cuucucaauugccauaggc

SEQ ID NO: 722868 - RNA, 19 nt, Artificial Sequence
  Description of Artificial Sequence: Synthetic oligonucleotide
  Sense strand starting at position 2689 of SEQ ID NO: 586504
cugacagguuucuccuuga

SEQ ID NO: 722869 - RNA, 19 nt, Artificial Sequence
  Description of Artificial Sequence: Synthetic oligonucleotide
  Antisense strand to SEQ ID NO: 722868
ucaaggagaaaccugucag

SEQ ID NO: 722870 - RNA, 19 nt, Artificial Sequence
  Description of Artificial Sequence: Synthetic oligonucleotide
  Sense strand starting at position 2694 of SEQ ID NO: 586504
agguuucuccuugacccaa

SEQ ID NO: 722871 - RNA, 19 nt, Artificial Sequence
  Description of Artificial Sequence: Synthetic oligonucleotide
  Antisense strand to SEQ ID NO: 722870
uugggucaaggagaaaccu

SEQ ID NO: 722872 - RNA, 19 nt, Artificial Sequence
  Description of Artificial Sequence: Synthetic oligonucleotide
  Sense strand starting at position 2826 of SEQ ID NO: 586504
gagaguccauucucuuaag

SEQ ID NO: 722873 - RNA, 19 nt, Artificial Sequence
  Description of Artificial Sequence: Synthetic oligonucleotide
  Antisense strand to SEQ ID NO: 722872
cuuaagagaauggacucuc

SEQ ID NO: 722874 - RNA, 19 nt, Artificial Sequence
  Description of Artificial Sequence: Synthetic oligonucleotide
  Sense strand starting at position 2947 of SEQ ID NO: 586504
uugcguuuccagcccuauu

SEQ ID NO: 722875 - RNA, 19 nt, Artificial Sequence
  Description of Artificial Sequence: Synthetic oligonucleotide
  Antisense strand to SEQ ID NO: 722874
aauagggcuggaaacgcaa

SEQ ID NO: 722876 - RNA, 19 nt, Artificial Sequence
  Description of Artificial Sequence: Synthetic oligonucleotide
  Sense strand starting at position 3004 of SEQ ID NO: 586504
uguuccauuccagguggaa

SEQ ID NO: 722877 - RNA, 19 nt, Artificial Sequence
  Description of Artificial Sequence: Synthetic oligonucleotide
  Antisense strand to SEQ ID NO: 722876
uuccaccuggaauggaaca

SEQ ID NO: 722878 - RNA, 19 nt, Artificial Sequence
  Description of Artificial Sequence: Synthetic oligonucleotide
  Sense strand starting at position 3025 of SEQ ID NO: 586504
aggugcuaguccucuggaa

SEQ ID NO: 722879 - RNA, 19 nt, Artificial Sequence
  Description of Artificial Sequence: Synthetic oligonucleotide
  Antisense strand to SEQ ID NO: 722878
uuccagaggacuagcaccu

SEQ ID NO: 722880 - RNA, 19 nt, Artificial Sequence
  Description of Artificial Sequence: Synthetic oligonucleotide
  Sense strand starting at position 3029 of SEQ ID NO: 586504
gcuaguccucuggaaacga

SEQ ID NO: 722881 - RNA, 19 nt, Artificial Sequence
  Description of Artificial Sequence: Synthetic oligonucleotide
  Antisense strand to SEQ ID NO: 722880
ucguuuccagaggacuagc

SEQ ID NO: 722882 - RNA, 19 nt, Artificial Sequence
  Description of Artificial Sequence: Synthetic oligonucleotide
  Sense strand starting at position 3563 of SEQ ID NO: 586504
gcgaucgucccgcuucauu

SEQ ID NO: 722883 - RNA, 19 nt, Artificial Sequence
  Description of Artificial Sequence: Synthetic oligonucleotide
  Antisense strand to SEQ ID NO: 722882
aaugaagcgggacgaucgc

SEQ ID NO: 722884 - RNA, 19 nt, Artificial Sequence
  Description of Artificial Sequence: Synthetic oligonucleotide
  Sense strand starting at position 3573 of SEQ ID NO: 586504
cgcuucauucugccgagua

SEQ ID NO: 722885 - RNA, 19 nt, Artificial Sequence
  Description of Artificial Sequence: Synthetic oligonucleotide
  Antisense strand to SEQ ID NO: 722884
uacucggcagaaugaagcg

SEQ ID NO: 722886 - RNA, 19 nt, Artificial Sequence
  Description of Artificial Sequence: Synthetic oligonucleotide
  Sense strand starting at position 3799 of SEQ ID NO: 586504
ugaguuaaauucccuugca

SEQ ID NO: 722887 - RNA, 19 nt, Artificial Sequence
  Description of Artificial Sequence: Synthetic oligonucleotide
  Antisense strand to SEQ ID NO: 722886
ugcaagggaauuuaacuca

SEQ ID NO: 722888 - RNA, 19 nt, Artificial Sequence
  Description of Artificial Sequence: Synthetic oligonucleotide
  Sense strand starting at position 3800 of SEQ ID NO: 586504
gaguuaaauucccuugcag

SEQ ID NO: 722889 - RNA, 19 nt, Artificial Sequence
  Description of Artificial Sequence: Synthetic oligonucleotide
  Antisense strand to SEQ ID NO: 722888
cugcaagggaauuuaacuc

SEQ ID NO: 722890 - RNA, 19 nt, Artificial Sequence
  Description of Artificial Sequence: Synthetic oligonucleotide
  Sense strand starting at position 3912 of SEQ ID NO: 586504
gugugucucauguugccaa

SEQ ID NO: 722891 - RNA, 19 nt, Artificial Sequence
  Description of Artificial Sequence: Synthetic oligonucleotide
  Antisense strand to SEQ ID NO: 722890
uuggcaacaugagacacac

SEQ ID NO: 722892 - RNA, 19 nt, Artificial Sequence
  Description of Artificial Sequence: Synthetic oligonucleotide
  Sense strand starting at position 2 of SEQ ID NO: 586505
aguuauaaacagugcaaua

SEQ ID NO: 722893 - RNA, 19 nt, Artificial Sequence
  Description of Artificial Sequence: Synthetic oligonucleotide
  Antisense strand to SEQ ID NO: 722892
uauugcacuguuuauaacu

SEQ ID NO: 722894 - RNA, 19 nt, Artificial Sequence
  Description of Artificial Sequence: Synthetic oligonucleotide
  Sense strand starting at position 28 of SEQ ID NO: 586505
ucagauuuccucugcuugu

SEQ ID NO: 722895 - RNA, 19 nt, Artificial Sequence
  Description of Artificial Sequence: Synthetic oligonucleotide
  Antisense strand to SEQ ID NO: 722894
acaagcagaggaaaucuga

SEQ ID NO: 722896 - RNA, 19 nt, Artificial Sequence
  Description of Artificial Sequence: Synthetic oligonucleotide
  Sense strand starting at position 32 of SEQ ID NO: 586505
auuuccucugcuugucaua

SEQ ID NO: 722897 - RNA, 19 nt, Artificial Sequence
  Description of Artificial Sequence: Synthetic oligonucleotide
  Antisense strand to SEQ ID NO: 722896
uaugacaagcagaggaaau

SEQ ID NO: 722898 - RNA, 19 nt, Artificial Sequence
  Description of Artificial Sequence: Synthetic oligonucleotide
  Sense strand starting at position 34 of SEQ ID NO: 586505
uuccucugcuugucauaga

SEQ ID NO: 722899 - RNA, 19 nt, Artificial Sequence
  Description of Artificial Sequence: Synthetic oligonucleotide
  Antisense strand to SEQ ID NO: 722898
ucuaugacaagcagaggaa

SEQ ID NO: 722900 - RNA, 19 nt, Artificial Sequence
  Description of Artificial Sequence: Synthetic oligonucleotide
  Sense strand starting at position 64 of SEQ ID NO: 586505
acacuuuagucagcuguau

SEQ ID NO: 722901 - RNA, 19 nt, Artificial Sequence
  Description of Artificial Sequence: Synthetic oligonucleotide
  Antisense strand to SEQ ID NO: 722900
auacagcugacuaaagugu

SEQ ID NO: 722902 - RNA, 19 nt, Artificial Sequence
  Description of Artificial Sequence: Synthetic oligonucleotide
  Sense strand starting at position 68 of SEQ ID NO: 586505
uuuagucagcuguauuaag

SEQ ID NO: 722903 - RNA, 19 nt, Artificial Sequence
  Description of Artificial Sequence: Synthetic oligonucleotide
  Antisense strand to SEQ ID NO: 722902
cuuaauacagcugacuaaa

SEQ ID NO: 722904 - RNA, 19 nt, Artificial Sequence
  Description of Artificial Sequence: Synthetic oligonucleotide
  Sense strand starting at position 79 of SEQ ID NO: 586505
guauuaagucugcaucugu

SEQ ID NO: 722905 - RNA, 19 nt, Artificial Sequence
  Description of Artificial Sequence: Synthetic oligonucleotide
  Antisense strand to SEQ ID NO: 722904
acagaugcagacuuaauac

SEQ ID NO: 722906 - RNA, 19 nt, Artificial Sequence
  Description of Artificial Sequence: Synthetic oligonucleotide
  Sense strand starting at position 188 of SEQ ID NO: 586505
ugaagugagacacguucuu

SEQ ID NO: 722907 - RNA, 19 nt, Artificial Sequence
  Description of Artificial Sequence: Synthetic oligonucleotide
  Antisense strand to SEQ ID NO: 722906
aagaacgugucucacuuca

SEQ ID NO: 722908 - RNA, 19 nt, Artificial Sequence
  Description of Artificial Sequence: Synthetic oligonucleotide
  Sense strand starting at position 199 of SEQ ID NO: 586505
acguucuugcugggacaga

SEQ ID NO: 722909 - RNA, 19 nt, Artificial Sequence
  Description of Artificial Sequence: Synthetic oligonucleotide
  Antisense strand to SEQ ID NO: 722908
ucugucccagcaagaacgu

SEQ ID NO: 722910 - RNA, 19 nt, Artificial Sequence
  Description of Artificial Sequence: Synthetic oligonucleotide
  Sense strand starting at position 871 of SEQ ID NO: 586505
ggaaguuucugguuuaacu

SEQ ID NO: 722911 - RNA, 19 nt, Artificial Sequence
  Description of Artificial Sequence: Synthetic oligonucleotide
  Antisense strand to SEQ ID NO: 722910
aguuaaaccagaaacuucc

SEQ ID NO: 722912 - RNA, 19 nt, Artificial Sequence
  Description of Artificial Sequence: Synthetic oligonucleotide
  Sense strand starting at position 926 of SEQ ID NO: 586505
guuugaaggcaucauacua

SEQ ID NO: 722913 - RNA, 19 nt, Artificial Sequence
  Description of Artificial Sequence: Synthetic oligonucleotide
  Antisense strand to SEQ ID NO: 722912
uaguaugaugccuucaaac

SEQ ID NO: 722914 - RNA, 19 nt, Artificial Sequence
  Description of Artificial Sequence: Synthetic oligonucleotide
  Sense strand starting at position 942 of SEQ ID NO: 586505
cuagguguuguguaucuuu

SEQ ID NO: 722915 - RNA, 19 nt, Artificial Sequence
  Description of Artificial Sequence: Synthetic oligonucleotide
  Antisense strand to SEQ ID NO: 722914
aaagauacacaacaccuag

SEQ ID NO: 722916 - RNA, 19 nt, Artificial Sequence
  Description of Artificial Sequence: Synthetic oligonucleotide
  Sense strand starting at position 983 of SEQ ID NO: 586505
gguugaagcaagcaauauu

SEQ ID NO: 722917 - RNA, 19 nt, Artificial Sequence
  Description of Artificial Sequence: Synthetic oligonucleotide
  Antisense strand to SEQ ID NO: 722916
aauauugcuugcuucaacc

SEQ ID NO: 722918 - RNA, 19 nt, Artificial Sequence
  Description of Artificial Sequence: Synthetic oligonucleotide
  Sense strand starting at position 1056 of SEQ ID NO: 586505
gcaugugcaugauccauaa

SEQ ID NO: 722919 - RNA, 19 nt, Artificial Sequence
  Description of Artificial Sequence: Synthetic oligonucleotide
  Antisense strand to SEQ ID NO: 722918
uuauggaucaugcacaugc

SEQ ID NO: 722920 - RNA, 19 nt, Artificial Sequence
  Description of Artificial Sequence: Synthetic oligonucleotide
  Sense strand starting at position 1103 of SEQ ID NO: 586505
ugcagagagaaguguaauc

SEQ ID NO: 722921 - RNA, 19 nt, Artificial Sequence
  Description of Artificial Sequence: Synthetic oligonucleotide
  Antisense strand to SEQ ID NO: 722920
gauuacacuucucucugca

SEQ ID NO: 722922 - RNA, 19 nt, Artificial Sequence
  Description of Artificial Sequence: Synthetic oligonucleotide
  Sense strand starting at position 1108 of SEQ ID NO: 586505
agagaaguguaaucccaag

SEQ ID NO: 722923 - RNA, 19 nt, Artificial Sequence
  Description of Artificial Sequence: Synthetic oligonucleotide
  Antisense strand to SEQ ID NO: 722922
cuugggauuacacuucucu

SEQ ID NO: 722924 - RNA, 19 nt, Artificial Sequence
  Description of Artificial Sequence: Synthetic oligonucleotide
  Sense strand starting at position 1129 of SEQ ID NO: 586505
auaggcauuucugacaagu

SEQ ID NO: 722925 - RNA, 19 nt, Artificial Sequence
  Description of Artificial Sequence: Synthetic oligonucleotide
  Antisense strand to SEQ ID NO: 722924
acuugucagaaaugccuau

SEQ ID NO: 722926 - RNA, 19 nt, Artificial Sequence
  Description of Artificial Sequence: Synthetic oligonucleotide
  Sense strand starting at position 1131 of SEQ ID NO: 586505
aggcauuucugacaaguaa

SEQ ID NO: 722927 - RNA, 19 nt, Artificial Sequence
  Description of Artificial Sequence: Synthetic oligonucleotide
  Antisense strand to SEQ ID NO: 722926
uuacuugucagaaaugccu

SEQ ID NO: 722928 - RNA, 19 nt, Artificial Sequence
  Description of Artificial Sequence: Synthetic oligonucleotide
  Sense strand starting at position 1152 of SEQ ID NO: 586505
uaggaaucugaguacuggu

SEQ ID NO: 722929 - RNA, 19 nt, Artificial Sequence
  Description of Artificial Sequence: Synthetic oligonucleotide
  Antisense strand to SEQ ID NO: 722928
accaguacucagauuccua

SEQ ID NO: 722930 - RNA, 19 nt, Artificial Sequence
  Description of Artificial Sequence: Synthetic oligonucleotide
  Sense strand starting at position 1159 of SEQ ID NO: 586505
cugaguacugguuaagcau

SEQ ID NO: 722931 - RNA, 19 nt, Artificial Sequence
  Description of Artificial Sequence: Synthetic oligonucleotide
  Antisense strand to SEQ ID NO: 722930
augcuuaaccaguacucag

SEQ ID NO: 722932 - RNA, 19 nt, Artificial Sequence
  Description of Artificial Sequence: Synthetic oligonucleotide
  Sense strand starting at position 1167 of SEQ ID NO: 586505
ugguuaagcaucuggaaau

SEQ ID NO: 722933 - RNA, 19 nt, Artificial Sequence
  Description of Artificial Sequence: Synthetic oligonucleotide
  Antisense strand to SEQ ID NO: 722932
auuuccagaugcuuaacca

SEQ ID NO: 722934 - RNA, 19 nt, Artificial Sequence
  Description of Artificial Sequence: Synthetic oligonucleotide
  Sense strand starting at position 1385 of SEQ ID NO: 586505
guauuuagcuuucucauuc

SEQ ID NO: 722935 - RNA, 19 nt, Artificial Sequence
  Description of Artificial Sequence: Synthetic oligonucleotide
  Antisense strand to SEQ ID NO: 722934
gaaugagaaagcuaaauac

SEQ ID NO: 722936 - RNA, 19 nt, Artificial Sequence
  Description of Artificial Sequence: Synthetic oligonucleotide
  Sense strand starting at position 2223 of SEQ ID NO: 586505
gcaucugugcaauagcaau

SEQ ID NO: 722937 - RNA, 19 nt, Artificial Sequence
  Description of Artificial Sequence: Synthetic oligonucleotide
  Antisense strand to SEQ ID NO: 722936
auugcuauugcacagaugc

SEQ ID NO: 722938 - RNA, 19 nt, Artificial Sequence
  Description of Artificial Sequence: Synthetic oligonucleotide
  Sense strand starting at position 2291 of SEQ ID NO: 586505
acagaaugcuguguuaauu

SEQ ID NO: 722939 - RNA, 19 nt, Artificial Sequence
  Description of Artificial Sequence: Synthetic oligonucleotide
  Antisense strand to SEQ ID NO: 722938
aauuaacacagcauucugu

SEQ ID NO: 722940 - RNA, 19 nt, Artificial Sequence
  Description of Artificial Sequence: Synthetic oligonucleotide
  Sense strand starting at position 2321 of SEQ ID NO: 586505
aaauacuaacguggaguuu

SEQ ID NO: 722941 - RNA, 19 nt, Artificial Sequence
  Description of Artificial Sequence: Synthetic oligonucleotide
  Antisense strand to SEQ ID NO: 722940
aaacuccacguuaguauuu

SEQ ID NO: 722942 - RNA, 19 nt, Artificial Sequence
  Description of Artificial Sequence: Synthetic oligonucleotide
  Sense strand starting at position 2384 of SEQ ID NO: 586505
guauuuggaugauaaagag

SEQ ID NO: 722943 - RNA, 19 nt, Artificial Sequence
  Description of Artificial Sequence: Synthetic oligonucleotide
  Antisense strand to SEQ ID NO: 722942
cucuuuaucauccaaauac

SEQ ID NO: 722944 - RNA, 19 nt, Artificial Sequence
  Description of Artificial Sequence: Synthetic oligonucleotide
  Sense strand starting at position 2403 of SEQ ID NO: 586505
cugauuugcucuuagacau

SEQ ID NO: 722945 - RNA, 19 nt, Artificial Sequence
  Description of Artificial Sequence: Synthetic oligonucleotide
  Antisense strand to SEQ ID NO: 722944
augucuaagagcaaaucag

SEQ ID NO: 722946 - RNA, 19 nt, Artificial Sequence
  Description of Artificial Sequence: Synthetic oligonucleotide
  Sense strand starting at position 2720 of SEQ ID NO: 586505
agauuuccugcuugcagca

SEQ ID NO: 722947 - RNA, 19 nt, Artificial Sequence
  Description of Artificial Sequence: Synthetic oligonucleotide
  Antisense strand to SEQ ID NO: 722946
ugcugcaagcaggaaaucu

SEQ ID NO: 722948 - RNA, 19 nt, Artificial Sequence
  Description of Artificial Sequence: Synthetic oligonucleotide
  Sense strand starting at position 2801 of SEQ ID NO: 586505
ggguaaguaacuuguacug

SEQ ID NO: 722949 - RNA, 19 nt, Artificial Sequence
  Description of Artificial Sequence: Synthetic oligonucleotide
  Antisense strand to SEQ ID NO: 722948
caguacaaguuacuuaccc

SEQ ID NO: 722950 - RNA, 19 nt, Artificial Sequence
  Description of Artificial Sequence: Synthetic oligonucleotide
  Sense strand starting at position 2907 of SEQ ID NO: 586505
caggaaucucguggacuau

SEQ ID NO: 722951 - RNA, 19 nt, Artificial Sequence
  Description of Artificial Sequence: Synthetic oligonucleotide
  Antisense strand to SEQ ID NO: 722950
auaguccacgagauuccug

SEQ ID NO: 722952 - RNA, 19 nt, Artificial Sequence
  Description of Artificial Sequence: Synthetic oligonucleotide
  Sense strand starting at position 2908 of SEQ ID NO: 586505
aggaaucucguggacuauu

SEQ ID NO: 722953 - RNA, 19 nt, Artificial Sequence
  Description of Artificial Sequence: Synthetic oligonucleotide
  Antisense strand to SEQ ID NO: 722952
aauaguccacgagauuccu

SEQ ID NO: 722954 - RNA, 19 nt, Artificial Sequence
  Description of Artificial Sequence: Synthetic oligonucleotide
  Sense strand starting at position 3264 of SEQ ID NO: 586505
ggugcucugcgugcuugau

SEQ ID NO: 722955 - RNA, 19 nt, Artificial Sequence
  Description of Artificial Sequence: Synthetic oligonucleotide
  Antisense strand to SEQ ID NO: 722954
aucaagcacgcagagcacc

SEQ ID NO: 722956 - RNA, 19 nt, Artificial Sequence
  Description of Artificial Sequence: Synthetic oligonucleotide
  Sense strand starting at position 3504 of SEQ ID NO: 586505
aucugaugucguuaugaau

SEQ ID NO: 722957 - RNA, 19 nt, Artificial Sequence
  Description of Artificial Sequence: Synthetic oligonucleotide
  Antisense strand to SEQ ID NO: 722956
auucauaacgacaucagau

SEQ ID NO: 722958 - RNA, 19 nt, Artificial Sequence
  Description of Artificial Sequence: Synthetic oligonucleotide
  Sense strand starting at position 3597 of SEQ ID NO: 586505
ucugaucauugcuuauuga

SEQ ID NO: 722959 - RNA, 19 nt, Artificial Sequence
  Description of Artificial Sequence: Synthetic oligonucleotide
  Antisense strand to SEQ ID NO: 722958
ucaauaagcaaugaucaga

SEQ ID NO: 722960 - RNA, 19 nt, Artificial Sequence
  Description of Artificial Sequence: Synthetic oligonucleotide
  Sense strand starting at position 3600 of SEQ ID NO: 586505
gaucauugcuuauugagcu

SEQ ID NO: 722961 - RNA, 19 nt, Artificial Sequence
  Description of Artificial Sequence: Synthetic oligonucleotide
  Antisense strand to SEQ ID NO: 722960
agcucaauaagcaaugauc

SEQ ID NO: 722962 - RNA, 19 nt, Artificial Sequence
  Description of Artificial Sequence: Synthetic oligonucleotide
  Sense strand starting at position 3604 of SEQ ID NO: 586505
auugcuuauugagcuaaau

SEQ ID NO: 722963 - RNA, 19 nt, Artificial Sequence
  Description of Artificial Sequence: Synthetic oligonucleotide
  Antisense strand to SEQ ID NO: 722962
auuuagcucaauaagcaau

SEQ ID NO: 722964 - RNA, 19 nt, Artificial Sequence
  Description of Artificial Sequence: Synthetic oligonucleotide
  Sense strand starting at position 3708 of SEQ ID NO: 586505
gagugaaugccacguagga

SEQ ID NO: 722965 - RNA, 19 nt, Artificial Sequence
  Description of Artificial Sequence: Synthetic oligonucleotide
  Antisense strand to SEQ ID NO: 722964
uccuacguggcauucacuc

SEQ ID NO: 722966 - RNA, 19 nt, Artificial Sequence
  Description of Artificial Sequence: Synthetic oligonucleotide
  Sense strand starting at position 3710 of SEQ ID NO: 586505
gugaaugccacguaggaaa

SEQ ID NO: 722967 - RNA, 19 nt, Artificial Sequence
  Description of Artificial Sequence: Synthetic oligonucleotide
  Antisense strand to SEQ ID NO: 722966
uuuccuacguggcauucac

SEQ ID NO: 722968 - RNA, 19 nt, Artificial Sequence
  Description of Artificial Sequence: Synthetic oligonucleotide
  Sense strand starting at position 3751 of SEQ ID NO: 586505
uucaguccucgcgugcaaa

SEQ ID NO: 722969 - RNA, 19 nt, Artificial Sequence
  Description of Artificial Sequence: Synthetic oligonucleotide
  Antisense strand to SEQ ID NO: 722968
uuugcacgcgaggacugaa

SEQ ID NO: 722970 - RNA, 19 nt, Artificial Sequence
  Description of Artificial Sequence: Synthetic oligonucleotide
  Sense strand starting at position 3963 of SEQ ID NO: 586505
uugcaugucgccguccaaa

SEQ ID NO: 722971 - RNA, 19 nt, Artificial Sequence
  Description of Artificial Sequence: Synthetic oligonucleotide
  Antisense strand to SEQ ID NO: 722970
uuuggacggcgacaugcaa

SEQ ID NO: 722972 - RNA, 19 nt, Artificial Sequence
  Description of Artificial Sequence: Synthetic oligonucleotide
  Sense strand starting at position 80 of SEQ ID NO: 586506
ggguuagagugguucuccu

SEQ ID NO: 722973 - RNA, 19 nt, Artificial Sequence
  Description of Artificial Sequence: Synthetic oligonucleotide
  Antisense strand to SEQ ID NO: 722972
aggagaaccacucuaaccc

SEQ ID NO: 722974 - RNA, 19 nt, Artificial Sequence
  Description of Artificial Sequence: Synthetic oligonucleotide
  Sense strand starting at position 210 of SEQ ID NO: 586506
acuucugaccuguagugau

SEQ ID NO: 722975 - RNA, 19 nt, Artificial Sequence
  Description of Artificial Sequence: Synthetic oligonucleotide
  Antisense strand to SEQ ID NO: 722974
aucacuacaggucagaagu

SEQ ID NO: 722976 - RNA, 19 nt, Artificial Sequence
  Description of Artificial Sequence: Synthetic oligonucleotide
  Sense strand starting at position 332 of SEQ ID NO: 586506
guugaccuauugcuugaaa

SEQ ID NO: 722977 - RNA, 19 nt, Artificial Sequence
  Description of Artificial Sequence: Synthetic oligonucleotide
  Antisense strand to SEQ ID NO: 722976
uuucaagcaauaggucaac

SEQ ID NO: 722978 - RNA, 19 nt, Artificial Sequence
  Description of Artificial Sequence: Synthetic oligonucleotide
  Sense strand starting at position 755 of SEQ ID NO: 586506
cugugucaguuauucuaaa

SEQ ID NO: 722979 - RNA, 19 nt, Artificial Sequence
  Description of Artificial Sequence: Synthetic oligonucleotide
  Antisense strand to SEQ ID NO: 722978
uuuagaauaacugacacag

SEQ ID NO: 722980 - RNA, 19 nt, Artificial Sequence
  Description of Artificial Sequence: Synthetic oligonucleotide
  Sense strand starting at position 848 of SEQ ID NO: 586506
aguagauaauaccauugaa

SEQ ID NO: 722981 - RNA, 19 nt, Artificial Sequence
  Description of Artificial Sequence: Synthetic oligonucleotide
  Antisense strand to SEQ ID NO: 722980
uucaaugguauuaucuacu

SEQ ID NO: 722982 - RNA, 19 nt, Artificial Sequence
  Description of Artificial Sequence: Synthetic oligonucleotide
  Sense strand starting at position 889 of SEQ ID NO: 586506
aggcucugucgggaagguu

SEQ ID NO: 722983 - RNA, 19 nt, Artificial Sequence
  Description of Artificial Sequence: Synthetic oligonucleotide
  Antisense strand to SEQ ID NO: 722982
aaccuucccgacagagccu

SEQ ID NO: 722984 - RNA, 19 nt, Artificial Sequence
  Description of Artificial Sequence: Synthetic oligonucleotide
  Sense strand starting at position 905 of SEQ ID NO: 586506
guugaaagacuccgcauuu

SEQ ID NO: 722985 - RNA, 19 nt, Artificial Sequence
  Description of Artificial Sequence: Synthetic oligonucleotide
  Antisense strand to SEQ ID NO: 722984
aaaugcggagucuuucaac

SEQ ID NO: 722986 - RNA, 19 nt, Artificial Sequence
  Description of Artificial Sequence: Synthetic oligonucleotide
  Sense strand starting at position 918 of SEQ ID NO: 586506
gcauuucgccucuguauuu

SEQ ID NO: 722987 - RNA, 19 nt, Artificial Sequence
  Description of Artificial Sequence: Synthetic oligonucleotide
  Antisense strand to SEQ ID NO: 722986
aaauacagaggcgaaaugc

SEQ ID NO: 722988 - RNA, 19 nt, Artificial Sequence
  Description of Artificial Sequence: Synthetic oligonucleotide
  Sense strand starting at position 1184 of SEQ ID NO: 586506
gugucugauguguccuagu

SEQ ID NO: 722989 - RNA, 19 nt, Artificial Sequence
  Description of Artificial Sequence: Synthetic oligonucleotide
  Antisense strand to SEQ ID NO: 722988
acuaggacacaucagacac

SEQ ID NO: 722990 - RNA, 19 nt, Artificial Sequence
  Description of Artificial Sequence: Synthetic oligonucleotide
  Sense strand starting at position 1186 of SEQ ID NO: 586506
gucugauguguccuagugu

SEQ ID NO: 722991 - RNA, 19 nt, Artificial Sequence
  Description of Artificial Sequence: Synthetic oligonucleotide
  Antisense strand to SEQ ID NO: 722990
acacuaggacacaucagac

SEQ ID NO: 722992 - RNA, 19 nt, Artificial Sequence
  Description of Artificial Sequence: Synthetic oligonucleotide
  Sense strand starting at position 1268 of SEQ ID NO: 586506
ggagguggccauggaguua

SEQ ID NO: 722993 - RNA, 19 nt, Artificial Sequence
  Description of Artificial Sequence: Synthetic oligonucleotide
  Antisense strand to SEQ ID NO: 722992
uaacuccauggccaccucc

SEQ ID NO: 722994 - RNA, 19 nt, Artificial Sequence
  Description of Artificial Sequence: Synthetic oligonucleotide
  Sense strand starting at position 1273 of SEQ ID NO: 586506
uggccauggaguuauaaac

SEQ ID NO: 722995 - RNA, 19 nt, Artificial Sequence
  Description of Artificial Sequence: Synthetic oligonucleotide
  Antisense strand to SEQ ID NO: 722994
guuuauaacuccauggcca

SEQ ID NO: 722996 - RNA, 19 nt, Artificial Sequence
  Description of Artificial Sequence: Synthetic oligonucleotide
  Sense strand starting at position 1282 of SEQ ID NO: 586506
aguuauaaacagugcaaua

SEQ ID NO: 722997 - RNA, 19 nt, Artificial Sequence
  Description of Artificial Sequence: Synthetic oligonucleotide
  Antisense strand to SEQ ID NO: 722996
uauugcacuguuuauaacu

SEQ ID NO: 722998 - RNA, 19 nt, Artificial Sequence
  Description of Artificial Sequence: Synthetic oligonucleotide
  Sense strand starting at position 1308 of SEQ ID NO: 586506
ucagauuuccucugcuugu

SEQ ID NO: 722999 - RNA, 19 nt, Artificial Sequence
  Description of Artificial Sequence: Synthetic oligonucleotide
  Antisense strand to SEQ ID NO: 722998
acaagcagaggaaaucuga

SEQ ID NO: 723000 - RNA, 19 nt, Artificial Sequence
  Description of Artificial Sequence: Synthetic oligonucleotide
  Sense strand starting at position 1312 of SEQ ID NO: 586506
auuuccucugcuugucaua

SEQ ID NO: 723001 - RNA, 19 nt, Artificial Sequence
  Description of Artificial Sequence: Synthetic oligonucleotide
  Antisense strand to SEQ ID NO: 723000
uaugacaagcagaggaaau

SEQ ID NO: 723002 - RNA, 19 nt, Artificial Sequence
  Description of Artificial Sequence: Synthetic oligonucleotide
  Sense strand starting at position 1314 of SEQ ID NO: 586506
uuccucugcuugucauaga

SEQ ID NO: 723003 - RNA, 19 nt, Artificial Sequence
  Description of Artificial Sequence: Synthetic oligonucleotide
  Antisense strand to SEQ ID NO: 723002
ucuaugacaagcagaggaa

SEQ ID NO: 723004 - RNA, 19 nt, Artificial Sequence
  Description of Artificial Sequence: Synthetic oligonucleotide
  Sense strand starting at position 1344 of SEQ ID NO: 586506
acacuuuagucagcuguau

SEQ ID NO: 723005 - RNA, 19 nt, Artificial Sequence
  Description of Artificial Sequence: Synthetic oligonucleotide
  Antisense strand to SEQ ID NO: 723004
auacagcugacuaaagugu

SEQ ID NO: 723006 - RNA, 19 nt, Artificial Sequence
  Description of Artificial Sequence: Synthetic oligonucleotide
  Sense strand starting at position 1348 of SEQ ID NO: 586506
uuuagucagcuguauuaag

SEQ ID NO: 723007 - RNA, 19 nt, Artificial Sequence
  Description of Artificial Sequence: Synthetic oligonucleotide
  Antisense strand to SEQ ID NO: 723006
cuuaauacagcugacuaaa

SEQ ID NO: 723008 - RNA, 19 nt, Artificial Sequence
  Description of Artificial Sequence: Synthetic oligonucleotide
  Sense strand starting at position 1359 of SEQ ID NO: 586506
guauuaagucugcaucugu

SEQ ID NO: 723009 - RNA, 19 nt, Artificial Sequence
  Description of Artificial Sequence: Synthetic oligonucleotide
  Antisense strand to SEQ ID NO: 723008
acagaugcagacuuaauac

SEQ ID NO: 723010 - RNA, 19 nt, Artificial Sequence
  Description of Artificial Sequence: Synthetic oligonucleotide
  Sense strand starting at position 1468 of SEQ ID NO: 586506
ugaagugagacacguucuu

SEQ ID NO: 723011 - RNA, 19 nt, Artificial Sequence
  Description of Artificial Sequence: Synthetic oligonucleotide
  Antisense strand to SEQ ID NO: 723010
aagaacgugucucacuuca

SEQ ID NO: 723012 - RNA, 19 nt, Artificial Sequence
  Description of Artificial Sequence: Synthetic oligonucleotide
  Sense strand starting at position 1479 of SEQ ID NO: 586506
acguucuugcugggacaga

SEQ ID NO: 723013 - RNA, 19 nt, Artificial Sequence
  Description of Artificial Sequence: Synthetic oligonucleotide
  Antisense strand to SEQ ID NO: 723012
ucugucccagcaagaacgu

SEQ ID NO: 723014 - RNA, 19 nt, Artificial Sequence
  Description of Artificial Sequence: Synthetic oligonucleotide
  Sense strand starting at position 2151 of SEQ ID NO: 586506
ggaaguuucugguuuaacu

SEQ ID NO: 723015 - RNA, 19 nt, Artificial Sequence
  Description of Artificial Sequence: Synthetic oligonucleotide
  Antisense strand to SEQ ID NO: 723014
aguuaaaccagaaacuucc

SEQ ID NO: 723016 - RNA, 19 nt, Artificial Sequence
  Description of Artificial Sequence: Synthetic oligonucleotide
  Sense strand starting at position 2206 of SEQ ID NO: 586506
guuugaaggcaucauacua

SEQ ID NO: 723017 - RNA, 19 nt, Artificial Sequence
  Description of Artificial Sequence: Synthetic oligonucleotide
  Antisense strand to SEQ ID NO: 723016
uaguaugaugccuucaaac

SEQ ID NO: 723018 - RNA, 19 nt, Artificial Sequence
  Description of Artificial Sequence: Synthetic oligonucleotide
  Sense strand starting at position 2222 of SEQ ID NO: 586506
cuagguguuguguaucuuu

SEQ ID NO: 723019 - RNA, 19 nt, Artificial Sequence
  Description of Artificial Sequence: Synthetic oligonucleotide
  Antisense strand to SEQ ID NO: 723018
aaagauacacaacaccuag

SEQ ID NO: 723020 - RNA, 19 nt, Artificial Sequence
  Description of Artificial Sequence: Synthetic oligonucleotide
  Sense strand starting at position 2263 of SEQ ID NO: 586506
gguugaagcaagcaauauu

SEQ ID NO: 723021 - RNA, 19 nt, Artificial Sequence
  Description of Artificial Sequence: Synthetic oligonucleotide
  Antisense strand to SEQ ID NO: 723020
aauauugcuugcuucaacc

SEQ ID NO: 723022 - RNA, 19 nt, Artificial Sequence
  Description of Artificial Sequence: Synthetic oligonucleotide
  Sense strand starting at position 2336 of SEQ ID NO: 586506
gcaugugcaugauccauaa

SEQ ID NO: 723023 - RNA, 19 nt, Artificial Sequence
  Description of Artificial Sequence: Synthetic oligonucleotide
  Antisense strand to SEQ ID NO: 723022
uuauggaucaugcacaugc

SEQ ID NO: 723024 - RNA, 19 nt, Artificial Sequence
  Description of Artificial Sequence: Synthetic oligonucleotide
  Sense strand starting at position 2383 of SEQ ID NO: 586506
ugcagagagaaguguaauc

SEQ ID NO: 723025 - RNA, 19 nt, Artificial Sequence
  Description of Artificial Sequence: Synthetic oligonucleotide
  Antisense strand to SEQ ID NO: 723024
gauuacacuucucucugca

SEQ ID NO: 723026 - RNA, 19 nt, Artificial Sequence
  Description of Artificial Sequence: Synthetic oligonucleotide
  Sense strand starting at position 2388 of SEQ ID NO: 586506
agagaaguguaaucccaag

SEQ ID NO: 723027 - RNA, 19 nt, Artificial Sequence
  Description of Artificial Sequence: Synthetic oligonucleotide
  Antisense strand to SEQ ID NO: 723026
cuugggauuacacuucucu

SEQ ID NO: 723028 - RNA, 19 nt, Artificial Sequence
  Description of Artificial Sequence: Synthetic oligonucleotide
  Sense strand starting at position 2409 of SEQ ID NO: 586506
auaggcauuucugacaagu

SEQ ID NO: 723029 - RNA, 19 nt, Artificial Sequence
  Description of Artificial Sequence: Synthetic oligonucleotide
  Antisense strand to SEQ ID NO: 723028
acuugucagaaaugccuau

SEQ ID NO: 723030 - RNA, 19 nt, Artificial Sequence
  Description of Artificial Sequence: Synthetic oligonucleotide
  Sense strand starting at position 2411 of SEQ ID NO: 586506
aggcauuucugacaaguaa

SEQ ID NO: 723031 - RNA, 19 nt, Artificial Sequence
  Description of Artificial Sequence: Synthetic oligonucleotide
  Antisense strand to SEQ ID NO: 723030
uuacuugucagaaaugccu

SEQ ID NO: 723032 - RNA, 19 nt, Artificial Sequence
  Description of Artificial Sequence: Synthetic oligonucleotide
  Sense strand starting at position 2432 of SEQ ID NO: 586506
uaggaaucugaguacuggu

SEQ ID NO: 723033 - RNA, 19 nt, Artificial Sequence
  Description of Artificial Sequence: Synthetic oligonucleotide
  Antisense strand to SEQ ID NO: 723032
accaguacucagauuccua

SEQ ID NO: 723034 - RNA, 19 nt, Artificial Sequence
  Description of Artificial Sequence: Synthetic oligonucleotide
  Sense strand starting at position 2439 of SEQ ID NO: 586506
cugaguacugguuaagcau

SEQ ID NO: 723035 - RNA, 19 nt, Artificial Sequence
  Description of Artificial Sequence: Synthetic oligonucleotide
  Antisense strand to SEQ ID NO: 723034
augcuuaaccaguacucag

SEQ ID NO: 723036 - RNA, 19 nt, Artificial Sequence
  Description of Artificial Sequence: Synthetic oligonucleotide
  Sense strand starting at position 2447 of SEQ ID NO: 586506
ugguuaagcaucuggaaau

SEQ ID NO: 723037 - RNA, 19 nt, Artificial Sequence
  Description of Artificial Sequence: Synthetic oligonucleotide
  Antisense strand to SEQ ID NO: 723036
auuuccagaugcuuaacca

SEQ ID NO: 723038 - RNA, 19 nt, Artificial Sequence
  Description of Artificial Sequence: Synthetic oligonucleotide
  Sense strand starting at position 2665 of SEQ ID NO: 586506
guauuuagcuuucucauuc

SEQ ID NO: 723039 - RNA, 19 nt, Artificial Sequence
  Description of Artificial Sequence: Synthetic oligonucleotide
  Antisense strand to SEQ ID NO: 723038
gaaugagaaagcuaaauac

SEQ ID NO: 723040 - RNA, 19 nt, Artificial Sequence
  Description of Artificial Sequence: Synthetic oligonucleotide
  Sense strand starting at position 2669 of SEQ ID NO: 586506
uuagcuuucucauucugua

SEQ ID NO: 723041 - RNA, 19 nt, Artificial Sequence
  Description of Artificial Sequence: Synthetic oligonucleotide
  Antisense strand to SEQ ID NO: 723040
uacagaaugagaaagcuaa

SEQ ID NO: 723042 - RNA, 19 nt, Artificial Sequence
  Description of Artificial Sequence: Synthetic oligonucleotide
  Sense strand starting at position 3503 of SEQ ID NO: 586506
gcaucugugcaauagcaau

SEQ ID NO: 723043 - RNA, 19 nt, Artificial Sequence
  Description of Artificial Sequence: Synthetic oligonucleotide
  Antisense strand to SEQ ID NO: 723042
auugcuauugcacagaugc

SEQ ID NO: 723044 - RNA, 19 nt, Artificial Sequence
  Description of Artificial Sequence: Synthetic oligonucleotide
  Sense strand starting at position 3571 of SEQ ID NO: 586506
acagaaugcuguguuaauu

SEQ ID NO: 723045 - RNA, 19 nt, Artificial Sequence
  Description of Artificial Sequence: Synthetic oligonucleotide
  Antisense strand to SEQ ID NO: 723044
aauuaacacagcauucugu

SEQ ID NO: 723046 - RNA, 19 nt, Artificial Sequence
  Description of Artificial Sequence: Synthetic oligonucleotide
  Sense strand starting at position 3601 of SEQ ID NO: 586506
aaauacuaacguggaguuu

SEQ ID NO: 723047 - RNA, 19 nt, Artificial Sequence
  Description of Artificial Sequence: Synthetic oligonucleotide
  Antisense strand to SEQ ID NO: 723046
aaacuccacguuaguauuu

SEQ ID NO: 723048 - RNA, 19 nt, Artificial Sequence
  Description of Artificial Sequence: Synthetic oligonucleotide
  Sense strand starting at position 3664 of SEQ ID NO: 586506
guauuuggaugauaaagag

SEQ ID NO: 723049 - RNA, 19 nt, Artificial Sequence
  Description of Artificial Sequence: Synthetic oligonucleotide
  Antisense strand to SEQ ID NO: 723048
cucuuuaucauccaaauac

SEQ ID NO: 723050 - RNA, 19 nt, Artificial Sequence
  Description of Artificial Sequence: Synthetic oligonucleotide
  Sense strand starting at position 3683 of SEQ ID NO: 586506
cugauuugcucuuagacau

SEQ ID NO: 723051 - RNA, 19 nt, Artificial Sequence
  Description of Artificial Sequence: Synthetic oligonucleotide
  Antisense strand to SEQ ID NO: 723050
augucuaagagcaaaucag

SEQ ID NO: 723052 - RNA, 19 nt, Artificial Sequence
  Description of Artificial Sequence: Synthetic oligonucleotide
  Sense strand starting at position 147 of SEQ ID NO: 586507
guaggaaaucuuuagugcu

SEQ ID NO: 723053 - RNA, 19 nt, Artificial Sequence
  Description of Artificial Sequence: Synthetic oligonucleotide
  Antisense strand to SEQ ID NO: 723052
agcacuaaagauuuccuac

SEQ ID NO: 723054 - RNA, 19 nt, Artificial Sequence
  Description of Artificial Sequence: Synthetic oligonucleotide
  Sense strand starting at position 154 of SEQ ID NO: 586507
aucuuuagugcuugauaca

SEQ ID NO: 723055 - RNA, 19 nt, Artificial Sequence
  Description of Artificial Sequence: Synthetic oligonucleotide
  Antisense strand to SEQ ID NO: 723054
uguaucaagcacuaaagau

SEQ ID NO: 723056 - RNA, 19 nt, Artificial Sequence
  Description of Artificial Sequence: Synthetic oligonucleotide
  Sense strand starting at position 155 of SEQ ID NO: 586507
ucuuuagugcuugauacac

SEQ ID NO: 723057 - RNA, 19 nt, Artificial Sequence
  Description of Artificial Sequence: Synthetic oligonucleotide
  Antisense strand to SEQ ID NO: 723056
guguaucaagcacuaaaga

SEQ ID NO: 723058 - RNA, 19 nt, Artificial Sequence
  Description of Artificial Sequence: Synthetic oligonucleotide
  Sense strand starting at position 227 of SEQ ID NO: 586507
caaggugaaccuggugaau

SEQ ID NO: 723059 - RNA, 19 nt, Artificial Sequence
  Description of Artificial Sequence: Synthetic oligonucleotide
  Antisense strand to SEQ ID NO: 723058
auucaccagguucaccuug

SEQ ID NO: 723060 - RNA, 19 nt, Artificial Sequence
  Description of Artificial Sequence: Synthetic oligonucleotide
  Sense strand starting at position 404 of SEQ ID NO: 586507
uuccuucgucuuuaaagua

SEQ ID NO: 723061 - RNA, 19 nt, Artificial Sequence
  Description of Artificial Sequence: Synthetic oligonucleotide
  Antisense strand to SEQ ID NO: 723060
uacuuuaaagacgaaggaa

SEQ ID NO: 723062 - RNA, 19 nt, Artificial Sequence
  Description of Artificial Sequence: Synthetic oligonucleotide
  Sense strand starting at position 1079 of SEQ ID NO: 586507
gcucucuuccucucgcgaa

SEQ ID NO: 723063 - RNA, 19 nt, Artificial Sequence
  Description of Artificial Sequence: Synthetic oligonucleotide
  Antisense strand to SEQ ID NO: 723062
uucgcgagaggaagagagc

SEQ ID NO: 723064 - RNA, 19 nt, Artificial Sequence
  Description of Artificial Sequence: Synthetic oligonucleotide
  Sense strand starting at position 1296 of SEQ ID NO: 586507
ccugcaggucugugaggaa

SEQ ID NO: 723065 - RNA, 19 nt, Artificial Sequence
  Description of Artificial Sequence: Synthetic oligonucleotide
  Antisense strand to SEQ ID NO: 723064
uuccucacagaccugcagg

SEQ ID NO: 723066 - RNA, 19 nt, Artificial Sequence
  Description of Artificial Sequence: Synthetic oligonucleotide
  Sense strand starting at position 1354 of SEQ ID NO: 586507
ucguaaauuugccuccaga

SEQ ID NO: 723067 - RNA, 19 nt, Artificial Sequence
  Description of Artificial Sequence: Synthetic oligonucleotide
  Antisense strand to SEQ ID NO: 723066
ucuggaggcaaauuuacga

SEQ ID NO: 723068 - RNA, 19 nt, Artificial Sequence
  Description of Artificial Sequence: Synthetic oligonucleotide
  Sense strand starting at position 1389 of SEQ ID NO: 586507
augugaggucuccacccuu

SEQ ID NO: 723069 - RNA, 19 nt, Artificial Sequence
  Description of Artificial Sequence: Synthetic oligonucleotide
  Antisense strand to SEQ ID NO: 723068
aaggguggagaccucacau

SEQ ID NO: 723070 - RNA, 19 nt, Artificial Sequence
  Description of Artificial Sequence: Synthetic oligonucleotide
  Sense strand starting at position 1656 of SEQ ID NO: 586507
gaugaaagcuuccugaaga

SEQ ID NO: 723071 - RNA, 19 nt, Artificial Sequence
  Description of Artificial Sequence: Synthetic oligonucleotide
  Antisense strand to SEQ ID NO: 723070
ucuucaggaagcuuucauc

SEQ ID NO: 723072 - RNA, 19 nt, Artificial Sequence
  Description of Artificial Sequence: Synthetic oligonucleotide
  Sense strand starting at position 1699 of SEQ ID NO: 586507
aggauauuauuagccauca

SEQ ID NO: 723073 - RNA, 19 nt, Artificial Sequence
  Description of Artificial Sequence: Synthetic oligonucleotide
  Antisense strand to SEQ ID NO: 723072
ugauggcuaauaauauccu

SEQ ID NO: 723074 - RNA, 19 nt, Artificial Sequence
  Description of Artificial Sequence: Synthetic oligonucleotide
  Sense strand starting at position 1700 of SEQ ID NO: 586507
ggauauuauuagccaucau

SEQ ID NO: 723075 - RNA, 19 nt, Artificial Sequence
  Description of Artificial Sequence: Synthetic oligonucleotide
  Antisense strand to SEQ ID NO: 723074
augauggcuaauaauaucc

SEQ ID NO: 723076 - RNA, 19 nt, Artificial Sequence
  Description of Artificial Sequence: Synthetic oligonucleotide
  Sense strand starting at position 1730 of SEQ ID NO: 586507
gccagagaauggguuaaac

SEQ ID NO: 723077 - RNA, 19 nt, Artificial Sequence
  Description of Artificial Sequence: Synthetic oligonucleotide
  Antisense strand to SEQ ID NO: 723076
guuuaacccauucucuggc

SEQ ID NO: 723078 - RNA, 19 nt, Artificial Sequence
  Description of Artificial Sequence: Synthetic oligonucleotide
  Sense strand starting at position 1767 of SEQ ID NO: 586507
ucacguuuggcggcaucaa

SEQ ID NO: 723079 - RNA, 19 nt, Artificial Sequence
  Description of Artificial Sequence: Synthetic oligonucleotide
  Antisense strand to SEQ ID NO: 723078
uugaugccgccaaacguga

SEQ ID NO: 723080 - RNA, 19 nt, Artificial Sequence
  Description of Artificial Sequence: Synthetic oligonucleotide
  Sense strand starting at position 2006 of SEQ ID NO: 586507
cugaucuggucucucaagu

SEQ ID NO: 723081 - RNA, 19 nt, Artificial Sequence
  Description of Artificial Sequence: Synthetic oligonucleotide
  Antisense strand to SEQ ID NO: 723080
acuugagagaccagaucag

SEQ ID NO: 723082 - RNA, 19 nt, Artificial Sequence
  Description of Artificial Sequence: Synthetic oligonucleotide
  Sense strand starting at position 2514 of SEQ ID NO: 586507
gacuuacugugguuccuau

SEQ ID NO: 723083 - RNA, 19 nt, Artificial Sequence
  Description of Artificial Sequence: Synthetic oligonucleotide
  Antisense strand to SEQ ID NO: 723082
auaggaaccacaguaaguc

SEQ ID NO: 723084 - RNA, 19 nt, Artificial Sequence
  Description of Artificial Sequence: Synthetic oligonucleotide
  Sense strand starting at position 2554 of SEQ ID NO: 586507
acguuuagaguucacaguu

SEQ ID NO: 723085 - RNA, 19 nt, Artificial Sequence
  Description of Artificial Sequence: Synthetic oligonucleotide
  Antisense strand to SEQ ID NO: 723084
aacugugaacucuaaacgu

SEQ ID NO: 723086 - RNA, 19 nt, Artificial Sequence
  Description of Artificial Sequence: Synthetic oligonucleotide
  Sense strand starting at position 2612 of SEQ ID NO: 586507
gugcucgugauugcuugua

SEQ ID NO: 723087 - RNA, 19 nt, Artificial Sequence
  Description of Artificial Sequence: Synthetic oligonucleotide
  Antisense strand to SEQ ID NO: 723086
uacaagcaaucacgagcac

SEQ ID NO: 723088 - RNA, 19 nt, Artificial Sequence
  Description of Artificial Sequence: Synthetic oligonucleotide
  Sense strand starting at position 2664 of SEQ ID NO: 586507
ggaggugucuuaucaauca

SEQ ID NO: 723089 - RNA, 19 nt, Artificial Sequence
  Description of Artificial Sequence: Synthetic oligonucleotide
  Antisense strand to SEQ ID NO: 723088
ugauugauaagacaccucc

SEQ ID NO: 723090 - RNA, 19 nt, Artificial Sequence
  Description of Artificial Sequence: Synthetic oligonucleotide
  Sense strand starting at position 2682 of SEQ ID NO: 586507
auuugaaauuguggaauac

SEQ ID NO: 723091 - RNA, 19 nt, Artificial Sequence
  Description of Artificial Sequence: Synthetic oligonucleotide
  Antisense strand to SEQ ID NO: 723090
guauuccacaauuucaaau

SEQ ID NO: 723092 - RNA, 19 nt, Artificial Sequence
  Description of Artificial Sequence: Synthetic oligonucleotide
  Sense strand starting at position 2729 of SEQ ID NO: 586507
ccaggaugugcuggaaaca

SEQ ID NO: 723093 - RNA, 19 nt, Artificial Sequence
  Description of Artificial Sequence: Synthetic oligonucleotide
  Antisense strand to SEQ ID NO: 723092
uguuuccagcacauccugg

SEQ ID NO: 723094 - RNA, 19 nt, Artificial Sequence
  Description of Artificial Sequence: Synthetic oligonucleotide
  Sense strand starting at position 2757 of SEQ ID NO: 586507
gccucugguagcugagaaa

SEQ ID NO: 723095 - RNA, 19 nt, Artificial Sequence
  Description of Artificial Sequence: Synthetic oligonucleotide
  Antisense strand to SEQ ID NO: 723094
uuucucagcuaccagaggc

SEQ ID NO: 723096 - RNA, 19 nt, Artificial Sequence
  Description of Artificial Sequence: Synthetic oligonucleotide
  Sense strand starting at position 2760 of SEQ ID NO: 586507
ucugguagcugagaaauuu

SEQ ID NO: 723097 - RNA, 19 nt, Artificial Sequence
  Description of Artificial Sequence: Synthetic oligonucleotide
  Antisense strand to SEQ ID NO: 723096
aaauuucucagcuaccaga

SEQ ID NO: 723098 - RNA, 19 nt, Artificial Sequence
  Description of Artificial Sequence: Synthetic oligonucleotide
  Sense strand starting at position 2792 of SEQ ID NO: 586507
uuuagaauaucugugcaau

SEQ ID NO: 723099 - RNA, 19 nt, Artificial Sequence
  Description of Artificial Sequence: Synthetic oligonucleotide
  Antisense strand to SEQ ID NO: 723098
auugcacagauauucuaaa

SEQ ID NO: 723100 - RNA, 19 nt, Artificial Sequence
  Description of Artificial Sequence: Synthetic oligonucleotide
  Sense strand starting at position 2793 of SEQ ID NO: 586507
uuagaauaucugugcaauu

SEQ ID NO: 723101 - RNA, 19 nt, Artificial Sequence
  Description of Artificial Sequence: Synthetic oligonucleotide
  Antisense strand to SEQ ID NO: 723100
aauugcacagauauucuaa

SEQ ID NO: 723102 - RNA, 19 nt, Artificial Sequence
  Description of Artificial Sequence: Synthetic oligonucleotide
  Sense strand starting at position 2860 of SEQ ID NO: 586507
aagcauuuauguguugcau

SEQ ID NO: 723103 - RNA, 19 nt, Artificial Sequence
  Description of Artificial Sequence: Synthetic oligonucleotide
  Antisense strand to SEQ ID NO: 723102
augcaacacauaaaugcuu

SEQ ID NO: 723104 - RNA, 19 nt, Artificial Sequence
  Description of Artificial Sequence: Synthetic oligonucleotide
  Sense strand starting at position 2928 of SEQ ID NO: 586507
gaaagcaggcauuaaaugu

SEQ ID NO: 723105 - RNA, 19 nt, Artificial Sequence
  Description of Artificial Sequence: Synthetic oligonucleotide
  Antisense strand to SEQ ID NO: 723104
acauuuaaugccugcuuuc

SEQ ID NO: 723106 - RNA, 19 nt, Artificial Sequence
  Description of Artificial Sequence: Synthetic oligonucleotide
  Sense strand starting at position 2949 of SEQ ID NO: 586507
aaacaagugugucuguaag

SEQ ID NO: 723107 - RNA, 19 nt, Artificial Sequence
  Description of Artificial Sequence: Synthetic oligonucleotide
  Antisense strand to SEQ ID NO: 723106
cuuacagacacacuuguuu

SEQ ID NO: 723108 - RNA, 19 nt, Artificial Sequence
  Description of Artificial Sequence: Synthetic oligonucleotide
  Sense strand starting at position 2951 of SEQ ID NO: 586507
acaagugugucuguaagau

SEQ ID NO: 723109 - RNA, 19 nt, Artificial Sequence
  Description of Artificial Sequence: Synthetic oligonucleotide
  Antisense strand to SEQ ID NO: 723108
aucuuacagacacacuugu

SEQ ID NO: 723110 - RNA, 19 nt, Artificial Sequence
  Description of Artificial Sequence: Synthetic oligonucleotide
  Sense strand starting at position 2981 of SEQ ID NO: 586507
gucaaaucauuccugguua

SEQ ID NO: 723111 - RNA, 19 nt, Artificial Sequence
  Description of Artificial Sequence: Synthetic oligonucleotide
  Antisense strand to SEQ ID NO: 723110
uaaccaggaaugauuugac

SEQ ID NO: 723112 - RNA, 19 nt, Artificial Sequence
  Description of Artificial Sequence: Synthetic oligonucleotide
  Sense strand starting at position 2996 of SEQ ID NO: 586507
guuacagaguaugcagaaa

SEQ ID NO: 723113 - RNA, 19 nt, Artificial Sequence
  Description of Artificial Sequence: Synthetic oligonucleotide
  Antisense strand to SEQ ID NO: 723112
uuucugcauacucuguaac

SEQ ID NO: 723114 - RNA, 19 nt, Artificial Sequence
  Description of Artificial Sequence: Synthetic oligonucleotide
  Sense strand starting at position 3086 of SEQ ID NO: 586507
aguagaaaccuugguugca

SEQ ID NO: 723115 - RNA, 19 nt, Artificial Sequence
  Description of Artificial Sequence: Synthetic oligonucleotide
  Antisense strand to SEQ ID NO: 723114
ugcaaccaagguuucuacu

SEQ ID NO: 723116 - RNA, 19 nt, Artificial Sequence
  Description of Artificial Sequence: Synthetic oligonucleotide
  Sense strand starting at position 3140 of SEQ ID NO: 586507
cagugugucaaggaggaau

SEQ ID NO: 723117 - RNA, 19 nt, Artificial Sequence
  Description of Artificial Sequence: Synthetic oligonucleotide
  Antisense strand to SEQ ID NO: 723116
auuccuccuugacacacug

SEQ ID NO: 723118 - RNA, 19 nt, Artificial Sequence
  Description of Artificial Sequence: Synthetic oligonucleotide
  Sense strand starting at position 3159 of SEQ ID NO: 586507
ggaaauagccuaugaaacu

SEQ ID NO: 723119 - RNA, 19 nt, Artificial Sequence
  Description of Artificial Sequence: Synthetic oligonucleotide
  Antisense strand to SEQ ID NO: 723118
aguuucauaggcuauuucc

SEQ ID NO: 723120 - RNA, 19 nt, Artificial Sequence
  Description of Artificial Sequence: Synthetic oligonucleotide
  Sense strand starting at position 3221 of SEQ ID NO: 586507
gcaaacaacucuguagagu

SEQ ID NO: 723121 - RNA, 19 nt, Artificial Sequence
  Description of Artificial Sequence: Synthetic oligonucleotide
  Antisense strand to SEQ ID NO: 723120
acucuacagaguuguuugc

SEQ ID NO: 723122 - RNA, 19 nt, Artificial Sequence
  Description of Artificial Sequence: Synthetic oligonucleotide
  Sense strand starting at position 3363 of SEQ ID NO: 586507
uguaauguaaagcgaauaa

SEQ ID NO: 723123 - RNA, 19 nt, Artificial Sequence
  Description of Artificial Sequence: Synthetic oligonucleotide
  Antisense strand to SEQ ID NO: 723122
uuauucgcuuuacauuaca

SEQ ID NO: 723124 - RNA, 19 nt, Artificial Sequence
  Description of Artificial Sequence: Synthetic oligonucleotide
  Sense strand starting at position 3367 of SEQ ID NO: 586507
auguaaagcgaauaaugua

SEQ ID NO: 723125 - RNA, 19 nt, Artificial Sequence
  Description of Artificial Sequence: Synthetic oligonucleotide
  Antisense strand to SEQ ID NO: 723124
uacauuauucgcuuuacau

SEQ ID NO: 723126 - RNA, 19 nt, Artificial Sequence
  Description of Artificial Sequence: Synthetic oligonucleotide
  Sense strand starting at position 3374 of SEQ ID NO: 586507
gcgaauaauguauauaguu

SEQ ID NO: 723127 - RNA, 19 nt, Artificial Sequence
  Description of Artificial Sequence: Synthetic oligonucleotide
  Antisense strand to SEQ ID NO: 723126
aacuauauacauuauucgc

SEQ ID NO: 723128 - RNA, 19 nt, Artificial Sequence
  Description of Artificial Sequence: Synthetic oligonucleotide
  Sense strand starting at position 3871 of SEQ ID NO: 586507
aguguuaaauucuucugua

SEQ ID NO: 723129 - RNA, 19 nt, Artificial Sequence
  Description of Artificial Sequence: Synthetic oligonucleotide
  Antisense strand to SEQ ID NO: 723128
uacagaagaauuuaacacu

SEQ ID NO: 723130 - RNA, 19 nt, Artificial Sequence
  Description of Artificial Sequence: Synthetic oligonucleotide
  Sense strand starting at position 3872 of SEQ ID NO: 586507
guguuaaauucuucuguaa

SEQ ID NO: 723131 - RNA, 19 nt, Artificial Sequence
  Description of Artificial Sequence: Synthetic oligonucleotide
  Antisense strand to SEQ ID NO: 723130
uuacagaagaauuuaacac

SEQ ID NO: 723132 - RNA, 19 nt, Artificial Sequence
  Description of Artificial Sequence: Synthetic oligonucleotide
  Sense strand starting at position 30 of SEQ ID NO: 586508
uaauguagauggguugaca

SEQ ID NO: 723133 - RNA, 19 nt, Artificial Sequence
  Description of Artificial Sequence: Synthetic oligonucleotide
  Antisense strand to SEQ ID NO: 723132
ugucaacccaucuacauua

SEQ ID NO: 723134 - RNA, 19 nt, Artificial Sequence
  Description of Artificial Sequence: Synthetic oligonucleotide
  Sense strand starting at position 316 of SEQ ID NO: 586508
cacauuagucagggauagu

SEQ ID NO: 723135 - RNA, 19 nt, Artificial Sequence
  Description of Artificial Sequence: Synthetic oligonucleotide
  Antisense strand to SEQ ID NO: 723134
acuaucccugacuaaugug

SEQ ID NO: 723136 - RNA, 19 nt, Artificial Sequence
  Description of Artificial Sequence: Synthetic oligonucleotide
  Sense strand starting at position 325 of SEQ ID NO: 586508
cagggauagucucuaaauu

SEQ ID NO: 723137 - RNA, 19 nt, Artificial Sequence
  Description of Artificial Sequence: Synthetic oligonucleotide
  Antisense strand to SEQ ID NO: 723136
aauuuagagacuaucccug

SEQ ID NO: 723138 - RNA, 19 nt, Artificial Sequence
  Description of Artificial Sequence: Synthetic oligonucleotide
  Sense strand starting at position 359 of SEQ ID NO: 586508
uguagauauguccaguaag

SEQ ID NO: 723139 - RNA, 19 nt, Artificial Sequence
  Description of Artificial Sequence: Synthetic oligonucleotide
  Antisense strand to SEQ ID NO: 723138
cuuacuggacauaucuaca

SEQ ID NO: 723140 - RNA, 19 nt, Artificial Sequence
  Description of Artificial Sequence: Synthetic oligonucleotide
  Sense strand starting at position 362 of SEQ ID NO: 586508
agauauguccaguaagcuu

SEQ ID NO: 723141 - RNA, 19 nt, Artificial Sequence
  Description of Artificial Sequence: Synthetic oligonucleotide
  Antisense strand to SEQ ID NO: 723140
aagcuuacuggacauaucu

SEQ ID NO: 723142 - RNA, 19 nt, Artificial Sequence
  Description of Artificial Sequence: Synthetic oligonucleotide
  Sense strand starting at position 402 of SEQ ID NO: 586508
agugcaauuggugauaauu

SEQ ID NO: 723143 - RNA, 19 nt, Artificial Sequence
  Description of Artificial Sequence: Synthetic oligonucleotide
  Antisense strand to SEQ ID NO: 723142
aauuaucaccaauugcacu

SEQ ID NO: 723144 - RNA, 19 nt, Artificial Sequence
  Description of Artificial Sequence: Synthetic oligonucleotide
  Sense strand starting at position 508 of SEQ ID NO: 586508
ucucuugauuucuagacag

SEQ ID NO: 723145 - RNA, 19 nt, Artificial Sequence
  Description of Artificial Sequence: Synthetic oligonucleotide
  Antisense strand to SEQ ID NO: 723144
cugucuagaaaucaagaga

SEQ ID NO: 723146 - RNA, 19 nt, Artificial Sequence
  Description of Artificial Sequence: Synthetic oligonucleotide
  Sense strand starting at position 541 of SEQ ID NO: 586508
gaguuaugauacccuagaa

SEQ ID NO: 723147 - RNA, 19 nt, Artificial Sequence
  Description of Artificial Sequence: Synthetic oligonucleotide
  Antisense strand to SEQ ID NO: 723146
uucuaggguaucauaacuc

SEQ ID NO: 723148 - RNA, 19 nt, Artificial Sequence
  Description of Artificial Sequence: Synthetic oligonucleotide
  Sense strand starting at position 615 of SEQ ID NO: 586508
ggacaucuaaccugguuag

SEQ ID NO: 723149 - RNA, 19 nt, Artificial Sequence
  Description of Artificial Sequence: Synthetic oligonucleotide
  Antisense strand to SEQ ID NO: 723148
cuaaccagguuagaugucc

SEQ ID NO: 723150 - RNA, 19 nt, Artificial Sequence
  Description of Artificial Sequence: Synthetic oligonucleotide
  Sense strand starting at position 707 of SEQ ID NO: 586508
gaacuaaaggucugaguuc

SEQ ID NO: 723151 - RNA, 19 nt, Artificial Sequence
  Description of Artificial Sequence: Synthetic oligonucleotide
  Antisense strand to SEQ ID NO: 723150
gaacucagaccuuuaguuc

SEQ ID NO: 723152 - RNA, 19 nt, Artificial Sequence
  Description of Artificial Sequence: Synthetic oligonucleotide
  Sense strand starting at position 894 of SEQ ID NO: 586508
acggccaucacucagagau

SEQ ID NO: 723153 - RNA, 19 nt, Artificial Sequence
  Description of Artificial Sequence: Synthetic oligonucleotide
  Antisense strand to SEQ ID NO: 723152
aucucugagugauggccgu

SEQ ID NO: 723154 - RNA, 19 nt, Artificial Sequence
  Description of Artificial Sequence: Synthetic oligonucleotide
  Sense strand starting at position 2099 of SEQ ID NO: 586508
ugccauuuaugugcuuaua

SEQ ID NO: 723155 - RNA, 19 nt, Artificial Sequence
  Description of Artificial Sequence: Synthetic oligonucleotide
  Antisense strand to SEQ ID NO: 723154
uauaagcacauaaauggca

SEQ ID NO: 723156 - RNA, 19 nt, Artificial Sequence
  Description of Artificial Sequence: Synthetic oligonucleotide
  Sense strand starting at position 2101 of SEQ ID NO: 586508
ccauuuaugugcuuauaug

SEQ ID NO: 723157 - RNA, 19 nt, Artificial Sequence
  Description of Artificial Sequence: Synthetic oligonucleotide
  Antisense strand to SEQ ID NO: 723156
cauauaagcacauaaaugg

SEQ ID NO: 723158 - RNA, 19 nt, Artificial Sequence
  Description of Artificial Sequence: Synthetic oligonucleotide
  Sense strand starting at position 2133 of SEQ ID NO: 586508
augcuuuaagaaugaagau

SEQ ID NO: 723159 - RNA, 19 nt, Artificial Sequence
  Description of Artificial Sequence: Synthetic oligonucleotide
  Antisense strand to SEQ ID NO: 723158
aucuucauucuuaaagcau

SEQ ID NO: 723160 - RNA, 19 nt, Artificial Sequence
  Description of Artificial Sequence: Synthetic oligonucleotide
  Sense strand starting at position 2190 of SEQ ID NO: 586508
acaguaagccauugauucu

SEQ ID NO: 723161 - RNA, 19 nt, Artificial Sequence
  Description of Artificial Sequence: Synthetic oligonucleotide
  Antisense strand to SEQ ID NO: 723160
agaaucaauggcuuacugu

SEQ ID NO: 723162 - RNA, 19 nt, Artificial Sequence
  Description of Artificial Sequence: Synthetic oligonucleotide
  Sense strand starting at position 2258 of SEQ ID NO: 586508
cagagagauguauguagau

SEQ ID NO: 723163 - RNA, 19 nt, Artificial Sequence
  Description of Artificial Sequence: Synthetic oligonucleotide
  Antisense strand to SEQ ID NO: 723162
aucuacauacaucucucug

SEQ ID NO: 723164 - RNA, 19 nt, Artificial Sequence
  Description of Artificial Sequence: Synthetic oligonucleotide
  Sense strand starting at position 2318 of SEQ ID NO: 586508
uggagcuaguacuuggaua

SEQ ID NO: 723165 - RNA, 19 nt, Artificial Sequence
  Description of Artificial Sequence: Synthetic oligonucleotide
  Antisense strand to SEQ ID NO: 723164
uauccaaguacuagcucca

SEQ ID NO: 723166 - RNA, 19 nt, Artificial Sequence
  Description of Artificial Sequence: Synthetic oligonucleotide
  Sense strand starting at position 2319 of SEQ ID NO: 586508
ggagcuaguacuuggauac

SEQ ID NO: 723167 - RNA, 19 nt, Artificial Sequence
  Description of Artificial Sequence: Synthetic oligonucleotide
  Antisense strand to SEQ ID NO: 723166
guauccaaguacuagcucc

SEQ ID NO: 723168 - RNA, 19 nt, Artificial Sequence
  Description of Artificial Sequence: Synthetic oligonucleotide
  Sense strand starting at position 2320 of SEQ ID NO: 586508
gagcuaguacuuggauacu

SEQ ID NO: 723169 - RNA, 19 nt, Artificial Sequence
  Description of Artificial Sequence: Synthetic oligonucleotide
  Antisense strand to SEQ ID NO: 723168
aguauccaaguacuagcuc

SEQ ID NO: 723170 - RNA, 19 nt, Artificial Sequence
  Description of Artificial Sequence: Synthetic oligonucleotide
  Sense strand starting at position 2360 of SEQ ID NO: 586508
aaaguugugagauggauag

SEQ ID NO: 723171 - RNA, 19 nt, Artificial Sequence
  Description of Artificial Sequence: Synthetic oligonucleotide
  Antisense strand to SEQ ID NO: 723170
cuauccaucucacaacuuu

SEQ ID NO: 723172 - RNA, 19 nt, Artificial Sequence
  Description of Artificial Sequence: Synthetic oligonucleotide
  Sense strand starting at position 2416 of SEQ ID NO: 586508
ucuuacgggcaugauuaua

SEQ ID NO: 723173 - RNA, 19 nt, Artificial Sequence
  Description of Artificial Sequence: Synthetic oligonucleotide
  Antisense strand to SEQ ID NO: 723172
uauaaucaugcccguaaga

SEQ ID NO: 723174 - RNA, 19 nt, Artificial Sequence
  Description of Artificial Sequence: Synthetic oligonucleotide
  Sense strand starting at position 2553 of SEQ ID NO: 586508
uaggaagguuuaccugaau

SEQ ID NO: 723175 - RNA, 19 nt, Artificial Sequence
  Description of Artificial Sequence: Synthetic oligonucleotide
  Antisense strand to SEQ ID NO: 723174
auucagguaaaccuuccua

SEQ ID NO: 723176 - RNA, 19 nt, Artificial Sequence
  Description of Artificial Sequence: Synthetic oligonucleotide
  Sense strand starting at position 2689 of SEQ ID NO: 586508
uugcaaauucgugacagag

SEQ ID NO: 723177 - RNA, 19 nt, Artificial Sequence
  Description of Artificial Sequence: Synthetic oligonucleotide
  Antisense strand to SEQ ID NO: 723176
cucugucacgaauuugcaa

SEQ ID NO: 723178 - RNA, 19 nt, Artificial Sequence
  Description of Artificial Sequence: Synthetic oligonucleotide
  Sense strand starting at position 2900 of SEQ ID NO: 586508
gauugauagccuuacaugu

SEQ ID NO: 723179 - RNA, 19 nt, Artificial Sequence
  Description of Artificial Sequence: Synthetic oligonucleotide
  Antisense strand to SEQ ID NO: 723178
acauguaaggcuaucaauc

SEQ ID NO: 723180 - RNA, 19 nt, Artificial Sequence
  Description of Artificial Sequence: Synthetic oligonucleotide
  Sense strand starting at position 2910 of SEQ ID NO: 586508
cuuacaugucuggaauguu

SEQ ID NO: 723181 - RNA, 19 nt, Artificial Sequence
  Description of Artificial Sequence: Synthetic oligonucleotide
  Antisense strand to SEQ ID NO: 723180
aacauuccagacauguaag

SEQ ID NO: 723182 - RNA, 19 nt, Artificial Sequence
  Description of Artificial Sequence: Synthetic oligonucleotide
  Sense strand starting at position 2920 of SEQ ID NO: 586508
uggaauguucuggguuaca

SEQ ID NO: 723183 - RNA, 19 nt, Artificial Sequence
  Description of Artificial Sequence: Synthetic oligonucleotide
  Antisense strand to SEQ ID NO: 723182
uguaacccagaacauucca

SEQ ID NO: 723184 - RNA, 19 nt, Artificial Sequence
  Description of Artificial Sequence: Synthetic oligonucleotide
  Sense strand starting at position 2987 of SEQ ID NO: 586508
augaaauuggcaggcuuua

SEQ ID NO: 723185 - RNA, 19 nt, Artificial Sequence
  Description of Artificial Sequence: Synthetic oligonucleotide
  Antisense strand to SEQ ID NO: 723184
uaaagccugccaauuucau

SEQ ID NO: 723186 - RNA, 19 nt, Artificial Sequence
  Description of Artificial Sequence: Synthetic oligonucleotide
  Sense strand starting at position 3060 of SEQ ID NO: 586508
uucugacuugaacaauugu

SEQ ID NO: 723187 - RNA, 19 nt, Artificial Sequence
  Description of Artificial Sequence: Synthetic oligonucleotide
  Antisense strand to SEQ ID NO: 723186
acaauuguucaagucagaa

SEQ ID NO: 723188 - RNA, 19 nt, Artificial Sequence
  Description of Artificial Sequence: Synthetic oligonucleotide
  Sense strand starting at position 3078 of SEQ ID NO: 586508
uguuauuagagguaugucu

SEQ ID NO: 723189 - RNA, 19 nt, Artificial Sequence
  Description of Artificial Sequence: Synthetic oligonucleotide
  Antisense strand to SEQ ID NO: 723188
agacauaccucuaauaaca

SEQ ID NO: 723190 - RNA, 19 nt, Artificial Sequence
  Description of Artificial Sequence: Synthetic oligonucleotide
  Sense strand starting at position 3080 of SEQ ID NO: 586508
uuauuagagguaugucuac

SEQ ID NO: 723191 - RNA, 19 nt, Artificial Sequence
  Description of Artificial Sequence: Synthetic oligonucleotide
  Antisense strand to SEQ ID NO: 723190
guagacauaccucuaauaa

SEQ ID NO: 723192 - RNA, 19 nt, Artificial Sequence
  Description of Artificial Sequence: Synthetic oligonucleotide
  Sense strand starting at position 3185 of SEQ ID NO: 586508
ugucucuuuguauaaugga

SEQ ID NO: 723193 - RNA, 19 nt, Artificial Sequence
  Description of Artificial Sequence: Synthetic oligonucleotide
  Antisense strand to SEQ ID NO: 723192
uccauuauacaaagagaca

SEQ ID NO: 723194 - RNA, 19 nt, Artificial Sequence
  Description of Artificial Sequence: Synthetic oligonucleotide
  Sense strand starting at position 3388 of SEQ ID NO: 586508
auagauauaucugugguau

SEQ ID NO: 723195 - RNA, 19 nt, Artificial Sequence
  Description of Artificial Sequence: Synthetic oligonucleotide
  Antisense strand to SEQ ID NO: 723194
auaccacagauauaucuau

SEQ ID NO: 723196 - RNA, 19 nt, Artificial Sequence
  Description of Artificial Sequence: Synthetic oligonucleotide
  Sense strand starting at position 3629 of SEQ ID NO: 586508
auaucauguugguuaccau

SEQ ID NO: 723197 - RNA, 19 nt, Artificial Sequence
  Description of Artificial Sequence: Synthetic oligonucleotide
  Antisense strand to SEQ ID NO: 723196
augguaaccaacaugauau

SEQ ID NO: 723198 - RNA, 19 nt, Artificial Sequence
  Description of Artificial Sequence: Synthetic oligonucleotide
  Sense strand starting at position 3659 of SEQ ID NO: 586508
aucaaagcucauugaauug

SEQ ID NO: 723199 - RNA, 19 nt, Artificial Sequence
  Description of Artificial Sequence: Synthetic oligonucleotide
  Antisense strand to SEQ ID NO: 723198
caauucaaugagcuuugau

SEQ ID NO: 723200 - RNA, 19 nt, Artificial Sequence
  Description of Artificial Sequence: Synthetic oligonucleotide
  Sense strand starting at position 3773 of SEQ ID NO: 586508
uugcauuugugggcaugga

SEQ ID NO: 723201 - RNA, 19 nt, Artificial Sequence
  Description of Artificial Sequence: Synthetic oligonucleotide
  Antisense strand to SEQ ID NO: 723200
uccaugcccacaaaugcaa

SEQ ID NO: 723202 - RNA, 19 nt, Artificial Sequence
  Description of Artificial Sequence: Synthetic oligonucleotide
  Sense strand starting at position 3802 of SEQ ID NO: 586508
aaggaauugugacucacuu

SEQ ID NO: 723203 - RNA, 19 nt, Artificial Sequence
  Description of Artificial Sequence: Synthetic oligonucleotide
  Antisense strand to SEQ ID NO: 723202
aagugagucacaauuccuu

SEQ ID NO: 723204 - RNA, 19 nt, Artificial Sequence
  Description of Artificial Sequence: Synthetic oligonucleotide
  Sense strand starting at position 3862 of SEQ ID NO: 586508
cauguuacacuguguauuu

SEQ ID NO: 723205 - RNA, 19 nt, Artificial Sequence
  Description of Artificial Sequence: Synthetic oligonucleotide
  Antisense strand to SEQ ID NO: 723204
aaauacacaguguaacaug

SEQ ID NO: 723206 - RNA, 19 nt, Artificial Sequence
  Description of Artificial Sequence: Synthetic oligonucleotide
  Sense strand starting at position 3871 of SEQ ID NO: 586508
cuguguauuucauccguag

SEQ ID NO: 723207 - RNA, 19 nt, Artificial Sequence
  Description of Artificial Sequence: Synthetic oligonucleotide
  Antisense strand to SEQ ID NO: 723206
cuacggaugaaauacacag

SEQ ID NO: 723208 - RNA, 19 nt, Artificial Sequence
  Description of Artificial Sequence: Synthetic oligonucleotide
  Sense strand starting at position 3890 of SEQ ID NO: 586508
gcugaaaucucucuacuug

SEQ ID NO: 723209 - RNA, 19 nt, Artificial Sequence
  Description of Artificial Sequence: Synthetic oligonucleotide
  Antisense strand to SEQ ID NO: 723208
caaguagagagauuucagc

SEQ ID NO: 723210 - RNA, 19 nt, Artificial Sequence
  Description of Artificial Sequence: Synthetic oligonucleotide
  Sense strand starting at position 3975 of SEQ ID NO: 586508
gugagucaagaaugaaugu

SEQ ID NO: 723211 - RNA, 19 nt, Artificial Sequence
  Description of Artificial Sequence: Synthetic oligonucleotide
  Antisense strand to SEQ ID NO: 723210
acauucauucuugacucac

SEQ ID NO: 723212 - RNA, 19 nt, Artificial Sequence
  Description of Artificial Sequence: Synthetic oligonucleotide
  Sense strand starting at position 37 of SEQ ID NO: 586509
cagaccuguucgcucaagu

SEQ ID NO: 723213 - RNA, 19 nt, Artificial Sequence
  Description of Artificial Sequence: Synthetic oligonucleotide
  Antisense strand to SEQ ID NO: 723212
acuugagcgaacaggucug

SEQ ID NO: 723214 - RNA, 19 nt, Artificial Sequence
  Description of Artificial Sequence: Synthetic oligonucleotide
  Sense strand starting at position 2105 of SEQ ID NO: 586509
ugcaguaaucgcugcagac

SEQ ID NO: 723215 - RNA, 19 nt, Artificial Sequence
  Description of Artificial Sequence: Synthetic oligonucleotide
  Antisense strand to SEQ ID NO: 723214
gucugcagcgauuacugca

SEQ ID NO: 723216 - RNA, 19 nt, Artificial Sequence
  Description of Artificial Sequence: Synthetic oligonucleotide
  Sense strand starting at position 2107 of SEQ ID NO: 586509
caguaaucgcugcagacca

SEQ ID NO: 723217 - RNA, 19 nt, Artificial Sequence
  Description of Artificial Sequence: Synthetic oligonucleotide
  Antisense strand to SEQ ID NO: 723216
uggucugcagcgauuacug

SEQ ID NO: 723218 - RNA, 19 nt, Artificial Sequence
  Description of Artificial Sequence: Synthetic oligonucleotide
  Sense strand starting at position 2141 of SEQ ID NO: 586509
uuuggugcauuucugugaa

SEQ ID NO: 723219 - RNA, 19 nt, Artificial Sequence
  Description of Artificial Sequence: Synthetic oligonucleotide
  Antisense strand to SEQ ID NO: 723218
uucacagaaaugcaccaaa

SEQ ID NO: 723220 - RNA, 19 nt, Artificial Sequence
  Description of Artificial Sequence: Synthetic oligonucleotide
  Sense strand starting at position 2144 of SEQ ID NO: 586509
ggugcauuucugugaaagu

SEQ ID NO: 723221 - RNA, 19 nt, Artificial Sequence
  Description of Artificial Sequence: Synthetic oligonucleotide
  Antisense strand to SEQ ID NO: 723220
acuuucacagaaaugcacc

SEQ ID NO: 723222 - RNA, 19 nt, Artificial Sequence
  Description of Artificial Sequence: Synthetic oligonucleotide
  Sense strand starting at position 2145 of SEQ ID NO: 586509
gugcauuucugugaaagug

SEQ ID NO: 723223 - RNA, 19 nt, Artificial Sequence
  Description of Artificial Sequence: Synthetic oligonucleotide
  Antisense strand to SEQ ID NO: 723222
cacuuucacagaaaugcac

SEQ ID NO: 723224 - RNA, 19 nt, Artificial Sequence
  Description of Artificial Sequence: Synthetic oligonucleotide
  Sense strand starting at position 2160 of SEQ ID NO: 586509
agugaaguugagcguugaa

SEQ ID NO: 723225 - RNA, 19 nt, Artificial Sequence
  Description of Artificial Sequence: Synthetic oligonucleotide
  Antisense strand to SEQ ID NO: 723224
uucaacgcucaacuucacu

SEQ ID NO: 723226 - RNA, 19 nt, Artificial Sequence
  Description of Artificial Sequence: Synthetic oligonucleotide
  Sense strand starting at position 2348 of SEQ ID NO: 586509
cacagugauucccgaaguu

SEQ ID NO: 723227 - RNA, 19 nt, Artificial Sequence
  Description of Artificial Sequence: Synthetic oligonucleotide
  Antisense strand to SEQ ID NO: 723226
aacuucgggaaucacugug

SEQ ID NO: 723228 - RNA, 19 nt, Artificial Sequence
  Description of Artificial Sequence: Synthetic oligonucleotide
  Sense strand starting at position 2358 of SEQ ID NO: 586509
cccgaaguuuacuagaugu

SEQ ID NO: 723229 - RNA, 19 nt, Artificial Sequence
  Description of Artificial Sequence: Synthetic oligonucleotide
  Antisense strand to SEQ ID NO: 723228
acaucuaguaaacuucggg

SEQ ID NO: 723230 - RNA, 19 nt, Artificial Sequence
  Description of Artificial Sequence: Synthetic oligonucleotide
  Sense strand starting at position 2360 of SEQ ID NO: 586509
cgaaguuuacuagaugucu

SEQ ID NO: 723231 - RNA, 19 nt, Artificial Sequence
  Description of Artificial Sequence: Synthetic oligonucleotide
  Antisense strand to SEQ ID NO: 723230
agacaucuaguaaacuucg

SEQ ID NO: 723232 - RNA, 19 nt, Artificial Sequence
  Description of Artificial Sequence: Synthetic oligonucleotide
  Sense strand starting at position 2368 of SEQ ID NO: 586509
acuagaugucugugguguu

SEQ ID NO: 723233 - RNA, 19 nt, Artificial Sequence
  Description of Artificial Sequence: Synthetic oligonucleotide
  Antisense strand to SEQ ID NO: 723232
aacaccacagacaucuagu

SEQ ID NO: 723234 - RNA, 19 nt, Artificial Sequence
  Description of Artificial Sequence: Synthetic oligonucleotide
  Sense strand starting at position 2564 of SEQ ID NO: 586509
cagucuugacgucacugaa

SEQ ID NO: 723235 - RNA, 19 nt, Artificial Sequence
  Description of Artificial Sequence: Synthetic oligonucleotide
  Antisense strand to SEQ ID NO: 723234
uucagugacgucaagacug

SEQ ID NO: 723236 - RNA, 19 nt, Artificial Sequence
  Description of Artificial Sequence: Synthetic oligonucleotide
  Sense strand starting at position 2567 of SEQ ID NO: 586509
ucuugacgucacugaauga

SEQ ID NO: 723237 - RNA, 19 nt, Artificial Sequence
  Description of Artificial Sequence: Synthetic oligonucleotide
  Antisense strand to SEQ ID NO: 723236
ucauucagugacgucaaga

SEQ ID NO: 723238 - RNA, 19 nt, Artificial Sequence
  Description of Artificial Sequence: Synthetic oligonucleotide
  Sense strand starting at position 2602 of SEQ ID NO: 586509
gccauccuagaguaagaau

SEQ ID NO: 723239 - RNA, 19 nt, Artificial Sequence
  Description of Artificial Sequence: Synthetic oligonucleotide
  Antisense strand to SEQ ID NO: 723238
auucuuacucuaggauggc

SEQ ID NO: 723240 - RNA, 19 nt, Artificial Sequence
  Description of Artificial Sequence: Synthetic oligonucleotide
  Sense strand starting at position 2657 of SEQ ID NO: 586509
ggcauuccucagggaccua

SEQ ID NO: 723241 - RNA, 19 nt, Artificial Sequence
  Description of Artificial Sequence: Synthetic oligonucleotide
  Antisense strand to SEQ ID NO: 723240
uaggucccugaggaaugcc

SEQ ID NO: 723242 - RNA, 19 nt, Artificial Sequence
  Description of Artificial Sequence: Synthetic oligonucleotide
  Sense strand starting at position 2676 of SEQ ID NO: 586509
cagcuaucucgggaagccu

SEQ ID NO: 723243 - RNA, 19 nt, Artificial Sequence
  Description of Artificial Sequence: Synthetic oligonucleotide
  Antisense strand to SEQ ID NO: 723242
aggcuucccgagauagcug

SEQ ID NO: 723244 - RNA, 19 nt, Artificial Sequence
  Description of Artificial Sequence: Synthetic oligonucleotide
  Sense strand starting at position 2694 of SEQ ID NO: 586509
ugauguccaccaugucauu

SEQ ID NO: 723245 - RNA, 19 nt, Artificial Sequence
  Description of Artificial Sequence: Synthetic oligonucleotide
  Antisense strand to SEQ ID NO: 723244
aaugacaugguggacauca

SEQ ID NO: 723246 - RNA, 19 nt, Artificial Sequence
  Description of Artificial Sequence: Synthetic oligonucleotide
  Sense strand starting at position 2849 of SEQ ID NO: 586509
gaguccugccacugcaaga

SEQ ID NO: 723247 - RNA, 19 nt, Artificial Sequence
  Description of Artificial Sequence: Synthetic oligonucleotide
  Antisense strand to SEQ ID NO: 723246
ucuugcaguggcaggacuc

SEQ ID NO: 723248 - RNA, 19 nt, Artificial Sequence
  Description of Artificial Sequence: Synthetic oligonucleotide
  Sense strand starting at position 3033 of SEQ ID NO: 586509
guggguagaugugggaauu

SEQ ID NO: 723249 - RNA, 19 nt, Artificial Sequence
  Description of Artificial Sequence: Synthetic oligonucleotide
  Antisense strand to SEQ ID NO: 723248
aauucccacaucuacccac

SEQ ID NO: 723250 - RNA, 19 nt, Artificial Sequence
  Description of Artificial Sequence: Synthetic oligonucleotide
  Sense strand starting at position 3076 of SEQ ID NO: 586509
acgggaggugugggucauu

SEQ ID NO: 723251 - RNA, 19 nt, Artificial Sequence
  Description of Artificial Sequence: Synthetic oligonucleotide
  Antisense strand to SEQ ID NO: 723250
aaugacccacaccucccgu

SEQ ID NO: 723252 - RNA, 19 nt, Artificial Sequence
  Description of Artificial Sequence: Synthetic oligonucleotide
  Sense strand starting at position 3093 of SEQ ID NO: 586509
uugugcaauccuggugaau

SEQ ID NO: 723253 - RNA, 19 nt, Artificial Sequence
  Description of Artificial Sequence: Synthetic oligonucleotide
  Antisense strand to SEQ ID NO: 723252
auucaccaggauugcacaa

SEQ ID NO: 723254 - RNA, 19 nt, Artificial Sequence
  Description of Artificial Sequence: Synthetic oligonucleotide
  Sense strand starting at position 3095 of SEQ ID NO: 586509
gugcaauccuggugaaugc

SEQ ID NO: 723255 - RNA, 19 nt, Artificial Sequence
  Description of Artificial Sequence: Synthetic oligonucleotide
  Antisense strand to SEQ ID NO: 723254
gcauucaccaggauugcac

SEQ ID NO: 723256 - RNA, 19 nt, Artificial Sequence
  Description of Artificial Sequence: Synthetic oligonucleotide
  Sense strand starting at position 3694 of SEQ ID NO: 586509
cuguccagggucugugauu

SEQ ID NO: 723257 - RNA, 19 nt, Artificial Sequence
  Description of Artificial Sequence: Synthetic oligonucleotide
  Antisense strand to SEQ ID NO: 723256
aaucacagacccuggacag

SEQ ID NO: 723258 - RNA, 19 nt, Artificial Sequence
  Description of Artificial Sequence: Synthetic oligonucleotide
  Sense strand starting at position 3695 of SEQ ID NO: 586509
uguccagggucugugauua

SEQ ID NO: 723259 - RNA, 19 nt, Artificial Sequence
  Description of Artificial Sequence: Synthetic oligonucleotide
  Antisense strand to SEQ ID NO: 723258
uaaucacagacccuggaca

SEQ ID NO: 723260 - RNA, 19 nt, Artificial Sequence
  Description of Artificial Sequence: Synthetic oligonucleotide
  Sense strand starting at position 3699 of SEQ ID NO: 586509
cagggucugugauuagaag

SEQ ID NO: 723261 - RNA, 19 nt, Artificial Sequence
  Description of Artificial Sequence: Synthetic oligonucleotide
  Antisense strand to SEQ ID NO: 723260
cuucuaaucacagacccug

SEQ ID NO: 723262 - RNA, 19 nt, Artificial Sequence
  Description of Artificial Sequence: Synthetic oligonucleotide
  Sense strand starting at position 775 of SEQ ID NO: 586510
uccaguauuuguuaucaaa

SEQ ID NO: 723263 - RNA, 19 nt, Artificial Sequence
  Description of Artificial Sequence: Synthetic oligonucleotide
  Antisense strand to SEQ ID NO: 723262
uuugauaacaaauacugga

SEQ ID NO: 723264 - RNA, 19 nt, Artificial Sequence
  Description of Artificial Sequence: Synthetic oligonucleotide
  Sense strand starting at position 809 of SEQ ID NO: 586510
uuauuagagccacagcuau

SEQ ID NO: 723265 - RNA, 19 nt, Artificial Sequence
  Description of Artificial Sequence: Synthetic oligonucleotide
  Antisense strand to SEQ ID NO: 723264
auagcuguggcucuaauaa

SEQ ID NO: 723266 - RNA, 19 nt, Artificial Sequence
  Description of Artificial Sequence: Synthetic oligonucleotide
  Sense strand starting at position 1094 of SEQ ID NO: 586510
auuagcacaugguuugaau

SEQ ID NO: 723267 - RNA, 19 nt, Artificial Sequence
  Description of Artificial Sequence: Synthetic oligonucleotide
  Antisense strand to SEQ ID NO: 723266
auucaaaccaugugcuaau

SEQ ID NO: 723268 - RNA, 19 nt, Artificial Sequence
  Description of Artificial Sequence: Synthetic oligonucleotide
  Sense strand starting at position 2055 of SEQ ID NO: 586510
uuugauuggucaguuguau

SEQ ID NO: 723269 - RNA, 19 nt, Artificial Sequence
  Description of Artificial Sequence: Synthetic oligonucleotide
  Antisense strand to SEQ ID NO: 723268
auacaacugaccaaucaaa

SEQ ID NO: 723270 - RNA, 19 nt, Artificial Sequence
  Description of Artificial Sequence: Synthetic oligonucleotide
  Sense strand starting at position 2234 of SEQ ID NO: 586510
ugguuuguuggucacuuau

SEQ ID NO: 723271 - RNA, 19 nt, Artificial Sequence
  Description of Artificial Sequence: Synthetic oligonucleotide
  Antisense strand to SEQ ID NO: 723270
auaagugaccaacaaacca

SEQ ID NO: 723272 - RNA, 19 nt, Artificial Sequence
  Description of Artificial Sequence: Synthetic oligonucleotide
  Sense strand starting at position 2291 of SEQ ID NO: 586510
aggaaagaauuacauagua

SEQ ID NO: 723273 - RNA, 19 nt, Artificial Sequence
  Description of Artificial Sequence: Synthetic oligonucleotide
  Antisense strand to SEQ ID NO: 723272
uacuauguaauucuuuccu

SEQ ID NO: 723274 - RNA, 19 nt, Artificial Sequence
  Description of Artificial Sequence: Synthetic oligonucleotide
  Sense strand starting at position 2333 of SEQ ID NO: 586510
ccuugauaauugcauuuga

SEQ ID NO: 723275 - RNA, 19 nt, Artificial Sequence
  Description of Artificial Sequence: Synthetic oligonucleotide
  Antisense strand to SEQ ID NO: 723274
ucaaaugcaauuaucaagg

SEQ ID NO: 723276 - RNA, 19 nt, Artificial Sequence
  Description of Artificial Sequence: Synthetic oligonucleotide
  Sense strand starting at position 2379 of SEQ ID NO: 586510
gauugagauucuuuguucu

SEQ ID NO: 723277 - RNA, 19 nt, Artificial Sequence
  Description of Artificial Sequence: Synthetic oligonucleotide
  Antisense strand to SEQ ID NO: 723276
agaacaaagaaucucaauc

SEQ ID NO: 723278 - RNA, 19 nt, Artificial Sequence
  Description of Artificial Sequence: Synthetic oligonucleotide
  Sense strand starting at position 2381 of SEQ ID NO: 586510
uugagauucuuuguucuac

SEQ ID NO: 723279 - RNA, 19 nt, Artificial Sequence
  Description of Artificial Sequence: Synthetic oligonucleotide
  Antisense strand to SEQ ID NO: 723278
guagaacaaagaaucucaa

SEQ ID NO: 723280 - RNA, 19 nt, Artificial Sequence
  Description of Artificial Sequence: Synthetic oligonucleotide
  Sense strand starting at position 2382 of SEQ ID NO: 586510
ugagauucuuuguucuaca

SEQ ID NO: 723281 - RNA, 19 nt, Artificial Sequence
  Description of Artificial Sequence: Synthetic oligonucleotide
  Antisense strand to SEQ ID NO: 723280
uguagaacaaagaaucuca

SEQ ID NO: 723282 - RNA, 19 nt, Artificial Sequence
  Description of Artificial Sequence: Synthetic oligonucleotide
  Sense strand starting at position 2464 of SEQ ID NO: 586510
aagucaucuucucugggua

SEQ ID NO: 723283 - RNA, 19 nt, Artificial Sequence
  Description of Artificial Sequence: Synthetic oligonucleotide
  Antisense strand to SEQ ID NO: 723282
uacccagagaagaugacuu

SEQ ID NO: 723284 - RNA, 19 nt, Artificial Sequence
  Description of Artificial Sequence: Synthetic oligonucleotide
  Sense strand starting at position 2472 of SEQ ID NO: 586510
uucucuggguauuccaaau

SEQ ID NO: 723285 - RNA, 19 nt, Artificial Sequence
  Description of Artificial Sequence: Synthetic oligonucleotide
  Antisense strand to SEQ ID NO: 723284
auuuggaauacccagagaa

SEQ ID NO: 723286 - RNA, 19 nt, Artificial Sequence
  Description of Artificial Sequence: Synthetic oligonucleotide
  Sense strand starting at position 2488 of SEQ ID NO: 586510
aauuguugugagcaucuca

SEQ ID NO: 723287 - RNA, 19 nt, Artificial Sequence
  Description of Artificial Sequence: Synthetic oligonucleotide
  Antisense strand to SEQ ID NO: 723286
ugagaugcucacaacaauu

SEQ ID NO: 723288 - RNA, 19 nt, Artificial Sequence
  Description of Artificial Sequence: Synthetic oligonucleotide
  Sense strand starting at position 2496 of SEQ ID NO: 586510
ugagcaucucaagguguua

SEQ ID NO: 723289 - RNA, 19 nt, Artificial Sequence
  Description of Artificial Sequence: Synthetic oligonucleotide
  Antisense strand to SEQ ID NO: 723288
uaacaccuugagaugcuca

SEQ ID NO: 723290 - RNA, 19 nt, Artificial Sequence
  Description of Artificial Sequence: Synthetic oligonucleotide
  Sense strand starting at position 2508 of SEQ ID NO: 586510
gguguuaaacauugucaug

SEQ ID NO: 723291 - RNA, 19 nt, Artificial Sequence
  Description of Artificial Sequence: Synthetic oligonucleotide
  Antisense strand to SEQ ID NO: 723290
caugacaauguuuaacacc

SEQ ID NO: 723292 - RNA, 19 nt, Artificial Sequence
  Description of Artificial Sequence: Synthetic oligonucleotide
  Sense strand starting at position 2510 of SEQ ID NO: 586510
uguuaaacauugucaugac

SEQ ID NO: 723293 - RNA, 19 nt, Artificial Sequence
  Description of Artificial Sequence: Synthetic oligonucleotide
  Antisense strand to SEQ ID NO: 723292
gucaugacaauguuuaaca

SEQ ID NO: 723294 - RNA, 19 nt, Artificial Sequence
  Description of Artificial Sequence: Synthetic oligonucleotide
  Sense strand starting at position 2697 of SEQ ID NO: 586510
ggagauuacuacuuggucu

SEQ ID NO: 723295 - RNA, 19 nt, Artificial Sequence
  Description of Artificial Sequence: Synthetic oligonucleotide
  Antisense strand to SEQ ID NO: 723294
agaccaaguaguaaucucc

SEQ ID NO: 723296 - RNA, 19 nt, Artificial Sequence
  Description of Artificial Sequence: Synthetic oligonucleotide
  Sense strand starting at position 2738 of SEQ ID NO: 586510
uugguagauguauacugau

SEQ ID NO: 723297 - RNA, 19 nt, Artificial Sequence
  Description of Artificial Sequence: Synthetic oligonucleotide
  Antisense strand to SEQ ID NO: 723296
aucaguauacaucuaccaa

SEQ ID NO: 723298 - RNA, 19 nt, Artificial Sequence
  Description of Artificial Sequence: Synthetic oligonucleotide
  Sense strand starting at position 2805 of SEQ ID NO: 586510
gggcacauuucuuaguaga

SEQ ID NO: 723299 - RNA, 19 nt, Artificial Sequence
  Description of Artificial Sequence: Synthetic oligonucleotide
  Antisense strand to SEQ ID NO: 723298
ucuacuaagaaaugugccc

SEQ ID NO: 723300 - RNA, 19 nt, Artificial Sequence
  Description of Artificial Sequence: Synthetic oligonucleotide
  Sense strand starting at position 2847 of SEQ ID NO: 586510
guagcuacacgcuaauauu

SEQ ID NO: 723301 - RNA, 19 nt, Artificial Sequence
  Description of Artificial Sequence: Synthetic oligonucleotide
  Antisense strand to SEQ ID NO: 723300
aauauuagcguguagcuac

SEQ ID NO: 723302 - RNA, 19 nt, Artificial Sequence
  Description of Artificial Sequence: Synthetic oligonucleotide
  Sense strand starting at position 2898 of SEQ ID NO: 586510
aguuacaugucuuuauaag

SEQ ID NO: 723303 - RNA, 19 nt, Artificial Sequence
  Description of Artificial Sequence: Synthetic oligonucleotide
  Antisense strand to SEQ ID NO: 723302
cuuauaaagacauguaacu

SEQ ID NO: 723304 - RNA, 19 nt, Artificial Sequence
  Description of Artificial Sequence: Synthetic oligonucleotide
  Sense strand starting at position 2899 of SEQ ID NO: 586510
guuacaugucuuuauaagu

SEQ ID NO: 723305 - RNA, 19 nt, Artificial Sequence
  Description of Artificial Sequence: Synthetic oligonucleotide
  Antisense strand to SEQ ID NO: 723304
acuuauaaagacauguaac

SEQ ID NO: 723306 - RNA, 19 nt, Artificial Sequence
  Description of Artificial Sequence: Synthetic oligonucleotide
  Sense strand starting at position 3196 of SEQ ID NO: 586510
ggacauuacauguggcuaa

SEQ ID NO: 723307 - RNA, 19 nt, Artificial Sequence
  Description of Artificial Sequence: Synthetic oligonucleotide
  Antisense strand to SEQ ID NO: 723306
uuagccacauguaaugucc

SEQ ID NO: 723308 - RNA, 19 nt, Artificial Sequence
  Description of Artificial Sequence: Synthetic oligonucleotide
  Sense strand starting at position 3225 of SEQ ID NO: 586510
uguuaauuaucaccuguuu

SEQ ID NO: 723309 - RNA, 19 nt, Artificial Sequence
  Description of Artificial Sequence: Synthetic oligonucleotide
  Antisense strand to SEQ ID NO: 723308
aaacaggugauaauuaaca

SEQ ID NO: 723310 - RNA, 19 nt, Artificial Sequence
  Description of Artificial Sequence: Synthetic oligonucleotide
  Sense strand starting at position 3254 of SEQ ID NO: 586510
aggaauauuuagugaccuu

SEQ ID NO: 723311 - RNA, 19 nt, Artificial Sequence
  Description of Artificial Sequence: Synthetic oligonucleotide
  Antisense strand to SEQ ID NO: 723310
aaggucacuaaauauuccu

SEQ ID NO: 723312 - RNA, 19 nt, Artificial Sequence
  Description of Artificial Sequence: Synthetic oligonucleotide
  Sense strand starting at position 3351 of SEQ ID NO: 586510
auaaucuuccacugguagu

SEQ ID NO: 723313 - RNA, 19 nt, Artificial Sequence
  Description of Artificial Sequence: Synthetic oligonucleotide
  Antisense strand to SEQ ID NO: 723312
acuaccaguggaagauuau

SEQ ID NO: 723314 - RNA, 19 nt, Artificial Sequence
  Description of Artificial Sequence: Synthetic oligonucleotide
  Sense strand starting at position 3361 of SEQ ID NO: 586510
acugguaguguugaaucuu

SEQ ID NO: 723315 - RNA, 19 nt, Artificial Sequence
  Description of Artificial Sequence: Synthetic oligonucleotide
  Antisense strand to SEQ ID NO: 723314
aagauucaacacuaccagu

SEQ ID NO: 723316 - RNA, 19 nt, Artificial Sequence
  Description of Artificial Sequence: Synthetic oligonucleotide
  Sense strand starting at position 3385 of SEQ ID NO: 586510
gggaauagcugaccaauau

SEQ ID NO: 723317 - RNA, 19 nt, Artificial Sequence
  Description of Artificial Sequence: Synthetic oligonucleotide
  Antisense strand to SEQ ID NO: 723316
auauuggucagcuauuccc

SEQ ID NO: 723318 - RNA, 19 nt, Artificial Sequence
  Description of Artificial Sequence: Synthetic oligonucleotide
  Sense strand starting at position 3389 of SEQ ID NO: 586510
auagcugaccaauaugagu

SEQ ID NO: 723319 - RNA, 19 nt, Artificial Sequence
  Description of Artificial Sequence: Synthetic oligonucleotide
  Antisense strand to SEQ ID NO: 723318
acucauauuggucagcuau

SEQ ID NO: 723320 - RNA, 19 nt, Artificial Sequence
  Description of Artificial Sequence: Synthetic oligonucleotide
  Sense strand starting at position 3394 of SEQ ID NO: 586510
ugaccaauaugaguuguga

SEQ ID NO: 723321 - RNA, 19 nt, Artificial Sequence
  Description of Artificial Sequence: Synthetic oligonucleotide
  Antisense strand to SEQ ID NO: 723320
ucacaacucauauugguca

SEQ ID NO: 723322 - RNA, 19 nt, Artificial Sequence
  Description of Artificial Sequence: Synthetic oligonucleotide
  Sense strand starting at position 3396 of SEQ ID NO: 586510
accaauaugaguugugagu

SEQ ID NO: 723323 - RNA, 19 nt, Artificial Sequence
  Description of Artificial Sequence: Synthetic oligonucleotide
  Antisense strand to SEQ ID NO: 723322
acucacaacucauauuggu

SEQ ID NO: 723324 - RNA, 19 nt, Artificial Sequence
  Description of Artificial Sequence: Synthetic oligonucleotide
  Sense strand starting at position 3403 of SEQ ID NO: 586510
ugaguugugaguugcauuu

SEQ ID NO: 723325 - RNA, 19 nt, Artificial Sequence
  Description of Artificial Sequence: Synthetic oligonucleotide
  Antisense strand to SEQ ID NO: 723324
aaaugcaacucacaacuca

SEQ ID NO: 723326 - RNA, 19 nt, Artificial Sequence
  Description of Artificial Sequence: Synthetic oligonucleotide
  Sense strand starting at position 3420 of SEQ ID NO: 586510
uucuauagaaguugagagu

SEQ ID NO: 723327 - RNA, 19 nt, Artificial Sequence
  Description of Artificial Sequence: Synthetic oligonucleotide
  Antisense strand to SEQ ID NO: 723326
acucucaacuucuauagaa

SEQ ID NO: 723328 - RNA, 19 nt, Artificial Sequence
  Description of Artificial Sequence: Synthetic oligonucleotide
  Sense strand starting at position 3498 of SEQ ID NO: 586510
aggcuuugguaauucuaaa

SEQ ID NO: 723329 - RNA, 19 nt, Artificial Sequence
  Description of Artificial Sequence: Synthetic oligonucleotide
  Antisense strand to SEQ ID NO: 723328
uuuagaauuaccaaagccu

SEQ ID NO: 723330 - RNA, 19 nt, Artificial Sequence
  Description of Artificial Sequence: Synthetic oligonucleotide
  Sense strand starting at position 3580 of SEQ ID NO: 586510
gccagccauuuauaaagaa

SEQ ID NO: 723331 - RNA, 19 nt, Artificial Sequence
  Description of Artificial Sequence: Synthetic oligonucleotide
  Antisense strand to SEQ ID NO: 723330
uucuuuauaaauggcuggc

SEQ ID NO: 723332 - RNA, 19 nt, Artificial Sequence
  Description of Artificial Sequence: Synthetic oligonucleotide
  Sense strand starting at position 3682 of SEQ ID NO: 586510
agcauagcaucaguggaaa

SEQ ID NO: 723333 - RNA, 19 nt, Artificial Sequence
  Description of Artificial Sequence: Synthetic oligonucleotide
  Antisense strand to SEQ ID NO: 723332
uuuccacugaugcuaugcu

SEQ ID NO: 723334 - RNA, 19 nt, Artificial Sequence
  Description of Artificial Sequence: Synthetic oligonucleotide
  Sense strand starting at position 3714 of SEQ ID NO: 586510
ugaggagauuauuaacaca

SEQ ID NO: 723335 - RNA, 19 nt, Artificial Sequence
  Description of Artificial Sequence: Synthetic oligonucleotide
  Antisense strand to SEQ ID NO: 723334
uguguuaauaaucuccuca

SEQ ID NO: 723336 - RNA, 19 nt, Artificial Sequence
  Description of Artificial Sequence: Synthetic oligonucleotide
  Sense strand starting at position 3756 of SEQ ID NO: 586510
ucaaguauuugcuuauguu

SEQ ID NO: 723337 - RNA, 19 nt, Artificial Sequence
  Description of Artificial Sequence: Synthetic oligonucleotide
  Antisense strand to SEQ ID NO: 723336
aacauaagcaaauacuuga

SEQ ID NO: 723338 - RNA, 19 nt, Artificial Sequence
  Description of Artificial Sequence: Synthetic oligonucleotide
  Sense strand starting at position 3817 of SEQ ID NO: 586510
agagaaauuuacugacuug

SEQ ID NO: 723339 - RNA, 19 nt, Artificial Sequence
  Description of Artificial Sequence: Synthetic oligonucleotide
  Antisense strand to SEQ ID NO: 723338
caagucaguaaauuucucu

SEQ ID NO: 723340 - RNA, 19 nt, Artificial Sequence
  Description of Artificial Sequence: Synthetic oligonucleotide
  Sense strand starting at position 3903 of SEQ ID NO: 586510
ggccuucucucuuuggaaa

SEQ ID NO: 723341 - RNA, 19 nt, Artificial Sequence
  Description of Artificial Sequence: Synthetic oligonucleotide
  Antisense strand to SEQ ID NO: 723340
uuuccaaagagagaaggcc

SEQ ID NO: 723342 - RNA, 19 nt, Artificial Sequence
  Description of Artificial Sequence: Synthetic oligonucleotide
  Sense strand starting at position 63 of SEQ ID NO: 586511
uggagaugcuccgcaugua

SEQ ID NO: 723343 - RNA, 19 nt, Artificial Sequence
  Description of Artificial Sequence: Synthetic oligonucleotide
  Antisense strand to SEQ ID NO: 723342
uacaugcggagcaucucca

SEQ ID NO: 723344 - RNA, 19 nt, Artificial Sequence
  Description of Artificial Sequence: Synthetic oligonucleotide
  Sense strand starting at position 66 of SEQ ID NO: 586511
agaugcuccgcauguagua

SEQ ID NO: 723345 - RNA, 19 nt, Artificial Sequence
  Description of Artificial Sequence: Synthetic oligonucleotide
  Antisense strand to SEQ ID NO: 723344
uacuacaugcggagcaucu

SEQ ID NO: 723346 - RNA, 19 nt, Artificial Sequence
  Description of Artificial Sequence: Synthetic oligonucleotide
  Sense strand starting at position 395 of SEQ ID NO: 586511
gcucuccuuggccaguaaa

SEQ ID NO: 723347 - RNA, 19 nt, Artificial Sequence
  Description of Artificial Sequence: Synthetic oligonucleotide
  Antisense strand to SEQ ID NO: 723346
uuuacuggccaaggagagc

SEQ ID NO: 723348 - RNA, 19 nt, Artificial Sequence
  Description of Artificial Sequence: Synthetic oligonucleotide
  Sense strand starting at position 982 of SEQ ID NO: 586511
gcuccugcuuaguuaggau

SEQ ID NO: 723349 - RNA, 19 nt, Artificial Sequence
  Description of Artificial Sequence: Synthetic oligonucleotide
  Antisense strand to SEQ ID NO: 723348
auccuaacuaagcaggagc

SEQ ID NO: 723350 - RNA, 19 nt, Artificial Sequence
  Description of Artificial Sequence: Synthetic oligonucleotide
  Sense strand starting at position 1025 of SEQ ID NO: 586511
cugagaguuaggcacaugu

SEQ ID NO: 723351 - RNA, 19 nt, Artificial Sequence
  Description of Artificial Sequence: Synthetic oligonucleotide
  Antisense strand to SEQ ID NO: 723350
acaugugccuaacucucag

SEQ ID NO: 723352 - RNA, 19 nt, Artificial Sequence
  Description of Artificial Sequence: Synthetic oligonucleotide
  Sense strand starting at position 1027 of SEQ ID NO: 586511
gagaguuaggcacauguca

SEQ ID NO: 723353 - RNA, 19 nt, Artificial Sequence
  Description of Artificial Sequence: Synthetic oligonucleotide
  Antisense strand to SEQ ID NO: 723352
ugacaugugccuaacucuc

SEQ ID NO: 723354 - RNA, 19 nt, Artificial Sequence
  Description of Artificial Sequence: Synthetic oligonucleotide
  Sense strand starting at position 1084 of SEQ ID NO: 586511
uagggugauagcggaagau

SEQ ID NO: 723355 - RNA, 19 nt, Artificial Sequence
  Description of Artificial Sequence: Synthetic oligonucleotide
  Antisense strand to SEQ ID NO: 723354
aucuuccgcuaucacccua

SEQ ID NO: 723356 - RNA, 19 nt, Artificial Sequence
  Description of Artificial Sequence: Synthetic oligonucleotide
  Sense strand starting at position 1155 of SEQ ID NO: 586511
uugugcauuucucagccaa

SEQ ID NO: 723357 - RNA, 19 nt, Artificial Sequence
  Description of Artificial Sequence: Synthetic oligonucleotide
  Antisense strand to SEQ ID NO: 723356
uuggcugagaaaugcacaa

SEQ ID NO: 723358 - RNA, 19 nt, Artificial Sequence
  Description of Artificial Sequence: Synthetic oligonucleotide
  Sense strand starting at position 1157 of SEQ ID NO: 586511
gugcauuucucagccaagu

SEQ ID NO: 723359 - RNA, 19 nt, Artificial Sequence
  Description of Artificial Sequence: Synthetic oligonucleotide
  Antisense strand to SEQ ID NO: 723358
acuuggcugagaaaugcac

SEQ ID NO: 723360 - RNA, 19 nt, Artificial Sequence
  Description of Artificial Sequence: Synthetic oligonucleotide
  Sense strand starting at position 1264 of SEQ ID NO: 586511
gacuguugauuacuguuga

SEQ ID NO: 723361 - RNA, 19 nt, Artificial Sequence
  Description of Artificial Sequence: Synthetic oligonucleotide
  Antisense strand to SEQ ID NO: 723360
ucaacaguaaucaacaguc

SEQ ID NO: 723362 - RNA, 19 nt, Artificial Sequence
  Description of Artificial Sequence: Synthetic oligonucleotide
  Sense strand starting at position 1383 of SEQ ID NO: 586511
gacagcguuugauccaguu

SEQ ID NO: 723363 - RNA, 19 nt, Artificial Sequence
  Description of Artificial Sequence: Synthetic oligonucleotide
  Antisense strand to SEQ ID NO: 723362
aacuggaucaaacgcuguc

SEQ ID NO: 723364 - RNA, 19 nt, Artificial Sequence
  Description of Artificial Sequence: Synthetic oligonucleotide
  Sense strand starting at position 1387 of SEQ ID NO: 586511
gcguuugauccaguugcaa

SEQ ID NO: 723365 - RNA, 19 nt, Artificial Sequence
  Description of Artificial Sequence: Synthetic oligonucleotide
  Antisense strand to SEQ ID NO: 723364
uugcaacuggaucaaacgc

SEQ ID NO: 723366 - RNA, 19 nt, Artificial Sequence
  Description of Artificial Sequence: Synthetic oligonucleotide
  Sense strand starting at position 1405 of SEQ ID NO: 586511
agccgaggucucuagagga

SEQ ID NO: 723367 - RNA, 19 nt, Artificial Sequence
  Description of Artificial Sequence: Synthetic oligonucleotide
  Antisense strand to SEQ ID NO: 723366
uccucuagagaccucggcu

SEQ ID NO: 723368 - RNA, 19 nt, Artificial Sequence
  Description of Artificial Sequence: Synthetic oligonucleotide
  Sense strand starting at position 1755 of SEQ ID NO: 586511
ggagcuagucacugccaca

SEQ ID NO: 723369 - RNA, 19 nt, Artificial Sequence
  Description of Artificial Sequence: Synthetic oligonucleotide
  Antisense strand to SEQ ID NO: 723368
uguggcagugacuagcucc

SEQ ID NO: 723370 - RNA, 19 nt, Artificial Sequence
  Description of Artificial Sequence: Synthetic oligonucleotide
  Sense strand starting at position 1944 of SEQ ID NO: 586511
cggagagauacugguuugu

SEQ ID NO: 723371 - RNA, 19 nt, Artificial Sequence
  Description of Artificial Sequence: Synthetic oligonucleotide
  Antisense strand to SEQ ID NO: 723370
acaaaccaguaucucuccg

SEQ ID NO: 723372 - RNA, 19 nt, Artificial Sequence
  Description of Artificial Sequence: Synthetic oligonucleotide
  Sense strand starting at position 2434 of SEQ ID NO: 586511
agaggugucagucauagag

SEQ ID NO: 723373 - RNA, 19 nt, Artificial Sequence
  Description of Artificial Sequence: Synthetic oligonucleotide
  Antisense strand to SEQ ID NO: 723372
cucuaugacugacaccucu

SEQ ID NO: 723374 - RNA, 19 nt, Artificial Sequence
  Description of Artificial Sequence: Synthetic oligonucleotide
  Sense strand starting at position 2436 of SEQ ID NO: 586511
aggugucagucauagagaa

SEQ ID NO: 723375 - RNA, 19 nt, Artificial Sequence
  Description of Artificial Sequence: Synthetic oligonucleotide
  Antisense strand to SEQ ID NO: 723374
uucucuaugacugacaccu

SEQ ID NO: 723376 - RNA, 19 nt, Artificial Sequence
  Description of Artificial Sequence: Synthetic oligonucleotide
  Sense strand starting at position 2438 of SEQ ID NO: 586511
gugucagucauagagaauu

SEQ ID NO: 723377 - RNA, 19 nt, Artificial Sequence
  Description of Artificial Sequence: Synthetic oligonucleotide
  Antisense strand to SEQ ID NO: 723376
aauucucuaugacugacac

SEQ ID NO: 723378 - RNA, 19 nt, Artificial Sequence
  Description of Artificial Sequence: Synthetic oligonucleotide
  Sense strand starting at position 2455 of SEQ ID NO: 586511
uuaccaguuccaggauuga

SEQ ID NO: 723379 - RNA, 19 nt, Artificial Sequence
  Description of Artificial Sequence: Synthetic oligonucleotide
  Antisense strand to SEQ ID NO: 723378
ucaauccuggaacugguaa

SEQ ID NO: 723380 - RNA, 19 nt, Artificial Sequence
  Description of Artificial Sequence: Synthetic oligonucleotide
  Sense strand starting at position 2566 of SEQ ID NO: 586511
uagugagguaguuguauuu

SEQ ID NO: 723381 - RNA, 19 nt, Artificial Sequence
  Description of Artificial Sequence: Synthetic oligonucleotide
  Antisense strand to SEQ ID NO: 723380
aaauacaacuaccucacua

SEQ ID NO: 723382 - RNA, 19 nt, Artificial Sequence
  Description of Artificial Sequence: Synthetic oligonucleotide
  Sense strand starting at position 2575 of SEQ ID NO: 586511
aguuguauuugaugaagua

SEQ ID NO: 723383 - RNA, 19 nt, Artificial Sequence
  Description of Artificial Sequence: Synthetic oligonucleotide
  Antisense strand to SEQ ID NO: 723382
uacuucaucaaauacaacu

SEQ ID NO: 723384 - RNA, 19 nt, Artificial Sequence
  Description of Artificial Sequence: Synthetic oligonucleotide
  Sense strand starting at position 2584 of SEQ ID NO: 586511
ugaugaaguagugggaaau

SEQ ID NO: 723385 - RNA, 19 nt, Artificial Sequence
  Description of Artificial Sequence: Synthetic oligonucleotide
  Antisense strand to SEQ ID NO: 723384
auuucccacuacuucauca

SEQ ID NO: 723386 - RNA, 19 nt, Artificial Sequence
  Description of Artificial Sequence: Synthetic oligonucleotide
  Sense strand starting at position 3111 of SEQ ID NO: 586511
uggaacauaugauaccaau

SEQ ID NO: 723387 - RNA, 19 nt, Artificial Sequence
  Description of Artificial Sequence: Synthetic oligonucleotide
  Antisense strand to SEQ ID NO: 723386
auugguaucauauguucca

SEQ ID NO: 723388 - RNA, 19 nt, Artificial Sequence
  Description of Artificial Sequence: Synthetic oligonucleotide
  Sense strand starting at position 3123 of SEQ ID NO: 586511
uaccaauugugguaaauag

SEQ ID NO: 723389 - RNA, 19 nt, Artificial Sequence
  Description of Artificial Sequence: Synthetic oligonucleotide
  Antisense strand to SEQ ID NO: 723388
cuauuuaccacaauuggua

SEQ ID NO: 723390 - RNA, 19 nt, Artificial Sequence
  Description of Artificial Sequence: Synthetic oligonucleotide
  Sense strand starting at position 3178 of SEQ ID NO: 586511
uccuaauaccugugaguau

SEQ ID NO: 723391 - RNA, 19 nt, Artificial Sequence
  Description of Artificial Sequence: Synthetic oligonucleotide
  Antisense strand to SEQ ID NO: 723390
auacucacagguauuagga

SEQ ID NO: 723392 - RNA, 19 nt, Artificial Sequence
  Description of Artificial Sequence: Synthetic oligonucleotide
  Sense strand starting at position 3182 of SEQ ID NO: 586511
aauaccugugaguauguua

SEQ ID NO: 723393 - RNA, 19 nt, Artificial Sequence
  Description of Artificial Sequence: Synthetic oligonucleotide
  Antisense strand to SEQ ID NO: 723392
uaacauacucacagguauu

SEQ ID NO: 723394 - RNA, 19 nt, Artificial Sequence
  Description of Artificial Sequence: Synthetic oligonucleotide
  Sense strand starting at position 3190 of SEQ ID NO: 586511
ugaguauguuaccuuacag

SEQ ID NO: 723395 - RNA, 19 nt, Artificial Sequence
  Description of Artificial Sequence: Synthetic oligonucleotide
  Antisense strand to SEQ ID NO: 723394
cuguaagguaacauacuca

SEQ ID NO: 723396 - RNA, 19 nt, Artificial Sequence
  Description of Artificial Sequence: Synthetic oligonucleotide
  Sense strand starting at position 3259 of SEQ ID NO: 586511
agaguaucgugauuaucca

SEQ ID NO: 723397 - RNA, 19 nt, Artificial Sequence
  Description of Artificial Sequence: Synthetic oligonucleotide
  Antisense strand to SEQ ID NO: 723396
uggauaaucacgauacucu

SEQ ID NO: 723398 - RNA, 19 nt, Artificial Sequence
  Description of Artificial Sequence: Synthetic oligonucleotide
  Sense strand starting at position 3266 of SEQ ID NO: 586511
cgugauuauccaggugggu

SEQ ID NO: 723399 - RNA, 19 nt, Artificial Sequence
  Description of Artificial Sequence: Synthetic oligonucleotide
  Antisense strand to SEQ ID NO: 723398
acccaccuggauaaucacg

SEQ ID NO: 723400 - RNA, 19 nt, Artificial Sequence
  Description of Artificial Sequence: Synthetic oligonucleotide
  Sense strand starting at position 3268 of SEQ ID NO: 586511
ugauuauccagguggguac

SEQ ID NO: 723401 - RNA, 19 nt, Artificial Sequence
  Description of Artificial Sequence: Synthetic oligonucleotide
  Antisense strand to SEQ ID NO: 723400
guacccaccuggauaauca

SEQ ID NO: 723402 - RNA, 19 nt, Artificial Sequence
  Description of Artificial Sequence: Synthetic oligonucleotide
  Sense strand starting at position 3319 of SEQ ID NO: 586511
gcaggagggucagaguaaa

SEQ ID NO: 723403 - RNA, 19 nt, Artificial Sequence
  Description of Artificial Sequence: Synthetic oligonucleotide
  Antisense strand to SEQ ID NO: 723402
uuuacucugacccuccugc

SEQ ID NO: 723404 - RNA, 19 nt, Artificial Sequence
  Description of Artificial Sequence: Synthetic oligonucleotide
  Sense strand starting at position 3361 of SEQ ID NO: 586511
gggcaaucucuggaagcua

SEQ ID NO: 723405 - RNA, 19 nt, Artificial Sequence
  Description of Artificial Sequence: Synthetic oligonucleotide
  Antisense strand to SEQ ID NO: 723404
uagcuuccagagauugccc

SEQ ID NO: 723406 - RNA, 19 nt, Artificial Sequence
  Description of Artificial Sequence: Synthetic oligonucleotide
  Sense strand starting at position 3374 of SEQ ID NO: 586511
aagcuagaaugggcauaaa

SEQ ID NO: 723407 - RNA, 19 nt, Artificial Sequence
  Description of Artificial Sequence: Synthetic oligonucleotide
  Antisense strand to SEQ ID NO: 723406
uuuaugcccauucuagcuu

SEQ ID NO: 723408 - RNA, 19 nt, Artificial Sequence
  Description of Artificial Sequence: Synthetic oligonucleotide
  Sense strand starting at position 3428 of SEQ ID NO: 586511
ccauaacuguaagauaaug

SEQ ID NO: 723409 - RNA, 19 nt, Artificial Sequence
  Description of Artificial Sequence: Synthetic oligonucleotide
  Antisense strand to SEQ ID NO: 723408
cauuaucuuacaguuaugg

SEQ ID NO: 723410 - RNA, 19 nt, Artificial Sequence
  Description of Artificial Sequence: Synthetic oligonucleotide
  Sense strand starting at position 3475 of SEQ ID NO: 586511
uaugguuauuuguugcagu

SEQ ID NO: 723411 - RNA, 19 nt, Artificial Sequence
  Description of Artificial Sequence: Synthetic oligonucleotide
  Antisense strand to SEQ ID NO: 723410
acugcaacaaauaaccaua

SEQ ID NO: 723412 - RNA, 19 nt, Artificial Sequence
  Description of Artificial Sequence: Synthetic oligonucleotide
  Sense strand starting at position 3663 of SEQ ID NO: 586511
agugcuagaccuuagcaua

SEQ ID NO: 723413 - RNA, 19 nt, Artificial Sequence
  Description of Artificial Sequence: Synthetic oligonucleotide
  Antisense strand to SEQ ID NO: 723412
uaugcuaaggucuagcacu

SEQ ID NO: 723414 - RNA, 19 nt, Artificial Sequence
  Description of Artificial Sequence: Synthetic oligonucleotide
  Sense strand starting at position 3675 of SEQ ID NO: 586511
uagcauauccugcggaaua

SEQ ID NO: 723415 - RNA, 19 nt, Artificial Sequence
  Description of Artificial Sequence: Synthetic oligonucleotide
  Antisense strand to SEQ ID NO: 723414
uauuccgcaggauaugcua

SEQ ID NO: 723416 - RNA, 19 nt, Artificial Sequence
  Description of Artificial Sequence: Synthetic oligonucleotide
  Sense strand starting at position 3677 of SEQ ID NO: 586511
gcauauccugcggaauaaa

SEQ ID NO: 723417 - RNA, 19 nt, Artificial Sequence
  Description of Artificial Sequence: Synthetic oligonucleotide
  Antisense strand to SEQ ID NO: 723416
uuuauuccgcaggauaugc

SEQ ID NO: 723418 - RNA, 19 nt, Artificial Sequence
  Description of Artificial Sequence: Synthetic oligonucleotide
  Sense strand starting at position 3745 of SEQ ID NO: 586511
gcagaauaaccuuaauguc

SEQ ID NO: 723419 - RNA, 19 nt, Artificial Sequence
  Description of Artificial Sequence: Synthetic oligonucleotide
  Antisense strand to SEQ ID NO: 723418
gacauuaagguuauucugc

SEQ ID NO: 723420 - RNA, 19 nt, Artificial Sequence
  Description of Artificial Sequence: Synthetic oligonucleotide
  Sense strand starting at position 3906 of SEQ ID NO: 586511
aggucagagcagugaauaa

SEQ ID NO: 723421 - RNA, 19 nt, Artificial Sequence
  Description of Artificial Sequence: Synthetic oligonucleotide
  Antisense strand to SEQ ID NO: 723420
uuauucacugcucugaccu

SEQ ID NO: 723422 - RNA, 19 nt, Artificial Sequence
  Description of Artificial Sequence: Synthetic oligonucleotide
  Sense strand starting at position 275 of SEQ ID NO: 586512
ucugauauuccucagucuu

SEQ ID NO: 723423 - RNA, 19 nt, Artificial Sequence
  Description of Artificial Sequence: Synthetic oligonucleotide
  Antisense strand to SEQ ID NO: 723422
aagacugaggaauaucaga

SEQ ID NO: 723424 - RNA, 19 nt, Artificial Sequence
  Description of Artificial Sequence: Synthetic oligonucleotide
  Sense strand starting at position 292 of SEQ ID NO: 586512
uuguaaggcuuuccagaaa

SEQ ID NO: 723425 - RNA, 19 nt, Artificial Sequence
  Description of Artificial Sequence: Synthetic oligonucleotide
  Antisense strand to SEQ ID NO: 723424
uuucuggaaagccuuacaa

SEQ ID NO: 723426 - RNA, 19 nt, Artificial Sequence
  Description of Artificial Sequence: Synthetic oligonucleotide
  Sense strand starting at position 318 of SEQ ID NO: 586512
cucaguaagcccuacugaa

SEQ ID NO: 723427 - RNA, 19 nt, Artificial Sequence
  Description of Artificial Sequence: Synthetic oligonucleotide
  Antisense strand to SEQ ID NO: 723426
uucaguagggcuuacugag

SEQ ID NO: 723428 - RNA, 19 nt, Artificial Sequence
  Description of Artificial Sequence: Synthetic oligonucleotide
  Sense strand starting at position 334 of SEQ ID NO: 586512
gaagaugcauugucugaau

SEQ ID NO: 723429 - RNA, 19 nt, Artificial Sequence
  Description of Artificial Sequence: Synthetic oligonucleotide
  Antisense strand to SEQ ID NO: 723428
auucagacaaugcaucuuc

SEQ ID NO: 723430 - RNA, 19 nt, Artificial Sequence
  Description of Artificial Sequence: Synthetic oligonucleotide
  Sense strand starting at position 345 of SEQ ID NO: 586512
gucugaauguacuuccauu

SEQ ID NO: 723431 - RNA, 19 nt, Artificial Sequence
  Description of Artificial Sequence: Synthetic oligonucleotide
  Antisense strand to SEQ ID NO: 723430
aauggaaguacauucagac

SEQ ID NO: 723432 - RNA, 19 nt, Artificial Sequence
  Description of Artificial Sequence: Synthetic oligonucleotide
  Sense strand starting at position 552 of SEQ ID NO: 586512
guuggauaucccgacagac

SEQ ID NO: 723433 - RNA, 19 nt, Artificial Sequence
  Description of Artificial Sequence: Synthetic oligonucleotide
  Antisense strand to SEQ ID NO: 723432
gucugucgggauauccaac

SEQ ID NO: 723434 - RNA, 19 nt, Artificial Sequence
  Description of Artificial Sequence: Synthetic oligonucleotide
  Sense strand starting at position 1175 of SEQ ID NO: 586512
aagugaugucuccagcuaa

SEQ ID NO: 723435 - RNA, 19 nt, Artificial Sequence
  Description of Artificial Sequence: Synthetic oligonucleotide
  Antisense strand to SEQ ID NO: 723434
uuagcuggagacaucacuu

SEQ ID NO: 723436 - RNA, 19 nt, Artificial Sequence
  Description of Artificial Sequence: Synthetic oligonucleotide
  Sense strand starting at position 1542 of SEQ ID NO: 586512
acaaguuccgcugaccaau

SEQ ID NO: 723437 - RNA, 19 nt, Artificial Sequence
  Description of Artificial Sequence: Synthetic oligonucleotide
  Antisense strand to SEQ ID NO: 723436
auuggucagcggaacuugu

SEQ ID NO: 723438 - RNA, 19 nt, Artificial Sequence
  Description of Artificial Sequence: Synthetic oligonucleotide
  Sense strand starting at position 1577 of SEQ ID NO: 586512
gcaguuauguguacgaguu

SEQ ID NO: 723439 - RNA, 19 nt, Artificial Sequence
  Description of Artificial Sequence: Synthetic oligonucleotide
  Antisense strand to SEQ ID NO: 723438
aacucguacacauaacugc

SEQ ID NO: 723440 - RNA, 19 nt, Artificial Sequence
  Description of Artificial Sequence: Synthetic oligonucleotide
  Sense strand starting at position 1775 of SEQ ID NO: 586512
guuuguggaggugauauaa

SEQ ID NO: 723441 - RNA, 19 nt, Artificial Sequence
  Description of Artificial Sequence: Synthetic oligonucleotide
  Antisense strand to SEQ ID NO: 723440
uuauaucaccuccacaaac

SEQ ID NO: 723442 - RNA, 19 nt, Artificial Sequence
  Description of Artificial Sequence: Synthetic oligonucleotide
  Sense strand starting at position 1945 of SEQ ID NO: 586512
guaauaaucugaucuugag

SEQ ID NO: 723443 - RNA, 19 nt, Artificial Sequence
  Description of Artificial Sequence: Synthetic oligonucleotide
  Antisense strand to SEQ ID NO: 723442
cucaagaucagauuauuac

SEQ ID NO: 723444 - RNA, 19 nt, Artificial Sequence
  Description of Artificial Sequence: Synthetic oligonucleotide
  Sense strand starting at position 1988 of SEQ ID NO: 586512
ggguggugagauugugaca

SEQ ID NO: 723445 - RNA, 19 nt, Artificial Sequence
  Description of Artificial Sequence: Synthetic oligonucleotide
  Antisense strand to SEQ ID NO: 723444
ugucacaaucucaccaccc

SEQ ID NO: 723446 - RNA, 19 nt, Artificial Sequence
  Description of Artificial Sequence: Synthetic oligonucleotide
  Sense strand starting at position 2021 of SEQ ID NO: 586512
ggccaaucagcauacagau

SEQ ID NO: 723447 - RNA, 19 nt, Artificial Sequence
  Description of Artificial Sequence: Synthetic oligonucleotide
  Antisense strand to SEQ ID NO: 723446
aucuguaugcugauuggcc

SEQ ID NO: 723448 - RNA, 19 nt, Artificial Sequence
  Description of Artificial Sequence: Synthetic oligonucleotide
  Sense strand starting at position 2035 of SEQ ID NO: 586512
cagauaauauggguuaauu

SEQ ID NO: 723449 - RNA, 19 nt, Artificial Sequence
  Description of Artificial Sequence: Synthetic oligonucleotide
  Antisense strand to SEQ ID NO: 723448
aauuaacccauauuaucug

SEQ ID NO: 723450 - RNA, 19 nt, Artificial Sequence
  Description of Artificial Sequence: Synthetic oligonucleotide
  Sense strand starting at position 2070 of SEQ ID NO: 586512
auuggaugagccgagguaa

SEQ ID NO: 723451 - RNA, 19 nt, Artificial Sequence
  Description of Artificial Sequence: Synthetic oligonucleotide
  Antisense strand to SEQ ID NO: 723450
uuaccucggcucauccaau

SEQ ID NO: 723452 - RNA, 19 nt, Artificial Sequence
  Description of Artificial Sequence: Synthetic oligonucleotide
  Sense strand starting at position 2082 of SEQ ID NO: 586512
gagguaaagccuuaucuug

SEQ ID NO: 723453 - RNA, 19 nt, Artificial Sequence
  Description of Artificial Sequence: Synthetic oligonucleotide
  Antisense strand to SEQ ID NO: 723452
caagauaaggcuuuaccuc

SEQ ID NO: 723454 - RNA, 19 nt, Artificial Sequence
  Description of Artificial Sequence: Synthetic oligonucleotide
  Sense strand starting at position 2084 of SEQ ID NO: 586512
gguaaagccuuaucuugau

SEQ ID NO: 723455 - RNA, 19 nt, Artificial Sequence
  Description of Artificial Sequence: Synthetic oligonucleotide
  Antisense strand to SEQ ID NO: 723454
aucaagauaaggcuuuacc

SEQ ID NO: 723456 - RNA, 19 nt, Artificial Sequence
  Description of Artificial Sequence: Synthetic oligonucleotide
  Sense strand starting at position 2102 of SEQ ID NO: 586512
ugucacagucguuacacaa

SEQ ID NO: 723457 - RNA, 19 nt, Artificial Sequence
  Description of Artificial Sequence: Synthetic oligonucleotide
  Antisense strand to SEQ ID NO: 723456
uuguguaacgacugugaca

SEQ ID NO: 723458 - RNA, 19 nt, Artificial Sequence
  Description of Artificial Sequence: Synthetic oligonucleotide
  Sense strand starting at position 2160 of SEQ ID NO: 586512
cugauuuguucuugaauuu

SEQ ID NO: 723459 - RNA, 19 nt, Artificial Sequence
  Description of Artificial Sequence: Synthetic oligonucleotide
  Antisense strand to SEQ ID NO: 723458
aaauucaagaacaaaucag

SEQ ID NO: 723460 - RNA, 19 nt, Artificial Sequence
  Description of Artificial Sequence: Synthetic oligonucleotide
  Sense strand starting at position 2171 of SEQ ID NO: 586512
uugaauuuccuacguccau

SEQ ID NO: 723461 - RNA, 19 nt, Artificial Sequence
  Description of Artificial Sequence: Synthetic oligonucleotide
  Antisense strand to SEQ ID NO: 723460
auggacguaggaaauucaa

SEQ ID NO: 723462 - RNA, 19 nt, Artificial Sequence
  Description of Artificial Sequence: Synthetic oligonucleotide
  Sense strand starting at position 2197 of SEQ ID NO: 586512
cauggauaauaguuuguuu

SEQ ID NO: 723463 - RNA, 19 nt, Artificial Sequence
  Description of Artificial Sequence: Synthetic oligonucleotide
  Antisense strand to SEQ ID NO: 723462
aaacaaacuauuauccaug

SEQ ID NO: 723464 - RNA, 19 nt, Artificial Sequence
  Description of Artificial Sequence: Synthetic oligonucleotide
  Sense strand starting at position 2484 of SEQ ID NO: 586512
agaguuauuuccugaauuu

SEQ ID NO: 723465 - RNA, 19 nt, Artificial Sequence
  Description of Artificial Sequence: Synthetic oligonucleotide
  Antisense strand to SEQ ID NO: 723464
aaauucaggaaauaacucu

SEQ ID NO: 723466 - RNA, 19 nt, Artificial Sequence
  Description of Artificial Sequence: Synthetic oligonucleotide
  Sense strand starting at position 2695 of SEQ ID NO: 586512
agucuuauucuuuaagcag

SEQ ID NO: 723467 - RNA, 19 nt, Artificial Sequence
  Description of Artificial Sequence: Synthetic oligonucleotide
  Antisense strand to SEQ ID NO: 723466
cugcuuaaagaauaagacu

SEQ ID NO: 723468 - RNA, 19 nt, Artificial Sequence
  Description of Artificial Sequence: Synthetic oligonucleotide
  Sense strand starting at position 2701 of SEQ ID NO: 586512
auucuuuaagcagauauug

SEQ ID NO: 723469 - RNA, 19 nt, Artificial Sequence
  Description of Artificial Sequence: Synthetic oligonucleotide
  Antisense strand to SEQ ID NO: 723468
caauaucugcuuaaagaau

SEQ ID NO: 723470 - RNA, 19 nt, Artificial Sequence
  Description of Artificial Sequence: Synthetic oligonucleotide
  Sense strand starting at position 2709 of SEQ ID NO: 586512
agcagauauugauuccuua

SEQ ID NO: 723471 - RNA, 19 nt, Artificial Sequence
  Description of Artificial Sequence: Synthetic oligonucleotide
  Antisense strand to SEQ ID NO: 723470
uaaggaaucaauaucugcu

SEQ ID NO: 723472 - RNA, 19 nt, Artificial Sequence
  Description of Artificial Sequence: Synthetic oligonucleotide
  Sense strand starting at position 2740 of SEQ ID NO: 586512
aggguauauguguaugcaa

SEQ ID NO: 723473 - RNA, 19 nt, Artificial Sequence
  Description of Artificial Sequence: Synthetic oligonucleotide
  Antisense strand to SEQ ID NO: 723472
uugcauacacauauacccu

SEQ ID NO: 723474 - RNA, 19 nt, Artificial Sequence
  Description of Artificial Sequence: Synthetic oligonucleotide
  Sense strand starting at position 2747 of SEQ ID NO: 586512
auguguaugcaauauucuu

SEQ ID NO: 723475 - RNA, 19 nt, Artificial Sequence
  Description of Artificial Sequence: Synthetic oligonucleotide
  Antisense strand to SEQ ID NO: 723474
aagaauauugcauacacau

SEQ ID NO: 723476 - RNA, 19 nt, Artificial Sequence
  Description of Artificial Sequence: Synthetic oligonucleotide
  Sense strand starting at position 2773 of SEQ ID NO: 586512
cacaucucaggguauagua

SEQ ID NO: 723477 - RNA, 19 nt, Artificial Sequence
  Description of Artificial Sequence: Synthetic oligonucleotide
  Antisense strand to SEQ ID NO: 723476
uacuauacccugagaugug

SEQ ID NO: 723478 - RNA, 19 nt, Artificial Sequence
  Description of Artificial Sequence: Synthetic oligonucleotide
  Sense strand starting at position 2850 of SEQ ID NO: 586512
ccagcuguuggauaagaau

SEQ ID NO: 723479 - RNA, 19 nt, Artificial Sequence
  Description of Artificial Sequence: Synthetic oligonucleotide
  Antisense strand to SEQ ID NO: 723478
auucuuauccaacagcugg

SEQ ID NO: 723480 - RNA, 19 nt, Artificial Sequence
  Description of Artificial Sequence: Synthetic oligonucleotide
  Sense strand starting at position 2856 of SEQ ID NO: 586512
guuggauaagaaugucauu

SEQ ID NO: 723481 - RNA, 19 nt, Artificial Sequence
  Description of Artificial Sequence: Synthetic oligonucleotide
  Antisense strand to SEQ ID NO: 723480
aaugacauucuuauccaac

SEQ ID NO: 723482 - RNA, 19 nt, Artificial Sequence
  Description of Artificial Sequence: Synthetic oligonucleotide
  Sense strand starting at position 2925 of SEQ ID NO: 586512
gcucauuaacucuacugga

SEQ ID NO: 723483 - RNA, 19 nt, Artificial Sequence
  Description of Artificial Sequence: Synthetic oligonucleotide
  Antisense strand to SEQ ID NO: 723482
uccaguagaguuaaugagc

SEQ ID NO: 723484 - RNA, 19 nt, Artificial Sequence
  Description of Artificial Sequence: Synthetic oligonucleotide
  Sense strand starting at position 3060 of SEQ ID NO: 586512
uuuagaucauaggcuuagu

SEQ ID NO: 723485 - RNA, 19 nt, Artificial Sequence
  Description of Artificial Sequence: Synthetic oligonucleotide
  Antisense strand to SEQ ID NO: 723484
acuaagccuaugaucuaaa

SEQ ID NO: 723486 - RNA, 19 nt, Artificial Sequence
  Description of Artificial Sequence: Synthetic oligonucleotide
  Sense strand starting at position 3188 of SEQ ID NO: 586512
ucuaauccuuggguuugaa

SEQ ID NO: 723487 - RNA, 19 nt, Artificial Sequence
  Description of Artificial Sequence: Synthetic oligonucleotide
  Antisense strand to SEQ ID NO: 723486
uucaaacccaaggauuaga

SEQ ID NO: 723488 - RNA, 19 nt, Artificial Sequence
  Description of Artificial Sequence: Synthetic oligonucleotide
  Sense strand starting at position 3220 of SEQ ID NO: 586512
uuacaaacuguuggaauau

SEQ ID NO: 723489 - RNA, 19 nt, Artificial Sequence
  Description of Artificial Sequence: Synthetic oligonucleotide
  Antisense strand to SEQ ID NO: 723488
auauuccaacaguuuguaa

SEQ ID NO: 723490 - RNA, 19 nt, Artificial Sequence
  Description of Artificial Sequence: Synthetic oligonucleotide
  Sense strand starting at position 3247 of SEQ ID NO: 586512
cuauauugaucaguguauu

SEQ ID NO: 723491 - RNA, 19 nt, Artificial Sequence
  Description of Artificial Sequence: Synthetic oligonucleotide
  Antisense strand to SEQ ID NO: 723490
aauacacugaucaauauag

SEQ ID NO: 723492 - RNA, 19 nt, Artificial Sequence
  Description of Artificial Sequence: Synthetic oligonucleotide
  Sense strand starting at position 3283 of SEQ ID NO: 586512
uugcuuaauuugguucuua

SEQ ID NO: 723493 - RNA, 19 nt, Artificial Sequence
  Description of Artificial Sequence: Synthetic oligonucleotide
  Antisense strand to SEQ ID NO: 723492
uaagaaccaaauuaagcaa

SEQ ID NO: 723494 - RNA, 19 nt, Artificial Sequence
  Description of Artificial Sequence: Synthetic oligonucleotide
  Sense strand starting at position 3284 of SEQ ID NO: 586512
ugcuuaauuugguucuuau

SEQ ID NO: 723495 - RNA, 19 nt, Artificial Sequence
  Description of Artificial Sequence: Synthetic oligonucleotide
  Antisense strand to SEQ ID NO: 723494
auaagaaccaaauuaagca

SEQ ID NO: 723496 - RNA, 19 nt, Artificial Sequence
  Description of Artificial Sequence: Synthetic oligonucleotide
  Sense strand starting at position 3385 of SEQ ID NO: 586512
auaguaucaugaucagcaa

SEQ ID NO: 723497 - RNA, 19 nt, Artificial Sequence
  Description of Artificial Sequence: Synthetic oligonucleotide
  Antisense strand to SEQ ID NO: 723496
uugcugaucaugauacuau

SEQ ID NO: 723498 - RNA, 19 nt, Artificial Sequence
  Description of Artificial Sequence: Synthetic oligonucleotide
  Sense strand starting at position 3419 of SEQ ID NO: 586512
cugugcauuguuuacauga

SEQ ID NO: 723499 - RNA, 19 nt, Artificial Sequence
  Description of Artificial Sequence: Synthetic oligonucleotide
  Antisense strand to SEQ ID NO: 723498
ucauguaaacaaugcacag

SEQ ID NO: 723500 - RNA, 19 nt, Artificial Sequence
  Description of Artificial Sequence: Synthetic oligonucleotide
  Sense strand starting at position 3424 of SEQ ID NO: 586512
cauuguuuacaugaaagug

SEQ ID NO: 723501 - RNA, 19 nt, Artificial Sequence
  Description of Artificial Sequence: Synthetic oligonucleotide
  Antisense strand to SEQ ID NO: 723500
cacuuucauguaaacaaug

SEQ ID NO: 723502 - RNA, 19 nt, Artificial Sequence
  Description of Artificial Sequence: Synthetic oligonucleotide
  Sense strand starting at position 5 of SEQ ID NO: 586513
ggugaugggcgauagcuaa

SEQ ID NO: 723503 - RNA, 19 nt, Artificial Sequence
  Description of Artificial Sequence: Synthetic oligonucleotide
  Antisense strand to SEQ ID NO: 723502
uuagcuaucgcccaucacc

SEQ ID NO: 723504 - RNA, 19 nt, Artificial Sequence
  Description of Artificial Sequence: Synthetic oligonucleotide
  Sense strand starting at position 9 of SEQ ID NO: 586513
augggcgauagcuaaauau

SEQ ID NO: 723505 - RNA, 19 nt, Artificial Sequence
  Description of Artificial Sequence: Synthetic oligonucleotide
  Antisense strand to SEQ ID NO: 723504
auauuuagcuaucgcccau

SEQ ID NO: 723506 - RNA, 19 nt, Artificial Sequence
  Description of Artificial Sequence: Synthetic oligonucleotide
  Sense strand starting at position 114 of SEQ ID NO: 586513
cccauaaguccagguagaa

SEQ ID NO: 723507 - RNA, 19 nt, Artificial Sequence
  Description of Artificial Sequence: Synthetic oligonucleotide
  Antisense strand to SEQ ID NO: 723506
uucuaccuggacuuauggg

SEQ ID NO: 723508 - RNA, 19 nt, Artificial Sequence
  Description of Artificial Sequence: Synthetic oligonucleotide
  Sense strand starting at position 325 of SEQ ID NO: 586513
gcuguuagaggcgagagau

SEQ ID NO: 723509 - RNA, 19 nt, Artificial Sequence
  Description of Artificial Sequence: Synthetic oligonucleotide
  Antisense strand to SEQ ID NO: 723508
aucucucgccucuaacagc

SEQ ID NO: 723510 - RNA, 19 nt, Artificial Sequence
  Description of Artificial Sequence: Synthetic oligonucleotide
  Sense strand starting at position 400 of SEQ ID NO: 586513
aggauacagccucagucaa

SEQ ID NO: 723511 - RNA, 19 nt, Artificial Sequence
  Description of Artificial Sequence: Synthetic oligonucleotide
  Antisense strand to SEQ ID NO: 723510
uugacugaggcuguauccu

SEQ ID NO: 723512 - RNA, 19 nt, Artificial Sequence
  Description of Artificial Sequence: Synthetic oligonucleotide
  Sense strand starting at position 496 of SEQ ID NO: 586513
ugaucugaucugcagucau

SEQ ID NO: 723513 - RNA, 19 nt, Artificial Sequence
  Description of Artificial Sequence: Synthetic oligonucleotide
  Antisense strand to SEQ ID NO: 723512
augacugcagaucagauca

SEQ ID NO: 723514 - RNA, 19 nt, Artificial Sequence
  Description of Artificial Sequence: Synthetic oligonucleotide
  Sense strand starting at position 539 of SEQ ID NO: 586513
uugccaucagaauaucuga

SEQ ID NO: 723515 - RNA, 19 nt, Artificial Sequence
  Description of Artificial Sequence: Synthetic oligonucleotide
  Antisense strand to SEQ ID NO: 723514
ucagauauucugauggcaa

SEQ ID NO: 723516 - RNA, 19 nt, Artificial Sequence
  Description of Artificial Sequence: Synthetic oligonucleotide
  Sense strand starting at position 575 of SEQ ID NO: 586513
accuaucaguucuuaaguu

SEQ ID NO: 723517 - RNA, 19 nt, Artificial Sequence
  Description of Artificial Sequence: Synthetic oligonucleotide
  Antisense strand to SEQ ID NO: 723516
aacuuaagaacugauaggu

SEQ ID NO: 723518 - RNA, 19 nt, Artificial Sequence
  Description of Artificial Sequence: Synthetic oligonucleotide
  Sense strand starting at position 579 of SEQ ID NO: 586513
aucaguucuuaaguuaaca

SEQ ID NO: 723519 - RNA, 19 nt, Artificial Sequence
  Description of Artificial Sequence: Synthetic oligonucleotide
  Antisense strand to SEQ ID NO: 723518
uguuaacuuaagaacugau

SEQ ID NO: 723520 - RNA, 19 nt, Artificial Sequence
  Description of Artificial Sequence: Synthetic oligonucleotide
  Sense strand starting at position 709 of SEQ ID NO: 586513
agagaauuggcuuguuuag

SEQ ID NO: 723521 - RNA, 19 nt, Artificial Sequence
  Description of Artificial Sequence: Synthetic oligonucleotide
  Antisense strand to SEQ ID NO: 723520
cuaaacaagccaauucucu

SEQ ID NO: 723522 - RNA, 19 nt, Artificial Sequence
  Description of Artificial Sequence: Synthetic oligonucleotide
  Sense strand starting at position 771 of SEQ ID NO: 586513
auauacauuugauagggua

SEQ ID NO: 723523 - RNA, 19 nt, Artificial Sequence
  Description of Artificial Sequence: Synthetic oligonucleotide
  Antisense strand to SEQ ID NO: 723522
uacccuaucaaauguauau

SEQ ID NO: 723524 - RNA, 19 nt, Artificial Sequence
  Description of Artificial Sequence: Synthetic oligonucleotide
  Sense strand starting at position 831 of SEQ ID NO: 586513
uaugccaguccaggaauua

SEQ ID NO: 723525 - RNA, 19 nt, Artificial Sequence
  Description of Artificial Sequence: Synthetic oligonucleotide
  Antisense strand to SEQ ID NO: 723524
uaauuccuggacuggcaua

SEQ ID NO: 723526 - RNA, 19 nt, Artificial Sequence
  Description of Artificial Sequence: Synthetic oligonucleotide
  Sense strand starting at position 832 of SEQ ID NO: 586513
augccaguccaggaauuaa

SEQ ID NO: 723527 - RNA, 19 nt, Artificial Sequence
  Description of Artificial Sequence: Synthetic oligonucleotide
  Antisense strand to SEQ ID NO: 723526
uuaauuccuggacuggcau

SEQ ID NO: 723528 - RNA, 19 nt, Artificial Sequence
  Description of Artificial Sequence: Synthetic oligonucleotide
  Sense strand starting at position 854 of SEQ ID NO: 586513
cuagaauugcaauggaauc

SEQ ID NO: 723529 - RNA, 19 nt, Artificial Sequence
  Description of Artificial Sequence: Synthetic oligonucleotide
  Antisense strand to SEQ ID NO: 723528
gauuccauugcaauucuag

SEQ ID NO: 723530 - RNA, 19 nt, Artificial Sequence
  Description of Artificial Sequence: Synthetic oligonucleotide
  Sense strand starting at position 1082 of SEQ ID NO: 586513
ggaacuuacuugucccaag

SEQ ID NO: 723531 - RNA, 19 nt, Artificial Sequence
  Description of Artificial Sequence: Synthetic oligonucleotide
  Antisense strand to SEQ ID NO: 723530
cuugggacaaguaaguucc

SEQ ID NO: 723532 - RNA, 19 nt, Artificial Sequence
  Description of Artificial Sequence: Synthetic oligonucleotide
  Sense strand starting at position 1287 of SEQ ID NO: 586513
ccuguauuucuugggcaau

SEQ ID NO: 723533 - RNA, 19 nt, Artificial Sequence
  Description of Artificial Sequence: Synthetic oligonucleotide
  Antisense strand to SEQ ID NO: 723532
auugcccaagaaauacagg

SEQ ID NO: 723534 - RNA, 19 nt, Artificial Sequence
  Description of Artificial Sequence: Synthetic oligonucleotide
  Sense strand starting at position 1325 of SEQ ID NO: 586513
cugauaaccuuuguugcaa

SEQ ID NO: 723535 - RNA, 19 nt, Artificial Sequence
  Description of Artificial Sequence: Synthetic oligonucleotide
  Antisense strand to SEQ ID NO: 723534
uugcaacaaagguuaucag

SEQ ID NO: 723536 - RNA, 19 nt, Artificial Sequence
  Description of Artificial Sequence: Synthetic oligonucleotide
  Sense strand starting at position 1326 of SEQ ID NO: 586513
ugauaaccuuuguugcaaa

SEQ ID NO: 723537 - RNA, 19 nt, Artificial Sequence
  Description of Artificial Sequence: Synthetic oligonucleotide
  Antisense strand to SEQ ID NO: 723536
uuugcaacaaagguuauca

SEQ ID NO: 723538 - RNA, 19 nt, Artificial Sequence
  Description of Artificial Sequence: Synthetic oligonucleotide
  Sense strand starting at position 1715 of SEQ ID NO: 586513
ucugauauuccucagucuu

SEQ ID NO: 723539 - RNA, 19 nt, Artificial Sequence
  Description of Artificial Sequence: Synthetic oligonucleotide
  Antisense strand to SEQ ID NO: 723538
aagacugaggaauaucaga

SEQ ID NO: 723540 - RNA, 19 nt, Artificial Sequence
  Description of Artificial Sequence: Synthetic oligonucleotide
  Sense strand starting at position 1732 of SEQ ID NO: 586513
uuguaaggcuuuccagaaa

SEQ ID NO: 723541 - RNA, 19 nt, Artificial Sequence
  Description of Artificial Sequence: Synthetic oligonucleotide
  Antisense strand to SEQ ID NO: 723540
uuucuggaaagccuuacaa

SEQ ID NO: 723542 - RNA, 19 nt, Artificial Sequence
  Description of Artificial Sequence: Synthetic oligonucleotide
  Sense strand starting at position 1758 of SEQ ID NO: 586513
cucaguaagcccuacugaa

SEQ ID NO: 723543 - RNA, 19 nt, Artificial Sequence
  Description of Artificial Sequence: Synthetic oligonucleotide
  Antisense strand to SEQ ID NO: 723542
uucaguagggcuuacugag

SEQ ID NO: 723544 - RNA, 19 nt, Artificial Sequence
  Description of Artificial Sequence: Synthetic oligonucleotide
  Sense strand starting at position 1774 of SEQ ID NO: 586513
gaagaugcauugucugaau

SEQ ID NO: 723545 - RNA, 19 nt, Artificial Sequence
  Description of Artificial Sequence: Synthetic oligonucleotide
  Antisense strand to SEQ ID NO: 723544
auucagacaaugcaucuuc

SEQ ID NO: 723546 - RNA, 19 nt, Artificial Sequence
  Description of Artificial Sequence: Synthetic oligonucleotide
  Sense strand starting at position 1785 of SEQ ID NO: 586513
gucugaauguacuuccauu

SEQ ID NO: 723547 - RNA, 19 nt, Artificial Sequence
  Description of Artificial Sequence: Synthetic oligonucleotide
  Antisense strand to SEQ ID NO: 723546
aauggaaguacauucagac

SEQ ID NO: 723548 - RNA, 19 nt, Artificial Sequence
  Description of Artificial Sequence: Synthetic oligonucleotide
  Sense strand starting at position 1992 of SEQ ID NO: 586513
guuggauaucccgacagac

SEQ ID NO: 723549 - RNA, 19 nt, Artificial Sequence
  Description of Artificial Sequence: Synthetic oligonucleotide
  Antisense strand to SEQ ID NO: 723548
gucugucgggauauccaac

SEQ ID NO: 723550 - RNA, 19 nt, Artificial Sequence
  Description of Artificial Sequence: Synthetic oligonucleotide
  Sense strand starting at position 2615 of SEQ ID NO: 586513
aagugaugucuccagcuaa

SEQ ID NO: 723551 - RNA, 19 nt, Artificial Sequence
  Description of Artificial Sequence: Synthetic oligonucleotide
  Antisense strand to SEQ ID NO: 723550
uuagcuggagacaucacuu

SEQ ID NO: 723552 - RNA, 19 nt, Artificial Sequence
  Description of Artificial Sequence: Synthetic oligonucleotide
  Sense strand starting at position 2982 of SEQ ID NO: 586513
acaaguuccgcugaccaau

SEQ ID NO: 723553 - RNA, 19 nt, Artificial Sequence
  Description of Artificial Sequence: Synthetic oligonucleotide
  Antisense strand to SEQ ID NO: 723552
auuggucagcggaacuugu

SEQ ID NO: 723554 - RNA, 19 nt, Artificial Sequence
  Description of Artificial Sequence: Synthetic oligonucleotide
  Sense strand starting at position 3017 of SEQ ID NO: 586513
gcaguuauguguacgaguu

SEQ ID NO: 723555 - RNA, 19 nt, Artificial Sequence
  Description of Artificial Sequence: Synthetic oligonucleotide
  Antisense strand to SEQ ID NO: 723554
aacucguacacauaacugc

SEQ ID NO: 723556 - RNA, 19 nt, Artificial Sequence
  Description of Artificial Sequence: Synthetic oligonucleotide
  Sense strand starting at position 3215 of SEQ ID NO: 586513
guuuguggaggugauauaa

SEQ ID NO: 723557 - RNA, 19 nt, Artificial Sequence
  Description of Artificial Sequence: Synthetic oligonucleotide
  Antisense strand to SEQ ID NO: 723556
uuauaucaccuccacaaac

SEQ ID NO: 723558 - RNA, 19 nt, Artificial Sequence
  Description of Artificial Sequence: Synthetic oligonucleotide
  Sense strand starting at position 3385 of SEQ ID NO: 586513
guaauaaucugaucuugag

SEQ ID NO: 723559 - RNA, 19 nt, Artificial Sequence
  Description of Artificial Sequence: Synthetic oligonucleotide
  Antisense strand to SEQ ID NO: 723558
cucaagaucagauuauuac

SEQ ID NO: 723560 - RNA, 19 nt, Artificial Sequence
  Description of Artificial Sequence: Synthetic oligonucleotide
  Sense strand starting at position 3428 of SEQ ID NO: 586513
ggguggugagauugugaca

SEQ ID NO: 723561 - RNA, 19 nt, Artificial Sequence
  Description of Artificial Sequence: Synthetic oligonucleotide
  Antisense strand to SEQ ID NO: 723560
ugucacaaucucaccaccc

SEQ ID NO: 723562 - RNA, 19 nt, Artificial Sequence
  Description of Artificial Sequence: Synthetic oligonucleotide
  Sense strand starting at position 3461 of SEQ ID NO: 586513
ggccaaucagcauacagau

SEQ ID NO: 723563 - RNA, 19 nt, Artificial Sequence
  Description of Artificial Sequence: Synthetic oligonucleotide
  Antisense strand to SEQ ID NO: 723562
aucuguaugcugauuggcc

SEQ ID NO: 723564 - RNA, 19 nt, Artificial Sequence
  Description of Artificial Sequence: Synthetic oligonucleotide
  Sense strand starting at position 3475 of SEQ ID NO: 586513
cagauaauauggguuaauu

SEQ ID NO: 723565 - RNA, 19 nt, Artificial Sequence
  Description of Artificial Sequence: Synthetic oligonucleotide
  Antisense strand to SEQ ID NO: 723564
aauuaacccauauuaucug

SEQ ID NO: 723566 - RNA, 19 nt, Artificial Sequence
  Description of Artificial Sequence: Synthetic oligonucleotide
  Sense strand starting at position 3510 of SEQ ID NO: 586513
auuggaugagccgagguaa

SEQ ID NO: 723567 - RNA, 19 nt, Artificial Sequence
  Description of Artificial Sequence: Synthetic oligonucleotide
  Antisense strand to SEQ ID NO: 723566
uuaccucggcucauccaau

SEQ ID NO: 723568 - RNA, 19 nt, Artificial Sequence
  Description of Artificial Sequence: Synthetic oligonucleotide
  Sense strand starting at position 3522 of SEQ ID NO: 586513
gagguaaagccuuaucuug

SEQ ID NO: 723569 - RNA, 19 nt, Artificial Sequence
  Description of Artificial Sequence: Synthetic oligonucleotide
  Antisense strand to SEQ ID NO: 723568
caagauaaggcuuuaccuc

SEQ ID NO: 723570 - RNA, 19 nt, Artificial Sequence
  Description of Artificial Sequence: Synthetic oligonucleotide
  Sense strand starting at position 3524 of SEQ ID NO: 586513
gguaaagccuuaucuugau

SEQ ID NO: 723571 - RNA, 19 nt, Artificial Sequence
  Description of Artificial Sequence: Synthetic oligonucleotide
  Antisense strand to SEQ ID NO: 723570
aucaagauaaggcuuuacc

SEQ ID NO: 723572 - RNA, 19 nt, Artificial Sequence
  Description of Artificial Sequence: Synthetic oligonucleotide
  Sense strand starting at position 3542 of SEQ ID NO: 586513
ugucacagucguuacacaa

SEQ ID NO: 723573 - RNA, 19 nt, Artificial Sequence
  Description of Artificial Sequence: Synthetic oligonucleotide
  Antisense strand to SEQ ID NO: 723572
uuguguaacgacugugaca

SEQ ID NO: 723574 - RNA, 19 nt, Artificial Sequence
  Description of Artificial Sequence: Synthetic oligonucleotide
  Sense strand starting at position 3600 of SEQ ID NO: 586513
cugauuuguucuugaauuu

SEQ ID NO: 723575 - RNA, 19 nt, Artificial Sequence
  Description of Artificial Sequence: Synthetic oligonucleotide
  Antisense strand to SEQ ID NO: 723574
aaauucaagaacaaaucag

SEQ ID NO: 723576 - RNA, 19 nt, Artificial Sequence
  Description of Artificial Sequence: Synthetic oligonucleotide
  Sense strand starting at position 3611 of SEQ ID NO: 586513
uugaauuuccuacguccau

SEQ ID NO: 723577 - RNA, 19 nt, Artificial Sequence
  Description of Artificial Sequence: Synthetic oligonucleotide
  Antisense strand to SEQ ID NO: 723576
auggacguaggaaauucaa

SEQ ID NO: 723578 - RNA, 19 nt, Artificial Sequence
  Description of Artificial Sequence: Synthetic oligonucleotide
  Sense strand starting at position 3637 of SEQ ID NO: 586513
cauggauaauaguuuguuu

SEQ ID NO: 723579 - RNA, 19 nt, Artificial Sequence
  Description of Artificial Sequence: Synthetic oligonucleotide
  Antisense strand to SEQ ID NO: 723578
aaacaaacuauuauccaug

SEQ ID NO: 723580 - RNA, 19 nt, Artificial Sequence
  Description of Artificial Sequence: Synthetic oligonucleotide
  Sense strand starting at position 3924 of SEQ ID NO: 586513
agaguuauuuccugaauuu

SEQ ID NO: 723581 - RNA, 19 nt, Artificial Sequence
  Description of Artificial Sequence: Synthetic oligonucleotide
  Antisense strand to SEQ ID NO: 723580
aaauucaggaaauaacucu

SEQ ID NO: 723582 - RNA, 19 nt, Artificial Sequence
  Description of Artificial Sequence: Synthetic oligonucleotide
  Sense strand starting at position 176 of SEQ ID NO: 586514
gcuguuagaggcgagagau

SEQ ID NO: 723583 - RNA, 19 nt, Artificial Sequence
  Description of Artificial Sequence: Synthetic oligonucleotide
  Antisense strand to SEQ ID NO: 723582
aucucucgccucuaacagc

SEQ ID NO: 723584 - RNA, 19 nt, Artificial Sequence
  Description of Artificial Sequence: Synthetic oligonucleotide
  Sense strand starting at position 251 of SEQ ID NO: 586514
aggauacagccucagucaa

SEQ ID NO: 723585 - RNA, 19 nt, Artificial Sequence
  Description of Artificial Sequence: Synthetic oligonucleotide
  Antisense strand to SEQ ID NO: 723584
uugacugaggcuguauccu

SEQ ID NO: 723586 - RNA, 19 nt, Artificial Sequence
  Description of Artificial Sequence: Synthetic oligonucleotide
  Sense strand starting at position 253 of SEQ ID NO: 586514
gauacagccucagucaagu

SEQ ID NO: 723587 - RNA, 19 nt, Artificial Sequence
  Description of Artificial Sequence: Synthetic oligonucleotide
  Antisense strand to SEQ ID NO: 723586
acuugacugaggcuguauc

SEQ ID NO: 723588 - RNA, 19 nt, Artificial Sequence
  Description of Artificial Sequence: Synthetic oligonucleotide
  Sense strand starting at position 347 of SEQ ID NO: 586514
ugaucugaucugcagucau

SEQ ID NO: 723589 - RNA, 19 nt, Artificial Sequence
  Description of Artificial Sequence: Synthetic oligonucleotide
  Antisense strand to SEQ ID NO: 723588
augacugcagaucagauca

SEQ ID NO: 723590 - RNA, 19 nt, Artificial Sequence
  Description of Artificial Sequence: Synthetic oligonucleotide
  Sense strand starting at position 390 of SEQ ID NO: 586514
uugccaucagaauaucuga

SEQ ID NO: 723591 - RNA, 19 nt, Artificial Sequence
  Description of Artificial Sequence: Synthetic oligonucleotide
  Antisense strand to SEQ ID NO: 723590
ucagauauucugauggcaa

SEQ ID NO: 723592 - RNA, 19 nt, Artificial Sequence
  Description of Artificial Sequence: Synthetic oligonucleotide
  Sense strand starting at position 426 of SEQ ID NO: 586514
accuaucaguucuuaaguu

SEQ ID NO: 723593 - RNA, 19 nt, Artificial Sequence
  Description of Artificial Sequence: Synthetic oligonucleotide
  Antisense strand to SEQ ID NO: 723592
aacuuaagaacugauaggu

SEQ ID NO: 723594 - RNA, 19 nt, Artificial Sequence
  Description of Artificial Sequence: Synthetic oligonucleotide
  Sense strand starting at position 430 of SEQ ID NO: 586514
aucaguucuuaaguuaaca

SEQ ID NO: 723595 - RNA, 19 nt, Artificial Sequence
  Description of Artificial Sequence: Synthetic oligonucleotide
  Antisense strand to SEQ ID NO: 723594
uguuaacuuaagaacugau

SEQ ID NO: 723596 - RNA, 19 nt, Artificial Sequence
  Description of Artificial Sequence: Synthetic oligonucleotide
  Sense strand starting at position 560 of SEQ ID NO: 586514
agagaauuggcuuguuuag

SEQ ID NO: 723597 - RNA, 19 nt, Artificial Sequence
  Description of Artificial Sequence: Synthetic oligonucleotide
  Antisense strand to SEQ ID NO: 723596
cuaaacaagccaauucucu

SEQ ID NO: 723598 - RNA, 19 nt, Artificial Sequence
  Description of Artificial Sequence: Synthetic oligonucleotide
  Sense strand starting at position 622 of SEQ ID NO: 586514
auauacauuugauagggua

SEQ ID NO: 723599 - RNA, 19 nt, Artificial Sequence
  Description of Artificial Sequence: Synthetic oligonucleotide
  Antisense strand to SEQ ID NO: 723598
uacccuaucaaauguauau

SEQ ID NO: 723600 - RNA, 19 nt, Artificial Sequence
  Description of Artificial Sequence: Synthetic oligonucleotide
  Sense strand starting at position 682 of SEQ ID NO: 586514
uaugccaguccaggaauua

SEQ ID NO: 723601 - RNA, 19 nt, Artificial Sequence
  Description of Artificial Sequence: Synthetic oligonucleotide
  Antisense strand to SEQ ID NO: 723600
uaauuccuggacuggcaua

SEQ ID NO: 723602 - RNA, 19 nt, Artificial Sequence
  Description of Artificial Sequence: Synthetic oligonucleotide
  Sense strand starting at position 683 of SEQ ID NO: 586514
augccaguccaggaauuaa

SEQ ID NO: 723603 - RNA, 19 nt, Artificial Sequence
  Description of Artificial Sequence: Synthetic oligonucleotide
  Antisense strand to SEQ ID NO: 723602
uuaauuccuggacuggcau

SEQ ID NO: 723604 - RNA, 19 nt, Artificial Sequence
  Description of Artificial Sequence: Synthetic oligonucleotide
  Sense strand starting at position 705 of SEQ ID NO: 586514
cuagaauugcaauggaauc

SEQ ID NO: 723605 - RNA, 19 nt, Artificial Sequence
  Description of Artificial Sequence: Synthetic oligonucleotide
  Antisense strand to SEQ ID NO: 723604
gauuccauugcaauucuag

SEQ ID NO: 723606 - RNA, 19 nt, Artificial Sequence
  Description of Artificial Sequence: Synthetic oligonucleotide
  Sense strand starting at position 933 of SEQ ID NO: 586514
ggaacuuacuugucccaag

SEQ ID NO: 723607 - RNA, 19 nt, Artificial Sequence
  Description of Artificial Sequence: Synthetic oligonucleotide
  Antisense strand to SEQ ID NO: 723606
cuugggacaaguaaguucc

SEQ ID NO: 723608 - RNA, 19 nt, Artificial Sequence
  Description of Artificial Sequence: Synthetic oligonucleotide
  Sense strand starting at position 944 of SEQ ID NO: 586514
gucccaagauuugauguga

SEQ ID NO: 723609 - RNA, 19 nt, Artificial Sequence
  Description of Artificial Sequence: Synthetic oligonucleotide
  Antisense strand to SEQ ID NO: 723608
ucacaucaaaucuugggac

SEQ ID NO: 723610 - RNA, 19 nt, Artificial Sequence
  Description of Artificial Sequence: Synthetic oligonucleotide
  Sense strand starting at position 1138 of SEQ ID NO: 586514
ccuguauuucuugggcaau

SEQ ID NO: 723611 - RNA, 19 nt, Artificial Sequence
  Description of Artificial Sequence: Synthetic oligonucleotide
  Antisense strand to SEQ ID NO: 723610
auugcccaagaaauacagg

SEQ ID NO: 723612 - RNA, 19 nt, Artificial Sequence
  Description of Artificial Sequence: Synthetic oligonucleotide
  Sense strand starting at position 1175 of SEQ ID NO: 586514
acugauaaccuuuguugca

SEQ ID NO: 723613 - RNA, 19 nt, Artificial Sequence
  Description of Artificial Sequence: Synthetic oligonucleotide
  Antisense strand to SEQ ID NO: 723612
ugcaacaaagguuaucagu

SEQ ID NO: 723614 - RNA, 19 nt, Artificial Sequence
  Description of Artificial Sequence: Synthetic oligonucleotide
  Sense strand starting at position 1176 of SEQ ID NO: 586514
cugauaaccuuuguugcaa

SEQ ID NO: 723615 - RNA, 19 nt, Artificial Sequence
  Description of Artificial Sequence: Synthetic oligonucleotide
  Antisense strand to SEQ ID NO: 723614
uugcaacaaagguuaucag

SEQ ID NO: 723616 - RNA, 19 nt, Artificial Sequence
  Description of Artificial Sequence: Synthetic oligonucleotide
  Sense strand starting at position 1177 of SEQ ID NO: 586514
ugauaaccuuuguugcaaa

SEQ ID NO: 723617 - RNA, 19 nt, Artificial Sequence
  Description of Artificial Sequence: Synthetic oligonucleotide
  Antisense strand to SEQ ID NO: 723616
uuugcaacaaagguuauca

SEQ ID NO: 723618 - RNA, 19 nt, Artificial Sequence
  Description of Artificial Sequence: Synthetic oligonucleotide
  Sense strand starting at position 1566 of SEQ ID NO: 586514
ucugauauuccucagucuu

SEQ ID NO: 723619 - RNA, 19 nt, Artificial Sequence
  Description of Artificial Sequence: Synthetic oligonucleotide
  Antisense strand to SEQ ID NO: 723618
aagacugaggaauaucaga

SEQ ID NO: 723620 - RNA, 19 nt, Artificial Sequence
  Description of Artificial Sequence: Synthetic oligonucleotide
  Sense strand starting at position 1583 of SEQ ID NO: 586514
uuguaaggcuuuccagaaa

SEQ ID NO: 723621 - RNA, 19 nt, Artificial Sequence
  Description of Artificial Sequence: Synthetic oligonucleotide
  Antisense strand to SEQ ID NO: 723620
uuucuggaaagccuuacaa

SEQ ID NO: 723622 - RNA, 19 nt, Artificial Sequence
  Description of Artificial Sequence: Synthetic oligonucleotide
  Sense strand starting at position 1609 of SEQ ID NO: 586514
cucaguaagcccuacugaa

SEQ ID NO: 723623 - RNA, 19 nt, Artificial Sequence
  Description of Artificial Sequence: Synthetic oligonucleotide
  Antisense strand to SEQ ID NO: 723622
uucaguagggcuuacugag

SEQ ID NO: 723624 - RNA, 19 nt, Artificial Sequence
  Description of Artificial Sequence: Synthetic oligonucleotide
  Sense strand starting at position 1625 of SEQ ID NO: 586514
gaagaugcauugucugaau

SEQ ID NO: 723625 - RNA, 19 nt, Artificial Sequence
  Description of Artificial Sequence: Synthetic oligonucleotide
  Antisense strand to SEQ ID NO: 723624
auucagacaaugcaucuuc

SEQ ID NO: 723626 - RNA, 19 nt, Artificial Sequence
  Description of Artificial Sequence: Synthetic oligonucleotide
  Sense strand starting at position 1636 of SEQ ID NO: 586514
gucugaauguacuuccauu

SEQ ID NO: 723627 - RNA, 19 nt, Artificial Sequence
  Description of Artificial Sequence: Synthetic oligonucleotide
  Antisense strand to SEQ ID NO: 723626
aauggaaguacauucagac

SEQ ID NO: 723628 - RNA, 19 nt, Artificial Sequence
  Description of Artificial Sequence: Synthetic oligonucleotide
  Sense strand starting at position 1843 of SEQ ID NO: 586514
guuggauaucccgacagac

SEQ ID NO: 723629 - RNA, 19 nt, Artificial Sequence
  Description of Artificial Sequence: Synthetic oligonucleotide
  Antisense strand to SEQ ID NO: 723628
gucugucgggauauccaac

SEQ ID NO: 723630 - RNA, 19 nt, Artificial Sequence
  Description of Artificial Sequence: Synthetic oligonucleotide
  Sense strand starting at position 2466 of SEQ ID NO: 586514
aagugaugucuccagcuaa

SEQ ID NO: 723631 - RNA, 19 nt, Artificial Sequence
  Description of Artificial Sequence: Synthetic oligonucleotide
  Antisense strand to SEQ ID NO: 723630
uuagcuggagacaucacuu

SEQ ID NO: 723632 - RNA, 19 nt, Artificial Sequence
  Description of Artificial Sequence: Synthetic oligonucleotide
  Sense strand starting at position 2833 of SEQ ID NO: 586514
acaaguuccgcugaccaau

SEQ ID NO: 723633 - RNA, 19 nt, Artificial Sequence
  Description of Artificial Sequence: Synthetic oligonucleotide
  Antisense strand to SEQ ID NO: 723632
auuggucagcggaacuugu

SEQ ID NO: 723634 - RNA, 19 nt, Artificial Sequence
  Description of Artificial Sequence: Synthetic oligonucleotide
  Sense strand starting at position 2868 of SEQ ID NO: 586514
gcaguuauguguacgaguu

SEQ ID NO: 723635 - RNA, 19 nt, Artificial Sequence
  Description of Artificial Sequence: Synthetic oligonucleotide
  Antisense strand to SEQ ID NO: 723634
aacucguacacauaacugc

SEQ ID NO: 723636 - RNA, 19 nt, Artificial Sequence
  Description of Artificial Sequence: Synthetic oligonucleotide
  Sense strand starting at position 3066 of SEQ ID NO: 586514
guuuguggaggugauauaa

SEQ ID NO: 723637 - RNA, 19 nt, Artificial Sequence
  Description of Artificial Sequence: Synthetic oligonucleotide
  Antisense strand to SEQ ID NO: 723636
uuauaucaccuccacaaac

SEQ ID NO: 723638 - RNA, 19 nt, Artificial Sequence
  Description of Artificial Sequence: Synthetic oligonucleotide
  Sense strand starting at position 3236 of SEQ ID NO: 586514
guaauaaucugaucuugag

SEQ ID NO: 723639 - RNA, 19 nt, Artificial Sequence
  Description of Artificial Sequence: Synthetic oligonucleotide
  Antisense strand to SEQ ID NO: 723638
cucaagaucagauuauuac

SEQ ID NO: 723640 - RNA, 19 nt, Artificial Sequence
  Description of Artificial Sequence: Synthetic oligonucleotide
  Sense strand starting at position 3279 of SEQ ID NO: 586514
ggguggugagauugugaca

SEQ ID NO: 723641 - RNA, 19 nt, Artificial Sequence
  Description of Artificial Sequence: Synthetic oligonucleotide
  Antisense strand to SEQ ID NO: 723640
ugucacaaucucaccaccc

SEQ ID NO: 723642 - RNA, 19 nt, Artificial Sequence
  Description of Artificial Sequence: Synthetic oligonucleotide
  Sense strand starting at position 3312 of SEQ ID NO: 586514
ggccaaucagcauacagau

SEQ ID NO: 723643 - RNA, 19 nt, Artificial Sequence
  Description of Artificial Sequence: Synthetic oligonucleotide
  Antisense strand to SEQ ID NO: 723642
aucuguaugcugauuggcc

SEQ ID NO: 723644 - RNA, 19 nt, Artificial Sequence
  Description of Artificial Sequence: Synthetic oligonucleotide
  Sense strand starting at position 3326 of SEQ ID NO: 586514
cagauaauauggguuaauu

SEQ ID NO: 723645 - RNA, 19 nt, Artificial Sequence
  Description of Artificial Sequence: Synthetic oligonucleotide
  Antisense strand to SEQ ID NO: 723644
aauuaacccauauuaucug

SEQ ID NO: 723646 - RNA, 19 nt, Artificial Sequence
  Description of Artificial Sequence: Synthetic oligonucleotide
  Sense strand starting at position 3361 of SEQ ID NO: 586514
auuggaugagccgagguaa

SEQ ID NO: 723647 - RNA, 19 nt, Artificial Sequence
  Description of Artificial Sequence: Synthetic oligonucleotide
  Antisense strand to SEQ ID NO: 723646
uuaccucggcucauccaau

SEQ ID NO: 723648 - RNA, 19 nt, Artificial Sequence
  Description of Artificial Sequence: Synthetic oligonucleotide
  Sense strand starting at position 3373 of SEQ ID NO: 586514
gagguaaagccuuaucuug

SEQ ID NO: 723649 - RNA, 19 nt, Artificial Sequence
  Description of Artificial Sequence: Synthetic oligonucleotide
  Antisense strand to SEQ ID NO: 723648
caagauaaggcuuuaccuc

SEQ ID NO: 723650 - RNA, 19 nt, Artificial Sequence
  Description of Artificial Sequence: Synthetic oligonucleotide
  Sense strand starting at position 3375 of SEQ ID NO: 586514
gguaaagccuuaucuugau

SEQ ID NO: 723651 - RNA, 19 nt, Artificial Sequence
  Description of Artificial Sequence: Synthetic oligonucleotide
  Antisense strand to SEQ ID NO: 723650
aucaagauaaggcuuuacc

SEQ ID NO: 723652 - RNA, 19 nt, Artificial Sequence
  Description of Artificial Sequence: Synthetic oligonucleotide
  Sense strand starting at position 3393 of SEQ ID NO: 586514
ugucacagucguuacacaa

SEQ ID NO: 723653 - RNA, 19 nt, Artificial Sequence
  Description of Artificial Sequence: Synthetic oligonucleotide
  Antisense strand to SEQ ID NO: 723652
uuguguaacgacugugaca

SEQ ID NO: 723654 - RNA, 19 nt, Artificial Sequence
  Description of Artificial Sequence: Synthetic oligonucleotide
  Sense strand starting at position 3451 of SEQ ID NO: 586514
cugauuuguucuugaauuu

SEQ ID NO: 723655 - RNA, 19 nt, Artificial Sequence
  Description of Artificial Sequence: Synthetic oligonucleotide
  Antisense strand to SEQ ID NO: 723654
aaauucaagaacaaaucag

SEQ ID NO: 723656 - RNA, 19 nt, Artificial Sequence
  Description of Artificial Sequence: Synthetic oligonucleotide
  Sense strand starting at position 3462 of SEQ ID NO: 586514
uugaauuuccuacguccau

SEQ ID NO: 723657 - RNA, 19 nt, Artificial Sequence
  Description of Artificial Sequence: Synthetic oligonucleotide
  Antisense strand to SEQ ID NO: 723656
auggacguaggaaauucaa

SEQ ID NO: 723658 - RNA, 19 nt, Artificial Sequence
  Description of Artificial Sequence: Synthetic oligonucleotide
  Sense strand starting at position 3488 of SEQ ID NO: 586514
cauggauaauaguuuguuu

SEQ ID NO: 723659 - RNA, 19 nt, Artificial Sequence
  Description of Artificial Sequence: Synthetic oligonucleotide
  Antisense strand to SEQ ID NO: 723658
aaacaaacuauuauccaug

SEQ ID NO: 723660 - RNA, 19 nt, Artificial Sequence
  Description of Artificial Sequence: Synthetic oligonucleotide
  Sense strand starting at position 3775 of SEQ ID NO: 586514
agaguuauuuccugaauuu

SEQ ID NO: 723661 - RNA, 19 nt, Artificial Sequence
  Description of Artificial Sequence: Synthetic oligonucleotide
  Antisense strand to SEQ ID NO: 723660
aaauucaggaaauaacucu

SEQ ID NO: 723662 - RNA, 19 nt, Artificial Sequence
  Description of Artificial Sequence: Synthetic oligonucleotide
  Sense strand starting at position 92 of SEQ ID NO: 586515
acuggaacccauuguaaau

SEQ ID NO: 723663 - RNA, 19 nt, Artificial Sequence
  Description of Artificial Sequence: Synthetic oligonucleotide
  Antisense strand to SEQ ID NO: 723662
auuuacaauggguuccagu

SEQ ID NO: 723664 - RNA, 19 nt, Artificial Sequence
  Description of Artificial Sequence: Synthetic oligonucleotide
  Sense strand starting at position 325 of SEQ ID NO: 586515
gggcaucggugacuacaaa

SEQ ID NO: 723665 - RNA, 19 nt, Artificial Sequence
  Description of Artificial Sequence: Synthetic oligonucleotide
  Antisense strand to SEQ ID NO: 723664
uuuguagucaccgaugccc

SEQ ID NO: 723666 - RNA, 19 nt, Artificial Sequence
  Description of Artificial Sequence: Synthetic oligonucleotide
  Sense strand starting at position 451 of SEQ ID NO: 586515
gaaccucuguggccauuau

SEQ ID NO: 723667 - RNA, 19 nt, Artificial Sequence
  Description of Artificial Sequence: Synthetic oligonucleotide
  Antisense strand to SEQ ID NO: 723666
auaauggccacagagguuc

SEQ ID NO: 723668 - RNA, 19 nt, Artificial Sequence
  Description of Artificial Sequence: Synthetic oligonucleotide
  Sense strand starting at position 687 of SEQ ID NO: 586515
agcacagagcuuuaaucaa

SEQ ID NO: 723669 - RNA, 19 nt, Artificial Sequence
  Description of Artificial Sequence: Synthetic oligonucleotide
  Antisense strand to SEQ ID NO: 723668
uugauuaaagcucugugcu

SEQ ID NO: 723670 - RNA, 19 nt, Artificial Sequence
  Description of Artificial Sequence: Synthetic oligonucleotide
  Sense strand starting at position 879 of SEQ ID NO: 586515
gucacauucgacgauuaga

SEQ ID NO: 723671 - RNA, 19 nt, Artificial Sequence
  Description of Artificial Sequence: Synthetic oligonucleotide
  Antisense strand to SEQ ID NO: 723670
ucuaaucgucgaaugugac

SEQ ID NO: 723672 - RNA, 19 nt, Artificial Sequence
  Description of Artificial Sequence: Synthetic oligonucleotide
  Sense strand starting at position 1207 of SEQ ID NO: 586515
ggauucgcgaaucaaaucu

SEQ ID NO: 723673 - RNA, 19 nt, Artificial Sequence
  Description of Artificial Sequence: Synthetic oligonucleotide
  Antisense strand to SEQ ID NO: 723672
agauuugauucgcgaaucc

SEQ ID NO: 723674 - RNA, 19 nt, Artificial Sequence
  Description of Artificial Sequence: Synthetic oligonucleotide
  Sense strand starting at position 1317 of SEQ ID NO: 586515
agaugaaacuguucuagca

SEQ ID NO: 723675 - RNA, 19 nt, Artificial Sequence
  Description of Artificial Sequence: Synthetic oligonucleotide
  Antisense strand to SEQ ID NO: 723674
ugcuagaacaguuucaucu

SEQ ID NO: 723676 - RNA, 19 nt, Artificial Sequence
  Description of Artificial Sequence: Synthetic oligonucleotide
  Sense strand starting at position 1449 of SEQ ID NO: 586515
ucuagaacaucuguuaaga

SEQ ID NO: 723677 - RNA, 19 nt, Artificial Sequence
  Description of Artificial Sequence: Synthetic oligonucleotide
  Antisense strand to SEQ ID NO: 723676
ucuuaacagauguucuaga

SEQ ID NO: 723678 - RNA, 19 nt, Artificial Sequence
  Description of Artificial Sequence: Synthetic oligonucleotide
  Sense strand starting at position 1695 of SEQ ID NO: 586515
cgggaauaugaccacgcua

SEQ ID NO: 723679 - RNA, 19 nt, Artificial Sequence
  Description of Artificial Sequence: Synthetic oligonucleotide
  Antisense strand to SEQ ID NO: 723678
uagcguggucauauucccg

SEQ ID NO: 723680 - RNA, 19 nt, Artificial Sequence
  Description of Artificial Sequence: Synthetic oligonucleotide
  Sense strand starting at position 1697 of SEQ ID NO: 586515
ggaauaugaccacgcuauc

SEQ ID NO: 723681 - RNA, 19 nt, Artificial Sequence
  Description of Artificial Sequence: Synthetic oligonucleotide
  Antisense strand to SEQ ID NO: 723680
gauagcguggucauauucc

SEQ ID NO: 723682 - RNA, 19 nt, Artificial Sequence
  Description of Artificial Sequence: Synthetic oligonucleotide
  Sense strand starting at position 1700 of SEQ ID NO: 586515
auaugaccacgcuaucuua

SEQ ID NO: 723683 - RNA, 19 nt, Artificial Sequence
  Description of Artificial Sequence: Synthetic oligonucleotide
  Antisense strand to SEQ ID NO: 723682
uaagauagcguggucauau

SEQ ID NO: 723684 - RNA, 19 nt, Artificial Sequence
  Description of Artificial Sequence: Synthetic oligonucleotide
  Sense strand starting at position 1703 of SEQ ID NO: 586515
ugaccacgcuaucuuacaa

SEQ ID NO: 723685 - RNA, 19 nt, Artificial Sequence
  Description of Artificial Sequence: Synthetic oligonucleotide
  Antisense strand to SEQ ID NO: 723684
uuguaagauagcgugguca

SEQ ID NO: 723686 - RNA, 19 nt, Artificial Sequence
  Description of Artificial Sequence: Synthetic oligonucleotide
  Sense strand starting at position 1805 of SEQ ID NO: 586515
guguccuagugaccugaga

SEQ ID NO: 723687 - RNA, 19 nt, Artificial Sequence
  Description of Artificial Sequence: Synthetic oligonucleotide
  Antisense strand to SEQ ID NO: 723686
ucucaggucacuaggacac

SEQ ID NO: 723688 - RNA, 19 nt, Artificial Sequence
  Description of Artificial Sequence: Synthetic oligonucleotide
  Sense strand starting at position 2125 of SEQ ID NO: 586515
cuuguagguucaguaagga

SEQ ID NO: 723689 - RNA, 19 nt, Artificial Sequence
  Description of Artificial Sequence: Synthetic oligonucleotide
  Antisense strand to SEQ ID NO: 723688
uccuuacugaaccuacaag

SEQ ID NO: 723690 - RNA, 19 nt, Artificial Sequence
  Description of Artificial Sequence: Synthetic oligonucleotide
  Sense strand starting at position 2166 of SEQ ID NO: 586515
uuugcugacaugcagagau

SEQ ID NO: 723691 - RNA, 19 nt, Artificial Sequence
  Description of Artificial Sequence: Synthetic oligonucleotide
  Antisense strand to SEQ ID NO: 723690
aucucugcaugucagcaaa

SEQ ID NO: 723692 - RNA, 19 nt, Artificial Sequence
  Description of Artificial Sequence: Synthetic oligonucleotide
  Sense strand starting at position 2191 of SEQ ID NO: 586515
caacuauggugcccugaga

SEQ ID NO: 723693 - RNA, 19 nt, Artificial Sequence
  Description of Artificial Sequence: Synthetic oligonucleotide
  Antisense strand to SEQ ID NO: 723692
ucucagggcaccauaguug

SEQ ID NO: 723694 - RNA, 19 nt, Artificial Sequence
  Description of Artificial Sequence: Synthetic oligonucleotide
  Sense strand starting at position 2370 of SEQ ID NO: 586515
agcuuucgcaaauagggau

SEQ ID NO: 723695 - RNA, 19 nt, Artificial Sequence
  Description of Artificial Sequence: Synthetic oligonucleotide
  Antisense strand to SEQ ID NO: 723694
aucccuauuugcgaaagcu

SEQ ID NO: 723696 - RNA, 19 nt, Artificial Sequence
  Description of Artificial Sequence: Synthetic oligonucleotide
  Sense strand starting at position 2450 of SEQ ID NO: 586515
agaacaucauuugagugaa

SEQ ID NO: 723697 - RNA, 19 nt, Artificial Sequence
  Description of Artificial Sequence: Synthetic oligonucleotide
  Antisense strand to SEQ ID NO: 723696
uucacucaaaugauguucu

SEQ ID NO: 723698 - RNA, 19 nt, Artificial Sequence
  Description of Artificial Sequence: Synthetic oligonucleotide
  Sense strand starting at position 2496 of SEQ ID NO: 586515
ucggaauucucaguggaca

SEQ ID NO: 723699 - RNA, 19 nt, Artificial Sequence
  Description of Artificial Sequence: Synthetic oligonucleotide
  Antisense strand to SEQ ID NO: 723698
uguccacugagaauuccga

SEQ ID NO: 723700 - RNA, 19 nt, Artificial Sequence
  Description of Artificial Sequence: Synthetic oligonucleotide
  Sense strand starting at position 2497 of SEQ ID NO: 586515
cggaauucucaguggacau

SEQ ID NO: 723701 - RNA, 19 nt, Artificial Sequence
  Description of Artificial Sequence: Synthetic oligonucleotide
  Antisense strand to SEQ ID NO: 723700
auguccacugagaauuccg

SEQ ID NO: 723702 - RNA, 19 nt, Artificial Sequence
  Description of Artificial Sequence: Synthetic oligonucleotide
  Sense strand starting at position 2498 of SEQ ID NO: 586515
ggaauucucaguggacauc

SEQ ID NO: 723703 - RNA, 19 nt, Artificial Sequence
  Description of Artificial Sequence: Synthetic oligonucleotide
  Antisense strand to SEQ ID NO: 723702
gauguccacugagaauucc

SEQ ID NO: 723704 - RNA, 19 nt, Artificial Sequence
  Description of Artificial Sequence: Synthetic oligonucleotide
  Sense strand starting at position 2624 of SEQ ID NO: 586515
aagacaagacccuguuaug

SEQ ID NO: 723705 - RNA, 19 nt, Artificial Sequence
  Description of Artificial Sequence: Synthetic oligonucleotide
  Antisense strand to SEQ ID NO: 723704
cauaacagggucuugucuu

SEQ ID NO: 723706 - RNA, 19 nt, Artificial Sequence
  Description of Artificial Sequence: Synthetic oligonucleotide
  Sense strand starting at position 2729 of SEQ ID NO: 586515
uuaaacacgucacuaaguu

SEQ ID NO: 723707 - RNA, 19 nt, Artificial Sequence
  Description of Artificial Sequence: Synthetic oligonucleotide
  Antisense strand to SEQ ID NO: 723706
aacuuagugacguguuuaa

SEQ ID NO: 723708 - RNA, 19 nt, Artificial Sequence
  Description of Artificial Sequence: Synthetic oligonucleotide
  Sense strand starting at position 2800 of SEQ ID NO: 586515
agaagagaauauuagaaca

SEQ ID NO: 723709 - RNA, 19 nt, Artificial Sequence
  Description of Artificial Sequence: Synthetic oligonucleotide
  Antisense strand to SEQ ID NO: 723708
uguucuaauauucucuucu

SEQ ID NO: 723710 - RNA, 19 nt, Artificial Sequence
  Description of Artificial Sequence: Synthetic oligonucleotide
  Sense strand starting at position 2913 of SEQ ID NO: 586515
cgauaccuuugaucaugga

SEQ ID NO: 723711 - RNA, 19 nt, Artificial Sequence
  Description of Artificial Sequence: Synthetic oligonucleotide
  Antisense strand to SEQ ID NO: 723710
uccaugaucaaagguaucg

SEQ ID NO: 723712 - RNA, 19 nt, Artificial Sequence
  Description of Artificial Sequence: Synthetic oligonucleotide
  Sense strand starting at position 3058 of SEQ ID NO: 586515
agggaauucucaucacagc

SEQ ID NO: 723713 - RNA, 19 nt, Artificial Sequence
  Description of Artificial Sequence: Synthetic oligonucleotide
  Antisense strand to SEQ ID NO: 723712
gcugugaugagaauucccu

SEQ ID NO: 723714 - RNA, 19 nt, Artificial Sequence
  Description of Artificial Sequence: Synthetic oligonucleotide
  Sense strand starting at position 3059 of SEQ ID NO: 586515
gggaauucucaucacagcu

SEQ ID NO: 723715 - RNA, 19 nt, Artificial Sequence
  Description of Artificial Sequence: Synthetic oligonucleotide
  Antisense strand to SEQ ID NO: 723714
agcugugaugagaauuccc

SEQ ID NO: 723716 - RNA, 19 nt, Artificial Sequence
  Description of Artificial Sequence: Synthetic oligonucleotide
  Sense strand starting at position 3087 of SEQ ID NO: 586515
agaagcaucccagaucugu

SEQ ID NO: 723717 - RNA, 19 nt, Artificial Sequence
  Description of Artificial Sequence: Synthetic oligonucleotide
  Antisense strand to SEQ ID NO: 723716
acagaucugggaugcuucu

SEQ ID NO: 723718 - RNA, 19 nt, Artificial Sequence
  Description of Artificial Sequence: Synthetic oligonucleotide
  Sense strand starting at position 3130 of SEQ ID NO: 586515
cugcaagaguuucucuaga

SEQ ID NO: 723719 - RNA, 19 nt, Artificial Sequence
  Description of Artificial Sequence: Synthetic oligonucleotide
  Antisense strand to SEQ ID NO: 723718
ucuagagaaacucuugcag

SEQ ID NO: 723720 - RNA, 19 nt, Artificial Sequence
  Description of Artificial Sequence: Synthetic oligonucleotide
  Sense strand starting at position 3205 of SEQ ID NO: 586515
agucaauagcaguggaagu

SEQ ID NO: 723721 - RNA, 19 nt, Artificial Sequence
  Description of Artificial Sequence: Synthetic oligonucleotide
  Antisense strand to SEQ ID NO: 723720
acuuccacugcuauugacu

SEQ ID NO: 723722 - RNA, 19 nt, Artificial Sequence
  Description of Artificial Sequence: Synthetic oligonucleotide
  Sense strand starting at position 3206 of SEQ ID NO: 586515
gucaauagcaguggaagua

SEQ ID NO: 723723 - RNA, 19 nt, Artificial Sequence
  Description of Artificial Sequence: Synthetic oligonucleotide
  Antisense strand to SEQ ID NO: 723722
uacuuccacugcuauugac

SEQ ID NO: 723724 - RNA, 19 nt, Artificial Sequence
  Description of Artificial Sequence: Synthetic oligonucleotide
  Sense strand starting at position 3270 of SEQ ID NO: 586515
ccaaccuacucagugagaa

SEQ ID NO: 723725 - RNA, 19 nt, Artificial Sequence
  Description of Artificial Sequence: Synthetic oligonucleotide
  Antisense strand to SEQ ID NO: 723724
uucucacugaguagguugg

SEQ ID NO: 723726 - RNA, 19 nt, Artificial Sequence
  Description of Artificial Sequence: Synthetic oligonucleotide
  Sense strand starting at position 3416 of SEQ ID NO: 586515
ccagucacuuagucaaaca

SEQ ID NO: 723727 - RNA, 19 nt, Artificial Sequence
  Description of Artificial Sequence: Synthetic oligonucleotide
  Antisense strand to SEQ ID NO: 723726
uguuugacuaagugacugg

SEQ ID NO: 723728 - RNA, 19 nt, Artificial Sequence
  Description of Artificial Sequence: Synthetic oligonucleotide
  Sense strand starting at position 3442 of SEQ ID NO: 586515
ggcuauugccaugaaggua

SEQ ID NO: 723729 - RNA, 19 nt, Artificial Sequence
  Description of Artificial Sequence: Synthetic oligonucleotide
  Antisense strand to SEQ ID NO: 723728
uaccuucauggcaauagcc

SEQ ID NO: 723730 - RNA, 19 nt, Artificial Sequence
  Description of Artificial Sequence: Synthetic oligonucleotide
  Sense strand starting at position 3454 of SEQ ID NO: 586515
gaagguauucuguaggugu

SEQ ID NO: 723731 - RNA, 19 nt, Artificial Sequence
  Description of Artificial Sequence: Synthetic oligonucleotide
  Antisense strand to SEQ ID NO: 723730
acaccuacagaauaccuuc

SEQ ID NO: 723732 - RNA, 19 nt, Artificial Sequence
  Description of Artificial Sequence: Synthetic oligonucleotide
  Sense strand starting at position 3471 of SEQ ID NO: 586515
gugguuaaugucuacaguu

SEQ ID NO: 723733 - RNA, 19 nt, Artificial Sequence
  Description of Artificial Sequence: Synthetic oligonucleotide
  Antisense strand to SEQ ID NO: 723732
aacuguagacauuaaccac

SEQ ID NO: 723734 - RNA, 19 nt, Artificial Sequence
  Description of Artificial Sequence: Synthetic oligonucleotide
  Sense strand starting at position 3473 of SEQ ID NO: 586515
gguuaaugucuacaguuac

SEQ ID NO: 723735 - RNA, 19 nt, Artificial Sequence
  Description of Artificial Sequence: Synthetic oligonucleotide
  Antisense strand to SEQ ID NO: 723734
guaacuguagacauuaacc

SEQ ID NO: 723736 - RNA, 19 nt, Artificial Sequence
  Description of Artificial Sequence: Synthetic oligonucleotide
  Sense strand starting at position 3484 of SEQ ID NO: 586515
acaguuacuuggcuuaaag

SEQ ID NO: 723737 - RNA, 19 nt, Artificial Sequence
  Description of Artificial Sequence: Synthetic oligonucleotide
  Antisense strand to SEQ ID NO: 723736
cuuuaagccaaguaacugu

SEQ ID NO: 723738 - RNA, 19 nt, Artificial Sequence
  Description of Artificial Sequence: Synthetic oligonucleotide
  Sense strand starting at position 3486 of SEQ ID NO: 586515
aguuacuuggcuuaaagga

SEQ ID NO: 723739 - RNA, 19 nt, Artificial Sequence
  Description of Artificial Sequence: Synthetic oligonucleotide
  Antisense strand to SEQ ID NO: 723738
uccuuuaagccaaguaacu

SEQ ID NO: 723740 - RNA, 19 nt, Artificial Sequence
  Description of Artificial Sequence: Synthetic oligonucleotide
  Sense strand starting at position 3587 of SEQ ID NO: 586515
agcuuaagacuguagcaaa

SEQ ID NO: 723741 - RNA, 19 nt, Artificial Sequence
  Description of Artificial Sequence: Synthetic oligonucleotide
  Antisense strand to SEQ ID NO: 723740
uuugcuacagucuuaagcu

SEQ ID NO: 723742 - RNA, 19 nt, Artificial Sequence
  Description of Artificial Sequence: Synthetic oligonucleotide
  Sense strand starting at position 37 of SEQ ID NO: 586516
uuuccuaaguagucuaauu

SEQ ID NO: 723743 - RNA, 19 nt, Artificial Sequence
  Description of Artificial Sequence: Synthetic oligonucleotide
  Antisense strand to SEQ ID NO: 723742
aauuagacuacuuaggaaa

SEQ ID NO: 723744 - RNA, 19 nt, Artificial Sequence
  Description of Artificial Sequence: Synthetic oligonucleotide
  Sense strand starting at position 272 of SEQ ID NO: 586516
agauaacucguaugaaacu

SEQ ID NO: 723745 - RNA, 19 nt, Artificial Sequence
  Description of Artificial Sequence: Synthetic oligonucleotide
  Antisense strand to SEQ ID NO: 723744
aguuucauacgaguuaucu

SEQ ID NO: 723746 - RNA, 19 nt, Artificial Sequence
  Description of Artificial Sequence: Synthetic oligonucleotide
  Sense strand starting at position 281 of SEQ ID NO: 586516
guaugaaacugaucgugaa

SEQ ID NO: 723747 - RNA, 19 nt, Artificial Sequence
  Description of Artificial Sequence: Synthetic oligonucleotide
  Antisense strand to SEQ ID NO: 723746
uucacgaucaguuucauac

SEQ ID NO: 723748 - RNA, 19 nt, Artificial Sequence
  Description of Artificial Sequence: Synthetic oligonucleotide
  Sense strand starting at position 282 of SEQ ID NO: 586516
uaugaaacugaucgugaag

SEQ ID NO: 723749 - RNA, 19 nt, Artificial Sequence
  Description of Artificial Sequence: Synthetic oligonucleotide
  Antisense strand to SEQ ID NO: 723748
cuucacgaucaguuucaua

SEQ ID NO: 723750 - RNA, 19 nt, Artificial Sequence
  Description of Artificial Sequence: Synthetic oligonucleotide
  Sense strand starting at position 285 of SEQ ID NO: 586516
gaaacugaucgugaaguuu

SEQ ID NO: 723751 - RNA, 19 nt, Artificial Sequence
  Description of Artificial Sequence: Synthetic oligonucleotide
  Antisense strand to SEQ ID NO: 723750
aaacuucacgaucaguuuc

SEQ ID NO: 723752 - RNA, 19 nt, Artificial Sequence
  Description of Artificial Sequence: Synthetic oligonucleotide
  Sense strand starting at position 312 of SEQ ID NO: 586516
gaaguuugcuaauugaaag

SEQ ID NO: 723753 - RNA, 19 nt, Artificial Sequence
  Description of Artificial Sequence: Synthetic oligonucleotide
  Antisense strand to SEQ ID NO: 723752
cuuucaauuagcaaacuuc

SEQ ID NO: 723754 - RNA, 19 nt, Artificial Sequence
  Description of Artificial Sequence: Synthetic oligonucleotide
  Sense strand starting at position 419 of SEQ ID NO: 586516
uguaaucuauuagugucaa

SEQ ID NO: 723755 - RNA, 19 nt, Artificial Sequence
  Description of Artificial Sequence: Synthetic oligonucleotide
  Antisense strand to SEQ ID NO: 723754
uugacacuaauagauuaca

SEQ ID NO: 723756 - RNA, 19 nt, Artificial Sequence
  Description of Artificial Sequence: Synthetic oligonucleotide
  Sense strand starting at position 429 of SEQ ID NO: 586516
uagugucaagagcaacauu

SEQ ID NO: 723757 - RNA, 19 nt, Artificial Sequence
  Description of Artificial Sequence: Synthetic oligonucleotide
  Antisense strand to SEQ ID NO: 723756
aauguugcucuugacacua

SEQ ID NO: 723758 - RNA, 19 nt, Artificial Sequence
  Description of Artificial Sequence: Synthetic oligonucleotide
  Sense strand starting at position 511 of SEQ ID NO: 586516
auuccuuacccuggugauu

SEQ ID NO: 723759 - RNA, 19 nt, Artificial Sequence
  Description of Artificial Sequence: Synthetic oligonucleotide
  Antisense strand to SEQ ID NO: 723758
aaucaccaggguaaggaau

SEQ ID NO: 723760 - RNA, 19 nt, Artificial Sequence
  Description of Artificial Sequence: Synthetic oligonucleotide
  Sense strand starting at position 522 of SEQ ID NO: 586516
uggugauucgcaagucggu

SEQ ID NO: 723761 - RNA, 19 nt, Artificial Sequence
  Description of Artificial Sequence: Synthetic oligonucleotide
  Antisense strand to SEQ ID NO: 723760
accgacuugcgaaucacca

SEQ ID NO: 723762 - RNA, 19 nt, Artificial Sequence
  Description of Artificial Sequence: Synthetic oligonucleotide
  Sense strand starting at position 803 of SEQ ID NO: 586516
cuguuuggcaaaggaguua

SEQ ID NO: 723763 - RNA, 19 nt, Artificial Sequence
  Description of Artificial Sequence: Synthetic oligonucleotide
  Antisense strand to SEQ ID NO: 723762
uaacuccuuugccaaacag

SEQ ID NO: 723764 - RNA, 19 nt, Artificial Sequence
  Description of Artificial Sequence: Synthetic oligonucleotide
  Sense strand starting at position 833 of SEQ ID NO: 586516
uguguuugggcuuaaauag

SEQ ID NO: 723765 - RNA, 19 nt, Artificial Sequence
  Description of Artificial Sequence: Synthetic oligonucleotide
  Antisense strand to SEQ ID NO: 723764
cuauuuaagcccaaacaca

SEQ ID NO: 723766 - RNA, 19 nt, Artificial Sequence
  Description of Artificial Sequence: Synthetic oligonucleotide
  Sense strand starting at position 851 of SEQ ID NO: 586516
gcuuucccugaauagcaau

SEQ ID NO: 723767 - RNA, 19 nt, Artificial Sequence
  Description of Artificial Sequence: Synthetic oligonucleotide
  Antisense strand to SEQ ID NO: 723766
auugcuauucagggaaagc

SEQ ID NO: 723768 - RNA, 19 nt, Artificial Sequence
  Description of Artificial Sequence: Synthetic oligonucleotide
  Sense strand starting at position 874 of SEQ ID NO: 586516
agagaauuauugccaacug

SEQ ID NO: 723769 - RNA, 19 nt, Artificial Sequence
  Description of Artificial Sequence: Synthetic oligonucleotide
  Antisense strand to SEQ ID NO: 723768
caguuggcaauaauucucu

SEQ ID NO: 723770 - RNA, 19 nt, Artificial Sequence
  Description of Artificial Sequence: Synthetic oligonucleotide
  Sense strand starting at position 970 of SEQ ID NO: 586516
aagugcugggcguucuauu

SEQ ID NO: 723771 - RNA, 19 nt, Artificial Sequence
  Description of Artificial Sequence: Synthetic oligonucleotide
  Antisense strand to SEQ ID NO: 723770
aauagaacgcccagcacuu

SEQ ID NO: 723772 - RNA, 19 nt, Artificial Sequence
  Description of Artificial Sequence: Synthetic oligonucleotide
  Sense strand starting at position 971 of SEQ ID NO: 586516
agugcugggcguucuauua

SEQ ID NO: 723773 - RNA, 19 nt, Artificial Sequence
  Description of Artificial Sequence: Synthetic oligonucleotide
  Antisense strand to SEQ ID NO: 723772
uaauagaacgcccagcacu

SEQ ID NO: 723774 - RNA, 19 nt, Artificial Sequence
  Description of Artificial Sequence: Synthetic oligonucleotide
  Sense strand starting at position 980 of SEQ ID NO: 586516
cguucuauuaccugggaca

SEQ ID NO: 723775 - RNA, 19 nt, Artificial Sequence
  Description of Artificial Sequence: Synthetic oligonucleotide
  Antisense strand to SEQ ID NO: 723774
ugucccagguaauagaacg

SEQ ID NO: 723776 - RNA, 19 nt, Artificial Sequence
  Description of Artificial Sequence: Synthetic oligonucleotide
  Sense strand starting at position 981 of SEQ ID NO: 586516
guucuauuaccugggacag

SEQ ID NO: 723777 - RNA, 19 nt, Artificial Sequence
  Description of Artificial Sequence: Synthetic oligonucleotide
  Antisense strand to SEQ ID NO: 723776
cugucccagguaauagaac

SEQ ID NO: 723778 - RNA, 19 nt, Artificial Sequence
  Description of Artificial Sequence: Synthetic oligonucleotide
  Sense strand starting at position 982 of SEQ ID NO: 586516
uucuauuaccugggacaga

SEQ ID NO: 723779 - RNA, 19 nt, Artificial Sequence
  Description of Artificial Sequence: Synthetic oligonucleotide
  Antisense strand to SEQ ID NO: 723778
ucugucccagguaauagaa

SEQ ID NO: 723780 - RNA, 19 nt, Artificial Sequence
  Description of Artificial Sequence: Synthetic oligonucleotide
  Sense strand starting at position 1068 of SEQ ID NO: 586516
uagacauuagugugagaac

SEQ ID NO: 723781 - RNA, 19 nt, Artificial Sequence
  Description of Artificial Sequence: Synthetic oligonucleotide
  Antisense strand to SEQ ID NO: 723780
guucucacacuaaugucua

SEQ ID NO: 723782 - RNA, 19 nt, Artificial Sequence
  Description of Artificial Sequence: Synthetic oligonucleotide
  Sense strand starting at position 1113 of SEQ ID NO: 586516
gcaauauuaugauccuaag

SEQ ID NO: 723783 - RNA, 19 nt, Artificial Sequence
  Description of Artificial Sequence: Synthetic oligonucleotide
  Antisense strand to SEQ ID NO: 723782
cuuaggaucauaauauugc

SEQ ID NO: 723784 - RNA, 19 nt, Artificial Sequence
  Description of Artificial Sequence: Synthetic oligonucleotide
  Sense strand starting at position 1291 of SEQ ID NO: 586516
guaccacuacuguaauuag

SEQ ID NO: 723785 - RNA, 19 nt, Artificial Sequence
  Description of Artificial Sequence: Synthetic oligonucleotide
  Antisense strand to SEQ ID NO: 723784
cuaauuacaguagugguac

SEQ ID NO: 723786 - RNA, 19 nt, Artificial Sequence
  Description of Artificial Sequence: Synthetic oligonucleotide
  Sense strand starting at position 1301 of SEQ ID NO: 586516
uguaauuagaaagguuuga

SEQ ID NO: 723787 - RNA, 19 nt, Artificial Sequence
  Description of Artificial Sequence: Synthetic oligonucleotide
  Antisense strand to SEQ ID NO: 723786
ucaaaccuuucuaauuaca

SEQ ID NO: 723788 - RNA, 19 nt, Artificial Sequence
  Description of Artificial Sequence: Synthetic oligonucleotide
  Sense strand starting at position 1312 of SEQ ID NO: 586516
agguuugaacugugccaaa

SEQ ID NO: 723789 - RNA, 19 nt, Artificial Sequence
  Description of Artificial Sequence: Synthetic oligonucleotide
  Antisense strand to SEQ ID NO: 723788
uuuggcacaguucaaaccu

SEQ ID NO: 723790 - RNA, 19 nt, Artificial Sequence
  Description of Artificial Sequence: Synthetic oligonucleotide
  Sense strand starting at position 1557 of SEQ ID NO: 586516
gugaguuacccucacaacc

SEQ ID NO: 723791 - RNA, 19 nt, Artificial Sequence
  Description of Artificial Sequence: Synthetic oligonucleotide
  Antisense strand to SEQ ID NO: 723790
gguugugaggguaacucac

SEQ ID NO: 723792 - RNA, 19 nt, Artificial Sequence
  Description of Artificial Sequence: Synthetic oligonucleotide
  Sense strand starting at position 1715 of SEQ ID NO: 586516
uugggaaugugacucuuaa

SEQ ID NO: 723793 - RNA, 19 nt, Artificial Sequence
  Description of Artificial Sequence: Synthetic oligonucleotide
  Antisense strand to SEQ ID NO: 723792
uuaagagucacauucccaa

SEQ ID NO: 723794 - RNA, 19 nt, Artificial Sequence
  Description of Artificial Sequence: Synthetic oligonucleotide
  Sense strand starting at position 1970 of SEQ ID NO: 586516
ggauguuuguucccuggga

SEQ ID NO: 723795 - RNA, 19 nt, Artificial Sequence
  Description of Artificial Sequence: Synthetic oligonucleotide
  Antisense strand to SEQ ID NO: 723794
ucccagggaacaaacaucc

SEQ ID NO: 723796 - RNA, 19 nt, Artificial Sequence
  Description of Artificial Sequence: Synthetic oligonucleotide
  Sense strand starting at position 2408 of SEQ ID NO: 586516
ccaucagcacucuagugua

SEQ ID NO: 723797 - RNA, 19 nt, Artificial Sequence
  Description of Artificial Sequence: Synthetic oligonucleotide
  Antisense strand to SEQ ID NO: 723796
uacacuagagugcugaugg

SEQ ID NO: 723798 - RNA, 19 nt, Artificial Sequence
  Description of Artificial Sequence: Synthetic oligonucleotide
  Sense strand starting at position 2433 of SEQ ID NO: 586516
caaguagaaguguagugua

SEQ ID NO: 723799 - RNA, 19 nt, Artificial Sequence
  Description of Artificial Sequence: Synthetic oligonucleotide
  Antisense strand to SEQ ID NO: 723798
uacacuacacuucuacuug

SEQ ID NO: 723800 - RNA, 19 nt, Artificial Sequence
  Description of Artificial Sequence: Synthetic oligonucleotide
  Sense strand starting at position 2438 of SEQ ID NO: 586516
agaaguguaguguaauuca

SEQ ID NO: 723801 - RNA, 19 nt, Artificial Sequence
  Description of Artificial Sequence: Synthetic oligonucleotide
  Antisense strand to SEQ ID NO: 723800
ugaauuacacuacacuucu

SEQ ID NO: 723802 - RNA, 19 nt, Artificial Sequence
  Description of Artificial Sequence: Synthetic oligonucleotide
  Sense strand starting at position 2480 of SEQ ID NO: 586516
aaauacagguuguuggaaa

SEQ ID NO: 723803 - RNA, 19 nt, Artificial Sequence
  Description of Artificial Sequence: Synthetic oligonucleotide
  Antisense strand to SEQ ID NO: 723802
uuuccaacaaccuguauuu

SEQ ID NO: 723804 - RNA, 19 nt, Artificial Sequence
  Description of Artificial Sequence: Synthetic oligonucleotide
  Sense strand starting at position 2901 of SEQ ID NO: 586516
aagugagauuguguaaaua

SEQ ID NO: 723805 - RNA, 19 nt, Artificial Sequence
  Description of Artificial Sequence: Synthetic oligonucleotide
  Antisense strand to SEQ ID NO: 723804
uauuuacacaaucucacuu

SEQ ID NO: 723806 - RNA, 19 nt, Artificial Sequence
  Description of Artificial Sequence: Synthetic oligonucleotide
  Sense strand starting at position 2983 of SEQ ID NO: 586516
auucuagacuacucuagua

SEQ ID NO: 723807 - RNA, 19 nt, Artificial Sequence
  Description of Artificial Sequence: Synthetic oligonucleotide
  Antisense strand to SEQ ID NO: 723806
uacuagaguagucuagaau

SEQ ID NO: 723808 - RNA, 19 nt, Artificial Sequence
  Description of Artificial Sequence: Synthetic oligonucleotide
  Sense strand starting at position 3096 of SEQ ID NO: 586516
ugcuuaggaucccuagaag

SEQ ID NO: 723809 - RNA, 19 nt, Artificial Sequence
  Description of Artificial Sequence: Synthetic oligonucleotide
  Antisense strand to SEQ ID NO: 723808
cuucuagggauccuaagca

SEQ ID NO: 723810 - RNA, 19 nt, Artificial Sequence
  Description of Artificial Sequence: Synthetic oligonucleotide
  Sense strand starting at position 3278 of SEQ ID NO: 586516
uggcuaauuccagagguaa

SEQ ID NO: 723811 - RNA, 19 nt, Artificial Sequence
  Description of Artificial Sequence: Synthetic oligonucleotide
  Antisense strand to SEQ ID NO: 723810
uuaccucuggaauuagcca

SEQ ID NO: 723812 - RNA, 19 nt, Artificial Sequence
  Description of Artificial Sequence: Synthetic oligonucleotide
  Sense strand starting at position 3515 of SEQ ID NO: 586516
uggauucucugagucaauc

SEQ ID NO: 723813 - RNA, 19 nt, Artificial Sequence
  Description of Artificial Sequence: Synthetic oligonucleotide
  Antisense strand to SEQ ID NO: 723812
gauugacucagagaaucca

SEQ ID NO: 723814 - RNA, 19 nt, Artificial Sequence
  Description of Artificial Sequence: Synthetic oligonucleotide
  Sense strand starting at position 3534 of SEQ ID NO: 586516
ugcucaucuguuuaugaug

SEQ ID NO: 723815 - RNA, 19 nt, Artificial Sequence
  Description of Artificial Sequence: Synthetic oligonucleotide
  Antisense strand to SEQ ID NO: 723814
caucauaaacagaugagca

SEQ ID NO: 723816 - RNA, 19 nt, Artificial Sequence
  Description of Artificial Sequence: Synthetic oligonucleotide
  Sense strand starting at position 3760 of SEQ ID NO: 586516
aguauaauccaauguaguc

SEQ ID NO: 723817 - RNA, 19 nt, Artificial Sequence
  Description of Artificial Sequence: Synthetic oligonucleotide
  Antisense strand to SEQ ID NO: 723816
gacuacauuggauuauacu

SEQ ID NO: 723818 - RNA, 19 nt, Artificial Sequence
  Description of Artificial Sequence: Synthetic oligonucleotide
  Sense strand starting at position 3781 of SEQ ID NO: 586516
guuuauugaccuuaucuuu

SEQ ID NO: 723819 - RNA, 19 nt, Artificial Sequence
  Description of Artificial Sequence: Synthetic oligonucleotide
  Antisense strand to SEQ ID NO: 723818
aaagauaaggucaauaaac

SEQ ID NO: 723820 - RNA, 19 nt, Artificial Sequence
  Description of Artificial Sequence: Synthetic oligonucleotide
  Sense strand starting at position 3884 of SEQ ID NO: 586516
cucuucugacuugauguau

SEQ ID NO: 723821 - RNA, 19 nt, Artificial Sequence
  Description of Artificial Sequence: Synthetic oligonucleotide
  Antisense strand to SEQ ID NO: 723820
auacaucaagucagaagag

SEQ ID NO: 723822 - RNA, 19 nt, Artificial Sequence
  Description of Artificial Sequence: Synthetic oligonucleotide
  Sense strand starting at position 23 of SEQ ID NO: 586517
uugucacuugcugacagua

SEQ ID NO: 723823 - RNA, 19 nt, Artificial Sequence
  Description of Artificial Sequence: Synthetic oligonucleotide
  Antisense strand to SEQ ID NO: 723822
uacugucagcaagugacaa

SEQ ID NO: 723824 - RNA, 19 nt, Artificial Sequence
  Description of Artificial Sequence: Synthetic oligonucleotide
  Sense strand starting at position 159 of SEQ ID NO: 586517
ugugaaaugcuacagaagu

SEQ ID NO: 723825 - RNA, 19 nt, Artificial Sequence
  Description of Artificial Sequence: Synthetic oligonucleotide
  Antisense strand to SEQ ID NO: 723824
acuucuguagcauuucaca

SEQ ID NO: 723826 - RNA, 19 nt, Artificial Sequence
  Description of Artificial Sequence: Synthetic oligonucleotide
  Sense strand starting at position 225 of SEQ ID NO: 586517
guaacucuguccucaaauu

SEQ ID NO: 723827 - RNA, 19 nt, Artificial Sequence
  Description of Artificial Sequence: Synthetic oligonucleotide
  Antisense strand to SEQ ID NO: 723826
aauuugaggacagaguuac

SEQ ID NO: 723828 - RNA, 19 nt, Artificial Sequence
  Description of Artificial Sequence: Synthetic oligonucleotide
  Sense strand starting at position 455 of SEQ ID NO: 586517
gucccacugcuguagaaac

SEQ ID NO: 723829 - RNA, 19 nt, Artificial Sequence
  Description of Artificial Sequence: Synthetic oligonucleotide
  Antisense strand to SEQ ID NO: 723828
guuucuacagcagugggac

SEQ ID NO: 723830 - RNA, 19 nt, Artificial Sequence
  Description of Artificial Sequence: Synthetic oligonucleotide
  Sense strand starting at position 486 of SEQ ID NO: 586517
cucuuuccuccuggaaaga

SEQ ID NO: 723831 - RNA, 19 nt, Artificial Sequence
  Description of Artificial Sequence: Synthetic oligonucleotide
  Antisense strand to SEQ ID NO: 723830
ucuuuccaggaggaaagag

SEQ ID NO: 723832 - RNA, 19 nt, Artificial Sequence
  Description of Artificial Sequence: Synthetic oligonucleotide
  Sense strand starting at position 546 of SEQ ID NO: 586517
uguuguaaacccuagucaa

SEQ ID NO: 723833 - RNA, 19 nt, Artificial Sequence
  Description of Artificial Sequence: Synthetic oligonucleotide
  Antisense strand to SEQ ID NO: 723832
uugacuaggguuuacaaca

SEQ ID NO: 723834 - RNA, 19 nt, Artificial Sequence
  Description of Artificial Sequence: Synthetic oligonucleotide
  Sense strand starting at position 567 of SEQ ID NO: 586517
ccgguugcugcgcuaacaa

SEQ ID NO: 723835 - RNA, 19 nt, Artificial Sequence
  Description of Artificial Sequence: Synthetic oligonucleotide
  Antisense strand to SEQ ID NO: 723834
uuguuagcgcagcaaccgg

SEQ ID NO: 723836 - RNA, 19 nt, Artificial Sequence
  Description of Artificial Sequence: Synthetic oligonucleotide
  Sense strand starting at position 717 of SEQ ID NO: 586517
gagcaaguugugcaauaac

SEQ ID NO: 723837 - RNA, 19 nt, Artificial Sequence
  Description of Artificial Sequence: Synthetic oligonucleotide
  Antisense strand to SEQ ID NO: 723836
guuauugcacaacuugcuc

SEQ ID NO: 723838 - RNA, 19 nt, Artificial Sequence
  Description of Artificial Sequence: Synthetic oligonucleotide
  Sense strand starting at position 1053 of SEQ ID NO: 586517
agaguugcaucagaaauuu

SEQ ID NO: 723839 - RNA, 19 nt, Artificial Sequence
  Description of Artificial Sequence: Synthetic oligonucleotide
  Antisense strand to SEQ ID NO: 723838
aaauuucugaugcaacucu

SEQ ID NO: 723840 - RNA, 19 nt, Artificial Sequence
  Description of Artificial Sequence: Synthetic oligonucleotide
  Sense strand starting at position 2382 of SEQ ID NO: 586517
guuugaaacgcacaaagua

SEQ ID NO: 723841 - RNA, 19 nt, Artificial Sequence
  Description of Artificial Sequence: Synthetic oligonucleotide
  Antisense strand to SEQ ID NO: 723840
uacuuugugcguuucaaac

SEQ ID NO: 723842 - RNA, 19 nt, Artificial Sequence
  Description of Artificial Sequence: Synthetic oligonucleotide
  Sense strand starting at position 2655 of SEQ ID NO: 586517
ucuuuacaaugggcuaaua

SEQ ID NO: 723843 - RNA, 19 nt, Artificial Sequence
  Description of Artificial Sequence: Synthetic oligonucleotide
  Antisense strand to SEQ ID NO: 723842
uauuagcccauuguaaaga

SEQ ID NO: 723844 - RNA, 19 nt, Artificial Sequence
  Description of Artificial Sequence: Synthetic oligonucleotide
  Sense strand starting at position 2725 of SEQ ID NO: 586517
acauaaagugacugcgaaa

SEQ ID NO: 723845 - RNA, 19 nt, Artificial Sequence
  Description of Artificial Sequence: Synthetic oligonucleotide
  Antisense strand to SEQ ID NO: 723844
uuucgcagucacuuuaugu

SEQ ID NO: 723846 - RNA, 19 nt, Artificial Sequence
  Description of Artificial Sequence: Synthetic oligonucleotide
  Sense strand starting at position 2773 of SEQ ID NO: 586517
gccauugucguuaguguga

SEQ ID NO: 723847 - RNA, 19 nt, Artificial Sequence
  Description of Artificial Sequence: Synthetic oligonucleotide
  Antisense strand to SEQ ID NO: 723846
ucacacuaacgacaauggc

SEQ ID NO: 723848 - RNA, 19 nt, Artificial Sequence
  Description of Artificial Sequence: Synthetic oligonucleotide
  Sense strand starting at position 2829 of SEQ ID NO: 586517
auagcauaacgauaaguau

SEQ ID NO: 723849 - RNA, 19 nt, Artificial Sequence
  Description of Artificial Sequence: Synthetic oligonucleotide
  Antisense strand to SEQ ID NO: 723848
auacuuaucguuaugcuau

SEQ ID NO: 723850 - RNA, 19 nt, Artificial Sequence
  Description of Artificial Sequence: Synthetic oligonucleotide
  Sense strand starting at position 2989 of SEQ ID NO: 586517
cuguguacggacugggaaa

SEQ ID NO: 723851 - RNA, 19 nt, Artificial Sequence
  Description of Artificial Sequence: Synthetic oligonucleotide
  Antisense strand to SEQ ID NO: 723850
uuucccaguccguacacag

SEQ ID NO: 723852 - RNA, 19 nt, Artificial Sequence
  Description of Artificial Sequence: Synthetic oligonucleotide
  Sense strand starting at position 3117 of SEQ ID NO: 586517
ugcuucuagcaggaguuau

SEQ ID NO: 723853 - RNA, 19 nt, Artificial Sequence
  Description of Artificial Sequence: Synthetic oligonucleotide
  Antisense strand to SEQ ID NO: 723852
auaacuccugcuagaagca

SEQ ID NO: 723854 - RNA, 19 nt, Artificial Sequence
  Description of Artificial Sequence: Synthetic oligonucleotide
  Sense strand starting at position 3145 of SEQ ID NO: 586517
gacagauguuacucaugga

SEQ ID NO: 723855 - RNA, 19 nt, Artificial Sequence
  Description of Artificial Sequence: Synthetic oligonucleotide
  Antisense strand to SEQ ID NO: 723854
uccaugaguaacaucuguc

SEQ ID NO: 723856 - RNA, 19 nt, Artificial Sequence
  Description of Artificial Sequence: Synthetic oligonucleotide
  Sense strand starting at position 3249 of SEQ ID NO: 586517
aagagaggaugauaucaaa

SEQ ID NO: 723857 - RNA, 19 nt, Artificial Sequence
  Description of Artificial Sequence: Synthetic oligonucleotide
  Antisense strand to SEQ ID NO: 723856
uuugauaucauccucucuu

SEQ ID NO: 723858 - RNA, 19 nt, Artificial Sequence
  Description of Artificial Sequence: Synthetic oligonucleotide
  Sense strand starting at position 3252 of SEQ ID NO: 586517
agaggaugauaucaaagga

SEQ ID NO: 723859 - RNA, 19 nt, Artificial Sequence
  Description of Artificial Sequence: Synthetic oligonucleotide
  Antisense strand to SEQ ID NO: 723858
uccuuugauaucauccucu

SEQ ID NO: 723860 - RNA, 19 nt, Artificial Sequence
  Description of Artificial Sequence: Synthetic oligonucleotide
  Sense strand starting at position 3437 of SEQ ID NO: 586517
ccagucagauagccugaua

SEQ ID NO: 723861 - RNA, 19 nt, Artificial Sequence
  Description of Artificial Sequence: Synthetic oligonucleotide
  Antisense strand to SEQ ID NO: 723860
uaucaggcuaucugacugg

SEQ ID NO: 723862 - RNA, 19 nt, Artificial Sequence
  Description of Artificial Sequence: Synthetic oligonucleotide
  Sense strand starting at position 3462 of SEQ ID NO: 586517
gaggcuuugauagagguuu

SEQ ID NO: 723863 - RNA, 19 nt, Artificial Sequence
  Description of Artificial Sequence: Synthetic oligonucleotide
  Antisense strand to SEQ ID NO: 723862
aaaccucuaucaaagccuc

SEQ ID NO: 723864 - RNA, 19 nt, Artificial Sequence
  Description of Artificial Sequence: Synthetic oligonucleotide
  Sense strand starting at position 3513 of SEQ ID NO: 586517
uuuggaaucacuugugggu

SEQ ID NO: 723865 - RNA, 19 nt, Artificial Sequence
  Description of Artificial Sequence: Synthetic oligonucleotide
  Antisense strand to SEQ ID NO: 723864
acccacaagugauuccaaa

SEQ ID NO: 723866 - RNA, 19 nt, Artificial Sequence
  Description of Artificial Sequence: Synthetic oligonucleotide
  Sense strand starting at position 3517 of SEQ ID NO: 586517
gaaucacuuguggguaaau

SEQ ID NO: 723867 - RNA, 19 nt, Artificial Sequence
  Description of Artificial Sequence: Synthetic oligonucleotide
  Antisense strand to SEQ ID NO: 723866
auuuacccacaagugauuc

SEQ ID NO: 723868 - RNA, 19 nt, Artificial Sequence
  Description of Artificial Sequence: Synthetic oligonucleotide
  Sense strand starting at position 3518 of SEQ ID NO: 586517
aaucacuuguggguaaauu

SEQ ID NO: 723869 - RNA, 19 nt, Artificial Sequence
  Description of Artificial Sequence: Synthetic oligonucleotide
  Antisense strand to SEQ ID NO: 723868
aauuuacccacaagugauu

SEQ ID NO: 723870 - RNA, 19 nt, Artificial Sequence
  Description of Artificial Sequence: Synthetic oligonucleotide
  Sense strand starting at position 3571 of SEQ ID NO: 586517
ugaugugucuuuccuaaga

SEQ ID NO: 723871 - RNA, 19 nt, Artificial Sequence
  Description of Artificial Sequence: Synthetic oligonucleotide
  Antisense strand to SEQ ID NO: 723870
ucuuaggaaagacacauca

SEQ ID NO: 723872 - RNA, 19 nt, Artificial Sequence
  Description of Artificial Sequence: Synthetic oligonucleotide
  Sense strand starting at position 3591 of SEQ ID NO: 586517
uagagauauuaugugcaua

SEQ ID NO: 723873 - RNA, 19 nt, Artificial Sequence
  Description of Artificial Sequence: Synthetic oligonucleotide
  Antisense strand to SEQ ID NO: 723872
uaugcacauaauaucucua

SEQ ID NO: 723874 - RNA, 19 nt, Artificial Sequence
  Description of Artificial Sequence: Synthetic oligonucleotide
  Sense strand starting at position 3593 of SEQ ID NO: 586517
gagauauuaugugcauaac

SEQ ID NO: 723875 - RNA, 19 nt, Artificial Sequence
  Description of Artificial Sequence: Synthetic oligonucleotide
  Antisense strand to SEQ ID NO: 723874
guuaugcacauaauaucuc

SEQ ID NO: 723876 - RNA, 19 nt, Artificial Sequence
  Description of Artificial Sequence: Synthetic oligonucleotide
  Sense strand starting at position 3602 of SEQ ID NO: 586517
ugugcauaaccacaauagu

SEQ ID NO: 723877 - RNA, 19 nt, Artificial Sequence
  Description of Artificial Sequence: Synthetic oligonucleotide
  Antisense strand to SEQ ID NO: 723876
acuauugugguuaugcaca

SEQ ID NO: 723878 - RNA, 19 nt, Artificial Sequence
  Description of Artificial Sequence: Synthetic oligonucleotide
  Sense strand starting at position 3619 of SEQ ID NO: 586517
gucaccaaauucguaaauu

SEQ ID NO: 723879 - RNA, 19 nt, Artificial Sequence
  Description of Artificial Sequence: Synthetic oligonucleotide
  Antisense strand to SEQ ID NO: 723878
aauuuacgaauuuggugac

SEQ ID NO: 723880 - RNA, 19 nt, Artificial Sequence
  Description of Artificial Sequence: Synthetic oligonucleotide
  Sense strand starting at position 3670 of SEQ ID NO: 586517
uccauauuccgguauaguc

SEQ ID NO: 723881 - RNA, 19 nt, Artificial Sequence
  Description of Artificial Sequence: Synthetic oligonucleotide
  Antisense strand to SEQ ID NO: 723880
gacuauaccggaauaugga

SEQ ID NO: 723882 - RNA, 19 nt, Artificial Sequence
  Description of Artificial Sequence: Synthetic oligonucleotide
  Sense strand starting at position 3689 of SEQ ID NO: 586517
aguugaucugacuaugucu

SEQ ID NO: 723883 - RNA, 19 nt, Artificial Sequence
  Description of Artificial Sequence: Synthetic oligonucleotide
  Antisense strand to SEQ ID NO: 723882
agacauagucagaucaacu

SEQ ID NO: 723884 - RNA, 19 nt, Artificial Sequence
  Description of Artificial Sequence: Synthetic oligonucleotide
  Sense strand starting at position 3694 of SEQ ID NO: 586517
aucugacuaugucuuccau

SEQ ID NO: 723885 - RNA, 19 nt, Artificial Sequence
  Description of Artificial Sequence: Synthetic oligonucleotide
  Antisense strand to SEQ ID NO: 723884
auggaagacauagucagau

SEQ ID NO: 723886 - RNA, 19 nt, Artificial Sequence
  Description of Artificial Sequence: Synthetic oligonucleotide
  Sense strand starting at position 3696 of SEQ ID NO: 586517
cugacuaugucuuccauag

SEQ ID NO: 723887 - RNA, 19 nt, Artificial Sequence
  Description of Artificial Sequence: Synthetic oligonucleotide
  Antisense strand to SEQ ID NO: 723886
cuauggaagacauagucag

SEQ ID NO: 723888 - RNA, 19 nt, Artificial Sequence
  Description of Artificial Sequence: Synthetic oligonucleotide
  Sense strand starting at position 3700 of SEQ ID NO: 586517
cuaugucuuccauaguauu

SEQ ID NO: 723889 - RNA, 19 nt, Artificial Sequence
  Description of Artificial Sequence: Synthetic oligonucleotide
  Antisense strand to SEQ ID NO: 723888
aauacuauggaagacauag

SEQ ID NO: 723890 - RNA, 19 nt, Artificial Sequence
  Description of Artificial Sequence: Synthetic oligonucleotide
  Sense strand starting at position 3742 of SEQ ID NO: 586517
acuauugaggucuagaguc

SEQ ID NO: 723891 - RNA, 19 nt, Artificial Sequence
  Description of Artificial Sequence: Synthetic oligonucleotide
  Antisense strand to SEQ ID NO: 723890
gacucuagaccucaauagu

SEQ ID NO: 723892 - RNA, 19 nt, Artificial Sequence
  Description of Artificial Sequence: Synthetic oligonucleotide
  Sense strand starting at position 3748 of SEQ ID NO: 586517
gaggucuagagucagguau

SEQ ID NO: 723893 - RNA, 19 nt, Artificial Sequence
  Description of Artificial Sequence: Synthetic oligonucleotide
  Antisense strand to SEQ ID NO: 723892
auaccugacucuagaccuc

SEQ ID NO: 723894 - RNA, 19 nt, Artificial Sequence
  Description of Artificial Sequence: Synthetic oligonucleotide
  Sense strand starting at position 3767 of SEQ ID NO: 586517
ugcauuuaguugucucaaa

SEQ ID NO: 723895 - RNA, 19 nt, Artificial Sequence
  Description of Artificial Sequence: Synthetic oligonucleotide
  Antisense strand to SEQ ID NO: 723894
uuugagacaacuaaaugca

SEQ ID NO: 723896 - RNA, 19 nt, Artificial Sequence
  Description of Artificial Sequence: Synthetic oligonucleotide
  Sense strand starting at position 3857 of SEQ ID NO: 586517
uagcauaggucucuagaau

SEQ ID NO: 723897 - RNA, 19 nt, Artificial Sequence
  Description of Artificial Sequence: Synthetic oligonucleotide
  Antisense strand to SEQ ID NO: 723896
auucuagagaccuaugcua

SEQ ID NO: 723898 - RNA, 19 nt, Artificial Sequence
  Description of Artificial Sequence: Synthetic oligonucleotide
  Sense strand starting at position 3858 of SEQ ID NO: 586517
agcauaggucucuagaauu

SEQ ID NO: 723899 - RNA, 19 nt, Artificial Sequence
  Description of Artificial Sequence: Synthetic oligonucleotide
  Antisense strand to SEQ ID NO: 723898
aauucuagagaccuaugcu

SEQ ID NO: 723900 - RNA, 19 nt, Artificial Sequence
  Description of Artificial Sequence: Synthetic oligonucleotide
  Sense strand starting at position 3906 of SEQ ID NO: 586517
ccuggcucucuguagacau

SEQ ID NO: 723901 - RNA, 19 nt, Artificial Sequence
  Description of Artificial Sequence: Synthetic oligonucleotide
  Antisense strand to SEQ ID NO: 723900
augucuacagagagccagg

SEQ ID NO: 723902 - RNA, 19 nt, Artificial Sequence
  Description of Artificial Sequence: Synthetic oligonucleotide
  Sense strand starting at position 16 of SEQ ID NO: 586518
cagccugguuugugccaaa

SEQ ID NO: 723903 - RNA, 19 nt, Artificial Sequence
  Description of Artificial Sequence: Synthetic oligonucleotide
  Antisense strand to SEQ ID NO: 723902
uuuggcacaaaccaggcug

SEQ ID NO: 723904 - RNA, 19 nt, Artificial Sequence
  Description of Artificial Sequence: Synthetic oligonucleotide
  Sense strand starting at position 41 of SEQ ID NO: 586518
aggaaaugccuuuggcaga

SEQ ID NO: 723905 - RNA, 19 nt, Artificial Sequence
  Description of Artificial Sequence: Synthetic oligonucleotide
  Antisense strand to SEQ ID NO: 723904
ucugccaaaggcauuuccu

SEQ ID NO: 723906 - RNA, 19 nt, Artificial Sequence
  Description of Artificial Sequence: Synthetic oligonucleotide
  Sense strand starting at position 42 of SEQ ID NO: 586518
ggaaaugccuuuggcagau

SEQ ID NO: 723907 - RNA, 19 nt, Artificial Sequence
  Description of Artificial Sequence: Synthetic oligonucleotide
  Antisense strand to SEQ ID NO: 723906
aucugccaaaggcauuucc

SEQ ID NO: 723908 - RNA, 19 nt, Artificial Sequence
  Description of Artificial Sequence: Synthetic oligonucleotide
  Sense strand starting at position 309 of SEQ ID NO: 586518
uugaguaucuggcaccaca

SEQ ID NO: 723909 - RNA, 19 nt, Artificial Sequence
  Description of Artificial Sequence: Synthetic oligonucleotide
  Antisense strand to SEQ ID NO: 723908
uguggugccagauacucaa

SEQ ID NO: 723910 - RNA, 19 nt, Artificial Sequence
  Description of Artificial Sequence: Synthetic oligonucleotide
  Sense strand starting at position 531 of SEQ ID NO: 586518
aagcgauaucuguggcucu

SEQ ID NO: 723911 - RNA, 19 nt, Artificial Sequence
  Description of Artificial Sequence: Synthetic oligonucleotide
  Antisense strand to SEQ ID NO: 723910
agagccacagauaucgcuu

SEQ ID NO: 723912 - RNA, 19 nt, Artificial Sequence
  Description of Artificial Sequence: Synthetic oligonucleotide
  Sense strand starting at position 532 of SEQ ID NO: 586518
agcgauaucuguggcucuu

SEQ ID NO: 723913 - RNA, 19 nt, Artificial Sequence
  Description of Artificial Sequence: Synthetic oligonucleotide
  Antisense strand to SEQ ID NO: 723912
aagagccacagauaucgcu

SEQ ID NO: 723914 - RNA, 19 nt, Artificial Sequence
  Description of Artificial Sequence: Synthetic oligonucleotide
  Sense strand starting at position 533 of SEQ ID NO: 586518
gcgauaucuguggcucuuu

SEQ ID NO: 723915 - RNA, 19 nt, Artificial Sequence
  Description of Artificial Sequence: Synthetic oligonucleotide
  Antisense strand to SEQ ID NO: 723914
aaagagccacagauaucgc

SEQ ID NO: 723916 - RNA, 19 nt, Artificial Sequence
  Description of Artificial Sequence: Synthetic oligonucleotide
  Sense strand starting at position 743 of SEQ ID NO: 586518
gauggugucucauuacguu

SEQ ID NO: 723917 - RNA, 19 nt, Artificial Sequence
  Description of Artificial Sequence: Synthetic oligonucleotide
  Antisense strand to SEQ ID NO: 723916
aacguaaugagacaccauc

SEQ ID NO: 723918 - RNA, 19 nt, Artificial Sequence
  Description of Artificial Sequence: Synthetic oligonucleotide
  Sense strand starting at position 845 of SEQ ID NO: 586518
gccugcaguuaaguucuaa

SEQ ID NO: 723919 - RNA, 19 nt, Artificial Sequence
  Description of Artificial Sequence: Synthetic oligonucleotide
  Antisense strand to SEQ ID NO: 723918
uuagaacuuaacugcaggc

SEQ ID NO: 723920 - RNA, 19 nt, Artificial Sequence
  Description of Artificial Sequence: Synthetic oligonucleotide
  Sense strand starting at position 893 of SEQ ID NO: 586518
ugggaacauucugguguca

SEQ ID NO: 723921 - RNA, 19 nt, Artificial Sequence
  Description of Artificial Sequence: Synthetic oligonucleotide
  Antisense strand to SEQ ID NO: 723920
ugacaccagaauguuccca

SEQ ID NO: 723922 - RNA, 19 nt, Artificial Sequence
  Description of Artificial Sequence: Synthetic oligonucleotide
  Sense strand starting at position 895 of SEQ ID NO: 586518
ggaacauucuggugucaau

SEQ ID NO: 723923 - RNA, 19 nt, Artificial Sequence
  Description of Artificial Sequence: Synthetic oligonucleotide
  Antisense strand to SEQ ID NO: 723922
auugacaccagaauguucc

SEQ ID NO: 723924 - RNA, 19 nt, Artificial Sequence
  Description of Artificial Sequence: Synthetic oligonucleotide
  Sense strand starting at position 898 of SEQ ID NO: 586518
acauucuggugucaauuau

SEQ ID NO: 723925 - RNA, 19 nt, Artificial Sequence
  Description of Artificial Sequence: Synthetic oligonucleotide
  Antisense strand to SEQ ID NO: 723924
auaauugacaccagaaugu

SEQ ID NO: 723926 - RNA, 19 nt, Artificial Sequence
  Description of Artificial Sequence: Synthetic oligonucleotide
  Sense strand starting at position 904 of SEQ ID NO: 586518
uggugucaauuauucuaua

SEQ ID NO: 723927 - RNA, 19 nt, Artificial Sequence
  Description of Artificial Sequence: Synthetic oligonucleotide
  Antisense strand to SEQ ID NO: 723926
uauagaauaauugacacca

SEQ ID NO: 723928 - RNA, 19 nt, Artificial Sequence
  Description of Artificial Sequence: Synthetic oligonucleotide
  Sense strand starting at position 905 of SEQ ID NO: 586518
ggugucaauuauucuauag

SEQ ID NO: 723929 - RNA, 19 nt, Artificial Sequence
  Description of Artificial Sequence: Synthetic oligonucleotide
  Antisense strand to SEQ ID NO: 723928
cuauagaauaauugacacc

SEQ ID NO: 723930 - RNA, 19 nt, Artificial Sequence
  Description of Artificial Sequence: Synthetic oligonucleotide
  Sense strand starting at position 907 of SEQ ID NO: 586518
ugucaauuauucuauaguc

SEQ ID NO: 723931 - RNA, 19 nt, Artificial Sequence
  Description of Artificial Sequence: Synthetic oligonucleotide
  Antisense strand to SEQ ID NO: 723930
gacuauagaauaauugaca

SEQ ID NO: 723932 - RNA, 19 nt, Artificial Sequence
  Description of Artificial Sequence: Synthetic oligonucleotide
  Sense strand starting at position 965 of SEQ ID NO: 586518
ugaucaagagggugguuau

SEQ ID NO: 723933 - RNA, 19 nt, Artificial Sequence
  Description of Artificial Sequence: Synthetic oligonucleotide
  Antisense strand to SEQ ID NO: 723932
auaaccacccucuugauca

SEQ ID NO: 723934 - RNA, 19 nt, Artificial Sequence
  Description of Artificial Sequence: Synthetic oligonucleotide
  Sense strand starting at position 966 of SEQ ID NO: 586518
gaucaagagggugguuauu

SEQ ID NO: 723935 - RNA, 19 nt, Artificial Sequence
  Description of Artificial Sequence: Synthetic oligonucleotide
  Antisense strand to SEQ ID NO: 723934
aauaaccacccucuugauc

SEQ ID NO: 723936 - RNA, 19 nt, Artificial Sequence
  Description of Artificial Sequence: Synthetic oligonucleotide
  Sense strand starting at position 976 of SEQ ID NO: 586518
gugguuauucaagggugca

SEQ ID NO: 723937 - RNA, 19 nt, Artificial Sequence
  Description of Artificial Sequence: Synthetic oligonucleotide
  Antisense strand to SEQ ID NO: 723936
ugcacccuugaauaaccac

SEQ ID NO: 723938 - RNA, 19 nt, Artificial Sequence
  Description of Artificial Sequence: Synthetic oligonucleotide
  Sense strand starting at position 1429 of SEQ ID NO: 586518
aguugagcauucccauauu

SEQ ID NO: 723939 - RNA, 19 nt, Artificial Sequence
  Description of Artificial Sequence: Synthetic oligonucleotide
  Antisense strand to SEQ ID NO: 723938
aauaugggaaugcucaacu

SEQ ID NO: 723940 - RNA, 19 nt, Artificial Sequence
  Description of Artificial Sequence: Synthetic oligonucleotide
  Sense strand starting at position 2023 of SEQ ID NO: 586518
cagggauuuccuugcugcu

SEQ ID NO: 723941 - RNA, 19 nt, Artificial Sequence
  Description of Artificial Sequence: Synthetic oligonucleotide
  Antisense strand to SEQ ID NO: 723940
agcagcaaggaaaucccug

SEQ ID NO: 723942 - RNA, 19 nt, Artificial Sequence
  Description of Artificial Sequence: Synthetic oligonucleotide
  Sense strand starting at position 2080 of SEQ ID NO: 586518
acugaaggccucuacuuau

SEQ ID NO: 723943 - RNA, 19 nt, Artificial Sequence
  Description of Artificial Sequence: Synthetic oligonucleotide
  Antisense strand to SEQ ID NO: 723942
auaaguagaggccuucagu

SEQ ID NO: 723944 - RNA, 19 nt, Artificial Sequence
  Description of Artificial Sequence: Synthetic oligonucleotide
  Sense strand starting at position 2118 of SEQ ID NO: 586518
cuccgucuuugucucaauu

SEQ ID NO: 723945 - RNA, 19 nt, Artificial Sequence
  Description of Artificial Sequence: Synthetic oligonucleotide
  Antisense strand to SEQ ID NO: 723944
aauugagacaaagacggag

SEQ ID NO: 723946 - RNA, 19 nt, Artificial Sequence
  Description of Artificial Sequence: Synthetic oligonucleotide
  Sense strand starting at position 2454 of SEQ ID NO: 586518
gugccuggcuugccuaauu

SEQ ID NO: 723947 - RNA, 19 nt, Artificial Sequence
  Description of Artificial Sequence: Synthetic oligonucleotide
  Antisense strand to SEQ ID NO: 723946
aauuaggcaagccaggcac

SEQ ID NO: 723948 - RNA, 19 nt, Artificial Sequence
  Description of Artificial Sequence: Synthetic oligonucleotide
  Sense strand starting at position 2874 of SEQ ID NO: 586518
cgggaucuggcaugaauca

SEQ ID NO: 723949 - RNA, 19 nt, Artificial Sequence
  Description of Artificial Sequence: Synthetic oligonucleotide
  Antisense strand to SEQ ID NO: 723948
ugauucaugccagaucccg

SEQ ID NO: 723950 - RNA, 19 nt, Artificial Sequence
  Description of Artificial Sequence: Synthetic oligonucleotide
  Sense strand starting at position 2881 of SEQ ID NO: 586518
uggcaugaaucacaaacuu

SEQ ID NO: 723951 - RNA, 19 nt, Artificial Sequence
  Description of Artificial Sequence: Synthetic oligonucleotide
  Antisense strand to SEQ ID NO: 723950
aaguuugugauucaugcca

SEQ ID NO: 723952 - RNA, 19 nt, Artificial Sequence
  Description of Artificial Sequence: Synthetic oligonucleotide
  Sense strand starting at position 2899 of SEQ ID NO: 586518
uacggaaguccagaauguu

SEQ ID NO: 723953 - RNA, 19 nt, Artificial Sequence
  Description of Artificial Sequence: Synthetic oligonucleotide
  Antisense strand to SEQ ID NO: 723952
aacauucuggacuuccgua

SEQ ID NO: 723954 - RNA, 19 nt, Artificial Sequence
  Description of Artificial Sequence: Synthetic oligonucleotide
  Sense strand starting at position 2907 of SEQ ID NO: 586518
uccagaauguuggagcaga

SEQ ID NO: 723955 - RNA, 19 nt, Artificial Sequence
  Description of Artificial Sequence: Synthetic oligonucleotide
  Antisense strand to SEQ ID NO: 723954
ucugcuccaacauucugga

SEQ ID NO: 723956 - RNA, 19 nt, Artificial Sequence
  Description of Artificial Sequence: Synthetic oligonucleotide
  Sense strand starting at position 2921 of SEQ ID NO: 586518
gcagaauggucccucagag

SEQ ID NO: 723957 - RNA, 19 nt, Artificial Sequence
  Description of Artificial Sequence: Synthetic oligonucleotide
  Antisense strand to SEQ ID NO: 723956
cucugagggaccauucugc

SEQ ID NO: 723958 - RNA, 19 nt, Artificial Sequence
  Description of Artificial Sequence: Synthetic oligonucleotide
  Sense strand starting at position 3935 of SEQ ID NO: 586518
gcgugucugcacuuugaga

SEQ ID NO: 723959 - RNA, 19 nt, Artificial Sequence
  Description of Artificial Sequence: Synthetic oligonucleotide
  Antisense strand to SEQ ID NO: 723958
ucucaaagugcagacacgc

SEQ ID NO: 723960 - RNA, 19 nt, Artificial Sequence
  Description of Artificial Sequence: Synthetic oligonucleotide
  Sense strand starting at position 3937 of SEQ ID NO: 586518
gugucugcacuuugagaca

SEQ ID NO: 723961 - RNA, 19 nt, Artificial Sequence
  Description of Artificial Sequence: Synthetic oligonucleotide
  Antisense strand to SEQ ID NO: 723960
ugucucaaagugcagacac

SEQ ID NO: 723962 - RNA, 19 nt, Artificial Sequence
  Description of Artificial Sequence: Synthetic oligonucleotide
  Sense strand starting at position 142 of SEQ ID NO: 586519
ggccguaugcgagaccgua

SEQ ID NO: 723963 - RNA, 19 nt, Artificial Sequence
  Description of Artificial Sequence: Synthetic oligonucleotide
  Antisense strand to SEQ ID NO: 723962
uacggucucgcauacggcc

SEQ ID NO: 723964 - RNA, 19 nt, Artificial Sequence
  Description of Artificial Sequence: Synthetic oligonucleotide
  Sense strand starting at position 144 of SEQ ID NO: 586519
ccguaugcgagaccguaua

SEQ ID NO: 723965 - RNA, 19 nt, Artificial Sequence
  Description of Artificial Sequence: Synthetic oligonucleotide
  Antisense strand to SEQ ID NO: 723964
uauacggucucgcauacgg

SEQ ID NO: 723966 - RNA, 19 nt, Artificial Sequence
  Description of Artificial Sequence: Synthetic oligonucleotide
  Sense strand starting at position 340 of SEQ ID NO: 586519
ccugcagccuucucagagu

SEQ ID NO: 723967 - RNA, 19 nt, Artificial Sequence
  Description of Artificial Sequence: Synthetic oligonucleotide
  Antisense strand to SEQ ID NO: 723966
acucugagaaggcugcagg

SEQ ID NO: 723968 - RNA, 19 nt, Artificial Sequence
  Description of Artificial Sequence: Synthetic oligonucleotide
  Sense strand starting at position 343 of SEQ ID NO: 586519
gcagccuucucagaguuua

SEQ ID NO: 723969 - RNA, 19 nt, Artificial Sequence
  Description of Artificial Sequence: Synthetic oligonucleotide
  Antisense strand to SEQ ID NO: 723968
uaaacucugagaaggcugc

SEQ ID NO: 723970 - RNA, 19 nt, Artificial Sequence
  Description of Artificial Sequence: Synthetic oligonucleotide
  Sense strand starting at position 348 of SEQ ID NO: 586519
cuucucagaguuuauugaa

SEQ ID NO: 723971 - RNA, 19 nt, Artificial Sequence
  Description of Artificial Sequence: Synthetic oligonucleotide
  Antisense strand to SEQ ID NO: 723970
uucaauaaacucugagaag

SEQ ID NO: 723972 - RNA, 19 nt, Artificial Sequence
  Description of Artificial Sequence: Synthetic oligonucleotide
  Sense strand starting at position 351 of SEQ ID NO: 586519
cucagaguuuauugaaggu

SEQ ID NO: 723973 - RNA, 19 nt, Artificial Sequence
  Description of Artificial Sequence: Synthetic oligonucleotide
  Antisense strand to SEQ ID NO: 723972
accuucaauaaacucugag

SEQ ID NO: 723974 - RNA, 19 nt, Artificial Sequence
  Description of Artificial Sequence: Synthetic oligonucleotide
  Sense strand starting at position 1426 of SEQ ID NO: 586519
acaagaaguuagucucgaa

SEQ ID NO: 723975 - RNA, 19 nt, Artificial Sequence
  Description of Artificial Sequence: Synthetic oligonucleotide
  Antisense strand to SEQ ID NO: 723974
uucgagacuaacuucuugu

SEQ ID NO: 723976 - RNA, 19 nt, Artificial Sequence
  Description of Artificial Sequence: Synthetic oligonucleotide
  Sense strand starting at position 1429 of SEQ ID NO: 586519
agaaguuagucucgaaccu

SEQ ID NO: 723977 - RNA, 19 nt, Artificial Sequence
  Description of Artificial Sequence: Synthetic oligonucleotide
  Antisense strand to SEQ ID NO: 723976
agguucgagacuaacuucu

SEQ ID NO: 723978 - RNA, 19 nt, Artificial Sequence
  Description of Artificial Sequence: Synthetic oligonucleotide
  Sense strand starting at position 1607 of SEQ ID NO: 586519
aggcuuuagacugagugga

SEQ ID NO: 723979 - RNA, 19 nt, Artificial Sequence
  Description of Artificial Sequence: Synthetic oligonucleotide
  Antisense strand to SEQ ID NO: 723978
uccacucagucuaaagccu

SEQ ID NO: 723980 - RNA, 19 nt, Artificial Sequence
  Description of Artificial Sequence: Synthetic oligonucleotide
  Sense strand starting at position 1609 of SEQ ID NO: 586519
gcuuuagacugaguggaag

SEQ ID NO: 723981 - RNA, 19 nt, Artificial Sequence
  Description of Artificial Sequence: Synthetic oligonucleotide
  Antisense strand to SEQ ID NO: 723980
cuuccacucagucuaaagc

SEQ ID NO: 723982 - RNA, 19 nt, Artificial Sequence
  Description of Artificial Sequence: Synthetic oligonucleotide
  Sense strand starting at position 2423 of SEQ ID NO: 586519
ggcucuuccuccgggauca

SEQ ID NO: 723983 - RNA, 19 nt, Artificial Sequence
  Description of Artificial Sequence: Synthetic oligonucleotide
  Antisense strand to SEQ ID NO: 723982
ugaucccggaggaagagcc

SEQ ID NO: 723984 - RNA, 19 nt, Artificial Sequence
  Description of Artificial Sequence: Synthetic oligonucleotide
  Sense strand starting at position 2992 of SEQ ID NO: 586519
gugugaguuccagagacuc

SEQ ID NO: 723985 - RNA, 19 nt, Artificial Sequence
  Description of Artificial Sequence: Synthetic oligonucleotide
  Antisense strand to SEQ ID NO: 723984
gagucucuggaacucacac

SEQ ID NO: 723986 - RNA, 19 nt, Artificial Sequence
  Description of Artificial Sequence: Synthetic oligonucleotide
  Sense strand starting at position 3021 of SEQ ID NO: 586519
ggagguuugcugugucccu

SEQ ID NO: 723987 - RNA, 19 nt, Artificial Sequence
  Description of Artificial Sequence: Synthetic oligonucleotide
  Antisense strand to SEQ ID NO: 723986
agggacacagcaaaccucc

SEQ ID NO: 723988 - RNA, 19 nt, Artificial Sequence
  Description of Artificial Sequence: Synthetic oligonucleotide
  Sense strand starting at position 3038 of SEQ ID NO: 586519
cugccugugugucugaaga

SEQ ID NO: 723989 - RNA, 19 nt, Artificial Sequence
  Description of Artificial Sequence: Synthetic oligonucleotide
  Antisense strand to SEQ ID NO: 723988
ucuucagacacacaggcag

SEQ ID NO: 723990 - RNA, 19 nt, Artificial Sequence
  Description of Artificial Sequence: Synthetic oligonucleotide
  Sense strand starting at position 1 of SEQ ID NO: 586520
gaacuauuguugguacuua

SEQ ID NO: 723991 - RNA, 19 nt, Artificial Sequence
  Description of Artificial Sequence: Synthetic oligonucleotide
  Antisense strand to SEQ ID NO: 723990
uaaguaccaacaauaguuc

SEQ ID NO: 723992 - RNA, 19 nt, Artificial Sequence
  Description of Artificial Sequence: Synthetic oligonucleotide
  Sense strand starting at position 138 of SEQ ID NO: 586520
uuaguugaguccuuaacca

SEQ ID NO: 723993 - RNA, 19 nt, Artificial Sequence
  Description of Artificial Sequence: Synthetic oligonucleotide
  Antisense strand to SEQ ID NO: 723992
ugguuaaggacucaacuaa

SEQ ID NO: 723994 - RNA, 19 nt, Artificial Sequence
  Description of Artificial Sequence: Synthetic oligonucleotide
  Sense strand starting at position 142 of SEQ ID NO: 586520
uugaguccuuaaccaaaga

SEQ ID NO: 723995 - RNA, 19 nt, Artificial Sequence
  Description of Artificial Sequence: Synthetic oligonucleotide
  Antisense strand to SEQ ID NO: 723994
ucuuugguuaaggacucaa

SEQ ID NO: 723996 - RNA, 19 nt, Artificial Sequence
  Description of Artificial Sequence: Synthetic oligonucleotide
  Sense strand starting at position 159 of SEQ ID NO: 586520
gaucuuuagagguguauag

SEQ ID NO: 723997 - RNA, 19 nt, Artificial Sequence
  Description of Artificial Sequence: Synthetic oligonucleotide
  Antisense strand to SEQ ID NO: 723996
cuauacaccucuaaagauc

SEQ ID NO: 723998 - RNA, 19 nt, Artificial Sequence
  Description of Artificial Sequence: Synthetic oligonucleotide
  Sense strand starting at position 161 of SEQ ID NO: 586520
ucuuuagagguguauaguu

SEQ ID NO: 723999 - RNA, 19 nt, Artificial Sequence
  Description of Artificial Sequence: Synthetic oligonucleotide
  Antisense strand to SEQ ID NO: 723998
aacuauacaccucuaaaga

SEQ ID NO: 724000 - RNA, 19 nt, Artificial Sequence
  Description of Artificial Sequence: Synthetic oligonucleotide
  Sense strand starting at position 217 of SEQ ID NO: 586520
gugggagaauccuuccuua

SEQ ID NO: 724001 - RNA, 19 nt, Artificial Sequence
  Description of Artificial Sequence: Synthetic oligonucleotide
  Antisense strand to SEQ ID NO: 724000
uaaggaaggauucucccac

SEQ ID NO: 724002 - RNA, 19 nt, Artificial Sequence
  Description of Artificial Sequence: Synthetic oligonucleotide
  Sense strand starting at position 251 of SEQ ID NO: 586520
aguguuguaccuuagagaa

SEQ ID NO: 724003 - RNA, 19 nt, Artificial Sequence
  Description of Artificial Sequence: Synthetic oligonucleotide
  Antisense strand to SEQ ID NO: 724002
uucucuaagguacaacacu

SEQ ID NO: 724004 - RNA, 19 nt, Artificial Sequence
  Description of Artificial Sequence: Synthetic oligonucleotide
  Sense strand starting at position 390 of SEQ ID NO: 586520
ugaguuaucucacugucag

SEQ ID NO: 724005 - RNA, 19 nt, Artificial Sequence
  Description of Artificial Sequence: Synthetic oligonucleotide
  Antisense strand to SEQ ID NO: 724004
cugacagugagauaacuca

SEQ ID NO: 724006 - RNA, 19 nt, Artificial Sequence
  Description of Artificial Sequence: Synthetic oligonucleotide
  Sense strand starting at position 391 of SEQ ID NO: 586520
gaguuaucucacugucaga

SEQ ID NO: 724007 - RNA, 19 nt, Artificial Sequence
  Description of Artificial Sequence: Synthetic oligonucleotide
  Antisense strand to SEQ ID NO: 724006
ucugacagugagauaacuc

SEQ ID NO: 724008 - RNA, 19 nt, Artificial Sequence
  Description of Artificial Sequence: Synthetic oligonucleotide
  Sense strand starting at position 722 of SEQ ID NO: 586520
aggugguuggcugaugaga

SEQ ID NO: 724009 - RNA, 19 nt, Artificial Sequence
  Description of Artificial Sequence: Synthetic oligonucleotide
  Antisense strand to SEQ ID NO: 724008
ucucaucagccaaccaccu

SEQ ID NO: 724010 - RNA, 19 nt, Artificial Sequence
  Description of Artificial Sequence: Synthetic oligonucleotide
  Sense strand starting at position 733 of SEQ ID NO: 586520
ugaugagacuggucucucu

SEQ ID NO: 724011 - RNA, 19 nt, Artificial Sequence
  Description of Artificial Sequence: Synthetic oligonucleotide
  Antisense strand to SEQ ID NO: 724010
agagagaccagucucauca

SEQ ID NO: 724012 - RNA, 19 nt, Artificial Sequence
  Description of Artificial Sequence: Synthetic oligonucleotide
  Sense strand starting at position 799 of SEQ ID NO: 586520
gcagaucuaugcccugaaa

SEQ ID NO: 724013 - RNA, 19 nt, Artificial Sequence
  Description of Artificial Sequence: Synthetic oligonucleotide
  Antisense strand to SEQ ID NO: 724012
uuucagggcauagaucugc

SEQ ID NO: 724014 - RNA, 19 nt, Artificial Sequence
  Description of Artificial Sequence: Synthetic oligonucleotide
  Sense strand starting at position 801 of SEQ ID NO: 586520
agaucuaugcccugaaauc

SEQ ID NO: 724015 - RNA, 19 nt, Artificial Sequence
  Description of Artificial Sequence: Synthetic oligonucleotide
  Antisense strand to SEQ ID NO: 724014
gauuucagggcauagaucu

SEQ ID NO: 724016 - RNA, 19 nt, Artificial Sequence
  Description of Artificial Sequence: Synthetic oligonucleotide
  Sense strand starting at position 2019 of SEQ ID NO: 586520
aggguuugugcagaacaau

SEQ ID NO: 724017 - RNA, 19 nt, Artificial Sequence
  Description of Artificial Sequence: Synthetic oligonucleotide
  Antisense strand to SEQ ID NO: 724016
auuguucugcacaaacccu

SEQ ID NO: 724018 - RNA, 19 nt, Artificial Sequence
  Description of Artificial Sequence: Synthetic oligonucleotide
  Sense strand starting at position 2029 of SEQ ID NO: 586520
cagaacaaucucuggguca

SEQ ID NO: 724019 - RNA, 19 nt, Artificial Sequence
  Description of Artificial Sequence: Synthetic oligonucleotide
  Antisense strand to SEQ ID NO: 724018
ugacccagagauuguucug

SEQ ID NO: 724020 - RNA, 19 nt, Artificial Sequence
  Description of Artificial Sequence: Synthetic oligonucleotide
  Sense strand starting at position 2089 of SEQ ID NO: 586520
aucuucucccucugaagga

SEQ ID NO: 724021 - RNA, 19 nt, Artificial Sequence
  Description of Artificial Sequence: Synthetic oligonucleotide
  Antisense strand to SEQ ID NO: 724020
uccuucagagggagaagau

SEQ ID NO: 724022 - RNA, 19 nt, Artificial Sequence
  Description of Artificial Sequence: Synthetic oligonucleotide
  Sense strand starting at position 2317 of SEQ ID NO: 586520
gucggauacagucaauguu

SEQ ID NO: 724023 - RNA, 19 nt, Artificial Sequence
  Description of Artificial Sequence: Synthetic oligonucleotide
  Antisense strand to SEQ ID NO: 724022
aacauugacuguauccgac

SEQ ID NO: 724024 - RNA, 19 nt, Artificial Sequence
  Description of Artificial Sequence: Synthetic oligonucleotide
  Sense strand starting at position 2326 of SEQ ID NO: 586520
agucaauguuuccuacaga

SEQ ID NO: 724025 - RNA, 19 nt, Artificial Sequence
  Description of Artificial Sequence: Synthetic oligonucleotide
  Antisense strand to SEQ ID NO: 724024
ucuguaggaaacauugacu

SEQ ID NO: 724026 - RNA, 19 nt, Artificial Sequence
  Description of Artificial Sequence: Synthetic oligonucleotide
  Sense strand starting at position 2567 of SEQ ID NO: 586520
uguauuaaccaaggacuga

SEQ ID NO: 724027 - RNA, 19 nt, Artificial Sequence
  Description of Artificial Sequence: Synthetic oligonucleotide
  Antisense strand to SEQ ID NO: 724026
ucaguccuugguuaauaca

SEQ ID NO: 724028 - RNA, 19 nt, Artificial Sequence
  Description of Artificial Sequence: Synthetic oligonucleotide
  Sense strand starting at position 2682 of SEQ ID NO: 586520
guaaccuagccagaacuuu

SEQ ID NO: 724029 - RNA, 19 nt, Artificial Sequence
  Description of Artificial Sequence: Synthetic oligonucleotide
  Antisense strand to SEQ ID NO: 724028
aaaguucuggcuagguuac

SEQ ID NO: 724030 - RNA, 19 nt, Artificial Sequence
  Description of Artificial Sequence: Synthetic oligonucleotide
  Sense strand starting at position 2901 of SEQ ID NO: 586520
aacguauucuuucuggaau

SEQ ID NO: 724031 - RNA, 19 nt, Artificial Sequence
  Description of Artificial Sequence: Synthetic oligonucleotide
  Antisense strand to SEQ ID NO: 724030
auuccagaaagaauacguu

SEQ ID NO: 724032 - RNA, 19 nt, Artificial Sequence
  Description of Artificial Sequence: Synthetic oligonucleotide
  Sense strand starting at position 2907 of SEQ ID NO: 586520
uucuuucuggaaugcaaua

SEQ ID NO: 724033 - RNA, 19 nt, Artificial Sequence
  Description of Artificial Sequence: Synthetic oligonucleotide
  Antisense strand to SEQ ID NO: 724032
uauugcauuccagaaagaa

SEQ ID NO: 724034 - RNA, 19 nt, Artificial Sequence
  Description of Artificial Sequence: Synthetic oligonucleotide
  Sense strand starting at position 2912 of SEQ ID NO: 586520
ucuggaaugcaauagcauu

SEQ ID NO: 724035 - RNA, 19 nt, Artificial Sequence
  Description of Artificial Sequence: Synthetic oligonucleotide
  Antisense strand to SEQ ID NO: 724034
aaugcuauugcauuccaga

SEQ ID NO: 724036 - RNA, 19 nt, Artificial Sequence
  Description of Artificial Sequence: Synthetic oligonucleotide
  Sense strand starting at position 3096 of SEQ ID NO: 586520
acaugaacaugagaaagau

SEQ ID NO: 724037 - RNA, 19 nt, Artificial Sequence
  Description of Artificial Sequence: Synthetic oligonucleotide
  Antisense strand to SEQ ID NO: 724036
aucuuucucauguucaugu

SEQ ID NO: 724038 - RNA, 19 nt, Artificial Sequence
  Description of Artificial Sequence: Synthetic oligonucleotide
  Sense strand starting at position 3222 of SEQ ID NO: 586520
aucagaauuagcugggauu

SEQ ID NO: 724039 - RNA, 19 nt, Artificial Sequence
  Description of Artificial Sequence: Synthetic oligonucleotide
  Antisense strand to SEQ ID NO: 724038
aaucccagcuaauucugau

SEQ ID NO: 724040 - RNA, 19 nt, Artificial Sequence
  Description of Artificial Sequence: Synthetic oligonucleotide
  Sense strand starting at position 3223 of SEQ ID NO: 586520
ucagaauuagcugggauug

SEQ ID NO: 724041 - RNA, 19 nt, Artificial Sequence
  Description of Artificial Sequence: Synthetic oligonucleotide
  Antisense strand to SEQ ID NO: 724040
caaucccagcuaauucuga

SEQ ID NO: 724042 - RNA, 19 nt, Artificial Sequence
  Description of Artificial Sequence: Synthetic oligonucleotide
  Sense strand starting at position 3224 of SEQ ID NO: 586520
cagaauuagcugggauuga

SEQ ID NO: 724043 - RNA, 19 nt, Artificial Sequence
  Description of Artificial Sequence: Synthetic oligonucleotide
  Antisense strand to SEQ ID NO: 724042
ucaaucccagcuaauucug

SEQ ID NO: 724044 - RNA, 19 nt, Artificial Sequence
  Description of Artificial Sequence: Synthetic oligonucleotide
  Sense strand starting at position 3248 of SEQ ID NO: 586520
guagaagagagcugauguu

SEQ ID NO: 724045 - RNA, 19 nt, Artificial Sequence
  Description of Artificial Sequence: Synthetic oligonucleotide
  Antisense strand to SEQ ID NO: 724044
aacaucagcucucuucuac

SEQ ID NO: 724046 - RNA, 19 nt, Artificial Sequence
  Description of Artificial Sequence: Synthetic oligonucleotide
  Sense strand starting at position 3305 of SEQ ID NO: 586520
acggaaagugcugauaaac

SEQ ID NO: 724047 - RNA, 19 nt, Artificial Sequence
  Description of Artificial Sequence: Synthetic oligonucleotide
  Antisense strand to SEQ ID NO: 724046
guuuaucagcacuuuccgu

SEQ ID NO: 724048 - RNA, 19 nt, Artificial Sequence
  Description of Artificial Sequence: Synthetic oligonucleotide
  Sense strand starting at position 3356 of SEQ ID NO: 586520
aaggcuuguggugaguaga

SEQ ID NO: 724049 - RNA, 19 nt, Artificial Sequence
  Description of Artificial Sequence: Synthetic oligonucleotide
  Antisense strand to SEQ ID NO: 724048
ucuacucaccacaagccuu

SEQ ID NO: 724050 - RNA, 19 nt, Artificial Sequence
  Description of Artificial Sequence: Synthetic oligonucleotide
  Sense strand starting at position 3366 of SEQ ID NO: 586520
gugaguagaggcugaaaug

SEQ ID NO: 724051 - RNA, 19 nt, Artificial Sequence
  Description of Artificial Sequence: Synthetic oligonucleotide
  Antisense strand to SEQ ID NO: 724050
cauuucagccucuacucac

SEQ ID NO: 724052 - RNA, 19 nt, Artificial Sequence
  Description of Artificial Sequence: Synthetic oligonucleotide
  Sense strand starting at position 3375 of SEQ ID NO: 586520
ggcugaaaugcugaggcaa

SEQ ID NO: 724053 - RNA, 19 nt, Artificial Sequence
  Description of Artificial Sequence: Synthetic oligonucleotide
  Antisense strand to SEQ ID NO: 724052
uugccucagcauuucagcc

SEQ ID NO: 724054 - RNA, 19 nt, Artificial Sequence
  Description of Artificial Sequence: Synthetic oligonucleotide
  Sense strand starting at position 3397 of SEQ ID NO: 586520
aucagucuguuaucagaua

SEQ ID NO: 724055 - RNA, 19 nt, Artificial Sequence
  Description of Artificial Sequence: Synthetic oligonucleotide
  Antisense strand to SEQ ID NO: 724054
uaucugauaacagacugau

SEQ ID NO: 724056 - RNA, 19 nt, Artificial Sequence
  Description of Artificial Sequence: Synthetic oligonucleotide
  Sense strand starting at position 3408 of SEQ ID NO: 586520
aucagauauugccugauga

SEQ ID NO: 724057 - RNA, 19 nt, Artificial Sequence
  Description of Artificial Sequence: Synthetic oligonucleotide
  Antisense strand to SEQ ID NO: 724056
ucaucaggcaauaucugau

SEQ ID NO: 724058 - RNA, 19 nt, Artificial Sequence
  Description of Artificial Sequence: Synthetic oligonucleotide
  Sense strand starting at position 3409 of SEQ ID NO: 586520
ucagauauugccugaugag

SEQ ID NO: 724059 - RNA, 19 nt, Artificial Sequence
  Description of Artificial Sequence: Synthetic oligonucleotide
  Antisense strand to SEQ ID NO: 724058
cucaucaggcaauaucuga

SEQ ID NO: 724060 - RNA, 19 nt, Artificial Sequence
  Description of Artificial Sequence: Synthetic oligonucleotide
  Sense strand starting at position 3610 of SEQ ID NO: 586520
uuaguaaauccauguaaga

SEQ ID NO: 724061 - RNA, 19 nt, Artificial Sequence
  Description of Artificial Sequence: Synthetic oligonucleotide
  Antisense strand to SEQ ID NO: 724060
ucuuacauggauuuacuaa

SEQ ID NO: 724062 - RNA, 19 nt, Artificial Sequence
  Description of Artificial Sequence: Synthetic oligonucleotide
  Sense strand starting at position 3735 of SEQ ID NO: 586520
guuuaaauucgucauugau

SEQ ID NO: 724063 - RNA, 19 nt, Artificial Sequence
  Description of Artificial Sequence: Synthetic oligonucleotide
  Antisense strand to SEQ ID NO: 724062
aucaaugacgaauuuaaac

SEQ ID NO: 724064 - RNA, 19 nt, Artificial Sequence
  Description of Artificial Sequence: Synthetic oligonucleotide
  Sense strand starting at position 3755 of SEQ ID NO: 586520
gggaauauagauuggcuuu

SEQ ID NO: 724065 - RNA, 19 nt, Artificial Sequence
  Description of Artificial Sequence: Synthetic oligonucleotide
  Antisense strand to SEQ ID NO: 724064
aaagccaaucuauauuccc

SEQ ID NO: 724066 - RNA, 19 nt, Artificial Sequence
  Description of Artificial Sequence: Synthetic oligonucleotide
  Sense strand starting at position 3854 of SEQ ID NO: 586520
ccucaagggauaggucuaa

SEQ ID NO: 724067 - RNA, 19 nt, Artificial Sequence
  Description of Artificial Sequence: Synthetic oligonucleotide
  Antisense strand to SEQ ID NO: 724066
uuagaccuaucccuugagg

SEQ ID NO: 724068 - RNA, 19 nt, Artificial Sequence
  Description of Artificial Sequence: Synthetic oligonucleotide
  Sense strand starting at position 3954 of SEQ ID NO: 586520
gggcuccauuucuaaacaa

SEQ ID NO: 724069 - RNA, 19 nt, Artificial Sequence
  Description of Artificial Sequence: Synthetic oligonucleotide
  Antisense strand to SEQ ID NO: 724068
uuguuuagaaauggagccc

SEQ ID NO: 724070 - RNA, 19 nt, Artificial Sequence
  Description of Artificial Sequence: Synthetic oligonucleotide
  Sense strand starting at position 397 of SEQ ID NO: 586521
gugaguuaacaauaacuuu

SEQ ID NO: 724071 - RNA, 19 nt, Artificial Sequence
  Description of Artificial Sequence: Synthetic oligonucleotide
  Antisense strand to SEQ ID NO: 724070
aaaguuauuguuaacucac

SEQ ID NO: 724072 - RNA, 19 nt, Artificial Sequence
  Description of Artificial Sequence: Synthetic oligonucleotide
  Sense strand starting at position 591 of SEQ ID NO: 586521
auuccaagucuguaucaga

SEQ ID NO: 724073 - RNA, 19 nt, Artificial Sequence
  Description of Artificial Sequence: Synthetic oligonucleotide
  Antisense strand to SEQ ID NO: 724072
ucugauacagacuuggaau

SEQ ID NO: 724074 - RNA, 19 nt, Artificial Sequence
  Description of Artificial Sequence: Synthetic oligonucleotide
  Sense strand starting at position 604 of SEQ ID NO: 586521
aucagagcagucugaauua

SEQ ID NO: 724075 - RNA, 19 nt, Artificial Sequence
  Description of Artificial Sequence: Synthetic oligonucleotide
  Antisense strand to SEQ ID NO: 724074
uaauucagacugcucugau

SEQ ID NO: 724076 - RNA, 19 nt, Artificial Sequence
  Description of Artificial Sequence: Synthetic oligonucleotide
  Sense strand starting at position 985 of SEQ ID NO: 586521
guuaauuguaaguaaugga

SEQ ID NO: 724077 - RNA, 19 nt, Artificial Sequence
  Description of Artificial Sequence: Synthetic oligonucleotide
  Antisense strand to SEQ ID NO: 724076
uccauuacuuacaauuaac

SEQ ID NO: 724078 - RNA, 19 nt, Artificial Sequence
  Description of Artificial Sequence: Synthetic oligonucleotide
  Sense strand starting at position 1114 of SEQ ID NO: 586521
ugcaguaggagucauagca

SEQ ID NO: 724079 - RNA, 19 nt, Artificial Sequence
  Description of Artificial Sequence: Synthetic oligonucleotide
  Antisense strand to SEQ ID NO: 724078
ugcuaugacuccuacugca

SEQ ID NO: 724080 - RNA, 19 nt, Artificial Sequence
  Description of Artificial Sequence: Synthetic oligonucleotide
  Sense strand starting at position 1275 of SEQ ID NO: 586521
guggaucuccauuagcaca

SEQ ID NO: 724081 - RNA, 19 nt, Artificial Sequence
  Description of Artificial Sequence: Synthetic oligonucleotide
  Antisense strand to SEQ ID NO: 724080
ugugcuaauggagauccac

SEQ ID NO: 724082 - RNA, 19 nt, Artificial Sequence
  Description of Artificial Sequence: Synthetic oligonucleotide
  Sense strand starting at position 1337 of SEQ ID NO: 586521
guuagagacugcuccaaag

SEQ ID NO: 724083 - RNA, 19 nt, Artificial Sequence
  Description of Artificial Sequence: Synthetic oligonucleotide
  Antisense strand to SEQ ID NO: 724082
cuuuggagcagucucuaac

SEQ ID NO: 724084 - RNA, 19 nt, Artificial Sequence
  Description of Artificial Sequence: Synthetic oligonucleotide
  Sense strand starting at position 1415 of SEQ ID NO: 586521
agaucaggguccuuguuaa

SEQ ID NO: 724085 - RNA, 19 nt, Artificial Sequence
  Description of Artificial Sequence: Synthetic oligonucleotide
  Antisense strand to SEQ ID NO: 724084
uuaacaaggacccugaucu

SEQ ID NO: 724086 - RNA, 19 nt, Artificial Sequence
  Description of Artificial Sequence: Synthetic oligonucleotide
  Sense strand starting at position 1427 of SEQ ID NO: 586521
uuguuaaucuggucaauug

SEQ ID NO: 724087 - RNA, 19 nt, Artificial Sequence
  Description of Artificial Sequence: Synthetic oligonucleotide
  Antisense strand to SEQ ID NO: 724086
caauugaccagauuaacaa

SEQ ID NO: 724088 - RNA, 19 nt, Artificial Sequence
  Description of Artificial Sequence: Synthetic oligonucleotide
  Sense strand starting at position 1436 of SEQ ID NO: 586521
uggucaauugcauaaagca

SEQ ID NO: 724089 - RNA, 19 nt, Artificial Sequence
  Description of Artificial Sequence: Synthetic oligonucleotide
  Antisense strand to SEQ ID NO: 724088
ugcuuuaugcaauugacca

SEQ ID NO: 724090 - RNA, 19 nt, Artificial Sequence
  Description of Artificial Sequence: Synthetic oligonucleotide
  Sense strand starting at position 1667 of SEQ ID NO: 586521
gaucgcuuucccucgcaua

SEQ ID NO: 724091 - RNA, 19 nt, Artificial Sequence
  Description of Artificial Sequence: Synthetic oligonucleotide
  Antisense strand to SEQ ID NO: 724090
uaugcgagggaaagcgauc

SEQ ID NO: 724092 - RNA, 19 nt, Artificial Sequence
  Description of Artificial Sequence: Synthetic oligonucleotide
  Sense strand starting at position 1728 of SEQ ID NO: 586521
uuauucuugccacagaaga

SEQ ID NO: 724093 - RNA, 19 nt, Artificial Sequence
  Description of Artificial Sequence: Synthetic oligonucleotide
  Antisense strand to SEQ ID NO: 724092
ucuucuguggcaagaauaa

SEQ ID NO: 724094 - RNA, 19 nt, Artificial Sequence
  Description of Artificial Sequence: Synthetic oligonucleotide
  Sense strand starting at position 1834 of SEQ ID NO: 586521
auuugaaugucacagugaa

SEQ ID NO: 724095 - RNA, 19 nt, Artificial Sequence
  Description of Artificial Sequence: Synthetic oligonucleotide
  Antisense strand to SEQ ID NO: 724094
uucacugugacauucaaau

SEQ ID NO: 724096 - RNA, 19 nt, Artificial Sequence
  Description of Artificial Sequence: Synthetic oligonucleotide
  Sense strand starting at position 1893 of SEQ ID NO: 586521
agaucaacuugccuggaau

SEQ ID NO: 724097 - RNA, 19 nt, Artificial Sequence
  Description of Artificial Sequence: Synthetic oligonucleotide
  Antisense strand to SEQ ID NO: 724096
auuccaggcaaguugaucu

SEQ ID NO: 724098 - RNA, 19 nt, Artificial Sequence
  Description of Artificial Sequence: Synthetic oligonucleotide
  Sense strand starting at position 1894 of SEQ ID NO: 586521
gaucaacuugccuggaaug

SEQ ID NO: 724099 - RNA, 19 nt, Artificial Sequence
  Description of Artificial Sequence: Synthetic oligonucleotide
  Antisense strand to SEQ ID NO: 724098
cauuccaggcaaguugauc

SEQ ID NO: 724100 - RNA, 19 nt, Artificial Sequence
  Description of Artificial Sequence: Synthetic oligonucleotide
  Sense strand starting at position 1935 of SEQ ID NO: 586521
gguucugauguugggauga

SEQ ID NO: 724101 - RNA, 19 nt, Artificial Sequence
  Description of Artificial Sequence: Synthetic oligonucleotide
  Antisense strand to SEQ ID NO: 724100
ucaucccaacaucagaacc

SEQ ID NO: 724102 - RNA, 19 nt, Artificial Sequence
  Description of Artificial Sequence: Synthetic oligonucleotide
  Sense strand starting at position 1980 of SEQ ID NO: 586521
agccuuguagcagaauuau

SEQ ID NO: 724103 - RNA, 19 nt, Artificial Sequence
  Description of Artificial Sequence: Synthetic oligonucleotide
  Antisense strand to SEQ ID NO: 724102
auaauucugcuacaaggcu

SEQ ID NO: 724104 - RNA, 19 nt, Artificial Sequence
  Description of Artificial Sequence: Synthetic oligonucleotide
  Sense strand starting at position 1989 of SEQ ID NO: 586521
gcagaauuauuccugggaa

SEQ ID NO: 724105 - RNA, 19 nt, Artificial Sequence
  Description of Artificial Sequence: Synthetic oligonucleotide
  Antisense strand to SEQ ID NO: 724104
uucccaggaauaauucugc

SEQ ID NO: 724106 - RNA, 19 nt, Artificial Sequence
  Description of Artificial Sequence: Synthetic oligonucleotide
  Sense strand starting at position 2157 of SEQ ID NO: 586521
gcaucuaaacagggagauu

SEQ ID NO: 724107 - RNA, 19 nt, Artificial Sequence
  Description of Artificial Sequence: Synthetic oligonucleotide
  Antisense strand to SEQ ID NO: 724106
aaucucccuguuuagaugc

SEQ ID NO: 724108 - RNA, 19 nt, Artificial Sequence
  Description of Artificial Sequence: Synthetic oligonucleotide
  Sense strand starting at position 2218 of SEQ ID NO: 586521
guagguugauucucccaaa

SEQ ID NO: 724109 - RNA, 19 nt, Artificial Sequence
  Description of Artificial Sequence: Synthetic oligonucleotide
  Antisense strand to SEQ ID NO: 724108
uuugggagaaucaaccuac

SEQ ID NO: 724110 - RNA, 19 nt, Artificial Sequence
  Description of Artificial Sequence: Synthetic oligonucleotide
  Sense strand starting at position 2682 of SEQ ID NO: 586521
uugucaggguuuccaauua

SEQ ID NO: 724111 - RNA, 19 nt, Artificial Sequence
  Description of Artificial Sequence: Synthetic oligonucleotide
  Antisense strand to SEQ ID NO: 724110
uaauuggaaacccugacaa

SEQ ID NO: 724112 - RNA, 19 nt, Artificial Sequence
  Description of Artificial Sequence: Synthetic oligonucleotide
  Sense strand starting at position 2694 of SEQ ID NO: 586521
ccaauuaauuugucggugu

SEQ ID NO: 724113 - RNA, 19 nt, Artificial Sequence
  Description of Artificial Sequence: Synthetic oligonucleotide
  Antisense strand to SEQ ID NO: 724112
acaccgacaaauuaauugg

SEQ ID NO: 724114 - RNA, 19 nt, Artificial Sequence
  Description of Artificial Sequence: Synthetic oligonucleotide
  Sense strand starting at position 2698 of SEQ ID NO: 586521
uuaauuugucgguguggga

SEQ ID NO: 724115 - RNA, 19 nt, Artificial Sequence
  Description of Artificial Sequence: Synthetic oligonucleotide
  Antisense strand to SEQ ID NO: 724114
ucccacaccgacaaauuaa

SEQ ID NO: 724116 - RNA, 19 nt, Artificial Sequence
  Description of Artificial Sequence: Synthetic oligonucleotide
  Sense strand starting at position 2711 of SEQ ID NO: 586521
gugggagcaauggguauau

SEQ ID NO: 724117 - RNA, 19 nt, Artificial Sequence
  Description of Artificial Sequence: Synthetic oligonucleotide
  Antisense strand to SEQ ID NO: 724116
auauacccauugcucccac

SEQ ID NO: 724118 - RNA, 19 nt, Artificial Sequence
  Description of Artificial Sequence: Synthetic oligonucleotide
  Sense strand starting at position 2741 of SEQ ID NO: 586521
agggaaacaugccuugauc

SEQ ID NO: 724119 - RNA, 19 nt, Artificial Sequence
  Description of Artificial Sequence: Synthetic oligonucleotide
  Antisense strand to SEQ ID NO: 724118
gaucaaggcauguuucccu

SEQ ID NO: 724120 - RNA, 19 nt, Artificial Sequence
  Description of Artificial Sequence: Synthetic oligonucleotide
  Sense strand starting at position 2760 of SEQ ID NO: 586521
ccagaaucacuaggagcaa

SEQ ID NO: 724121 - RNA, 19 nt, Artificial Sequence
  Description of Artificial Sequence: Synthetic oligonucleotide
  Antisense strand to SEQ ID NO: 724120
uugcuccuagugauucugg

SEQ ID NO: 724122 - RNA, 19 nt, Artificial Sequence
  Description of Artificial Sequence: Synthetic oligonucleotide
  Sense strand starting at position 2917 of SEQ ID NO: 586521
acccuuaauuccguaagau

SEQ ID NO: 724123 - RNA, 19 nt, Artificial Sequence
  Description of Artificial Sequence: Synthetic oligonucleotide
  Antisense strand to SEQ ID NO: 724122
aucuuacggaauuaagggu

SEQ ID NO: 724124 - RNA, 19 nt, Artificial Sequence
  Description of Artificial Sequence: Synthetic oligonucleotide
  Sense strand starting at position 2918 of SEQ ID NO: 586521
cccuuaauuccguaagauu

SEQ ID NO: 724125 - RNA, 19 nt, Artificial Sequence
  Description of Artificial Sequence: Synthetic oligonucleotide
  Antisense strand to SEQ ID NO: 724124
aaucuuacggaauuaaggg

SEQ ID NO: 724126 - RNA, 19 nt, Artificial Sequence
  Description of Artificial Sequence: Synthetic oligonucleotide
  Sense strand starting at position 2990 of SEQ ID NO: 586521
cagggaaucugagauuugu

SEQ ID NO: 724127 - RNA, 19 nt, Artificial Sequence
  Description of Artificial Sequence: Synthetic oligonucleotide
  Antisense strand to SEQ ID NO: 724126
acaaaucucagauucccug

SEQ ID NO: 724128 - RNA, 19 nt, Artificial Sequence
  Description of Artificial Sequence: Synthetic oligonucleotide
  Sense strand starting at position 3054 of SEQ ID NO: 586521
caggaugguuaaucuaaug

SEQ ID NO: 724129 - RNA, 19 nt, Artificial Sequence
  Description of Artificial Sequence: Synthetic oligonucleotide
  Antisense strand to SEQ ID NO: 724128
cauuagauuaaccauccug

SEQ ID NO: 724130 - RNA, 19 nt, Artificial Sequence
  Description of Artificial Sequence: Synthetic oligonucleotide
  Sense strand starting at position 3097 of SEQ ID NO: 586521
ggguuugaaaccugaaauu

SEQ ID NO: 724131 - RNA, 19 nt, Artificial Sequence
  Description of Artificial Sequence: Synthetic oligonucleotide
  Antisense strand to SEQ ID NO: 724130
aauuucagguuucaaaccc

SEQ ID NO: 724132 - RNA, 19 nt, Artificial Sequence
  Description of Artificial Sequence: Synthetic oligonucleotide
  Sense strand starting at position 3106 of SEQ ID NO: 586521
accugaaauuuggacaguu

SEQ ID NO: 724133 - RNA, 19 nt, Artificial Sequence
  Description of Artificial Sequence: Synthetic oligonucleotide
  Antisense strand to SEQ ID NO: 724132
aacuguccaaauuucaggu

SEQ ID NO: 724134 - RNA, 19 nt, Artificial Sequence
  Description of Artificial Sequence: Synthetic oligonucleotide
  Sense strand starting at position 3119 of SEQ ID NO: 586521
acaguucuccuguacccua

SEQ ID NO: 724135 - RNA, 19 nt, Artificial Sequence
  Description of Artificial Sequence: Synthetic oligonucleotide
  Antisense strand to SEQ ID NO: 724134
uaggguacaggagaacugu

SEQ ID NO: 724136 - RNA, 19 nt, Artificial Sequence
  Description of Artificial Sequence: Synthetic oligonucleotide
  Sense strand starting at position 3291 of SEQ ID NO: 586521
uuugcacuugcagauuaga

SEQ ID NO: 724137 - RNA, 19 nt, Artificial Sequence
  Description of Artificial Sequence: Synthetic oligonucleotide
  Antisense strand to SEQ ID NO: 724136
ucuaaucugcaagugcaaa

SEQ ID NO: 724138 - RNA, 19 nt, Artificial Sequence
  Description of Artificial Sequence: Synthetic oligonucleotide
  Sense strand starting at position 3449 of SEQ ID NO: 586521
uuagauuuccucugugcug

SEQ ID NO: 724139 - RNA, 19 nt, Artificial Sequence
  Description of Artificial Sequence: Synthetic oligonucleotide
  Antisense strand to SEQ ID NO: 724138
cagcacagaggaaaucuaa

SEQ ID NO: 724140 - RNA, 19 nt, Artificial Sequence
  Description of Artificial Sequence: Synthetic oligonucleotide
  Sense strand starting at position 3684 of SEQ ID NO: 586521
aaguaagauuguguuuaac

SEQ ID NO: 724141 - RNA, 19 nt, Artificial Sequence
  Description of Artificial Sequence: Synthetic oligonucleotide
  Antisense strand to SEQ ID NO: 724140
guuaaacacaaucuuacuu

SEQ ID NO: 724142 - RNA, 19 nt, Artificial Sequence
  Description of Artificial Sequence: Synthetic oligonucleotide
  Sense strand starting at position 3686 of SEQ ID NO: 586521
guaagauuguguuuaacag

SEQ ID NO: 724143 - RNA, 19 nt, Artificial Sequence
  Description of Artificial Sequence: Synthetic oligonucleotide
  Antisense strand to SEQ ID NO: 724142
cuguuaaacacaaucuuac

SEQ ID NO: 724144 - RNA, 19 nt, Artificial Sequence
  Description of Artificial Sequence: Synthetic oligonucleotide
  Sense strand starting at position 3687 of SEQ ID NO: 586521
uaagauuguguuuaacagu

SEQ ID NO: 724145 - RNA, 19 nt, Artificial Sequence
  Description of Artificial Sequence: Synthetic oligonucleotide
  Antisense strand to SEQ ID NO: 724144
acuguuaaacacaaucuua

SEQ ID NO: 724146 - RNA, 19 nt, Artificial Sequence
  Description of Artificial Sequence: Synthetic oligonucleotide
  Sense strand starting at position 3749 of SEQ ID NO: 586521
ucugaucacuaguugagaa

SEQ ID NO: 724147 - RNA, 19 nt, Artificial Sequence
  Description of Artificial Sequence: Synthetic oligonucleotide
  Antisense strand to SEQ ID NO: 724146
uucucaacuagugaucaga

SEQ ID NO: 724148 - RNA, 19 nt, Artificial Sequence
  Description of Artificial Sequence: Synthetic oligonucleotide
  Sense strand starting at position 3761 of SEQ ID NO: 586521
uugagaauuugagaccaau

SEQ ID NO: 724149 - RNA, 19 nt, Artificial Sequence
  Description of Artificial Sequence: Synthetic oligonucleotide
  Antisense strand to SEQ ID NO: 724148
auuggucucaaauucucaa

SEQ ID NO: 724150 - RNA, 19 nt, Artificial Sequence
  Description of Artificial Sequence: Synthetic oligonucleotide
  Sense strand starting at position 55 of SEQ ID NO: 586522
cuguguucucaguaucuuc

SEQ ID NO: 724151 - RNA, 19 nt, Artificial Sequence
  Description of Artificial Sequence: Synthetic oligonucleotide
  Antisense strand to SEQ ID NO: 724150
gaagauacugagaacacag

SEQ ID NO: 724152 - RNA, 19 nt, Artificial Sequence
  Description of Artificial Sequence: Synthetic oligonucleotide
  Sense strand starting at position 74 of SEQ ID NO: 586522
uucuuuauuccgggucaau

SEQ ID NO: 724153 - RNA, 19 nt, Artificial Sequence
  Description of Artificial Sequence: Synthetic oligonucleotide
  Antisense strand to SEQ ID NO: 724152
auugacccggaauaaagaa

SEQ ID NO: 724154 - RNA, 19 nt, Artificial Sequence
  Description of Artificial Sequence: Synthetic oligonucleotide
  Sense strand starting at position 86 of SEQ ID NO: 586522
ggucaauugucuccuacaa

SEQ ID NO: 724155 - RNA, 19 nt, Artificial Sequence
  Description of Artificial Sequence: Synthetic oligonucleotide
  Antisense strand to SEQ ID NO: 724154
uuguaggagacaauugacc

SEQ ID NO: 724156 - RNA, 19 nt, Artificial Sequence
  Description of Artificial Sequence: Synthetic oligonucleotide
  Sense strand starting at position 177 of SEQ ID NO: 586522
accuguaguugacucuaaa

SEQ ID NO: 724157 - RNA, 19 nt, Artificial Sequence
  Description of Artificial Sequence: Synthetic oligonucleotide
  Antisense strand to SEQ ID NO: 724156
uuuagagucaacuacaggu

SEQ ID NO: 724158 - RNA, 19 nt, Artificial Sequence
  Description of Artificial Sequence: Synthetic oligonucleotide
  Sense strand starting at position 429 of SEQ ID NO: 586522
guggaaauuacaggcaagu

SEQ ID NO: 724159 - RNA, 19 nt, Artificial Sequence
  Description of Artificial Sequence: Synthetic oligonucleotide
  Antisense strand to SEQ ID NO: 724158
acuugccuguaauuuccac

SEQ ID NO: 724160 - RNA, 19 nt, Artificial Sequence
  Description of Artificial Sequence: Synthetic oligonucleotide
  Sense strand starting at position 448 of SEQ ID NO: 586522
gcaauaagcuguuuaucca

SEQ ID NO: 724161 - RNA, 19 nt, Artificial Sequence
  Description of Artificial Sequence: Synthetic oligonucleotide
  Antisense strand to SEQ ID NO: 724160
uggauaaacagcuuauugc

SEQ ID NO: 724162 - RNA, 19 nt, Artificial Sequence
  Description of Artificial Sequence: Synthetic oligonucleotide
  Sense strand starting at position 452 of SEQ ID NO: 586522
uaagcuguuuauccacgau

SEQ ID NO: 724163 - RNA, 19 nt, Artificial Sequence
  Description of Artificial Sequence: Synthetic oligonucleotide
  Antisense strand to SEQ ID NO: 724162
aucguggauaaacagcuua

SEQ ID NO: 724164 - RNA, 19 nt, Artificial Sequence
  Description of Artificial Sequence: Synthetic oligonucleotide
  Sense strand starting at position 456 of SEQ ID NO: 586522
cuguuuauccacgaucuac

SEQ ID NO: 724165 - RNA, 19 nt, Artificial Sequence
  Description of Artificial Sequence: Synthetic oligonucleotide
  Antisense strand to SEQ ID NO: 724164
guagaucguggauaaacag

SEQ ID NO: 724166 - RNA, 19 nt, Artificial Sequence
  Description of Artificial Sequence: Synthetic oligonucleotide
  Sense strand starting at position 624 of SEQ ID NO: 586522
gguaguagcccagacucua

SEQ ID NO: 724167 - RNA, 19 nt, Artificial Sequence
  Description of Artificial Sequence: Synthetic oligonucleotide
  Antisense strand to SEQ ID NO: 724166
uagagucugggcuacuacc

SEQ ID NO: 724168 - RNA, 19 nt, Artificial Sequence
  Description of Artificial Sequence: Synthetic oligonucleotide
  Sense strand starting at position 644 of SEQ ID NO: 586522
uguauucuuggguguucca

SEQ ID NO: 724169 - RNA, 19 nt, Artificial Sequence
  Description of Artificial Sequence: Synthetic oligonucleotide
  Antisense strand to SEQ ID NO: 724168
uggaacacccaagaauaca

SEQ ID NO: 724170 - RNA, 19 nt, Artificial Sequence
  Description of Artificial Sequence: Synthetic oligonucleotide
  Sense strand starting at position 945 of SEQ ID NO: 586522
gugucagacgaagggaauu

SEQ ID NO: 724171 - RNA, 19 nt, Artificial Sequence
  Description of Artificial Sequence: Synthetic oligonucleotide
  Antisense strand to SEQ ID NO: 724170
aauucccuucgucugacac

SEQ ID NO: 724172 - RNA, 19 nt, Artificial Sequence
  Description of Artificial Sequence: Synthetic oligonucleotide
  Sense strand starting at position 975 of SEQ ID NO: 586522
uuuggugauucuguuauuu

SEQ ID NO: 724173 - RNA, 19 nt, Artificial Sequence
  Description of Artificial Sequence: Synthetic oligonucleotide
  Antisense strand to SEQ ID NO: 724172
aaauaacagaaucaccaaa

SEQ ID NO: 724174 - RNA, 19 nt, Artificial Sequence
  Description of Artificial Sequence: Synthetic oligonucleotide
  Sense strand starting at position 1006 of SEQ ID NO: 586522
uacgaagcucaagggauau

SEQ ID NO: 724175 - RNA, 19 nt, Artificial Sequence
  Description of Artificial Sequence: Synthetic oligonucleotide
  Antisense strand to SEQ ID NO: 724174
auaucccuugagcuucgua

SEQ ID NO: 724176 - RNA, 19 nt, Artificial Sequence
  Description of Artificial Sequence: Synthetic oligonucleotide
  Sense strand starting at position 1091 of SEQ ID NO: 586522
ccguuucuaucucuaccau

SEQ ID NO: 724177 - RNA, 19 nt, Artificial Sequence
  Description of Artificial Sequence: Synthetic oligonucleotide
  Antisense strand to SEQ ID NO: 724176
augguagagauagaaacgg

SEQ ID NO: 724178 - RNA, 19 nt, Artificial Sequence
  Description of Artificial Sequence: Synthetic oligonucleotide
  Sense strand starting at position 1092 of SEQ ID NO: 586522
cguuucuaucucuaccaua

SEQ ID NO: 724179 - RNA, 19 nt, Artificial Sequence
  Description of Artificial Sequence: Synthetic oligonucleotide
  Antisense strand to SEQ ID NO: 724178
uaugguagagauagaaacg

SEQ ID NO: 724180 - RNA, 19 nt, Artificial Sequence
  Description of Artificial Sequence: Synthetic oligonucleotide
  Sense strand starting at position 1190 of SEQ ID NO: 586522
agccggguucuggguagau

SEQ ID NO: 724181 - RNA, 19 nt, Artificial Sequence
  Description of Artificial Sequence: Synthetic oligonucleotide
  Antisense strand to SEQ ID NO: 724180
aucuacccagaacccggcu

SEQ ID NO: 724182 - RNA, 19 nt, Artificial Sequence
  Description of Artificial Sequence: Synthetic oligonucleotide
  Sense strand starting at position 1191 of SEQ ID NO: 586522
gccggguucuggguagaua

SEQ ID NO: 724183 - RNA, 19 nt, Artificial Sequence
  Description of Artificial Sequence: Synthetic oligonucleotide
  Antisense strand to SEQ ID NO: 724182
uaucuacccagaacccggc

SEQ ID NO: 724184 - RNA, 19 nt, Artificial Sequence
  Description of Artificial Sequence: Synthetic oligonucleotide
  Sense strand starting at position 1634 of SEQ ID NO: 586522
ucccuagauccugguuaga

SEQ ID NO: 724185 - RNA, 19 nt, Artificial Sequence
  Description of Artificial Sequence: Synthetic oligonucleotide
  Antisense strand to SEQ ID NO: 724184
ucuaaccaggaucuaggga

SEQ ID NO: 724186 - RNA, 19 nt, Artificial Sequence
  Description of Artificial Sequence: Synthetic oligonucleotide
  Sense strand starting at position 1636 of SEQ ID NO: 586522
ccuagauccugguuagaca

SEQ ID NO: 724187 - RNA, 19 nt, Artificial Sequence
  Description of Artificial Sequence: Synthetic oligonucleotide
  Antisense strand to SEQ ID NO: 724186
ugucuaaccaggaucuagg

SEQ ID NO: 724188 - RNA, 19 nt, Artificial Sequence
  Description of Artificial Sequence: Synthetic oligonucleotide
  Sense strand starting at position 1910 of SEQ ID NO: 586522
cucccauucgccgacuaaa

SEQ ID NO: 724189 - RNA, 19 nt, Artificial Sequence
  Description of Artificial Sequence: Synthetic oligonucleotide
  Antisense strand to SEQ ID NO: 724188
uuuagucggcgaaugggag

SEQ ID NO: 724190 - RNA, 19 nt, Artificial Sequence
  Description of Artificial Sequence: Synthetic oligonucleotide
  Sense strand starting at position 1913 of SEQ ID NO: 586522
ccauucgccgacuaaacuu

SEQ ID NO: 724191 - RNA, 19 nt, Artificial Sequence
  Description of Artificial Sequence: Synthetic oligonucleotide
  Antisense strand to SEQ ID NO: 724190
aaguuuagucggcgaaugg

SEQ ID NO: 724192 - RNA, 19 nt, Artificial Sequence
  Description of Artificial Sequence: Synthetic oligonucleotide
  Sense strand starting at position 1955 of SEQ ID NO: 586522
uugggaguuccggguaaag

SEQ ID NO: 724193 - RNA, 19 nt, Artificial Sequence
  Description of Artificial Sequence: Synthetic oligonucleotide
  Antisense strand to SEQ ID NO: 724192
cuuuacccggaacucccaa

SEQ ID NO: 724194 - RNA, 19 nt, Artificial Sequence
  Description of Artificial Sequence: Synthetic oligonucleotide
  Sense strand starting at position 1957 of SEQ ID NO: 586522
gggaguuccggguaaaguc

SEQ ID NO: 724195 - RNA, 19 nt, Artificial Sequence
  Description of Artificial Sequence: Synthetic oligonucleotide
  Antisense strand to SEQ ID NO: 724194
gacuuuacccggaacuccc

SEQ ID NO: 724196 - RNA, 19 nt, Artificial Sequence
  Description of Artificial Sequence: Synthetic oligonucleotide
  Sense strand starting at position 1965 of SEQ ID NO: 586522
cggguaaagucucccucuu

SEQ ID NO: 724197 - RNA, 19 nt, Artificial Sequence
  Description of Artificial Sequence: Synthetic oligonucleotide
  Antisense strand to SEQ ID NO: 724196
aagagggagacuuuacccg

SEQ ID NO: 724198 - RNA, 19 nt, Artificial Sequence
  Description of Artificial Sequence: Synthetic oligonucleotide
  Sense strand starting at position 1990 of SEQ ID NO: 586522
accucuuuacuguaaugua

SEQ ID NO: 724199 - RNA, 19 nt, Artificial Sequence
  Description of Artificial Sequence: Synthetic oligonucleotide
  Antisense strand to SEQ ID NO: 724198
uacauuacaguaaagaggu

SEQ ID NO: 724200 - RNA, 19 nt, Artificial Sequence
  Description of Artificial Sequence: Synthetic oligonucleotide
  Sense strand starting at position 2002 of SEQ ID NO: 586522
uaauguaaucaugggcaga

SEQ ID NO: 724201 - RNA, 19 nt, Artificial Sequence
  Description of Artificial Sequence: Synthetic oligonucleotide
  Antisense strand to SEQ ID NO: 724200
ucugcccaugauuacauua

SEQ ID NO: 724202 - RNA, 19 nt, Artificial Sequence
  Description of Artificial Sequence: Synthetic oligonucleotide
  Sense strand starting at position 2004 of SEQ ID NO: 586522
auguaaucaugggcagaca

SEQ ID NO: 724203 - RNA, 19 nt, Artificial Sequence
  Description of Artificial Sequence: Synthetic oligonucleotide
  Antisense strand to SEQ ID NO: 724202
ugucugcccaugauuacau

SEQ ID NO: 724204 - RNA, 19 nt, Artificial Sequence
  Description of Artificial Sequence: Synthetic oligonucleotide
  Sense strand starting at position 2147 of SEQ ID NO: 586522
gcccgcuauuucucucaca

SEQ ID NO: 724205 - RNA, 19 nt, Artificial Sequence
  Description of Artificial Sequence: Synthetic oligonucleotide
  Antisense strand to SEQ ID NO: 724204
ugugagagaaauagcgggc

SEQ ID NO: 724206 - RNA, 19 nt, Artificial Sequence
  Description of Artificial Sequence: Synthetic oligonucleotide
  Sense strand starting at position 2186 of SEQ ID NO: 586522
aucuacuugugcucaggaa

SEQ ID NO: 724207 - RNA, 19 nt, Artificial Sequence
  Description of Artificial Sequence: Synthetic oligonucleotide
  Antisense strand to SEQ ID NO: 724206
uuccugagcacaaguagau

SEQ ID NO: 724208 - RNA, 19 nt, Artificial Sequence
  Description of Artificial Sequence: Synthetic oligonucleotide
  Sense strand starting at position 2187 of SEQ ID NO: 586522
ucuacuugugcucaggaaa

SEQ ID NO: 724209 - RNA, 19 nt, Artificial Sequence
  Description of Artificial Sequence: Synthetic oligonucleotide
  Antisense strand to SEQ ID NO: 724208
uuuccugagcacaaguaga

SEQ ID NO: 724210 - RNA, 19 nt, Artificial Sequence
  Description of Artificial Sequence: Synthetic oligonucleotide
  Sense strand starting at position 2212 of SEQ ID NO: 586522
ucacuagagugauaugaga

SEQ ID NO: 724211 - RNA, 19 nt, Artificial Sequence
  Description of Artificial Sequence: Synthetic oligonucleotide
  Antisense strand to SEQ ID NO: 724210
ucucauaucacucuaguga

SEQ ID NO: 724212 - RNA, 19 nt, Artificial Sequence
  Description of Artificial Sequence: Synthetic oligonucleotide
  Sense strand starting at position 2246 of SEQ ID NO: 586522
ggcuguccgcugaaagguu

SEQ ID NO: 724213 - RNA, 19 nt, Artificial Sequence
  Description of Artificial Sequence: Synthetic oligonucleotide
  Antisense strand to SEQ ID NO: 724212
aaccuuucagcggacagcc

SEQ ID NO: 724214 - RNA, 19 nt, Artificial Sequence
  Description of Artificial Sequence: Synthetic oligonucleotide
  Sense strand starting at position 3002 of SEQ ID NO: 586522
gaaggaauaugguugugga

SEQ ID NO: 724215 - RNA, 19 nt, Artificial Sequence
  Description of Artificial Sequence: Synthetic oligonucleotide
  Antisense strand to SEQ ID NO: 724214
uccacaaccauauuccuuc

SEQ ID NO: 724216 - RNA, 19 nt, Artificial Sequence
  Description of Artificial Sequence: Synthetic oligonucleotide
  Sense strand starting at position 3136 of SEQ ID NO: 586522
cagaaagcgucaccgagaa

SEQ ID NO: 724217 - RNA, 19 nt, Artificial Sequence
  Description of Artificial Sequence: Synthetic oligonucleotide
  Antisense strand to SEQ ID NO: 724216
uucucggugacgcuuucug

SEQ ID NO: 724218 - RNA, 19 nt, Artificial Sequence
  Description of Artificial Sequence: Synthetic oligonucleotide
  Sense strand starting at position 3138 of SEQ ID NO: 586522
gaaagcgucaccgagaaua

SEQ ID NO: 724219 - RNA, 19 nt, Artificial Sequence
  Description of Artificial Sequence: Synthetic oligonucleotide
  Antisense strand to SEQ ID NO: 724218
uauucucggugacgcuuuc

SEQ ID NO: 724220 - RNA, 19 nt, Artificial Sequence
  Description of Artificial Sequence: Synthetic oligonucleotide
  Sense strand starting at position 3140 of SEQ ID NO: 586522
aagcgucaccgagaauaac

SEQ ID NO: 724221 - RNA, 19 nt, Artificial Sequence
  Description of Artificial Sequence: Synthetic oligonucleotide
  Antisense strand to SEQ ID NO: 724220
guuauucucggugacgcuu

SEQ ID NO: 724222 - RNA, 19 nt, Artificial Sequence
  Description of Artificial Sequence: Synthetic oligonucleotide
  Sense strand starting at position 3230 of SEQ ID NO: 586522
cgcgguucccuugcaaagu

SEQ ID NO: 724223 - RNA, 19 nt, Artificial Sequence
  Description of Artificial Sequence: Synthetic oligonucleotide
  Antisense strand to SEQ ID NO: 724222
acuuugcaagggaaccgcg

SEQ ID NO: 724224 - RNA, 19 nt, Artificial Sequence
  Description of Artificial Sequence: Synthetic oligonucleotide
  Sense strand starting at position 3860 of SEQ ID NO: 586522
ucggcaucucuacaaugaa

SEQ ID NO: 724225 - RNA, 19 nt, Artificial Sequence
  Description of Artificial Sequence: Synthetic oligonucleotide
  Antisense strand to SEQ ID NO: 724224
uucauuguagagaugccga

SEQ ID NO: 724226 - RNA, 19 nt, Artificial Sequence
  Description of Artificial Sequence: Synthetic oligonucleotide
  Sense strand starting at position 3910 of SEQ ID NO: 586522
gcauuaugucaggaaucuu

SEQ ID NO: 724227 - RNA, 19 nt, Artificial Sequence
  Description of Artificial Sequence: Synthetic oligonucleotide
  Antisense strand to SEQ ID NO: 724226
aagauuccugacauaaugc

SEQ ID NO: 724228 - RNA, 19 nt, Artificial Sequence
  Description of Artificial Sequence: Synthetic oligonucleotide
  Sense strand starting at position 3980 of SEQ ID NO: 586522
acaucaacucugugagaug

SEQ ID NO: 724229 - RNA, 19 nt, Artificial Sequence
  Description of Artificial Sequence: Synthetic oligonucleotide
  Antisense strand to SEQ ID NO: 724228
caucucacagaguugaugu

SEQ ID NO: 724230 - RNA, 19 nt, Artificial Sequence
  Description of Artificial Sequence: Synthetic oligonucleotide
  Sense strand starting at position 292 of SEQ ID NO: 586523
aagguuacaucuucggaua

SEQ ID NO: 724231 - RNA, 19 nt, Artificial Sequence
  Description of Artificial Sequence: Synthetic oligonucleotide
  Antisense strand to SEQ ID NO: 724230
uauccgaagauguaaccuu

SEQ ID NO: 724232 - RNA, 19 nt, Artificial Sequence
  Description of Artificial Sequence: Synthetic oligonucleotide
  Sense strand starting at position 293 of SEQ ID NO: 586523
agguuacaucuucggauac

SEQ ID NO: 724233 - RNA, 19 nt, Artificial Sequence
  Description of Artificial Sequence: Synthetic oligonucleotide
  Antisense strand to SEQ ID NO: 724232
guauccgaagauguaaccu

SEQ ID NO: 724234 - RNA, 19 nt, Artificial Sequence
  Description of Artificial Sequence: Synthetic oligonucleotide
  Sense strand starting at position 317 of SEQ ID NO: 586523
uucagauccgcacggauau

SEQ ID NO: 724235 - RNA, 19 nt, Artificial Sequence
  Description of Artificial Sequence: Synthetic oligonucleotide
  Antisense strand to SEQ ID NO: 724234
auauccgugcggaucugaa

SEQ ID NO: 724236 - RNA, 19 nt, Artificial Sequence
  Description of Artificial Sequence: Synthetic oligonucleotide
  Sense strand starting at position 318 of SEQ ID NO: 586523
ucagauccgcacggauaua

SEQ ID NO: 724237 - RNA, 19 nt, Artificial Sequence
  Description of Artificial Sequence: Synthetic oligonucleotide
  Antisense strand to SEQ ID NO: 724236
uauauccgugcggaucuga

SEQ ID NO: 724238 - RNA, 19 nt, Artificial Sequence
  Description of Artificial Sequence: Synthetic oligonucleotide
  Sense strand starting at position 338 of SEQ ID NO: 586523
gccagacugaaaggucaua

SEQ ID NO: 724239 - RNA, 19 nt, Artificial Sequence
  Description of Artificial Sequence: Synthetic oligonucleotide
  Antisense strand to SEQ ID NO: 724238
uaugaccuuucagucuggc

SEQ ID NO: 724240 - RNA, 19 nt, Artificial Sequence
  Description of Artificial Sequence: Synthetic oligonucleotide
  Sense strand starting at position 343 of SEQ ID NO: 586523
acugaaaggucauagauau

SEQ ID NO: 724241 - RNA, 19 nt, Artificial Sequence
  Description of Artificial Sequence: Synthetic oligonucleotide
  Antisense strand to SEQ ID NO: 724240
auaucuaugaccuuucagu

SEQ ID NO: 724242 - RNA, 19 nt, Artificial Sequence
  Description of Artificial Sequence: Synthetic oligonucleotide
  Sense strand starting at position 559 of SEQ ID NO: 586523
uguggauccagagaaugcu

SEQ ID NO: 724243 - RNA, 19 nt, Artificial Sequence
  Description of Artificial Sequence: Synthetic oligonucleotide
  Antisense strand to SEQ ID NO: 724242
agcauucucuggauccaca

SEQ ID NO: 724244 - RNA, 19 nt, Artificial Sequence
  Description of Artificial Sequence: Synthetic oligonucleotide
  Sense strand starting at position 565 of SEQ ID NO: 586523
uccagagaaugcuuucuua

SEQ ID NO: 724245 - RNA, 19 nt, Artificial Sequence
  Description of Artificial Sequence: Synthetic oligonucleotide
  Antisense strand to SEQ ID NO: 724244
uaagaaagcauucucugga

SEQ ID NO: 724246 - RNA, 19 nt, Artificial Sequence
  Description of Artificial Sequence: Synthetic oligonucleotide
  Sense strand starting at position 568 of SEQ ID NO: 586523
agagaaugcuuucuuauag

SEQ ID NO: 724247 - RNA, 19 nt, Artificial Sequence
  Description of Artificial Sequence: Synthetic oligonucleotide
  Antisense strand to SEQ ID NO: 724246
cuauaagaaagcauucucu

SEQ ID NO: 724248 - RNA, 19 nt, Artificial Sequence
  Description of Artificial Sequence: Synthetic oligonucleotide
  Sense strand starting at position 569 of SEQ ID NO: 586523
gagaaugcuuucuuauagg

SEQ ID NO: 724249 - RNA, 19 nt, Artificial Sequence
  Description of Artificial Sequence: Synthetic oligonucleotide
  Antisense strand to SEQ ID NO: 724248
ccuauaagaaagcauucuc

SEQ ID NO: 724250 - RNA, 19 nt, Artificial Sequence
  Description of Artificial Sequence: Synthetic oligonucleotide
  Sense strand starting at position 584 of SEQ ID NO: 586523
uaggcaugugcauguguga

SEQ ID NO: 724251 - RNA, 19 nt, Artificial Sequence
  Description of Artificial Sequence: Synthetic oligonucleotide
  Antisense strand to SEQ ID NO: 724250
ucacacaugcacaugccua

SEQ ID NO: 724252 - RNA, 19 nt, Artificial Sequence
  Description of Artificial Sequence: Synthetic oligonucleotide
  Sense strand starting at position 622 of SEQ ID NO: 586523
ggaauauacgacugccaac

SEQ ID NO: 724253 - RNA, 19 nt, Artificial Sequence
  Description of Artificial Sequence: Synthetic oligonucleotide
  Antisense strand to SEQ ID NO: 724252
guuggcagucguauauucc

SEQ ID NO: 724254 - RNA, 19 nt, Artificial Sequence
  Description of Artificial Sequence: Synthetic oligonucleotide
  Sense strand starting at position 836 of SEQ ID NO: 586523
gguguaugccauuacaccu

SEQ ID NO: 724255 - RNA, 19 nt, Artificial Sequence
  Description of Artificial Sequence: Synthetic oligonucleotide
  Antisense strand to SEQ ID NO: 724254
agguguaauggcauacacc

SEQ ID NO: 724256 - RNA, 19 nt, Artificial Sequence
  Description of Artificial Sequence: Synthetic oligonucleotide
  Sense strand starting at position 1525 of SEQ ID NO: 586523
agggcauccugguuuggaa

SEQ ID NO: 724257 - RNA, 19 nt, Artificial Sequence
  Description of Artificial Sequence: Synthetic oligonucleotide
  Antisense strand to SEQ ID NO: 724256
uuccaaaccaggaugcccu

SEQ ID NO: 724258 - RNA, 19 nt, Artificial Sequence
  Description of Artificial Sequence: Synthetic oligonucleotide
  Sense strand starting at position 1532 of SEQ ID NO: 586523
ccugguuuggaaugggaaa

SEQ ID NO: 724259 - RNA, 19 nt, Artificial Sequence
  Description of Artificial Sequence: Synthetic oligonucleotide
  Antisense strand to SEQ ID NO: 724258
uuucccauuccaaaccagg

SEQ ID NO: 724260 - RNA, 19 nt, Artificial Sequence
  Description of Artificial Sequence: Synthetic oligonucleotide
  Sense strand starting at position 1566 of SEQ ID NO: 586523
cacuguuuccuccggucau

SEQ ID NO: 724261 - RNA, 19 nt, Artificial Sequence
  Description of Artificial Sequence: Synthetic oligonucleotide
  Antisense strand to SEQ ID NO: 724260
augaccggaggaaacagug

SEQ ID NO: 724262 - RNA, 19 nt, Artificial Sequence
  Description of Artificial Sequence: Synthetic oligonucleotide
  Sense strand starting at position 1629 of SEQ ID NO: 586523
guuccuucccguugacaac

SEQ ID NO: 724263 - RNA, 19 nt, Artificial Sequence
  Description of Artificial Sequence: Synthetic oligonucleotide
  Antisense strand to SEQ ID NO: 724262
guugucaacgggaaggaac

SEQ ID NO: 724264 - RNA, 19 nt, Artificial Sequence
  Description of Artificial Sequence: Synthetic oligonucleotide
  Sense strand starting at position 2246 of SEQ ID NO: 586523
gcgggagggaucugaauuc

SEQ ID NO: 724265 - RNA, 19 nt, Artificial Sequence
  Description of Artificial Sequence: Synthetic oligonucleotide
  Antisense strand to SEQ ID NO: 724264
gaauucagaucccucccgc

SEQ ID NO: 724266 - RNA, 19 nt, Artificial Sequence
  Description of Artificial Sequence: Synthetic oligonucleotide
  Sense strand starting at position 2332 of SEQ ID NO: 586523
cugggcuucuaaucuguaa

SEQ ID NO: 724267 - RNA, 19 nt, Artificial Sequence
  Description of Artificial Sequence: Synthetic oligonucleotide
  Antisense strand to SEQ ID NO: 724266
uuacagauuagaagcccag

SEQ ID NO: 724268 - RNA, 19 nt, Artificial Sequence
  Description of Artificial Sequence: Synthetic oligonucleotide
  Sense strand starting at position 2442 of SEQ ID NO: 586523
uauaguguugaguguuaac

SEQ ID NO: 724269 - RNA, 19 nt, Artificial Sequence
  Description of Artificial Sequence: Synthetic oligonucleotide
  Antisense strand to SEQ ID NO: 724268
guuaacacucaacacuaua

SEQ ID NO: 724270 - RNA, 19 nt, Artificial Sequence
  Description of Artificial Sequence: Synthetic oligonucleotide
  Sense strand starting at position 2471 of SEQ ID NO: 586523
auaauauagcguuaauagc

SEQ ID NO: 724271 - RNA, 19 nt, Artificial Sequence
  Description of Artificial Sequence: Synthetic oligonucleotide
  Antisense strand to SEQ ID NO: 724270
gcuauuaacgcuauauuau

SEQ ID NO: 724272 - RNA, 19 nt, Artificial Sequence
  Description of Artificial Sequence: Synthetic oligonucleotide
  Sense strand starting at position 2480 of SEQ ID NO: 586523
cguuaauagcauuaacacu

SEQ ID NO: 724273 - RNA, 19 nt, Artificial Sequence
  Description of Artificial Sequence: Synthetic oligonucleotide
  Antisense strand to SEQ ID NO: 724272
aguguuaaugcuauuaacg

SEQ ID NO: 724274 - RNA, 19 nt, Artificial Sequence
  Description of Artificial Sequence: Synthetic oligonucleotide
  Sense strand starting at position 2814 of SEQ ID NO: 586523
auguaauaguaucuacacu

SEQ ID NO: 724275 - RNA, 19 nt, Artificial Sequence
  Description of Artificial Sequence: Synthetic oligonucleotide
  Antisense strand to SEQ ID NO: 724274
aguguagauacuauuacau

SEQ ID NO: 724276 - RNA, 19 nt, Artificial Sequence
  Description of Artificial Sequence: Synthetic oligonucleotide
  Sense strand starting at position 3403 of SEQ ID NO: 586523
auaguagcacacugugaua

SEQ ID NO: 724277 - RNA, 19 nt, Artificial Sequence
  Description of Artificial Sequence: Synthetic oligonucleotide
  Antisense strand to SEQ ID NO: 724276
uaucacagugugcuacuau

SEQ ID NO: 724278 - RNA, 19 nt, Artificial Sequence
  Description of Artificial Sequence: Synthetic oligonucleotide
  Sense strand starting at position 3405 of SEQ ID NO: 586523
aguagcacacugugauauu

SEQ ID NO: 724279 - RNA, 19 nt, Artificial Sequence
  Description of Artificial Sequence: Synthetic oligonucleotide
  Antisense strand to SEQ ID NO: 724278
aauaucacagugugcuacu

SEQ ID NO: 724280 - RNA, 19 nt, Artificial Sequence
  Description of Artificial Sequence: Synthetic oligonucleotide
  Sense strand starting at position 3453 of SEQ ID NO: 586523
guguuagcacacuguggua

SEQ ID NO: 724281 - RNA, 19 nt, Artificial Sequence
  Description of Artificial Sequence: Synthetic oligonucleotide
  Antisense strand to SEQ ID NO: 724280
uaccacagugugcuaacac

SEQ ID NO: 724282 - RNA, 19 nt, Artificial Sequence
  Description of Artificial Sequence: Synthetic oligonucleotide
  Sense strand starting at position 3564 of SEQ ID NO: 586523
cuguuaacacacugugaua

SEQ ID NO: 724283 - RNA, 19 nt, Artificial Sequence
  Description of Artificial Sequence: Synthetic oligonucleotide
  Antisense strand to SEQ ID NO: 724282
uaucacaguguguuaacag

SEQ ID NO: 724284 - RNA, 19 nt, Artificial Sequence
  Description of Artificial Sequence: Synthetic oligonucleotide
  Sense strand starting at position 3605 of SEQ ID NO: 586523
ucauauuagugauauccag

SEQ ID NO: 724285 - RNA, 19 nt, Artificial Sequence
  Description of Artificial Sequence: Synthetic oligonucleotide
  Antisense strand to SEQ ID NO: 724284
cuggauaucacuaauauga

SEQ ID NO: 724286 - RNA, 19 nt, Artificial Sequence
  Description of Artificial Sequence: Synthetic oligonucleotide
  Sense strand starting at position 3609 of SEQ ID NO: 586523
auuagugauauccaguguu

SEQ ID NO: 724287 - RNA, 19 nt, Artificial Sequence
  Description of Artificial Sequence: Synthetic oligonucleotide
  Antisense strand to SEQ ID NO: 724286
aacacuggauaucacuaau

SEQ ID NO: 724288 - RNA, 19 nt, Artificial Sequence
  Description of Artificial Sequence: Synthetic oligonucleotide
  Sense strand starting at position 3612 of SEQ ID NO: 586523
agugauauccaguguuagc

SEQ ID NO: 724289 - RNA, 19 nt, Artificial Sequence
  Description of Artificial Sequence: Synthetic oligonucleotide
  Antisense strand to SEQ ID NO: 724288
gcuaacacuggauaucacu

SEQ ID NO: 724290 - RNA, 19 nt, Artificial Sequence
  Description of Artificial Sequence: Synthetic oligonucleotide
  Sense strand starting at position 3623 of SEQ ID NO: 586523
guguuagcacacuguauua

SEQ ID NO: 724291 - RNA, 19 nt, Artificial Sequence
  Description of Artificial Sequence: Synthetic oligonucleotide
  Antisense strand to SEQ ID NO: 724290
uaauacagugugcuaacac

SEQ ID NO: 724292 - RNA, 19 nt, Artificial Sequence
  Description of Artificial Sequence: Synthetic oligonucleotide
  Sense strand starting at position 3636 of SEQ ID NO: 586523
guauuaacacacugugaua

SEQ ID NO: 724293 - RNA, 19 nt, Artificial Sequence
  Description of Artificial Sequence: Synthetic oligonucleotide
  Antisense strand to SEQ ID NO: 724292
uaucacaguguguuaauac

SEQ ID NO: 724294 - RNA, 19 nt, Artificial Sequence
  Description of Artificial Sequence: Synthetic oligonucleotide
  Sense strand starting at position 3741 of SEQ ID NO: 586523
ggcacacugcaauguuaau

SEQ ID NO: 724295 - RNA, 19 nt, Artificial Sequence
  Description of Artificial Sequence: Synthetic oligonucleotide
  Antisense strand to SEQ ID NO: 724294
auuaacauugcagugugcc

SEQ ID NO: 724296 - RNA, 19 nt, Artificial Sequence
  Description of Artificial Sequence: Synthetic oligonucleotide
  Sense strand starting at position 3792 of SEQ ID NO: 586523
gcacccuguguuguguuaa

SEQ ID NO: 724297 - RNA, 19 nt, Artificial Sequence
  Description of Artificial Sequence: Synthetic oligonucleotide
  Antisense strand to SEQ ID NO: 724296
uuaacacaacacagggugc

SEQ ID NO: 724298 - RNA, 19 nt, Artificial Sequence
  Description of Artificial Sequence: Synthetic oligonucleotide
  Sense strand starting at position 3838 of SEQ ID NO: 586523
guguuagcacccugugaug

SEQ ID NO: 724299 - RNA, 19 nt, Artificial Sequence
  Description of Artificial Sequence: Synthetic oligonucleotide
  Antisense strand to SEQ ID NO: 724298
caucacagggugcuaacac

SEQ ID NO: 724300 - RNA, 19 nt, Artificial Sequence
  Description of Artificial Sequence: Synthetic oligonucleotide
  Sense strand starting at position 3889 of SEQ ID NO: 586523
guauuagcacccugugacu

SEQ ID NO: 724301 - RNA, 19 nt, Artificial Sequence
  Description of Artificial Sequence: Synthetic oligonucleotide
  Antisense strand to SEQ ID NO: 724300
agucacagggugcuaauac

SEQ ID NO: 724302 - RNA, 19 nt, Artificial Sequence
  Description of Artificial Sequence: Synthetic oligonucleotide
  Sense strand starting at position 3898 of SEQ ID NO: 586523
cccugugacuugcuaauaa

SEQ ID NO: 724303 - RNA, 19 nt, Artificial Sequence
  Description of Artificial Sequence: Synthetic oligonucleotide
  Antisense strand to SEQ ID NO: 724302
uuauuagcaagucacaggg

SEQ ID NO: 724304 - RNA, 19 nt, Artificial Sequence
  Description of Artificial Sequence: Synthetic oligonucleotide
  Sense strand starting at position 3975 of SEQ ID NO: 586523
guguuagcacaccgugaua

SEQ ID NO: 724305 - RNA, 19 nt, Artificial Sequence
  Description of Artificial Sequence: Synthetic oligonucleotide
  Antisense strand to SEQ ID NO: 724304
uaucacggugugcuaacac

SEQ ID NO: 724306 - RNA, 19 nt, Artificial Sequence
  Description of Artificial Sequence: Synthetic oligonucleotide
  Sense strand starting at position 3977 of SEQ ID NO: 586523
guuagcacaccgugauaau

SEQ ID NO: 724307 - RNA, 19 nt, Artificial Sequence
  Description of Artificial Sequence: Synthetic oligonucleotide
  Antisense strand to SEQ ID NO: 724306
auuaucacggugugcuaac

SEQ ID NO: 724308 - RNA, 19 nt, Artificial Sequence
  Description of Artificial Sequence: Synthetic oligonucleotide
  Sense strand starting at position 3978 of SEQ ID NO: 586523
uuagcacaccgugauaaua

SEQ ID NO: 724309 - RNA, 19 nt, Artificial Sequence
  Description of Artificial Sequence: Synthetic oligonucleotide
  Antisense strand to SEQ ID NO: 724308
uauuaucacggugugcuaa

SEQ ID NO: 724310 - RNA, 19 nt, Artificial Sequence
  Description of Artificial Sequence: Synthetic oligonucleotide
  Sense strand starting at position 13 of SEQ ID NO: 586524
gugauuaucagaggugaua

SEQ ID NO: 724311 - RNA, 19 nt, Artificial Sequence
  Description of Artificial Sequence: Synthetic oligonucleotide
  Antisense strand to SEQ ID NO: 724310
uaucaccucugauaaucac

SEQ ID NO: 724312 - RNA, 19 nt, Artificial Sequence
  Description of Artificial Sequence: Synthetic oligonucleotide
  Sense strand starting at position 24 of SEQ ID NO: 586524
aggugauaauucucuuagu

SEQ ID NO: 724313 - RNA, 19 nt, Artificial Sequence
  Description of Artificial Sequence: Synthetic oligonucleotide
  Antisense strand to SEQ ID NO: 724312
acuaagagaauuaucaccu

SEQ ID NO: 724314 - RNA, 19 nt, Artificial Sequence
  Description of Artificial Sequence: Synthetic oligonucleotide
  Sense strand starting at position 25 of SEQ ID NO: 586524
ggugauaauucucuuagua

SEQ ID NO: 724315 - RNA, 19 nt, Artificial Sequence
  Description of Artificial Sequence: Synthetic oligonucleotide
  Antisense strand to SEQ ID NO: 724314
uacuaagagaauuaucacc

SEQ ID NO: 724316 - RNA, 19 nt, Artificial Sequence
  Description of Artificial Sequence: Synthetic oligonucleotide
  Sense strand starting at position 38 of SEQ ID NO: 586524
uuaguauaacagggcuaau

SEQ ID NO: 724317 - RNA, 19 nt, Artificial Sequence
  Description of Artificial Sequence: Synthetic oligonucleotide
  Antisense strand to SEQ ID NO: 724316
auuagcccuguuauacuaa

SEQ ID NO: 724318 - RNA, 19 nt, Artificial Sequence
  Description of Artificial Sequence: Synthetic oligonucleotide
  Sense strand starting at position 41 of SEQ ID NO: 586524
guauaacagggcuaauauc

SEQ ID NO: 724319 - RNA, 19 nt, Artificial Sequence
  Description of Artificial Sequence: Synthetic oligonucleotide
  Antisense strand to SEQ ID NO: 724318
gauauuagcccuguuauac

SEQ ID NO: 724320 - RNA, 19 nt, Artificial Sequence
  Description of Artificial Sequence: Synthetic oligonucleotide
  Sense strand starting at position 67 of SEQ ID NO: 586524
gauauuugcucugaaagag

SEQ ID NO: 724321 - RNA, 19 nt, Artificial Sequence
  Description of Artificial Sequence: Synthetic oligonucleotide
  Antisense strand to SEQ ID NO: 724320
cucuuucagagcaaauauc

SEQ ID NO: 724322 - RNA, 19 nt, Artificial Sequence
  Description of Artificial Sequence: Synthetic oligonucleotide
  Sense strand starting at position 119 of SEQ ID NO: 586524
uccagaaaguaccuucuga

SEQ ID NO: 724323 - RNA, 19 nt, Artificial Sequence
  Description of Artificial Sequence: Synthetic oligonucleotide
  Antisense strand to SEQ ID NO: 724322
ucagaagguacuuucugga

SEQ ID NO: 724324 - RNA, 19 nt, Artificial Sequence
  Description of Artificial Sequence: Synthetic oligonucleotide
  Sense strand starting at position 192 of SEQ ID NO: 586524
uucagagaugagcgaaaga

SEQ ID NO: 724325 - RNA, 19 nt, Artificial Sequence
  Description of Artificial Sequence: Synthetic oligonucleotide
  Antisense strand to SEQ ID NO: 724324
ucuuucgcucaucucugaa

SEQ ID NO: 724326 - RNA, 19 nt, Artificial Sequence
  Description of Artificial Sequence: Synthetic oligonucleotide
  Sense strand starting at position 273 of SEQ ID NO: 586524
aacauaagacuguggcauu

SEQ ID NO: 724327 - RNA, 19 nt, Artificial Sequence
  Description of Artificial Sequence: Synthetic oligonucleotide
  Antisense strand to SEQ ID NO: 724326
aaugccacagucuuauguu

SEQ ID NO: 724328 - RNA, 19 nt, Artificial Sequence
  Description of Artificial Sequence: Synthetic oligonucleotide
  Sense strand starting at position 358 of SEQ ID NO: 586524
aaaggaguacuugguagua

SEQ ID NO: 724329 - RNA, 19 nt, Artificial Sequence
  Description of Artificial Sequence: Synthetic oligonucleotide
  Antisense strand to SEQ ID NO: 724328
uacuaccaaguacuccuuu

SEQ ID NO: 724330 - RNA, 19 nt, Artificial Sequence
  Description of Artificial Sequence: Synthetic oligonucleotide
  Sense strand starting at position 785 of SEQ ID NO: 586524
uuucgcuauagucauagga

SEQ ID NO: 724331 - RNA, 19 nt, Artificial Sequence
  Description of Artificial Sequence: Synthetic oligonucleotide
  Antisense strand to SEQ ID NO: 724330
uccuaugacuauagcgaaa

SEQ ID NO: 724332 - RNA, 19 nt, Artificial Sequence
  Description of Artificial Sequence: Synthetic oligonucleotide
  Sense strand starting at position 981 of SEQ ID NO: 586524
gcauuuaagcucugaagcu

SEQ ID NO: 724333 - RNA, 19 nt, Artificial Sequence
  Description of Artificial Sequence: Synthetic oligonucleotide
  Antisense strand to SEQ ID NO: 724332
agcuucagagcuuaaaugc

SEQ ID NO: 724334 - RNA, 19 nt, Artificial Sequence
  Description of Artificial Sequence: Synthetic oligonucleotide
  Sense strand starting at position 2353 of SEQ ID NO: 586524
gaaaccacuuggcuugaga

SEQ ID NO: 724335 - RNA, 19 nt, Artificial Sequence
  Description of Artificial Sequence: Synthetic oligonucleotide
  Antisense strand to SEQ ID NO: 724334
ucucaagccaagugguuuc

SEQ ID NO: 724336 - RNA, 19 nt, Artificial Sequence
  Description of Artificial Sequence: Synthetic oligonucleotide
  Sense strand starting at position 2355 of SEQ ID NO: 586524
aaccacuuggcuugagaga

SEQ ID NO: 724337 - RNA, 19 nt, Artificial Sequence
  Description of Artificial Sequence: Synthetic oligonucleotide
  Antisense strand to SEQ ID NO: 724336
ucucucaagccaagugguu

SEQ ID NO: 724338 - RNA, 19 nt, Artificial Sequence
  Description of Artificial Sequence: Synthetic oligonucleotide
  Sense strand starting at position 2466 of SEQ ID NO: 586524
guguuauuaagguaaugag

SEQ ID NO: 724339 - RNA, 19 nt, Artificial Sequence
  Description of Artificial Sequence: Synthetic oligonucleotide
  Antisense strand to SEQ ID NO: 724338
cucauuaccuuaauaacac

SEQ ID NO: 724340 - RNA, 19 nt, Artificial Sequence
  Description of Artificial Sequence: Synthetic oligonucleotide
  Sense strand starting at position 2502 of SEQ ID NO: 586524
ugacgaaggugaucccauu

SEQ ID NO: 724341 - RNA, 19 nt, Artificial Sequence
  Description of Artificial Sequence: Synthetic oligonucleotide
  Antisense strand to SEQ ID NO: 724340
aaugggaucaccuucguca

SEQ ID NO: 724342 - RNA, 19 nt, Artificial Sequence
  Description of Artificial Sequence: Synthetic oligonucleotide
  Sense strand starting at position 2508 of SEQ ID NO: 586524
aggugaucccauuguaaga

SEQ ID NO: 724343 - RNA, 19 nt, Artificial Sequence
  Description of Artificial Sequence: Synthetic oligonucleotide
  Antisense strand to SEQ ID NO: 724342
ucuuacaaugggaucaccu

SEQ ID NO: 724344 - RNA, 19 nt, Artificial Sequence
  Description of Artificial Sequence: Synthetic oligonucleotide
  Sense strand starting at position 2519 of SEQ ID NO: 586524
uuguaagagaaacgcuaaa

SEQ ID NO: 724345 - RNA, 19 nt, Artificial Sequence
  Description of Artificial Sequence: Synthetic oligonucleotide
  Antisense strand to SEQ ID NO: 724344
uuuagcguuucucuuacaa

SEQ ID NO: 724346 - RNA, 19 nt, Artificial Sequence
  Description of Artificial Sequence: Synthetic oligonucleotide
  Sense strand starting at position 2683 of SEQ ID NO: 586524
gaaggugcucgacaauuac

SEQ ID NO: 724347 - RNA, 19 nt, Artificial Sequence
  Description of Artificial Sequence: Synthetic oligonucleotide
  Antisense strand to SEQ ID NO: 724346
guaauugucgagcaccuuc

SEQ ID NO: 724348 - RNA, 19 nt, Artificial Sequence
  Description of Artificial Sequence: Synthetic oligonucleotide
  Sense strand starting at position 2687 of SEQ ID NO: 586524
gugcucgacaauuacugaa

SEQ ID NO: 724349 - RNA, 19 nt, Artificial Sequence
  Description of Artificial Sequence: Synthetic oligonucleotide
  Antisense strand to SEQ ID NO: 724348
uucaguaauugucgagcac

SEQ ID NO: 724350 - RNA, 19 nt, Artificial Sequence
  Description of Artificial Sequence: Synthetic oligonucleotide
  Sense strand starting at position 2689 of SEQ ID NO: 586524
gcucgacaauuacugaaga

SEQ ID NO: 724351 - RNA, 19 nt, Artificial Sequence
  Description of Artificial Sequence: Synthetic oligonucleotide
  Antisense strand to SEQ ID NO: 724350
ucuucaguaauugucgagc

SEQ ID NO: 724352 - RNA, 19 nt, Artificial Sequence
  Description of Artificial Sequence: Synthetic oligonucleotide
  Sense strand starting at position 2878 of SEQ ID NO: 586524
uaggcuuacuaaguuugaa

SEQ ID NO: 724353 - RNA, 19 nt, Artificial Sequence
  Description of Artificial Sequence: Synthetic oligonucleotide
  Antisense strand to SEQ ID NO: 724352
uucaaacuuaguaagccua

SEQ ID NO: 724354 - RNA, 19 nt, Artificial Sequence
  Description of Artificial Sequence: Synthetic oligonucleotide
  Sense strand starting at position 2948 of SEQ ID NO: 586524
agacauguuucuccaacug

SEQ ID NO: 724355 - RNA, 19 nt, Artificial Sequence
  Description of Artificial Sequence: Synthetic oligonucleotide
  Antisense strand to SEQ ID NO: 724354
caguuggagaaacaugucu

SEQ ID NO: 724356 - RNA, 19 nt, Artificial Sequence
  Description of Artificial Sequence: Synthetic oligonucleotide
  Sense strand starting at position 3150 of SEQ ID NO: 586524
aagcuuguugccuuuguca

SEQ ID NO: 724357 - RNA, 19 nt, Artificial Sequence
  Description of Artificial Sequence: Synthetic oligonucleotide
  Antisense strand to SEQ ID NO: 724356
ugacaaaggcaacaagcuu

SEQ ID NO: 724358 - RNA, 19 nt, Artificial Sequence
  Description of Artificial Sequence: Synthetic oligonucleotide
  Sense strand starting at position 3173 of SEQ ID NO: 586524
gaaacacuguuggccaauu

SEQ ID NO: 724359 - RNA, 19 nt, Artificial Sequence
  Description of Artificial Sequence: Synthetic oligonucleotide
  Antisense strand to SEQ ID NO: 724358
aauuggccaacaguguuuc

SEQ ID NO: 724360 - RNA, 19 nt, Artificial Sequence
  Description of Artificial Sequence: Synthetic oligonucleotide
  Sense strand starting at position 3266 of SEQ ID NO: 586524
auagucaagcagugaugau

SEQ ID NO: 724361 - RNA, 19 nt, Artificial Sequence
  Description of Artificial Sequence: Synthetic oligonucleotide
  Antisense strand to SEQ ID NO: 724360
aucaucacugcuugacuau

SEQ ID NO: 724362 - RNA, 19 nt, Artificial Sequence
  Description of Artificial Sequence: Synthetic oligonucleotide
  Sense strand starting at position 3369 of SEQ ID NO: 586524
aaaucaugagggugcuaua

SEQ ID NO: 724363 - RNA, 19 nt, Artificial Sequence
  Description of Artificial Sequence: Synthetic oligonucleotide
  Antisense strand to SEQ ID NO: 724362
uauagcacccucaugauuu

SEQ ID NO: 724364 - RNA, 19 nt, Artificial Sequence
  Description of Artificial Sequence: Synthetic oligonucleotide
  Sense strand starting at position 3511 of SEQ ID NO: 586524
uagggcagguuccugaauu

SEQ ID NO: 724365 - RNA, 19 nt, Artificial Sequence
  Description of Artificial Sequence: Synthetic oligonucleotide
  Antisense strand to SEQ ID NO: 724364
aauucaggaaccugcccua

SEQ ID NO: 724366 - RNA, 19 nt, Artificial Sequence
  Description of Artificial Sequence: Synthetic oligonucleotide
  Sense strand starting at position 3521 of SEQ ID NO: 586524
uccugaauuuaucagggac

SEQ ID NO: 724367 - RNA, 19 nt, Artificial Sequence
  Description of Artificial Sequence: Synthetic oligonucleotide
  Antisense strand to SEQ ID NO: 724366
gucccugauaaauucagga

SEQ ID NO: 724368 - RNA, 19 nt, Artificial Sequence
  Description of Artificial Sequence: Synthetic oligonucleotide
  Sense strand starting at position 3564 of SEQ ID NO: 586524
ccaccugauccugagugua

SEQ ID NO: 724369 - RNA, 19 nt, Artificial Sequence
  Description of Artificial Sequence: Synthetic oligonucleotide
  Antisense strand to SEQ ID NO: 724368
uacacucaggaucaggugg

SEQ ID NO: 724370 - RNA, 19 nt, Artificial Sequence
  Description of Artificial Sequence: Synthetic oligonucleotide
  Sense strand starting at position 3586 of SEQ ID NO: 586524
uuguccucaugaucaaaga

SEQ ID NO: 724371 - RNA, 19 nt, Artificial Sequence
  Description of Artificial Sequence: Synthetic oligonucleotide
  Antisense strand to SEQ ID NO: 724370
ucuuugaucaugaggacaa

SEQ ID NO: 724372 - RNA, 19 nt, Artificial Sequence
  Description of Artificial Sequence: Synthetic oligonucleotide
  Sense strand starting at position 3630 of SEQ ID NO: 586524
gucugcauuccagaaauca

SEQ ID NO: 724373 - RNA, 19 nt, Artificial Sequence
  Description of Artificial Sequence: Synthetic oligonucleotide
  Antisense strand to SEQ ID NO: 724372
ugauuucuggaaugcagac

SEQ ID NO: 724374 - RNA, 19 nt, Artificial Sequence
  Description of Artificial Sequence: Synthetic oligonucleotide
  Sense strand starting at position 3691 of SEQ ID NO: 586524
uaaggauacuucccggaag

SEQ ID NO: 724375 - RNA, 19 nt, Artificial Sequence
  Description of Artificial Sequence: Synthetic oligonucleotide
  Antisense strand to SEQ ID NO: 724374
cuuccgggaaguauccuua

SEQ ID NO: 724376 - RNA, 19 nt, Artificial Sequence
  Description of Artificial Sequence: Synthetic oligonucleotide
  Sense strand starting at position 3693 of SEQ ID NO: 586524
aggauacuucccggaaguu

SEQ ID NO: 724377 - RNA, 19 nt, Artificial Sequence
  Description of Artificial Sequence: Synthetic oligonucleotide
  Antisense strand to SEQ ID NO: 724376
aacuuccgggaaguauccu

SEQ ID NO: 724378 - RNA, 19 nt, Artificial Sequence
  Description of Artificial Sequence: Synthetic oligonucleotide
  Sense strand starting at position 3694 of SEQ ID NO: 586524
ggauacuucccggaaguuc

SEQ ID NO: 724379 - RNA, 19 nt, Artificial Sequence
  Description of Artificial Sequence: Synthetic oligonucleotide
  Antisense strand to SEQ ID NO: 724378
gaacuuccgggaaguaucc

SEQ ID NO: 724380 - RNA, 19 nt, Artificial Sequence
  Description of Artificial Sequence: Synthetic oligonucleotide
  Sense strand starting at position 3703 of SEQ ID NO: 586524
ccggaaguucuacacaaca

SEQ ID NO: 724381 - RNA, 19 nt, Artificial Sequence
  Description of Artificial Sequence: Synthetic oligonucleotide
  Antisense strand to SEQ ID NO: 724380
uguuguguagaacuuccgg

SEQ ID NO: 724382 - RNA, 19 nt, Artificial Sequence
  Description of Artificial Sequence: Synthetic oligonucleotide
  Sense strand starting at position 3716 of SEQ ID NO: 586524
acaacauuucuacguaugu

SEQ ID NO: 724383 - RNA, 19 nt, Artificial Sequence
  Description of Artificial Sequence: Synthetic oligonucleotide
  Antisense strand to SEQ ID NO: 724382
acauacguagaaauguugu

SEQ ID NO: 724384 - RNA, 19 nt, Artificial Sequence
  Description of Artificial Sequence: Synthetic oligonucleotide
  Sense strand starting at position 3788 of SEQ ID NO: 586524
ggaaauauaccuggccauu

SEQ ID NO: 724385 - RNA, 19 nt, Artificial Sequence
  Description of Artificial Sequence: Synthetic oligonucleotide
  Antisense strand to SEQ ID NO: 724384
aauggccagguauauuucc

SEQ ID NO: 724386 - RNA, 19 nt, Artificial Sequence
  Description of Artificial Sequence: Synthetic oligonucleotide
  Sense strand starting at position 3801 of SEQ ID NO: 586524
gccauugcugugcccagau

SEQ ID NO: 724387 - RNA, 19 nt, Artificial Sequence
  Description of Artificial Sequence: Synthetic oligonucleotide
  Antisense strand to SEQ ID NO: 724386
aucugggcacagcaauggc

SEQ ID NO: 724388 - RNA, 19 nt, Artificial Sequence
  Description of Artificial Sequence: Synthetic oligonucleotide
  Sense strand starting at position 3874 of SEQ ID NO: 586524
auuagagaucucugucaga

SEQ ID NO: 724389 - RNA, 19 nt, Artificial Sequence
  Description of Artificial Sequence: Synthetic oligonucleotide
  Antisense strand to SEQ ID NO: 724388
ucugacagagaucucuaau

SEQ ID NO: 724390 - RNA, 19 nt, Artificial Sequence
  Description of Artificial Sequence: Synthetic oligonucleotide
  Sense strand starting at position 77 of SEQ ID NO: 586525
cgccaacuguucucagauu

SEQ ID NO: 724391 - RNA, 19 nt, Artificial Sequence
  Description of Artificial Sequence: Synthetic oligonucleotide
  Antisense strand to SEQ ID NO: 724390
aaucugagaacaguuggcg

SEQ ID NO: 724392 - RNA, 19 nt, Artificial Sequence
  Description of Artificial Sequence: Synthetic oligonucleotide
  Sense strand starting at position 85 of SEQ ID NO: 586525
guucucagauucucuauga

SEQ ID NO: 724393 - RNA, 19 nt, Artificial Sequence
  Description of Artificial Sequence: Synthetic oligonucleotide
  Antisense strand to SEQ ID NO: 724392
ucauagagaaucugagaac

SEQ ID NO: 724394 - RNA, 19 nt, Artificial Sequence
  Description of Artificial Sequence: Synthetic oligonucleotide
  Sense strand starting at position 619 of SEQ ID NO: 586525
aaggcugauccugagguuu

SEQ ID NO: 724395 - RNA, 19 nt, Artificial Sequence
  Description of Artificial Sequence: Synthetic oligonucleotide
  Antisense strand to SEQ ID NO: 724394
aaaccucaggaucagccuu

SEQ ID NO: 724396 - RNA, 19 nt, Artificial Sequence
  Description of Artificial Sequence: Synthetic oligonucleotide
  Sense strand starting at position 1350 of SEQ ID NO: 586525
ggcagaggucaagaacgau

SEQ ID NO: 724397 - RNA, 19 nt, Artificial Sequence
  Description of Artificial Sequence: Synthetic oligonucleotide
  Antisense strand to SEQ ID NO: 724396
aucguucuugaccucugcc

SEQ ID NO: 724398 - RNA, 19 nt, Artificial Sequence
  Description of Artificial Sequence: Synthetic oligonucleotide
  Sense strand starting at position 1370 of SEQ ID NO: 586525
gccagugugcaagauggaa

SEQ ID NO: 724399 - RNA, 19 nt, Artificial Sequence
  Description of Artificial Sequence: Synthetic oligonucleotide
  Antisense strand to SEQ ID NO: 724398
uuccaucuugcacacuggc

SEQ ID NO: 724400 - RNA, 19 nt, Artificial Sequence
  Description of Artificial Sequence: Synthetic oligonucleotide
  Sense strand starting at position 1454 of SEQ ID NO: 586525
cuacauuguuugguuugaa

SEQ ID NO: 724401 - RNA, 19 nt, Artificial Sequence
  Description of Artificial Sequence: Synthetic oligonucleotide
  Antisense strand to SEQ ID NO: 724400
uucaaaccaaacaauguag

SEQ ID NO: 724402 - RNA, 19 nt, Artificial Sequence
  Description of Artificial Sequence: Synthetic oligonucleotide
  Sense strand starting at position 1455 of SEQ ID NO: 586525
uacauuguuugguuugaaa

SEQ ID NO: 724403 - RNA, 19 nt, Artificial Sequence
  Description of Artificial Sequence: Synthetic oligonucleotide
  Antisense strand to SEQ ID NO: 724402
uuucaaaccaaacaaugua

SEQ ID NO: 724404 - RNA, 19 nt, Artificial Sequence
  Description of Artificial Sequence: Synthetic oligonucleotide
  Sense strand starting at position 1457 of SEQ ID NO: 586525
cauuguuugguuugaaauu

SEQ ID NO: 724405 - RNA, 19 nt, Artificial Sequence
  Description of Artificial Sequence: Synthetic oligonucleotide
  Antisense strand to SEQ ID NO: 724404
aauuucaaaccaaacaaug

SEQ ID NO: 724406 - RNA, 19 nt, Artificial Sequence
  Description of Artificial Sequence: Synthetic oligonucleotide
  Sense strand starting at position 1463 of SEQ ID NO: 586525
uugguuugaaauuggcaaa

SEQ ID NO: 724407 - RNA, 19 nt, Artificial Sequence
  Description of Artificial Sequence: Synthetic oligonucleotide
  Antisense strand to SEQ ID NO: 724406
uuugccaauuucaaaccaa

SEQ ID NO: 724408 - RNA, 19 nt, Artificial Sequence
  Description of Artificial Sequence: Synthetic oligonucleotide
  Sense strand starting at position 1497 of SEQ ID NO: 586525
agaaaucuauuccaggauc

SEQ ID NO: 724409 - RNA, 19 nt, Artificial Sequence
  Description of Artificial Sequence: Synthetic oligonucleotide
  Antisense strand to SEQ ID NO: 724408
gauccuggaauagauuucu

SEQ ID NO: 724410 - RNA, 19 nt, Artificial Sequence
  Description of Artificial Sequence: Synthetic oligonucleotide
  Sense strand starting at position 1546 of SEQ ID NO: 586525
ugccaucguugggcuaaga

SEQ ID NO: 724411 - RNA, 19 nt, Artificial Sequence
  Description of Artificial Sequence: Synthetic oligonucleotide
  Antisense strand to SEQ ID NO: 724410
ucuuagcccaacgauggca

SEQ ID NO: 724412 - RNA, 19 nt, Artificial Sequence
  Description of Artificial Sequence: Synthetic oligonucleotide
  Sense strand starting at position 1578 of SEQ ID NO: 586525
ugcauuucucccugaaugu

SEQ ID NO: 724413 - RNA, 19 nt, Artificial Sequence
  Description of Artificial Sequence: Synthetic oligonucleotide
  Antisense strand to SEQ ID NO: 724412
acauucagggagaaaugca

SEQ ID NO: 724414 - RNA, 19 nt, Artificial Sequence
  Description of Artificial Sequence: Synthetic oligonucleotide
  Sense strand starting at position 1626 of SEQ ID NO: 586525
ggaaacugcagucgggaua

SEQ ID NO: 724415 - RNA, 19 nt, Artificial Sequence
  Description of Artificial Sequence: Synthetic oligonucleotide
  Antisense strand to SEQ ID NO: 724414
uaucccgacugcaguuucc

SEQ ID NO: 724416 - RNA, 19 nt, Artificial Sequence
  Description of Artificial Sequence: Synthetic oligonucleotide
  Sense strand starting at position 1627 of SEQ ID NO: 586525
gaaacugcagucgggauau

SEQ ID NO: 724417 - RNA, 19 nt, Artificial Sequence
  Description of Artificial Sequence: Synthetic oligonucleotide
  Antisense strand to SEQ ID NO: 724416
auaucccgacugcaguuuc

SEQ ID NO: 724418 - RNA, 19 nt, Artificial Sequence
  Description of Artificial Sequence: Synthetic oligonucleotide
  Sense strand starting at position 1629 of SEQ ID NO: 586525
aacugcagucgggauauaa

SEQ ID NO: 724419 - RNA, 19 nt, Artificial Sequence
  Description of Artificial Sequence: Synthetic oligonucleotide
  Antisense strand to SEQ ID NO: 724418
uuauaucccgacugcaguu

SEQ ID NO: 724420 - RNA, 19 nt, Artificial Sequence
  Description of Artificial Sequence: Synthetic oligonucleotide
  Sense strand starting at position 1667 of SEQ ID NO: 586525
cgacucuauuccguuuaaa

SEQ ID NO: 724421 - RNA, 19 nt, Artificial Sequence
  Description of Artificial Sequence: Synthetic oligonucleotide
  Antisense strand to SEQ ID NO: 724420
uuuaaacggaauagagucg

SEQ ID NO: 724422 - RNA, 19 nt, Artificial Sequence
  Description of Artificial Sequence: Synthetic oligonucleotide
  Sense strand starting at position 2032 of SEQ ID NO: 586525
gagagaaacugcccuggua

SEQ ID NO: 724423 - RNA, 19 nt, Artificial Sequence
  Description of Artificial Sequence: Synthetic oligonucleotide
  Antisense strand to SEQ ID NO: 724422
uaccagggcaguuucucuc

SEQ ID NO: 724424 - RNA, 19 nt, Artificial Sequence
  Description of Artificial Sequence: Synthetic oligonucleotide
  Sense strand starting at position 2034 of SEQ ID NO: 586525
gagaaacugcccugguaga

SEQ ID NO: 724425 - RNA, 19 nt, Artificial Sequence
  Description of Artificial Sequence: Synthetic oligonucleotide
  Antisense strand to SEQ ID NO: 724424
ucuaccagggcaguuucuc

SEQ ID NO: 724426 - RNA, 19 nt, Artificial Sequence
  Description of Artificial Sequence: Synthetic oligonucleotide
  Sense strand starting at position 2155 of SEQ ID NO: 586525
gcugcaaucgccuuugcaa

SEQ ID NO: 724427 - RNA, 19 nt, Artificial Sequence
  Description of Artificial Sequence: Synthetic oligonucleotide
  Antisense strand to SEQ ID NO: 724426
uugcaaaggcgauugcagc

SEQ ID NO: 724428 - RNA, 19 nt, Artificial Sequence
  Description of Artificial Sequence: Synthetic oligonucleotide
  Sense strand starting at position 2260 of SEQ ID NO: 586525
gucauuccugagcauggga

SEQ ID NO: 724429 - RNA, 19 nt, Artificial Sequence
  Description of Artificial Sequence: Synthetic oligonucleotide
  Antisense strand to SEQ ID NO: 724428
ucccaugcucaggaaugac

SEQ ID NO: 724430 - RNA, 19 nt, Artificial Sequence
  Description of Artificial Sequence: Synthetic oligonucleotide
  Sense strand starting at position 2279 of SEQ ID NO: 586525
cgagcuaauauagggagaa

SEQ ID NO: 724431 - RNA, 19 nt, Artificial Sequence
  Description of Artificial Sequence: Synthetic oligonucleotide
  Antisense strand to SEQ ID NO: 724430
uucucccuauauuagcucg

SEQ ID NO: 724432 - RNA, 19 nt, Artificial Sequence
  Description of Artificial Sequence: Synthetic oligonucleotide
  Sense strand starting at position 2280 of SEQ ID NO: 586525
gagcuaauauagggagaaa

SEQ ID NO: 724433 - RNA, 19 nt, Artificial Sequence
  Description of Artificial Sequence: Synthetic oligonucleotide
  Antisense strand to SEQ ID NO: 724432
uuucucccuauauuagcuc

SEQ ID NO: 724434 - RNA, 19 nt, Artificial Sequence
  Description of Artificial Sequence: Synthetic oligonucleotide
  Sense strand starting at position 2432 of SEQ ID NO: 586525
gacauuguuccagagguca

SEQ ID NO: 724435 - RNA, 19 nt, Artificial Sequence
  Description of Artificial Sequence: Synthetic oligonucleotide
  Antisense strand to SEQ ID NO: 724434
ugaccucuggaacaauguc

SEQ ID NO: 724436 - RNA, 19 nt, Artificial Sequence
  Description of Artificial Sequence: Synthetic oligonucleotide
  Sense strand starting at position 2447 of SEQ ID NO: 586525
gucacaagcucugcaacuu

SEQ ID NO: 724437 - RNA, 19 nt, Artificial Sequence
  Description of Artificial Sequence: Synthetic oligonucleotide
  Antisense strand to SEQ ID NO: 724436
aaguugcagagcuugugac

SEQ ID NO: 724438 - RNA, 19 nt, Artificial Sequence
  Description of Artificial Sequence: Synthetic oligonucleotide
  Sense strand starting at position 2505 of SEQ ID NO: 586525
aagacuggccuuugaagau

SEQ ID NO: 724439 - RNA, 19 nt, Artificial Sequence
  Description of Artificial Sequence: Synthetic oligonucleotide
  Antisense strand to SEQ ID NO: 724438
aucuucaaaggccagucuu

SEQ ID NO: 724440 - RNA, 19 nt, Artificial Sequence
  Description of Artificial Sequence: Synthetic oligonucleotide
  Sense strand starting at position 3353 of SEQ ID NO: 586525
gggaauaucuaaugauaac

SEQ ID NO: 724441 - RNA, 19 nt, Artificial Sequence
  Description of Artificial Sequence: Synthetic oligonucleotide
  Antisense strand to SEQ ID NO: 724440
guuaucauuagauauuccc

SEQ ID NO: 724442 - RNA, 19 nt, Artificial Sequence
  Description of Artificial Sequence: Synthetic oligonucleotide
  Sense strand starting at position 3387 of SEQ ID NO: 586525
aguugugaggaaugaggua

SEQ ID NO: 724443 - RNA, 19 nt, Artificial Sequence
  Description of Artificial Sequence: Synthetic oligonucleotide
  Antisense strand to SEQ ID NO: 724442
uaccucauuccucacaacu

SEQ ID NO: 724444 - RNA, 19 nt, Artificial Sequence
  Description of Artificial Sequence: Synthetic oligonucleotide
  Sense strand starting at position 3425 of SEQ ID NO: 586525
uuauuauuguugcuuggca

SEQ ID NO: 724445 - RNA, 19 nt, Artificial Sequence
  Description of Artificial Sequence: Synthetic oligonucleotide
  Antisense strand to SEQ ID NO: 724444
ugccaagcaacaauaauaa

SEQ ID NO: 724446 - RNA, 19 nt, Artificial Sequence
  Description of Artificial Sequence: Synthetic oligonucleotide
  Sense strand starting at position 3473 of SEQ ID NO: 586525
auaagaaguucucagagua

SEQ ID NO: 724447 - RNA, 19 nt, Artificial Sequence
  Description of Artificial Sequence: Synthetic oligonucleotide
  Antisense strand to SEQ ID NO: 724446
uacucugagaacuucuuau

SEQ ID NO: 724448 - RNA, 19 nt, Artificial Sequence
  Description of Artificial Sequence: Synthetic oligonucleotide
  Sense strand starting at position 3501 of SEQ ID NO: 586525
uuguguuaccuuugucaga

SEQ ID NO: 724449 - RNA, 19 nt, Artificial Sequence
  Description of Artificial Sequence: Synthetic oligonucleotide
  Antisense strand to SEQ ID NO: 724448
ucugacaaagguaacacaa

SEQ ID NO: 724450 - RNA, 19 nt, Artificial Sequence
  Description of Artificial Sequence: Synthetic oligonucleotide
  Sense strand starting at position 3502 of SEQ ID NO: 586525
uguguuaccuuugucagag

SEQ ID NO: 724451 - RNA, 19 nt, Artificial Sequence
  Description of Artificial Sequence: Synthetic oligonucleotide
  Antisense strand to SEQ ID NO: 724450
cucugacaaagguaacaca

SEQ ID NO: 724452 - RNA, 19 nt, Artificial Sequence
  Description of Artificial Sequence: Synthetic oligonucleotide
  Sense strand starting at position 3503 of SEQ ID NO: 586525
guguuaccuuugucagaga

SEQ ID NO: 724453 - RNA, 19 nt, Artificial Sequence
  Description of Artificial Sequence: Synthetic oligonucleotide
  Antisense strand to SEQ ID NO: 724452
ucucugacaaagguaacac

SEQ ID NO: 724454 - RNA, 19 nt, Artificial Sequence
  Description of Artificial Sequence: Synthetic oligonucleotide
  Sense strand starting at position 3506 of SEQ ID NO: 586525
uuaccuuugucagagauuu

SEQ ID NO: 724455 - RNA, 19 nt, Artificial Sequence
  Description of Artificial Sequence: Synthetic oligonucleotide
  Antisense strand to SEQ ID NO: 724454
aaaucucugacaaagguaa

SEQ ID NO: 724456 - RNA, 19 nt, Artificial Sequence
  Description of Artificial Sequence: Synthetic oligonucleotide
  Sense strand starting at position 3514 of SEQ ID NO: 586525
gucagagauuugcacaaug

SEQ ID NO: 724457 - RNA, 19 nt, Artificial Sequence
  Description of Artificial Sequence: Synthetic oligonucleotide
  Antisense strand to SEQ ID NO: 724456
cauugugcaaaucucugac

SEQ ID NO: 724458 - RNA, 19 nt, Artificial Sequence
  Description of Artificial Sequence: Synthetic oligonucleotide
  Sense strand starting at position 3525 of SEQ ID NO: 586525
gcacaaugucugggacaca

SEQ ID NO: 724459 - RNA, 19 nt, Artificial Sequence
  Description of Artificial Sequence: Synthetic oligonucleotide
  Antisense strand to SEQ ID NO: 724458
ugugucccagacauugugc

SEQ ID NO: 724460 - RNA, 19 nt, Artificial Sequence
  Description of Artificial Sequence: Synthetic oligonucleotide
  Sense strand starting at position 3638 of SEQ ID NO: 586525
ggaaacgauuggcccuauu

SEQ ID NO: 724461 - RNA, 19 nt, Artificial Sequence
  Description of Artificial Sequence: Synthetic oligonucleotide
  Antisense strand to SEQ ID NO: 724460
aauagggccaaucguuucc

SEQ ID NO: 724462 - RNA, 19 nt, Artificial Sequence
  Description of Artificial Sequence: Synthetic oligonucleotide
  Sense strand starting at position 3664 of SEQ ID NO: 586525
acaaauaugugagucauau

SEQ ID NO: 724463 - RNA, 19 nt, Artificial Sequence
  Description of Artificial Sequence: Synthetic oligonucleotide
  Antisense strand to SEQ ID NO: 724462
auaugacucacauauuugu

SEQ ID NO: 724464 - RNA, 19 nt, Artificial Sequence
  Description of Artificial Sequence: Synthetic oligonucleotide
  Sense strand starting at position 3673 of SEQ ID NO: 586525
ugagucauauugucuuaua

SEQ ID NO: 724465 - RNA, 19 nt, Artificial Sequence
  Description of Artificial Sequence: Synthetic oligonucleotide
  Antisense strand to SEQ ID NO: 724464
uauaagacaauaugacuca

SEQ ID NO: 724466 - RNA, 19 nt, Artificial Sequence
  Description of Artificial Sequence: Synthetic oligonucleotide
  Sense strand starting at position 3909 of SEQ ID NO: 586525
ugauguuaucauuaccuac

SEQ ID NO: 724467 - RNA, 19 nt, Artificial Sequence
  Description of Artificial Sequence: Synthetic oligonucleotide
  Antisense strand to SEQ ID NO: 724466
guagguaaugauaacauca

SEQ ID NO: 724468 - RNA, 19 nt, Artificial Sequence
  Description of Artificial Sequence: Synthetic oligonucleotide
  Sense strand starting at position 3924 of SEQ ID NO: 586525
cuacuugcagaguaaacua

SEQ ID NO: 724469 - RNA, 19 nt, Artificial Sequence
  Description of Artificial Sequence: Synthetic oligonucleotide
  Antisense strand to SEQ ID NO: 724468
uaguuuacucugcaaguag

SEQ ID NO: 724470 - RNA, 19 nt, Artificial Sequence
  Description of Artificial Sequence: Synthetic oligonucleotide
  Sense strand starting at position 359 of SEQ ID NO: 586526
ugcaaugugcuaugauugu

SEQ ID NO: 724471 - RNA, 19 nt, Artificial Sequence
  Description of Artificial Sequence: Synthetic oligonucleotide
  Antisense strand to SEQ ID NO: 724470
acaaucauagcacauugca

SEQ ID NO: 724472 - RNA, 19 nt, Artificial Sequence
  Description of Artificial Sequence: Synthetic oligonucleotide
  Sense strand starting at position 584 of SEQ ID NO: 586526
ggaggucaguagucagcaa

SEQ ID NO: 724473 - RNA, 19 nt, Artificial Sequence
  Description of Artificial Sequence: Synthetic oligonucleotide
  Antisense strand to SEQ ID NO: 724472
uugcugacuacugaccucc

SEQ ID NO: 724474 - RNA, 19 nt, Artificial Sequence
  Description of Artificial Sequence: Synthetic oligonucleotide
  Sense strand starting at position 674 of SEQ ID NO: 586526
agcgcaaauccauaaccua

SEQ ID NO: 724475 - RNA, 19 nt, Artificial Sequence
  Description of Artificial Sequence: Synthetic oligonucleotide
  Antisense strand to SEQ ID NO: 724474
uagguuauggauuugcgcu

SEQ ID NO: 724476 - RNA, 19 nt, Artificial Sequence
  Description of Artificial Sequence: Synthetic oligonucleotide
  Sense strand starting at position 876 of SEQ ID NO: 586526
uccggucauuguguuuauu

SEQ ID NO: 724477 - RNA, 19 nt, Artificial Sequence
  Description of Artificial Sequence: Synthetic oligonucleotide
  Antisense strand to SEQ ID NO: 724476
aauaaacacaaugaccgga

SEQ ID NO: 724478 - RNA, 19 nt, Artificial Sequence
  Description of Artificial Sequence: Synthetic oligonucleotide
  Sense strand starting at position 878 of SEQ ID NO: 586526
cggucauuguguuuauuuc

SEQ ID NO: 724479 - RNA, 19 nt, Artificial Sequence
  Description of Artificial Sequence: Synthetic oligonucleotide
  Antisense strand to SEQ ID NO: 724478
gaaauaaacacaaugaccg

SEQ ID NO: 724480 - RNA, 19 nt, Artificial Sequence
  Description of Artificial Sequence: Synthetic oligonucleotide
  Sense strand starting at position 2061 of SEQ ID NO: 586526
cgggaguuguaguuucgga

SEQ ID NO: 724481 - RNA, 19 nt, Artificial Sequence
  Description of Artificial Sequence: Synthetic oligonucleotide
  Antisense strand to SEQ ID NO: 724480
uccgaaacuacaacucccg

SEQ ID NO: 724482 - RNA, 19 nt, Artificial Sequence
  Description of Artificial Sequence: Synthetic oligonucleotide
  Sense strand starting at position 2666 of SEQ ID NO: 586526
agcagaaauccugacucgu

SEQ ID NO: 724483 - RNA, 19 nt, Artificial Sequence
  Description of Artificial Sequence: Synthetic oligonucleotide
  Antisense strand to SEQ ID NO: 724482
acgagucaggauuucugcu

SEQ ID NO: 724484 - RNA, 19 nt, Artificial Sequence
  Description of Artificial Sequence: Synthetic oligonucleotide
  Sense strand starting at position 2668 of SEQ ID NO: 586526
cagaaauccugacucguag

SEQ ID NO: 724485 - RNA, 19 nt, Artificial Sequence
  Description of Artificial Sequence: Synthetic oligonucleotide
  Antisense strand to SEQ ID NO: 724484
cuacgagucaggauuucug

SEQ ID NO: 724486 - RNA, 19 nt, Artificial Sequence
  Description of Artificial Sequence: Synthetic oligonucleotide
  Sense strand starting at position 2708 of SEQ ID NO: 586526
cgcgaugcgauuuaacuca

SEQ ID NO: 724487 - RNA, 19 nt, Artificial Sequence
  Description of Artificial Sequence: Synthetic oligonucleotide
  Antisense strand to SEQ ID NO: 724486
ugaguuaaaucgcaucgcg

SEQ ID NO: 724488 - RNA, 19 nt, Artificial Sequence
  Description of Artificial Sequence: Synthetic oligonucleotide
  Sense strand starting at position 2764 of SEQ ID NO: 586526
ugaauuagccgguggguuu

SEQ ID NO: 724489 - RNA, 19 nt, Artificial Sequence
  Description of Artificial Sequence: Synthetic oligonucleotide
  Antisense strand to SEQ ID NO: 724488
aaacccaccggcuaauuca

SEQ ID NO: 724490 - RNA, 19 nt, Artificial Sequence
  Description of Artificial Sequence: Synthetic oligonucleotide
  Sense strand starting at position 2862 of SEQ ID NO: 586526
uuauguaaagcacgagauu

SEQ ID NO: 724491 - RNA, 19 nt, Artificial Sequence
  Description of Artificial Sequence: Synthetic oligonucleotide
  Antisense strand to SEQ ID NO: 724490
aaucucgugcuuuacauaa

SEQ ID NO: 724492 - RNA, 19 nt, Artificial Sequence
  Description of Artificial Sequence: Synthetic oligonucleotide
  Sense strand starting at position 2871 of SEQ ID NO: 586526
gcacgagauugagugguuu

SEQ ID NO: 724493 - RNA, 19 nt, Artificial Sequence
  Description of Artificial Sequence: Synthetic oligonucleotide
  Antisense strand to SEQ ID NO: 724492
aaaccacucaaucucgugc

SEQ ID NO: 724494 - RNA, 19 nt, Artificial Sequence
  Description of Artificial Sequence: Synthetic oligonucleotide
  Sense strand starting at position 3013 of SEQ ID NO: 586526
gccuuugucgcuagcgaga

SEQ ID NO: 724495 - RNA, 19 nt, Artificial Sequence
  Description of Artificial Sequence: Synthetic oligonucleotide
  Antisense strand to SEQ ID NO: 724494
ucucgcuagcgacaaaggc

SEQ ID NO: 724496 - RNA, 19 nt, Artificial Sequence
  Description of Artificial Sequence: Synthetic oligonucleotide
  Sense strand starting at position 3090 of SEQ ID NO: 586526
ggguucuccgauuggcauu

SEQ ID NO: 724497 - RNA, 19 nt, Artificial Sequence
  Description of Artificial Sequence: Synthetic oligonucleotide
  Antisense strand to SEQ ID NO: 724496
aaugccaaucggagaaccc

SEQ ID NO: 724498 - RNA, 19 nt, Artificial Sequence
  Description of Artificial Sequence: Synthetic oligonucleotide
  Sense strand starting at position 3196 of SEQ ID NO: 586526
gcguaaagcucaccggaga

SEQ ID NO: 724499 - RNA, 19 nt, Artificial Sequence
  Description of Artificial Sequence: Synthetic oligonucleotide
  Antisense strand to SEQ ID NO: 724498
ucuccggugagcuuuacgc

SEQ ID NO: 724500 - RNA, 19 nt, Artificial Sequence
  Description of Artificial Sequence: Synthetic oligonucleotide
  Sense strand starting at position 3197 of SEQ ID NO: 586526
cguaaagcucaccggagaa

SEQ ID NO: 724501 - RNA, 19 nt, Artificial Sequence
  Description of Artificial Sequence: Synthetic oligonucleotide
  Antisense strand to SEQ ID NO: 724500
uucuccggugagcuuuacg

SEQ ID NO: 724502 - RNA, 19 nt, Artificial Sequence
  Description of Artificial Sequence: Synthetic oligonucleotide
  Sense strand starting at position 3243 of SEQ ID NO: 586526
uugcgauuucccggacaau

SEQ ID NO: 724503 - RNA, 19 nt, Artificial Sequence
  Description of Artificial Sequence: Synthetic oligonucleotide
  Antisense strand to SEQ ID NO: 724502
auuguccgggaaaucgcaa

SEQ ID NO: 724504 - RNA, 19 nt, Artificial Sequence
  Description of Artificial Sequence: Synthetic oligonucleotide
  Sense strand starting at position 3274 of SEQ ID NO: 586526
uucgguccuugccuaauaa

SEQ ID NO: 724505 - RNA, 19 nt, Artificial Sequence
  Description of Artificial Sequence: Synthetic oligonucleotide
  Antisense strand to SEQ ID NO: 724504
uuauuaggcaaggaccgaa

SEQ ID NO: 724506 - RNA, 19 nt, Artificial Sequence
  Description of Artificial Sequence: Synthetic oligonucleotide
  Sense strand starting at position 3284 of SEQ ID NO: 586526
gccuaauaagauugugacu

SEQ ID NO: 724507 - RNA, 19 nt, Artificial Sequence
  Description of Artificial Sequence: Synthetic oligonucleotide
  Antisense strand to SEQ ID NO: 724506
agucacaaucuuauuaggc

SEQ ID NO: 724508 - RNA, 19 nt, Artificial Sequence
  Description of Artificial Sequence: Synthetic oligonucleotide
  Sense strand starting at position 3289 of SEQ ID NO: 586526
auaagauugugacucuccu

SEQ ID NO: 724509 - RNA, 19 nt, Artificial Sequence
  Description of Artificial Sequence: Synthetic oligonucleotide
  Antisense strand to SEQ ID NO: 724508
aggagagucacaaucuuau

SEQ ID NO: 724510 - RNA, 19 nt, Artificial Sequence
  Description of Artificial Sequence: Synthetic oligonucleotide
  Sense strand starting at position 3297 of SEQ ID NO: 586526
gugacucuccuuugucgau

SEQ ID NO: 724511 - RNA, 19 nt, Artificial Sequence
  Description of Artificial Sequence: Synthetic oligonucleotide
  Antisense strand to SEQ ID NO: 724510
aucgacaaaggagagucac

SEQ ID NO: 724512 - RNA, 19 nt, Artificial Sequence
  Description of Artificial Sequence: Synthetic oligonucleotide
  Sense strand starting at position 3307 of SEQ ID NO: 586526
uuugucgauugucucgaaa

SEQ ID NO: 724513 - RNA, 19 nt, Artificial Sequence
  Description of Artificial Sequence: Synthetic oligonucleotide
  Antisense strand to SEQ ID NO: 724512
uuucgagacaaucgacaaa

SEQ ID NO: 724514 - RNA, 19 nt, Artificial Sequence
  Description of Artificial Sequence: Synthetic oligonucleotide
  Sense strand starting at position 3310 of SEQ ID NO: 586526
gucgauugucucgaaaguc

SEQ ID NO: 724515 - RNA, 19 nt, Artificial Sequence
  Description of Artificial Sequence: Synthetic oligonucleotide
  Antisense strand to SEQ ID NO: 724514
gacuuucgagacaaucgac

SEQ ID NO: 724516 - RNA, 19 nt, Artificial Sequence
  Description of Artificial Sequence: Synthetic oligonucleotide
  Sense strand starting at position 3331 of SEQ ID NO: 586526
ucauuaaguuugcacaaga

SEQ ID NO: 724517 - RNA, 19 nt, Artificial Sequence
  Description of Artificial Sequence: Synthetic oligonucleotide
  Antisense strand to SEQ ID NO: 724516
ucuugugcaaacuuaauga

SEQ ID NO: 724518 - RNA, 19 nt, Artificial Sequence
  Description of Artificial Sequence: Synthetic oligonucleotide
  Sense strand starting at position 3432 of SEQ ID NO: 586526
ggcauauauuuaggaacaa

SEQ ID NO: 724519 - RNA, 19 nt, Artificial Sequence
  Description of Artificial Sequence: Synthetic oligonucleotide
  Antisense strand to SEQ ID NO: 724518
uuguuccuaaauauaugcc

SEQ ID NO: 724520 - RNA, 19 nt, Artificial Sequence
  Description of Artificial Sequence: Synthetic oligonucleotide
  Sense strand starting at position 3433 of SEQ ID NO: 586526
gcauauauuuaggaacaaa

SEQ ID NO: 724521 - RNA, 19 nt, Artificial Sequence
  Description of Artificial Sequence: Synthetic oligonucleotide
  Antisense strand to SEQ ID NO: 724520
uuuguuccuaaauauaugc

SEQ ID NO: 724522 - RNA, 19 nt, Artificial Sequence
  Description of Artificial Sequence: Synthetic oligonucleotide
  Sense strand starting at position 3458 of SEQ ID NO: 586526
ucuugagaagccuauaacu

SEQ ID NO: 724523 - RNA, 19 nt, Artificial Sequence
  Description of Artificial Sequence: Synthetic oligonucleotide
  Antisense strand to SEQ ID NO: 724522
aguuauaggcuucucaaga

SEQ ID NO: 724524 - RNA, 19 nt, Artificial Sequence
  Description of Artificial Sequence: Synthetic oligonucleotide
  Sense strand starting at position 3523 of SEQ ID NO: 586526
uguggacuucagugaguau

SEQ ID NO: 724525 - RNA, 19 nt, Artificial Sequence
  Description of Artificial Sequence: Synthetic oligonucleotide
  Antisense strand to SEQ ID NO: 724524
auacucacugaaguccaca

SEQ ID NO: 724526 - RNA, 19 nt, Artificial Sequence
  Description of Artificial Sequence: Synthetic oligonucleotide
  Sense strand starting at position 3552 of SEQ ID NO: 586526
gagagugguuucuccaccu

SEQ ID NO: 724527 - RNA, 19 nt, Artificial Sequence
  Description of Artificial Sequence: Synthetic oligonucleotide
  Antisense strand to SEQ ID NO: 724526
agguggagaaaccacucuc

SEQ ID NO: 724528 - RNA, 19 nt, Artificial Sequence
  Description of Artificial Sequence: Synthetic oligonucleotide
  Sense strand starting at position 3602 of SEQ ID NO: 586526
aguggagucguggaguaga

SEQ ID NO: 724529 - RNA, 19 nt, Artificial Sequence
  Description of Artificial Sequence: Synthetic oligonucleotide
  Antisense strand to SEQ ID NO: 724528
ucuacuccacgacuccacu

SEQ ID NO: 724530 - RNA, 19 nt, Artificial Sequence
  Description of Artificial Sequence: Synthetic oligonucleotide
  Sense strand starting at position 3605 of SEQ ID NO: 586526
ggagucguggaguagaauu

SEQ ID NO: 724531 - RNA, 19 nt, Artificial Sequence
  Description of Artificial Sequence: Synthetic oligonucleotide
  Antisense strand to SEQ ID NO: 724530
aauucuacuccacgacucc

SEQ ID NO: 724532 - RNA, 19 nt, Artificial Sequence
  Description of Artificial Sequence: Synthetic oligonucleotide
  Sense strand starting at position 3633 of SEQ ID NO: 586526
guuacaaagugaguuagca

SEQ ID NO: 724533 - RNA, 19 nt, Artificial Sequence
  Description of Artificial Sequence: Synthetic oligonucleotide
  Antisense strand to SEQ ID NO: 724532
ugcuaacucacuuuguaac

SEQ ID NO: 724534 - RNA, 19 nt, Artificial Sequence
  Description of Artificial Sequence: Synthetic oligonucleotide
  Sense strand starting at position 3654 of SEQ ID NO: 586526
gcagaaguuuauuuagcca

SEQ ID NO: 724535 - RNA, 19 nt, Artificial Sequence
  Description of Artificial Sequence: Synthetic oligonucleotide
  Antisense strand to SEQ ID NO: 724534
uggcuaaauaaacuucugc

SEQ ID NO: 724536 - RNA, 19 nt, Artificial Sequence
  Description of Artificial Sequence: Synthetic oligonucleotide
  Sense strand starting at position 3673 of SEQ ID NO: 586526
agaugacucuuaucaucgu

SEQ ID NO: 724537 - RNA, 19 nt, Artificial Sequence
  Description of Artificial Sequence: Synthetic oligonucleotide
  Antisense strand to SEQ ID NO: 724536
acgaugauaagagucaucu

SEQ ID NO: 724538 - RNA, 19 nt, Artificial Sequence
  Description of Artificial Sequence: Synthetic oligonucleotide
  Sense strand starting at position 3676 of SEQ ID NO: 586526
ugacucuuaucaucgugaa

SEQ ID NO: 724539 - RNA, 19 nt, Artificial Sequence
  Description of Artificial Sequence: Synthetic oligonucleotide
  Antisense strand to SEQ ID NO: 724538
uucacgaugauaagaguca

SEQ ID NO: 724540 - RNA, 19 nt, Artificial Sequence
  Description of Artificial Sequence: Synthetic oligonucleotide
  Sense strand starting at position 3677 of SEQ ID NO: 586526
gacucuuaucaucgugaaa

SEQ ID NO: 724541 - RNA, 19 nt, Artificial Sequence
  Description of Artificial Sequence: Synthetic oligonucleotide
  Antisense strand to SEQ ID NO: 724540
uuucacgaugauaagaguc

SEQ ID NO: 724542 - RNA, 19 nt, Artificial Sequence
  Description of Artificial Sequence: Synthetic oligonucleotide
  Sense strand starting at position 3706 of SEQ ID NO: 586526
gguaguuccuuucuucuau

SEQ ID NO: 724543 - RNA, 19 nt, Artificial Sequence
  Description of Artificial Sequence: Synthetic oligonucleotide
  Antisense strand to SEQ ID NO: 724542
auagaagaaaggaacuacc

SEQ ID NO: 724544 - RNA, 19 nt, Artificial Sequence
  Description of Artificial Sequence: Synthetic oligonucleotide
  Sense strand starting at position 3927 of SEQ ID NO: 586526
agagacggguuucuacuaa

SEQ ID NO: 724545 - RNA, 19 nt, Artificial Sequence
  Description of Artificial Sequence: Synthetic oligonucleotide
  Antisense strand to SEQ ID NO: 724544
uuaguagaaacccgucucu

SEQ ID NO: 724546 - RNA, 19 nt, Artificial Sequence
  Description of Artificial Sequence: Synthetic oligonucleotide
  Sense strand starting at position 3931 of SEQ ID NO: 586526
acggguuucuacuaaacau

SEQ ID NO: 724547 - RNA, 19 nt, Artificial Sequence
  Description of Artificial Sequence: Synthetic oligonucleotide
  Antisense strand to SEQ ID NO: 724546
auguuuaguagaaacccgu

SEQ ID NO: 724548 - RNA, 19 nt, Artificial Sequence
  Description of Artificial Sequence: Synthetic oligonucleotide
  Sense strand starting at position 3946 of SEQ ID NO: 586526
acauguugcccagacuguu

SEQ ID NO: 724549 - RNA, 19 nt, Artificial Sequence
  Description of Artificial Sequence: Synthetic oligonucleotide
  Antisense strand to SEQ ID NO: 724548
aacagucugggcaacaugu

SEQ ID NO: 724550 - RNA, 19 nt, Artificial Sequence
  Description of Artificial Sequence: Synthetic oligonucleotide
  Sense strand starting at position 107 of SEQ ID NO: 586527
gcagaugccugcucagaag

SEQ ID NO: 724551 - RNA, 19 nt, Artificial Sequence
  Description of Artificial Sequence: Synthetic oligonucleotide
  Antisense strand to SEQ ID NO: 724550
cuucugagcaggcaucugc

SEQ ID NO: 724552 - RNA, 19 nt, Artificial Sequence
  Description of Artificial Sequence: Synthetic oligonucleotide
  Sense strand starting at position 125 of SEQ ID NO: 586527
gaggucagagucuaucuca

SEQ ID NO: 724553 - RNA, 19 nt, Artificial Sequence
  Description of Artificial Sequence: Synthetic oligonucleotide
  Antisense strand to SEQ ID NO: 724552
ugagauagacucugaccuc

SEQ ID NO: 724554 - RNA, 19 nt, Artificial Sequence
  Description of Artificial Sequence: Synthetic oligonucleotide
  Sense strand starting at position 284 of SEQ ID NO: 586527
cuggaaugacacugcugaa

SEQ ID NO: 724555 - RNA, 19 nt, Artificial Sequence
  Description of Artificial Sequence: Synthetic oligonucleotide
  Antisense strand to SEQ ID NO: 724554
uucagcagugucauuccag

SEQ ID NO: 724556 - RNA, 19 nt, Artificial Sequence
  Description of Artificial Sequence: Synthetic oligonucleotide
  Sense strand starting at position 1117 of SEQ ID NO: 586527
gggcaauccuggcuggacu

SEQ ID NO: 724557 - RNA, 19 nt, Artificial Sequence
  Description of Artificial Sequence: Synthetic oligonucleotide
  Antisense strand to SEQ ID NO: 724556
aguccagccaggauugccc

SEQ ID NO: 724558 - RNA, 19 nt, Artificial Sequence
  Description of Artificial Sequence: Synthetic oligonucleotide
  Sense strand starting at position 1431 of SEQ ID NO: 586527
cccgaauuauaaucccagu

SEQ ID NO: 724559 - RNA, 19 nt, Artificial Sequence
  Description of Artificial Sequence: Synthetic oligonucleotide
  Antisense strand to SEQ ID NO: 724558
acugggauuauaauucggg

SEQ ID NO: 724560 - RNA, 19 nt, Artificial Sequence
  Description of Artificial Sequence: Synthetic oligonucleotide
  Sense strand starting at position 1995 of SEQ ID NO: 586527
ccauuuacauacgggauua

SEQ ID NO: 724561 - RNA, 19 nt, Artificial Sequence
  Description of Artificial Sequence: Synthetic oligonucleotide
  Antisense strand to SEQ ID NO: 724560
uaaucccguauguaaaugg

SEQ ID NO: 724562 - RNA, 19 nt, Artificial Sequence
  Description of Artificial Sequence: Synthetic oligonucleotide
  Sense strand starting at position 2333 of SEQ ID NO: 586527
ggguucuaguccuaaggcu

SEQ ID NO: 724563 - RNA, 19 nt, Artificial Sequence
  Description of Artificial Sequence: Synthetic oligonucleotide
  Antisense strand to SEQ ID NO: 724562
agccuuaggacuagaaccc

SEQ ID NO: 724564 - RNA, 19 nt, Artificial Sequence
  Description of Artificial Sequence: Synthetic oligonucleotide
  Sense strand starting at position 2359 of SEQ ID NO: 586527
gguaccucuuacucuuaca

SEQ ID NO: 724565 - RNA, 19 nt, Artificial Sequence
  Description of Artificial Sequence: Synthetic oligonucleotide
  Antisense strand to SEQ ID NO: 724564
uguaagaguaagagguacc

SEQ ID NO: 724566 - RNA, 19 nt, Artificial Sequence
  Description of Artificial Sequence: Synthetic oligonucleotide
  Sense strand starting at position 2462 of SEQ ID NO: 586527
cccaucuugucugauggga

SEQ ID NO: 724567 - RNA, 19 nt, Artificial Sequence
  Description of Artificial Sequence: Synthetic oligonucleotide
  Antisense strand to SEQ ID NO: 724566
ucccaucagacaagauggg

SEQ ID NO: 724568 - RNA, 19 nt, Artificial Sequence
  Description of Artificial Sequence: Synthetic oligonucleotide
  Sense strand starting at position 2668 of SEQ ID NO: 586527
ugcccugaucccugaacua

SEQ ID NO: 724569 - RNA, 19 nt, Artificial Sequence
  Description of Artificial Sequence: Synthetic oligonucleotide
  Antisense strand to SEQ ID NO: 724568
uaguucagggaucagggca

SEQ ID NO: 724570 - RNA, 19 nt, Artificial Sequence
  Description of Artificial Sequence: Synthetic oligonucleotide
  Sense strand starting at position 2681 of SEQ ID NO: 586527
gaacuagaccuuggcuaga

SEQ ID NO: 724571 - RNA, 19 nt, Artificial Sequence
  Description of Artificial Sequence: Synthetic oligonucleotide
  Antisense strand to SEQ ID NO: 724570
ucuagccaaggucuaguuc

SEQ ID NO: 724572 - RNA, 19 nt, Artificial Sequence
  Description of Artificial Sequence: Synthetic oligonucleotide
  Sense strand starting at position 2750 of SEQ ID NO: 586527
gggagcuucuggcuuagaa

SEQ ID NO: 724573 - RNA, 19 nt, Artificial Sequence
  Description of Artificial Sequence: Synthetic oligonucleotide
  Antisense strand to SEQ ID NO: 724572
uucuaagccagaagcuccc

SEQ ID NO: 724574 - RNA, 19 nt, Artificial Sequence
  Description of Artificial Sequence: Synthetic oligonucleotide
  Sense strand starting at position 2874 of SEQ ID NO: 586527
agaaguuuagcguggcuga

SEQ ID NO: 724575 - RNA, 19 nt, Artificial Sequence
  Description of Artificial Sequence: Synthetic oligonucleotide
  Antisense strand to SEQ ID NO: 724574
ucagccacgcuaaacuucu

SEQ ID NO: 724576 - RNA, 19 nt, Artificial Sequence
  Description of Artificial Sequence: Synthetic oligonucleotide
  Sense strand starting at position 3070 of SEQ ID NO: 586527
aacgaaaggccgugagauu

SEQ ID NO: 724577 - RNA, 19 nt, Artificial Sequence
  Description of Artificial Sequence: Synthetic oligonucleotide
  Antisense strand to SEQ ID NO: 724576
aaucucacggccuuucguu

SEQ ID NO: 724578 - RNA, 19 nt, Artificial Sequence
  Description of Artificial Sequence: Synthetic oligonucleotide
  Sense strand starting at position 3071 of SEQ ID NO: 586527
acgaaaggccgugagauua

SEQ ID NO: 724579 - RNA, 19 nt, Artificial Sequence
  Description of Artificial Sequence: Synthetic oligonucleotide
  Antisense strand to SEQ ID NO: 724578
uaaucucacggccuuucgu

SEQ ID NO: 724580 - RNA, 19 nt, Artificial Sequence
  Description of Artificial Sequence: Synthetic oligonucleotide
  Sense strand starting at position 3079 of SEQ ID NO: 586527
ccgugagauuaggauuaug

SEQ ID NO: 724581 - RNA, 19 nt, Artificial Sequence
  Description of Artificial Sequence: Synthetic oligonucleotide
  Antisense strand to SEQ ID NO: 724580
cauaauccuaaucucacgg

SEQ ID NO: 724582 - RNA, 19 nt, Artificial Sequence
  Description of Artificial Sequence: Synthetic oligonucleotide
  Sense strand starting at position 3143 of SEQ ID NO: 586527
cugacugcucaggagucau

SEQ ID NO: 724583 - RNA, 19 nt, Artificial Sequence
  Description of Artificial Sequence: Synthetic oligonucleotide
  Antisense strand to SEQ ID NO: 724582
augacuccugagcagucag

SEQ ID NO: 724584 - RNA, 19 nt, Artificial Sequence
  Description of Artificial Sequence: Synthetic oligonucleotide
  Sense strand starting at position 3154 of SEQ ID NO: 586527
ggagucauguggcgagaga

SEQ ID NO: 724585 - RNA, 19 nt, Artificial Sequence
  Description of Artificial Sequence: Synthetic oligonucleotide
  Antisense strand to SEQ ID NO: 724584
ucucucgccacaugacucc

SEQ ID NO: 724586 - RNA, 19 nt, Artificial Sequence
  Description of Artificial Sequence: Synthetic oligonucleotide
  Sense strand starting at position 3155 of SEQ ID NO: 586527
gagucauguggcgagagau

SEQ ID NO: 724587 - RNA, 19 nt, Artificial Sequence
  Description of Artificial Sequence: Synthetic oligonucleotide
  Antisense strand to SEQ ID NO: 724586
aucucucgccacaugacuc

SEQ ID NO: 724588 - RNA, 19 nt, Artificial Sequence
  Description of Artificial Sequence: Synthetic oligonucleotide
  Sense strand starting at position 3210 of SEQ ID NO: 586527
uagcaucucuauuguggaa

SEQ ID NO: 724589 - RNA, 19 nt, Artificial Sequence
  Description of Artificial Sequence: Synthetic oligonucleotide
  Antisense strand to SEQ ID NO: 724588
uuccacaauagagaugcua

SEQ ID NO: 724590 - RNA, 19 nt, Artificial Sequence
  Description of Artificial Sequence: Synthetic oligonucleotide
  Sense strand starting at position 3212 of SEQ ID NO: 586527
gcaucucuauuguggaaac

SEQ ID NO: 724591 - RNA, 19 nt, Artificial Sequence
  Description of Artificial Sequence: Synthetic oligonucleotide
  Antisense strand to SEQ ID NO: 724590
guuuccacaauagagaugc

SEQ ID NO: 724592 - RNA, 19 nt, Artificial Sequence
  Description of Artificial Sequence: Synthetic oligonucleotide
  Sense strand starting at position 3222 of SEQ ID NO: 586527
uguggaaacugagauuggu

SEQ ID NO: 724593 - RNA, 19 nt, Artificial Sequence
  Description of Artificial Sequence: Synthetic oligonucleotide
  Antisense strand to SEQ ID NO: 724592
accaaucucaguuuccaca

SEQ ID NO: 724594 - RNA, 19 nt, Artificial Sequence
  Description of Artificial Sequence: Synthetic oligonucleotide
  Sense strand starting at position 3225 of SEQ ID NO: 586527
ggaaacugagauuggucuu

SEQ ID NO: 724595 - RNA, 19 nt, Artificial Sequence
  Description of Artificial Sequence: Synthetic oligonucleotide
  Antisense strand to SEQ ID NO: 724594
aagaccaaucucaguuucc

SEQ ID NO: 724596 - RNA, 19 nt, Artificial Sequence
  Description of Artificial Sequence: Synthetic oligonucleotide
  Sense strand starting at position 3231 of SEQ ID NO: 586527
ugagauuggucuuuggaga

SEQ ID NO: 724597 - RNA, 19 nt, Artificial Sequence
  Description of Artificial Sequence: Synthetic oligonucleotide
  Antisense strand to SEQ ID NO: 724596
ucuccaaagaccaaucuca

SEQ ID NO: 724598 - RNA, 19 nt, Artificial Sequence
  Description of Artificial Sequence: Synthetic oligonucleotide
  Sense strand starting at position 3232 of SEQ ID NO: 586527
gagauuggucuuuggagau

SEQ ID NO: 724599 - RNA, 19 nt, Artificial Sequence
  Description of Artificial Sequence: Synthetic oligonucleotide
  Antisense strand to SEQ ID NO: 724598
aucuccaaagaccaaucuc

SEQ ID NO: 724600 - RNA, 19 nt, Artificial Sequence
  Description of Artificial Sequence: Synthetic oligonucleotide
  Sense strand starting at position 3293 of SEQ ID NO: 586527
ggaccugugugacucauga

SEQ ID NO: 724601 - RNA, 19 nt, Artificial Sequence
  Description of Artificial Sequence: Synthetic oligonucleotide
  Antisense strand to SEQ ID NO: 724600
ucaugagucacacaggucc

SEQ ID NO: 724602 - RNA, 19 nt, Artificial Sequence
  Description of Artificial Sequence: Synthetic oligonucleotide
  Sense strand starting at position 3297 of SEQ ID NO: 586527
cugugugacucaugacuca

SEQ ID NO: 724603 - RNA, 19 nt, Artificial Sequence
  Description of Artificial Sequence: Synthetic oligonucleotide
  Antisense strand to SEQ ID NO: 724602
ugagucaugagucacacag

SEQ ID NO: 724604 - RNA, 19 nt, Artificial Sequence
  Description of Artificial Sequence: Synthetic oligonucleotide
  Sense strand starting at position 3510 of SEQ ID NO: 586527
cuagcucugcauuaauaag

SEQ ID NO: 724605 - RNA, 19 nt, Artificial Sequence
  Description of Artificial Sequence: Synthetic oligonucleotide
  Antisense strand to SEQ ID NO: 724604
cuuauuaaugcagagcuag

SEQ ID NO: 724606 - RNA, 19 nt, Artificial Sequence
  Description of Artificial Sequence: Synthetic oligonucleotide
  Sense strand starting at position 3637 of SEQ ID NO: 586527
agcgaaaccuggucacuaa

SEQ ID NO: 724607 - RNA, 19 nt, Artificial Sequence
  Description of Artificial Sequence: Synthetic oligonucleotide
  Antisense strand to SEQ ID NO: 724606
uuagugaccagguuucgcu

SEQ ID NO: 724608 - RNA, 19 nt, Artificial Sequence
  Description of Artificial Sequence: Synthetic oligonucleotide
  Sense strand starting at position 3638 of SEQ ID NO: 586527
gcgaaaccuggucacuaaa

SEQ ID NO: 724609 - RNA, 19 nt, Artificial Sequence
  Description of Artificial Sequence: Synthetic oligonucleotide
  Antisense strand to SEQ ID NO: 724608
uuuagugaccagguuucgc

SEQ ID NO: 724610 - RNA, 19 nt, Artificial Sequence
  Description of Artificial Sequence: Synthetic oligonucleotide
  Sense strand starting at position 60 of SEQ ID NO: 586528
cugugacggucgaucugau

SEQ ID NO: 724611 - RNA, 19 nt, Artificial Sequence
  Description of Artificial Sequence: Synthetic oligonucleotide
  Antisense strand to SEQ ID NO: 724610
aucagaucgaccgucacag

SEQ ID NO: 724612 - RNA, 19 nt, Artificial Sequence
  Description of Artificial Sequence: Synthetic oligonucleotide
  Sense strand starting at position 182 of SEQ ID NO: 586528
caucacagcgugcaauuua

SEQ ID NO: 724613 - RNA, 19 nt, Artificial Sequence
  Description of Artificial Sequence: Synthetic oligonucleotide
  Antisense strand to SEQ ID NO: 724612
uaaauugcacgcugugaug

SEQ ID NO: 724614 - RNA, 19 nt, Artificial Sequence
  Description of Artificial Sequence: Synthetic oligonucleotide
  Sense strand starting at position 251 of SEQ ID NO: 586528
cacgguugaccucagguaa

SEQ ID NO: 724615 - RNA, 19 nt, Artificial Sequence
  Description of Artificial Sequence: Synthetic oligonucleotide
  Antisense strand to SEQ ID NO: 724614
uuaccugaggucaaccgug

SEQ ID NO: 724616 - RNA, 19 nt, Artificial Sequence
  Description of Artificial Sequence: Synthetic oligonucleotide
  Sense strand starting at position 381 of SEQ ID NO: 586528
gcagacgucagggacuaaa

SEQ ID NO: 724617 - RNA, 19 nt, Artificial Sequence
  Description of Artificial Sequence: Synthetic oligonucleotide
  Antisense strand to SEQ ID NO: 724616
uuuagucccugacgucugc

SEQ ID NO: 724618 - RNA, 19 nt, Artificial Sequence
  Description of Artificial Sequence: Synthetic oligonucleotide
  Sense strand starting at position 706 of SEQ ID NO: 586528
gguauacaccuaugagaau

SEQ ID NO: 724619 - RNA, 19 nt, Artificial Sequence
  Description of Artificial Sequence: Synthetic oligonucleotide
  Antisense strand to SEQ ID NO: 724618
auucucauagguguauacc

SEQ ID NO: 724620 - RNA, 19 nt, Artificial Sequence
  Description of Artificial Sequence: Synthetic oligonucleotide
  Sense strand starting at position 707 of SEQ ID NO: 586528
guauacaccuaugagaauu

SEQ ID NO: 724621 - RNA, 19 nt, Artificial Sequence
  Description of Artificial Sequence: Synthetic oligonucleotide
  Antisense strand to SEQ ID NO: 724620
aauucucauagguguauac

SEQ ID NO: 724622 - RNA, 19 nt, Artificial Sequence
  Description of Artificial Sequence: Synthetic oligonucleotide
  Sense strand starting at position 910 of SEQ ID NO: 586528
uugggaugauucuauccac

SEQ ID NO: 724623 - RNA, 19 nt, Artificial Sequence
  Description of Artificial Sequence: Synthetic oligonucleotide
  Antisense strand to SEQ ID NO: 724622
guggauagaaucaucccaa

SEQ ID NO: 724624 - RNA, 19 nt, Artificial Sequence
  Description of Artificial Sequence: Synthetic oligonucleotide
  Sense strand starting at position 1050 of SEQ ID NO: 586528
ugcugaaagcguucugcaa

SEQ ID NO: 724625 - RNA, 19 nt, Artificial Sequence
  Description of Artificial Sequence: Synthetic oligonucleotide
  Antisense strand to SEQ ID NO: 724624
uugcagaacgcuuucagca

SEQ ID NO: 724626 - RNA, 19 nt, Artificial Sequence
  Description of Artificial Sequence: Synthetic oligonucleotide
  Sense strand starting at position 1051 of SEQ ID NO: 586528
gcugaaagcguucugcaau

SEQ ID NO: 724627 - RNA, 19 nt, Artificial Sequence
  Description of Artificial Sequence: Synthetic oligonucleotide
  Antisense strand to SEQ ID NO: 724626
auugcagaacgcuuucagc

SEQ ID NO: 724628 - RNA, 19 nt, Artificial Sequence
  Description of Artificial Sequence: Synthetic oligonucleotide
  Sense strand starting at position 1052 of SEQ ID NO: 586528
cugaaagcguucugcaauu

SEQ ID NO: 724629 - RNA, 19 nt, Artificial Sequence
  Description of Artificial Sequence: Synthetic oligonucleotide
  Antisense strand to SEQ ID NO: 724628
aauugcagaacgcuuucag

SEQ ID NO: 724630 - RNA, 19 nt, Artificial Sequence
  Description of Artificial Sequence: Synthetic oligonucleotide
  Sense strand starting at position 1054 of SEQ ID NO: 586528
gaaagcguucugcaauuag

SEQ ID NO: 724631 - RNA, 19 nt, Artificial Sequence
  Description of Artificial Sequence: Synthetic oligonucleotide
  Antisense strand to SEQ ID NO: 724630
cuaauugcagaacgcuuuc

SEQ ID NO: 724632 - RNA, 19 nt, Artificial Sequence
  Description of Artificial Sequence: Synthetic oligonucleotide
  Sense strand starting at position 1061 of SEQ ID NO: 586528
uucugcaauuaguggcaaa

SEQ ID NO: 724633 - RNA, 19 nt, Artificial Sequence
  Description of Artificial Sequence: Synthetic oligonucleotide
  Antisense strand to SEQ ID NO: 724632
uuugccacuaauugcagaa

SEQ ID NO: 724634 - RNA, 19 nt, Artificial Sequence
  Description of Artificial Sequence: Synthetic oligonucleotide
  Sense strand starting at position 1088 of SEQ ID NO: 586528
agcucugugcacugaauua

SEQ ID NO: 724635 - RNA, 19 nt, Artificial Sequence
  Description of Artificial Sequence: Synthetic oligonucleotide
  Antisense strand to SEQ ID NO: 724634
uaauucagugcacagagcu

SEQ ID NO: 724636 - RNA, 19 nt, Artificial Sequence
  Description of Artificial Sequence: Synthetic oligonucleotide
  Sense strand starting at position 1141 of SEQ ID NO: 586528
caacgaagcuguuauuaag

SEQ ID NO: 724637 - RNA, 19 nt, Artificial Sequence
  Description of Artificial Sequence: Synthetic oligonucleotide
  Antisense strand to SEQ ID NO: 724636
cuuaauaacagcuucguug

SEQ ID NO: 724638 - RNA, 19 nt, Artificial Sequence
  Description of Artificial Sequence: Synthetic oligonucleotide
  Sense strand starting at position 1144 of SEQ ID NO: 586528
cgaagcuguuauuaagaaa

SEQ ID NO: 724639 - RNA, 19 nt, Artificial Sequence
  Description of Artificial Sequence: Synthetic oligonucleotide
  Antisense strand to SEQ ID NO: 724638
uuucuuaauaacagcuucg

SEQ ID NO: 724640 - RNA, 19 nt, Artificial Sequence
  Description of Artificial Sequence: Synthetic oligonucleotide
  Sense strand starting at position 1147 of SEQ ID NO: 586528
agcuguuauuaagaaacaa

SEQ ID NO: 724641 - RNA, 19 nt, Artificial Sequence
  Description of Artificial Sequence: Synthetic oligonucleotide
  Antisense strand to SEQ ID NO: 724640
uuguuucuuaauaacagcu

SEQ ID NO: 724642 - RNA, 19 nt, Artificial Sequence
  Description of Artificial Sequence: Synthetic oligonucleotide
  Sense strand starting at position 1163 of SEQ ID NO: 586528
caagaaagcuugggcuuga

SEQ ID NO: 724643 - RNA, 19 nt, Artificial Sequence
  Description of Artificial Sequence: Synthetic oligonucleotide
  Antisense strand to SEQ ID NO: 724642
ucaagcccaagcuuucuug

SEQ ID NO: 724644 - RNA, 19 nt, Artificial Sequence
  Description of Artificial Sequence: Synthetic oligonucleotide
  Sense strand starting at position 1231 of SEQ ID NO: 586528
ccagaauugcaacgggaaa

SEQ ID NO: 724645 - RNA, 19 nt, Artificial Sequence
  Description of Artificial Sequence: Synthetic oligonucleotide
  Antisense strand to SEQ ID NO: 724644
uuucccguugcaauucugg

SEQ ID NO: 724646 - RNA, 19 nt, Artificial Sequence
  Description of Artificial Sequence: Synthetic oligonucleotide
  Sense strand starting at position 1233 of SEQ ID NO: 586528
agaauugcaacgggaaauu

SEQ ID NO: 724647 - RNA, 19 nt, Artificial Sequence
  Description of Artificial Sequence: Synthetic oligonucleotide
  Antisense strand to SEQ ID NO: 724646
aauuucccguugcaauucu

SEQ ID NO: 724648 - RNA, 19 nt, Artificial Sequence
  Description of Artificial Sequence: Synthetic oligonucleotide
  Sense strand starting at position 1997 of SEQ ID NO: 586528
guuugcuuccuggaaggca

SEQ ID NO: 724649 - RNA, 19 nt, Artificial Sequence
  Description of Artificial Sequence: Synthetic oligonucleotide
  Antisense strand to SEQ ID NO: 724648
ugccuuccaggaagcaaac

SEQ ID NO: 724650 - RNA, 19 nt, Artificial Sequence
  Description of Artificial Sequence: Synthetic oligonucleotide
  Sense strand starting at position 2151 of SEQ ID NO: 586528
cgcugauugugggauggau

SEQ ID NO: 724651 - RNA, 19 nt, Artificial Sequence
  Description of Artificial Sequence: Synthetic oligonucleotide
  Antisense strand to SEQ ID NO: 724650
auccaucccacaaucagcg

SEQ ID NO: 724652 - RNA, 19 nt, Artificial Sequence
  Description of Artificial Sequence: Synthetic oligonucleotide
  Sense strand starting at position 2216 of SEQ ID NO: 586528
ugcaguugcuugcuguuau

SEQ ID NO: 724653 - RNA, 19 nt, Artificial Sequence
  Description of Artificial Sequence: Synthetic oligonucleotide
  Antisense strand to SEQ ID NO: 724652
auaacagcaagcaacugca

SEQ ID NO: 724654 - RNA, 19 nt, Artificial Sequence
  Description of Artificial Sequence: Synthetic oligonucleotide
  Sense strand starting at position 2217 of SEQ ID NO: 586528
gcaguugcuugcuguuauu

SEQ ID NO: 724655 - RNA, 19 nt, Artificial Sequence
  Description of Artificial Sequence: Synthetic oligonucleotide
  Antisense strand to SEQ ID NO: 724654
aauaacagcaagcaacugc

SEQ ID NO: 724656 - RNA, 19 nt, Artificial Sequence
  Description of Artificial Sequence: Synthetic oligonucleotide
  Sense strand starting at position 2220 of SEQ ID NO: 586528
guugcuugcuguuauuuaa

SEQ ID NO: 724657 - RNA, 19 nt, Artificial Sequence
  Description of Artificial Sequence: Synthetic oligonucleotide
  Antisense strand to SEQ ID NO: 724656
uuaaauaacagcaagcaac

SEQ ID NO: 724658 - RNA, 19 nt, Artificial Sequence
  Description of Artificial Sequence: Synthetic oligonucleotide
  Sense strand starting at position 2555 of SEQ ID NO: 586528
gguuaugacucccaaauau

SEQ ID NO: 724659 - RNA, 19 nt, Artificial Sequence
  Description of Artificial Sequence: Synthetic oligonucleotide
  Antisense strand to SEQ ID NO: 724658
auauuugggagucauaacc

SEQ ID NO: 724660 - RNA, 19 nt, Artificial Sequence
  Description of Artificial Sequence: Synthetic oligonucleotide
  Sense strand starting at position 2619 of SEQ ID NO: 586528
ccaacugccugcuuugaaa

SEQ ID NO: 724661 - RNA, 19 nt, Artificial Sequence
  Description of Artificial Sequence: Synthetic oligonucleotide
  Antisense strand to SEQ ID NO: 724660
uuucaaagcaggcaguugg

SEQ ID NO: 724662 - RNA, 19 nt, Artificial Sequence
  Description of Artificial Sequence: Synthetic oligonucleotide
  Sense strand starting at position 2641 of SEQ ID NO: 586528
ccacuuguacagcgacuua

SEQ ID NO: 724663 - RNA, 19 nt, Artificial Sequence
  Description of Artificial Sequence: Synthetic oligonucleotide
  Antisense strand to SEQ ID NO: 724662
uaagucgcuguacaagugg

SEQ ID NO: 724664 - RNA, 19 nt, Artificial Sequence
  Description of Artificial Sequence: Synthetic oligonucleotide
  Sense strand starting at position 2646 of SEQ ID NO: 586528
uguacagcgacuuaagaaa

SEQ ID NO: 724665 - RNA, 19 nt, Artificial Sequence
  Description of Artificial Sequence: Synthetic oligonucleotide
  Antisense strand to SEQ ID NO: 724664
uuucuuaagucgcuguaca

SEQ ID NO: 724666 - RNA, 19 nt, Artificial Sequence
  Description of Artificial Sequence: Synthetic oligonucleotide
  Sense strand starting at position 2743 of SEQ ID NO: 586528
ucuccagcucaaugaauga

SEQ ID NO: 724667 - RNA, 19 nt, Artificial Sequence
  Description of Artificial Sequence: Synthetic oligonucleotide
  Antisense strand to SEQ ID NO: 724666
ucauucauugagcuggaga

SEQ ID NO: 724668 - RNA, 19 nt, Artificial Sequence
  Description of Artificial Sequence: Synthetic oligonucleotide
  Sense strand starting at position 2786 of SEQ ID NO: 586528
gccagaagccuuggaagca

SEQ ID NO: 724669 - RNA, 19 nt, Artificial Sequence
  Description of Artificial Sequence: Synthetic oligonucleotide
  Antisense strand to SEQ ID NO: 724668
ugcuuccaaggcuucuggc

SEQ ID NO: 724670 - RNA, 19 nt, Artificial Sequence
  Description of Artificial Sequence: Synthetic oligonucleotide
  Sense strand starting at position 2787 of SEQ ID NO: 586528
ccagaagccuuggaagcau

SEQ ID NO: 724671 - RNA, 19 nt, Artificial Sequence
  Description of Artificial Sequence: Synthetic oligonucleotide
  Antisense strand to SEQ ID NO: 724670
augcuuccaaggcuucugg

SEQ ID NO: 724672 - RNA, 19 nt, Artificial Sequence
  Description of Artificial Sequence: Synthetic oligonucleotide
  Sense strand starting at position 2852 of SEQ ID NO: 586528
gcucuaacuuugcccagau

SEQ ID NO: 724673 - RNA, 19 nt, Artificial Sequence
  Description of Artificial Sequence: Synthetic oligonucleotide
  Antisense strand to SEQ ID NO: 724672
aucugggcaaaguuagagc

SEQ ID NO: 724674 - RNA, 19 nt, Artificial Sequence
  Description of Artificial Sequence: Synthetic oligonucleotide
  Sense strand starting at position 3430 of SEQ ID NO: 586528
cgccuauauuccuagaacu

SEQ ID NO: 724675 - RNA, 19 nt, Artificial Sequence
  Description of Artificial Sequence: Synthetic oligonucleotide
  Antisense strand to SEQ ID NO: 724674
aguucuaggaauauaggcg

SEQ ID NO: 724676 - RNA, 19 nt, Artificial Sequence
  Description of Artificial Sequence: Synthetic oligonucleotide
  Sense strand starting at position 3465 of SEQ ID NO: 586528
gucggauugccugagcuaa

SEQ ID NO: 724677 - RNA, 19 nt, Artificial Sequence
  Description of Artificial Sequence: Synthetic oligonucleotide
  Antisense strand to SEQ ID NO: 724676
uuagcucaggcaauccgac

SEQ ID NO: 724678 - RNA, 19 nt, Artificial Sequence
  Description of Artificial Sequence: Synthetic oligonucleotide
  Sense strand starting at position 3751 of SEQ ID NO: 586528
ucaaauugcuguucucaag

SEQ ID NO: 724679 - RNA, 19 nt, Artificial Sequence
  Description of Artificial Sequence: Synthetic oligonucleotide
  Antisense strand to SEQ ID NO: 724678
cuugagaacagcaauuuga

SEQ ID NO: 724680 - RNA, 19 nt, Artificial Sequence
  Description of Artificial Sequence: Synthetic oligonucleotide
  Sense strand starting at position 3754 of SEQ ID NO: 586528
aauugcuguucucaaggga

SEQ ID NO: 724681 - RNA, 19 nt, Artificial Sequence
  Description of Artificial Sequence: Synthetic oligonucleotide
  Antisense strand to SEQ ID NO: 724680
ucccuugagaacagcaauu

SEQ ID NO: 724682 - RNA, 19 nt, Artificial Sequence
  Description of Artificial Sequence: Synthetic oligonucleotide
  Sense strand starting at position 3797 of SEQ ID NO: 586528
cccaaacuguugggauaca

SEQ ID NO: 724683 - RNA, 19 nt, Artificial Sequence
  Description of Artificial Sequence: Synthetic oligonucleotide
  Antisense strand to SEQ ID NO: 724682
uguaucccaacaguuuggg

SEQ ID NO: 724684 - RNA, 19 nt, Artificial Sequence
  Description of Artificial Sequence: Synthetic oligonucleotide
  Sense strand starting at position 3875 of SEQ ID NO: 586528
cacugucucuugcuguaga

SEQ ID NO: 724685 - RNA, 19 nt, Artificial Sequence
  Description of Artificial Sequence: Synthetic oligonucleotide
  Antisense strand to SEQ ID NO: 724684
ucuacagcaagagacagug

SEQ ID NO: 724686 - RNA, 19 nt, Artificial Sequence
  Description of Artificial Sequence: Synthetic oligonucleotide
  Sense strand starting at position 3886 of SEQ ID NO: 586528
gcuguagacuccuaauuug

SEQ ID NO: 724687 - RNA, 19 nt, Artificial Sequence
  Description of Artificial Sequence: Synthetic oligonucleotide
  Antisense strand to SEQ ID NO: 724686
caaauuaggagucuacagc

SEQ ID NO: 724688 - RNA, 19 nt, Artificial Sequence
  Description of Artificial Sequence: Synthetic oligonucleotide
  Sense strand starting at position 3960 of SEQ ID NO: 586528
ucuuguaaaguguaacuca

SEQ ID NO: 724689 - RNA, 19 nt, Artificial Sequence
  Description of Artificial Sequence: Synthetic oligonucleotide
  Antisense strand to SEQ ID NO: 724688
ugaguuacacuuuacaaga

SEQ ID NO: 724690 - RNA, 19 nt, Artificial Sequence
  Description of Artificial Sequence: Synthetic oligonucleotide
  Sense strand starting at position 52 of SEQ ID NO: 586529
cugugacggucgaucugau

SEQ ID NO: 724691 - RNA, 19 nt, Artificial Sequence
  Description of Artificial Sequence: Synthetic oligonucleotide
  Antisense strand to SEQ ID NO: 724690
aucagaucgaccgucacag

SEQ ID NO: 724692 - RNA, 19 nt, Artificial Sequence
  Description of Artificial Sequence: Synthetic oligonucleotide
  Sense strand starting at position 174 of SEQ ID NO: 586529
caucacagcgugcaauuua

SEQ ID NO: 724693 - RNA, 19 nt, Artificial Sequence
  Description of Artificial Sequence: Synthetic oligonucleotide
  Antisense strand to SEQ ID NO: 724692
uaaauugcacgcugugaug

SEQ ID NO: 724694 - RNA, 19 nt, Artificial Sequence
  Description of Artificial Sequence: Synthetic oligonucleotide
  Sense strand starting at position 200 of SEQ ID NO: 586529
cgaauuguuuauuuccgga

SEQ ID NO: 724695 - RNA, 19 nt, Artificial Sequence
  Description of Artificial Sequence: Synthetic oligonucleotide
  Antisense strand to SEQ ID NO: 724694
uccggaaauaaacaauucg

SEQ ID NO: 724696 - RNA, 19 nt, Artificial Sequence
  Description of Artificial Sequence: Synthetic oligonucleotide
  Sense strand starting at position 299 of SEQ ID NO: 586529
gguucugcagccugagaau

SEQ ID NO: 724697 - RNA, 19 nt, Artificial Sequence
  Description of Artificial Sequence: Synthetic oligonucleotide
  Antisense strand to SEQ ID NO: 724696
auucucaggcugcagaacc

SEQ ID NO: 724698 - RNA, 19 nt, Artificial Sequence
  Description of Artificial Sequence: Synthetic oligonucleotide
  Sense strand starting at position 373 of SEQ ID NO: 586529
gcagacgucagggacuaaa

SEQ ID NO: 724699 - RNA, 19 nt, Artificial Sequence
  Description of Artificial Sequence: Synthetic oligonucleotide
  Antisense strand to SEQ ID NO: 724698
uuuagucccugacgucugc

SEQ ID NO: 724700 - RNA, 19 nt, Artificial Sequence
  Description of Artificial Sequence: Synthetic oligonucleotide
  Sense strand starting at position 698 of SEQ ID NO: 586529
gguauacaccuaugagaau

SEQ ID NO: 724701 - RNA, 19 nt, Artificial Sequence
  Description of Artificial Sequence: Synthetic oligonucleotide
  Antisense strand to SEQ ID NO: 724700
auucucauagguguauacc

SEQ ID NO: 724702 - RNA, 19 nt, Artificial Sequence
  Description of Artificial Sequence: Synthetic oligonucleotide
  Sense strand starting at position 699 of SEQ ID NO: 586529
guauacaccuaugagaauu

SEQ ID NO: 724703 - RNA, 19 nt, Artificial Sequence
  Description of Artificial Sequence: Synthetic oligonucleotide
  Antisense strand to SEQ ID NO: 724702
aauucucauagguguauac

SEQ ID NO: 724704 - RNA, 19 nt, Artificial Sequence
  Description of Artificial Sequence: Synthetic oligonucleotide
  Sense strand starting at position 902 of SEQ ID NO: 586529
uugggaugauucuauccac

SEQ ID NO: 724705 - RNA, 19 nt, Artificial Sequence
  Description of Artificial Sequence: Synthetic oligonucleotide
  Antisense strand to SEQ ID NO: 724704
guggauagaaucaucccaa

SEQ ID NO: 724706 - RNA, 19 nt, Artificial Sequence
  Description of Artificial Sequence: Synthetic oligonucleotide
  Sense strand starting at position 905 of SEQ ID NO: 586529
ggaugauucuauccacacg

SEQ ID NO: 724707 - RNA, 19 nt, Artificial Sequence
  Description of Artificial Sequence: Synthetic oligonucleotide
  Antisense strand to SEQ ID NO: 724706
cguguggauagaaucaucc

SEQ ID NO: 724708 - RNA, 19 nt, Artificial Sequence
  Description of Artificial Sequence: Synthetic oligonucleotide
  Sense strand starting at position 1042 of SEQ ID NO: 586529
ugcugaaagcguucugcaa

SEQ ID NO: 724709 - RNA, 19 nt, Artificial Sequence
  Description of Artificial Sequence: Synthetic oligonucleotide
  Antisense strand to SEQ ID NO: 724708
uugcagaacgcuuucagca

SEQ ID NO: 724710 - RNA, 19 nt, Artificial Sequence
  Description of Artificial Sequence: Synthetic oligonucleotide
  Sense strand starting at position 1043 of SEQ ID NO: 586529
gcugaaagcguucugcaau

SEQ ID NO: 724711 - RNA, 19 nt, Artificial Sequence
  Description of Artificial Sequence: Synthetic oligonucleotide
  Antisense strand to SEQ ID NO: 724710
auugcagaacgcuuucagc

SEQ ID NO: 724712 - RNA, 19 nt, Artificial Sequence
  Description of Artificial Sequence: Synthetic oligonucleotide
  Sense strand starting at position 1044 of SEQ ID NO: 586529
cugaaagcguucugcaauu

SEQ ID NO: 724713 - RNA, 19 nt, Artificial Sequence
  Description of Artificial Sequence: Synthetic oligonucleotide
  Antisense strand to SEQ ID NO: 724712
aauugcagaacgcuuucag

SEQ ID NO: 724714 - RNA, 19 nt, Artificial Sequence
  Description of Artificial Sequence: Synthetic oligonucleotide
  Sense strand starting at position 1046 of SEQ ID NO: 586529
gaaagcguucugcaauuag

SEQ ID NO: 724715 - RNA, 19 nt, Artificial Sequence
  Description of Artificial Sequence: Synthetic oligonucleotide
  Antisense strand to SEQ ID NO: 724714
cuaauugcagaacgcuuuc

SEQ ID NO: 724716 - RNA, 19 nt, Artificial Sequence
  Description of Artificial Sequence: Synthetic oligonucleotide
  Sense strand starting at position 1053 of SEQ ID NO: 586529
uucugcaauuaguggcaaa

SEQ ID NO: 724717 - RNA, 19 nt, Artificial Sequence
  Description of Artificial Sequence: Synthetic oligonucleotide
  Antisense strand to SEQ ID NO: 724716
uuugccacuaauugcagaa

SEQ ID NO: 724718 - RNA, 19 nt, Artificial Sequence
  Description of Artificial Sequence: Synthetic oligonucleotide
  Sense strand starting at position 1080 of SEQ ID NO: 586529
agcucugugcacugaauua

SEQ ID NO: 724719 - RNA, 19 nt, Artificial Sequence
  Description of Artificial Sequence: Synthetic oligonucleotide
  Antisense strand to SEQ ID NO: 724718
uaauucagugcacagagcu

SEQ ID NO: 724720 - RNA, 19 nt, Artificial Sequence
  Description of Artificial Sequence: Synthetic oligonucleotide
  Sense strand starting at position 1133 of SEQ ID NO: 586529
caacgaagcuguuauuaag

SEQ ID NO: 724721 - RNA, 19 nt, Artificial Sequence
  Description of Artificial Sequence: Synthetic oligonucleotide
  Antisense strand to SEQ ID NO: 724720
cuuaauaacagcuucguug

SEQ ID NO: 724722 - RNA, 19 nt, Artificial Sequence
  Description of Artificial Sequence: Synthetic oligonucleotide
  Sense strand starting at position 1136 of SEQ ID NO: 586529
cgaagcuguuauuaagaaa

SEQ ID NO: 724723 - RNA, 19 nt, Artificial Sequence
  Description of Artificial Sequence: Synthetic oligonucleotide
  Antisense strand to SEQ ID NO: 724722
uuucuuaauaacagcuucg

SEQ ID NO: 724724 - RNA, 19 nt, Artificial Sequence
  Description of Artificial Sequence: Synthetic oligonucleotide
  Sense strand starting at position 1139 of SEQ ID NO: 586529
agcuguuauuaagaaacaa

SEQ ID NO: 724725 - RNA, 19 nt, Artificial Sequence
  Description of Artificial Sequence: Synthetic oligonucleotide
  Antisense strand to SEQ ID NO: 724724
uuguuucuuaauaacagcu

SEQ ID NO: 724726 - RNA, 19 nt, Artificial Sequence
  Description of Artificial Sequence: Synthetic oligonucleotide
  Sense strand starting at position 1155 of SEQ ID NO: 586529
caagaaagcuugggcuuga

SEQ ID NO: 724727 - RNA, 19 nt, Artificial Sequence
  Description of Artificial Sequence: Synthetic oligonucleotide
  Antisense strand to SEQ ID NO: 724726
ucaagcccaagcuuucuug

SEQ ID NO: 724728 - RNA, 19 nt, Artificial Sequence
  Description of Artificial Sequence: Synthetic oligonucleotide
  Sense strand starting at position 1223 of SEQ ID NO: 586529
ccagaauugcaacgggaaa

SEQ ID NO: 724729 - RNA, 19 nt, Artificial Sequence
  Description of Artificial Sequence: Synthetic oligonucleotide
  Antisense strand to SEQ ID NO: 724728
uuucccguugcaauucugg

SEQ ID NO: 724730 - RNA, 19 nt, Artificial Sequence
  Description of Artificial Sequence: Synthetic oligonucleotide
  Sense strand starting at position 1225 of SEQ ID NO: 586529
agaauugcaacgggaaauu

SEQ ID NO: 724731 - RNA, 19 nt, Artificial Sequence
  Description of Artificial Sequence: Synthetic oligonucleotide
  Antisense strand to SEQ ID NO: 724730
aauuucccguugcaauucu

SEQ ID NO: 724732 - RNA, 19 nt, Artificial Sequence
  Description of Artificial Sequence: Synthetic oligonucleotide
  Sense strand starting at position 1998 of SEQ ID NO: 586529
guuugcuuccuggaaggca

SEQ ID NO: 724733 - RNA, 19 nt, Artificial Sequence
  Description of Artificial Sequence: Synthetic oligonucleotide
  Antisense strand to SEQ ID NO: 724732
ugccuuccaggaagcaaac

SEQ ID NO: 724734 - RNA, 19 nt, Artificial Sequence
  Description of Artificial Sequence: Synthetic oligonucleotide
  Sense strand starting at position 2152 of SEQ ID NO: 586529
cgcugauugugggauggau

SEQ ID NO: 724735 - RNA, 19 nt, Artificial Sequence
  Description of Artificial Sequence: Synthetic oligonucleotide
  Antisense strand to SEQ ID NO: 724734
auccaucccacaaucagcg

SEQ ID NO: 724736 - RNA, 19 nt, Artificial Sequence
  Description of Artificial Sequence: Synthetic oligonucleotide
  Sense strand starting at position 2217 of SEQ ID NO: 586529
ugcaguugcuugcuguuau

SEQ ID NO: 724737 - RNA, 19 nt, Artificial Sequence
  Description of Artificial Sequence: Synthetic oligonucleotide
  Antisense strand to SEQ ID NO: 724736
auaacagcaagcaacugca

SEQ ID NO: 724738 - RNA, 19 nt, Artificial Sequence
  Description of Artificial Sequence: Synthetic oligonucleotide
  Sense strand starting at position 2218 of SEQ ID NO: 586529
gcaguugcuugcuguuauu

SEQ ID NO: 724739 - RNA, 19 nt, Artificial Sequence
  Description of Artificial Sequence: Synthetic oligonucleotide
  Antisense strand to SEQ ID NO: 724738
aauaacagcaagcaacugc

SEQ ID NO: 724740 - RNA, 19 nt, Artificial Sequence
  Description of Artificial Sequence: Synthetic oligonucleotide
  Sense strand starting at position 2221 of SEQ ID NO: 586529
guugcuugcuguuauuuaa

SEQ ID NO: 724741 - RNA, 19 nt, Artificial Sequence
  Description of Artificial Sequence: Synthetic oligonucleotide
  Antisense strand to SEQ ID NO: 724740
uuaaauaacagcaagcaac

SEQ ID NO: 724742 - RNA, 19 nt, Artificial Sequence
  Description of Artificial Sequence: Synthetic oligonucleotide
  Sense strand starting at position 2556 of SEQ ID NO: 586529
gguuaugacucccaaauau

SEQ ID NO: 724743 - RNA, 19 nt, Artificial Sequence
  Description of Artificial Sequence: Synthetic oligonucleotide
  Antisense strand to SEQ ID NO: 724742
auauuugggagucauaacc

SEQ ID NO: 724744 - RNA, 19 nt, Artificial Sequence
  Description of Artificial Sequence: Synthetic oligonucleotide
  Sense strand starting at position 2620 of SEQ ID NO: 586529
ccaacugccugcuuugaaa

SEQ ID NO: 724745 - RNA, 19 nt, Artificial Sequence
  Description of Artificial Sequence: Synthetic oligonucleotide
  Antisense strand to SEQ ID NO: 724744
uuucaaagcaggcaguugg

SEQ ID NO: 724746 - RNA, 19 nt, Artificial Sequence
  Description of Artificial Sequence: Synthetic oligonucleotide
  Sense strand starting at position 2642 of SEQ ID NO: 586529
ccacuuguacagcgacuua

SEQ ID NO: 724747 - RNA, 19 nt, Artificial Sequence
  Description of Artificial Sequence: Synthetic oligonucleotide
  Antisense strand to SEQ ID NO: 724746
uaagucgcuguacaagugg

SEQ ID NO: 724748 - RNA, 19 nt, Artificial Sequence
  Description of Artificial Sequence: Synthetic oligonucleotide
  Sense strand starting at position 2647 of SEQ ID NO: 586529
uguacagcgacuuaagaaa

SEQ ID NO: 724749 - RNA, 19 nt, Artificial Sequence
  Description of Artificial Sequence: Synthetic oligonucleotide
  Antisense strand to SEQ ID NO: 724748
uuucuuaagucgcuguaca

SEQ ID NO: 724750 - RNA, 19 nt, Artificial Sequence
  Description of Artificial Sequence: Synthetic oligonucleotide
  Sense strand starting at position 2744 of SEQ ID NO: 586529
ucuccagcucaaugaauga

SEQ ID NO: 724751 - RNA, 19 nt, Artificial Sequence
  Description of Artificial Sequence: Synthetic oligonucleotide
  Antisense strand to SEQ ID NO: 724750
ucauucauugagcuggaga

SEQ ID NO: 724752 - RNA, 19 nt, Artificial Sequence
  Description of Artificial Sequence: Synthetic oligonucleotide
  Sense strand starting at position 2853 of SEQ ID NO: 586529
gcucuaacuuugcccagau

SEQ ID NO: 724753 - RNA, 19 nt, Artificial Sequence
  Description of Artificial Sequence: Synthetic oligonucleotide
  Antisense strand to SEQ ID NO: 724752
aucugggcaaaguuagagc

SEQ ID NO: 724754 - RNA, 19 nt, Artificial Sequence
  Description of Artificial Sequence: Synthetic oligonucleotide
  Sense strand starting at position 3422 of SEQ ID NO: 586529
cgccuauauuccuagaacu

SEQ ID NO: 724755 - RNA, 19 nt, Artificial Sequence
  Description of Artificial Sequence: Synthetic oligonucleotide
  Antisense strand to SEQ ID NO: 724754
aguucuaggaauauaggcg

SEQ ID NO: 724756 - RNA, 19 nt, Artificial Sequence
  Description of Artificial Sequence: Synthetic oligonucleotide
  Sense strand starting at position 3457 of SEQ ID NO: 586529
gucggauugccugagcuaa

SEQ ID NO: 724757 - RNA, 19 nt, Artificial Sequence
  Description of Artificial Sequence: Synthetic oligonucleotide
  Antisense strand to SEQ ID NO: 724756
uuagcucaggcaauccgac

SEQ ID NO: 724758 - RNA, 19 nt, Artificial Sequence
  Description of Artificial Sequence: Synthetic oligonucleotide
  Sense strand starting at position 3748 of SEQ ID NO: 586529
ucaaauugcuguucucaag

SEQ ID NO: 724759 - RNA, 19 nt, Artificial Sequence
  Description of Artificial Sequence: Synthetic oligonucleotide
  Antisense strand to SEQ ID NO: 724758
cuugagaacagcaauuuga

SEQ ID NO: 724760 - RNA, 19 nt, Artificial Sequence
  Description of Artificial Sequence: Synthetic oligonucleotide
  Sense strand starting at position 3751 of SEQ ID NO: 586529
aauugcuguucucaaggga

SEQ ID NO: 724761 - RNA, 19 nt, Artificial Sequence
  Description of Artificial Sequence: Synthetic oligonucleotide
  Antisense strand to SEQ ID NO: 724760
ucccuugagaacagcaauu

SEQ ID NO: 724762 - RNA, 19 nt, Artificial Sequence
  Description of Artificial Sequence: Synthetic oligonucleotide
  Sense strand starting at position 3794 of SEQ ID NO: 586529
cccaaacuguugggauaca

SEQ ID NO: 724763 - RNA, 19 nt, Artificial Sequence
  Description of Artificial Sequence: Synthetic oligonucleotide
  Antisense strand to SEQ ID NO: 724762
uguaucccaacaguuuggg

SEQ ID NO: 724764 - RNA, 19 nt, Artificial Sequence
  Description of Artificial Sequence: Synthetic oligonucleotide
  Sense strand starting at position 3872 of SEQ ID NO: 586529
cacugucucuugcuguaga

SEQ ID NO: 724765 - RNA, 19 nt, Artificial Sequence
  Description of Artificial Sequence: Synthetic oligonucleotide
  Antisense strand to SEQ ID NO: 724764
ucuacagcaagagacagug

SEQ ID NO: 724766 - RNA, 19 nt, Artificial Sequence
  Description of Artificial Sequence: Synthetic oligonucleotide
  Sense strand starting at position 3883 of SEQ ID NO: 586529
gcuguagacuccuaauuug

SEQ ID NO: 724767 - RNA, 19 nt, Artificial Sequence
  Description of Artificial Sequence: Synthetic oligonucleotide
  Antisense strand to SEQ ID NO: 724766
caaauuaggagucuacagc

SEQ ID NO: 724768 - RNA, 19 nt, Artificial Sequence
  Description of Artificial Sequence: Synthetic oligonucleotide
  Sense strand starting at position 3957 of SEQ ID NO: 586529
ucuuguaaaguguaacuca

SEQ ID NO: 724769 - RNA, 19 nt, Artificial Sequence
  Description of Artificial Sequence: Synthetic oligonucleotide
  Antisense strand to SEQ ID NO: 724768
ugaguuacacuuuacaaga

SEQ ID NO: 724770 - RNA, 19 nt, Artificial Sequence
  Description of Artificial Sequence: Synthetic oligonucleotide
  Sense strand starting at position 281 of SEQ ID NO: 586530
gcuuccagccaacagauua

SEQ ID NO: 724771 - RNA, 19 nt, Artificial Sequence
  Description of Artificial Sequence: Synthetic oligonucleotide
  Antisense strand to SEQ ID NO: 724770
uaaucuguuggcuggaagc

SEQ ID NO: 724772 - RNA, 19 nt, Artificial Sequence
  Description of Artificial Sequence: Synthetic oligonucleotide
  Sense strand starting at position 374 of SEQ ID NO: 586530
cauguucuugaagggucaa

SEQ ID NO: 724773 - RNA, 19 nt, Artificial Sequence
  Description of Artificial Sequence: Synthetic oligonucleotide
  Antisense strand to SEQ ID NO: 724772
uugacccuucaagaacaug

SEQ ID NO: 724774 - RNA, 19 nt, Artificial Sequence
  Description of Artificial Sequence: Synthetic oligonucleotide
  Sense strand starting at position 768 of SEQ ID NO: 586530
ugcucuguacuacaugaaa

SEQ ID NO: 724775 - RNA, 19 nt, Artificial Sequence
  Description of Artificial Sequence: Synthetic oligonucleotide
  Antisense strand to SEQ ID NO: 724774
uuucauguaguacagagca

SEQ ID NO: 724776 - RNA, 19 nt, Artificial Sequence
  Description of Artificial Sequence: Synthetic oligonucleotide
  Sense strand starting at position 789 of SEQ ID NO: 586530
ccgccauuucuacaugcca

SEQ ID NO: 724777 - RNA, 19 nt, Artificial Sequence
  Description of Artificial Sequence: Synthetic oligonucleotide
  Antisense strand to SEQ ID NO: 724776
uggcauguagaaauggcgg

SEQ ID NO: 724778 - RNA, 19 nt, Artificial Sequence
  Description of Artificial Sequence: Synthetic oligonucleotide
  Sense strand starting at position 984 of SEQ ID NO: 586530
gcauuuaguguuuaccugu

SEQ ID NO: 724779 - RNA, 19 nt, Artificial Sequence
  Description of Artificial Sequence: Synthetic oligonucleotide
  Antisense strand to SEQ ID NO: 724778
acagguaaacacuaaaugc

SEQ ID NO: 724780 - RNA, 19 nt, Artificial Sequence
  Description of Artificial Sequence: Synthetic oligonucleotide
  Sense strand starting at position 1020 of SEQ ID NO: 586530
gaacuucuuguagguaaag

SEQ ID NO: 724781 - RNA, 19 nt, Artificial Sequence
  Description of Artificial Sequence: Synthetic oligonucleotide
  Antisense strand to SEQ ID NO: 724780
cuuuaccuacaagaaguuc

SEQ ID NO: 724782 - RNA, 19 nt, Artificial Sequence
  Description of Artificial Sequence: Synthetic oligonucleotide
  Sense strand starting at position 1031 of SEQ ID NO: 586530
agguaaaggacuuacguau

SEQ ID NO: 724783 - RNA, 19 nt, Artificial Sequence
  Description of Artificial Sequence: Synthetic oligonucleotide
  Antisense strand to SEQ ID NO: 724782
auacguaaguccuuuaccu

SEQ ID NO: 724784 - RNA, 19 nt, Artificial Sequence
  Description of Artificial Sequence: Synthetic oligonucleotide
  Sense strand starting at position 1085 of SEQ ID NO: 586530
ggaguaauuucuuaaauuc

SEQ ID NO: 724785 - RNA, 19 nt, Artificial Sequence
  Description of Artificial Sequence: Synthetic oligonucleotide
  Antisense strand to SEQ ID NO: 724784
gaauuuaagaaauuacucc

SEQ ID NO: 724786 - RNA, 19 nt, Artificial Sequence
  Description of Artificial Sequence: Synthetic oligonucleotide
  Sense strand starting at position 1188 of SEQ ID NO: 586530
uucugauauacucgaggag

SEQ ID NO: 724787 - RNA, 19 nt, Artificial Sequence
  Description of Artificial Sequence: Synthetic oligonucleotide
  Antisense strand to SEQ ID NO: 724786
cuccucgaguauaucagaa

SEQ ID NO: 724788 - RNA, 19 nt, Artificial Sequence
  Description of Artificial Sequence: Synthetic oligonucleotide
  Sense strand starting at position 1191 of SEQ ID NO: 586530
ugauauacucgaggagagu

SEQ ID NO: 724789 - RNA, 19 nt, Artificial Sequence
  Description of Artificial Sequence: Synthetic oligonucleotide
  Antisense strand to SEQ ID NO: 724788
acucuccucgaguauauca

SEQ ID NO: 724790 - RNA, 19 nt, Artificial Sequence
  Description of Artificial Sequence: Synthetic oligonucleotide
  Sense strand starting at position 1200 of SEQ ID NO: 586530
cgaggagaguuucuacagu

SEQ ID NO: 724791 - RNA, 19 nt, Artificial Sequence
  Description of Artificial Sequence: Synthetic oligonucleotide
  Antisense strand to SEQ ID NO: 724790
acuguagaaacucuccucg

SEQ ID NO: 724792 - RNA, 19 nt, Artificial Sequence
  Description of Artificial Sequence: Synthetic oligonucleotide
  Sense strand starting at position 1247 of SEQ ID NO: 586530
gcucuagauuaaucagauu

SEQ ID NO: 724793 - RNA, 19 nt, Artificial Sequence
  Description of Artificial Sequence: Synthetic oligonucleotide
  Antisense strand to SEQ ID NO: 724792
aaucugauuaaucuagagc

SEQ ID NO: 724794 - RNA, 19 nt, Artificial Sequence
  Description of Artificial Sequence: Synthetic oligonucleotide
  Sense strand starting at position 1301 of SEQ ID NO: 586530
uacucuggucguuagaaau

SEQ ID NO: 724795 - RNA, 19 nt, Artificial Sequence
  Description of Artificial Sequence: Synthetic oligonucleotide
  Antisense strand to SEQ ID NO: 724794
auuucuaacgaccagagua

SEQ ID NO: 724796 - RNA, 19 nt, Artificial Sequence
  Description of Artificial Sequence: Synthetic oligonucleotide
  Sense strand starting at position 1307 of SEQ ID NO: 586530
ggucguuagaaauaaagua

SEQ ID NO: 724797 - RNA, 19 nt, Artificial Sequence
  Description of Artificial Sequence: Synthetic oligonucleotide
  Antisense strand to SEQ ID NO: 724796
uacuuuauuucuaacgacc

SEQ ID NO: 724798 - RNA, 19 nt, Artificial Sequence
  Description of Artificial Sequence: Synthetic oligonucleotide
  Sense strand starting at position 1360 of SEQ ID NO: 586530
gcauuacugauaggauaag

SEQ ID NO: 724799 - RNA, 19 nt, Artificial Sequence
  Description of Artificial Sequence: Synthetic oligonucleotide
  Antisense strand to SEQ ID NO: 724798
cuuauccuaucaguaaugc

SEQ ID NO: 724800 - RNA, 19 nt, Artificial Sequence
  Description of Artificial Sequence: Synthetic oligonucleotide
  Sense strand starting at position 1418 of SEQ ID NO: 586530
cggaaacgauucuuaagac

SEQ ID NO: 724801 - RNA, 19 nt, Artificial Sequence
  Description of Artificial Sequence: Synthetic oligonucleotide
  Antisense strand to SEQ ID NO: 724800
gucuuaagaaucguuuccg

SEQ ID NO: 724802 - RNA, 19 nt, Artificial Sequence
  Description of Artificial Sequence: Synthetic oligonucleotide
  Sense strand starting at position 1457 of SEQ ID NO: 586530
ccuaaauguucugcaggaa

SEQ ID NO: 724803 - RNA, 19 nt, Artificial Sequence
  Description of Artificial Sequence: Synthetic oligonucleotide
  Antisense strand to SEQ ID NO: 724802
uuccugcagaacauuuagg

SEQ ID NO: 724804 - RNA, 19 nt, Artificial Sequence
  Description of Artificial Sequence: Synthetic oligonucleotide
  Sense strand starting at position 1458 of SEQ ID NO: 586530
cuaaauguucugcaggaag

SEQ ID NO: 724805 - RNA, 19 nt, Artificial Sequence
  Description of Artificial Sequence: Synthetic oligonucleotide
  Antisense strand to SEQ ID NO: 724804
cuuccugcagaacauuuag

SEQ ID NO: 724806 - RNA, 19 nt, Artificial Sequence
  Description of Artificial Sequence: Synthetic oligonucleotide
  Sense strand starting at position 1534 of SEQ ID NO: 586530
agcgcacucaaggagaaau

SEQ ID NO: 724807 - RNA, 19 nt, Artificial Sequence
  Description of Artificial Sequence: Synthetic oligonucleotide
  Antisense strand to SEQ ID NO: 724806
auuucuccuugagugcgcu

SEQ ID NO: 724808 - RNA, 19 nt, Artificial Sequence
  Description of Artificial Sequence: Synthetic oligonucleotide
  Sense strand starting at position 1761 of SEQ ID NO: 586530
ggcggagaagucuauggga

SEQ ID NO: 724809 - RNA, 19 nt, Artificial Sequence
  Description of Artificial Sequence: Synthetic oligonucleotide
  Antisense strand to SEQ ID NO: 724808
ucccauagacuucuccgcc

SEQ ID NO: 724810 - RNA, 19 nt, Artificial Sequence
  Description of Artificial Sequence: Synthetic oligonucleotide
  Sense strand starting at position 1763 of SEQ ID NO: 586530
cggagaagucuaugggaaa

SEQ ID NO: 724811 - RNA, 19 nt, Artificial Sequence
  Description of Artificial Sequence: Synthetic oligonucleotide
  Antisense strand to SEQ ID NO: 724810
uuucccauagacuucuccg

SEQ ID NO: 724812 - RNA, 19 nt, Artificial Sequence
  Description of Artificial Sequence: Synthetic oligonucleotide
  Sense strand starting at position 2397 of SEQ ID NO: 586530
cugaguagucuccagccaa

SEQ ID NO: 724813 - RNA, 19 nt, Artificial Sequence
  Description of Artificial Sequence: Synthetic oligonucleotide
  Antisense strand to SEQ ID NO: 724812
uuggcuggagacuacucag

SEQ ID NO: 724814 - RNA, 19 nt, Artificial Sequence
  Description of Artificial Sequence: Synthetic oligonucleotide
  Sense strand starting at position 2503 of SEQ ID NO: 586530
ucuccugugcaguaagaga

SEQ ID NO: 724815 - RNA, 19 nt, Artificial Sequence
  Description of Artificial Sequence: Synthetic oligonucleotide
  Antisense strand to SEQ ID NO: 724814
ucucuuacugcacaggaga

SEQ ID NO: 724816 - RNA, 19 nt, Artificial Sequence
  Description of Artificial Sequence: Synthetic oligonucleotide
  Sense strand starting at position 2518 of SEQ ID NO: 586530
gagaaagaagcuuguuuac

SEQ ID NO: 724817 - RNA, 19 nt, Artificial Sequence
  Description of Artificial Sequence: Synthetic oligonucleotide
  Antisense strand to SEQ ID NO: 724816
guaaacaagcuucuuucuc

SEQ ID NO: 724818 - RNA, 19 nt, Artificial Sequence
  Description of Artificial Sequence: Synthetic oligonucleotide
  Sense strand starting at position 3180 of SEQ ID NO: 586530
cacuuaggacagugauuau

SEQ ID NO: 724819 - RNA, 19 nt, Artificial Sequence
  Description of Artificial Sequence: Synthetic oligonucleotide
  Antisense strand to SEQ ID NO: 724818
auaaucacuguccuaagug

SEQ ID NO: 724820 - RNA, 19 nt, Artificial Sequence
  Description of Artificial Sequence: Synthetic oligonucleotide
  Sense strand starting at position 3189 of SEQ ID NO: 586530
cagugauuauuuggaaaga

SEQ ID NO: 724821 - RNA, 19 nt, Artificial Sequence
  Description of Artificial Sequence: Synthetic oligonucleotide
  Antisense strand to SEQ ID NO: 724820
ucuuuccaaauaaucacug

SEQ ID NO: 724822 - RNA, 19 nt, Artificial Sequence
  Description of Artificial Sequence: Synthetic oligonucleotide
  Sense strand starting at position 3190 of SEQ ID NO: 586530
agugauuauuuggaaagac

SEQ ID NO: 724823 - RNA, 19 nt, Artificial Sequence
  Description of Artificial Sequence: Synthetic oligonucleotide
  Antisense strand to SEQ ID NO: 724822
gucuuuccaaauaaucacu

SEQ ID NO: 724824 - RNA, 19 nt, Artificial Sequence
  Description of Artificial Sequence: Synthetic oligonucleotide
  Sense strand starting at position 3317 of SEQ ID NO: 586530
cccucuguggauuacuuua

SEQ ID NO: 724825 - RNA, 19 nt, Artificial Sequence
  Description of Artificial Sequence: Synthetic oligonucleotide
  Antisense strand to SEQ ID NO: 724824
uaaaguaauccacagaggg

SEQ ID NO: 724826 - RNA, 19 nt, Artificial Sequence
  Description of Artificial Sequence: Synthetic oligonucleotide
  Sense strand starting at position 3319 of SEQ ID NO: 586530
cucuguggauuacuuuaau

SEQ ID NO: 724827 - RNA, 19 nt, Artificial Sequence
  Description of Artificial Sequence: Synthetic oligonucleotide
  Antisense strand to SEQ ID NO: 724826
auuaaaguaauccacagag

SEQ ID NO: 724828 - RNA, 19 nt, Artificial Sequence
  Description of Artificial Sequence: Synthetic oligonucleotide
  Sense strand starting at position 3322 of SEQ ID NO: 586530
uguggauuacuuuaauguu

SEQ ID NO: 724829 - RNA, 19 nt, Artificial Sequence
  Description of Artificial Sequence: Synthetic oligonucleotide
  Antisense strand to SEQ ID NO: 724828
aacauuaaaguaauccaca

SEQ ID NO: 724830 - RNA, 19 nt, Artificial Sequence
  Description of Artificial Sequence: Synthetic oligonucleotide
  Sense strand starting at position 3355 of SEQ ID NO: 586530
gcaacagauguugauuacu

SEQ ID NO: 724831 - RNA, 19 nt, Artificial Sequence
  Description of Artificial Sequence: Synthetic oligonucleotide
  Antisense strand to SEQ ID NO: 724830
aguaaucaacaucuguugc

SEQ ID NO: 724832 - RNA, 19 nt, Artificial Sequence
  Description of Artificial Sequence: Synthetic oligonucleotide
  Sense strand starting at position 3460 of SEQ ID NO: 586530
auuacuaucuuacuagguu

SEQ ID NO: 724833 - RNA, 19 nt, Artificial Sequence
  Description of Artificial Sequence: Synthetic oligonucleotide
  Antisense strand to SEQ ID NO: 724832
aaccuaguaagauaguaau

SEQ ID NO: 724834 - RNA, 19 nt, Artificial Sequence
  Description of Artificial Sequence: Synthetic oligonucleotide
  Sense strand starting at position 3528 of SEQ ID NO: 586530
gccuauuucuuguuaguga

SEQ ID NO: 724835 - RNA, 19 nt, Artificial Sequence
  Description of Artificial Sequence: Synthetic oligonucleotide
  Antisense strand to SEQ ID NO: 724834
ucacuaacaagaaauaggc

SEQ ID NO: 724836 - RNA, 19 nt, Artificial Sequence
  Description of Artificial Sequence: Synthetic oligonucleotide
  Sense strand starting at position 3620 of SEQ ID NO: 586530
augggagauugauauagaa

SEQ ID NO: 724837 - RNA, 19 nt, Artificial Sequence
  Description of Artificial Sequence: Synthetic oligonucleotide
  Antisense strand to SEQ ID NO: 724836
uucuauaucaaucucccau

SEQ ID NO: 724838 - RNA, 19 nt, Artificial Sequence
  Description of Artificial Sequence: Synthetic oligonucleotide
  Sense strand starting at position 3650 of SEQ ID NO: 586530
ugaugaggaucauugugua

SEQ ID NO: 724839 - RNA, 19 nt, Artificial Sequence
  Description of Artificial Sequence: Synthetic oligonucleotide
  Antisense strand to SEQ ID NO: 724838
uacacaaugauccucauca

SEQ ID NO: 724840 - RNA, 19 nt, Artificial Sequence
  Description of Artificial Sequence: Synthetic oligonucleotide
  Sense strand starting at position 3655 of SEQ ID NO: 586530
aggaucauuguguacugua

SEQ ID NO: 724841 - RNA, 19 nt, Artificial Sequence
  Description of Artificial Sequence: Synthetic oligonucleotide
  Antisense strand to SEQ ID NO: 724840
uacaguacacaaugauccu

SEQ ID NO: 724842 - RNA, 19 nt, Artificial Sequence
  Description of Artificial Sequence: Synthetic oligonucleotide
  Sense strand starting at position 3713 of SEQ ID NO: 586530
uggucagggccugaaguau

SEQ ID NO: 724843 - RNA, 19 nt, Artificial Sequence
  Description of Artificial Sequence: Synthetic oligonucleotide
  Antisense strand to SEQ ID NO: 724842
auacuucaggcccugacca

SEQ ID NO: 724844 - RNA, 19 nt, Artificial Sequence
  Description of Artificial Sequence: Synthetic oligonucleotide
  Sense strand starting at position 3765 of SEQ ID NO: 586530
aacauuguguaacuggaaa

SEQ ID NO: 724845 - RNA, 19 nt, Artificial Sequence
  Description of Artificial Sequence: Synthetic oligonucleotide
  Antisense strand to SEQ ID NO: 724844
uuuccaguuacacaauguu

SEQ ID NO: 724846 - RNA, 19 nt, Artificial Sequence
  Description of Artificial Sequence: Synthetic oligonucleotide
  Sense strand starting at position 3880 of SEQ ID NO: 586530
cuacuucugccaugaagag

SEQ ID NO: 724847 - RNA, 19 nt, Artificial Sequence
  Description of Artificial Sequence: Synthetic oligonucleotide
  Antisense strand to SEQ ID NO: 724846
cucuucauggcagaaguag

SEQ ID NO: 724848 - RNA, 19 nt, Artificial Sequence
  Description of Artificial Sequence: Synthetic oligonucleotide
  Sense strand starting at position 3897 of SEQ ID NO: 586530
aggaaagaaugccuccuua

SEQ ID NO: 724849 - RNA, 19 nt, Artificial Sequence
  Description of Artificial Sequence: Synthetic oligonucleotide
  Antisense strand to SEQ ID NO: 724848
uaaggaggcauucuuuccu

SEQ ID NO: 724850 - RNA, 19 nt, Artificial Sequence
  Description of Artificial Sequence: Synthetic oligonucleotide
  Sense strand starting at position 38 of SEQ ID NO: 586531
aguccuggcugaugucauu

SEQ ID NO: 724851 - RNA, 19 nt, Artificial Sequence
  Description of Artificial Sequence: Synthetic oligonucleotide
  Antisense strand to SEQ ID NO: 724850
aaugacaucagccaggacu

SEQ ID NO: 724852 - RNA, 19 nt, Artificial Sequence
  Description of Artificial Sequence: Synthetic oligonucleotide
  Sense strand starting at position 41 of SEQ ID NO: 586531
ccuggcugaugucauugaa

SEQ ID NO: 724853 - RNA, 19 nt, Artificial Sequence
  Description of Artificial Sequence: Synthetic oligonucleotide
  Antisense strand to SEQ ID NO: 724852
uucaaugacaucagccagg

SEQ ID NO: 724854 - RNA, 19 nt, Artificial Sequence
  Description of Artificial Sequence: Synthetic oligonucleotide
  Sense strand starting at position 44 of SEQ ID NO: 586531
ggcugaugucauugaagcu

SEQ ID NO: 724855 - RNA, 19 nt, Artificial Sequence
  Description of Artificial Sequence: Synthetic oligonucleotide
  Antisense strand to SEQ ID NO: 724854
agcuucaaugacaucagcc

SEQ ID NO: 724856 - RNA, 19 nt, Artificial Sequence
  Description of Artificial Sequence: Synthetic oligonucleotide
  Sense strand starting at position 286 of SEQ ID NO: 586531
aggaguuccuccucagagu

SEQ ID NO: 724857 - RNA, 19 nt, Artificial Sequence
  Description of Artificial Sequence: Synthetic oligonucleotide
  Antisense strand to SEQ ID NO: 724856
acucugaggaggaacuccu

SEQ ID NO: 724858 - RNA, 19 nt, Artificial Sequence
  Description of Artificial Sequence: Synthetic oligonucleotide
  Sense strand starting at position 311 of SEQ ID NO: 586531
ggcacaauaucuccugaga

SEQ ID NO: 724859 - RNA, 19 nt, Artificial Sequence
  Description of Artificial Sequence: Synthetic oligonucleotide
  Antisense strand to SEQ ID NO: 724858
ucucaggagauauugugcc

SEQ ID NO: 724860 - RNA, 19 nt, Artificial Sequence
  Description of Artificial Sequence: Synthetic oligonucleotide
  Sense strand starting at position 520 of SEQ ID NO: 586531
gcugcaaagucagaauaag

SEQ ID NO: 724861 - RNA, 19 nt, Artificial Sequence
  Description of Artificial Sequence: Synthetic oligonucleotide
  Antisense strand to SEQ ID NO: 724860
cuuauucugacuuugcagc

SEQ ID NO: 724862 - RNA, 19 nt, Artificial Sequence
  Description of Artificial Sequence: Synthetic oligonucleotide
  Sense strand starting at position 578 of SEQ ID NO: 586531
guuccacuucucugcagau

SEQ ID NO: 724863 - RNA, 19 nt, Artificial Sequence
  Description of Artificial Sequence: Synthetic oligonucleotide
  Antisense strand to SEQ ID NO: 724862
aucugcagagaaguggaac

SEQ ID NO: 724864 - RNA, 19 nt, Artificial Sequence
  Description of Artificial Sequence: Synthetic oligonucleotide
  Sense strand starting at position 647 of SEQ ID NO: 586531
uguccuguccucuauguga

SEQ ID NO: 724865 - RNA, 19 nt, Artificial Sequence
  Description of Artificial Sequence: Synthetic oligonucleotide
  Antisense strand to SEQ ID NO: 724864
ucacauagaggacaggaca

SEQ ID NO: 724866 - RNA, 19 nt, Artificial Sequence
  Description of Artificial Sequence: Synthetic oligonucleotide
  Sense strand starting at position 649 of SEQ ID NO: 586531
uccuguccucuaugugaac

SEQ ID NO: 724867 - RNA, 19 nt, Artificial Sequence
  Description of Artificial Sequence: Synthetic oligonucleotide
  Antisense strand to SEQ ID NO: 724866
guucacauagaggacagga

SEQ ID NO: 724868 - RNA, 19 nt, Artificial Sequence
  Description of Artificial Sequence: Synthetic oligonucleotide
  Sense strand starting at position 857 of SEQ ID NO: 586531
gagaccacccuggguaaau

SEQ ID NO: 724869 - RNA, 19 nt, Artificial Sequence
  Description of Artificial Sequence: Synthetic oligonucleotide
  Antisense strand to SEQ ID NO: 724868
auuuacccaggguggucuc

SEQ ID NO: 724870 - RNA, 19 nt, Artificial Sequence
  Description of Artificial Sequence: Synthetic oligonucleotide
  Sense strand starting at position 858 of SEQ ID NO: 586531
agaccacccuggguaaaua

SEQ ID NO: 724871 - RNA, 19 nt, Artificial Sequence
  Description of Artificial Sequence: Synthetic oligonucleotide
  Antisense strand to SEQ ID NO: 724870
uauuuacccaggguggucu

SEQ ID NO: 724872 - RNA, 19 nt, Artificial Sequence
  Description of Artificial Sequence: Synthetic oligonucleotide
  Sense strand starting at position 876 of SEQ ID NO: 586531
agugacacccuguaucuuu

SEQ ID NO: 724873 - RNA, 19 nt, Artificial Sequence
  Description of Artificial Sequence: Synthetic oligonucleotide
  Antisense strand to SEQ ID NO: 724872
aaagauacagggugucacu

SEQ ID NO: 724874 - RNA, 19 nt, Artificial Sequence
  Description of Artificial Sequence: Synthetic oligonucleotide
  Sense strand starting at position 1416 of SEQ ID NO: 586531
cagccuuuaccucgggaaa

SEQ ID NO: 724875 - RNA, 19 nt, Artificial Sequence
  Description of Artificial Sequence: Synthetic oligonucleotide
  Antisense strand to SEQ ID NO: 724874
uuucccgagguaaaggcug

SEQ ID NO: 724876 - RNA, 19 nt, Artificial Sequence
  Description of Artificial Sequence: Synthetic oligonucleotide
  Sense strand starting at position 1417 of SEQ ID NO: 586531
agccuuuaccucgggaaag

SEQ ID NO: 724877 - RNA, 19 nt, Artificial Sequence
  Description of Artificial Sequence: Synthetic oligonucleotide
  Antisense strand to SEQ ID NO: 724876
cuuucccgagguaaaggcu

SEQ ID NO: 724878 - RNA, 19 nt, Artificial Sequence
  Description of Artificial Sequence: Synthetic oligonucleotide
  Sense strand starting at position 1700 of SEQ ID NO: 586531
cggcgucgguugucagaga

SEQ ID NO: 724879 - RNA, 19 nt, Artificial Sequence
  Description of Artificial Sequence: Synthetic oligonucleotide
  Antisense strand to SEQ ID NO: 724878
ucucugacaaccgacgccg

SEQ ID NO: 724880 - RNA, 19 nt, Artificial Sequence
  Description of Artificial Sequence: Synthetic oligonucleotide
  Sense strand starting at position 1701 of SEQ ID NO: 586531
ggcgucgguugucagagaa

SEQ ID NO: 724881 - RNA, 19 nt, Artificial Sequence
  Description of Artificial Sequence: Synthetic oligonucleotide
  Antisense strand to SEQ ID NO: 724880
uucucugacaaccgacgcc

SEQ ID NO: 724882 - RNA, 19 nt, Artificial Sequence
  Description of Artificial Sequence: Synthetic oligonucleotide
  Sense strand starting at position 1703 of SEQ ID NO: 586531
cgucgguugucagagaagu

SEQ ID NO: 724883 - RNA, 19 nt, Artificial Sequence
  Description of Artificial Sequence: Synthetic oligonucleotide
  Antisense strand to SEQ ID NO: 724882
acuucucugacaaccgacg

SEQ ID NO: 724884 - RNA, 19 nt, Artificial Sequence
  Description of Artificial Sequence: Synthetic oligonucleotide
  Sense strand starting at position 1704 of SEQ ID NO: 586531
gucgguugucagagaaguc

SEQ ID NO: 724885 - RNA, 19 nt, Artificial Sequence
  Description of Artificial Sequence: Synthetic oligonucleotide
  Antisense strand to SEQ ID NO: 724884
gacuucucugacaaccgac

SEQ ID NO: 724886 - RNA, 19 nt, Artificial Sequence
  Description of Artificial Sequence: Synthetic oligonucleotide
  Sense strand starting at position 1713 of SEQ ID NO: 586531
cagagaagucggcgcggaa

SEQ ID NO: 724887 - RNA, 19 nt, Artificial Sequence
  Description of Artificial Sequence: Synthetic oligonucleotide
  Antisense strand to SEQ ID NO: 724886
uuccgcgccgacuucucug

SEQ ID NO: 724888 - RNA, 19 nt, Artificial Sequence
  Description of Artificial Sequence: Synthetic oligonucleotide
  Sense strand starting at position 1981 of SEQ ID NO: 586531
gcgccaucuugguugagga

SEQ ID NO: 724889 - RNA, 19 nt, Artificial Sequence
  Description of Artificial Sequence: Synthetic oligonucleotide
  Antisense strand to SEQ ID NO: 724888
uccucaaccaagauggcgc

SEQ ID NO: 724890 - RNA, 19 nt, Artificial Sequence
  Description of Artificial Sequence: Synthetic oligonucleotide
  Sense strand starting at position 2387 of SEQ ID NO: 586531
ugguguugcaggcacauaa

SEQ ID NO: 724891 - RNA, 19 nt, Artificial Sequence
  Description of Artificial Sequence: Synthetic oligonucleotide
  Antisense strand to SEQ ID NO: 724890
uuaugugccugcaacacca

SEQ ID NO: 724892 - RNA, 19 nt, Artificial Sequence
  Description of Artificial Sequence: Synthetic oligonucleotide
  Sense strand starting at position 2391 of SEQ ID NO: 586531
guugcaggcacauaaagau

SEQ ID NO: 724893 - RNA, 19 nt, Artificial Sequence
  Description of Artificial Sequence: Synthetic oligonucleotide
  Antisense strand to SEQ ID NO: 724892
aucuuuaugugccugcaac

SEQ ID NO: 724894 - RNA, 19 nt, Artificial Sequence
  Description of Artificial Sequence: Synthetic oligonucleotide
  Sense strand starting at position 2851 of SEQ ID NO: 586531
uggccauugcuggacauga

SEQ ID NO: 724895 - RNA, 19 nt, Artificial Sequence
  Description of Artificial Sequence: Synthetic oligonucleotide
  Antisense strand to SEQ ID NO: 724894
ucauguccagcaauggcca

SEQ ID NO: 724896 - RNA, 19 nt, Artificial Sequence
  Description of Artificial Sequence: Synthetic oligonucleotide
  Sense strand starting at position 2853 of SEQ ID NO: 586531
gccauugcuggacaugaga

SEQ ID NO: 724897 - RNA, 19 nt, Artificial Sequence
  Description of Artificial Sequence: Synthetic oligonucleotide
  Antisense strand to SEQ ID NO: 724896
ucucauguccagcaauggc

SEQ ID NO: 724898 - RNA, 19 nt, Artificial Sequence
  Description of Artificial Sequence: Synthetic oligonucleotide
  Sense strand starting at position 2930 of SEQ ID NO: 586531
accuguuacugguggaguu

SEQ ID NO: 724899 - RNA, 19 nt, Artificial Sequence
  Description of Artificial Sequence: Synthetic oligonucleotide
  Antisense strand to SEQ ID NO: 724898
aacuccaccaguaacaggu

SEQ ID NO: 724900 - RNA, 19 nt, Artificial Sequence
  Description of Artificial Sequence: Synthetic oligonucleotide
  Sense strand starting at position 2942 of SEQ ID NO: 586531
uggaguuccggguggugaa

SEQ ID NO: 724901 - RNA, 19 nt, Artificial Sequence
  Description of Artificial Sequence: Synthetic oligonucleotide
  Antisense strand to SEQ ID NO: 724900
uucaccacccggaacucca

SEQ ID NO: 724902 - RNA, 19 nt, Artificial Sequence
  Description of Artificial Sequence: Synthetic oligonucleotide
  Sense strand starting at position 2943 of SEQ ID NO: 586531
ggaguuccggguggugaau

SEQ ID NO: 724903 - RNA, 19 nt, Artificial Sequence
  Description of Artificial Sequence: Synthetic oligonucleotide
  Antisense strand to SEQ ID NO: 724902
auucaccacccggaacucc

SEQ ID NO: 724904 - RNA, 19 nt, Artificial Sequence
  Description of Artificial Sequence: Synthetic oligonucleotide
  Sense strand starting at position 2952 of SEQ ID NO: 586531
gguggugaaucccuacaca

SEQ ID NO: 724905 - RNA, 19 nt, Artificial Sequence
  Description of Artificial Sequence: Synthetic oligonucleotide
  Antisense strand to SEQ ID NO: 724904
uguguagggauucaccacc

SEQ ID NO: 724906 - RNA, 19 nt, Artificial Sequence
  Description of Artificial Sequence: Synthetic oligonucleotide
  Sense strand starting at position 3052 of SEQ ID NO: 586531
gcugcagagcaguaguaaa

SEQ ID NO: 724907 - RNA, 19 nt, Artificial Sequence
  Description of Artificial Sequence: Synthetic oligonucleotide
  Antisense strand to SEQ ID NO: 724906
uuuacuacugcucugcagc

SEQ ID NO: 724908 - RNA, 19 nt, Artificial Sequence
  Description of Artificial Sequence: Synthetic oligonucleotide
  Sense strand starting at position 3732 of SEQ ID NO: 586531
gggccaagugggugaucua

SEQ ID NO: 724909 - RNA, 19 nt, Artificial Sequence
  Description of Artificial Sequence: Synthetic oligonucleotide
  Antisense strand to SEQ ID NO: 724908
uagaucacccacuuggccc

SEQ ID NO: 724910 - RNA, 19 nt, Artificial Sequence
  Description of Artificial Sequence: Synthetic oligonucleotide
  Sense strand starting at position 3733 of SEQ ID NO: 586531
ggccaagugggugaucuaa

SEQ ID NO: 724911 - RNA, 19 nt, Artificial Sequence
  Description of Artificial Sequence: Synthetic oligonucleotide
  Antisense strand to SEQ ID NO: 724910
uuagaucacccacuuggcc

SEQ ID NO: 724912 - RNA, 19 nt, Artificial Sequence
  Description of Artificial Sequence: Synthetic oligonucleotide
  Sense strand starting at position 3735 of SEQ ID NO: 586531
ccaagugggugaucuaaga

SEQ ID NO: 724913 - RNA, 19 nt, Artificial Sequence
  Description of Artificial Sequence: Synthetic oligonucleotide
  Antisense strand to SEQ ID NO: 724912
ucuuagaucacccacuugg

SEQ ID NO: 724914 - RNA, 19 nt, Artificial Sequence
  Description of Artificial Sequence: Synthetic oligonucleotide
  Sense strand starting at position 3944 of SEQ ID NO: 586531
gagagaaucgccugaacca

SEQ ID NO: 724915 - RNA, 19 nt, Artificial Sequence
  Description of Artificial Sequence: Synthetic oligonucleotide
  Antisense strand to SEQ ID NO: 724914
ugguucaggcgauucucuc

SEQ ID NO: 724916 - RNA, 19 nt, Artificial Sequence
  Description of Artificial Sequence: Synthetic oligonucleotide
  Sense strand starting at position 3953 of SEQ ID NO: 586531
gccugaaccagagauugca

SEQ ID NO: 724917 - RNA, 19 nt, Artificial Sequence
  Description of Artificial Sequence: Synthetic oligonucleotide
  Antisense strand to SEQ ID NO: 724916
ugcaaucucugguucaggc

SEQ ID NO: 724918 - RNA, 19 nt, Artificial Sequence
  Description of Artificial Sequence: Synthetic oligonucleotide
  Sense strand starting at position 139 of SEQ ID NO: 586532
gcuacugguaaguggauau

SEQ ID NO: 724919 - RNA, 19 nt, Artificial Sequence
  Description of Artificial Sequence: Synthetic oligonucleotide
  Antisense strand to SEQ ID NO: 724918
auauccacuuaccaguagc

SEQ ID NO: 724920 - RNA, 19 nt, Artificial Sequence
  Description of Artificial Sequence: Synthetic oligonucleotide
  Sense strand starting at position 164 of SEQ ID NO: 586532
uauagcguaucacuagaga

SEQ ID NO: 724921 - RNA, 19 nt, Artificial Sequence
  Description of Artificial Sequence: Synthetic oligonucleotide
  Antisense strand to SEQ ID NO: 724920
ucucuagugauacgcuaua

SEQ ID NO: 724922 - RNA, 19 nt, Artificial Sequence
  Description of Artificial Sequence: Synthetic oligonucleotide
  Sense strand starting at position 167 of SEQ ID NO: 586532
agcguaucacuagagauug

SEQ ID NO: 724923 - RNA, 19 nt, Artificial Sequence
  Description of Artificial Sequence: Synthetic oligonucleotide
  Antisense strand to SEQ ID NO: 724922
caaucucuagugauacgcu

SEQ ID NO: 724924 - RNA, 19 nt, Artificial Sequence
  Description of Artificial Sequence: Synthetic oligonucleotide
  Sense strand starting at position 569 of SEQ ID NO: 586532
ucaucuguuugagcaaauc

SEQ ID NO: 724925 - RNA, 19 nt, Artificial Sequence
  Description of Artificial Sequence: Synthetic oligonucleotide
  Antisense strand to SEQ ID NO: 724924
gauuugcucaaacagauga

SEQ ID NO: 724926 - RNA, 19 nt, Artificial Sequence
  Description of Artificial Sequence: Synthetic oligonucleotide
  Sense strand starting at position 600 of SEQ ID NO: 586532
agauguaagcuguaccuca

SEQ ID NO: 724927 - RNA, 19 nt, Artificial Sequence
  Description of Artificial Sequence: Synthetic oligonucleotide
  Antisense strand to SEQ ID NO: 724926
ugagguacagcuuacaucu

SEQ ID NO: 724928 - RNA, 19 nt, Artificial Sequence
  Description of Artificial Sequence: Synthetic oligonucleotide
  Sense strand starting at position 610 of SEQ ID NO: 586532
uguaccucaguuugauaaa

SEQ ID NO: 724929 - RNA, 19 nt, Artificial Sequence
  Description of Artificial Sequence: Synthetic oligonucleotide
  Antisense strand to SEQ ID NO: 724928
uuuaucaaacugagguaca

SEQ ID NO: 724930 - RNA, 19 nt, Artificial Sequence
  Description of Artificial Sequence: Synthetic oligonucleotide
  Sense strand starting at position 666 of SEQ ID NO: 586532
gugagacguuggaagcaau

SEQ ID NO: 724931 - RNA, 19 nt, Artificial Sequence
  Description of Artificial Sequence: Synthetic oligonucleotide
  Antisense strand to SEQ ID NO: 724930
auugcuuccaacgucucac

SEQ ID NO: 724932 - RNA, 19 nt, Artificial Sequence
  Description of Artificial Sequence: Synthetic oligonucleotide
  Sense strand starting at position 736 of SEQ ID NO: 586532
uaaacuauacguuagacgu

SEQ ID NO: 724933 - RNA, 19 nt, Artificial Sequence
  Description of Artificial Sequence: Synthetic oligonucleotide
  Antisense strand to SEQ ID NO: 724932
acgucuaacguauaguuua

SEQ ID NO: 724934 - RNA, 19 nt, Artificial Sequence
  Description of Artificial Sequence: Synthetic oligonucleotide
  Sense strand starting at position 749 of SEQ ID NO: 586532
agacguuggaagcaauuau

SEQ ID NO: 724935 - RNA, 19 nt, Artificial Sequence
  Description of Artificial Sequence: Synthetic oligonucleotide
  Antisense strand to SEQ ID NO: 724934
auaauugcuuccaacgucu

SEQ ID NO: 724936 - RNA, 19 nt, Artificial Sequence
  Description of Artificial Sequence: Synthetic oligonucleotide
  Sense strand starting at position 756 of SEQ ID NO: 586532
ggaagcaauuaucccuaaa

SEQ ID NO: 724937 - RNA, 19 nt, Artificial Sequence
  Description of Artificial Sequence: Synthetic oligonucleotide
  Antisense strand to SEQ ID NO: 724936
uuuagggauaauugcuucc

SEQ ID NO: 724938 - RNA, 19 nt, Artificial Sequence
  Description of Artificial Sequence: Synthetic oligonucleotide
  Sense strand starting at position 786 of SEQ ID NO: 586532
cucuaagauuuggguauuu

SEQ ID NO: 724939 - RNA, 19 nt, Artificial Sequence
  Description of Artificial Sequence: Synthetic oligonucleotide
  Antisense strand to SEQ ID NO: 724938
aaauacccaaaucuuagag

SEQ ID NO: 724940 - RNA, 19 nt, Artificial Sequence
  Description of Artificial Sequence: Synthetic oligonucleotide
  Sense strand starting at position 834 of SEQ ID NO: 586532
ggccaaucuguuuacaguu

SEQ ID NO: 724941 - RNA, 19 nt, Artificial Sequence
  Description of Artificial Sequence: Synthetic oligonucleotide
  Antisense strand to SEQ ID NO: 724940
aacuguaaacagauuggcc

SEQ ID NO: 724942 - RNA, 19 nt, Artificial Sequence
  Description of Artificial Sequence: Synthetic oligonucleotide
  Sense strand starting at position 844 of SEQ ID NO: 586532
uuuacaguuagguguuaug

SEQ ID NO: 724943 - RNA, 19 nt, Artificial Sequence
  Description of Artificial Sequence: Synthetic oligonucleotide
  Antisense strand to SEQ ID NO: 724942
cauaacaccuaacuguaaa

SEQ ID NO: 724944 - RNA, 19 nt, Artificial Sequence
  Description of Artificial Sequence: Synthetic oligonucleotide
  Sense strand starting at position 914 of SEQ ID NO: 586532
cuaucugcaguaugauaaa

SEQ ID NO: 724945 - RNA, 19 nt, Artificial Sequence
  Description of Artificial Sequence: Synthetic oligonucleotide
  Antisense strand to SEQ ID NO: 724944
uuuaucauacugcagauag

SEQ ID NO: 724946 - RNA, 19 nt, Artificial Sequence
  Description of Artificial Sequence: Synthetic oligonucleotide
  Sense strand starting at position 930 of SEQ ID NO: 586532
aaaugacagcuuggugcua

SEQ ID NO: 724947 - RNA, 19 nt, Artificial Sequence
  Description of Artificial Sequence: Synthetic oligonucleotide
  Antisense strand to SEQ ID NO: 724946
uagcaccaagcugucauuu

SEQ ID NO: 724948 - RNA, 19 nt, Artificial Sequence
  Description of Artificial Sequence: Synthetic oligonucleotide
  Sense strand starting at position 961 of SEQ ID NO: 586532
guagcucccguugaaguaa

SEQ ID NO: 724949 - RNA, 19 nt, Artificial Sequence
  Description of Artificial Sequence: Synthetic oligonucleotide
  Antisense strand to SEQ ID NO: 724948
uuacuucaacgggagcuac

SEQ ID NO: 724950 - RNA, 19 nt, Artificial Sequence
  Description of Artificial Sequence: Synthetic oligonucleotide
  Sense strand starting at position 1194 of SEQ ID NO: 586532
ugaauacuuuaagacugaa

SEQ ID NO: 724951 - RNA, 19 nt, Artificial Sequence
  Description of Artificial Sequence: Synthetic oligonucleotide
  Antisense strand to SEQ ID NO: 724950
uucagucuuaaaguauuca

SEQ ID NO: 724952 - RNA, 19 nt, Artificial Sequence
  Description of Artificial Sequence: Synthetic oligonucleotide
  Sense strand starting at position 1236 of SEQ ID NO: 586532
aguacuguuguauaaugaa

SEQ ID NO: 724953 - RNA, 19 nt, Artificial Sequence
  Description of Artificial Sequence: Synthetic oligonucleotide
  Antisense strand to SEQ ID NO: 724952
uucauuauacaacaguacu

SEQ ID NO: 724954 - RNA, 19 nt, Artificial Sequence
  Description of Artificial Sequence: Synthetic oligonucleotide
  Sense strand starting at position 1278 of SEQ ID NO: 586532
gaagauaacgggcguucau

SEQ ID NO: 724955 - RNA, 19 nt, Artificial Sequence
  Description of Artificial Sequence: Synthetic oligonucleotide
  Antisense strand to SEQ ID NO: 724954
augaacgcccguuaucuuc

SEQ ID NO: 724956 - RNA, 19 nt, Artificial Sequence
  Description of Artificial Sequence: Synthetic oligonucleotide
  Sense strand starting at position 1319 of SEQ ID NO: 586532
gaacaaaucgugugguucu

SEQ ID NO: 724957 - RNA, 19 nt, Artificial Sequence
  Description of Artificial Sequence: Synthetic oligonucleotide
  Antisense strand to SEQ ID NO: 724956
agaaccacacgauuuguuc

SEQ ID NO: 724958 - RNA, 19 nt, Artificial Sequence
  Description of Artificial Sequence: Synthetic oligonucleotide
  Sense strand starting at position 1407 of SEQ ID NO: 586532
acugacugccagggagauu

SEQ ID NO: 724959 - RNA, 19 nt, Artificial Sequence
  Description of Artificial Sequence: Synthetic oligonucleotide
  Antisense strand to SEQ ID NO: 724958
aaucucccuggcagucagu

SEQ ID NO: 724960 - RNA, 19 nt, Artificial Sequence
  Description of Artificial Sequence: Synthetic oligonucleotide
  Sense strand starting at position 1420 of SEQ ID NO: 586532
gagauuacguaaccaaaca

SEQ ID NO: 724961 - RNA, 19 nt, Artificial Sequence
  Description of Artificial Sequence: Synthetic oligonucleotide
  Antisense strand to SEQ ID NO: 724960
uguuugguuacguaaucuc

SEQ ID NO: 724962 - RNA, 19 nt, Artificial Sequence
  Description of Artificial Sequence: Synthetic oligonucleotide
  Sense strand starting at position 2364 of SEQ ID NO: 586532
ggagguaaagaguguugga

SEQ ID NO: 724963 - RNA, 19 nt, Artificial Sequence
  Description of Artificial Sequence: Synthetic oligonucleotide
  Antisense strand to SEQ ID NO: 724962
uccaacacucuuuaccucc

SEQ ID NO: 724964 - RNA, 19 nt, Artificial Sequence
  Description of Artificial Sequence: Synthetic oligonucleotide
  Sense strand starting at position 2405 of SEQ ID NO: 586532
cacagacugugaggauuua

SEQ ID NO: 724965 - RNA, 19 nt, Artificial Sequence
  Description of Artificial Sequence: Synthetic oligonucleotide
  Antisense strand to SEQ ID NO: 724964
uaaauccucacagucugug

SEQ ID NO: 724966 - RNA, 19 nt, Artificial Sequence
  Description of Artificial Sequence: Synthetic oligonucleotide
  Sense strand starting at position 2671 of SEQ ID NO: 586532
gcuaucaauuggcuacaua

SEQ ID NO: 724967 - RNA, 19 nt, Artificial Sequence
  Description of Artificial Sequence: Synthetic oligonucleotide
  Antisense strand to SEQ ID NO: 724966
uauguagccaauugauagc

SEQ ID NO: 724968 - RNA, 19 nt, Artificial Sequence
  Description of Artificial Sequence: Synthetic oligonucleotide
  Sense strand starting at position 2728 of SEQ ID NO: 586532
gauggaguccugggacuac

SEQ ID NO: 724969 - RNA, 19 nt, Artificial Sequence
  Description of Artificial Sequence: Synthetic oligonucleotide
  Antisense strand to SEQ ID NO: 724968
guagucccaggacuccauc

SEQ ID NO: 724970 - RNA, 19 nt, Artificial Sequence
  Description of Artificial Sequence: Synthetic oligonucleotide
  Sense strand starting at position 2974 of SEQ ID NO: 586532
uacugucaagacugagaca

SEQ ID NO: 724971 - RNA, 19 nt, Artificial Sequence
  Description of Artificial Sequence: Synthetic oligonucleotide
  Antisense strand to SEQ ID NO: 724970
ugucucagucuugacagua

SEQ ID NO: 724972 - RNA, 19 nt, Artificial Sequence
  Description of Artificial Sequence: Synthetic oligonucleotide
  Sense strand starting at position 3109 of SEQ ID NO: 586532
aauggaugaggccgauagu

SEQ ID NO: 724973 - RNA, 19 nt, Artificial Sequence
  Description of Artificial Sequence: Synthetic oligonucleotide
  Antisense strand to SEQ ID NO: 724972
acuaucggccucauccauu

SEQ ID NO: 724974 - RNA, 19 nt, Artificial Sequence
  Description of Artificial Sequence: Synthetic oligonucleotide
  Sense strand starting at position 3119 of SEQ ID NO: 586532
gccgauagucaggaaugaa

SEQ ID NO: 724975 - RNA, 19 nt, Artificial Sequence
  Description of Artificial Sequence: Synthetic oligonucleotide
  Antisense strand to SEQ ID NO: 724974
uucauuccugacuaucggc

SEQ ID NO: 724976 - RNA, 19 nt, Artificial Sequence
  Description of Artificial Sequence: Synthetic oligonucleotide
  Sense strand starting at position 3145 of SEQ ID NO: 586532
uaaacaauuggguaugcau

SEQ ID NO: 724977 - RNA, 19 nt, Artificial Sequence
  Description of Artificial Sequence: Synthetic oligonucleotide
  Antisense strand to SEQ ID NO: 724976
augcauacccaauuguuua

SEQ ID NO: 724978 - RNA, 19 nt, Artificial Sequence
  Description of Artificial Sequence: Synthetic oligonucleotide
  Sense strand starting at position 3164 of SEQ ID NO: 586532
gggauuggguaugugugua

SEQ ID NO: 724979 - RNA, 19 nt, Artificial Sequence
  Description of Artificial Sequence: Synthetic oligonucleotide
  Antisense strand to SEQ ID NO: 724978
uacacacauacccaauccc

SEQ ID NO: 724980 - RNA, 19 nt, Artificial Sequence
  Description of Artificial Sequence: Synthetic oligonucleotide
  Sense strand starting at position 3206 of SEQ ID NO: 586532
accgaagucccauacucau

SEQ ID NO: 724981 - RNA, 19 nt, Artificial Sequence
  Description of Artificial Sequence: Synthetic oligonucleotide
  Antisense strand to SEQ ID NO: 724980
augaguaugggacuucggu

SEQ ID NO: 724982 - RNA, 19 nt, Artificial Sequence
  Description of Artificial Sequence: Synthetic oligonucleotide
  Sense strand starting at position 3317 of SEQ ID NO: 586532
uugcuuacaucauuagguu

SEQ ID NO: 724983 - RNA, 19 nt, Artificial Sequence
  Description of Artificial Sequence: Synthetic oligonucleotide
  Antisense strand to SEQ ID NO: 724982
aaccuaaugauguaagcaa

SEQ ID NO: 724984 - RNA, 19 nt, Artificial Sequence
  Description of Artificial Sequence: Synthetic oligonucleotide
  Sense strand starting at position 3318 of SEQ ID NO: 586532
ugcuuacaucauuagguua

SEQ ID NO: 724985 - RNA, 19 nt, Artificial Sequence
  Description of Artificial Sequence: Synthetic oligonucleotide
  Antisense strand to SEQ ID NO: 724984
uaaccuaaugauguaagca

SEQ ID NO: 724986 - RNA, 19 nt, Artificial Sequence
  Description of Artificial Sequence: Synthetic oligonucleotide
  Sense strand starting at position 3423 of SEQ ID NO: 586532
ggauguaugugagugcaca

SEQ ID NO: 724987 - RNA, 19 nt, Artificial Sequence
  Description of Artificial Sequence: Synthetic oligonucleotide
  Antisense strand to SEQ ID NO: 724986
ugugcacucacauacaucc

SEQ ID NO: 724988 - RNA, 19 nt, Artificial Sequence
  Description of Artificial Sequence: Synthetic oligonucleotide
  Sense strand starting at position 3424 of SEQ ID NO: 586532
gauguaugugagugcacag

SEQ ID NO: 724989 - RNA, 19 nt, Artificial Sequence
  Description of Artificial Sequence: Synthetic oligonucleotide
  Antisense strand to SEQ ID NO: 724988
cugugcacucacauacauc

SEQ ID NO: 724990 - RNA, 19 nt, Artificial Sequence
  Description of Artificial Sequence: Synthetic oligonucleotide
  Sense strand starting at position 3460 of SEQ ID NO: 586532
uuucuuccacaguguuaac

SEQ ID NO: 724991 - RNA, 19 nt, Artificial Sequence
  Description of Artificial Sequence: Synthetic oligonucleotide
  Antisense strand to SEQ ID NO: 724990
guuaacacuguggaagaaa

SEQ ID NO: 724992 - RNA, 19 nt, Artificial Sequence
  Description of Artificial Sequence: Synthetic oligonucleotide
  Sense strand starting at position 3835 of SEQ ID NO: 586532
ucuauuacagucuggacaa

SEQ ID NO: 724993 - RNA, 19 nt, Artificial Sequence
  Description of Artificial Sequence: Synthetic oligonucleotide
  Antisense strand to SEQ ID NO: 724992
uuguccagacuguaauaga

SEQ ID NO: 724994 - RNA, 19 nt, Artificial Sequence
  Description of Artificial Sequence: Synthetic oligonucleotide
  Sense strand starting at position 3932 of SEQ ID NO: 586532
ccgcauagccuguagauaa

SEQ ID NO: 724995 - RNA, 19 nt, Artificial Sequence
  Description of Artificial Sequence: Synthetic oligonucleotide
  Antisense strand to SEQ ID NO: 724994
uuaucuacaggcuaugcgg

SEQ ID NO: 724996 - RNA, 19 nt, Artificial Sequence
  Description of Artificial Sequence: Synthetic oligonucleotide
  Sense strand starting at position 3939 of SEQ ID NO: 586532
gccuguagauaaccaagau

SEQ ID NO: 724997 - RNA, 19 nt, Artificial Sequence
  Description of Artificial Sequence: Synthetic oligonucleotide
  Antisense strand to SEQ ID NO: 724996
aucuugguuaucuacaggc

SEQ ID NO: 724998 - RNA, 19 nt, Artificial Sequence
  Description of Artificial Sequence: Synthetic oligonucleotide
  Sense strand starting at position 97 of SEQ ID NO: 586533
agagguaugcccugugaag

SEQ ID NO: 724999 - RNA, 19 nt, Artificial Sequence
  Description of Artificial Sequence: Synthetic oligonucleotide
  Antisense strand to SEQ ID NO: 724998
cuucacagggcauaccucu

SEQ ID NO: 725000 - RNA, 19 nt, Artificial Sequence
  Description of Artificial Sequence: Synthetic oligonucleotide
  Sense strand starting at position 141 of SEQ ID NO: 586533
gugggcaauccugggagaa

SEQ ID NO: 725001 - RNA, 19 nt, Artificial Sequence
  Description of Artificial Sequence: Synthetic oligonucleotide
  Antisense strand to SEQ ID NO: 725000
uucucccaggauugcccac

SEQ ID NO: 725002 - RNA, 19 nt, Artificial Sequence
  Description of Artificial Sequence: Synthetic oligonucleotide
  Sense strand starting at position 142 of SEQ ID NO: 586533
ugggcaauccugggagaag

SEQ ID NO: 725003 - RNA, 19 nt, Artificial Sequence
  Description of Artificial Sequence: Synthetic oligonucleotide
  Antisense strand to SEQ ID NO: 725002
cuucucccaggauugccca

SEQ ID NO: 725004 - RNA, 19 nt, Artificial Sequence
  Description of Artificial Sequence: Synthetic oligonucleotide
  Sense strand starting at position 175 of SEQ ID NO: 586533
aggguauguaguuaggagu

SEQ ID NO: 725005 - RNA, 19 nt, Artificial Sequence
  Description of Artificial Sequence: Synthetic oligonucleotide
  Antisense strand to SEQ ID NO: 725004
acuccuaacuacauacccu

SEQ ID NO: 725006 - RNA, 19 nt, Artificial Sequence
  Description of Artificial Sequence: Synthetic oligonucleotide
  Sense strand starting at position 183 of SEQ ID NO: 586533
uaguuaggaguuugagaag

SEQ ID NO: 725007 - RNA, 19 nt, Artificial Sequence
  Description of Artificial Sequence: Synthetic oligonucleotide
  Antisense strand to SEQ ID NO: 725006
cuucucaaacuccuaacua

SEQ ID NO: 725008 - RNA, 19 nt, Artificial Sequence
  Description of Artificial Sequence: Synthetic oligonucleotide
  Sense strand starting at position 548 of SEQ ID NO: 586533
agacauacauugcagauuu

SEQ ID NO: 725009 - RNA, 19 nt, Artificial Sequence
  Description of Artificial Sequence: Synthetic oligonucleotide
  Antisense strand to SEQ ID NO: 725008
aaaucugcaauguaugucu

SEQ ID NO: 725010 - RNA, 19 nt, Artificial Sequence
  Description of Artificial Sequence: Synthetic oligonucleotide
  Sense strand starting at position 667 of SEQ ID NO: 586533
ggcuauucagagggaagua

SEQ ID NO: 725011 - RNA, 19 nt, Artificial Sequence
  Description of Artificial Sequence: Synthetic oligonucleotide
  Antisense strand to SEQ ID NO: 725010
uacuucccucugaauagcc

SEQ ID NO: 725012 - RNA, 19 nt, Artificial Sequence
  Description of Artificial Sequence: Synthetic oligonucleotide
  Sense strand starting at position 700 of SEQ ID NO: 586533
gccuccauccgagcuguua

SEQ ID NO: 725013 - RNA, 19 nt, Artificial Sequence
  Description of Artificial Sequence: Synthetic oligonucleotide
  Antisense strand to SEQ ID NO: 725012
uaacagcucggauggaggc

SEQ ID NO: 725014 - RNA, 19 nt, Artificial Sequence
  Description of Artificial Sequence: Synthetic oligonucleotide
  Sense strand starting at position 835 of SEQ ID NO: 586533
gcugucagugcuccuucua

SEQ ID NO: 725015 - RNA, 19 nt, Artificial Sequence
  Description of Artificial Sequence: Synthetic oligonucleotide
  Antisense strand to SEQ ID NO: 725014
uagaaggagcacugacagc

SEQ ID NO: 725016 - RNA, 19 nt, Artificial Sequence
  Description of Artificial Sequence: Synthetic oligonucleotide
  Sense strand starting at position 883 of SEQ ID NO: 586533
aaugaacucgaguguagag

SEQ ID NO: 725017 - RNA, 19 nt, Artificial Sequence
  Description of Artificial Sequence: Synthetic oligonucleotide
  Antisense strand to SEQ ID NO: 725016
cucuacacucgaguucauu

SEQ ID NO: 725018 - RNA, 19 nt, Artificial Sequence
  Description of Artificial Sequence: Synthetic oligonucleotide
  Sense strand starting at position 1234 of SEQ ID NO: 586533
auucgaacugcguaacaau

SEQ ID NO: 725019 - RNA, 19 nt, Artificial Sequence
  Description of Artificial Sequence: Synthetic oligonucleotide
  Antisense strand to SEQ ID NO: 725018
auuguuacgcaguucgaau

SEQ ID NO: 725020 - RNA, 19 nt, Artificial Sequence
  Description of Artificial Sequence: Synthetic oligonucleotide
  Sense strand starting at position 2013 of SEQ ID NO: 586533
agcucuuucgcccucuuau

SEQ ID NO: 725021 - RNA, 19 nt, Artificial Sequence
  Description of Artificial Sequence: Synthetic oligonucleotide
  Antisense strand to SEQ ID NO: 725020
auaagagggcgaaagagcu

SEQ ID NO: 725022 - RNA, 19 nt, Artificial Sequence
  Description of Artificial Sequence: Synthetic oligonucleotide
  Sense strand starting at position 2014 of SEQ ID NO: 586533
gcucuuucgcccucuuauu

SEQ ID NO: 725023 - RNA, 19 nt, Artificial Sequence
  Description of Artificial Sequence: Synthetic oligonucleotide
  Antisense strand to SEQ ID NO: 725022
aauaagagggcgaaagagc

SEQ ID NO: 725024 - RNA, 19 nt, Artificial Sequence
  Description of Artificial Sequence: Synthetic oligonucleotide
  Sense strand starting at position 2025 of SEQ ID NO: 586533
cucuuauuggacugcagaa

SEQ ID NO: 725025 - RNA, 19 nt, Artificial Sequence
  Description of Artificial Sequence: Synthetic oligonucleotide
  Antisense strand to SEQ ID NO: 725024
uucugcaguccaauaagag

SEQ ID NO: 725026 - RNA, 19 nt, Artificial Sequence
  Description of Artificial Sequence: Synthetic oligonucleotide
  Sense strand starting at position 2123 of SEQ ID NO: 586533
uuguguuuacuggagaaga

SEQ ID NO: 725027 - RNA, 19 nt, Artificial Sequence
  Description of Artificial Sequence: Synthetic oligonucleotide
  Antisense strand to SEQ ID NO: 725026
ucuucuccaguaaacacaa

SEQ ID NO: 725028 - RNA, 19 nt, Artificial Sequence
  Description of Artificial Sequence: Synthetic oligonucleotide
  Sense strand starting at position 2157 of SEQ ID NO: 586533
aagaguaagugcuucggau

SEQ ID NO: 725029 - RNA, 19 nt, Artificial Sequence
  Description of Artificial Sequence: Synthetic oligonucleotide
  Antisense strand to SEQ ID NO: 725028
auccgaagcacuuacucuu

SEQ ID NO: 725030 - RNA, 19 nt, Artificial Sequence
  Description of Artificial Sequence: Synthetic oligonucleotide
  Sense strand starting at position 2176 of SEQ ID NO: 586533
uggacuauugccgagaguc

SEQ ID NO: 725031 - RNA, 19 nt, Artificial Sequence
  Description of Artificial Sequence: Synthetic oligonucleotide
  Antisense strand to SEQ ID NO: 725030
gacucucggcaauagucca

SEQ ID NO: 725032 - RNA, 19 nt, Artificial Sequence
  Description of Artificial Sequence: Synthetic oligonucleotide
  Sense strand starting at position 2360 of SEQ ID NO: 586533
guguaucagcucguuuguu

SEQ ID NO: 725033 - RNA, 19 nt, Artificial Sequence
  Description of Artificial Sequence: Synthetic oligonucleotide
  Antisense strand to SEQ ID NO: 725032
aacaaacgagcugauacac

SEQ ID NO: 725034 - RNA, 19 nt, Artificial Sequence
  Description of Artificial Sequence: Synthetic oligonucleotide
  Sense strand starting at position 2740 of SEQ ID NO: 586533
aggacagcaacuugagauu

SEQ ID NO: 725035 - RNA, 19 nt, Artificial Sequence
  Description of Artificial Sequence: Synthetic oligonucleotide
  Antisense strand to SEQ ID NO: 725034
aaucucaaguugcuguccu

SEQ ID NO: 725036 - RNA, 19 nt, Artificial Sequence
  Description of Artificial Sequence: Synthetic oligonucleotide
  Sense strand starting at position 2749 of SEQ ID NO: 586533
acuugagauugccuuguca

SEQ ID NO: 725037 - RNA, 19 nt, Artificial Sequence
  Description of Artificial Sequence: Synthetic oligonucleotide
  Antisense strand to SEQ ID NO: 725036
ugacaaggcaaucucaagu

SEQ ID NO: 725038 - RNA, 19 nt, Artificial Sequence
  Description of Artificial Sequence: Synthetic oligonucleotide
  Sense strand starting at position 2913 of SEQ ID NO: 586533
gcaaguuaaagcggcauuu

SEQ ID NO: 725039 - RNA, 19 nt, Artificial Sequence
  Description of Artificial Sequence: Synthetic oligonucleotide
  Antisense strand to SEQ ID NO: 725038
aaaugccgcuuuaacuugc

SEQ ID NO: 725040 - RNA, 19 nt, Artificial Sequence
  Description of Artificial Sequence: Synthetic oligonucleotide
  Sense strand starting at position 2930 of SEQ ID NO: 586533
uuuccauacugauuaguau

SEQ ID NO: 725041 - RNA, 19 nt, Artificial Sequence
  Description of Artificial Sequence: Synthetic oligonucleotide
  Antisense strand to SEQ ID NO: 725040
auacuaaucaguauggaaa

SEQ ID NO: 725042 - RNA, 19 nt, Artificial Sequence
  Description of Artificial Sequence: Synthetic oligonucleotide
  Sense strand starting at position 2941 of SEQ ID NO: 586533
auuaguaugcucguugguu

SEQ ID NO: 725043 - RNA, 19 nt, Artificial Sequence
  Description of Artificial Sequence: Synthetic oligonucleotide
  Antisense strand to SEQ ID NO: 725042
aaccaacgagcauacuaau

SEQ ID NO: 725044 - RNA, 19 nt, Artificial Sequence
  Description of Artificial Sequence: Synthetic oligonucleotide
  Sense strand starting at position 2961 of SEQ ID NO: 586533
acguaauacaaagggugua

SEQ ID NO: 725045 - RNA, 19 nt, Artificial Sequence
  Description of Artificial Sequence: Synthetic oligonucleotide
  Antisense strand to SEQ ID NO: 725044
uacacccuuuguauuacgu

SEQ ID NO: 725046 - RNA, 19 nt, Artificial Sequence
  Description of Artificial Sequence: Synthetic oligonucleotide
  Sense strand starting at position 3005 of SEQ ID NO: 586533
ugugaaucauuaucaguaa

SEQ ID NO: 725047 - RNA, 19 nt, Artificial Sequence
  Description of Artificial Sequence: Synthetic oligonucleotide
  Antisense strand to SEQ ID NO: 725046
uuacugauaaugauucaca

SEQ ID NO: 725048 - RNA, 19 nt, Artificial Sequence
  Description of Artificial Sequence: Synthetic oligonucleotide
  Sense strand starting at position 3018 of SEQ ID NO: 586533
caguaaguuucucugguga

SEQ ID NO: 725049 - RNA, 19 nt, Artificial Sequence
  Description of Artificial Sequence: Synthetic oligonucleotide
  Antisense strand to SEQ ID NO: 725048
ucaccagagaaacuuacug

SEQ ID NO: 725050 - RNA, 19 nt, Artificial Sequence
  Description of Artificial Sequence: Synthetic oligonucleotide
  Sense strand starting at position 3110 of SEQ ID NO: 586533
cuaggaguuccucaaguua

SEQ ID NO: 725051 - RNA, 19 nt, Artificial Sequence
  Description of Artificial Sequence: Synthetic oligonucleotide
  Antisense strand to SEQ ID NO: 725050
uaacuugaggaacuccuag

SEQ ID NO: 725052 - RNA, 19 nt, Artificial Sequence
  Description of Artificial Sequence: Synthetic oligonucleotide
  Sense strand starting at position 3124 of SEQ ID NO: 586533
aguuacgaauucucugacu

SEQ ID NO: 725053 - RNA, 19 nt, Artificial Sequence
  Description of Artificial Sequence: Synthetic oligonucleotide
  Antisense strand to SEQ ID NO: 725052
agucagagaauucguaacu

SEQ ID NO: 725054 - RNA, 19 nt, Artificial Sequence
  Description of Artificial Sequence: Synthetic oligonucleotide
  Sense strand starting at position 3126 of SEQ ID NO: 586533
uuacgaauucucugacuca

SEQ ID NO: 725055 - RNA, 19 nt, Artificial Sequence
  Description of Artificial Sequence: Synthetic oligonucleotide
  Antisense strand to SEQ ID NO: 725054
ugagucagagaauucguaa

SEQ ID NO: 725056 - RNA, 19 nt, Artificial Sequence
  Description of Artificial Sequence: Synthetic oligonucleotide
  Sense strand starting at position 3129 of SEQ ID NO: 586533
cgaauucucugacucacca

SEQ ID NO: 725057 - RNA, 19 nt, Artificial Sequence
  Description of Artificial Sequence: Synthetic oligonucleotide
  Antisense strand to SEQ ID NO: 725056
uggugagucagagaauucg

SEQ ID NO: 725058 - RNA, 19 nt, Artificial Sequence
  Description of Artificial Sequence: Synthetic oligonucleotide
  Sense strand starting at position 3283 of SEQ ID NO: 586533
accuuuaguguuuaaucau

SEQ ID NO: 725059 - RNA, 19 nt, Artificial Sequence
  Description of Artificial Sequence: Synthetic oligonucleotide
  Antisense strand to SEQ ID NO: 725058
augauuaaacacuaaaggu

SEQ ID NO: 725060 - RNA, 19 nt, Artificial Sequence
  Description of Artificial Sequence: Synthetic oligonucleotide
  Sense strand starting at position 3478 of SEQ ID NO: 586533
cugaaagccgcguaacaaa

SEQ ID NO: 725061 - RNA, 19 nt, Artificial Sequence
  Description of Artificial Sequence: Synthetic oligonucleotide
  Antisense strand to SEQ ID NO: 725060
uuuguuacgcggcuuucag

SEQ ID NO: 725062 - RNA, 19 nt, Artificial Sequence
  Description of Artificial Sequence: Synthetic oligonucleotide
  Sense strand starting at position 3521 of SEQ ID NO: 586533
acauguugaaaucgaguuu

SEQ ID NO: 725063 - RNA, 19 nt, Artificial Sequence
  Description of Artificial Sequence: Synthetic oligonucleotide
  Antisense strand to SEQ ID NO: 725062
aaacucgauuucaacaugu

SEQ ID NO: 725064 - RNA, 19 nt, Artificial Sequence
  Description of Artificial Sequence: Synthetic oligonucleotide
  Sense strand starting at position 3590 of SEQ ID NO: 586533
aguccucccguguaaucaa

SEQ ID NO: 725065 - RNA, 19 nt, Artificial Sequence
  Description of Artificial Sequence: Synthetic oligonucleotide
  Antisense strand to SEQ ID NO: 725064
uugauuacacgggaggacu

SEQ ID NO: 725066 - RNA, 19 nt, Artificial Sequence
  Description of Artificial Sequence: Synthetic oligonucleotide
  Sense strand starting at position 3593 of SEQ ID NO: 586533
ccucccguguaaucaaaua

SEQ ID NO: 725067 - RNA, 19 nt, Artificial Sequence
  Description of Artificial Sequence: Synthetic oligonucleotide
  Antisense strand to SEQ ID NO: 725066
uauuugauuacacgggagg

SEQ ID NO: 725068 - RNA, 19 nt, Artificial Sequence
  Description of Artificial Sequence: Synthetic oligonucleotide
  Sense strand starting at position 3765 of SEQ ID NO: 586533
augaaugucucugcuacuu

SEQ ID NO: 725069 - RNA, 19 nt, Artificial Sequence
  Description of Artificial Sequence: Synthetic oligonucleotide
  Antisense strand to SEQ ID NO: 725068
aaguagcagagacauucau

SEQ ID NO: 725070 - RNA, 19 nt, Artificial Sequence
  Description of Artificial Sequence: Synthetic oligonucleotide
  Sense strand starting at position 3771 of SEQ ID NO: 586533
gucucugcuacuuugugua

SEQ ID NO: 725071 - RNA, 19 nt, Artificial Sequence
  Description of Artificial Sequence: Synthetic oligonucleotide
  Antisense strand to SEQ ID NO: 725070
uacacaaaguagcagagac

SEQ ID NO: 725072 - RNA, 19 nt, Artificial Sequence
  Description of Artificial Sequence: Synthetic oligonucleotide
  Sense strand starting at position 3818 of SEQ ID NO: 586533
aauggagggucaucgugua

SEQ ID NO: 725073 - RNA, 19 nt, Artificial Sequence
  Description of Artificial Sequence: Synthetic oligonucleotide
  Antisense strand to SEQ ID NO: 725072
uacacgaugacccuccauu

SEQ ID NO: 725074 - RNA, 19 nt, Artificial Sequence
  Description of Artificial Sequence: Synthetic oligonucleotide
  Sense strand starting at position 3823 of SEQ ID NO: 586533
agggucaucguguacuaga

SEQ ID NO: 725075 - RNA, 19 nt, Artificial Sequence
  Description of Artificial Sequence: Synthetic oligonucleotide
  Antisense strand to SEQ ID NO: 725074
ucuaguacacgaugacccu

SEQ ID NO: 725076 - RNA, 19 nt, Artificial Sequence
  Description of Artificial Sequence: Synthetic oligonucleotide
  Sense strand starting at position 3828 of SEQ ID NO: 586533
caucguguacuagaauaga

SEQ ID NO: 725077 - RNA, 19 nt, Artificial Sequence
  Description of Artificial Sequence: Synthetic oligonucleotide
  Antisense strand to SEQ ID NO: 725076
ucuauucuaguacacgaug

SEQ ID NO: 725078 - RNA, 19 nt, Artificial Sequence
  Description of Artificial Sequence: Synthetic oligonucleotide
  Sense strand starting at position 151 of SEQ ID NO: 586534
agagguaugcccugugaag

SEQ ID NO: 725079 - RNA, 19 nt, Artificial Sequence
  Description of Artificial Sequence: Synthetic oligonucleotide
  Antisense strand to SEQ ID NO: 725078
cuucacagggcauaccucu

SEQ ID NO: 725080 - RNA, 19 nt, Artificial Sequence
  Description of Artificial Sequence: Synthetic oligonucleotide
  Sense strand starting at position 195 of SEQ ID NO: 586534
gugggcaauccugggagaa

SEQ ID NO: 725081 - RNA, 19 nt, Artificial Sequence
  Description of Artificial Sequence: Synthetic oligonucleotide
  Antisense strand to SEQ ID NO: 725080
uucucccaggauugcccac

SEQ ID NO: 725082 - RNA, 19 nt, Artificial Sequence
  Description of Artificial Sequence: Synthetic oligonucleotide
  Sense strand starting at position 196 of SEQ ID NO: 586534
ugggcaauccugggagaag

SEQ ID NO: 725083 - RNA, 19 nt, Artificial Sequence
  Description of Artificial Sequence: Synthetic oligonucleotide
  Antisense strand to SEQ ID NO: 725082
cuucucccaggauugccca

SEQ ID NO: 725084 - RNA, 19 nt, Artificial Sequence
  Description of Artificial Sequence: Synthetic oligonucleotide
  Sense strand starting at position 229 of SEQ ID NO: 586534
aggguauguaguuaggagu

SEQ ID NO: 725085 - RNA, 19 nt, Artificial Sequence
  Description of Artificial Sequence: Synthetic oligonucleotide
  Antisense strand to SEQ ID NO: 725084
acuccuaacuacauacccu

SEQ ID NO: 725086 - RNA, 19 nt, Artificial Sequence
  Description of Artificial Sequence: Synthetic oligonucleotide
  Sense strand starting at position 237 of SEQ ID NO: 586534
uaguuaggaguuugagaag

SEQ ID NO: 725087 - RNA, 19 nt, Artificial Sequence
  Description of Artificial Sequence: Synthetic oligonucleotide
  Antisense strand to SEQ ID NO: 725086
cuucucaaacuccuaacua

SEQ ID NO: 725088 - RNA, 19 nt, Artificial Sequence
  Description of Artificial Sequence: Synthetic oligonucleotide
  Sense strand starting at position 602 of SEQ ID NO: 586534
agacauacauugcagauuu

SEQ ID NO: 725089 - RNA, 19 nt, Artificial Sequence
  Description of Artificial Sequence: Synthetic oligonucleotide
  Antisense strand to SEQ ID NO: 725088
aaaucugcaauguaugucu

SEQ ID NO: 725090 - RNA, 19 nt, Artificial Sequence
  Description of Artificial Sequence: Synthetic oligonucleotide
  Sense strand starting at position 721 of SEQ ID NO: 586534
ggcuauucagagggaagua

SEQ ID NO: 725091 - RNA, 19 nt, Artificial Sequence
  Description of Artificial Sequence: Synthetic oligonucleotide
  Antisense strand to SEQ ID NO: 725090
uacuucccucugaauagcc

SEQ ID NO: 725092 - RNA, 19 nt, Artificial Sequence
  Description of Artificial Sequence: Synthetic oligonucleotide
  Sense strand starting at position 754 of SEQ ID NO: 586534
gccuccauccgagcuguua

SEQ ID NO: 725093 - RNA, 19 nt, Artificial Sequence
  Description of Artificial Sequence: Synthetic oligonucleotide
  Antisense strand to SEQ ID NO: 725092
uaacagcucggauggaggc

SEQ ID NO: 725094 - RNA, 19 nt, Artificial Sequence
  Description of Artificial Sequence: Synthetic oligonucleotide
  Sense strand starting at position 889 of SEQ ID NO: 586534
gcugucagugcuccuucua

SEQ ID NO: 725095 - RNA, 19 nt, Artificial Sequence
  Description of Artificial Sequence: Synthetic oligonucleotide
  Antisense strand to SEQ ID NO: 725094
uagaaggagcacugacagc

SEQ ID NO: 725096 - RNA, 19 nt, Artificial Sequence
  Description of Artificial Sequence: Synthetic oligonucleotide
  Sense strand starting at position 937 of SEQ ID NO: 586534
aaugaacucgaguguagag

SEQ ID NO: 725097 - RNA, 19 nt, Artificial Sequence
  Description of Artificial Sequence: Synthetic oligonucleotide
  Antisense strand to SEQ ID NO: 725096
cucuacacucgaguucauu

SEQ ID NO: 725098 - RNA, 19 nt, Artificial Sequence
  Description of Artificial Sequence: Synthetic oligonucleotide
  Sense strand starting at position 1288 of SEQ ID NO: 586534
auucgaacugcguaacaau

SEQ ID NO: 725099 - RNA, 19 nt, Artificial Sequence
  Description of Artificial Sequence: Synthetic oligonucleotide
  Antisense strand to SEQ ID NO: 725098
auuguuacgcaguucgaau

SEQ ID NO: 725100 - RNA, 19 nt, Artificial Sequence
  Description of Artificial Sequence: Synthetic oligonucleotide
  Sense strand starting at position 2067 of SEQ ID NO: 586534
agcucuuucgcccucuuau

SEQ ID NO: 725101 - RNA, 19 nt, Artificial Sequence
  Description of Artificial Sequence: Synthetic oligonucleotide
  Antisense strand to SEQ ID NO: 725100
auaagagggcgaaagagcu

SEQ ID NO: 725102 - RNA, 19 nt, Artificial Sequence
  Description of Artificial Sequence: Synthetic oligonucleotide
  Sense strand starting at position 2068 of SEQ ID NO: 586534
gcucuuucgcccucuuauu

SEQ ID NO: 725103 - RNA, 19 nt, Artificial Sequence
  Description of Artificial Sequence: Synthetic oligonucleotide
  Antisense strand to SEQ ID NO: 725102
aauaagagggcgaaagagc

SEQ ID NO: 725104 - RNA, 19 nt, Artificial Sequence
  Description of Artificial Sequence: Synthetic oligonucleotide
  Sense strand starting at position 2079 of SEQ ID NO: 586534
cucuuauuggacugcagaa

SEQ ID NO: 725105 - RNA, 19 nt, Artificial Sequence
  Description of Artificial Sequence: Synthetic oligonucleotide
  Antisense strand to SEQ ID NO: 725104
uucugcaguccaauaagag

SEQ ID NO: 725106 - RNA, 19 nt, Artificial Sequence
  Description of Artificial Sequence: Synthetic oligonucleotide
  Sense strand starting at position 2177 of SEQ ID NO: 586534
uuguguuuacuggagaaga

SEQ ID NO: 725107 - RNA, 19 nt, Artificial Sequence
  Description of Artificial Sequence: Synthetic oligonucleotide
  Antisense strand to SEQ ID NO: 725106
ucuucuccaguaaacacaa

SEQ ID NO: 725108 - RNA, 19 nt, Artificial Sequence
  Description of Artificial Sequence: Synthetic oligonucleotide
  Sense strand starting at position 2211 of SEQ ID NO: 586534
aagaguaagugcuucggau

SEQ ID NO: 725109 - RNA, 19 nt, Artificial Sequence
  Description of Artificial Sequence: Synthetic oligonucleotide
  Antisense strand to SEQ ID NO: 725108
auccgaagcacuuacucuu

SEQ ID NO: 725110 - RNA, 19 nt, Artificial Sequence
  Description of Artificial Sequence: Synthetic oligonucleotide
  Sense strand starting at position 2230 of SEQ ID NO: 586534
uggacuauugccgagaguc

SEQ ID NO: 725111 - RNA, 19 nt, Artificial Sequence
  Description of Artificial Sequence: Synthetic oligonucleotide
  Antisense strand to SEQ ID NO: 725110
gacucucggcaauagucca

SEQ ID NO: 725112 - RNA, 19 nt, Artificial Sequence
  Description of Artificial Sequence: Synthetic oligonucleotide
  Sense strand starting at position 2414 of SEQ ID NO: 586534
guguaucagcucguuuguu

SEQ ID NO: 725113 - RNA, 19 nt, Artificial Sequence
  Description of Artificial Sequence: Synthetic oligonucleotide
  Antisense strand to SEQ ID NO: 725112
aacaaacgagcugauacac

SEQ ID NO: 725114 - RNA, 19 nt, Artificial Sequence
  Description of Artificial Sequence: Synthetic oligonucleotide
  Sense strand starting at position 2794 of SEQ ID NO: 586534
aggacagcaacuugagauu

SEQ ID NO: 725115 - RNA, 19 nt, Artificial Sequence
  Description of Artificial Sequence: Synthetic oligonucleotide
  Antisense strand to SEQ ID NO: 725114
aaucucaaguugcuguccu

SEQ ID NO: 725116 - RNA, 19 nt, Artificial Sequence
  Description of Artificial Sequence: Synthetic oligonucleotide
  Sense strand starting at position 2803 of SEQ ID NO: 586534
acuugagauugccuuguca

SEQ ID NO: 725117 - RNA, 19 nt, Artificial Sequence
  Description of Artificial Sequence: Synthetic oligonucleotide
  Antisense strand to SEQ ID NO: 725116
ugacaaggcaaucucaagu

SEQ ID NO: 725118 - RNA, 19 nt, Artificial Sequence
  Description of Artificial Sequence: Synthetic oligonucleotide
  Sense strand starting at position 2967 of SEQ ID NO: 586534
gcaaguuaaagcggcauuu

SEQ ID NO: 725119 - RNA, 19 nt, Artificial Sequence
  Description of Artificial Sequence: Synthetic oligonucleotide
  Antisense strand to SEQ ID NO: 725118
aaaugccgcuuuaacuugc

SEQ ID NO: 725120 - RNA, 19 nt, Artificial Sequence
  Description of Artificial Sequence: Synthetic oligonucleotide
  Sense strand starting at position 2984 of SEQ ID NO: 586534
uuuccauacugauuaguau

SEQ ID NO: 725121 - RNA, 19 nt, Artificial Sequence
  Description of Artificial Sequence: Synthetic oligonucleotide
  Antisense strand to SEQ ID NO: 725120
auacuaaucaguauggaaa

SEQ ID NO: 725122 - RNA, 19 nt, Artificial Sequence
  Description of Artificial Sequence: Synthetic oligonucleotide
  Sense strand starting at position 2995 of SEQ ID NO: 586534
auuaguaugcucguugguu

SEQ ID NO: 725123 - RNA, 19 nt, Artificial Sequence
  Description of Artificial Sequence: Synthetic oligonucleotide
  Antisense strand to SEQ ID NO: 725122
aaccaacgagcauacuaau

SEQ ID NO: 725124 - RNA, 19 nt, Artificial Sequence
  Description of Artificial Sequence: Synthetic oligonucleotide
  Sense strand starting at position 3015 of SEQ ID NO: 586534
acguaauacaaagggugua

SEQ ID NO: 725125 - RNA, 19 nt, Artificial Sequence
  Description of Artificial Sequence: Synthetic oligonucleotide
  Antisense strand to SEQ ID NO: 725124
uacacccuuuguauuacgu

SEQ ID NO: 725126 - RNA, 19 nt, Artificial Sequence
  Description of Artificial Sequence: Synthetic oligonucleotide
  Sense strand starting at position 3059 of SEQ ID NO: 586534
ugugaaucauuaucaguaa

SEQ ID NO: 725127 - RNA, 19 nt, Artificial Sequence
  Description of Artificial Sequence: Synthetic oligonucleotide
  Antisense strand to SEQ ID NO: 725126
uuacugauaaugauucaca

SEQ ID NO: 725128 - RNA, 19 nt, Artificial Sequence
  Description of Artificial Sequence: Synthetic oligonucleotide
  Sense strand starting at position 3072 of SEQ ID NO: 586534
caguaaguuucucugguga

SEQ ID NO: 725129 - RNA, 19 nt, Artificial Sequence
  Description of Artificial Sequence: Synthetic oligonucleotide
  Antisense strand to SEQ ID NO: 725128
ucaccagagaaacuuacug

SEQ ID NO: 725130 - RNA, 19 nt, Artificial Sequence
  Description of Artificial Sequence: Synthetic oligonucleotide
  Sense strand starting at position 3164 of SEQ ID NO: 586534
cuaggaguuccucaaguua

SEQ ID NO: 725131 - RNA, 19 nt, Artificial Sequence
  Description of Artificial Sequence: Synthetic oligonucleotide
  Antisense strand to SEQ ID NO: 725130
uaacuugaggaacuccuag

SEQ ID NO: 725132 - RNA, 19 nt, Artificial Sequence
  Description of Artificial Sequence: Synthetic oligonucleotide
  Sense strand starting at position 3178 of SEQ ID NO: 586534
aguuacgaauucucugacu

SEQ ID NO: 725133 - RNA, 19 nt, Artificial Sequence
  Description of Artificial Sequence: Synthetic oligonucleotide
  Antisense strand to SEQ ID NO: 725132
agucagagaauucguaacu

SEQ ID NO: 725134 - RNA, 19 nt, Artificial Sequence
  Description of Artificial Sequence: Synthetic oligonucleotide
  Sense strand starting at position 3180 of SEQ ID NO: 586534
uuacgaauucucugacuca

SEQ ID NO: 725135 - RNA, 19 nt, Artificial Sequence
  Description of Artificial Sequence: Synthetic oligonucleotide
  Antisense strand to SEQ ID NO: 725134
ugagucagagaauucguaa

SEQ ID NO: 725136 - RNA, 19 nt, Artificial Sequence
  Description of Artificial Sequence: Synthetic oligonucleotide
  Sense strand starting at position 3183 of SEQ ID NO: 586534
cgaauucucugacucacca

SEQ ID NO: 725137 - RNA, 19 nt, Artificial Sequence
  Description of Artificial Sequence: Synthetic oligonucleotide
  Antisense strand to SEQ ID NO: 725136
uggugagucagagaauucg

SEQ ID NO: 725138 - RNA, 19 nt, Artificial Sequence
  Description of Artificial Sequence: Synthetic oligonucleotide
  Sense strand starting at position 3337 of SEQ ID NO: 586534
accuuuaguguuuaaucau

SEQ ID NO: 725139 - RNA, 19 nt, Artificial Sequence
  Description of Artificial Sequence: Synthetic oligonucleotide
  Antisense strand to SEQ ID NO: 725138
augauuaaacacuaaaggu

SEQ ID NO: 725140 - RNA, 19 nt, Artificial Sequence
  Description of Artificial Sequence: Synthetic oligonucleotide
  Sense strand starting at position 3532 of SEQ ID NO: 586534
cugaaagccgcguaacaaa

SEQ ID NO: 725141 - RNA, 19 nt, Artificial Sequence
  Description of Artificial Sequence: Synthetic oligonucleotide
  Antisense strand to SEQ ID NO: 725140
uuuguuacgcggcuuucag

SEQ ID NO: 725142 - RNA, 19 nt, Artificial Sequence
  Description of Artificial Sequence: Synthetic oligonucleotide
  Sense strand starting at position 3575 of SEQ ID NO: 586534
acauguugaaaucgaguuu

SEQ ID NO: 725143 - RNA, 19 nt, Artificial Sequence
  Description of Artificial Sequence: Synthetic oligonucleotide
  Antisense strand to SEQ ID NO: 725142
aaacucgauuucaacaugu

SEQ ID NO: 725144 - RNA, 19 nt, Artificial Sequence
  Description of Artificial Sequence: Synthetic oligonucleotide
  Sense strand starting at position 3644 of SEQ ID NO: 586534
aguccucccguguaaucaa

SEQ ID NO: 725145 - RNA, 19 nt, Artificial Sequence
  Description of Artificial Sequence: Synthetic oligonucleotide
  Antisense strand to SEQ ID NO: 725144
uugauuacacgggaggacu

SEQ ID NO: 725146 - RNA, 19 nt, Artificial Sequence
  Description of Artificial Sequence: Synthetic oligonucleotide
  Sense strand starting at position 3647 of SEQ ID NO: 586534
ccucccguguaaucaaaua

SEQ ID NO: 725147 - RNA, 19 nt, Artificial Sequence
  Description of Artificial Sequence: Synthetic oligonucleotide
  Antisense strand to SEQ ID NO: 725146
uauuugauuacacgggagg

SEQ ID NO: 725148 - RNA, 19 nt, Artificial Sequence
  Description of Artificial Sequence: Synthetic oligonucleotide
  Sense strand starting at position 3819 of SEQ ID NO: 586534
augaaugucucugcuacuu

SEQ ID NO: 725149 - RNA, 19 nt, Artificial Sequence
  Description of Artificial Sequence: Synthetic oligonucleotide
  Antisense strand to SEQ ID NO: 725148
aaguagcagagacauucau

SEQ ID NO: 725150 - RNA, 19 nt, Artificial Sequence
  Description of Artificial Sequence: Synthetic oligonucleotide
  Sense strand starting at position 3825 of SEQ ID NO: 586534
gucucugcuacuuugugua

SEQ ID NO: 725151 - RNA, 19 nt, Artificial Sequence
  Description of Artificial Sequence: Synthetic oligonucleotide
  Antisense strand to SEQ ID NO: 725150
uacacaaaguagcagagac

SEQ ID NO: 725152 - RNA, 19 nt, Artificial Sequence
  Description of Artificial Sequence: Synthetic oligonucleotide
  Sense strand starting at position 3872 of SEQ ID NO: 586534
aauggagggucaucgugua

SEQ ID NO: 725153 - RNA, 19 nt, Artificial Sequence
  Description of Artificial Sequence: Synthetic oligonucleotide
  Antisense strand to SEQ ID NO: 725152
uacacgaugacccuccauu

SEQ ID NO: 725154 - RNA, 19 nt, Artificial Sequence
  Description of Artificial Sequence: Synthetic oligonucleotide
  Sense strand starting at position 3877 of SEQ ID NO: 586534
agggucaucguguacuaga

SEQ ID NO: 725155 - RNA, 19 nt, Artificial Sequence
  Description of Artificial Sequence: Synthetic oligonucleotide
  Antisense strand to SEQ ID NO: 725154
ucuaguacacgaugacccu

SEQ ID NO: 725156 - RNA, 19 nt, Artificial Sequence
  Description of Artificial Sequence: Synthetic oligonucleotide
  Sense strand starting at position 3882 of SEQ ID NO: 586534
caucguguacuagaauaga

SEQ ID NO: 725157 - RNA, 19 nt, Artificial Sequence
  Description of Artificial Sequence: Synthetic oligonucleotide
  Antisense strand to SEQ ID NO: 725156
ucuauucuaguacacgaug

SEQ ID NO: 725158 - RNA, 19 nt, Artificial Sequence
  Description of Artificial Sequence: Synthetic oligonucleotide
  Sense strand starting at position 127 of SEQ ID NO: 586535
cauaaaugguuuccagaag

SEQ ID NO: 725159 - RNA, 19 nt, Artificial Sequence
  Description of Artificial Sequence: Synthetic oligonucleotide
  Antisense strand to SEQ ID NO: 725158
cuucuggaaaccauuuaug

SEQ ID NO: 725160 - RNA, 19 nt, Artificial Sequence
  Description of Artificial Sequence: Synthetic oligonucleotide
  Sense strand starting at position 218 of SEQ ID NO: 586535
gacuaauuaucugugguaa

SEQ ID NO: 725161 - RNA, 19 nt, Artificial Sequence
  Description of Artificial Sequence: Synthetic oligonucleotide
  Antisense strand to SEQ ID NO: 725160
uuaccacagauaauuaguc

SEQ ID NO: 725162 - RNA, 19 nt, Artificial Sequence
  Description of Artificial Sequence: Synthetic oligonucleotide
  Sense strand starting at position 219 of SEQ ID NO: 586535
acuaauuaucugugguaaa

SEQ ID NO: 725163 - RNA, 19 nt, Artificial Sequence
  Description of Artificial Sequence: Synthetic oligonucleotide
  Antisense strand to SEQ ID NO: 725162
uuuaccacagauaauuagu

SEQ ID NO: 725164 - RNA, 19 nt, Artificial Sequence
  Description of Artificial Sequence: Synthetic oligonucleotide
  Sense strand starting at position 378 of SEQ ID NO: 586535
auuacaggauuagaaagau

SEQ ID NO: 725165 - RNA, 19 nt, Artificial Sequence
  Description of Artificial Sequence: Synthetic oligonucleotide
  Antisense strand to SEQ ID NO: 725164
aucuuucuaauccuguaau

SEQ ID NO: 725166 - RNA, 19 nt, Artificial Sequence
  Description of Artificial Sequence: Synthetic oligonucleotide
  Sense strand starting at position 544 of SEQ ID NO: 586535
acaugacagugcucugaau

SEQ ID NO: 725167 - RNA, 19 nt, Artificial Sequence
  Description of Artificial Sequence: Synthetic oligonucleotide
  Antisense strand to SEQ ID NO: 725166
auucagagcacugucaugu

SEQ ID NO: 725168 - RNA, 19 nt, Artificial Sequence
  Description of Artificial Sequence: Synthetic oligonucleotide
  Sense strand starting at position 546 of SEQ ID NO: 586535
augacagugcucugaauac

SEQ ID NO: 725169 - RNA, 19 nt, Artificial Sequence
  Description of Artificial Sequence: Synthetic oligonucleotide
  Antisense strand to SEQ ID NO: 725168
guauucagagcacugucau

SEQ ID NO: 725170 - RNA, 19 nt, Artificial Sequence
  Description of Artificial Sequence: Synthetic oligonucleotide
  Sense strand starting at position 553 of SEQ ID NO: 586535
ugcucugaauacuuguaau

SEQ ID NO: 725171 - RNA, 19 nt, Artificial Sequence
  Description of Artificial Sequence: Synthetic oligonucleotide
  Antisense strand to SEQ ID NO: 725170
auuacaaguauucagagca

SEQ ID NO: 725172 - RNA, 19 nt, Artificial Sequence
  Description of Artificial Sequence: Synthetic oligonucleotide
  Sense strand starting at position 815 of SEQ ID NO: 586535
uuacuuaaagcugaaaguu

SEQ ID NO: 725173 - RNA, 19 nt, Artificial Sequence
  Description of Artificial Sequence: Synthetic oligonucleotide
  Antisense strand to SEQ ID NO: 725172
aacuuucagcuuuaaguaa

SEQ ID NO: 725174 - RNA, 19 nt, Artificial Sequence
  Description of Artificial Sequence: Synthetic oligonucleotide
  Sense strand starting at position 913 of SEQ ID NO: 586535
acuagagaauucuccaagu

SEQ ID NO: 725175 - RNA, 19 nt, Artificial Sequence
  Description of Artificial Sequence: Synthetic oligonucleotide
  Antisense strand to SEQ ID NO: 725174
acuuggagaauucucuagu

SEQ ID NO: 725176 - RNA, 19 nt, Artificial Sequence
  Description of Artificial Sequence: Synthetic oligonucleotide
  Sense strand starting at position 1198 of SEQ ID NO: 586535
ccuuaauaagcuuacgauu

SEQ ID NO: 725177 - RNA, 19 nt, Artificial Sequence
  Description of Artificial Sequence: Synthetic oligonucleotide
  Antisense strand to SEQ ID NO: 725176
aaucguaagcuuauuaagg

SEQ ID NO: 725178 - RNA, 19 nt, Artificial Sequence
  Description of Artificial Sequence: Synthetic oligonucleotide
  Sense strand starting at position 1321 of SEQ ID NO: 586535
acugaaguccuccacgaaa

SEQ ID NO: 725179 - RNA, 19 nt, Artificial Sequence
  Description of Artificial Sequence: Synthetic oligonucleotide
  Antisense strand to SEQ ID NO: 725178
uuucguggaggacuucagu

SEQ ID NO: 725180 - RNA, 19 nt, Artificial Sequence
  Description of Artificial Sequence: Synthetic oligonucleotide
  Sense strand starting at position 1323 of SEQ ID NO: 586535
ugaaguccuccacgaaaca

SEQ ID NO: 725181 - RNA, 19 nt, Artificial Sequence
  Description of Artificial Sequence: Synthetic oligonucleotide
  Antisense strand to SEQ ID NO: 725180
uguuucguggaggacuuca

SEQ ID NO: 725182 - RNA, 19 nt, Artificial Sequence
  Description of Artificial Sequence: Synthetic oligonucleotide
  Sense strand starting at position 1324 of SEQ ID NO: 586535
gaaguccuccacgaaacau

SEQ ID NO: 725183 - RNA, 19 nt, Artificial Sequence
  Description of Artificial Sequence: Synthetic oligonucleotide
  Antisense strand to SEQ ID NO: 725182
auguuucguggaggacuuc

SEQ ID NO: 725184 - RNA, 19 nt, Artificial Sequence
  Description of Artificial Sequence: Synthetic oligonucleotide
  Sense strand starting at position 1423 of SEQ ID NO: 586535
acauaaacuggguguguuu

SEQ ID NO: 725185 - RNA, 19 nt, Artificial Sequence
  Description of Artificial Sequence: Synthetic oligonucleotide
  Antisense strand to SEQ ID NO: 725184
aaacacacccaguuuaugu

SEQ ID NO: 725186 - RNA, 19 nt, Artificial Sequence
  Description of Artificial Sequence: Synthetic oligonucleotide
  Sense strand starting at position 1503 of SEQ ID NO: 586535
gucugcaugccacaaagau

SEQ ID NO: 725187 - RNA, 19 nt, Artificial Sequence
  Description of Artificial Sequence: Synthetic oligonucleotide
  Antisense strand to SEQ ID NO: 725186
aucuuuguggcaugcagac

SEQ ID NO: 725188 - RNA, 19 nt, Artificial Sequence
  Description of Artificial Sequence: Synthetic oligonucleotide
  Sense strand starting at position 1532 of SEQ ID NO: 586535
ccaacuucugacgaagguu

SEQ ID NO: 725189 - RNA, 19 nt, Artificial Sequence
  Description of Artificial Sequence: Synthetic oligonucleotide
  Antisense strand to SEQ ID NO: 725188
aaccuucgucagaaguugg

SEQ ID NO: 725190 - RNA, 19 nt, Artificial Sequence
  Description of Artificial Sequence: Synthetic oligonucleotide
  Sense strand starting at position 1540 of SEQ ID NO: 586535
ugacgaagguucccuuaaa

SEQ ID NO: 725191 - RNA, 19 nt, Artificial Sequence
  Description of Artificial Sequence: Synthetic oligonucleotide
  Antisense strand to SEQ ID NO: 725190
uuuaagggaaccuucguca

SEQ ID NO: 725192 - RNA, 19 nt, Artificial Sequence
  Description of Artificial Sequence: Synthetic oligonucleotide
  Sense strand starting at position 1541 of SEQ ID NO: 586535
gacgaagguucccuuaaac

SEQ ID NO: 725193 - RNA, 19 nt, Artificial Sequence
  Description of Artificial Sequence: Synthetic oligonucleotide
  Antisense strand to SEQ ID NO: 725192
guuuaagggaaccuucguc

SEQ ID NO: 725194 - RNA, 19 nt, Artificial Sequence
  Description of Artificial Sequence: Synthetic oligonucleotide
  Sense strand starting at position 2714 of SEQ ID NO: 586535
augcguggagcuugaagaa

SEQ ID NO: 725195 - RNA, 19 nt, Artificial Sequence
  Description of Artificial Sequence: Synthetic oligonucleotide
  Antisense strand to SEQ ID NO: 725194
uucuucaagcuccacgcau

SEQ ID NO: 725196 - RNA, 19 nt, Artificial Sequence
  Description of Artificial Sequence: Synthetic oligonucleotide
  Sense strand starting at position 2806 of SEQ ID NO: 586535
gugacugcuguuggaaaca

SEQ ID NO: 725197 - RNA, 19 nt, Artificial Sequence
  Description of Artificial Sequence: Synthetic oligonucleotide
  Antisense strand to SEQ ID NO: 725196
uguuuccaacagcagucac

SEQ ID NO: 725198 - RNA, 19 nt, Artificial Sequence
  Description of Artificial Sequence: Synthetic oligonucleotide
  Sense strand starting at position 2860 of SEQ ID NO: 586535
gaggaccauucgcucugaa

SEQ ID NO: 725199 - RNA, 19 nt, Artificial Sequence
  Description of Artificial Sequence: Synthetic oligonucleotide
  Antisense strand to SEQ ID NO: 725198
uucagagcgaaugguccuc

SEQ ID NO: 725200 - RNA, 19 nt, Artificial Sequence
  Description of Artificial Sequence: Synthetic oligonucleotide
  Sense strand starting at position 2905 of SEQ ID NO: 586535
guuagaagggccgagaauu

SEQ ID NO: 725201 - RNA, 19 nt, Artificial Sequence
  Description of Artificial Sequence: Synthetic oligonucleotide
  Antisense strand to SEQ ID NO: 725200
aauucucggcccuucuaac

SEQ ID NO: 725202 - RNA, 19 nt, Artificial Sequence
  Description of Artificial Sequence: Synthetic oligonucleotide
  Sense strand starting at position 2915 of SEQ ID NO: 586535
ccgagaauuaacgagguga

SEQ ID NO: 725203 - RNA, 19 nt, Artificial Sequence
  Description of Artificial Sequence: Synthetic oligonucleotide
  Antisense strand to SEQ ID NO: 725202
ucaccucguuaauucucgg

SEQ ID NO: 725204 - RNA, 19 nt, Artificial Sequence
  Description of Artificial Sequence: Synthetic oligonucleotide
  Sense strand starting at position 2917 of SEQ ID NO: 586535
gagaauuaacgaggugauc

SEQ ID NO: 725205 - RNA, 19 nt, Artificial Sequence
  Description of Artificial Sequence: Synthetic oligonucleotide
  Antisense strand to SEQ ID NO: 725204
gaucaccucguuaauucuc

SEQ ID NO: 725206 - RNA, 19 nt, Artificial Sequence
  Description of Artificial Sequence: Synthetic oligonucleotide
  Sense strand starting at position 2944 of SEQ ID NO: 586535
ugguuaguauucuuaccuu

SEQ ID NO: 725207 - RNA, 19 nt, Artificial Sequence
  Description of Artificial Sequence: Synthetic oligonucleotide
  Antisense strand to SEQ ID NO: 725206
aagguaagaauacuaacca

SEQ ID NO: 725208 - RNA, 19 nt, Artificial Sequence
  Description of Artificial Sequence: Synthetic oligonucleotide
  Sense strand starting at position 3012 of SEQ ID NO: 586535
gcuguagauuccuuuauga

SEQ ID NO: 725209 - RNA, 19 nt, Artificial Sequence
  Description of Artificial Sequence: Synthetic oligonucleotide
  Antisense strand to SEQ ID NO: 725208
ucauaaaggaaucuacagc

SEQ ID NO: 725210 - RNA, 19 nt, Artificial Sequence
  Description of Artificial Sequence: Synthetic oligonucleotide
  Sense strand starting at position 3023 of SEQ ID NO: 586535
cuuuaugaaguguacaaca

SEQ ID NO: 725211 - RNA, 19 nt, Artificial Sequence
  Description of Artificial Sequence: Synthetic oligonucleotide
  Antisense strand to SEQ ID NO: 725210
uguuguacacuucauaaag

SEQ ID NO: 725212 - RNA, 19 nt, Artificial Sequence
  Description of Artificial Sequence: Synthetic oligonucleotide
  Sense strand starting at position 3302 of SEQ ID NO: 586535
aguagugugauuugcccaa

SEQ ID NO: 725213 - RNA, 19 nt, Artificial Sequence
  Description of Artificial Sequence: Synthetic oligonucleotide
  Antisense strand to SEQ ID NO: 725212
uugggcaaaucacacuacu

SEQ ID NO: 725214 - RNA, 19 nt, Artificial Sequence
  Description of Artificial Sequence: Synthetic oligonucleotide
  Sense strand starting at position 3324 of SEQ ID NO: 586535
cucacaguggcagaguuaa

SEQ ID NO: 725215 - RNA, 19 nt, Artificial Sequence
  Description of Artificial Sequence: Synthetic oligonucleotide
  Antisense strand to SEQ ID NO: 725214
uuaacucugccacugugag

SEQ ID NO: 725216 - RNA, 19 nt, Artificial Sequence
  Description of Artificial Sequence: Synthetic oligonucleotide
  Sense strand starting at position 3588 of SEQ ID NO: 586535
gcauucuuaggaggauaaa

SEQ ID NO: 725217 - RNA, 19 nt, Artificial Sequence
  Description of Artificial Sequence: Synthetic oligonucleotide
  Antisense strand to SEQ ID NO: 725216
uuuauccuccuaagaaugc

SEQ ID NO: 725218 - RNA, 19 nt, Artificial Sequence
  Description of Artificial Sequence: Synthetic oligonucleotide
  Sense strand starting at position 3607 of SEQ ID NO: 586535
aguguaugauggcuagauu

SEQ ID NO: 725219 - RNA, 19 nt, Artificial Sequence
  Description of Artificial Sequence: Synthetic oligonucleotide
  Antisense strand to SEQ ID NO: 725218
aaucuagccaucauacacu

SEQ ID NO: 725220 - RNA, 19 nt, Artificial Sequence
  Description of Artificial Sequence: Synthetic oligonucleotide
  Sense strand starting at position 3648 of SEQ ID NO: 586535
aggaauucacgcugcagga

SEQ ID NO: 725221 - RNA, 19 nt, Artificial Sequence
  Description of Artificial Sequence: Synthetic oligonucleotide
  Antisense strand to SEQ ID NO: 725220
uccugcagcgugaauuccu

SEQ ID NO: 725222 - RNA, 19 nt, Artificial Sequence
  Description of Artificial Sequence: Synthetic oligonucleotide
  Sense strand starting at position 3670 of SEQ ID NO: 586535
gucagcuagcuuuaaauaa

SEQ ID NO: 725223 - RNA, 19 nt, Artificial Sequence
  Description of Artificial Sequence: Synthetic oligonucleotide
  Antisense strand to SEQ ID NO: 725222
uuauuuaaagcuagcugac

SEQ ID NO: 725224 - RNA, 19 nt, Artificial Sequence
  Description of Artificial Sequence: Synthetic oligonucleotide
  Sense strand starting at position 3733 of SEQ ID NO: 586535
gugcuagagcuucugcuua

SEQ ID NO: 725225 - RNA, 19 nt, Artificial Sequence
  Description of Artificial Sequence: Synthetic oligonucleotide
  Antisense strand to SEQ ID NO: 725224
uaagcagaagcucuagcac

SEQ ID NO: 725226 - RNA, 19 nt, Artificial Sequence
  Description of Artificial Sequence: Synthetic oligonucleotide
  Sense strand starting at position 3738 of SEQ ID NO: 586535
agagcuucugcuuaacuuu

SEQ ID NO: 725227 - RNA, 19 nt, Artificial Sequence
  Description of Artificial Sequence: Synthetic oligonucleotide
  Antisense strand to SEQ ID NO: 725226
aaaguuaagcagaagcucu

SEQ ID NO: 725228 - RNA, 19 nt, Artificial Sequence
  Description of Artificial Sequence: Synthetic oligonucleotide
  Sense strand starting at position 3767 of SEQ ID NO: 586535
ugaggauucuguucguuag

SEQ ID NO: 725229 - RNA, 19 nt, Artificial Sequence
  Description of Artificial Sequence: Synthetic oligonucleotide
  Antisense strand to SEQ ID NO: 725228
cuaacgaacagaauccuca

SEQ ID NO: 725230 - RNA, 19 nt, Artificial Sequence
  Description of Artificial Sequence: Synthetic oligonucleotide
  Sense strand starting at position 3777 of SEQ ID NO: 586535
guucguuagcaugacgaau

SEQ ID NO: 725231 - RNA, 19 nt, Artificial Sequence
  Description of Artificial Sequence: Synthetic oligonucleotide
  Antisense strand to SEQ ID NO: 725230
auucgucaugcuaacgaac

SEQ ID NO: 725232 - RNA, 19 nt, Artificial Sequence
  Description of Artificial Sequence: Synthetic oligonucleotide
  Sense strand starting at position 3829 of SEQ ID NO: 586535
ugaugauauugacucaagu

SEQ ID NO: 725233 - RNA, 19 nt, Artificial Sequence
  Description of Artificial Sequence: Synthetic oligonucleotide
  Antisense strand to SEQ ID NO: 725232
acuugagucaauaucauca

SEQ ID NO: 725234 - RNA, 19 nt, Artificial Sequence
  Description of Artificial Sequence: Synthetic oligonucleotide
  Sense strand starting at position 3865 of SEQ ID NO: 586535
guauauaugccagauauaa

SEQ ID NO: 725235 - RNA, 19 nt, Artificial Sequence
  Description of Artificial Sequence: Synthetic oligonucleotide
  Antisense strand to SEQ ID NO: 725234
uuauaucuggcauauauac

SEQ ID NO: 725236 - RNA, 19 nt, Artificial Sequence
  Description of Artificial Sequence: Synthetic oligonucleotide
  Sense strand starting at position 3924 of SEQ ID NO: 586535
uuaagaaauggucaagugu

SEQ ID NO: 725237 - RNA, 19 nt, Artificial Sequence
  Description of Artificial Sequence: Synthetic oligonucleotide
  Antisense strand to SEQ ID NO: 725236
acacuugaccauuucuuaa

SEQ ID NO: 725238 - RNA, 19 nt, Artificial Sequence
  Description of Artificial Sequence: Synthetic oligonucleotide
  Sense strand starting at position 190 of SEQ ID NO: 586536
gucacuuaaguguauaaau

SEQ ID NO: 725239 - RNA, 19 nt, Artificial Sequence
  Description of Artificial Sequence: Synthetic oligonucleotide
  Antisense strand to SEQ ID NO: 725238
auuuauacacuuaagugac

SEQ ID NO: 725240 - RNA, 19 nt, Artificial Sequence
  Description of Artificial Sequence: Synthetic oligonucleotide
  Sense strand starting at position 329 of SEQ ID NO: 586536
cccauaugggaagguguau

SEQ ID NO: 725241 - RNA, 19 nt, Artificial Sequence
  Description of Artificial Sequence: Synthetic oligonucleotide
  Antisense strand to SEQ ID NO: 725240
auacaccuucccauauggg

SEQ ID NO: 725242 - RNA, 19 nt, Artificial Sequence
  Description of Artificial Sequence: Synthetic oligonucleotide
  Sense strand starting at position 368 of SEQ ID NO: 586536
ugccaaccuguggaauauu

SEQ ID NO: 725243 - RNA, 19 nt, Artificial Sequence
  Description of Artificial Sequence: Synthetic oligonucleotide
  Antisense strand to SEQ ID NO: 725242
aauauuccacagguuggca

SEQ ID NO: 725244 - RNA, 19 nt, Artificial Sequence
  Description of Artificial Sequence: Synthetic oligonucleotide
  Sense strand starting at position 445 of SEQ ID NO: 586536
aaucuaggcggugaucuau

SEQ ID NO: 725245 - RNA, 19 nt, Artificial Sequence
  Description of Artificial Sequence: Synthetic oligonucleotide
  Antisense strand to SEQ ID NO: 725244
auagaucaccgccuagauu

SEQ ID NO: 725246 - RNA, 19 nt, Artificial Sequence
  Description of Artificial Sequence: Synthetic oligonucleotide
  Sense strand starting at position 451 of SEQ ID NO: 586536
ggcggugaucuauaauuac

SEQ ID NO: 725247 - RNA, 19 nt, Artificial Sequence
  Description of Artificial Sequence: Synthetic oligonucleotide
  Antisense strand to SEQ ID NO: 725246
guaauuauagaucaccgcc

SEQ ID NO: 725248 - RNA, 19 nt, Artificial Sequence
  Description of Artificial Sequence: Synthetic oligonucleotide
  Sense strand starting at position 454 of SEQ ID NO: 586536
ggugaucuauaauuacgau

SEQ ID NO: 725249 - RNA, 19 nt, Artificial Sequence
  Description of Artificial Sequence: Synthetic oligonucleotide
  Antisense strand to SEQ ID NO: 725248
aucguaauuauagaucacc

SEQ ID NO: 725250 - RNA, 19 nt, Artificial Sequence
  Description of Artificial Sequence: Synthetic oligonucleotide
  Sense strand starting at position 469 of SEQ ID NO: 586536
cgauuaagcccacauggga

SEQ ID NO: 725251 - RNA, 19 nt, Artificial Sequence
  Description of Artificial Sequence: Synthetic oligonucleotide
  Antisense strand to SEQ ID NO: 725250
ucccaugugggcuuaaucg

SEQ ID NO: 725252 - RNA, 19 nt, Artificial Sequence
  Description of Artificial Sequence: Synthetic oligonucleotide
  Sense strand starting at position 489 of SEQ ID NO: 586536
gugggaucuaagugagaac

SEQ ID NO: 725253 - RNA, 19 nt, Artificial Sequence
  Description of Artificial Sequence: Synthetic oligonucleotide
  Antisense strand to SEQ ID NO: 725252
guucucacuuagaucccac

SEQ ID NO: 725254 - RNA, 19 nt, Artificial Sequence
  Description of Artificial Sequence: Synthetic oligonucleotide
  Sense strand starting at position 501 of SEQ ID NO: 586536
ugagaacuuuaagccaauu

SEQ ID NO: 725255 - RNA, 19 nt, Artificial Sequence
  Description of Artificial Sequence: Synthetic oligonucleotide
  Antisense strand to SEQ ID NO: 725254
aauuggcuuaaaguucuca

SEQ ID NO: 725256 - RNA, 19 nt, Artificial Sequence
  Description of Artificial Sequence: Synthetic oligonucleotide
  Sense strand starting at position 605 of SEQ ID NO: 586536
auaauuacacguuaaguga

SEQ ID NO: 725257 - RNA, 19 nt, Artificial Sequence
  Description of Artificial Sequence: Synthetic oligonucleotide
  Antisense strand to SEQ ID NO: 725256
ucacuuaacguguaauuau

SEQ ID NO: 725258 - RNA, 19 nt, Artificial Sequence
  Description of Artificial Sequence: Synthetic oligonucleotide
  Sense strand starting at position 618 of SEQ ID NO: 586536
aagugauacugccuggaga

SEQ ID NO: 725259 - RNA, 19 nt, Artificial Sequence
  Description of Artificial Sequence: Synthetic oligonucleotide
  Antisense strand to SEQ ID NO: 725258
ucuccaggcaguaucacuu

SEQ ID NO: 725260 - RNA, 19 nt, Artificial Sequence
  Description of Artificial Sequence: Synthetic oligonucleotide
  Sense strand starting at position 619 of SEQ ID NO: 586536
agugauacugccuggagag

SEQ ID NO: 725261 - RNA, 19 nt, Artificial Sequence
  Description of Artificial Sequence: Synthetic oligonucleotide
  Antisense strand to SEQ ID NO: 725260
cucuccaggcaguaucacu

SEQ ID NO: 725262 - RNA, 19 nt, Artificial Sequence
  Description of Artificial Sequence: Synthetic oligonucleotide
  Sense strand starting at position 621 of SEQ ID NO: 586536
ugauacugccuggagagua

SEQ ID NO: 725263 - RNA, 19 nt, Artificial Sequence
  Description of Artificial Sequence: Synthetic oligonucleotide
  Antisense strand to SEQ ID NO: 725262
uacucuccaggcaguauca

SEQ ID NO: 725264 - RNA, 19 nt, Artificial Sequence
  Description of Artificial Sequence: Synthetic oligonucleotide
  Sense strand starting at position 692 of SEQ ID NO: 586536
agcucaucuccuugagaaa

SEQ ID NO: 725265 - RNA, 19 nt, Artificial Sequence
  Description of Artificial Sequence: Synthetic oligonucleotide
  Antisense strand to SEQ ID NO: 725264
uuucucaaggagaugagcu

SEQ ID NO: 725266 - RNA, 19 nt, Artificial Sequence
  Description of Artificial Sequence: Synthetic oligonucleotide
  Sense strand starting at position 693 of SEQ ID NO: 586536
gcucaucuccuugagaaac

SEQ ID NO: 725267 - RNA, 19 nt, Artificial Sequence
  Description of Artificial Sequence: Synthetic oligonucleotide
  Antisense strand to SEQ ID NO: 725266
guuucucaaggagaugagc

SEQ ID NO: 725268 - RNA, 19 nt, Artificial Sequence
  Description of Artificial Sequence: Synthetic oligonucleotide
  Sense strand starting at position 766 of SEQ ID NO: 586536
acauuuacauguguguuau

SEQ ID NO: 725269 - RNA, 19 nt, Artificial Sequence
  Description of Artificial Sequence: Synthetic oligonucleotide
  Antisense strand to SEQ ID NO: 725268
auaacacacauguaaaugu

SEQ ID NO: 725270 - RNA, 19 nt, Artificial Sequence
  Description of Artificial Sequence: Synthetic oligonucleotide
  Sense strand starting at position 767 of SEQ ID NO: 586536
cauuuacauguguguuaug

SEQ ID NO: 725271 - RNA, 19 nt, Artificial Sequence
  Description of Artificial Sequence: Synthetic oligonucleotide
  Antisense strand to SEQ ID NO: 725270
cauaacacacauguaaaug

SEQ ID NO: 725272 - RNA, 19 nt, Artificial Sequence
  Description of Artificial Sequence: Synthetic oligonucleotide
  Sense strand starting at position 789 of SEQ ID NO: 586536
ucacaucugccugacaaug

SEQ ID NO: 725273 - RNA, 19 nt, Artificial Sequence
  Description of Artificial Sequence: Synthetic oligonucleotide
  Antisense strand to SEQ ID NO: 725272
cauugucaggcagauguga

SEQ ID NO: 725274 - RNA, 19 nt, Artificial Sequence
  Description of Artificial Sequence: Synthetic oligonucleotide
  Sense strand starting at position 808 of SEQ ID NO: 586536
cuagacuucccacauguuu

SEQ ID NO: 725275 - RNA, 19 nt, Artificial Sequence
  Description of Artificial Sequence: Synthetic oligonucleotide
  Antisense strand to SEQ ID NO: 725274
aaacaugugggaagucuag

SEQ ID NO: 725276 - RNA, 19 nt, Artificial Sequence
  Description of Artificial Sequence: Synthetic oligonucleotide
  Sense strand starting at position 960 of SEQ ID NO: 586536
uuuagaagguaggucuaua

SEQ ID NO: 725277 - RNA, 19 nt, Artificial Sequence
  Description of Artificial Sequence: Synthetic oligonucleotide
  Antisense strand to SEQ ID NO: 725276
uauagaccuaccuucuaaa

SEQ ID NO: 725278 - RNA, 19 nt, Artificial Sequence
  Description of Artificial Sequence: Synthetic oligonucleotide
  Sense strand starting at position 991 of SEQ ID NO: 586536
ucuguaggcacagaguaaa

SEQ ID NO: 725279 - RNA, 19 nt, Artificial Sequence
  Description of Artificial Sequence: Synthetic oligonucleotide
  Antisense strand to SEQ ID NO: 725278
uuuacucugugccuacaga

SEQ ID NO: 725280 - RNA, 19 nt, Artificial Sequence
  Description of Artificial Sequence: Synthetic oligonucleotide
  Sense strand starting at position 1084 of SEQ ID NO: 586536
cuauuagaauaggcuuaca

SEQ ID NO: 725281 - RNA, 19 nt, Artificial Sequence
  Description of Artificial Sequence: Synthetic oligonucleotide
  Antisense strand to SEQ ID NO: 725280
uguaagccuauucuaauag

SEQ ID NO: 725282 - RNA, 19 nt, Artificial Sequence
  Description of Artificial Sequence: Synthetic oligonucleotide
  Sense strand starting at position 1095 of SEQ ID NO: 586536
ggcuuacaaucaguacaca

SEQ ID NO: 725283 - RNA, 19 nt, Artificial Sequence
  Description of Artificial Sequence: Synthetic oligonucleotide
  Antisense strand to SEQ ID NO: 725282
uguguacugauuguaagcc

SEQ ID NO: 725284 - RNA, 19 nt, Artificial Sequence
  Description of Artificial Sequence: Synthetic oligonucleotide
  Sense strand starting at position 1121 of SEQ ID NO: 586536
uuucuaguugcauaguaaa

SEQ ID NO: 725285 - RNA, 19 nt, Artificial Sequence
  Description of Artificial Sequence: Synthetic oligonucleotide
  Antisense strand to SEQ ID NO: 725284
uuuacuaugcaacuagaaa

SEQ ID NO: 725286 - RNA, 19 nt, Artificial Sequence
  Description of Artificial Sequence: Synthetic oligonucleotide
  Sense strand starting at position 1228 of SEQ ID NO: 586536
cccuaagcagacugaauau

SEQ ID NO: 725287 - RNA, 19 nt, Artificial Sequence
  Description of Artificial Sequence: Synthetic oligonucleotide
  Antisense strand to SEQ ID NO: 725286
auauucagucugcuuaggg

SEQ ID NO: 725288 - RNA, 19 nt, Artificial Sequence
  Description of Artificial Sequence: Synthetic oligonucleotide
  Sense strand starting at position 1329 of SEQ ID NO: 586536
caauuuccuuaagagaggu

SEQ ID NO: 725289 - RNA, 19 nt, Artificial Sequence
  Description of Artificial Sequence: Synthetic oligonucleotide
  Antisense strand to SEQ ID NO: 725288
accucucuuaaggaaauug

SEQ ID NO: 725290 - RNA, 19 nt, Artificial Sequence
  Description of Artificial Sequence: Synthetic oligonucleotide
  Sense strand starting at position 1415 of SEQ ID NO: 586536
gaucuuaccugagcugauc

SEQ ID NO: 725291 - RNA, 19 nt, Artificial Sequence
  Description of Artificial Sequence: Synthetic oligonucleotide
  Antisense strand to SEQ ID NO: 725290
gaucagcucagguaagauc

SEQ ID NO: 725292 - RNA, 19 nt, Artificial Sequence
  Description of Artificial Sequence: Synthetic oligonucleotide
  Sense strand starting at position 1418 of SEQ ID NO: 586536
cuuaccugagcugaucaua

SEQ ID NO: 725293 - RNA, 19 nt, Artificial Sequence
  Description of Artificial Sequence: Synthetic oligonucleotide
  Antisense strand to SEQ ID NO: 725292
uaugaucagcucagguaag

SEQ ID NO: 725294 - RNA, 19 nt, Artificial Sequence
  Description of Artificial Sequence: Synthetic oligonucleotide
  Sense strand starting at position 1637 of SEQ ID NO: 586536
gaggaucaacuucgacaau

SEQ ID NO: 725295 - RNA, 19 nt, Artificial Sequence
  Description of Artificial Sequence: Synthetic oligonucleotide
  Antisense strand to SEQ ID NO: 725294
auugucgaaguugauccuc

SEQ ID NO: 725296 - RNA, 19 nt, Artificial Sequence
  Description of Artificial Sequence: Synthetic oligonucleotide
  Sense strand starting at position 2922 of SEQ ID NO: 586536
gcaccuguugauggauaaa

SEQ ID NO: 725297 - RNA, 19 nt, Artificial Sequence
  Description of Artificial Sequence: Synthetic oligonucleotide
  Antisense strand to SEQ ID NO: 725296
uuuauccaucaacaggugc

SEQ ID NO: 725298 - RNA, 19 nt, Artificial Sequence
  Description of Artificial Sequence: Synthetic oligonucleotide
  Sense strand starting at position 3070 of SEQ ID NO: 586536
uguggcguucagcuauaca

SEQ ID NO: 725299 - RNA, 19 nt, Artificial Sequence
  Description of Artificial Sequence: Synthetic oligonucleotide
  Antisense strand to SEQ ID NO: 725298
uguauagcugaacgccaca

SEQ ID NO: 725300 - RNA, 19 nt, Artificial Sequence
  Description of Artificial Sequence: Synthetic oligonucleotide
  Sense strand starting at position 3191 of SEQ ID NO: 586536
ugucacuuccaagagcaaa

SEQ ID NO: 725301 - RNA, 19 nt, Artificial Sequence
  Description of Artificial Sequence: Synthetic oligonucleotide
  Antisense strand to SEQ ID NO: 725300
uuugcucuuggaagugaca

SEQ ID NO: 725302 - RNA, 19 nt, Artificial Sequence
  Description of Artificial Sequence: Synthetic oligonucleotide
  Sense strand starting at position 3220 of SEQ ID NO: 586536
auaaucuacuagucaugga

SEQ ID NO: 725303 - RNA, 19 nt, Artificial Sequence
  Description of Artificial Sequence: Synthetic oligonucleotide
  Antisense strand to SEQ ID NO: 725302
uccaugacuaguagauuau

SEQ ID NO: 725304 - RNA, 19 nt, Artificial Sequence
  Description of Artificial Sequence: Synthetic oligonucleotide
  Sense strand starting at position 3257 of SEQ ID NO: 586536
aaacuaaaucagcgaggaa

SEQ ID NO: 725305 - RNA, 19 nt, Artificial Sequence
  Description of Artificial Sequence: Synthetic oligonucleotide
  Antisense strand to SEQ ID NO: 725304
uuccucgcugauuuaguuu

SEQ ID NO: 725306 - RNA, 19 nt, Artificial Sequence
  Description of Artificial Sequence: Synthetic oligonucleotide
  Sense strand starting at position 3361 of SEQ ID NO: 586536
gagggaucuuggucaacuc

SEQ ID NO: 725307 - RNA, 19 nt, Artificial Sequence
  Description of Artificial Sequence: Synthetic oligonucleotide
  Antisense strand to SEQ ID NO: 725306
gaguugaccaagaucccuc

SEQ ID NO: 725308 - RNA, 19 nt, Artificial Sequence
  Description of Artificial Sequence: Synthetic oligonucleotide
  Sense strand starting at position 3368 of SEQ ID NO: 586536
cuuggucaacuccagagua

SEQ ID NO: 725309 - RNA, 19 nt, Artificial Sequence
  Description of Artificial Sequence: Synthetic oligonucleotide
  Antisense strand to SEQ ID NO: 725308
uacucuggaguugaccaag

SEQ ID NO: 725310 - RNA, 19 nt, Artificial Sequence
  Description of Artificial Sequence: Synthetic oligonucleotide
  Sense strand starting at position 3370 of SEQ ID NO: 586536
uggucaacuccagaguaug

SEQ ID NO: 725311 - RNA, 19 nt, Artificial Sequence
  Description of Artificial Sequence: Synthetic oligonucleotide
  Antisense strand to SEQ ID NO: 725310
cauacucuggaguugacca

SEQ ID NO: 725312 - RNA, 19 nt, Artificial Sequence
  Description of Artificial Sequence: Synthetic oligonucleotide
  Sense strand starting at position 3539 of SEQ ID NO: 586536
uuggauauguaaguuacaa

SEQ ID NO: 725313 - RNA, 19 nt, Artificial Sequence
  Description of Artificial Sequence: Synthetic oligonucleotide
  Antisense strand to SEQ ID NO: 725312
uuguaacuuacauauccaa

SEQ ID NO: 725314 - RNA, 19 nt, Artificial Sequence
  Description of Artificial Sequence: Synthetic oligonucleotide
  Sense strand starting at position 3739 of SEQ ID NO: 586536
uuuccuuaaggaugaugua

SEQ ID NO: 725315 - RNA, 19 nt, Artificial Sequence
  Description of Artificial Sequence: Synthetic oligonucleotide
  Antisense strand to SEQ ID NO: 725314
uacaucauccuuaaggaaa

SEQ ID NO: 725316 - RNA, 19 nt, Artificial Sequence
  Description of Artificial Sequence: Synthetic oligonucleotide
  Sense strand starting at position 3917 of SEQ ID NO: 586536
uguuuccauuuggagauuu

SEQ ID NO: 725317 - RNA, 19 nt, Artificial Sequence
  Description of Artificial Sequence: Synthetic oligonucleotide
  Antisense strand to SEQ ID NO: 725316
aaaucuccaaauggaaaca

SEQ ID NO: 725318 - RNA, 19 nt, Artificial Sequence
  Description of Artificial Sequence: Synthetic oligonucleotide
  Sense strand starting at position 4 of SEQ ID NO: 586537
aauaaauagugagagacua

SEQ ID NO: 725319 - RNA, 19 nt, Artificial Sequence
  Description of Artificial Sequence: Synthetic oligonucleotide
  Antisense strand to SEQ ID NO: 725318
uagucucucacuauuuauu

SEQ ID NO: 725320 - RNA, 19 nt, Artificial Sequence
  Description of Artificial Sequence: Synthetic oligonucleotide
  Sense strand starting at position 24 of SEQ ID NO: 586537
ggguacuacggguaucagu

SEQ ID NO: 725321 - RNA, 19 nt, Artificial Sequence
  Description of Artificial Sequence: Synthetic oligonucleotide
  Antisense strand to SEQ ID NO: 725320
acugauacccguaguaccc

SEQ ID NO: 725322 - RNA, 19 nt, Artificial Sequence
  Description of Artificial Sequence: Synthetic oligonucleotide
  Sense strand starting at position 31 of SEQ ID NO: 586537
acggguaucaguugauuga

SEQ ID NO: 725323 - RNA, 19 nt, Artificial Sequence
  Description of Artificial Sequence: Synthetic oligonucleotide
  Antisense strand to SEQ ID NO: 725322
ucaaucaacugauacccgu

SEQ ID NO: 725324 - RNA, 19 nt, Artificial Sequence
  Description of Artificial Sequence: Synthetic oligonucleotide
  Sense strand starting at position 35 of SEQ ID NO: 586537
guaucaguugauugagggu

SEQ ID NO: 725325 - RNA, 19 nt, Artificial Sequence
  Description of Artificial Sequence: Synthetic oligonucleotide
  Antisense strand to SEQ ID NO: 725324
acccucaaucaacugauac

SEQ ID NO: 725326 - RNA, 19 nt, Artificial Sequence
  Description of Artificial Sequence: Synthetic oligonucleotide
  Sense strand starting at position 582 of SEQ ID NO: 586537
uacccuuggcauugagauu

SEQ ID NO: 725327 - RNA, 19 nt, Artificial Sequence
  Description of Artificial Sequence: Synthetic oligonucleotide
  Antisense strand to SEQ ID NO: 725326
aaucucaaugccaagggua

SEQ ID NO: 725328 - RNA, 19 nt, Artificial Sequence
  Description of Artificial Sequence: Synthetic oligonucleotide
  Sense strand starting at position 679 of SEQ ID NO: 586537
aaauguagaugagcuagau

SEQ ID NO: 725329 - RNA, 19 nt, Artificial Sequence
  Description of Artificial Sequence: Synthetic oligonucleotide
  Antisense strand to SEQ ID NO: 725328
aucuagcucaucuacauuu

SEQ ID NO: 725330 - RNA, 19 nt, Artificial Sequence
  Description of Artificial Sequence: Synthetic oligonucleotide
  Sense strand starting at position 683 of SEQ ID NO: 586537
guagaugagcuagauagca

SEQ ID NO: 725331 - RNA, 19 nt, Artificial Sequence
  Description of Artificial Sequence: Synthetic oligonucleotide
  Antisense strand to SEQ ID NO: 725330
ugcuaucuagcucaucuac

SEQ ID NO: 725332 - RNA, 19 nt, Artificial Sequence
  Description of Artificial Sequence: Synthetic oligonucleotide
  Sense strand starting at position 969 of SEQ ID NO: 586537
agacacauaucccaggaaa

SEQ ID NO: 725333 - RNA, 19 nt, Artificial Sequence
  Description of Artificial Sequence: Synthetic oligonucleotide
  Antisense strand to SEQ ID NO: 725332
uuuccugggauaugugucu

SEQ ID NO: 725334 - RNA, 19 nt, Artificial Sequence
  Description of Artificial Sequence: Synthetic oligonucleotide
  Sense strand starting at position 1040 of SEQ ID NO: 586537
ccaaauucccuucguuaag

SEQ ID NO: 725335 - RNA, 19 nt, Artificial Sequence
  Description of Artificial Sequence: Synthetic oligonucleotide
  Antisense strand to SEQ ID NO: 725334
cuuaacgaagggaauuugg

SEQ ID NO: 725336 - RNA, 19 nt, Artificial Sequence
  Description of Artificial Sequence: Synthetic oligonucleotide
  Sense strand starting at position 1049 of SEQ ID NO: 586537
cuucguuaagaauaacuga

SEQ ID NO: 725337 - RNA, 19 nt, Artificial Sequence
  Description of Artificial Sequence: Synthetic oligonucleotide
  Antisense strand to SEQ ID NO: 725336
ucaguuauucuuaacgaag

SEQ ID NO: 725338 - RNA, 19 nt, Artificial Sequence
  Description of Artificial Sequence: Synthetic oligonucleotide
  Sense strand starting at position 1092 of SEQ ID NO: 586537
uuguuaaagcauuggaggu

SEQ ID NO: 725339 - RNA, 19 nt, Artificial Sequence
  Description of Artificial Sequence: Synthetic oligonucleotide
  Antisense strand to SEQ ID NO: 725338
accuccaaugcuuuaacaa

SEQ ID NO: 725340 - RNA, 19 nt, Artificial Sequence
  Description of Artificial Sequence: Synthetic oligonucleotide
  Sense strand starting at position 1096 of SEQ ID NO: 586537
uaaagcauuggaggucauu

SEQ ID NO: 725341 - RNA, 19 nt, Artificial Sequence
  Description of Artificial Sequence: Synthetic oligonucleotide
  Antisense strand to SEQ ID NO: 725340
aaugaccuccaaugcuuua

SEQ ID NO: 725342 - RNA, 19 nt, Artificial Sequence
  Description of Artificial Sequence: Synthetic oligonucleotide
  Sense strand starting at position 1342 of SEQ ID NO: 586537
cuagguacuguagggaaua

SEQ ID NO: 725343 - RNA, 19 nt, Artificial Sequence
  Description of Artificial Sequence: Synthetic oligonucleotide
  Antisense strand to SEQ ID NO: 725342
uauucccuacaguaccuag

SEQ ID NO: 725344 - RNA, 19 nt, Artificial Sequence
  Description of Artificial Sequence: Synthetic oligonucleotide
  Sense strand starting at position 1573 of SEQ ID NO: 586537
gaaaucagugaugguguca

SEQ ID NO: 725345 - RNA, 19 nt, Artificial Sequence
  Description of Artificial Sequence: Synthetic oligonucleotide
  Antisense strand to SEQ ID NO: 725344
ugacaccaucacugauuuc

SEQ ID NO: 725346 - RNA, 19 nt, Artificial Sequence
  Description of Artificial Sequence: Synthetic oligonucleotide
  Sense strand starting at position 1588 of SEQ ID NO: 586537
gucagacauuagguaacau

SEQ ID NO: 725347 - RNA, 19 nt, Artificial Sequence
  Description of Artificial Sequence: Synthetic oligonucleotide
  Antisense strand to SEQ ID NO: 725346
auguuaccuaaugucugac

SEQ ID NO: 725348 - RNA, 19 nt, Artificial Sequence
  Description of Artificial Sequence: Synthetic oligonucleotide
  Sense strand starting at position 1659 of SEQ ID NO: 586537
gcauuaagguaucucagaa

SEQ ID NO: 725349 - RNA, 19 nt, Artificial Sequence
  Description of Artificial Sequence: Synthetic oligonucleotide
  Antisense strand to SEQ ID NO: 725348
uucugagauaccuuaaugc

SEQ ID NO: 725350 - RNA, 19 nt, Artificial Sequence
  Description of Artificial Sequence: Synthetic oligonucleotide
  Sense strand starting at position 1989 of SEQ ID NO: 586537
gcagaaguuaaguggagau

SEQ ID NO: 725351 - RNA, 19 nt, Artificial Sequence
  Description of Artificial Sequence: Synthetic oligonucleotide
  Antisense strand to SEQ ID NO: 725350
aucuccacuuaacuucugc

SEQ ID NO: 725352 - RNA, 19 nt, Artificial Sequence
  Description of Artificial Sequence: Synthetic oligonucleotide
  Sense strand starting at position 2091 of SEQ ID NO: 586537
aggcaucaagcaugugaga

SEQ ID NO: 725353 - RNA, 19 nt, Artificial Sequence
  Description of Artificial Sequence: Synthetic oligonucleotide
  Antisense strand to SEQ ID NO: 725352
ucucacaugcuugaugccu

SEQ ID NO: 725354 - RNA, 19 nt, Artificial Sequence
  Description of Artificial Sequence: Synthetic oligonucleotide
  Sense strand starting at position 2093 of SEQ ID NO: 586537
gcaucaagcaugugagaua

SEQ ID NO: 725355 - RNA, 19 nt, Artificial Sequence
  Description of Artificial Sequence: Synthetic oligonucleotide
  Antisense strand to SEQ ID NO: 725354
uaucucacaugcuugaugc

SEQ ID NO: 725356 - RNA, 19 nt, Artificial Sequence
  Description of Artificial Sequence: Synthetic oligonucleotide
  Sense strand starting at position 2104 of SEQ ID NO: 586537
gugagauaaugugucaguc

SEQ ID NO: 725357 - RNA, 19 nt, Artificial Sequence
  Description of Artificial Sequence: Synthetic oligonucleotide
  Antisense strand to SEQ ID NO: 725356
gacugacacauuaucucac

SEQ ID NO: 725358 - RNA, 19 nt, Artificial Sequence
  Description of Artificial Sequence: Synthetic oligonucleotide
  Sense strand starting at position 2149 of SEQ ID NO: 586537
cuguguauccaccauuguu

SEQ ID NO: 725359 - RNA, 19 nt, Artificial Sequence
  Description of Artificial Sequence: Synthetic oligonucleotide
  Antisense strand to SEQ ID NO: 725358
aacaaugguggauacacag

SEQ ID NO: 725360 - RNA, 19 nt, Artificial Sequence
  Description of Artificial Sequence: Synthetic oligonucleotide
  Sense strand starting at position 2379 of SEQ ID NO: 586537
gccuaacaaaggugugauu

SEQ ID NO: 725361 - RNA, 19 nt, Artificial Sequence
  Description of Artificial Sequence: Synthetic oligonucleotide
  Antisense strand to SEQ ID NO: 725360
aaucacaccuuuguuaggc

SEQ ID NO: 725362 - RNA, 19 nt, Artificial Sequence
  Description of Artificial Sequence: Synthetic oligonucleotide
  Sense strand starting at position 2382 of SEQ ID NO: 586537
uaacaaaggugugauuuga

SEQ ID NO: 725363 - RNA, 19 nt, Artificial Sequence
  Description of Artificial Sequence: Synthetic oligonucleotide
  Antisense strand to SEQ ID NO: 725362
ucaaaucacaccuuuguua

SEQ ID NO: 725364 - RNA, 19 nt, Artificial Sequence
  Description of Artificial Sequence: Synthetic oligonucleotide
  Sense strand starting at position 2433 of SEQ ID NO: 586537
guuguagguacacaguaaa

SEQ ID NO: 725365 - RNA, 19 nt, Artificial Sequence
  Description of Artificial Sequence: Synthetic oligonucleotide
  Antisense strand to SEQ ID NO: 725364
uuuacuguguaccuacaac

SEQ ID NO: 725366 - RNA, 19 nt, Artificial Sequence
  Description of Artificial Sequence: Synthetic oligonucleotide
  Sense strand starting at position 2455 of SEQ ID NO: 586537
cugugugaugaauacugua

SEQ ID NO: 725367 - RNA, 19 nt, Artificial Sequence
  Description of Artificial Sequence: Synthetic oligonucleotide
  Antisense strand to SEQ ID NO: 725366
uacaguauucaucacacag

SEQ ID NO: 725368 - RNA, 19 nt, Artificial Sequence
  Description of Artificial Sequence: Synthetic oligonucleotide
  Sense strand starting at position 2498 of SEQ ID NO: 586537
caauauuguguuuaugaga

SEQ ID NO: 725369 - RNA, 19 nt, Artificial Sequence
  Description of Artificial Sequence: Synthetic oligonucleotide
  Antisense strand to SEQ ID NO: 725368
ucucauaaacacaauauug

SEQ ID NO: 725370 - RNA, 19 nt, Artificial Sequence
  Description of Artificial Sequence: Synthetic oligonucleotide
  Sense strand starting at position 2621 of SEQ ID NO: 586537
gacucauacugcuugggua

SEQ ID NO: 725371 - RNA, 19 nt, Artificial Sequence
  Description of Artificial Sequence: Synthetic oligonucleotide
  Antisense strand to SEQ ID NO: 725370
uacccaagcaguaugaguc

SEQ ID NO: 725372 - RNA, 19 nt, Artificial Sequence
  Description of Artificial Sequence: Synthetic oligonucleotide
  Sense strand starting at position 2622 of SEQ ID NO: 586537
acucauacugcuuggguaa

SEQ ID NO: 725373 - RNA, 19 nt, Artificial Sequence
  Description of Artificial Sequence: Synthetic oligonucleotide
  Antisense strand to SEQ ID NO: 725372
uuacccaagcaguaugagu

SEQ ID NO: 725374 - RNA, 19 nt, Artificial Sequence
  Description of Artificial Sequence: Synthetic oligonucleotide
  Sense strand starting at position 2625 of SEQ ID NO: 586537
cauacugcuuggguaagaa

SEQ ID NO: 725375 - RNA, 19 nt, Artificial Sequence
  Description of Artificial Sequence: Synthetic oligonucleotide
  Antisense strand to SEQ ID NO: 725374
uucuuacccaagcaguaug

SEQ ID NO: 725376 - RNA, 19 nt, Artificial Sequence
  Description of Artificial Sequence: Synthetic oligonucleotide
  Sense strand starting at position 2633 of SEQ ID NO: 586537
uuggguaagaaauguuaag

SEQ ID NO: 725377 - RNA, 19 nt, Artificial Sequence
  Description of Artificial Sequence: Synthetic oligonucleotide
  Antisense strand to SEQ ID NO: 725376
cuuaacauuucuuacccaa

SEQ ID NO: 725378 - RNA, 19 nt, Artificial Sequence
  Description of Artificial Sequence: Synthetic oligonucleotide
  Sense strand starting at position 2954 of SEQ ID NO: 586537
caaauuaaacguugaagga

SEQ ID NO: 725379 - RNA, 19 nt, Artificial Sequence
  Description of Artificial Sequence: Synthetic oligonucleotide
  Antisense strand to SEQ ID NO: 725378
uccuucaacguuuaauuug

SEQ ID NO: 725380 - RNA, 19 nt, Artificial Sequence
  Description of Artificial Sequence: Synthetic oligonucleotide
  Sense strand starting at position 3183 of SEQ ID NO: 586537
guuuaauagcuguaucuuc

SEQ ID NO: 725381 - RNA, 19 nt, Artificial Sequence
  Description of Artificial Sequence: Synthetic oligonucleotide
  Antisense strand to SEQ ID NO: 725380
gaagauacagcuauuaaac

SEQ ID NO: 725382 - RNA, 19 nt, Artificial Sequence
  Description of Artificial Sequence: Synthetic oligonucleotide
  Sense strand starting at position 3206 of SEQ ID NO: 586537
ucauaugguugguucuuaa

SEQ ID NO: 725383 - RNA, 19 nt, Artificial Sequence
  Description of Artificial Sequence: Synthetic oligonucleotide
  Antisense strand to SEQ ID NO: 725382
uuaagaaccaaccauauga

SEQ ID NO: 725384 - RNA, 19 nt, Artificial Sequence
  Description of Artificial Sequence: Synthetic oligonucleotide
  Sense strand starting at position 3309 of SEQ ID NO: 586537
cuucgacccgcucauuaaa

SEQ ID NO: 725385 - RNA, 19 nt, Artificial Sequence
  Description of Artificial Sequence: Synthetic oligonucleotide
  Antisense strand to SEQ ID NO: 725384
uuuaaugagcgggucgaag

SEQ ID NO: 725386 - RNA, 19 nt, Artificial Sequence
  Description of Artificial Sequence: Synthetic oligonucleotide
  Sense strand starting at position 3327 of SEQ ID NO: 586537
aagaguggucaggaugcaa

SEQ ID NO: 725387 - RNA, 19 nt, Artificial Sequence
  Description of Artificial Sequence: Synthetic oligonucleotide
  Antisense strand to SEQ ID NO: 725386
uugcauccugaccacucuu

SEQ ID NO: 725388 - RNA, 19 nt, Artificial Sequence
  Description of Artificial Sequence: Synthetic oligonucleotide
  Sense strand starting at position 3430 of SEQ ID NO: 586537
uacuguguguuuccuauuu

SEQ ID NO: 725389 - RNA, 19 nt, Artificial Sequence
  Description of Artificial Sequence: Synthetic oligonucleotide
  Antisense strand to SEQ ID NO: 725388
aaauaggaaacacacagua

SEQ ID NO: 725390 - RNA, 19 nt, Artificial Sequence
  Description of Artificial Sequence: Synthetic oligonucleotide
  Sense strand starting at position 3467 of SEQ ID NO: 586537
auuccuaauggucagcaga

SEQ ID NO: 725391 - RNA, 19 nt, Artificial Sequence
  Description of Artificial Sequence: Synthetic oligonucleotide
  Antisense strand to SEQ ID NO: 725390
ucugcugaccauuaggaau

SEQ ID NO: 725392 - RNA, 19 nt, Artificial Sequence
  Description of Artificial Sequence: Synthetic oligonucleotide
  Sense strand starting at position 3469 of SEQ ID NO: 586537
uccuaauggucagcagaua

SEQ ID NO: 725393 - RNA, 19 nt, Artificial Sequence
  Description of Artificial Sequence: Synthetic oligonucleotide
  Antisense strand to SEQ ID NO: 725392
uaucugcugaccauuagga

SEQ ID NO: 725394 - RNA, 19 nt, Artificial Sequence
  Description of Artificial Sequence: Synthetic oligonucleotide
  Sense strand starting at position 3470 of SEQ ID NO: 586537
ccuaauggucagcagauaa

SEQ ID NO: 725395 - RNA, 19 nt, Artificial Sequence
  Description of Artificial Sequence: Synthetic oligonucleotide
  Antisense strand to SEQ ID NO: 725394
uuaucugcugaccauuagg

SEQ ID NO: 725396 - RNA, 19 nt, Artificial Sequence
  Description of Artificial Sequence: Synthetic oligonucleotide
  Sense strand starting at position 3973 of SEQ ID NO: 586537
ggugggagauuggugugaa

SEQ ID NO: 725397 - RNA, 19 nt, Artificial Sequence
  Description of Artificial Sequence: Synthetic oligonucleotide
  Antisense strand to SEQ ID NO: 725396
uucacaccaaucucccacc

SEQ ID NO: 725398 - RNA, 19 nt, Artificial Sequence
  Description of Artificial Sequence: Synthetic oligonucleotide
  Sense strand starting at position 55 of SEQ ID NO: 586538
gcaggaaggguguaauugu

SEQ ID NO: 725399 - RNA, 19 nt, Artificial Sequence
  Description of Artificial Sequence: Synthetic oligonucleotide
  Antisense strand to SEQ ID NO: 725398
acaauuacacccuuccugc

SEQ ID NO: 725400 - RNA, 19 nt, Artificial Sequence
  Description of Artificial Sequence: Synthetic oligonucleotide
  Sense strand starting at position 102 of SEQ ID NO: 586538
agaacuuagugauuaugua

SEQ ID NO: 725401 - RNA, 19 nt, Artificial Sequence
  Description of Artificial Sequence: Synthetic oligonucleotide
  Antisense strand to SEQ ID NO: 725400
uacauaaucacuaaguucu

SEQ ID NO: 725402 - RNA, 19 nt, Artificial Sequence
  Description of Artificial Sequence: Synthetic oligonucleotide
  Sense strand starting at position 103 of SEQ ID NO: 586538
gaacuuagugauuauguau

SEQ ID NO: 725403 - RNA, 19 nt, Artificial Sequence
  Description of Artificial Sequence: Synthetic oligonucleotide
  Antisense strand to SEQ ID NO: 725402
auacauaaucacuaaguuc

SEQ ID NO: 725404 - RNA, 19 nt, Artificial Sequence
  Description of Artificial Sequence: Synthetic oligonucleotide
  Sense strand starting at position 306 of SEQ ID NO: 586538
uacugaaauggguguaaag

SEQ ID NO: 725405 - RNA, 19 nt, Artificial Sequence
  Description of Artificial Sequence: Synthetic oligonucleotide
  Antisense strand to SEQ ID NO: 725404
cuuuacacccauuucagua

SEQ ID NO: 725406 - RNA, 19 nt, Artificial Sequence
  Description of Artificial Sequence: Synthetic oligonucleotide
  Sense strand starting at position 308 of SEQ ID NO: 586538
cugaaauggguguaaagcu

SEQ ID NO: 725407 - RNA, 19 nt, Artificial Sequence
  Description of Artificial Sequence: Synthetic oligonucleotide
  Antisense strand to SEQ ID NO: 725406
agcuuuacacccauuucag

SEQ ID NO: 725408 - RNA, 19 nt, Artificial Sequence
  Description of Artificial Sequence: Synthetic oligonucleotide
  Sense strand starting at position 706 of SEQ ID NO: 586538
gucacuuaaguguauaaau

SEQ ID NO: 725409 - RNA, 19 nt, Artificial Sequence
  Description of Artificial Sequence: Synthetic oligonucleotide
  Antisense strand to SEQ ID NO: 725408
auuuauacacuuaagugac

SEQ ID NO: 725410 - RNA, 19 nt, Artificial Sequence
  Description of Artificial Sequence: Synthetic oligonucleotide
  Sense strand starting at position 845 of SEQ ID NO: 586538
cccauaugggaagguguau

SEQ ID NO: 725411 - RNA, 19 nt, Artificial Sequence
  Description of Artificial Sequence: Synthetic oligonucleotide
  Antisense strand to SEQ ID NO: 725410
auacaccuucccauauggg

SEQ ID NO: 725412 - RNA, 19 nt, Artificial Sequence
  Description of Artificial Sequence: Synthetic oligonucleotide
  Sense strand starting at position 884 of SEQ ID NO: 586538
ugccaaccuguggaauauu

SEQ ID NO: 725413 - RNA, 19 nt, Artificial Sequence
  Description of Artificial Sequence: Synthetic oligonucleotide
  Antisense strand to SEQ ID NO: 725412
aauauuccacagguuggca

SEQ ID NO: 725414 - RNA, 19 nt, Artificial Sequence
  Description of Artificial Sequence: Synthetic oligonucleotide
  Sense strand starting at position 961 of SEQ ID NO: 586538
aaucuaggcggugaucuau

SEQ ID NO: 725415 - RNA, 19 nt, Artificial Sequence
  Description of Artificial Sequence: Synthetic oligonucleotide
  Antisense strand to SEQ ID NO: 725414
auagaucaccgccuagauu

SEQ ID NO: 725416 - RNA, 19 nt, Artificial Sequence
  Description of Artificial Sequence: Synthetic oligonucleotide
  Sense strand starting at position 967 of SEQ ID NO: 586538
ggcggugaucuauaauuac

SEQ ID NO: 725417 - RNA, 19 nt, Artificial Sequence
  Description of Artificial Sequence: Synthetic oligonucleotide
  Antisense strand to SEQ ID NO: 725416
guaauuauagaucaccgcc

SEQ ID NO: 725418 - RNA, 19 nt, Artificial Sequence
  Description of Artificial Sequence: Synthetic oligonucleotide
  Sense strand starting at position 970 of SEQ ID NO: 586538
ggugaucuauaauuacgau

SEQ ID NO: 725419 - RNA, 19 nt, Artificial Sequence
  Description of Artificial Sequence: Synthetic oligonucleotide
  Antisense strand to SEQ ID NO: 725418
aucguaauuauagaucacc

SEQ ID NO: 725420 - RNA, 19 nt, Artificial Sequence
  Description of Artificial Sequence: Synthetic oligonucleotide
  Sense strand starting at position 985 of SEQ ID NO: 586538
cgauuaagcccacauggga

SEQ ID NO: 725421 - RNA, 19 nt, Artificial Sequence
  Description of Artificial Sequence: Synthetic oligonucleotide
  Antisense strand to SEQ ID NO: 725420
ucccaugugggcuuaaucg

SEQ ID NO: 725422 - RNA, 19 nt, Artificial Sequence
  Description of Artificial Sequence: Synthetic oligonucleotide
  Sense strand starting at position 1005 of SEQ ID NO: 586538
gugggaucuaagugagaac

SEQ ID NO: 725423 - RNA, 19 nt, Artificial Sequence
  Description of Artificial Sequence: Synthetic oligonucleotide
  Antisense strand to SEQ ID NO: 725422
guucucacuuagaucccac

SEQ ID NO: 725424 - RNA, 19 nt, Artificial Sequence
  Description of Artificial Sequence: Synthetic oligonucleotide
  Sense strand starting at position 1017 of SEQ ID NO: 586538
ugagaacuuuaagccaauu

SEQ ID NO: 725425 - RNA, 19 nt, Artificial Sequence
  Description of Artificial Sequence: Synthetic oligonucleotide
  Antisense strand to SEQ ID NO: 725424
aauuggcuuaaaguucuca

SEQ ID NO: 725426 - RNA, 19 nt, Artificial Sequence
  Description of Artificial Sequence: Synthetic oligonucleotide
  Sense strand starting at position 1121 of SEQ ID NO: 586538
auaauuacacguuaaguga

SEQ ID NO: 725427 - RNA, 19 nt, Artificial Sequence
  Description of Artificial Sequence: Synthetic oligonucleotide
  Antisense strand to SEQ ID NO: 725426
ucacuuaacguguaauuau

SEQ ID NO: 725428 - RNA, 19 nt, Artificial Sequence
  Description of Artificial Sequence: Synthetic oligonucleotide
  Sense strand starting at position 1134 of SEQ ID NO: 586538
aagugauacugccuggaga

SEQ ID NO: 725429 - RNA, 19 nt, Artificial Sequence
  Description of Artificial Sequence: Synthetic oligonucleotide
  Antisense strand to SEQ ID NO: 725428
ucuccaggcaguaucacuu

SEQ ID NO: 725430 - RNA, 19 nt, Artificial Sequence
  Description of Artificial Sequence: Synthetic oligonucleotide
  Sense strand starting at position 1135 of SEQ ID NO: 586538
agugauacugccuggagag

SEQ ID NO: 725431 - RNA, 19 nt, Artificial Sequence
  Description of Artificial Sequence: Synthetic oligonucleotide
  Antisense strand to SEQ ID NO: 725430
cucuccaggcaguaucacu

SEQ ID NO: 725432 - RNA, 19 nt, Artificial Sequence
  Description of Artificial Sequence: Synthetic oligonucleotide
  Sense strand starting at position 1137 of SEQ ID NO: 586538
ugauacugccuggagagua

SEQ ID NO: 725433 - RNA, 19 nt, Artificial Sequence
  Description of Artificial Sequence: Synthetic oligonucleotide
  Antisense strand to SEQ ID NO: 725432
uacucuccaggcaguauca

SEQ ID NO: 725434 - RNA, 19 nt, Artificial Sequence
  Description of Artificial Sequence: Synthetic oligonucleotide
  Sense strand starting at position 1208 of SEQ ID NO: 586538
agcucaucuccuugagaaa

SEQ ID NO: 725435 - RNA, 19 nt, Artificial Sequence
  Description of Artificial Sequence: Synthetic oligonucleotide
  Antisense strand to SEQ ID NO: 725434
uuucucaaggagaugagcu

SEQ ID NO: 725436 - RNA, 19 nt, Artificial Sequence
  Description of Artificial Sequence: Synthetic oligonucleotide
  Sense strand starting at position 1209 of SEQ ID NO: 586538
gcucaucuccuugagaaac

SEQ ID NO: 725437 - RNA, 19 nt, Artificial Sequence
  Description of Artificial Sequence: Synthetic oligonucleotide
  Antisense strand to SEQ ID NO: 725436
guuucucaaggagaugagc

SEQ ID NO: 725438 - RNA, 19 nt, Artificial Sequence
  Description of Artificial Sequence: Synthetic oligonucleotide
  Sense strand starting at position 1282 of SEQ ID NO: 586538
acauuuacauguguguuau

SEQ ID NO: 725439 - RNA, 19 nt, Artificial Sequence
  Description of Artificial Sequence: Synthetic oligonucleotide
  Antisense strand to SEQ ID NO: 725438
auaacacacauguaaaugu

SEQ ID NO: 725440 - RNA, 19 nt, Artificial Sequence
  Description of Artificial Sequence: Synthetic oligonucleotide
  Sense strand starting at position 1283 of SEQ ID NO: 586538
cauuuacauguguguuaug

SEQ ID NO: 725441 - RNA, 19 nt, Artificial Sequence
  Description of Artificial Sequence: Synthetic oligonucleotide
  Antisense strand to SEQ ID NO: 725440
cauaacacacauguaaaug

SEQ ID NO: 725442 - RNA, 19 nt, Artificial Sequence
  Description of Artificial Sequence: Synthetic oligonucleotide
  Sense strand starting at position 1305 of SEQ ID NO: 586538
ucacaucugccugacaaug

SEQ ID NO: 725443 - RNA, 19 nt, Artificial Sequence
  Description of Artificial Sequence: Synthetic oligonucleotide
  Antisense strand to SEQ ID NO: 725442
cauugucaggcagauguga

SEQ ID NO: 725444 - RNA, 19 nt, Artificial Sequence
  Description of Artificial Sequence: Synthetic oligonucleotide
  Sense strand starting at position 1324 of SEQ ID NO: 586538
cuagacuucccacauguuu

SEQ ID NO: 725445 - RNA, 19 nt, Artificial Sequence
  Description of Artificial Sequence: Synthetic oligonucleotide
  Antisense strand to SEQ ID NO: 725444
aaacaugugggaagucuag

SEQ ID NO: 725446 - RNA, 19 nt, Artificial Sequence
  Description of Artificial Sequence: Synthetic oligonucleotide
  Sense strand starting at position 1476 of SEQ ID NO: 586538
uuuagaagguaggucuaua

SEQ ID NO: 725447 - RNA, 19 nt, Artificial Sequence
  Description of Artificial Sequence: Synthetic oligonucleotide
  Antisense strand to SEQ ID NO: 725446
uauagaccuaccuucuaaa

SEQ ID NO: 725448 - RNA, 19 nt, Artificial Sequence
  Description of Artificial Sequence: Synthetic oligonucleotide
  Sense strand starting at position 1507 of SEQ ID NO: 586538
ucuguaggcacagaguaaa

SEQ ID NO: 725449 - RNA, 19 nt, Artificial Sequence
  Description of Artificial Sequence: Synthetic oligonucleotide
  Antisense strand to SEQ ID NO: 725448
uuuacucugugccuacaga

SEQ ID NO: 725450 - RNA, 19 nt, Artificial Sequence
  Description of Artificial Sequence: Synthetic oligonucleotide
  Sense strand starting at position 1600 of SEQ ID NO: 586538
cuauuagaauaggcuuaca

SEQ ID NO: 725451 - RNA, 19 nt, Artificial Sequence
  Description of Artificial Sequence: Synthetic oligonucleotide
  Antisense strand to SEQ ID NO: 725450
uguaagccuauucuaauag

SEQ ID NO: 725452 - RNA, 19 nt, Artificial Sequence
  Description of Artificial Sequence: Synthetic oligonucleotide
  Sense strand starting at position 1611 of SEQ ID NO: 586538
ggcuuacaaucaguacaca

SEQ ID NO: 725453 - RNA, 19 nt, Artificial Sequence
  Description of Artificial Sequence: Synthetic oligonucleotide
  Antisense strand to SEQ ID NO: 725452
uguguacugauuguaagcc

SEQ ID NO: 725454 - RNA, 19 nt, Artificial Sequence
  Description of Artificial Sequence: Synthetic oligonucleotide
  Sense strand starting at position 1744 of SEQ ID NO: 586538
cccuaagcagacugaauau

SEQ ID NO: 725455 - RNA, 19 nt, Artificial Sequence
  Description of Artificial Sequence: Synthetic oligonucleotide
  Antisense strand to SEQ ID NO: 725454
auauucagucugcuuaggg

SEQ ID NO: 725456 - RNA, 19 nt, Artificial Sequence
  Description of Artificial Sequence: Synthetic oligonucleotide
  Sense strand starting at position 1845 of SEQ ID NO: 586538
caauuuccuuaagagaggu

SEQ ID NO: 725457 - RNA, 19 nt, Artificial Sequence
  Description of Artificial Sequence: Synthetic oligonucleotide
  Antisense strand to SEQ ID NO: 725456
accucucuuaaggaaauug

SEQ ID NO: 725458 - RNA, 19 nt, Artificial Sequence
  Description of Artificial Sequence: Synthetic oligonucleotide
  Sense strand starting at position 1934 of SEQ ID NO: 586538
cuuaccugagcugaucaua

SEQ ID NO: 725459 - RNA, 19 nt, Artificial Sequence
  Description of Artificial Sequence: Synthetic oligonucleotide
  Antisense strand to SEQ ID NO: 725458
uaugaucagcucagguaag

SEQ ID NO: 725460 - RNA, 19 nt, Artificial Sequence
  Description of Artificial Sequence: Synthetic oligonucleotide
  Sense strand starting at position 2153 of SEQ ID NO: 586538
gaggaucaacuucgacaau

SEQ ID NO: 725461 - RNA, 19 nt, Artificial Sequence
  Description of Artificial Sequence: Synthetic oligonucleotide
  Antisense strand to SEQ ID NO: 725460
auugucgaaguugauccuc

SEQ ID NO: 725462 - RNA, 19 nt, Artificial Sequence
  Description of Artificial Sequence: Synthetic oligonucleotide
  Sense strand starting at position 3438 of SEQ ID NO: 586538
gcaccuguugauggauaaa

SEQ ID NO: 725463 - RNA, 19 nt, Artificial Sequence
  Description of Artificial Sequence: Synthetic oligonucleotide
  Antisense strand to SEQ ID NO: 725462
uuuauccaucaacaggugc

SEQ ID NO: 725464 - RNA, 19 nt, Artificial Sequence
  Description of Artificial Sequence: Synthetic oligonucleotide
  Sense strand starting at position 3586 of SEQ ID NO: 586538
uguggcguucagcuauaca

SEQ ID NO: 725465 - RNA, 19 nt, Artificial Sequence
  Description of Artificial Sequence: Synthetic oligonucleotide
  Antisense strand to SEQ ID NO: 725464
uguauagcugaacgccaca

SEQ ID NO: 725466 - RNA, 19 nt, Artificial Sequence
  Description of Artificial Sequence: Synthetic oligonucleotide
  Sense strand starting at position 3707 of SEQ ID NO: 586538
ugucacuuccaagagcaaa

SEQ ID NO: 725467 - RNA, 19 nt, Artificial Sequence
  Description of Artificial Sequence: Synthetic oligonucleotide
  Antisense strand to SEQ ID NO: 725466
uuugcucuuggaagugaca

SEQ ID NO: 725468 - RNA, 19 nt, Artificial Sequence
  Description of Artificial Sequence: Synthetic oligonucleotide
  Sense strand starting at position 3736 of SEQ ID NO: 586538
auaaucuacuagucaugga

SEQ ID NO: 725469 - RNA, 19 nt, Artificial Sequence
  Description of Artificial Sequence: Synthetic oligonucleotide
  Antisense strand to SEQ ID NO: 725468
uccaugacuaguagauuau

SEQ ID NO: 725470 - RNA, 19 nt, Artificial Sequence
  Description of Artificial Sequence: Synthetic oligonucleotide
  Sense strand starting at position 3773 of SEQ ID NO: 586538
aaacuaaaucagcgaggaa

SEQ ID NO: 725471 - RNA, 19 nt, Artificial Sequence
  Description of Artificial Sequence: Synthetic oligonucleotide
  Antisense strand to SEQ ID NO: 725470
uuccucgcugauuuaguuu

SEQ ID NO: 725472 - RNA, 19 nt, Artificial Sequence
  Description of Artificial Sequence: Synthetic oligonucleotide
  Sense strand starting at position 3877 of SEQ ID NO: 586538
gagggaucuuggucaacuc

SEQ ID NO: 725473 - RNA, 19 nt, Artificial Sequence
  Description of Artificial Sequence: Synthetic oligonucleotide
  Antisense strand to SEQ ID NO: 725472
gaguugaccaagaucccuc

SEQ ID NO: 725474 - RNA, 19 nt, Artificial Sequence
  Description of Artificial Sequence: Synthetic oligonucleotide
  Sense strand starting at position 3884 of SEQ ID NO: 586538
cuuggucaacuccagagua

SEQ ID NO: 725475 - RNA, 19 nt, Artificial Sequence
  Description of Artificial Sequence: Synthetic oligonucleotide
  Antisense strand to SEQ ID NO: 725474
uacucuggaguugaccaag

SEQ ID NO: 725476 - RNA, 19 nt, Artificial Sequence
  Description of Artificial Sequence: Synthetic oligonucleotide
  Sense strand starting at position 3886 of SEQ ID NO: 586538
uggucaacuccagaguaug

SEQ ID NO: 725477 - RNA, 19 nt, Artificial Sequence
  Description of Artificial Sequence: Synthetic oligonucleotide
  Antisense strand to SEQ ID NO: 725476
cauacucuggaguugacca

SEQ ID NO: 725478 - RNA, 19 nt, Artificial Sequence
  Description of Artificial Sequence: Synthetic oligonucleotide
  Sense strand starting at position 75 of SEQ ID NO: 586539
agggaauucuaccacaauc

SEQ ID NO: 725479 - RNA, 19 nt, Artificial Sequence
  Description of Artificial Sequence: Synthetic oligonucleotide
  Antisense strand to SEQ ID NO: 725478
gauugugguagaauucccu

SEQ ID NO: 725480 - RNA, 19 nt, Artificial Sequence
  Description of Artificial Sequence: Synthetic oligonucleotide
  Sense strand starting at position 532 of SEQ ID NO: 586539
auaauaucuucuucggcaa

SEQ ID NO: 725481 - RNA, 19 nt, Artificial Sequence
  Description of Artificial Sequence: Synthetic oligonucleotide
  Antisense strand to SEQ ID NO: 725480
uugccgaagaagauauuau

SEQ ID NO: 725482 - RNA, 19 nt, Artificial Sequence
  Description of Artificial Sequence: Synthetic oligonucleotide
  Sense strand starting at position 535 of SEQ ID NO: 586539
auaucuucuucggcaacua

SEQ ID NO: 725483 - RNA, 19 nt, Artificial Sequence
  Description of Artificial Sequence: Synthetic oligonucleotide
  Antisense strand to SEQ ID NO: 725482
uaguugccgaagaagauau

SEQ ID NO: 725484 - RNA, 19 nt, Artificial Sequence
  Description of Artificial Sequence: Synthetic oligonucleotide
  Sense strand starting at position 670 of SEQ ID NO: 586539
cgcugaaauucggcaggga

SEQ ID NO: 725485 - RNA, 19 nt, Artificial Sequence
  Description of Artificial Sequence: Synthetic oligonucleotide
  Antisense strand to SEQ ID NO: 725484
ucccugccgaauuucagcg

SEQ ID NO: 725486 - RNA, 19 nt, Artificial Sequence
  Description of Artificial Sequence: Synthetic oligonucleotide
  Sense strand starting at position 671 of SEQ ID NO: 586539
gcugaaauucggcagggaa

SEQ ID NO: 725487 - RNA, 19 nt, Artificial Sequence
  Description of Artificial Sequence: Synthetic oligonucleotide
  Antisense strand to SEQ ID NO: 725486
uucccugccgaauuucagc

SEQ ID NO: 725488 - RNA, 19 nt, Artificial Sequence
  Description of Artificial Sequence: Synthetic oligonucleotide
  Sense strand starting at position 673 of SEQ ID NO: 586539
ugaaauucggcagggaaga

SEQ ID NO: 725489 - RNA, 19 nt, Artificial Sequence
  Description of Artificial Sequence: Synthetic oligonucleotide
  Antisense strand to SEQ ID NO: 725488
ucuucccugccgaauuuca

SEQ ID NO: 725490 - RNA, 19 nt, Artificial Sequence
  Description of Artificial Sequence: Synthetic oligonucleotide
  Sense strand starting at position 1194 of SEQ ID NO: 586539
gggcauugcaugggacaca

SEQ ID NO: 725491 - RNA, 19 nt, Artificial Sequence
  Description of Artificial Sequence: Synthetic oligonucleotide
  Antisense strand to SEQ ID NO: 725490
ugugucccaugcaaugccc

SEQ ID NO: 725492 - RNA, 19 nt, Artificial Sequence
  Description of Artificial Sequence: Synthetic oligonucleotide
  Sense strand starting at position 1239 of SEQ ID NO: 586539
agcgcaaauccagagcuuu

SEQ ID NO: 725493 - RNA, 19 nt, Artificial Sequence
  Description of Artificial Sequence: Synthetic oligonucleotide
  Antisense strand to SEQ ID NO: 725492
aaagcucuggauuugcgcu

SEQ ID NO: 725494 - RNA, 19 nt, Artificial Sequence
  Description of Artificial Sequence: Synthetic oligonucleotide
  Sense strand starting at position 2278 of SEQ ID NO: 586539
cccugugacagguguucuu

SEQ ID NO: 725495 - RNA, 19 nt, Artificial Sequence
  Description of Artificial Sequence: Synthetic oligonucleotide
  Antisense strand to SEQ ID NO: 725494
aagaacaccugucacaggg

SEQ ID NO: 725496 - RNA, 19 nt, Artificial Sequence
  Description of Artificial Sequence: Synthetic oligonucleotide
  Sense strand starting at position 2291 of SEQ ID NO: 586539
guucuuggccucugucuua

SEQ ID NO: 725497 - RNA, 19 nt, Artificial Sequence
  Description of Artificial Sequence: Synthetic oligonucleotide
  Antisense strand to SEQ ID NO: 725496
uaagacagaggccaagaac

SEQ ID NO: 725498 - RNA, 19 nt, Artificial Sequence
  Description of Artificial Sequence: Synthetic oligonucleotide
  Sense strand starting at position 2401 of SEQ ID NO: 586539
cguaaugacaaaugcaaag

SEQ ID NO: 725499 - RNA, 19 nt, Artificial Sequence
  Description of Artificial Sequence: Synthetic oligonucleotide
  Antisense strand to SEQ ID NO: 725498
cuuugcauuugucauuacg

SEQ ID NO: 725500 - RNA, 19 nt, Artificial Sequence
  Description of Artificial Sequence: Synthetic oligonucleotide
  Sense strand starting at position 2436 of SEQ ID NO: 586539
gaauaucuauuguugggca

SEQ ID NO: 725501 - RNA, 19 nt, Artificial Sequence
  Description of Artificial Sequence: Synthetic oligonucleotide
  Antisense strand to SEQ ID NO: 725500
ugcccaacaauagauauuc

SEQ ID NO: 725502 - RNA, 19 nt, Artificial Sequence
  Description of Artificial Sequence: Synthetic oligonucleotide
  Sense strand starting at position 2438 of SEQ ID NO: 586539
auaucuauuguugggcaaa

SEQ ID NO: 725503 - RNA, 19 nt, Artificial Sequence
  Description of Artificial Sequence: Synthetic oligonucleotide
  Antisense strand to SEQ ID NO: 725502
uuugcccaacaauagauau

SEQ ID NO: 725504 - RNA, 19 nt, Artificial Sequence
  Description of Artificial Sequence: Synthetic oligonucleotide
  Sense strand starting at position 2569 of SEQ ID NO: 586539
aagugaaaugcugguuacu

SEQ ID NO: 725505 - RNA, 19 nt, Artificial Sequence
  Description of Artificial Sequence: Synthetic oligonucleotide
  Antisense strand to SEQ ID NO: 725504
aguaaccagcauuucacuu

SEQ ID NO: 725506 - RNA, 19 nt, Artificial Sequence
  Description of Artificial Sequence: Synthetic oligonucleotide
  Sense strand starting at position 2571 of SEQ ID NO: 586539
gugaaaugcugguuacuau

SEQ ID NO: 725507 - RNA, 19 nt, Artificial Sequence
  Description of Artificial Sequence: Synthetic oligonucleotide
  Antisense strand to SEQ ID NO: 725506
auaguaaccagcauuucac

SEQ ID NO: 725508 - RNA, 19 nt, Artificial Sequence
  Description of Artificial Sequence: Synthetic oligonucleotide
  Sense strand starting at position 2572 of SEQ ID NO: 586539
ugaaaugcugguuacuauu

SEQ ID NO: 725509 - RNA, 19 nt, Artificial Sequence
  Description of Artificial Sequence: Synthetic oligonucleotide
  Antisense strand to SEQ ID NO: 725508
aauaguaaccagcauuuca

SEQ ID NO: 725510 - RNA, 19 nt, Artificial Sequence
  Description of Artificial Sequence: Synthetic oligonucleotide
  Sense strand starting at position 2621 of SEQ ID NO: 586539
uugugcaucuggucgacau

SEQ ID NO: 725511 - RNA, 19 nt, Artificial Sequence
  Description of Artificial Sequence: Synthetic oligonucleotide
  Antisense strand to SEQ ID NO: 725510
augucgaccagaugcacaa

SEQ ID NO: 725512 - RNA, 19 nt, Artificial Sequence
  Description of Artificial Sequence: Synthetic oligonucleotide
  Sense strand starting at position 2622 of SEQ ID NO: 586539
ugugcaucuggucgacauu

SEQ ID NO: 725513 - RNA, 19 nt, Artificial Sequence
  Description of Artificial Sequence: Synthetic oligonucleotide
  Antisense strand to SEQ ID NO: 725512
aaugucgaccagaugcaca

SEQ ID NO: 725514 - RNA, 19 nt, Artificial Sequence
  Description of Artificial Sequence: Synthetic oligonucleotide
  Sense strand starting at position 2623 of SEQ ID NO: 586539
gugcaucuggucgacauuu

SEQ ID NO: 725515 - RNA, 19 nt, Artificial Sequence
  Description of Artificial Sequence: Synthetic oligonucleotide
  Antisense strand to SEQ ID NO: 725514
aaaugucgaccagaugcac

SEQ ID NO: 725516 - RNA, 19 nt, Artificial Sequence
  Description of Artificial Sequence: Synthetic oligonucleotide
  Sense strand starting at position 2634 of SEQ ID NO: 586539
cgacauuugguuugugugu

SEQ ID NO: 725517 - RNA, 19 nt, Artificial Sequence
  Description of Artificial Sequence: Synthetic oligonucleotide
  Antisense strand to SEQ ID NO: 725516
acacacaaaccaaaugucg

SEQ ID NO: 725518 - RNA, 19 nt, Artificial Sequence
  Description of Artificial Sequence: Synthetic oligonucleotide
  Sense strand starting at position 2668 of SEQ ID NO: 586539
agaggcuuugagcacauaa

SEQ ID NO: 725519 - RNA, 19 nt, Artificial Sequence
  Description of Artificial Sequence: Synthetic oligonucleotide
  Antisense strand to SEQ ID NO: 725518
uuaugugcucaaagccucu

SEQ ID NO: 725520 - RNA, 19 nt, Artificial Sequence
  Description of Artificial Sequence: Synthetic oligonucleotide
  Sense strand starting at position 2670 of SEQ ID NO: 586539
aggcuuugagcacauaauc

SEQ ID NO: 725521 - RNA, 19 nt, Artificial Sequence
  Description of Artificial Sequence: Synthetic oligonucleotide
  Antisense strand to SEQ ID NO: 725520
gauuaugugcucaaagccu

SEQ ID NO: 725522 - RNA, 19 nt, Artificial Sequence
  Description of Artificial Sequence: Synthetic oligonucleotide
  Sense strand starting at position 2686 of SEQ ID NO: 586539
aucucuauagccugggauu

SEQ ID NO: 725523 - RNA, 19 nt, Artificial Sequence
  Description of Artificial Sequence: Synthetic oligonucleotide
  Antisense strand to SEQ ID NO: 725522
aaucccaggcuauagagau

SEQ ID NO: 725524 - RNA, 19 nt, Artificial Sequence
  Description of Artificial Sequence: Synthetic oligonucleotide
  Sense strand starting at position 2793 of SEQ ID NO: 586539
cugagaaguuaucuucuuu

SEQ ID NO: 725525 - RNA, 19 nt, Artificial Sequence
  Description of Artificial Sequence: Synthetic oligonucleotide
  Antisense strand to SEQ ID NO: 725524
aaagaagauaacuucucag

SEQ ID NO: 725526 - RNA, 19 nt, Artificial Sequence
  Description of Artificial Sequence: Synthetic oligonucleotide
  Sense strand starting at position 2827 of SEQ ID NO: 586539
ccgccuccucuagaauaaa

SEQ ID NO: 725527 - RNA, 19 nt, Artificial Sequence
  Description of Artificial Sequence: Synthetic oligonucleotide
  Antisense strand to SEQ ID NO: 725526
uuuauucuagaggaggcgg

SEQ ID NO: 725528 - RNA, 19 nt, Artificial Sequence
  Description of Artificial Sequence: Synthetic oligonucleotide
  Sense strand starting at position 2887 of SEQ ID NO: 586539
ugaguacggacuugucaaa

SEQ ID NO: 725529 - RNA, 19 nt, Artificial Sequence
  Description of Artificial Sequence: Synthetic oligonucleotide
  Antisense strand to SEQ ID NO: 725528
uuugacaaguccguacuca

SEQ ID NO: 725530 - RNA, 19 nt, Artificial Sequence
  Description of Artificial Sequence: Synthetic oligonucleotide
  Sense strand starting at position 2971 of SEQ ID NO: 586539
gccucuuggcauugauuuc

SEQ ID NO: 725531 - RNA, 19 nt, Artificial Sequence
  Description of Artificial Sequence: Synthetic oligonucleotide
  Antisense strand to SEQ ID NO: 725530
gaaaucaaugccaagaggc

SEQ ID NO: 725532 - RNA, 19 nt, Artificial Sequence
  Description of Artificial Sequence: Synthetic oligonucleotide
  Sense strand starting at position 2999 of SEQ ID NO: 586539
acuggaacuuuccagaacu

SEQ ID NO: 725533 - RNA, 19 nt, Artificial Sequence
  Description of Artificial Sequence: Synthetic oligonucleotide
  Antisense strand to SEQ ID NO: 725532
aguucuggaaaguuccagu

SEQ ID NO: 725534 - RNA, 19 nt, Artificial Sequence
  Description of Artificial Sequence: Synthetic oligonucleotide
  Sense strand starting at position 3015 of SEQ ID NO: 586539
acuggaaacuuuggacgau

SEQ ID NO: 725535 - RNA, 19 nt, Artificial Sequence
  Description of Artificial Sequence: Synthetic oligonucleotide
  Antisense strand to SEQ ID NO: 725534
aucguccaaaguuuccagu

SEQ ID NO: 725536 - RNA, 19 nt, Artificial Sequence
  Description of Artificial Sequence: Synthetic oligonucleotide
  Sense strand starting at position 3083 of SEQ ID NO: 586539
cuucucuuuccguauucca

SEQ ID NO: 725537 - RNA, 19 nt, Artificial Sequence
  Description of Artificial Sequence: Synthetic oligonucleotide
  Antisense strand to SEQ ID NO: 725536
uggaauacggaaagagaag

SEQ ID NO: 725538 - RNA, 19 nt, Artificial Sequence
  Description of Artificial Sequence: Synthetic oligonucleotide
  Sense strand starting at position 3155 of SEQ ID NO: 586539
cagaucuucuggucagaug

SEQ ID NO: 725539 - RNA, 19 nt, Artificial Sequence
  Description of Artificial Sequence: Synthetic oligonucleotide
  Antisense strand to SEQ ID NO: 725538
caucugaccagaagaucug

SEQ ID NO: 725540 - RNA, 19 nt, Artificial Sequence
  Description of Artificial Sequence: Synthetic oligonucleotide
  Sense strand starting at position 3166 of SEQ ID NO: 586539
gucagaugagcucaaagca

SEQ ID NO: 725541 - RNA, 19 nt, Artificial Sequence
  Description of Artificial Sequence: Synthetic oligonucleotide
  Antisense strand to SEQ ID NO: 725540
ugcuuugagcucaucugac

SEQ ID NO: 725542 - RNA, 19 nt, Artificial Sequence
  Description of Artificial Sequence: Synthetic oligonucleotide
  Sense strand starting at position 3461 of SEQ ID NO: 586539
aacuaauugccaggauguu

SEQ ID NO: 725543 - RNA, 19 nt, Artificial Sequence
  Description of Artificial Sequence: Synthetic oligonucleotide
  Antisense strand to SEQ ID NO: 725542
aacauccuggcaauuaguu

SEQ ID NO: 725544 - RNA, 19 nt, Artificial Sequence
  Description of Artificial Sequence: Synthetic oligonucleotide
  Sense strand starting at position 3519 of SEQ ID NO: 586539
agagauguuugcucucugu

SEQ ID NO: 725545 - RNA, 19 nt, Artificial Sequence
  Description of Artificial Sequence: Synthetic oligonucleotide
  Antisense strand to SEQ ID NO: 725544
acagagagcaaacaucucu

SEQ ID NO: 725546 - RNA, 19 nt, Artificial Sequence
  Description of Artificial Sequence: Synthetic oligonucleotide
  Sense strand starting at position 3523 of SEQ ID NO: 586539
auguuugcucucuguucua

SEQ ID NO: 725547 - RNA, 19 nt, Artificial Sequence
  Description of Artificial Sequence: Synthetic oligonucleotide
  Antisense strand to SEQ ID NO: 725546
uagaacagagagcaaacau

SEQ ID NO: 725548 - RNA, 19 nt, Artificial Sequence
  Description of Artificial Sequence: Synthetic oligonucleotide
  Sense strand starting at position 3568 of SEQ ID NO: 586539
ccacaucucucauagaggu

SEQ ID NO: 725549 - RNA, 19 nt, Artificial Sequence
  Description of Artificial Sequence: Synthetic oligonucleotide
  Antisense strand to SEQ ID NO: 725548
accucuaugagagaugugg

SEQ ID NO: 725550 - RNA, 19 nt, Artificial Sequence
  Description of Artificial Sequence: Synthetic oligonucleotide
  Sense strand starting at position 3583 of SEQ ID NO: 586539
agguuauugauguagcaau

SEQ ID NO: 725551 - RNA, 19 nt, Artificial Sequence
  Description of Artificial Sequence: Synthetic oligonucleotide
  Antisense strand to SEQ ID NO: 725550
auugcuacaucaauaaccu

SEQ ID NO: 725552 - RNA, 19 nt, Artificial Sequence
  Description of Artificial Sequence: Synthetic oligonucleotide
  Sense strand starting at position 3600 of SEQ ID NO: 586539
auccuuguggugugcuuua

SEQ ID NO: 725553 - RNA, 19 nt, Artificial Sequence
  Description of Artificial Sequence: Synthetic oligonucleotide
  Antisense strand to SEQ ID NO: 725552
uaaagcacaccacaaggau

SEQ ID NO: 725554 - RNA, 19 nt, Artificial Sequence
  Description of Artificial Sequence: Synthetic oligonucleotide
  Sense strand starting at position 3727 of SEQ ID NO: 586539
cuacaugucaggugcaaug

SEQ ID NO: 725555 - RNA, 19 nt, Artificial Sequence
  Description of Artificial Sequence: Synthetic oligonucleotide
  Antisense strand to SEQ ID NO: 725554
cauugcaccugacauguag

SEQ ID NO: 725556 - RNA, 19 nt, Artificial Sequence
  Description of Artificial Sequence: Synthetic oligonucleotide
  Sense strand starting at position 3754 of SEQ ID NO: 586539
uacagacuccuguguauug

SEQ ID NO: 725557 - RNA, 19 nt, Artificial Sequence
  Description of Artificial Sequence: Synthetic oligonucleotide
  Antisense strand to SEQ ID NO: 725556
caauacacaggagucugua

SEQ ID NO: 725558 - RNA, 19 nt, Artificial Sequence
  Description of Artificial Sequence: Synthetic oligonucleotide
  Sense strand starting at position 34 of SEQ ID NO: 586540
acccucuuacauuguauga

SEQ ID NO: 725559 - RNA, 19 nt, Artificial Sequence
  Description of Artificial Sequence: Synthetic oligonucleotide
  Antisense strand to SEQ ID NO: 725558
ucauacaauguaagagggu

SEQ ID NO: 725560 - RNA, 19 nt, Artificial Sequence
  Description of Artificial Sequence: Synthetic oligonucleotide
  Sense strand starting at position 94 of SEQ ID NO: 586540
gaaguccuacuguagaauu

SEQ ID NO: 725561 - RNA, 19 nt, Artificial Sequence
  Description of Artificial Sequence: Synthetic oligonucleotide
  Antisense strand to SEQ ID NO: 725560
aauucuacaguaggacuuc

SEQ ID NO: 725562 - RNA, 19 nt, Artificial Sequence
  Description of Artificial Sequence: Synthetic oligonucleotide
  Sense strand starting at position 215 of SEQ ID NO: 586540
ggcauuuacuucccuguua

SEQ ID NO: 725563 - RNA, 19 nt, Artificial Sequence
  Description of Artificial Sequence: Synthetic oligonucleotide
  Antisense strand to SEQ ID NO: 725562
uaacagggaaguaaaugcc

SEQ ID NO: 725564 - RNA, 19 nt, Artificial Sequence
  Description of Artificial Sequence: Synthetic oligonucleotide
  Sense strand starting at position 216 of SEQ ID NO: 586540
gcauuuacuucccuguuau

SEQ ID NO: 725565 - RNA, 19 nt, Artificial Sequence
  Description of Artificial Sequence: Synthetic oligonucleotide
  Antisense strand to SEQ ID NO: 725564
auaacagggaaguaaaugc

SEQ ID NO: 725566 - RNA, 19 nt, Artificial Sequence
  Description of Artificial Sequence: Synthetic oligonucleotide
  Sense strand starting at position 434 of SEQ ID NO: 586540
aucuguggucuuuacaaca

SEQ ID NO: 725567 - RNA, 19 nt, Artificial Sequence
  Description of Artificial Sequence: Synthetic oligonucleotide
  Antisense strand to SEQ ID NO: 725566
uguuguaaagaccacagau

SEQ ID NO: 725568 - RNA, 19 nt, Artificial Sequence
  Description of Artificial Sequence: Synthetic oligonucleotide
  Sense strand starting at position 579 of SEQ ID NO: 586540
acuaaauugucucuaaguu

SEQ ID NO: 725569 - RNA, 19 nt, Artificial Sequence
  Description of Artificial Sequence: Synthetic oligonucleotide
  Antisense strand to SEQ ID NO: 725568
aacuuagagacaauuuagu

SEQ ID NO: 725570 - RNA, 19 nt, Artificial Sequence
  Description of Artificial Sequence: Synthetic oligonucleotide
  Sense strand starting at position 580 of SEQ ID NO: 586540
cuaaauugucucuaaguuc

SEQ ID NO: 725571 - RNA, 19 nt, Artificial Sequence
  Description of Artificial Sequence: Synthetic oligonucleotide
  Antisense strand to SEQ ID NO: 725570
gaacuuagagacaauuuag

SEQ ID NO: 725572 - RNA, 19 nt, Artificial Sequence
  Description of Artificial Sequence: Synthetic oligonucleotide
  Sense strand starting at position 718 of SEQ ID NO: 586540
gguagugacaguuauaaua

SEQ ID NO: 725573 - RNA, 19 nt, Artificial Sequence
  Description of Artificial Sequence: Synthetic oligonucleotide
  Antisense strand to SEQ ID NO: 725572
uauuauaacugucacuacc

SEQ ID NO: 725574 - RNA, 19 nt, Artificial Sequence
  Description of Artificial Sequence: Synthetic oligonucleotide
  Sense strand starting at position 782 of SEQ ID NO: 586540
aggcuuaaauuugauaaca

SEQ ID NO: 725575 - RNA, 19 nt, Artificial Sequence
  Description of Artificial Sequence: Synthetic oligonucleotide
  Antisense strand to SEQ ID NO: 725574
uguuaucaaauuuaagccu

SEQ ID NO: 725576 - RNA, 19 nt, Artificial Sequence
  Description of Artificial Sequence: Synthetic oligonucleotide
  Sense strand starting at position 880 of SEQ ID NO: 586540
augugugagauagguacaa

SEQ ID NO: 725577 - RNA, 19 nt, Artificial Sequence
  Description of Artificial Sequence: Synthetic oligonucleotide
  Antisense strand to SEQ ID NO: 725576
uuguaccuaucucacacau

SEQ ID NO: 725578 - RNA, 19 nt, Artificial Sequence
  Description of Artificial Sequence: Synthetic oligonucleotide
  Sense strand starting at position 882 of SEQ ID NO: 586540
gugugagauagguacaaca

SEQ ID NO: 725579 - RNA, 19 nt, Artificial Sequence
  Description of Artificial Sequence: Synthetic oligonucleotide
  Antisense strand to SEQ ID NO: 725578
uguuguaccuaucucacac

SEQ ID NO: 725580 - RNA, 19 nt, Artificial Sequence
  Description of Artificial Sequence: Synthetic oligonucleotide
  Sense strand starting at position 884 of SEQ ID NO: 586540
gugagauagguacaacagu

SEQ ID NO: 725581 - RNA, 19 nt, Artificial Sequence
  Description of Artificial Sequence: Synthetic oligonucleotide
  Antisense strand to SEQ ID NO: 725580
acuguuguaccuaucucac

SEQ ID NO: 725582 - RNA, 19 nt, Artificial Sequence
  Description of Artificial Sequence: Synthetic oligonucleotide
  Sense strand starting at position 1254 of SEQ ID NO: 586540
ggacuagccauugggcaaa

SEQ ID NO: 725583 - RNA, 19 nt, Artificial Sequence
  Description of Artificial Sequence: Synthetic oligonucleotide
  Antisense strand to SEQ ID NO: 725582
uuugcccaauggcuagucc

SEQ ID NO: 725584 - RNA, 19 nt, Artificial Sequence
  Description of Artificial Sequence: Synthetic oligonucleotide
  Sense strand starting at position 1478 of SEQ ID NO: 586540
acucuaaguggucacaauu

SEQ ID NO: 725585 - RNA, 19 nt, Artificial Sequence
  Description of Artificial Sequence: Synthetic oligonucleotide
  Antisense strand to SEQ ID NO: 725584
aauugugaccacuuagagu

SEQ ID NO: 725586 - RNA, 19 nt, Artificial Sequence
  Description of Artificial Sequence: Synthetic oligonucleotide
  Sense strand starting at position 1601 of SEQ ID NO: 586540
uuaucuuaaugagugcuau

SEQ ID NO: 725587 - RNA, 19 nt, Artificial Sequence
  Description of Artificial Sequence: Synthetic oligonucleotide
  Antisense strand to SEQ ID NO: 725586
auagcacucauuaagauaa

SEQ ID NO: 725588 - RNA, 19 nt, Artificial Sequence
  Description of Artificial Sequence: Synthetic oligonucleotide
  Sense strand starting at position 1602 of SEQ ID NO: 586540
uaucuuaaugagugcuaug

SEQ ID NO: 725589 - RNA, 19 nt, Artificial Sequence
  Description of Artificial Sequence: Synthetic oligonucleotide
  Antisense strand to SEQ ID NO: 725588
cauagcacucauuaagaua

SEQ ID NO: 725590 - RNA, 19 nt, Artificial Sequence
  Description of Artificial Sequence: Synthetic oligonucleotide
  Sense strand starting at position 1607 of SEQ ID NO: 586540
uaaugagugcuaugacaau

SEQ ID NO: 725591 - RNA, 19 nt, Artificial Sequence
  Description of Artificial Sequence: Synthetic oligonucleotide
  Antisense strand to SEQ ID NO: 725590
auugucauagcacucauua

SEQ ID NO: 725592 - RNA, 19 nt, Artificial Sequence
  Description of Artificial Sequence: Synthetic oligonucleotide
  Sense strand starting at position 1613 of SEQ ID NO: 586540
gugcuaugacaauaauugu

SEQ ID NO: 725593 - RNA, 19 nt, Artificial Sequence
  Description of Artificial Sequence: Synthetic oligonucleotide
  Antisense strand to SEQ ID NO: 725592
acaauuauugucauagcac

SEQ ID NO: 725594 - RNA, 19 nt, Artificial Sequence
  Description of Artificial Sequence: Synthetic oligonucleotide
  Sense strand starting at position 1988 of SEQ ID NO: 586540
ggaaauuagcagugaggua

SEQ ID NO: 725595 - RNA, 19 nt, Artificial Sequence
  Description of Artificial Sequence: Synthetic oligonucleotide
  Antisense strand to SEQ ID NO: 725594
uaccucacugcuaauuucc

SEQ ID NO: 725596 - RNA, 19 nt, Artificial Sequence
  Description of Artificial Sequence: Synthetic oligonucleotide
  Sense strand starting at position 2022 of SEQ ID NO: 586540
ccucuugcuucugugauuu

SEQ ID NO: 725597 - RNA, 19 nt, Artificial Sequence
  Description of Artificial Sequence: Synthetic oligonucleotide
  Antisense strand to SEQ ID NO: 725596
aaaucacagaagcaagagg

SEQ ID NO: 725598 - RNA, 19 nt, Artificial Sequence
  Description of Artificial Sequence: Synthetic oligonucleotide
  Sense strand starting at position 2046 of SEQ ID NO: 586540
cagaaugaauguguauaca

SEQ ID NO: 725599 - RNA, 19 nt, Artificial Sequence
  Description of Artificial Sequence: Synthetic oligonucleotide
  Antisense strand to SEQ ID NO: 725598
uguauacacauucauucug

SEQ ID NO: 725600 - RNA, 19 nt, Artificial Sequence
  Description of Artificial Sequence: Synthetic oligonucleotide
  Sense strand starting at position 2094 of SEQ ID NO: 586540
ugugcuuagcaagaauaca

SEQ ID NO: 725601 - RNA, 19 nt, Artificial Sequence
  Description of Artificial Sequence: Synthetic oligonucleotide
  Antisense strand to SEQ ID NO: 725600
uguauucuugcuaagcaca

SEQ ID NO: 725602 - RNA, 19 nt, Artificial Sequence
  Description of Artificial Sequence: Synthetic oligonucleotide
  Sense strand starting at position 2140 of SEQ ID NO: 586540
agcaacuaccaguaauugu

SEQ ID NO: 725603 - RNA, 19 nt, Artificial Sequence
  Description of Artificial Sequence: Synthetic oligonucleotide
  Antisense strand to SEQ ID NO: 725602
acaauuacugguaguugcu

SEQ ID NO: 725604 - RNA, 19 nt, Artificial Sequence
  Description of Artificial Sequence: Synthetic oligonucleotide
  Sense strand starting at position 2147 of SEQ ID NO: 586540
accaguaauugucuauaua

SEQ ID NO: 725605 - RNA, 19 nt, Artificial Sequence
  Description of Artificial Sequence: Synthetic oligonucleotide
  Antisense strand to SEQ ID NO: 725604
uauauagacaauuacuggu

SEQ ID NO: 725606 - RNA, 19 nt, Artificial Sequence
  Description of Artificial Sequence: Synthetic oligonucleotide
  Sense strand starting at position 2148 of SEQ ID NO: 586540
ccaguaauugucuauauau

SEQ ID NO: 725607 - RNA, 19 nt, Artificial Sequence
  Description of Artificial Sequence: Synthetic oligonucleotide
  Antisense strand to SEQ ID NO: 725606
auauauagacaauuacugg

SEQ ID NO: 725608 - RNA, 19 nt, Artificial Sequence
  Description of Artificial Sequence: Synthetic oligonucleotide
  Sense strand starting at position 2354 of SEQ ID NO: 586540
auugaaguagcucauguau

SEQ ID NO: 725609 - RNA, 19 nt, Artificial Sequence
  Description of Artificial Sequence: Synthetic oligonucleotide
  Antisense strand to SEQ ID NO: 725608
auacaugagcuacuucaau

SEQ ID NO: 725610 - RNA, 19 nt, Artificial Sequence
  Description of Artificial Sequence: Synthetic oligonucleotide
  Sense strand starting at position 2570 of SEQ ID NO: 586540
aggcauggaccaugcauaa

SEQ ID NO: 725611 - RNA, 19 nt, Artificial Sequence
  Description of Artificial Sequence: Synthetic oligonucleotide
  Antisense strand to SEQ ID NO: 725610
uuaugcaugguccaugccu

SEQ ID NO: 725612 - RNA, 19 nt, Artificial Sequence
  Description of Artificial Sequence: Synthetic oligonucleotide
  Sense strand starting at position 2599 of SEQ ID NO: 586540
aagugcaugccaggagaua

SEQ ID NO: 725613 - RNA, 19 nt, Artificial Sequence
  Description of Artificial Sequence: Synthetic oligonucleotide
  Antisense strand to SEQ ID NO: 725612
uaucuccuggcaugcacuu

SEQ ID NO: 725614 - RNA, 19 nt, Artificial Sequence
  Description of Artificial Sequence: Synthetic oligonucleotide
  Sense strand starting at position 2763 of SEQ ID NO: 586540
ccgcuuaauuuacuaaguu

SEQ ID NO: 725615 - RNA, 19 nt, Artificial Sequence
  Description of Artificial Sequence: Synthetic oligonucleotide
  Antisense strand to SEQ ID NO: 725614
aacuuaguaaauuaagcgg

SEQ ID NO: 725616 - RNA, 19 nt, Artificial Sequence
  Description of Artificial Sequence: Synthetic oligonucleotide
  Sense strand starting at position 3014 of SEQ ID NO: 586540
ggaaacacucuuugcauua

SEQ ID NO: 725617 - RNA, 19 nt, Artificial Sequence
  Description of Artificial Sequence: Synthetic oligonucleotide
  Antisense strand to SEQ ID NO: 725616
uaaugcaaagaguguuucc

SEQ ID NO: 725618 - RNA, 19 nt, Artificial Sequence
  Description of Artificial Sequence: Synthetic oligonucleotide
  Sense strand starting at position 3294 of SEQ ID NO: 586540
cucugagcucucgaauaca

SEQ ID NO: 725619 - RNA, 19 nt, Artificial Sequence
  Description of Artificial Sequence: Synthetic oligonucleotide
  Antisense strand to SEQ ID NO: 725618
uguauucgagagcucagag

SEQ ID NO: 725620 - RNA, 19 nt, Artificial Sequence
  Description of Artificial Sequence: Synthetic oligonucleotide
  Sense strand starting at position 3376 of SEQ ID NO: 586540
uuaaguuguuucuccagaa

SEQ ID NO: 725621 - RNA, 19 nt, Artificial Sequence
  Description of Artificial Sequence: Synthetic oligonucleotide
  Antisense strand to SEQ ID NO: 725620
uucuggagaaacaacuuaa

SEQ ID NO: 725622 - RNA, 19 nt, Artificial Sequence
  Description of Artificial Sequence: Synthetic oligonucleotide
  Sense strand starting at position 3425 of SEQ ID NO: 586540
uuacgauucucaguugaug

SEQ ID NO: 725623 - RNA, 19 nt, Artificial Sequence
  Description of Artificial Sequence: Synthetic oligonucleotide
  Antisense strand to SEQ ID NO: 725622
caucaacugagaaucguaa

SEQ ID NO: 725624 - RNA, 19 nt, Artificial Sequence
  Description of Artificial Sequence: Synthetic oligonucleotide
  Sense strand starting at position 3434 of SEQ ID NO: 586540
ucaguugaugcguaagaaa

SEQ ID NO: 725625 - RNA, 19 nt, Artificial Sequence
  Description of Artificial Sequence: Synthetic oligonucleotide
  Antisense strand to SEQ ID NO: 725624
uuucuuacgcaucaacuga

SEQ ID NO: 725626 - RNA, 19 nt, Artificial Sequence
  Description of Artificial Sequence: Synthetic oligonucleotide
  Sense strand starting at position 3465 of SEQ ID NO: 586540
uuaauauuggauugcacaa

SEQ ID NO: 725627 - RNA, 19 nt, Artificial Sequence
  Description of Artificial Sequence: Synthetic oligonucleotide
  Antisense strand to SEQ ID NO: 725626
uugugcaauccaauauuaa

SEQ ID NO: 725628 - RNA, 19 nt, Artificial Sequence
  Description of Artificial Sequence: Synthetic oligonucleotide
  Sense strand starting at position 3563 of SEQ ID NO: 586540
uccaauugccguuaucaaa

SEQ ID NO: 725629 - RNA, 19 nt, Artificial Sequence
  Description of Artificial Sequence: Synthetic oligonucleotide
  Antisense strand to SEQ ID NO: 725628
uuugauaacggcaauugga

SEQ ID NO: 725630 - RNA, 19 nt, Artificial Sequence
  Description of Artificial Sequence: Synthetic oligonucleotide
  Sense strand starting at position 3603 of SEQ ID NO: 586540
caaucuagugcuggauuau

SEQ ID NO: 725631 - RNA, 19 nt, Artificial Sequence
  Description of Artificial Sequence: Synthetic oligonucleotide
  Antisense strand to SEQ ID NO: 725630
auaauccagcacuagauug

SEQ ID NO: 725632 - RNA, 19 nt, Artificial Sequence
  Description of Artificial Sequence: Synthetic oligonucleotide
  Sense strand starting at position 3604 of SEQ ID NO: 586540
aaucuagugcuggauuaua

SEQ ID NO: 725633 - RNA, 19 nt, Artificial Sequence
  Description of Artificial Sequence: Synthetic oligonucleotide
  Antisense strand to SEQ ID NO: 725632
uauaauccagcacuagauu

SEQ ID NO: 725634 - RNA, 19 nt, Artificial Sequence
  Description of Artificial Sequence: Synthetic oligonucleotide
  Sense strand starting at position 3771 of SEQ ID NO: 586540
ggugauaguagaugcuaca

SEQ ID NO: 725635 - RNA, 19 nt, Artificial Sequence
  Description of Artificial Sequence: Synthetic oligonucleotide
  Antisense strand to SEQ ID NO: 725634
uguagcaucuacuaucacc

SEQ ID NO: 725636 - RNA, 19 nt, Artificial Sequence
  Description of Artificial Sequence: Synthetic oligonucleotide
  Sense strand starting at position 3911 of SEQ ID NO: 586540
agugguaaacuguagauau

SEQ ID NO: 725637 - RNA, 19 nt, Artificial Sequence
  Description of Artificial Sequence: Synthetic oligonucleotide
  Antisense strand to SEQ ID NO: 725636
auaucuacaguuuaccacu

SEQ ID NO: 725638 - RNA, 19 nt, Artificial Sequence
  Description of Artificial Sequence: Synthetic oligonucleotide
  Sense strand starting at position 37 of SEQ ID NO: 586541
cagauaguugcugaaucua

SEQ ID NO: 725639 - RNA, 19 nt, Artificial Sequence
  Description of Artificial Sequence: Synthetic oligonucleotide
  Antisense strand to SEQ ID NO: 725638
uagauucagcaacuaucug

SEQ ID NO: 725640 - RNA, 19 nt, Artificial Sequence
  Description of Artificial Sequence: Synthetic oligonucleotide
  Sense strand starting at position 128 of SEQ ID NO: 586541
cucauauucuagguaggga

SEQ ID NO: 725641 - RNA, 19 nt, Artificial Sequence
  Description of Artificial Sequence: Synthetic oligonucleotide
  Antisense strand to SEQ ID NO: 725640
ucccuaccuagaauaugag

SEQ ID NO: 725642 - RNA, 19 nt, Artificial Sequence
  Description of Artificial Sequence: Synthetic oligonucleotide
  Sense strand starting at position 369 of SEQ ID NO: 586541
cagauaaagugacauuuga

SEQ ID NO: 725643 - RNA, 19 nt, Artificial Sequence
  Description of Artificial Sequence: Synthetic oligonucleotide
  Antisense strand to SEQ ID NO: 725642
ucaaaugucacuuuaucug

SEQ ID NO: 725644 - RNA, 19 nt, Artificial Sequence
  Description of Artificial Sequence: Synthetic oligonucleotide
  Sense strand starting at position 761 of SEQ ID NO: 586541
gugguaagugguuggauuu

SEQ ID NO: 725645 - RNA, 19 nt, Artificial Sequence
  Description of Artificial Sequence: Synthetic oligonucleotide
  Antisense strand to SEQ ID NO: 725644
aaauccaaccacuuaccac

SEQ ID NO: 725646 - RNA, 19 nt, Artificial Sequence
  Description of Artificial Sequence: Synthetic oligonucleotide
  Sense strand starting at position 822 of SEQ ID NO: 586541
cuggaugugggaugugaga

SEQ ID NO: 725647 - RNA, 19 nt, Artificial Sequence
  Description of Artificial Sequence: Synthetic oligonucleotide
  Antisense strand to SEQ ID NO: 725646
ucucacaucccacauccag

SEQ ID NO: 725648 - RNA, 19 nt, Artificial Sequence
  Description of Artificial Sequence: Synthetic oligonucleotide
  Sense strand starting at position 957 of SEQ ID NO: 586541
agaaguugggcuuggacau

SEQ ID NO: 725649 - RNA, 19 nt, Artificial Sequence
  Description of Artificial Sequence: Synthetic oligonucleotide
  Antisense strand to SEQ ID NO: 725648
auguccaagcccaacuucu

SEQ ID NO: 725650 - RNA, 19 nt, Artificial Sequence
  Description of Artificial Sequence: Synthetic oligonucleotide
  Sense strand starting at position 958 of SEQ ID NO: 586541
gaaguugggcuuggacaua

SEQ ID NO: 725651 - RNA, 19 nt, Artificial Sequence
  Description of Artificial Sequence: Synthetic oligonucleotide
  Antisense strand to SEQ ID NO: 725650
uauguccaagcccaacuuc

SEQ ID NO: 725652 - RNA, 19 nt, Artificial Sequence
  Description of Artificial Sequence: Synthetic oligonucleotide
  Sense strand starting at position 963 of SEQ ID NO: 586541
ugggcuuggacauaguaua

SEQ ID NO: 725653 - RNA, 19 nt, Artificial Sequence
  Description of Artificial Sequence: Synthetic oligonucleotide
  Antisense strand to SEQ ID NO: 725652
uauacuauguccaagccca

SEQ ID NO: 725654 - RNA, 19 nt, Artificial Sequence
  Description of Artificial Sequence: Synthetic oligonucleotide
  Sense strand starting at position 1156 of SEQ ID NO: 586541
ggacucuucccaggguaca

SEQ ID NO: 725655 - RNA, 19 nt, Artificial Sequence
  Description of Artificial Sequence: Synthetic oligonucleotide
  Antisense strand to SEQ ID NO: 725654
uguacccugggaagagucc

SEQ ID NO: 725656 - RNA, 19 nt, Artificial Sequence
  Description of Artificial Sequence: Synthetic oligonucleotide
  Sense strand starting at position 1171 of SEQ ID NO: 586541
uacagucuauuguugagaa

SEQ ID NO: 725657 - RNA, 19 nt, Artificial Sequence
  Description of Artificial Sequence: Synthetic oligonucleotide
  Antisense strand to SEQ ID NO: 725656
uucucaacaauagacugua

SEQ ID NO: 725658 - RNA, 19 nt, Artificial Sequence
  Description of Artificial Sequence: Synthetic oligonucleotide
  Sense strand starting at position 1219 of SEQ ID NO: 586541
gcaacauuauacuugauag

SEQ ID NO: 725659 - RNA, 19 nt, Artificial Sequence
  Description of Artificial Sequence: Synthetic oligonucleotide
  Antisense strand to SEQ ID NO: 725658
cuaucaaguauaauguugc

SEQ ID NO: 725660 - RNA, 19 nt, Artificial Sequence
  Description of Artificial Sequence: Synthetic oligonucleotide
  Sense strand starting at position 1303 of SEQ ID NO: 586541
uuaugugcaugucuuauuu

SEQ ID NO: 725661 - RNA, 19 nt, Artificial Sequence
  Description of Artificial Sequence: Synthetic oligonucleotide
  Antisense strand to SEQ ID NO: 725660
aaauaagacaugcacauaa

SEQ ID NO: 725662 - RNA, 19 nt, Artificial Sequence
  Description of Artificial Sequence: Synthetic oligonucleotide
  Sense strand starting at position 1307 of SEQ ID NO: 586541
gugcaugucuuauuuaauc

SEQ ID NO: 725663 - RNA, 19 nt, Artificial Sequence
  Description of Artificial Sequence: Synthetic oligonucleotide
  Antisense strand to SEQ ID NO: 725662
gauuaaauaagacaugcac

SEQ ID NO: 725664 - RNA, 19 nt, Artificial Sequence
  Description of Artificial Sequence: Synthetic oligonucleotide
  Sense strand starting at position 1335 of SEQ ID NO: 586541
ccuugugagguagauaaug

SEQ ID NO: 725665 - RNA, 19 nt, Artificial Sequence
  Description of Artificial Sequence: Synthetic oligonucleotide
  Antisense strand to SEQ ID NO: 725664
cauuaucuaccucacaagg

SEQ ID NO: 725666 - RNA, 19 nt, Artificial Sequence
  Description of Artificial Sequence: Synthetic oligonucleotide
  Sense strand starting at position 1407 of SEQ ID NO: 586541
uugugaagccaagaucuaa

SEQ ID NO: 725667 - RNA, 19 nt, Artificial Sequence
  Description of Artificial Sequence: Synthetic oligonucleotide
  Antisense strand to SEQ ID NO: 725666
uuagaucuuggcuucacaa

SEQ ID NO: 725668 - RNA, 19 nt, Artificial Sequence
  Description of Artificial Sequence: Synthetic oligonucleotide
  Sense strand starting at position 1544 of SEQ ID NO: 586541
guuccauuucccugaaugu

SEQ ID NO: 725669 - RNA, 19 nt, Artificial Sequence
  Description of Artificial Sequence: Synthetic oligonucleotide
  Antisense strand to SEQ ID NO: 725668
acauucagggaaauggaac

SEQ ID NO: 725670 - RNA, 19 nt, Artificial Sequence
  Description of Artificial Sequence: Synthetic oligonucleotide
  Sense strand starting at position 1602 of SEQ ID NO: 586541
guggguugauaagcagaga

SEQ ID NO: 725671 - RNA, 19 nt, Artificial Sequence
  Description of Artificial Sequence: Synthetic oligonucleotide
  Antisense strand to SEQ ID NO: 725670
ucucugcuuaucaacccac

SEQ ID NO: 725672 - RNA, 19 nt, Artificial Sequence
  Description of Artificial Sequence: Synthetic oligonucleotide
  Sense strand starting at position 1607 of SEQ ID NO: 586541
uugauaagcagagaugcau

SEQ ID NO: 725673 - RNA, 19 nt, Artificial Sequence
  Description of Artificial Sequence: Synthetic oligonucleotide
  Antisense strand to SEQ ID NO: 725672
augcaucucugcuuaucaa

SEQ ID NO: 725674 - RNA, 19 nt, Artificial Sequence
  Description of Artificial Sequence: Synthetic oligonucleotide
  Sense strand starting at position 1684 of SEQ ID NO: 586541
cacagagcccaguaaguau

SEQ ID NO: 725675 - RNA, 19 nt, Artificial Sequence
  Description of Artificial Sequence: Synthetic oligonucleotide
  Antisense strand to SEQ ID NO: 725674
auacuuacugggcucugug

SEQ ID NO: 725676 - RNA, 19 nt, Artificial Sequence
  Description of Artificial Sequence: Synthetic oligonucleotide
  Sense strand starting at position 1695 of SEQ ID NO: 586541
guaaguauuugggcauugu

SEQ ID NO: 725677 - RNA, 19 nt, Artificial Sequence
  Description of Artificial Sequence: Synthetic oligonucleotide
  Antisense strand to SEQ ID NO: 725676
acaaugcccaaauacuuac

SEQ ID NO: 725678 - RNA, 19 nt, Artificial Sequence
  Description of Artificial Sequence: Synthetic oligonucleotide
  Sense strand starting at position 1728 of SEQ ID NO: 586541
auagccauaugaucuggau

SEQ ID NO: 725679 - RNA, 19 nt, Artificial Sequence
  Description of Artificial Sequence: Synthetic oligonucleotide
  Antisense strand to SEQ ID NO: 725678
auccagaucauauggcuau

SEQ ID NO: 725680 - RNA, 19 nt, Artificial Sequence
  Description of Artificial Sequence: Synthetic oligonucleotide
  Sense strand starting at position 1732 of SEQ ID NO: 586541
ccauaugaucuggaugucu

SEQ ID NO: 725681 - RNA, 19 nt, Artificial Sequence
  Description of Artificial Sequence: Synthetic oligonucleotide
  Antisense strand to SEQ ID NO: 725680
agacauccagaucauaugg

SEQ ID NO: 725682 - RNA, 19 nt, Artificial Sequence
  Description of Artificial Sequence: Synthetic oligonucleotide
  Sense strand starting at position 1734 of SEQ ID NO: 586541
auaugaucuggaugucuga

SEQ ID NO: 725683 - RNA, 19 nt, Artificial Sequence
  Description of Artificial Sequence: Synthetic oligonucleotide
  Antisense strand to SEQ ID NO: 725682
ucagacauccagaucauau

SEQ ID NO: 725684 - RNA, 19 nt, Artificial Sequence
  Description of Artificial Sequence: Synthetic oligonucleotide
  Sense strand starting at position 1971 of SEQ ID NO: 586541
cuagguacugacuauucua

SEQ ID NO: 725685 - RNA, 19 nt, Artificial Sequence
  Description of Artificial Sequence: Synthetic oligonucleotide
  Antisense strand to SEQ ID NO: 725684
uagaauagucaguaccuag

SEQ ID NO: 725686 - RNA, 19 nt, Artificial Sequence
  Description of Artificial Sequence: Synthetic oligonucleotide
  Sense strand starting at position 1986 of SEQ ID NO: 586541
ucuaguacugguuacauau

SEQ ID NO: 725687 - RNA, 19 nt, Artificial Sequence
  Description of Artificial Sequence: Synthetic oligonucleotide
  Antisense strand to SEQ ID NO: 725686
auauguaaccaguacuaga

SEQ ID NO: 725688 - RNA, 19 nt, Artificial Sequence
  Description of Artificial Sequence: Synthetic oligonucleotide
  Sense strand starting at position 2107 of SEQ ID NO: 586541
acgauugcuacggaauaau

SEQ ID NO: 725689 - RNA, 19 nt, Artificial Sequence
  Description of Artificial Sequence: Synthetic oligonucleotide
  Antisense strand to SEQ ID NO: 725688
auuauuccguagcaaucgu

SEQ ID NO: 725690 - RNA, 19 nt, Artificial Sequence
  Description of Artificial Sequence: Synthetic oligonucleotide
  Sense strand starting at position 2288 of SEQ ID NO: 586541
gcugucugaaaugacugaa

SEQ ID NO: 725691 - RNA, 19 nt, Artificial Sequence
  Description of Artificial Sequence: Synthetic oligonucleotide
  Antisense strand to SEQ ID NO: 725690
uucagucauuucagacagc

SEQ ID NO: 725692 - RNA, 19 nt, Artificial Sequence
  Description of Artificial Sequence: Synthetic oligonucleotide
  Sense strand starting at position 2291 of SEQ ID NO: 586541
gucugaaaugacugaauau

SEQ ID NO: 725693 - RNA, 19 nt, Artificial Sequence
  Description of Artificial Sequence: Synthetic oligonucleotide
  Antisense strand to SEQ ID NO: 725692
auauucagucauuucagac

SEQ ID NO: 725694 - RNA, 19 nt, Artificial Sequence
  Description of Artificial Sequence: Synthetic oligonucleotide
  Sense strand starting at position 2361 of SEQ ID NO: 586541
ucccaaggagagugguauu

SEQ ID NO: 725695 - RNA, 19 nt, Artificial Sequence
  Description of Artificial Sequence: Synthetic oligonucleotide
  Antisense strand to SEQ ID NO: 725694
aauaccacucuccuuggga

SEQ ID NO: 725696 - RNA, 19 nt, Artificial Sequence
  Description of Artificial Sequence: Synthetic oligonucleotide
  Sense strand starting at position 2375 of SEQ ID NO: 586541
guauuaaaccauuaucagu

SEQ ID NO: 725697 - RNA, 19 nt, Artificial Sequence
  Description of Artificial Sequence: Synthetic oligonucleotide
  Antisense strand to SEQ ID NO: 725696
acugauaaugguuuaauac

SEQ ID NO: 725698 - RNA, 19 nt, Artificial Sequence
  Description of Artificial Sequence: Synthetic oligonucleotide
  Sense strand starting at position 2388 of SEQ ID NO: 586541
aucagucaugaccaguuau

SEQ ID NO: 725699 - RNA, 19 nt, Artificial Sequence
  Description of Artificial Sequence: Synthetic oligonucleotide
  Antisense strand to SEQ ID NO: 725698
auaacuggucaugacugau

SEQ ID NO: 725700 - RNA, 19 nt, Artificial Sequence
  Description of Artificial Sequence: Synthetic oligonucleotide
  Sense strand starting at position 2739 of SEQ ID NO: 586541
acaacugugcuggaaacua

SEQ ID NO: 725701 - RNA, 19 nt, Artificial Sequence
  Description of Artificial Sequence: Synthetic oligonucleotide
  Antisense strand to SEQ ID NO: 725700
uaguuuccagcacaguugu

SEQ ID NO: 725702 - RNA, 19 nt, Artificial Sequence
  Description of Artificial Sequence: Synthetic oligonucleotide
  Sense strand starting at position 2814 of SEQ ID NO: 586541
acacuuugagggugucaga

SEQ ID NO: 725703 - RNA, 19 nt, Artificial Sequence
  Description of Artificial Sequence: Synthetic oligonucleotide
  Antisense strand to SEQ ID NO: 725702
ucugacacccucaaagugu

SEQ ID NO: 725704 - RNA, 19 nt, Artificial Sequence
  Description of Artificial Sequence: Synthetic oligonucleotide
  Sense strand starting at position 3006 of SEQ ID NO: 586541
gugaaauccugauuaaugu

SEQ ID NO: 725705 - RNA, 19 nt, Artificial Sequence
  Description of Artificial Sequence: Synthetic oligonucleotide
  Antisense strand to SEQ ID NO: 725704
acauuaaucaggauuucac

SEQ ID NO: 725706 - RNA, 19 nt, Artificial Sequence
  Description of Artificial Sequence: Synthetic oligonucleotide
  Sense strand starting at position 3241 of SEQ ID NO: 586541
ggaagagagucuuccuuag

SEQ ID NO: 725707 - RNA, 19 nt, Artificial Sequence
  Description of Artificial Sequence: Synthetic oligonucleotide
  Antisense strand to SEQ ID NO: 725706
cuaaggaagacucucuucc

SEQ ID NO: 725708 - RNA, 19 nt, Artificial Sequence
  Description of Artificial Sequence: Synthetic oligonucleotide
  Sense strand starting at position 3427 of SEQ ID NO: 586541
aacuguagacaaugaguau

SEQ ID NO: 725709 - RNA, 19 nt, Artificial Sequence
  Description of Artificial Sequence: Synthetic oligonucleotide
  Antisense strand to SEQ ID NO: 725708
auacucauugucuacaguu

SEQ ID NO: 725710 - RNA, 19 nt, Artificial Sequence
  Description of Artificial Sequence: Synthetic oligonucleotide
  Sense strand starting at position 3430 of SEQ ID NO: 586541
uguagacaaugaguauaga

SEQ ID NO: 725711 - RNA, 19 nt, Artificial Sequence
  Description of Artificial Sequence: Synthetic oligonucleotide
  Antisense strand to SEQ ID NO: 725710
ucuauacucauugucuaca

SEQ ID NO: 725712 - RNA, 19 nt, Artificial Sequence
  Description of Artificial Sequence: Synthetic oligonucleotide
  Sense strand starting at position 3583 of SEQ ID NO: 586541
gcagaauagagauggguga

SEQ ID NO: 725713 - RNA, 19 nt, Artificial Sequence
  Description of Artificial Sequence: Synthetic oligonucleotide
  Antisense strand to SEQ ID NO: 725712
ucacccaucucuauucugc

SEQ ID NO: 725714 - RNA, 19 nt, Artificial Sequence
  Description of Artificial Sequence: Synthetic oligonucleotide
  Sense strand starting at position 3613 of SEQ ID NO: 586541
aauccuuaagcaggugaga

SEQ ID NO: 725715 - RNA, 19 nt, Artificial Sequence
  Description of Artificial Sequence: Synthetic oligonucleotide
  Antisense strand to SEQ ID NO: 725714
ucucaccugcuuaaggauu

SEQ ID NO: 725716 - RNA, 19 nt, Artificial Sequence
  Description of Artificial Sequence: Synthetic oligonucleotide
  Sense strand starting at position 3615 of SEQ ID NO: 586541
uccuuaagcaggugagaag

SEQ ID NO: 725717 - RNA, 19 nt, Artificial Sequence
  Description of Artificial Sequence: Synthetic oligonucleotide
  Antisense strand to SEQ ID NO: 725716
cuucucaccugcuuaagga

SEQ ID NO: 725718 - RNA, 19 nt, Artificial Sequence
  Description of Artificial Sequence: Synthetic oligonucleotide
  Sense strand starting at position 142 of SEQ ID NO: 586542
ccauguauccucuacagga

SEQ ID NO: 725719 - RNA, 19 nt, Artificial Sequence
  Description of Artificial Sequence: Synthetic oligonucleotide
  Antisense strand to SEQ ID NO: 725718
uccuguagaggauacaugg

SEQ ID NO: 725720 - RNA, 19 nt, Artificial Sequence
  Description of Artificial Sequence: Synthetic oligonucleotide
  Sense strand starting at position 208 of SEQ ID NO: 586542
auucuuugguccuugaaac

SEQ ID NO: 725721 - RNA, 19 nt, Artificial Sequence
  Description of Artificial Sequence: Synthetic oligonucleotide
  Antisense strand to SEQ ID NO: 725720
guuucaaggaccaaagaau

SEQ ID NO: 725722 - RNA, 19 nt, Artificial Sequence
  Description of Artificial Sequence: Synthetic oligonucleotide
  Sense strand starting at position 209 of SEQ ID NO: 586542
uucuuugguccuugaaaca

SEQ ID NO: 725723 - RNA, 19 nt, Artificial Sequence
  Description of Artificial Sequence: Synthetic oligonucleotide
  Antisense strand to SEQ ID NO: 725722
uguuucaaggaccaaagaa

SEQ ID NO: 725724 - RNA, 19 nt, Artificial Sequence
  Description of Artificial Sequence: Synthetic oligonucleotide
  Sense strand starting at position 316 of SEQ ID NO: 586542
gggccaaguguugaaagua

SEQ ID NO: 725725 - RNA, 19 nt, Artificial Sequence
  Description of Artificial Sequence: Synthetic oligonucleotide
  Antisense strand to SEQ ID NO: 725724
uacuuucaacacuuggccc

SEQ ID NO: 725726 - RNA, 19 nt, Artificial Sequence
  Description of Artificial Sequence: Synthetic oligonucleotide
  Sense strand starting at position 429 of SEQ ID NO: 586542
gcauauuagguugaugacu

SEQ ID NO: 725727 - RNA, 19 nt, Artificial Sequence
  Description of Artificial Sequence: Synthetic oligonucleotide
  Antisense strand to SEQ ID NO: 725726
agucaucaaccuaauaugc

SEQ ID NO: 725728 - RNA, 19 nt, Artificial Sequence
  Description of Artificial Sequence: Synthetic oligonucleotide
  Sense strand starting at position 440 of SEQ ID NO: 586542
ugaugacuuuaaguccaaa

SEQ ID NO: 725729 - RNA, 19 nt, Artificial Sequence
  Description of Artificial Sequence: Synthetic oligonucleotide
  Antisense strand to SEQ ID NO: 725728
uuuggacuuaaagucauca

SEQ ID NO: 725730 - RNA, 19 nt, Artificial Sequence
  Description of Artificial Sequence: Synthetic oligonucleotide
  Sense strand starting at position 479 of SEQ ID NO: 586542
gccugccaauucuuugaga

SEQ ID NO: 725731 - RNA, 19 nt, Artificial Sequence
  Description of Artificial Sequence: Synthetic oligonucleotide
  Antisense strand to SEQ ID NO: 725730
ucucaaagaauuggcaggc

SEQ ID NO: 725732 - RNA, 19 nt, Artificial Sequence
  Description of Artificial Sequence: Synthetic oligonucleotide
  Sense strand starting at position 481 of SEQ ID NO: 586542
cugccaauucuuugagaca

SEQ ID NO: 725733 - RNA, 19 nt, Artificial Sequence
  Description of Artificial Sequence: Synthetic oligonucleotide
  Antisense strand to SEQ ID NO: 725732
ugucucaaagaauuggcag

SEQ ID NO: 725734 - RNA, 19 nt, Artificial Sequence
  Description of Artificial Sequence: Synthetic oligonucleotide
  Sense strand starting at position 769 of SEQ ID NO: 586542
cggucuuugccugccaauu

SEQ ID NO: 725735 - RNA, 19 nt, Artificial Sequence
  Description of Artificial Sequence: Synthetic oligonucleotide
  Antisense strand to SEQ ID NO: 725734
aauuggcaggcaaagaccg

SEQ ID NO: 725736 - RNA, 19 nt, Artificial Sequence
  Description of Artificial Sequence: Synthetic oligonucleotide
  Sense strand starting at position 845 of SEQ ID NO: 586542
aauauuaaugaugguucga

SEQ ID NO: 725737 - RNA, 19 nt, Artificial Sequence
  Description of Artificial Sequence: Synthetic oligonucleotide
  Antisense strand to SEQ ID NO: 725736
ucgaaccaucauuaauauu

SEQ ID NO: 725738 - RNA, 19 nt, Artificial Sequence
  Description of Artificial Sequence: Synthetic oligonucleotide
  Sense strand starting at position 847 of SEQ ID NO: 586542
uauuaaugaugguucgaac

SEQ ID NO: 725739 - RNA, 19 nt, Artificial Sequence
  Description of Artificial Sequence: Synthetic oligonucleotide
  Antisense strand to SEQ ID NO: 725738
guucgaaccaucauuaaua

SEQ ID NO: 725740 - RNA, 19 nt, Artificial Sequence
  Description of Artificial Sequence: Synthetic oligonucleotide
  Sense strand starting at position 1020 of SEQ ID NO: 586542
acugguuugcuaggguaaa

SEQ ID NO: 725741 - RNA, 19 nt, Artificial Sequence
  Description of Artificial Sequence: Synthetic oligonucleotide
  Antisense strand to SEQ ID NO: 725740
uuuacccuagcaaaccagu

SEQ ID NO: 725742 - RNA, 19 nt, Artificial Sequence
  Description of Artificial Sequence: Synthetic oligonucleotide
  Sense strand starting at position 1030 of SEQ ID NO: 586542
uaggguaaacguuagauag

SEQ ID NO: 725743 - RNA, 19 nt, Artificial Sequence
  Description of Artificial Sequence: Synthetic oligonucleotide
  Antisense strand to SEQ ID NO: 725742
cuaucuaacguuuacccua

SEQ ID NO: 725744 - RNA, 19 nt, Artificial Sequence
  Description of Artificial Sequence: Synthetic oligonucleotide
  Sense strand starting at position 1093 of SEQ ID NO: 586542
uagucuggucacuguauuu

SEQ ID NO: 725745 - RNA, 19 nt, Artificial Sequence
  Description of Artificial Sequence: Synthetic oligonucleotide
  Antisense strand to SEQ ID NO: 725744
aaauacagugaccagacua

SEQ ID NO: 725746 - RNA, 19 nt, Artificial Sequence
  Description of Artificial Sequence: Synthetic oligonucleotide
  Sense strand starting at position 1260 of SEQ ID NO: 586542
agaagugaguucuuaguau

SEQ ID NO: 725747 - RNA, 19 nt, Artificial Sequence
  Description of Artificial Sequence: Synthetic oligonucleotide
  Antisense strand to SEQ ID NO: 725746
auacuaagaacucacuucu

SEQ ID NO: 725748 - RNA, 19 nt, Artificial Sequence
  Description of Artificial Sequence: Synthetic oligonucleotide
  Sense strand starting at position 1284 of SEQ ID NO: 586542
guccaagucaguuacaagu

SEQ ID NO: 725749 - RNA, 19 nt, Artificial Sequence
  Description of Artificial Sequence: Synthetic oligonucleotide
  Antisense strand to SEQ ID NO: 725748
acuuguaacugacuuggac

SEQ ID NO: 725750 - RNA, 19 nt, Artificial Sequence
  Description of Artificial Sequence: Synthetic oligonucleotide
  Sense strand starting at position 1968 of SEQ ID NO: 586542
guuguuauugcgaggauug

SEQ ID NO: 725751 - RNA, 19 nt, Artificial Sequence
  Description of Artificial Sequence: Synthetic oligonucleotide
  Antisense strand to SEQ ID NO: 725750
caauccucgcaauaacaac

SEQ ID NO: 725752 - RNA, 19 nt, Artificial Sequence
  Description of Artificial Sequence: Synthetic oligonucleotide
  Sense strand starting at position 2273 of SEQ ID NO: 586542
cccugaagauuugggaagu

SEQ ID NO: 725753 - RNA, 19 nt, Artificial Sequence
  Description of Artificial Sequence: Synthetic oligonucleotide
  Antisense strand to SEQ ID NO: 725752
acuucccaaaucuucaggg

SEQ ID NO: 725754 - RNA, 19 nt, Artificial Sequence
  Description of Artificial Sequence: Synthetic oligonucleotide
  Sense strand starting at position 2284 of SEQ ID NO: 586542
ugggaagucuuucuccauc

SEQ ID NO: 725755 - RNA, 19 nt, Artificial Sequence
  Description of Artificial Sequence: Synthetic oligonucleotide
  Antisense strand to SEQ ID NO: 725754
gauggagaaagacuuccca

SEQ ID NO: 725756 - RNA, 19 nt, Artificial Sequence
  Description of Artificial Sequence: Synthetic oligonucleotide
  Sense strand starting at position 2372 of SEQ ID NO: 586542
gagcgucgucugucugcaa

SEQ ID NO: 725757 - RNA, 19 nt, Artificial Sequence
  Description of Artificial Sequence: Synthetic oligonucleotide
  Antisense strand to SEQ ID NO: 725756
uugcagacagacgacgcuc

SEQ ID NO: 725758 - RNA, 19 nt, Artificial Sequence
  Description of Artificial Sequence: Synthetic oligonucleotide
  Sense strand starting at position 2426 of SEQ ID NO: 586542
ggguacauguguaaagagu

SEQ ID NO: 725759 - RNA, 19 nt, Artificial Sequence
  Description of Artificial Sequence: Synthetic oligonucleotide
  Antisense strand to SEQ ID NO: 725758
acucuuuacacauguaccc

SEQ ID NO: 725760 - RNA, 19 nt, Artificial Sequence
  Description of Artificial Sequence: Synthetic oligonucleotide
  Sense strand starting at position 2534 of SEQ ID NO: 586542
gacgguaaugccuaccuga

SEQ ID NO: 725761 - RNA, 19 nt, Artificial Sequence
  Description of Artificial Sequence: Synthetic oligonucleotide
  Antisense strand to SEQ ID NO: 725760
ucagguaggcauuaccguc

SEQ ID NO: 725762 - RNA, 19 nt, Artificial Sequence
  Description of Artificial Sequence: Synthetic oligonucleotide
  Sense strand starting at position 2563 of SEQ ID NO: 586542
augaguaaaugagcuauga

SEQ ID NO: 725763 - RNA, 19 nt, Artificial Sequence
  Description of Artificial Sequence: Synthetic oligonucleotide
  Antisense strand to SEQ ID NO: 725762
ucauagcucauuuacucau

SEQ ID NO: 725764 - RNA, 19 nt, Artificial Sequence
  Description of Artificial Sequence: Synthetic oligonucleotide
  Sense strand starting at position 2565 of SEQ ID NO: 586542
gaguaaaugagcuaugagu

SEQ ID NO: 725765 - RNA, 19 nt, Artificial Sequence
  Description of Artificial Sequence: Synthetic oligonucleotide
  Antisense strand to SEQ ID NO: 725764
acucauagcucauuuacuc

SEQ ID NO: 725766 - RNA, 19 nt, Artificial Sequence
  Description of Artificial Sequence: Synthetic oligonucleotide
  Sense strand starting at position 2573 of SEQ ID NO: 586542
gagcuaugagugcaaagug

SEQ ID NO: 725767 - RNA, 19 nt, Artificial Sequence
  Description of Artificial Sequence: Synthetic oligonucleotide
  Antisense strand to SEQ ID NO: 725766
cacuuugcacucauagcuc

SEQ ID NO: 725768 - RNA, 19 nt, Artificial Sequence
  Description of Artificial Sequence: Synthetic oligonucleotide
  Sense strand starting at position 2626 of SEQ ID NO: 586542
gucaguuuccgucucauuc

SEQ ID NO: 725769 - RNA, 19 nt, Artificial Sequence
  Description of Artificial Sequence: Synthetic oligonucleotide
  Antisense strand to SEQ ID NO: 725768
gaaugagacggaaacugac

SEQ ID NO: 725770 - RNA, 19 nt, Artificial Sequence
  Description of Artificial Sequence: Synthetic oligonucleotide
  Sense strand starting at position 2802 of SEQ ID NO: 586542
uuucuacugugguuuagaa

SEQ ID NO: 725771 - RNA, 19 nt, Artificial Sequence
  Description of Artificial Sequence: Synthetic oligonucleotide
  Antisense strand to SEQ ID NO: 725770
uucuaaaccacaguagaaa

SEQ ID NO: 725772 - RNA, 19 nt, Artificial Sequence
  Description of Artificial Sequence: Synthetic oligonucleotide
  Sense strand starting at position 2804 of SEQ ID NO: 586542
ucuacugugguuuagaagu

SEQ ID NO: 725773 - RNA, 19 nt, Artificial Sequence
  Description of Artificial Sequence: Synthetic oligonucleotide
  Antisense strand to SEQ ID NO: 725772
acuucuaaaccacaguaga

SEQ ID NO: 725774 - RNA, 19 nt, Artificial Sequence
  Description of Artificial Sequence: Synthetic oligonucleotide
  Sense strand starting at position 2812 of SEQ ID NO: 586542
gguuuagaagucgguauag

SEQ ID NO: 725775 - RNA, 19 nt, Artificial Sequence
  Description of Artificial Sequence: Synthetic oligonucleotide
  Antisense strand to SEQ ID NO: 725774
cuauaccgacuucuaaacc

SEQ ID NO: 725776 - RNA, 19 nt, Artificial Sequence
  Description of Artificial Sequence: Synthetic oligonucleotide
  Sense strand starting at position 2814 of SEQ ID NO: 586542
uuuagaagucgguauagua

SEQ ID NO: 725777 - RNA, 19 nt, Artificial Sequence
  Description of Artificial Sequence: Synthetic oligonucleotide
  Antisense strand to SEQ ID NO: 725776
uacuauaccgacuucuaaa

SEQ ID NO: 725778 - RNA, 19 nt, Artificial Sequence
  Description of Artificial Sequence: Synthetic oligonucleotide
  Sense strand starting at position 2831 of SEQ ID NO: 586542
uaaguuaaggguuguuaga

SEQ ID NO: 725779 - RNA, 19 nt, Artificial Sequence
  Description of Artificial Sequence: Synthetic oligonucleotide
  Antisense strand to SEQ ID NO: 725778
ucuaacaacccuuaacuua

SEQ ID NO: 725780 - RNA, 19 nt, Artificial Sequence
  Description of Artificial Sequence: Synthetic oligonucleotide
  Sense strand starting at position 2833 of SEQ ID NO: 586542
aguuaaggguuguuagaug

SEQ ID NO: 725781 - RNA, 19 nt, Artificial Sequence
  Description of Artificial Sequence: Synthetic oligonucleotide
  Antisense strand to SEQ ID NO: 725780
caucuaacaacccuuaacu

SEQ ID NO: 725782 - RNA, 19 nt, Artificial Sequence
  Description of Artificial Sequence: Synthetic oligonucleotide
  Sense strand starting at position 2840 of SEQ ID NO: 586542
gguuguuagaugugcauuu

SEQ ID NO: 725783 - RNA, 19 nt, Artificial Sequence
  Description of Artificial Sequence: Synthetic oligonucleotide
  Antisense strand to SEQ ID NO: 725782
aaaugcacaucuaacaacc

SEQ ID NO: 725784 - RNA, 19 nt, Artificial Sequence
  Description of Artificial Sequence: Synthetic oligonucleotide
  Sense strand starting at position 2933 of SEQ ID NO: 586542
ucagaagggcuucgaggua

SEQ ID NO: 725785 - RNA, 19 nt, Artificial Sequence
  Description of Artificial Sequence: Synthetic oligonucleotide
  Antisense strand to SEQ ID NO: 725784
uaccucgaagcccuucuga

SEQ ID NO: 725786 - RNA, 19 nt, Artificial Sequence
  Description of Artificial Sequence: Synthetic oligonucleotide
  Sense strand starting at position 2948 of SEQ ID NO: 586542
gguagccaccacugaauua

SEQ ID NO: 725787 - RNA, 19 nt, Artificial Sequence
  Description of Artificial Sequence: Synthetic oligonucleotide
  Antisense strand to SEQ ID NO: 725786
uaauucagugguggcuacc

SEQ ID NO: 725788 - RNA, 19 nt, Artificial Sequence
  Description of Artificial Sequence: Synthetic oligonucleotide
  Sense strand starting at position 3148 of SEQ ID NO: 586542
uaagccuagcugggaaauu

SEQ ID NO: 725789 - RNA, 19 nt, Artificial Sequence
  Description of Artificial Sequence: Synthetic oligonucleotide
  Antisense strand to SEQ ID NO: 725788
aauuucccagcuaggcuua

SEQ ID NO: 725790 - RNA, 19 nt, Artificial Sequence
  Description of Artificial Sequence: Synthetic oligonucleotide
  Sense strand starting at position 3648 of SEQ ID NO: 586542
ccacgauucucuuccauga

SEQ ID NO: 725791 - RNA, 19 nt, Artificial Sequence
  Description of Artificial Sequence: Synthetic oligonucleotide
  Antisense strand to SEQ ID NO: 725790
ucauggaagagaaucgugg

SEQ ID NO: 725792 - RNA, 19 nt, Artificial Sequence
  Description of Artificial Sequence: Synthetic oligonucleotide
  Sense strand starting at position 3865 of SEQ ID NO: 586542
ggaggaaauucuuccucuc

SEQ ID NO: 725793 - RNA, 19 nt, Artificial Sequence
  Description of Artificial Sequence: Synthetic oligonucleotide
  Antisense strand to SEQ ID NO: 725792
gagaggaagaauuuccucc

SEQ ID NO: 725794 - RNA, 19 nt, Artificial Sequence
  Description of Artificial Sequence: Synthetic oligonucleotide
  Sense strand starting at position 3958 of SEQ ID NO: 586542
accauaucuuagcuguacu

SEQ ID NO: 725795 - RNA, 19 nt, Artificial Sequence
  Description of Artificial Sequence: Synthetic oligonucleotide
  Antisense strand to SEQ ID NO: 725794
aguacagcuaagauauggu

SEQ ID NO: 725796 - RNA, 19 nt, Artificial Sequence
  Description of Artificial Sequence: Synthetic oligonucleotide
  Sense strand starting at position 3961 of SEQ ID NO: 586542
auaucuuagcuguacucua

SEQ ID NO: 725797 - RNA, 19 nt, Artificial Sequence
  Description of Artificial Sequence: Synthetic oligonucleotide
  Antisense strand to SEQ ID NO: 725796
uagaguacagcuaagauau

SEQ ID NO: 725798 - RNA, 19 nt, Artificial Sequence
  Description of Artificial Sequence: Synthetic oligonucleotide
  Sense strand starting at position 566 of SEQ ID NO: 586543
acaugucaagcaugauaac

SEQ ID NO: 725799 - RNA, 19 nt, Artificial Sequence
  Description of Artificial Sequence: Synthetic oligonucleotide
  Antisense strand to SEQ ID NO: 725798
guuaucaugcuugacaugu

SEQ ID NO: 725800 - RNA, 19 nt, Artificial Sequence
  Description of Artificial Sequence: Synthetic oligonucleotide
  Sense strand starting at position 1076 of SEQ ID NO: 586543
cggcaaauccaagggagaa

SEQ ID NO: 725801 - RNA, 19 nt, Artificial Sequence
  Description of Artificial Sequence: Synthetic oligonucleotide
  Antisense strand to SEQ ID NO: 725800
uucucccuuggauuugccg

SEQ ID NO: 725802 - RNA, 19 nt, Artificial Sequence
  Description of Artificial Sequence: Synthetic oligonucleotide
  Sense strand starting at position 1164 of SEQ ID NO: 586543
aggcauccguacccagaaa

SEQ ID NO: 725803 - RNA, 19 nt, Artificial Sequence
  Description of Artificial Sequence: Synthetic oligonucleotide
  Antisense strand to SEQ ID NO: 725802
uuucuggguacggaugccu

SEQ ID NO: 725804 - RNA, 19 nt, Artificial Sequence
  Description of Artificial Sequence: Synthetic oligonucleotide
  Sense strand starting at position 1278 of SEQ ID NO: 586543
agucguaauuuggcuccaa

SEQ ID NO: 725805 - RNA, 19 nt, Artificial Sequence
  Description of Artificial Sequence: Synthetic oligonucleotide
  Antisense strand to SEQ ID NO: 725804
uuggagccaaauuacgacu

SEQ ID NO: 725806 - RNA, 19 nt, Artificial Sequence
  Description of Artificial Sequence: Synthetic oligonucleotide
  Sense strand starting at position 1279 of SEQ ID NO: 586543
gucguaauuuggcuccaaa

SEQ ID NO: 725807 - RNA, 19 nt, Artificial Sequence
  Description of Artificial Sequence: Synthetic oligonucleotide
  Antisense strand to SEQ ID NO: 725806
uuuggagccaaauuacgac

SEQ ID NO: 725808 - RNA, 19 nt, Artificial Sequence
  Description of Artificial Sequence: Synthetic oligonucleotide
  Sense strand starting at position 1315 of SEQ ID NO: 586543
ggaguagugcauuaucaug

SEQ ID NO: 725809 - RNA, 19 nt, Artificial Sequence
  Description of Artificial Sequence: Synthetic oligonucleotide
  Antisense strand to SEQ ID NO: 725808
caugauaaugcacuacucc

SEQ ID NO: 725810 - RNA, 19 nt, Artificial Sequence
  Description of Artificial Sequence: Synthetic oligonucleotide
  Sense strand starting at position 1317 of SEQ ID NO: 586543
aguagugcauuaucaugaa

SEQ ID NO: 725811 - RNA, 19 nt, Artificial Sequence
  Description of Artificial Sequence: Synthetic oligonucleotide
  Antisense strand to SEQ ID NO: 725810
uucaugauaaugcacuacu

SEQ ID NO: 725812 - RNA, 19 nt, Artificial Sequence
  Description of Artificial Sequence: Synthetic oligonucleotide
  Sense strand starting at position 1414 of SEQ ID NO: 586543
gcuuuaaacuuguccaaag

SEQ ID NO: 725813 - RNA, 19 nt, Artificial Sequence
  Description of Artificial Sequence: Synthetic oligonucleotide
  Antisense strand to SEQ ID NO: 725812
cuuuggacaaguuuaaagc

SEQ ID NO: 725814 - RNA, 19 nt, Artificial Sequence
  Description of Artificial Sequence: Synthetic oligonucleotide
  Sense strand starting at position 1687 of SEQ ID NO: 586543
ggaagguuagcaggagagu

SEQ ID NO: 725815 - RNA, 19 nt, Artificial Sequence
  Description of Artificial Sequence: Synthetic oligonucleotide
  Antisense strand to SEQ ID NO: 725814
acucuccugcuaaccuucc

SEQ ID NO: 725816 - RNA, 19 nt, Artificial Sequence
  Description of Artificial Sequence: Synthetic oligonucleotide
  Sense strand starting at position 1688 of SEQ ID NO: 586543
gaagguuagcaggagaguu

SEQ ID NO: 725817 - RNA, 19 nt, Artificial Sequence
  Description of Artificial Sequence: Synthetic oligonucleotide
  Antisense strand to SEQ ID NO: 725816
aacucuccugcuaaccuuc

SEQ ID NO: 725818 - RNA, 19 nt, Artificial Sequence
  Description of Artificial Sequence: Synthetic oligonucleotide
  Sense strand starting at position 1690 of SEQ ID NO: 586543
agguuagcaggagaguuaa

SEQ ID NO: 725819 - RNA, 19 nt, Artificial Sequence
  Description of Artificial Sequence: Synthetic oligonucleotide
  Antisense strand to SEQ ID NO: 725818
uuaacucuccugcuaaccu

SEQ ID NO: 725820 - RNA, 19 nt, Artificial Sequence
  Description of Artificial Sequence: Synthetic oligonucleotide
  Sense strand starting at position 1817 of SEQ ID NO: 586543
ggaguuuggucacccacau

SEQ ID NO: 725821 - RNA, 19 nt, Artificial Sequence
  Description of Artificial Sequence: Synthetic oligonucleotide
  Antisense strand to SEQ ID NO: 725820
augugggugaccaaacucc

SEQ ID NO: 725822 - RNA, 19 nt, Artificial Sequence
  Description of Artificial Sequence: Synthetic oligonucleotide
  Sense strand starting at position 1854 of SEQ ID NO: 586543
ggcggaucccucuggagga

SEQ ID NO: 725823 - RNA, 19 nt, Artificial Sequence
  Description of Artificial Sequence: Synthetic oligonucleotide
  Antisense strand to SEQ ID NO: 725822
uccuccagagggauccgcc

SEQ ID NO: 725824 - RNA, 19 nt, Artificial Sequence
  Description of Artificial Sequence: Synthetic oligonucleotide
  Sense strand starting at position 1869 of SEQ ID NO: 586543
aggagaugccugggugaaa

SEQ ID NO: 725825 - RNA, 19 nt, Artificial Sequence
  Description of Artificial Sequence: Synthetic oligonucleotide
  Antisense strand to SEQ ID NO: 725824
uuucacccaggcaucuccu

SEQ ID NO: 725826 - RNA, 19 nt, Artificial Sequence
  Description of Artificial Sequence: Synthetic oligonucleotide
  Sense strand starting at position 1870 of SEQ ID NO: 586543
ggagaugccugggugaaag

SEQ ID NO: 725827 - RNA, 19 nt, Artificial Sequence
  Description of Artificial Sequence: Synthetic oligonucleotide
  Antisense strand to SEQ ID NO: 725826
cuuucacccaggcaucucc

SEQ ID NO: 725828 - RNA, 19 nt, Artificial Sequence
  Description of Artificial Sequence: Synthetic oligonucleotide
  Sense strand starting at position 1885 of SEQ ID NO: 586543
aaagaauccuguucggagu

SEQ ID NO: 725829 - RNA, 19 nt, Artificial Sequence
  Description of Artificial Sequence: Synthetic oligonucleotide
  Antisense strand to SEQ ID NO: 725828
acuccgaacaggauucuuu

SEQ ID NO: 725830 - RNA, 19 nt, Artificial Sequence
  Description of Artificial Sequence: Synthetic oligonucleotide
  Sense strand starting at position 1963 of SEQ ID NO: 586543
uugugugauuaacuggaaa

SEQ ID NO: 725831 - RNA, 19 nt, Artificial Sequence
  Description of Artificial Sequence: Synthetic oligonucleotide
  Antisense strand to SEQ ID NO: 725830
uuuccaguuaaucacacaa

SEQ ID NO: 725832 - RNA, 19 nt, Artificial Sequence
  Description of Artificial Sequence: Synthetic oligonucleotide
  Sense strand starting at position 1965 of SEQ ID NO: 586543
gugugauuaacuggaaaga

SEQ ID NO: 725833 - RNA, 19 nt, Artificial Sequence
  Description of Artificial Sequence: Synthetic oligonucleotide
  Antisense strand to SEQ ID NO: 725832
ucuuuccaguuaaucacac

SEQ ID NO: 725834 - RNA, 19 nt, Artificial Sequence
  Description of Artificial Sequence: Synthetic oligonucleotide
  Sense strand starting at position 1997 of SEQ ID NO: 586543
ucccucuuacgguaagaaa

SEQ ID NO: 725835 - RNA, 19 nt, Artificial Sequence
  Description of Artificial Sequence: Synthetic oligonucleotide
  Antisense strand to SEQ ID NO: 725834
uuucuuaccguaagaggga

SEQ ID NO: 725836 - RNA, 19 nt, Artificial Sequence
  Description of Artificial Sequence: Synthetic oligonucleotide
  Sense strand starting at position 2005 of SEQ ID NO: 586543
acgguaagaaacuguuuaa

SEQ ID NO: 725837 - RNA, 19 nt, Artificial Sequence
  Description of Artificial Sequence: Synthetic oligonucleotide
  Antisense strand to SEQ ID NO: 725836
uuaaacaguuucuuaccgu

SEQ ID NO: 725838 - RNA, 19 nt, Artificial Sequence
  Description of Artificial Sequence: Synthetic oligonucleotide
  Sense strand starting at position 2008 of SEQ ID NO: 586543
guaagaaacuguuuaacaa

SEQ ID NO: 725839 - RNA, 19 nt, Artificial Sequence
  Description of Artificial Sequence: Synthetic oligonucleotide
  Antisense strand to SEQ ID NO: 725838
uuguuaaacaguuucuuac

SEQ ID NO: 725840 - RNA, 19 nt, Artificial Sequence
  Description of Artificial Sequence: Synthetic oligonucleotide
  Sense strand starting at position 2220 of SEQ ID NO: 586543
cuccuauccgaguaaggaa

SEQ ID NO: 725841 - RNA, 19 nt, Artificial Sequence
  Description of Artificial Sequence: Synthetic oligonucleotide
  Antisense strand to SEQ ID NO: 725840
uuccuuacucggauaggag

SEQ ID NO: 725842 - RNA, 19 nt, Artificial Sequence
  Description of Artificial Sequence: Synthetic oligonucleotide
  Sense strand starting at position 2786 of SEQ ID NO: 586543
agaaacagucauuguccau

SEQ ID NO: 725843 - RNA, 19 nt, Artificial Sequence
  Description of Artificial Sequence: Synthetic oligonucleotide
  Antisense strand to SEQ ID NO: 725842
auggacaaugacuguuucu

SEQ ID NO: 725844 - RNA, 19 nt, Artificial Sequence
  Description of Artificial Sequence: Synthetic oligonucleotide
  Sense strand starting at position 2881 of SEQ ID NO: 586543
ugguguguauguacguaua

SEQ ID NO: 725845 - RNA, 19 nt, Artificial Sequence
  Description of Artificial Sequence: Synthetic oligonucleotide
  Antisense strand to SEQ ID NO: 725844
uauacguacauacacacca

SEQ ID NO: 725846 - RNA, 19 nt, Artificial Sequence
  Description of Artificial Sequence: Synthetic oligonucleotide
  Sense strand starting at position 2943 of SEQ ID NO: 586543
ugaauucgugaguacugaa

SEQ ID NO: 725847 - RNA, 19 nt, Artificial Sequence
  Description of Artificial Sequence: Synthetic oligonucleotide
  Antisense strand to SEQ ID NO: 725846
uucaguacucacgaauuca

SEQ ID NO: 725848 - RNA, 19 nt, Artificial Sequence
  Description of Artificial Sequence: Synthetic oligonucleotide
  Sense strand starting at position 3010 of SEQ ID NO: 586543
cccaaaguguaaguggaaa

SEQ ID NO: 725849 - RNA, 19 nt, Artificial Sequence
  Description of Artificial Sequence: Synthetic oligonucleotide
  Antisense strand to SEQ ID NO: 725848
uuuccacuuacacuuuggg

SEQ ID NO: 725850 - RNA, 19 nt, Artificial Sequence
  Description of Artificial Sequence: Synthetic oligonucleotide
  Sense strand starting at position 3012 of SEQ ID NO: 586543
caaaguguaaguggaaaga

SEQ ID NO: 725851 - RNA, 19 nt, Artificial Sequence
  Description of Artificial Sequence: Synthetic oligonucleotide
  Antisense strand to SEQ ID NO: 725850
ucuuuccacuuacacuuug

SEQ ID NO: 725852 - RNA, 19 nt, Artificial Sequence
  Description of Artificial Sequence: Synthetic oligonucleotide
  Sense strand starting at position 3065 of SEQ ID NO: 586543
guaucaaauccuugugaga

SEQ ID NO: 725853 - RNA, 19 nt, Artificial Sequence
  Description of Artificial Sequence: Synthetic oligonucleotide
  Antisense strand to SEQ ID NO: 725852
ucucacaaggauuugauac

SEQ ID NO: 725854 - RNA, 19 nt, Artificial Sequence
  Description of Artificial Sequence: Synthetic oligonucleotide
  Sense strand starting at position 3078 of SEQ ID NO: 586543
gugagaucauugcccagac

SEQ ID NO: 725855 - RNA, 19 nt, Artificial Sequence
  Description of Artificial Sequence: Synthetic oligonucleotide
  Antisense strand to SEQ ID NO: 725854
gucugggcaaugaucucac

SEQ ID NO: 725856 - RNA, 19 nt, Artificial Sequence
  Description of Artificial Sequence: Synthetic oligonucleotide
  Sense strand starting at position 3158 of SEQ ID NO: 586543
gcaagagccugcuuuauuu

SEQ ID NO: 725857 - RNA, 19 nt, Artificial Sequence
  Description of Artificial Sequence: Synthetic oligonucleotide
  Antisense strand to SEQ ID NO: 725856
aaauaaagcaggcucuugc

SEQ ID NO: 725858 - RNA, 19 nt, Artificial Sequence
  Description of Artificial Sequence: Synthetic oligonucleotide
  Sense strand starting at position 3203 of SEQ ID NO: 586543
ccuguaucucucugagaug

SEQ ID NO: 725859 - RNA, 19 nt, Artificial Sequence
  Description of Artificial Sequence: Synthetic oligonucleotide
  Antisense strand to SEQ ID NO: 725858
caucucagagagauacagg

SEQ ID NO: 725860 - RNA, 19 nt, Artificial Sequence
  Description of Artificial Sequence: Synthetic oligonucleotide
  Sense strand starting at position 3209 of SEQ ID NO: 586543
ucucucugagauggauauu

SEQ ID NO: 725861 - RNA, 19 nt, Artificial Sequence
  Description of Artificial Sequence: Synthetic oligonucleotide
  Antisense strand to SEQ ID NO: 725860
aauauccaucucagagaga

SEQ ID NO: 725862 - RNA, 19 nt, Artificial Sequence
  Description of Artificial Sequence: Synthetic oligonucleotide
  Sense strand starting at position 3268 of SEQ ID NO: 586543
aggccaaaugugggaauga

SEQ ID NO: 725863 - RNA, 19 nt, Artificial Sequence
  Description of Artificial Sequence: Synthetic oligonucleotide
  Antisense strand to SEQ ID NO: 725862
ucauucccacauuuggccu

SEQ ID NO: 725864 - RNA, 19 nt, Artificial Sequence
  Description of Artificial Sequence: Synthetic oligonucleotide
  Sense strand starting at position 3298 of SEQ ID NO: 586543
gguagcuguacagaaguga

SEQ ID NO: 725865 - RNA, 19 nt, Artificial Sequence
  Description of Artificial Sequence: Synthetic oligonucleotide
  Antisense strand to SEQ ID NO: 725864
ucacuucuguacagcuacc

SEQ ID NO: 725866 - RNA, 19 nt, Artificial Sequence
  Description of Artificial Sequence: Synthetic oligonucleotide
  Sense strand starting at position 3422 of SEQ ID NO: 586543
ccugauaagucccugaggu

SEQ ID NO: 725867 - RNA, 19 nt, Artificial Sequence
  Description of Artificial Sequence: Synthetic oligonucleotide
  Antisense strand to SEQ ID NO: 725866
accucagggacuuaucagg

SEQ ID NO: 725868 - RNA, 19 nt, Artificial Sequence
  Description of Artificial Sequence: Synthetic oligonucleotide
  Sense strand starting at position 3423 of SEQ ID NO: 586543
cugauaagucccugagguu

SEQ ID NO: 725869 - RNA, 19 nt, Artificial Sequence
  Description of Artificial Sequence: Synthetic oligonucleotide
  Antisense strand to SEQ ID NO: 725868
aaccucagggacuuaucag

SEQ ID NO: 725870 - RNA, 19 nt, Artificial Sequence
  Description of Artificial Sequence: Synthetic oligonucleotide
  Sense strand starting at position 3424 of SEQ ID NO: 586543
ugauaagucccugagguug

SEQ ID NO: 725871 - RNA, 19 nt, Artificial Sequence
  Description of Artificial Sequence: Synthetic oligonucleotide
  Antisense strand to SEQ ID NO: 725870
caaccucagggacuuauca

SEQ ID NO: 725872 - RNA, 19 nt, Artificial Sequence
  Description of Artificial Sequence: Synthetic oligonucleotide
  Sense strand starting at position 3908 of SEQ ID NO: 586543
ucaacuuucugugugaaau

SEQ ID NO: 725873 - RNA, 19 nt, Artificial Sequence
  Description of Artificial Sequence: Synthetic oligonucleotide
  Antisense strand to SEQ ID NO: 725872
auuucacacagaaaguuga

SEQ ID NO: 725874 - RNA, 19 nt, Artificial Sequence
  Description of Artificial Sequence: Synthetic oligonucleotide
  Sense strand starting at position 3919 of SEQ ID NO: 586543
ugugaaaucuggccauaaa

SEQ ID NO: 725875 - RNA, 19 nt, Artificial Sequence
  Description of Artificial Sequence: Synthetic oligonucleotide
  Antisense strand to SEQ ID NO: 725874
uuuauggccagauuucaca

SEQ ID NO: 725876 - RNA, 19 nt, Artificial Sequence
  Description of Artificial Sequence: Synthetic oligonucleotide
  Sense strand starting at position 3960 of SEQ ID NO: 586543
uugaucguagcucauaaga

SEQ ID NO: 725877 - RNA, 19 nt, Artificial Sequence
  Description of Artificial Sequence: Synthetic oligonucleotide
  Antisense strand to SEQ ID NO: 725876
ucuuaugagcuacgaucaa

SEQ ID NO: 725878 - RNA, 19 nt, Artificial Sequence
  Description of Artificial Sequence: Synthetic oligonucleotide
  Sense strand starting at position 101 of SEQ ID NO: 586544
uuuguagcucaauauauga

SEQ ID NO: 725879 - RNA, 19 nt, Artificial Sequence
  Description of Artificial Sequence: Synthetic oligonucleotide
  Antisense strand to SEQ ID NO: 725878
ucauauauugagcuacaaa

SEQ ID NO: 725880 - RNA, 19 nt, Artificial Sequence
  Description of Artificial Sequence: Synthetic oligonucleotide
  Sense strand starting at position 122 of SEQ ID NO: 586544
cucaaacagugguuacauu

SEQ ID NO: 725881 - RNA, 19 nt, Artificial Sequence
  Description of Artificial Sequence: Synthetic oligonucleotide
  Antisense strand to SEQ ID NO: 725880
aauguaaccacuguuugag

SEQ ID NO: 725882 - RNA, 19 nt, Artificial Sequence
  Description of Artificial Sequence: Synthetic oligonucleotide
  Sense strand starting at position 280 of SEQ ID NO: 586544
gcuguuaagaauuguaaga

SEQ ID NO: 725883 - RNA, 19 nt, Artificial Sequence
  Description of Artificial Sequence: Synthetic oligonucleotide
  Antisense strand to SEQ ID NO: 725882
ucuuacaauucuuaacagc

SEQ ID NO: 725884 - RNA, 19 nt, Artificial Sequence
  Description of Artificial Sequence: Synthetic oligonucleotide
  Sense strand starting at position 285 of SEQ ID NO: 586544
uaagaauuguaagagaaag

SEQ ID NO: 725885 - RNA, 19 nt, Artificial Sequence
  Description of Artificial Sequence: Synthetic oligonucleotide
  Antisense strand to SEQ ID NO: 725884
cuuucucuuacaauucuua

SEQ ID NO: 725886 - RNA, 19 nt, Artificial Sequence
  Description of Artificial Sequence: Synthetic oligonucleotide
  Sense strand starting at position 694 of SEQ ID NO: 586544
uguuauuaauccucaguau

SEQ ID NO: 725887 - RNA, 19 nt, Artificial Sequence
  Description of Artificial Sequence: Synthetic oligonucleotide
  Antisense strand to SEQ ID NO: 725886
auacugaggauuaauaaca

SEQ ID NO: 725888 - RNA, 19 nt, Artificial Sequence
  Description of Artificial Sequence: Synthetic oligonucleotide
  Sense strand starting at position 695 of SEQ ID NO: 586544
guuauuaauccucaguaug

SEQ ID NO: 725889 - RNA, 19 nt, Artificial Sequence
  Description of Artificial Sequence: Synthetic oligonucleotide
  Antisense strand to SEQ ID NO: 725888
cauacugaggauuaauaac

SEQ ID NO: 725890 - RNA, 19 nt, Artificial Sequence
  Description of Artificial Sequence: Synthetic oligonucleotide
  Sense strand starting at position 811 of SEQ ID NO: 586544
ggaguccuggugugauaga

SEQ ID NO: 725891 - RNA, 19 nt, Artificial Sequence
  Description of Artificial Sequence: Synthetic oligonucleotide
  Antisense strand to SEQ ID NO: 725890
ucuaucacaccaggacucc

SEQ ID NO: 725892 - RNA, 19 nt, Artificial Sequence
  Description of Artificial Sequence: Synthetic oligonucleotide
  Sense strand starting at position 816 of SEQ ID NO: 586544
ccuggugugauagaaaguu

SEQ ID NO: 725893 - RNA, 19 nt, Artificial Sequence
  Description of Artificial Sequence: Synthetic oligonucleotide
  Antisense strand to SEQ ID NO: 725892
aacuuucuaucacaccagg

SEQ ID NO: 725894 - RNA, 19 nt, Artificial Sequence
  Description of Artificial Sequence: Synthetic oligonucleotide
  Sense strand starting at position 865 of SEQ ID NO: 586544
cuaggucuugcugggaaua

SEQ ID NO: 725895 - RNA, 19 nt, Artificial Sequence
  Description of Artificial Sequence: Synthetic oligonucleotide
  Antisense strand to SEQ ID NO: 725894
uauucccagcaagaccuag

SEQ ID NO: 725896 - RNA, 19 nt, Artificial Sequence
  Description of Artificial Sequence: Synthetic oligonucleotide
  Sense strand starting at position 866 of SEQ ID NO: 586544
uaggucuugcugggaauau

SEQ ID NO: 725897 - RNA, 19 nt, Artificial Sequence
  Description of Artificial Sequence: Synthetic oligonucleotide
  Antisense strand to SEQ ID NO: 725896
auauucccagcaagaccua

SEQ ID NO: 725898 - RNA, 19 nt, Artificial Sequence
  Description of Artificial Sequence: Synthetic oligonucleotide
  Sense strand starting at position 923 of SEQ ID NO: 586544
cggaguaugaaagacugua

SEQ ID NO: 725899 - RNA, 19 nt, Artificial Sequence
  Description of Artificial Sequence: Synthetic oligonucleotide
  Antisense strand to SEQ ID NO: 725898
uacagucuuucauacuccg

SEQ ID NO: 725900 - RNA, 19 nt, Artificial Sequence
  Description of Artificial Sequence: Synthetic oligonucleotide
  Sense strand starting at position 938 of SEQ ID NO: 586544
uguauuagaucuccgugga

SEQ ID NO: 725901 - RNA, 19 nt, Artificial Sequence
  Description of Artificial Sequence: Synthetic oligonucleotide
  Antisense strand to SEQ ID NO: 725900
uccacggagaucuaauaca

SEQ ID NO: 725902 - RNA, 19 nt, Artificial Sequence
  Description of Artificial Sequence: Synthetic oligonucleotide
  Sense strand starting at position 939 of SEQ ID NO: 586544
guauuagaucuccguggau

SEQ ID NO: 725903 - RNA, 19 nt, Artificial Sequence
  Description of Artificial Sequence: Synthetic oligonucleotide
  Antisense strand to SEQ ID NO: 725902
auccacggagaucuaauac

SEQ ID NO: 725904 - RNA, 19 nt, Artificial Sequence
  Description of Artificial Sequence: Synthetic oligonucleotide
  Sense strand starting at position 941 of SEQ ID NO: 586544
auuagaucuccguggaucu

SEQ ID NO: 725905 - RNA, 19 nt, Artificial Sequence
  Description of Artificial Sequence: Synthetic oligonucleotide
  Antisense strand to SEQ ID NO: 725904
agauccacggagaucuaau

SEQ ID NO: 725906 - RNA, 19 nt, Artificial Sequence
  Description of Artificial Sequence: Synthetic oligonucleotide
  Sense strand starting at position 942 of SEQ ID NO: 586544
uuagaucuccguggaucuu

SEQ ID NO: 725907 - RNA, 19 nt, Artificial Sequence
  Description of Artificial Sequence: Synthetic oligonucleotide
  Antisense strand to SEQ ID NO: 725906
aagauccacggagaucuaa

SEQ ID NO: 725908 - RNA, 19 nt, Artificial Sequence
  Description of Artificial Sequence: Synthetic oligonucleotide
  Sense strand starting at position 1011 of SEQ ID NO: 586544
aauuuaccaugguaugaga

SEQ ID NO: 725909 - RNA, 19 nt, Artificial Sequence
  Description of Artificial Sequence: Synthetic oligonucleotide
  Antisense strand to SEQ ID NO: 725908
ucucauaccaugguaaauu

SEQ ID NO: 725910 - RNA, 19 nt, Artificial Sequence
  Description of Artificial Sequence: Synthetic oligonucleotide
  Sense strand starting at position 1040 of SEQ ID NO: 586544
aggauuaauucugcccaca

SEQ ID NO: 725911 - RNA, 19 nt, Artificial Sequence
  Description of Artificial Sequence: Synthetic oligonucleotide
  Antisense strand to SEQ ID NO: 725910
ugugggcagaauuaauccu

SEQ ID NO: 725912 - RNA, 19 nt, Artificial Sequence
  Description of Artificial Sequence: Synthetic oligonucleotide
  Sense strand starting at position 1198 of SEQ ID NO: 586544
cagccaccgcuuguguaau

SEQ ID NO: 725913 - RNA, 19 nt, Artificial Sequence
  Description of Artificial Sequence: Synthetic oligonucleotide
  Antisense strand to SEQ ID NO: 725912
auuacacaagcgguggcug

SEQ ID NO: 725914 - RNA, 19 nt, Artificial Sequence
  Description of Artificial Sequence: Synthetic oligonucleotide
  Sense strand starting at position 1228 of SEQ ID NO: 586544
cucggacucaggugguuaa

SEQ ID NO: 725915 - RNA, 19 nt, Artificial Sequence
  Description of Artificial Sequence: Synthetic oligonucleotide
  Antisense strand to SEQ ID NO: 725914
uuaaccaccugaguccgag

SEQ ID NO: 725916 - RNA, 19 nt, Artificial Sequence
  Description of Artificial Sequence: Synthetic oligonucleotide
  Sense strand starting at position 1229 of SEQ ID NO: 586544
ucggacucaggugguuaaa

SEQ ID NO: 725917 - RNA, 19 nt, Artificial Sequence
  Description of Artificial Sequence: Synthetic oligonucleotide
  Antisense strand to SEQ ID NO: 725916
uuuaaccaccugaguccga

SEQ ID NO: 725918 - RNA, 19 nt, Artificial Sequence
  Description of Artificial Sequence: Synthetic oligonucleotide
  Sense strand starting at position 1231 of SEQ ID NO: 586544
ggacucaggugguuaaaca

SEQ ID NO: 725919 - RNA, 19 nt, Artificial Sequence
  Description of Artificial Sequence: Synthetic oligonucleotide
  Antisense strand to SEQ ID NO: 725918
uguuuaaccaccugagucc

SEQ ID NO: 725920 - RNA, 19 nt, Artificial Sequence
  Description of Artificial Sequence: Synthetic oligonucleotide
  Sense strand starting at position 1515 of SEQ ID NO: 586544
ggguacucgcggagugagu

SEQ ID NO: 725921 - RNA, 19 nt, Artificial Sequence
  Description of Artificial Sequence: Synthetic oligonucleotide
  Antisense strand to SEQ ID NO: 725920
acucacuccgcgaguaccc

SEQ ID NO: 725922 - RNA, 19 nt, Artificial Sequence
  Description of Artificial Sequence: Synthetic oligonucleotide
  Sense strand starting at position 2136 of SEQ ID NO: 586544
ggagucuccuuguuuacca

SEQ ID NO: 725923 - RNA, 19 nt, Artificial Sequence
  Description of Artificial Sequence: Synthetic oligonucleotide
  Antisense strand to SEQ ID NO: 725922
ugguaaacaaggagacucc

SEQ ID NO: 725924 - RNA, 19 nt, Artificial Sequence
  Description of Artificial Sequence: Synthetic oligonucleotide
  Sense strand starting at position 2138 of SEQ ID NO: 586544
agucuccuuguuuaccaaa

SEQ ID NO: 725925 - RNA, 19 nt, Artificial Sequence
  Description of Artificial Sequence: Synthetic oligonucleotide
  Antisense strand to SEQ ID NO: 725924
uuugguaaacaaggagacu

SEQ ID NO: 725926 - RNA, 19 nt, Artificial Sequence
  Description of Artificial Sequence: Synthetic oligonucleotide
  Sense strand starting at position 2280 of SEQ ID NO: 586544
cuaccauguguguaauaac

SEQ ID NO: 725927 - RNA, 19 nt, Artificial Sequence
  Description of Artificial Sequence: Synthetic oligonucleotide
  Antisense strand to SEQ ID NO: 725926
guuauuacacacaugguag

SEQ ID NO: 725928 - RNA, 19 nt, Artificial Sequence
  Description of Artificial Sequence: Synthetic oligonucleotide
  Sense strand starting at position 2365 of SEQ ID NO: 586544
uugguaacauuaucuuuga

SEQ ID NO: 725929 - RNA, 19 nt, Artificial Sequence
  Description of Artificial Sequence: Synthetic oligonucleotide
  Antisense strand to SEQ ID NO: 725928
ucaaagauaauguuaccaa

SEQ ID NO: 725930 - RNA, 19 nt, Artificial Sequence
  Description of Artificial Sequence: Synthetic oligonucleotide
  Sense strand starting at position 2366 of SEQ ID NO: 586544
ugguaacauuaucuuugaa

SEQ ID NO: 725931 - RNA, 19 nt, Artificial Sequence
  Description of Artificial Sequence: Synthetic oligonucleotide
  Antisense strand to SEQ ID NO: 725930
uucaaagauaauguuacca

SEQ ID NO: 725932 - RNA, 19 nt, Artificial Sequence
  Description of Artificial Sequence: Synthetic oligonucleotide
  Sense strand starting at position 2368 of SEQ ID NO: 586544
guaacauuaucuuugaagg

SEQ ID NO: 725933 - RNA, 19 nt, Artificial Sequence
  Description of Artificial Sequence: Synthetic oligonucleotide
  Antisense strand to SEQ ID NO: 725932
ccuucaaagauaauguuac

SEQ ID NO: 725934 - RNA, 19 nt, Artificial Sequence
  Description of Artificial Sequence: Synthetic oligonucleotide
  Sense strand starting at position 2852 of SEQ ID NO: 586544
agucauucuucugucaaug

SEQ ID NO: 725935 - RNA, 19 nt, Artificial Sequence
  Description of Artificial Sequence: Synthetic oligonucleotide
  Antisense strand to SEQ ID NO: 725934
cauugacagaagaaugacu

SEQ ID NO: 725936 - RNA, 19 nt, Artificial Sequence
  Description of Artificial Sequence: Synthetic oligonucleotide
  Sense strand starting at position 2977 of SEQ ID NO: 586544
gacuauagccuuuggagaa

SEQ ID NO: 725937 - RNA, 19 nt, Artificial Sequence
  Description of Artificial Sequence: Synthetic oligonucleotide
  Antisense strand to SEQ ID NO: 725936
uucuccaaaggcuauaguc

SEQ ID NO: 725938 - RNA, 19 nt, Artificial Sequence
  Description of Artificial Sequence: Synthetic oligonucleotide
  Sense strand starting at position 3013 of SEQ ID NO: 586544
agagaauguguauggagua

SEQ ID NO: 725939 - RNA, 19 nt, Artificial Sequence
  Description of Artificial Sequence: Synthetic oligonucleotide
  Antisense strand to SEQ ID NO: 725938
uacuccauacacauucucu

SEQ ID NO: 725940 - RNA, 19 nt, Artificial Sequence
  Description of Artificial Sequence: Synthetic oligonucleotide
  Sense strand starting at position 3100 of SEQ ID NO: 586544
cucaguaacccauggaguu

SEQ ID NO: 725941 - RNA, 19 nt, Artificial Sequence
  Description of Artificial Sequence: Synthetic oligonucleotide
  Antisense strand to SEQ ID NO: 725940
aacuccauggguuacugag

SEQ ID NO: 725942 - RNA, 19 nt, Artificial Sequence
  Description of Artificial Sequence: Synthetic oligonucleotide
  Sense strand starting at position 3463 of SEQ ID NO: 586544
auagaucuccugcaggcaa

SEQ ID NO: 725943 - RNA, 19 nt, Artificial Sequence
  Description of Artificial Sequence: Synthetic oligonucleotide
  Antisense strand to SEQ ID NO: 725942
uugccugcaggagaucuau

SEQ ID NO: 725944 - RNA, 19 nt, Artificial Sequence
  Description of Artificial Sequence: Synthetic oligonucleotide
  Sense strand starting at position 3569 of SEQ ID NO: 586544
ucaacugugucuccuccaa

SEQ ID NO: 725945 - RNA, 19 nt, Artificial Sequence
  Description of Artificial Sequence: Synthetic oligonucleotide
  Antisense strand to SEQ ID NO: 725944
uuggaggagacacaguuga

SEQ ID NO: 725946 - RNA, 19 nt, Artificial Sequence
  Description of Artificial Sequence: Synthetic oligonucleotide
  Sense strand starting at position 3573 of SEQ ID NO: 586544
cugugucuccuccaagaag

SEQ ID NO: 725947 - RNA, 19 nt, Artificial Sequence
  Description of Artificial Sequence: Synthetic oligonucleotide
  Antisense strand to SEQ ID NO: 725946
cuucuuggaggagacacag

SEQ ID NO: 725948 - RNA, 19 nt, Artificial Sequence
  Description of Artificial Sequence: Synthetic oligonucleotide
  Sense strand starting at position 3707 of SEQ ID NO: 586544
auucuuacuguuugaaggu

SEQ ID NO: 725949 - RNA, 19 nt, Artificial Sequence
  Description of Artificial Sequence: Synthetic oligonucleotide
  Antisense strand to SEQ ID NO: 725948
accuucaaacaguaagaau

SEQ ID NO: 725950 - RNA, 19 nt, Artificial Sequence
  Description of Artificial Sequence: Synthetic oligonucleotide
  Sense strand starting at position 3723 of SEQ ID NO: 586544
ggugcuugcagauauuauu

SEQ ID NO: 725951 - RNA, 19 nt, Artificial Sequence
  Description of Artificial Sequence: Synthetic oligonucleotide
  Antisense strand to SEQ ID NO: 725950
aauaauaucugcaagcacc

SEQ ID NO: 725952 - RNA, 19 nt, Artificial Sequence
  Description of Artificial Sequence: Synthetic oligonucleotide
  Sense strand starting at position 3839 of SEQ ID NO: 586544
gagucuuugccacgcauuu

SEQ ID NO: 725953 - RNA, 19 nt, Artificial Sequence
  Description of Artificial Sequence: Synthetic oligonucleotide
  Antisense strand to SEQ ID NO: 725952
aaaugcguggcaaagacuc

SEQ ID NO: 725954 - RNA, 19 nt, Artificial Sequence
  Description of Artificial Sequence: Synthetic oligonucleotide
  Sense strand starting at position 3919 of SEQ ID NO: 586544
guagauagguuucucccua

SEQ ID NO: 725955 - RNA, 19 nt, Artificial Sequence
  Description of Artificial Sequence: Synthetic oligonucleotide
  Antisense strand to SEQ ID NO: 725954
uagggagaaaccuaucuac

SEQ ID NO: 725956 - RNA, 19 nt, Artificial Sequence
  Description of Artificial Sequence: Synthetic oligonucleotide
  Sense strand starting at position 3923 of SEQ ID NO: 586544
auagguuucucccuauucu

SEQ ID NO: 725957 - RNA, 19 nt, Artificial Sequence
  Description of Artificial Sequence: Synthetic oligonucleotide
  Antisense strand to SEQ ID NO: 725956
agaauagggagaaaccuau

SEQ ID NO: 725958 - RNA, 19 nt, Artificial Sequence
  Description of Artificial Sequence: Synthetic oligonucleotide
  Sense strand starting at position 620 of SEQ ID NO: 586545
gccucuggacccugagaaa

SEQ ID NO: 725959 - RNA, 19 nt, Artificial Sequence
  Description of Artificial Sequence: Synthetic oligonucleotide
  Antisense strand to SEQ ID NO: 725958
uuucucaggguccagaggc

SEQ ID NO: 725960 - RNA, 19 nt, Artificial Sequence
  Description of Artificial Sequence: Synthetic oligonucleotide
  Sense strand starting at position 725 of SEQ ID NO: 586545
aggcuuagccagugaggga

SEQ ID NO: 725961 - RNA, 19 nt, Artificial Sequence
  Description of Artificial Sequence: Synthetic oligonucleotide
  Antisense strand to SEQ ID NO: 725960
ucccucacuggcuaagccu

SEQ ID NO: 725962 - RNA, 19 nt, Artificial Sequence
  Description of Artificial Sequence: Synthetic oligonucleotide
  Sense strand starting at position 1382 of SEQ ID NO: 586545
caaauaacucuaugagggu

SEQ ID NO: 725963 - RNA, 19 nt, Artificial Sequence
  Description of Artificial Sequence: Synthetic oligonucleotide
  Antisense strand to SEQ ID NO: 725962
acccucauagaguuauuug

SEQ ID NO: 725964 - RNA, 19 nt, Artificial Sequence
  Description of Artificial Sequence: Synthetic oligonucleotide
  Sense strand starting at position 1386 of SEQ ID NO: 586545
uaacucuaugagggucaaa

SEQ ID NO: 725965 - RNA, 19 nt, Artificial Sequence
  Description of Artificial Sequence: Synthetic oligonucleotide
  Antisense strand to SEQ ID NO: 725964
uuugacccucauagaguua

SEQ ID NO: 725966 - RNA, 19 nt, Artificial Sequence
  Description of Artificial Sequence: Synthetic oligonucleotide
  Sense strand starting at position 1435 of SEQ ID NO: 586545
ccaugaauaucugcaaugu

SEQ ID NO: 725967 - RNA, 19 nt, Artificial Sequence
  Description of Artificial Sequence: Synthetic oligonucleotide
  Antisense strand to SEQ ID NO: 725966
acauugcagauauucaugg

SEQ ID NO: 725968 - RNA, 19 nt, Artificial Sequence
  Description of Artificial Sequence: Synthetic oligonucleotide
  Sense strand starting at position 1439 of SEQ ID NO: 586545
gaauaucugcaauguguua

SEQ ID NO: 725969 - RNA, 19 nt, Artificial Sequence
  Description of Artificial Sequence: Synthetic oligonucleotide
  Antisense strand to SEQ ID NO: 725968
uaacacauugcagauauuc

SEQ ID NO: 725970 - RNA, 19 nt, Artificial Sequence
  Description of Artificial Sequence: Synthetic oligonucleotide
  Sense strand starting at position 1451 of SEQ ID NO: 586545
uguguuagguacccuggaa

SEQ ID NO: 725971 - RNA, 19 nt, Artificial Sequence
  Description of Artificial Sequence: Synthetic oligonucleotide
  Antisense strand to SEQ ID NO: 725970
uuccaggguaccuaacaca

SEQ ID NO: 725972 - RNA, 19 nt, Artificial Sequence
  Description of Artificial Sequence: Synthetic oligonucleotide
  Sense strand starting at position 1619 of SEQ ID NO: 586545
cguggauccuaguuaggac

SEQ ID NO: 725973 - RNA, 19 nt, Artificial Sequence
  Description of Artificial Sequence: Synthetic oligonucleotide
  Antisense strand to SEQ ID NO: 725972
guccuaacuaggauccacg

SEQ ID NO: 725974 - RNA, 19 nt, Artificial Sequence
  Description of Artificial Sequence: Synthetic oligonucleotide
  Sense strand starting at position 2161 of SEQ ID NO: 586545
gagucauuguguucuggag

SEQ ID NO: 725975 - RNA, 19 nt, Artificial Sequence
  Description of Artificial Sequence: Synthetic oligonucleotide
  Antisense strand to SEQ ID NO: 725974
cuccagaacacaaugacuc

SEQ ID NO: 725976 - RNA, 19 nt, Artificial Sequence
  Description of Artificial Sequence: Synthetic oligonucleotide
  Sense strand starting at position 2165 of SEQ ID NO: 586545
cauuguguucuggagugag

SEQ ID NO: 725977 - RNA, 19 nt, Artificial Sequence
  Description of Artificial Sequence: Synthetic oligonucleotide
  Antisense strand to SEQ ID NO: 725976
cucacuccagaacacaaug

SEQ ID NO: 725978 - RNA, 19 nt, Artificial Sequence
  Description of Artificial Sequence: Synthetic oligonucleotide
  Sense strand starting at position 2185 of SEQ ID NO: 586545
cgaggcguguguauuaauc

SEQ ID NO: 725979 - RNA, 19 nt, Artificial Sequence
  Description of Artificial Sequence: Synthetic oligonucleotide
  Antisense strand to SEQ ID NO: 725978
gauuaauacacacgccucg

SEQ ID NO: 725980 - RNA, 19 nt, Artificial Sequence
  Description of Artificial Sequence: Synthetic oligonucleotide
  Sense strand starting at position 2345 of SEQ ID NO: 586545
ggugcacuaaauugucaga

SEQ ID NO: 725981 - RNA, 19 nt, Artificial Sequence
  Description of Artificial Sequence: Synthetic oligonucleotide
  Antisense strand to SEQ ID NO: 725980
ucugacaauuuagugcacc

SEQ ID NO: 725982 - RNA, 19 nt, Artificial Sequence
  Description of Artificial Sequence: Synthetic oligonucleotide
  Sense strand starting at position 2477 of SEQ ID NO: 586545
ucgguaucucuggaauggu

SEQ ID NO: 725983 - RNA, 19 nt, Artificial Sequence
  Description of Artificial Sequence: Synthetic oligonucleotide
  Antisense strand to SEQ ID NO: 725982
accauuccagagauaccga

SEQ ID NO: 725984 - RNA, 19 nt, Artificial Sequence
  Description of Artificial Sequence: Synthetic oligonucleotide
  Sense strand starting at position 2478 of SEQ ID NO: 586545
cgguaucucuggaauggug

SEQ ID NO: 725985 - RNA, 19 nt, Artificial Sequence
  Description of Artificial Sequence: Synthetic oligonucleotide
  Antisense strand to SEQ ID NO: 725984
caccauuccagagauaccg

SEQ ID NO: 725986 - RNA, 19 nt, Artificial Sequence
  Description of Artificial Sequence: Synthetic oligonucleotide
  Sense strand starting at position 2499 of SEQ ID NO: 586545
gcccuugugcaacauauua

SEQ ID NO: 725987 - RNA, 19 nt, Artificial Sequence
  Description of Artificial Sequence: Synthetic oligonucleotide
  Antisense strand to SEQ ID NO: 725986
uaauauguugcacaagggc

SEQ ID NO: 725988 - RNA, 19 nt, Artificial Sequence
  Description of Artificial Sequence: Synthetic oligonucleotide
  Sense strand starting at position 2529 of SEQ ID NO: 586545
cucugcuuucuaugagagu

SEQ ID NO: 725989 - RNA, 19 nt, Artificial Sequence
  Description of Artificial Sequence: Synthetic oligonucleotide
  Antisense strand to SEQ ID NO: 725988
acucucauagaaagcagag

SEQ ID NO: 725990 - RNA, 19 nt, Artificial Sequence
  Description of Artificial Sequence: Synthetic oligonucleotide
  Sense strand starting at position 2543 of SEQ ID NO: 586545
agaguuugucgugucgcuu

SEQ ID NO: 725991 - RNA, 19 nt, Artificial Sequence
  Description of Artificial Sequence: Synthetic oligonucleotide
  Antisense strand to SEQ ID NO: 725990
aagcgacacgacaaacucu

SEQ ID NO: 725992 - RNA, 19 nt, Artificial Sequence
  Description of Artificial Sequence: Synthetic oligonucleotide
  Sense strand starting at position 2549 of SEQ ID NO: 586545
ugucgugucgcuucagaaa

SEQ ID NO: 725993 - RNA, 19 nt, Artificial Sequence
  Description of Artificial Sequence: Synthetic oligonucleotide
  Antisense strand to SEQ ID NO: 725992
uuucugaagcgacacgaca

SEQ ID NO: 725994 - RNA, 19 nt, Artificial Sequence
  Description of Artificial Sequence: Synthetic oligonucleotide
  Sense strand starting at position 2592 of SEQ ID NO: 586545
gugggauccuaacugcaua

SEQ ID NO: 725995 - RNA, 19 nt, Artificial Sequence
  Description of Artificial Sequence: Synthetic oligonucleotide
  Antisense strand to SEQ ID NO: 725994
uaugcaguuaggaucccac

SEQ ID NO: 725996 - RNA, 19 nt, Artificial Sequence
  Description of Artificial Sequence: Synthetic oligonucleotide
  Sense strand starting at position 2612 of SEQ ID NO: 586545
gggcaagucacuugguauu

SEQ ID NO: 725997 - RNA, 19 nt, Artificial Sequence
  Description of Artificial Sequence: Synthetic oligonucleotide
  Antisense strand to SEQ ID NO: 725996
aauaccaagugacuugccc

SEQ ID NO: 725998 - RNA, 19 nt, Artificial Sequence
  Description of Artificial Sequence: Synthetic oligonucleotide
  Sense strand starting at position 2614 of SEQ ID NO: 586545
gcaagucacuugguauuua

SEQ ID NO: 725999 - RNA, 19 nt, Artificial Sequence
  Description of Artificial Sequence: Synthetic oligonucleotide
  Antisense strand to SEQ ID NO: 725998
uaaauaccaagugacuugc

SEQ ID NO: 726000 - RNA, 19 nt, Artificial Sequence
  Description of Artificial Sequence: Synthetic oligonucleotide
  Sense strand starting at position 2851 of SEQ ID NO: 586545
ugcuuucggcuugaacuaa

SEQ ID NO: 726001 - RNA, 19 nt, Artificial Sequence
  Description of Artificial Sequence: Synthetic oligonucleotide
  Antisense strand to SEQ ID NO: 726000
uuaguucaagccgaaagca

SEQ ID NO: 726002 - RNA, 19 nt, Artificial Sequence
  Description of Artificial Sequence: Synthetic oligonucleotide
  Sense strand starting at position 2889 of SEQ ID NO: 586545
ccagccuuauguccagauu

SEQ ID NO: 726003 - RNA, 19 nt, Artificial Sequence
  Description of Artificial Sequence: Synthetic oligonucleotide
  Antisense strand to SEQ ID NO: 726002
aaucuggacauaaggcugg

SEQ ID NO: 726004 - RNA, 19 nt, Artificial Sequence
  Description of Artificial Sequence: Synthetic oligonucleotide
  Sense strand starting at position 3073 of SEQ ID NO: 586545
gccgcugguggcuuuagaa

SEQ ID NO: 726005 - RNA, 19 nt, Artificial Sequence
  Description of Artificial Sequence: Synthetic oligonucleotide
  Antisense strand to SEQ ID NO: 726004
uucuaaagccaccagcggc

SEQ ID NO: 726006 - RNA, 19 nt, Artificial Sequence
  Description of Artificial Sequence: Synthetic oligonucleotide
  Sense strand starting at position 3135 of SEQ ID NO: 586545
gaaagaacccugugacuuu

SEQ ID NO: 726007 - RNA, 19 nt, Artificial Sequence
  Description of Artificial Sequence: Synthetic oligonucleotide
  Antisense strand to SEQ ID NO: 726006
aaagucacaggguucuuuc

SEQ ID NO: 726008 - RNA, 19 nt, Artificial Sequence
  Description of Artificial Sequence: Synthetic oligonucleotide
  Sense strand starting at position 3145 of SEQ ID NO: 586545
ugugacuuuccacaucuca

SEQ ID NO: 726009 - RNA, 19 nt, Artificial Sequence
  Description of Artificial Sequence: Synthetic oligonucleotide
  Antisense strand to SEQ ID NO: 726008
ugagauguggaaagucaca

SEQ ID NO: 726010 - RNA, 19 nt, Artificial Sequence
  Description of Artificial Sequence: Synthetic oligonucleotide
  Sense strand starting at position 3173 of SEQ ID NO: 586545
gcgggcucugcuuaagaag

SEQ ID NO: 726011 - RNA, 19 nt, Artificial Sequence
  Description of Artificial Sequence: Synthetic oligonucleotide
  Antisense strand to SEQ ID NO: 726010
cuucuuaagcagagcccgc

SEQ ID NO: 726012 - RNA, 19 nt, Artificial Sequence
  Description of Artificial Sequence: Synthetic oligonucleotide
  Sense strand starting at position 3381 of SEQ ID NO: 586545
gguccuucgcuauaccaga

SEQ ID NO: 726013 - RNA, 19 nt, Artificial Sequence
  Description of Artificial Sequence: Synthetic oligonucleotide
  Antisense strand to SEQ ID NO: 726012
ucugguauagcgaaggacc

SEQ ID NO: 726014 - RNA, 19 nt, Artificial Sequence
  Description of Artificial Sequence: Synthetic oligonucleotide
  Sense strand starting at position 3425 of SEQ ID NO: 586545
gugugacccuucucucaca

SEQ ID NO: 726015 - RNA, 19 nt, Artificial Sequence
  Description of Artificial Sequence: Synthetic oligonucleotide
  Antisense strand to SEQ ID NO: 726014
ugugagagaagggucacac

SEQ ID NO: 726016 - RNA, 19 nt, Artificial Sequence
  Description of Artificial Sequence: Synthetic oligonucleotide
  Sense strand starting at position 3446 of SEQ ID NO: 586545
guuauuaaauaggucucaa

SEQ ID NO: 726017 - RNA, 19 nt, Artificial Sequence
  Description of Artificial Sequence: Synthetic oligonucleotide
  Antisense strand to SEQ ID NO: 726016
uugagaccuauuuaauaac

SEQ ID NO: 726018 - RNA, 19 nt, Artificial Sequence
  Description of Artificial Sequence: Synthetic oligonucleotide
  Sense strand starting at position 3466 of SEQ ID NO: 586545
cugcgaaaucacugccaga

SEQ ID NO: 726019 - RNA, 19 nt, Artificial Sequence
  Description of Artificial Sequence: Synthetic oligonucleotide
  Antisense strand to SEQ ID NO: 726018
ucuggcagugauuucgcag

SEQ ID NO: 726020 - RNA, 19 nt, Artificial Sequence
  Description of Artificial Sequence: Synthetic oligonucleotide
  Sense strand starting at position 3495 of SEQ ID NO: 586545
acuacuuugccaggugaag

SEQ ID NO: 726021 - RNA, 19 nt, Artificial Sequence
  Description of Artificial Sequence: Synthetic oligonucleotide
  Antisense strand to SEQ ID NO: 726020
cuucaccuggcaaaguagu

SEQ ID NO: 726022 - RNA, 19 nt, Artificial Sequence
  Description of Artificial Sequence: Synthetic oligonucleotide
  Sense strand starting at position 3519 of SEQ ID NO: 586545
gggcgaacccuuuaaccuu

SEQ ID NO: 726023 - RNA, 19 nt, Artificial Sequence
  Description of Artificial Sequence: Synthetic oligonucleotide
  Antisense strand to SEQ ID NO: 726022
aagguuaaaggguucgccc

SEQ ID NO: 726024 - RNA, 19 nt, Artificial Sequence
  Description of Artificial Sequence: Synthetic oligonucleotide
  Sense strand starting at position 3759 of SEQ ID NO: 586545
ccauuugaguucuacuuag

SEQ ID NO: 726025 - RNA, 19 nt, Artificial Sequence
  Description of Artificial Sequence: Synthetic oligonucleotide
  Antisense strand to SEQ ID NO: 726024
cuaaguagaacucaaaugg

SEQ ID NO: 726026 - RNA, 19 nt, Artificial Sequence
  Description of Artificial Sequence: Synthetic oligonucleotide
  Sense strand starting at position 3766 of SEQ ID NO: 586545
aguucuacuuaguuugagu

SEQ ID NO: 726027 - RNA, 19 nt, Artificial Sequence
  Description of Artificial Sequence: Synthetic oligonucleotide
  Antisense strand to SEQ ID NO: 726026
acucaaacuaaguagaacu

SEQ ID NO: 726028 - RNA, 19 nt, Artificial Sequence
  Description of Artificial Sequence: Synthetic oligonucleotide
  Sense strand starting at position 3820 of SEQ ID NO: 586545
ugggcaccucuccaacaau

SEQ ID NO: 726029 - RNA, 19 nt, Artificial Sequence
  Description of Artificial Sequence: Synthetic oligonucleotide
  Antisense strand to SEQ ID NO: 726028
auuguuggagaggugccca

SEQ ID NO: 726030 - RNA, 19 nt, Artificial Sequence
  Description of Artificial Sequence: Synthetic oligonucleotide
  Sense strand starting at position 3856 of SEQ ID NO: 586545
ccugccauugucuaaaggu

SEQ ID NO: 726031 - RNA, 19 nt, Artificial Sequence
  Description of Artificial Sequence: Synthetic oligonucleotide
  Antisense strand to SEQ ID NO: 726030
accuuuagacaauggcagg

SEQ ID NO: 726032 - RNA, 19 nt, Artificial Sequence
  Description of Artificial Sequence: Synthetic oligonucleotide
  Sense strand starting at position 3872 of SEQ ID NO: 586545
ggucaugccaguuggaaau

SEQ ID NO: 726033 - RNA, 19 nt, Artificial Sequence
  Description of Artificial Sequence: Synthetic oligonucleotide
  Antisense strand to SEQ ID NO: 726032
auuuccaacuggcaugacc

SEQ ID NO: 726034 - RNA, 19 nt, Artificial Sequence
  Description of Artificial Sequence: Synthetic oligonucleotide
  Sense strand starting at position 3889 of SEQ ID NO: 586545
auaagaaggguuuggguga

SEQ ID NO: 726035 - RNA, 19 nt, Artificial Sequence
  Description of Artificial Sequence: Synthetic oligonucleotide
  Antisense strand to SEQ ID NO: 726034
ucacccaaacccuucuuau

SEQ ID NO: 726036 - RNA, 19 nt, Artificial Sequence
  Description of Artificial Sequence: Synthetic oligonucleotide
  Sense strand starting at position 3929 of SEQ ID NO: 586545
uucugucagcuacaaaugu

SEQ ID NO: 726037 - RNA, 19 nt, Artificial Sequence
  Description of Artificial Sequence: Synthetic oligonucleotide
  Antisense strand to SEQ ID NO: 726036
acauuuguagcugacagaa

SEQ ID NO: 726038 - RNA, 19 nt, Artificial Sequence
  Description of Artificial Sequence: Synthetic oligonucleotide
  Sense strand starting at position 140 of SEQ ID NO: 586546
ggcgggaucucaguguguu

SEQ ID NO: 726039 - RNA, 19 nt, Artificial Sequence
  Description of Artificial Sequence: Synthetic oligonucleotide
  Antisense strand to SEQ ID NO: 726038
aacacacugagaucccgcc

SEQ ID NO: 726040 - RNA, 19 nt, Artificial Sequence
  Description of Artificial Sequence: Synthetic oligonucleotide
  Sense strand starting at position 141 of SEQ ID NO: 586546
gcgggaucucaguguguug

SEQ ID NO: 726041 - RNA, 19 nt, Artificial Sequence
  Description of Artificial Sequence: Synthetic oligonucleotide
  Antisense strand to SEQ ID NO: 726040
caacacacugagaucccgc

SEQ ID NO: 726042 - RNA, 19 nt, Artificial Sequence
  Description of Artificial Sequence: Synthetic oligonucleotide
  Sense strand starting at position 152 of SEQ ID NO: 586546
guguguugucuaggcaggu

SEQ ID NO: 726043 - RNA, 19 nt, Artificial Sequence
  Description of Artificial Sequence: Synthetic oligonucleotide
  Antisense strand to SEQ ID NO: 726042
accugccuagacaacacac

SEQ ID NO: 726044 - RNA, 19 nt, Artificial Sequence
  Description of Artificial Sequence: Synthetic oligonucleotide
  Sense strand starting at position 153 of SEQ ID NO: 586546
uguguugucuaggcaggua

SEQ ID NO: 726045 - RNA, 19 nt, Artificial Sequence
  Description of Artificial Sequence: Synthetic oligonucleotide
  Antisense strand to SEQ ID NO: 726044
uaccugccuagacaacaca

SEQ ID NO: 726046 - RNA, 19 nt, Artificial Sequence
  Description of Artificial Sequence: Synthetic oligonucleotide
  Sense strand starting at position 158 of SEQ ID NO: 586546
ugucuaggcagguaucgaa

SEQ ID NO: 726047 - RNA, 19 nt, Artificial Sequence
  Description of Artificial Sequence: Synthetic oligonucleotide
  Antisense strand to SEQ ID NO: 726046
uucgauaccugccuagaca

SEQ ID NO: 726048 - RNA, 19 nt, Artificial Sequence
  Description of Artificial Sequence: Synthetic oligonucleotide
  Sense strand starting at position 677 of SEQ ID NO: 586546
agcucuauucuuugaaaga

SEQ ID NO: 726049 - RNA, 19 nt, Artificial Sequence
  Description of Artificial Sequence: Synthetic oligonucleotide
  Antisense strand to SEQ ID NO: 726048
ucuuucaaagaauagagcu

SEQ ID NO: 726050 - RNA, 19 nt, Artificial Sequence
  Description of Artificial Sequence: Synthetic oligonucleotide
  Sense strand starting at position 678 of SEQ ID NO: 586546
gcucuauucuuugaaagau

SEQ ID NO: 726051 - RNA, 19 nt, Artificial Sequence
  Description of Artificial Sequence: Synthetic oligonucleotide
  Antisense strand to SEQ ID NO: 726050
aucuuucaaagaauagagc

SEQ ID NO: 726052 - RNA, 19 nt, Artificial Sequence
  Description of Artificial Sequence: Synthetic oligonucleotide
  Sense strand starting at position 716 of SEQ ID NO: 586546
gucagauucucacugucuu

SEQ ID NO: 726053 - RNA, 19 nt, Artificial Sequence
  Description of Artificial Sequence: Synthetic oligonucleotide
  Antisense strand to SEQ ID NO: 726052
aagacagugagaaucugac

SEQ ID NO: 726054 - RNA, 19 nt, Artificial Sequence
  Description of Artificial Sequence: Synthetic oligonucleotide
  Sense strand starting at position 717 of SEQ ID NO: 586546
ucagauucucacugucuuu

SEQ ID NO: 726055 - RNA, 19 nt, Artificial Sequence
  Description of Artificial Sequence: Synthetic oligonucleotide
  Antisense strand to SEQ ID NO: 726054
aaagacagugagaaucuga

SEQ ID NO: 726056 - RNA, 19 nt, Artificial Sequence
  Description of Artificial Sequence: Synthetic oligonucleotide
  Sense strand starting at position 780 of SEQ ID NO: 586546
ggaaguauuccucgcauaa

SEQ ID NO: 726057 - RNA, 19 nt, Artificial Sequence
  Description of Artificial Sequence: Synthetic oligonucleotide
  Antisense strand to SEQ ID NO: 726056
uuaugcgaggaauacuucc

SEQ ID NO: 726058 - RNA, 19 nt, Artificial Sequence
  Description of Artificial Sequence: Synthetic oligonucleotide
  Sense strand starting at position 784 of SEQ ID NO: 586546
guauuccucgcauaacaca

SEQ ID NO: 726059 - RNA, 19 nt, Artificial Sequence
  Description of Artificial Sequence: Synthetic oligonucleotide
  Antisense strand to SEQ ID NO: 726058
uguguuaugcgaggaauac

SEQ ID NO: 726060 - RNA, 19 nt, Artificial Sequence
  Description of Artificial Sequence: Synthetic oligonucleotide
  Sense strand starting at position 892 of SEQ ID NO: 586546
cagcauuggcacugggauu

SEQ ID NO: 726061 - RNA, 19 nt, Artificial Sequence
  Description of Artificial Sequence: Synthetic oligonucleotide
  Antisense strand to SEQ ID NO: 726060
aaucccagugccaaugcug

SEQ ID NO: 726062 - RNA, 19 nt, Artificial Sequence
  Description of Artificial Sequence: Synthetic oligonucleotide
  Sense strand starting at position 893 of SEQ ID NO: 586546
agcauuggcacugggauua

SEQ ID NO: 726063 - RNA, 19 nt, Artificial Sequence
  Description of Artificial Sequence: Synthetic oligonucleotide
  Antisense strand to SEQ ID NO: 726062
uaaucccagugccaaugcu

SEQ ID NO: 726064 - RNA, 19 nt, Artificial Sequence
  Description of Artificial Sequence: Synthetic oligonucleotide
  Sense strand starting at position 912 of SEQ ID NO: 586546
aaagaagcguuguacucuu

SEQ ID NO: 726065 - RNA, 19 nt, Artificial Sequence
  Description of Artificial Sequence: Synthetic oligonucleotide
  Antisense strand to SEQ ID NO: 726064
aagaguacaacgcuucuuu

SEQ ID NO: 726066 - RNA, 19 nt, Artificial Sequence
  Description of Artificial Sequence: Synthetic oligonucleotide
  Sense strand starting at position 919 of SEQ ID NO: 586546
cguuguacucuuugaaaug

SEQ ID NO: 726067 - RNA, 19 nt, Artificial Sequence
  Description of Artificial Sequence: Synthetic oligonucleotide
  Antisense strand to SEQ ID NO: 726066
cauuucaaagaguacaacg

SEQ ID NO: 726068 - RNA, 19 nt, Artificial Sequence
  Description of Artificial Sequence: Synthetic oligonucleotide
  Sense strand starting at position 920 of SEQ ID NO: 586546
guuguacucuuugaaaugg

SEQ ID NO: 726069 - RNA, 19 nt, Artificial Sequence
  Description of Artificial Sequence: Synthetic oligonucleotide
  Antisense strand to SEQ ID NO: 726068
ccauuucaaagaguacaac

SEQ ID NO: 726070 - RNA, 19 nt, Artificial Sequence
  Description of Artificial Sequence: Synthetic oligonucleotide
  Sense strand starting at position 1051 of SEQ ID NO: 586546
ugaugacacugaggaauuu

SEQ ID NO: 726071 - RNA, 19 nt, Artificial Sequence
  Description of Artificial Sequence: Synthetic oligonucleotide
  Antisense strand to SEQ ID NO: 726070
aaauuccucagugucauca

SEQ ID NO: 726072 - RNA, 19 nt, Artificial Sequence
  Description of Artificial Sequence: Synthetic oligonucleotide
  Sense strand starting at position 1173 of SEQ ID NO: 586546
gcaccauggucuccacuuu

SEQ ID NO: 726073 - RNA, 19 nt, Artificial Sequence
  Description of Artificial Sequence: Synthetic oligonucleotide
  Antisense strand to SEQ ID NO: 726072
aaaguggagaccauggugc

SEQ ID NO: 726074 - RNA, 19 nt, Artificial Sequence
  Description of Artificial Sequence: Synthetic oligonucleotide
  Sense strand starting at position 1311 of SEQ ID NO: 586546
gcaagaggcaucgagaaag

SEQ ID NO: 726075 - RNA, 19 nt, Artificial Sequence
  Description of Artificial Sequence: Synthetic oligonucleotide
  Antisense strand to SEQ ID NO: 726074
cuuucucgaugccucuugc

SEQ ID NO: 726076 - RNA, 19 nt, Artificial Sequence
  Description of Artificial Sequence: Synthetic oligonucleotide
  Sense strand starting at position 1680 of SEQ ID NO: 586546
cccagaucugcacgucaau

SEQ ID NO: 726077 - RNA, 19 nt, Artificial Sequence
  Description of Artificial Sequence: Synthetic oligonucleotide
  Antisense strand to SEQ ID NO: 726076
auugacgugcagaucuggg

SEQ ID NO: 726078 - RNA, 19 nt, Artificial Sequence
  Description of Artificial Sequence: Synthetic oligonucleotide
  Sense strand starting at position 2065 of SEQ ID NO: 586546
ggcugugaguucugccagu

SEQ ID NO: 726079 - RNA, 19 nt, Artificial Sequence
  Description of Artificial Sequence: Synthetic oligonucleotide
  Antisense strand to SEQ ID NO: 726078
acuggcagaacucacagcc

SEQ ID NO: 726080 - RNA, 19 nt, Artificial Sequence
  Description of Artificial Sequence: Synthetic oligonucleotide
  Sense strand starting at position 2824 of SEQ ID NO: 586546
cagagcuuauuuguuggua

SEQ ID NO: 726081 - RNA, 19 nt, Artificial Sequence
  Description of Artificial Sequence: Synthetic oligonucleotide
  Antisense strand to SEQ ID NO: 726080
uaccaacaaauaagcucug

SEQ ID NO: 726082 - RNA, 19 nt, Artificial Sequence
  Description of Artificial Sequence: Synthetic oligonucleotide
  Sense strand starting at position 2826 of SEQ ID NO: 586546
gagcuuauuuguugguaga

SEQ ID NO: 726083 - RNA, 19 nt, Artificial Sequence
  Description of Artificial Sequence: Synthetic oligonucleotide
  Antisense strand to SEQ ID NO: 726082
ucuaccaacaaauaagcuc

SEQ ID NO: 726084 - RNA, 19 nt, Artificial Sequence
  Description of Artificial Sequence: Synthetic oligonucleotide
  Sense strand starting at position 2829 of SEQ ID NO: 586546
cuuauuuguugguagaaag

SEQ ID NO: 726085 - RNA, 19 nt, Artificial Sequence
  Description of Artificial Sequence: Synthetic oligonucleotide
  Antisense strand to SEQ ID NO: 726084
cuuucuaccaacaaauaag

SEQ ID NO: 726086 - RNA, 19 nt, Artificial Sequence
  Description of Artificial Sequence: Synthetic oligonucleotide
  Sense strand starting at position 2839 of SEQ ID NO: 586546
gguagaaagcccuguagac

SEQ ID NO: 726087 - RNA, 19 nt, Artificial Sequence
  Description of Artificial Sequence: Synthetic oligonucleotide
  Antisense strand to SEQ ID NO: 726086
gucuacagggcuuucuacc

SEQ ID NO: 726088 - RNA, 19 nt, Artificial Sequence
  Description of Artificial Sequence: Synthetic oligonucleotide
  Sense strand starting at position 2851 of SEQ ID NO: 586546
uguagacacuuucgguuua

SEQ ID NO: 726089 - RNA, 19 nt, Artificial Sequence
  Description of Artificial Sequence: Synthetic oligonucleotide
  Antisense strand to SEQ ID NO: 726088
uaaaccgaaagugucuaca

SEQ ID NO: 726090 - RNA, 19 nt, Artificial Sequence
  Description of Artificial Sequence: Synthetic oligonucleotide
  Sense strand starting at position 2852 of SEQ ID NO: 586546
guagacacuuucgguuuau

SEQ ID NO: 726091 - RNA, 19 nt, Artificial Sequence
  Description of Artificial Sequence: Synthetic oligonucleotide
  Antisense strand to SEQ ID NO: 726090
auaaaccgaaagugucuac

SEQ ID NO: 726092 - RNA, 19 nt, Artificial Sequence
  Description of Artificial Sequence: Synthetic oligonucleotide
  Sense strand starting at position 2853 of SEQ ID NO: 586546
uagacacuuucgguuuauc

SEQ ID NO: 726093 - RNA, 19 nt, Artificial Sequence
  Description of Artificial Sequence: Synthetic oligonucleotide
  Antisense strand to SEQ ID NO: 726092
gauaaaccgaaagugucua

SEQ ID NO: 726094 - RNA, 19 nt, Artificial Sequence
  Description of Artificial Sequence: Synthetic oligonucleotide
  Sense strand starting at position 2856 of SEQ ID NO: 586546
acacuuucgguuuaucuua

SEQ ID NO: 726095 - RNA, 19 nt, Artificial Sequence
  Description of Artificial Sequence: Synthetic oligonucleotide
  Antisense strand to SEQ ID NO: 726094
uaagauaaaccgaaagugu

SEQ ID NO: 726096 - RNA, 19 nt, Artificial Sequence
  Description of Artificial Sequence: Synthetic oligonucleotide
  Sense strand starting at position 2864 of SEQ ID NO: 586546
gguuuaucuuaggcucuga

SEQ ID NO: 726097 - RNA, 19 nt, Artificial Sequence
  Description of Artificial Sequence: Synthetic oligonucleotide
  Antisense strand to SEQ ID NO: 726096
ucagagccuaagauaaacc

SEQ ID NO: 726098 - RNA, 19 nt, Artificial Sequence
  Description of Artificial Sequence: Synthetic oligonucleotide
  Sense strand starting at position 2932 of SEQ ID NO: 586546
agagaagugugaugcuuag

SEQ ID NO: 726099 - RNA, 19 nt, Artificial Sequence
  Description of Artificial Sequence: Synthetic oligonucleotide
  Antisense strand to SEQ ID NO: 726098
cuaagcaucacacuucucu

SEQ ID NO: 726100 - RNA, 19 nt, Artificial Sequence
  Description of Artificial Sequence: Synthetic oligonucleotide
  Sense strand starting at position 2950 of SEQ ID NO: 586546
gcaggagugcuggagaaag

SEQ ID NO: 726101 - RNA, 19 nt, Artificial Sequence
  Description of Artificial Sequence: Synthetic oligonucleotide
  Antisense strand to SEQ ID NO: 726100
cuuucuccagcacuccugc

SEQ ID NO: 726102 - RNA, 19 nt, Artificial Sequence
  Description of Artificial Sequence: Synthetic oligonucleotide
  Sense strand starting at position 2952 of SEQ ID NO: 586546
aggagugcuggagaaaguu

SEQ ID NO: 726103 - RNA, 19 nt, Artificial Sequence
  Description of Artificial Sequence: Synthetic oligonucleotide
  Antisense strand to SEQ ID NO: 726102
aacuuucuccagcacuccu

SEQ ID NO: 726104 - RNA, 19 nt, Artificial Sequence
  Description of Artificial Sequence: Synthetic oligonucleotide
  Sense strand starting at position 2988 of SEQ ID NO: 586546
cuccaauuuagguguguuu

SEQ ID NO: 726105 - RNA, 19 nt, Artificial Sequence
  Description of Artificial Sequence: Synthetic oligonucleotide
  Antisense strand to SEQ ID NO: 726104
aaacacaccuaaauuggag

SEQ ID NO: 726106 - RNA, 19 nt, Artificial Sequence
  Description of Artificial Sequence: Synthetic oligonucleotide
  Sense strand starting at position 3083 of SEQ ID NO: 586546
gagugcagaucguaacaca

SEQ ID NO: 726107 - RNA, 19 nt, Artificial Sequence
  Description of Artificial Sequence: Synthetic oligonucleotide
  Antisense strand to SEQ ID NO: 726106
uguguuacgaucugcacuc

SEQ ID NO: 726108 - RNA, 19 nt, Artificial Sequence
  Description of Artificial Sequence: Synthetic oligonucleotide
  Sense strand starting at position 3375 of SEQ ID NO: 586546
gccuaacaauuuggugauu

SEQ ID NO: 726109 - RNA, 19 nt, Artificial Sequence
  Description of Artificial Sequence: Synthetic oligonucleotide
  Antisense strand to SEQ ID NO: 726108
aaucaccaaauuguuaggc

SEQ ID NO: 726110 - RNA, 19 nt, Artificial Sequence
  Description of Artificial Sequence: Synthetic oligonucleotide
  Sense strand starting at position 3492 of SEQ ID NO: 586546
ucguuugagcucugaacuu

SEQ ID NO: 726111 - RNA, 19 nt, Artificial Sequence
  Description of Artificial Sequence: Synthetic oligonucleotide
  Antisense strand to SEQ ID NO: 726110
aaguucagagcucaaacga

SEQ ID NO: 726112 - RNA, 19 nt, Artificial Sequence
  Description of Artificial Sequence: Synthetic oligonucleotide
  Sense strand starting at position 3770 of SEQ ID NO: 586546
augaucuccugggcucaaa

SEQ ID NO: 726113 - RNA, 19 nt, Artificial Sequence
  Description of Artificial Sequence: Synthetic oligonucleotide
  Antisense strand to SEQ ID NO: 726112
uuugagcccaggagaucau

SEQ ID NO: 726114 - RNA, 19 nt, Artificial Sequence
  Description of Artificial Sequence: Synthetic oligonucleotide
  Sense strand starting at position 3940 of SEQ ID NO: 586546
ggcauuugcgguuacuaag

SEQ ID NO: 726115 - RNA, 19 nt, Artificial Sequence
  Description of Artificial Sequence: Synthetic oligonucleotide
  Antisense strand to SEQ ID NO: 726114
cuuaguaaccgcaaaugcc

SEQ ID NO: 726116 - RNA, 19 nt, Artificial Sequence
  Description of Artificial Sequence: Synthetic oligonucleotide
  Sense strand starting at position 23 of SEQ ID NO: 586547
cguuuacuauaguucugaa

SEQ ID NO: 726117 - RNA, 19 nt, Artificial Sequence
  Description of Artificial Sequence: Synthetic oligonucleotide
  Antisense strand to SEQ ID NO: 726116
uucagaacuauaguaaacg

SEQ ID NO: 726118 - RNA, 19 nt, Artificial Sequence
  Description of Artificial Sequence: Synthetic oligonucleotide
  Sense strand starting at position 100 of SEQ ID NO: 586547
ggagguacuuaauaaagag

SEQ ID NO: 726119 - RNA, 19 nt, Artificial Sequence
  Description of Artificial Sequence: Synthetic oligonucleotide
  Antisense strand to SEQ ID NO: 726118
cucuuuauuaaguaccucc

SEQ ID NO: 726120 - RNA, 19 nt, Artificial Sequence
  Description of Artificial Sequence: Synthetic oligonucleotide
  Sense strand starting at position 243 of SEQ ID NO: 586547
uucuauucugcguggugga

SEQ ID NO: 726121 - RNA, 19 nt, Artificial Sequence
  Description of Artificial Sequence: Synthetic oligonucleotide
  Antisense strand to SEQ ID NO: 726120
uccaccacgcagaauagaa

SEQ ID NO: 726122 - RNA, 19 nt, Artificial Sequence
  Description of Artificial Sequence: Synthetic oligonucleotide
  Sense strand starting at position 340 of SEQ ID NO: 586547
ggaauaacaucucucuguu

SEQ ID NO: 726123 - RNA, 19 nt, Artificial Sequence
  Description of Artificial Sequence: Synthetic oligonucleotide
  Antisense strand to SEQ ID NO: 726122
aacagagagauguuauucc

SEQ ID NO: 726124 - RNA, 19 nt, Artificial Sequence
  Description of Artificial Sequence: Synthetic oligonucleotide
  Sense strand starting at position 375 of SEQ ID NO: 586547
cuuuguuucuaagagaguc

SEQ ID NO: 726125 - RNA, 19 nt, Artificial Sequence
  Description of Artificial Sequence: Synthetic oligonucleotide
  Antisense strand to SEQ ID NO: 726124
gacucucuuagaaacaaag

SEQ ID NO: 726126 - RNA, 19 nt, Artificial Sequence
  Description of Artificial Sequence: Synthetic oligonucleotide
  Sense strand starting at position 444 of SEQ ID NO: 586547
gggccugacugguaacuuu

SEQ ID NO: 726127 - RNA, 19 nt, Artificial Sequence
  Description of Artificial Sequence: Synthetic oligonucleotide
  Antisense strand to SEQ ID NO: 726126
aaaguuaccagucaggccc

SEQ ID NO: 726128 - RNA, 19 nt, Artificial Sequence
  Description of Artificial Sequence: Synthetic oligonucleotide
  Sense strand starting at position 459 of SEQ ID NO: 586547
cuuuauuccggccagaaac

SEQ ID NO: 726129 - RNA, 19 nt, Artificial Sequence
  Description of Artificial Sequence: Synthetic oligonucleotide
  Antisense strand to SEQ ID NO: 726128
guuucuggccggaauaaag

SEQ ID NO: 726130 - RNA, 19 nt, Artificial Sequence
  Description of Artificial Sequence: Synthetic oligonucleotide
  Sense strand starting at position 541 of SEQ ID NO: 586547
agccucuuauaacagagau

SEQ ID NO: 726131 - RNA, 19 nt, Artificial Sequence
  Description of Artificial Sequence: Synthetic oligonucleotide
  Antisense strand to SEQ ID NO: 726130
aucucuguuauaagaggcu

SEQ ID NO: 726132 - RNA, 19 nt, Artificial Sequence
  Description of Artificial Sequence: Synthetic oligonucleotide
  Sense strand starting at position 591 of SEQ ID NO: 586547
ccacaacuguucuccggau

SEQ ID NO: 726133 - RNA, 19 nt, Artificial Sequence
  Description of Artificial Sequence: Synthetic oligonucleotide
  Antisense strand to SEQ ID NO: 726132
auccggagaacaguugugg

SEQ ID NO: 726134 - RNA, 19 nt, Artificial Sequence
  Description of Artificial Sequence: Synthetic oligonucleotide
  Sense strand starting at position 592 of SEQ ID NO: 586547
cacaacuguucuccggauu

SEQ ID NO: 726135 - RNA, 19 nt, Artificial Sequence
  Description of Artificial Sequence: Synthetic oligonucleotide
  Antisense strand to SEQ ID NO: 726134
aauccggagaacaguugug

SEQ ID NO: 726136 - RNA, 19 nt, Artificial Sequence
  Description of Artificial Sequence: Synthetic oligonucleotide
  Sense strand starting at position 740 of SEQ ID NO: 586547
guaugugaaggcugcgauu

SEQ ID NO: 726137 - RNA, 19 nt, Artificial Sequence
  Description of Artificial Sequence: Synthetic oligonucleotide
  Antisense strand to SEQ ID NO: 726136
aaucgcagccuucacauac

SEQ ID NO: 726138 - RNA, 19 nt, Artificial Sequence
  Description of Artificial Sequence: Synthetic oligonucleotide
  Sense strand starting at position 809 of SEQ ID NO: 586547
agacacacuuggguuuaaa

SEQ ID NO: 726139 - RNA, 19 nt, Artificial Sequence
  Description of Artificial Sequence: Synthetic oligonucleotide
  Antisense strand to SEQ ID NO: 726138
uuuaaacccaagugugucu

SEQ ID NO: 726140 - RNA, 19 nt, Artificial Sequence
  Description of Artificial Sequence: Synthetic oligonucleotide
  Sense strand starting at position 876 of SEQ ID NO: 586547
aguugauucuggguugcuu

SEQ ID NO: 726141 - RNA, 19 nt, Artificial Sequence
  Description of Artificial Sequence: Synthetic oligonucleotide
  Antisense strand to SEQ ID NO: 726140
aagcaacccagaaucaacu

SEQ ID NO: 726142 - RNA, 19 nt, Artificial Sequence
  Description of Artificial Sequence: Synthetic oligonucleotide
  Sense strand starting at position 1249 of SEQ ID NO: 586547
cggaggcucgcggagaaua

SEQ ID NO: 726143 - RNA, 19 nt, Artificial Sequence
  Description of Artificial Sequence: Synthetic oligonucleotide
  Antisense strand to SEQ ID NO: 726142
uauucuccgcgagccuccg

SEQ ID NO: 726144 - RNA, 19 nt, Artificial Sequence
  Description of Artificial Sequence: Synthetic oligonucleotide
  Sense strand starting at position 1251 of SEQ ID NO: 586547
gaggcucgcggagaauaaa

SEQ ID NO: 726145 - RNA, 19 nt, Artificial Sequence
  Description of Artificial Sequence: Synthetic oligonucleotide
  Antisense strand to SEQ ID NO: 726144
uuuauucuccgcgagccuc

SEQ ID NO: 726146 - RNA, 19 nt, Artificial Sequence
  Description of Artificial Sequence: Synthetic oligonucleotide
  Sense strand starting at position 1331 of SEQ ID NO: 586547
aggaggugcuccgaaaggu

SEQ ID NO: 726147 - RNA, 19 nt, Artificial Sequence
  Description of Artificial Sequence: Synthetic oligonucleotide
  Antisense strand to SEQ ID NO: 726146
accuuucggagcaccuccu

SEQ ID NO: 726148 - RNA, 19 nt, Artificial Sequence
  Description of Artificial Sequence: Synthetic oligonucleotide
  Sense strand starting at position 2986 of SEQ ID NO: 586547
uaggaagacuuguugaguc

SEQ ID NO: 726149 - RNA, 19 nt, Artificial Sequence
  Description of Artificial Sequence: Synthetic oligonucleotide
  Antisense strand to SEQ ID NO: 726148
gacucaacaagucuuccua

SEQ ID NO: 726150 - RNA, 19 nt, Artificial Sequence
  Description of Artificial Sequence: Synthetic oligonucleotide
  Sense strand starting at position 2994 of SEQ ID NO: 586547
cuuguugagucuccucuua

SEQ ID NO: 726151 - RNA, 19 nt, Artificial Sequence
  Description of Artificial Sequence: Synthetic oligonucleotide
  Antisense strand to SEQ ID NO: 726150
uaagaggagacucaacaag

SEQ ID NO: 726152 - RNA, 19 nt, Artificial Sequence
  Description of Artificial Sequence: Synthetic oligonucleotide
  Sense strand starting at position 3027 of SEQ ID NO: 586547
aacugugggucgugacaca

SEQ ID NO: 726153 - RNA, 19 nt, Artificial Sequence
  Description of Artificial Sequence: Synthetic oligonucleotide
  Antisense strand to SEQ ID NO: 726152
ugugucacgacccacaguu

SEQ ID NO: 726154 - RNA, 19 nt, Artificial Sequence
  Description of Artificial Sequence: Synthetic oligonucleotide
  Sense strand starting at position 3032 of SEQ ID NO: 586547
ugggucgugacacaguaau

SEQ ID NO: 726155 - RNA, 19 nt, Artificial Sequence
  Description of Artificial Sequence: Synthetic oligonucleotide
  Antisense strand to SEQ ID NO: 726154
auuacugugucacgaccca

SEQ ID NO: 726156 - RNA, 19 nt, Artificial Sequence
  Description of Artificial Sequence: Synthetic oligonucleotide
  Sense strand starting at position 3038 of SEQ ID NO: 586547
gugacacaguaauagauca

SEQ ID NO: 726157 - RNA, 19 nt, Artificial Sequence
  Description of Artificial Sequence: Synthetic oligonucleotide
  Antisense strand to SEQ ID NO: 726156
ugaucuauuacugugucac

SEQ ID NO: 726158 - RNA, 19 nt, Artificial Sequence
  Description of Artificial Sequence: Synthetic oligonucleotide
  Sense strand starting at position 3127 of SEQ ID NO: 586547
guccauugcccuuaguaag

SEQ ID NO: 726159 - RNA, 19 nt, Artificial Sequence
  Description of Artificial Sequence: Synthetic oligonucleotide
  Antisense strand to SEQ ID NO: 726158
cuuacuaagggcaauggac

SEQ ID NO: 726160 - RNA, 19 nt, Artificial Sequence
  Description of Artificial Sequence: Synthetic oligonucleotide
  Sense strand starting at position 3177 of SEQ ID NO: 586547
gauuauagguacuggacaa

SEQ ID NO: 726161 - RNA, 19 nt, Artificial Sequence
  Description of Artificial Sequence: Synthetic oligonucleotide
  Antisense strand to SEQ ID NO: 726160
uuguccaguaccuauaauc

SEQ ID NO: 726162 - RNA, 19 nt, Artificial Sequence
  Description of Artificial Sequence: Synthetic oligonucleotide
  Sense strand starting at position 3200 of SEQ ID NO: 586547
acuggaccaugaugucaau

SEQ ID NO: 726163 - RNA, 19 nt, Artificial Sequence
  Description of Artificial Sequence: Synthetic oligonucleotide
  Antisense strand to SEQ ID NO: 726162
auugacaucaugguccagu

SEQ ID NO: 726164 - RNA, 19 nt, Artificial Sequence
  Description of Artificial Sequence: Synthetic oligonucleotide
  Sense strand starting at position 3219 of SEQ ID NO: 586547
uuuauuuccgucugugaau

SEQ ID NO: 726165 - RNA, 19 nt, Artificial Sequence
  Description of Artificial Sequence: Synthetic oligonucleotide
  Antisense strand to SEQ ID NO: 726164
auucacagacggaaauaaa

SEQ ID NO: 726166 - RNA, 19 nt, Artificial Sequence
  Description of Artificial Sequence: Synthetic oligonucleotide
  Sense strand starting at position 3220 of SEQ ID NO: 586547
uuauuuccgucugugaauc

SEQ ID NO: 726167 - RNA, 19 nt, Artificial Sequence
  Description of Artificial Sequence: Synthetic oligonucleotide
  Antisense strand to SEQ ID NO: 726166
gauucacagacggaaauaa

SEQ ID NO: 726168 - RNA, 19 nt, Artificial Sequence
  Description of Artificial Sequence: Synthetic oligonucleotide
  Sense strand starting at position 3228 of SEQ ID NO: 586547
gucugugaaucguggguuu

SEQ ID NO: 726169 - RNA, 19 nt, Artificial Sequence
  Description of Artificial Sequence: Synthetic oligonucleotide
  Antisense strand to SEQ ID NO: 726168
aaacccacgauucacagac

SEQ ID NO: 726170 - RNA, 19 nt, Artificial Sequence
  Description of Artificial Sequence: Synthetic oligonucleotide
  Sense strand starting at position 3230 of SEQ ID NO: 586547
cugugaaucguggguuuaa

SEQ ID NO: 726171 - RNA, 19 nt, Artificial Sequence
  Description of Artificial Sequence: Synthetic oligonucleotide
  Antisense strand to SEQ ID NO: 726170
uuaaacccacgauucacag

SEQ ID NO: 726172 - RNA, 19 nt, Artificial Sequence
  Description of Artificial Sequence: Synthetic oligonucleotide
  Sense strand starting at position 3231 of SEQ ID NO: 586547
ugugaaucguggguuuaaa

SEQ ID NO: 726173 - RNA, 19 nt, Artificial Sequence
  Description of Artificial Sequence: Synthetic oligonucleotide
  Antisense strand to SEQ ID NO: 726172
uuuaaacccacgauucaca

SEQ ID NO: 726174 - RNA, 19 nt, Artificial Sequence
  Description of Artificial Sequence: Synthetic oligonucleotide
  Sense strand starting at position 3431 of SEQ ID NO: 586547
ccuuccucugugugaucuu

SEQ ID NO: 726175 - RNA, 19 nt, Artificial Sequence
  Description of Artificial Sequence: Synthetic oligonucleotide
  Antisense strand to SEQ ID NO: 726174
aagaucacacagaggaagg

SEQ ID NO: 726176 - RNA, 19 nt, Artificial Sequence
  Description of Artificial Sequence: Synthetic oligonucleotide
  Sense strand starting at position 3434 of SEQ ID NO: 586547
uccucugugugaucuugua

SEQ ID NO: 726177 - RNA, 19 nt, Artificial Sequence
  Description of Artificial Sequence: Synthetic oligonucleotide
  Antisense strand to SEQ ID NO: 726176
uacaagaucacacagagga

SEQ ID NO: 726178 - RNA, 19 nt, Artificial Sequence
  Description of Artificial Sequence: Synthetic oligonucleotide
  Sense strand starting at position 3526 of SEQ ID NO: 586547
uuugcagaauccuagacua

SEQ ID NO: 726179 - RNA, 19 nt, Artificial Sequence
  Description of Artificial Sequence: Synthetic oligonucleotide
  Antisense strand to SEQ ID NO: 726178
uagucuaggauucugcaaa

SEQ ID NO: 726180 - RNA, 19 nt, Artificial Sequence
  Description of Artificial Sequence: Synthetic oligonucleotide
  Sense strand starting at position 3528 of SEQ ID NO: 586547
ugcagaauccuagacuacu

SEQ ID NO: 726181 - RNA, 19 nt, Artificial Sequence
  Description of Artificial Sequence: Synthetic oligonucleotide
  Antisense strand to SEQ ID NO: 726180
aguagucuaggauucugca

SEQ ID NO: 726182 - RNA, 19 nt, Artificial Sequence
  Description of Artificial Sequence: Synthetic oligonucleotide
  Sense strand starting at position 3537 of SEQ ID NO: 586547
cuagacuacuguugcuaaa

SEQ ID NO: 726183 - RNA, 19 nt, Artificial Sequence
  Description of Artificial Sequence: Synthetic oligonucleotide
  Antisense strand to SEQ ID NO: 726182
uuuagcaacaguagucuag

SEQ ID NO: 726184 - RNA, 19 nt, Artificial Sequence
  Description of Artificial Sequence: Synthetic oligonucleotide
  Sense strand starting at position 3860 of SEQ ID NO: 586547
ggcugagugccuuggcuuu

SEQ ID NO: 726185 - RNA, 19 nt, Artificial Sequence
  Description of Artificial Sequence: Synthetic oligonucleotide
  Antisense strand to SEQ ID NO: 726184
aaagccaaggcacucagcc

SEQ ID NO: 726186 - RNA, 19 nt, Artificial Sequence
  Description of Artificial Sequence: Synthetic oligonucleotide
  Sense strand starting at position 3892 of SEQ ID NO: 586547
cgaguccugacuuagcuuu

SEQ ID NO: 726187 - RNA, 19 nt, Artificial Sequence
  Description of Artificial Sequence: Synthetic oligonucleotide
  Antisense strand to SEQ ID NO: 726186
aaagcuaagucaggacucg

SEQ ID NO: 726188 - RNA, 19 nt, Artificial Sequence
  Description of Artificial Sequence: Synthetic oligonucleotide
  Sense strand starting at position 3899 of SEQ ID NO: 586547
ugacuuagcuuucuaagga

SEQ ID NO: 726189 - RNA, 19 nt, Artificial Sequence
  Description of Artificial Sequence: Synthetic oligonucleotide
  Antisense strand to SEQ ID NO: 726188
uccuuagaaagcuaaguca

SEQ ID NO: 726190 - RNA, 19 nt, Artificial Sequence
  Description of Artificial Sequence: Synthetic oligonucleotide
  Sense strand starting at position 3903 of SEQ ID NO: 586547
uuagcuuucuaaggacaug

SEQ ID NO: 726191 - RNA, 19 nt, Artificial Sequence
  Description of Artificial Sequence: Synthetic oligonucleotide
  Antisense strand to SEQ ID NO: 726190
cauguccuuagaaagcuaa

SEQ ID NO: 726192 - RNA, 19 nt, Artificial Sequence
  Description of Artificial Sequence: Synthetic oligonucleotide
  Sense strand starting at position 3906 of SEQ ID NO: 586547
gcuuucuaaggacaugagu

SEQ ID NO: 726193 - RNA, 19 nt, Artificial Sequence
  Description of Artificial Sequence: Synthetic oligonucleotide
  Antisense strand to SEQ ID NO: 726192
acucauguccuuagaaagc

SEQ ID NO: 726194 - RNA, 19 nt, Artificial Sequence
  Description of Artificial Sequence: Synthetic oligonucleotide
  Sense strand starting at position 36 of SEQ ID NO: 586548
ccuagcaagcagcauuaau

SEQ ID NO: 726195 - RNA, 19 nt, Artificial Sequence
  Description of Artificial Sequence: Synthetic oligonucleotide
  Antisense strand to SEQ ID NO: 726194
auuaaugcugcuugcuagg

SEQ ID NO: 726196 - RNA, 19 nt, Artificial Sequence
  Description of Artificial Sequence: Synthetic oligonucleotide
  Sense strand starting at position 233 of SEQ ID NO: 586548
uugaaaugguuacuuguca

SEQ ID NO: 726197 - RNA, 19 nt, Artificial Sequence
  Description of Artificial Sequence: Synthetic oligonucleotide
  Antisense strand to SEQ ID NO: 726196
ugacaaguaaccauuucaa

SEQ ID NO: 726198 - RNA, 19 nt, Artificial Sequence
  Description of Artificial Sequence: Synthetic oligonucleotide
  Sense strand starting at position 237 of SEQ ID NO: 586548
aaugguuacuugucacgau

SEQ ID NO: 726199 - RNA, 19 nt, Artificial Sequence
  Description of Artificial Sequence: Synthetic oligonucleotide
  Antisense strand to SEQ ID NO: 726198
aucgugacaaguaaccauu

SEQ ID NO: 726200 - RNA, 19 nt, Artificial Sequence
  Description of Artificial Sequence: Synthetic oligonucleotide
  Sense strand starting at position 241 of SEQ ID NO: 586548
guuacuugucacgauaguu

SEQ ID NO: 726201 - RNA, 19 nt, Artificial Sequence
  Description of Artificial Sequence: Synthetic oligonucleotide
  Antisense strand to SEQ ID NO: 726200
aacuaucgugacaaguaac

SEQ ID NO: 726202 - RNA, 19 nt, Artificial Sequence
  Description of Artificial Sequence: Synthetic oligonucleotide
  Sense strand starting at position 288 of SEQ ID NO: 586548
cuuaauugucgucagcaca

SEQ ID NO: 726203 - RNA, 19 nt, Artificial Sequence
  Description of Artificial Sequence: Synthetic oligonucleotide
  Antisense strand to SEQ ID NO: 726202
ugugcugacgacaauuaag

SEQ ID NO: 726204 - RNA, 19 nt, Artificial Sequence
  Description of Artificial Sequence: Synthetic oligonucleotide
  Sense strand starting at position 302 of SEQ ID NO: 586548
gcacauagguuaucucuaa

SEQ ID NO: 726205 - RNA, 19 nt, Artificial Sequence
  Description of Artificial Sequence: Synthetic oligonucleotide
  Antisense strand to SEQ ID NO: 726204
uuagagauaaccuaugugc

SEQ ID NO: 726206 - RNA, 19 nt, Artificial Sequence
  Description of Artificial Sequence: Synthetic oligonucleotide
  Sense strand starting at position 417 of SEQ ID NO: 586548
cccgauguccacuaucgau

SEQ ID NO: 726207 - RNA, 19 nt, Artificial Sequence
  Description of Artificial Sequence: Synthetic oligonucleotide
  Antisense strand to SEQ ID NO: 726206
aucgauaguggacaucggg

SEQ ID NO: 726208 - RNA, 19 nt, Artificial Sequence
  Description of Artificial Sequence: Synthetic oligonucleotide
  Sense strand starting at position 459 of SEQ ID NO: 586548
cgugcuuagggucaaagaa

SEQ ID NO: 726209 - RNA, 19 nt, Artificial Sequence
  Description of Artificial Sequence: Synthetic oligonucleotide
  Antisense strand to SEQ ID NO: 726208
uucuuugacccuaagcacg

SEQ ID NO: 726210 - RNA, 19 nt, Artificial Sequence
  Description of Artificial Sequence: Synthetic oligonucleotide
  Sense strand starting at position 699 of SEQ ID NO: 586548
cguaaucaucuauaaaggu

SEQ ID NO: 726211 - RNA, 19 nt, Artificial Sequence
  Description of Artificial Sequence: Synthetic oligonucleotide
  Antisense strand to SEQ ID NO: 726210
accuuuauagaugauuacg

SEQ ID NO: 726212 - RNA, 19 nt, Artificial Sequence
  Description of Artificial Sequence: Synthetic oligonucleotide
  Sense strand starting at position 709 of SEQ ID NO: 586548
uauaaagguccauggaucu

SEQ ID NO: 726213 - RNA, 19 nt, Artificial Sequence
  Description of Artificial Sequence: Synthetic oligonucleotide
  Antisense strand to SEQ ID NO: 726212
agauccauggaccuuuaua

SEQ ID NO: 726214 - RNA, 19 nt, Artificial Sequence
  Description of Artificial Sequence: Synthetic oligonucleotide
  Sense strand starting at position 722 of SEQ ID NO: 586548
ggaucugucccguaagggu

SEQ ID NO: 726215 - RNA, 19 nt, Artificial Sequence
  Description of Artificial Sequence: Synthetic oligonucleotide
  Antisense strand to SEQ ID NO: 726214
acccuuacgggacagaucc

SEQ ID NO: 726216 - RNA, 19 nt, Artificial Sequence
  Description of Artificial Sequence: Synthetic oligonucleotide
  Sense strand starting at position 729 of SEQ ID NO: 586548
ucccguaaggguuaaacuu

SEQ ID NO: 726217 - RNA, 19 nt, Artificial Sequence
  Description of Artificial Sequence: Synthetic oligonucleotide
  Antisense strand to SEQ ID NO: 726216
aaguuuaacccuuacggga

SEQ ID NO: 726218 - RNA, 19 nt, Artificial Sequence
  Description of Artificial Sequence: Synthetic oligonucleotide
  Sense strand starting at position 737 of SEQ ID NO: 586548
ggguuaaacuucucaguaa

SEQ ID NO: 726219 - RNA, 19 nt, Artificial Sequence
  Description of Artificial Sequence: Synthetic oligonucleotide
  Antisense strand to SEQ ID NO: 726218
uuacugagaaguuuaaccc

SEQ ID NO: 726220 - RNA, 19 nt, Artificial Sequence
  Description of Artificial Sequence: Synthetic oligonucleotide
  Sense strand starting at position 770 of SEQ ID NO: 586548
augagucagcucuacaacu

SEQ ID NO: 726221 - RNA, 19 nt, Artificial Sequence
  Description of Artificial Sequence: Synthetic oligonucleotide
  Antisense strand to SEQ ID NO: 726220
aguuguagagcugacucau

SEQ ID NO: 726222 - RNA, 19 nt, Artificial Sequence
  Description of Artificial Sequence: Synthetic oligonucleotide
  Sense strand starting at position 814 of SEQ ID NO: 586548
aggauucugacgcgaauau

SEQ ID NO: 726223 - RNA, 19 nt, Artificial Sequence
  Description of Artificial Sequence: Synthetic oligonucleotide
  Antisense strand to SEQ ID NO: 726222
auauucgcgucagaauccu

SEQ ID NO: 726224 - RNA, 19 nt, Artificial Sequence
  Description of Artificial Sequence: Synthetic oligonucleotide
  Sense strand starting at position 815 of SEQ ID NO: 586548
ggauucugacgcgaauauc

SEQ ID NO: 726225 - RNA, 19 nt, Artificial Sequence
  Description of Artificial Sequence: Synthetic oligonucleotide
  Antisense strand to SEQ ID NO: 726224
gauauucgcgucagaaucc

SEQ ID NO: 726226 - RNA, 19 nt, Artificial Sequence
  Description of Artificial Sequence: Synthetic oligonucleotide
  Sense strand starting at position 1040 of SEQ ID NO: 586548
ggugauaucuucucugaaa

SEQ ID NO: 726227 - RNA, 19 nt, Artificial Sequence
  Description of Artificial Sequence: Synthetic oligonucleotide
  Antisense strand to SEQ ID NO: 726226
uuucagagaagauaucacc

SEQ ID NO: 726228 - RNA, 19 nt, Artificial Sequence
  Description of Artificial Sequence: Synthetic oligonucleotide
  Sense strand starting at position 1041 of SEQ ID NO: 586548
gugauaucuucucugaaac

SEQ ID NO: 726229 - RNA, 19 nt, Artificial Sequence
  Description of Artificial Sequence: Synthetic oligonucleotide
  Antisense strand to SEQ ID NO: 726228
guuucagagaagauaucac

SEQ ID NO: 726230 - RNA, 19 nt, Artificial Sequence
  Description of Artificial Sequence: Synthetic oligonucleotide
  Sense strand starting at position 1164 of SEQ ID NO: 586548
ugcgcaggacucuaaagau

SEQ ID NO: 726231 - RNA, 19 nt, Artificial Sequence
  Description of Artificial Sequence: Synthetic oligonucleotide
  Antisense strand to SEQ ID NO: 726230
aucuuuagaguccugcgca

SEQ ID NO: 726232 - RNA, 19 nt, Artificial Sequence
  Description of Artificial Sequence: Synthetic oligonucleotide
  Sense strand starting at position 1455 of SEQ ID NO: 586548
cgaagcagcgugcuuuaga

SEQ ID NO: 726233 - RNA, 19 nt, Artificial Sequence
  Description of Artificial Sequence: Synthetic oligonucleotide
  Antisense strand to SEQ ID NO: 726232
ucuaaagcacgcugcuucg

SEQ ID NO: 726234 - RNA, 19 nt, Artificial Sequence
  Description of Artificial Sequence: Synthetic oligonucleotide
  Sense strand starting at position 1464 of SEQ ID NO: 586548
gugcuuuagaaagggaaua

SEQ ID NO: 726235 - RNA, 19 nt, Artificial Sequence
  Description of Artificial Sequence: Synthetic oligonucleotide
  Antisense strand to SEQ ID NO: 726234
uauucccuuucuaaagcac

SEQ ID NO: 726236 - RNA, 19 nt, Artificial Sequence
  Description of Artificial Sequence: Synthetic oligonucleotide
  Sense strand starting at position 1833 of SEQ ID NO: 586548
gagagaucuccgcggacga

SEQ ID NO: 726237 - RNA, 19 nt, Artificial Sequence
  Description of Artificial Sequence: Synthetic oligonucleotide
  Antisense strand to SEQ ID NO: 726236
ucguccgcggagaucucuc

SEQ ID NO: 726238 - RNA, 19 nt, Artificial Sequence
  Description of Artificial Sequence: Synthetic oligonucleotide
  Sense strand starting at position 1834 of SEQ ID NO: 586548
agagaucuccgcggacgaa

SEQ ID NO: 726239 - RNA, 19 nt, Artificial Sequence
  Description of Artificial Sequence: Synthetic oligonucleotide
  Antisense strand to SEQ ID NO: 726238
uucguccgcggagaucucu

SEQ ID NO: 726240 - RNA, 19 nt, Artificial Sequence
  Description of Artificial Sequence: Synthetic oligonucleotide
  Sense strand starting at position 2116 of SEQ ID NO: 586548
gagacaguacccgacguua

SEQ ID NO: 726241 - RNA, 19 nt, Artificial Sequence
  Description of Artificial Sequence: Synthetic oligonucleotide
  Antisense strand to SEQ ID NO: 726240
uaacgucggguacugucuc

SEQ ID NO: 726242 - RNA, 19 nt, Artificial Sequence
  Description of Artificial Sequence: Synthetic oligonucleotide
  Sense strand starting at position 2139 of SEQ ID NO: 586548
cguaaaugcgcucaaugaa

SEQ ID NO: 726243 - RNA, 19 nt, Artificial Sequence
  Description of Artificial Sequence: Synthetic oligonucleotide
  Antisense strand to SEQ ID NO: 726242
uucauugagcgcauuuacg

SEQ ID NO: 726244 - RNA, 19 nt, Artificial Sequence
  Description of Artificial Sequence: Synthetic oligonucleotide
  Sense strand starting at position 2151 of SEQ ID NO: 586548
caaugaauugcggaaggcu

SEQ ID NO: 726245 - RNA, 19 nt, Artificial Sequence
  Description of Artificial Sequence: Synthetic oligonucleotide
  Antisense strand to SEQ ID NO: 726244
agccuuccgcaauucauug

SEQ ID NO: 726246 - RNA, 19 nt, Artificial Sequence
  Description of Artificial Sequence: Synthetic oligonucleotide
  Sense strand starting at position 2183 of SEQ ID NO: 586548
uuacuaccucuuggaauag

SEQ ID NO: 726247 - RNA, 19 nt, Artificial Sequence
  Description of Artificial Sequence: Synthetic oligonucleotide
  Antisense strand to SEQ ID NO: 726246
cuauuccaagagguaguaa

SEQ ID NO: 726248 - RNA, 19 nt, Artificial Sequence
  Description of Artificial Sequence: Synthetic oligonucleotide
  Sense strand starting at position 2329 of SEQ ID NO: 586548
caguuacgccaaugauaac

SEQ ID NO: 726249 - RNA, 19 nt, Artificial Sequence
  Description of Artificial Sequence: Synthetic oligonucleotide
  Antisense strand to SEQ ID NO: 726248
guuaucauuggcguaacug

SEQ ID NO: 726250 - RNA, 19 nt, Artificial Sequence
  Description of Artificial Sequence: Synthetic oligonucleotide
  Sense strand starting at position 3649 of SEQ ID NO: 586548
ggguguuugcaagagguga

SEQ ID NO: 726251 - RNA, 19 nt, Artificial Sequence
  Description of Artificial Sequence: Synthetic oligonucleotide
  Antisense strand to SEQ ID NO: 726250
ucaccucuugcaaacaccc

SEQ ID NO: 726252 - RNA, 19 nt, Artificial Sequence
  Description of Artificial Sequence: Synthetic oligonucleotide
  Sense strand starting at position 3653 of SEQ ID NO: 586548
guuugcaagaggugauucu

SEQ ID NO: 726253 - RNA, 19 nt, Artificial Sequence
  Description of Artificial Sequence: Synthetic oligonucleotide
  Antisense strand to SEQ ID NO: 726252
agaaucaccucuugcaaac

SEQ ID NO: 726254 - RNA, 19 nt, Artificial Sequence
  Description of Artificial Sequence: Synthetic oligonucleotide
  Sense strand starting at position 3729 of SEQ ID NO: 586548
uuaauuaccgauuggaaag

SEQ ID NO: 726255 - RNA, 19 nt, Artificial Sequence
  Description of Artificial Sequence: Synthetic oligonucleotide
  Antisense strand to SEQ ID NO: 726254
cuuuccaaucgguaauuaa

SEQ ID NO: 726256 - RNA, 19 nt, Artificial Sequence
  Description of Artificial Sequence: Synthetic oligonucleotide
  Sense strand starting at position 3751 of SEQ ID NO: 586548
gaggguuucugagcagaaa

SEQ ID NO: 726257 - RNA, 19 nt, Artificial Sequence
  Description of Artificial Sequence: Synthetic oligonucleotide
  Antisense strand to SEQ ID NO: 726256
uuucugcucagaaacccuc

SEQ ID NO: 726258 - RNA, 19 nt, Artificial Sequence
  Description of Artificial Sequence: Synthetic oligonucleotide
  Sense strand starting at position 3770 of SEQ ID NO: 586548
ccaaguugggauugcagaa

SEQ ID NO: 726259 - RNA, 19 nt, Artificial Sequence
  Description of Artificial Sequence: Synthetic oligonucleotide
  Antisense strand to SEQ ID NO: 726258
uucugcaaucccaacuugg

SEQ ID NO: 726260 - RNA, 19 nt, Artificial Sequence
  Description of Artificial Sequence: Synthetic oligonucleotide
  Sense strand starting at position 3802 of SEQ ID NO: 586548
cagugcuuuaccguuguga

SEQ ID NO: 726261 - RNA, 19 nt, Artificial Sequence
  Description of Artificial Sequence: Synthetic oligonucleotide
  Antisense strand to SEQ ID NO: 726260
ucacaacgguaaagcacug

SEQ ID NO: 726262 - RNA, 19 nt, Artificial Sequence
  Description of Artificial Sequence: Synthetic oligonucleotide
  Sense strand starting at position 3805 of SEQ ID NO: 586548
ugcuuuaccguugugaguu

SEQ ID NO: 726263 - RNA, 19 nt, Artificial Sequence
  Description of Artificial Sequence: Synthetic oligonucleotide
  Antisense strand to SEQ ID NO: 726262
aacucacaacgguaaagca

SEQ ID NO: 726264 - RNA, 19 nt, Artificial Sequence
  Description of Artificial Sequence: Synthetic oligonucleotide
  Sense strand starting at position 3827 of SEQ ID NO: 586548
uggguaaucgugccugguu

SEQ ID NO: 726265 - RNA, 19 nt, Artificial Sequence
  Description of Artificial Sequence: Synthetic oligonucleotide
  Antisense strand to SEQ ID NO: 726264
aaccaggcacgauuaccca

SEQ ID NO: 726266 - RNA, 19 nt, Artificial Sequence
  Description of Artificial Sequence: Synthetic oligonucleotide
  Sense strand starting at position 3849 of SEQ ID NO: 586548
aaccgaaaggauuguccuu

SEQ ID NO: 726267 - RNA, 19 nt, Artificial Sequence
  Description of Artificial Sequence: Synthetic oligonucleotide
  Antisense strand to SEQ ID NO: 726266
aaggacaauccuuucgguu

SEQ ID NO: 726268 - RNA, 19 nt, Artificial Sequence
  Description of Artificial Sequence: Synthetic oligonucleotide
  Sense strand starting at position 3851 of SEQ ID NO: 586548
ccgaaaggauuguccuuua

SEQ ID NO: 726269 - RNA, 19 nt, Artificial Sequence
  Description of Artificial Sequence: Synthetic oligonucleotide
  Antisense strand to SEQ ID NO: 726268
uaaaggacaauccuuucgg

SEQ ID NO: 726270 - RNA, 19 nt, Artificial Sequence
  Description of Artificial Sequence: Synthetic oligonucleotide
  Sense strand starting at position 3969 of SEQ ID NO: 586548
ccaguaaagucuuucuaga

SEQ ID NO: 726271 - RNA, 19 nt, Artificial Sequence
  Description of Artificial Sequence: Synthetic oligonucleotide
  Antisense strand to SEQ ID NO: 726270
ucuagaaagacuuuacugg

SEQ ID NO: 726272 - RNA, 19 nt, Artificial Sequence
  Description of Artificial Sequence: Synthetic oligonucleotide
  Sense strand starting at position 3971 of SEQ ID NO: 586548
aguaaagucuuucuagacu

SEQ ID NO: 726273 - RNA, 19 nt, Artificial Sequence
  Description of Artificial Sequence: Synthetic oligonucleotide
  Antisense strand to SEQ ID NO: 726272
agucuagaaagacuuuacu

SEQ ID NO: 726274 - RNA, 19 nt, Artificial Sequence
  Description of Artificial Sequence: Synthetic oligonucleotide
  Sense strand starting at position 62 of SEQ ID NO: 586549
cuguacauauaguuagaua

SEQ ID NO: 726275 - RNA, 19 nt, Artificial Sequence
  Description of Artificial Sequence: Synthetic oligonucleotide
  Antisense strand to SEQ ID NO: 726274
uaucuaacuauauguacag

SEQ ID NO: 726276 - RNA, 19 nt, Artificial Sequence
  Description of Artificial Sequence: Synthetic oligonucleotide
  Sense strand starting at position 155 of SEQ ID NO: 586549
acaguagguucugugaauu

SEQ ID NO: 726277 - RNA, 19 nt, Artificial Sequence
  Description of Artificial Sequence: Synthetic oligonucleotide
  Antisense strand to SEQ ID NO: 726276
aauucacagaaccuacugu

SEQ ID NO: 726278 - RNA, 19 nt, Artificial Sequence
  Description of Artificial Sequence: Synthetic oligonucleotide
  Sense strand starting at position 230 of SEQ ID NO: 586549
ucuggaugaagguguuaac

SEQ ID NO: 726279 - RNA, 19 nt, Artificial Sequence
  Description of Artificial Sequence: Synthetic oligonucleotide
  Antisense strand to SEQ ID NO: 726278
guuaacaccuucauccaga

SEQ ID NO: 726280 - RNA, 19 nt, Artificial Sequence
  Description of Artificial Sequence: Synthetic oligonucleotide
  Sense strand starting at position 255 of SEQ ID NO: 586549
ccaagucucugguccagaa

SEQ ID NO: 726281 - RNA, 19 nt, Artificial Sequence
  Description of Artificial Sequence: Synthetic oligonucleotide
  Antisense strand to SEQ ID NO: 726280
uucuggaccagagacuugg

SEQ ID NO: 726282 - RNA, 19 nt, Artificial Sequence
  Description of Artificial Sequence: Synthetic oligonucleotide
  Sense strand starting at position 257 of SEQ ID NO: 586549
aagucucugguccagaauu

SEQ ID NO: 726283 - RNA, 19 nt, Artificial Sequence
  Description of Artificial Sequence: Synthetic oligonucleotide
  Antisense strand to SEQ ID NO: 726282
aauucuggaccagagacuu

SEQ ID NO: 726284 - RNA, 19 nt, Artificial Sequence
  Description of Artificial Sequence: Synthetic oligonucleotide
  Sense strand starting at position 259 of SEQ ID NO: 586549
gucucugguccagaauuau

SEQ ID NO: 726285 - RNA, 19 nt, Artificial Sequence
  Description of Artificial Sequence: Synthetic oligonucleotide
  Antisense strand to SEQ ID NO: 726284
auaauucuggaccagagac

SEQ ID NO: 726286 - RNA, 19 nt, Artificial Sequence
  Description of Artificial Sequence: Synthetic oligonucleotide
  Sense strand starting at position 265 of SEQ ID NO: 586549
gguccagaauuaucugcaa

SEQ ID NO: 726287 - RNA, 19 nt, Artificial Sequence
  Description of Artificial Sequence: Synthetic oligonucleotide
  Antisense strand to SEQ ID NO: 726286
uugcagauaauucuggacc

SEQ ID NO: 726288 - RNA, 19 nt, Artificial Sequence
  Description of Artificial Sequence: Synthetic oligonucleotide
  Sense strand starting at position 367 of SEQ ID NO: 586549
augugcuuuggguaagaag

SEQ ID NO: 726289 - RNA, 19 nt, Artificial Sequence
  Description of Artificial Sequence: Synthetic oligonucleotide
  Antisense strand to SEQ ID NO: 726288
cuucuuacccaaagcacau

SEQ ID NO: 726290 - RNA, 19 nt, Artificial Sequence
  Description of Artificial Sequence: Synthetic oligonucleotide
  Sense strand starting at position 497 of SEQ ID NO: 586549
gcuggacuucucugaggau

SEQ ID NO: 726291 - RNA, 19 nt, Artificial Sequence
  Description of Artificial Sequence: Synthetic oligonucleotide
  Antisense strand to SEQ ID NO: 726290
auccucagagaaguccagc

SEQ ID NO: 726292 - RNA, 19 nt, Artificial Sequence
  Description of Artificial Sequence: Synthetic oligonucleotide
  Sense strand starting at position 804 of SEQ ID NO: 586549
gaagccaugagacggaaau

SEQ ID NO: 726293 - RNA, 19 nt, Artificial Sequence
  Description of Artificial Sequence: Synthetic oligonucleotide
  Antisense strand to SEQ ID NO: 726292
auuuccgucucauggcuuc

SEQ ID NO: 726294 - RNA, 19 nt, Artificial Sequence
  Description of Artificial Sequence: Synthetic oligonucleotide
  Sense strand starting at position 930 of SEQ ID NO: 586549
ugagguguaaaguguuaac

SEQ ID NO: 726295 - RNA, 19 nt, Artificial Sequence
  Description of Artificial Sequence: Synthetic oligonucleotide
  Antisense strand to SEQ ID NO: 726294
guuaacacuuuacaccuca

SEQ ID NO: 726296 - RNA, 19 nt, Artificial Sequence
  Description of Artificial Sequence: Synthetic oligonucleotide
  Sense strand starting at position 939 of SEQ ID NO: 586549
aaguguuaaccugauguaa

SEQ ID NO: 726297 - RNA, 19 nt, Artificial Sequence
  Description of Artificial Sequence: Synthetic oligonucleotide
  Antisense strand to SEQ ID NO: 726296
uuacaucagguuaacacuu

SEQ ID NO: 726298 - RNA, 19 nt, Artificial Sequence
  Description of Artificial Sequence: Synthetic oligonucleotide
  Sense strand starting at position 951 of SEQ ID NO: 586549
gauguaaaccauuagcaug

SEQ ID NO: 726299 - RNA, 19 nt, Artificial Sequence
  Description of Artificial Sequence: Synthetic oligonucleotide
  Antisense strand to SEQ ID NO: 726298
caugcuaaugguuuacauc

SEQ ID NO: 726300 - RNA, 19 nt, Artificial Sequence
  Description of Artificial Sequence: Synthetic oligonucleotide
  Sense strand starting at position 957 of SEQ ID NO: 586549
aaccauuagcauggucaga

SEQ ID NO: 726301 - RNA, 19 nt, Artificial Sequence
  Description of Artificial Sequence: Synthetic oligonucleotide
  Antisense strand to SEQ ID NO: 726300
ucugaccaugcuaaugguu

SEQ ID NO: 726302 - RNA, 19 nt, Artificial Sequence
  Description of Artificial Sequence: Synthetic oligonucleotide
  Sense strand starting at position 966 of SEQ ID NO: 586549
cauggucagaccggugauu

SEQ ID NO: 726303 - RNA, 19 nt, Artificial Sequence
  Description of Artificial Sequence: Synthetic oligonucleotide
  Antisense strand to SEQ ID NO: 726302
aaucaccggucugaccaug

SEQ ID NO: 726304 - RNA, 19 nt, Artificial Sequence
  Description of Artificial Sequence: Synthetic oligonucleotide
  Sense strand starting at position 968 of SEQ ID NO: 586549
uggucagaccggugauuaa

SEQ ID NO: 726305 - RNA, 19 nt, Artificial Sequence
  Description of Artificial Sequence: Synthetic oligonucleotide
  Antisense strand to SEQ ID NO: 726304
uuaaucaccggucugacca

SEQ ID NO: 726306 - RNA, 19 nt, Artificial Sequence
  Description of Artificial Sequence: Synthetic oligonucleotide
  Sense strand starting at position 1402 of SEQ ID NO: 586549
ggugcuccuguccauauga

SEQ ID NO: 726307 - RNA, 19 nt, Artificial Sequence
  Description of Artificial Sequence: Synthetic oligonucleotide
  Antisense strand to SEQ ID NO: 726306
ucauauggacaggagcacc

SEQ ID NO: 726308 - RNA, 19 nt, Artificial Sequence
  Description of Artificial Sequence: Synthetic oligonucleotide
  Sense strand starting at position 1404 of SEQ ID NO: 586549
ugcuccuguccauaugagu

SEQ ID NO: 726309 - RNA, 19 nt, Artificial Sequence
  Description of Artificial Sequence: Synthetic oligonucleotide
  Antisense strand to SEQ ID NO: 726308
acucauauggacaggagca

SEQ ID NO: 726310 - RNA, 19 nt, Artificial Sequence
  Description of Artificial Sequence: Synthetic oligonucleotide
  Sense strand starting at position 1410 of SEQ ID NO: 586549
uguccauaugaguggugaa

SEQ ID NO: 726311 - RNA, 19 nt, Artificial Sequence
  Description of Artificial Sequence: Synthetic oligonucleotide
  Antisense strand to SEQ ID NO: 726310
uucaccacucauauggaca

SEQ ID NO: 726312 - RNA, 19 nt, Artificial Sequence
  Description of Artificial Sequence: Synthetic oligonucleotide
  Sense strand starting at position 1411 of SEQ ID NO: 586549
guccauaugaguggugaau

SEQ ID NO: 726313 - RNA, 19 nt, Artificial Sequence
  Description of Artificial Sequence: Synthetic oligonucleotide
  Antisense strand to SEQ ID NO: 726312
auucaccacucauauggac

SEQ ID NO: 726314 - RNA, 19 nt, Artificial Sequence
  Description of Artificial Sequence: Synthetic oligonucleotide
  Sense strand starting at position 1498 of SEQ ID NO: 586549
augagagauuuccagagua

SEQ ID NO: 726315 - RNA, 19 nt, Artificial Sequence
  Description of Artificial Sequence: Synthetic oligonucleotide
  Antisense strand to SEQ ID NO: 726314
uacucuggaaaucucucau

SEQ ID NO: 726316 - RNA, 19 nt, Artificial Sequence
  Description of Artificial Sequence: Synthetic oligonucleotide
  Sense strand starting at position 1592 of SEQ ID NO: 586549
acugaaguucugugagcca

SEQ ID NO: 726317 - RNA, 19 nt, Artificial Sequence
  Description of Artificial Sequence: Synthetic oligonucleotide
  Antisense strand to SEQ ID NO: 726316
uggcucacagaacuucagu

SEQ ID NO: 726318 - RNA, 19 nt, Artificial Sequence
  Description of Artificial Sequence: Synthetic oligonucleotide
  Sense strand starting at position 1595 of SEQ ID NO: 586549
gaaguucugugagccauag

SEQ ID NO: 726319 - RNA, 19 nt, Artificial Sequence
  Description of Artificial Sequence: Synthetic oligonucleotide
  Antisense strand to SEQ ID NO: 726318
cuauggcucacagaacuuc

SEQ ID NO: 726320 - RNA, 19 nt, Artificial Sequence
  Description of Artificial Sequence: Synthetic oligonucleotide
  Sense strand starting at position 1902 of SEQ ID NO: 586549
uccaucugucacugaguga

SEQ ID NO: 726321 - RNA, 19 nt, Artificial Sequence
  Description of Artificial Sequence: Synthetic oligonucleotide
  Antisense strand to SEQ ID NO: 726320
ucacucagugacagaugga

SEQ ID NO: 726322 - RNA, 19 nt, Artificial Sequence
  Description of Artificial Sequence: Synthetic oligonucleotide
  Sense strand starting at position 2725 of SEQ ID NO: 586549
ccaggagggucuucgaaac

SEQ ID NO: 726323 - RNA, 19 nt, Artificial Sequence
  Description of Artificial Sequence: Synthetic oligonucleotide
  Antisense strand to SEQ ID NO: 726322
guuucgaagacccuccugg

SEQ ID NO: 726324 - RNA, 19 nt, Artificial Sequence
  Description of Artificial Sequence: Synthetic oligonucleotide
  Sense strand starting at position 2781 of SEQ ID NO: 586549
ugaggaguuucuguaauuc

SEQ ID NO: 726325 - RNA, 19 nt, Artificial Sequence
  Description of Artificial Sequence: Synthetic oligonucleotide
  Antisense strand to SEQ ID NO: 726324
gaauuacagaaacuccuca

SEQ ID NO: 726326 - RNA, 19 nt, Artificial Sequence
  Description of Artificial Sequence: Synthetic oligonucleotide
  Sense strand starting at position 2811 of SEQ ID NO: 586549
gcggaugagcccuggaaac

SEQ ID NO: 726327 - RNA, 19 nt, Artificial Sequence
  Description of Artificial Sequence: Synthetic oligonucleotide
  Antisense strand to SEQ ID NO: 726326
guuuccagggcucauccgc

SEQ ID NO: 726328 - RNA, 19 nt, Artificial Sequence
  Description of Artificial Sequence: Synthetic oligonucleotide
  Sense strand starting at position 3334 of SEQ ID NO: 586549
uguguaguugcuuaugaga

SEQ ID NO: 726329 - RNA, 19 nt, Artificial Sequence
  Description of Artificial Sequence: Synthetic oligonucleotide
  Antisense strand to SEQ ID NO: 726328
ucucauaagcaacuacaca

SEQ ID NO: 726330 - RNA, 19 nt, Artificial Sequence
  Description of Artificial Sequence: Synthetic oligonucleotide
  Sense strand starting at position 3357 of SEQ ID NO: 586549
ucaaguccuucccuagaga

SEQ ID NO: 726331 - RNA, 19 nt, Artificial Sequence
  Description of Artificial Sequence: Synthetic oligonucleotide
  Antisense strand to SEQ ID NO: 726330
ucucuagggaaggacuuga

SEQ ID NO: 726332 - RNA, 19 nt, Artificial Sequence
  Description of Artificial Sequence: Synthetic oligonucleotide
  Sense strand starting at position 3381 of SEQ ID NO: 586549
augcaaaucugagccucau

SEQ ID NO: 726333 - RNA, 19 nt, Artificial Sequence
  Description of Artificial Sequence: Synthetic oligonucleotide
  Antisense strand to SEQ ID NO: 726332
augaggcucagauuugcau

SEQ ID NO: 726334 - RNA, 19 nt, Artificial Sequence
  Description of Artificial Sequence: Synthetic oligonucleotide
  Sense strand starting at position 3445 of SEQ ID NO: 586549
ugcugaggucguuaaauug

SEQ ID NO: 726335 - RNA, 19 nt, Artificial Sequence
  Description of Artificial Sequence: Synthetic oligonucleotide
  Antisense strand to SEQ ID NO: 726334
caauuuaacgaccucagca

SEQ ID NO: 726336 - RNA, 19 nt, Artificial Sequence
  Description of Artificial Sequence: Synthetic oligonucleotide
  Sense strand starting at position 3536 of SEQ ID NO: 586549
ugcagucuuggguaggaga

SEQ ID NO: 726337 - RNA, 19 nt, Artificial Sequence
  Description of Artificial Sequence: Synthetic oligonucleotide
  Antisense strand to SEQ ID NO: 726336
ucuccuacccaagacugca

SEQ ID NO: 726338 - RNA, 19 nt, Artificial Sequence
  Description of Artificial Sequence: Synthetic oligonucleotide
  Sense strand starting at position 3557 of SEQ ID NO: 586549
ucgagagcuuguccaggaa

SEQ ID NO: 726339 - RNA, 19 nt, Artificial Sequence
  Description of Artificial Sequence: Synthetic oligonucleotide
  Antisense strand to SEQ ID NO: 726338
uuccuggacaagcucucga

SEQ ID NO: 726340 - RNA, 19 nt, Artificial Sequence
  Description of Artificial Sequence: Synthetic oligonucleotide
  Sense strand starting at position 3561 of SEQ ID NO: 586549
gagcuuguccaggaagcuu

SEQ ID NO: 726341 - RNA, 19 nt, Artificial Sequence
  Description of Artificial Sequence: Synthetic oligonucleotide
  Antisense strand to SEQ ID NO: 726340
aagcuuccuggacaagcuc

SEQ ID NO: 726342 - RNA, 19 nt, Artificial Sequence
  Description of Artificial Sequence: Synthetic oligonucleotide
  Sense strand starting at position 3573 of SEQ ID NO: 586549
gaagcuuugcuguauaaau

SEQ ID NO: 726343 - RNA, 19 nt, Artificial Sequence
  Description of Artificial Sequence: Synthetic oligonucleotide
  Antisense strand to SEQ ID NO: 726342
auuuauacagcaaagcuuc

SEQ ID NO: 726344 - RNA, 19 nt, Artificial Sequence
  Description of Artificial Sequence: Synthetic oligonucleotide
  Sense strand starting at position 3575 of SEQ ID NO: 586549
agcuuugcuguauaaauua

SEQ ID NO: 726345 - RNA, 19 nt, Artificial Sequence
  Description of Artificial Sequence: Synthetic oligonucleotide
  Antisense strand to SEQ ID NO: 726344
uaauuuauacagcaaagcu

SEQ ID NO: 726346 - RNA, 19 nt, Artificial Sequence
  Description of Artificial Sequence: Synthetic oligonucleotide
  Sense strand starting at position 3623 of SEQ ID NO: 586549
ccauguguacaauguugga

SEQ ID NO: 726347 - RNA, 19 nt, Artificial Sequence
  Description of Artificial Sequence: Synthetic oligonucleotide
  Antisense strand to SEQ ID NO: 726346
uccaacauuguacacaugg

SEQ ID NO: 726348 - RNA, 19 nt, Artificial Sequence
  Description of Artificial Sequence: Synthetic oligonucleotide
  Sense strand starting at position 3627 of SEQ ID NO: 586549
guguacaauguuggaauca

SEQ ID NO: 726349 - RNA, 19 nt, Artificial Sequence
  Description of Artificial Sequence: Synthetic oligonucleotide
  Antisense strand to SEQ ID NO: 726348
ugauuccaacauuguacac

SEQ ID NO: 726350 - RNA, 19 nt, Artificial Sequence
  Description of Artificial Sequence: Synthetic oligonucleotide
  Sense strand starting at position 3703 of SEQ ID NO: 586549
cuuuccucccguuagaaca

SEQ ID NO: 726351 - RNA, 19 nt, Artificial Sequence
  Description of Artificial Sequence: Synthetic oligonucleotide
  Antisense strand to SEQ ID NO: 726350
uguucuaacgggaggaaag

SEQ ID NO: 726352 - RNA, 19 nt, Artificial Sequence
  Description of Artificial Sequence: Synthetic oligonucleotide
  Sense strand starting at position 3857 of SEQ ID NO: 586549
uggacucccucaguaacaa

SEQ ID NO: 726353 - RNA, 19 nt, Artificial Sequence
  Description of Artificial Sequence: Synthetic oligonucleotide
  Antisense strand to SEQ ID NO: 726352
uuguuacugagggagucca

SEQ ID NO: 726354 - RNA, 19 nt, Artificial Sequence
  Description of Artificial Sequence: Synthetic oligonucleotide
  Sense strand starting at position 93 of SEQ ID NO: 586550
gccguagaugcuugcagaa

SEQ ID NO: 726355 - RNA, 19 nt, Artificial Sequence
  Description of Artificial Sequence: Synthetic oligonucleotide
  Antisense strand to SEQ ID NO: 726354
uucugcaagcaucuacggc

SEQ ID NO: 726356 - RNA, 19 nt, Artificial Sequence
  Description of Artificial Sequence: Synthetic oligonucleotide
  Sense strand starting at position 132 of SEQ ID NO: 586550
gcuguacaucuugaacuua

SEQ ID NO: 726357 - RNA, 19 nt, Artificial Sequence
  Description of Artificial Sequence: Synthetic oligonucleotide
  Antisense strand to SEQ ID NO: 726356
uaaguucaagauguacagc

SEQ ID NO: 726358 - RNA, 19 nt, Artificial Sequence
  Description of Artificial Sequence: Synthetic oligonucleotide
  Sense strand starting at position 218 of SEQ ID NO: 586550
gggugcuuacuuggaagau

SEQ ID NO: 726359 - RNA, 19 nt, Artificial Sequence
  Description of Artificial Sequence: Synthetic oligonucleotide
  Antisense strand to SEQ ID NO: 726358
aucuuccaaguaagcaccc

SEQ ID NO: 726360 - RNA, 19 nt, Artificial Sequence
  Description of Artificial Sequence: Synthetic oligonucleotide
  Sense strand starting at position 304 of SEQ ID NO: 586550
agggcaucauugguccaau

SEQ ID NO: 726361 - RNA, 19 nt, Artificial Sequence
  Description of Artificial Sequence: Synthetic oligonucleotide
  Antisense strand to SEQ ID NO: 726360
auuggaccaaugaugcccu

SEQ ID NO: 726362 - RNA, 19 nt, Artificial Sequence
  Description of Artificial Sequence: Synthetic oligonucleotide
  Sense strand starting at position 305 of SEQ ID NO: 586550
gggcaucauugguccaaug

SEQ ID NO: 726363 - RNA, 19 nt, Artificial Sequence
  Description of Artificial Sequence: Synthetic oligonucleotide
  Antisense strand to SEQ ID NO: 726362
cauuggaccaaugaugccc

SEQ ID NO: 726364 - RNA, 19 nt, Artificial Sequence
  Description of Artificial Sequence: Synthetic oligonucleotide
  Sense strand starting at position 388 of SEQ ID NO: 586550
gauagauagcugggcgauu

SEQ ID NO: 726365 - RNA, 19 nt, Artificial Sequence
  Description of Artificial Sequence: Synthetic oligonucleotide
  Antisense strand to SEQ ID NO: 726364
aaucgcccagcuaucuauc

SEQ ID NO: 726366 - RNA, 19 nt, Artificial Sequence
  Description of Artificial Sequence: Synthetic oligonucleotide
  Sense strand starting at position 485 of SEQ ID NO: 586550
uucuucuucccgcaacgaa

SEQ ID NO: 726367 - RNA, 19 nt, Artificial Sequence
  Description of Artificial Sequence: Synthetic oligonucleotide
  Antisense strand to SEQ ID NO: 726366
uucguugcgggaagaagaa

SEQ ID NO: 726368 - RNA, 19 nt, Artificial Sequence
  Description of Artificial Sequence: Synthetic oligonucleotide
  Sense strand starting at position 561 of SEQ ID NO: 586550
gccgguuaaugggcuuauu

SEQ ID NO: 726369 - RNA, 19 nt, Artificial Sequence
  Description of Artificial Sequence: Synthetic oligonucleotide
  Antisense strand to SEQ ID NO: 726368
aauaagcccauuaaccggc

SEQ ID NO: 726370 - RNA, 19 nt, Artificial Sequence
  Description of Artificial Sequence: Synthetic oligonucleotide
  Sense strand starting at position 822 of SEQ ID NO: 586550
cgcuaagccggacaugaau

SEQ ID NO: 726371 - RNA, 19 nt, Artificial Sequence
  Description of Artificial Sequence: Synthetic oligonucleotide
  Antisense strand to SEQ ID NO: 726370
auucauguccggcuuagcg

SEQ ID NO: 726372 - RNA, 19 nt, Artificial Sequence
  Description of Artificial Sequence: Synthetic oligonucleotide
  Sense strand starting at position 1035 of SEQ ID NO: 586550
ggcuuugcugcucucggaa

SEQ ID NO: 726373 - RNA, 19 nt, Artificial Sequence
  Description of Artificial Sequence: Synthetic oligonucleotide
  Antisense strand to SEQ ID NO: 726372
uuccgagagcagcaaagcc

SEQ ID NO: 726374 - RNA, 19 nt, Artificial Sequence
  Description of Artificial Sequence: Synthetic oligonucleotide
  Sense strand starting at position 1435 of SEQ ID NO: 586550
gggcauuuguccgccgagu

SEQ ID NO: 726375 - RNA, 19 nt, Artificial Sequence
  Description of Artificial Sequence: Synthetic oligonucleotide
  Antisense strand to SEQ ID NO: 726374
acucggcggacaaaugccc

SEQ ID NO: 726376 - RNA, 19 nt, Artificial Sequence
  Description of Artificial Sequence: Synthetic oligonucleotide
  Sense strand starting at position 1439 of SEQ ID NO: 586550
auuuguccgccgagucgua

SEQ ID NO: 726377 - RNA, 19 nt, Artificial Sequence
  Description of Artificial Sequence: Synthetic oligonucleotide
  Antisense strand to SEQ ID NO: 726376
uacgacucggcggacaaau

SEQ ID NO: 726378 - RNA, 19 nt, Artificial Sequence
  Description of Artificial Sequence: Synthetic oligonucleotide
  Sense strand starting at position 1467 of SEQ ID NO: 586550
ggagcucucuucuuugaug

SEQ ID NO: 726379 - RNA, 19 nt, Artificial Sequence
  Description of Artificial Sequence: Synthetic oligonucleotide
  Antisense strand to SEQ ID NO: 726378
caucaaagaagagagcucc

SEQ ID NO: 726380 - RNA, 19 nt, Artificial Sequence
  Description of Artificial Sequence: Synthetic oligonucleotide
  Sense strand starting at position 1468 of SEQ ID NO: 586550
gagcucucuucuuugaugu

SEQ ID NO: 726381 - RNA, 19 nt, Artificial Sequence
  Description of Artificial Sequence: Synthetic oligonucleotide
  Antisense strand to SEQ ID NO: 726380
acaucaaagaagagagcuc

SEQ ID NO: 726382 - RNA, 19 nt, Artificial Sequence
  Description of Artificial Sequence: Synthetic oligonucleotide
  Sense strand starting at position 1469 of SEQ ID NO: 586550
agcucucuucuuugauguu

SEQ ID NO: 726383 - RNA, 19 nt, Artificial Sequence
  Description of Artificial Sequence: Synthetic oligonucleotide
  Antisense strand to SEQ ID NO: 726382
aacaucaaagaagagagcu

SEQ ID NO: 726384 - RNA, 19 nt, Artificial Sequence
  Description of Artificial Sequence: Synthetic oligonucleotide
  Sense strand starting at position 1481 of SEQ ID NO: 586550
ugauguucugcgcgaaaga

SEQ ID NO: 726385 - RNA, 19 nt, Artificial Sequence
  Description of Artificial Sequence: Synthetic oligonucleotide
  Antisense strand to SEQ ID NO: 726384
ucuuucgcgcagaacauca

SEQ ID NO: 726386 - RNA, 19 nt, Artificial Sequence
  Description of Artificial Sequence: Synthetic oligonucleotide
  Sense strand starting at position 1482 of SEQ ID NO: 586550
gauguucugcgcgaaagag

SEQ ID NO: 726387 - RNA, 19 nt, Artificial Sequence
  Description of Artificial Sequence: Synthetic oligonucleotide
  Antisense strand to SEQ ID NO: 726386
cucuuucgcgcagaacauc

SEQ ID NO: 726388 - RNA, 19 nt, Artificial Sequence
  Description of Artificial Sequence: Synthetic oligonucleotide
  Sense strand starting at position 1915 of SEQ ID NO: 586550
gacauuguugugggauaau

SEQ ID NO: 726389 - RNA, 19 nt, Artificial Sequence
  Description of Artificial Sequence: Synthetic oligonucleotide
  Antisense strand to SEQ ID NO: 726388
auuaucccacaacaauguc

SEQ ID NO: 726390 - RNA, 19 nt, Artificial Sequence
  Description of Artificial Sequence: Synthetic oligonucleotide
  Sense strand starting at position 1952 of SEQ ID NO: 586550
agcccuuucuggcugacau

SEQ ID NO: 726391 - RNA, 19 nt, Artificial Sequence
  Description of Artificial Sequence: Synthetic oligonucleotide
  Antisense strand to SEQ ID NO: 726390
augucagccagaaagggcu

SEQ ID NO: 726392 - RNA, 19 nt, Artificial Sequence
  Description of Artificial Sequence: Synthetic oligonucleotide
  Sense strand starting at position 1953 of SEQ ID NO: 586550
gcccuuucuggcugacauu

SEQ ID NO: 726393 - RNA, 19 nt, Artificial Sequence
  Description of Artificial Sequence: Synthetic oligonucleotide
  Antisense strand to SEQ ID NO: 726392
aaugucagccagaaagggc

SEQ ID NO: 726394 - RNA, 19 nt, Artificial Sequence
  Description of Artificial Sequence: Synthetic oligonucleotide
  Sense strand starting at position 1962 of SEQ ID NO: 586550
ggcugacauuucuugugca

SEQ ID NO: 726395 - RNA, 19 nt, Artificial Sequence
  Description of Artificial Sequence: Synthetic oligonucleotide
  Antisense strand to SEQ ID NO: 726394
ugcacaagaaaugucagcc

SEQ ID NO: 726396 - RNA, 19 nt, Artificial Sequence
  Description of Artificial Sequence: Synthetic oligonucleotide
  Sense strand starting at position 1987 of SEQ ID NO: 586550
gcugaauacgauuagcaau

SEQ ID NO: 726397 - RNA, 19 nt, Artificial Sequence
  Description of Artificial Sequence: Synthetic oligonucleotide
  Antisense strand to SEQ ID NO: 726396
auugcuaaucguauucagc

SEQ ID NO: 726398 - RNA, 19 nt, Artificial Sequence
  Description of Artificial Sequence: Synthetic oligonucleotide
  Sense strand starting at position 2046 of SEQ ID NO: 586550
cagaguuuccgcgcgacca

SEQ ID NO: 726399 - RNA, 19 nt, Artificial Sequence
  Description of Artificial Sequence: Synthetic oligonucleotide
  Antisense strand to SEQ ID NO: 726398
uggucgcgcggaaacucug

SEQ ID NO: 726400 - RNA, 19 nt, Artificial Sequence
  Description of Artificial Sequence: Synthetic oligonucleotide
  Sense strand starting at position 2065 of SEQ ID NO: 586550
cucccaguuugguuucgua

SEQ ID NO: 726401 - RNA, 19 nt, Artificial Sequence
  Description of Artificial Sequence: Synthetic oligonucleotide
  Antisense strand to SEQ ID NO: 726400
uacgaaaccaaacugggag

SEQ ID NO: 726402 - RNA, 19 nt, Artificial Sequence
  Description of Artificial Sequence: Synthetic oligonucleotide
  Sense strand starting at position 2111 of SEQ ID NO: 586550
cucagagcccgcgauugau

SEQ ID NO: 726403 - RNA, 19 nt, Artificial Sequence
  Description of Artificial Sequence: Synthetic oligonucleotide
  Antisense strand to SEQ ID NO: 726402
aucaaucgcgggcucugag

SEQ ID NO: 726404 - RNA, 19 nt, Artificial Sequence
  Description of Artificial Sequence: Synthetic oligonucleotide
  Sense strand starting at position 2114 of SEQ ID NO: 586550
agagcccgcgauugauaua

SEQ ID NO: 726405 - RNA, 19 nt, Artificial Sequence
  Description of Artificial Sequence: Synthetic oligonucleotide
  Antisense strand to SEQ ID NO: 726404
uauaucaaucgcgggcucu

SEQ ID NO: 726406 - RNA, 19 nt, Artificial Sequence
  Description of Artificial Sequence: Synthetic oligonucleotide
  Sense strand starting at position 2115 of SEQ ID NO: 586550
gagcccgcgauugauauaa

SEQ ID NO: 726407 - RNA, 19 nt, Artificial Sequence
  Description of Artificial Sequence: Synthetic oligonucleotide
  Antisense strand to SEQ ID NO: 726406
uuauaucaaucgcgggcuc

SEQ ID NO: 726408 - RNA, 19 nt, Artificial Sequence
  Description of Artificial Sequence: Synthetic oligonucleotide
  Sense strand starting at position 2119 of SEQ ID NO: 586550
ccgcgauugauauaaauau

SEQ ID NO: 726409 - RNA, 19 nt, Artificial Sequence
  Description of Artificial Sequence: Synthetic oligonucleotide
  Antisense strand to SEQ ID NO: 726408
auauuuauaucaaucgcgg

SEQ ID NO: 726410 - RNA, 19 nt, Artificial Sequence
  Description of Artificial Sequence: Synthetic oligonucleotide
  Sense strand starting at position 2398 of SEQ ID NO: 586550
gguguacucuaaccacuga

SEQ ID NO: 726411 - RNA, 19 nt, Artificial Sequence
  Description of Artificial Sequence: Synthetic oligonucleotide
  Antisense strand to SEQ ID NO: 726410
ucagugguuagaguacacc

SEQ ID NO: 726412 - RNA, 19 nt, Artificial Sequence
  Description of Artificial Sequence: Synthetic oligonucleotide
  Sense strand starting at position 2522 of SEQ ID NO: 586550
ccgucaggauccucagagu

SEQ ID NO: 726413 - RNA, 19 nt, Artificial Sequence
  Description of Artificial Sequence: Synthetic oligonucleotide
  Antisense strand to SEQ ID NO: 726412
acucugaggauccugacgg

SEQ ID NO: 726414 - RNA, 19 nt, Artificial Sequence
  Description of Artificial Sequence: Synthetic oligonucleotide
  Sense strand starting at position 2662 of SEQ ID NO: 586550
cguugauccaguuaggauc

SEQ ID NO: 726415 - RNA, 19 nt, Artificial Sequence
  Description of Artificial Sequence: Synthetic oligonucleotide
  Antisense strand to SEQ ID NO: 726414
gauccuaacuggaucaacg

SEQ ID NO: 726416 - RNA, 19 nt, Artificial Sequence
  Description of Artificial Sequence: Synthetic oligonucleotide
  Sense strand starting at position 2705 of SEQ ID NO: 586550
cggcuugccuucucuacaa

SEQ ID NO: 726417 - RNA, 19 nt, Artificial Sequence
  Description of Artificial Sequence: Synthetic oligonucleotide
  Antisense strand to SEQ ID NO: 726416
uuguagagaaggcaagccg

SEQ ID NO: 726418 - RNA, 19 nt, Artificial Sequence
  Description of Artificial Sequence: Synthetic oligonucleotide
  Sense strand starting at position 3144 of SEQ ID NO: 586550
ggaaauccuuucccugcaa

SEQ ID NO: 726419 - RNA, 19 nt, Artificial Sequence
  Description of Artificial Sequence: Synthetic oligonucleotide
  Antisense strand to SEQ ID NO: 726418
uugcagggaaaggauuucc

SEQ ID NO: 726420 - RNA, 19 nt, Artificial Sequence
  Description of Artificial Sequence: Synthetic oligonucleotide
  Sense strand starting at position 3282 of SEQ ID NO: 586550
aagugugagccucaugcua

SEQ ID NO: 726421 - RNA, 19 nt, Artificial Sequence
  Description of Artificial Sequence: Synthetic oligonucleotide
  Antisense strand to SEQ ID NO: 726420
uagcaugaggcucacacuu

SEQ ID NO: 726422 - RNA, 19 nt, Artificial Sequence
  Description of Artificial Sequence: Synthetic oligonucleotide
  Sense strand starting at position 3376 of SEQ ID NO: 586550
gcuacaggucuccaggaua

SEQ ID NO: 726423 - RNA, 19 nt, Artificial Sequence
  Description of Artificial Sequence: Synthetic oligonucleotide
  Antisense strand to SEQ ID NO: 726422
uauccuggagaccuguagc

SEQ ID NO: 726424 - RNA, 19 nt, Artificial Sequence
  Description of Artificial Sequence: Synthetic oligonucleotide
  Sense strand starting at position 3446 of SEQ ID NO: 586550
gccggcaucccaggaaaua

SEQ ID NO: 726425 - RNA, 19 nt, Artificial Sequence
  Description of Artificial Sequence: Synthetic oligonucleotide
  Antisense strand to SEQ ID NO: 726424
uauuuccugggaugccggc

SEQ ID NO: 726426 - RNA, 19 nt, Artificial Sequence
  Description of Artificial Sequence: Synthetic oligonucleotide
  Sense strand starting at position 3533 of SEQ ID NO: 586550
ccuuccucccagugugaau

SEQ ID NO: 726427 - RNA, 19 nt, Artificial Sequence
  Description of Artificial Sequence: Synthetic oligonucleotide
  Antisense strand to SEQ ID NO: 726426
auucacacugggaggaagg

SEQ ID NO: 726428 - RNA, 19 nt, Artificial Sequence
  Description of Artificial Sequence: Synthetic oligonucleotide
  Sense strand starting at position 3920 of SEQ ID NO: 586550
gcggcuuuagagggaucaa

SEQ ID NO: 726429 - RNA, 19 nt, Artificial Sequence
  Description of Artificial Sequence: Synthetic oligonucleotide
  Antisense strand to SEQ ID NO: 726428
uugaucccucuaaagccgc

SEQ ID NO: 726430 - RNA, 19 nt, Artificial Sequence
  Description of Artificial Sequence: Synthetic oligonucleotide
  Sense strand starting at position 3921 of SEQ ID NO: 586550
cggcuuuagagggaucaag

SEQ ID NO: 726431 - RNA, 19 nt, Artificial Sequence
  Description of Artificial Sequence: Synthetic oligonucleotide
  Antisense strand to SEQ ID NO: 726430
cuugaucccucuaaagccg

SEQ ID NO: 726432 - RNA, 19 nt, Artificial Sequence
  Description of Artificial Sequence: Synthetic oligonucleotide
  Sense strand starting at position 3949 of SEQ ID NO: 586550
gugccaagagaucauuaac

SEQ ID NO: 726433 - RNA, 19 nt, Artificial Sequence
  Description of Artificial Sequence: Synthetic oligonucleotide
  Antisense strand to SEQ ID NO: 726432
guuaaugaucucuuggcac

SEQ ID NO: 726434 - RNA, 19 nt, Artificial Sequence
  Description of Artificial Sequence: Synthetic oligonucleotide
  Sense strand starting at position 104 of SEQ ID NO: 586551
gccuaagccucuuugaaag

SEQ ID NO: 726435 - RNA, 19 nt, Artificial Sequence
  Description of Artificial Sequence: Synthetic oligonucleotide
  Antisense strand to SEQ ID NO: 726434
cuuucaaagaggcuuaggc

SEQ ID NO: 726436 - RNA, 19 nt, Artificial Sequence
  Description of Artificial Sequence: Synthetic oligonucleotide
  Sense strand starting at position 459 of SEQ ID NO: 586551
gcucuaucuuagguagggu

SEQ ID NO: 726437 - RNA, 19 nt, Artificial Sequence
  Description of Artificial Sequence: Synthetic oligonucleotide
  Antisense strand to SEQ ID NO: 726436
acccuaccuaagauagagc

SEQ ID NO: 726438 - RNA, 19 nt, Artificial Sequence
  Description of Artificial Sequence: Synthetic oligonucleotide
  Sense strand starting at position 462 of SEQ ID NO: 586551
cuaucuuagguagggugaa

SEQ ID NO: 726439 - RNA, 19 nt, Artificial Sequence
  Description of Artificial Sequence: Synthetic oligonucleotide
  Antisense strand to SEQ ID NO: 726438
uucacccuaccuaagauag

SEQ ID NO: 726440 - RNA, 19 nt, Artificial Sequence
  Description of Artificial Sequence: Synthetic oligonucleotide
  Sense strand starting at position 686 of SEQ ID NO: 586551
ggccaacuuuggguuaauu

SEQ ID NO: 726441 - RNA, 19 nt, Artificial Sequence
  Description of Artificial Sequence: Synthetic oligonucleotide
  Antisense strand to SEQ ID NO: 726440
aauuaacccaaaguuggcc

SEQ ID NO: 726442 - RNA, 19 nt, Artificial Sequence
  Description of Artificial Sequence: Synthetic oligonucleotide
  Sense strand starting at position 734 of SEQ ID NO: 586551
cgggcuacuuuaucuguua

SEQ ID NO: 726443 - RNA, 19 nt, Artificial Sequence
  Description of Artificial Sequence: Synthetic oligonucleotide
  Antisense strand to SEQ ID NO: 726442
uaacagauaaaguagcccg

SEQ ID NO: 726444 - RNA, 19 nt, Artificial Sequence
  Description of Artificial Sequence: Synthetic oligonucleotide
  Sense strand starting at position 735 of SEQ ID NO: 586551
gggcuacuuuaucuguuaa

SEQ ID NO: 726445 - RNA, 19 nt, Artificial Sequence
  Description of Artificial Sequence: Synthetic oligonucleotide
  Antisense strand to SEQ ID NO: 726444
uuaacagauaaaguagccc

SEQ ID NO: 726446 - RNA, 19 nt, Artificial Sequence
  Description of Artificial Sequence: Synthetic oligonucleotide
  Sense strand starting at position 847 of SEQ ID NO: 586551
cggauuaccucgcuaucaa

SEQ ID NO: 726447 - RNA, 19 nt, Artificial Sequence
  Description of Artificial Sequence: Synthetic oligonucleotide
  Antisense strand to SEQ ID NO: 726446
uugauagcgagguaauccg

SEQ ID NO: 726448 - RNA, 19 nt, Artificial Sequence
  Description of Artificial Sequence: Synthetic oligonucleotide
  Sense strand starting at position 848 of SEQ ID NO: 586551
ggauuaccucgcuaucaaa

SEQ ID NO: 726449 - RNA, 19 nt, Artificial Sequence
  Description of Artificial Sequence: Synthetic oligonucleotide
  Antisense strand to SEQ ID NO: 726448
uuugauagcgagguaaucc

SEQ ID NO: 726450 - RNA, 19 nt, Artificial Sequence
  Description of Artificial Sequence: Synthetic oligonucleotide
  Sense strand starting at position 1026 of SEQ ID NO: 586551
uggguauuucacggccaau

SEQ ID NO: 726451 - RNA, 19 nt, Artificial Sequence
  Description of Artificial Sequence: Synthetic oligonucleotide
  Antisense strand to SEQ ID NO: 726450
auuggccgugaaauaccca

SEQ ID NO: 726452 - RNA, 19 nt, Artificial Sequence
  Description of Artificial Sequence: Synthetic oligonucleotide
  Sense strand starting at position 1155 of SEQ ID NO: 586551
agcggugcugcgcuagauu

SEQ ID NO: 726453 - RNA, 19 nt, Artificial Sequence
  Description of Artificial Sequence: Synthetic oligonucleotide
  Antisense strand to SEQ ID NO: 726452
aaucuagcgcagcaccgcu

SEQ ID NO: 726454 - RNA, 19 nt, Artificial Sequence
  Description of Artificial Sequence: Synthetic oligonucleotide
  Sense strand starting at position 1205 of SEQ ID NO: 586551
ugccuuuauacguacugga

SEQ ID NO: 726455 - RNA, 19 nt, Artificial Sequence
  Description of Artificial Sequence: Synthetic oligonucleotide
  Antisense strand to SEQ ID NO: 726454
uccaguacguauaaaggca

SEQ ID NO: 726456 - RNA, 19 nt, Artificial Sequence
  Description of Artificial Sequence: Synthetic oligonucleotide
  Sense strand starting at position 1785 of SEQ ID NO: 586551
ggaguaggaguaugucauu

SEQ ID NO: 726457 - RNA, 19 nt, Artificial Sequence
  Description of Artificial Sequence: Synthetic oligonucleotide
  Antisense strand to SEQ ID NO: 726456
aaugacauacuccuacucc

SEQ ID NO: 726458 - RNA, 19 nt, Artificial Sequence
  Description of Artificial Sequence: Synthetic oligonucleotide
  Sense strand starting at position 2002 of SEQ ID NO: 586551
ggauccgugaaguagaaau

SEQ ID NO: 726459 - RNA, 19 nt, Artificial Sequence
  Description of Artificial Sequence: Synthetic oligonucleotide
  Antisense strand to SEQ ID NO: 726458
auuucuacuucacggaucc

SEQ ID NO: 726460 - RNA, 19 nt, Artificial Sequence
  Description of Artificial Sequence: Synthetic oligonucleotide
  Sense strand starting at position 2012 of SEQ ID NO: 586551
aguagaaauuuggagacgu

SEQ ID NO: 726461 - RNA, 19 nt, Artificial Sequence
  Description of Artificial Sequence: Synthetic oligonucleotide
  Antisense strand to SEQ ID NO: 726460
acgucuccaaauuucuacu

SEQ ID NO: 726462 - RNA, 19 nt, Artificial Sequence
  Description of Artificial Sequence: Synthetic oligonucleotide
  Sense strand starting at position 2087 of SEQ ID NO: 586551
cgauguugaaauugacaag

SEQ ID NO: 726463 - RNA, 19 nt, Artificial Sequence
  Description of Artificial Sequence: Synthetic oligonucleotide
  Antisense strand to SEQ ID NO: 726462
cuugucaauuucaacaucg

SEQ ID NO: 726464 - RNA, 19 nt, Artificial Sequence
  Description of Artificial Sequence: Synthetic oligonucleotide
  Sense strand starting at position 3034 of SEQ ID NO: 586551
gagacuucuccuggguaug

SEQ ID NO: 726465 - RNA, 19 nt, Artificial Sequence
  Description of Artificial Sequence: Synthetic oligonucleotide
  Antisense strand to SEQ ID NO: 726464
cauacccaggagaagucuc

SEQ ID NO: 726466 - RNA, 19 nt, Artificial Sequence
  Description of Artificial Sequence: Synthetic oligonucleotide
  Sense strand starting at position 3072 of SEQ ID NO: 586551
ccaucaggcugcuuacaga

SEQ ID NO: 726467 - RNA, 19 nt, Artificial Sequence
  Description of Artificial Sequence: Synthetic oligonucleotide
  Antisense strand to SEQ ID NO: 726466
ucuguaagcagccugaugg

SEQ ID NO: 726468 - RNA, 19 nt, Artificial Sequence
  Description of Artificial Sequence: Synthetic oligonucleotide
  Sense strand starting at position 3189 of SEQ ID NO: 586551
uuccuugcaaugugugaga

SEQ ID NO: 726469 - RNA, 19 nt, Artificial Sequence
  Description of Artificial Sequence: Synthetic oligonucleotide
  Antisense strand to SEQ ID NO: 726468
ucucacacauugcaaggaa

SEQ ID NO: 726470 - RNA, 19 nt, Artificial Sequence
  Description of Artificial Sequence: Synthetic oligonucleotide
  Sense strand starting at position 3191 of SEQ ID NO: 586551
ccuugcaaugugugagagu

SEQ ID NO: 726471 - RNA, 19 nt, Artificial Sequence
  Description of Artificial Sequence: Synthetic oligonucleotide
  Antisense strand to SEQ ID NO: 726470
acucucacacauugcaagg

SEQ ID NO: 726472 - RNA, 19 nt, Artificial Sequence
  Description of Artificial Sequence: Synthetic oligonucleotide
  Sense strand starting at position 3216 of SEQ ID NO: 586551
aagggaugugcagggcaaa

SEQ ID NO: 726473 - RNA, 19 nt, Artificial Sequence
  Description of Artificial Sequence: Synthetic oligonucleotide
  Antisense strand to SEQ ID NO: 726472
uuugcccugcacaucccuu

SEQ ID NO: 726474 - RNA, 19 nt, Artificial Sequence
  Description of Artificial Sequence: Synthetic oligonucleotide
  Sense strand starting at position 3264 of SEQ ID NO: 586551
gcucauuccacaggaggaa

SEQ ID NO: 726475 - RNA, 19 nt, Artificial Sequence
  Description of Artificial Sequence: Synthetic oligonucleotide
  Antisense strand to SEQ ID NO: 726474
uuccuccuguggaaugagc

SEQ ID NO: 726476 - RNA, 19 nt, Artificial Sequence
  Description of Artificial Sequence: Synthetic oligonucleotide
  Sense strand starting at position 3279 of SEQ ID NO: 586551
ggaauacaauaccagagaa

SEQ ID NO: 726477 - RNA, 19 nt, Artificial Sequence
  Description of Artificial Sequence: Synthetic oligonucleotide
  Antisense strand to SEQ ID NO: 726476
uucucugguauuguauucc

SEQ ID NO: 726478 - RNA, 19 nt, Artificial Sequence
  Description of Artificial Sequence: Synthetic oligonucleotide
  Sense strand starting at position 3330 of SEQ ID NO: 586551
gggaaacagggaugucuuu

SEQ ID NO: 726479 - RNA, 19 nt, Artificial Sequence
  Description of Artificial Sequence: Synthetic oligonucleotide
  Antisense strand to SEQ ID NO: 726478
aaagacaucccuguuuccc

SEQ ID NO: 726480 - RNA, 19 nt, Artificial Sequence
  Description of Artificial Sequence: Synthetic oligonucleotide
  Sense strand starting at position 3351 of SEQ ID NO: 586551
aaagcuagguuugugcuaa

SEQ ID NO: 726481 - RNA, 19 nt, Artificial Sequence
  Description of Artificial Sequence: Synthetic oligonucleotide
  Antisense strand to SEQ ID NO: 726480
uuagcacaaaccuagcuuu

SEQ ID NO: 726482 - RNA, 19 nt, Artificial Sequence
  Description of Artificial Sequence: Synthetic oligonucleotide
  Sense strand starting at position 3385 of SEQ ID NO: 586551
auagcaauacucugagucu

SEQ ID NO: 726483 - RNA, 19 nt, Artificial Sequence
  Description of Artificial Sequence: Synthetic oligonucleotide
  Antisense strand to SEQ ID NO: 726482
agacucagaguauugcuau

SEQ ID NO: 726484 - RNA, 19 nt, Artificial Sequence
  Description of Artificial Sequence: Synthetic oligonucleotide
  Sense strand starting at position 3394 of SEQ ID NO: 586551
cucugagucuagcuuucuu

SEQ ID NO: 726485 - RNA, 19 nt, Artificial Sequence
  Description of Artificial Sequence: Synthetic oligonucleotide
  Antisense strand to SEQ ID NO: 726484
aagaaagcuagacucagag

SEQ ID NO: 726486 - RNA, 19 nt, Artificial Sequence
  Description of Artificial Sequence: Synthetic oligonucleotide
  Sense strand starting at position 3398 of SEQ ID NO: 586551
gagucuagcuuucuugaga

SEQ ID NO: 726487 - RNA, 19 nt, Artificial Sequence
  Description of Artificial Sequence: Synthetic oligonucleotide
  Antisense strand to SEQ ID NO: 726486
ucucaagaaagcuagacuc

SEQ ID NO: 726488 - RNA, 19 nt, Artificial Sequence
  Description of Artificial Sequence: Synthetic oligonucleotide
  Sense strand starting at position 3399 of SEQ ID NO: 586551
agucuagcuuucuugagaa

SEQ ID NO: 726489 - RNA, 19 nt, Artificial Sequence
  Description of Artificial Sequence: Synthetic oligonucleotide
  Antisense strand to SEQ ID NO: 726488
uucucaagaaagcuagacu

SEQ ID NO: 726490 - RNA, 19 nt, Artificial Sequence
  Description of Artificial Sequence: Synthetic oligonucleotide
  Sense strand starting at position 3401 of SEQ ID NO: 586551
ucuagcuuucuugagaaga

SEQ ID NO: 726491 - RNA, 19 nt, Artificial Sequence
  Description of Artificial Sequence: Synthetic oligonucleotide
  Antisense strand to SEQ ID NO: 726490
ucuucucaagaaagcuaga

SEQ ID NO: 726492 - RNA, 19 nt, Artificial Sequence
  Description of Artificial Sequence: Synthetic oligonucleotide
  Sense strand starting at position 3711 of SEQ ID NO: 586551
acucuaagaucuuugguau

SEQ ID NO: 726493 - RNA, 19 nt, Artificial Sequence
  Description of Artificial Sequence: Synthetic oligonucleotide
  Antisense strand to SEQ ID NO: 726492
auaccaaagaucuuagagu

SEQ ID NO: 726494 - RNA, 19 nt, Artificial Sequence
  Description of Artificial Sequence: Synthetic oligonucleotide
  Sense strand starting at position 3712 of SEQ ID NO: 586551
cucuaagaucuuugguauu

SEQ ID NO: 726495 - RNA, 19 nt, Artificial Sequence
  Description of Artificial Sequence: Synthetic oligonucleotide
  Antisense strand to SEQ ID NO: 726494
aauaccaaagaucuuagag

SEQ ID NO: 726496 - RNA, 19 nt, Artificial Sequence
  Description of Artificial Sequence: Synthetic oligonucleotide
  Sense strand starting at position 3726 of SEQ ID NO: 586551
guauuuaagugucaacauc

SEQ ID NO: 726497 - RNA, 19 nt, Artificial Sequence
  Description of Artificial Sequence: Synthetic oligonucleotide
  Antisense strand to SEQ ID NO: 726496
gauguugacacuuaaauac

SEQ ID NO: 726498 - RNA, 19 nt, Artificial Sequence
  Description of Artificial Sequence: Synthetic oligonucleotide
  Sense strand starting at position 3754 of SEQ ID NO: 586551
auuuauugcugagcugacu

SEQ ID NO: 726499 - RNA, 19 nt, Artificial Sequence
  Description of Artificial Sequence: Synthetic oligonucleotide
  Antisense strand to SEQ ID NO: 726498
agucagcucagcaauaaau

SEQ ID NO: 726500 - RNA, 19 nt, Artificial Sequence
  Description of Artificial Sequence: Synthetic oligonucleotide
  Sense strand starting at position 3791 of SEQ ID NO: 586551
aaucuaaucguguauugca

SEQ ID NO: 726501 - RNA, 19 nt, Artificial Sequence
  Description of Artificial Sequence: Synthetic oligonucleotide
  Antisense strand to SEQ ID NO: 726500
ugcaauacacgauuagauu

SEQ ID NO: 726502 - RNA, 19 nt, Artificial Sequence
  Description of Artificial Sequence: Synthetic oligonucleotide
  Sense strand starting at position 3896 of SEQ ID NO: 586551
ugaaguaauuacucuguag

SEQ ID NO: 726503 - RNA, 19 nt, Artificial Sequence
  Description of Artificial Sequence: Synthetic oligonucleotide
  Antisense strand to SEQ ID NO: 726502
cuacagaguaauuacuuca

SEQ ID NO: 726504 - RNA, 19 nt, Artificial Sequence
  Description of Artificial Sequence: Synthetic oligonucleotide
  Sense strand starting at position 3900 of SEQ ID NO: 586551
guaauuacucuguagucga

SEQ ID NO: 726505 - RNA, 19 nt, Artificial Sequence
  Description of Artificial Sequence: Synthetic oligonucleotide
  Antisense strand to SEQ ID NO: 726504
ucgacuacagaguaauuac

SEQ ID NO: 726506 - RNA, 19 nt, Artificial Sequence
  Description of Artificial Sequence: Synthetic oligonucleotide
  Sense strand starting at position 3903 of SEQ ID NO: 586551
auuacucuguagucgagua

SEQ ID NO: 726507 - RNA, 19 nt, Artificial Sequence
  Description of Artificial Sequence: Synthetic oligonucleotide
  Antisense strand to SEQ ID NO: 726506
uacucgacuacagaguaau

SEQ ID NO: 726508 - RNA, 19 nt, Artificial Sequence
  Description of Artificial Sequence: Synthetic oligonucleotide
  Sense strand starting at position 3904 of SEQ ID NO: 586551
uuacucuguagucgaguaa

SEQ ID NO: 726509 - RNA, 19 nt, Artificial Sequence
  Description of Artificial Sequence: Synthetic oligonucleotide
  Antisense strand to SEQ ID NO: 726508
uuacucgacuacagaguaa

SEQ ID NO: 726510 - RNA, 19 nt, Artificial Sequence
  Description of Artificial Sequence: Synthetic oligonucleotide
  Sense strand starting at position 3905 of SEQ ID NO: 586551
uacucuguagucgaguaaa

SEQ ID NO: 726511 - RNA, 19 nt, Artificial Sequence
  Description of Artificial Sequence: Synthetic oligonucleotide
  Antisense strand to SEQ ID NO: 726510
uuuacucgacuacagagua

SEQ ID NO: 726512 - RNA, 19 nt, Artificial Sequence
  Description of Artificial Sequence: Synthetic oligonucleotide
  Sense strand starting at position 3908 of SEQ ID NO: 586551
ucuguagucgaguaaacua

SEQ ID NO: 726513 - RNA, 19 nt, Artificial Sequence
  Description of Artificial Sequence: Synthetic oligonucleotide
  Antisense strand to SEQ ID NO: 726512
uaguuuacucgacuacaga

SEQ ID NO: 726514 - RNA, 19 nt, Artificial Sequence
  Description of Artificial Sequence: Synthetic oligonucleotide
  Sense strand starting at position 18 of SEQ ID NO: 586552
uuaucauuaucugggcaaa

SEQ ID NO: 726515 - RNA, 19 nt, Artificial Sequence
  Description of Artificial Sequence: Synthetic oligonucleotide
  Antisense strand to SEQ ID NO: 726514
uuugcccagauaaugauaa

SEQ ID NO: 726516 - RNA, 19 nt, Artificial Sequence
  Description of Artificial Sequence: Synthetic oligonucleotide
  Sense strand starting at position 21 of SEQ ID NO: 586552
ucauuaucugggcaaagca

SEQ ID NO: 726517 - RNA, 19 nt, Artificial Sequence
  Description of Artificial Sequence: Synthetic oligonucleotide
  Antisense strand to SEQ ID NO: 726516
ugcuuugcccagauaauga

SEQ ID NO: 726518 - RNA, 19 nt, Artificial Sequence
  Description of Artificial Sequence: Synthetic oligonucleotide
  Sense strand starting at position 106 of SEQ ID NO: 586552
ucaguuuguugaugacuuu

SEQ ID NO: 726519 - RNA, 19 nt, Artificial Sequence
  Description of Artificial Sequence: Synthetic oligonucleotide
  Antisense strand to SEQ ID NO: 726518
aaagucaucaacaaacuga

SEQ ID NO: 726520 - RNA, 19 nt, Artificial Sequence
  Description of Artificial Sequence: Synthetic oligonucleotide
  Sense strand starting at position 173 of SEQ ID NO: 586552
agagagauucgucguggcu

SEQ ID NO: 726521 - RNA, 19 nt, Artificial Sequence
  Description of Artificial Sequence: Synthetic oligonucleotide
  Antisense strand to SEQ ID NO: 726520
agccacgacgaaucucucu

SEQ ID NO: 726522 - RNA, 19 nt, Artificial Sequence
  Description of Artificial Sequence: Synthetic oligonucleotide
  Sense strand starting at position 175 of SEQ ID NO: 586552
agagauucgucguggcuga

SEQ ID NO: 726523 - RNA, 19 nt, Artificial Sequence
  Description of Artificial Sequence: Synthetic oligonucleotide
  Antisense strand to SEQ ID NO: 726522
ucagccacgacgaaucucu

SEQ ID NO: 726524 - RNA, 19 nt, Artificial Sequence
  Description of Artificial Sequence: Synthetic oligonucleotide
  Sense strand starting at position 176 of SEQ ID NO: 586552
gagauucgucguggcugau

SEQ ID NO: 726525 - RNA, 19 nt, Artificial Sequence
  Description of Artificial Sequence: Synthetic oligonucleotide
  Antisense strand to SEQ ID NO: 726524
aucagccacgacgaaucuc

SEQ ID NO: 726526 - RNA, 19 nt, Artificial Sequence
  Description of Artificial Sequence: Synthetic oligonucleotide
  Sense strand starting at position 188 of SEQ ID NO: 586552
ggcugauauccgccuccgu

SEQ ID NO: 726527 - RNA, 19 nt, Artificial Sequence
  Description of Artificial Sequence: Synthetic oligonucleotide
  Antisense strand to SEQ ID NO: 726526
acggaggcggauaucagcc

SEQ ID NO: 726528 - RNA, 19 nt, Artificial Sequence
  Description of Artificial Sequence: Synthetic oligonucleotide
  Sense strand starting at position 190 of SEQ ID NO: 586552
cugauauccgccuccguuu

SEQ ID NO: 726529 - RNA, 19 nt, Artificial Sequence
  Description of Artificial Sequence: Synthetic oligonucleotide
  Antisense strand to SEQ ID NO: 726528
aaacggaggcggauaucag

SEQ ID NO: 726530 - RNA, 19 nt, Artificial Sequence
  Description of Artificial Sequence: Synthetic oligonucleotide
  Sense strand starting at position 201 of SEQ ID NO: 586552
cuccguuuguccuuaguaa

SEQ ID NO: 726531 - RNA, 19 nt, Artificial Sequence
  Description of Artificial Sequence: Synthetic oligonucleotide
  Antisense strand to SEQ ID NO: 726530
uuacuaaggacaaacggag

SEQ ID NO: 726532 - RNA, 19 nt, Artificial Sequence
  Description of Artificial Sequence: Synthetic oligonucleotide
  Sense strand starting at position 202 of SEQ ID NO: 586552
uccguuuguccuuaguaau

SEQ ID NO: 726533 - RNA, 19 nt, Artificial Sequence
  Description of Artificial Sequence: Synthetic oligonucleotide
  Antisense strand to SEQ ID NO: 726532
auuacuaaggacaaacgga

SEQ ID NO: 726534 - RNA, 19 nt, Artificial Sequence
  Description of Artificial Sequence: Synthetic oligonucleotide
  Sense strand starting at position 205 of SEQ ID NO: 586552
guuuguccuuaguaaugaa

SEQ ID NO: 726535 - RNA, 19 nt, Artificial Sequence
  Description of Artificial Sequence: Synthetic oligonucleotide
  Antisense strand to SEQ ID NO: 726534
uucauuacuaaggacaaac

SEQ ID NO: 726536 - RNA, 19 nt, Artificial Sequence
  Description of Artificial Sequence: Synthetic oligonucleotide
  Sense strand starting at position 208 of SEQ ID NO: 586552
uguccuuaguaaugaauuu

SEQ ID NO: 726537 - RNA, 19 nt, Artificial Sequence
  Description of Artificial Sequence: Synthetic oligonucleotide
  Antisense strand to SEQ ID NO: 726536
aaauucauuacuaaggaca

SEQ ID NO: 726538 - RNA, 19 nt, Artificial Sequence
  Description of Artificial Sequence: Synthetic oligonucleotide
  Sense strand starting at position 220 of SEQ ID NO: 586552
ugaauuuauucguggcgua

SEQ ID NO: 726539 - RNA, 19 nt, Artificial Sequence
  Description of Artificial Sequence: Synthetic oligonucleotide
  Antisense strand to SEQ ID NO: 726538
uacgccacgaauaaauuca

SEQ ID NO: 726540 - RNA, 19 nt, Artificial Sequence
  Description of Artificial Sequence: Synthetic oligonucleotide
  Sense strand starting at position 221 of SEQ ID NO: 586552
gaauuuauucguggcguau

SEQ ID NO: 726541 - RNA, 19 nt, Artificial Sequence
  Description of Artificial Sequence: Synthetic oligonucleotide
  Antisense strand to SEQ ID NO: 726540
auacgccacgaauaaauuc

SEQ ID NO: 726542 - RNA, 19 nt, Artificial Sequence
  Description of Artificial Sequence: Synthetic oligonucleotide
  Sense strand starting at position 232 of SEQ ID NO: 586552
uggcguauucccguucaag

SEQ ID NO: 726543 - RNA, 19 nt, Artificial Sequence
  Description of Artificial Sequence: Synthetic oligonucleotide
  Antisense strand to SEQ ID NO: 726542
cuugaacgggaauacgcca

SEQ ID NO: 726544 - RNA, 19 nt, Artificial Sequence
  Description of Artificial Sequence: Synthetic oligonucleotide
  Sense strand starting at position 233 of SEQ ID NO: 586552
ggcguauucccguucaagu

SEQ ID NO: 726545 - RNA, 19 nt, Artificial Sequence
  Description of Artificial Sequence: Synthetic oligonucleotide
  Antisense strand to SEQ ID NO: 726544
acuugaacgggaauacgcc

SEQ ID NO: 726546 - RNA, 19 nt, Artificial Sequence
  Description of Artificial Sequence: Synthetic oligonucleotide
  Sense strand starting at position 234 of SEQ ID NO: 586552
gcguauucccguucaaguu

SEQ ID NO: 726547 - RNA, 19 nt, Artificial Sequence
  Description of Artificial Sequence: Synthetic oligonucleotide
  Antisense strand to SEQ ID NO: 726546
aacuugaacgggaauacgc

SEQ ID NO: 726548 - RNA, 19 nt, Artificial Sequence
  Description of Artificial Sequence: Synthetic oligonucleotide
  Sense strand starting at position 256 of SEQ ID NO: 586552
uuaauugcaccuugguaua

SEQ ID NO: 726549 - RNA, 19 nt, Artificial Sequence
  Description of Artificial Sequence: Synthetic oligonucleotide
  Antisense strand to SEQ ID NO: 726548
uauaccaaggugcaauuaa

SEQ ID NO: 726550 - RNA, 19 nt, Artificial Sequence
  Description of Artificial Sequence: Synthetic oligonucleotide
  Sense strand starting at position 494 of SEQ ID NO: 586552
gaagguaguuaguucugaa

SEQ ID NO: 726551 - RNA, 19 nt, Artificial Sequence
  Description of Artificial Sequence: Synthetic oligonucleotide
  Antisense strand to SEQ ID NO: 726550
uucagaacuaacuaccuuc

SEQ ID NO: 726552 - RNA, 19 nt, Artificial Sequence
  Description of Artificial Sequence: Synthetic oligonucleotide
  Sense strand starting at position 497 of SEQ ID NO: 586552
gguaguuaguucugaacug

SEQ ID NO: 726553 - RNA, 19 nt, Artificial Sequence
  Description of Artificial Sequence: Synthetic oligonucleotide
  Antisense strand to SEQ ID NO: 726552
caguucagaacuaacuacc

SEQ ID NO: 726554 - RNA, 19 nt, Artificial Sequence
  Description of Artificial Sequence: Synthetic oligonucleotide
  Sense strand starting at position 498 of SEQ ID NO: 586552
guaguuaguucugaacuga

SEQ ID NO: 726555 - RNA, 19 nt, Artificial Sequence
  Description of Artificial Sequence: Synthetic oligonucleotide
  Antisense strand to SEQ ID NO: 726554
ucaguucagaacuaacuac

SEQ ID NO: 726556 - RNA, 19 nt, Artificial Sequence
  Description of Artificial Sequence: Synthetic oligonucleotide
  Sense strand starting at position 577 of SEQ ID NO: 586552
guaggcagccucgagugau

SEQ ID NO: 726557 - RNA, 19 nt, Artificial Sequence
  Description of Artificial Sequence: Synthetic oligonucleotide
  Antisense strand to SEQ ID NO: 726556
aucacucgaggcugccuac

SEQ ID NO: 726558 - RNA, 19 nt, Artificial Sequence
  Description of Artificial Sequence: Synthetic oligonucleotide
  Sense strand starting at position 589 of SEQ ID NO: 586552
gagugauagccugguccaa

SEQ ID NO: 726559 - RNA, 19 nt, Artificial Sequence
  Description of Artificial Sequence: Synthetic oligonucleotide
  Antisense strand to SEQ ID NO: 726558
uuggaccaggcuaucacuc

SEQ ID NO: 726560 - RNA, 19 nt, Artificial Sequence
  Description of Artificial Sequence: Synthetic oligonucleotide
  Sense strand starting at position 674 of SEQ ID NO: 586552
gucccaauacucgaagcuu

SEQ ID NO: 726561 - RNA, 19 nt, Artificial Sequence
  Description of Artificial Sequence: Synthetic oligonucleotide
  Antisense strand to SEQ ID NO: 726560
aagcuucgaguauugggac

SEQ ID NO: 726562 - RNA, 19 nt, Artificial Sequence
  Description of Artificial Sequence: Synthetic oligonucleotide
  Sense strand starting at position 1028 of SEQ ID NO: 586552
cugggaauaggucgucauu

SEQ ID NO: 726563 - RNA, 19 nt, Artificial Sequence
  Description of Artificial Sequence: Synthetic oligonucleotide
  Antisense strand to SEQ ID NO: 726562
aaugacgaccuauucccag

SEQ ID NO: 726564 - RNA, 19 nt, Artificial Sequence
  Description of Artificial Sequence: Synthetic oligonucleotide
  Sense strand starting at position 1039 of SEQ ID NO: 586552
ucgucauuuaccgggcaga

SEQ ID NO: 726565 - RNA, 19 nt, Artificial Sequence
  Description of Artificial Sequence: Synthetic oligonucleotide
  Antisense strand to SEQ ID NO: 726564
ucugcccgguaaaugacga

SEQ ID NO: 726566 - RNA, 19 nt, Artificial Sequence
  Description of Artificial Sequence: Synthetic oligonucleotide
  Sense strand starting at position 1040 of SEQ ID NO: 586552
cgucauuuaccgggcagag

SEQ ID NO: 726567 - RNA, 19 nt, Artificial Sequence
  Description of Artificial Sequence: Synthetic oligonucleotide
  Antisense strand to SEQ ID NO: 726566
cucugcccgguaaaugacg

SEQ ID NO: 726568 - RNA, 19 nt, Artificial Sequence
  Description of Artificial Sequence: Synthetic oligonucleotide
  Sense strand starting at position 1143 of SEQ ID NO: 586552
gguagcuuuccaugggaag

SEQ ID NO: 726569 - RNA, 19 nt, Artificial Sequence
  Description of Artificial Sequence: Synthetic oligonucleotide
  Antisense strand to SEQ ID NO: 726568
cuucccauggaaagcuacc

SEQ ID NO: 726570 - RNA, 19 nt, Artificial Sequence
  Description of Artificial Sequence: Synthetic oligonucleotide
  Sense strand starting at position 1144 of SEQ ID NO: 586552
guagcuuuccaugggaaga

SEQ ID NO: 726571 - RNA, 19 nt, Artificial Sequence
  Description of Artificial Sequence: Synthetic oligonucleotide
  Antisense strand to SEQ ID NO: 726570
ucuucccauggaaagcuac

SEQ ID NO: 726572 - RNA, 19 nt, Artificial Sequence
  Description of Artificial Sequence: Synthetic oligonucleotide
  Sense strand starting at position 1331 of SEQ ID NO: 586552
gcgguauccauguacuugu

SEQ ID NO: 726573 - RNA, 19 nt, Artificial Sequence
  Description of Artificial Sequence: Synthetic oligonucleotide
  Antisense strand to SEQ ID NO: 726572
acaaguacauggauaccgc

SEQ ID NO: 726574 - RNA, 19 nt, Artificial Sequence
  Description of Artificial Sequence: Synthetic oligonucleotide
  Sense strand starting at position 1338 of SEQ ID NO: 586552
ccauguacuuguccgcgaa

SEQ ID NO: 726575 - RNA, 19 nt, Artificial Sequence
  Description of Artificial Sequence: Synthetic oligonucleotide
  Antisense strand to SEQ ID NO: 726574
uucgcggacaaguacaugg

SEQ ID NO: 726576 - RNA, 19 nt, Artificial Sequence
  Description of Artificial Sequence: Synthetic oligonucleotide
  Sense strand starting at position 1901 of SEQ ID NO: 586552
ccgccguugucguagagaa

SEQ ID NO: 726577 - RNA, 19 nt, Artificial Sequence
  Description of Artificial Sequence: Synthetic oligonucleotide
  Antisense strand to SEQ ID NO: 726576
uucucuacgacaacggcgg

SEQ ID NO: 726578 - RNA, 19 nt, Artificial Sequence
  Description of Artificial Sequence: Synthetic oligonucleotide
  Sense strand starting at position 1902 of SEQ ID NO: 586552
cgccguugucguagagaaa

SEQ ID NO: 726579 - RNA, 19 nt, Artificial Sequence
  Description of Artificial Sequence: Synthetic oligonucleotide
  Antisense strand to SEQ ID NO: 726578
uuucucuacgacaacggcg

SEQ ID NO: 726580 - RNA, 19 nt, Artificial Sequence
  Description of Artificial Sequence: Synthetic oligonucleotide
  Sense strand starting at position 1903 of SEQ ID NO: 586552
gccguugucguagagaaac

SEQ ID NO: 726581 - RNA, 19 nt, Artificial Sequence
  Description of Artificial Sequence: Synthetic oligonucleotide
  Antisense strand to SEQ ID NO: 726580
guuucucuacgacaacggc

SEQ ID NO: 726582 - RNA, 19 nt, Artificial Sequence
  Description of Artificial Sequence: Synthetic oligonucleotide
  Sense strand starting at position 1905 of SEQ ID NO: 586552
cguugucguagagaaacau

SEQ ID NO: 726583 - RNA, 19 nt, Artificial Sequence
  Description of Artificial Sequence: Synthetic oligonucleotide
  Antisense strand to SEQ ID NO: 726582
auguuucucuacgacaacg

SEQ ID NO: 726584 - RNA, 19 nt, Artificial Sequence
  Description of Artificial Sequence: Synthetic oligonucleotide
  Sense strand starting at position 16 of SEQ ID NO: 586553
cugaaauaucuacgggacu

SEQ ID NO: 726585 - RNA, 19 nt, Artificial Sequence
  Description of Artificial Sequence: Synthetic oligonucleotide
  Antisense strand to SEQ ID NO: 726584
agucccguagauauuucag

SEQ ID NO: 726586 - RNA, 19 nt, Artificial Sequence
  Description of Artificial Sequence: Synthetic oligonucleotide
  Sense strand starting at position 104 of SEQ ID NO: 586553
gcuaaaguccugcaaagag

SEQ ID NO: 726587 - RNA, 19 nt, Artificial Sequence
  Description of Artificial Sequence: Synthetic oligonucleotide
  Antisense strand to SEQ ID NO: 726586
cucuuugcaggacuuuagc

SEQ ID NO: 726588 - RNA, 19 nt, Artificial Sequence
  Description of Artificial Sequence: Synthetic oligonucleotide
  Sense strand starting at position 133 of SEQ ID NO: 586553
gggccucaggacugucauu

SEQ ID NO: 726589 - RNA, 19 nt, Artificial Sequence
  Description of Artificial Sequence: Synthetic oligonucleotide
  Antisense strand to SEQ ID NO: 726588
aaugacaguccugaggccc

SEQ ID NO: 726590 - RNA, 19 nt, Artificial Sequence
  Description of Artificial Sequence: Synthetic oligonucleotide
  Sense strand starting at position 138 of SEQ ID NO: 586553
ucaggacugucauuguuua

SEQ ID NO: 726591 - RNA, 19 nt, Artificial Sequence
  Description of Artificial Sequence: Synthetic oligonucleotide
  Antisense strand to SEQ ID NO: 726590
uaaacaaugacaguccuga

SEQ ID NO: 726592 - RNA, 19 nt, Artificial Sequence
  Description of Artificial Sequence: Synthetic oligonucleotide
  Sense strand starting at position 522 of SEQ ID NO: 586553
acuugucucucagucaaau

SEQ ID NO: 726593 - RNA, 19 nt, Artificial Sequence
  Description of Artificial Sequence: Synthetic oligonucleotide
  Antisense strand to SEQ ID NO: 726592
auuugacugagagacaagu

SEQ ID NO: 726594 - RNA, 19 nt, Artificial Sequence
  Description of Artificial Sequence: Synthetic oligonucleotide
  Sense strand starting at position 574 of SEQ ID NO: 586553
ugcaaagguacuuguugaa

SEQ ID NO: 726595 - RNA, 19 nt, Artificial Sequence
  Description of Artificial Sequence: Synthetic oligonucleotide
  Antisense strand to SEQ ID NO: 726594
uucaacaaguaccuuugca

SEQ ID NO: 726596 - RNA, 19 nt, Artificial Sequence
  Description of Artificial Sequence: Synthetic oligonucleotide
  Sense strand starting at position 610 of SEQ ID NO: 586553
gcucuagaagcuguguguu

SEQ ID NO: 726597 - RNA, 19 nt, Artificial Sequence
  Description of Artificial Sequence: Synthetic oligonucleotide
  Antisense strand to SEQ ID NO: 726596
aacacacagcuucuagagc

SEQ ID NO: 726598 - RNA, 19 nt, Artificial Sequence
  Description of Artificial Sequence: Synthetic oligonucleotide
  Sense strand starting at position 620 of SEQ ID NO: 586553
cuguguguugguguaagca

SEQ ID NO: 726599 - RNA, 19 nt, Artificial Sequence
  Description of Artificial Sequence: Synthetic oligonucleotide
  Antisense strand to SEQ ID NO: 726598
ugcuuacaccaacacacag

SEQ ID NO: 726600 - RNA, 19 nt, Artificial Sequence
  Description of Artificial Sequence: Synthetic oligonucleotide
  Sense strand starting at position 623 of SEQ ID NO: 586553
uguguugguguaagcaguu

SEQ ID NO: 726601 - RNA, 19 nt, Artificial Sequence
  Description of Artificial Sequence: Synthetic oligonucleotide
  Antisense strand to SEQ ID NO: 726600
aacugcuuacaccaacaca

SEQ ID NO: 726602 - RNA, 19 nt, Artificial Sequence
  Description of Artificial Sequence: Synthetic oligonucleotide
  Sense strand starting at position 673 of SEQ ID NO: 586553
cggcgauuuccagggauuc

SEQ ID NO: 726603 - RNA, 19 nt, Artificial Sequence
  Description of Artificial Sequence: Synthetic oligonucleotide
  Antisense strand to SEQ ID NO: 726602
gaaucccuggaaaucgccg

SEQ ID NO: 726604 - RNA, 19 nt, Artificial Sequence
  Description of Artificial Sequence: Synthetic oligonucleotide
  Sense strand starting at position 752 of SEQ ID NO: 586553
gguuauuccacuggagaau

SEQ ID NO: 726605 - RNA, 19 nt, Artificial Sequence
  Description of Artificial Sequence: Synthetic oligonucleotide
  Antisense strand to SEQ ID NO: 726604
auucuccaguggaauaacc

SEQ ID NO: 726606 - RNA, 19 nt, Artificial Sequence
  Description of Artificial Sequence: Synthetic oligonucleotide
  Sense strand starting at position 983 of SEQ ID NO: 586553
cugagcaagagcgaucuau

SEQ ID NO: 726607 - RNA, 19 nt, Artificial Sequence
  Description of Artificial Sequence: Synthetic oligonucleotide
  Antisense strand to SEQ ID NO: 726606
auagaucgcucuugcucag

SEQ ID NO: 726608 - RNA, 19 nt, Artificial Sequence
  Description of Artificial Sequence: Synthetic oligonucleotide
  Sense strand starting at position 987 of SEQ ID NO: 586553
gcaagagcgaucuaucacu

SEQ ID NO: 726609 - RNA, 19 nt, Artificial Sequence
  Description of Artificial Sequence: Synthetic oligonucleotide
  Antisense strand to SEQ ID NO: 726608
agugauagaucgcucuugc

SEQ ID NO: 726610 - RNA, 19 nt, Artificial Sequence
  Description of Artificial Sequence: Synthetic oligonucleotide
  Sense strand starting at position 1088 of SEQ ID NO: 586553
acacaaguucgggaaaguu

SEQ ID NO: 726611 - RNA, 19 nt, Artificial Sequence
  Description of Artificial Sequence: Synthetic oligonucleotide
  Antisense strand to SEQ ID NO: 726610
aacuuucccgaacuugugu

SEQ ID NO: 726612 - RNA, 19 nt, Artificial Sequence
  Description of Artificial Sequence: Synthetic oligonucleotide
  Sense strand starting at position 1127 of SEQ ID NO: 586553
auauaugucucauuguaga

SEQ ID NO: 726613 - RNA, 19 nt, Artificial Sequence
  Description of Artificial Sequence: Synthetic oligonucleotide
  Antisense strand to SEQ ID NO: 726612
ucuacaaugagacauauau

SEQ ID NO: 726614 - RNA, 19 nt, Artificial Sequence
  Description of Artificial Sequence: Synthetic oligonucleotide
  Sense strand starting at position 1553 of SEQ ID NO: 586553
cugggaauggucugcucaa

SEQ ID NO: 726615 - RNA, 19 nt, Artificial Sequence
  Description of Artificial Sequence: Synthetic oligonucleotide
  Antisense strand to SEQ ID NO: 726614
uugagcagaccauucccag

SEQ ID NO: 726616 - RNA, 19 nt, Artificial Sequence
  Description of Artificial Sequence: Synthetic oligonucleotide
  Sense strand starting at position 1554 of SEQ ID NO: 586553
ugggaauggucugcucaaa

SEQ ID NO: 726617 - RNA, 19 nt, Artificial Sequence
  Description of Artificial Sequence: Synthetic oligonucleotide
  Antisense strand to SEQ ID NO: 726616
uuugagcagaccauuccca

SEQ ID NO: 726618 - RNA, 19 nt, Artificial Sequence
  Description of Artificial Sequence: Synthetic oligonucleotide
  Sense strand starting at position 1603 of SEQ ID NO: 586553
cgucgaggucuugauugau

SEQ ID NO: 726619 - RNA, 19 nt, Artificial Sequence
  Description of Artificial Sequence: Synthetic oligonucleotide
  Antisense strand to SEQ ID NO: 726618
aucaaucaagaccucgacg

SEQ ID NO: 726620 - RNA, 19 nt, Artificial Sequence
  Description of Artificial Sequence: Synthetic oligonucleotide
  Sense strand starting at position 1606 of SEQ ID NO: 586553
cgaggucuugauugaugaa

SEQ ID NO: 726621 - RNA, 19 nt, Artificial Sequence
  Description of Artificial Sequence: Synthetic oligonucleotide
  Antisense strand to SEQ ID NO: 726620
uucaucaaucaagaccucg

SEQ ID NO: 726622 - RNA, 19 nt, Artificial Sequence
  Description of Artificial Sequence: Synthetic oligonucleotide
  Sense strand starting at position 1628 of SEQ ID NO: 586553
ugaaauguaucagcgacag

SEQ ID NO: 726623 - RNA, 19 nt, Artificial Sequence
  Description of Artificial Sequence: Synthetic oligonucleotide
  Antisense strand to SEQ ID NO: 726622
cugucgcugauacauuuca

SEQ ID NO: 726624 - RNA, 19 nt, Artificial Sequence
  Description of Artificial Sequence: Synthetic oligonucleotide
  Sense strand starting at position 2157 of SEQ ID NO: 586553
ccuccugaucugcaaggau

SEQ ID NO: 726625 - RNA, 19 nt, Artificial Sequence
  Description of Artificial Sequence: Synthetic oligonucleotide
  Antisense strand to SEQ ID NO: 726624
auccuugcagaucaggagg

SEQ ID NO: 726626 - RNA, 19 nt, Artificial Sequence
  Description of Artificial Sequence: Synthetic oligonucleotide
  Sense strand starting at position 2160 of SEQ ID NO: 586553
ccugaucugcaaggaucua

SEQ ID NO: 726627 - RNA, 19 nt, Artificial Sequence
  Description of Artificial Sequence: Synthetic oligonucleotide
  Antisense strand to SEQ ID NO: 726626
uagauccuugcagaucagg

SEQ ID NO: 726628 - RNA, 19 nt, Artificial Sequence
  Description of Artificial Sequence: Synthetic oligonucleotide
  Sense strand starting at position 2355 of SEQ ID NO: 586553
gccugcagucauuaacaaa

SEQ ID NO: 726629 - RNA, 19 nt, Artificial Sequence
  Description of Artificial Sequence: Synthetic oligonucleotide
  Antisense strand to SEQ ID NO: 726628
uuuguuaaugacugcaggc

SEQ ID NO: 726630 - RNA, 19 nt, Artificial Sequence
  Description of Artificial Sequence: Synthetic oligonucleotide
  Sense strand starting at position 2434 of SEQ ID NO: 586553
ucuguuaaagcaggagaaa

SEQ ID NO: 726631 - RNA, 19 nt, Artificial Sequence
  Description of Artificial Sequence: Synthetic oligonucleotide
  Antisense strand to SEQ ID NO: 726630
uuucuccugcuuuaacaga

SEQ ID NO: 726632 - RNA, 19 nt, Artificial Sequence
  Description of Artificial Sequence: Synthetic oligonucleotide
  Sense strand starting at position 2906 of SEQ ID NO: 586553
ucaggaguggcuggagaaa

SEQ ID NO: 726633 - RNA, 19 nt, Artificial Sequence
  Description of Artificial Sequence: Synthetic oligonucleotide
  Antisense strand to SEQ ID NO: 726632
uuucuccagccacuccuga

SEQ ID NO: 726634 - RNA, 19 nt, Artificial Sequence
  Description of Artificial Sequence: Synthetic oligonucleotide
  Sense strand starting at position 2919 of SEQ ID NO: 586553
gagaaagaugcaugugcca

SEQ ID NO: 726635 - RNA, 19 nt, Artificial Sequence
  Description of Artificial Sequence: Synthetic oligonucleotide
  Antisense strand to SEQ ID NO: 726634
uggcacaugcaucuuucuc

SEQ ID NO: 726636 - RNA, 19 nt, Artificial Sequence
  Description of Artificial Sequence: Synthetic oligonucleotide
  Sense strand starting at position 3069 of SEQ ID NO: 586553
ugcggugaguauuuccgau

SEQ ID NO: 726637 - RNA, 19 nt, Artificial Sequence
  Description of Artificial Sequence: Synthetic oligonucleotide
  Antisense strand to SEQ ID NO: 726636
aucggaaauacucaccgca

SEQ ID NO: 726638 - RNA, 19 nt, Artificial Sequence
  Description of Artificial Sequence: Synthetic oligonucleotide
  Sense strand starting at position 3073 of SEQ ID NO: 586553
gugaguauuuccgauuucc

SEQ ID NO: 726639 - RNA, 19 nt, Artificial Sequence
  Description of Artificial Sequence: Synthetic oligonucleotide
  Antisense strand to SEQ ID NO: 726638
ggaaaucggaaauacucac

SEQ ID NO: 726640 - RNA, 19 nt, Artificial Sequence
  Description of Artificial Sequence: Synthetic oligonucleotide
  Sense strand starting at position 3298 of SEQ ID NO: 586553
gguucuguugugggaaaca

SEQ ID NO: 726641 - RNA, 19 nt, Artificial Sequence
  Description of Artificial Sequence: Synthetic oligonucleotide
  Antisense strand to SEQ ID NO: 726640
uguuucccacaacagaacc

SEQ ID NO: 726642 - RNA, 19 nt, Artificial Sequence
  Description of Artificial Sequence: Synthetic oligonucleotide
  Sense strand starting at position 3414 of SEQ ID NO: 586553
caucuuggacagugcuaga

SEQ ID NO: 726643 - RNA, 19 nt, Artificial Sequence
  Description of Artificial Sequence: Synthetic oligonucleotide
  Antisense strand to SEQ ID NO: 726642
ucuagcacuguccaagaug

SEQ ID NO: 726644 - RNA, 19 nt, Artificial Sequence
  Description of Artificial Sequence: Synthetic oligonucleotide
  Sense strand starting at position 3776 of SEQ ID NO: 586553
agacauaaguggccuauau

SEQ ID NO: 726645 - RNA, 19 nt, Artificial Sequence
  Description of Artificial Sequence: Synthetic oligonucleotide
  Antisense strand to SEQ ID NO: 726644
auauaggccacuuaugucu

SEQ ID NO: 726646 - RNA, 19 nt, Artificial Sequence
  Description of Artificial Sequence: Synthetic oligonucleotide
  Sense strand starting at position 3778 of SEQ ID NO: 586553
acauaaguggccuauauca

SEQ ID NO: 726647 - RNA, 19 nt, Artificial Sequence
  Description of Artificial Sequence: Synthetic oligonucleotide
  Antisense strand to SEQ ID NO: 726646
ugauauaggccacuuaugu

SEQ ID NO: 726648 - RNA, 19 nt, Artificial Sequence
  Description of Artificial Sequence: Synthetic oligonucleotide
  Sense strand starting at position 3780 of SEQ ID NO: 586553
auaaguggccuauaucauu

SEQ ID NO: 726649 - RNA, 19 nt, Artificial Sequence
  Description of Artificial Sequence: Synthetic oligonucleotide
  Antisense strand to SEQ ID NO: 726648
aaugauauaggccacuuau

SEQ ID NO: 726650 - RNA, 19 nt, Artificial Sequence
  Description of Artificial Sequence: Synthetic oligonucleotide
  Sense strand starting at position 3785 of SEQ ID NO: 586553
uggccuauaucauugacca

SEQ ID NO: 726651 - RNA, 19 nt, Artificial Sequence
  Description of Artificial Sequence: Synthetic oligonucleotide
  Antisense strand to SEQ ID NO: 726650
uggucaaugauauaggcca

SEQ ID NO: 726652 - RNA, 19 nt, Artificial Sequence
  Description of Artificial Sequence: Synthetic oligonucleotide
  Sense strand starting at position 3786 of SEQ ID NO: 586553
ggccuauaucauugaccag

SEQ ID NO: 726653 - RNA, 19 nt, Artificial Sequence
  Description of Artificial Sequence: Synthetic oligonucleotide
  Antisense strand to SEQ ID NO: 726652
cuggucaaugauauaggcc

SEQ ID NO: 726654 - RNA, 19 nt, Artificial Sequence
  Description of Artificial Sequence: Synthetic oligonucleotide
  Sense strand starting at position 3814 of SEQ ID NO: 586553
uugccuugcagauagagau

SEQ ID NO: 726655 - RNA, 19 nt, Artificial Sequence
  Description of Artificial Sequence: Synthetic oligonucleotide
  Antisense strand to SEQ ID NO: 726654
aucucuaucugcaaggcaa

SEQ ID NO: 726656 - RNA, 19 nt, Artificial Sequence
  Description of Artificial Sequence: Synthetic oligonucleotide
  Sense strand starting at position 3820 of SEQ ID NO: 586553
ugcagauagagaugcuauu

SEQ ID NO: 726657 - RNA, 19 nt, Artificial Sequence
  Description of Artificial Sequence: Synthetic oligonucleotide
  Antisense strand to SEQ ID NO: 726656
aauagcaucucuaucugca

SEQ ID NO: 726658 - RNA, 19 nt, Artificial Sequence
  Description of Artificial Sequence: Synthetic oligonucleotide
  Sense strand starting at position 3905 of SEQ ID NO: 586553
gcgcgaucaaucuugcuca

SEQ ID NO: 726659 - RNA, 19 nt, Artificial Sequence
  Description of Artificial Sequence: Synthetic oligonucleotide
  Antisense strand to SEQ ID NO: 726658
ugagcaagauugaucgcgc

SEQ ID NO: 726660 - RNA, 19 nt, Artificial Sequence
  Description of Artificial Sequence: Synthetic oligonucleotide
  Sense strand starting at position 3908 of SEQ ID NO: 586553
cgaucaaucuugcucacca

SEQ ID NO: 726661 - RNA, 19 nt, Artificial Sequence
  Description of Artificial Sequence: Synthetic oligonucleotide
  Antisense strand to SEQ ID NO: 726660
uggugagcaagauugaucg

SEQ ID NO: 726662 - RNA, 19 nt, Artificial Sequence
  Description of Artificial Sequence: Synthetic oligonucleotide
  Sense strand starting at position 3939 of SEQ ID NO: 586553
gcuucuagcccuuaagaac

SEQ ID NO: 726663 - RNA, 19 nt, Artificial Sequence
  Description of Artificial Sequence: Synthetic oligonucleotide
  Antisense strand to SEQ ID NO: 726662
guucuuaagggcuagaagc

SEQ ID NO: 726664 - RNA, 19 nt, Artificial Sequence
  Description of Artificial Sequence: Synthetic oligonucleotide
  Sense strand starting at position 7 of SEQ ID NO: 586554
cuggaagcaucaucaauaa

SEQ ID NO: 726665 - RNA, 19 nt, Artificial Sequence
  Description of Artificial Sequence: Synthetic oligonucleotide
  Antisense strand to SEQ ID NO: 726664
uuauugaugaugcuuccag

SEQ ID NO: 726666 - RNA, 19 nt, Artificial Sequence
  Description of Artificial Sequence: Synthetic oligonucleotide
  Sense strand starting at position 530 of SEQ ID NO: 586554
uaugaacaaucggcggaaa

SEQ ID NO: 726667 - RNA, 19 nt, Artificial Sequence
  Description of Artificial Sequence: Synthetic oligonucleotide
  Antisense strand to SEQ ID NO: 726666
uuuccgccgauuguucaua

SEQ ID NO: 726668 - RNA, 19 nt, Artificial Sequence
  Description of Artificial Sequence: Synthetic oligonucleotide
  Sense strand starting at position 531 of SEQ ID NO: 586554
augaacaaucggcggaaau

SEQ ID NO: 726669 - RNA, 19 nt, Artificial Sequence
  Description of Artificial Sequence: Synthetic oligonucleotide
  Antisense strand to SEQ ID NO: 726668
auuuccgccgauuguucau

SEQ ID NO: 726670 - RNA, 19 nt, Artificial Sequence
  Description of Artificial Sequence: Synthetic oligonucleotide
  Sense strand starting at position 532 of SEQ ID NO: 586554
ugaacaaucggcggaaaua

SEQ ID NO: 726671 - RNA, 19 nt, Artificial Sequence
  Description of Artificial Sequence: Synthetic oligonucleotide
  Antisense strand to SEQ ID NO: 726670
uauuuccgccgauuguuca

SEQ ID NO: 726672 - RNA, 19 nt, Artificial Sequence
  Description of Artificial Sequence: Synthetic oligonucleotide
  Sense strand starting at position 533 of SEQ ID NO: 586554
gaacaaucggcggaaauac

SEQ ID NO: 726673 - RNA, 19 nt, Artificial Sequence
  Description of Artificial Sequence: Synthetic oligonucleotide
  Antisense strand to SEQ ID NO: 726672
guauuuccgccgauuguuc

SEQ ID NO: 726674 - RNA, 19 nt, Artificial Sequence
  Description of Artificial Sequence: Synthetic oligonucleotide
  Sense strand starting at position 715 of SEQ ID NO: 586554
uggcucuguagagaaucua

SEQ ID NO: 726675 - RNA, 19 nt, Artificial Sequence
  Description of Artificial Sequence: Synthetic oligonucleotide
  Antisense strand to SEQ ID NO: 726674
uagauucucuacagagcca

SEQ ID NO: 726676 - RNA, 19 nt, Artificial Sequence
  Description of Artificial Sequence: Synthetic oligonucleotide
  Sense strand starting at position 811 of SEQ ID NO: 586554
guggucauacgucaacuua

SEQ ID NO: 726677 - RNA, 19 nt, Artificial Sequence
  Description of Artificial Sequence: Synthetic oligonucleotide
  Antisense strand to SEQ ID NO: 726676
uaaguugacguaugaccac

SEQ ID NO: 726678 - RNA, 19 nt, Artificial Sequence
  Description of Artificial Sequence: Synthetic oligonucleotide
  Sense strand starting at position 862 of SEQ ID NO: 586554
ggaacuagguuuccaaaca

SEQ ID NO: 726679 - RNA, 19 nt, Artificial Sequence
  Description of Artificial Sequence: Synthetic oligonucleotide
  Antisense strand to SEQ ID NO: 726678
uguuuggaaaccuaguucc

SEQ ID NO: 726680 - RNA, 19 nt, Artificial Sequence
  Description of Artificial Sequence: Synthetic oligonucleotide
  Sense strand starting at position 938 of SEQ ID NO: 586554
aagaguucugucuaagcaa

SEQ ID NO: 726681 - RNA, 19 nt, Artificial Sequence
  Description of Artificial Sequence: Synthetic oligonucleotide
  Antisense strand to SEQ ID NO: 726680
uugcuuagacagaacucuu

SEQ ID NO: 726682 - RNA, 19 nt, Artificial Sequence
  Description of Artificial Sequence: Synthetic oligonucleotide
  Sense strand starting at position 1297 of SEQ ID NO: 586554
ggcacauaauuaccugaca

SEQ ID NO: 726683 - RNA, 19 nt, Artificial Sequence
  Description of Artificial Sequence: Synthetic oligonucleotide
  Antisense strand to SEQ ID NO: 726682
ugucagguaauuaugugcc

SEQ ID NO: 726684 - RNA, 19 nt, Artificial Sequence
  Description of Artificial Sequence: Synthetic oligonucleotide
  Sense strand starting at position 1457 of SEQ ID NO: 586554
agcauuuccucagugcaca

SEQ ID NO: 726685 - RNA, 19 nt, Artificial Sequence
  Description of Artificial Sequence: Synthetic oligonucleotide
  Antisense strand to SEQ ID NO: 726684
ugugcacugaggaaaugcu

SEQ ID NO: 726686 - RNA, 19 nt, Artificial Sequence
  Description of Artificial Sequence: Synthetic oligonucleotide
  Sense strand starting at position 1458 of SEQ ID NO: 586554
gcauuuccucagugcacaa

SEQ ID NO: 726687 - RNA, 19 nt, Artificial Sequence
  Description of Artificial Sequence: Synthetic oligonucleotide
  Antisense strand to SEQ ID NO: 726686
uugugcacugaggaaaugc

SEQ ID NO: 726688 - RNA, 19 nt, Artificial Sequence
  Description of Artificial Sequence: Synthetic oligonucleotide
  Sense strand starting at position 1470 of SEQ ID NO: 586554
ugcacaacugagugauaca

SEQ ID NO: 726689 - RNA, 19 nt, Artificial Sequence
  Description of Artificial Sequence: Synthetic oligonucleotide
  Antisense strand to SEQ ID NO: 726688
uguaucacucaguugugca

SEQ ID NO: 726690 - RNA, 19 nt, Artificial Sequence
  Description of Artificial Sequence: Synthetic oligonucleotide
  Sense strand starting at position 1477 of SEQ ID NO: 586554
cugagugauacauggaauu

SEQ ID NO: 726691 - RNA, 19 nt, Artificial Sequence
  Description of Artificial Sequence: Synthetic oligonucleotide
  Antisense strand to SEQ ID NO: 726690
aauuccauguaucacucag

SEQ ID NO: 726692 - RNA, 19 nt, Artificial Sequence
  Description of Artificial Sequence: Synthetic oligonucleotide
  Sense strand starting at position 1532 of SEQ ID NO: 586554
aucuaauugcucugcaaga

SEQ ID NO: 726693 - RNA, 19 nt, Artificial Sequence
  Description of Artificial Sequence: Synthetic oligonucleotide
  Antisense strand to SEQ ID NO: 726692
ucuugcagagcaauuagau

SEQ ID NO: 726694 - RNA, 19 nt, Artificial Sequence
  Description of Artificial Sequence: Synthetic oligonucleotide
  Sense strand starting at position 1533 of SEQ ID NO: 586554
ucuaauugcucugcaagag

SEQ ID NO: 726695 - RNA, 19 nt, Artificial Sequence
  Description of Artificial Sequence: Synthetic oligonucleotide
  Antisense strand to SEQ ID NO: 726694
cucuugcagagcaauuaga

SEQ ID NO: 726696 - RNA, 19 nt, Artificial Sequence
  Description of Artificial Sequence: Synthetic oligonucleotide
  Sense strand starting at position 1534 of SEQ ID NO: 586554
cuaauugcucugcaagaga

SEQ ID NO: 726697 - RNA, 19 nt, Artificial Sequence
  Description of Artificial Sequence: Synthetic oligonucleotide
  Antisense strand to SEQ ID NO: 726696
ucucuugcagagcaauuag

SEQ ID NO: 726698 - RNA, 19 nt, Artificial Sequence
  Description of Artificial Sequence: Synthetic oligonucleotide
  Sense strand starting at position 1602 of SEQ ID NO: 586554
acuggagugccuuaaguua

SEQ ID NO: 726699 - RNA, 19 nt, Artificial Sequence
  Description of Artificial Sequence: Synthetic oligonucleotide
  Antisense strand to SEQ ID NO: 726698
uaacuuaaggcacuccagu

SEQ ID NO: 726700 - RNA, 19 nt, Artificial Sequence
  Description of Artificial Sequence: Synthetic oligonucleotide
  Sense strand starting at position 1888 of SEQ ID NO: 586554
ugaugacauugcccacuaa

SEQ ID NO: 726701 - RNA, 19 nt, Artificial Sequence
  Description of Artificial Sequence: Synthetic oligonucleotide
  Antisense strand to SEQ ID NO: 726700
uuagugggcaaugucauca

SEQ ID NO: 726702 - RNA, 19 nt, Artificial Sequence
  Description of Artificial Sequence: Synthetic oligonucleotide
  Sense strand starting at position 1993 of SEQ ID NO: 586554
uagugagauccucaggcca

SEQ ID NO: 726703 - RNA, 19 nt, Artificial Sequence
  Description of Artificial Sequence: Synthetic oligonucleotide
  Antisense strand to SEQ ID NO: 726702
uggccugaggaucucacua

SEQ ID NO: 726704 - RNA, 19 nt, Artificial Sequence
  Description of Artificial Sequence: Synthetic oligonucleotide
  Sense strand starting at position 2169 of SEQ ID NO: 586554
agagaacuuguucaugggu

SEQ ID NO: 726705 - RNA, 19 nt, Artificial Sequence
  Description of Artificial Sequence: Synthetic oligonucleotide
  Antisense strand to SEQ ID NO: 726704
acccaugaacaaguucucu

SEQ ID NO: 726706 - RNA, 19 nt, Artificial Sequence
  Description of Artificial Sequence: Synthetic oligonucleotide
  Sense strand starting at position 2245 of SEQ ID NO: 586554
gccuaagcuggugacaaua

SEQ ID NO: 726707 - RNA, 19 nt, Artificial Sequence
  Description of Artificial Sequence: Synthetic oligonucleotide
  Antisense strand to SEQ ID NO: 726706
uauugucaccagcuuaggc

SEQ ID NO: 726708 - RNA, 19 nt, Artificial Sequence
  Description of Artificial Sequence: Synthetic oligonucleotide
  Sense strand starting at position 2283 of SEQ ID NO: 586554
gugguguagcuggaagaga

SEQ ID NO: 726709 - RNA, 19 nt, Artificial Sequence
  Description of Artificial Sequence: Synthetic oligonucleotide
  Antisense strand to SEQ ID NO: 726708
ucucuuccagcuacaccac

SEQ ID NO: 726710 - RNA, 19 nt, Artificial Sequence
  Description of Artificial Sequence: Synthetic oligonucleotide
  Sense strand starting at position 2284 of SEQ ID NO: 586554
ugguguagcuggaagagaa

SEQ ID NO: 726711 - RNA, 19 nt, Artificial Sequence
  Description of Artificial Sequence: Synthetic oligonucleotide
  Antisense strand to SEQ ID NO: 726710
uucucuuccagcuacacca

SEQ ID NO: 726712 - RNA, 19 nt, Artificial Sequence
  Description of Artificial Sequence: Synthetic oligonucleotide
  Sense strand starting at position 2297 of SEQ ID NO: 586554
agagaaccuccaugugaac

SEQ ID NO: 726713 - RNA, 19 nt, Artificial Sequence
  Description of Artificial Sequence: Synthetic oligonucleotide
  Antisense strand to SEQ ID NO: 726712
guucacauggagguucucu

SEQ ID NO: 726714 - RNA, 19 nt, Artificial Sequence
  Description of Artificial Sequence: Synthetic oligonucleotide
  Sense strand starting at position 2405 of SEQ ID NO: 586554
aguagaagcugguuuccaa

SEQ ID NO: 726715 - RNA, 19 nt, Artificial Sequence
  Description of Artificial Sequence: Synthetic oligonucleotide
  Antisense strand to SEQ ID NO: 726714
uuggaaaccagcuucuacu

SEQ ID NO: 726716 - RNA, 19 nt, Artificial Sequence
  Description of Artificial Sequence: Synthetic oligonucleotide
  Sense strand starting at position 2569 of SEQ ID NO: 586554
caaguuucugaagaggcau

SEQ ID NO: 726717 - RNA, 19 nt, Artificial Sequence
  Description of Artificial Sequence: Synthetic oligonucleotide
  Antisense strand to SEQ ID NO: 726716
augccucuucagaaacuug

SEQ ID NO: 726718 - RNA, 19 nt, Artificial Sequence
  Description of Artificial Sequence: Synthetic oligonucleotide
  Sense strand starting at position 2974 of SEQ ID NO: 586554
ugaaauaagucauugguac

SEQ ID NO: 726719 - RNA, 19 nt, Artificial Sequence
  Description of Artificial Sequence: Synthetic oligonucleotide
  Antisense strand to SEQ ID NO: 726718
guaccaaugacuuauuuca

SEQ ID NO: 726720 - RNA, 19 nt, Artificial Sequence
  Description of Artificial Sequence: Synthetic oligonucleotide
  Sense strand starting at position 2975 of SEQ ID NO: 586554
gaaauaagucauugguacu

SEQ ID NO: 726721 - RNA, 19 nt, Artificial Sequence
  Description of Artificial Sequence: Synthetic oligonucleotide
  Antisense strand to SEQ ID NO: 726720
aguaccaaugacuuauuuc

SEQ ID NO: 726722 - RNA, 19 nt, Artificial Sequence
  Description of Artificial Sequence: Synthetic oligonucleotide
  Sense strand starting at position 3133 of SEQ ID NO: 586554
gugauuuggugggaugaga

SEQ ID NO: 726723 - RNA, 19 nt, Artificial Sequence
  Description of Artificial Sequence: Synthetic oligonucleotide
  Antisense strand to SEQ ID NO: 726722
ucucaucccaccaaaucac

SEQ ID NO: 726724 - RNA, 19 nt, Artificial Sequence
  Description of Artificial Sequence: Synthetic oligonucleotide
  Sense strand starting at position 3201 of SEQ ID NO: 586554
acagcuucucuaugagaga

SEQ ID NO: 726725 - RNA, 19 nt, Artificial Sequence
  Description of Artificial Sequence: Synthetic oligonucleotide
  Antisense strand to SEQ ID NO: 726724
ucucucauagagaagcugu

SEQ ID NO: 726726 - RNA, 19 nt, Artificial Sequence
  Description of Artificial Sequence: Synthetic oligonucleotide
  Sense strand starting at position 3283 of SEQ ID NO: 586554
uccaguuuccuggagcaaa

SEQ ID NO: 726727 - RNA, 19 nt, Artificial Sequence
  Description of Artificial Sequence: Synthetic oligonucleotide
  Antisense strand to SEQ ID NO: 726726
uuugcuccaggaaacugga

SEQ ID NO: 726728 - RNA, 19 nt, Artificial Sequence
  Description of Artificial Sequence: Synthetic oligonucleotide
  Sense strand starting at position 3492 of SEQ ID NO: 586554
uuagauauaucuguacuca

SEQ ID NO: 726729 - RNA, 19 nt, Artificial Sequence
  Description of Artificial Sequence: Synthetic oligonucleotide
  Antisense strand to SEQ ID NO: 726728
ugaguacagauauaucuaa

SEQ ID NO: 726730 - RNA, 19 nt, Artificial Sequence
  Description of Artificial Sequence: Synthetic oligonucleotide
  Sense strand starting at position 3662 of SEQ ID NO: 586554
guguguaugauagauucuu

SEQ ID NO: 726731 - RNA, 19 nt, Artificial Sequence
  Description of Artificial Sequence: Synthetic oligonucleotide
  Antisense strand to SEQ ID NO: 726730
aagaaucuaucauacacac

SEQ ID NO: 726732 - RNA, 19 nt, Artificial Sequence
  Description of Artificial Sequence: Synthetic oligonucleotide
  Sense strand starting at position 3693 of SEQ ID NO: 586554
auauuuccugugggugcaa

SEQ ID NO: 726733 - RNA, 19 nt, Artificial Sequence
  Description of Artificial Sequence: Synthetic oligonucleotide
  Antisense strand to SEQ ID NO: 726732
uugcacccacaggaaauau

SEQ ID NO: 726734 - RNA, 19 nt, Artificial Sequence
  Description of Artificial Sequence: Synthetic oligonucleotide
  Sense strand starting at position 3708 of SEQ ID NO: 586554
gcaagugcaguagagaaau

SEQ ID NO: 726735 - RNA, 19 nt, Artificial Sequence
  Description of Artificial Sequence: Synthetic oligonucleotide
  Antisense strand to SEQ ID NO: 726734
auuucucuacugcacuugc

SEQ ID NO: 726736 - RNA, 19 nt, Artificial Sequence
  Description of Artificial Sequence: Synthetic oligonucleotide
  Sense strand starting at position 3727 of SEQ ID NO: 586554
gggccaaguucucuggaca

SEQ ID NO: 726737 - RNA, 19 nt, Artificial Sequence
  Description of Artificial Sequence: Synthetic oligonucleotide
  Antisense strand to SEQ ID NO: 726736
uguccagagaacuuggccc

SEQ ID NO: 726738 - RNA, 19 nt, Artificial Sequence
  Description of Artificial Sequence: Synthetic oligonucleotide
  Sense strand starting at position 3728 of SEQ ID NO: 586554
ggccaaguucucuggacac

SEQ ID NO: 726739 - RNA, 19 nt, Artificial Sequence
  Description of Artificial Sequence: Synthetic oligonucleotide
  Antisense strand to SEQ ID NO: 726738
guguccagagaacuuggcc

SEQ ID NO: 726740 - RNA, 19 nt, Artificial Sequence
  Description of Artificial Sequence: Synthetic oligonucleotide
  Sense strand starting at position 3730 of SEQ ID NO: 586554
ccaaguucucuggacacgu

SEQ ID NO: 726741 - RNA, 19 nt, Artificial Sequence
  Description of Artificial Sequence: Synthetic oligonucleotide
  Antisense strand to SEQ ID NO: 726740
acguguccagagaacuugg

SEQ ID NO: 726742 - RNA, 19 nt, Artificial Sequence
  Description of Artificial Sequence: Synthetic oligonucleotide
  Sense strand starting at position 3914 of SEQ ID NO: 586554
guaacacagcuugacuauu

SEQ ID NO: 726743 - RNA, 19 nt, Artificial Sequence
  Description of Artificial Sequence: Synthetic oligonucleotide
  Antisense strand to SEQ ID NO: 726742
aauagucaagcuguguuac

SEQ ID NO: 726744 - RNA, 19 nt, Artificial Sequence
  Description of Artificial Sequence: Synthetic oligonucleotide
  Sense strand starting at position 100 of SEQ ID NO: 586555
accuccauuccuggcagaa

SEQ ID NO: 726745 - RNA, 19 nt, Artificial Sequence
  Description of Artificial Sequence: Synthetic oligonucleotide
  Antisense strand to SEQ ID NO: 726744
uucugccaggaauggaggu

SEQ ID NO: 726746 - RNA, 19 nt, Artificial Sequence
  Description of Artificial Sequence: Synthetic oligonucleotide
  Sense strand starting at position 112 of SEQ ID NO: 586555
ggcagaauaucuuccuaag

SEQ ID NO: 726747 - RNA, 19 nt, Artificial Sequence
  Description of Artificial Sequence: Synthetic oligonucleotide
  Antisense strand to SEQ ID NO: 726746
cuuaggaagauauucugcc

SEQ ID NO: 726748 - RNA, 19 nt, Artificial Sequence
  Description of Artificial Sequence: Synthetic oligonucleotide
  Sense strand starting at position 149 of SEQ ID NO: 586555
cuuauugcucucuagagug

SEQ ID NO: 726749 - RNA, 19 nt, Artificial Sequence
  Description of Artificial Sequence: Synthetic oligonucleotide
  Antisense strand to SEQ ID NO: 726748
cacucuagagagcaauaag

SEQ ID NO: 726750 - RNA, 19 nt, Artificial Sequence
  Description of Artificial Sequence: Synthetic oligonucleotide
  Sense strand starting at position 155 of SEQ ID NO: 586555
gcucucuagagugagacua

SEQ ID NO: 726751 - RNA, 19 nt, Artificial Sequence
  Description of Artificial Sequence: Synthetic oligonucleotide
  Antisense strand to SEQ ID NO: 726750
uagucucacucuagagagc

SEQ ID NO: 726752 - RNA, 19 nt, Artificial Sequence
  Description of Artificial Sequence: Synthetic oligonucleotide
  Sense strand starting at position 340 of SEQ ID NO: 586555
aggaaacaaucccagagaa

SEQ ID NO: 726753 - RNA, 19 nt, Artificial Sequence
  Description of Artificial Sequence: Synthetic oligonucleotide
  Antisense strand to SEQ ID NO: 726752
uucucugggauuguuuccu

SEQ ID NO: 726754 - RNA, 19 nt, Artificial Sequence
  Description of Artificial Sequence: Synthetic oligonucleotide
  Sense strand starting at position 552 of SEQ ID NO: 586555
gcagaauuauucuugggac

SEQ ID NO: 726755 - RNA, 19 nt, Artificial Sequence
  Description of Artificial Sequence: Synthetic oligonucleotide
  Antisense strand to SEQ ID NO: 726754
gucccaagaauaauucugc

SEQ ID NO: 726756 - RNA, 19 nt, Artificial Sequence
  Description of Artificial Sequence: Synthetic oligonucleotide
  Sense strand starting at position 558 of SEQ ID NO: 586555
uuauucuugggacagugua

SEQ ID NO: 726757 - RNA, 19 nt, Artificial Sequence
  Description of Artificial Sequence: Synthetic oligonucleotide
  Antisense strand to SEQ ID NO: 726756
uacacugucccaagaauaa

SEQ ID NO: 726758 - RNA, 19 nt, Artificial Sequence
  Description of Artificial Sequence: Synthetic oligonucleotide
  Sense strand starting at position 620 of SEQ ID NO: 586555
gccuguguucugcuauaca

SEQ ID NO: 726759 - RNA, 19 nt, Artificial Sequence
  Description of Artificial Sequence: Synthetic oligonucleotide
  Antisense strand to SEQ ID NO: 726758
uguauagcagaacacaggc

SEQ ID NO: 726760 - RNA, 19 nt, Artificial Sequence
  Description of Artificial Sequence: Synthetic oligonucleotide
  Sense strand starting at position 623 of SEQ ID NO: 586555
uguguucugcuauacaaga

SEQ ID NO: 726761 - RNA, 19 nt, Artificial Sequence
  Description of Artificial Sequence: Synthetic oligonucleotide
  Antisense strand to SEQ ID NO: 726760
ucuuguauagcagaacaca

SEQ ID NO: 726762 - RNA, 19 nt, Artificial Sequence
  Description of Artificial Sequence: Synthetic oligonucleotide
  Sense strand starting at position 633 of SEQ ID NO: 586555
uauacaagacuguguuuag

SEQ ID NO: 726763 - RNA, 19 nt, Artificial Sequence
  Description of Artificial Sequence: Synthetic oligonucleotide
  Antisense strand to SEQ ID NO: 726762
cuaaacacagucuuguaua

SEQ ID NO: 726764 - RNA, 19 nt, Artificial Sequence
  Description of Artificial Sequence: Synthetic oligonucleotide
  Sense strand starting at position 636 of SEQ ID NO: 586555
acaagacuguguuuaggga

SEQ ID NO: 726765 - RNA, 19 nt, Artificial Sequence
  Description of Artificial Sequence: Synthetic oligonucleotide
  Antisense strand to SEQ ID NO: 726764
ucccuaaacacagucuugu

SEQ ID NO: 726766 - RNA, 19 nt, Artificial Sequence
  Description of Artificial Sequence: Synthetic oligonucleotide
  Sense strand starting at position 637 of SEQ ID NO: 586555
caagacuguguuuagggau

SEQ ID NO: 726767 - RNA, 19 nt, Artificial Sequence
  Description of Artificial Sequence: Synthetic oligonucleotide
  Antisense strand to SEQ ID NO: 726766
aucccuaaacacagucuug

SEQ ID NO: 726768 - RNA, 19 nt, Artificial Sequence
  Description of Artificial Sequence: Synthetic oligonucleotide
  Sense strand starting at position 643 of SEQ ID NO: 586555
uguguuuagggaugcagag

SEQ ID NO: 726769 - RNA, 19 nt, Artificial Sequence
  Description of Artificial Sequence: Synthetic oligonucleotide
  Antisense strand to SEQ ID NO: 726768
cucugcaucccuaaacaca

SEQ ID NO: 726770 - RNA, 19 nt, Artificial Sequence
  Description of Artificial Sequence: Synthetic oligonucleotide
  Sense strand starting at position 739 of SEQ ID NO: 586555
uacauugauucuuuggguu

SEQ ID NO: 726771 - RNA, 19 nt, Artificial Sequence
  Description of Artificial Sequence: Synthetic oligonucleotide
  Antisense strand to SEQ ID NO: 726770
aacccaaagaaucaaugua

SEQ ID NO: 726772 - RNA, 19 nt, Artificial Sequence
  Description of Artificial Sequence: Synthetic oligonucleotide
  Sense strand starting at position 773 of SEQ ID NO: 586555
ucuaaagagucauugaucu

SEQ ID NO: 726773 - RNA, 19 nt, Artificial Sequence
  Description of Artificial Sequence: Synthetic oligonucleotide
  Antisense strand to SEQ ID NO: 726772
agaucaaugacucuuuaga

SEQ ID NO: 726774 - RNA, 19 nt, Artificial Sequence
  Description of Artificial Sequence: Synthetic oligonucleotide
  Sense strand starting at position 777 of SEQ ID NO: 586555
aagagucauugaucuguuu

SEQ ID NO: 726775 - RNA, 19 nt, Artificial Sequence
  Description of Artificial Sequence: Synthetic oligonucleotide
  Antisense strand to SEQ ID NO: 726774
aaacagaucaaugacucuu

SEQ ID NO: 726776 - RNA, 19 nt, Artificial Sequence
  Description of Artificial Sequence: Synthetic oligonucleotide
  Sense strand starting at position 788 of SEQ ID NO: 586555
aucuguuucuaugugggaa

SEQ ID NO: 726777 - RNA, 19 nt, Artificial Sequence
  Description of Artificial Sequence: Synthetic oligonucleotide
  Antisense strand to SEQ ID NO: 726776
uucccacauagaaacagau

SEQ ID NO: 726778 - RNA, 19 nt, Artificial Sequence
  Description of Artificial Sequence: Synthetic oligonucleotide
  Sense strand starting at position 1035 of SEQ ID NO: 586555
gguauuaaguacucuacua

SEQ ID NO: 726779 - RNA, 19 nt, Artificial Sequence
  Description of Artificial Sequence: Synthetic oligonucleotide
  Antisense strand to SEQ ID NO: 726778
uaguagaguacuuaauacc

SEQ ID NO: 726780 - RNA, 19 nt, Artificial Sequence
  Description of Artificial Sequence: Synthetic oligonucleotide
  Sense strand starting at position 1249 of SEQ ID NO: 586555
uccggagucaugcacaacu

SEQ ID NO: 726781 - RNA, 19 nt, Artificial Sequence
  Description of Artificial Sequence: Synthetic oligonucleotide
  Antisense strand to SEQ ID NO: 726780
aguugugcaugacuccgga

SEQ ID NO: 726782 - RNA, 19 nt, Artificial Sequence
  Description of Artificial Sequence: Synthetic oligonucleotide
  Sense strand starting at position 1275 of SEQ ID NO: 586555
gugacuaaagcagaugagu

SEQ ID NO: 726783 - RNA, 19 nt, Artificial Sequence
  Description of Artificial Sequence: Synthetic oligonucleotide
  Antisense strand to SEQ ID NO: 726782
acucaucugcuuuagucac

SEQ ID NO: 726784 - RNA, 19 nt, Artificial Sequence
  Description of Artificial Sequence: Synthetic oligonucleotide
  Sense strand starting at position 1277 of SEQ ID NO: 586555
gacuaaagcagaugagugu

SEQ ID NO: 726785 - RNA, 19 nt, Artificial Sequence
  Description of Artificial Sequence: Synthetic oligonucleotide
  Antisense strand to SEQ ID NO: 726784
acacucaucugcuuuaguc

SEQ ID NO: 726786 - RNA, 19 nt, Artificial Sequence
  Description of Artificial Sequence: Synthetic oligonucleotide
  Sense strand starting at position 1742 of SEQ ID NO: 586555
uggacuuauaagugcaagu

SEQ ID NO: 726787 - RNA, 19 nt, Artificial Sequence
  Description of Artificial Sequence: Synthetic oligonucleotide
  Antisense strand to SEQ ID NO: 726786
acuugcacuuauaagucca

SEQ ID NO: 726788 - RNA, 19 nt, Artificial Sequence
  Description of Artificial Sequence: Synthetic oligonucleotide
  Sense strand starting at position 1744 of SEQ ID NO: 586555
gacuuauaagugcaaguga

SEQ ID NO: 726789 - RNA, 19 nt, Artificial Sequence
  Description of Artificial Sequence: Synthetic oligonucleotide
  Antisense strand to SEQ ID NO: 726788
ucacuugcacuuauaaguc

SEQ ID NO: 726790 - RNA, 19 nt, Artificial Sequence
  Description of Artificial Sequence: Synthetic oligonucleotide
  Sense strand starting at position 1983 of SEQ ID NO: 586555
ccacauuauuugcaagaag

SEQ ID NO: 726791 - RNA, 19 nt, Artificial Sequence
  Description of Artificial Sequence: Synthetic oligonucleotide
  Antisense strand to SEQ ID NO: 726790
cuucuugcaaauaaugugg

SEQ ID NO: 726792 - RNA, 19 nt, Artificial Sequence
  Description of Artificial Sequence: Synthetic oligonucleotide
  Sense strand starting at position 2069 of SEQ ID NO: 586555
guauuuauuguuugaggug

SEQ ID NO: 726793 - RNA, 19 nt, Artificial Sequence
  Description of Artificial Sequence: Synthetic oligonucleotide
  Antisense strand to SEQ ID NO: 726792
caccucaaacaauaaauac

SEQ ID NO: 726794 - RNA, 19 nt, Artificial Sequence
  Description of Artificial Sequence: Synthetic oligonucleotide
  Sense strand starting at position 2075 of SEQ ID NO: 586555
auuguuugaggugauuaau

SEQ ID NO: 726795 - RNA, 19 nt, Artificial Sequence
  Description of Artificial Sequence: Synthetic oligonucleotide
  Antisense strand to SEQ ID NO: 726794
auuaaucaccucaaacaau

SEQ ID NO: 726796 - RNA, 19 nt, Artificial Sequence
  Description of Artificial Sequence: Synthetic oligonucleotide
  Sense strand starting at position 2078 of SEQ ID NO: 586555
guuugaggugauuaaugau

SEQ ID NO: 726797 - RNA, 19 nt, Artificial Sequence
  Description of Artificial Sequence: Synthetic oligonucleotide
  Antisense strand to SEQ ID NO: 726796
aucauuaaucaccucaaac

SEQ ID NO: 726798 - RNA, 19 nt, Artificial Sequence
  Description of Artificial Sequence: Synthetic oligonucleotide
  Sense strand starting at position 2185 of SEQ ID NO: 586555
uugcauugccuccagaaau

SEQ ID NO: 726799 - RNA, 19 nt, Artificial Sequence
  Description of Artificial Sequence: Synthetic oligonucleotide
  Antisense strand to SEQ ID NO: 726798
auuucuggaggcaaugcaa

SEQ ID NO: 726800 - RNA, 19 nt, Artificial Sequence
  Description of Artificial Sequence: Synthetic oligonucleotide
  Sense strand starting at position 2267 of SEQ ID NO: 586555
guaaguguguauuugauug

SEQ ID NO: 726801 - RNA, 19 nt, Artificial Sequence
  Description of Artificial Sequence: Synthetic oligonucleotide
  Antisense strand to SEQ ID NO: 726800
caaucaaauacacacuuac

SEQ ID NO: 726802 - RNA, 19 nt, Artificial Sequence
  Description of Artificial Sequence: Synthetic oligonucleotide
  Sense strand starting at position 2275 of SEQ ID NO: 586555
guauuugauugcucccgaa

SEQ ID NO: 726803 - RNA, 19 nt, Artificial Sequence
  Description of Artificial Sequence: Synthetic oligonucleotide
  Antisense strand to SEQ ID NO: 726802
uucgggagcaaucaaauac

SEQ ID NO: 726804 - RNA, 19 nt, Artificial Sequence
  Description of Artificial Sequence: Synthetic oligonucleotide
  Sense strand starting at position 2446 of SEQ ID NO: 586555
augagagaaauguguuuaa

SEQ ID NO: 726805 - RNA, 19 nt, Artificial Sequence
  Description of Artificial Sequence: Synthetic oligonucleotide
  Antisense strand to SEQ ID NO: 726804
uuaaacacauuucucucau

SEQ ID NO: 726806 - RNA, 19 nt, Artificial Sequence
  Description of Artificial Sequence: Synthetic oligonucleotide
  Sense strand starting at position 2602 of SEQ ID NO: 586555
ggucuuauuguagggaacu

SEQ ID NO: 726807 - RNA, 19 nt, Artificial Sequence
  Description of Artificial Sequence: Synthetic oligonucleotide
  Antisense strand to SEQ ID NO: 726806
aguucccuacaauaagacc

SEQ ID NO: 726808 - RNA, 19 nt, Artificial Sequence
  Description of Artificial Sequence: Synthetic oligonucleotide
  Sense strand starting at position 2612 of SEQ ID NO: 586555
uagggaacucccugcagua

SEQ ID NO: 726809 - RNA, 19 nt, Artificial Sequence
  Description of Artificial Sequence: Synthetic oligonucleotide
  Antisense strand to SEQ ID NO: 726808
uacugcagggaguucccua

SEQ ID NO: 726810 - RNA, 19 nt, Artificial Sequence
  Description of Artificial Sequence: Synthetic oligonucleotide
  Sense strand starting at position 2624 of SEQ ID NO: 586555
ugcaguaagcaucaaaucu

SEQ ID NO: 726811 - RNA, 19 nt, Artificial Sequence
  Description of Artificial Sequence: Synthetic oligonucleotide
  Antisense strand to SEQ ID NO: 726810
agauuugaugcuuacugca

SEQ ID NO: 726812 - RNA, 19 nt, Artificial Sequence
  Description of Artificial Sequence: Synthetic oligonucleotide
  Sense strand starting at position 2664 of SEQ ID NO: 586555
gguuauagagaucgagaag

SEQ ID NO: 726813 - RNA, 19 nt, Artificial Sequence
  Description of Artificial Sequence: Synthetic oligonucleotide
  Antisense strand to SEQ ID NO: 726812
cuucucgaucucuauaacc

SEQ ID NO: 726814 - RNA, 19 nt, Artificial Sequence
  Description of Artificial Sequence: Synthetic oligonucleotide
  Sense strand starting at position 2665 of SEQ ID NO: 586555
guuauagagaucgagaagu

SEQ ID NO: 726815 - RNA, 19 nt, Artificial Sequence
  Description of Artificial Sequence: Synthetic oligonucleotide
  Antisense strand to SEQ ID NO: 726814
acuucucgaucucuauaac

SEQ ID NO: 726816 - RNA, 19 nt, Artificial Sequence
  Description of Artificial Sequence: Synthetic oligonucleotide
  Sense strand starting at position 2853 of SEQ ID NO: 586555
gacauuggagaguguacuu

SEQ ID NO: 726817 - RNA, 19 nt, Artificial Sequence
  Description of Artificial Sequence: Synthetic oligonucleotide
  Antisense strand to SEQ ID NO: 726816
aaguacacucuccaauguc

SEQ ID NO: 726818 - RNA, 19 nt, Artificial Sequence
  Description of Artificial Sequence: Synthetic oligonucleotide
  Sense strand starting at position 2858 of SEQ ID NO: 586555
uggagaguguacuuguaaa

SEQ ID NO: 726819 - RNA, 19 nt, Artificial Sequence
  Description of Artificial Sequence: Synthetic oligonucleotide
  Antisense strand to SEQ ID NO: 726818
uuuacaaguacacucucca

SEQ ID NO: 726820 - RNA, 19 nt, Artificial Sequence
  Description of Artificial Sequence: Synthetic oligonucleotide
  Sense strand starting at position 2942 of SEQ ID NO: 586555
ccagucuguaguuagugaa

SEQ ID NO: 726821 - RNA, 19 nt, Artificial Sequence
  Description of Artificial Sequence: Synthetic oligonucleotide
  Antisense strand to SEQ ID NO: 726820
uucacuaacuacagacugg

SEQ ID NO: 726822 - RNA, 19 nt, Artificial Sequence
  Description of Artificial Sequence: Synthetic oligonucleotide
  Sense strand starting at position 3037 of SEQ ID NO: 586555
caggcagauuaagugugaa

SEQ ID NO: 726823 - RNA, 19 nt, Artificial Sequence
  Description of Artificial Sequence: Synthetic oligonucleotide
  Antisense strand to SEQ ID NO: 726822
uucacacuuaaucugccug

SEQ ID NO: 726824 - RNA, 19 nt, Artificial Sequence
  Description of Artificial Sequence: Synthetic oligonucleotide
  Sense strand starting at position 276 of SEQ ID NO: 586556
acagacucuuaaccggaua

SEQ ID NO: 726825 - RNA, 19 nt, Artificial Sequence
  Description of Artificial Sequence: Synthetic oligonucleotide
  Antisense strand to SEQ ID NO: 726824
uauccgguuaagagucugu

SEQ ID NO: 726826 - RNA, 19 nt, Artificial Sequence
  Description of Artificial Sequence: Synthetic oligonucleotide
  Sense strand starting at position 425 of SEQ ID NO: 586556
ugguuaagaucucuagaag

SEQ ID NO: 726827 - RNA, 19 nt, Artificial Sequence
  Description of Artificial Sequence: Synthetic oligonucleotide
  Antisense strand to SEQ ID NO: 726826
cuucuagagaucuuaacca

SEQ ID NO: 726828 - RNA, 19 nt, Artificial Sequence
  Description of Artificial Sequence: Synthetic oligonucleotide
  Sense strand starting at position 654 of SEQ ID NO: 586556
gcgugugggcgaucucgau

SEQ ID NO: 726829 - RNA, 19 nt, Artificial Sequence
  Description of Artificial Sequence: Synthetic oligonucleotide
  Antisense strand to SEQ ID NO: 726828
aucgagaucgcccacacgc

SEQ ID NO: 726830 - RNA, 19 nt, Artificial Sequence
  Description of Artificial Sequence: Synthetic oligonucleotide
  Sense strand starting at position 684 of SEQ ID NO: 586556
gggucagguaucgauugaa

SEQ ID NO: 726831 - RNA, 19 nt, Artificial Sequence
  Description of Artificial Sequence: Synthetic oligonucleotide
  Antisense strand to SEQ ID NO: 726830
uucaaucgauaccugaccc

SEQ ID NO: 726832 - RNA, 19 nt, Artificial Sequence
  Description of Artificial Sequence: Synthetic oligonucleotide
  Sense strand starting at position 883 of SEQ ID NO: 586556
gcaauuggacaucaucauu

SEQ ID NO: 726833 - RNA, 19 nt, Artificial Sequence
  Description of Artificial Sequence: Synthetic oligonucleotide
  Antisense strand to SEQ ID NO: 726832
aaugaugauguccaauugc

SEQ ID NO: 726834 - RNA, 19 nt, Artificial Sequence
  Description of Artificial Sequence: Synthetic oligonucleotide
  Sense strand starting at position 964 of SEQ ID NO: 586556
ggcuauugacaacgggaaa

SEQ ID NO: 726835 - RNA, 19 nt, Artificial Sequence
  Description of Artificial Sequence: Synthetic oligonucleotide
  Antisense strand to SEQ ID NO: 726834
uuucccguugucaauagcc

SEQ ID NO: 726836 - RNA, 19 nt, Artificial Sequence
  Description of Artificial Sequence: Synthetic oligonucleotide
  Sense strand starting at position 1101 of SEQ ID NO: 586556
aacaguuuggcgucucgua

SEQ ID NO: 726837 - RNA, 19 nt, Artificial Sequence
  Description of Artificial Sequence: Synthetic oligonucleotide
  Antisense strand to SEQ ID NO: 726836
uacgagacgccaaacuguu

SEQ ID NO: 726838 - RNA, 19 nt, Artificial Sequence
  Description of Artificial Sequence: Synthetic oligonucleotide
  Sense strand starting at position 1102 of SEQ ID NO: 586556
acaguuuggcgucucguaa

SEQ ID NO: 726839 - RNA, 19 nt, Artificial Sequence
  Description of Artificial Sequence: Synthetic oligonucleotide
  Antisense strand to SEQ ID NO: 726838
uuacgagacgccaaacugu

SEQ ID NO: 726840 - RNA, 19 nt, Artificial Sequence
  Description of Artificial Sequence: Synthetic oligonucleotide
  Sense strand starting at position 1103 of SEQ ID NO: 586556
caguuuggcgucucguaaa

SEQ ID NO: 726841 - RNA, 19 nt, Artificial Sequence
  Description of Artificial Sequence: Synthetic oligonucleotide
  Antisense strand to SEQ ID NO: 726840
uuuacgagacgccaaacug

SEQ ID NO: 726842 - RNA, 19 nt, Artificial Sequence
  Description of Artificial Sequence: Synthetic oligonucleotide
  Sense strand starting at position 1116 of SEQ ID NO: 586556
cguaaaucuccugauaaag

SEQ ID NO: 726843 - RNA, 19 nt, Artificial Sequence
  Description of Artificial Sequence: Synthetic oligonucleotide
  Antisense strand to SEQ ID NO: 726842
cuuuaucaggagauuuacg

SEQ ID NO: 726844 - RNA, 19 nt, Artificial Sequence
  Description of Artificial Sequence: Synthetic oligonucleotide
  Sense strand starting at position 1899 of SEQ ID NO: 586556
gagggaacuugggcucgau

SEQ ID NO: 726845 - RNA, 19 nt, Artificial Sequence
  Description of Artificial Sequence: Synthetic oligonucleotide
  Antisense strand to SEQ ID NO: 726844
aucgagcccaaguucccuc

SEQ ID NO: 726846 - RNA, 19 nt, Artificial Sequence
  Description of Artificial Sequence: Synthetic oligonucleotide
  Sense strand starting at position 1918 of SEQ ID NO: 586556
guaguuggaguuuaucaaa

SEQ ID NO: 726847 - RNA, 19 nt, Artificial Sequence
  Description of Artificial Sequence: Synthetic oligonucleotide
  Antisense strand to SEQ ID NO: 726846
uuugauaaacuccaacuac

SEQ ID NO: 726848 - RNA, 19 nt, Artificial Sequence
  Description of Artificial Sequence: Synthetic oligonucleotide
  Sense strand starting at position 1939 of SEQ ID NO: 586556
cgagcucauggucauuaau

SEQ ID NO: 726849 - RNA, 19 nt, Artificial Sequence
  Description of Artificial Sequence: Synthetic oligonucleotide
  Antisense strand to SEQ ID NO: 726848
auuaaugaccaugagcucg

SEQ ID NO: 726850 - RNA, 19 nt, Artificial Sequence
  Description of Artificial Sequence: Synthetic oligonucleotide
  Sense strand starting at position 2617 of SEQ ID NO: 586556
cuuugagaagcuuggcaga

SEQ ID NO: 726851 - RNA, 19 nt, Artificial Sequence
  Description of Artificial Sequence: Synthetic oligonucleotide
  Antisense strand to SEQ ID NO: 726850
ucugccaagcuucucaaag

SEQ ID NO: 726852 - RNA, 19 nt, Artificial Sequence
  Description of Artificial Sequence: Synthetic oligonucleotide
  Sense strand starting at position 2773 of SEQ ID NO: 586556
auuggaaccuucguaauag

SEQ ID NO: 726853 - RNA, 19 nt, Artificial Sequence
  Description of Artificial Sequence: Synthetic oligonucleotide
  Antisense strand to SEQ ID NO: 726852
cuauuacgaagguuccaau

SEQ ID NO: 726854 - RNA, 19 nt, Artificial Sequence
  Description of Artificial Sequence: Synthetic oligonucleotide
  Sense strand starting at position 2809 of SEQ ID NO: 586556
guugucgaugugagagcua

SEQ ID NO: 726855 - RNA, 19 nt, Artificial Sequence
  Description of Artificial Sequence: Synthetic oligonucleotide
  Antisense strand to SEQ ID NO: 726854
uagcucucacaucgacaac

SEQ ID NO: 726856 - RNA, 19 nt, Artificial Sequence
  Description of Artificial Sequence: Synthetic oligonucleotide
  Sense strand starting at position 2814 of SEQ ID NO: 586556
cgaugugagagcuaaauau

SEQ ID NO: 726857 - RNA, 19 nt, Artificial Sequence
  Description of Artificial Sequence: Synthetic oligonucleotide
  Antisense strand to SEQ ID NO: 726856
auauuuagcucucacaucg

SEQ ID NO: 726858 - RNA, 19 nt, Artificial Sequence
  Description of Artificial Sequence: Synthetic oligonucleotide
  Sense strand starting at position 2837 of SEQ ID NO: 586556
gcauuuacuaggugcgauu

SEQ ID NO: 726859 - RNA, 19 nt, Artificial Sequence
  Description of Artificial Sequence: Synthetic oligonucleotide
  Antisense strand to SEQ ID NO: 726858
aaucgcaccuaguaaaugc

SEQ ID NO: 726860 - RNA, 19 nt, Artificial Sequence
  Description of Artificial Sequence: Synthetic oligonucleotide
  Sense strand starting at position 3066 of SEQ ID NO: 586556
aguaucugaggcuagaguu

SEQ ID NO: 726861 - RNA, 19 nt, Artificial Sequence
  Description of Artificial Sequence: Synthetic oligonucleotide
  Antisense strand to SEQ ID NO: 726860
aacucuagccucagauacu

SEQ ID NO: 726862 - RNA, 19 nt, Artificial Sequence
  Description of Artificial Sequence: Synthetic oligonucleotide
  Sense strand starting at position 3128 of SEQ ID NO: 586556
gcguauuaacgauaucaga

SEQ ID NO: 726863 - RNA, 19 nt, Artificial Sequence
  Description of Artificial Sequence: Synthetic oligonucleotide
  Antisense strand to SEQ ID NO: 726862
ucugauaucguuaauacgc

SEQ ID NO: 726864 - RNA, 19 nt, Artificial Sequence
  Description of Artificial Sequence: Synthetic oligonucleotide
  Sense strand starting at position 3174 of SEQ ID NO: 586556
guugccugcuauuugguaa

SEQ ID NO: 726865 - RNA, 19 nt, Artificial Sequence
  Description of Artificial Sequence: Synthetic oligonucleotide
  Antisense strand to SEQ ID NO: 726864
uuaccaaauagcaggcaac

SEQ ID NO: 726866 - RNA, 19 nt, Artificial Sequence
  Description of Artificial Sequence: Synthetic oligonucleotide
  Sense strand starting at position 3254 of SEQ ID NO: 586556
accuaauguugaucuuuga

SEQ ID NO: 726867 - RNA, 19 nt, Artificial Sequence
  Description of Artificial Sequence: Synthetic oligonucleotide
  Antisense strand to SEQ ID NO: 726866
ucaaagaucaacauuaggu

SEQ ID NO: 726868 - RNA, 19 nt, Artificial Sequence
  Description of Artificial Sequence: Synthetic oligonucleotide
  Sense strand starting at position 3257 of SEQ ID NO: 586556
uaauguugaucuuugaagu

SEQ ID NO: 726869 - RNA, 19 nt, Artificial Sequence
  Description of Artificial Sequence: Synthetic oligonucleotide
  Antisense strand to SEQ ID NO: 726868
acuucaaagaucaacauua

SEQ ID NO: 726870 - RNA, 19 nt, Artificial Sequence
  Description of Artificial Sequence: Synthetic oligonucleotide
  Sense strand starting at position 3258 of SEQ ID NO: 586556
aauguugaucuuugaagua

SEQ ID NO: 726871 - RNA, 19 nt, Artificial Sequence
  Description of Artificial Sequence: Synthetic oligonucleotide
  Antisense strand to SEQ ID NO: 726870
uacuucaaagaucaacauu

SEQ ID NO: 726872 - RNA, 19 nt, Artificial Sequence
  Description of Artificial Sequence: Synthetic oligonucleotide
  Sense strand starting at position 3320 of SEQ ID NO: 586556
uucugaguaguagacauau

SEQ ID NO: 726873 - RNA, 19 nt, Artificial Sequence
  Description of Artificial Sequence: Synthetic oligonucleotide
  Antisense strand to SEQ ID NO: 726872
auaugucuacuacucagaa

SEQ ID NO: 726874 - RNA, 19 nt, Artificial Sequence
  Description of Artificial Sequence: Synthetic oligonucleotide
  Sense strand starting at position 3364 of SEQ ID NO: 586556
auuaaagcaguguaaacua

SEQ ID NO: 726875 - RNA, 19 nt, Artificial Sequence
  Description of Artificial Sequence: Synthetic oligonucleotide
  Antisense strand to SEQ ID NO: 726874
uaguuuacacugcuuuaau

SEQ ID NO: 726876 - RNA, 19 nt, Artificial Sequence
  Description of Artificial Sequence: Synthetic oligonucleotide
  Sense strand starting at position 3525 of SEQ ID NO: 586556
uuuccuaagccuggagaca

SEQ ID NO: 726877 - RNA, 19 nt, Artificial Sequence
  Description of Artificial Sequence: Synthetic oligonucleotide
  Antisense strand to SEQ ID NO: 726876
ugucuccaggcuuaggaaa

SEQ ID NO: 726878 - RNA, 19 nt, Artificial Sequence
  Description of Artificial Sequence: Synthetic oligonucleotide
  Sense strand starting at position 3574 of SEQ ID NO: 586556
ucauacugguuacucauau

SEQ ID NO: 726879 - RNA, 19 nt, Artificial Sequence
  Description of Artificial Sequence: Synthetic oligonucleotide
  Antisense strand to SEQ ID NO: 726878
auaugaguaaccaguauga

SEQ ID NO: 726880 - RNA, 19 nt, Artificial Sequence
  Description of Artificial Sequence: Synthetic oligonucleotide
  Sense strand starting at position 3583 of SEQ ID NO: 586556
uuacucauaugaguuacua

SEQ ID NO: 726881 - RNA, 19 nt, Artificial Sequence
  Description of Artificial Sequence: Synthetic oligonucleotide
  Antisense strand to SEQ ID NO: 726880
uaguaacucauaugaguaa

SEQ ID NO: 726882 - RNA, 19 nt, Artificial Sequence
  Description of Artificial Sequence: Synthetic oligonucleotide
  Sense strand starting at position 3587 of SEQ ID NO: 586556
ucauaugaguuacuaaaug

SEQ ID NO: 726883 - RNA, 19 nt, Artificial Sequence
  Description of Artificial Sequence: Synthetic oligonucleotide
  Antisense strand to SEQ ID NO: 726882
cauuuaguaacucauauga

SEQ ID NO: 726884 - RNA, 19 nt, Artificial Sequence
  Description of Artificial Sequence: Synthetic oligonucleotide
  Sense strand starting at position 3596 of SEQ ID NO: 586556
uuacuaaaugcuggaauau

SEQ ID NO: 726885 - RNA, 19 nt, Artificial Sequence
  Description of Artificial Sequence: Synthetic oligonucleotide
  Antisense strand to SEQ ID NO: 726884
auauuccagcauuuaguaa

SEQ ID NO: 726886 - RNA, 19 nt, Artificial Sequence
  Description of Artificial Sequence: Synthetic oligonucleotide
  Sense strand starting at position 3620 of SEQ ID NO: 586556
uuugauggauagucacuua

SEQ ID NO: 726887 - RNA, 19 nt, Artificial Sequence
  Description of Artificial Sequence: Synthetic oligonucleotide
  Antisense strand to SEQ ID NO: 726886
uaagugacuauccaucaaa

SEQ ID NO: 726888 - RNA, 19 nt, Artificial Sequence
  Description of Artificial Sequence: Synthetic oligonucleotide
  Sense strand starting at position 3623 of SEQ ID NO: 586556
gauggauagucacuuaaug

SEQ ID NO: 726889 - RNA, 19 nt, Artificial Sequence
  Description of Artificial Sequence: Synthetic oligonucleotide
  Antisense strand to SEQ ID NO: 726888
cauuaagugacuauccauc

SEQ ID NO: 726890 - RNA, 19 nt, Artificial Sequence
  Description of Artificial Sequence: Synthetic oligonucleotide
  Sense strand starting at position 3710 of SEQ ID NO: 586556
ggaucauauuagcuuucua

SEQ ID NO: 726891 - RNA, 19 nt, Artificial Sequence
  Description of Artificial Sequence: Synthetic oligonucleotide
  Antisense strand to SEQ ID NO: 726890
uagaaagcuaauaugaucc

SEQ ID NO: 726892 - RNA, 19 nt, Artificial Sequence
  Description of Artificial Sequence: Synthetic oligonucleotide
  Sense strand starting at position 3718 of SEQ ID NO: 586556
uuagcuuucuaacuggaau

SEQ ID NO: 726893 - RNA, 19 nt, Artificial Sequence
  Description of Artificial Sequence: Synthetic oligonucleotide
  Antisense strand to SEQ ID NO: 726892
auuccaguuagaaagcuaa

SEQ ID NO: 726894 - RNA, 19 nt, Artificial Sequence
  Description of Artificial Sequence: Synthetic oligonucleotide
  Sense strand starting at position 3764 of SEQ ID NO: 586556
ccacguuagguguauauga

SEQ ID NO: 726895 - RNA, 19 nt, Artificial Sequence
  Description of Artificial Sequence: Synthetic oligonucleotide
  Antisense strand to SEQ ID NO: 726894
ucauauacaccuaacgugg

SEQ ID NO: 726896 - RNA, 19 nt, Artificial Sequence
  Description of Artificial Sequence: Synthetic oligonucleotide
  Sense strand starting at position 3774 of SEQ ID NO: 586556
uguauaugagugugaagag

SEQ ID NO: 726897 - RNA, 19 nt, Artificial Sequence
  Description of Artificial Sequence: Synthetic oligonucleotide
  Antisense strand to SEQ ID NO: 726896
cucuucacacucauauaca

SEQ ID NO: 726898 - RNA, 19 nt, Artificial Sequence
  Description of Artificial Sequence: Synthetic oligonucleotide
  Sense strand starting at position 3854 of SEQ ID NO: 586556
agaaaucaacacugagugu

SEQ ID NO: 726899 - RNA, 19 nt, Artificial Sequence
  Description of Artificial Sequence: Synthetic oligonucleotide
  Antisense strand to SEQ ID NO: 726898
acacucaguguugauuucu

SEQ ID NO: 726900 - RNA, 19 nt, Artificial Sequence
  Description of Artificial Sequence: Synthetic oligonucleotide
  Sense strand starting at position 3863 of SEQ ID NO: 586556
cacugaguguaaucuuuag

SEQ ID NO: 726901 - RNA, 19 nt, Artificial Sequence
  Description of Artificial Sequence: Synthetic oligonucleotide
  Antisense strand to SEQ ID NO: 726900
cuaaagauuacacucagug

SEQ ID NO: 726902 - RNA, 19 nt, Artificial Sequence
  Description of Artificial Sequence: Synthetic oligonucleotide
  Sense strand starting at position 3867 of SEQ ID NO: 586556
gaguguaaucuuuagccau

SEQ ID NO: 726903 - RNA, 19 nt, Artificial Sequence
  Description of Artificial Sequence: Synthetic oligonucleotide
  Antisense strand to SEQ ID NO: 726902
auggcuaaagauuacacuc

SEQ ID NO: 726904 - RNA, 19 nt, Artificial Sequence
  Description of Artificial Sequence: Synthetic oligonucleotide
  Sense strand starting at position 1 of SEQ ID NO: 586557
aggcgcuauaauggcaaua

SEQ ID NO: 726905 - RNA, 19 nt, Artificial Sequence
  Description of Artificial Sequence: Synthetic oligonucleotide
  Antisense strand to SEQ ID NO: 726904
uauugccauuauagcgccu

SEQ ID NO: 726906 - RNA, 19 nt, Artificial Sequence
  Description of Artificial Sequence: Synthetic oligonucleotide
  Sense strand starting at position 132 of SEQ ID NO: 586557
gcuaauacugcucaguacu

SEQ ID NO: 726907 - RNA, 19 nt, Artificial Sequence
  Description of Artificial Sequence: Synthetic oligonucleotide
  Antisense strand to SEQ ID NO: 726906
aguacugagcaguauuagc

SEQ ID NO: 726908 - RNA, 19 nt, Artificial Sequence
  Description of Artificial Sequence: Synthetic oligonucleotide
  Sense strand starting at position 148 of SEQ ID NO: 586557
acuuuaaacgcucagauac

SEQ ID NO: 726909 - RNA, 19 nt, Artificial Sequence
  Description of Artificial Sequence: Synthetic oligonucleotide
  Antisense strand to SEQ ID NO: 726908
guaucugagcguuuaaagu

SEQ ID NO: 726910 - RNA, 19 nt, Artificial Sequence
  Description of Artificial Sequence: Synthetic oligonucleotide
  Sense strand starting at position 282 of SEQ ID NO: 586557
caaagagcaugugcuauuu

SEQ ID NO: 726911 - RNA, 19 nt, Artificial Sequence
  Description of Artificial Sequence: Synthetic oligonucleotide
  Antisense strand to SEQ ID NO: 726910
aaauagcacaugcucuuug

SEQ ID NO: 726912 - RNA, 19 nt, Artificial Sequence
  Description of Artificial Sequence: Synthetic oligonucleotide
  Sense strand starting at position 409 of SEQ ID NO: 586557
cuauguugucugcaauaga

SEQ ID NO: 726913 - RNA, 19 nt, Artificial Sequence
  Description of Artificial Sequence: Synthetic oligonucleotide
  Antisense strand to SEQ ID NO: 726912
ucuauugcagacaacauag

SEQ ID NO: 726914 - RNA, 19 nt, Artificial Sequence
  Description of Artificial Sequence: Synthetic oligonucleotide
  Sense strand starting at position 597 of SEQ ID NO: 586557
uuuggacccugggaacaau

SEQ ID NO: 726915 - RNA, 19 nt, Artificial Sequence
  Description of Artificial Sequence: Synthetic oligonucleotide
  Antisense strand to SEQ ID NO: 726914
auuguucccaggguccaaa

SEQ ID NO: 726916 - RNA, 19 nt, Artificial Sequence
  Description of Artificial Sequence: Synthetic oligonucleotide
  Sense strand starting at position 991 of SEQ ID NO: 586557
cguagcccuccucauaaau

SEQ ID NO: 726917 - RNA, 19 nt, Artificial Sequence
  Description of Artificial Sequence: Synthetic oligonucleotide
  Antisense strand to SEQ ID NO: 726916
auuuaugaggagggcuacg

SEQ ID NO: 726918 - RNA, 19 nt, Artificial Sequence
  Description of Artificial Sequence: Synthetic oligonucleotide
  Sense strand starting at position 1003 of SEQ ID NO: 586557
cauaaauuauccgccguga

SEQ ID NO: 726919 - RNA, 19 nt, Artificial Sequence
  Description of Artificial Sequence: Synthetic oligonucleotide
  Antisense strand to SEQ ID NO: 726918
ucacggcggauaauuuaug

SEQ ID NO: 726920 - RNA, 19 nt, Artificial Sequence
  Description of Artificial Sequence: Synthetic oligonucleotide
  Sense strand starting at position 1005 of SEQ ID NO: 586557
uaaauuauccgccgugaca

SEQ ID NO: 726921 - RNA, 19 nt, Artificial Sequence
  Description of Artificial Sequence: Synthetic oligonucleotide
  Antisense strand to SEQ ID NO: 726920
ugucacggcggauaauuua

SEQ ID NO: 726922 - RNA, 19 nt, Artificial Sequence
  Description of Artificial Sequence: Synthetic oligonucleotide
  Sense strand starting at position 1007 of SEQ ID NO: 586557
aauuauccgccgugacaag

SEQ ID NO: 726923 - RNA, 19 nt, Artificial Sequence
  Description of Artificial Sequence: Synthetic oligonucleotide
  Antisense strand to SEQ ID NO: 726922
cuugucacggcggauaauu

SEQ ID NO: 726924 - RNA, 19 nt, Artificial Sequence
  Description of Artificial Sequence: Synthetic oligonucleotide
  Sense strand starting at position 1343 of SEQ ID NO: 586557
gcggucgcguggauuuaga

SEQ ID NO: 726925 - RNA, 19 nt, Artificial Sequence
  Description of Artificial Sequence: Synthetic oligonucleotide
  Antisense strand to SEQ ID NO: 726924
ucuaaauccacgcgaccgc

SEQ ID NO: 726926 - RNA, 19 nt, Artificial Sequence
  Description of Artificial Sequence: Synthetic oligonucleotide
  Sense strand starting at position 1368 of SEQ ID NO: 586557
cuggcuuuaccaugacuua

SEQ ID NO: 726927 - RNA, 19 nt, Artificial Sequence
  Description of Artificial Sequence: Synthetic oligonucleotide
  Antisense strand to SEQ ID NO: 726926
uaagucaugguaaagccag

SEQ ID NO: 726928 - RNA, 19 nt, Artificial Sequence
  Description of Artificial Sequence: Synthetic oligonucleotide
  Sense strand starting at position 1369 of SEQ ID NO: 586557
uggcuuuaccaugacuuau

SEQ ID NO: 726929 - RNA, 19 nt, Artificial Sequence
  Description of Artificial Sequence: Synthetic oligonucleotide
  Antisense strand to SEQ ID NO: 726928
auaagucaugguaaagcca

SEQ ID NO: 726930 - RNA, 19 nt, Artificial Sequence
  Description of Artificial Sequence: Synthetic oligonucleotide
  Sense strand starting at position 1371 of SEQ ID NO: 586557
gcuuuaccaugacuuaugu

SEQ ID NO: 726931 - RNA, 19 nt, Artificial Sequence
  Description of Artificial Sequence: Synthetic oligonucleotide
  Antisense strand to SEQ ID NO: 726930
acauaagucaugguaaagc

SEQ ID NO: 726932 - RNA, 19 nt, Artificial Sequence
  Description of Artificial Sequence: Synthetic oligonucleotide
  Sense strand starting at position 1774 of SEQ ID NO: 586557
cgcugagauccaugccauu

SEQ ID NO: 726933 - RNA, 19 nt, Artificial Sequence
  Description of Artificial Sequence: Synthetic oligonucleotide
  Antisense strand to SEQ ID NO: 726932
aauggcauggaucucagcg

SEQ ID NO: 726934 - RNA, 19 nt, Artificial Sequence
  Description of Artificial Sequence: Synthetic oligonucleotide
  Sense strand starting at position 1851 of SEQ ID NO: 586557
acggaacuaugaucuccau

SEQ ID NO: 726935 - RNA, 19 nt, Artificial Sequence
  Description of Artificial Sequence: Synthetic oligonucleotide
  Antisense strand to SEQ ID NO: 726934
auggagaucauaguuccgu

SEQ ID NO: 726936 - RNA, 19 nt, Artificial Sequence
  Description of Artificial Sequence: Synthetic oligonucleotide
  Sense strand starting at position 1946 of SEQ ID NO: 586557
uuugauaugugugcuugau

SEQ ID NO: 726937 - RNA, 19 nt, Artificial Sequence
  Description of Artificial Sequence: Synthetic oligonucleotide
  Antisense strand to SEQ ID NO: 726936
aucaagcacacauaucaaa

SEQ ID NO: 726938 - RNA, 19 nt, Artificial Sequence
  Description of Artificial Sequence: Synthetic oligonucleotide
  Sense strand starting at position 1948 of SEQ ID NO: 586557
ugauaugugugcuugauuu

SEQ ID NO: 726939 - RNA, 19 nt, Artificial Sequence
  Description of Artificial Sequence: Synthetic oligonucleotide
  Antisense strand to SEQ ID NO: 726938
aaaucaagcacacauauca

SEQ ID NO: 726940 - RNA, 19 nt, Artificial Sequence
  Description of Artificial Sequence: Synthetic oligonucleotide
  Sense strand starting at position 1950 of SEQ ID NO: 586557
auaugugugcuugauuugu

SEQ ID NO: 726941 - RNA, 19 nt, Artificial Sequence
  Description of Artificial Sequence: Synthetic oligonucleotide
  Antisense strand to SEQ ID NO: 726940
acaaaucaagcacacauau

SEQ ID NO: 726942 - RNA, 19 nt, Artificial Sequence
  Description of Artificial Sequence: Synthetic oligonucleotide
  Sense strand starting at position 1977 of SEQ ID NO: 586557
gucguuugugcgucuauag

SEQ ID NO: 726943 - RNA, 19 nt, Artificial Sequence
  Description of Artificial Sequence: Synthetic oligonucleotide
  Antisense strand to SEQ ID NO: 726942
cuauagacgcacaaacgac

SEQ ID NO: 726944 - RNA, 19 nt, Artificial Sequence
  Description of Artificial Sequence: Synthetic oligonucleotide
  Sense strand starting at position 2001 of SEQ ID NO: 586557
uugcacaauuuaugaugaa

SEQ ID NO: 726945 - RNA, 19 nt, Artificial Sequence
  Description of Artificial Sequence: Synthetic oligonucleotide
  Antisense strand to SEQ ID NO: 726944
uucaucauaaauugugcaa

SEQ ID NO: 726946 - RNA, 19 nt, Artificial Sequence
  Description of Artificial Sequence: Synthetic oligonucleotide
  Sense strand starting at position 2002 of SEQ ID NO: 586557
ugcacaauuuaugaugaau

SEQ ID NO: 726947 - RNA, 19 nt, Artificial Sequence
  Description of Artificial Sequence: Synthetic oligonucleotide
  Antisense strand to SEQ ID NO: 726946
auucaucauaaauugugca

SEQ ID NO: 726948 - RNA, 19 nt, Artificial Sequence
  Description of Artificial Sequence: Synthetic oligonucleotide
  Sense strand starting at position 2024 of SEQ ID NO: 586557
ggaaaugacugggacaugu

SEQ ID NO: 726949 - RNA, 19 nt, Artificial Sequence
  Description of Artificial Sequence: Synthetic oligonucleotide
  Antisense strand to SEQ ID NO: 726948
acaugucccagucauuucc

SEQ ID NO: 726950 - RNA, 19 nt, Artificial Sequence
  Description of Artificial Sequence: Synthetic oligonucleotide
  Sense strand starting at position 2114 of SEQ ID NO: 586557
cguaaauccugccugauga

SEQ ID NO: 726951 - RNA, 19 nt, Artificial Sequence
  Description of Artificial Sequence: Synthetic oligonucleotide
  Antisense strand to SEQ ID NO: 726950
ucaucaggcaggauuuacg

SEQ ID NO: 726952 - RNA, 19 nt, Artificial Sequence
  Description of Artificial Sequence: Synthetic oligonucleotide
  Sense strand starting at position 2115 of SEQ ID NO: 586557
guaaauccugccugaugac

SEQ ID NO: 726953 - RNA, 19 nt, Artificial Sequence
  Description of Artificial Sequence: Synthetic oligonucleotide
  Antisense strand to SEQ ID NO: 726952
gucaucaggcaggauuuac

SEQ ID NO: 726954 - RNA, 19 nt, Artificial Sequence
  Description of Artificial Sequence: Synthetic oligonucleotide
  Sense strand starting at position 2141 of SEQ ID NO: 586557
gguaaacucgugcacuaau

SEQ ID NO: 726955 - RNA, 19 nt, Artificial Sequence
  Description of Artificial Sequence: Synthetic oligonucleotide
  Antisense strand to SEQ ID NO: 726954
auuagugcacgaguuuacc

SEQ ID NO: 726956 - RNA, 19 nt, Artificial Sequence
  Description of Artificial Sequence: Synthetic oligonucleotide
  Sense strand starting at position 2678 of SEQ ID NO: 586557
gucccugccgcucuuaaau

SEQ ID NO: 726957 - RNA, 19 nt, Artificial Sequence
  Description of Artificial Sequence: Synthetic oligonucleotide
  Antisense strand to SEQ ID NO: 726956
auuuaagagcggcagggac

SEQ ID NO: 726958 - RNA, 19 nt, Artificial Sequence
  Description of Artificial Sequence: Synthetic oligonucleotide
  Sense strand starting at position 2691 of SEQ ID NO: 586557
uuaaaugacaggcgucuau

SEQ ID NO: 726959 - RNA, 19 nt, Artificial Sequence
  Description of Artificial Sequence: Synthetic oligonucleotide
  Antisense strand to SEQ ID NO: 726958
auagacgccugucauuuaa

SEQ ID NO: 726960 - RNA, 19 nt, Artificial Sequence
  Description of Artificial Sequence: Synthetic oligonucleotide
  Sense strand starting at position 2695 of SEQ ID NO: 586557
augacaggcgucuauuaaa

SEQ ID NO: 726961 - RNA, 19 nt, Artificial Sequence
  Description of Artificial Sequence: Synthetic oligonucleotide
  Antisense strand to SEQ ID NO: 726960
uuuaauagacgccugucau

SEQ ID NO: 726962 - RNA, 19 nt, Artificial Sequence
  Description of Artificial Sequence: Synthetic oligonucleotide
  Sense strand starting at position 2702 of SEQ ID NO: 586557
gcgucuauuaaagauagcu

SEQ ID NO: 726963 - RNA, 19 nt, Artificial Sequence
  Description of Artificial Sequence: Synthetic oligonucleotide
  Antisense strand to SEQ ID NO: 726962
agcuaucuuuaauagacgc

SEQ ID NO: 726964 - RNA, 19 nt, Artificial Sequence
  Description of Artificial Sequence: Synthetic oligonucleotide
  Sense strand starting at position 2765 of SEQ ID NO: 586557
uuauaaccguagucgauuu

SEQ ID NO: 726965 - RNA, 19 nt, Artificial Sequence
  Description of Artificial Sequence: Synthetic oligonucleotide
  Antisense strand to SEQ ID NO: 726964
aaaucgacuacgguuauaa

SEQ ID NO: 726966 - RNA, 19 nt, Artificial Sequence
  Description of Artificial Sequence: Synthetic oligonucleotide
  Sense strand starting at position 2807 of SEQ ID NO: 586557
cgugucauuaguuugcgau

SEQ ID NO: 726967 - RNA, 19 nt, Artificial Sequence
  Description of Artificial Sequence: Synthetic oligonucleotide
  Antisense strand to SEQ ID NO: 726966
aucgcaaacuaaugacacg

SEQ ID NO: 726968 - RNA, 19 nt, Artificial Sequence
  Description of Artificial Sequence: Synthetic oligonucleotide
  Sense strand starting at position 2809 of SEQ ID NO: 586557
ugucauuaguuugcgauuu

SEQ ID NO: 726969 - RNA, 19 nt, Artificial Sequence
  Description of Artificial Sequence: Synthetic oligonucleotide
  Antisense strand to SEQ ID NO: 726968
aaaucgcaaacuaaugaca

SEQ ID NO: 726970 - RNA, 19 nt, Artificial Sequence
  Description of Artificial Sequence: Synthetic oligonucleotide
  Sense strand starting at position 2827 of SEQ ID NO: 586557
ugauuugcuuacguaucca

SEQ ID NO: 726971 - RNA, 19 nt, Artificial Sequence
  Description of Artificial Sequence: Synthetic oligonucleotide
  Antisense strand to SEQ ID NO: 726970
uggauacguaagcaaauca

SEQ ID NO: 726972 - RNA, 19 nt, Artificial Sequence
  Description of Artificial Sequence: Synthetic oligonucleotide
  Sense strand starting at position 3000 of SEQ ID NO: 586557
ugcuuagaccuccaggagu

SEQ ID NO: 726973 - RNA, 19 nt, Artificial Sequence
  Description of Artificial Sequence: Synthetic oligonucleotide
  Antisense strand to SEQ ID NO: 726972
acuccuggaggucuaagca

SEQ ID NO: 726974 - RNA, 19 nt, Artificial Sequence
  Description of Artificial Sequence: Synthetic oligonucleotide
  Sense strand starting at position 3002 of SEQ ID NO: 586557
cuuagaccuccaggaguaa

SEQ ID NO: 726975 - RNA, 19 nt, Artificial Sequence
  Description of Artificial Sequence: Synthetic oligonucleotide
  Antisense strand to SEQ ID NO: 726974
uuacuccuggaggucuaag

SEQ ID NO: 726976 - RNA, 19 nt, Artificial Sequence
  Description of Artificial Sequence: Synthetic oligonucleotide
  Sense strand starting at position 3036 of SEQ ID NO: 586557
ggaagcauuccuuggcagu

SEQ ID NO: 726977 - RNA, 19 nt, Artificial Sequence
  Description of Artificial Sequence: Synthetic oligonucleotide
  Antisense strand to SEQ ID NO: 726976
acugccaaggaaugcuucc

SEQ ID NO: 726978 - RNA, 19 nt, Artificial Sequence
  Description of Artificial Sequence: Synthetic oligonucleotide
  Sense strand starting at position 3056 of SEQ ID NO: 586557
ccuaguaucucuguaguua

SEQ ID NO: 726979 - RNA, 19 nt, Artificial Sequence
  Description of Artificial Sequence: Synthetic oligonucleotide
  Antisense strand to SEQ ID NO: 726978
uaacuacagagauacuagg

SEQ ID NO: 726980 - RNA, 19 nt, Artificial Sequence
  Description of Artificial Sequence: Synthetic oligonucleotide
  Sense strand starting at position 3057 of SEQ ID NO: 586557
cuaguaucucuguaguuau

SEQ ID NO: 726981 - RNA, 19 nt, Artificial Sequence
  Description of Artificial Sequence: Synthetic oligonucleotide
  Antisense strand to SEQ ID NO: 726980
auaacuacagagauacuag

SEQ ID NO: 726982 - RNA, 19 nt, Artificial Sequence
  Description of Artificial Sequence: Synthetic oligonucleotide
  Sense strand starting at position 3510 of SEQ ID NO: 586557
cagagaugauuugaugaug

SEQ ID NO: 726983 - RNA, 19 nt, Artificial Sequence
  Description of Artificial Sequence: Synthetic oligonucleotide
  Antisense strand to SEQ ID NO: 726982
caucaucaaaucaucucug

SEQ ID NO: 726984 - RNA, 19 nt, Artificial Sequence
  Description of Artificial Sequence: Synthetic oligonucleotide
  Sense strand starting at position 286 of SEQ ID NO: 586558
gcauacugaaugggagauu

SEQ ID NO: 726985 - RNA, 19 nt, Artificial Sequence
  Description of Artificial Sequence: Synthetic oligonucleotide
  Antisense strand to SEQ ID NO: 726984
aaucucccauucaguaugc

SEQ ID NO: 726986 - RNA, 19 nt, Artificial Sequence
  Description of Artificial Sequence: Synthetic oligonucleotide
  Sense strand starting at position 556 of SEQ ID NO: 586558
ggucucucugaggaugcua

SEQ ID NO: 726987 - RNA, 19 nt, Artificial Sequence
  Description of Artificial Sequence: Synthetic oligonucleotide
  Antisense strand to SEQ ID NO: 726986
uagcauccucagagagacc

SEQ ID NO: 726988 - RNA, 19 nt, Artificial Sequence
  Description of Artificial Sequence: Synthetic oligonucleotide
  Sense strand starting at position 698 of SEQ ID NO: 586558
ggauaaaguggauguuaau

SEQ ID NO: 726989 - RNA, 19 nt, Artificial Sequence
  Description of Artificial Sequence: Synthetic oligonucleotide
  Antisense strand to SEQ ID NO: 726988
auuaacauccacuuuaucc

SEQ ID NO: 726990 - RNA, 19 nt, Artificial Sequence
  Description of Artificial Sequence: Synthetic oligonucleotide
  Sense strand starting at position 749 of SEQ ID NO: 586558
ggcucuguccuagggaauu

SEQ ID NO: 726991 - RNA, 19 nt, Artificial Sequence
  Description of Artificial Sequence: Synthetic oligonucleotide
  Antisense strand to SEQ ID NO: 726990
aauucccuaggacagagcc

SEQ ID NO: 726992 - RNA, 19 nt, Artificial Sequence
  Description of Artificial Sequence: Synthetic oligonucleotide
  Sense strand starting at position 760 of SEQ ID NO: 586558
agggaauuccuaggagucu

SEQ ID NO: 726993 - RNA, 19 nt, Artificial Sequence
  Description of Artificial Sequence: Synthetic oligonucleotide
  Antisense strand to SEQ ID NO: 726992
agacuccuaggaauucccu

SEQ ID NO: 726994 - RNA, 19 nt, Artificial Sequence
  Description of Artificial Sequence: Synthetic oligonucleotide
  Sense strand starting at position 812 of SEQ ID NO: 586558
ggcuaagagauggagcuau

SEQ ID NO: 726995 - RNA, 19 nt, Artificial Sequence
  Description of Artificial Sequence: Synthetic oligonucleotide
  Antisense strand to SEQ ID NO: 726994
auagcuccaucucuuagcc

SEQ ID NO: 726996 - RNA, 19 nt, Artificial Sequence
  Description of Artificial Sequence: Synthetic oligonucleotide
  Sense strand starting at position 822 of SEQ ID NO: 586558
uggagcuauagguagucua

SEQ ID NO: 726997 - RNA, 19 nt, Artificial Sequence
  Description of Artificial Sequence: Synthetic oligonucleotide
  Antisense strand to SEQ ID NO: 726996
uagacuaccuauagcucca

SEQ ID NO: 726998 - RNA, 19 nt, Artificial Sequence
  Description of Artificial Sequence: Synthetic oligonucleotide
  Sense strand starting at position 825 of SEQ ID NO: 586558
agcuauagguagucuagga

SEQ ID NO: 726999 - RNA, 19 nt, Artificial Sequence
  Description of Artificial Sequence: Synthetic oligonucleotide
  Antisense strand to SEQ ID NO: 726998
uccuagacuaccuauagcu

SEQ ID NO: 727000 - RNA, 19 nt, Artificial Sequence
  Description of Artificial Sequence: Synthetic oligonucleotide
  Sense strand starting at position 916 of SEQ ID NO: 586558
cuccaagacagguguauga

SEQ ID NO: 727001 - RNA, 19 nt, Artificial Sequence
  Description of Artificial Sequence: Synthetic oligonucleotide
  Antisense strand to SEQ ID NO: 727000
ucauacaccugucuuggag

SEQ ID NO: 727002 - RNA, 19 nt, Artificial Sequence
  Description of Artificial Sequence: Synthetic oligonucleotide
  Sense strand starting at position 939 of SEQ ID NO: 586558
caggcaugggcucagaaga

SEQ ID NO: 727003 - RNA, 19 nt, Artificial Sequence
  Description of Artificial Sequence: Synthetic oligonucleotide
  Antisense strand to SEQ ID NO: 727002
ucuucugagcccaugccug

SEQ ID NO: 727004 - RNA, 19 nt, Artificial Sequence
  Description of Artificial Sequence: Synthetic oligonucleotide
  Sense strand starting at position 960 of SEQ ID NO: 586558
gcagaaguuggcuaagagu

SEQ ID NO: 727005 - RNA, 19 nt, Artificial Sequence
  Description of Artificial Sequence: Synthetic oligonucleotide
  Antisense strand to SEQ ID NO: 727004
acucuuagccaacuucugc

SEQ ID NO: 727006 - RNA, 19 nt, Artificial Sequence
  Description of Artificial Sequence: Synthetic oligonucleotide
  Sense strand starting at position 1102 of SEQ ID NO: 586558
cggguuucugaagggcaga

SEQ ID NO: 727007 - RNA, 19 nt, Artificial Sequence
  Description of Artificial Sequence: Synthetic oligonucleotide
  Antisense strand to SEQ ID NO: 727006
ucugcccuucagaaacccg

SEQ ID NO: 727008 - RNA, 19 nt, Artificial Sequence
  Description of Artificial Sequence: Synthetic oligonucleotide
  Sense strand starting at position 1103 of SEQ ID NO: 586558
ggguuucugaagggcagaa

SEQ ID NO: 727009 - RNA, 19 nt, Artificial Sequence
  Description of Artificial Sequence: Synthetic oligonucleotide
  Antisense strand to SEQ ID NO: 727008
uucugcccuucagaaaccc

SEQ ID NO: 727010 - RNA, 19 nt, Artificial Sequence
  Description of Artificial Sequence: Synthetic oligonucleotide
  Sense strand starting at position 1146 of SEQ ID NO: 586558
gguauuuaucagugacgca

SEQ ID NO: 727011 - RNA, 19 nt, Artificial Sequence
  Description of Artificial Sequence: Synthetic oligonucleotide
  Antisense strand to SEQ ID NO: 727010
ugcgucacugauaaauacc

SEQ ID NO: 727012 - RNA, 19 nt, Artificial Sequence
  Description of Artificial Sequence: Synthetic oligonucleotide
  Sense strand starting at position 1790 of SEQ ID NO: 586558
guuggacuguugguagaaa

SEQ ID NO: 727013 - RNA, 19 nt, Artificial Sequence
  Description of Artificial Sequence: Synthetic oligonucleotide
  Antisense strand to SEQ ID NO: 727012
uuucuaccaacaguccaac

SEQ ID NO: 727014 - RNA, 19 nt, Artificial Sequence
  Description of Artificial Sequence: Synthetic oligonucleotide
  Sense strand starting at position 1990 of SEQ ID NO: 586558
gcaggacugugauuuguug

SEQ ID NO: 727015 - RNA, 19 nt, Artificial Sequence
  Description of Artificial Sequence: Synthetic oligonucleotide
  Antisense strand to SEQ ID NO: 727014
caacaaaucacaguccugc

SEQ ID NO: 727016 - RNA, 19 nt, Artificial Sequence
  Description of Artificial Sequence: Synthetic oligonucleotide
  Sense strand starting at position 1994 of SEQ ID NO: 586558
gacugugauuuguugugua

SEQ ID NO: 727017 - RNA, 19 nt, Artificial Sequence
  Description of Artificial Sequence: Synthetic oligonucleotide
  Antisense strand to SEQ ID NO: 727016
uacacaacaaaucacaguc

SEQ ID NO: 727018 - RNA, 19 nt, Artificial Sequence
  Description of Artificial Sequence: Synthetic oligonucleotide
  Sense strand starting at position 1998 of SEQ ID NO: 586558
gugauuuguuguguauuag

SEQ ID NO: 727019 - RNA, 19 nt, Artificial Sequence
  Description of Artificial Sequence: Synthetic oligonucleotide
  Antisense strand to SEQ ID NO: 727018
cuaauacacaacaaaucac

SEQ ID NO: 727020 - RNA, 19 nt, Artificial Sequence
  Description of Artificial Sequence: Synthetic oligonucleotide
  Sense strand starting at position 1999 of SEQ ID NO: 586558
ugauuuguuguguauuagu

SEQ ID NO: 727021 - RNA, 19 nt, Artificial Sequence
  Description of Artificial Sequence: Synthetic oligonucleotide
  Antisense strand to SEQ ID NO: 727020
acuaauacacaacaaauca

SEQ ID NO: 727022 - RNA, 19 nt, Artificial Sequence
  Description of Artificial Sequence: Synthetic oligonucleotide
  Sense strand starting at position 2015 of SEQ ID NO: 586558
aguacaucuggcuauaacu

SEQ ID NO: 727023 - RNA, 19 nt, Artificial Sequence
  Description of Artificial Sequence: Synthetic oligonucleotide
  Antisense strand to SEQ ID NO: 727022
aguuauagccagauguacu

SEQ ID NO: 727024 - RNA, 19 nt, Artificial Sequence
  Description of Artificial Sequence: Synthetic oligonucleotide
  Sense strand starting at position 2030 of SEQ ID NO: 586558
aacuauuaguagucaucga

SEQ ID NO: 727025 - RNA, 19 nt, Artificial Sequence
  Description of Artificial Sequence: Synthetic oligonucleotide
  Antisense strand to SEQ ID NO: 727024
ucgaugacuacuaauaguu

SEQ ID NO: 727026 - RNA, 19 nt, Artificial Sequence
  Description of Artificial Sequence: Synthetic oligonucleotide
  Sense strand starting at position 2616 of SEQ ID NO: 586558
gccuuaggaaucggugaac

SEQ ID NO: 727027 - RNA, 19 nt, Artificial Sequence
  Description of Artificial Sequence: Synthetic oligonucleotide
  Antisense strand to SEQ ID NO: 727026
guucaccgauuccuaaggc

SEQ ID NO: 727028 - RNA, 19 nt, Artificial Sequence
  Description of Artificial Sequence: Synthetic oligonucleotide
  Sense strand starting at position 2875 of SEQ ID NO: 586558
gccagaaaccacugguuuc

SEQ ID NO: 727029 - RNA, 19 nt, Artificial Sequence
  Description of Artificial Sequence: Synthetic oligonucleotide
  Antisense strand to SEQ ID NO: 727028
gaaaccagugguuucuggc

SEQ ID NO: 727030 - RNA, 19 nt, Artificial Sequence
  Description of Artificial Sequence: Synthetic oligonucleotide
  Sense strand starting at position 3033 of SEQ ID NO: 586558
uguggaaucucucugucca

SEQ ID NO: 727031 - RNA, 19 nt, Artificial Sequence
  Description of Artificial Sequence: Synthetic oligonucleotide
  Antisense strand to SEQ ID NO: 727030
uggacagagagauuccaca

SEQ ID NO: 727032 - RNA, 19 nt, Artificial Sequence
  Description of Artificial Sequence: Synthetic oligonucleotide
  Sense strand starting at position 3034 of SEQ ID NO: 586558
guggaaucucucuguccac

SEQ ID NO: 727033 - RNA, 19 nt, Artificial Sequence
  Description of Artificial Sequence: Synthetic oligonucleotide
  Antisense strand to SEQ ID NO: 727032
guggacagagagauuccac

SEQ ID NO: 727034 - RNA, 19 nt, Artificial Sequence
  Description of Artificial Sequence: Synthetic oligonucleotide
  Sense strand starting at position 3035 of SEQ ID NO: 586558
uggaaucucucuguccaca

SEQ ID NO: 727035 - RNA, 19 nt, Artificial Sequence
  Description of Artificial Sequence: Synthetic oligonucleotide
  Antisense strand to SEQ ID NO: 727034
uguggacagagagauucca

SEQ ID NO: 727036 - RNA, 19 nt, Artificial Sequence
  Description of Artificial Sequence: Synthetic oligonucleotide
  Sense strand starting at position 3351 of SEQ ID NO: 586558
ucacucuugccugagaggu

SEQ ID NO: 727037 - RNA, 19 nt, Artificial Sequence
  Description of Artificial Sequence: Synthetic oligonucleotide
  Antisense strand to SEQ ID NO: 727036
accucucaggcaagaguga

SEQ ID NO: 727038 - RNA, 19 nt, Artificial Sequence
  Description of Artificial Sequence: Synthetic oligonucleotide
  Sense strand starting at position 3370 of SEQ ID NO: 586558
gugccuucgagauaguuga

SEQ ID NO: 727039 - RNA, 19 nt, Artificial Sequence
  Description of Artificial Sequence: Synthetic oligonucleotide
  Antisense strand to SEQ ID NO: 727038
ucaacuaucucgaaggcac

SEQ ID NO: 727040 - RNA, 19 nt, Artificial Sequence
  Description of Artificial Sequence: Synthetic oligonucleotide
  Sense strand starting at position 3374 of SEQ ID NO: 586558
cuucgagauaguugacuuu

SEQ ID NO: 727041 - RNA, 19 nt, Artificial Sequence
  Description of Artificial Sequence: Synthetic oligonucleotide
  Antisense strand to SEQ ID NO: 727040
aaagucaacuaucucgaag

SEQ ID NO: 727042 - RNA, 19 nt, Artificial Sequence
  Description of Artificial Sequence: Synthetic oligonucleotide
  Sense strand starting at position 3457 of SEQ ID NO: 586558
guguuuguugggcuuguaa

SEQ ID NO: 727043 - RNA, 19 nt, Artificial Sequence
  Description of Artificial Sequence: Synthetic oligonucleotide
  Antisense strand to SEQ ID NO: 727042
uuacaagcccaacaaacac

SEQ ID NO: 727044 - RNA, 19 nt, Artificial Sequence
  Description of Artificial Sequence: Synthetic oligonucleotide
  Sense strand starting at position 3499 of SEQ ID NO: 586558
uccucaauucuguggaggu

SEQ ID NO: 727045 - RNA, 19 nt, Artificial Sequence
  Description of Artificial Sequence: Synthetic oligonucleotide
  Antisense strand to SEQ ID NO: 727044
accuccacagaauugagga

SEQ ID NO: 727046 - RNA, 19 nt, Artificial Sequence
  Description of Artificial Sequence: Synthetic oligonucleotide
  Sense strand starting at position 3503 of SEQ ID NO: 586558
caauucuguggagguugaa

SEQ ID NO: 727047 - RNA, 19 nt, Artificial Sequence
  Description of Artificial Sequence: Synthetic oligonucleotide
  Antisense strand to SEQ ID NO: 727046
uucaaccuccacagaauug

SEQ ID NO: 727048 - RNA, 19 nt, Artificial Sequence
  Description of Artificial Sequence: Synthetic oligonucleotide
  Sense strand starting at position 3532 of SEQ ID NO: 586558
uuacgugauuuggauggau

SEQ ID NO: 727049 - RNA, 19 nt, Artificial Sequence
  Description of Artificial Sequence: Synthetic oligonucleotide
  Antisense strand to SEQ ID NO: 727048
auccauccaaaucacguaa

SEQ ID NO: 727050 - RNA, 19 nt, Artificial Sequence
  Description of Artificial Sequence: Synthetic oligonucleotide
  Sense strand starting at position 3552 of SEQ ID NO: 586558
ucuggagacuguuuacaag

SEQ ID NO: 727051 - RNA, 19 nt, Artificial Sequence
  Description of Artificial Sequence: Synthetic oligonucleotide
  Antisense strand to SEQ ID NO: 727050
cuuguaaacagucuccaga

SEQ ID NO: 727052 - RNA, 19 nt, Artificial Sequence
  Description of Artificial Sequence: Synthetic oligonucleotide
  Sense strand starting at position 3558 of SEQ ID NO: 586558
gacuguuuacaagaucugu

SEQ ID NO: 727053 - RNA, 19 nt, Artificial Sequence
  Description of Artificial Sequence: Synthetic oligonucleotide
  Antisense strand to SEQ ID NO: 727052
acagaucuuguaaacaguc

SEQ ID NO: 727054 - RNA, 19 nt, Artificial Sequence
  Description of Artificial Sequence: Synthetic oligonucleotide
  Sense strand starting at position 3855 of SEQ ID NO: 586558
aaggguuuacuuugcauau

SEQ ID NO: 727055 - RNA, 19 nt, Artificial Sequence
  Description of Artificial Sequence: Synthetic oligonucleotide
  Antisense strand to SEQ ID NO: 727054
auaugcaaaguaaacccuu

SEQ ID NO: 727056 - RNA, 19 nt, Artificial Sequence
  Description of Artificial Sequence: Synthetic oligonucleotide
  Sense strand starting at position 3856 of SEQ ID NO: 586558
aggguuuacuuugcauaua

SEQ ID NO: 727057 - RNA, 19 nt, Artificial Sequence
  Description of Artificial Sequence: Synthetic oligonucleotide
  Antisense strand to SEQ ID NO: 727056
uauaugcaaaguaaacccu

SEQ ID NO: 727058 - RNA, 19 nt, Artificial Sequence
  Description of Artificial Sequence: Synthetic oligonucleotide
  Sense strand starting at position 3859 of SEQ ID NO: 586558
guuuacuuugcauauaaag

SEQ ID NO: 727059 - RNA, 19 nt, Artificial Sequence
  Description of Artificial Sequence: Synthetic oligonucleotide
  Antisense strand to SEQ ID NO: 727058
cuuuauaugcaaaguaaac

SEQ ID NO: 727060 - RNA, 19 nt, Artificial Sequence
  Description of Artificial Sequence: Synthetic oligonucleotide
  Sense strand starting at position 3893 of SEQ ID NO: 586558
gaggauagaauugggcauu

SEQ ID NO: 727061 - RNA, 19 nt, Artificial Sequence
  Description of Artificial Sequence: Synthetic oligonucleotide
  Antisense strand to SEQ ID NO: 727060
aaugcccaauucuauccuc

SEQ ID NO: 727062 - RNA, 19 nt, Artificial Sequence
  Description of Artificial Sequence: Synthetic oligonucleotide
  Sense strand starting at position 3894 of SEQ ID NO: 586558
aggauagaauugggcauuu

SEQ ID NO: 727063 - RNA, 19 nt, Artificial Sequence
  Description of Artificial Sequence: Synthetic oligonucleotide
  Antisense strand to SEQ ID NO: 727062
aaaugcccaauucuauccu

SEQ ID NO: 727064 - RNA, 19 nt, Artificial Sequence
  Description of Artificial Sequence: Synthetic oligonucleotide
  Sense strand starting at position 1243 of SEQ ID NO: 586559
acccauuaauugggccaua

SEQ ID NO: 727065 - RNA, 19 nt, Artificial Sequence
  Description of Artificial Sequence: Synthetic oligonucleotide
  Antisense strand to SEQ ID NO: 727064
uauggcccaauuaaugggu

SEQ ID NO: 727066 - RNA, 19 nt, Artificial Sequence
  Description of Artificial Sequence: Synthetic oligonucleotide
  Sense strand starting at position 1244 of SEQ ID NO: 586559
cccauuaauugggccauaa

SEQ ID NO: 727067 - RNA, 19 nt, Artificial Sequence
  Description of Artificial Sequence: Synthetic oligonucleotide
  Antisense strand to SEQ ID NO: 727066
uuauggcccaauuaauggg

SEQ ID NO: 727068 - RNA, 19 nt, Artificial Sequence
  Description of Artificial Sequence: Synthetic oligonucleotide
  Sense strand starting at position 1313 of SEQ ID NO: 586559
gcgccuccgcuccaauuaa

SEQ ID NO: 727069 - RNA, 19 nt, Artificial Sequence
  Description of Artificial Sequence: Synthetic oligonucleotide
  Antisense strand to SEQ ID NO: 727068
uuaauuggagcggaggcgc

SEQ ID NO: 727070 - RNA, 19 nt, Artificial Sequence
  Description of Artificial Sequence: Synthetic oligonucleotide
  Sense strand starting at position 1691 of SEQ ID NO: 586559
ggcuguugacauuguauaa

SEQ ID NO: 727071 - RNA, 19 nt, Artificial Sequence
  Description of Artificial Sequence: Synthetic oligonucleotide
  Antisense strand to SEQ ID NO: 727070
uuauacaaugucaacagcc

SEQ ID NO: 727072 - RNA, 19 nt, Artificial Sequence
  Description of Artificial Sequence: Synthetic oligonucleotide
  Sense strand starting at position 1751 of SEQ ID NO: 586559
agccgcuucucugugaguu

SEQ ID NO: 727073 - RNA, 19 nt, Artificial Sequence
  Description of Artificial Sequence: Synthetic oligonucleotide
  Antisense strand to SEQ ID NO: 727072
aacucacagagaagcggcu

SEQ ID NO: 727074 - RNA, 19 nt, Artificial Sequence
  Description of Artificial Sequence: Synthetic oligonucleotide
  Sense strand starting at position 1752 of SEQ ID NO: 586559
gccgcuucucugugaguug

SEQ ID NO: 727075 - RNA, 19 nt, Artificial Sequence
  Description of Artificial Sequence: Synthetic oligonucleotide
  Antisense strand to SEQ ID NO: 727074
caacucacagagaagcggc

SEQ ID NO: 727076 - RNA, 19 nt, Artificial Sequence
  Description of Artificial Sequence: Synthetic oligonucleotide
  Sense strand starting at position 1755 of SEQ ID NO: 586559
gcuucucugugaguuggga

SEQ ID NO: 727077 - RNA, 19 nt, Artificial Sequence
  Description of Artificial Sequence: Synthetic oligonucleotide
  Antisense strand to SEQ ID NO: 727076
ucccaacucacagagaagc

SEQ ID NO: 727078 - RNA, 19 nt, Artificial Sequence
  Description of Artificial Sequence: Synthetic oligonucleotide
  Sense strand starting at position 1879 of SEQ ID NO: 586559
ugugauuuguuguccggca

SEQ ID NO: 727079 - RNA, 19 nt, Artificial Sequence
  Description of Artificial Sequence: Synthetic oligonucleotide
  Antisense strand to SEQ ID NO: 727078
ugccggacaacaaaucaca

SEQ ID NO: 727080 - RNA, 19 nt, Artificial Sequence
  Description of Artificial Sequence: Synthetic oligonucleotide
  Sense strand starting at position 1918 of SEQ ID NO: 586559
gagguagagugauauauga

SEQ ID NO: 727081 - RNA, 19 nt, Artificial Sequence
  Description of Artificial Sequence: Synthetic oligonucleotide
  Antisense strand to SEQ ID NO: 727080
ucauauaucacucuaccuc

SEQ ID NO: 727082 - RNA, 19 nt, Artificial Sequence
  Description of Artificial Sequence: Synthetic oligonucleotide
  Sense strand starting at position 2098 of SEQ ID NO: 586559
gcucaaauaugcggccaaa

SEQ ID NO: 727083 - RNA, 19 nt, Artificial Sequence
  Description of Artificial Sequence: Synthetic oligonucleotide
  Antisense strand to SEQ ID NO: 727082
uuuggccgcauauuugagc

SEQ ID NO: 727084 - RNA, 19 nt, Artificial Sequence
  Description of Artificial Sequence: Synthetic oligonucleotide
  Sense strand starting at position 2396 of SEQ ID NO: 586559
ggacucagcuaugagcaga

SEQ ID NO: 727085 - RNA, 19 nt, Artificial Sequence
  Description of Artificial Sequence: Synthetic oligonucleotide
  Antisense strand to SEQ ID NO: 727084
ucugcucauagcugagucc

SEQ ID NO: 727086 - RNA, 19 nt, Artificial Sequence
  Description of Artificial Sequence: Synthetic oligonucleotide
  Sense strand starting at position 2464 of SEQ ID NO: 586559
ggacuuagacucggaucca

SEQ ID NO: 727087 - RNA, 19 nt, Artificial Sequence
  Description of Artificial Sequence: Synthetic oligonucleotide
  Antisense strand to SEQ ID NO: 727086
uggauccgagucuaagucc

SEQ ID NO: 727088 - RNA, 19 nt, Artificial Sequence
  Description of Artificial Sequence: Synthetic oligonucleotide
  Sense strand starting at position 2537 of SEQ ID NO: 586559
ggagccaugugguucgaau

SEQ ID NO: 727089 - RNA, 19 nt, Artificial Sequence
  Description of Artificial Sequence: Synthetic oligonucleotide
  Antisense strand to SEQ ID NO: 727088
auucgaaccacauggcucc

SEQ ID NO: 727090 - RNA, 19 nt, Artificial Sequence
  Description of Artificial Sequence: Synthetic oligonucleotide
  Sense strand starting at position 2539 of SEQ ID NO: 586559
agccaugugguucgaauaa

SEQ ID NO: 727091 - RNA, 19 nt, Artificial Sequence
  Description of Artificial Sequence: Synthetic oligonucleotide
  Antisense strand to SEQ ID NO: 727090
uuauucgaaccacauggcu

SEQ ID NO: 727092 - RNA, 19 nt, Artificial Sequence
  Description of Artificial Sequence: Synthetic oligonucleotide
  Sense strand starting at position 2601 of SEQ ID NO: 586559
guuuauccgcccuaaagga

SEQ ID NO: 727093 - RNA, 19 nt, Artificial Sequence
  Description of Artificial Sequence: Synthetic oligonucleotide
  Antisense strand to SEQ ID NO: 727092
uccuuuagggcggauaaac

SEQ ID NO: 727094 - RNA, 19 nt, Artificial Sequence
  Description of Artificial Sequence: Synthetic oligonucleotide
  Sense strand starting at position 2646 of SEQ ID NO: 586559
agacucauuugccaacaga

SEQ ID NO: 727095 - RNA, 19 nt, Artificial Sequence
  Description of Artificial Sequence: Synthetic oligonucleotide
  Antisense strand to SEQ ID NO: 727094
ucuguuggcaaaugagucu

SEQ ID NO: 727096 - RNA, 19 nt, Artificial Sequence
  Description of Artificial Sequence: Synthetic oligonucleotide
  Sense strand starting at position 2748 of SEQ ID NO: 586559
gcuccagcaguccgauaaa

SEQ ID NO: 727097 - RNA, 19 nt, Artificial Sequence
  Description of Artificial Sequence: Synthetic oligonucleotide
  Antisense strand to SEQ ID NO: 727096
uuuaucggacugcuggagc

SEQ ID NO: 727098 - RNA, 19 nt, Artificial Sequence
  Description of Artificial Sequence: Synthetic oligonucleotide
  Sense strand starting at position 2751 of SEQ ID NO: 586559
ccagcaguccgauaaauug

SEQ ID NO: 727099 - RNA, 19 nt, Artificial Sequence
  Description of Artificial Sequence: Synthetic oligonucleotide
  Antisense strand to SEQ ID NO: 727098
caauuuaucggacugcugg

SEQ ID NO: 727100 - RNA, 19 nt, Artificial Sequence
  Description of Artificial Sequence: Synthetic oligonucleotide
  Sense strand starting at position 2758 of SEQ ID NO: 586559
uccgauaaauugcuaaaga

SEQ ID NO: 727101 - RNA, 19 nt, Artificial Sequence
  Description of Artificial Sequence: Synthetic oligonucleotide
  Antisense strand to SEQ ID NO: 727100
ucuuuagcaauuuaucgga

SEQ ID NO: 727102 - RNA, 19 nt, Artificial Sequence
  Description of Artificial Sequence: Synthetic oligonucleotide
  Sense strand starting at position 2759 of SEQ ID NO: 586559
ccgauaaauugcuaaagau

SEQ ID NO: 727103 - RNA, 19 nt, Artificial Sequence
  Description of Artificial Sequence: Synthetic oligonucleotide
  Antisense strand to SEQ ID NO: 727102
aucuuuagcaauuuaucgg

SEQ ID NO: 727104 - RNA, 19 nt, Artificial Sequence
  Description of Artificial Sequence: Synthetic oligonucleotide
  Sense strand starting at position 3288 of SEQ ID NO: 586559
acugcucagcucgauuaca

SEQ ID NO: 727105 - RNA, 19 nt, Artificial Sequence
  Description of Artificial Sequence: Synthetic oligonucleotide
  Antisense strand to SEQ ID NO: 727104
uguaaucgagcugagcagu

SEQ ID NO: 727106 - RNA, 19 nt, Artificial Sequence
  Description of Artificial Sequence: Synthetic oligonucleotide
  Sense strand starting at position 3317 of SEQ ID NO: 586559
ccgaccucacaauggaauu

SEQ ID NO: 727107 - RNA, 19 nt, Artificial Sequence
  Description of Artificial Sequence: Synthetic oligonucleotide
  Antisense strand to SEQ ID NO: 727106
aauuccauugugaggucgg

SEQ ID NO: 727108 - RNA, 19 nt, Artificial Sequence
  Description of Artificial Sequence: Synthetic oligonucleotide
  Sense strand starting at position 3338 of SEQ ID NO: 586559
cccggaaauucuccuguaa

SEQ ID NO: 727109 - RNA, 19 nt, Artificial Sequence
  Description of Artificial Sequence: Synthetic oligonucleotide
  Antisense strand to SEQ ID NO: 727108
uuacaggagaauuuccggg

SEQ ID NO: 727110 - RNA, 19 nt, Artificial Sequence
  Description of Artificial Sequence: Synthetic oligonucleotide
  Sense strand starting at position 3340 of SEQ ID NO: 586559
cggaaauucuccuguaaau

SEQ ID NO: 727111 - RNA, 19 nt, Artificial Sequence
  Description of Artificial Sequence: Synthetic oligonucleotide
  Antisense strand to SEQ ID NO: 727110
auuuacaggagaauuuccg

SEQ ID NO: 727112 - RNA, 19 nt, Artificial Sequence
  Description of Artificial Sequence: Synthetic oligonucleotide
  Sense strand starting at position 3349 of SEQ ID NO: 586559
uccuguaaauuguagaguu

SEQ ID NO: 727113 - RNA, 19 nt, Artificial Sequence
  Description of Artificial Sequence: Synthetic oligonucleotide
  Antisense strand to SEQ ID NO: 727112
aacucuacaauuuacagga

SEQ ID NO: 727114 - RNA, 19 nt, Artificial Sequence
  Description of Artificial Sequence: Synthetic oligonucleotide
  Sense strand starting at position 3351 of SEQ ID NO: 586559
cuguaaauuguagaguuua

SEQ ID NO: 727115 - RNA, 19 nt, Artificial Sequence
  Description of Artificial Sequence: Synthetic oligonucleotide
  Antisense strand to SEQ ID NO: 727114
uaaacucuacaauuuacag

SEQ ID NO: 727116 - RNA, 19 nt, Artificial Sequence
  Description of Artificial Sequence: Synthetic oligonucleotide
  Sense strand starting at position 3362 of SEQ ID NO: 586559
agaguuuaguuccuugugu

SEQ ID NO: 727117 - RNA, 19 nt, Artificial Sequence
  Description of Artificial Sequence: Synthetic oligonucleotide
  Antisense strand to SEQ ID NO: 727116
acacaaggaacuaaacucu

SEQ ID NO: 727118 - RNA, 19 nt, Artificial Sequence
  Description of Artificial Sequence: Synthetic oligonucleotide
  Sense strand starting at position 3363 of SEQ ID NO: 586559
gaguuuaguuccuugugua

SEQ ID NO: 727119 - RNA, 19 nt, Artificial Sequence
  Description of Artificial Sequence: Synthetic oligonucleotide
  Antisense strand to SEQ ID NO: 727118
uacacaaggaacuaaacuc

SEQ ID NO: 727120 - RNA, 19 nt, Artificial Sequence
  Description of Artificial Sequence: Synthetic oligonucleotide
  Sense strand starting at position 3364 of SEQ ID NO: 586559
aguuuaguuccuuguguac

SEQ ID NO: 727121 - RNA, 19 nt, Artificial Sequence
  Description of Artificial Sequence: Synthetic oligonucleotide
  Antisense strand to SEQ ID NO: 727120
guacacaaggaacuaaacu

SEQ ID NO: 727122 - RNA, 19 nt, Artificial Sequence
  Description of Artificial Sequence: Synthetic oligonucleotide
  Sense strand starting at position 3500 of SEQ ID NO: 586559
ccaguuccugcgcagugaa

SEQ ID NO: 727123 - RNA, 19 nt, Artificial Sequence
  Description of Artificial Sequence: Synthetic oligonucleotide
  Antisense strand to SEQ ID NO: 727122
uucacugcgcaggaacugg

SEQ ID NO: 727124 - RNA, 19 nt, Artificial Sequence
  Description of Artificial Sequence: Synthetic oligonucleotide
  Sense strand starting at position 3638 of SEQ ID NO: 586559
gccuuuauggcggaucaga

SEQ ID NO: 727125 - RNA, 19 nt, Artificial Sequence
  Description of Artificial Sequence: Synthetic oligonucleotide
  Antisense strand to SEQ ID NO: 727124
ucugauccgccauaaaggc

SEQ ID NO: 727126 - RNA, 19 nt, Artificial Sequence
  Description of Artificial Sequence: Synthetic oligonucleotide
  Sense strand starting at position 3655 of SEQ ID NO: 586559
gaugauaccuugucuccga

SEQ ID NO: 727127 - RNA, 19 nt, Artificial Sequence
  Description of Artificial Sequence: Synthetic oligonucleotide
  Antisense strand to SEQ ID NO: 727126
ucggagacaagguaucauc

SEQ ID NO: 727128 - RNA, 19 nt, Artificial Sequence
  Description of Artificial Sequence: Synthetic oligonucleotide
  Sense strand starting at position 3659 of SEQ ID NO: 586559
auaccuugucuccgaugga

SEQ ID NO: 727129 - RNA, 19 nt, Artificial Sequence
  Description of Artificial Sequence: Synthetic oligonucleotide
  Antisense strand to SEQ ID NO: 727128
uccaucggagacaagguau

SEQ ID NO: 727130 - RNA, 19 nt, Artificial Sequence
  Description of Artificial Sequence: Synthetic oligonucleotide
  Sense strand starting at position 3662 of SEQ ID NO: 586559
ccuugucuccgauggagaa

SEQ ID NO: 727131 - RNA, 19 nt, Artificial Sequence
  Description of Artificial Sequence: Synthetic oligonucleotide
  Antisense strand to SEQ ID NO: 727130
uucuccaucggagacaagg

SEQ ID NO: 727132 - RNA, 19 nt, Artificial Sequence
  Description of Artificial Sequence: Synthetic oligonucleotide
  Sense strand starting at position 3663 of SEQ ID NO: 586559
cuugucuccgauggagaau

SEQ ID NO: 727133 - RNA, 19 nt, Artificial Sequence
  Description of Artificial Sequence: Synthetic oligonucleotide
  Antisense strand to SEQ ID NO: 727132
auucuccaucggagacaag

SEQ ID NO: 727134 - RNA, 19 nt, Artificial Sequence
  Description of Artificial Sequence: Synthetic oligonucleotide
  Sense strand starting at position 3664 of SEQ ID NO: 586559
uugucuccgauggagaaua

SEQ ID NO: 727135 - RNA, 19 nt, Artificial Sequence
  Description of Artificial Sequence: Synthetic oligonucleotide
  Antisense strand to SEQ ID NO: 727134
uauucuccaucggagacaa

SEQ ID NO: 727136 - RNA, 19 nt, Artificial Sequence
  Description of Artificial Sequence: Synthetic oligonucleotide
  Sense strand starting at position 3722 of SEQ ID NO: 586559
gucgcaucgccuucuggaa

SEQ ID NO: 727137 - RNA, 19 nt, Artificial Sequence
  Description of Artificial Sequence: Synthetic oligonucleotide
  Antisense strand to SEQ ID NO: 727136
uuccagaaggcgaugcgac

SEQ ID NO: 727138 - RNA, 19 nt, Artificial Sequence
  Description of Artificial Sequence: Synthetic oligonucleotide
  Sense strand starting at position 3729 of SEQ ID NO: 586559
cgccuucuggaaggaaaua

SEQ ID NO: 727139 - RNA, 19 nt, Artificial Sequence
  Description of Artificial Sequence: Synthetic oligonucleotide
  Antisense strand to SEQ ID NO: 727138
uauuuccuuccagaaggcg

SEQ ID NO: 727140 - RNA, 19 nt, Artificial Sequence
  Description of Artificial Sequence: Synthetic oligonucleotide
  Sense strand starting at position 3894 of SEQ ID NO: 586559
gccgucugucuagacucaa

SEQ ID NO: 727141 - RNA, 19 nt, Artificial Sequence
  Description of Artificial Sequence: Synthetic oligonucleotide
  Antisense strand to SEQ ID NO: 727140
uugagucuagacagacggc

SEQ ID NO: 727142 - RNA, 19 nt, Artificial Sequence
  Description of Artificial Sequence: Synthetic oligonucleotide
  Sense strand starting at position 3930 of SEQ ID NO: 586559
cagagcugguguuuaaagu

SEQ ID NO: 727143 - RNA, 19 nt, Artificial Sequence
  Description of Artificial Sequence: Synthetic oligonucleotide
  Antisense strand to SEQ ID NO: 727142
acuuuaaacaccagcucug

SEQ ID NO: 727144 - RNA, 19 nt, Artificial Sequence
  Description of Artificial Sequence: Synthetic oligonucleotide
  Sense strand starting at position 11 of SEQ ID NO: 586560
gacggacaguucuuucuuu

SEQ ID NO: 727145 - RNA, 19 nt, Artificial Sequence
  Description of Artificial Sequence: Synthetic oligonucleotide
  Antisense strand to SEQ ID NO: 727144
aaagaaagaacuguccguc

SEQ ID NO: 727146 - RNA, 19 nt, Artificial Sequence
  Description of Artificial Sequence: Synthetic oligonucleotide
  Sense strand starting at position 195 of SEQ ID NO: 586560
uggugagguacauguugaa

SEQ ID NO: 727147 - RNA, 19 nt, Artificial Sequence
  Description of Artificial Sequence: Synthetic oligonucleotide
  Antisense strand to SEQ ID NO: 727146
uucaacauguaccucacca

SEQ ID NO: 727148 - RNA, 19 nt, Artificial Sequence
  Description of Artificial Sequence: Synthetic oligonucleotide
  Sense strand starting at position 400 of SEQ ID NO: 586560
agugcagaacucugcugaa

SEQ ID NO: 727149 - RNA, 19 nt, Artificial Sequence
  Description of Artificial Sequence: Synthetic oligonucleotide
  Antisense strand to SEQ ID NO: 727148
uucagcagaguucugcacu

SEQ ID NO: 727150 - RNA, 19 nt, Artificial Sequence
  Description of Artificial Sequence: Synthetic oligonucleotide
  Sense strand starting at position 403 of SEQ ID NO: 586560
gcagaacucugcugaacug

SEQ ID NO: 727151 - RNA, 19 nt, Artificial Sequence
  Description of Artificial Sequence: Synthetic oligonucleotide
  Antisense strand to SEQ ID NO: 727150
caguucagcagaguucugc

SEQ ID NO: 727152 - RNA, 19 nt, Artificial Sequence
  Description of Artificial Sequence: Synthetic oligonucleotide
  Sense strand starting at position 591 of SEQ ID NO: 586560
cgcuguauagaaugaaauu

SEQ ID NO: 727153 - RNA, 19 nt, Artificial Sequence
  Description of Artificial Sequence: Synthetic oligonucleotide
  Antisense strand to SEQ ID NO: 727152
aauuucauucuauacagcg

SEQ ID NO: 727154 - RNA, 19 nt, Artificial Sequence
  Description of Artificial Sequence: Synthetic oligonucleotide
  Sense strand starting at position 651 of SEQ ID NO: 586560
ccuuguguucuguagcaag

SEQ ID NO: 727155 - RNA, 19 nt, Artificial Sequence
  Description of Artificial Sequence: Synthetic oligonucleotide
  Antisense strand to SEQ ID NO: 727154
cuugcuacagaacacaagg

SEQ ID NO: 727156 - RNA, 19 nt, Artificial Sequence
  Description of Artificial Sequence: Synthetic oligonucleotide
  Sense strand starting at position 654 of SEQ ID NO: 586560
uguguucuguagcaagauu

SEQ ID NO: 727157 - RNA, 19 nt, Artificial Sequence
  Description of Artificial Sequence: Synthetic oligonucleotide
  Antisense strand to SEQ ID NO: 727156
aaucuugcuacagaacaca

SEQ ID NO: 727158 - RNA, 19 nt, Artificial Sequence
  Description of Artificial Sequence: Synthetic oligonucleotide
  Sense strand starting at position 807 of SEQ ID NO: 586560
ucacgucuguggcuuauuu

SEQ ID NO: 727159 - RNA, 19 nt, Artificial Sequence
  Description of Artificial Sequence: Synthetic oligonucleotide
  Antisense strand to SEQ ID NO: 727158
aaauaagccacagacguga

SEQ ID NO: 727160 - RNA, 19 nt, Artificial Sequence
  Description of Artificial Sequence: Synthetic oligonucleotide
  Sense strand starting at position 809 of SEQ ID NO: 586560
acgucuguggcuuauuuga

SEQ ID NO: 727161 - RNA, 19 nt, Artificial Sequence
  Description of Artificial Sequence: Synthetic oligonucleotide
  Antisense strand to SEQ ID NO: 727160
ucaaauaagccacagacgu

SEQ ID NO: 727162 - RNA, 19 nt, Artificial Sequence
  Description of Artificial Sequence: Synthetic oligonucleotide
  Sense strand starting at position 811 of SEQ ID NO: 586560
gucuguggcuuauuugaau

SEQ ID NO: 727163 - RNA, 19 nt, Artificial Sequence
  Description of Artificial Sequence: Synthetic oligonucleotide
  Antisense strand to SEQ ID NO: 727162
auucaaauaagccacagac

SEQ ID NO: 727164 - RNA, 19 nt, Artificial Sequence
  Description of Artificial Sequence: Synthetic oligonucleotide
  Sense strand starting at position 814 of SEQ ID NO: 586560
uguggcuuauuugaauaau

SEQ ID NO: 727165 - RNA, 19 nt, Artificial Sequence
  Description of Artificial Sequence: Synthetic oligonucleotide
  Antisense strand to SEQ ID NO: 727164
auuauucaaauaagccaca

SEQ ID NO: 727166 - RNA, 19 nt, Artificial Sequence
  Description of Artificial Sequence: Synthetic oligonucleotide
  Sense strand starting at position 869 of SEQ ID NO: 586560
gccucaucuuggcaggauu

SEQ ID NO: 727167 - RNA, 19 nt, Artificial Sequence
  Description of Artificial Sequence: Synthetic oligonucleotide
  Antisense strand to SEQ ID NO: 727166
aauccugccaagaugaggc

SEQ ID NO: 727168 - RNA, 19 nt, Artificial Sequence
  Description of Artificial Sequence: Synthetic oligonucleotide
  Sense strand starting at position 978 of SEQ ID NO: 586560
cggacaaucuaguuguaca

SEQ ID NO: 727169 - RNA, 19 nt, Artificial Sequence
  Description of Artificial Sequence: Synthetic oligonucleotide
  Antisense strand to SEQ ID NO: 727168
uguacaacuagauuguccg

SEQ ID NO: 727170 - RNA, 19 nt, Artificial Sequence
  Description of Artificial Sequence: Synthetic oligonucleotide
  Sense strand starting at position 1011 of SEQ ID NO: 586560
cugcacugcuuucgaagaa

SEQ ID NO: 727171 - RNA, 19 nt, Artificial Sequence
  Description of Artificial Sequence: Synthetic oligonucleotide
  Antisense strand to SEQ ID NO: 727170
uucuucgaaagcagugcag

SEQ ID NO: 727172 - RNA, 19 nt, Artificial Sequence
  Description of Artificial Sequence: Synthetic oligonucleotide
  Sense strand starting at position 1082 of SEQ ID NO: 586560
agucuuggcucgucccgaa

SEQ ID NO: 727173 - RNA, 19 nt, Artificial Sequence
  Description of Artificial Sequence: Synthetic oligonucleotide
  Antisense strand to SEQ ID NO: 727172
uucgggacgagccaagacu

SEQ ID NO: 727174 - RNA, 19 nt, Artificial Sequence
  Description of Artificial Sequence: Synthetic oligonucleotide
  Sense strand starting at position 1339 of SEQ ID NO: 586560
gacacuuacugggaucgau

SEQ ID NO: 727175 - RNA, 19 nt, Artificial Sequence
  Description of Artificial Sequence: Synthetic oligonucleotide
  Antisense strand to SEQ ID NO: 727174
aucgaucccaguaaguguc

SEQ ID NO: 727176 - RNA, 19 nt, Artificial Sequence
  Description of Artificial Sequence: Synthetic oligonucleotide
  Sense strand starting at position 1377 of SEQ ID NO: 586560
cucucauucucagcauugu

SEQ ID NO: 727177 - RNA, 19 nt, Artificial Sequence
  Description of Artificial Sequence: Synthetic oligonucleotide
  Antisense strand to SEQ ID NO: 727176
acaaugcugagaaugagag

SEQ ID NO: 727178 - RNA, 19 nt, Artificial Sequence
  Description of Artificial Sequence: Synthetic oligonucleotide
  Sense strand starting at position 1378 of SEQ ID NO: 586560
ucucauucucagcauuguu

SEQ ID NO: 727179 - RNA, 19 nt, Artificial Sequence
  Description of Artificial Sequence: Synthetic oligonucleotide
  Antisense strand to SEQ ID NO: 727178
aacaaugcugagaaugaga

SEQ ID NO: 727180 - RNA, 19 nt, Artificial Sequence
  Description of Artificial Sequence: Synthetic oligonucleotide
  Sense strand starting at position 1456 of SEQ ID NO: 586560
cauagucagucagggacaa

SEQ ID NO: 727181 - RNA, 19 nt, Artificial Sequence
  Description of Artificial Sequence: Synthetic oligonucleotide
  Antisense strand to SEQ ID NO: 727180
uugucccugacugacuaug

SEQ ID NO: 727182 - RNA, 19 nt, Artificial Sequence
  Description of Artificial Sequence: Synthetic oligonucleotide
  Sense strand starting at position 1457 of SEQ ID NO: 586560
auagucagucagggacaaa

SEQ ID NO: 727183 - RNA, 19 nt, Artificial Sequence
  Description of Artificial Sequence: Synthetic oligonucleotide
  Antisense strand to SEQ ID NO: 727182
uuugucccugacugacuau

SEQ ID NO: 727184 - RNA, 19 nt, Artificial Sequence
  Description of Artificial Sequence: Synthetic oligonucleotide
  Sense strand starting at position 1470 of SEQ ID NO: 586560
gacaaagugugagugucaa

SEQ ID NO: 727185 - RNA, 19 nt, Artificial Sequence
  Description of Artificial Sequence: Synthetic oligonucleotide
  Antisense strand to SEQ ID NO: 727184
uugacacucacacuuuguc

SEQ ID NO: 727186 - RNA, 19 nt, Artificial Sequence
  Description of Artificial Sequence: Synthetic oligonucleotide
  Sense strand starting at position 1885 of SEQ ID NO: 586560
acgaguccacguaguaguu

SEQ ID NO: 727187 - RNA, 19 nt, Artificial Sequence
  Description of Artificial Sequence: Synthetic oligonucleotide
  Antisense strand to SEQ ID NO: 727186
aacuacuacguggacucgu

SEQ ID NO: 727188 - RNA, 19 nt, Artificial Sequence
  Description of Artificial Sequence: Synthetic oligonucleotide
  Sense strand starting at position 2117 of SEQ ID NO: 586560
cgcuauuaaugguccgaug

SEQ ID NO: 727189 - RNA, 19 nt, Artificial Sequence
  Description of Artificial Sequence: Synthetic oligonucleotide
  Antisense strand to SEQ ID NO: 727188
caucggaccauuaauagcg

SEQ ID NO: 727190 - RNA, 19 nt, Artificial Sequence
  Description of Artificial Sequence: Synthetic oligonucleotide
  Sense strand starting at position 2119 of SEQ ID NO: 586560
cuauuaaugguccgauguu

SEQ ID NO: 727191 - RNA, 19 nt, Artificial Sequence
  Description of Artificial Sequence: Synthetic oligonucleotide
  Antisense strand to SEQ ID NO: 727190
aacaucggaccauuaauag

SEQ ID NO: 727192 - RNA, 19 nt, Artificial Sequence
  Description of Artificial Sequence: Synthetic oligonucleotide
  Sense strand starting at position 2120 of SEQ ID NO: 586560
uauuaaugguccgauguuu

SEQ ID NO: 727193 - RNA, 19 nt, Artificial Sequence
  Description of Artificial Sequence: Synthetic oligonucleotide
  Antisense strand to SEQ ID NO: 727192
aaacaucggaccauuaaua

SEQ ID NO: 727194 - RNA, 19 nt, Artificial Sequence
  Description of Artificial Sequence: Synthetic oligonucleotide
  Sense strand starting at position 2293 of SEQ ID NO: 586560
acuucuuaagcggacuauu

SEQ ID NO: 727195 - RNA, 19 nt, Artificial Sequence
  Description of Artificial Sequence: Synthetic oligonucleotide
  Antisense strand to SEQ ID NO: 727194
aauaguccgcuuaagaagu

SEQ ID NO: 727196 - RNA, 19 nt, Artificial Sequence
  Description of Artificial Sequence: Synthetic oligonucleotide
  Sense strand starting at position 2434 of SEQ ID NO: 586560
gucgcucuacuguauuuaa

SEQ ID NO: 727197 - RNA, 19 nt, Artificial Sequence
  Description of Artificial Sequence: Synthetic oligonucleotide
  Antisense strand to SEQ ID NO: 727196
uuaaauacaguagagcgac

SEQ ID NO: 727198 - RNA, 19 nt, Artificial Sequence
  Description of Artificial Sequence: Synthetic oligonucleotide
  Sense strand starting at position 2548 of SEQ ID NO: 586560
cguggcucccagcuguaaa

SEQ ID NO: 727199 - RNA, 19 nt, Artificial Sequence
  Description of Artificial Sequence: Synthetic oligonucleotide
  Antisense strand to SEQ ID NO: 727198
uuuacagcugggagccacg

SEQ ID NO: 727200 - RNA, 19 nt, Artificial Sequence
  Description of Artificial Sequence: Synthetic oligonucleotide
  Sense strand starting at position 2595 of SEQ ID NO: 586560
uguuguguuugguuggcga

SEQ ID NO: 727201 - RNA, 19 nt, Artificial Sequence
  Description of Artificial Sequence: Synthetic oligonucleotide
  Antisense strand to SEQ ID NO: 727200
ucgccaaccaaacacaaca

SEQ ID NO: 727202 - RNA, 19 nt, Artificial Sequence
  Description of Artificial Sequence: Synthetic oligonucleotide
  Sense strand starting at position 2608 of SEQ ID NO: 586560
uggcgagcucccuguaaau

SEQ ID NO: 727203 - RNA, 19 nt, Artificial Sequence
  Description of Artificial Sequence: Synthetic oligonucleotide
  Antisense strand to SEQ ID NO: 727202
auuuacagggagcucgcca

SEQ ID NO: 727204 - RNA, 19 nt, Artificial Sequence
  Description of Artificial Sequence: Synthetic oligonucleotide
  Sense strand starting at position 2610 of SEQ ID NO: 586560
gcgagcucccuguaaauaa

SEQ ID NO: 727205 - RNA, 19 nt, Artificial Sequence
  Description of Artificial Sequence: Synthetic oligonucleotide
  Antisense strand to SEQ ID NO: 727204
uuauuuacagggagcucgc

SEQ ID NO: 727206 - RNA, 19 nt, Artificial Sequence
  Description of Artificial Sequence: Synthetic oligonucleotide
  Sense strand starting at position 3075 of SEQ ID NO: 586560
ccugguugcgcuccgugaa

SEQ ID NO: 727207 - RNA, 19 nt, Artificial Sequence
  Description of Artificial Sequence: Synthetic oligonucleotide
  Antisense strand to SEQ ID NO: 727206
uucacggagcgcaaccagg

SEQ ID NO: 727208 - RNA, 19 nt, Artificial Sequence
  Description of Artificial Sequence: Synthetic oligonucleotide
  Sense strand starting at position 3076 of SEQ ID NO: 586560
cugguugcgcuccgugaau

SEQ ID NO: 727209 - RNA, 19 nt, Artificial Sequence
  Description of Artificial Sequence: Synthetic oligonucleotide
  Antisense strand to SEQ ID NO: 727208
auucacggagcgcaaccag

SEQ ID NO: 727210 - RNA, 19 nt, Artificial Sequence
  Description of Artificial Sequence: Synthetic oligonucleotide
  Sense strand starting at position 3134 of SEQ ID NO: 586560
gcaaguucgguuugggaaa

SEQ ID NO: 727211 - RNA, 19 nt, Artificial Sequence
  Description of Artificial Sequence: Synthetic oligonucleotide
  Antisense strand to SEQ ID NO: 727210
uuucccaaaccgaacuugc

SEQ ID NO: 727212 - RNA, 19 nt, Artificial Sequence
  Description of Artificial Sequence: Synthetic oligonucleotide
  Sense strand starting at position 3154 of SEQ ID NO: 586560
ggcagccucgccuaagaga

SEQ ID NO: 727213 - RNA, 19 nt, Artificial Sequence
  Description of Artificial Sequence: Synthetic oligonucleotide
  Antisense strand to SEQ ID NO: 727212
ucucuuaggcgaggcugcc

SEQ ID NO: 727214 - RNA, 19 nt, Artificial Sequence
  Description of Artificial Sequence: Synthetic oligonucleotide
  Sense strand starting at position 3479 of SEQ ID NO: 586560
cuccguuaauuggaaggaa

SEQ ID NO: 727215 - RNA, 19 nt, Artificial Sequence
  Description of Artificial Sequence: Synthetic oligonucleotide
  Antisense strand to SEQ ID NO: 727214
uuccuuccaauuaacggag

SEQ ID NO: 727216 - RNA, 19 nt, Artificial Sequence
  Description of Artificial Sequence: Synthetic oligonucleotide
  Sense strand starting at position 3482 of SEQ ID NO: 586560
cguuaauuggaaggaaacu

SEQ ID NO: 727217 - RNA, 19 nt, Artificial Sequence
  Description of Artificial Sequence: Synthetic oligonucleotide
  Antisense strand to SEQ ID NO: 727216
aguuuccuuccaauuaacg

SEQ ID NO: 727218 - RNA, 19 nt, Artificial Sequence
  Description of Artificial Sequence: Synthetic oligonucleotide
  Sense strand starting at position 3567 of SEQ ID NO: 586560
ggauacugugccugcaaca

SEQ ID NO: 727219 - RNA, 19 nt, Artificial Sequence
  Description of Artificial Sequence: Synthetic oligonucleotide
  Antisense strand to SEQ ID NO: 727218
uguugcaggcacaguaucc

SEQ ID NO: 727220 - RNA, 19 nt, Artificial Sequence
  Description of Artificial Sequence: Synthetic oligonucleotide
  Sense strand starting at position 3922 of SEQ ID NO: 586560
aguccaccguguccuaaau

SEQ ID NO: 727221 - RNA, 19 nt, Artificial Sequence
  Description of Artificial Sequence: Synthetic oligonucleotide
  Antisense strand to SEQ ID NO: 727220
auuuaggacacgguggacu

SEQ ID NO: 727222 - RNA, 19 nt, Artificial Sequence
  Description of Artificial Sequence: Synthetic oligonucleotide
  Sense strand starting at position 3951 of SEQ ID NO: 586560
ccgccaggccucugagauu

SEQ ID NO: 727223 - RNA, 19 nt, Artificial Sequence
  Description of Artificial Sequence: Synthetic oligonucleotide
  Antisense strand to SEQ ID NO: 727222
aaucucagaggccuggcgg

SEQ ID NO: 727224 - RNA, 19 nt, Artificial Sequence
  Description of Artificial Sequence: Synthetic oligonucleotide
  Sense strand starting at position 104 of SEQ ID NO: 586561
agaccucugucuuuaugga

SEQ ID NO: 727225 - RNA, 19 nt, Artificial Sequence
  Description of Artificial Sequence: Synthetic oligonucleotide
  Antisense strand to SEQ ID NO: 727224
uccauaaagacagaggucu

SEQ ID NO: 727226 - RNA, 19 nt, Artificial Sequence
  Description of Artificial Sequence: Synthetic oligonucleotide
  Sense strand starting at position 105 of SEQ ID NO: 586561
gaccucugucuuuauggau

SEQ ID NO: 727227 - RNA, 19 nt, Artificial Sequence
  Description of Artificial Sequence: Synthetic oligonucleotide
  Antisense strand to SEQ ID NO: 727226
auccauaaagacagagguc

SEQ ID NO: 727228 - RNA, 19 nt, Artificial Sequence
  Description of Artificial Sequence: Synthetic oligonucleotide
  Sense strand starting at position 111 of SEQ ID NO: 586561
ugucuuuauggaugugagu

SEQ ID NO: 727229 - RNA, 19 nt, Artificial Sequence
  Description of Artificial Sequence: Synthetic oligonucleotide
  Antisense strand to SEQ ID NO: 727228
acucacauccauaaagaca

SEQ ID NO: 727230 - RNA, 19 nt, Artificial Sequence
  Description of Artificial Sequence: Synthetic oligonucleotide
  Sense strand starting at position 113 of SEQ ID NO: 586561
ucuuuauggaugugaguca

SEQ ID NO: 727231 - RNA, 19 nt, Artificial Sequence
  Description of Artificial Sequence: Synthetic oligonucleotide
  Antisense strand to SEQ ID NO: 727230
ugacucacauccauaaaga

SEQ ID NO: 727232 - RNA, 19 nt, Artificial Sequence
  Description of Artificial Sequence: Synthetic oligonucleotide
  Sense strand starting at position 132 of SEQ ID NO: 586561
gccuguguccagcaaccua

SEQ ID NO: 727233 - RNA, 19 nt, Artificial Sequence
  Description of Artificial Sequence: Synthetic oligonucleotide
  Antisense strand to SEQ ID NO: 727232
uagguugcuggacacaggc

SEQ ID NO: 727234 - RNA, 19 nt, Artificial Sequence
  Description of Artificial Sequence: Synthetic oligonucleotide
  Sense strand starting at position 593 of SEQ ID NO: 586561
aaaggcaagcguuacauua

SEQ ID NO: 727235 - RNA, 19 nt, Artificial Sequence
  Description of Artificial Sequence: Synthetic oligonucleotide
  Antisense strand to SEQ ID NO: 727234
uaauguaacgcuugccuuu

SEQ ID NO: 727236 - RNA, 19 nt, Artificial Sequence
  Description of Artificial Sequence: Synthetic oligonucleotide
  Sense strand starting at position 683 of SEQ ID NO: 586561
ccaggacucacguguauuu

SEQ ID NO: 727237 - RNA, 19 nt, Artificial Sequence
  Description of Artificial Sequence: Synthetic oligonucleotide
  Antisense strand to SEQ ID NO: 727236
aaauacacgugaguccugg

SEQ ID NO: 727238 - RNA, 19 nt, Artificial Sequence
  Description of Artificial Sequence: Synthetic oligonucleotide
  Sense strand starting at position 919 of SEQ ID NO: 586561
ucagaaacuuccggaaagu

SEQ ID NO: 727239 - RNA, 19 nt, Artificial Sequence
  Description of Artificial Sequence: Synthetic oligonucleotide
  Antisense strand to SEQ ID NO: 727238
acuuuccggaaguuucuga

SEQ ID NO: 727240 - RNA, 19 nt, Artificial Sequence
  Description of Artificial Sequence: Synthetic oligonucleotide
  Sense strand starting at position 928 of SEQ ID NO: 586561
uccggaaaguucuucgauu

SEQ ID NO: 727241 - RNA, 19 nt, Artificial Sequence
  Description of Artificial Sequence: Synthetic oligonucleotide
  Antisense strand to SEQ ID NO: 727240
aaucgaagaacuuuccgga

SEQ ID NO: 727242 - RNA, 19 nt, Artificial Sequence
  Description of Artificial Sequence: Synthetic oligonucleotide
  Sense strand starting at position 929 of SEQ ID NO: 586561
ccggaaaguucuucgauuc

SEQ ID NO: 727243 - RNA, 19 nt, Artificial Sequence
  Description of Artificial Sequence: Synthetic oligonucleotide
  Antisense strand to SEQ ID NO: 727242
gaaucgaagaacuuuccgg

SEQ ID NO: 727244 - RNA, 19 nt, Artificial Sequence
  Description of Artificial Sequence: Synthetic oligonucleotide
  Sense strand starting at position 930 of SEQ ID NO: 586561
cggaaaguucuucgauuca

SEQ ID NO: 727245 - RNA, 19 nt, Artificial Sequence
  Description of Artificial Sequence: Synthetic oligonucleotide
  Antisense strand to SEQ ID NO: 727244
ugaaucgaagaacuuuccg

SEQ ID NO: 727246 - RNA, 19 nt, Artificial Sequence
  Description of Artificial Sequence: Synthetic oligonucleotide
  Sense strand starting at position 2060 of SEQ ID NO: 586561
ggaaccuucucucguuaag

SEQ ID NO: 727247 - RNA, 19 nt, Artificial Sequence
  Description of Artificial Sequence: Synthetic oligonucleotide
  Antisense strand to SEQ ID NO: 727246
cuuaacgagagaagguucc

SEQ ID NO: 727248 - RNA, 19 nt, Artificial Sequence
  Description of Artificial Sequence: Synthetic oligonucleotide
  Sense strand starting at position 2062 of SEQ ID NO: 586561
aaccuucucucguuaagga

SEQ ID NO: 727249 - RNA, 19 nt, Artificial Sequence
  Description of Artificial Sequence: Synthetic oligonucleotide
  Antisense strand to SEQ ID NO: 727248
uccuuaacgagagaagguu

SEQ ID NO: 727250 - RNA, 19 nt, Artificial Sequence
  Description of Artificial Sequence: Synthetic oligonucleotide
  Sense strand starting at position 2063 of SEQ ID NO: 586561
accuucucucguuaaggaa

SEQ ID NO: 727251 - RNA, 19 nt, Artificial Sequence
  Description of Artificial Sequence: Synthetic oligonucleotide
  Antisense strand to SEQ ID NO: 727250
uuccuuaacgagagaaggu

SEQ ID NO: 727252 - RNA, 19 nt, Artificial Sequence
  Description of Artificial Sequence: Synthetic oligonucleotide
  Sense strand starting at position 2261 of SEQ ID NO: 586561
accacacgcgugugagaua

SEQ ID NO: 727253 - RNA, 19 nt, Artificial Sequence
  Description of Artificial Sequence: Synthetic oligonucleotide
  Antisense strand to SEQ ID NO: 727252
uaucucacacgcguguggu

SEQ ID NO: 727254 - RNA, 19 nt, Artificial Sequence
  Description of Artificial Sequence: Synthetic oligonucleotide
  Sense strand starting at position 2266 of SEQ ID NO: 586561
acgcgugugagauagaaug

SEQ ID NO: 727255 - RNA, 19 nt, Artificial Sequence
  Description of Artificial Sequence: Synthetic oligonucleotide
  Antisense strand to SEQ ID NO: 727254
cauucuaucucacacgcgu

SEQ ID NO: 727256 - RNA, 19 nt, Artificial Sequence
  Description of Artificial Sequence: Synthetic oligonucleotide
  Sense strand starting at position 2290 of SEQ ID NO: 586561
aaaggagucuggugcuuga

SEQ ID NO: 727257 - RNA, 19 nt, Artificial Sequence
  Description of Artificial Sequence: Synthetic oligonucleotide
  Antisense strand to SEQ ID NO: 727256
ucaagcaccagacuccuuu

SEQ ID NO: 727258 - RNA, 19 nt, Artificial Sequence
  Description of Artificial Sequence: Synthetic oligonucleotide
  Sense strand starting at position 2369 of SEQ ID NO: 586561
agaucaaagucuugucucu

SEQ ID NO: 727259 - RNA, 19 nt, Artificial Sequence
  Description of Artificial Sequence: Synthetic oligonucleotide
  Antisense strand to SEQ ID NO: 727258
agagacaagacuuugaucu

SEQ ID NO: 727260 - RNA, 19 nt, Artificial Sequence
  Description of Artificial Sequence: Synthetic oligonucleotide
  Sense strand starting at position 2371 of SEQ ID NO: 586561
aucaaagucuugucucuca

SEQ ID NO: 727261 - RNA, 19 nt, Artificial Sequence
  Description of Artificial Sequence: Synthetic oligonucleotide
  Antisense strand to SEQ ID NO: 727260
ugagagacaagacuuugau

SEQ ID NO: 727262 - RNA, 19 nt, Artificial Sequence
  Description of Artificial Sequence: Synthetic oligonucleotide
  Sense strand starting at position 3051 of SEQ ID NO: 586561
cuaguaaucuggugugguu

SEQ ID NO: 727263 - RNA, 19 nt, Artificial Sequence
  Description of Artificial Sequence: Synthetic oligonucleotide
  Antisense strand to SEQ ID NO: 727262
aaccacaccagauuacuag

SEQ ID NO: 727264 - RNA, 19 nt, Artificial Sequence
  Description of Artificial Sequence: Synthetic oligonucleotide
  Sense strand starting at position 3129 of SEQ ID NO: 586561
agcagaugaacuugugcaa

SEQ ID NO: 727265 - RNA, 19 nt, Artificial Sequence
  Description of Artificial Sequence: Synthetic oligonucleotide
  Antisense strand to SEQ ID NO: 727264
uugcacaaguucaucugcu

SEQ ID NO: 727266 - RNA, 19 nt, Artificial Sequence
  Description of Artificial Sequence: Synthetic oligonucleotide
  Sense strand starting at position 3132 of SEQ ID NO: 586561
agaugaacuugugcaaguu

SEQ ID NO: 727267 - RNA, 19 nt, Artificial Sequence
  Description of Artificial Sequence: Synthetic oligonucleotide
  Antisense strand to SEQ ID NO: 727266
aacuugcacaaguucaucu

SEQ ID NO: 727268 - RNA, 19 nt, Artificial Sequence
  Description of Artificial Sequence: Synthetic oligonucleotide
  Sense strand starting at position 3133 of SEQ ID NO: 586561
gaugaacuugugcaaguua

SEQ ID NO: 727269 - RNA, 19 nt, Artificial Sequence
  Description of Artificial Sequence: Synthetic oligonucleotide
  Antisense strand to SEQ ID NO: 727268
uaacuugcacaaguucauc

SEQ ID NO: 727270 - RNA, 19 nt, Artificial Sequence
  Description of Artificial Sequence: Synthetic oligonucleotide
  Sense strand starting at position 3149 of SEQ ID NO: 586561
uuagauucuuugugccuca

SEQ ID NO: 727271 - RNA, 19 nt, Artificial Sequence
  Description of Artificial Sequence: Synthetic oligonucleotide
  Antisense strand to SEQ ID NO: 727270
ugaggcacaaagaaucuaa

SEQ ID NO: 727272 - RNA, 19 nt, Artificial Sequence
  Description of Artificial Sequence: Synthetic oligonucleotide
  Sense strand starting at position 3152 of SEQ ID NO: 586561
gauucuuugugccucaguu

SEQ ID NO: 727273 - RNA, 19 nt, Artificial Sequence
  Description of Artificial Sequence: Synthetic oligonucleotide
  Antisense strand to SEQ ID NO: 727272
aacugaggcacaaagaauc

SEQ ID NO: 727274 - RNA, 19 nt, Artificial Sequence
  Description of Artificial Sequence: Synthetic oligonucleotide
  Sense strand starting at position 3192 of SEQ ID NO: 586561
ugauaaugaugguaacagu

SEQ ID NO: 727275 - RNA, 19 nt, Artificial Sequence
  Description of Artificial Sequence: Synthetic oligonucleotide
  Antisense strand to SEQ ID NO: 727274
acuguuaccaucauuauca

SEQ ID NO: 727276 - RNA, 19 nt, Artificial Sequence
  Description of Artificial Sequence: Synthetic oligonucleotide
  Sense strand starting at position 3195 of SEQ ID NO: 586561
uaaugaugguaacagucau

SEQ ID NO: 727277 - RNA, 19 nt, Artificial Sequence
  Description of Artificial Sequence: Synthetic oligonucleotide
  Antisense strand to SEQ ID NO: 727276
augacuguuaccaucauua

SEQ ID NO: 727278 - RNA, 19 nt, Artificial Sequence
  Description of Artificial Sequence: Synthetic oligonucleotide
  Sense strand starting at position 3201 of SEQ ID NO: 586561
ugguaacagucaugcauug

SEQ ID NO: 727279 - RNA, 19 nt, Artificial Sequence
  Description of Artificial Sequence: Synthetic oligonucleotide
  Antisense strand to SEQ ID NO: 727278
caaugcaugacuguuacca

SEQ ID NO: 727280 - RNA, 19 nt, Artificial Sequence
  Description of Artificial Sequence: Synthetic oligonucleotide
  Sense strand starting at position 3210 of SEQ ID NO: 586561
ucaugcauugcauaaagau

SEQ ID NO: 727281 - RNA, 19 nt, Artificial Sequence
  Description of Artificial Sequence: Synthetic oligonucleotide
  Antisense strand to SEQ ID NO: 727280
aucuuuaugcaaugcauga

SEQ ID NO: 727282 - RNA, 19 nt, Artificial Sequence
  Description of Artificial Sequence: Synthetic oligonucleotide
  Sense strand starting at position 3218 of SEQ ID NO: 586561
ugcauaaagauguguaagu

SEQ ID NO: 727283 - RNA, 19 nt, Artificial Sequence
  Description of Artificial Sequence: Synthetic oligonucleotide
  Antisense strand to SEQ ID NO: 727282
acuuacacaucuuuaugca

SEQ ID NO: 727284 - RNA, 19 nt, Artificial Sequence
  Description of Artificial Sequence: Synthetic oligonucleotide
  Sense strand starting at position 3219 of SEQ ID NO: 586561
gcauaaagauguguaaguc

SEQ ID NO: 727285 - RNA, 19 nt, Artificial Sequence
  Description of Artificial Sequence: Synthetic oligonucleotide
  Antisense strand to SEQ ID NO: 727284
gacuuacacaucuuuaugc

SEQ ID NO: 727286 - RNA, 19 nt, Artificial Sequence
  Description of Artificial Sequence: Synthetic oligonucleotide
  Sense strand starting at position 3220 of SEQ ID NO: 586561
cauaaagauguguaaguca

SEQ ID NO: 727287 - RNA, 19 nt, Artificial Sequence
  Description of Artificial Sequence: Synthetic oligonucleotide
  Antisense strand to SEQ ID NO: 727286
ugacuuacacaucuuuaug

SEQ ID NO: 727288 - RNA, 19 nt, Artificial Sequence
  Description of Artificial Sequence: Synthetic oligonucleotide
  Sense strand starting at position 3603 of SEQ ID NO: 586561
cuguacaucuucuauguuu

SEQ ID NO: 727289 - RNA, 19 nt, Artificial Sequence
  Description of Artificial Sequence: Synthetic oligonucleotide
  Antisense strand to SEQ ID NO: 727288
aaacauagaagauguacag

SEQ ID NO: 727290 - RNA, 19 nt, Artificial Sequence
  Description of Artificial Sequence: Synthetic oligonucleotide
  Sense strand starting at position 124 of SEQ ID NO: 586562
gacaguaaccuaggugaua

SEQ ID NO: 727291 - RNA, 19 nt, Artificial Sequence
  Description of Artificial Sequence: Synthetic oligonucleotide
  Antisense strand to SEQ ID NO: 727290
uaucaccuagguuacuguc

SEQ ID NO: 727292 - RNA, 19 nt, Artificial Sequence
  Description of Artificial Sequence: Synthetic oligonucleotide
  Sense strand starting at position 185 of SEQ ID NO: 586562
agaauagacuaggaugaaa

SEQ ID NO: 727293 - RNA, 19 nt, Artificial Sequence
  Description of Artificial Sequence: Synthetic oligonucleotide
  Antisense strand to SEQ ID NO: 727292
uuucauccuagucuauucu

SEQ ID NO: 727294 - RNA, 19 nt, Artificial Sequence
  Description of Artificial Sequence: Synthetic oligonucleotide
  Sense strand starting at position 198 of SEQ ID NO: 586562
augaaaugcuaaccugcau

SEQ ID NO: 727295 - RNA, 19 nt, Artificial Sequence
  Description of Artificial Sequence: Synthetic oligonucleotide
  Antisense strand to SEQ ID NO: 727294
augcagguuagcauuucau

SEQ ID NO: 727296 - RNA, 19 nt, Artificial Sequence
  Description of Artificial Sequence: Synthetic oligonucleotide
  Sense strand starting at position 360 of SEQ ID NO: 586562
agauguucuaaaggguguu

SEQ ID NO: 727297 - RNA, 19 nt, Artificial Sequence
  Description of Artificial Sequence: Synthetic oligonucleotide
  Antisense strand to SEQ ID NO: 727296
aacacccuuuagaacaucu

SEQ ID NO: 727298 - RNA, 19 nt, Artificial Sequence
  Description of Artificial Sequence: Synthetic oligonucleotide
  Sense strand starting at position 361 of SEQ ID NO: 586562
gauguucuaaaggguguua

SEQ ID NO: 727299 - RNA, 19 nt, Artificial Sequence
  Description of Artificial Sequence: Synthetic oligonucleotide
  Antisense strand to SEQ ID NO: 727298
uaacacccuuuagaacauc

SEQ ID NO: 727300 - RNA, 19 nt, Artificial Sequence
  Description of Artificial Sequence: Synthetic oligonucleotide
  Sense strand starting at position 437 of SEQ ID NO: 586562
ccucguguucuguauauuu

SEQ ID NO: 727301 - RNA, 19 nt, Artificial Sequence
  Description of Artificial Sequence: Synthetic oligonucleotide
  Antisense strand to SEQ ID NO: 727300
aaauauacagaacacgagg

SEQ ID NO: 727302 - RNA, 19 nt, Artificial Sequence
  Description of Artificial Sequence: Synthetic oligonucleotide
  Sense strand starting at position 439 of SEQ ID NO: 586562
ucguguucuguauauuuaa

SEQ ID NO: 727303 - RNA, 19 nt, Artificial Sequence
  Description of Artificial Sequence: Synthetic oligonucleotide
  Antisense strand to SEQ ID NO: 727302
uuaaauauacagaacacga

SEQ ID NO: 727304 - RNA, 19 nt, Artificial Sequence
  Description of Artificial Sequence: Synthetic oligonucleotide
  Sense strand starting at position 474 of SEQ ID NO: 586562
gaaggaacaugauaugauu

SEQ ID NO: 727305 - RNA, 19 nt, Artificial Sequence
  Description of Artificial Sequence: Synthetic oligonucleotide
  Antisense strand to SEQ ID NO: 727304
aaucauaucauguuccuuc

SEQ ID NO: 727306 - RNA, 19 nt, Artificial Sequence
  Description of Artificial Sequence: Synthetic oligonucleotide
  Sense strand starting at position 486 of SEQ ID NO: 586562
uaugauuagcccugugaga

SEQ ID NO: 727307 - RNA, 19 nt, Artificial Sequence
  Description of Artificial Sequence: Synthetic oligonucleotide
  Antisense strand to SEQ ID NO: 727306
ucucacagggcuaaucaua

SEQ ID NO: 727308 - RNA, 19 nt, Artificial Sequence
  Description of Artificial Sequence: Synthetic oligonucleotide
  Sense strand starting at position 488 of SEQ ID NO: 586562
ugauuagcccugugagagg

SEQ ID NO: 727309 - RNA, 19 nt, Artificial Sequence
  Description of Artificial Sequence: Synthetic oligonucleotide
  Antisense strand to SEQ ID NO: 727308
ccucucacagggcuaauca

SEQ ID NO: 727310 - RNA, 19 nt, Artificial Sequence
  Description of Artificial Sequence: Synthetic oligonucleotide
  Sense strand starting at position 628 of SEQ ID NO: 586562
ggauauagccuguacagau

SEQ ID NO: 727311 - RNA, 19 nt, Artificial Sequence
  Description of Artificial Sequence: Synthetic oligonucleotide
  Antisense strand to SEQ ID NO: 727310
aucuguacaggcuauaucc

SEQ ID NO: 727312 - RNA, 19 nt, Artificial Sequence
  Description of Artificial Sequence: Synthetic oligonucleotide
  Sense strand starting at position 2021 of SEQ ID NO: 586562
gccuuauccaaguggagau

SEQ ID NO: 727313 - RNA, 19 nt, Artificial Sequence
  Description of Artificial Sequence: Synthetic oligonucleotide
  Antisense strand to SEQ ID NO: 727312
aucuccacuuggauaaggc

SEQ ID NO: 727314 - RNA, 19 nt, Artificial Sequence
  Description of Artificial Sequence: Synthetic oligonucleotide
  Sense strand starting at position 2035 of SEQ ID NO: 586562
gagaucuagcccuacguaa

SEQ ID NO: 727315 - RNA, 19 nt, Artificial Sequence
  Description of Artificial Sequence: Synthetic oligonucleotide
  Antisense strand to SEQ ID NO: 727314
uuacguagggcuagaucuc

SEQ ID NO: 727316 - RNA, 19 nt, Artificial Sequence
  Description of Artificial Sequence: Synthetic oligonucleotide
  Sense strand starting at position 2244 of SEQ ID NO: 586562
ccucucuugccugaaauga

SEQ ID NO: 727317 - RNA, 19 nt, Artificial Sequence
  Description of Artificial Sequence: Synthetic oligonucleotide
  Antisense strand to SEQ ID NO: 727316
ucauuucaggcaagagagg

SEQ ID NO: 727318 - RNA, 19 nt, Artificial Sequence
  Description of Artificial Sequence: Synthetic oligonucleotide
  Sense strand starting at position 2383 of SEQ ID NO: 586562
aguauuuacucuuccugca

SEQ ID NO: 727319 - RNA, 19 nt, Artificial Sequence
  Description of Artificial Sequence: Synthetic oligonucleotide
  Antisense strand to SEQ ID NO: 727318
ugcaggaagaguaaauacu

SEQ ID NO: 727320 - RNA, 19 nt, Artificial Sequence
  Description of Artificial Sequence: Synthetic oligonucleotide
  Sense strand starting at position 2388 of SEQ ID NO: 586562
uuacucuuccugcaagagu

SEQ ID NO: 727321 - RNA, 19 nt, Artificial Sequence
  Description of Artificial Sequence: Synthetic oligonucleotide
  Antisense strand to SEQ ID NO: 727320
acucuugcaggaagaguaa

SEQ ID NO: 727322 - RNA, 19 nt, Artificial Sequence
  Description of Artificial Sequence: Synthetic oligonucleotide
  Sense strand starting at position 2552 of SEQ ID NO: 586562
gcuguuccuagagaugguu

SEQ ID NO: 727323 - RNA, 19 nt, Artificial Sequence
  Description of Artificial Sequence: Synthetic oligonucleotide
  Antisense strand to SEQ ID NO: 727322
aaccaucucuaggaacagc

SEQ ID NO: 727324 - RNA, 19 nt, Artificial Sequence
  Description of Artificial Sequence: Synthetic oligonucleotide
  Sense strand starting at position 2554 of SEQ ID NO: 586562
uguuccuagagaugguuga

SEQ ID NO: 727325 - RNA, 19 nt, Artificial Sequence
  Description of Artificial Sequence: Synthetic oligonucleotide
  Antisense strand to SEQ ID NO: 727324
ucaaccaucucuaggaaca

SEQ ID NO: 727326 - RNA, 19 nt, Artificial Sequence
  Description of Artificial Sequence: Synthetic oligonucleotide
  Sense strand starting at position 2572 of SEQ ID NO: 586562
agguguuggagcuagaaug

SEQ ID NO: 727327 - RNA, 19 nt, Artificial Sequence
  Description of Artificial Sequence: Synthetic oligonucleotide
  Antisense strand to SEQ ID NO: 727326
cauucuagcuccaacaccu

SEQ ID NO: 727328 - RNA, 19 nt, Artificial Sequence
  Description of Artificial Sequence: Synthetic oligonucleotide
  Sense strand starting at position 2625 of SEQ ID NO: 586562
gcuuuaucuccucagaguc

SEQ ID NO: 727329 - RNA, 19 nt, Artificial Sequence
  Description of Artificial Sequence: Synthetic oligonucleotide
  Antisense strand to SEQ ID NO: 727328
gacucugaggagauaaagc

SEQ ID NO: 727330 - RNA, 19 nt, Artificial Sequence
  Description of Artificial Sequence: Synthetic oligonucleotide
  Sense strand starting at position 2663 of SEQ ID NO: 586562
uccaguggucccuacuaaa

SEQ ID NO: 727331 - RNA, 19 nt, Artificial Sequence
  Description of Artificial Sequence: Synthetic oligonucleotide
  Antisense strand to SEQ ID NO: 727330
uuuaguagggaccacugga

SEQ ID NO: 727332 - RNA, 19 nt, Artificial Sequence
  Description of Artificial Sequence: Synthetic oligonucleotide
  Sense strand starting at position 2983 of SEQ ID NO: 586562
cgugaaauccugugcauuu

SEQ ID NO: 727333 - RNA, 19 nt, Artificial Sequence
  Description of Artificial Sequence: Synthetic oligonucleotide
  Antisense strand to SEQ ID NO: 727332
aaaugcacaggauuucacg

SEQ ID NO: 727334 - RNA, 19 nt, Artificial Sequence
  Description of Artificial Sequence: Synthetic oligonucleotide
  Sense strand starting at position 2984 of SEQ ID NO: 586562
gugaaauccugugcauuua

SEQ ID NO: 727335 - RNA, 19 nt, Artificial Sequence
  Description of Artificial Sequence: Synthetic oligonucleotide
  Antisense strand to SEQ ID NO: 727334
uaaaugcacaggauuucac

SEQ ID NO: 727336 - RNA, 19 nt, Artificial Sequence
  Description of Artificial Sequence: Synthetic oligonucleotide
  Sense strand starting at position 3067 of SEQ ID NO: 586562
uuguuucuugcagaguaaa

SEQ ID NO: 727337 - RNA, 19 nt, Artificial Sequence
  Description of Artificial Sequence: Synthetic oligonucleotide
  Antisense strand to SEQ ID NO: 727336
uuuacucugcaagaaacaa

SEQ ID NO: 727338 - RNA, 19 nt, Artificial Sequence
  Description of Artificial Sequence: Synthetic oligonucleotide
  Sense strand starting at position 3291 of SEQ ID NO: 586562
ucuugaggucauggaacua

SEQ ID NO: 727339 - RNA, 19 nt, Artificial Sequence
  Description of Artificial Sequence: Synthetic oligonucleotide
  Antisense strand to SEQ ID NO: 727338
uaguuccaugaccucaaga

SEQ ID NO: 727340 - RNA, 19 nt, Artificial Sequence
  Description of Artificial Sequence: Synthetic oligonucleotide
  Sense strand starting at position 3331 of SEQ ID NO: 586562
ugaauccucuucuuuggaa

SEQ ID NO: 727341 - RNA, 19 nt, Artificial Sequence
  Description of Artificial Sequence: Synthetic oligonucleotide
  Antisense strand to SEQ ID NO: 727340
uuccaaagaagaggauuca

SEQ ID NO: 727342 - RNA, 19 nt, Artificial Sequence
  Description of Artificial Sequence: Synthetic oligonucleotide
  Sense strand starting at position 3371 of SEQ ID NO: 586562
gggccuguuaucuggagga

SEQ ID NO: 727343 - RNA, 19 nt, Artificial Sequence
  Description of Artificial Sequence: Synthetic oligonucleotide
  Antisense strand to SEQ ID NO: 727342
uccuccagauaacaggccc

SEQ ID NO: 727344 - RNA, 19 nt, Artificial Sequence
  Description of Artificial Sequence: Synthetic oligonucleotide
  Sense strand starting at position 3373 of SEQ ID NO: 586562
gccuguuaucuggaggaau

SEQ ID NO: 727345 - RNA, 19 nt, Artificial Sequence
  Description of Artificial Sequence: Synthetic oligonucleotide
  Antisense strand to SEQ ID NO: 727344
auuccuccagauaacaggc

SEQ ID NO: 727346 - RNA, 19 nt, Artificial Sequence
  Description of Artificial Sequence: Synthetic oligonucleotide
  Sense strand starting at position 3453 of SEQ ID NO: 586562
augggcuugugauuauauu

SEQ ID NO: 727347 - RNA, 19 nt, Artificial Sequence
  Description of Artificial Sequence: Synthetic oligonucleotide
  Antisense strand to SEQ ID NO: 727346
aauauaaucacaagcccau

SEQ ID NO: 727348 - RNA, 19 nt, Artificial Sequence
  Description of Artificial Sequence: Synthetic oligonucleotide
  Sense strand starting at position 3454 of SEQ ID NO: 586562
ugggcuugugauuauauuc

SEQ ID NO: 727349 - RNA, 19 nt, Artificial Sequence
  Description of Artificial Sequence: Synthetic oligonucleotide
  Antisense strand to SEQ ID NO: 727348
gaauauaaucacaagccca

SEQ ID NO: 727350 - RNA, 19 nt, Artificial Sequence
  Description of Artificial Sequence: Synthetic oligonucleotide
  Sense strand starting at position 3501 of SEQ ID NO: 586562
uguauugauagcuaaguga

SEQ ID NO: 727351 - RNA, 19 nt, Artificial Sequence
  Description of Artificial Sequence: Synthetic oligonucleotide
  Antisense strand to SEQ ID NO: 727350
ucacuuagcuaucaauaca

SEQ ID NO: 727352 - RNA, 19 nt, Artificial Sequence
  Description of Artificial Sequence: Synthetic oligonucleotide
  Sense strand starting at position 3512 of SEQ ID NO: 586562
cuaagugagcagcagaaua

SEQ ID NO: 727353 - RNA, 19 nt, Artificial Sequence
  Description of Artificial Sequence: Synthetic oligonucleotide
  Antisense strand to SEQ ID NO: 727352
uauucugcugcucacuuag

SEQ ID NO: 727354 - RNA, 19 nt, Artificial Sequence
  Description of Artificial Sequence: Synthetic oligonucleotide
  Sense strand starting at position 3520 of SEQ ID NO: 586562
gcagcagaauaguuaauaa

SEQ ID NO: 727355 - RNA, 19 nt, Artificial Sequence
  Description of Artificial Sequence: Synthetic oligonucleotide
  Antisense strand to SEQ ID NO: 727354
uuauuaacuauucugcugc

SEQ ID NO: 727356 - RNA, 19 nt, Artificial Sequence
  Description of Artificial Sequence: Synthetic oligonucleotide
  Sense strand starting at position 3585 of SEQ ID NO: 586562
ucauaaauuuagggacuga

SEQ ID NO: 727357 - RNA, 19 nt, Artificial Sequence
  Description of Artificial Sequence: Synthetic oligonucleotide
  Antisense strand to SEQ ID NO: 727356
ucagucccuaaauuuauga

SEQ ID NO: 727358 - RNA, 19 nt, Artificial Sequence
  Description of Artificial Sequence: Synthetic oligonucleotide
  Sense strand starting at position 3665 of SEQ ID NO: 586562
cagaaagucuggcuuaucu

SEQ ID NO: 727359 - RNA, 19 nt, Artificial Sequence
  Description of Artificial Sequence: Synthetic oligonucleotide
  Antisense strand to SEQ ID NO: 727358
agauaagccagacuuucug

SEQ ID NO: 727360 - RNA, 19 nt, Artificial Sequence
  Description of Artificial Sequence: Synthetic oligonucleotide
  Sense strand starting at position 3667 of SEQ ID NO: 586562
gaaagucuggcuuaucucu

SEQ ID NO: 727361 - RNA, 19 nt, Artificial Sequence
  Description of Artificial Sequence: Synthetic oligonucleotide
  Antisense strand to SEQ ID NO: 727360
agagauaagccagacuuuc

SEQ ID NO: 727362 - RNA, 19 nt, Artificial Sequence
  Description of Artificial Sequence: Synthetic oligonucleotide
  Sense strand starting at position 3804 of SEQ ID NO: 586562
gccauaugguaccucugaa

SEQ ID NO: 727363 - RNA, 19 nt, Artificial Sequence
  Description of Artificial Sequence: Synthetic oligonucleotide
  Antisense strand to SEQ ID NO: 727362
uucagagguaccauauggc

SEQ ID NO: 727364 - RNA, 19 nt, Artificial Sequence
  Description of Artificial Sequence: Synthetic oligonucleotide
  Sense strand starting at position 3860 of SEQ ID NO: 586562
ccucuuauggguuaaacug

SEQ ID NO: 727365 - RNA, 19 nt, Artificial Sequence
  Description of Artificial Sequence: Synthetic oligonucleotide
  Antisense strand to SEQ ID NO: 727364
caguuuaacccauaagagg

SEQ ID NO: 727366 - RNA, 19 nt, Artificial Sequence
  Description of Artificial Sequence: Synthetic oligonucleotide
  Sense strand starting at position 3912 of SEQ ID NO: 586562
agauuuauauauggaaguc

SEQ ID NO: 727367 - RNA, 19 nt, Artificial Sequence
  Description of Artificial Sequence: Synthetic oligonucleotide
  Antisense strand to SEQ ID NO: 727366
gacuuccauauauaaaucu

SEQ ID NO: 727368 - RNA, 19 nt, Artificial Sequence
  Description of Artificial Sequence: Synthetic oligonucleotide
  Sense strand starting at position 3945 of SEQ ID NO: 586562
cucauagugugacuauauu

SEQ ID NO: 727369 - RNA, 19 nt, Artificial Sequence
  Description of Artificial Sequence: Synthetic oligonucleotide
  Antisense strand to SEQ ID NO: 727368
aauauagucacacuaugag

SEQ ID NO: 727370 - RNA, 19 nt, Artificial Sequence
  Description of Artificial Sequence: Synthetic oligonucleotide
  Sense strand starting at position 287 of SEQ ID NO: 586563
cucauucuaugaguaggaa

SEQ ID NO: 727371 - RNA, 19 nt, Artificial Sequence
  Description of Artificial Sequence: Synthetic oligonucleotide
  Antisense strand to SEQ ID NO: 727370
uuccuacucauagaaugag

SEQ ID NO: 727372 - RNA, 19 nt, Artificial Sequence
  Description of Artificial Sequence: Synthetic oligonucleotide
  Sense strand starting at position 305 of SEQ ID NO: 586563
agagcaacucuggauugua

SEQ ID NO: 727373 - RNA, 19 nt, Artificial Sequence
  Description of Artificial Sequence: Synthetic oligonucleotide
  Antisense strand to SEQ ID NO: 727372
uacaauccagaguugcucu

SEQ ID NO: 727374 - RNA, 19 nt, Artificial Sequence
  Description of Artificial Sequence: Synthetic oligonucleotide
  Sense strand starting at position 327 of SEQ ID NO: 586563
augcgcaugaguuugugua

SEQ ID NO: 727375 - RNA, 19 nt, Artificial Sequence
  Description of Artificial Sequence: Synthetic oligonucleotide
  Antisense strand to SEQ ID NO: 727374
uacacaaacucaugcgcau

SEQ ID NO: 727376 - RNA, 19 nt, Artificial Sequence
  Description of Artificial Sequence: Synthetic oligonucleotide
  Sense strand starting at position 331 of SEQ ID NO: 586563
gcaugaguuuguguauuug

SEQ ID NO: 727377 - RNA, 19 nt, Artificial Sequence
  Description of Artificial Sequence: Synthetic oligonucleotide
  Antisense strand to SEQ ID NO: 727376
caaauacacaaacucaugc

SEQ ID NO: 727378 - RNA, 19 nt, Artificial Sequence
  Description of Artificial Sequence: Synthetic oligonucleotide
  Sense strand starting at position 341 of SEQ ID NO: 586563
guguauuuguguguuugga

SEQ ID NO: 727379 - RNA, 19 nt, Artificial Sequence
  Description of Artificial Sequence: Synthetic oligonucleotide
  Antisense strand to SEQ ID NO: 727378
uccaaacacacaaauacac

SEQ ID NO: 727380 - RNA, 19 nt, Artificial Sequence
  Description of Artificial Sequence: Synthetic oligonucleotide
  Sense strand starting at position 752 of SEQ ID NO: 586563
ccaagacuucuguguuaga

SEQ ID NO: 727381 - RNA, 19 nt, Artificial Sequence
  Description of Artificial Sequence: Synthetic oligonucleotide
  Antisense strand to SEQ ID NO: 727380
ucuaacacagaagucuugg

SEQ ID NO: 727382 - RNA, 19 nt, Artificial Sequence
  Description of Artificial Sequence: Synthetic oligonucleotide
  Sense strand starting at position 753 of SEQ ID NO: 586563
caagacuucuguguuagaa

SEQ ID NO: 727383 - RNA, 19 nt, Artificial Sequence
  Description of Artificial Sequence: Synthetic oligonucleotide
  Antisense strand to SEQ ID NO: 727382
uucuaacacagaagucuug

SEQ ID NO: 727384 - RNA, 19 nt, Artificial Sequence
  Description of Artificial Sequence: Synthetic oligonucleotide
  Sense strand starting at position 814 of SEQ ID NO: 586563
cagggaaaguguuuauuag

SEQ ID NO: 727385 - RNA, 19 nt, Artificial Sequence
  Description of Artificial Sequence: Synthetic oligonucleotide
  Antisense strand to SEQ ID NO: 727384
cuaauaaacacuuucccug

SEQ ID NO: 727386 - RNA, 19 nt, Artificial Sequence
  Description of Artificial Sequence: Synthetic oligonucleotide
  Sense strand starting at position 815 of SEQ ID NO: 586563
agggaaaguguuuauuagu

SEQ ID NO: 727387 - RNA, 19 nt, Artificial Sequence
  Description of Artificial Sequence: Synthetic oligonucleotide
  Antisense strand to SEQ ID NO: 727386
acuaauaaacacuuucccu

SEQ ID NO: 727388 - RNA, 19 nt, Artificial Sequence
  Description of Artificial Sequence: Synthetic oligonucleotide
  Sense strand starting at position 894 of SEQ ID NO: 586563
cgauguuagcucuaaauaa

SEQ ID NO: 727389 - RNA, 19 nt, Artificial Sequence
  Description of Artificial Sequence: Synthetic oligonucleotide
  Antisense strand to SEQ ID NO: 727388
uuauuuagagcuaacaucg

SEQ ID NO: 727390 - RNA, 19 nt, Artificial Sequence
  Description of Artificial Sequence: Synthetic oligonucleotide
  Sense strand starting at position 944 of SEQ ID NO: 586563
uuugaaauucguugaagaa

SEQ ID NO: 727391 - RNA, 19 nt, Artificial Sequence
  Description of Artificial Sequence: Synthetic oligonucleotide
  Antisense strand to SEQ ID NO: 727390
uucuucaacgaauuucaaa

SEQ ID NO: 727392 - RNA, 19 nt, Artificial Sequence
  Description of Artificial Sequence: Synthetic oligonucleotide
  Sense strand starting at position 1007 of SEQ ID NO: 586563
ugaucuuuccagugacaau

SEQ ID NO: 727393 - RNA, 19 nt, Artificial Sequence
  Description of Artificial Sequence: Synthetic oligonucleotide
  Antisense strand to SEQ ID NO: 727392
auugucacuggaaagauca

SEQ ID NO: 727394 - RNA, 19 nt, Artificial Sequence
  Description of Artificial Sequence: Synthetic oligonucleotide
  Sense strand starting at position 1016 of SEQ ID NO: 586563
cagugacaaucugcagagu

SEQ ID NO: 727395 - RNA, 19 nt, Artificial Sequence
  Description of Artificial Sequence: Synthetic oligonucleotide
  Antisense strand to SEQ ID NO: 727394
acucugcagauugucacug

SEQ ID NO: 727396 - RNA, 19 nt, Artificial Sequence
  Description of Artificial Sequence: Synthetic oligonucleotide
  Sense strand starting at position 1105 of SEQ ID NO: 586563
gcuugucacaaaggaugaa

SEQ ID NO: 727397 - RNA, 19 nt, Artificial Sequence
  Description of Artificial Sequence: Synthetic oligonucleotide
  Antisense strand to SEQ ID NO: 727396
uucauccuuugugacaagc

SEQ ID NO: 727398 - RNA, 19 nt, Artificial Sequence
  Description of Artificial Sequence: Synthetic oligonucleotide
  Sense strand starting at position 1126 of SEQ ID NO: 586563
uaagcuuaucagggcugau

SEQ ID NO: 727399 - RNA, 19 nt, Artificial Sequence
  Description of Artificial Sequence: Synthetic oligonucleotide
  Antisense strand to SEQ ID NO: 727398
aucagcccugauaagcuua

SEQ ID NO: 727400 - RNA, 19 nt, Artificial Sequence
  Description of Artificial Sequence: Synthetic oligonucleotide
  Sense strand starting at position 1275 of SEQ ID NO: 586563
caucaacuucucgguggaa

SEQ ID NO: 727401 - RNA, 19 nt, Artificial Sequence
  Description of Artificial Sequence: Synthetic oligonucleotide
  Antisense strand to SEQ ID NO: 727400
uuccaccgagaaguugaug

SEQ ID NO: 727402 - RNA, 19 nt, Artificial Sequence
  Description of Artificial Sequence: Synthetic oligonucleotide
  Sense strand starting at position 1276 of SEQ ID NO: 586563
aucaacuucucgguggaaa

SEQ ID NO: 727403 - RNA, 19 nt, Artificial Sequence
  Description of Artificial Sequence: Synthetic oligonucleotide
  Antisense strand to SEQ ID NO: 727402
uuuccaccgagaaguugau

SEQ ID NO: 727404 - RNA, 19 nt, Artificial Sequence
  Description of Artificial Sequence: Synthetic oligonucleotide
  Sense strand starting at position 1310 of SEQ ID NO: 586563
uugguaucacacuggaaag

SEQ ID NO: 727405 - RNA, 19 nt, Artificial Sequence
  Description of Artificial Sequence: Synthetic oligonucleotide
  Antisense strand to SEQ ID NO: 727404
cuuuccagugugauaccaa

SEQ ID NO: 727406 - RNA, 19 nt, Artificial Sequence
  Description of Artificial Sequence: Synthetic oligonucleotide
  Sense strand starting at position 1311 of SEQ ID NO: 586563
ugguaucacacuggaaagu

SEQ ID NO: 727407 - RNA, 19 nt, Artificial Sequence
  Description of Artificial Sequence: Synthetic oligonucleotide
  Antisense strand to SEQ ID NO: 727406
acuuuccagugugauacca

SEQ ID NO: 727408 - RNA, 19 nt, Artificial Sequence
  Description of Artificial Sequence: Synthetic oligonucleotide
  Sense strand starting at position 1524 of SEQ ID NO: 586563
gggccuugaagguauguca

SEQ ID NO: 727409 - RNA, 19 nt, Artificial Sequence
  Description of Artificial Sequence: Synthetic oligonucleotide
  Antisense strand to SEQ ID NO: 727408
ugacauaccuucaaggccc

SEQ ID NO: 727410 - RNA, 19 nt, Artificial Sequence
  Description of Artificial Sequence: Synthetic oligonucleotide
  Sense strand starting at position 1527 of SEQ ID NO: 586563
ccuugaagguaugucaaug

SEQ ID NO: 727411 - RNA, 19 nt, Artificial Sequence
  Description of Artificial Sequence: Synthetic oligonucleotide
  Antisense strand to SEQ ID NO: 727410
cauugacauaccuucaagg

SEQ ID NO: 727412 - RNA, 19 nt, Artificial Sequence
  Description of Artificial Sequence: Synthetic oligonucleotide
  Sense strand starting at position 1537 of SEQ ID NO: 586563
augucaaugccugauaaag

SEQ ID NO: 727413 - RNA, 19 nt, Artificial Sequence
  Description of Artificial Sequence: Synthetic oligonucleotide
  Antisense strand to SEQ ID NO: 727412
cuuuaucaggcauugacau

SEQ ID NO: 727414 - RNA, 19 nt, Artificial Sequence
  Description of Artificial Sequence: Synthetic oligonucleotide
  Sense strand starting at position 1549 of SEQ ID NO: 586563
gauaaagccgucuauggga

SEQ ID NO: 727415 - RNA, 19 nt, Artificial Sequence
  Description of Artificial Sequence: Synthetic oligonucleotide
  Antisense strand to SEQ ID NO: 727414
ucccauagacggcuuuauc

SEQ ID NO: 727416 - RNA, 19 nt, Artificial Sequence
  Description of Artificial Sequence: Synthetic oligonucleotide
  Sense strand starting at position 1594 of SEQ ID NO: 586563
cgugaucggaaucaaguuu

SEQ ID NO: 727417 - RNA, 19 nt, Artificial Sequence
  Description of Artificial Sequence: Synthetic oligonucleotide
  Antisense strand to SEQ ID NO: 727416
aaacuugauuccgaucacg

SEQ ID NO: 727418 - RNA, 19 nt, Artificial Sequence
  Description of Artificial Sequence: Synthetic oligonucleotide
  Sense strand starting at position 1612 of SEQ ID NO: 586563
ucagaaacgucccuugaaa

SEQ ID NO: 727419 - RNA, 19 nt, Artificial Sequence
  Description of Artificial Sequence: Synthetic oligonucleotide
  Antisense strand to SEQ ID NO: 727418
uuucaagggacguuucuga

SEQ ID NO: 727420 - RNA, 19 nt, Artificial Sequence
  Description of Artificial Sequence: Synthetic oligonucleotide
  Sense strand starting at position 1920 of SEQ ID NO: 586563
ggccucuguggguaacaga

SEQ ID NO: 727421 - RNA, 19 nt, Artificial Sequence
  Description of Artificial Sequence: Synthetic oligonucleotide
  Antisense strand to SEQ ID NO: 727420
ucuguuacccacagaggcc

SEQ ID NO: 727422 - RNA, 19 nt, Artificial Sequence
  Description of Artificial Sequence: Synthetic oligonucleotide
  Sense strand starting at position 2014 of SEQ ID NO: 586563
cgacucuuaccaggguuau

SEQ ID NO: 727423 - RNA, 19 nt, Artificial Sequence
  Description of Artificial Sequence: Synthetic oligonucleotide
  Antisense strand to SEQ ID NO: 727422
auaacccugguaagagucg

SEQ ID NO: 727424 - RNA, 19 nt, Artificial Sequence
  Description of Artificial Sequence: Synthetic oligonucleotide
  Sense strand starting at position 2015 of SEQ ID NO: 586563
gacucuuaccaggguuauc

SEQ ID NO: 727425 - RNA, 19 nt, Artificial Sequence
  Description of Artificial Sequence: Synthetic oligonucleotide
  Antisense strand to SEQ ID NO: 727424
gauaacccugguaagaguc

SEQ ID NO: 727426 - RNA, 19 nt, Artificial Sequence
  Description of Artificial Sequence: Synthetic oligonucleotide
  Sense strand starting at position 2166 of SEQ ID NO: 586563
cggguaauggugggaucua

SEQ ID NO: 727427 - RNA, 19 nt, Artificial Sequence
  Description of Artificial Sequence: Synthetic oligonucleotide
  Antisense strand to SEQ ID NO: 727426
uagaucccaccauuacccg

SEQ ID NO: 727428 - RNA, 19 nt, Artificial Sequence
  Description of Artificial Sequence: Synthetic oligonucleotide
  Sense strand starting at position 2404 of SEQ ID NO: 586563
ugaagcaucuugguggauu

SEQ ID NO: 727429 - RNA, 19 nt, Artificial Sequence
  Description of Artificial Sequence: Synthetic oligonucleotide
  Antisense strand to SEQ ID NO: 727428
aauccaccaagaugcuuca

SEQ ID NO: 727430 - RNA, 19 nt, Artificial Sequence
  Description of Artificial Sequence: Synthetic oligonucleotide
  Sense strand starting at position 2406 of SEQ ID NO: 586563
aagcaucuugguggauuaa

SEQ ID NO: 727431 - RNA, 19 nt, Artificial Sequence
  Description of Artificial Sequence: Synthetic oligonucleotide
  Antisense strand to SEQ ID NO: 727430
uuaauccaccaagaugcuu

SEQ ID NO: 727432 - RNA, 19 nt, Artificial Sequence
  Description of Artificial Sequence: Synthetic oligonucleotide
  Sense strand starting at position 2482 of SEQ ID NO: 586563
ugguaaagucgggaagcuu

SEQ ID NO: 727433 - RNA, 19 nt, Artificial Sequence
  Description of Artificial Sequence: Synthetic oligonucleotide
  Antisense strand to SEQ ID NO: 727432
aagcuucccgacuuuacca

SEQ ID NO: 727434 - RNA, 19 nt, Artificial Sequence
  Description of Artificial Sequence: Synthetic oligonucleotide
  Sense strand starting at position 2504 of SEQ ID NO: 586563
gaacacugacguuaaguga

SEQ ID NO: 727435 - RNA, 19 nt, Artificial Sequence
  Description of Artificial Sequence: Synthetic oligonucleotide
  Antisense strand to SEQ ID NO: 727434
ucacuuaacgucaguguuc

SEQ ID NO: 727436 - RNA, 19 nt, Artificial Sequence
  Description of Artificial Sequence: Synthetic oligonucleotide
  Sense strand starting at position 2507 of SEQ ID NO: 586563
cacugacguuaagugauaa

SEQ ID NO: 727437 - RNA, 19 nt, Artificial Sequence
  Description of Artificial Sequence: Synthetic oligonucleotide
  Antisense strand to SEQ ID NO: 727436
uuaucacuuaacgucagug

SEQ ID NO: 727438 - RNA, 19 nt, Artificial Sequence
  Description of Artificial Sequence: Synthetic oligonucleotide
  Sense strand starting at position 2508 of SEQ ID NO: 586563
acugacguuaagugauaau

SEQ ID NO: 727439 - RNA, 19 nt, Artificial Sequence
  Description of Artificial Sequence: Synthetic oligonucleotide
  Antisense strand to SEQ ID NO: 727438
auuaucacuuaacgucagu

SEQ ID NO: 727440 - RNA, 19 nt, Artificial Sequence
  Description of Artificial Sequence: Synthetic oligonucleotide
  Sense strand starting at position 2519 of SEQ ID NO: 586563
gugauaauucugcaguuug

SEQ ID NO: 727441 - RNA, 19 nt, Artificial Sequence
  Description of Artificial Sequence: Synthetic oligonucleotide
  Antisense strand to SEQ ID NO: 727440
caaacugcagaauuaucac

SEQ ID NO: 727442 - RNA, 19 nt, Artificial Sequence
  Description of Artificial Sequence: Synthetic oligonucleotide
  Sense strand starting at position 2543 of SEQ ID NO: 586563
agacgaacuuuauuacauc

SEQ ID NO: 727443 - RNA, 19 nt, Artificial Sequence
  Description of Artificial Sequence: Synthetic oligonucleotide
  Antisense strand to SEQ ID NO: 727442
gauguaauaaaguucgucu

SEQ ID NO: 727444 - RNA, 19 nt, Artificial Sequence
  Description of Artificial Sequence: Synthetic oligonucleotide
  Sense strand starting at position 2668 of SEQ ID NO: 586563
gacuaaagauuaucugugu

SEQ ID NO: 727445 - RNA, 19 nt, Artificial Sequence
  Description of Artificial Sequence: Synthetic oligonucleotide
  Antisense strand to SEQ ID NO: 727444
acacagauaaucuuuaguc

SEQ ID NO: 727446 - RNA, 19 nt, Artificial Sequence
  Description of Artificial Sequence: Synthetic oligonucleotide
  Sense strand starting at position 2669 of SEQ ID NO: 586563
acuaaagauuaucuguguu

SEQ ID NO: 727447 - RNA, 19 nt, Artificial Sequence
  Description of Artificial Sequence: Synthetic oligonucleotide
  Antisense strand to SEQ ID NO: 727446
aacacagauaaucuuuagu

SEQ ID NO: 727448 - RNA, 19 nt, Artificial Sequence
  Description of Artificial Sequence: Synthetic oligonucleotide
  Sense strand starting at position 2720 of SEQ ID NO: 586563
agacuagaaccuugucuuu

SEQ ID NO: 727449 - RNA, 19 nt, Artificial Sequence
  Description of Artificial Sequence: Synthetic oligonucleotide
  Antisense strand to SEQ ID NO: 727448
aaagacaagguucuagucu

SEQ ID NO: 727450 - RNA, 19 nt, Artificial Sequence
  Description of Artificial Sequence: Synthetic oligonucleotide
  Sense strand starting at position 52 of SEQ ID NO: 586564
agagcaauguauggagacu

SEQ ID NO: 727451 - RNA, 19 nt, Artificial Sequence
  Description of Artificial Sequence: Synthetic oligonucleotide
  Antisense strand to SEQ ID NO: 727450
agucuccauacauugcucu

SEQ ID NO: 727452 - RNA, 19 nt, Artificial Sequence
  Description of Artificial Sequence: Synthetic oligonucleotide
  Sense strand starting at position 64 of SEQ ID NO: 586564
ggagacucacguugugaac

SEQ ID NO: 727453 - RNA, 19 nt, Artificial Sequence
  Description of Artificial Sequence: Synthetic oligonucleotide
  Antisense strand to SEQ ID NO: 727452
guucacaacgugagucucc

SEQ ID NO: 727454 - RNA, 19 nt, Artificial Sequence
  Description of Artificial Sequence: Synthetic oligonucleotide
  Sense strand starting at position 66 of SEQ ID NO: 586564
agacucacguugugaacuu

SEQ ID NO: 727455 - RNA, 19 nt, Artificial Sequence
  Description of Artificial Sequence: Synthetic oligonucleotide
  Antisense strand to SEQ ID NO: 727454
aaguucacaacgugagucu

SEQ ID NO: 727456 - RNA, 19 nt, Artificial Sequence
  Description of Artificial Sequence: Synthetic oligonucleotide
  Sense strand starting at position 67 of SEQ ID NO: 586564
gacucacguugugaacuuu

SEQ ID NO: 727457 - RNA, 19 nt, Artificial Sequence
  Description of Artificial Sequence: Synthetic oligonucleotide
  Antisense strand to SEQ ID NO: 727456
aaaguucacaacgugaguc

SEQ ID NO: 727458 - RNA, 19 nt, Artificial Sequence
  Description of Artificial Sequence: Synthetic oligonucleotide
  Sense strand starting at position 151 of SEQ ID NO: 586564
gcggaaugcuccuagagga

SEQ ID NO: 727459 - RNA, 19 nt, Artificial Sequence
  Description of Artificial Sequence: Synthetic oligonucleotide
  Antisense strand to SEQ ID NO: 727458
uccucuaggagcauuccgc

SEQ ID NO: 727460 - RNA, 19 nt, Artificial Sequence
  Description of Artificial Sequence: Synthetic oligonucleotide
  Sense strand starting at position 311 of SEQ ID NO: 586564
cagagagcugagugaaaua

SEQ ID NO: 727461 - RNA, 19 nt, Artificial Sequence
  Description of Artificial Sequence: Synthetic oligonucleotide
  Antisense strand to SEQ ID NO: 727460
uauuucacucagcucucug

SEQ ID NO: 727462 - RNA, 19 nt, Artificial Sequence
  Description of Artificial Sequence: Synthetic oligonucleotide
  Sense strand starting at position 387 of SEQ ID NO: 586564
cuauuucugccuugucuca

SEQ ID NO: 727463 - RNA, 19 nt, Artificial Sequence
  Description of Artificial Sequence: Synthetic oligonucleotide
  Antisense strand to SEQ ID NO: 727462
ugagacaaggcagaaauag

SEQ ID NO: 727464 - RNA, 19 nt, Artificial Sequence
  Description of Artificial Sequence: Synthetic oligonucleotide
  Sense strand starting at position 389 of SEQ ID NO: 586564
auuucugccuugucucaua

SEQ ID NO: 727465 - RNA, 19 nt, Artificial Sequence
  Description of Artificial Sequence: Synthetic oligonucleotide
  Antisense strand to SEQ ID NO: 727464
uaugagacaaggcagaaau

SEQ ID NO: 727466 - RNA, 19 nt, Artificial Sequence
  Description of Artificial Sequence: Synthetic oligonucleotide
  Sense strand starting at position 394 of SEQ ID NO: 586564
ugccuugucucauaggagu

SEQ ID NO: 727467 - RNA, 19 nt, Artificial Sequence
  Description of Artificial Sequence: Synthetic oligonucleotide
  Antisense strand to SEQ ID NO: 727466
acuccuaugagacaaggca

SEQ ID NO: 727468 - RNA, 19 nt, Artificial Sequence
  Description of Artificial Sequence: Synthetic oligonucleotide
  Sense strand starting at position 499 of SEQ ID NO: 586564
ccugaaguuuccuguccag

SEQ ID NO: 727469 - RNA, 19 nt, Artificial Sequence
  Description of Artificial Sequence: Synthetic oligonucleotide
  Antisense strand to SEQ ID NO: 727468
cuggacaggaaacuucagg

SEQ ID NO: 727470 - RNA, 19 nt, Artificial Sequence
  Description of Artificial Sequence: Synthetic oligonucleotide
  Sense strand starting at position 615 of SEQ ID NO: 586564
gcaaguucucagucuugcu

SEQ ID NO: 727471 - RNA, 19 nt, Artificial Sequence
  Description of Artificial Sequence: Synthetic oligonucleotide
  Antisense strand to SEQ ID NO: 727470
agcaagacugagaacuugc

SEQ ID NO: 727472 - RNA, 19 nt, Artificial Sequence
  Description of Artificial Sequence: Synthetic oligonucleotide
  Sense strand starting at position 784 of SEQ ID NO: 586564
cccuaauccuccugggaau

SEQ ID NO: 727473 - RNA, 19 nt, Artificial Sequence
  Description of Artificial Sequence: Synthetic oligonucleotide
  Antisense strand to SEQ ID NO: 727472
auucccaggaggauuaggg

SEQ ID NO: 727474 - RNA, 19 nt, Artificial Sequence
  Description of Artificial Sequence: Synthetic oligonucleotide
  Sense strand starting at position 785 of SEQ ID NO: 586564
ccuaauccuccugggaaua

SEQ ID NO: 727475 - RNA, 19 nt, Artificial Sequence
  Description of Artificial Sequence: Synthetic oligonucleotide
  Antisense strand to SEQ ID NO: 727474
uauucccaggaggauuagg

SEQ ID NO: 727476 - RNA, 19 nt, Artificial Sequence
  Description of Artificial Sequence: Synthetic oligonucleotide
  Sense strand starting at position 786 of SEQ ID NO: 586564
cuaauccuccugggaauau

SEQ ID NO: 727477 - RNA, 19 nt, Artificial Sequence
  Description of Artificial Sequence: Synthetic oligonucleotide
  Antisense strand to SEQ ID NO: 727476
auauucccaggaggauuag

SEQ ID NO: 727478 - RNA, 19 nt, Artificial Sequence
  Description of Artificial Sequence: Synthetic oligonucleotide
  Sense strand starting at position 807 of SEQ ID NO: 586564
caccauuggccugggaaca

SEQ ID NO: 727479 - RNA, 19 nt, Artificial Sequence
  Description of Artificial Sequence: Synthetic oligonucleotide
  Antisense strand to SEQ ID NO: 727478
uguucccaggccaauggug

SEQ ID NO: 727480 - RNA, 19 nt, Artificial Sequence
  Description of Artificial Sequence: Synthetic oligonucleotide
  Sense strand starting at position 808 of SEQ ID NO: 586564
accauuggccugggaacaa

SEQ ID NO: 727481 - RNA, 19 nt, Artificial Sequence
  Description of Artificial Sequence: Synthetic oligonucleotide
  Antisense strand to SEQ ID NO: 727480
uuguucccaggccaauggu

SEQ ID NO: 727482 - RNA, 19 nt, Artificial Sequence
  Description of Artificial Sequence: Synthetic oligonucleotide
  Sense strand starting at position 1161 of SEQ ID NO: 586564
gcagaugguuuacaucaca

SEQ ID NO: 727483 - RNA, 19 nt, Artificial Sequence
  Description of Artificial Sequence: Synthetic oligonucleotide
  Antisense strand to SEQ ID NO: 727482
ugugauguaaaccaucugc

SEQ ID NO: 727484 - RNA, 19 nt, Artificial Sequence
  Description of Artificial Sequence: Synthetic oligonucleotide
  Sense strand starting at position 1226 of SEQ ID NO: 586564
ccagcuagguggcuagaua

SEQ ID NO: 727485 - RNA, 19 nt, Artificial Sequence
  Description of Artificial Sequence: Synthetic oligonucleotide
  Antisense strand to SEQ ID NO: 727484
uaucuagccaccuagcugg

SEQ ID NO: 727486 - RNA, 19 nt, Artificial Sequence
  Description of Artificial Sequence: Synthetic oligonucleotide
  Sense strand starting at position 1268 of SEQ ID NO: 586564
ccacucagcucucuggaaa

SEQ ID NO: 727487 - RNA, 19 nt, Artificial Sequence
  Description of Artificial Sequence: Synthetic oligonucleotide
  Antisense strand to SEQ ID NO: 727486
uuuccagagagcugagugg

SEQ ID NO: 727488 - RNA, 19 nt, Artificial Sequence
  Description of Artificial Sequence: Synthetic oligonucleotide
  Sense strand starting at position 1358 of SEQ ID NO: 586564
agccuugagcccuauacca

SEQ ID NO: 727489 - RNA, 19 nt, Artificial Sequence
  Description of Artificial Sequence: Synthetic oligonucleotide
  Antisense strand to SEQ ID NO: 727488
ugguauagggcucaaggcu

SEQ ID NO: 727490 - RNA, 19 nt, Artificial Sequence
  Description of Artificial Sequence: Synthetic oligonucleotide
  Sense strand starting at position 2228 of SEQ ID NO: 586564
uaagguaagccgugacaga

SEQ ID NO: 727491 - RNA, 19 nt, Artificial Sequence
  Description of Artificial Sequence: Synthetic oligonucleotide
  Antisense strand to SEQ ID NO: 727490
ucugucacggcuuaccuua

SEQ ID NO: 727492 - RNA, 19 nt, Artificial Sequence
  Description of Artificial Sequence: Synthetic oligonucleotide
  Sense strand starting at position 2304 of SEQ ID NO: 586564
accaguagacaaggugauu

SEQ ID NO: 727493 - RNA, 19 nt, Artificial Sequence
  Description of Artificial Sequence: Synthetic oligonucleotide
  Antisense strand to SEQ ID NO: 727492
aaucaccuugucuacuggu

SEQ ID NO: 727494 - RNA, 19 nt, Artificial Sequence
  Description of Artificial Sequence: Synthetic oligonucleotide
  Sense strand starting at position 2633 of SEQ ID NO: 586564
ccgcguuugagcucugaga

SEQ ID NO: 727495 - RNA, 19 nt, Artificial Sequence
  Description of Artificial Sequence: Synthetic oligonucleotide
  Antisense strand to SEQ ID NO: 727494
ucucagagcucaaacgcgg

SEQ ID NO: 727496 - RNA, 19 nt, Artificial Sequence
  Description of Artificial Sequence: Synthetic oligonucleotide
  Sense strand starting at position 3214 of SEQ ID NO: 586564
gagcuaaagaaggguguuu

SEQ ID NO: 727497 - RNA, 19 nt, Artificial Sequence
  Description of Artificial Sequence: Synthetic oligonucleotide
  Antisense strand to SEQ ID NO: 727496
aaacacccuucuuuagcuc

SEQ ID NO: 727498 - RNA, 19 nt, Artificial Sequence
  Description of Artificial Sequence: Synthetic oligonucleotide
  Sense strand starting at position 3216 of SEQ ID NO: 586564
gcuaaagaaggguguuuga

SEQ ID NO: 727499 - RNA, 19 nt, Artificial Sequence
  Description of Artificial Sequence: Synthetic oligonucleotide
  Antisense strand to SEQ ID NO: 727498
ucaaacacccuucuuuagc

SEQ ID NO: 727500 - RNA, 19 nt, Artificial Sequence
  Description of Artificial Sequence: Synthetic oligonucleotide
  Sense strand starting at position 3219 of SEQ ID NO: 586564
aaagaaggguguuugaauc

SEQ ID NO: 727501 - RNA, 19 nt, Artificial Sequence
  Description of Artificial Sequence: Synthetic oligonucleotide
  Antisense strand to SEQ ID NO: 727500
gauucaaacacccuucuuu

SEQ ID NO: 727502 - RNA, 19 nt, Artificial Sequence
  Description of Artificial Sequence: Synthetic oligonucleotide
  Sense strand starting at position 3226 of SEQ ID NO: 586564
gguguuugaauccauugca

SEQ ID NO: 727503 - RNA, 19 nt, Artificial Sequence
  Description of Artificial Sequence: Synthetic oligonucleotide
  Antisense strand to SEQ ID NO: 727502
ugcaauggauucaaacacc

SEQ ID NO: 727504 - RNA, 19 nt, Artificial Sequence
  Description of Artificial Sequence: Synthetic oligonucleotide
  Sense strand starting at position 3522 of SEQ ID NO: 586564
auguauguuugauugguau

SEQ ID NO: 727505 - RNA, 19 nt, Artificial Sequence
  Description of Artificial Sequence: Synthetic oligonucleotide
  Antisense strand to SEQ ID NO: 727504
auaccaaucaaacauacau

SEQ ID NO: 727506 - RNA, 19 nt, Artificial Sequence
  Description of Artificial Sequence: Synthetic oligonucleotide
  Sense strand starting at position 3524 of SEQ ID NO: 586564
guauguuugauugguauac

SEQ ID NO: 727507 - RNA, 19 nt, Artificial Sequence
  Description of Artificial Sequence: Synthetic oligonucleotide
  Antisense strand to SEQ ID NO: 727506
guauaccaaucaaacauac

SEQ ID NO: 727508 - RNA, 19 nt, Artificial Sequence
  Description of Artificial Sequence: Synthetic oligonucleotide
  Sense strand starting at position 3578 of SEQ ID NO: 586564
aacagucuucgggauauua

SEQ ID NO: 727509 - RNA, 19 nt, Artificial Sequence
  Description of Artificial Sequence: Synthetic oligonucleotide
  Antisense strand to SEQ ID NO: 727508
uaauaucccgaagacuguu

SEQ ID NO: 727510 - RNA, 19 nt, Artificial Sequence
  Description of Artificial Sequence: Synthetic oligonucleotide
  Sense strand starting at position 3580 of SEQ ID NO: 586564
cagucuucgggauauuauc

SEQ ID NO: 727511 - RNA, 19 nt, Artificial Sequence
  Description of Artificial Sequence: Synthetic oligonucleotide
  Antisense strand to SEQ ID NO: 727510
gauaauaucccgaagacug

SEQ ID NO: 727512 - RNA, 19 nt, Artificial Sequence
  Description of Artificial Sequence: Synthetic oligonucleotide
  Sense strand starting at position 22 of SEQ ID NO: 586565
uuucgugagauugaucuuu

SEQ ID NO: 727513 - RNA, 19 nt, Artificial Sequence
  Description of Artificial Sequence: Synthetic oligonucleotide
  Antisense strand to SEQ ID NO: 727512
aaagaucaaucucacgaaa

SEQ ID NO: 727514 - RNA, 19 nt, Artificial Sequence
  Description of Artificial Sequence: Synthetic oligonucleotide
  Sense strand starting at position 27 of SEQ ID NO: 586565
ugagauugaucuuuaugca

SEQ ID NO: 727515 - RNA, 19 nt, Artificial Sequence
  Description of Artificial Sequence: Synthetic oligonucleotide
  Antisense strand to SEQ ID NO: 727514
ugcauaaagaucaaucuca

SEQ ID NO: 727516 - RNA, 19 nt, Artificial Sequence
  Description of Artificial Sequence: Synthetic oligonucleotide
  Sense strand starting at position 28 of SEQ ID NO: 586565
gagauugaucuuuaugcac

SEQ ID NO: 727517 - RNA, 19 nt, Artificial Sequence
  Description of Artificial Sequence: Synthetic oligonucleotide
  Antisense strand to SEQ ID NO: 727516
gugcauaaagaucaaucuc

SEQ ID NO: 727518 - RNA, 19 nt, Artificial Sequence
  Description of Artificial Sequence: Synthetic oligonucleotide
  Sense strand starting at position 50 of SEQ ID NO: 586565
gguaaagaugcguagagaa

SEQ ID NO: 727519 - RNA, 19 nt, Artificial Sequence
  Description of Artificial Sequence: Synthetic oligonucleotide
  Antisense strand to SEQ ID NO: 727518
uucucuacgcaucuuuacc

SEQ ID NO: 727520 - RNA, 19 nt, Artificial Sequence
  Description of Artificial Sequence: Synthetic oligonucleotide
  Sense strand starting at position 231 of SEQ ID NO: 586565
guagcuuaacuguuacguu

SEQ ID NO: 727521 - RNA, 19 nt, Artificial Sequence
  Description of Artificial Sequence: Synthetic oligonucleotide
  Antisense strand to SEQ ID NO: 727520
aacguaacaguuaagcuac

SEQ ID NO: 727522 - RNA, 19 nt, Artificial Sequence
  Description of Artificial Sequence: Synthetic oligonucleotide
  Sense strand starting at position 335 of SEQ ID NO: 586565
uuaagauguauguacagua

SEQ ID NO: 727523 - RNA, 19 nt, Artificial Sequence
  Description of Artificial Sequence: Synthetic oligonucleotide
  Antisense strand to SEQ ID NO: 727522
uacuguacauacaucuuaa

SEQ ID NO: 727524 - RNA, 19 nt, Artificial Sequence
  Description of Artificial Sequence: Synthetic oligonucleotide
  Sense strand starting at position 340 of SEQ ID NO: 586565
auguauguacaguauuagu

SEQ ID NO: 727525 - RNA, 19 nt, Artificial Sequence
  Description of Artificial Sequence: Synthetic oligonucleotide
  Antisense strand to SEQ ID NO: 727524
acuaauacuguacauacau

SEQ ID NO: 727526 - RNA, 19 nt, Artificial Sequence
  Description of Artificial Sequence: Synthetic oligonucleotide
  Sense strand starting at position 364 of SEQ ID NO: 586565
accaaagagugauauuuga

SEQ ID NO: 727527 - RNA, 19 nt, Artificial Sequence
  Description of Artificial Sequence: Synthetic oligonucleotide
  Antisense strand to SEQ ID NO: 727526
ucaaauaucacucuuuggu

SEQ ID NO: 727528 - RNA, 19 nt, Artificial Sequence
  Description of Artificial Sequence: Synthetic oligonucleotide
  Sense strand starting at position 414 of SEQ ID NO: 586565
ugugguauucucuacaaag

SEQ ID NO: 727529 - RNA, 19 nt, Artificial Sequence
  Description of Artificial Sequence: Synthetic oligonucleotide
  Antisense strand to SEQ ID NO: 727528
cuuuguagagaauaccaca

SEQ ID NO: 727530 - RNA, 19 nt, Artificial Sequence
  Description of Artificial Sequence: Synthetic oligonucleotide
  Sense strand starting at position 663 of SEQ ID NO: 586565
cacugaaacguauggacaa

SEQ ID NO: 727531 - RNA, 19 nt, Artificial Sequence
  Description of Artificial Sequence: Synthetic oligonucleotide
  Antisense strand to SEQ ID NO: 727530
uuguccauacguuucagug

SEQ ID NO: 727532 - RNA, 19 nt, Artificial Sequence
  Description of Artificial Sequence: Synthetic oligonucleotide
  Sense strand starting at position 712 of SEQ ID NO: 586565
ggaccuuaauggccaauaa

SEQ ID NO: 727533 - RNA, 19 nt, Artificial Sequence
  Description of Artificial Sequence: Synthetic oligonucleotide
  Antisense strand to SEQ ID NO: 727532
uuauuggccauuaaggucc

SEQ ID NO: 727534 - RNA, 19 nt, Artificial Sequence
  Description of Artificial Sequence: Synthetic oligonucleotide
  Sense strand starting at position 772 of SEQ ID NO: 586565
aagcaagcuggugacauau

SEQ ID NO: 727535 - RNA, 19 nt, Artificial Sequence
  Description of Artificial Sequence: Synthetic oligonucleotide
  Antisense strand to SEQ ID NO: 727534
auaugucaccagcuugcuu

SEQ ID NO: 727536 - RNA, 19 nt, Artificial Sequence
  Description of Artificial Sequence: Synthetic oligonucleotide
  Sense strand starting at position 791 of SEQ ID NO: 586565
uuuccaggccuugauaauu

SEQ ID NO: 727537 - RNA, 19 nt, Artificial Sequence
  Description of Artificial Sequence: Synthetic oligonucleotide
  Antisense strand to SEQ ID NO: 727536
aauuaucaaggccuggaaa

SEQ ID NO: 727538 - RNA, 19 nt, Artificial Sequence
  Description of Artificial Sequence: Synthetic oligonucleotide
  Sense strand starting at position 822 of SEQ ID NO: 586565
ccagaucucgguuacuaag

SEQ ID NO: 727539 - RNA, 19 nt, Artificial Sequence
  Description of Artificial Sequence: Synthetic oligonucleotide
  Antisense strand to SEQ ID NO: 727538
cuuaguaaccgagaucugg

SEQ ID NO: 727540 - RNA, 19 nt, Artificial Sequence
  Description of Artificial Sequence: Synthetic oligonucleotide
  Sense strand starting at position 824 of SEQ ID NO: 586565
agaucucgguuacuaagau

SEQ ID NO: 727541 - RNA, 19 nt, Artificial Sequence
  Description of Artificial Sequence: Synthetic oligonucleotide
  Antisense strand to SEQ ID NO: 727540
aucuuaguaaccgagaucu

SEQ ID NO: 727542 - RNA, 19 nt, Artificial Sequence
  Description of Artificial Sequence: Synthetic oligonucleotide
  Sense strand starting at position 890 of SEQ ID NO: 586565
ugaagagaacgcgauucuu

SEQ ID NO: 727543 - RNA, 19 nt, Artificial Sequence
  Description of Artificial Sequence: Synthetic oligonucleotide
  Antisense strand to SEQ ID NO: 727542
aagaaucgcguucucuuca

SEQ ID NO: 727544 - RNA, 19 nt, Artificial Sequence
  Description of Artificial Sequence: Synthetic oligonucleotide
  Sense strand starting at position 1267 of SEQ ID NO: 586565
ggcacuagugguuauaaag

SEQ ID NO: 727545 - RNA, 19 nt, Artificial Sequence
  Description of Artificial Sequence: Synthetic oligonucleotide
  Antisense strand to SEQ ID NO: 727544
cuuuauaaccacuagugcc

SEQ ID NO: 727546 - RNA, 19 nt, Artificial Sequence
  Description of Artificial Sequence: Synthetic oligonucleotide
  Sense strand starting at position 1372 of SEQ ID NO: 586565
ugaacuugucaacaaguca

SEQ ID NO: 727547 - RNA, 19 nt, Artificial Sequence
  Description of Artificial Sequence: Synthetic oligonucleotide
  Antisense strand to SEQ ID NO: 727546
ugacuuguugacaaguuca

SEQ ID NO: 727548 - RNA, 19 nt, Artificial Sequence
  Description of Artificial Sequence: Synthetic oligonucleotide
  Sense strand starting at position 2749 of SEQ ID NO: 586565
augaaaccucaauguagua

SEQ ID NO: 727549 - RNA, 19 nt, Artificial Sequence
  Description of Artificial Sequence: Synthetic oligonucleotide
  Antisense strand to SEQ ID NO: 727548
uacuacauugagguuucau

SEQ ID NO: 727550 - RNA, 19 nt, Artificial Sequence
  Description of Artificial Sequence: Synthetic oligonucleotide
  Sense strand starting at position 2843 of SEQ ID NO: 586565
gaaugauaguuauugagua

SEQ ID NO: 727551 - RNA, 19 nt, Artificial Sequence
  Description of Artificial Sequence: Synthetic oligonucleotide
  Antisense strand to SEQ ID NO: 727550
uacucaauaacuaucauuc

SEQ ID NO: 727552 - RNA, 19 nt, Artificial Sequence
  Description of Artificial Sequence: Synthetic oligonucleotide
  Sense strand starting at position 2847 of SEQ ID NO: 586565
gauaguuauugaguaauga

SEQ ID NO: 727553 - RNA, 19 nt, Artificial Sequence
  Description of Artificial Sequence: Synthetic oligonucleotide
  Antisense strand to SEQ ID NO: 727552
ucauuacucaauaacuauc

SEQ ID NO: 727554 - RNA, 19 nt, Artificial Sequence
  Description of Artificial Sequence: Synthetic oligonucleotide
  Sense strand starting at position 2858 of SEQ ID NO: 586565
aguaaugaugcugacgaau

SEQ ID NO: 727555 - RNA, 19 nt, Artificial Sequence
  Description of Artificial Sequence: Synthetic oligonucleotide
  Antisense strand to SEQ ID NO: 727554
auucgucagcaucauuacu

SEQ ID NO: 727556 - RNA, 19 nt, Artificial Sequence
  Description of Artificial Sequence: Synthetic oligonucleotide
  Sense strand starting at position 2927 of SEQ ID NO: 586565
ugcuguaugcuuuauauuu

SEQ ID NO: 727557 - RNA, 19 nt, Artificial Sequence
  Description of Artificial Sequence: Synthetic oligonucleotide
  Antisense strand to SEQ ID NO: 727556
aaauauaaagcauacagca

SEQ ID NO: 727558 - RNA, 19 nt, Artificial Sequence
  Description of Artificial Sequence: Synthetic oligonucleotide
  Sense strand starting at position 3057 of SEQ ID NO: 586565
ccaggagacuuagcuuaau

SEQ ID NO: 727559 - RNA, 19 nt, Artificial Sequence
  Description of Artificial Sequence: Synthetic oligonucleotide
  Antisense strand to SEQ ID NO: 727558
auuaagcuaagucuccugg

SEQ ID NO: 727560 - RNA, 19 nt, Artificial Sequence
  Description of Artificial Sequence: Synthetic oligonucleotide
  Sense strand starting at position 3060 of SEQ ID NO: 586565
ggagacuuagcuuaaucuc

SEQ ID NO: 727561 - RNA, 19 nt, Artificial Sequence
  Description of Artificial Sequence: Synthetic oligonucleotide
  Antisense strand to SEQ ID NO: 727560
gagauuaagcuaagucucc

SEQ ID NO: 727562 - RNA, 19 nt, Artificial Sequence
  Description of Artificial Sequence: Synthetic oligonucleotide
  Sense strand starting at position 3069 of SEQ ID NO: 586565
gcuuaaucucaagauagca

SEQ ID NO: 727563 - RNA, 19 nt, Artificial Sequence
  Description of Artificial Sequence: Synthetic oligonucleotide
  Antisense strand to SEQ ID NO: 727562
ugcuaucuugagauuaagc

SEQ ID NO: 727564 - RNA, 19 nt, Artificial Sequence
  Description of Artificial Sequence: Synthetic oligonucleotide
  Sense strand starting at position 3089 of SEQ ID NO: 586565
ggugucuugccagaaugga

SEQ ID NO: 727565 - RNA, 19 nt, Artificial Sequence
  Description of Artificial Sequence: Synthetic oligonucleotide
  Antisense strand to SEQ ID NO: 727564
uccauucuggcaagacacc

SEQ ID NO: 727566 - RNA, 19 nt, Artificial Sequence
  Description of Artificial Sequence: Synthetic oligonucleotide
  Sense strand starting at position 3117 of SEQ ID NO: 586565
aguauagaauauguugaca

SEQ ID NO: 727567 - RNA, 19 nt, Artificial Sequence
  Description of Artificial Sequence: Synthetic oligonucleotide
  Antisense strand to SEQ ID NO: 727566
ugucaacauauucuauacu

SEQ ID NO: 727568 - RNA, 19 nt, Artificial Sequence
  Description of Artificial Sequence: Synthetic oligonucleotide
  Sense strand starting at position 3199 of SEQ ID NO: 586565
ggauucuguuugucauaga

SEQ ID NO: 727569 - RNA, 19 nt, Artificial Sequence
  Description of Artificial Sequence: Synthetic oligonucleotide
  Antisense strand to SEQ ID NO: 727568
ucuaugacaaacagaaucc

SEQ ID NO: 727570 - RNA, 19 nt, Artificial Sequence
  Description of Artificial Sequence: Synthetic oligonucleotide
  Sense strand starting at position 3247 of SEQ ID NO: 586565
uuuggagcugaguaaacau

SEQ ID NO: 727571 - RNA, 19 nt, Artificial Sequence
  Description of Artificial Sequence: Synthetic oligonucleotide
  Antisense strand to SEQ ID NO: 727570
auguuuacucagcuccaaa

SEQ ID NO: 727572 - RNA, 19 nt, Artificial Sequence
  Description of Artificial Sequence: Synthetic oligonucleotide
  Sense strand starting at position 3258 of SEQ ID NO: 586565
guaaacaucuccuuaguaa

SEQ ID NO: 727573 - RNA, 19 nt, Artificial Sequence
  Description of Artificial Sequence: Synthetic oligonucleotide
  Antisense strand to SEQ ID NO: 727572
uuacuaaggagauguuuac

SEQ ID NO: 727574 - RNA, 19 nt, Artificial Sequence
  Description of Artificial Sequence: Synthetic oligonucleotide
  Sense strand starting at position 3275 of SEQ ID NO: 586565
aaguguguaugaguaaaca

SEQ ID NO: 727575 - RNA, 19 nt, Artificial Sequence
  Description of Artificial Sequence: Synthetic oligonucleotide
  Antisense strand to SEQ ID NO: 727574
uguuuacucauacacacuu

SEQ ID NO: 727576 - RNA, 19 nt, Artificial Sequence
  Description of Artificial Sequence: Synthetic oligonucleotide
  Sense strand starting at position 3296 of SEQ ID NO: 586565
ucaugaauauggucuacaa

SEQ ID NO: 727577 - RNA, 19 nt, Artificial Sequence
  Description of Artificial Sequence: Synthetic oligonucleotide
  Antisense strand to SEQ ID NO: 727576
uuguagaccauauucauga

SEQ ID NO: 727578 - RNA, 19 nt, Artificial Sequence
  Description of Artificial Sequence: Synthetic oligonucleotide
  Sense strand starting at position 3474 of SEQ ID NO: 586565
augagaaagucuuccuuac

SEQ ID NO: 727579 - RNA, 19 nt, Artificial Sequence
  Description of Artificial Sequence: Synthetic oligonucleotide
  Antisense strand to SEQ ID NO: 727578
guaaggaagacuuucucau

SEQ ID NO: 727580 - RNA, 19 nt, Artificial Sequence
  Description of Artificial Sequence: Synthetic oligonucleotide
  Sense strand starting at position 3559 of SEQ ID NO: 586565
agcuauuaucgggaguuaa

SEQ ID NO: 727581 - RNA, 19 nt, Artificial Sequence
  Description of Artificial Sequence: Synthetic oligonucleotide
  Antisense strand to SEQ ID NO: 727580
uuaacucccgauaauagcu

SEQ ID NO: 727582 - RNA, 19 nt, Artificial Sequence
  Description of Artificial Sequence: Synthetic oligonucleotide
  Sense strand starting at position 3608 of SEQ ID NO: 586565
aaugaagugccguaaugaa

SEQ ID NO: 727583 - RNA, 19 nt, Artificial Sequence
  Description of Artificial Sequence: Synthetic oligonucleotide
  Antisense strand to SEQ ID NO: 727582
uucauuacggcacuucauu

SEQ ID NO: 727584 - RNA, 19 nt, Artificial Sequence
  Description of Artificial Sequence: Synthetic oligonucleotide
  Sense strand starting at position 3615 of SEQ ID NO: 586565
ugccguaaugaacaucaua

SEQ ID NO: 727585 - RNA, 19 nt, Artificial Sequence
  Description of Artificial Sequence: Synthetic oligonucleotide
  Antisense strand to SEQ ID NO: 727584
uaugauguucauuacggca

SEQ ID NO: 727586 - RNA, 19 nt, Artificial Sequence
  Description of Artificial Sequence: Synthetic oligonucleotide
  Sense strand starting at position 3631 of SEQ ID NO: 586565
auaggugcccgauaaaugu

SEQ ID NO: 727587 - RNA, 19 nt, Artificial Sequence
  Description of Artificial Sequence: Synthetic oligonucleotide
  Antisense strand to SEQ ID NO: 727586
acauuuaucgggcaccuau

SEQ ID NO: 727588 - RNA, 19 nt, Artificial Sequence
  Description of Artificial Sequence: Synthetic oligonucleotide
  Sense strand starting at position 3954 of SEQ ID NO: 586565
ucugaauuccaaggugaaa

SEQ ID NO: 727589 - RNA, 19 nt, Artificial Sequence
  Description of Artificial Sequence: Synthetic oligonucleotide
  Antisense strand to SEQ ID NO: 727588
uuucaccuuggaauucaga

SEQ ID NO: 727590 - RNA, 19 nt, Artificial Sequence
  Description of Artificial Sequence: Synthetic oligonucleotide
  Sense strand starting at position 3971 of SEQ ID NO: 586565
aaacgaugacugugagucu

SEQ ID NO: 727591 - RNA, 19 nt, Artificial Sequence
  Description of Artificial Sequence: Synthetic oligonucleotide
  Antisense strand to SEQ ID NO: 727590
agacucacagucaucguuu

SEQ ID NO: 727592 - RNA, 19 nt, Artificial Sequence
  Description of Artificial Sequence: Synthetic oligonucleotide
  Sense strand starting at position 4 of SEQ ID NO: 586566
uuaagauguauguacagua

SEQ ID NO: 727593 - RNA, 19 nt, Artificial Sequence
  Description of Artificial Sequence: Synthetic oligonucleotide
  Antisense strand to SEQ ID NO: 727592
uacuguacauacaucuuaa

SEQ ID NO: 727594 - RNA, 19 nt, Artificial Sequence
  Description of Artificial Sequence: Synthetic oligonucleotide
  Sense strand starting at position 9 of SEQ ID NO: 586566
auguauguacaguauuagu

SEQ ID NO: 727595 - RNA, 19 nt, Artificial Sequence
  Description of Artificial Sequence: Synthetic oligonucleotide
  Antisense strand to SEQ ID NO: 727594
acuaauacuguacauacau

SEQ ID NO: 727596 - RNA, 19 nt, Artificial Sequence
  Description of Artificial Sequence: Synthetic oligonucleotide
  Sense strand starting at position 33 of SEQ ID NO: 586566
accaaagagugauauuuga

SEQ ID NO: 727597 - RNA, 19 nt, Artificial Sequence
  Description of Artificial Sequence: Synthetic oligonucleotide
  Antisense strand to SEQ ID NO: 727596
ucaaauaucacucuuuggu

SEQ ID NO: 727598 - RNA, 19 nt, Artificial Sequence
  Description of Artificial Sequence: Synthetic oligonucleotide
  Sense strand starting at position 83 of SEQ ID NO: 586566
ugugguauucucuacaaag

SEQ ID NO: 727599 - RNA, 19 nt, Artificial Sequence
  Description of Artificial Sequence: Synthetic oligonucleotide
  Antisense strand to SEQ ID NO: 727598
cuuuguagagaauaccaca

SEQ ID NO: 727600 - RNA, 19 nt, Artificial Sequence
  Description of Artificial Sequence: Synthetic oligonucleotide
  Sense strand starting at position 332 of SEQ ID NO: 586566
cacugaaacguauggacaa

SEQ ID NO: 727601 - RNA, 19 nt, Artificial Sequence
  Description of Artificial Sequence: Synthetic oligonucleotide
  Antisense strand to SEQ ID NO: 727600
uuguccauacguuucagug

SEQ ID NO: 727602 - RNA, 19 nt, Artificial Sequence
  Description of Artificial Sequence: Synthetic oligonucleotide
  Sense strand starting at position 381 of SEQ ID NO: 586566
ggaccuuaauggccaauaa

SEQ ID NO: 727603 - RNA, 19 nt, Artificial Sequence
  Description of Artificial Sequence: Synthetic oligonucleotide
  Antisense strand to SEQ ID NO: 727602
uuauuggccauuaaggucc

SEQ ID NO: 727604 - RNA, 19 nt, Artificial Sequence
  Description of Artificial Sequence: Synthetic oligonucleotide
  Sense strand starting at position 441 of SEQ ID NO: 586566
aagcaagcuggugacauau

SEQ ID NO: 727605 - RNA, 19 nt, Artificial Sequence
  Description of Artificial Sequence: Synthetic oligonucleotide
  Antisense strand to SEQ ID NO: 727604
auaugucaccagcuugcuu

SEQ ID NO: 727606 - RNA, 19 nt, Artificial Sequence
  Description of Artificial Sequence: Synthetic oligonucleotide
  Sense strand starting at position 460 of SEQ ID NO: 586566
uuuccaggccuugauaauu

SEQ ID NO: 727607 - RNA, 19 nt, Artificial Sequence
  Description of Artificial Sequence: Synthetic oligonucleotide
  Antisense strand to SEQ ID NO: 727606
aauuaucaaggccuggaaa

SEQ ID NO: 727608 - RNA, 19 nt, Artificial Sequence
  Description of Artificial Sequence: Synthetic oligonucleotide
  Sense strand starting at position 491 of SEQ ID NO: 586566
ccagaucucgguuacuaag

SEQ ID NO: 727609 - RNA, 19 nt, Artificial Sequence
  Description of Artificial Sequence: Synthetic oligonucleotide
  Antisense strand to SEQ ID NO: 727608
cuuaguaaccgagaucugg

SEQ ID NO: 727610 - RNA, 19 nt, Artificial Sequence
  Description of Artificial Sequence: Synthetic oligonucleotide
  Sense strand starting at position 493 of SEQ ID NO: 586566
agaucucgguuacuaagau

SEQ ID NO: 727611 - RNA, 19 nt, Artificial Sequence
  Description of Artificial Sequence: Synthetic oligonucleotide
  Antisense strand to SEQ ID NO: 727610
aucuuaguaaccgagaucu

SEQ ID NO: 727612 - RNA, 19 nt, Artificial Sequence
  Description of Artificial Sequence: Synthetic oligonucleotide
  Sense strand starting at position 559 of SEQ ID NO: 586566
ugaagagaacgcgauucuu

SEQ ID NO: 727613 - RNA, 19 nt, Artificial Sequence
  Description of Artificial Sequence: Synthetic oligonucleotide
  Antisense strand to SEQ ID NO: 727612
aagaaucgcguucucuuca

SEQ ID NO: 727614 - RNA, 19 nt, Artificial Sequence
  Description of Artificial Sequence: Synthetic oligonucleotide
  Sense strand starting at position 936 of SEQ ID NO: 586566
ggcacuagugguuauaaag

SEQ ID NO: 727615 - RNA, 19 nt, Artificial Sequence
  Description of Artificial Sequence: Synthetic oligonucleotide
  Antisense strand to SEQ ID NO: 727614
cuuuauaaccacuagugcc

SEQ ID NO: 727616 - RNA, 19 nt, Artificial Sequence
  Description of Artificial Sequence: Synthetic oligonucleotide
  Sense strand starting at position 1041 of SEQ ID NO: 586566
ugaacuugucaacaaguca

SEQ ID NO: 727617 - RNA, 19 nt, Artificial Sequence
  Description of Artificial Sequence: Synthetic oligonucleotide
  Antisense strand to SEQ ID NO: 727616
ugacuuguugacaaguuca

SEQ ID NO: 727618 - RNA, 19 nt, Artificial Sequence
  Description of Artificial Sequence: Synthetic oligonucleotide
  Sense strand starting at position 2418 of SEQ ID NO: 586566
augaaaccucaauguagua

SEQ ID NO: 727619 - RNA, 19 nt, Artificial Sequence
  Description of Artificial Sequence: Synthetic oligonucleotide
  Antisense strand to SEQ ID NO: 727618
uacuacauugagguuucau

SEQ ID NO: 727620 - RNA, 19 nt, Artificial Sequence
  Description of Artificial Sequence: Synthetic oligonucleotide
  Sense strand starting at position 2512 of SEQ ID NO: 586566
gaaugauaguuauugagua

SEQ ID NO: 727621 - RNA, 19 nt, Artificial Sequence
  Description of Artificial Sequence: Synthetic oligonucleotide
  Antisense strand to SEQ ID NO: 727620
uacucaauaacuaucauuc

SEQ ID NO: 727622 - RNA, 19 nt, Artificial Sequence
  Description of Artificial Sequence: Synthetic oligonucleotide
  Sense strand starting at position 2516 of SEQ ID NO: 586566
gauaguuauugaguaauga

SEQ ID NO: 727623 - RNA, 19 nt, Artificial Sequence
  Description of Artificial Sequence: Synthetic oligonucleotide
  Antisense strand to SEQ ID NO: 727622
ucauuacucaauaacuauc

SEQ ID NO: 727624 - RNA, 19 nt, Artificial Sequence
  Description of Artificial Sequence: Synthetic oligonucleotide
  Sense strand starting at position 2527 of SEQ ID NO: 586566
aguaaugaugcugacgaau

SEQ ID NO: 727625 - RNA, 19 nt, Artificial Sequence
  Description of Artificial Sequence: Synthetic oligonucleotide
  Antisense strand to SEQ ID NO: 727624
auucgucagcaucauuacu

SEQ ID NO: 727626 - RNA, 19 nt, Artificial Sequence
  Description of Artificial Sequence: Synthetic oligonucleotide
  Sense strand starting at position 2596 of SEQ ID NO: 586566
ugcuguaugcuuuauauuu

SEQ ID NO: 727627 - RNA, 19 nt, Artificial Sequence
  Description of Artificial Sequence: Synthetic oligonucleotide
  Antisense strand to SEQ ID NO: 727626
aaauauaaagcauacagca

SEQ ID NO: 727628 - RNA, 19 nt, Artificial Sequence
  Description of Artificial Sequence: Synthetic oligonucleotide
  Sense strand starting at position 2726 of SEQ ID NO: 586566
ccaggagacuuagcuuaau

SEQ ID NO: 727629 - RNA, 19 nt, Artificial Sequence
  Description of Artificial Sequence: Synthetic oligonucleotide
  Antisense strand to SEQ ID NO: 727628
auuaagcuaagucuccugg

SEQ ID NO: 727630 - RNA, 19 nt, Artificial Sequence
  Description of Artificial Sequence: Synthetic oligonucleotide
  Sense strand starting at position 2729 of SEQ ID NO: 586566
ggagacuuagcuuaaucuc

SEQ ID NO: 727631 - RNA, 19 nt, Artificial Sequence
  Description of Artificial Sequence: Synthetic oligonucleotide
  Antisense strand to SEQ ID NO: 727630
gagauuaagcuaagucucc

SEQ ID NO: 727632 - RNA, 19 nt, Artificial Sequence
  Description of Artificial Sequence: Synthetic oligonucleotide
  Sense strand starting at position 2738 of SEQ ID NO: 586566
gcuuaaucucaagauagca

SEQ ID NO: 727633 - RNA, 19 nt, Artificial Sequence
  Description of Artificial Sequence: Synthetic oligonucleotide
  Antisense strand to SEQ ID NO: 727632
ugcuaucuugagauuaagc

SEQ ID NO: 727634 - RNA, 19 nt, Artificial Sequence
  Description of Artificial Sequence: Synthetic oligonucleotide
  Sense strand starting at position 2758 of SEQ ID NO: 586566
ggugucuugccagaaugga

SEQ ID NO: 727635 - RNA, 19 nt, Artificial Sequence
  Description of Artificial Sequence: Synthetic oligonucleotide
  Antisense strand to SEQ ID NO: 727634
uccauucuggcaagacacc

SEQ ID NO: 727636 - RNA, 19 nt, Artificial Sequence
  Description of Artificial Sequence: Synthetic oligonucleotide
  Sense strand starting at position 2786 of SEQ ID NO: 586566
aguauagaauauguugaca

SEQ ID NO: 727637 - RNA, 19 nt, Artificial Sequence
  Description of Artificial Sequence: Synthetic oligonucleotide
  Antisense strand to SEQ ID NO: 727636
ugucaacauauucuauacu

SEQ ID NO: 727638 - RNA, 19 nt, Artificial Sequence
  Description of Artificial Sequence: Synthetic oligonucleotide
  Sense strand starting at position 2868 of SEQ ID NO: 586566
ggauucuguuugucauaga

SEQ ID NO: 727639 - RNA, 19 nt, Artificial Sequence
  Description of Artificial Sequence: Synthetic oligonucleotide
  Antisense strand to SEQ ID NO: 727638
ucuaugacaaacagaaucc

SEQ ID NO: 727640 - RNA, 19 nt, Artificial Sequence
  Description of Artificial Sequence: Synthetic oligonucleotide
  Sense strand starting at position 2916 of SEQ ID NO: 586566
uuuggagcugaguaaacau

SEQ ID NO: 727641 - RNA, 19 nt, Artificial Sequence
  Description of Artificial Sequence: Synthetic oligonucleotide
  Antisense strand to SEQ ID NO: 727640
auguuuacucagcuccaaa

SEQ ID NO: 727642 - RNA, 19 nt, Artificial Sequence
  Description of Artificial Sequence: Synthetic oligonucleotide
  Sense strand starting at position 2927 of SEQ ID NO: 586566
guaaacaucuccuuaguaa

SEQ ID NO: 727643 - RNA, 19 nt, Artificial Sequence
  Description of Artificial Sequence: Synthetic oligonucleotide
  Antisense strand to SEQ ID NO: 727642
uuacuaaggagauguuuac

SEQ ID NO: 727644 - RNA, 19 nt, Artificial Sequence
  Description of Artificial Sequence: Synthetic oligonucleotide
  Sense strand starting at position 2944 of SEQ ID NO: 586566
aaguguguaugaguaaaca

SEQ ID NO: 727645 - RNA, 19 nt, Artificial Sequence
  Description of Artificial Sequence: Synthetic oligonucleotide
  Antisense strand to SEQ ID NO: 727644
uguuuacucauacacacuu

SEQ ID NO: 727646 - RNA, 19 nt, Artificial Sequence
  Description of Artificial Sequence: Synthetic oligonucleotide
  Sense strand starting at position 2965 of SEQ ID NO: 586566
ucaugaauauggucuacaa

SEQ ID NO: 727647 - RNA, 19 nt, Artificial Sequence
  Description of Artificial Sequence: Synthetic oligonucleotide
  Antisense strand to SEQ ID NO: 727646
uuguagaccauauucauga

SEQ ID NO: 727648 - RNA, 19 nt, Artificial Sequence
  Description of Artificial Sequence: Synthetic oligonucleotide
  Sense strand starting at position 3143 of SEQ ID NO: 586566
augagaaagucuuccuuac

SEQ ID NO: 727649 - RNA, 19 nt, Artificial Sequence
  Description of Artificial Sequence: Synthetic oligonucleotide
  Antisense strand to SEQ ID NO: 727648
guaaggaagacuuucucau

SEQ ID NO: 727650 - RNA, 19 nt, Artificial Sequence
  Description of Artificial Sequence: Synthetic oligonucleotide
  Sense strand starting at position 3228 of SEQ ID NO: 586566
agcuauuaucgggaguuaa

SEQ ID NO: 727651 - RNA, 19 nt, Artificial Sequence
  Description of Artificial Sequence: Synthetic oligonucleotide
  Antisense strand to SEQ ID NO: 727650
uuaacucccgauaauagcu

SEQ ID NO: 727652 - RNA, 19 nt, Artificial Sequence
  Description of Artificial Sequence: Synthetic oligonucleotide
  Sense strand starting at position 3277 of SEQ ID NO: 586566
aaugaagugccguaaugaa

SEQ ID NO: 727653 - RNA, 19 nt, Artificial Sequence
  Description of Artificial Sequence: Synthetic oligonucleotide
  Antisense strand to SEQ ID NO: 727652
uucauuacggcacuucauu

SEQ ID NO: 727654 - RNA, 19 nt, Artificial Sequence
  Description of Artificial Sequence: Synthetic oligonucleotide
  Sense strand starting at position 3284 of SEQ ID NO: 586566
ugccguaaugaacaucaua

SEQ ID NO: 727655 - RNA, 19 nt, Artificial Sequence
  Description of Artificial Sequence: Synthetic oligonucleotide
  Antisense strand to SEQ ID NO: 727654
uaugauguucauuacggca

SEQ ID NO: 727656 - RNA, 19 nt, Artificial Sequence
  Description of Artificial Sequence: Synthetic oligonucleotide
  Sense strand starting at position 3623 of SEQ ID NO: 586566
ucugaauuccaaggugaaa

SEQ ID NO: 727657 - RNA, 19 nt, Artificial Sequence
  Description of Artificial Sequence: Synthetic oligonucleotide
  Antisense strand to SEQ ID NO: 727656
uuucaccuuggaauucaga

SEQ ID NO: 727658 - RNA, 19 nt, Artificial Sequence
  Description of Artificial Sequence: Synthetic oligonucleotide
  Sense strand starting at position 3640 of SEQ ID NO: 586566
aaacgaugacugugagucu

SEQ ID NO: 727659 - RNA, 19 nt, Artificial Sequence
  Description of Artificial Sequence: Synthetic oligonucleotide
  Antisense strand to SEQ ID NO: 727658
agacucacagucaucguuu

SEQ ID NO: 727660 - RNA, 19 nt, Artificial Sequence
  Description of Artificial Sequence: Synthetic oligonucleotide
  Sense strand starting at position 3729 of SEQ ID NO: 586566
uuauguagucaacauggca

SEQ ID NO: 727661 - RNA, 19 nt, Artificial Sequence
  Description of Artificial Sequence: Synthetic oligonucleotide
  Antisense strand to SEQ ID NO: 727660
ugccauguugacuacauaa

SEQ ID NO: 727662 - RNA, 19 nt, Artificial Sequence
  Description of Artificial Sequence: Synthetic oligonucleotide
  Sense strand starting at position 3737 of SEQ ID NO: 586566
ucaacauggcacugaaauu

SEQ ID NO: 727663 - RNA, 19 nt, Artificial Sequence
  Description of Artificial Sequence: Synthetic oligonucleotide
  Antisense strand to SEQ ID NO: 727662
aauuucagugccauguuga

SEQ ID NO: 727664 - RNA, 19 nt, Artificial Sequence
  Description of Artificial Sequence: Synthetic oligonucleotide
  Sense strand starting at position 3759 of SEQ ID NO: 586566
ugggcucccggagaguuua

SEQ ID NO: 727665 - RNA, 19 nt, Artificial Sequence
  Description of Artificial Sequence: Synthetic oligonucleotide
  Antisense strand to SEQ ID NO: 727664
uaaacucuccgggagccca

SEQ ID NO: 727666 - RNA, 19 nt, Artificial Sequence
  Description of Artificial Sequence: Synthetic oligonucleotide
  Sense strand starting at position 3829 of SEQ ID NO: 586566
agcauaauauuugagaaag

SEQ ID NO: 727667 - RNA, 19 nt, Artificial Sequence
  Description of Artificial Sequence: Synthetic oligonucleotide
  Antisense strand to SEQ ID NO: 727666
cuuucucaaauauuaugcu

SEQ ID NO: 727668 - RNA, 19 nt, Artificial Sequence
  Description of Artificial Sequence: Synthetic oligonucleotide
  Sense strand starting at position 3933 of SEQ ID NO: 586566
acuugcauuuguuucugaa

SEQ ID NO: 727669 - RNA, 19 nt, Artificial Sequence
  Description of Artificial Sequence: Synthetic oligonucleotide
  Antisense strand to SEQ ID NO: 727668
uucagaaacaaaugcaagu

SEQ ID NO: 727670 - RNA, 19 nt, Artificial Sequence
  Description of Artificial Sequence: Synthetic oligonucleotide
  Sense strand starting at position 3935 of SEQ ID NO: 586566
uugcauuuguuucugaaua

SEQ ID NO: 727671 - RNA, 19 nt, Artificial Sequence
  Description of Artificial Sequence: Synthetic oligonucleotide
  Antisense strand to SEQ ID NO: 727670
uauucagaaacaaaugcaa

SEQ ID NO: 727672 - RNA, 19 nt, Artificial Sequence
  Description of Artificial Sequence: Synthetic oligonucleotide
  Sense strand starting at position 120 of SEQ ID NO: 586567
uacguuauggcauaacuac

SEQ ID NO: 727673 - RNA, 19 nt, Artificial Sequence
  Description of Artificial Sequence: Synthetic oligonucleotide
  Antisense strand to SEQ ID NO: 727672
guaguuaugccauaacgua

SEQ ID NO: 727674 - RNA, 19 nt, Artificial Sequence
  Description of Artificial Sequence: Synthetic oligonucleotide
  Sense strand starting at position 251 of SEQ ID NO: 586567
uuucgugagauugaucuuu

SEQ ID NO: 727675 - RNA, 19 nt, Artificial Sequence
  Description of Artificial Sequence: Synthetic oligonucleotide
  Antisense strand to SEQ ID NO: 727674
aaagaucaaucucacgaaa

SEQ ID NO: 727676 - RNA, 19 nt, Artificial Sequence
  Description of Artificial Sequence: Synthetic oligonucleotide
  Sense strand starting at position 256 of SEQ ID NO: 586567
ugagauugaucuuuaugca

SEQ ID NO: 727677 - RNA, 19 nt, Artificial Sequence
  Description of Artificial Sequence: Synthetic oligonucleotide
  Antisense strand to SEQ ID NO: 727676
ugcauaaagaucaaucuca

SEQ ID NO: 727678 - RNA, 19 nt, Artificial Sequence
  Description of Artificial Sequence: Synthetic oligonucleotide
  Sense strand starting at position 257 of SEQ ID NO: 586567
gagauugaucuuuaugcac

SEQ ID NO: 727679 - RNA, 19 nt, Artificial Sequence
  Description of Artificial Sequence: Synthetic oligonucleotide
  Antisense strand to SEQ ID NO: 727678
gugcauaaagaucaaucuc

SEQ ID NO: 727680 - RNA, 19 nt, Artificial Sequence
  Description of Artificial Sequence: Synthetic oligonucleotide
  Sense strand starting at position 279 of SEQ ID NO: 586567
gguaaagaugcguagagaa

SEQ ID NO: 727681 - RNA, 19 nt, Artificial Sequence
  Description of Artificial Sequence: Synthetic oligonucleotide
  Antisense strand to SEQ ID NO: 727680
uucucuacgcaucuuuacc

SEQ ID NO: 727682 - RNA, 19 nt, Artificial Sequence
  Description of Artificial Sequence: Synthetic oligonucleotide
  Sense strand starting at position 460 of SEQ ID NO: 586567
guagcuuaacuguuacguu

SEQ ID NO: 727683 - RNA, 19 nt, Artificial Sequence
  Description of Artificial Sequence: Synthetic oligonucleotide
  Antisense strand to SEQ ID NO: 727682
aacguaacaguuaagcuac

SEQ ID NO: 727684 - RNA, 19 nt, Artificial Sequence
  Description of Artificial Sequence: Synthetic oligonucleotide
  Sense strand starting at position 564 of SEQ ID NO: 586567
uuaagauguauguacagua

SEQ ID NO: 727685 - RNA, 19 nt, Artificial Sequence
  Description of Artificial Sequence: Synthetic oligonucleotide
  Antisense strand to SEQ ID NO: 727684
uacuguacauacaucuuaa

SEQ ID NO: 727686 - RNA, 19 nt, Artificial Sequence
  Description of Artificial Sequence: Synthetic oligonucleotide
  Sense strand starting at position 569 of SEQ ID NO: 586567
auguauguacaguauuagu

SEQ ID NO: 727687 - RNA, 19 nt, Artificial Sequence
  Description of Artificial Sequence: Synthetic oligonucleotide
  Antisense strand to SEQ ID NO: 727686
acuaauacuguacauacau

SEQ ID NO: 727688 - RNA, 19 nt, Artificial Sequence
  Description of Artificial Sequence: Synthetic oligonucleotide
  Sense strand starting at position 593 of SEQ ID NO: 586567
accaaagagugauauuuga

SEQ ID NO: 727689 - RNA, 19 nt, Artificial Sequence
  Description of Artificial Sequence: Synthetic oligonucleotide
  Antisense strand to SEQ ID NO: 727688
ucaaauaucacucuuuggu

SEQ ID NO: 727690 - RNA, 19 nt, Artificial Sequence
  Description of Artificial Sequence: Synthetic oligonucleotide
  Sense strand starting at position 643 of SEQ ID NO: 586567
ugugguauucucuacaaag

SEQ ID NO: 727691 - RNA, 19 nt, Artificial Sequence
  Description of Artificial Sequence: Synthetic oligonucleotide
  Antisense strand to SEQ ID NO: 727690
cuuuguagagaauaccaca

SEQ ID NO: 727692 - RNA, 19 nt, Artificial Sequence
  Description of Artificial Sequence: Synthetic oligonucleotide
  Sense strand starting at position 892 of SEQ ID NO: 586567
cacugaaacguauggacaa

SEQ ID NO: 727693 - RNA, 19 nt, Artificial Sequence
  Description of Artificial Sequence: Synthetic oligonucleotide
  Antisense strand to SEQ ID NO: 727692
uuguccauacguuucagug

SEQ ID NO: 727694 - RNA, 19 nt, Artificial Sequence
  Description of Artificial Sequence: Synthetic oligonucleotide
  Sense strand starting at position 941 of SEQ ID NO: 586567
ggaccuuaauggccaauaa

SEQ ID NO: 727695 - RNA, 19 nt, Artificial Sequence
  Description of Artificial Sequence: Synthetic oligonucleotide
  Antisense strand to SEQ ID NO: 727694
uuauuggccauuaaggucc

SEQ ID NO: 727696 - RNA, 19 nt, Artificial Sequence
  Description of Artificial Sequence: Synthetic oligonucleotide
  Sense strand starting at position 1001 of SEQ ID NO: 586567
aagcaagcuggugacauau

SEQ ID NO: 727697 - RNA, 19 nt, Artificial Sequence
  Description of Artificial Sequence: Synthetic oligonucleotide
  Antisense strand to SEQ ID NO: 727696
auaugucaccagcuugcuu

SEQ ID NO: 727698 - RNA, 19 nt, Artificial Sequence
  Description of Artificial Sequence: Synthetic oligonucleotide
  Sense strand starting at position 1020 of SEQ ID NO: 586567
uuuccaggccuugauaauu

SEQ ID NO: 727699 - RNA, 19 nt, Artificial Sequence
  Description of Artificial Sequence: Synthetic oligonucleotide
  Antisense strand to SEQ ID NO: 727698
aauuaucaaggccuggaaa

SEQ ID NO: 727700 - RNA, 19 nt, Artificial Sequence
  Description of Artificial Sequence: Synthetic oligonucleotide
  Sense strand starting at position 1051 of SEQ ID NO: 586567
ccagaucucgguuacuaag

SEQ ID NO: 727701 - RNA, 19 nt, Artificial Sequence
  Description of Artificial Sequence: Synthetic oligonucleotide
  Antisense strand to SEQ ID NO: 727700
cuuaguaaccgagaucugg

SEQ ID NO: 727702 - RNA, 19 nt, Artificial Sequence
  Description of Artificial Sequence: Synthetic oligonucleotide
  Sense strand starting at position 1053 of SEQ ID NO: 586567
agaucucgguuacuaagau

SEQ ID NO: 727703 - RNA, 19 nt, Artificial Sequence
  Description of Artificial Sequence: Synthetic oligonucleotide
  Antisense strand to SEQ ID NO: 727702
aucuuaguaaccgagaucu

SEQ ID NO: 727704 - RNA, 19 nt, Artificial Sequence
  Description of Artificial Sequence: Synthetic oligonucleotide
  Sense strand starting at position 1119 of SEQ ID NO: 586567
ugaagagaacgcgauucuu

SEQ ID NO: 727705 - RNA, 19 nt, Artificial Sequence
  Description of Artificial Sequence: Synthetic oligonucleotide
  Antisense strand to SEQ ID NO: 727704
aagaaucgcguucucuuca

SEQ ID NO: 727706 - RNA, 19 nt, Artificial Sequence
  Description of Artificial Sequence: Synthetic oligonucleotide
  Sense strand starting at position 1496 of SEQ ID NO: 586567
ggcacuagugguuauaaag

SEQ ID NO: 727707 - RNA, 19 nt, Artificial Sequence
  Description of Artificial Sequence: Synthetic oligonucleotide
  Antisense strand to SEQ ID NO: 727706
cuuuauaaccacuagugcc

SEQ ID NO: 727708 - RNA, 19 nt, Artificial Sequence
  Description of Artificial Sequence: Synthetic oligonucleotide
  Sense strand starting at position 1601 of SEQ ID NO: 586567
ugaacuugucaacaaguca

SEQ ID NO: 727709 - RNA, 19 nt, Artificial Sequence
  Description of Artificial Sequence: Synthetic oligonucleotide
  Antisense strand to SEQ ID NO: 727708
ugacuuguugacaaguuca

SEQ ID NO: 727710 - RNA, 19 nt, Artificial Sequence
  Description of Artificial Sequence: Synthetic oligonucleotide
  Sense strand starting at position 2978 of SEQ ID NO: 586567
augaaaccucaauguagua

SEQ ID NO: 727711 - RNA, 19 nt, Artificial Sequence
  Description of Artificial Sequence: Synthetic oligonucleotide
  Antisense strand to SEQ ID NO: 727710
uacuacauugagguuucau

SEQ ID NO: 727712 - RNA, 19 nt, Artificial Sequence
  Description of Artificial Sequence: Synthetic oligonucleotide
  Sense strand starting at position 3072 of SEQ ID NO: 586567
gaaugauaguuauugagua

SEQ ID NO: 727713 - RNA, 19 nt, Artificial Sequence
  Description of Artificial Sequence: Synthetic oligonucleotide
  Antisense strand to SEQ ID NO: 727712
uacucaauaacuaucauuc

SEQ ID NO: 727714 - RNA, 19 nt, Artificial Sequence
  Description of Artificial Sequence: Synthetic oligonucleotide
  Sense strand starting at position 3076 of SEQ ID NO: 586567
gauaguuauugaguaauga

SEQ ID NO: 727715 - RNA, 19 nt, Artificial Sequence
  Description of Artificial Sequence: Synthetic oligonucleotide
  Antisense strand to SEQ ID NO: 727714
ucauuacucaauaacuauc

SEQ ID NO: 727716 - RNA, 19 nt, Artificial Sequence
  Description of Artificial Sequence: Synthetic oligonucleotide
  Sense strand starting at position 3087 of SEQ ID NO: 586567
aguaaugaugcugacgaau

SEQ ID NO: 727717 - RNA, 19 nt, Artificial Sequence
  Description of Artificial Sequence: Synthetic oligonucleotide
  Antisense strand to SEQ ID NO: 727716
auucgucagcaucauuacu

SEQ ID NO: 727718 - RNA, 19 nt, Artificial Sequence
  Description of Artificial Sequence: Synthetic oligonucleotide
  Sense strand starting at position 3156 of SEQ ID NO: 586567
ugcuguaugcuuuauauuu

SEQ ID NO: 727719 - RNA, 19 nt, Artificial Sequence
  Description of Artificial Sequence: Synthetic oligonucleotide
  Antisense strand to SEQ ID NO: 727718
aaauauaaagcauacagca

SEQ ID NO: 727720 - RNA, 19 nt, Artificial Sequence
  Description of Artificial Sequence: Synthetic oligonucleotide
  Sense strand starting at position 3286 of SEQ ID NO: 586567
ccaggagacuuagcuuaau

SEQ ID NO: 727721 - RNA, 19 nt, Artificial Sequence
  Description of Artificial Sequence: Synthetic oligonucleotide
  Antisense strand to SEQ ID NO: 727720
auuaagcuaagucuccugg

SEQ ID NO: 727722 - RNA, 19 nt, Artificial Sequence
  Description of Artificial Sequence: Synthetic oligonucleotide
  Sense strand starting at position 3289 of SEQ ID NO: 586567
ggagacuuagcuuaaucuc

SEQ ID NO: 727723 - RNA, 19 nt, Artificial Sequence
  Description of Artificial Sequence: Synthetic oligonucleotide
  Antisense strand to SEQ ID NO: 727722
gagauuaagcuaagucucc

SEQ ID NO: 727724 - RNA, 19 nt, Artificial Sequence
  Description of Artificial Sequence: Synthetic oligonucleotide
  Sense strand starting at position 3298 of SEQ ID NO: 586567
gcuuaaucucaagauagca

SEQ ID NO: 727725 - RNA, 19 nt, Artificial Sequence
  Description of Artificial Sequence: Synthetic oligonucleotide
  Antisense strand to SEQ ID NO: 727724
ugcuaucuugagauuaagc

SEQ ID NO: 727726 - RNA, 19 nt, Artificial Sequence
  Description of Artificial Sequence: Synthetic oligonucleotide
  Sense strand starting at position 3318 of SEQ ID NO: 586567
ggugucuugccagaaugga

SEQ ID NO: 727727 - RNA, 19 nt, Artificial Sequence
  Description of Artificial Sequence: Synthetic oligonucleotide
  Antisense strand to SEQ ID NO: 727726
uccauucuggcaagacacc

SEQ ID NO: 727728 - RNA, 19 nt, Artificial Sequence
  Description of Artificial Sequence: Synthetic oligonucleotide
  Sense strand starting at position 3346 of SEQ ID NO: 586567
aguauagaauauguugaca

SEQ ID NO: 727729 - RNA, 19 nt, Artificial Sequence
  Description of Artificial Sequence: Synthetic oligonucleotide
  Antisense strand to SEQ ID NO: 727728
ugucaacauauucuauacu

SEQ ID NO: 727730 - RNA, 19 nt, Artificial Sequence
  Description of Artificial Sequence: Synthetic oligonucleotide
  Sense strand starting at position 3427 of SEQ ID NO: 586567
gggauucuguuugucauag

SEQ ID NO: 727731 - RNA, 19 nt, Artificial Sequence
  Description of Artificial Sequence: Synthetic oligonucleotide
  Antisense strand to SEQ ID NO: 727730
cuaugacaaacagaauccc

SEQ ID NO: 727732 - RNA, 19 nt, Artificial Sequence
  Description of Artificial Sequence: Synthetic oligonucleotide
  Sense strand starting at position 3428 of SEQ ID NO: 586567
ggauucuguuugucauaga

SEQ ID NO: 727733 - RNA, 19 nt, Artificial Sequence
  Description of Artificial Sequence: Synthetic oligonucleotide
  Antisense strand to SEQ ID NO: 727732
ucuaugacaaacagaaucc

SEQ ID NO: 727734 - RNA, 19 nt, Artificial Sequence
  Description of Artificial Sequence: Synthetic oligonucleotide
  Sense strand starting at position 3476 of SEQ ID NO: 586567
uuuggagcugaguaaacau

SEQ ID NO: 727735 - RNA, 19 nt, Artificial Sequence
  Description of Artificial Sequence: Synthetic oligonucleotide
  Antisense strand to SEQ ID NO: 727734
auguuuacucagcuccaaa

SEQ ID NO: 727736 - RNA, 19 nt, Artificial Sequence
  Description of Artificial Sequence: Synthetic oligonucleotide
  Sense strand starting at position 3487 of SEQ ID NO: 586567
guaaacaucuccuuaguaa

SEQ ID NO: 727737 - RNA, 19 nt, Artificial Sequence
  Description of Artificial Sequence: Synthetic oligonucleotide
  Antisense strand to SEQ ID NO: 727736
uuacuaaggagauguuuac

SEQ ID NO: 727738 - RNA, 19 nt, Artificial Sequence
  Description of Artificial Sequence: Synthetic oligonucleotide
  Sense strand starting at position 3504 of SEQ ID NO: 586567
aaguguguaugaguaaaca

SEQ ID NO: 727739 - RNA, 19 nt, Artificial Sequence
  Description of Artificial Sequence: Synthetic oligonucleotide
  Antisense strand to SEQ ID NO: 727738
uguuuacucauacacacuu

SEQ ID NO: 727740 - RNA, 19 nt, Artificial Sequence
  Description of Artificial Sequence: Synthetic oligonucleotide
  Sense strand starting at position 3525 of SEQ ID NO: 586567
ucaugaauauggucuacaa

SEQ ID NO: 727741 - RNA, 19 nt, Artificial Sequence
  Description of Artificial Sequence: Synthetic oligonucleotide
  Antisense strand to SEQ ID NO: 727740
uuguagaccauauucauga

SEQ ID NO: 727742 - RNA, 19 nt, Artificial Sequence
  Description of Artificial Sequence: Synthetic oligonucleotide
  Sense strand starting at position 3703 of SEQ ID NO: 586567
augagaaagucuuccuuac

SEQ ID NO: 727743 - RNA, 19 nt, Artificial Sequence
  Description of Artificial Sequence: Synthetic oligonucleotide
  Antisense strand to SEQ ID NO: 727742
guaaggaagacuuucucau

SEQ ID NO: 727744 - RNA, 19 nt, Artificial Sequence
  Description of Artificial Sequence: Synthetic oligonucleotide
  Sense strand starting at position 3788 of SEQ ID NO: 586567
agcuauuaucgggaguuaa

SEQ ID NO: 727745 - RNA, 19 nt, Artificial Sequence
  Description of Artificial Sequence: Synthetic oligonucleotide
  Antisense strand to SEQ ID NO: 727744
uuaacucccgauaauagcu

SEQ ID NO: 727746 - RNA, 19 nt, Artificial Sequence
  Description of Artificial Sequence: Synthetic oligonucleotide
  Sense strand starting at position 3837 of SEQ ID NO: 586567
aaugaagugccguaaugaa

SEQ ID NO: 727747 - RNA, 19 nt, Artificial Sequence
  Description of Artificial Sequence: Synthetic oligonucleotide
  Antisense strand to SEQ ID NO: 727746
uucauuacggcacuucauu

SEQ ID NO: 727748 - RNA, 19 nt, Artificial Sequence
  Description of Artificial Sequence: Synthetic oligonucleotide
  Sense strand starting at position 3844 of SEQ ID NO: 586567
ugccguaaugaacaucaua

SEQ ID NO: 727749 - RNA, 19 nt, Artificial Sequence
  Description of Artificial Sequence: Synthetic oligonucleotide
  Antisense strand to SEQ ID NO: 727748
uaugauguucauuacggca

SEQ ID NO: 727750 - RNA, 19 nt, Artificial Sequence
  Description of Artificial Sequence: Synthetic oligonucleotide
  Sense strand starting at position 3860 of SEQ ID NO: 586567
auaggugcccgauaaaugu

SEQ ID NO: 727751 - RNA, 19 nt, Artificial Sequence
  Description of Artificial Sequence: Synthetic oligonucleotide
  Antisense strand to SEQ ID NO: 727750
acauuuaucgggcaccuau

SEQ ID NO: 727752 - RNA, 19 nt, Artificial Sequence
  Description of Artificial Sequence: Synthetic oligonucleotide
  Sense strand starting at position 157 of SEQ ID NO: 586568
acccaagugcuguagaaua

SEQ ID NO: 727753 - RNA, 19 nt, Artificial Sequence
  Description of Artificial Sequence: Synthetic oligonucleotide
  Antisense strand to SEQ ID NO: 727752
uauucuacagcacuugggu

SEQ ID NO: 727754 - RNA, 19 nt, Artificial Sequence
  Description of Artificial Sequence: Synthetic oligonucleotide
  Sense strand starting at position 159 of SEQ ID NO: 586568
ccaagugcuguagaauaca

SEQ ID NO: 727755 - RNA, 19 nt, Artificial Sequence
  Description of Artificial Sequence: Synthetic oligonucleotide
  Antisense strand to SEQ ID NO: 727754
uguauucuacagcacuugg

SEQ ID NO: 727756 - RNA, 19 nt, Artificial Sequence
  Description of Artificial Sequence: Synthetic oligonucleotide
  Sense strand starting at position 162 of SEQ ID NO: 586568
agugcuguagaauacauau

SEQ ID NO: 727757 - RNA, 19 nt, Artificial Sequence
  Description of Artificial Sequence: Synthetic oligonucleotide
  Antisense strand to SEQ ID NO: 727756
auauguauucuacagcacu

SEQ ID NO: 727758 - RNA, 19 nt, Artificial Sequence
  Description of Artificial Sequence: Synthetic oligonucleotide
  Sense strand starting at position 197 of SEQ ID NO: 586568
uggagcauucuccagaauu

SEQ ID NO: 727759 - RNA, 19 nt, Artificial Sequence
  Description of Artificial Sequence: Synthetic oligonucleotide
  Antisense strand to SEQ ID NO: 727758
aauucuggagaaugcucca

SEQ ID NO: 727760 - RNA, 19 nt, Artificial Sequence
  Description of Artificial Sequence: Synthetic oligonucleotide
  Sense strand starting at position 345 of SEQ ID NO: 586568
ggacaugaauauuaaacaa

SEQ ID NO: 727761 - RNA, 19 nt, Artificial Sequence
  Description of Artificial Sequence: Synthetic oligonucleotide
  Antisense strand to SEQ ID NO: 727760
uuguuuaauauucaugucc

SEQ ID NO: 727762 - RNA, 19 nt, Artificial Sequence
  Description of Artificial Sequence: Synthetic oligonucleotide
  Sense strand starting at position 373 of SEQ ID NO: 586568
gaacuaccagugggucaau

SEQ ID NO: 727763 - RNA, 19 nt, Artificial Sequence
  Description of Artificial Sequence: Synthetic oligonucleotide
  Antisense strand to SEQ ID NO: 727762
auugacccacugguaguuc

SEQ ID NO: 727764 - RNA, 19 nt, Artificial Sequence
  Description of Artificial Sequence: Synthetic oligonucleotide
  Sense strand starting at position 820 of SEQ ID NO: 586568
gcaccagauuaccucaaga

SEQ ID NO: 727765 - RNA, 19 nt, Artificial Sequence
  Description of Artificial Sequence: Synthetic oligonucleotide
  Antisense strand to SEQ ID NO: 727764
ucuugagguaaucuggugc

SEQ ID NO: 727766 - RNA, 19 nt, Artificial Sequence
  Description of Artificial Sequence: Synthetic oligonucleotide
  Sense strand starting at position 861 of SEQ ID NO: 586568
aaaguaugccugcaacaga

SEQ ID NO: 727767 - RNA, 19 nt, Artificial Sequence
  Description of Artificial Sequence: Synthetic oligonucleotide
  Antisense strand to SEQ ID NO: 727766
ucuguugcaggcauacuuu

SEQ ID NO: 727768 - RNA, 19 nt, Artificial Sequence
  Description of Artificial Sequence: Synthetic oligonucleotide
  Sense strand starting at position 975 of SEQ ID NO: 586568
caccauaagugagucaagu

SEQ ID NO: 727769 - RNA, 19 nt, Artificial Sequence
  Description of Artificial Sequence: Synthetic oligonucleotide
  Antisense strand to SEQ ID NO: 727768
acuugacucacuuauggug

SEQ ID NO: 727770 - RNA, 19 nt, Artificial Sequence
  Description of Artificial Sequence: Synthetic oligonucleotide
  Sense strand starting at position 1514 of SEQ ID NO: 586568
uguucuucugcauaugauc

SEQ ID NO: 727771 - RNA, 19 nt, Artificial Sequence
  Description of Artificial Sequence: Synthetic oligonucleotide
  Antisense strand to SEQ ID NO: 727770
gaucauaugcagaagaaca

SEQ ID NO: 727772 - RNA, 19 nt, Artificial Sequence
  Description of Artificial Sequence: Synthetic oligonucleotide
  Sense strand starting at position 1640 of SEQ ID NO: 586568
gcaucuuaguccuugacca

SEQ ID NO: 727773 - RNA, 19 nt, Artificial Sequence
  Description of Artificial Sequence: Synthetic oligonucleotide
  Antisense strand to SEQ ID NO: 727772
uggucaaggacuaagaugc

SEQ ID NO: 727774 - RNA, 19 nt, Artificial Sequence
  Description of Artificial Sequence: Synthetic oligonucleotide
  Sense strand starting at position 2047 of SEQ ID NO: 586568
auaggaagugcugagucau

SEQ ID NO: 727775 - RNA, 19 nt, Artificial Sequence
  Description of Artificial Sequence: Synthetic oligonucleotide
  Antisense strand to SEQ ID NO: 727774
augacucagcacuuccuau

SEQ ID NO: 727776 - RNA, 19 nt, Artificial Sequence
  Description of Artificial Sequence: Synthetic oligonucleotide
  Sense strand starting at position 2177 of SEQ ID NO: 586568
ugaccuucucuuugucaca

SEQ ID NO: 727777 - RNA, 19 nt, Artificial Sequence
  Description of Artificial Sequence: Synthetic oligonucleotide
  Antisense strand to SEQ ID NO: 727776
ugugacaaagagaagguca

SEQ ID NO: 727778 - RNA, 19 nt, Artificial Sequence
  Description of Artificial Sequence: Synthetic oligonucleotide
  Sense strand starting at position 2294 of SEQ ID NO: 586568
auggucagguguucuuaua

SEQ ID NO: 727779 - RNA, 19 nt, Artificial Sequence
  Description of Artificial Sequence: Synthetic oligonucleotide
  Antisense strand to SEQ ID NO: 727778
uauaagaacaccugaccau

SEQ ID NO: 727780 - RNA, 19 nt, Artificial Sequence
  Description of Artificial Sequence: Synthetic oligonucleotide
  Sense strand starting at position 2369 of SEQ ID NO: 586568
aacuuucuugugggaacau

SEQ ID NO: 727781 - RNA, 19 nt, Artificial Sequence
  Description of Artificial Sequence: Synthetic oligonucleotide
  Antisense strand to SEQ ID NO: 727780
auguucccacaagaaaguu

SEQ ID NO: 727782 - RNA, 19 nt, Artificial Sequence
  Description of Artificial Sequence: Synthetic oligonucleotide
  Sense strand starting at position 2549 of SEQ ID NO: 586568
ugugcaauccaagggcaua

SEQ ID NO: 727783 - RNA, 19 nt, Artificial Sequence
  Description of Artificial Sequence: Synthetic oligonucleotide
  Antisense strand to SEQ ID NO: 727782
uaugcccuuggauugcaca

SEQ ID NO: 727784 - RNA, 19 nt, Artificial Sequence
  Description of Artificial Sequence: Synthetic oligonucleotide
  Sense strand starting at position 2661 of SEQ ID NO: 586568
acuguaggacugugagaug

SEQ ID NO: 727785 - RNA, 19 nt, Artificial Sequence
  Description of Artificial Sequence: Synthetic oligonucleotide
  Antisense strand to SEQ ID NO: 727784
caucucacaguccuacagu

SEQ ID NO: 727786 - RNA, 19 nt, Artificial Sequence
  Description of Artificial Sequence: Synthetic oligonucleotide
  Sense strand starting at position 2668 of SEQ ID NO: 586568
gacugugagaugcaugguu

SEQ ID NO: 727787 - RNA, 19 nt, Artificial Sequence
  Description of Artificial Sequence: Synthetic oligonucleotide
  Antisense strand to SEQ ID NO: 727786
aaccaugcaucucacaguc

SEQ ID NO: 727788 - RNA, 19 nt, Artificial Sequence
  Description of Artificial Sequence: Synthetic oligonucleotide
  Sense strand starting at position 2686 of SEQ ID NO: 586568
uuguucugauugucaggau

SEQ ID NO: 727789 - RNA, 19 nt, Artificial Sequence
  Description of Artificial Sequence: Synthetic oligonucleotide
  Antisense strand to SEQ ID NO: 727788
auccugacaaucagaacaa

SEQ ID NO: 727790 - RNA, 19 nt, Artificial Sequence
  Description of Artificial Sequence: Synthetic oligonucleotide
  Sense strand starting at position 2728 of SEQ ID NO: 586568
ggugucaugaguuacagag

SEQ ID NO: 727791 - RNA, 19 nt, Artificial Sequence
  Description of Artificial Sequence: Synthetic oligonucleotide
  Antisense strand to SEQ ID NO: 727790
cucuguaacucaugacacc

SEQ ID NO: 727792 - RNA, 19 nt, Artificial Sequence
  Description of Artificial Sequence: Synthetic oligonucleotide
  Sense strand starting at position 2736 of SEQ ID NO: 586568
gaguuacagagcuggucaa

SEQ ID NO: 727793 - RNA, 19 nt, Artificial Sequence
  Description of Artificial Sequence: Synthetic oligonucleotide
  Antisense strand to SEQ ID NO: 727792
uugaccagcucuguaacuc

SEQ ID NO: 727794 - RNA, 19 nt, Artificial Sequence
  Description of Artificial Sequence: Synthetic oligonucleotide
  Sense strand starting at position 2893 of SEQ ID NO: 586568
cuguuuccucgcuugucaa

SEQ ID NO: 727795 - RNA, 19 nt, Artificial Sequence
  Description of Artificial Sequence: Synthetic oligonucleotide
  Antisense strand to SEQ ID NO: 727794
uugacaagcgaggaaacag

SEQ ID NO: 727796 - RNA, 19 nt, Artificial Sequence
  Description of Artificial Sequence: Synthetic oligonucleotide
  Sense strand starting at position 2941 of SEQ ID NO: 586568
agacucagucccuacugau

SEQ ID NO: 727797 - RNA, 19 nt, Artificial Sequence
  Description of Artificial Sequence: Synthetic oligonucleotide
  Antisense strand to SEQ ID NO: 727796
aucaguagggacugagucu

SEQ ID NO: 727798 - RNA, 19 nt, Artificial Sequence
  Description of Artificial Sequence: Synthetic oligonucleotide
  Sense strand starting at position 3063 of SEQ ID NO: 586568
cguaccaaucucugagauu

SEQ ID NO: 727799 - RNA, 19 nt, Artificial Sequence
  Description of Artificial Sequence: Synthetic oligonucleotide
  Antisense strand to SEQ ID NO: 727798
aaucucagagauugguacg

SEQ ID NO: 727800 - RNA, 19 nt, Artificial Sequence
  Description of Artificial Sequence: Synthetic oligonucleotide
  Sense strand starting at position 3117 of SEQ ID NO: 586568
aggugaugcaaacaauagu

SEQ ID NO: 727801 - RNA, 19 nt, Artificial Sequence
  Description of Artificial Sequence: Synthetic oligonucleotide
  Antisense strand to SEQ ID NO: 727800
acuauuguuugcaucaccu

SEQ ID NO: 727802 - RNA, 19 nt, Artificial Sequence
  Description of Artificial Sequence: Synthetic oligonucleotide
  Sense strand starting at position 3211 of SEQ ID NO: 586568
ggcuaagguuccuccagaa

SEQ ID NO: 727803 - RNA, 19 nt, Artificial Sequence
  Description of Artificial Sequence: Synthetic oligonucleotide
  Antisense strand to SEQ ID NO: 727802
uucuggaggaaccuuagcc

SEQ ID NO: 727804 - RNA, 19 nt, Artificial Sequence
  Description of Artificial Sequence: Synthetic oligonucleotide
  Sense strand starting at position 3245 of SEQ ID NO: 586568
augcuuucccagcagacaa

SEQ ID NO: 727805 - RNA, 19 nt, Artificial Sequence
  Description of Artificial Sequence: Synthetic oligonucleotide
  Antisense strand to SEQ ID NO: 727804
uugucugcugggaaagcau

SEQ ID NO: 727806 - RNA, 19 nt, Artificial Sequence
  Description of Artificial Sequence: Synthetic oligonucleotide
  Sense strand starting at position 3307 of SEQ ID NO: 586568
uuuccugaucucgagauug

SEQ ID NO: 727807 - RNA, 19 nt, Artificial Sequence
  Description of Artificial Sequence: Synthetic oligonucleotide
  Antisense strand to SEQ ID NO: 727806
caaucucgagaucaggaaa

SEQ ID NO: 727808 - RNA, 19 nt, Artificial Sequence
  Description of Artificial Sequence: Synthetic oligonucleotide
  Sense strand starting at position 3309 of SEQ ID NO: 586568
uccugaucucgagauuguu

SEQ ID NO: 727809 - RNA, 19 nt, Artificial Sequence
  Description of Artificial Sequence: Synthetic oligonucleotide
  Antisense strand to SEQ ID NO: 727808
aacaaucucgagaucagga

SEQ ID NO: 727810 - RNA, 19 nt, Artificial Sequence
  Description of Artificial Sequence: Synthetic oligonucleotide
  Sense strand starting at position 3312 of SEQ ID NO: 586568
ugaucucgagauuguucuu

SEQ ID NO: 727811 - RNA, 19 nt, Artificial Sequence
  Description of Artificial Sequence: Synthetic oligonucleotide
  Antisense strand to SEQ ID NO: 727810
aagaacaaucucgagauca

SEQ ID NO: 727812 - RNA, 19 nt, Artificial Sequence
  Description of Artificial Sequence: Synthetic oligonucleotide
  Sense strand starting at position 3325 of SEQ ID NO: 586568
guucuucuuggccaacauu

SEQ ID NO: 727813 - RNA, 19 nt, Artificial Sequence
  Description of Artificial Sequence: Synthetic oligonucleotide
  Antisense strand to SEQ ID NO: 727812
aauguuggccaagaagaac

SEQ ID NO: 727814 - RNA, 19 nt, Artificial Sequence
  Description of Artificial Sequence: Synthetic oligonucleotide
  Sense strand starting at position 3364 of SEQ ID NO: 586568
ucaccagguccugaaaguu

SEQ ID NO: 727815 - RNA, 19 nt, Artificial Sequence
  Description of Artificial Sequence: Synthetic oligonucleotide
  Antisense strand to SEQ ID NO: 727814
aacuuucaggaccugguga

SEQ ID NO: 727816 - RNA, 19 nt, Artificial Sequence
  Description of Artificial Sequence: Synthetic oligonucleotide
  Sense strand starting at position 3432 of SEQ ID NO: 586568
cucauauuuguuugcagac

SEQ ID NO: 727817 - RNA, 19 nt, Artificial Sequence
  Description of Artificial Sequence: Synthetic oligonucleotide
  Antisense strand to SEQ ID NO: 727816
gucugcaaacaaauaugag

SEQ ID NO: 727818 - RNA, 19 nt, Artificial Sequence
  Description of Artificial Sequence: Synthetic oligonucleotide
  Sense strand starting at position 3433 of SEQ ID NO: 586568
ucauauuuguuugcagacu

SEQ ID NO: 727819 - RNA, 19 nt, Artificial Sequence
  Description of Artificial Sequence: Synthetic oligonucleotide
  Antisense strand to SEQ ID NO: 727818
agucugcaaacaaauauga

SEQ ID NO: 727820 - RNA, 19 nt, Artificial Sequence
  Description of Artificial Sequence: Synthetic oligonucleotide
  Sense strand starting at position 3498 of SEQ ID NO: 586568
cugguugcuaaugaaauga

SEQ ID NO: 727821 - RNA, 19 nt, Artificial Sequence
  Description of Artificial Sequence: Synthetic oligonucleotide
  Antisense strand to SEQ ID NO: 727820
ucauuucauuagcaaccag

SEQ ID NO: 727822 - RNA, 19 nt, Artificial Sequence
  Description of Artificial Sequence: Synthetic oligonucleotide
  Sense strand starting at position 3548 of SEQ ID NO: 586568
uguguuauuauugaggaac

SEQ ID NO: 727823 - RNA, 19 nt, Artificial Sequence
  Description of Artificial Sequence: Synthetic oligonucleotide
  Antisense strand to SEQ ID NO: 727822
guuccucaauaauaacaca

SEQ ID NO: 727824 - RNA, 19 nt, Artificial Sequence
  Description of Artificial Sequence: Synthetic oligonucleotide
  Sense strand starting at position 3800 of SEQ ID NO: 586568
guaggaauaguaggucuau

SEQ ID NO: 727825 - RNA, 19 nt, Artificial Sequence
  Description of Artificial Sequence: Synthetic oligonucleotide
  Antisense strand to SEQ ID NO: 727824
auagaccuacuauuccuac

SEQ ID NO: 727826 - RNA, 19 nt, Artificial Sequence
  Description of Artificial Sequence: Synthetic oligonucleotide
  Sense strand starting at position 3801 of SEQ ID NO: 586568
uaggaauaguaggucuauu

SEQ ID NO: 727827 - RNA, 19 nt, Artificial Sequence
  Description of Artificial Sequence: Synthetic oligonucleotide
  Antisense strand to SEQ ID NO: 727826
aauagaccuacuauuccua

SEQ ID NO: 727828 - RNA, 19 nt, Artificial Sequence
  Description of Artificial Sequence: Synthetic oligonucleotide
  Sense strand starting at position 3872 of SEQ ID NO: 586568
gcauacauauuugcuagua

SEQ ID NO: 727829 - RNA, 19 nt, Artificial Sequence
  Description of Artificial Sequence: Synthetic oligonucleotide
  Antisense strand to SEQ ID NO: 727828
uacuagcaaauauguaugc

SEQ ID NO: 727830 - RNA, 19 nt, Artificial Sequence
  Description of Artificial Sequence: Synthetic oligonucleotide
  Sense strand starting at position 3933 of SEQ ID NO: 586568
aacugagucccaggaugau

SEQ ID NO: 727831 - RNA, 19 nt, Artificial Sequence
  Description of Artificial Sequence: Synthetic oligonucleotide
  Antisense strand to SEQ ID NO: 727830
aucauccugggacucaguu

SEQ ID NO: 727832 - RNA, 19 nt, Artificial Sequence
  Description of Artificial Sequence: Synthetic oligonucleotide
  Sense strand starting at position 47 of SEQ ID NO: 586569
gaccgugagucaccugauu

SEQ ID NO: 727833 - RNA, 19 nt, Artificial Sequence
  Description of Artificial Sequence: Synthetic oligonucleotide
  Antisense strand to SEQ ID NO: 727832
aaucaggugacucacgguc

SEQ ID NO: 727834 - RNA, 19 nt, Artificial Sequence
  Description of Artificial Sequence: Synthetic oligonucleotide
  Sense strand starting at position 49 of SEQ ID NO: 586569
ccgugagucaccugauuaa

SEQ ID NO: 727835 - RNA, 19 nt, Artificial Sequence
  Description of Artificial Sequence: Synthetic oligonucleotide
  Antisense strand to SEQ ID NO: 727834
uuaaucaggugacucacgg

SEQ ID NO: 727836 - RNA, 19 nt, Artificial Sequence
  Description of Artificial Sequence: Synthetic oligonucleotide
  Sense strand starting at position 52 of SEQ ID NO: 586569
ugagucaccugauuaaccu

SEQ ID NO: 727837 - RNA, 19 nt, Artificial Sequence
  Description of Artificial Sequence: Synthetic oligonucleotide
  Antisense strand to SEQ ID NO: 727836
agguuaaucaggugacuca

SEQ ID NO: 727838 - RNA, 19 nt, Artificial Sequence
  Description of Artificial Sequence: Synthetic oligonucleotide
  Sense strand starting at position 94 of SEQ ID NO: 586569
aaaucaaaguucguauguu

SEQ ID NO: 727839 - RNA, 19 nt, Artificial Sequence
  Description of Artificial Sequence: Synthetic oligonucleotide
  Antisense strand to SEQ ID NO: 727838
aacauacgaacuuugauuu

SEQ ID NO: 727840 - RNA, 19 nt, Artificial Sequence
  Description of Artificial Sequence: Synthetic oligonucleotide
  Sense strand starting at position 344 of SEQ ID NO: 586569
gugcuuaggacaggaauaa

SEQ ID NO: 727841 - RNA, 19 nt, Artificial Sequence
  Description of Artificial Sequence: Synthetic oligonucleotide
  Antisense strand to SEQ ID NO: 727840
uuauuccuguccuaagcac

SEQ ID NO: 727842 - RNA, 19 nt, Artificial Sequence
  Description of Artificial Sequence: Synthetic oligonucleotide
  Sense strand starting at position 394 of SEQ ID NO: 586569
ggaucuaucuuccucguuu

SEQ ID NO: 727843 - RNA, 19 nt, Artificial Sequence
  Description of Artificial Sequence: Synthetic oligonucleotide
  Antisense strand to SEQ ID NO: 727842
aaacgaggaagauagaucc

SEQ ID NO: 727844 - RNA, 19 nt, Artificial Sequence
  Description of Artificial Sequence: Synthetic oligonucleotide
  Sense strand starting at position 430 of SEQ ID NO: 586569
gcaacagaugagugucauc

SEQ ID NO: 727845 - RNA, 19 nt, Artificial Sequence
  Description of Artificial Sequence: Synthetic oligonucleotide
  Antisense strand to SEQ ID NO: 727844
gaugacacucaucuguugc

SEQ ID NO: 727846 - RNA, 19 nt, Artificial Sequence
  Description of Artificial Sequence: Synthetic oligonucleotide
  Sense strand starting at position 435 of SEQ ID NO: 586569
agaugagugucaucugauu

SEQ ID NO: 727847 - RNA, 19 nt, Artificial Sequence
  Description of Artificial Sequence: Synthetic oligonucleotide
  Antisense strand to SEQ ID NO: 727846
aaucagaugacacucaucu

SEQ ID NO: 727848 - RNA, 19 nt, Artificial Sequence
  Description of Artificial Sequence: Synthetic oligonucleotide
  Sense strand starting at position 502 of SEQ ID NO: 586569
auagccuauuucuaagagu

SEQ ID NO: 727849 - RNA, 19 nt, Artificial Sequence
  Description of Artificial Sequence: Synthetic oligonucleotide
  Antisense strand to SEQ ID NO: 727848
acucuuagaaauaggcuau

SEQ ID NO: 727850 - RNA, 19 nt, Artificial Sequence
  Description of Artificial Sequence: Synthetic oligonucleotide
  Sense strand starting at position 505 of SEQ ID NO: 586569
gccuauuucuaagaguauu

SEQ ID NO: 727851 - RNA, 19 nt, Artificial Sequence
  Description of Artificial Sequence: Synthetic oligonucleotide
  Antisense strand to SEQ ID NO: 727850
aauacucuuagaaauaggc

SEQ ID NO: 727852 - RNA, 19 nt, Artificial Sequence
  Description of Artificial Sequence: Synthetic oligonucleotide
  Sense strand starting at position 573 of SEQ ID NO: 586569
uuucuaagauucgagggaa

SEQ ID NO: 727853 - RNA, 19 nt, Artificial Sequence
  Description of Artificial Sequence: Synthetic oligonucleotide
  Antisense strand to SEQ ID NO: 727852
uucccucgaaucuuagaaa

SEQ ID NO: 727854 - RNA, 19 nt, Artificial Sequence
  Description of Artificial Sequence: Synthetic oligonucleotide
  Sense strand starting at position 633 of SEQ ID NO: 586569
cuguaugaaugccugauau

SEQ ID NO: 727855 - RNA, 19 nt, Artificial Sequence
  Description of Artificial Sequence: Synthetic oligonucleotide
  Antisense strand to SEQ ID NO: 727854
auaucaggcauucauacag

SEQ ID NO: 727856 - RNA, 19 nt, Artificial Sequence
  Description of Artificial Sequence: Synthetic oligonucleotide
  Sense strand starting at position 637 of SEQ ID NO: 586569
augaaugccugauauuuag

SEQ ID NO: 727857 - RNA, 19 nt, Artificial Sequence
  Description of Artificial Sequence: Synthetic oligonucleotide
  Antisense strand to SEQ ID NO: 727856
cuaaauaucaggcauucau

SEQ ID NO: 727858 - RNA, 19 nt, Artificial Sequence
  Description of Artificial Sequence: Synthetic oligonucleotide
  Sense strand starting at position 643 of SEQ ID NO: 586569
gccugauauuuaggucaaa

SEQ ID NO: 727859 - RNA, 19 nt, Artificial Sequence
  Description of Artificial Sequence: Synthetic oligonucleotide
  Antisense strand to SEQ ID NO: 727858
uuugaccuaaauaucaggc

SEQ ID NO: 727860 - RNA, 19 nt, Artificial Sequence
  Description of Artificial Sequence: Synthetic oligonucleotide
  Sense strand starting at position 970 of SEQ ID NO: 586569
uuagguaaguggcuuguua

SEQ ID NO: 727861 - RNA, 19 nt, Artificial Sequence
  Description of Artificial Sequence: Synthetic oligonucleotide
  Antisense strand to SEQ ID NO: 727860
uaacaagccacuuaccuaa

SEQ ID NO: 727862 - RNA, 19 nt, Artificial Sequence
  Description of Artificial Sequence: Synthetic oligonucleotide
  Sense strand starting at position 972 of SEQ ID NO: 586569
agguaaguggcuuguuaag

SEQ ID NO: 727863 - RNA, 19 nt, Artificial Sequence
  Description of Artificial Sequence: Synthetic oligonucleotide
  Antisense strand to SEQ ID NO: 727862
cuuaacaagccacuuaccu

SEQ ID NO: 727864 - RNA, 19 nt, Artificial Sequence
  Description of Artificial Sequence: Synthetic oligonucleotide
  Sense strand starting at position 974 of SEQ ID NO: 586569
guaaguggcuuguuaagua

SEQ ID NO: 727865 - RNA, 19 nt, Artificial Sequence
  Description of Artificial Sequence: Synthetic oligonucleotide
  Antisense strand to SEQ ID NO: 727864
uacuuaacaagccacuuac

SEQ ID NO: 727866 - RNA, 19 nt, Artificial Sequence
  Description of Artificial Sequence: Synthetic oligonucleotide
  Sense strand starting at position 979 of SEQ ID NO: 586569
uggcuuguuaaguaagcaa

SEQ ID NO: 727867 - RNA, 19 nt, Artificial Sequence
  Description of Artificial Sequence: Synthetic oligonucleotide
  Antisense strand to SEQ ID NO: 727866
uugcuuacuuaacaagcca

SEQ ID NO: 727868 - RNA, 19 nt, Artificial Sequence
  Description of Artificial Sequence: Synthetic oligonucleotide
  Sense strand starting at position 1309 of SEQ ID NO: 586569
gaugaaaggucacaaauga

SEQ ID NO: 727869 - RNA, 19 nt, Artificial Sequence
  Description of Artificial Sequence: Synthetic oligonucleotide
  Antisense strand to SEQ ID NO: 727868
ucauuugugaccuuucauc

SEQ ID NO: 727870 - RNA, 19 nt, Artificial Sequence
  Description of Artificial Sequence: Synthetic oligonucleotide
  Sense strand starting at position 1320 of SEQ ID NO: 586569
acaaaugagcccugaagca

SEQ ID NO: 727871 - RNA, 19 nt, Artificial Sequence
  Description of Artificial Sequence: Synthetic oligonucleotide
  Antisense strand to SEQ ID NO: 727870
ugcuucagggcucauuugu

SEQ ID NO: 727872 - RNA, 19 nt, Artificial Sequence
  Description of Artificial Sequence: Synthetic oligonucleotide
  Sense strand starting at position 1408 of SEQ ID NO: 586569
gaggcuugcccagaaacuu

SEQ ID NO: 727873 - RNA, 19 nt, Artificial Sequence
  Description of Artificial Sequence: Synthetic oligonucleotide
  Antisense strand to SEQ ID NO: 727872
aaguuucugggcaagccuc

SEQ ID NO: 727874 - RNA, 19 nt, Artificial Sequence
  Description of Artificial Sequence: Synthetic oligonucleotide
  Sense strand starting at position 1440 of SEQ ID NO: 586569
agguuugugcgugaucuag

SEQ ID NO: 727875 - RNA, 19 nt, Artificial Sequence
  Description of Artificial Sequence: Synthetic oligonucleotide
  Antisense strand to SEQ ID NO: 727874
cuagaucacgcacaaaccu

SEQ ID NO: 727876 - RNA, 19 nt, Artificial Sequence
  Description of Artificial Sequence: Synthetic oligonucleotide
  Sense strand starting at position 1449 of SEQ ID NO: 586569
cgugaucuaggccauuacu

SEQ ID NO: 727877 - RNA, 19 nt, Artificial Sequence
  Description of Artificial Sequence: Synthetic oligonucleotide
  Antisense strand to SEQ ID NO: 727876
aguaauggccuagaucacg

SEQ ID NO: 727878 - RNA, 19 nt, Artificial Sequence
  Description of Artificial Sequence: Synthetic oligonucleotide
  Sense strand starting at position 2074 of SEQ ID NO: 586569
uuaauacaugaucacgagu

SEQ ID NO: 727879 - RNA, 19 nt, Artificial Sequence
  Description of Artificial Sequence: Synthetic oligonucleotide
  Antisense strand to SEQ ID NO: 727878
acucgugaucauguauuaa

SEQ ID NO: 727880 - RNA, 19 nt, Artificial Sequence
  Description of Artificial Sequence: Synthetic oligonucleotide
  Sense strand starting at position 2220 of SEQ ID NO: 586569
auaccugauggcuaauagu

SEQ ID NO: 727881 - RNA, 19 nt, Artificial Sequence
  Description of Artificial Sequence: Synthetic oligonucleotide
  Antisense strand to SEQ ID NO: 727880
acuauuagccaucagguau

SEQ ID NO: 727882 - RNA, 19 nt, Artificial Sequence
  Description of Artificial Sequence: Synthetic oligonucleotide
  Sense strand starting at position 2234 of SEQ ID NO: 586569
auaguuccagugugauaac

SEQ ID NO: 727883 - RNA, 19 nt, Artificial Sequence
  Description of Artificial Sequence: Synthetic oligonucleotide
  Antisense strand to SEQ ID NO: 727882
guuaucacacuggaacuau

SEQ ID NO: 727884 - RNA, 19 nt, Artificial Sequence
  Description of Artificial Sequence: Synthetic oligonucleotide
  Sense strand starting at position 2243 of SEQ ID NO: 586569
gugugauaacgucggagaa

SEQ ID NO: 727885 - RNA, 19 nt, Artificial Sequence
  Description of Artificial Sequence: Synthetic oligonucleotide
  Antisense strand to SEQ ID NO: 727884
uucuccgacguuaucacac

SEQ ID NO: 727886 - RNA, 19 nt, Artificial Sequence
  Description of Artificial Sequence: Synthetic oligonucleotide
  Sense strand starting at position 2244 of SEQ ID NO: 586569
ugugauaacgucggagaau

SEQ ID NO: 727887 - RNA, 19 nt, Artificial Sequence
  Description of Artificial Sequence: Synthetic oligonucleotide
  Antisense strand to SEQ ID NO: 727886
auucuccgacguuaucaca

SEQ ID NO: 727888 - RNA, 19 nt, Artificial Sequence
  Description of Artificial Sequence: Synthetic oligonucleotide
  Sense strand starting at position 2247 of SEQ ID NO: 586569
gauaacgucggagaauacu

SEQ ID NO: 727889 - RNA, 19 nt, Artificial Sequence
  Description of Artificial Sequence: Synthetic oligonucleotide
  Antisense strand to SEQ ID NO: 727888
aguauucuccgacguuauc

SEQ ID NO: 727890 - RNA, 19 nt, Artificial Sequence
  Description of Artificial Sequence: Synthetic oligonucleotide
  Sense strand starting at position 2253 of SEQ ID NO: 586569
gucggagaauacuccaaua

SEQ ID NO: 727891 - RNA, 19 nt, Artificial Sequence
  Description of Artificial Sequence: Synthetic oligonucleotide
  Antisense strand to SEQ ID NO: 727890
uauuggaguauucuccgac

SEQ ID NO: 727892 - RNA, 19 nt, Artificial Sequence
  Description of Artificial Sequence: Synthetic oligonucleotide
  Sense strand starting at position 2309 of SEQ ID NO: 586569
cagguuauuuaauacucga

SEQ ID NO: 727893 - RNA, 19 nt, Artificial Sequence
  Description of Artificial Sequence: Synthetic oligonucleotide
  Antisense strand to SEQ ID NO: 727892
ucgaguauuaaauaaccug

SEQ ID NO: 727894 - RNA, 19 nt, Artificial Sequence
  Description of Artificial Sequence: Synthetic oligonucleotide
  Sense strand starting at position 2319 of SEQ ID NO: 586569
aauacucgauuugaguuua

SEQ ID NO: 727895 - RNA, 19 nt, Artificial Sequence
  Description of Artificial Sequence: Synthetic oligonucleotide
  Antisense strand to SEQ ID NO: 727894
uaaacucaaaucgaguauu

SEQ ID NO: 727896 - RNA, 19 nt, Artificial Sequence
  Description of Artificial Sequence: Synthetic oligonucleotide
  Sense strand starting at position 2942 of SEQ ID NO: 586569
gcgagaucgccgccgagaa

SEQ ID NO: 727897 - RNA, 19 nt, Artificial Sequence
  Description of Artificial Sequence: Synthetic oligonucleotide
  Antisense strand to SEQ ID NO: 727896
uucucggcggcgaucucgc

SEQ ID NO: 727898 - RNA, 19 nt, Artificial Sequence
  Description of Artificial Sequence: Synthetic oligonucleotide
  Sense strand starting at position 3078 of SEQ ID NO: 586569
guucgcacgccagaucuaa

SEQ ID NO: 727899 - RNA, 19 nt, Artificial Sequence
  Description of Artificial Sequence: Synthetic oligonucleotide
  Antisense strand to SEQ ID NO: 727898
uuagaucuggcgugcgaac

SEQ ID NO: 727900 - RNA, 19 nt, Artificial Sequence
  Description of Artificial Sequence: Synthetic oligonucleotide
  Sense strand starting at position 3168 of SEQ ID NO: 586569
ugcaaauguguacaucaga

SEQ ID NO: 727901 - RNA, 19 nt, Artificial Sequence
  Description of Artificial Sequence: Synthetic oligonucleotide
  Antisense strand to SEQ ID NO: 727900
ucugauguacacauuugca

SEQ ID NO: 727902 - RNA, 19 nt, Artificial Sequence
  Description of Artificial Sequence: Synthetic oligonucleotide
  Sense strand starting at position 3173 of SEQ ID NO: 586569
auguguacaucagagaaag

SEQ ID NO: 727903 - RNA, 19 nt, Artificial Sequence
  Description of Artificial Sequence: Synthetic oligonucleotide
  Antisense strand to SEQ ID NO: 727902
cuuucucugauguacacau

SEQ ID NO: 727904 - RNA, 19 nt, Artificial Sequence
  Description of Artificial Sequence: Synthetic oligonucleotide
  Sense strand starting at position 3727 of SEQ ID NO: 586569
cgcggauccuaccuacaaa

SEQ ID NO: 727905 - RNA, 19 nt, Artificial Sequence
  Description of Artificial Sequence: Synthetic oligonucleotide
  Antisense strand to SEQ ID NO: 727904
uuuguagguaggauccgcg

SEQ ID NO: 727906 - RNA, 19 nt, Artificial Sequence
  Description of Artificial Sequence: Synthetic oligonucleotide
  Sense strand starting at position 3798 of SEQ ID NO: 586569
cacugaauucugggaaacg

SEQ ID NO: 727907 - RNA, 19 nt, Artificial Sequence
  Description of Artificial Sequence: Synthetic oligonucleotide
  Antisense strand to SEQ ID NO: 727906
cguuucccagaauucagug

SEQ ID NO: 727908 - RNA, 19 nt, Artificial Sequence
  Description of Artificial Sequence: Synthetic oligonucleotide
  Sense strand starting at position 3964 of SEQ ID NO: 586569
gggcgaguaugcccuauga

SEQ ID NO: 727909 - RNA, 19 nt, Artificial Sequence
  Description of Artificial Sequence: Synthetic oligonucleotide
  Antisense strand to SEQ ID NO: 727908
ucauagggcauacucgccc

SEQ ID NO: 727910 - RNA, 19 nt, Artificial Sequence
  Description of Artificial Sequence: Synthetic oligonucleotide
  Sense strand starting at position 3966 of SEQ ID NO: 586569
gcgaguaugcccuaugacg

SEQ ID NO: 727911 - RNA, 19 nt, Artificial Sequence
  Description of Artificial Sequence: Synthetic oligonucleotide
  Antisense strand to SEQ ID NO: 727910
cgucauagggcauacucgc

SEQ ID NO: 727912 - RNA, 19 nt, Artificial Sequence
  Description of Artificial Sequence: Synthetic oligonucleotide
  Sense strand starting at position 444 of SEQ ID NO: 586570
uuaauacaugaucacgagu

SEQ ID NO: 727913 - RNA, 19 nt, Artificial Sequence
  Description of Artificial Sequence: Synthetic oligonucleotide
  Antisense strand to SEQ ID NO: 727912
acucgugaucauguauuaa

SEQ ID NO: 727914 - RNA, 19 nt, Artificial Sequence
  Description of Artificial Sequence: Synthetic oligonucleotide
  Sense strand starting at position 590 of SEQ ID NO: 586570
auaccugauggcuaauagu

SEQ ID NO: 727915 - RNA, 19 nt, Artificial Sequence
  Description of Artificial Sequence: Synthetic oligonucleotide
  Antisense strand to SEQ ID NO: 727914
acuauuagccaucagguau

SEQ ID NO: 727916 - RNA, 19 nt, Artificial Sequence
  Description of Artificial Sequence: Synthetic oligonucleotide
  Sense strand starting at position 604 of SEQ ID NO: 586570
auaguuccagugugauaac

SEQ ID NO: 727917 - RNA, 19 nt, Artificial Sequence
  Description of Artificial Sequence: Synthetic oligonucleotide
  Antisense strand to SEQ ID NO: 727916
guuaucacacuggaacuau

SEQ ID NO: 727918 - RNA, 19 nt, Artificial Sequence
  Description of Artificial Sequence: Synthetic oligonucleotide
  Sense strand starting at position 613 of SEQ ID NO: 586570
gugugauaacgucggagaa

SEQ ID NO: 727919 - RNA, 19 nt, Artificial Sequence
  Description of Artificial Sequence: Synthetic oligonucleotide
  Antisense strand to SEQ ID NO: 727918
uucuccgacguuaucacac

SEQ ID NO: 727920 - RNA, 19 nt, Artificial Sequence
  Description of Artificial Sequence: Synthetic oligonucleotide
  Sense strand starting at position 614 of SEQ ID NO: 586570
ugugauaacgucggagaau

SEQ ID NO: 727921 - RNA, 19 nt, Artificial Sequence
  Description of Artificial Sequence: Synthetic oligonucleotide
  Antisense strand to SEQ ID NO: 727920
auucuccgacguuaucaca

SEQ ID NO: 727922 - RNA, 19 nt, Artificial Sequence
  Description of Artificial Sequence: Synthetic oligonucleotide
  Sense strand starting at position 617 of SEQ ID NO: 586570
gauaacgucggagaauacu

SEQ ID NO: 727923 - RNA, 19 nt, Artificial Sequence
  Description of Artificial Sequence: Synthetic oligonucleotide
  Antisense strand to SEQ ID NO: 727922
aguauucuccgacguuauc

SEQ ID NO: 727924 - RNA, 19 nt, Artificial Sequence
  Description of Artificial Sequence: Synthetic oligonucleotide
  Sense strand starting at position 623 of SEQ ID NO: 586570
gucggagaauacuccaaua

SEQ ID NO: 727925 - RNA, 19 nt, Artificial Sequence
  Description of Artificial Sequence: Synthetic oligonucleotide
  Antisense strand to SEQ ID NO: 727924
uauuggaguauucuccgac

SEQ ID NO: 727926 - RNA, 19 nt, Artificial Sequence
  Description of Artificial Sequence: Synthetic oligonucleotide
  Sense strand starting at position 679 of SEQ ID NO: 586570
cagguuauuuaauacucga

SEQ ID NO: 727927 - RNA, 19 nt, Artificial Sequence
  Description of Artificial Sequence: Synthetic oligonucleotide
  Antisense strand to SEQ ID NO: 727926
ucgaguauuaaauaaccug

SEQ ID NO: 727928 - RNA, 19 nt, Artificial Sequence
  Description of Artificial Sequence: Synthetic oligonucleotide
  Sense strand starting at position 689 of SEQ ID NO: 586570
aauacucgauuugaguuua

SEQ ID NO: 727929 - RNA, 19 nt, Artificial Sequence
  Description of Artificial Sequence: Synthetic oligonucleotide
  Antisense strand to SEQ ID NO: 727928
uaaacucaaaucgaguauu

SEQ ID NO: 727930 - RNA, 19 nt, Artificial Sequence
  Description of Artificial Sequence: Synthetic oligonucleotide
  Sense strand starting at position 1312 of SEQ ID NO: 586570
gcgagaucgccgccgagaa

SEQ ID NO: 727931 - RNA, 19 nt, Artificial Sequence
  Description of Artificial Sequence: Synthetic oligonucleotide
  Antisense strand to SEQ ID NO: 727930
uucucggcggcgaucucgc

SEQ ID NO: 727932 - RNA, 19 nt, Artificial Sequence
  Description of Artificial Sequence: Synthetic oligonucleotide
  Sense strand starting at position 1538 of SEQ ID NO: 586570
ugcaaauguguacaucaga

SEQ ID NO: 727933 - RNA, 19 nt, Artificial Sequence
  Description of Artificial Sequence: Synthetic oligonucleotide
  Antisense strand to SEQ ID NO: 727932
ucugauguacacauuugca

SEQ ID NO: 727934 - RNA, 19 nt, Artificial Sequence
  Description of Artificial Sequence: Synthetic oligonucleotide
  Sense strand starting at position 2097 of SEQ ID NO: 586570
cgcggauccuaccuacaaa

SEQ ID NO: 727935 - RNA, 19 nt, Artificial Sequence
  Description of Artificial Sequence: Synthetic oligonucleotide
  Antisense strand to SEQ ID NO: 727934
uuuguagguaggauccgcg

SEQ ID NO: 727936 - RNA, 19 nt, Artificial Sequence
  Description of Artificial Sequence: Synthetic oligonucleotide
  Sense strand starting at position 2168 of SEQ ID NO: 586570
cacugaauucugggaaacg

SEQ ID NO: 727937 - RNA, 19 nt, Artificial Sequence
  Description of Artificial Sequence: Synthetic oligonucleotide
  Antisense strand to SEQ ID NO: 727936
cguuucccagaauucagug

SEQ ID NO: 727938 - RNA, 19 nt, Artificial Sequence
  Description of Artificial Sequence: Synthetic oligonucleotide
  Sense strand starting at position 2413 of SEQ ID NO: 586570
ugguguucuccuuaaccuu

SEQ ID NO: 727939 - RNA, 19 nt, Artificial Sequence
  Description of Artificial Sequence: Synthetic oligonucleotide
  Antisense strand to SEQ ID NO: 727938
aagguuaaggagaacacca

SEQ ID NO: 727940 - RNA, 19 nt, Artificial Sequence
  Description of Artificial Sequence: Synthetic oligonucleotide
  Sense strand starting at position 2470 of SEQ ID NO: 586570
uuaccucuccuggguaaca

SEQ ID NO: 727941 - RNA, 19 nt, Artificial Sequence
  Description of Artificial Sequence: Synthetic oligonucleotide
  Antisense strand to SEQ ID NO: 727940
uguuacccaggagagguaa

SEQ ID NO: 727942 - RNA, 19 nt, Artificial Sequence
  Description of Artificial Sequence: Synthetic oligonucleotide
  Sense strand starting at position 2472 of SEQ ID NO: 586570
accucuccuggguaacauu

SEQ ID NO: 727943 - RNA, 19 nt, Artificial Sequence
  Description of Artificial Sequence: Synthetic oligonucleotide
  Antisense strand to SEQ ID NO: 727942
aauguuacccaggagaggu

SEQ ID NO: 727944 - RNA, 19 nt, Artificial Sequence
  Description of Artificial Sequence: Synthetic oligonucleotide
  Sense strand starting at position 2481 of SEQ ID NO: 586570
ggguaacauuuccaugguu

SEQ ID NO: 727945 - RNA, 19 nt, Artificial Sequence
  Description of Artificial Sequence: Synthetic oligonucleotide
  Antisense strand to SEQ ID NO: 727944
aaccauggaaauguuaccc

SEQ ID NO: 727946 - RNA, 19 nt, Artificial Sequence
  Description of Artificial Sequence: Synthetic oligonucleotide
  Sense strand starting at position 2530 of SEQ ID NO: 586570
agccaucaucaguacugua

SEQ ID NO: 727947 - RNA, 19 nt, Artificial Sequence
  Description of Artificial Sequence: Synthetic oligonucleotide
  Antisense strand to SEQ ID NO: 727946
uacaguacugaugauggcu

SEQ ID NO: 727948 - RNA, 19 nt, Artificial Sequence
  Description of Artificial Sequence: Synthetic oligonucleotide
  Sense strand starting at position 2538 of SEQ ID NO: 586570
ucaguacuguaccuguaau

SEQ ID NO: 727949 - RNA, 19 nt, Artificial Sequence
  Description of Artificial Sequence: Synthetic oligonucleotide
  Antisense strand to SEQ ID NO: 727948
auuacagguacaguacuga

SEQ ID NO: 727950 - RNA, 19 nt, Artificial Sequence
  Description of Artificial Sequence: Synthetic oligonucleotide
  Sense strand starting at position 2552 of SEQ ID NO: 586570
guaauuggaccgugguuca

SEQ ID NO: 727951 - RNA, 19 nt, Artificial Sequence
  Description of Artificial Sequence: Synthetic oligonucleotide
  Antisense strand to SEQ ID NO: 727950
ugaaccacgguccaauuac

SEQ ID NO: 727952 - RNA, 19 nt, Artificial Sequence
  Description of Artificial Sequence: Synthetic oligonucleotide
  Sense strand starting at position 2612 of SEQ ID NO: 586570
gaugcuuucgucuacuuag

SEQ ID NO: 727953 - RNA, 19 nt, Artificial Sequence
  Description of Artificial Sequence: Synthetic oligonucleotide
  Antisense strand to SEQ ID NO: 727952
cuaaguagacgaaagcauc

SEQ ID NO: 727954 - RNA, 19 nt, Artificial Sequence
  Description of Artificial Sequence: Synthetic oligonucleotide
  Sense strand starting at position 2614 of SEQ ID NO: 586570
ugcuuucgucuacuuaguu

SEQ ID NO: 727955 - RNA, 19 nt, Artificial Sequence
  Description of Artificial Sequence: Synthetic oligonucleotide
  Antisense strand to SEQ ID NO: 727954
aacuaaguagacgaaagca

SEQ ID NO: 727956 - RNA, 19 nt, Artificial Sequence
  Description of Artificial Sequence: Synthetic oligonucleotide
  Sense strand starting at position 2635 of SEQ ID NO: 586570
ggaguucguguauaucuca

SEQ ID NO: 727957 - RNA, 19 nt, Artificial Sequence
  Description of Artificial Sequence: Synthetic oligonucleotide
  Antisense strand to SEQ ID NO: 727956
ugagauauacacgaacucc

SEQ ID NO: 727958 - RNA, 19 nt, Artificial Sequence
  Description of Artificial Sequence: Synthetic oligonucleotide
  Sense strand starting at position 2655 of SEQ ID NO: 586570
auucuagacuaggaauaua

SEQ ID NO: 727959 - RNA, 19 nt, Artificial Sequence
  Description of Artificial Sequence: Synthetic oligonucleotide
  Antisense strand to SEQ ID NO: 727958
uauauuccuagucuagaau

SEQ ID NO: 727960 - RNA, 19 nt, Artificial Sequence
  Description of Artificial Sequence: Synthetic oligonucleotide
  Sense strand starting at position 2682 of SEQ ID NO: 586570
cagcguuguggguuucuau

SEQ ID NO: 727961 - RNA, 19 nt, Artificial Sequence
  Description of Artificial Sequence: Synthetic oligonucleotide
  Antisense strand to SEQ ID NO: 727960
auagaaacccacaacgcug

SEQ ID NO: 727962 - RNA, 19 nt, Artificial Sequence
  Description of Artificial Sequence: Synthetic oligonucleotide
  Sense strand starting at position 2701 of SEQ ID NO: 586570
acaagaaugugucccuuga

SEQ ID NO: 727963 - RNA, 19 nt, Artificial Sequence
  Description of Artificial Sequence: Synthetic oligonucleotide
  Antisense strand to SEQ ID NO: 727962
ucaagggacacauucuugu

SEQ ID NO: 727964 - RNA, 19 nt, Artificial Sequence
  Description of Artificial Sequence: Synthetic oligonucleotide
  Sense strand starting at position 2703 of SEQ ID NO: 586570
aagaaugugucccuugaca

SEQ ID NO: 727965 - RNA, 19 nt, Artificial Sequence
  Description of Artificial Sequence: Synthetic oligonucleotide
  Antisense strand to SEQ ID NO: 727964
ugucaagggacacauucuu

SEQ ID NO: 727966 - RNA, 19 nt, Artificial Sequence
  Description of Artificial Sequence: Synthetic oligonucleotide
  Sense strand starting at position 2705 of SEQ ID NO: 586570
gaaugugucccuugacaau

SEQ ID NO: 727967 - RNA, 19 nt, Artificial Sequence
  Description of Artificial Sequence: Synthetic oligonucleotide
  Antisense strand to SEQ ID NO: 727966
auugucaagggacacauuc

SEQ ID NO: 727968 - RNA, 19 nt, Artificial Sequence
  Description of Artificial Sequence: Synthetic oligonucleotide
  Sense strand starting at position 2844 of SEQ ID NO: 586570
acauuugucuaguauuuag

SEQ ID NO: 727969 - RNA, 19 nt, Artificial Sequence
  Description of Artificial Sequence: Synthetic oligonucleotide
  Antisense strand to SEQ ID NO: 727968
cuaaauacuagacaaaugu

SEQ ID NO: 727970 - RNA, 19 nt, Artificial Sequence
  Description of Artificial Sequence: Synthetic oligonucleotide
  Sense strand starting at position 2855 of SEQ ID NO: 586570
guauuuagagccuguuauu

SEQ ID NO: 727971 - RNA, 19 nt, Artificial Sequence
  Description of Artificial Sequence: Synthetic oligonucleotide
  Antisense strand to SEQ ID NO: 727970
aauaacaggcucuaaauac

SEQ ID NO: 727972 - RNA, 19 nt, Artificial Sequence
  Description of Artificial Sequence: Synthetic oligonucleotide
  Sense strand starting at position 2918 of SEQ ID NO: 586570
ccucaauguaggugaguca

SEQ ID NO: 727973 - RNA, 19 nt, Artificial Sequence
  Description of Artificial Sequence: Synthetic oligonucleotide
  Antisense strand to SEQ ID NO: 727972
ugacucaccuacauugagg

SEQ ID NO: 727974 - RNA, 19 nt, Artificial Sequence
  Description of Artificial Sequence: Synthetic oligonucleotide
  Sense strand starting at position 2953 of SEQ ID NO: 586570
ucagcugagcucuauucua

SEQ ID NO: 727975 - RNA, 19 nt, Artificial Sequence
  Description of Artificial Sequence: Synthetic oligonucleotide
  Antisense strand to SEQ ID NO: 727974
uagaauagagcucagcuga

SEQ ID NO: 727976 - RNA, 19 nt, Artificial Sequence
  Description of Artificial Sequence: Synthetic oligonucleotide
  Sense strand starting at position 2985 of SEQ ID NO: 586570
guagcaaauuuccaccaga

SEQ ID NO: 727977 - RNA, 19 nt, Artificial Sequence
  Description of Artificial Sequence: Synthetic oligonucleotide
  Antisense strand to SEQ ID NO: 727976
ucugguggaaauuugcuac

SEQ ID NO: 727978 - RNA, 19 nt, Artificial Sequence
  Description of Artificial Sequence: Synthetic oligonucleotide
  Sense strand starting at position 3207 of SEQ ID NO: 586570
cuguccuauucugugauca

SEQ ID NO: 727979 - RNA, 19 nt, Artificial Sequence
  Description of Artificial Sequence: Synthetic oligonucleotide
  Antisense strand to SEQ ID NO: 727978
ugaucacagaauaggacag

SEQ ID NO: 727980 - RNA, 19 nt, Artificial Sequence
  Description of Artificial Sequence: Synthetic oligonucleotide
  Sense strand starting at position 3208 of SEQ ID NO: 586570
uguccuauucugugaucac

SEQ ID NO: 727981 - RNA, 19 nt, Artificial Sequence
  Description of Artificial Sequence: Synthetic oligonucleotide
  Antisense strand to SEQ ID NO: 727980
gugaucacagaauaggaca

SEQ ID NO: 727982 - RNA, 19 nt, Artificial Sequence
  Description of Artificial Sequence: Synthetic oligonucleotide
  Sense strand starting at position 3211 of SEQ ID NO: 586570
ccuauucugugaucacaug

SEQ ID NO: 727983 - RNA, 19 nt, Artificial Sequence
  Description of Artificial Sequence: Synthetic oligonucleotide
  Antisense strand to SEQ ID NO: 727982
caugugaucacagaauagg

SEQ ID NO: 727984 - RNA, 19 nt, Artificial Sequence
  Description of Artificial Sequence: Synthetic oligonucleotide
  Sense strand starting at position 3212 of SEQ ID NO: 586570
cuauucugugaucacaugu

SEQ ID NO: 727985 - RNA, 19 nt, Artificial Sequence
  Description of Artificial Sequence: Synthetic oligonucleotide
  Antisense strand to SEQ ID NO: 727984
acaugugaucacagaauag

SEQ ID NO: 727986 - RNA, 19 nt, Artificial Sequence
  Description of Artificial Sequence: Synthetic oligonucleotide
  Sense strand starting at position 3306 of SEQ ID NO: 586570
cagauuuauuuguguguuc

SEQ ID NO: 727987 - RNA, 19 nt, Artificial Sequence
  Description of Artificial Sequence: Synthetic oligonucleotide
  Antisense strand to SEQ ID NO: 727986
gaacacacaaauaaaucug

SEQ ID NO: 727988 - RNA, 19 nt, Artificial Sequence
  Description of Artificial Sequence: Synthetic oligonucleotide
  Sense strand starting at position 3311 of SEQ ID NO: 586570
uuauuuguguguucccuau

SEQ ID NO: 727989 - RNA, 19 nt, Artificial Sequence
  Description of Artificial Sequence: Synthetic oligonucleotide
  Antisense strand to SEQ ID NO: 727988
auagggaacacacaaauaa

SEQ ID NO: 727990 - RNA, 19 nt, Artificial Sequence
  Description of Artificial Sequence: Synthetic oligonucleotide
  Sense strand starting at position 3776 of SEQ ID NO: 586570
uuguuuaauccugaagcag

SEQ ID NO: 727991 - RNA, 19 nt, Artificial Sequence
  Description of Artificial Sequence: Synthetic oligonucleotide
  Antisense strand to SEQ ID NO: 727990
cugcuucaggauuaaacaa

SEQ ID NO: 727992 - RNA, 19 nt, Artificial Sequence
  Description of Artificial Sequence: Synthetic oligonucleotide
  Sense strand starting at position 114 of SEQ ID NO: 586571
gccuaagacuucuacaggu

SEQ ID NO: 727993 - RNA, 19 nt, Artificial Sequence
  Description of Artificial Sequence: Synthetic oligonucleotide
  Antisense strand to SEQ ID NO: 727992
accuguagaagucuuaggc

SEQ ID NO: 727994 - RNA, 19 nt, Artificial Sequence
  Description of Artificial Sequence: Synthetic oligonucleotide
  Sense strand starting at position 116 of SEQ ID NO: 586571
cuaagacuucuacagguuu

SEQ ID NO: 727995 - RNA, 19 nt, Artificial Sequence
  Description of Artificial Sequence: Synthetic oligonucleotide
  Antisense strand to SEQ ID NO: 727994
aaaccuguagaagucuuag

SEQ ID NO: 727996 - RNA, 19 nt, Artificial Sequence
  Description of Artificial Sequence: Synthetic oligonucleotide
  Sense strand starting at position 761 of SEQ ID NO: 586571
cgcauuuagccuuagucca

SEQ ID NO: 727997 - RNA, 19 nt, Artificial Sequence
  Description of Artificial Sequence: Synthetic oligonucleotide
  Antisense strand to SEQ ID NO: 727996
uggacuaaggcuaaaugcg

SEQ ID NO: 727998 - RNA, 19 nt, Artificial Sequence
  Description of Artificial Sequence: Synthetic oligonucleotide
  Sense strand starting at position 870 of SEQ ID NO: 586571
guuccaggaccauauagua

SEQ ID NO: 727999 - RNA, 19 nt, Artificial Sequence
  Description of Artificial Sequence: Synthetic oligonucleotide
  Antisense strand to SEQ ID NO: 727998
uacuauaugguccuggaac

SEQ ID NO: 728000 - RNA, 19 nt, Artificial Sequence
  Description of Artificial Sequence: Synthetic oligonucleotide
  Sense strand starting at position 1486 of SEQ ID NO: 586571
gcgacaaccugucucaaac

SEQ ID NO: 728001 - RNA, 19 nt, Artificial Sequence
  Description of Artificial Sequence: Synthetic oligonucleotide
  Antisense strand to SEQ ID NO: 728000
guuugagacagguugucgc

SEQ ID NO: 728002 - RNA, 19 nt, Artificial Sequence
  Description of Artificial Sequence: Synthetic oligonucleotide
  Sense strand starting at position 1573 of SEQ ID NO: 586571
aggcuaugguuccaaugau

SEQ ID NO: 728003 - RNA, 19 nt, Artificial Sequence
  Description of Artificial Sequence: Synthetic oligonucleotide
  Antisense strand to SEQ ID NO: 728002
aucauuggaaccauagccu

SEQ ID NO: 728004 - RNA, 19 nt, Artificial Sequence
  Description of Artificial Sequence: Synthetic oligonucleotide
  Sense strand starting at position 1656 of SEQ ID NO: 586571
ggcagugguuggaaucaag

SEQ ID NO: 728005 - RNA, 19 nt, Artificial Sequence
  Description of Artificial Sequence: Synthetic oligonucleotide
  Antisense strand to SEQ ID NO: 728004
cuugauuccaaccacugcc

SEQ ID NO: 728006 - RNA, 19 nt, Artificial Sequence
  Description of Artificial Sequence: Synthetic oligonucleotide
  Sense strand starting at position 1667 of SEQ ID NO: 586571
gaaucaaggucugaaagca

SEQ ID NO: 728007 - RNA, 19 nt, Artificial Sequence
  Description of Artificial Sequence: Synthetic oligonucleotide
  Antisense strand to SEQ ID NO: 728006
ugcuuucagaccuugauuc

SEQ ID NO: 728008 - RNA, 19 nt, Artificial Sequence
  Description of Artificial Sequence: Synthetic oligonucleotide
  Sense strand starting at position 2259 of SEQ ID NO: 586571
gccaucacguccgacuaau

SEQ ID NO: 728009 - RNA, 19 nt, Artificial Sequence
  Description of Artificial Sequence: Synthetic oligonucleotide
  Antisense strand to SEQ ID NO: 728008
auuagucggacgugauggc

SEQ ID NO: 728010 - RNA, 19 nt, Artificial Sequence
  Description of Artificial Sequence: Synthetic oligonucleotide
  Sense strand starting at position 2400 of SEQ ID NO: 586571
ccaccagucucgguagaga

SEQ ID NO: 728011 - RNA, 19 nt, Artificial Sequence
  Description of Artificial Sequence: Synthetic oligonucleotide
  Antisense strand to SEQ ID NO: 728010
ucucuaccgagacuggugg

SEQ ID NO: 728012 - RNA, 19 nt, Artificial Sequence
  Description of Artificial Sequence: Synthetic oligonucleotide
  Sense strand starting at position 2476 of SEQ ID NO: 586571
cccaauaaucccgagagcu

SEQ ID NO: 728013 - RNA, 19 nt, Artificial Sequence
  Description of Artificial Sequence: Synthetic oligonucleotide
  Antisense strand to SEQ ID NO: 728012
agcucucgggauuauuggg

SEQ ID NO: 728014 - RNA, 19 nt, Artificial Sequence
  Description of Artificial Sequence: Synthetic oligonucleotide
  Sense strand starting at position 2549 of SEQ ID NO: 586571
aucacuguggcaugauauc

SEQ ID NO: 728015 - RNA, 19 nt, Artificial Sequence
  Description of Artificial Sequence: Synthetic oligonucleotide
  Antisense strand to SEQ ID NO: 728014
gauaucaugccacagugau

SEQ ID NO: 728016 - RNA, 19 nt, Artificial Sequence
  Description of Artificial Sequence: Synthetic oligonucleotide
  Sense strand starting at position 2628 of SEQ ID NO: 586571
aggugaaagucugguuucu

SEQ ID NO: 728017 - RNA, 19 nt, Artificial Sequence
  Description of Artificial Sequence: Synthetic oligonucleotide
  Antisense strand to SEQ ID NO: 728016
agaaaccagacuuucaccu

SEQ ID NO: 728018 - RNA, 19 nt, Artificial Sequence
  Description of Artificial Sequence: Synthetic oligonucleotide
  Sense strand starting at position 2630 of SEQ ID NO: 586571
gugaaagucugguuucugu

SEQ ID NO: 728019 - RNA, 19 nt, Artificial Sequence
  Description of Artificial Sequence: Synthetic oligonucleotide
  Antisense strand to SEQ ID NO: 728018
acagaaaccagacuuucac

SEQ ID NO: 728020 - RNA, 19 nt, Artificial Sequence
  Description of Artificial Sequence: Synthetic oligonucleotide
  Sense strand starting at position 2667 of SEQ ID NO: 586571
cuaucauucgucugaccua

SEQ ID NO: 728021 - RNA, 19 nt, Artificial Sequence
  Description of Artificial Sequence: Synthetic oligonucleotide
  Antisense strand to SEQ ID NO: 728020
uaggucagacgaaugauag

SEQ ID NO: 728022 - RNA, 19 nt, Artificial Sequence
  Description of Artificial Sequence: Synthetic oligonucleotide
  Sense strand starting at position 2672 of SEQ ID NO: 586571
auucgucugaccuaggaga

SEQ ID NO: 728023 - RNA, 19 nt, Artificial Sequence
  Description of Artificial Sequence: Synthetic oligonucleotide
  Antisense strand to SEQ ID NO: 728022
ucuccuaggucagacgaau

SEQ ID NO: 728024 - RNA, 19 nt, Artificial Sequence
  Description of Artificial Sequence: Synthetic oligonucleotide
  Sense strand starting at position 2674 of SEQ ID NO: 586571
ucgucugaccuaggagaaa

SEQ ID NO: 728025 - RNA, 19 nt, Artificial Sequence
  Description of Artificial Sequence: Synthetic oligonucleotide
  Antisense strand to SEQ ID NO: 728024
uuucuccuaggucagacga

SEQ ID NO: 728026 - RNA, 19 nt, Artificial Sequence
  Description of Artificial Sequence: Synthetic oligonucleotide
  Sense strand starting at position 2801 of SEQ ID NO: 586571
uuggauaagccaugauauu

SEQ ID NO: 728027 - RNA, 19 nt, Artificial Sequence
  Description of Artificial Sequence: Synthetic oligonucleotide
  Antisense strand to SEQ ID NO: 728026
aauaucauggcuuauccaa

SEQ ID NO: 728028 - RNA, 19 nt, Artificial Sequence
  Description of Artificial Sequence: Synthetic oligonucleotide
  Sense strand starting at position 2822 of SEQ ID NO: 586571
augucuaugugccgagagu

SEQ ID NO: 728029 - RNA, 19 nt, Artificial Sequence
  Description of Artificial Sequence: Synthetic oligonucleotide
  Antisense strand to SEQ ID NO: 728028
acucucggcacauagacau

SEQ ID NO: 728030 - RNA, 19 nt, Artificial Sequence
  Description of Artificial Sequence: Synthetic oligonucleotide
  Sense strand starting at position 2911 of SEQ ID NO: 586571
ucuuuaaccuucgguaaca

SEQ ID NO: 728031 - RNA, 19 nt, Artificial Sequence
  Description of Artificial Sequence: Synthetic oligonucleotide
  Antisense strand to SEQ ID NO: 728030
uguuaccgaagguuaaaga

SEQ ID NO: 728032 - RNA, 19 nt, Artificial Sequence
  Description of Artificial Sequence: Synthetic oligonucleotide
  Sense strand starting at position 2912 of SEQ ID NO: 586571
cuuuaaccuucgguaacau

SEQ ID NO: 728033 - RNA, 19 nt, Artificial Sequence
  Description of Artificial Sequence: Synthetic oligonucleotide
  Antisense strand to SEQ ID NO: 728032
auguuaccgaagguuaaag

SEQ ID NO: 728034 - RNA, 19 nt, Artificial Sequence
  Description of Artificial Sequence: Synthetic oligonucleotide
  Sense strand starting at position 2913 of SEQ ID NO: 586571
uuuaaccuucgguaacaua

SEQ ID NO: 728035 - RNA, 19 nt, Artificial Sequence
  Description of Artificial Sequence: Synthetic oligonucleotide
  Antisense strand to SEQ ID NO: 728034
uauguuaccgaagguuaaa

SEQ ID NO: 728036 - RNA, 19 nt, Artificial Sequence
  Description of Artificial Sequence: Synthetic oligonucleotide
  Sense strand starting at position 2921 of SEQ ID NO: 586571
ucgguaacauaguuacaua

SEQ ID NO: 728037 - RNA, 19 nt, Artificial Sequence
  Description of Artificial Sequence: Synthetic oligonucleotide
  Antisense strand to SEQ ID NO: 728036
uauguaacuauguuaccga

SEQ ID NO: 728038 - RNA, 19 nt, Artificial Sequence
  Description of Artificial Sequence: Synthetic oligonucleotide
  Sense strand starting at position 2932 of SEQ ID NO: 586571
guuacauagucuuuguauu

SEQ ID NO: 728039 - RNA, 19 nt, Artificial Sequence
  Description of Artificial Sequence: Synthetic oligonucleotide
  Antisense strand to SEQ ID NO: 728038
aauacaaagacuauguaac

SEQ ID NO: 728040 - RNA, 19 nt, Artificial Sequence
  Description of Artificial Sequence: Synthetic oligonucleotide
  Sense strand starting at position 2933 of SEQ ID NO: 586571
uuacauagucuuuguauug

SEQ ID NO: 728041 - RNA, 19 nt, Artificial Sequence
  Description of Artificial Sequence: Synthetic oligonucleotide
  Antisense strand to SEQ ID NO: 728040
caauacaaagacuauguaa

SEQ ID NO: 728042 - RNA, 19 nt, Artificial Sequence
  Description of Artificial Sequence: Synthetic oligonucleotide
  Sense strand starting at position 3027 of SEQ ID NO: 586571
acuugagguucugcacagu

SEQ ID NO: 728043 - RNA, 19 nt, Artificial Sequence
  Description of Artificial Sequence: Synthetic oligonucleotide
  Antisense strand to SEQ ID NO: 728042
acugugcagaaccucaagu

SEQ ID NO: 728044 - RNA, 19 nt, Artificial Sequence
  Description of Artificial Sequence: Synthetic oligonucleotide
  Sense strand starting at position 3044 of SEQ ID NO: 586571
gucccuucguccugguaga

SEQ ID NO: 728045 - RNA, 19 nt, Artificial Sequence
  Description of Artificial Sequence: Synthetic oligonucleotide
  Antisense strand to SEQ ID NO: 728044
ucuaccaggacgaagggac

SEQ ID NO: 728046 - RNA, 19 nt, Artificial Sequence
  Description of Artificial Sequence: Synthetic oligonucleotide
  Sense strand starting at position 3045 of SEQ ID NO: 586571
ucccuucguccugguagau

SEQ ID NO: 728047 - RNA, 19 nt, Artificial Sequence
  Description of Artificial Sequence: Synthetic oligonucleotide
  Antisense strand to SEQ ID NO: 728046
aucuaccaggacgaaggga

SEQ ID NO: 728048 - RNA, 19 nt, Artificial Sequence
  Description of Artificial Sequence: Synthetic oligonucleotide
  Sense strand starting at position 3057 of SEQ ID NO: 586571
gguagauucuaggccagau

SEQ ID NO: 728049 - RNA, 19 nt, Artificial Sequence
  Description of Artificial Sequence: Synthetic oligonucleotide
  Antisense strand to SEQ ID NO: 728048
aucuggccuagaaucuacc

SEQ ID NO: 728050 - RNA, 19 nt, Artificial Sequence
  Description of Artificial Sequence: Synthetic oligonucleotide
  Sense strand starting at position 3437 of SEQ ID NO: 586571
cucugaaagugccggaauu

SEQ ID NO: 728051 - RNA, 19 nt, Artificial Sequence
  Description of Artificial Sequence: Synthetic oligonucleotide
  Antisense strand to SEQ ID NO: 728050
aauuccggcacuuucagag

SEQ ID NO: 728052 - RNA, 19 nt, Artificial Sequence
  Description of Artificial Sequence: Synthetic oligonucleotide
  Sense strand starting at position 3438 of SEQ ID NO: 586571
ucugaaagugccggaauua

SEQ ID NO: 728053 - RNA, 19 nt, Artificial Sequence
  Description of Artificial Sequence: Synthetic oligonucleotide
  Antisense strand to SEQ ID NO: 728052
uaauuccggcacuuucaga

SEQ ID NO: 728054 - RNA, 19 nt, Artificial Sequence
  Description of Artificial Sequence: Synthetic oligonucleotide
  Sense strand starting at position 3530 of SEQ ID NO: 586571
cgaagugaugaguauccua

SEQ ID NO: 728055 - RNA, 19 nt, Artificial Sequence
  Description of Artificial Sequence: Synthetic oligonucleotide
  Antisense strand to SEQ ID NO: 728054
uaggauacucaucacuucg

SEQ ID NO: 728056 - RNA, 19 nt, Artificial Sequence
  Description of Artificial Sequence: Synthetic oligonucleotide
  Sense strand starting at position 3533 of SEQ ID NO: 586571
agugaugaguauccuaaau

SEQ ID NO: 728057 - RNA, 19 nt, Artificial Sequence
  Description of Artificial Sequence: Synthetic oligonucleotide
  Antisense strand to SEQ ID NO: 728056
auuuaggauacucaucacu

SEQ ID NO: 728058 - RNA, 19 nt, Artificial Sequence
  Description of Artificial Sequence: Synthetic oligonucleotide
  Sense strand starting at position 3535 of SEQ ID NO: 586571
ugaugaguauccuaaauug

SEQ ID NO: 728059 - RNA, 19 nt, Artificial Sequence
  Description of Artificial Sequence: Synthetic oligonucleotide
  Antisense strand to SEQ ID NO: 728058
caauuuaggauacucauca

SEQ ID NO: 728060 - RNA, 19 nt, Artificial Sequence
  Description of Artificial Sequence: Synthetic oligonucleotide
  Sense strand starting at position 3922 of SEQ ID NO: 586571
uucuccuuucuauguguaa

SEQ ID NO: 728061 - RNA, 19 nt, Artificial Sequence
  Description of Artificial Sequence: Synthetic oligonucleotide
  Antisense strand to SEQ ID NO: 728060
uuacacauagaaaggagaa

SEQ ID NO: 728062 - RNA, 19 nt, Artificial Sequence
  Description of Artificial Sequence: Synthetic oligonucleotide
  Sense strand starting at position 3923 of SEQ ID NO: 586571
ucuccuuucuauguguaaa

SEQ ID NO: 728063 - RNA, 19 nt, Artificial Sequence
  Description of Artificial Sequence: Synthetic oligonucleotide
  Antisense strand to SEQ ID NO: 728062
uuuacacauagaaaggaga

SEQ ID NO: 728064 - RNA, 19 nt, Artificial Sequence
  Description of Artificial Sequence: Synthetic oligonucleotide
  Sense strand starting at position 3925 of SEQ ID NO: 586571
uccuuucuauguguaaaga

SEQ ID NO: 728065 - RNA, 19 nt, Artificial Sequence
  Description of Artificial Sequence: Synthetic oligonucleotide
  Antisense strand to SEQ ID NO: 728064
ucuuuacacauagaaagga

SEQ ID NO: 728066 - RNA, 19 nt, Artificial Sequence
  Description of Artificial Sequence: Synthetic oligonucleotide
  Sense strand starting at position 3926 of SEQ ID NO: 586571
ccuuucuauguguaaagau

SEQ ID NO: 728067 - RNA, 19 nt, Artificial Sequence
  Description of Artificial Sequence: Synthetic oligonucleotide
  Antisense strand to SEQ ID NO: 728066
aucuuuacacauagaaagg

SEQ ID NO: 728068 - RNA, 19 nt, Artificial Sequence
  Description of Artificial Sequence: Synthetic oligonucleotide
  Sense strand starting at position 337 of SEQ ID NO: 586572
gggcauuuaacucgcagau

SEQ ID NO: 728069 - RNA, 19 nt, Artificial Sequence
  Description of Artificial Sequence: Synthetic oligonucleotide
  Antisense strand to SEQ ID NO: 728068
aucugcgaguuaaaugccc

SEQ ID NO: 728070 - RNA, 19 nt, Artificial Sequence
  Description of Artificial Sequence: Synthetic oligonucleotide
  Sense strand starting at position 384 of SEQ ID NO: 586572
ccacuacuuggguaucagu

SEQ ID NO: 728071 - RNA, 19 nt, Artificial Sequence
  Description of Artificial Sequence: Synthetic oligonucleotide
  Antisense strand to SEQ ID NO: 728070
acugauacccaaguagugg

SEQ ID NO: 728072 - RNA, 19 nt, Artificial Sequence
  Description of Artificial Sequence: Synthetic oligonucleotide
  Sense strand starting at position 1140 of SEQ ID NO: 586572
cagacagcgccguaaauaa

SEQ ID NO: 728073 - RNA, 19 nt, Artificial Sequence
  Description of Artificial Sequence: Synthetic oligonucleotide
  Antisense strand to SEQ ID NO: 728072
uuauuuacggcgcugucug

SEQ ID NO: 728074 - RNA, 19 nt, Artificial Sequence
  Description of Artificial Sequence: Synthetic oligonucleotide
  Sense strand starting at position 1151 of SEQ ID NO: 586572
guaaauaacgaccgaggaa

SEQ ID NO: 728075 - RNA, 19 nt, Artificial Sequence
  Description of Artificial Sequence: Synthetic oligonucleotide
  Antisense strand to SEQ ID NO: 728074
uuccucggucguuauuuac

SEQ ID NO: 728076 - RNA, 19 nt, Artificial Sequence
  Description of Artificial Sequence: Synthetic oligonucleotide
  Sense strand starting at position 1657 of SEQ ID NO: 586572
cuuggcguccuugaagaua

SEQ ID NO: 728077 - RNA, 19 nt, Artificial Sequence
  Description of Artificial Sequence: Synthetic oligonucleotide
  Antisense strand to SEQ ID NO: 728076
uaucuucaaggacgccaag

SEQ ID NO: 728078 - RNA, 19 nt, Artificial Sequence
  Description of Artificial Sequence: Synthetic oligonucleotide
  Sense strand starting at position 1668 of SEQ ID NO: 586572
ugaagauacuuucuagguc

SEQ ID NO: 728079 - RNA, 19 nt, Artificial Sequence
  Description of Artificial Sequence: Synthetic oligonucleotide
  Antisense strand to SEQ ID NO: 728078
gaccuagaaaguaucuuca

SEQ ID NO: 728080 - RNA, 19 nt, Artificial Sequence
  Description of Artificial Sequence: Synthetic oligonucleotide
  Sense strand starting at position 1707 of SEQ ID NO: 586572
ugagguuuccgauauacag

SEQ ID NO: 728081 - RNA, 19 nt, Artificial Sequence
  Description of Artificial Sequence: Synthetic oligonucleotide
  Antisense strand to SEQ ID NO: 728080
cuguauaucggaaaccuca

SEQ ID NO: 728082 - RNA, 19 nt, Artificial Sequence
  Description of Artificial Sequence: Synthetic oligonucleotide
  Sense strand starting at position 1709 of SEQ ID NO: 586572
agguuuccgauauacaguu

SEQ ID NO: 728083 - RNA, 19 nt, Artificial Sequence
  Description of Artificial Sequence: Synthetic oligonucleotide
  Antisense strand to SEQ ID NO: 728082
aacuguauaucggaaaccu

SEQ ID NO: 728084 - RNA, 19 nt, Artificial Sequence
  Description of Artificial Sequence: Synthetic oligonucleotide
  Sense strand starting at position 1735 of SEQ ID NO: 586572
ugugaagagugguuguuua

SEQ ID NO: 728085 - RNA, 19 nt, Artificial Sequence
  Description of Artificial Sequence: Synthetic oligonucleotide
  Antisense strand to SEQ ID NO: 728084
uaaacaaccacucuucaca

SEQ ID NO: 728086 - RNA, 19 nt, Artificial Sequence
  Description of Artificial Sequence: Synthetic oligonucleotide
  Sense strand starting at position 1914 of SEQ ID NO: 586572
uuuccuugucuagaugugu

SEQ ID NO: 728087 - RNA, 19 nt, Artificial Sequence
  Description of Artificial Sequence: Synthetic oligonucleotide
  Antisense strand to SEQ ID NO: 728086
acacaucuagacaaggaaa

SEQ ID NO: 728088 - RNA, 19 nt, Artificial Sequence
  Description of Artificial Sequence: Synthetic oligonucleotide
  Sense strand starting at position 2276 of SEQ ID NO: 586572
caacgucucacgugaggaa

SEQ ID NO: 728089 - RNA, 19 nt, Artificial Sequence
  Description of Artificial Sequence: Synthetic oligonucleotide
  Antisense strand to SEQ ID NO: 728088
uuccucacgugagacguug

SEQ ID NO: 728090 - RNA, 19 nt, Artificial Sequence
  Description of Artificial Sequence: Synthetic oligonucleotide
  Sense strand starting at position 2277 of SEQ ID NO: 586572
aacgucucacgugaggaau

SEQ ID NO: 728091 - RNA, 19 nt, Artificial Sequence
  Description of Artificial Sequence: Synthetic oligonucleotide
  Antisense strand to SEQ ID NO: 728090
auuccucacgugagacguu

SEQ ID NO: 728092 - RNA, 19 nt, Artificial Sequence
  Description of Artificial Sequence: Synthetic oligonucleotide
  Sense strand starting at position 2303 of SEQ ID NO: 586572
ccucaauuagaguggguuu

SEQ ID NO: 728093 - RNA, 19 nt, Artificial Sequence
  Description of Artificial Sequence: Synthetic oligonucleotide
  Antisense strand to SEQ ID NO: 728092
aaacccacucuaauugagg

SEQ ID NO: 728094 - RNA, 19 nt, Artificial Sequence
  Description of Artificial Sequence: Synthetic oligonucleotide
  Sense strand starting at position 2454 of SEQ ID NO: 586572
acaacucgaguuuguaaag

SEQ ID NO: 728095 - RNA, 19 nt, Artificial Sequence
  Description of Artificial Sequence: Synthetic oligonucleotide
  Antisense strand to SEQ ID NO: 728094
cuuuacaaacucgaguugu

SEQ ID NO: 728096 - RNA, 19 nt, Artificial Sequence
  Description of Artificial Sequence: Synthetic oligonucleotide
  Sense strand starting at position 2460 of SEQ ID NO: 586572
cgaguuuguaaaggguuau

SEQ ID NO: 728097 - RNA, 19 nt, Artificial Sequence
  Description of Artificial Sequence: Synthetic oligonucleotide
  Antisense strand to SEQ ID NO: 728096
auaacccuuuacaaacucg

SEQ ID NO: 728098 - RNA, 19 nt, Artificial Sequence
  Description of Artificial Sequence: Synthetic oligonucleotide
  Sense strand starting at position 2461 of SEQ ID NO: 586572
gaguuuguaaaggguuauc

SEQ ID NO: 728099 - RNA, 19 nt, Artificial Sequence
  Description of Artificial Sequence: Synthetic oligonucleotide
  Antisense strand to SEQ ID NO: 728098
gauaacccuuuacaaacuc

SEQ ID NO: 728100 - RNA, 19 nt, Artificial Sequence
  Description of Artificial Sequence: Synthetic oligonucleotide
  Sense strand starting at position 2564 of SEQ ID NO: 586572
aguuccucagcgcuaguua

SEQ ID NO: 728101 - RNA, 19 nt, Artificial Sequence
  Description of Artificial Sequence: Synthetic oligonucleotide
  Antisense strand to SEQ ID NO: 728100
uaacuagcgcugaggaacu

SEQ ID NO: 728102 - RNA, 19 nt, Artificial Sequence
  Description of Artificial Sequence: Synthetic oligonucleotide
  Sense strand starting at position 2573 of SEQ ID NO: 586572
gcgcuaguuaccguaguuu

SEQ ID NO: 728103 - RNA, 19 nt, Artificial Sequence
  Description of Artificial Sequence: Synthetic oligonucleotide
  Antisense strand to SEQ ID NO: 728102
aaacuacgguaacuagcgc

SEQ ID NO: 728104 - RNA, 19 nt, Artificial Sequence
  Description of Artificial Sequence: Synthetic oligonucleotide
  Sense strand starting at position 2658 of SEQ ID NO: 586572
gguggcuuuaauggcauua

SEQ ID NO: 728105 - RNA, 19 nt, Artificial Sequence
  Description of Artificial Sequence: Synthetic oligonucleotide
  Antisense strand to SEQ ID NO: 728104
uaaugccauuaaagccacc

SEQ ID NO: 728106 - RNA, 19 nt, Artificial Sequence
  Description of Artificial Sequence: Synthetic oligonucleotide
  Sense strand starting at position 2663 of SEQ ID NO: 586572
cuuuaauggcauuagaagu

SEQ ID NO: 728107 - RNA, 19 nt, Artificial Sequence
  Description of Artificial Sequence: Synthetic oligonucleotide
  Antisense strand to SEQ ID NO: 728106
acuucuaaugccauuaaag

SEQ ID NO: 728108 - RNA, 19 nt, Artificial Sequence
  Description of Artificial Sequence: Synthetic oligonucleotide
  Sense strand starting at position 2696 of SEQ ID NO: 586572
gccgcaggcacguuucuaa

SEQ ID NO: 728109 - RNA, 19 nt, Artificial Sequence
  Description of Artificial Sequence: Synthetic oligonucleotide
  Antisense strand to SEQ ID NO: 728108
uuagaaacgugccugcggc

SEQ ID NO: 728110 - RNA, 19 nt, Artificial Sequence
  Description of Artificial Sequence: Synthetic oligonucleotide
  Sense strand starting at position 3211 of SEQ ID NO: 586572
uggagaacuugagacuuaa

SEQ ID NO: 728111 - RNA, 19 nt, Artificial Sequence
  Description of Artificial Sequence: Synthetic oligonucleotide
  Antisense strand to SEQ ID NO: 728110
uuaagucucaaguucucca

SEQ ID NO: 728112 - RNA, 19 nt, Artificial Sequence
  Description of Artificial Sequence: Synthetic oligonucleotide
  Sense strand starting at position 3320 of SEQ ID NO: 586572
ggccaugagagccauacau

SEQ ID NO: 728113 - RNA, 19 nt, Artificial Sequence
  Description of Artificial Sequence: Synthetic oligonucleotide
  Antisense strand to SEQ ID NO: 728112
auguauggcucucauggcc

SEQ ID NO: 728114 - RNA, 19 nt, Artificial Sequence
  Description of Artificial Sequence: Synthetic oligonucleotide
  Sense strand starting at position 3400 of SEQ ID NO: 586572
agccuugugggccaacaaa

SEQ ID NO: 728115 - RNA, 19 nt, Artificial Sequence
  Description of Artificial Sequence: Synthetic oligonucleotide
  Antisense strand to SEQ ID NO: 728114
uuuguuggcccacaaggcu

SEQ ID NO: 728116 - RNA, 19 nt, Artificial Sequence
  Description of Artificial Sequence: Synthetic oligonucleotide
  Sense strand starting at position 3477 of SEQ ID NO: 586572
cuccaacugucguuuaaag

SEQ ID NO: 728117 - RNA, 19 nt, Artificial Sequence
  Description of Artificial Sequence: Synthetic oligonucleotide
  Antisense strand to SEQ ID NO: 728116
cuuuaaacgacaguuggag

SEQ ID NO: 728118 - RNA, 19 nt, Artificial Sequence
  Description of Artificial Sequence: Synthetic oligonucleotide
  Sense strand starting at position 3479 of SEQ ID NO: 586572
ccaacugucguuuaaagau

SEQ ID NO: 728119 - RNA, 19 nt, Artificial Sequence
  Description of Artificial Sequence: Synthetic oligonucleotide
  Antisense strand to SEQ ID NO: 728118
aucuuuaaacgacaguugg

SEQ ID NO: 728120 - RNA, 19 nt, Artificial Sequence
  Description of Artificial Sequence: Synthetic oligonucleotide
  Sense strand starting at position 3499 of SEQ ID NO: 586572
guguacuccacucaaaggu

SEQ ID NO: 728121 - RNA, 19 nt, Artificial Sequence
  Description of Artificial Sequence: Synthetic oligonucleotide
  Antisense strand to SEQ ID NO: 728120
accuuugaguggaguacac

SEQ ID NO: 728122 - RNA, 19 nt, Artificial Sequence
  Description of Artificial Sequence: Synthetic oligonucleotide
  Sense strand starting at position 3525 of SEQ ID NO: 586572
gcaccagauacuugugugu

SEQ ID NO: 728123 - RNA, 19 nt, Artificial Sequence
  Description of Artificial Sequence: Synthetic oligonucleotide
  Antisense strand to SEQ ID NO: 728122
acacacaaguaucuggugc

SEQ ID NO: 728124 - RNA, 19 nt, Artificial Sequence
  Description of Artificial Sequence: Synthetic oligonucleotide
  Sense strand starting at position 3659 of SEQ ID NO: 586572
gguacucuuacugguagaa

SEQ ID NO: 728125 - RNA, 19 nt, Artificial Sequence
  Description of Artificial Sequence: Synthetic oligonucleotide
  Antisense strand to SEQ ID NO: 728124
uucuaccaguaagaguacc

SEQ ID NO: 728126 - RNA, 19 nt, Artificial Sequence
  Description of Artificial Sequence: Synthetic oligonucleotide
  Sense strand starting at position 3716 of SEQ ID NO: 586572
cuggaaacaucuucgguaa

SEQ ID NO: 728127 - RNA, 19 nt, Artificial Sequence
  Description of Artificial Sequence: Synthetic oligonucleotide
  Antisense strand to SEQ ID NO: 728126
uuaccgaagauguuuccag

SEQ ID NO: 728128 - RNA, 19 nt, Artificial Sequence
  Description of Artificial Sequence: Synthetic oligonucleotide
  Sense strand starting at position 3717 of SEQ ID NO: 586572
uggaaacaucuucgguaau

SEQ ID NO: 728129 - RNA, 19 nt, Artificial Sequence
  Description of Artificial Sequence: Synthetic oligonucleotide
  Antisense strand to SEQ ID NO: 728128
auuaccgaagauguuucca

SEQ ID NO: 728130 - RNA, 19 nt, Artificial Sequence
  Description of Artificial Sequence: Synthetic oligonucleotide
  Sense strand starting at position 3719 of SEQ ID NO: 586572
gaaacaucuucgguaauug

SEQ ID NO: 728131 - RNA, 19 nt, Artificial Sequence
  Description of Artificial Sequence: Synthetic oligonucleotide
  Antisense strand to SEQ ID NO: 728130
caauuaccgaagauguuuc

SEQ ID NO: 728132 - RNA, 19 nt, Artificial Sequence
  Description of Artificial Sequence: Synthetic oligonucleotide
  Sense strand starting at position 3720 of SEQ ID NO: 586572
aaacaucuucgguaauuga

SEQ ID NO: 728133 - RNA, 19 nt, Artificial Sequence
  Description of Artificial Sequence: Synthetic oligonucleotide
  Antisense strand to SEQ ID NO: 728132
ucaauuaccgaagauguuu

SEQ ID NO: 728134 - RNA, 19 nt, Artificial Sequence
  Description of Artificial Sequence: Synthetic oligonucleotide
  Sense strand starting at position 3729 of SEQ ID NO: 586572
cgguaauugauacagccuu

SEQ ID NO: 728135 - RNA, 19 nt, Artificial Sequence
  Description of Artificial Sequence: Synthetic oligonucleotide
  Antisense strand to SEQ ID NO: 728134
aaggcuguaucaauuaccg

SEQ ID NO: 728136 - RNA, 19 nt, Artificial Sequence
  Description of Artificial Sequence: Synthetic oligonucleotide
  Sense strand starting at position 3742 of SEQ ID NO: 586572
agccuugcuucucugucaa

SEQ ID NO: 728137 - RNA, 19 nt, Artificial Sequence
  Description of Artificial Sequence: Synthetic oligonucleotide
  Antisense strand to SEQ ID NO: 728136
uugacagagaagcaaggcu

SEQ ID NO: 728138 - RNA, 19 nt, Artificial Sequence
  Description of Artificial Sequence: Synthetic oligonucleotide
  Sense strand starting at position 3800 of SEQ ID NO: 586572
aaagaugaaugguagacuu

SEQ ID NO: 728139 - RNA, 19 nt, Artificial Sequence
  Description of Artificial Sequence: Synthetic oligonucleotide
  Antisense strand to SEQ ID NO: 728138
aagucuaccauucaucuuu

SEQ ID NO: 728140 - RNA, 19 nt, Artificial Sequence
  Description of Artificial Sequence: Synthetic oligonucleotide
  Sense strand starting at position 3824 of SEQ ID NO: 586572
ugggaauuguugcaugaua

SEQ ID NO: 728141 - RNA, 19 nt, Artificial Sequence
  Description of Artificial Sequence: Synthetic oligonucleotide
  Antisense strand to SEQ ID NO: 728140
uaucaugcaacaauuccca

SEQ ID NO: 728142 - RNA, 19 nt, Artificial Sequence
  Description of Artificial Sequence: Synthetic oligonucleotide
  Sense strand starting at position 3826 of SEQ ID NO: 586572
ggaauuguugcaugauaua

SEQ ID NO: 728143 - RNA, 19 nt, Artificial Sequence
  Description of Artificial Sequence: Synthetic oligonucleotide
  Antisense strand to SEQ ID NO: 728142
uauaucaugcaacaauucc

SEQ ID NO: 728144 - RNA, 19 nt, Artificial Sequence
  Description of Artificial Sequence: Synthetic oligonucleotide
  Sense strand starting at position 3872 of SEQ ID NO: 586572
gggaacuuacuuuguaauu

SEQ ID NO: 728145 - RNA, 19 nt, Artificial Sequence
  Description of Artificial Sequence: Synthetic oligonucleotide
  Antisense strand to SEQ ID NO: 728144
aauuacaaaguaaguuccc

SEQ ID NO: 728146 - RNA, 19 nt, Artificial Sequence
  Description of Artificial Sequence: Synthetic oligonucleotide
  Sense strand starting at position 3903 of SEQ ID NO: 586572
accggaaggugucagauca

SEQ ID NO: 728147 - RNA, 19 nt, Artificial Sequence
  Description of Artificial Sequence: Synthetic oligonucleotide
  Antisense strand to SEQ ID NO: 728146
ugaucugacaccuuccggu

SEQ ID NO: 728148 - RNA, 19 nt, Artificial Sequence
  Description of Artificial Sequence: Synthetic oligonucleotide
  Sense strand starting at position 10 of SEQ ID NO: 586573
ccagcucuguuccugacaa

SEQ ID NO: 728149 - RNA, 19 nt, Artificial Sequence
  Description of Artificial Sequence: Synthetic oligonucleotide
  Antisense strand to SEQ ID NO: 728148
uugucaggaacagagcugg

SEQ ID NO: 728150 - RNA, 19 nt, Artificial Sequence
  Description of Artificial Sequence: Synthetic oligonucleotide
  Sense strand starting at position 12 of SEQ ID NO: 586573
agcucuguuccugacaaua

SEQ ID NO: 728151 - RNA, 19 nt, Artificial Sequence
  Description of Artificial Sequence: Synthetic oligonucleotide
  Antisense strand to SEQ ID NO: 728150
uauugucaggaacagagcu

SEQ ID NO: 728152 - RNA, 19 nt, Artificial Sequence
  Description of Artificial Sequence: Synthetic oligonucleotide
  Sense strand starting at position 375 of SEQ ID NO: 586573
ggaucuugcagauagaguc

SEQ ID NO: 728153 - RNA, 19 nt, Artificial Sequence
  Description of Artificial Sequence: Synthetic oligonucleotide
  Antisense strand to SEQ ID NO: 728152
gacucuaucugcaagaucc

SEQ ID NO: 728154 - RNA, 19 nt, Artificial Sequence
  Description of Artificial Sequence: Synthetic oligonucleotide
  Sense strand starting at position 382 of SEQ ID NO: 586573
gcagauagaguccaaaggu

SEQ ID NO: 728155 - RNA, 19 nt, Artificial Sequence
  Description of Artificial Sequence: Synthetic oligonucleotide
  Antisense strand to SEQ ID NO: 728154
accuuuggacucuaucugc

SEQ ID NO: 728156 - RNA, 19 nt, Artificial Sequence
  Description of Artificial Sequence: Synthetic oligonucleotide
  Sense strand starting at position 502 of SEQ ID NO: 586573
agagaauccgcaggaaauc

SEQ ID NO: 728157 - RNA, 19 nt, Artificial Sequence
  Description of Artificial Sequence: Synthetic oligonucleotide
  Antisense strand to SEQ ID NO: 728156
gauuuccugcggauucucu

SEQ ID NO: 728158 - RNA, 19 nt, Artificial Sequence
  Description of Artificial Sequence: Synthetic oligonucleotide
  Sense strand starting at position 705 of SEQ ID NO: 586573
ugcuuaaauccaggaaaga

SEQ ID NO: 728159 - RNA, 19 nt, Artificial Sequence
  Description of Artificial Sequence: Synthetic oligonucleotide
  Antisense strand to SEQ ID NO: 728158
ucuuuccuggauuuaagca

SEQ ID NO: 728160 - RNA, 19 nt, Artificial Sequence
  Description of Artificial Sequence: Synthetic oligonucleotide
  Sense strand starting at position 718 of SEQ ID NO: 586573
gaaagaaccugauugucau

SEQ ID NO: 728161 - RNA, 19 nt, Artificial Sequence
  Description of Artificial Sequence: Synthetic oligonucleotide
  Antisense strand to SEQ ID NO: 728160
augacaaucagguucuuuc

SEQ ID NO: 728162 - RNA, 19 nt, Artificial Sequence
  Description of Artificial Sequence: Synthetic oligonucleotide
  Sense strand starting at position 721 of SEQ ID NO: 586573
agaaccugauugucauguu

SEQ ID NO: 728163 - RNA, 19 nt, Artificial Sequence
  Description of Artificial Sequence: Synthetic oligonucleotide
  Antisense strand to SEQ ID NO: 728162
aacaugacaaucagguucu

SEQ ID NO: 728164 - RNA, 19 nt, Artificial Sequence
  Description of Artificial Sequence: Synthetic oligonucleotide
  Sense strand starting at position 814 of SEQ ID NO: 586573
cucacauuauguucuguaa

SEQ ID NO: 728165 - RNA, 19 nt, Artificial Sequence
  Description of Artificial Sequence: Synthetic oligonucleotide
  Antisense strand to SEQ ID NO: 728164
uuacagaacauaaugugag

SEQ ID NO: 728166 - RNA, 19 nt, Artificial Sequence
  Description of Artificial Sequence: Synthetic oligonucleotide
  Sense strand starting at position 817 of SEQ ID NO: 586573
acauuauguucuguaaaca

SEQ ID NO: 728167 - RNA, 19 nt, Artificial Sequence
  Description of Artificial Sequence: Synthetic oligonucleotide
  Antisense strand to SEQ ID NO: 728166
uguuuacagaacauaaugu

SEQ ID NO: 728168 - RNA, 19 nt, Artificial Sequence
  Description of Artificial Sequence: Synthetic oligonucleotide
  Sense strand starting at position 828 of SEQ ID NO: 586573
uguaaacaucugggaagca

SEQ ID NO: 728169 - RNA, 19 nt, Artificial Sequence
  Description of Artificial Sequence: Synthetic oligonucleotide
  Antisense strand to SEQ ID NO: 728168
ugcuucccagauguuuaca

SEQ ID NO: 728170 - RNA, 19 nt, Artificial Sequence
  Description of Artificial Sequence: Synthetic oligonucleotide
  Sense strand starting at position 849 of SEQ ID NO: 586573
uacuguauccaggacguau

SEQ ID NO: 728171 - RNA, 19 nt, Artificial Sequence
  Description of Artificial Sequence: Synthetic oligonucleotide
  Antisense strand to SEQ ID NO: 728170
auacguccuggauacagua

SEQ ID NO: 728172 - RNA, 19 nt, Artificial Sequence
  Description of Artificial Sequence: Synthetic oligonucleotide
  Sense strand starting at position 851 of SEQ ID NO: 586573
cuguauccaggacguauau

SEQ ID NO: 728173 - RNA, 19 nt, Artificial Sequence
  Description of Artificial Sequence: Synthetic oligonucleotide
  Antisense strand to SEQ ID NO: 728172
auauacguccuggauacag

SEQ ID NO: 728174 - RNA, 19 nt, Artificial Sequence
  Description of Artificial Sequence: Synthetic oligonucleotide
  Sense strand starting at position 853 of SEQ ID NO: 586573
guauccaggacguauauua

SEQ ID NO: 728175 - RNA, 19 nt, Artificial Sequence
  Description of Artificial Sequence: Synthetic oligonucleotide
  Antisense strand to SEQ ID NO: 728174
uaauauacguccuggauac

SEQ ID NO: 728176 - RNA, 19 nt, Artificial Sequence
  Description of Artificial Sequence: Synthetic oligonucleotide
  Sense strand starting at position 1044 of SEQ ID NO: 586573
cugucugggucucuaaaga

SEQ ID NO: 728177 - RNA, 19 nt, Artificial Sequence
  Description of Artificial Sequence: Synthetic oligonucleotide
  Antisense strand to SEQ ID NO: 728176
ucuuuagagacccagacag

SEQ ID NO: 728178 - RNA, 19 nt, Artificial Sequence
  Description of Artificial Sequence: Synthetic oligonucleotide
  Sense strand starting at position 1055 of SEQ ID NO: 586573
ucuaaagaucucugggcua

SEQ ID NO: 728179 - RNA, 19 nt, Artificial Sequence
  Description of Artificial Sequence: Synthetic oligonucleotide
  Antisense strand to SEQ ID NO: 728178
uagcccagagaucuuuaga

SEQ ID NO: 728180 - RNA, 19 nt, Artificial Sequence
  Description of Artificial Sequence: Synthetic oligonucleotide
  Sense strand starting at position 1084 of SEQ ID NO: 586573
gugggagcuuccuccuuga

SEQ ID NO: 728181 - RNA, 19 nt, Artificial Sequence
  Description of Artificial Sequence: Synthetic oligonucleotide
  Antisense strand to SEQ ID NO: 728180
ucaaggaggaagcucccac

SEQ ID NO: 728182 - RNA, 19 nt, Artificial Sequence
  Description of Artificial Sequence: Synthetic oligonucleotide
  Sense strand starting at position 1099 of SEQ ID NO: 586573
uugagucuccacuaagcua

SEQ ID NO: 728183 - RNA, 19 nt, Artificial Sequence
  Description of Artificial Sequence: Synthetic oligonucleotide
  Antisense strand to SEQ ID NO: 728182
uagcuuaguggagacucaa

SEQ ID NO: 728184 - RNA, 19 nt, Artificial Sequence
  Description of Artificial Sequence: Synthetic oligonucleotide
  Sense strand starting at position 1115 of SEQ ID NO: 586573
cuaugugugcccuggaaca

SEQ ID NO: 728185 - RNA, 19 nt, Artificial Sequence
  Description of Artificial Sequence: Synthetic oligonucleotide
  Antisense strand to SEQ ID NO: 728184
uguuccagggcacacauag

SEQ ID NO: 728186 - RNA, 19 nt, Artificial Sequence
  Description of Artificial Sequence: Synthetic oligonucleotide
  Sense strand starting at position 2055 of SEQ ID NO: 586573
acuguuugucccguuguua

SEQ ID NO: 728187 - RNA, 19 nt, Artificial Sequence
  Description of Artificial Sequence: Synthetic oligonucleotide
  Antisense strand to SEQ ID NO: 728186
uaacaacgggacaaacagu

SEQ ID NO: 728188 - RNA, 19 nt, Artificial Sequence
  Description of Artificial Sequence: Synthetic oligonucleotide
  Sense strand starting at position 2507 of SEQ ID NO: 586573
ggcaguuaagaaggucuaa

SEQ ID NO: 728189 - RNA, 19 nt, Artificial Sequence
  Description of Artificial Sequence: Synthetic oligonucleotide
  Antisense strand to SEQ ID NO: 728188
uuagaccuucuuaacugcc

SEQ ID NO: 728190 - RNA, 19 nt, Artificial Sequence
  Description of Artificial Sequence: Synthetic oligonucleotide
  Sense strand starting at position 2706 of SEQ ID NO: 586573
caggcuuaucuccaggagu

SEQ ID NO: 728191 - RNA, 19 nt, Artificial Sequence
  Description of Artificial Sequence: Synthetic oligonucleotide
  Antisense strand to SEQ ID NO: 728190
acuccuggagauaagccug

SEQ ID NO: 728192 - RNA, 19 nt, Artificial Sequence
  Description of Artificial Sequence: Synthetic oligonucleotide
  Sense strand starting at position 2708 of SEQ ID NO: 586573
ggcuuaucuccaggaguug

SEQ ID NO: 728193 - RNA, 19 nt, Artificial Sequence
  Description of Artificial Sequence: Synthetic oligonucleotide
  Antisense strand to SEQ ID NO: 728192
caacuccuggagauaagcc

SEQ ID NO: 728194 - RNA, 19 nt, Artificial Sequence
  Description of Artificial Sequence: Synthetic oligonucleotide
  Sense strand starting at position 2991 of SEQ ID NO: 586573
uugcuuuauagaggagaac

SEQ ID NO: 728195 - RNA, 19 nt, Artificial Sequence
  Description of Artificial Sequence: Synthetic oligonucleotide
  Antisense strand to SEQ ID NO: 728194
guucuccucuauaaagcaa

SEQ ID NO: 728196 - RNA, 19 nt, Artificial Sequence
  Description of Artificial Sequence: Synthetic oligonucleotide
  Sense strand starting at position 3028 of SEQ ID NO: 586573
aggcuauugccaggucaaa

SEQ ID NO: 728197 - RNA, 19 nt, Artificial Sequence
  Description of Artificial Sequence: Synthetic oligonucleotide
  Antisense strand to SEQ ID NO: 728196
uuugaccuggcaauagccu

SEQ ID NO: 728198 - RNA, 19 nt, Artificial Sequence
  Description of Artificial Sequence: Synthetic oligonucleotide
  Sense strand starting at position 3107 of SEQ ID NO: 586573
uccuguuuacuguaagcaa

SEQ ID NO: 728199 - RNA, 19 nt, Artificial Sequence
  Description of Artificial Sequence: Synthetic oligonucleotide
  Antisense strand to SEQ ID NO: 728198
uugcuuacaguaaacagga

SEQ ID NO: 728200 - RNA, 19 nt, Artificial Sequence
  Description of Artificial Sequence: Synthetic oligonucleotide
  Sense strand starting at position 3118 of SEQ ID NO: 586573
guaagcaagcccuaaguaa

SEQ ID NO: 728201 - RNA, 19 nt, Artificial Sequence
  Description of Artificial Sequence: Synthetic oligonucleotide
  Antisense strand to SEQ ID NO: 728200
uuacuuagggcuugcuuac

SEQ ID NO: 728202 - RNA, 19 nt, Artificial Sequence
  Description of Artificial Sequence: Synthetic oligonucleotide
  Sense strand starting at position 3173 of SEQ ID NO: 586573
acaguagagcauugcugaa

SEQ ID NO: 728203 - RNA, 19 nt, Artificial Sequence
  Description of Artificial Sequence: Synthetic oligonucleotide
  Antisense strand to SEQ ID NO: 728202
uucagcaaugcucuacugu

SEQ ID NO: 728204 - RNA, 19 nt, Artificial Sequence
  Description of Artificial Sequence: Synthetic oligonucleotide
  Sense strand starting at position 3186 of SEQ ID NO: 586573
gcugaaucaccucaaguga

SEQ ID NO: 728205 - RNA, 19 nt, Artificial Sequence
  Description of Artificial Sequence: Synthetic oligonucleotide
  Antisense strand to SEQ ID NO: 728204
ucacuugaggugauucagc

SEQ ID NO: 728206 - RNA, 19 nt, Artificial Sequence
  Description of Artificial Sequence: Synthetic oligonucleotide
  Sense strand starting at position 3224 of SEQ ID NO: 586573
ggaaaugaucccugcugcu

SEQ ID NO: 728207 - RNA, 19 nt, Artificial Sequence
  Description of Artificial Sequence: Synthetic oligonucleotide
  Antisense strand to SEQ ID NO: 728206
agcagcagggaucauuucc

SEQ ID NO: 728208 - RNA, 19 nt, Artificial Sequence
  Description of Artificial Sequence: Synthetic oligonucleotide
  Sense strand starting at position 3255 of SEQ ID NO: 586573
gguguaagggcaggugaaa

SEQ ID NO: 728209 - RNA, 19 nt, Artificial Sequence
  Description of Artificial Sequence: Synthetic oligonucleotide
  Antisense strand to SEQ ID NO: 728208
uuucaccugcccuuacacc

SEQ ID NO: 728210 - RNA, 19 nt, Artificial Sequence
  Description of Artificial Sequence: Synthetic oligonucleotide
  Sense strand starting at position 3306 of SEQ ID NO: 586573
guagaauggucugugcuaa

SEQ ID NO: 728211 - RNA, 19 nt, Artificial Sequence
  Description of Artificial Sequence: Synthetic oligonucleotide
  Antisense strand to SEQ ID NO: 728210
uuagcacagaccauucuac

SEQ ID NO: 728212 - RNA, 19 nt, Artificial Sequence
  Description of Artificial Sequence: Synthetic oligonucleotide
  Sense strand starting at position 3307 of SEQ ID NO: 586573
uagaauggucugugcuaac

SEQ ID NO: 728213 - RNA, 19 nt, Artificial Sequence
  Description of Artificial Sequence: Synthetic oligonucleotide
  Antisense strand to SEQ ID NO: 728212
guuagcacagaccauucua

SEQ ID NO: 728214 - RNA, 19 nt, Artificial Sequence
  Description of Artificial Sequence: Synthetic oligonucleotide
  Sense strand starting at position 3340 of SEQ ID NO: 586573
cuguuuauccuacagauga

SEQ ID NO: 728215 - RNA, 19 nt, Artificial Sequence
  Description of Artificial Sequence: Synthetic oligonucleotide
  Antisense strand to SEQ ID NO: 728214
ucaucuguaggauaaacag

SEQ ID NO: 728216 - RNA, 19 nt, Artificial Sequence
  Description of Artificial Sequence: Synthetic oligonucleotide
  Sense strand starting at position 3484 of SEQ ID NO: 586573
gcauccuuccacuggaaga

SEQ ID NO: 728217 - RNA, 19 nt, Artificial Sequence
  Description of Artificial Sequence: Synthetic oligonucleotide
  Antisense strand to SEQ ID NO: 728216
ucuuccaguggaaggaugc

SEQ ID NO: 728218 - RNA, 19 nt, Artificial Sequence
  Description of Artificial Sequence: Synthetic oligonucleotide
  Sense strand starting at position 3610 of SEQ ID NO: 586573
gaaaguacagaguguggua

SEQ ID NO: 728219 - RNA, 19 nt, Artificial Sequence
  Description of Artificial Sequence: Synthetic oligonucleotide
  Antisense strand to SEQ ID NO: 728218
uaccacacucuguacuuuc

SEQ ID NO: 728220 - RNA, 19 nt, Artificial Sequence
  Description of Artificial Sequence: Synthetic oligonucleotide
  Sense strand starting at position 3628 of SEQ ID NO: 586573
acuguuuguguacaauaaa

SEQ ID NO: 728221 - RNA, 19 nt, Artificial Sequence
  Description of Artificial Sequence: Synthetic oligonucleotide
  Antisense strand to SEQ ID NO: 728220
uuuauuguacacaaacagu

SEQ ID NO: 728222 - RNA, 19 nt, Artificial Sequence
  Description of Artificial Sequence: Synthetic oligonucleotide
  Sense strand starting at position 3648 of SEQ ID NO: 586573
gcaagaugaauguaugcaa

SEQ ID NO: 728223 - RNA, 19 nt, Artificial Sequence
  Description of Artificial Sequence: Synthetic oligonucleotide
  Antisense strand to SEQ ID NO: 728222
uugcauacauucaucuugc

SEQ ID NO: 728224 - RNA, 19 nt, Artificial Sequence
  Description of Artificial Sequence: Synthetic oligonucleotide
  Sense strand starting at position 3659 of SEQ ID NO: 586573
guaugcaacugauucuaca

SEQ ID NO: 728225 - RNA, 19 nt, Artificial Sequence
  Description of Artificial Sequence: Synthetic oligonucleotide
  Antisense strand to SEQ ID NO: 728224
uguagaaucaguugcauac

SEQ ID NO: 728226 - RNA, 19 nt, Artificial Sequence
  Description of Artificial Sequence: Synthetic oligonucleotide
  Sense strand starting at position 3812 of SEQ ID NO: 586573
uuuacacugucuguuacau

SEQ ID NO: 728227 - RNA, 19 nt, Artificial Sequence
  Description of Artificial Sequence: Synthetic oligonucleotide
  Antisense strand to SEQ ID NO: 728226
auguaacagacaguguaaa

SEQ ID NO: 728228 - RNA, 19 nt, Artificial Sequence
  Description of Artificial Sequence: Synthetic oligonucleotide
  Sense strand starting at position 15 of SEQ ID NO: 586574
auugcuaaagcccaagaau

SEQ ID NO: 728229 - RNA, 19 nt, Artificial Sequence
  Description of Artificial Sequence: Synthetic oligonucleotide
  Antisense strand to SEQ ID NO: 728228
auucuugggcuuuagcaau

SEQ ID NO: 728230 - RNA, 19 nt, Artificial Sequence
  Description of Artificial Sequence: Synthetic oligonucleotide
  Sense strand starting at position 27 of SEQ ID NO: 586574
caagaaugacgauguguau

SEQ ID NO: 728231 - RNA, 19 nt, Artificial Sequence
  Description of Artificial Sequence: Synthetic oligonucleotide
  Antisense strand to SEQ ID NO: 728230
auacacaucgucauucuug

SEQ ID NO: 728232 - RNA, 19 nt, Artificial Sequence
  Description of Artificial Sequence: Synthetic oligonucleotide
  Sense strand starting at position 36 of SEQ ID NO: 586574
cgauguguaucaguauuuc

SEQ ID NO: 728233 - RNA, 19 nt, Artificial Sequence
  Description of Artificial Sequence: Synthetic oligonucleotide
  Antisense strand to SEQ ID NO: 728232
gaaauacugauacacaucg

SEQ ID NO: 728234 - RNA, 19 nt, Artificial Sequence
  Description of Artificial Sequence: Synthetic oligonucleotide
  Sense strand starting at position 91 of SEQ ID NO: 586574
auguacgacacuuggcaaa

SEQ ID NO: 728235 - RNA, 19 nt, Artificial Sequence
  Description of Artificial Sequence: Synthetic oligonucleotide
  Antisense strand to SEQ ID NO: 728234
uuugccaagugucguacau

SEQ ID NO: 728236 - RNA, 19 nt, Artificial Sequence
  Description of Artificial Sequence: Synthetic oligonucleotide
  Sense strand starting at position 342 of SEQ ID NO: 586574
acaucuguccaacgugauc

SEQ ID NO: 728237 - RNA, 19 nt, Artificial Sequence
  Description of Artificial Sequence: Synthetic oligonucleotide
  Antisense strand to SEQ ID NO: 728236
gaucacguuggacagaugu

SEQ ID NO: 728238 - RNA, 19 nt, Artificial Sequence
  Description of Artificial Sequence: Synthetic oligonucleotide
  Sense strand starting at position 455 of SEQ ID NO: 586574
ggcuaagaaugcuugaaag

SEQ ID NO: 728239 - RNA, 19 nt, Artificial Sequence
  Description of Artificial Sequence: Synthetic oligonucleotide
  Antisense strand to SEQ ID NO: 728238
cuuucaagcauucuuagcc

SEQ ID NO: 728240 - RNA, 19 nt, Artificial Sequence
  Description of Artificial Sequence: Synthetic oligonucleotide
  Sense strand starting at position 526 of SEQ ID NO: 586574
augugaugcccuuaccaga

SEQ ID NO: 728241 - RNA, 19 nt, Artificial Sequence
  Description of Artificial Sequence: Synthetic oligonucleotide
  Antisense strand to SEQ ID NO: 728240
ucugguaagggcaucacau

SEQ ID NO: 728242 - RNA, 19 nt, Artificial Sequence
  Description of Artificial Sequence: Synthetic oligonucleotide
  Sense strand starting at position 544 of SEQ ID NO: 586574
agucgcugucugccugaua

SEQ ID NO: 728243 - RNA, 19 nt, Artificial Sequence
  Description of Artificial Sequence: Synthetic oligonucleotide
  Antisense strand to SEQ ID NO: 728242
uaucaggcagacagcgacu

SEQ ID NO: 728244 - RNA, 19 nt, Artificial Sequence
  Description of Artificial Sequence: Synthetic oligonucleotide
  Sense strand starting at position 582 of SEQ ID NO: 586574
gaggguaacucugccaaau

SEQ ID NO: 728245 - RNA, 19 nt, Artificial Sequence
  Description of Artificial Sequence: Synthetic oligonucleotide
  Antisense strand to SEQ ID NO: 728244
auuuggcagaguuacccuc

SEQ ID NO: 728246 - RNA, 19 nt, Artificial Sequence
  Description of Artificial Sequence: Synthetic oligonucleotide
  Sense strand starting at position 592 of SEQ ID NO: 586574
cugccaaauguuugcauuu

SEQ ID NO: 728247 - RNA, 19 nt, Artificial Sequence
  Description of Artificial Sequence: Synthetic oligonucleotide
  Antisense strand to SEQ ID NO: 728246
aaaugcaaacauuuggcag

SEQ ID NO: 728248 - RNA, 19 nt, Artificial Sequence
  Description of Artificial Sequence: Synthetic oligonucleotide
  Sense strand starting at position 701 of SEQ ID NO: 586574
ccuuccgugucauugaaau

SEQ ID NO: 728249 - RNA, 19 nt, Artificial Sequence
  Description of Artificial Sequence: Synthetic oligonucleotide
  Antisense strand to SEQ ID NO: 728248
auuucaaugacacggaagg

SEQ ID NO: 728250 - RNA, 19 nt, Artificial Sequence
  Description of Artificial Sequence: Synthetic oligonucleotide
  Sense strand starting at position 703 of SEQ ID NO: 586574
uuccgugucauugaaauug

SEQ ID NO: 728251 - RNA, 19 nt, Artificial Sequence
  Description of Artificial Sequence: Synthetic oligonucleotide
  Antisense strand to SEQ ID NO: 728250
caauuucaaugacacggaa

SEQ ID NO: 728252 - RNA, 19 nt, Artificial Sequence
  Description of Artificial Sequence: Synthetic oligonucleotide
  Sense strand starting at position 755 of SEQ ID NO: 586574
cuggaaguuuguuugaggu

SEQ ID NO: 728253 - RNA, 19 nt, Artificial Sequence
  Description of Artificial Sequence: Synthetic oligonucleotide
  Antisense strand to SEQ ID NO: 728252
accucaaacaaacuuccag

SEQ ID NO: 728254 - RNA, 19 nt, Artificial Sequence
  Description of Artificial Sequence: Synthetic oligonucleotide
  Sense strand starting at position 802 of SEQ ID NO: 586574
guaagaaugguaugguacu

SEQ ID NO: 728255 - RNA, 19 nt, Artificial Sequence
  Description of Artificial Sequence: Synthetic oligonucleotide
  Antisense strand to SEQ ID NO: 728254
aguaccauaccauucuuac

SEQ ID NO: 728256 - RNA, 19 nt, Artificial Sequence
  Description of Artificial Sequence: Synthetic oligonucleotide
  Sense strand starting at position 966 of SEQ ID NO: 586574
acuagacauugcuuugcaa

SEQ ID NO: 728257 - RNA, 19 nt, Artificial Sequence
  Description of Artificial Sequence: Synthetic oligonucleotide
  Antisense strand to SEQ ID NO: 728256
uugcaaagcaaugucuagu

SEQ ID NO: 728258 - RNA, 19 nt, Artificial Sequence
  Description of Artificial Sequence: Synthetic oligonucleotide
  Sense strand starting at position 1138 of SEQ ID NO: 586574
gagaaucuccuguguccag

SEQ ID NO: 728259 - RNA, 19 nt, Artificial Sequence
  Description of Artificial Sequence: Synthetic oligonucleotide
  Antisense strand to SEQ ID NO: 728258
cuggacacaggagauucuc

SEQ ID NO: 728260 - RNA, 19 nt, Artificial Sequence
  Description of Artificial Sequence: Synthetic oligonucleotide
  Sense strand starting at position 1145 of SEQ ID NO: 586574
uccuguguccaggaucuuu

SEQ ID NO: 728261 - RNA, 19 nt, Artificial Sequence
  Description of Artificial Sequence: Synthetic oligonucleotide
  Antisense strand to SEQ ID NO: 728260
aaagauccuggacacagga

SEQ ID NO: 728262 - RNA, 19 nt, Artificial Sequence
  Description of Artificial Sequence: Synthetic oligonucleotide
  Sense strand starting at position 1156 of SEQ ID NO: 586574
ggaucuuuccaacagcuaa

SEQ ID NO: 728263 - RNA, 19 nt, Artificial Sequence
  Description of Artificial Sequence: Synthetic oligonucleotide
  Antisense strand to SEQ ID NO: 728262
uuagcuguuggaaagaucc

SEQ ID NO: 728264 - RNA, 19 nt, Artificial Sequence
  Description of Artificial Sequence: Synthetic oligonucleotide
  Sense strand starting at position 1348 of SEQ ID NO: 586574
uauuaucuccagugagaag

SEQ ID NO: 728265 - RNA, 19 nt, Artificial Sequence
  Description of Artificial Sequence: Synthetic oligonucleotide
  Antisense strand to SEQ ID NO: 728264
cuucucacuggagauaaua

SEQ ID NO: 728266 - RNA, 19 nt, Artificial Sequence
  Description of Artificial Sequence: Synthetic oligonucleotide
  Sense strand starting at position 2223 of SEQ ID NO: 586574
caccuugucgucuacaaga

SEQ ID NO: 728267 - RNA, 19 nt, Artificial Sequence
  Description of Artificial Sequence: Synthetic oligonucleotide
  Antisense strand to SEQ ID NO: 728266
ucuuguagacgacaaggug

SEQ ID NO: 728268 - RNA, 19 nt, Artificial Sequence
  Description of Artificial Sequence: Synthetic oligonucleotide
  Sense strand starting at position 2472 of SEQ ID NO: 586574
aggcgaagucuugggacau

SEQ ID NO: 728269 - RNA, 19 nt, Artificial Sequence
  Description of Artificial Sequence: Synthetic oligonucleotide
  Antisense strand to SEQ ID NO: 728268
augucccaagacuucgccu

SEQ ID NO: 728270 - RNA, 19 nt, Artificial Sequence
  Description of Artificial Sequence: Synthetic oligonucleotide
  Sense strand starting at position 2482 of SEQ ID NO: 586574
uugggacauuucugacuua

SEQ ID NO: 728271 - RNA, 19 nt, Artificial Sequence
  Description of Artificial Sequence: Synthetic oligonucleotide
  Antisense strand to SEQ ID NO: 728270
uaagucagaaaugucccaa

SEQ ID NO: 728272 - RNA, 19 nt, Artificial Sequence
  Description of Artificial Sequence: Synthetic oligonucleotide
  Sense strand starting at position 2546 of SEQ ID NO: 586574
cccgcugggcuguuuauau

SEQ ID NO: 728273 - RNA, 19 nt, Artificial Sequence
  Description of Artificial Sequence: Synthetic oligonucleotide
  Antisense strand to SEQ ID NO: 728272
auauaaacagcccagcggg

SEQ ID NO: 728274 - RNA, 19 nt, Artificial Sequence
  Description of Artificial Sequence: Synthetic oligonucleotide
  Sense strand starting at position 2625 of SEQ ID NO: 586574
cuuacuucucaacgcaaga

SEQ ID NO: 728275 - RNA, 19 nt, Artificial Sequence
  Description of Artificial Sequence: Synthetic oligonucleotide
  Antisense strand to SEQ ID NO: 728274
ucuugcguugagaaguaag

SEQ ID NO: 728276 - RNA, 19 nt, Artificial Sequence
  Description of Artificial Sequence: Synthetic oligonucleotide
  Sense strand starting at position 2664 of SEQ ID NO: 586574
accgcaagucuccaauuaa

SEQ ID NO: 728277 - RNA, 19 nt, Artificial Sequence
  Description of Artificial Sequence: Synthetic oligonucleotide
  Antisense strand to SEQ ID NO: 728276
uuaauuggagacuugcggu

SEQ ID NO: 728278 - RNA, 19 nt, Artificial Sequence
  Description of Artificial Sequence: Synthetic oligonucleotide
  Sense strand starting at position 2759 of SEQ ID NO: 586574
uggguauucucccugauua

SEQ ID NO: 728279 - RNA, 19 nt, Artificial Sequence
  Description of Artificial Sequence: Synthetic oligonucleotide
  Antisense strand to SEQ ID NO: 728278
uaaucagggagaauaccca

SEQ ID NO: 728280 - RNA, 19 nt, Artificial Sequence
  Description of Artificial Sequence: Synthetic oligonucleotide
  Sense strand starting at position 2760 of SEQ ID NO: 586574
ggguauucucccugauuau

SEQ ID NO: 728281 - RNA, 19 nt, Artificial Sequence
  Description of Artificial Sequence: Synthetic oligonucleotide
  Antisense strand to SEQ ID NO: 728280
auaaucagggagaauaccc

SEQ ID NO: 728282 - RNA, 19 nt, Artificial Sequence
  Description of Artificial Sequence: Synthetic oligonucleotide
  Sense strand starting at position 2761 of SEQ ID NO: 586574
gguauucucccugauuaug

SEQ ID NO: 728283 - RNA, 19 nt, Artificial Sequence
  Description of Artificial Sequence: Synthetic oligonucleotide
  Antisense strand to SEQ ID NO: 728282
cauaaucagggagaauacc

SEQ ID NO: 728284 - RNA, 19 nt, Artificial Sequence
  Description of Artificial Sequence: Synthetic oligonucleotide
  Sense strand starting at position 2839 of SEQ ID NO: 586574
gcugaaacguaauuaacca

SEQ ID NO: 728285 - RNA, 19 nt, Artificial Sequence
  Description of Artificial Sequence: Synthetic oligonucleotide
  Antisense strand to SEQ ID NO: 728284
ugguuaauuacguuucagc

SEQ ID NO: 728286 - RNA, 19 nt, Artificial Sequence
  Description of Artificial Sequence: Synthetic oligonucleotide
  Sense strand starting at position 2899 of SEQ ID NO: 586574
ggcgacuucguauuacugu

SEQ ID NO: 728287 - RNA, 19 nt, Artificial Sequence
  Description of Artificial Sequence: Synthetic oligonucleotide
  Antisense strand to SEQ ID NO: 728286
acaguaauacgaagucgcc

SEQ ID NO: 728288 - RNA, 19 nt, Artificial Sequence
  Description of Artificial Sequence: Synthetic oligonucleotide
  Sense strand starting at position 2908 of SEQ ID NO: 586574
guauuacuguauucucgau

SEQ ID NO: 728289 - RNA, 19 nt, Artificial Sequence
  Description of Artificial Sequence: Synthetic oligonucleotide
  Antisense strand to SEQ ID NO: 728288
aucgagaauacaguaauac

SEQ ID NO: 728290 - RNA, 19 nt, Artificial Sequence
  Description of Artificial Sequence: Synthetic oligonucleotide
  Sense strand starting at position 2930 of SEQ ID NO: 586574
uugggauucuagcuuaucu

SEQ ID NO: 728291 - RNA, 19 nt, Artificial Sequence
  Description of Artificial Sequence: Synthetic oligonucleotide
  Antisense strand to SEQ ID NO: 728290
agauaagcuagaaucccaa

SEQ ID NO: 728292 - RNA, 19 nt, Artificial Sequence
  Description of Artificial Sequence: Synthetic oligonucleotide
  Sense strand starting at position 2932 of SEQ ID NO: 586574
gggauucuagcuuaucucu

SEQ ID NO: 728293 - RNA, 19 nt, Artificial Sequence
  Description of Artificial Sequence: Synthetic oligonucleotide
  Antisense strand to SEQ ID NO: 728292
agagauaagcuagaauccc

SEQ ID NO: 728294 - RNA, 19 nt, Artificial Sequence
  Description of Artificial Sequence: Synthetic oligonucleotide
  Sense strand starting at position 3188 of SEQ ID NO: 586574
ggagacuuuccugaacgcu

SEQ ID NO: 728295 - RNA, 19 nt, Artificial Sequence
  Description of Artificial Sequence: Synthetic oligonucleotide
  Antisense strand to SEQ ID NO: 728294
agcguucaggaaagucucc

SEQ ID NO: 728296 - RNA, 19 nt, Artificial Sequence
  Description of Artificial Sequence: Synthetic oligonucleotide
  Sense strand starting at position 3249 of SEQ ID NO: 586574
gaaggagcccuuugcaguu

SEQ ID NO: 728297 - RNA, 19 nt, Artificial Sequence
  Description of Artificial Sequence: Synthetic oligonucleotide
  Antisense strand to SEQ ID NO: 728296
aacugcaaagggcuccuuc

SEQ ID NO: 728298 - RNA, 19 nt, Artificial Sequence
  Description of Artificial Sequence: Synthetic oligonucleotide
  Sense strand starting at position 3261 of SEQ ID NO: 586574
ugcaguuuggaguaguaau

SEQ ID NO: 728299 - RNA, 19 nt, Artificial Sequence
  Description of Artificial Sequence: Synthetic oligonucleotide
  Antisense strand to SEQ ID NO: 728298
auuacuacuccaaacugca

SEQ ID NO: 728300 - RNA, 19 nt, Artificial Sequence
  Description of Artificial Sequence: Synthetic oligonucleotide
  Sense strand starting at position 3315 of SEQ ID NO: 586574
gaagccuugggugaaguua

SEQ ID NO: 728301 - RNA, 19 nt, Artificial Sequence
  Description of Artificial Sequence: Synthetic oligonucleotide
  Antisense strand to SEQ ID NO: 728300
uaacuucacccaaggcuuc

SEQ ID NO: 728302 - RNA, 19 nt, Artificial Sequence
  Description of Artificial Sequence: Synthetic oligonucleotide
  Sense strand starting at position 3829 of SEQ ID NO: 586574
uuccuuaaauacucgcaga

SEQ ID NO: 728303 - RNA, 19 nt, Artificial Sequence
  Description of Artificial Sequence: Synthetic oligonucleotide
  Antisense strand to SEQ ID NO: 728302
ucugcgaguauuuaaggaa

SEQ ID NO: 728304 - RNA, 19 nt, Artificial Sequence
  Description of Artificial Sequence: Synthetic oligonucleotide
  Sense strand starting at position 3847 of SEQ ID NO: 586574
agaccuugacucugaaauu

SEQ ID NO: 728305 - RNA, 19 nt, Artificial Sequence
  Description of Artificial Sequence: Synthetic oligonucleotide
  Antisense strand to SEQ ID NO: 728304
aauuucagagucaaggucu

SEQ ID NO: 728306 - RNA, 19 nt, Artificial Sequence
  Description of Artificial Sequence: Synthetic oligonucleotide
  Sense strand starting at position 3981 of SEQ ID NO: 586574
agcuuuaucaucuggagag

SEQ ID NO: 728307 - RNA, 19 nt, Artificial Sequence
  Description of Artificial Sequence: Synthetic oligonucleotide
  Antisense strand to SEQ ID NO: 728306
cucuccagaugauaaagcu

SEQ ID NO: 728308 - RNA, 19 nt, Artificial Sequence
  Description of Artificial Sequence: Synthetic oligonucleotide
  Sense strand starting at position 38 of SEQ ID NO: 586575
ucuuuaggagccuguguaa

SEQ ID NO: 728309 - RNA, 19 nt, Artificial Sequence
  Description of Artificial Sequence: Synthetic oligonucleotide
  Antisense strand to SEQ ID NO: 728308
uuacacaggcuccuaaaga

SEQ ID NO: 728310 - RNA, 19 nt, Artificial Sequence
  Description of Artificial Sequence: Synthetic oligonucleotide
  Sense strand starting at position 58 of SEQ ID NO: 586575
acucuucgaaagggucaaa

SEQ ID NO: 728311 - RNA, 19 nt, Artificial Sequence
  Description of Artificial Sequence: Synthetic oligonucleotide
  Antisense strand to SEQ ID NO: 728310
uuugacccuuucgaagagu

SEQ ID NO: 728312 - RNA, 19 nt, Artificial Sequence
  Description of Artificial Sequence: Synthetic oligonucleotide
  Sense strand starting at position 135 of SEQ ID NO: 586575
gggugauuauugcuaugau

SEQ ID NO: 728313 - RNA, 19 nt, Artificial Sequence
  Description of Artificial Sequence: Synthetic oligonucleotide
  Antisense strand to SEQ ID NO: 728312
aucauagcaauaaucaccc

SEQ ID NO: 728314 - RNA, 19 nt, Artificial Sequence
  Description of Artificial Sequence: Synthetic oligonucleotide
  Sense strand starting at position 138 of SEQ ID NO: 586575
ugauuauugcuaugauguu

SEQ ID NO: 728315 - RNA, 19 nt, Artificial Sequence
  Description of Artificial Sequence: Synthetic oligonucleotide
  Antisense strand to SEQ ID NO: 728314
aacaucauagcaauaauca

SEQ ID NO: 728316 - RNA, 19 nt, Artificial Sequence
  Description of Artificial Sequence: Synthetic oligonucleotide
  Sense strand starting at position 148 of SEQ ID NO: 586575
uaugauguuucugcauuag

SEQ ID NO: 728317 - RNA, 19 nt, Artificial Sequence
  Description of Artificial Sequence: Synthetic oligonucleotide
  Antisense strand to SEQ ID NO: 728316
cuaaugcagaaacaucaua

SEQ ID NO: 728318 - RNA, 19 nt, Artificial Sequence
  Description of Artificial Sequence: Synthetic oligonucleotide
  Sense strand starting at position 228 of SEQ ID NO: 586575
acuggagaguuucuaaacu

SEQ ID NO: 728319 - RNA, 19 nt, Artificial Sequence
  Description of Artificial Sequence: Synthetic oligonucleotide
  Antisense strand to SEQ ID NO: 728318
aguuuagaaacucuccagu

SEQ ID NO: 728320 - RNA, 19 nt, Artificial Sequence
  Description of Artificial Sequence: Synthetic oligonucleotide
  Sense strand starting at position 317 of SEQ ID NO: 586575
ggucaccagcucugauuga

SEQ ID NO: 728321 - RNA, 19 nt, Artificial Sequence
  Description of Artificial Sequence: Synthetic oligonucleotide
  Antisense strand to SEQ ID NO: 728320
ucaaucagagcuggugacc

SEQ ID NO: 728322 - RNA, 19 nt, Artificial Sequence
  Description of Artificial Sequence: Synthetic oligonucleotide
  Sense strand starting at position 327 of SEQ ID NO: 586575
ucugauugacugugagacu

SEQ ID NO: 728323 - RNA, 19 nt, Artificial Sequence
  Description of Artificial Sequence: Synthetic oligonucleotide
  Antisense strand to SEQ ID NO: 728322
agucucacagucaaucaga

SEQ ID NO: 728324 - RNA, 19 nt, Artificial Sequence
  Description of Artificial Sequence: Synthetic oligonucleotide
  Sense strand starting at position 341 of SEQ ID NO: 586575
agacuuaagagucacguuu

SEQ ID NO: 728325 - RNA, 19 nt, Artificial Sequence
  Description of Artificial Sequence: Synthetic oligonucleotide
  Antisense strand to SEQ ID NO: 728324
aaacgugacucuuaagucu

SEQ ID NO: 728326 - RNA, 19 nt, Artificial Sequence
  Description of Artificial Sequence: Synthetic oligonucleotide
  Sense strand starting at position 426 of SEQ ID NO: 586575
gcaagaauaguguaguauu

SEQ ID NO: 728327 - RNA, 19 nt, Artificial Sequence
  Description of Artificial Sequence: Synthetic oligonucleotide
  Antisense strand to SEQ ID NO: 728326
aauacuacacuauucuugc

SEQ ID NO: 728328 - RNA, 19 nt, Artificial Sequence
  Description of Artificial Sequence: Synthetic oligonucleotide
  Sense strand starting at position 460 of SEQ ID NO: 586575
uuauuuguauguguacaca

SEQ ID NO: 728329 - RNA, 19 nt, Artificial Sequence
  Description of Artificial Sequence: Synthetic oligonucleotide
  Antisense strand to SEQ ID NO: 728328
uguguacacauacaaauaa

SEQ ID NO: 728330 - RNA, 19 nt, Artificial Sequence
  Description of Artificial Sequence: Synthetic oligonucleotide
  Sense strand starting at position 463 of SEQ ID NO: 586575
uuuguauguguacacauua

SEQ ID NO: 728331 - RNA, 19 nt, Artificial Sequence
  Description of Artificial Sequence: Synthetic oligonucleotide
  Antisense strand to SEQ ID NO: 728330
uaauguguacacauacaaa

SEQ ID NO: 728332 - RNA, 19 nt, Artificial Sequence
  Description of Artificial Sequence: Synthetic oligonucleotide
  Sense strand starting at position 506 of SEQ ID NO: 586575
acaagaugccagcguaaga

SEQ ID NO: 728333 - RNA, 19 nt, Artificial Sequence
  Description of Artificial Sequence: Synthetic oligonucleotide
  Antisense strand to SEQ ID NO: 728332
ucuuacgcuggcaucuugu

SEQ ID NO: 728334 - RNA, 19 nt, Artificial Sequence
  Description of Artificial Sequence: Synthetic oligonucleotide
  Sense strand starting at position 517 of SEQ ID NO: 586575
gcguaagaaggugaaucuu

SEQ ID NO: 728335 - RNA, 19 nt, Artificial Sequence
  Description of Artificial Sequence: Synthetic oligonucleotide
  Antisense strand to SEQ ID NO: 728334
aagauucaccuucuuacgc

SEQ ID NO: 728336 - RNA, 19 nt, Artificial Sequence
  Description of Artificial Sequence: Synthetic oligonucleotide
  Sense strand starting at position 525 of SEQ ID NO: 586575
aggugaaucuucuugucau

SEQ ID NO: 728337 - RNA, 19 nt, Artificial Sequence
  Description of Artificial Sequence: Synthetic oligonucleotide
  Antisense strand to SEQ ID NO: 728336
augacaagaagauucaccu

SEQ ID NO: 728338 - RNA, 19 nt, Artificial Sequence
  Description of Artificial Sequence: Synthetic oligonucleotide
  Sense strand starting at position 528 of SEQ ID NO: 586575
ugaaucuucuugucaugaa

SEQ ID NO: 728339 - RNA, 19 nt, Artificial Sequence
  Description of Artificial Sequence: Synthetic oligonucleotide
  Antisense strand to SEQ ID NO: 728338
uucaugacaagaagauuca

SEQ ID NO: 728340 - RNA, 19 nt, Artificial Sequence
  Description of Artificial Sequence: Synthetic oligonucleotide
  Sense strand starting at position 542 of SEQ ID NO: 586575
augaauauuugccucgugu

SEQ ID NO: 728341 - RNA, 19 nt, Artificial Sequence
  Description of Artificial Sequence: Synthetic oligonucleotide
  Antisense strand to SEQ ID NO: 728340
acacgaggcaaauauucau

SEQ ID NO: 728342 - RNA, 19 nt, Artificial Sequence
  Description of Artificial Sequence: Synthetic oligonucleotide
  Sense strand starting at position 544 of SEQ ID NO: 586575
gaauauuugccucguguac

SEQ ID NO: 728343 - RNA, 19 nt, Artificial Sequence
  Description of Artificial Sequence: Synthetic oligonucleotide
  Antisense strand to SEQ ID NO: 728342
guacacgaggcaaauauuc

SEQ ID NO: 728344 - RNA, 19 nt, Artificial Sequence
  Description of Artificial Sequence: Synthetic oligonucleotide
  Sense strand starting at position 577 of SEQ ID NO: 586575
cccaaaugaucugauuugu

SEQ ID NO: 728345 - RNA, 19 nt, Artificial Sequence
  Description of Artificial Sequence: Synthetic oligonucleotide
  Antisense strand to SEQ ID NO: 728344
acaaaucagaucauuuggg

SEQ ID NO: 728346 - RNA, 19 nt, Artificial Sequence
  Description of Artificial Sequence: Synthetic oligonucleotide
  Sense strand starting at position 599 of SEQ ID NO: 586575
ggaaauaauucugacacau

SEQ ID NO: 728347 - RNA, 19 nt, Artificial Sequence
  Description of Artificial Sequence: Synthetic oligonucleotide
  Antisense strand to SEQ ID NO: 728346
augugucagaauuauuucc

SEQ ID NO: 728348 - RNA, 19 nt, Artificial Sequence
  Description of Artificial Sequence: Synthetic oligonucleotide
  Sense strand starting at position 800 of SEQ ID NO: 586575
uuugaaugucuaugaaagu

SEQ ID NO: 728349 - RNA, 19 nt, Artificial Sequence
  Description of Artificial Sequence: Synthetic oligonucleotide
  Antisense strand to SEQ ID NO: 728348
acuuucauagacauucaaa

SEQ ID NO: 728350 - RNA, 19 nt, Artificial Sequence
  Description of Artificial Sequence: Synthetic oligonucleotide
  Sense strand starting at position 973 of SEQ ID NO: 586575
gggaaauugugagugggua

SEQ ID NO: 728351 - RNA, 19 nt, Artificial Sequence
  Description of Artificial Sequence: Synthetic oligonucleotide
  Antisense strand to SEQ ID NO: 728350
uacccacucacaauuuccc

SEQ ID NO: 728352 - RNA, 19 nt, Artificial Sequence
  Description of Artificial Sequence: Synthetic oligonucleotide
  Sense strand starting at position 974 of SEQ ID NO: 586575
ggaaauugugaguggguaa

SEQ ID NO: 728353 - RNA, 19 nt, Artificial Sequence
  Description of Artificial Sequence: Synthetic oligonucleotide
  Antisense strand to SEQ ID NO: 728352
uuacccacucacaauuucc

SEQ ID NO: 728354 - RNA, 19 nt, Artificial Sequence
  Description of Artificial Sequence: Synthetic oligonucleotide
  Sense strand starting at position 975 of SEQ ID NO: 586575
gaaauugugaguggguaac

SEQ ID NO: 728355 - RNA, 19 nt, Artificial Sequence
  Description of Artificial Sequence: Synthetic oligonucleotide
  Antisense strand to SEQ ID NO: 728354
guuacccacucacaauuuc

SEQ ID NO: 728356 - RNA, 19 nt, Artificial Sequence
  Description of Artificial Sequence: Synthetic oligonucleotide
  Sense strand starting at position 1111 of SEQ ID NO: 586575
gucauuagaugccuccaaa

SEQ ID NO: 728357 - RNA, 19 nt, Artificial Sequence
  Description of Artificial Sequence: Synthetic oligonucleotide
  Antisense strand to SEQ ID NO: 728356
uuuggaggcaucuaaugac

SEQ ID NO: 728358 - RNA, 19 nt, Artificial Sequence
  Description of Artificial Sequence: Synthetic oligonucleotide
  Sense strand starting at position 1171 of SEQ ID NO: 586575
agcagcgaugcuugacaaa

SEQ ID NO: 728359 - RNA, 19 nt, Artificial Sequence
  Description of Artificial Sequence: Synthetic oligonucleotide
  Antisense strand to SEQ ID NO: 728358
uuugucaagcaucgcugcu

SEQ ID NO: 728360 - RNA, 19 nt, Artificial Sequence
  Description of Artificial Sequence: Synthetic oligonucleotide
  Sense strand starting at position 1221 of SEQ ID NO: 586575
guaaccugaugccuuaaua

SEQ ID NO: 728361 - RNA, 19 nt, Artificial Sequence
  Description of Artificial Sequence: Synthetic oligonucleotide
  Antisense strand to SEQ ID NO: 728360
uauuaaggcaucagguuac

SEQ ID NO: 728362 - RNA, 19 nt, Artificial Sequence
  Description of Artificial Sequence: Synthetic oligonucleotide
  Sense strand starting at position 1256 of SEQ ID NO: 586575
ugagaagguuuggugacuu

SEQ ID NO: 728363 - RNA, 19 nt, Artificial Sequence
  Description of Artificial Sequence: Synthetic oligonucleotide
  Antisense strand to SEQ ID NO: 728362
aagucaccaaaccuucuca

SEQ ID NO: 728364 - RNA, 19 nt, Artificial Sequence
  Description of Artificial Sequence: Synthetic oligonucleotide
  Sense strand starting at position 1266 of SEQ ID NO: 586575
uggugacuugagcgucaaa

SEQ ID NO: 728365 - RNA, 19 nt, Artificial Sequence
  Description of Artificial Sequence: Synthetic oligonucleotide
  Antisense strand to SEQ ID NO: 728364
uuugacgcucaagucacca

SEQ ID NO: 728366 - RNA, 19 nt, Artificial Sequence
  Description of Artificial Sequence: Synthetic oligonucleotide
  Sense strand starting at position 1269 of SEQ ID NO: 586575
ugacuugagcgucaaaccu

SEQ ID NO: 728367 - RNA, 19 nt, Artificial Sequence
  Description of Artificial Sequence: Synthetic oligonucleotide
  Antisense strand to SEQ ID NO: 728366
agguuugacgcucaaguca

SEQ ID NO: 728368 - RNA, 19 nt, Artificial Sequence
  Description of Artificial Sequence: Synthetic oligonucleotide
  Sense strand starting at position 1318 of SEQ ID NO: 586575
ccgggauaauuccucucuu

SEQ ID NO: 728369 - RNA, 19 nt, Artificial Sequence
  Description of Artificial Sequence: Synthetic oligonucleotide
  Antisense strand to SEQ ID NO: 728368
aagagaggaauuaucccgg

SEQ ID NO: 728370 - RNA, 19 nt, Artificial Sequence
  Description of Artificial Sequence: Synthetic oligonucleotide
  Sense strand starting at position 1319 of SEQ ID NO: 586575
cgggauaauuccucucuug

SEQ ID NO: 728371 - RNA, 19 nt, Artificial Sequence
  Description of Artificial Sequence: Synthetic oligonucleotide
  Antisense strand to SEQ ID NO: 728370
caagagaggaauuaucccg

SEQ ID NO: 728372 - RNA, 19 nt, Artificial Sequence
  Description of Artificial Sequence: Synthetic oligonucleotide
  Sense strand starting at position 1383 of SEQ ID NO: 586575
aagaaagcucccggcucaa

SEQ ID NO: 728373 - RNA, 19 nt, Artificial Sequence
  Description of Artificial Sequence: Synthetic oligonucleotide
  Antisense strand to SEQ ID NO: 728372
uugagccgggagcuuucuu

SEQ ID NO: 728374 - RNA, 19 nt, Artificial Sequence
  Description of Artificial Sequence: Synthetic oligonucleotide
  Sense strand starting at position 1439 of SEQ ID NO: 586575
cugacuuccguggguauau

SEQ ID NO: 728375 - RNA, 19 nt, Artificial Sequence
  Description of Artificial Sequence: Synthetic oligonucleotide
  Antisense strand to SEQ ID NO: 728374
auauacccacggaagucag

SEQ ID NO: 728376 - RNA, 19 nt, Artificial Sequence
  Description of Artificial Sequence: Synthetic oligonucleotide
  Sense strand starting at position 1450 of SEQ ID NO: 586575
ggguauauguaggucuaca

SEQ ID NO: 728377 - RNA, 19 nt, Artificial Sequence
  Description of Artificial Sequence: Synthetic oligonucleotide
  Antisense strand to SEQ ID NO: 728376
uguagaccuacauauaccc

SEQ ID NO: 728378 - RNA, 19 nt, Artificial Sequence
  Description of Artificial Sequence: Synthetic oligonucleotide
  Sense strand starting at position 1575 of SEQ ID NO: 586575
gcaacagacgcuugacaga

SEQ ID NO: 728379 - RNA, 19 nt, Artificial Sequence
  Description of Artificial Sequence: Synthetic oligonucleotide
  Antisense strand to SEQ ID NO: 728378
ucugucaagcgucuguugc

SEQ ID NO: 728380 - RNA, 19 nt, Artificial Sequence
  Description of Artificial Sequence: Synthetic oligonucleotide
  Sense strand starting at position 1580 of SEQ ID NO: 586575
agacgcuugacagaaguga

SEQ ID NO: 728381 - RNA, 19 nt, Artificial Sequence
  Description of Artificial Sequence: Synthetic oligonucleotide
  Antisense strand to SEQ ID NO: 728380
ucacuucugucaagcgucu

SEQ ID NO: 728382 - RNA, 19 nt, Artificial Sequence
  Description of Artificial Sequence: Synthetic oligonucleotide
  Sense strand starting at position 3069 of SEQ ID NO: 586575
guugauccuccgcaaggga

SEQ ID NO: 728383 - RNA, 19 nt, Artificial Sequence
  Description of Artificial Sequence: Synthetic oligonucleotide
  Antisense strand to SEQ ID NO: 728382
ucccuugcggaggaucaac

SEQ ID NO: 728384 - RNA, 19 nt, Artificial Sequence
  Description of Artificial Sequence: Synthetic oligonucleotide
  Sense strand starting at position 3272 of SEQ ID NO: 586575
cggcucuuugcgucucaga

SEQ ID NO: 728385 - RNA, 19 nt, Artificial Sequence
  Description of Artificial Sequence: Synthetic oligonucleotide
  Antisense strand to SEQ ID NO: 728384
ucugagacgcaaagagccg

SEQ ID NO: 728386 - RNA, 19 nt, Artificial Sequence
  Description of Artificial Sequence: Synthetic oligonucleotide
  Sense strand starting at position 3330 of SEQ ID NO: 586575
acgggaaugccacaucuga

SEQ ID NO: 728387 - RNA, 19 nt, Artificial Sequence
  Description of Artificial Sequence: Synthetic oligonucleotide
  Antisense strand to SEQ ID NO: 728386
ucagauguggcauucccgu

SEQ ID NO: 728388 - RNA, 19 nt, Artificial Sequence
  Description of Artificial Sequence: Synthetic oligonucleotide
  Sense strand starting at position 325 of SEQ ID NO: 586576
ccaugaagugccugaauac

SEQ ID NO: 728389 - RNA, 19 nt, Artificial Sequence
  Description of Artificial Sequence: Synthetic oligonucleotide
  Antisense strand to SEQ ID NO: 728388
guauucaggcacuucaugg

SEQ ID NO: 728390 - RNA, 19 nt, Artificial Sequence
  Description of Artificial Sequence: Synthetic oligonucleotide
  Sense strand starting at position 547 of SEQ ID NO: 586576
gcaggaugacuguagucaa

SEQ ID NO: 728391 - RNA, 19 nt, Artificial Sequence
  Description of Artificial Sequence: Synthetic oligonucleotide
  Antisense strand to SEQ ID NO: 728390
uugacuacagucauccugc

SEQ ID NO: 728392 - RNA, 19 nt, Artificial Sequence
  Description of Artificial Sequence: Synthetic oligonucleotide
  Sense strand starting at position 593 of SEQ ID NO: 586576
aaggaagaugucgaauguu

SEQ ID NO: 728393 - RNA, 19 nt, Artificial Sequence
  Description of Artificial Sequence: Synthetic oligonucleotide
  Antisense strand to SEQ ID NO: 728392
aacauucgacaucuuccuu

SEQ ID NO: 728394 - RNA, 19 nt, Artificial Sequence
  Description of Artificial Sequence: Synthetic oligonucleotide
  Sense strand starting at position 720 of SEQ ID NO: 586576
ugugucuauguacacaauu

SEQ ID NO: 728395 - RNA, 19 nt, Artificial Sequence
  Description of Artificial Sequence: Synthetic oligonucleotide
  Antisense strand to SEQ ID NO: 728394
aauuguguacauagacaca

SEQ ID NO: 728396 - RNA, 19 nt, Artificial Sequence
  Description of Artificial Sequence: Synthetic oligonucleotide
  Sense strand starting at position 945 of SEQ ID NO: 586576
gggagaguuuaaguccaaa

SEQ ID NO: 728397 - RNA, 19 nt, Artificial Sequence
  Description of Artificial Sequence: Synthetic oligonucleotide
  Antisense strand to SEQ ID NO: 728396
uuuggacuuaaacucuccc

SEQ ID NO: 728398 - RNA, 19 nt, Artificial Sequence
  Description of Artificial Sequence: Synthetic oligonucleotide
  Sense strand starting at position 1010 of SEQ ID NO: 586576
cugugauuggcagaucuau

SEQ ID NO: 728399 - RNA, 19 nt, Artificial Sequence
  Description of Artificial Sequence: Synthetic oligonucleotide
  Antisense strand to SEQ ID NO: 728398
auagaucugccaaucacag

SEQ ID NO: 728400 - RNA, 19 nt, Artificial Sequence
  Description of Artificial Sequence: Synthetic oligonucleotide
  Sense strand starting at position 1028 of SEQ ID NO: 586576
ucuccaguuccauggaacu

SEQ ID NO: 728401 - RNA, 19 nt, Artificial Sequence
  Description of Artificial Sequence: Synthetic oligonucleotide
  Antisense strand to SEQ ID NO: 728400
aguuccauggaacuggaga

SEQ ID NO: 728402 - RNA, 19 nt, Artificial Sequence
  Description of Artificial Sequence: Synthetic oligonucleotide
  Sense strand starting at position 1126 of SEQ ID NO: 586576
ggagcaccaacuuguagaa

SEQ ID NO: 728403 - RNA, 19 nt, Artificial Sequence
  Description of Artificial Sequence: Synthetic oligonucleotide
  Antisense strand to SEQ ID NO: 728402
uucuacaaguuggugcucc

SEQ ID NO: 728404 - RNA, 19 nt, Artificial Sequence
  Description of Artificial Sequence: Synthetic oligonucleotide
  Sense strand starting at position 1475 of SEQ ID NO: 586576
gggucuccuggaugagaag

SEQ ID NO: 728405 - RNA, 19 nt, Artificial Sequence
  Description of Artificial Sequence: Synthetic oligonucleotide
  Antisense strand to SEQ ID NO: 728404
cuucucauccaggagaccc

SEQ ID NO: 728406 - RNA, 19 nt, Artificial Sequence
  Description of Artificial Sequence: Synthetic oligonucleotide
  Sense strand starting at position 1544 of SEQ ID NO: 586576
uguguccaugcuuaaugaa

SEQ ID NO: 728407 - RNA, 19 nt, Artificial Sequence
  Description of Artificial Sequence: Synthetic oligonucleotide
  Antisense strand to SEQ ID NO: 728406
uucauuaagcauggacaca

SEQ ID NO: 728408 - RNA, 19 nt, Artificial Sequence
  Description of Artificial Sequence: Synthetic oligonucleotide
  Sense strand starting at position 1694 of SEQ ID NO: 586576
guauuuaacucuucccguu

SEQ ID NO: 728409 - RNA, 19 nt, Artificial Sequence
  Description of Artificial Sequence: Synthetic oligonucleotide
  Antisense strand to SEQ ID NO: 728408
aacgggaagaguuaaauac

SEQ ID NO: 728410 - RNA, 19 nt, Artificial Sequence
  Description of Artificial Sequence: Synthetic oligonucleotide
  Sense strand starting at position 1780 of SEQ ID NO: 586576
gauaauuuguaacagguga

SEQ ID NO: 728411 - RNA, 19 nt, Artificial Sequence
  Description of Artificial Sequence: Synthetic oligonucleotide
  Antisense strand to SEQ ID NO: 728410
ucaccuguuacaaauuauc

SEQ ID NO: 728412 - RNA, 19 nt, Artificial Sequence
  Description of Artificial Sequence: Synthetic oligonucleotide
  Sense strand starting at position 1811 of SEQ ID NO: 586576
ggcaaauuccaucaugguc

SEQ ID NO: 728413 - RNA, 19 nt, Artificial Sequence
  Description of Artificial Sequence: Synthetic oligonucleotide
  Antisense strand to SEQ ID NO: 728412
gaccaugauggaauuugcc

SEQ ID NO: 728414 - RNA, 19 nt, Artificial Sequence
  Description of Artificial Sequence: Synthetic oligonucleotide
  Sense strand starting at position 1989 of SEQ ID NO: 586576
guccucagguuaucugaga

SEQ ID NO: 728415 - RNA, 19 nt, Artificial Sequence
  Description of Artificial Sequence: Synthetic oligonucleotide
  Antisense strand to SEQ ID NO: 728414
ucucagauaaccugaggac

SEQ ID NO: 728416 - RNA, 19 nt, Artificial Sequence
  Description of Artificial Sequence: Synthetic oligonucleotide
  Sense strand starting at position 1990 of SEQ ID NO: 586576
uccucagguuaucugagaa

SEQ ID NO: 728417 - RNA, 19 nt, Artificial Sequence
  Description of Artificial Sequence: Synthetic oligonucleotide
  Antisense strand to SEQ ID NO: 728416
uucucagauaaccugagga

SEQ ID NO: 728418 - RNA, 19 nt, Artificial Sequence
  Description of Artificial Sequence: Synthetic oligonucleotide
  Sense strand starting at position 2043 of SEQ ID NO: 586576
cuaauaagauaugagaaag

SEQ ID NO: 728419 - RNA, 19 nt, Artificial Sequence
  Description of Artificial Sequence: Synthetic oligonucleotide
  Antisense strand to SEQ ID NO: 728418
cuuucucauaucuuauuag

SEQ ID NO: 728420 - RNA, 19 nt, Artificial Sequence
  Description of Artificial Sequence: Synthetic oligonucleotide
  Sense strand starting at position 2101 of SEQ ID NO: 586576
guuaucuagcaagaauaau

SEQ ID NO: 728421 - RNA, 19 nt, Artificial Sequence
  Description of Artificial Sequence: Synthetic oligonucleotide
  Antisense strand to SEQ ID NO: 728420
auuauucuugcuagauaac

SEQ ID NO: 728422 - RNA, 19 nt, Artificial Sequence
  Description of Artificial Sequence: Synthetic oligonucleotide
  Sense strand starting at position 2145 of SEQ ID NO: 586576
ggaguaucagacuggcaca

SEQ ID NO: 728423 - RNA, 19 nt, Artificial Sequence
  Description of Artificial Sequence: Synthetic oligonucleotide
  Antisense strand to SEQ ID NO: 728422
ugugccagucugauacucc

SEQ ID NO: 728424 - RNA, 19 nt, Artificial Sequence
  Description of Artificial Sequence: Synthetic oligonucleotide
  Sense strand starting at position 2324 of SEQ ID NO: 586576
ggucauuguaggcacagaa

SEQ ID NO: 728425 - RNA, 19 nt, Artificial Sequence
  Description of Artificial Sequence: Synthetic oligonucleotide
  Antisense strand to SEQ ID NO: 728424
uucugugccuacaaugacc

SEQ ID NO: 728426 - RNA, 19 nt, Artificial Sequence
  Description of Artificial Sequence: Synthetic oligonucleotide
  Sense strand starting at position 2352 of SEQ ID NO: 586576
uuggcugauccauaguuau

SEQ ID NO: 728427 - RNA, 19 nt, Artificial Sequence
  Description of Artificial Sequence: Synthetic oligonucleotide
  Antisense strand to SEQ ID NO: 728426
auaacuauggaucagccaa

SEQ ID NO: 728428 - RNA, 19 nt, Artificial Sequence
  Description of Artificial Sequence: Synthetic oligonucleotide
  Sense strand starting at position 2396 of SEQ ID NO: 586576
aucgaugaaccuugaguca

SEQ ID NO: 728429 - RNA, 19 nt, Artificial Sequence
  Description of Artificial Sequence: Synthetic oligonucleotide
  Antisense strand to SEQ ID NO: 728428
ugacucaagguucaucgau

SEQ ID NO: 728430 - RNA, 19 nt, Artificial Sequence
  Description of Artificial Sequence: Synthetic oligonucleotide
  Sense strand starting at position 2463 of SEQ ID NO: 586576
ugaagaaugucucauuuac

SEQ ID NO: 728431 - RNA, 19 nt, Artificial Sequence
  Description of Artificial Sequence: Synthetic oligonucleotide
  Antisense strand to SEQ ID NO: 728430
guaaaugagacauucuuca

SEQ ID NO: 728432 - RNA, 19 nt, Artificial Sequence
  Description of Artificial Sequence: Synthetic oligonucleotide
  Sense strand starting at position 2719 of SEQ ID NO: 586576
cucagaucgguuuaaauua

SEQ ID NO: 728433 - RNA, 19 nt, Artificial Sequence
  Description of Artificial Sequence: Synthetic oligonucleotide
  Antisense strand to SEQ ID NO: 728432
uaauuuaaaccgaucugag

SEQ ID NO: 728434 - RNA, 19 nt, Artificial Sequence
  Description of Artificial Sequence: Synthetic oligonucleotide
  Sense strand starting at position 2781 of SEQ ID NO: 586576
cuucgaugaccauagugaa

SEQ ID NO: 728435 - RNA, 19 nt, Artificial Sequence
  Description of Artificial Sequence: Synthetic oligonucleotide
  Antisense strand to SEQ ID NO: 728434
uucacuauggucaucgaag

SEQ ID NO: 728436 - RNA, 19 nt, Artificial Sequence
  Description of Artificial Sequence: Synthetic oligonucleotide
  Sense strand starting at position 2788 of SEQ ID NO: 586576
gaccauagugaauguucca

SEQ ID NO: 728437 - RNA, 19 nt, Artificial Sequence
  Description of Artificial Sequence: Synthetic oligonucleotide
  Antisense strand to SEQ ID NO: 728436
uggaacauucacuaugguc

SEQ ID NO: 728438 - RNA, 19 nt, Artificial Sequence
  Description of Artificial Sequence: Synthetic oligonucleotide
  Sense strand starting at position 2795 of SEQ ID NO: 586576
gugaauguuccacagagug

SEQ ID NO: 728439 - RNA, 19 nt, Artificial Sequence
  Description of Artificial Sequence: Synthetic oligonucleotide
  Antisense strand to SEQ ID NO: 728438
cacucuguggaacauucac

SEQ ID NO: 728440 - RNA, 19 nt, Artificial Sequence
  Description of Artificial Sequence: Synthetic oligonucleotide
  Sense strand starting at position 2849 of SEQ ID NO: 586576
gcaucaguggaguagaaac

SEQ ID NO: 728441 - RNA, 19 nt, Artificial Sequence
  Description of Artificial Sequence: Synthetic oligonucleotide
  Antisense strand to SEQ ID NO: 728440
guuucuacuccacugaugc

SEQ ID NO: 728442 - RNA, 19 nt, Artificial Sequence
  Description of Artificial Sequence: Synthetic oligonucleotide
  Sense strand starting at position 2946 of SEQ ID NO: 586576
cuggcagcuccacagauaa

SEQ ID NO: 728443 - RNA, 19 nt, Artificial Sequence
  Description of Artificial Sequence: Synthetic oligonucleotide
  Antisense strand to SEQ ID NO: 728442
uuaucuguggagcugccag

SEQ ID NO: 728444 - RNA, 19 nt, Artificial Sequence
  Description of Artificial Sequence: Synthetic oligonucleotide
  Sense strand starting at position 2965 of SEQ ID NO: 586576
gaaagcuauggccagcaga

SEQ ID NO: 728445 - RNA, 19 nt, Artificial Sequence
  Description of Artificial Sequence: Synthetic oligonucleotide
  Antisense strand to SEQ ID NO: 728444
ucugcuggccauagcuuuc

SEQ ID NO: 728446 - RNA, 19 nt, Artificial Sequence
  Description of Artificial Sequence: Synthetic oligonucleotide
  Sense strand starting at position 3004 of SEQ ID NO: 586576
gcucauuuaugcucuggua

SEQ ID NO: 728447 - RNA, 19 nt, Artificial Sequence
  Description of Artificial Sequence: Synthetic oligonucleotide
  Antisense strand to SEQ ID NO: 728446
uaccagagcauaaaugagc

SEQ ID NO: 728448 - RNA, 19 nt, Artificial Sequence
  Description of Artificial Sequence: Synthetic oligonucleotide
  Sense strand starting at position 3006 of SEQ ID NO: 586576
ucauuuaugcucugguaua

SEQ ID NO: 728449 - RNA, 19 nt, Artificial Sequence
  Description of Artificial Sequence: Synthetic oligonucleotide
  Antisense strand to SEQ ID NO: 728448
uauaccagagcauaaauga

SEQ ID NO: 728450 - RNA, 19 nt, Artificial Sequence
  Description of Artificial Sequence: Synthetic oligonucleotide
  Sense strand starting at position 3135 of SEQ ID NO: 586576
uucagauguguggaucuga

SEQ ID NO: 728451 - RNA, 19 nt, Artificial Sequence
  Description of Artificial Sequence: Synthetic oligonucleotide
  Antisense strand to SEQ ID NO: 728450
ucagauccacacaucugaa

SEQ ID NO: 728452 - RNA, 19 nt, Artificial Sequence
  Description of Artificial Sequence: Synthetic oligonucleotide
  Sense strand starting at position 3212 of SEQ ID NO: 586576
ccucucaauuaggcugaaa

SEQ ID NO: 728453 - RNA, 19 nt, Artificial Sequence
  Description of Artificial Sequence: Synthetic oligonucleotide
  Antisense strand to SEQ ID NO: 728452
uuucagccuaauugagagg

SEQ ID NO: 728454 - RNA, 19 nt, Artificial Sequence
  Description of Artificial Sequence: Synthetic oligonucleotide
  Sense strand starting at position 3324 of SEQ ID NO: 586576
ucaggaauaucaguauuag

SEQ ID NO: 728455 - RNA, 19 nt, Artificial Sequence
  Description of Artificial Sequence: Synthetic oligonucleotide
  Antisense strand to SEQ ID NO: 728454
cuaauacugauauuccuga

SEQ ID NO: 728456 - RNA, 19 nt, Artificial Sequence
  Description of Artificial Sequence: Synthetic oligonucleotide
  Sense strand starting at position 3330 of SEQ ID NO: 586576
auaucaguauuagucauga

SEQ ID NO: 728457 - RNA, 19 nt, Artificial Sequence
  Description of Artificial Sequence: Synthetic oligonucleotide
  Antisense strand to SEQ ID NO: 728456
ucaugacuaauacugauau

SEQ ID NO: 728458 - RNA, 19 nt, Artificial Sequence
  Description of Artificial Sequence: Synthetic oligonucleotide
  Sense strand starting at position 3568 of SEQ ID NO: 586576
aaagcaauacgucaagagu

SEQ ID NO: 728459 - RNA, 19 nt, Artificial Sequence
  Description of Artificial Sequence: Synthetic oligonucleotide
  Antisense strand to SEQ ID NO: 728458
acucuugacguauugcuuu

SEQ ID NO: 728460 - RNA, 19 nt, Artificial Sequence
  Description of Artificial Sequence: Synthetic oligonucleotide
  Sense strand starting at position 3741 of SEQ ID NO: 586576
ucugaagauguguauagua

SEQ ID NO: 728461 - RNA, 19 nt, Artificial Sequence
  Description of Artificial Sequence: Synthetic oligonucleotide
  Antisense strand to SEQ ID NO: 728460
uacuauacacaucuucaga

SEQ ID NO: 728462 - RNA, 19 nt, Artificial Sequence
  Description of Artificial Sequence: Synthetic oligonucleotide
  Sense strand starting at position 3743 of SEQ ID NO: 586576
ugaagauguguauaguauu

SEQ ID NO: 728463 - RNA, 19 nt, Artificial Sequence
  Description of Artificial Sequence: Synthetic oligonucleotide
  Antisense strand to SEQ ID NO: 728462
aauacuauacacaucuuca

SEQ ID NO: 728464 - RNA, 19 nt, Artificial Sequence
  Description of Artificial Sequence: Synthetic oligonucleotide
  Sense strand starting at position 3798 of SEQ ID NO: 586576
ucuguauugauuggugaag

SEQ ID NO: 728465 - RNA, 19 nt, Artificial Sequence
  Description of Artificial Sequence: Synthetic oligonucleotide
  Antisense strand to SEQ ID NO: 728464
cuucaccaaucaauacaga

SEQ ID NO: 728466 - RNA, 19 nt, Artificial Sequence
  Description of Artificial Sequence: Synthetic oligonucleotide
  Sense strand starting at position 3809 of SEQ ID NO: 586576
uggugaagcauacagaagu

SEQ ID NO: 728467 - RNA, 19 nt, Artificial Sequence
  Description of Artificial Sequence: Synthetic oligonucleotide
  Antisense strand to SEQ ID NO: 728466
acuucuguaugcuucacca

SEQ ID NO: 728468 - RNA, 19 nt, Artificial Sequence
  Description of Artificial Sequence: Synthetic oligonucleotide
  Sense strand starting at position 15 of SEQ ID NO: 586577
cuggaagcauucuuaagac

SEQ ID NO: 728469 - RNA, 19 nt, Artificial Sequence
  Description of Artificial Sequence: Synthetic oligonucleotide
  Antisense strand to SEQ ID NO: 728468
gucuuaagaaugcuuccag

SEQ ID NO: 728470 - RNA, 19 nt, Artificial Sequence
  Description of Artificial Sequence: Synthetic oligonucleotide
  Sense strand starting at position 117 of SEQ ID NO: 586577
uuuguaguccuuuauuugu

SEQ ID NO: 728471 - RNA, 19 nt, Artificial Sequence
  Description of Artificial Sequence: Synthetic oligonucleotide
  Antisense strand to SEQ ID NO: 728470
acaaauaaaggacuacaaa

SEQ ID NO: 728472 - RNA, 19 nt, Artificial Sequence
  Description of Artificial Sequence: Synthetic oligonucleotide
  Sense strand starting at position 126 of SEQ ID NO: 586577
cuuuauuuguggccuauga

SEQ ID NO: 728473 - RNA, 19 nt, Artificial Sequence
  Description of Artificial Sequence: Synthetic oligonucleotide
  Antisense strand to SEQ ID NO: 728472
ucauaggccacaaauaaag

SEQ ID NO: 728474 - RNA, 19 nt, Artificial Sequence
  Description of Artificial Sequence: Synthetic oligonucleotide
  Sense strand starting at position 264 of SEQ ID NO: 586577
ugcuccuguccauaagaga

SEQ ID NO: 728475 - RNA, 19 nt, Artificial Sequence
  Description of Artificial Sequence: Synthetic oligonucleotide
  Antisense strand to SEQ ID NO: 728474
ucucuuauggacaggagca

SEQ ID NO: 728476 - RNA, 19 nt, Artificial Sequence
  Description of Artificial Sequence: Synthetic oligonucleotide
  Sense strand starting at position 273 of SEQ ID NO: 586577
ccauaagagagcgaaaugu

SEQ ID NO: 728477 - RNA, 19 nt, Artificial Sequence
  Description of Artificial Sequence: Synthetic oligonucleotide
  Antisense strand to SEQ ID NO: 728476
acauuucgcucucuuaugg

SEQ ID NO: 728478 - RNA, 19 nt, Artificial Sequence
  Description of Artificial Sequence: Synthetic oligonucleotide
  Sense strand starting at position 333 of SEQ ID NO: 586577
gcucuuaaguaaguugaaa

SEQ ID NO: 728479 - RNA, 19 nt, Artificial Sequence
  Description of Artificial Sequence: Synthetic oligonucleotide
  Antisense strand to SEQ ID NO: 728478
uuucaacuuacuuaagagc

SEQ ID NO: 728480 - RNA, 19 nt, Artificial Sequence
  Description of Artificial Sequence: Synthetic oligonucleotide
  Sense strand starting at position 564 of SEQ ID NO: 586577
cugagauaauuagcaguau

SEQ ID NO: 728481 - RNA, 19 nt, Artificial Sequence
  Description of Artificial Sequence: Synthetic oligonucleotide
  Antisense strand to SEQ ID NO: 728480
auacugcuaauuaucucag

SEQ ID NO: 728482 - RNA, 19 nt, Artificial Sequence
  Description of Artificial Sequence: Synthetic oligonucleotide
  Sense strand starting at position 568 of SEQ ID NO: 586577
gauaauuagcaguaugguu

SEQ ID NO: 728483 - RNA, 19 nt, Artificial Sequence
  Description of Artificial Sequence: Synthetic oligonucleotide
  Antisense strand to SEQ ID NO: 728482
aaccauacugcuaauuauc

SEQ ID NO: 728484 - RNA, 19 nt, Artificial Sequence
  Description of Artificial Sequence: Synthetic oligonucleotide
  Sense strand starting at position 629 of SEQ ID NO: 586577
ugcagugaaucucuuugaa

SEQ ID NO: 728485 - RNA, 19 nt, Artificial Sequence
  Description of Artificial Sequence: Synthetic oligonucleotide
  Antisense strand to SEQ ID NO: 728484
uucaaagagauucacugca

SEQ ID NO: 728486 - RNA, 19 nt, Artificial Sequence
  Description of Artificial Sequence: Synthetic oligonucleotide
  Sense strand starting at position 868 of SEQ ID NO: 586577
ccauuaggucuagggaagu

SEQ ID NO: 728487 - RNA, 19 nt, Artificial Sequence
  Description of Artificial Sequence: Synthetic oligonucleotide
  Antisense strand to SEQ ID NO: 728486
acuucccuagaccuaaugg

SEQ ID NO: 728488 - RNA, 19 nt, Artificial Sequence
  Description of Artificial Sequence: Synthetic oligonucleotide
  Sense strand starting at position 874 of SEQ ID NO: 586577
ggucuagggaaguaucuua

SEQ ID NO: 728489 - RNA, 19 nt, Artificial Sequence
  Description of Artificial Sequence: Synthetic oligonucleotide
  Antisense strand to SEQ ID NO: 728488
uaagauacuucccuagacc

SEQ ID NO: 728490 - RNA, 19 nt, Artificial Sequence
  Description of Artificial Sequence: Synthetic oligonucleotide
  Sense strand starting at position 882 of SEQ ID NO: 586577
gaaguaucuuauguggaau

SEQ ID NO: 728491 - RNA, 19 nt, Artificial Sequence
  Description of Artificial Sequence: Synthetic oligonucleotide
  Antisense strand to SEQ ID NO: 728490
auuccacauaagauacuuc

SEQ ID NO: 728492 - RNA, 19 nt, Artificial Sequence
  Description of Artificial Sequence: Synthetic oligonucleotide
  Sense strand starting at position 1077 of SEQ ID NO: 586577
uuuagugugugaucucaaa

SEQ ID NO: 728493 - RNA, 19 nt, Artificial Sequence
  Description of Artificial Sequence: Synthetic oligonucleotide
  Antisense strand to SEQ ID NO: 728492
uuugagaucacacacuaaa

SEQ ID NO: 728494 - RNA, 19 nt, Artificial Sequence
  Description of Artificial Sequence: Synthetic oligonucleotide
  Sense strand starting at position 1368 of SEQ ID NO: 586577
ccuccuacccauuagaguu

SEQ ID NO: 728495 - RNA, 19 nt, Artificial Sequence
  Description of Artificial Sequence: Synthetic oligonucleotide
  Antisense strand to SEQ ID NO: 728494
aacucuaauggguaggagg

SEQ ID NO: 728496 - RNA, 19 nt, Artificial Sequence
  Description of Artificial Sequence: Synthetic oligonucleotide
  Sense strand starting at position 1408 of SEQ ID NO: 586577
ggaagagagucagauuuac

SEQ ID NO: 728497 - RNA, 19 nt, Artificial Sequence
  Description of Artificial Sequence: Synthetic oligonucleotide
  Antisense strand to SEQ ID NO: 728496
guaaaucugacucucuucc

SEQ ID NO: 728498 - RNA, 19 nt, Artificial Sequence
  Description of Artificial Sequence: Synthetic oligonucleotide
  Sense strand starting at position 1432 of SEQ ID NO: 586577
cagugagcugauugcagaa

SEQ ID NO: 728499 - RNA, 19 nt, Artificial Sequence
  Description of Artificial Sequence: Synthetic oligonucleotide
  Antisense strand to SEQ ID NO: 728498
uucugcaaucagcucacug

SEQ ID NO: 728500 - RNA, 19 nt, Artificial Sequence
  Description of Artificial Sequence: Synthetic oligonucleotide
  Sense strand starting at position 1465 of SEQ ID NO: 586577
ugcacacucgagugagaaa

SEQ ID NO: 728501 - RNA, 19 nt, Artificial Sequence
  Description of Artificial Sequence: Synthetic oligonucleotide
  Antisense strand to SEQ ID NO: 728500
uuucucacucgagugugca

SEQ ID NO: 728502 - RNA, 19 nt, Artificial Sequence
  Description of Artificial Sequence: Synthetic oligonucleotide
  Sense strand starting at position 2086 of SEQ ID NO: 586577
ucagaaauuauguggacgu

SEQ ID NO: 728503 - RNA, 19 nt, Artificial Sequence
  Description of Artificial Sequence: Synthetic oligonucleotide
  Antisense strand to SEQ ID NO: 728502
acguccacauaauuucuga

SEQ ID NO: 728504 - RNA, 19 nt, Artificial Sequence
  Description of Artificial Sequence: Synthetic oligonucleotide
  Sense strand starting at position 2090 of SEQ ID NO: 586577
aaauuauguggacgucuga

SEQ ID NO: 728505 - RNA, 19 nt, Artificial Sequence
  Description of Artificial Sequence: Synthetic oligonucleotide
  Antisense strand to SEQ ID NO: 728504
ucagacguccacauaauuu

SEQ ID NO: 728506 - RNA, 19 nt, Artificial Sequence
  Description of Artificial Sequence: Synthetic oligonucleotide
  Sense strand starting at position 2097 of SEQ ID NO: 586577
guggacgucugauuuguca

SEQ ID NO: 728507 - RNA, 19 nt, Artificial Sequence
  Description of Artificial Sequence: Synthetic oligonucleotide
  Antisense strand to SEQ ID NO: 728506
ugacaaaucagacguccac

SEQ ID NO: 728508 - RNA, 19 nt, Artificial Sequence
  Description of Artificial Sequence: Synthetic oligonucleotide
  Sense strand starting at position 2145 of SEQ ID NO: 586577
gucaacaggaauugugagu

SEQ ID NO: 728509 - RNA, 19 nt, Artificial Sequence
  Description of Artificial Sequence: Synthetic oligonucleotide
  Antisense strand to SEQ ID NO: 728508
acucacaauuccuguugac

SEQ ID NO: 728510 - RNA, 19 nt, Artificial Sequence
  Description of Artificial Sequence: Synthetic oligonucleotide
  Sense strand starting at position 2409 of SEQ ID NO: 586577
ggcccuucucaggaguaac

SEQ ID NO: 728511 - RNA, 19 nt, Artificial Sequence
  Description of Artificial Sequence: Synthetic oligonucleotide
  Antisense strand to SEQ ID NO: 728510
guuacuccugagaagggcc

SEQ ID NO: 728512 - RNA, 19 nt, Artificial Sequence
  Description of Artificial Sequence: Synthetic oligonucleotide
  Sense strand starting at position 2808 of SEQ ID NO: 586577
gugcucugcgucccuaaca

SEQ ID NO: 728513 - RNA, 19 nt, Artificial Sequence
  Description of Artificial Sequence: Synthetic oligonucleotide
  Antisense strand to SEQ ID NO: 728512
uguuagggacgcagagcac

SEQ ID NO: 728514 - RNA, 19 nt, Artificial Sequence
  Description of Artificial Sequence: Synthetic oligonucleotide
  Sense strand starting at position 2903 of SEQ ID NO: 586577
cugaaacucuacguuucua

SEQ ID NO: 728515 - RNA, 19 nt, Artificial Sequence
  Description of Artificial Sequence: Synthetic oligonucleotide
  Antisense strand to SEQ ID NO: 728514
uagaaacguagaguuucag

SEQ ID NO: 728516 - RNA, 19 nt, Artificial Sequence
  Description of Artificial Sequence: Synthetic oligonucleotide
  Sense strand starting at position 2986 of SEQ ID NO: 586577
cgugaaauagauuaauguu

SEQ ID NO: 728517 - RNA, 19 nt, Artificial Sequence
  Description of Artificial Sequence: Synthetic oligonucleotide
  Antisense strand to SEQ ID NO: 728516
aacauuaaucuauuucacg

SEQ ID NO: 728518 - RNA, 19 nt, Artificial Sequence
  Description of Artificial Sequence: Synthetic oligonucleotide
  Sense strand starting at position 3115 of SEQ ID NO: 586577
aagucucuguaguuaugaa

SEQ ID NO: 728519 - RNA, 19 nt, Artificial Sequence
  Description of Artificial Sequence: Synthetic oligonucleotide
  Antisense strand to SEQ ID NO: 728518
uucauaacuacagagacuu

SEQ ID NO: 728520 - RNA, 19 nt, Artificial Sequence
  Description of Artificial Sequence: Synthetic oligonucleotide
  Sense strand starting at position 3339 of SEQ ID NO: 586577
cuuagaauaugacaagaac

SEQ ID NO: 728521 - RNA, 19 nt, Artificial Sequence
  Description of Artificial Sequence: Synthetic oligonucleotide
  Antisense strand to SEQ ID NO: 728520
guucuugucauauucuaag

SEQ ID NO: 728522 - RNA, 19 nt, Artificial Sequence
  Description of Artificial Sequence: Synthetic oligonucleotide
  Sense strand starting at position 3430 of SEQ ID NO: 586577
cagugauauccuugaugaa

SEQ ID NO: 728523 - RNA, 19 nt, Artificial Sequence
  Description of Artificial Sequence: Synthetic oligonucleotide
  Antisense strand to SEQ ID NO: 728522
uucaucaaggauaucacug

SEQ ID NO: 728524 - RNA, 19 nt, Artificial Sequence
  Description of Artificial Sequence: Synthetic oligonucleotide
  Sense strand starting at position 3440 of SEQ ID NO: 586577
cuugaugaauucuucguua

SEQ ID NO: 728525 - RNA, 19 nt, Artificial Sequence
  Description of Artificial Sequence: Synthetic oligonucleotide
  Antisense strand to SEQ ID NO: 728524
uaacgaagaauucaucaag

SEQ ID NO: 728526 - RNA, 19 nt, Artificial Sequence
  Description of Artificial Sequence: Synthetic oligonucleotide
  Sense strand starting at position 3442 of SEQ ID NO: 586577
ugaugaauucuucguuaac

SEQ ID NO: 728527 - RNA, 19 nt, Artificial Sequence
  Description of Artificial Sequence: Synthetic oligonucleotide
  Antisense strand to SEQ ID NO: 728526
guuaacgaagaauucauca

SEQ ID NO: 728528 - RNA, 19 nt, Artificial Sequence
  Description of Artificial Sequence: Synthetic oligonucleotide
  Sense strand starting at position 3443 of SEQ ID NO: 586577
gaugaauucuucguuaacc

SEQ ID NO: 728529 - RNA, 19 nt, Artificial Sequence
  Description of Artificial Sequence: Synthetic oligonucleotide
  Antisense strand to SEQ ID NO: 728528
gguuaacgaagaauucauc

SEQ ID NO: 728530 - RNA, 19 nt, Artificial Sequence
  Description of Artificial Sequence: Synthetic oligonucleotide
  Sense strand starting at position 3444 of SEQ ID NO: 586577
augaauucuucguuaacca

SEQ ID NO: 728531 - RNA, 19 nt, Artificial Sequence
  Description of Artificial Sequence: Synthetic oligonucleotide
  Antisense strand to SEQ ID NO: 728530
ugguuaacgaagaauucau

SEQ ID NO: 728532 - RNA, 19 nt, Artificial Sequence
  Description of Artificial Sequence: Synthetic oligonucleotide
  Sense strand starting at position 3445 of SEQ ID NO: 586577
ugaauucuucguuaaccac

SEQ ID NO: 728533 - RNA, 19 nt, Artificial Sequence
  Description of Artificial Sequence: Synthetic oligonucleotide
  Antisense strand to SEQ ID NO: 728532
gugguuaacgaagaauuca

SEQ ID NO: 728534 - RNA, 19 nt, Artificial Sequence
  Description of Artificial Sequence: Synthetic oligonucleotide
  Sense strand starting at position 3742 of SEQ ID NO: 586577
augcauaaucuugaagugu

SEQ ID NO: 728535 - RNA, 19 nt, Artificial Sequence
  Description of Artificial Sequence: Synthetic oligonucleotide
  Antisense strand to SEQ ID NO: 728534
acacuucaagauuaugcau

SEQ ID NO: 728536 - RNA, 19 nt, Artificial Sequence
  Description of Artificial Sequence: Synthetic oligonucleotide
  Sense strand starting at position 3833 of SEQ ID NO: 586577
cuauauuaaccacgcauga

SEQ ID NO: 728537 - RNA, 19 nt, Artificial Sequence
  Description of Artificial Sequence: Synthetic oligonucleotide
  Antisense strand to SEQ ID NO: 728536
ucaugcgugguuaauauag

SEQ ID NO: 728538 - RNA, 19 nt, Artificial Sequence
  Description of Artificial Sequence: Synthetic oligonucleotide
  Sense strand starting at position 3913 of SEQ ID NO: 586577
acuccaagucucuagucaa

SEQ ID NO: 728539 - RNA, 19 nt, Artificial Sequence
  Description of Artificial Sequence: Synthetic oligonucleotide
  Antisense strand to SEQ ID NO: 728538
uugacuagagacuuggagu

SEQ ID NO: 728540 - RNA, 19 nt, Artificial Sequence
  Description of Artificial Sequence: Synthetic oligonucleotide
  Sense strand starting at position 3916 of SEQ ID NO: 586577
ccaagucucuagucaaaca

SEQ ID NO: 728541 - RNA, 19 nt, Artificial Sequence
  Description of Artificial Sequence: Synthetic oligonucleotide
  Antisense strand to SEQ ID NO: 728540
uguuugacuagagacuugg

SEQ ID NO: 728542 - RNA, 19 nt, Artificial Sequence
  Description of Artificial Sequence: Synthetic oligonucleotide
  Sense strand starting at position 3966 of SEQ ID NO: 586577
uuuagaccucuuggcuaau

SEQ ID NO: 728543 - RNA, 19 nt, Artificial Sequence
  Description of Artificial Sequence: Synthetic oligonucleotide
  Antisense strand to SEQ ID NO: 728542
auuagccaagaggucuaaa

SEQ ID NO: 728544 - RNA, 19 nt, Artificial Sequence
  Description of Artificial Sequence: Synthetic oligonucleotide
  Sense strand starting at position 3967 of SEQ ID NO: 586577
uuagaccucuuggcuaaua

SEQ ID NO: 728545 - RNA, 19 nt, Artificial Sequence
  Description of Artificial Sequence: Synthetic oligonucleotide
  Antisense strand to SEQ ID NO: 728544
uauuagccaagaggucuaa

SEQ ID NO: 728546 - RNA, 19 nt, Artificial Sequence
  Description of Artificial Sequence: Synthetic oligonucleotide
  Sense strand starting at position 3969 of SEQ ID NO: 586577
agaccucuuggcuaauaca

SEQ ID NO: 728547 - RNA, 19 nt, Artificial Sequence
  Description of Artificial Sequence: Synthetic oligonucleotide
  Antisense strand to SEQ ID NO: 728546
uguauuagccaagaggucu

SEQ ID NO: 728548 - RNA, 19 nt, Artificial Sequence
  Description of Artificial Sequence: Synthetic oligonucleotide
  Sense strand starting at position 13 of SEQ ID NO: 586578
ggaaauaauucugacacau

SEQ ID NO: 728549 - RNA, 19 nt, Artificial Sequence
  Description of Artificial Sequence: Synthetic oligonucleotide
  Antisense strand to SEQ ID NO: 728548
augugucagaauuauuucc

SEQ ID NO: 728550 - RNA, 19 nt, Artificial Sequence
  Description of Artificial Sequence: Synthetic oligonucleotide
  Sense strand starting at position 214 of SEQ ID NO: 586578
uuugaaugucuaugaaagu

SEQ ID NO: 728551 - RNA, 19 nt, Artificial Sequence
  Description of Artificial Sequence: Synthetic oligonucleotide
  Antisense strand to SEQ ID NO: 728550
acuuucauagacauucaaa

SEQ ID NO: 728552 - RNA, 19 nt, Artificial Sequence
  Description of Artificial Sequence: Synthetic oligonucleotide
  Sense strand starting at position 387 of SEQ ID NO: 586578
gggaaauugugagugggua

SEQ ID NO: 728553 - RNA, 19 nt, Artificial Sequence
  Description of Artificial Sequence: Synthetic oligonucleotide
  Antisense strand to SEQ ID NO: 728552
uacccacucacaauuuccc

SEQ ID NO: 728554 - RNA, 19 nt, Artificial Sequence
  Description of Artificial Sequence: Synthetic oligonucleotide
  Sense strand starting at position 388 of SEQ ID NO: 586578
ggaaauugugaguggguaa

SEQ ID NO: 728555 - RNA, 19 nt, Artificial Sequence
  Description of Artificial Sequence: Synthetic oligonucleotide
  Antisense strand to SEQ ID NO: 728554
uuacccacucacaauuucc

SEQ ID NO: 728556 - RNA, 19 nt, Artificial Sequence
  Description of Artificial Sequence: Synthetic oligonucleotide
  Sense strand starting at position 389 of SEQ ID NO: 586578
gaaauugugaguggguaac

SEQ ID NO: 728557 - RNA, 19 nt, Artificial Sequence
  Description of Artificial Sequence: Synthetic oligonucleotide
  Antisense strand to SEQ ID NO: 728556
guuacccacucacaauuuc

SEQ ID NO: 728558 - RNA, 19 nt, Artificial Sequence
  Description of Artificial Sequence: Synthetic oligonucleotide
  Sense strand starting at position 481 of SEQ ID NO: 586578
aaagcugugccuggucaga

SEQ ID NO: 728559 - RNA, 19 nt, Artificial Sequence
  Description of Artificial Sequence: Synthetic oligonucleotide
  Antisense strand to SEQ ID NO: 728558
ucugaccaggcacagcuuu

SEQ ID NO: 728560 - RNA, 19 nt, Artificial Sequence
  Description of Artificial Sequence: Synthetic oligonucleotide
  Sense strand starting at position 525 of SEQ ID NO: 586578
gucauuagaugccuccaaa

SEQ ID NO: 728561 - RNA, 19 nt, Artificial Sequence
  Description of Artificial Sequence: Synthetic oligonucleotide
  Antisense strand to SEQ ID NO: 728560
uuuggaggcaucuaaugac

SEQ ID NO: 728562 - RNA, 19 nt, Artificial Sequence
  Description of Artificial Sequence: Synthetic oligonucleotide
  Sense strand starting at position 585 of SEQ ID NO: 586578
agcagcgaugcuugacaaa

SEQ ID NO: 728563 - RNA, 19 nt, Artificial Sequence
  Description of Artificial Sequence: Synthetic oligonucleotide
  Antisense strand to SEQ ID NO: 728562
uuugucaagcaucgcugcu

SEQ ID NO: 728564 - RNA, 19 nt, Artificial Sequence
  Description of Artificial Sequence: Synthetic oligonucleotide
  Sense strand starting at position 635 of SEQ ID NO: 586578
guaaccugaugccuuaaua

SEQ ID NO: 728565 - RNA, 19 nt, Artificial Sequence
  Description of Artificial Sequence: Synthetic oligonucleotide
  Antisense strand to SEQ ID NO: 728564
uauuaaggcaucagguuac

SEQ ID NO: 728566 - RNA, 19 nt, Artificial Sequence
  Description of Artificial Sequence: Synthetic oligonucleotide
  Sense strand starting at position 670 of SEQ ID NO: 586578
ugagaagguuuggugacuu

SEQ ID NO: 728567 - RNA, 19 nt, Artificial Sequence
  Description of Artificial Sequence: Synthetic oligonucleotide
  Antisense strand to SEQ ID NO: 728566
aagucaccaaaccuucuca

SEQ ID NO: 728568 - RNA, 19 nt, Artificial Sequence
  Description of Artificial Sequence: Synthetic oligonucleotide
  Sense strand starting at position 680 of SEQ ID NO: 586578
uggugacuugagcgucaaa

SEQ ID NO: 728569 - RNA, 19 nt, Artificial Sequence
  Description of Artificial Sequence: Synthetic oligonucleotide
  Antisense strand to SEQ ID NO: 728568
uuugacgcucaagucacca

SEQ ID NO: 728570 - RNA, 19 nt, Artificial Sequence
  Description of Artificial Sequence: Synthetic oligonucleotide
  Sense strand starting at position 683 of SEQ ID NO: 586578
ugacuugagcgucaaaccu

SEQ ID NO: 728571 - RNA, 19 nt, Artificial Sequence
  Description of Artificial Sequence: Synthetic oligonucleotide
  Antisense strand to SEQ ID NO: 728570
agguuugacgcucaaguca

SEQ ID NO: 728572 - RNA, 19 nt, Artificial Sequence
  Description of Artificial Sequence: Synthetic oligonucleotide
  Sense strand starting at position 732 of SEQ ID NO: 586578
ccgggauaauuccucucuu

SEQ ID NO: 728573 - RNA, 19 nt, Artificial Sequence
  Description of Artificial Sequence: Synthetic oligonucleotide
  Antisense strand to SEQ ID NO: 728572
aagagaggaauuaucccgg

SEQ ID NO: 728574 - RNA, 19 nt, Artificial Sequence
  Description of Artificial Sequence: Synthetic oligonucleotide
  Sense strand starting at position 733 of SEQ ID NO: 586578
cgggauaauuccucucuug

SEQ ID NO: 728575 - RNA, 19 nt, Artificial Sequence
  Description of Artificial Sequence: Synthetic oligonucleotide
  Antisense strand to SEQ ID NO: 728574
caagagaggaauuaucccg

SEQ ID NO: 728576 - RNA, 19 nt, Artificial Sequence
  Description of Artificial Sequence: Synthetic oligonucleotide
  Sense strand starting at position 797 of SEQ ID NO: 586578
aagaaagcucccggcucaa

SEQ ID NO: 728577 - RNA, 19 nt, Artificial Sequence
  Description of Artificial Sequence: Synthetic oligonucleotide
  Antisense strand to SEQ ID NO: 728576
uugagccgggagcuuucuu

SEQ ID NO: 728578 - RNA, 19 nt, Artificial Sequence
  Description of Artificial Sequence: Synthetic oligonucleotide
  Sense strand starting at position 853 of SEQ ID NO: 586578
cugacuuccguggguauau

SEQ ID NO: 728579 - RNA, 19 nt, Artificial Sequence
  Description of Artificial Sequence: Synthetic oligonucleotide
  Antisense strand to SEQ ID NO: 728578
auauacccacggaagucag

SEQ ID NO: 728580 - RNA, 19 nt, Artificial Sequence
  Description of Artificial Sequence: Synthetic oligonucleotide
  Sense strand starting at position 864 of SEQ ID NO: 586578
ggguauauguaggucuaca

SEQ ID NO: 728581 - RNA, 19 nt, Artificial Sequence
  Description of Artificial Sequence: Synthetic oligonucleotide
  Antisense strand to SEQ ID NO: 728580
uguagaccuacauauaccc

SEQ ID NO: 728582 - RNA, 19 nt, Artificial Sequence
  Description of Artificial Sequence: Synthetic oligonucleotide
  Sense strand starting at position 989 of SEQ ID NO: 586578
gcaacagacgcuugacaga

SEQ ID NO: 728583 - RNA, 19 nt, Artificial Sequence
  Description of Artificial Sequence: Synthetic oligonucleotide
  Antisense strand to SEQ ID NO: 728582
ucugucaagcgucuguugc

SEQ ID NO: 728584 - RNA, 19 nt, Artificial Sequence
  Description of Artificial Sequence: Synthetic oligonucleotide
  Sense strand starting at position 994 of SEQ ID NO: 586578
agacgcuugacagaaguga

SEQ ID NO: 728585 - RNA, 19 nt, Artificial Sequence
  Description of Artificial Sequence: Synthetic oligonucleotide
  Antisense strand to SEQ ID NO: 728584
ucacuucugucaagcgucu

SEQ ID NO: 728586 - RNA, 19 nt, Artificial Sequence
  Description of Artificial Sequence: Synthetic oligonucleotide
  Sense strand starting at position 2483 of SEQ ID NO: 586578
guugauccuccgcaaggga

SEQ ID NO: 728587 - RNA, 19 nt, Artificial Sequence
  Description of Artificial Sequence: Synthetic oligonucleotide
  Antisense strand to SEQ ID NO: 728586
ucccuugcggaggaucaac

SEQ ID NO: 728588 - RNA, 19 nt, Artificial Sequence
  Description of Artificial Sequence: Synthetic oligonucleotide
  Sense strand starting at position 2686 of SEQ ID NO: 586578
cggcucuuugcgucucaga

SEQ ID NO: 728589 - RNA, 19 nt, Artificial Sequence
  Description of Artificial Sequence: Synthetic oligonucleotide
  Antisense strand to SEQ ID NO: 728588
ucugagacgcaaagagccg

SEQ ID NO: 728590 - RNA, 19 nt, Artificial Sequence
  Description of Artificial Sequence: Synthetic oligonucleotide
  Sense strand starting at position 2744 of SEQ ID NO: 586578
acgggaaugccacaucuga

SEQ ID NO: 728591 - RNA, 19 nt, Artificial Sequence
  Description of Artificial Sequence: Synthetic oligonucleotide
  Antisense strand to SEQ ID NO: 728590
ucagauguggcauucccgu

SEQ ID NO: 728592 - RNA, 19 nt, Artificial Sequence
  Description of Artificial Sequence: Synthetic oligonucleotide
  Sense strand starting at position 3328 of SEQ ID NO: 586578
aggcccuuuacccgugaau

SEQ ID NO: 728593 - RNA, 19 nt, Artificial Sequence
  Description of Artificial Sequence: Synthetic oligonucleotide
  Antisense strand to SEQ ID NO: 728592
auucacggguaaagggccu

SEQ ID NO: 728594 - RNA, 19 nt, Artificial Sequence
  Description of Artificial Sequence: Synthetic oligonucleotide
  Sense strand starting at position 3330 of SEQ ID NO: 586578
gcccuuuacccgugaauca

SEQ ID NO: 728595 - RNA, 19 nt, Artificial Sequence
  Description of Artificial Sequence: Synthetic oligonucleotide
  Antisense strand to SEQ ID NO: 728594
ugauucacggguaaagggc

SEQ ID NO: 728596 - RNA, 19 nt, Artificial Sequence
  Description of Artificial Sequence: Synthetic oligonucleotide
  Sense strand starting at position 3432 of SEQ ID NO: 586578
gggcaagucugagccaguu

SEQ ID NO: 728597 - RNA, 19 nt, Artificial Sequence
  Description of Artificial Sequence: Synthetic oligonucleotide
  Antisense strand to SEQ ID NO: 728596
aacuggcucagacuugccc

SEQ ID NO: 728598 - RNA, 19 nt, Artificial Sequence
  Description of Artificial Sequence: Synthetic oligonucleotide
  Sense strand starting at position 3434 of SEQ ID NO: 586578
gcaagucugagccaguuaa

SEQ ID NO: 728599 - RNA, 19 nt, Artificial Sequence
  Description of Artificial Sequence: Synthetic oligonucleotide
  Antisense strand to SEQ ID NO: 728598
uuaacuggcucagacuugc

SEQ ID NO: 728600 - RNA, 19 nt, Artificial Sequence
  Description of Artificial Sequence: Synthetic oligonucleotide
  Sense strand starting at position 3560 of SEQ ID NO: 586578
gcaucaucuuccuugucua

SEQ ID NO: 728601 - RNA, 19 nt, Artificial Sequence
  Description of Artificial Sequence: Synthetic oligonucleotide
  Antisense strand to SEQ ID NO: 728600
uagacaaggaagaugaugc

SEQ ID NO: 728602 - RNA, 19 nt, Artificial Sequence
  Description of Artificial Sequence: Synthetic oligonucleotide
  Sense strand starting at position 3696 of SEQ ID NO: 586578
ccucuaguucuuggaugca

SEQ ID NO: 728603 - RNA, 19 nt, Artificial Sequence
  Description of Artificial Sequence: Synthetic oligonucleotide
  Antisense strand to SEQ ID NO: 728602
ugcauccaagaacuagagg

SEQ ID NO: 728604 - RNA, 19 nt, Artificial Sequence
  Description of Artificial Sequence: Synthetic oligonucleotide
  Sense strand starting at position 3699 of SEQ ID NO: 586578
cuaguucuuggaugcagaa

SEQ ID NO: 728605 - RNA, 19 nt, Artificial Sequence
  Description of Artificial Sequence: Synthetic oligonucleotide
  Antisense strand to SEQ ID NO: 728604
uucugcauccaagaacuag

SEQ ID NO: 728606 - RNA, 19 nt, Artificial Sequence
  Description of Artificial Sequence: Synthetic oligonucleotide
  Sense strand starting at position 3701 of SEQ ID NO: 586578
aguucuuggaugcagaagu

SEQ ID NO: 728607 - RNA, 19 nt, Artificial Sequence
  Description of Artificial Sequence: Synthetic oligonucleotide
  Antisense strand to SEQ ID NO: 728606
acuucugcauccaagaacu

SEQ ID NO: 728608 - RNA, 19 nt, Artificial Sequence
  Description of Artificial Sequence: Synthetic oligonucleotide
  Sense strand starting at position 3847 of SEQ ID NO: 586578
cagauaguuugggcuuaug

SEQ ID NO: 728609 - RNA, 19 nt, Artificial Sequence
  Description of Artificial Sequence: Synthetic oligonucleotide
  Antisense strand to SEQ ID NO: 728608
cauaagcccaaacuaucug

SEQ ID NO: 728610 - RNA, 19 nt, Artificial Sequence
  Description of Artificial Sequence: Synthetic oligonucleotide
  Sense strand starting at position 3850 of SEQ ID NO: 586578
auaguuugggcuuaugaau

SEQ ID NO: 728611 - RNA, 19 nt, Artificial Sequence
  Description of Artificial Sequence: Synthetic oligonucleotide
  Antisense strand to SEQ ID NO: 728610
auucauaagcccaaacuau

SEQ ID NO: 728612 - RNA, 19 nt, Artificial Sequence
  Description of Artificial Sequence: Synthetic oligonucleotide
  Sense strand starting at position 3858 of SEQ ID NO: 586578
ggcuuaugaaucugacuga

SEQ ID NO: 728613 - RNA, 19 nt, Artificial Sequence
  Description of Artificial Sequence: Synthetic oligonucleotide
  Antisense strand to SEQ ID NO: 728612
ucagucagauucauaagcc

SEQ ID NO: 728614 - RNA, 19 nt, Artificial Sequence
  Description of Artificial Sequence: Synthetic oligonucleotide
  Sense strand starting at position 3861 of SEQ ID NO: 586578
uuaugaaucugacugaggu

SEQ ID NO: 728615 - RNA, 19 nt, Artificial Sequence
  Description of Artificial Sequence: Synthetic oligonucleotide
  Antisense strand to SEQ ID NO: 728614
accucagucagauucauaa

SEQ ID NO: 728616 - RNA, 19 nt, Artificial Sequence
  Description of Artificial Sequence: Synthetic oligonucleotide
  Sense strand starting at position 3862 of SEQ ID NO: 586578
uaugaaucugacugagguc

SEQ ID NO: 728617 - RNA, 19 nt, Artificial Sequence
  Description of Artificial Sequence: Synthetic oligonucleotide
  Antisense strand to SEQ ID NO: 728616
gaccucagucagauucaua

SEQ ID NO: 728618 - RNA, 19 nt, Artificial Sequence
  Description of Artificial Sequence: Synthetic oligonucleotide
  Sense strand starting at position 3871 of SEQ ID NO: 586578
gacugagguccuuaaucuc

SEQ ID NO: 728619 - RNA, 19 nt, Artificial Sequence
  Description of Artificial Sequence: Synthetic oligonucleotide
  Antisense strand to SEQ ID NO: 728618
gagauuaaggaccucaguc

SEQ ID NO: 728620 - RNA, 19 nt, Artificial Sequence
  Description of Artificial Sequence: Synthetic oligonucleotide
  Sense strand starting at position 3877 of SEQ ID NO: 586578
gguccuuaaucucucaaag

SEQ ID NO: 728621 - RNA, 19 nt, Artificial Sequence
  Description of Artificial Sequence: Synthetic oligonucleotide
  Antisense strand to SEQ ID NO: 728620
cuuugagagauuaaggacc

SEQ ID NO: 728622 - RNA, 19 nt, Artificial Sequence
  Description of Artificial Sequence: Synthetic oligonucleotide
  Sense strand starting at position 3911 of SEQ ID NO: 586578
cuguaaauugguggugaua

SEQ ID NO: 728623 - RNA, 19 nt, Artificial Sequence
  Description of Artificial Sequence: Synthetic oligonucleotide
  Antisense strand to SEQ ID NO: 728622
uaucaccaccaauuuacag

SEQ ID NO: 728624 - RNA, 19 nt, Artificial Sequence
  Description of Artificial Sequence: Synthetic oligonucleotide
  Sense strand starting at position 3947 of SEQ ID NO: 586578
ggguuguuuguggguuaag

SEQ ID NO: 728625 - RNA, 19 nt, Artificial Sequence
  Description of Artificial Sequence: Synthetic oligonucleotide
  Antisense strand to SEQ ID NO: 728624
cuuaacccacaaacaaccc

SEQ ID NO: 728626 - RNA, 19 nt, Artificial Sequence
  Description of Artificial Sequence: Synthetic oligonucleotide
  Sense strand starting at position 3952 of SEQ ID NO: 586578
guuuguggguuaaggagau

SEQ ID NO: 728627 - RNA, 19 nt, Artificial Sequence
  Description of Artificial Sequence: Synthetic oligonucleotide
  Antisense strand to SEQ ID NO: 728626
aucuccuuaacccacaaac

SEQ ID NO: 728628 - RNA, 19 nt, Artificial Sequence
  Description of Artificial Sequence: Synthetic oligonucleotide
  Sense strand starting at position 59 of SEQ ID NO: 586579
gagaguaccuuucccagga

SEQ ID NO: 728629 - RNA, 19 nt, Artificial Sequence
  Description of Artificial Sequence: Synthetic oligonucleotide
  Antisense strand to SEQ ID NO: 728628
uccugggaaagguacucuc

SEQ ID NO: 728630 - RNA, 19 nt, Artificial Sequence
  Description of Artificial Sequence: Synthetic oligonucleotide
  Sense strand starting at position 60 of SEQ ID NO: 586579
agaguaccuuucccaggau

SEQ ID NO: 728631 - RNA, 19 nt, Artificial Sequence
  Description of Artificial Sequence: Synthetic oligonucleotide
  Antisense strand to SEQ ID NO: 728630
auccugggaaagguacucu

SEQ ID NO: 728632 - RNA, 19 nt, Artificial Sequence
  Description of Artificial Sequence: Synthetic oligonucleotide
  Sense strand starting at position 63 of SEQ ID NO: 586579
guaccuuucccaggaugaa

SEQ ID NO: 728633 - RNA, 19 nt, Artificial Sequence
  Description of Artificial Sequence: Synthetic oligonucleotide
  Antisense strand to SEQ ID NO: 728632
uucauccugggaaagguac

SEQ ID NO: 728634 - RNA, 19 nt, Artificial Sequence
  Description of Artificial Sequence: Synthetic oligonucleotide
  Sense strand starting at position 83 of SEQ ID NO: 586579
uaauuaaaccugugggagu

SEQ ID NO: 728635 - RNA, 19 nt, Artificial Sequence
  Description of Artificial Sequence: Synthetic oligonucleotide
  Antisense strand to SEQ ID NO: 728634
acucccacagguuuaauua

SEQ ID NO: 728636 - RNA, 19 nt, Artificial Sequence
  Description of Artificial Sequence: Synthetic oligonucleotide
  Sense strand starting at position 85 of SEQ ID NO: 586579
auuaaaccugugggaguuu

SEQ ID NO: 728637 - RNA, 19 nt, Artificial Sequence
  Description of Artificial Sequence: Synthetic oligonucleotide
  Antisense strand to SEQ ID NO: 728636
aaacucccacagguuuaau

SEQ ID NO: 728638 - RNA, 19 nt, Artificial Sequence
  Description of Artificial Sequence: Synthetic oligonucleotide
  Sense strand starting at position 151 of SEQ ID NO: 586579
ggccauaccuguccaagaa

SEQ ID NO: 728639 - RNA, 19 nt, Artificial Sequence
  Description of Artificial Sequence: Synthetic oligonucleotide
  Antisense strand to SEQ ID NO: 728638
uucuuggacagguauggcc

SEQ ID NO: 728640 - RNA, 19 nt, Artificial Sequence
  Description of Artificial Sequence: Synthetic oligonucleotide
  Sense strand starting at position 152 of SEQ ID NO: 586579
gccauaccuguccaagaau

SEQ ID NO: 728641 - RNA, 19 nt, Artificial Sequence
  Description of Artificial Sequence: Synthetic oligonucleotide
  Antisense strand to SEQ ID NO: 728640
auucuuggacagguauggc

SEQ ID NO: 728642 - RNA, 19 nt, Artificial Sequence
  Description of Artificial Sequence: Synthetic oligonucleotide
  Sense strand starting at position 255 of SEQ ID NO: 586579
cuggaucuauauguauaca

SEQ ID NO: 728643 - RNA, 19 nt, Artificial Sequence
  Description of Artificial Sequence: Synthetic oligonucleotide
  Antisense strand to SEQ ID NO: 728642
uguauacauauagauccag

SEQ ID NO: 728644 - RNA, 19 nt, Artificial Sequence
  Description of Artificial Sequence: Synthetic oligonucleotide
  Sense strand starting at position 334 of SEQ ID NO: 586579
guugguaccucauugaauc

SEQ ID NO: 728645 - RNA, 19 nt, Artificial Sequence
  Description of Artificial Sequence: Synthetic oligonucleotide
  Antisense strand to SEQ ID NO: 728644
gauucaaugagguaccaac

SEQ ID NO: 728646 - RNA, 19 nt, Artificial Sequence
  Description of Artificial Sequence: Synthetic oligonucleotide
  Sense strand starting at position 444 of SEQ ID NO: 586579
cuuguuacaugucugggaa

SEQ ID NO: 728647 - RNA, 19 nt, Artificial Sequence
  Description of Artificial Sequence: Synthetic oligonucleotide
  Antisense strand to SEQ ID NO: 728646
uucccagacauguaacaag

SEQ ID NO: 728648 - RNA, 19 nt, Artificial Sequence
  Description of Artificial Sequence: Synthetic oligonucleotide
  Sense strand starting at position 445 of SEQ ID NO: 586579
uuguuacaugucugggaaa

SEQ ID NO: 728649 - RNA, 19 nt, Artificial Sequence
  Description of Artificial Sequence: Synthetic oligonucleotide
  Antisense strand to SEQ ID NO: 728648
uuucccagacauguaacaa

SEQ ID NO: 728650 - RNA, 19 nt, Artificial Sequence
  Description of Artificial Sequence: Synthetic oligonucleotide
  Sense strand starting at position 447 of SEQ ID NO: 586579
guuacaugucugggaaaga

SEQ ID NO: 728651 - RNA, 19 nt, Artificial Sequence
  Description of Artificial Sequence: Synthetic oligonucleotide
  Antisense strand to SEQ ID NO: 728650
ucuuucccagacauguaac

SEQ ID NO: 728652 - RNA, 19 nt, Artificial Sequence
  Description of Artificial Sequence: Synthetic oligonucleotide
  Sense strand starting at position 458 of SEQ ID NO: 586579
gggaaagaauaccagaauu

SEQ ID NO: 728653 - RNA, 19 nt, Artificial Sequence
  Description of Artificial Sequence: Synthetic oligonucleotide
  Antisense strand to SEQ ID NO: 728652
aauucugguauucuuuccc

SEQ ID NO: 728654 - RNA, 19 nt, Artificial Sequence
  Description of Artificial Sequence: Synthetic oligonucleotide
  Sense strand starting at position 481 of SEQ ID NO: 586579
ucaccuaagugucccuaaa

SEQ ID NO: 728655 - RNA, 19 nt, Artificial Sequence
  Description of Artificial Sequence: Synthetic oligonucleotide
  Antisense strand to SEQ ID NO: 728654
uuuagggacacuuagguga

SEQ ID NO: 728656 - RNA, 19 nt, Artificial Sequence
  Description of Artificial Sequence: Synthetic oligonucleotide
  Sense strand starting at position 651 of SEQ ID NO: 586579
agguguguuacuuaauccu

SEQ ID NO: 728657 - RNA, 19 nt, Artificial Sequence
  Description of Artificial Sequence: Synthetic oligonucleotide
  Antisense strand to SEQ ID NO: 728656
aggauuaaguaacacaccu

SEQ ID NO: 728658 - RNA, 19 nt, Artificial Sequence
  Description of Artificial Sequence: Synthetic oligonucleotide
  Sense strand starting at position 1057 of SEQ ID NO: 586579
ggcucugagguaugaaucu

SEQ ID NO: 728659 - RNA, 19 nt, Artificial Sequence
  Description of Artificial Sequence: Synthetic oligonucleotide
  Antisense strand to SEQ ID NO: 728658
agauucauaccucagagcc

SEQ ID NO: 728660 - RNA, 19 nt, Artificial Sequence
  Description of Artificial Sequence: Synthetic oligonucleotide
  Sense strand starting at position 1066 of SEQ ID NO: 586579
guaugaaucuuagcuggaa

SEQ ID NO: 728661 - RNA, 19 nt, Artificial Sequence
  Description of Artificial Sequence: Synthetic oligonucleotide
  Antisense strand to SEQ ID NO: 728660
uuccagcuaagauucauac

SEQ ID NO: 728662 - RNA, 19 nt, Artificial Sequence
  Description of Artificial Sequence: Synthetic oligonucleotide
  Sense strand starting at position 1079 of SEQ ID NO: 586579
cuggaauggcuuugaggaa

SEQ ID NO: 728663 - RNA, 19 nt, Artificial Sequence
  Description of Artificial Sequence: Synthetic oligonucleotide
  Antisense strand to SEQ ID NO: 728662
uuccucaaagccauuccag

SEQ ID NO: 728664 - RNA, 19 nt, Artificial Sequence
  Description of Artificial Sequence: Synthetic oligonucleotide
  Sense strand starting at position 1092 of SEQ ID NO: 586579
gaggaauccuagccauuga

SEQ ID NO: 728665 - RNA, 19 nt, Artificial Sequence
  Description of Artificial Sequence: Synthetic oligonucleotide
  Antisense strand to SEQ ID NO: 728664
ucaauggcuaggauuccuc

SEQ ID NO: 728666 - RNA, 19 nt, Artificial Sequence
  Description of Artificial Sequence: Synthetic oligonucleotide
  Sense strand starting at position 1102 of SEQ ID NO: 586579
agccauugaguuuacauaa

SEQ ID NO: 728667 - RNA, 19 nt, Artificial Sequence
  Description of Artificial Sequence: Synthetic oligonucleotide
  Antisense strand to SEQ ID NO: 728666
uuauguaaacucaauggcu

SEQ ID NO: 728668 - RNA, 19 nt, Artificial Sequence
  Description of Artificial Sequence: Synthetic oligonucleotide
  Sense strand starting at position 1131 of SEQ ID NO: 586579
cugcaacugcucugagaag

SEQ ID NO: 728669 - RNA, 19 nt, Artificial Sequence
  Description of Artificial Sequence: Synthetic oligonucleotide
  Antisense strand to SEQ ID NO: 728668
cuucucagagcaguugcag

SEQ ID NO: 728670 - RNA, 19 nt, Artificial Sequence
  Description of Artificial Sequence: Synthetic oligonucleotide
  Sense strand starting at position 2026 of SEQ ID NO: 586579
uugauaaaucuuuguugga

SEQ ID NO: 728671 - RNA, 19 nt, Artificial Sequence
  Description of Artificial Sequence: Synthetic oligonucleotide
  Antisense strand to SEQ ID NO: 728670
uccaacaaagauuuaucaa

SEQ ID NO: 728672 - RNA, 19 nt, Artificial Sequence
  Description of Artificial Sequence: Synthetic oligonucleotide
  Sense strand starting at position 2027 of SEQ ID NO: 586579
ugauaaaucuuuguuggag

SEQ ID NO: 728673 - RNA, 19 nt, Artificial Sequence
  Description of Artificial Sequence: Synthetic oligonucleotide
  Antisense strand to SEQ ID NO: 728672
cuccaacaaagauuuauca

SEQ ID NO: 728674 - RNA, 19 nt, Artificial Sequence
  Description of Artificial Sequence: Synthetic oligonucleotide
  Sense strand starting at position 2028 of SEQ ID NO: 586579
gauaaaucuuuguuggagg

SEQ ID NO: 728675 - RNA, 19 nt, Artificial Sequence
  Description of Artificial Sequence: Synthetic oligonucleotide
  Antisense strand to SEQ ID NO: 728674
ccuccaacaaagauuuauc

SEQ ID NO: 728676 - RNA, 19 nt, Artificial Sequence
  Description of Artificial Sequence: Synthetic oligonucleotide
  Sense strand starting at position 2085 of SEQ ID NO: 586579
ccuuauuaagauugugcaa

SEQ ID NO: 728677 - RNA, 19 nt, Artificial Sequence
  Description of Artificial Sequence: Synthetic oligonucleotide
  Antisense strand to SEQ ID NO: 728676
uugcacaaucuuaauaagg

SEQ ID NO: 728678 - RNA, 19 nt, Artificial Sequence
  Description of Artificial Sequence: Synthetic oligonucleotide
  Sense strand starting at position 2088 of SEQ ID NO: 586579
uauuaagauugugcaaugu

SEQ ID NO: 728679 - RNA, 19 nt, Artificial Sequence
  Description of Artificial Sequence: Synthetic oligonucleotide
  Antisense strand to SEQ ID NO: 728678
acauugcacaaucuuaaua

SEQ ID NO: 728680 - RNA, 19 nt, Artificial Sequence
  Description of Artificial Sequence: Synthetic oligonucleotide
  Sense strand starting at position 2098 of SEQ ID NO: 586579
gugcaaugugacguccuuu

SEQ ID NO: 728681 - RNA, 19 nt, Artificial Sequence
  Description of Artificial Sequence: Synthetic oligonucleotide
  Antisense strand to SEQ ID NO: 728680
aaaggacgucacauugcac

SEQ ID NO: 728682 - RNA, 19 nt, Artificial Sequence
  Description of Artificial Sequence: Synthetic oligonucleotide
  Sense strand starting at position 2220 of SEQ ID NO: 586579
auuagugacucagcacuuu

SEQ ID NO: 728683 - RNA, 19 nt, Artificial Sequence
  Description of Artificial Sequence: Synthetic oligonucleotide
  Antisense strand to SEQ ID NO: 728682
aaagugcugagucacuaau

SEQ ID NO: 728684 - RNA, 19 nt, Artificial Sequence
  Description of Artificial Sequence: Synthetic oligonucleotide
  Sense strand starting at position 2237 of SEQ ID NO: 586579
uuggcaugucuugacaaag

SEQ ID NO: 728685 - RNA, 19 nt, Artificial Sequence
  Description of Artificial Sequence: Synthetic oligonucleotide
  Antisense strand to SEQ ID NO: 728684
cuuugucaagacaugccaa

SEQ ID NO: 728686 - RNA, 19 nt, Artificial Sequence
  Description of Artificial Sequence: Synthetic oligonucleotide
  Sense strand starting at position 2262 of SEQ ID NO: 586579
gcugaagucaugcacgaag

SEQ ID NO: 728687 - RNA, 19 nt, Artificial Sequence
  Description of Artificial Sequence: Synthetic oligonucleotide
  Antisense strand to SEQ ID NO: 728686
cuucgugcaugacuucagc

SEQ ID NO: 728688 - RNA, 19 nt, Artificial Sequence
  Description of Artificial Sequence: Synthetic oligonucleotide
  Sense strand starting at position 2265 of SEQ ID NO: 586579
gaagucaugcacgaaguuu

SEQ ID NO: 728689 - RNA, 19 nt, Artificial Sequence
  Description of Artificial Sequence: Synthetic oligonucleotide
  Antisense strand to SEQ ID NO: 728688
aaacuucgugcaugacuuc

SEQ ID NO: 728690 - RNA, 19 nt, Artificial Sequence
  Description of Artificial Sequence: Synthetic oligonucleotide
  Sense strand starting at position 2549 of SEQ ID NO: 586579
ucaaauuucgugcaguuac

SEQ ID NO: 728691 - RNA, 19 nt, Artificial Sequence
  Description of Artificial Sequence: Synthetic oligonucleotide
  Antisense strand to SEQ ID NO: 728690
guaacugcacgaaauuuga

SEQ ID NO: 728692 - RNA, 19 nt, Artificial Sequence
  Description of Artificial Sequence: Synthetic oligonucleotide
  Sense strand starting at position 3068 of SEQ ID NO: 586579
gggucaagcugguucagaa

SEQ ID NO: 728693 - RNA, 19 nt, Artificial Sequence
  Description of Artificial Sequence: Synthetic oligonucleotide
  Antisense strand to SEQ ID NO: 728692
uucugaaccagcuugaccc

SEQ ID NO: 728694 - RNA, 19 nt, Artificial Sequence
  Description of Artificial Sequence: Synthetic oligonucleotide
  Sense strand starting at position 3118 of SEQ ID NO: 586579
ggaggauccuuggucucau

SEQ ID NO: 728695 - RNA, 19 nt, Artificial Sequence
  Description of Artificial Sequence: Synthetic oligonucleotide
  Antisense strand to SEQ ID NO: 728694
augagaccaaggauccucc

SEQ ID NO: 728696 - RNA, 19 nt, Artificial Sequence
  Description of Artificial Sequence: Synthetic oligonucleotide
  Sense strand starting at position 3119 of SEQ ID NO: 586579
gaggauccuuggucucaug

SEQ ID NO: 728697 - RNA, 19 nt, Artificial Sequence
  Description of Artificial Sequence: Synthetic oligonucleotide
  Antisense strand to SEQ ID NO: 728696
caugagaccaaggauccuc

SEQ ID NO: 728698 - RNA, 19 nt, Artificial Sequence
  Description of Artificial Sequence: Synthetic oligonucleotide
  Sense strand starting at position 3137 of SEQ ID NO: 586579
gcaaaugggcucuagacua

SEQ ID NO: 728699 - RNA, 19 nt, Artificial Sequence
  Description of Artificial Sequence: Synthetic oligonucleotide
  Antisense strand to SEQ ID NO: 728698
uagucuagagcccauuugc

SEQ ID NO: 728700 - RNA, 19 nt, Artificial Sequence
  Description of Artificial Sequence: Synthetic oligonucleotide
  Sense strand starting at position 3450 of SEQ ID NO: 586579
ugggauucuuuggugugaa

SEQ ID NO: 728701 - RNA, 19 nt, Artificial Sequence
  Description of Artificial Sequence: Synthetic oligonucleotide
  Antisense strand to SEQ ID NO: 728700
uucacaccaaagaauccca

SEQ ID NO: 728702 - RNA, 19 nt, Artificial Sequence
  Description of Artificial Sequence: Synthetic oligonucleotide
  Sense strand starting at position 3684 of SEQ ID NO: 586579
acuugaacugagugacaca

SEQ ID NO: 728703 - RNA, 19 nt, Artificial Sequence
  Description of Artificial Sequence: Synthetic oligonucleotide
  Antisense strand to SEQ ID NO: 728702
ugugucacucaguucaagu

SEQ ID NO: 728704 - RNA, 19 nt, Artificial Sequence
  Description of Artificial Sequence: Synthetic oligonucleotide
  Sense strand starting at position 3878 of SEQ ID NO: 586579
cuguuauccuagccuggga

SEQ ID NO: 728705 - RNA, 19 nt, Artificial Sequence
  Description of Artificial Sequence: Synthetic oligonucleotide
  Antisense strand to SEQ ID NO: 728704
ucccaggcuaggauaacag

SEQ ID NO: 728706 - RNA, 19 nt, Artificial Sequence
  Description of Artificial Sequence: Synthetic oligonucleotide
  Sense strand starting at position 3880 of SEQ ID NO: 586579
guuauccuagccugggaaa

SEQ ID NO: 728707 - RNA, 19 nt, Artificial Sequence
  Description of Artificial Sequence: Synthetic oligonucleotide
  Antisense strand to SEQ ID NO: 728706
uuucccaggcuaggauaac

SEQ ID NO: 728708 - RNA, 19 nt, Artificial Sequence
  Description of Artificial Sequence: Synthetic oligonucleotide
  Sense strand starting at position 5 of SEQ ID NO: 586580
ccauccuuguaaguuuauu

SEQ ID NO: 728709 - RNA, 19 nt, Artificial Sequence
  Description of Artificial Sequence: Synthetic oligonucleotide
  Antisense strand to SEQ ID NO: 728708
aauaaacuuacaaggaugg

SEQ ID NO: 728710 - RNA, 19 nt, Artificial Sequence
  Description of Artificial Sequence: Synthetic oligonucleotide
  Sense strand starting at position 10 of SEQ ID NO: 586580
cuuguaaguuuauuacuga

SEQ ID NO: 728711 - RNA, 19 nt, Artificial Sequence
  Description of Artificial Sequence: Synthetic oligonucleotide
  Antisense strand to SEQ ID NO: 728710
ucaguaauaaacuuacaag

SEQ ID NO: 728712 - RNA, 19 nt, Artificial Sequence
  Description of Artificial Sequence: Synthetic oligonucleotide
  Sense strand starting at position 31 of SEQ ID NO: 586580
guacuagaaaggcggaaua

SEQ ID NO: 728713 - RNA, 19 nt, Artificial Sequence
  Description of Artificial Sequence: Synthetic oligonucleotide
  Antisense strand to SEQ ID NO: 728712
uauuccgccuuucuaguac

SEQ ID NO: 728714 - RNA, 19 nt, Artificial Sequence
  Description of Artificial Sequence: Synthetic oligonucleotide
  Sense strand starting at position 42 of SEQ ID NO: 586580
gcggaauaauaauucuguu

SEQ ID NO: 728715 - RNA, 19 nt, Artificial Sequence
  Description of Artificial Sequence: Synthetic oligonucleotide
  Antisense strand to SEQ ID NO: 728714
aacagaauuauuauuccgc

SEQ ID NO: 728716 - RNA, 19 nt, Artificial Sequence
  Description of Artificial Sequence: Synthetic oligonucleotide
  Sense strand starting at position 89 of SEQ ID NO: 586580
ccacuaugaucaguaguac

SEQ ID NO: 728717 - RNA, 19 nt, Artificial Sequence
  Description of Artificial Sequence: Synthetic oligonucleotide
  Antisense strand to SEQ ID NO: 728716
guacuacugaucauagugg

SEQ ID NO: 728718 - RNA, 19 nt, Artificial Sequence
  Description of Artificial Sequence: Synthetic oligonucleotide
  Sense strand starting at position 98 of SEQ ID NO: 586580
ucaguaguacagggaaagu

SEQ ID NO: 728719 - RNA, 19 nt, Artificial Sequence
  Description of Artificial Sequence: Synthetic oligonucleotide
  Antisense strand to SEQ ID NO: 728718
acuuucccuguacuacuga

SEQ ID NO: 728720 - RNA, 19 nt, Artificial Sequence
  Description of Artificial Sequence: Synthetic oligonucleotide
  Sense strand starting at position 323 of SEQ ID NO: 586580
uccauaaauuaugugguca

SEQ ID NO: 728721 - RNA, 19 nt, Artificial Sequence
  Description of Artificial Sequence: Synthetic oligonucleotide
  Antisense strand to SEQ ID NO: 728720
ugaccacauaauuuaugga

SEQ ID NO: 728722 - RNA, 19 nt, Artificial Sequence
  Description of Artificial Sequence: Synthetic oligonucleotide
  Sense strand starting at position 524 of SEQ ID NO: 586580
ugacauauaggaugcauaa

SEQ ID NO: 728723 - RNA, 19 nt, Artificial Sequence
  Description of Artificial Sequence: Synthetic oligonucleotide
  Antisense strand to SEQ ID NO: 728722
uuaugcauccuauauguca

SEQ ID NO: 728724 - RNA, 19 nt, Artificial Sequence
  Description of Artificial Sequence: Synthetic oligonucleotide
  Sense strand starting at position 726 of SEQ ID NO: 586580
gaaugcuugccaggaggua

SEQ ID NO: 728725 - RNA, 19 nt, Artificial Sequence
  Description of Artificial Sequence: Synthetic oligonucleotide
  Antisense strand to SEQ ID NO: 728724
uaccuccuggcaagcauuc

SEQ ID NO: 728726 - RNA, 19 nt, Artificial Sequence
  Description of Artificial Sequence: Synthetic oligonucleotide
  Sense strand starting at position 809 of SEQ ID NO: 586580
uucuguaagcuugagagau

SEQ ID NO: 728727 - RNA, 19 nt, Artificial Sequence
  Description of Artificial Sequence: Synthetic oligonucleotide
  Antisense strand to SEQ ID NO: 728726
aucucucaagcuuacagaa

SEQ ID NO: 728728 - RNA, 19 nt, Artificial Sequence
  Description of Artificial Sequence: Synthetic oligonucleotide
  Sense strand starting at position 813 of SEQ ID NO: 586580
guaagcuugagagauccca

SEQ ID NO: 728729 - RNA, 19 nt, Artificial Sequence
  Description of Artificial Sequence: Synthetic oligonucleotide
  Antisense strand to SEQ ID NO: 728728
ugggaucucucaagcuuac

SEQ ID NO: 728730 - RNA, 19 nt, Artificial Sequence
  Description of Artificial Sequence: Synthetic oligonucleotide
  Sense strand starting at position 845 of SEQ ID NO: 586580
cuuguaaucuuguuacuaa

SEQ ID NO: 728731 - RNA, 19 nt, Artificial Sequence
  Description of Artificial Sequence: Synthetic oligonucleotide
  Antisense strand to SEQ ID NO: 728730
uuaguaacaagauuacaag

SEQ ID NO: 728732 - RNA, 19 nt, Artificial Sequence
  Description of Artificial Sequence: Synthetic oligonucleotide
  Sense strand starting at position 848 of SEQ ID NO: 586580
guaaucuuguuacuaacuu

SEQ ID NO: 728733 - RNA, 19 nt, Artificial Sequence
  Description of Artificial Sequence: Synthetic oligonucleotide
  Antisense strand to SEQ ID NO: 728732
aaguuaguaacaagauuac

SEQ ID NO: 728734 - RNA, 19 nt, Artificial Sequence
  Description of Artificial Sequence: Synthetic oligonucleotide
  Sense strand starting at position 974 of SEQ ID NO: 586580
uauggucucagggauuagu

SEQ ID NO: 728735 - RNA, 19 nt, Artificial Sequence
  Description of Artificial Sequence: Synthetic oligonucleotide
  Antisense strand to SEQ ID NO: 728734
acuaaucccugagaccaua

SEQ ID NO: 728736 - RNA, 19 nt, Artificial Sequence
  Description of Artificial Sequence: Synthetic oligonucleotide
  Sense strand starting at position 977 of SEQ ID NO: 586580
ggucucagggauuagucaa

SEQ ID NO: 728737 - RNA, 19 nt, Artificial Sequence
  Description of Artificial Sequence: Synthetic oligonucleotide
  Antisense strand to SEQ ID NO: 728736
uugacuaaucccugagacc

SEQ ID NO: 728738 - RNA, 19 nt, Artificial Sequence
  Description of Artificial Sequence: Synthetic oligonucleotide
  Sense strand starting at position 990 of SEQ ID NO: 586580
agucaaagcuggcuaauaa

SEQ ID NO: 728739 - RNA, 19 nt, Artificial Sequence
  Description of Artificial Sequence: Synthetic oligonucleotide
  Antisense strand to SEQ ID NO: 728738
uuauuagccagcuuugacu

SEQ ID NO: 728740 - RNA, 19 nt, Artificial Sequence
  Description of Artificial Sequence: Synthetic oligonucleotide
  Sense strand starting at position 1124 of SEQ ID NO: 586580
gcuguuaaacucuauagac

SEQ ID NO: 728741 - RNA, 19 nt, Artificial Sequence
  Description of Artificial Sequence: Synthetic oligonucleotide
  Antisense strand to SEQ ID NO: 728740
gucuauagaguuuaacagc

SEQ ID NO: 728742 - RNA, 19 nt, Artificial Sequence
  Description of Artificial Sequence: Synthetic oligonucleotide
  Sense strand starting at position 1187 of SEQ ID NO: 586580
gaagguggguccuccaguu

SEQ ID NO: 728743 - RNA, 19 nt, Artificial Sequence
  Description of Artificial Sequence: Synthetic oligonucleotide
  Antisense strand to SEQ ID NO: 728742
aacuggaggacccaccuuc

SEQ ID NO: 728744 - RNA, 19 nt, Artificial Sequence
  Description of Artificial Sequence: Synthetic oligonucleotide
  Sense strand starting at position 1197 of SEQ ID NO: 586580
ccuccaguucccgaugaaa

SEQ ID NO: 728745 - RNA, 19 nt, Artificial Sequence
  Description of Artificial Sequence: Synthetic oligonucleotide
  Antisense strand to SEQ ID NO: 728744
uuucaucgggaacuggagg

SEQ ID NO: 728746 - RNA, 19 nt, Artificial Sequence
  Description of Artificial Sequence: Synthetic oligonucleotide
  Sense strand starting at position 1243 of SEQ ID NO: 586580
cgagcaguucuggacaucu

SEQ ID NO: 728747 - RNA, 19 nt, Artificial Sequence
  Description of Artificial Sequence: Synthetic oligonucleotide
  Antisense strand to SEQ ID NO: 728746
agauguccagaacugcucg

SEQ ID NO: 728748 - RNA, 19 nt, Artificial Sequence
  Description of Artificial Sequence: Synthetic oligonucleotide
  Sense strand starting at position 1290 of SEQ ID NO: 586580
gauaaaguccuagguccuu

SEQ ID NO: 728749 - RNA, 19 nt, Artificial Sequence
  Description of Artificial Sequence: Synthetic oligonucleotide
  Antisense strand to SEQ ID NO: 728748
aaggaccuaggacuuuauc

SEQ ID NO: 728750 - RNA, 19 nt, Artificial Sequence
  Description of Artificial Sequence: Synthetic oligonucleotide
  Sense strand starting at position 1559 of SEQ ID NO: 586580
cuuugugaggacugggaga

SEQ ID NO: 728751 - RNA, 19 nt, Artificial Sequence
  Description of Artificial Sequence: Synthetic oligonucleotide
  Antisense strand to SEQ ID NO: 728750
ucucccaguccucacaaag

SEQ ID NO: 728752 - RNA, 19 nt, Artificial Sequence
  Description of Artificial Sequence: Synthetic oligonucleotide
  Sense strand starting at position 2278 of SEQ ID NO: 586580
ccucacaguuacuuaagua

SEQ ID NO: 728753 - RNA, 19 nt, Artificial Sequence
  Description of Artificial Sequence: Synthetic oligonucleotide
  Antisense strand to SEQ ID NO: 728752
uacuuaaguaacugugagg

SEQ ID NO: 728754 - RNA, 19 nt, Artificial Sequence
  Description of Artificial Sequence: Synthetic oligonucleotide
  Sense strand starting at position 2433 of SEQ ID NO: 586580
ggcgguuuacuugagagaa

SEQ ID NO: 728755 - RNA, 19 nt, Artificial Sequence
  Description of Artificial Sequence: Synthetic oligonucleotide
  Antisense strand to SEQ ID NO: 728754
uucucucaaguaaaccgcc

SEQ ID NO: 728756 - RNA, 19 nt, Artificial Sequence
  Description of Artificial Sequence: Synthetic oligonucleotide
  Sense strand starting at position 2783 of SEQ ID NO: 586580
acucuuaacuggguuauua

SEQ ID NO: 728757 - RNA, 19 nt, Artificial Sequence
  Description of Artificial Sequence: Synthetic oligonucleotide
  Antisense strand to SEQ ID NO: 728756
uaauaacccaguuaagagu

SEQ ID NO: 728758 - RNA, 19 nt, Artificial Sequence
  Description of Artificial Sequence: Synthetic oligonucleotide
  Sense strand starting at position 2785 of SEQ ID NO: 586580
ucuuaacuggguuauuaca

SEQ ID NO: 728759 - RNA, 19 nt, Artificial Sequence
  Description of Artificial Sequence: Synthetic oligonucleotide
  Antisense strand to SEQ ID NO: 728758
uguaauaacccaguuaaga

SEQ ID NO: 728760 - RNA, 19 nt, Artificial Sequence
  Description of Artificial Sequence: Synthetic oligonucleotide
  Sense strand starting at position 2934 of SEQ ID NO: 586580
caauuacaggugcgauauu

SEQ ID NO: 728761 - RNA, 19 nt, Artificial Sequence
  Description of Artificial Sequence: Synthetic oligonucleotide
  Antisense strand to SEQ ID NO: 728760
aauaucgcaccuguaauug

SEQ ID NO: 728762 - RNA, 19 nt, Artificial Sequence
  Description of Artificial Sequence: Synthetic oligonucleotide
  Sense strand starting at position 3011 of SEQ ID NO: 586580
cuaccagauuccgcaugau

SEQ ID NO: 728763 - RNA, 19 nt, Artificial Sequence
  Description of Artificial Sequence: Synthetic oligonucleotide
  Antisense strand to SEQ ID NO: 728762
aucaugcggaaucugguag

SEQ ID NO: 728764 - RNA, 19 nt, Artificial Sequence
  Description of Artificial Sequence: Synthetic oligonucleotide
  Sense strand starting at position 3014 of SEQ ID NO: 586580
ccagauuccgcaugauuga

SEQ ID NO: 728765 - RNA, 19 nt, Artificial Sequence
  Description of Artificial Sequence: Synthetic oligonucleotide
  Antisense strand to SEQ ID NO: 728764
ucaaucaugcggaaucugg

SEQ ID NO: 728766 - RNA, 19 nt, Artificial Sequence
  Description of Artificial Sequence: Synthetic oligonucleotide
  Sense strand starting at position 3019 of SEQ ID NO: 586580
uuccgcaugauugaggaau

SEQ ID NO: 728767 - RNA, 19 nt, Artificial Sequence
  Description of Artificial Sequence: Synthetic oligonucleotide
  Antisense strand to SEQ ID NO: 728766
auuccucaaucaugcggaa

SEQ ID NO: 728768 - RNA, 19 nt, Artificial Sequence
  Description of Artificial Sequence: Synthetic oligonucleotide
  Sense strand starting at position 3095 of SEQ ID NO: 586580
gagaaacuugcgugcauuu

SEQ ID NO: 728769 - RNA, 19 nt, Artificial Sequence
  Description of Artificial Sequence: Synthetic oligonucleotide
  Antisense strand to SEQ ID NO: 728768
aaaugcacgcaaguuucuc

SEQ ID NO: 728770 - RNA, 19 nt, Artificial Sequence
  Description of Artificial Sequence: Synthetic oligonucleotide
  Sense strand starting at position 3290 of SEQ ID NO: 586580
cuaagacauguuugagacu

SEQ ID NO: 728771 - RNA, 19 nt, Artificial Sequence
  Description of Artificial Sequence: Synthetic oligonucleotide
  Antisense strand to SEQ ID NO: 728770
agucucaaacaugucuuag

SEQ ID NO: 728772 - RNA, 19 nt, Artificial Sequence
  Description of Artificial Sequence: Synthetic oligonucleotide
  Sense strand starting at position 3299 of SEQ ID NO: 586580
guuugagacuggucucccu

SEQ ID NO: 728773 - RNA, 19 nt, Artificial Sequence
  Description of Artificial Sequence: Synthetic oligonucleotide
  Antisense strand to SEQ ID NO: 728772
agggagaccagucucaaac

SEQ ID NO: 728774 - RNA, 19 nt, Artificial Sequence
  Description of Artificial Sequence: Synthetic oligonucleotide
  Sense strand starting at position 3429 of SEQ ID NO: 586580
agcaguggcaccuagaaau

SEQ ID NO: 728775 - RNA, 19 nt, Artificial Sequence
  Description of Artificial Sequence: Synthetic oligonucleotide
  Antisense strand to SEQ ID NO: 728774
auuucuaggugccacugcu

SEQ ID NO: 728776 - RNA, 19 nt, Artificial Sequence
  Description of Artificial Sequence: Synthetic oligonucleotide
  Sense strand starting at position 3630 of SEQ ID NO: 586580
uuaagaaucuacucagggu

SEQ ID NO: 728777 - RNA, 19 nt, Artificial Sequence
  Description of Artificial Sequence: Synthetic oligonucleotide
  Antisense strand to SEQ ID NO: 728776
acccugaguagauucuuaa

SEQ ID NO: 728778 - RNA, 19 nt, Artificial Sequence
  Description of Artificial Sequence: Synthetic oligonucleotide
  Sense strand starting at position 3634 of SEQ ID NO: 586580
gaaucuacucagggucuua

SEQ ID NO: 728779 - RNA, 19 nt, Artificial Sequence
  Description of Artificial Sequence: Synthetic oligonucleotide
  Antisense strand to SEQ ID NO: 728778
uaagacccugaguagauuc

SEQ ID NO: 728780 - RNA, 19 nt, Artificial Sequence
  Description of Artificial Sequence: Synthetic oligonucleotide
  Sense strand starting at position 3646 of SEQ ID NO: 586580
ggucuuaaauagccugaua

SEQ ID NO: 728781 - RNA, 19 nt, Artificial Sequence
  Description of Artificial Sequence: Synthetic oligonucleotide
  Antisense strand to SEQ ID NO: 728780
uaucaggcuauuuaagacc

SEQ ID NO: 728782 - RNA, 19 nt, Artificial Sequence
  Description of Artificial Sequence: Synthetic oligonucleotide
  Sense strand starting at position 3672 of SEQ ID NO: 586580
uuccaagaguuuccuaaag

SEQ ID NO: 728783 - RNA, 19 nt, Artificial Sequence
  Description of Artificial Sequence: Synthetic oligonucleotide
  Antisense strand to SEQ ID NO: 728782
cuuuaggaaacucuuggaa

SEQ ID NO: 728784 - RNA, 19 nt, Artificial Sequence
  Description of Artificial Sequence: Synthetic oligonucleotide
  Sense strand starting at position 3948 of SEQ ID NO: 586580
guuuauggccuuuauugua

SEQ ID NO: 728785 - RNA, 19 nt, Artificial Sequence
  Description of Artificial Sequence: Synthetic oligonucleotide
  Antisense strand to SEQ ID NO: 728784
uacaauaaaggccauaaac

SEQ ID NO: 728786 - RNA, 19 nt, Artificial Sequence
  Description of Artificial Sequence: Synthetic oligonucleotide
  Sense strand starting at position 3957 of SEQ ID NO: 586580
cuuuauuguauugggaagu

SEQ ID NO: 728787 - RNA, 19 nt, Artificial Sequence
  Description of Artificial Sequence: Synthetic oligonucleotide
  Antisense strand to SEQ ID NO: 728786
acuucccaauacaauaaag

SEQ ID NO: 728788 - RNA, 19 nt, Artificial Sequence
  Description of Artificial Sequence: Synthetic oligonucleotide
  Sense strand starting at position 231 of SEQ ID NO: 586581
ccauccuuguaaguuuauu

SEQ ID NO: 728789 - RNA, 19 nt, Artificial Sequence
  Description of Artificial Sequence: Synthetic oligonucleotide
  Antisense strand to SEQ ID NO: 728788
aauaaacuuacaaggaugg

SEQ ID NO: 728790 - RNA, 19 nt, Artificial Sequence
  Description of Artificial Sequence: Synthetic oligonucleotide
  Sense strand starting at position 236 of SEQ ID NO: 586581
cuuguaaguuuauuacuga

SEQ ID NO: 728791 - RNA, 19 nt, Artificial Sequence
  Description of Artificial Sequence: Synthetic oligonucleotide
  Antisense strand to SEQ ID NO: 728790
ucaguaauaaacuuacaag

SEQ ID NO: 728792 - RNA, 19 nt, Artificial Sequence
  Description of Artificial Sequence: Synthetic oligonucleotide
  Sense strand starting at position 257 of SEQ ID NO: 586581
guacuagaaaggcggaaua

SEQ ID NO: 728793 - RNA, 19 nt, Artificial Sequence
  Description of Artificial Sequence: Synthetic oligonucleotide
  Antisense strand to SEQ ID NO: 728792
uauuccgccuuucuaguac

SEQ ID NO: 728794 - RNA, 19 nt, Artificial Sequence
  Description of Artificial Sequence: Synthetic oligonucleotide
  Sense strand starting at position 268 of SEQ ID NO: 586581
gcggaauaauaauucuguu

SEQ ID NO: 728795 - RNA, 19 nt, Artificial Sequence
  Description of Artificial Sequence: Synthetic oligonucleotide
  Antisense strand to SEQ ID NO: 728794
aacagaauuauuauuccgc

SEQ ID NO: 728796 - RNA, 19 nt, Artificial Sequence
  Description of Artificial Sequence: Synthetic oligonucleotide
  Sense strand starting at position 315 of SEQ ID NO: 586581
ccacuaugaucaguaguac

SEQ ID NO: 728797 - RNA, 19 nt, Artificial Sequence
  Description of Artificial Sequence: Synthetic oligonucleotide
  Antisense strand to SEQ ID NO: 728796
guacuacugaucauagugg

SEQ ID NO: 728798 - RNA, 19 nt, Artificial Sequence
  Description of Artificial Sequence: Synthetic oligonucleotide
  Sense strand starting at position 324 of SEQ ID NO: 586581
ucaguaguacagggaaagu

SEQ ID NO: 728799 - RNA, 19 nt, Artificial Sequence
  Description of Artificial Sequence: Synthetic oligonucleotide
  Antisense strand to SEQ ID NO: 728798
acuuucccuguacuacuga

SEQ ID NO: 728800 - RNA, 19 nt, Artificial Sequence
  Description of Artificial Sequence: Synthetic oligonucleotide
  Sense strand starting at position 549 of SEQ ID NO: 586581
uccauaaauuaugugguca

SEQ ID NO: 728801 - RNA, 19 nt, Artificial Sequence
  Description of Artificial Sequence: Synthetic oligonucleotide
  Antisense strand to SEQ ID NO: 728800
ugaccacauaauuuaugga

SEQ ID NO: 728802 - RNA, 19 nt, Artificial Sequence
  Description of Artificial Sequence: Synthetic oligonucleotide
  Sense strand starting at position 750 of SEQ ID NO: 586581
ugacauauaggaugcauaa

SEQ ID NO: 728803 - RNA, 19 nt, Artificial Sequence
  Description of Artificial Sequence: Synthetic oligonucleotide
  Antisense strand to SEQ ID NO: 728802
uuaugcauccuauauguca

SEQ ID NO: 728804 - RNA, 19 nt, Artificial Sequence
  Description of Artificial Sequence: Synthetic oligonucleotide
  Sense strand starting at position 952 of SEQ ID NO: 586581
gaaugcuugccaggaggua

SEQ ID NO: 728805 - RNA, 19 nt, Artificial Sequence
  Description of Artificial Sequence: Synthetic oligonucleotide
  Antisense strand to SEQ ID NO: 728804
uaccuccuggcaagcauuc

SEQ ID NO: 728806 - RNA, 19 nt, Artificial Sequence
  Description of Artificial Sequence: Synthetic oligonucleotide
  Sense strand starting at position 1035 of SEQ ID NO: 586581
uucuguaagcuugagagau

SEQ ID NO: 728807 - RNA, 19 nt, Artificial Sequence
  Description of Artificial Sequence: Synthetic oligonucleotide
  Antisense strand to SEQ ID NO: 728806
aucucucaagcuuacagaa

SEQ ID NO: 728808 - RNA, 19 nt, Artificial Sequence
  Description of Artificial Sequence: Synthetic oligonucleotide
  Sense strand starting at position 1039 of SEQ ID NO: 586581
guaagcuugagagauccca

SEQ ID NO: 728809 - RNA, 19 nt, Artificial Sequence
  Description of Artificial Sequence: Synthetic oligonucleotide
  Antisense strand to SEQ ID NO: 728808
ugggaucucucaagcuuac

SEQ ID NO: 728810 - RNA, 19 nt, Artificial Sequence
  Description of Artificial Sequence: Synthetic oligonucleotide
  Sense strand starting at position 1071 of SEQ ID NO: 586581
cuuguaaucuuguuacuaa

SEQ ID NO: 728811 - RNA, 19 nt, Artificial Sequence
  Description of Artificial Sequence: Synthetic oligonucleotide
  Antisense strand to SEQ ID NO: 728810
uuaguaacaagauuacaag

SEQ ID NO: 728812 - RNA, 19 nt, Artificial Sequence
  Description of Artificial Sequence: Synthetic oligonucleotide
  Sense strand starting at position 1074 of SEQ ID NO: 586581
guaaucuuguuacuaacuu

SEQ ID NO: 728813 - RNA, 19 nt, Artificial Sequence
  Description of Artificial Sequence: Synthetic oligonucleotide
  Antisense strand to SEQ ID NO: 728812
aaguuaguaacaagauuac

SEQ ID NO: 728814 - RNA, 19 nt, Artificial Sequence
  Description of Artificial Sequence: Synthetic oligonucleotide
  Sense strand starting at position 1184 of SEQ ID NO: 586581
cuggauucuuuagugcuau

SEQ ID NO: 728815 - RNA, 19 nt, Artificial Sequence
  Description of Artificial Sequence: Synthetic oligonucleotide
  Antisense strand to SEQ ID NO: 728814
auagcacuaaagaauccag

SEQ ID NO: 728816 - RNA, 19 nt, Artificial Sequence
  Description of Artificial Sequence: Synthetic oligonucleotide
  Sense strand starting at position 1200 of SEQ ID NO: 586581
uauggucucagggauuagu

SEQ ID NO: 728817 - RNA, 19 nt, Artificial Sequence
  Description of Artificial Sequence: Synthetic oligonucleotide
  Antisense strand to SEQ ID NO: 728816
acuaaucccugagaccaua

SEQ ID NO: 728818 - RNA, 19 nt, Artificial Sequence
  Description of Artificial Sequence: Synthetic oligonucleotide
  Sense strand starting at position 1203 of SEQ ID NO: 586581
ggucucagggauuagucaa

SEQ ID NO: 728819 - RNA, 19 nt, Artificial Sequence
  Description of Artificial Sequence: Synthetic oligonucleotide
  Antisense strand to SEQ ID NO: 728818
uugacuaaucccugagacc

SEQ ID NO: 728820 - RNA, 19 nt, Artificial Sequence
  Description of Artificial Sequence: Synthetic oligonucleotide
  Sense strand starting at position 1216 of SEQ ID NO: 586581
agucaaagcuggcuaauaa

SEQ ID NO: 728821 - RNA, 19 nt, Artificial Sequence
  Description of Artificial Sequence: Synthetic oligonucleotide
  Antisense strand to SEQ ID NO: 728820
uuauuagccagcuuugacu

SEQ ID NO: 728822 - RNA, 19 nt, Artificial Sequence
  Description of Artificial Sequence: Synthetic oligonucleotide
  Sense strand starting at position 1350 of SEQ ID NO: 586581
gcuguuaaacucuauagac

SEQ ID NO: 728823 - RNA, 19 nt, Artificial Sequence
  Description of Artificial Sequence: Synthetic oligonucleotide
  Antisense strand to SEQ ID NO: 728822
gucuauagaguuuaacagc

SEQ ID NO: 728824 - RNA, 19 nt, Artificial Sequence
  Description of Artificial Sequence: Synthetic oligonucleotide
  Sense strand starting at position 1413 of SEQ ID NO: 586581
gaagguggguccuccaguu

SEQ ID NO: 728825 - RNA, 19 nt, Artificial Sequence
  Description of Artificial Sequence: Synthetic oligonucleotide
  Antisense strand to SEQ ID NO: 728824
aacuggaggacccaccuuc

SEQ ID NO: 728826 - RNA, 19 nt, Artificial Sequence
  Description of Artificial Sequence: Synthetic oligonucleotide
  Sense strand starting at position 1423 of SEQ ID NO: 586581
ccuccaguucccgaugaaa

SEQ ID NO: 728827 - RNA, 19 nt, Artificial Sequence
  Description of Artificial Sequence: Synthetic oligonucleotide
  Antisense strand to SEQ ID NO: 728826
uuucaucgggaacuggagg

SEQ ID NO: 728828 - RNA, 19 nt, Artificial Sequence
  Description of Artificial Sequence: Synthetic oligonucleotide
  Sense strand starting at position 1469 of SEQ ID NO: 586581
cgagcaguucuggacaucu

SEQ ID NO: 728829 - RNA, 19 nt, Artificial Sequence
  Description of Artificial Sequence: Synthetic oligonucleotide
  Antisense strand to SEQ ID NO: 728828
agauguccagaacugcucg

SEQ ID NO: 728830 - RNA, 19 nt, Artificial Sequence
  Description of Artificial Sequence: Synthetic oligonucleotide
  Sense strand starting at position 1516 of SEQ ID NO: 586581
gauaaaguccuagguccuu

SEQ ID NO: 728831 - RNA, 19 nt, Artificial Sequence
  Description of Artificial Sequence: Synthetic oligonucleotide
  Antisense strand to SEQ ID NO: 728830
aaggaccuaggacuuuauc

SEQ ID NO: 728832 - RNA, 19 nt, Artificial Sequence
  Description of Artificial Sequence: Synthetic oligonucleotide
  Sense strand starting at position 1785 of SEQ ID NO: 586581
cuuugugaggacugggaga

SEQ ID NO: 728833 - RNA, 19 nt, Artificial Sequence
  Description of Artificial Sequence: Synthetic oligonucleotide
  Antisense strand to SEQ ID NO: 728832
ucucccaguccucacaaag

SEQ ID NO: 728834 - RNA, 19 nt, Artificial Sequence
  Description of Artificial Sequence: Synthetic oligonucleotide
  Sense strand starting at position 2504 of SEQ ID NO: 586581
ccucacaguuacuuaagua

SEQ ID NO: 728835 - RNA, 19 nt, Artificial Sequence
  Description of Artificial Sequence: Synthetic oligonucleotide
  Antisense strand to SEQ ID NO: 728834
uacuuaaguaacugugagg

SEQ ID NO: 728836 - RNA, 19 nt, Artificial Sequence
  Description of Artificial Sequence: Synthetic oligonucleotide
  Sense strand starting at position 2659 of SEQ ID NO: 586581
ggcgguuuacuugagagaa

SEQ ID NO: 728837 - RNA, 19 nt, Artificial Sequence
  Description of Artificial Sequence: Synthetic oligonucleotide
  Antisense strand to SEQ ID NO: 728836
uucucucaaguaaaccgcc

SEQ ID NO: 728838 - RNA, 19 nt, Artificial Sequence
  Description of Artificial Sequence: Synthetic oligonucleotide
  Sense strand starting at position 3009 of SEQ ID NO: 586581
acucuuaacuggguuauua

SEQ ID NO: 728839 - RNA, 19 nt, Artificial Sequence
  Description of Artificial Sequence: Synthetic oligonucleotide
  Antisense strand to SEQ ID NO: 728838
uaauaacccaguuaagagu

SEQ ID NO: 728840 - RNA, 19 nt, Artificial Sequence
  Description of Artificial Sequence: Synthetic oligonucleotide
  Sense strand starting at position 3011 of SEQ ID NO: 586581
ucuuaacuggguuauuaca

SEQ ID NO: 728841 - RNA, 19 nt, Artificial Sequence
  Description of Artificial Sequence: Synthetic oligonucleotide
  Antisense strand to SEQ ID NO: 728840
uguaauaacccaguuaaga

SEQ ID NO: 728842 - RNA, 19 nt, Artificial Sequence
  Description of Artificial Sequence: Synthetic oligonucleotide
  Sense strand starting at position 3160 of SEQ ID NO: 586581
caauuacaggugcgauauu

SEQ ID NO: 728843 - RNA, 19 nt, Artificial Sequence
  Description of Artificial Sequence: Synthetic oligonucleotide
  Antisense strand to SEQ ID NO: 728842
aauaucgcaccuguaauug

SEQ ID NO: 728844 - RNA, 19 nt, Artificial Sequence
  Description of Artificial Sequence: Synthetic oligonucleotide
  Sense strand starting at position 3237 of SEQ ID NO: 586581
cuaccagauuccgcaugau

SEQ ID NO: 728845 - RNA, 19 nt, Artificial Sequence
  Description of Artificial Sequence: Synthetic oligonucleotide
  Antisense strand to SEQ ID NO: 728844
aucaugcggaaucugguag

SEQ ID NO: 728846 - RNA, 19 nt, Artificial Sequence
  Description of Artificial Sequence: Synthetic oligonucleotide
  Sense strand starting at position 3240 of SEQ ID NO: 586581
ccagauuccgcaugauuga

SEQ ID NO: 728847 - RNA, 19 nt, Artificial Sequence
  Description of Artificial Sequence: Synthetic oligonucleotide
  Antisense strand to SEQ ID NO: 728846
ucaaucaugcggaaucugg

SEQ ID NO: 728848 - RNA, 19 nt, Artificial Sequence
  Description of Artificial Sequence: Synthetic oligonucleotide
  Sense strand starting at position 3245 of SEQ ID NO: 586581
uuccgcaugauugaggaau

SEQ ID NO: 728849 - RNA, 19 nt, Artificial Sequence
  Description of Artificial Sequence: Synthetic oligonucleotide
  Antisense strand to SEQ ID NO: 728848
auuccucaaucaugcggaa

SEQ ID NO: 728850 - RNA, 19 nt, Artificial Sequence
  Description of Artificial Sequence: Synthetic oligonucleotide
  Sense strand starting at position 3321 of SEQ ID NO: 586581
gagaaacuugcgugcauuu

SEQ ID NO: 728851 - RNA, 19 nt, Artificial Sequence
  Description of Artificial Sequence: Synthetic oligonucleotide
  Antisense strand to SEQ ID NO: 728850
aaaugcacgcaaguuucuc

SEQ ID NO: 728852 - RNA, 19 nt, Artificial Sequence
  Description of Artificial Sequence: Synthetic oligonucleotide
  Sense strand starting at position 3347 of SEQ ID NO: 586581
guuccuuucucagcagaua

SEQ ID NO: 728853 - RNA, 19 nt, Artificial Sequence
  Description of Artificial Sequence: Synthetic oligonucleotide
  Antisense strand to SEQ ID NO: 728852
uaucugcugagaaaggaac

SEQ ID NO: 728854 - RNA, 19 nt, Artificial Sequence
  Description of Artificial Sequence: Synthetic oligonucleotide
  Sense strand starting at position 3516 of SEQ ID NO: 586581
cuaagacauguuugagacu

SEQ ID NO: 728855 - RNA, 19 nt, Artificial Sequence
  Description of Artificial Sequence: Synthetic oligonucleotide
  Antisense strand to SEQ ID NO: 728854
agucucaaacaugucuuag

SEQ ID NO: 728856 - RNA, 19 nt, Artificial Sequence
  Description of Artificial Sequence: Synthetic oligonucleotide
  Sense strand starting at position 3525 of SEQ ID NO: 586581
guuugagacuggucucccu

SEQ ID NO: 728857 - RNA, 19 nt, Artificial Sequence
  Description of Artificial Sequence: Synthetic oligonucleotide
  Antisense strand to SEQ ID NO: 728856
agggagaccagucucaaac

SEQ ID NO: 728858 - RNA, 19 nt, Artificial Sequence
  Description of Artificial Sequence: Synthetic oligonucleotide
  Sense strand starting at position 3655 of SEQ ID NO: 586581
agcaguggcaccuagaaau

SEQ ID NO: 728859 - RNA, 19 nt, Artificial Sequence
  Description of Artificial Sequence: Synthetic oligonucleotide
  Antisense strand to SEQ ID NO: 728858
auuucuaggugccacugcu

SEQ ID NO: 728860 - RNA, 19 nt, Artificial Sequence
  Description of Artificial Sequence: Synthetic oligonucleotide
  Sense strand starting at position 3856 of SEQ ID NO: 586581
uuaagaaucuacucagggu

SEQ ID NO: 728861 - RNA, 19 nt, Artificial Sequence
  Description of Artificial Sequence: Synthetic oligonucleotide
  Antisense strand to SEQ ID NO: 728860
acccugaguagauucuuaa

SEQ ID NO: 728862 - RNA, 19 nt, Artificial Sequence
  Description of Artificial Sequence: Synthetic oligonucleotide
  Sense strand starting at position 3860 of SEQ ID NO: 586581
gaaucuacucagggucuua

SEQ ID NO: 728863 - RNA, 19 nt, Artificial Sequence
  Description of Artificial Sequence: Synthetic oligonucleotide
  Antisense strand to SEQ ID NO: 728862
uaagacccugaguagauuc

SEQ ID NO: 728864 - RNA, 19 nt, Artificial Sequence
  Description of Artificial Sequence: Synthetic oligonucleotide
  Sense strand starting at position 3872 of SEQ ID NO: 586581
ggucuuaaauagccugaua

SEQ ID NO: 728865 - RNA, 19 nt, Artificial Sequence
  Description of Artificial Sequence: Synthetic oligonucleotide
  Antisense strand to SEQ ID NO: 728864
uaucaggcuauuuaagacc

SEQ ID NO: 728866 - RNA, 19 nt, Artificial Sequence
  Description of Artificial Sequence: Synthetic oligonucleotide
  Sense strand starting at position 3898 of SEQ ID NO: 586581
uuccaagaguuuccuaaag

SEQ ID NO: 728867 - RNA, 19 nt, Artificial Sequence
  Description of Artificial Sequence: Synthetic oligonucleotide
  Antisense strand to SEQ ID NO: 728866
cuuuaggaaacucuuggaa

SEQ ID NO: 728868 - RNA, 19 nt, Artificial Sequence
  Description of Artificial Sequence: Synthetic oligonucleotide
  Sense strand starting at position 23 of SEQ ID NO: 586582
uccagagacuccgcuaauc

SEQ ID NO: 728869 - RNA, 19 nt, Artificial Sequence
  Description of Artificial Sequence: Synthetic oligonucleotide
  Antisense strand to SEQ ID NO: 728868
gauuagcggagucucugga

SEQ ID NO: 728870 - RNA, 19 nt, Artificial Sequence
  Description of Artificial Sequence: Synthetic oligonucleotide
  Sense strand starting at position 149 of SEQ ID NO: 586582
ggcuguuguucccugagac

SEQ ID NO: 728871 - RNA, 19 nt, Artificial Sequence
  Description of Artificial Sequence: Synthetic oligonucleotide
  Antisense strand to SEQ ID NO: 728870
gucucagggaacaacagcc

SEQ ID NO: 728872 - RNA, 19 nt, Artificial Sequence
  Description of Artificial Sequence: Synthetic oligonucleotide
  Sense strand starting at position 390 of SEQ ID NO: 586582
ggcauagccuguccaaguu

SEQ ID NO: 728873 - RNA, 19 nt, Artificial Sequence
  Description of Artificial Sequence: Synthetic oligonucleotide
  Antisense strand to SEQ ID NO: 728872
aacuuggacaggcuaugcc

SEQ ID NO: 728874 - RNA, 19 nt, Artificial Sequence
  Description of Artificial Sequence: Synthetic oligonucleotide
  Sense strand starting at position 412 of SEQ ID NO: 586582
gccagagagcaauaacacu

SEQ ID NO: 728875 - RNA, 19 nt, Artificial Sequence
  Description of Artificial Sequence: Synthetic oligonucleotide
  Antisense strand to SEQ ID NO: 728874
aguguuauugcucucuggc

SEQ ID NO: 728876 - RNA, 19 nt, Artificial Sequence
  Description of Artificial Sequence: Synthetic oligonucleotide
  Sense strand starting at position 630 of SEQ ID NO: 586582
agaagugcaaucuggagaa

SEQ ID NO: 728877 - RNA, 19 nt, Artificial Sequence
  Description of Artificial Sequence: Synthetic oligonucleotide
  Antisense strand to SEQ ID NO: 728876
uucuccagauugcacuucu

SEQ ID NO: 728878 - RNA, 19 nt, Artificial Sequence
  Description of Artificial Sequence: Synthetic oligonucleotide
  Sense strand starting at position 669 of SEQ ID NO: 586582
cggccugagcucugaaaca

SEQ ID NO: 728879 - RNA, 19 nt, Artificial Sequence
  Description of Artificial Sequence: Synthetic oligonucleotide
  Antisense strand to SEQ ID NO: 728878
uguuucagagcucaggccg

SEQ ID NO: 728880 - RNA, 19 nt, Artificial Sequence
  Description of Artificial Sequence: Synthetic oligonucleotide
  Sense strand starting at position 797 of SEQ ID NO: 586582
cuggauuucuaggacagga

SEQ ID NO: 728881 - RNA, 19 nt, Artificial Sequence
  Description of Artificial Sequence: Synthetic oligonucleotide
  Antisense strand to SEQ ID NO: 728880
uccuguccuagaaauccag

SEQ ID NO: 728882 - RNA, 19 nt, Artificial Sequence
  Description of Artificial Sequence: Synthetic oligonucleotide
  Sense strand starting at position 829 of SEQ ID NO: 586582
uugccuaagccugagucaa

SEQ ID NO: 728883 - RNA, 19 nt, Artificial Sequence
  Description of Artificial Sequence: Synthetic oligonucleotide
  Antisense strand to SEQ ID NO: 728882
uugacucaggcuuaggcaa

SEQ ID NO: 728884 - RNA, 19 nt, Artificial Sequence
  Description of Artificial Sequence: Synthetic oligonucleotide
  Sense strand starting at position 831 of SEQ ID NO: 586582
gccuaagccugagucaauu

SEQ ID NO: 728885 - RNA, 19 nt, Artificial Sequence
  Description of Artificial Sequence: Synthetic oligonucleotide
  Antisense strand to SEQ ID NO: 728884
aauugacucaggcuuaggc

SEQ ID NO: 728886 - RNA, 19 nt, Artificial Sequence
  Description of Artificial Sequence: Synthetic oligonucleotide
  Sense strand starting at position 1101 of SEQ ID NO: 586582
ugcgauacaauccagagau

SEQ ID NO: 728887 - RNA, 19 nt, Artificial Sequence
  Description of Artificial Sequence: Synthetic oligonucleotide
  Antisense strand to SEQ ID NO: 728886
aucucuggauuguaucgca

SEQ ID NO: 728888 - RNA, 19 nt, Artificial Sequence
  Description of Artificial Sequence: Synthetic oligonucleotide
  Sense strand starting at position 1223 of SEQ ID NO: 586582
gcgucuucggagagaccuu

SEQ ID NO: 728889 - RNA, 19 nt, Artificial Sequence
  Description of Artificial Sequence: Synthetic oligonucleotide
  Antisense strand to SEQ ID NO: 728888
aaggucucuccgaagacgc

SEQ ID NO: 728890 - RNA, 19 nt, Artificial Sequence
  Description of Artificial Sequence: Synthetic oligonucleotide
  Sense strand starting at position 1291 of SEQ ID NO: 586582
gggagaguguccucaccua

SEQ ID NO: 728891 - RNA, 19 nt, Artificial Sequence
  Description of Artificial Sequence: Synthetic oligonucleotide
  Antisense strand to SEQ ID NO: 728890
uaggugaggacacucuccc

SEQ ID NO: 728892 - RNA, 19 nt, Artificial Sequence
  Description of Artificial Sequence: Synthetic oligonucleotide
  Sense strand starting at position 1466 of SEQ ID NO: 586582
gggugucgucgggugugua

SEQ ID NO: 728893 - RNA, 19 nt, Artificial Sequence
  Description of Artificial Sequence: Synthetic oligonucleotide
  Antisense strand to SEQ ID NO: 728892
uacacacccgacgacaccc

SEQ ID NO: 728894 - RNA, 19 nt, Artificial Sequence
  Description of Artificial Sequence: Synthetic oligonucleotide
  Sense strand starting at position 1478 of SEQ ID NO: 586582
guguguagcgagguccaau

SEQ ID NO: 728895 - RNA, 19 nt, Artificial Sequence
  Description of Artificial Sequence: Synthetic oligonucleotide
  Antisense strand to SEQ ID NO: 728894
auuggaccucgcuacacac

SEQ ID NO: 728896 - RNA, 19 nt, Artificial Sequence
  Description of Artificial Sequence: Synthetic oligonucleotide
  Sense strand starting at position 1619 of SEQ ID NO: 586582
guggcguuucgggaaguua

SEQ ID NO: 728897 - RNA, 19 nt, Artificial Sequence
  Description of Artificial Sequence: Synthetic oligonucleotide
  Antisense strand to SEQ ID NO: 728896
uaacuucccgaaacgccac

SEQ ID NO: 728898 - RNA, 19 nt, Artificial Sequence
  Description of Artificial Sequence: Synthetic oligonucleotide
  Sense strand starting at position 1621 of SEQ ID NO: 586582
ggcguuucgggaaguuaga

SEQ ID NO: 728899 - RNA, 19 nt, Artificial Sequence
  Description of Artificial Sequence: Synthetic oligonucleotide
  Antisense strand to SEQ ID NO: 728898
ucuaacuucccgaaacgcc

SEQ ID NO: 728900 - RNA, 19 nt, Artificial Sequence
  Description of Artificial Sequence: Synthetic oligonucleotide
  Sense strand starting at position 2475 of SEQ ID NO: 586582
guaaucugccagggaacga

SEQ ID NO: 728901 - RNA, 19 nt, Artificial Sequence
  Description of Artificial Sequence: Synthetic oligonucleotide
  Antisense strand to SEQ ID NO: 728900
ucguucccuggcagauuac

SEQ ID NO: 728902 - RNA, 19 nt, Artificial Sequence
  Description of Artificial Sequence: Synthetic oligonucleotide
  Sense strand starting at position 2536 of SEQ ID NO: 586582
agucuugccucguugugga

SEQ ID NO: 728903 - RNA, 19 nt, Artificial Sequence
  Description of Artificial Sequence: Synthetic oligonucleotide
  Antisense strand to SEQ ID NO: 728902
uccacaacgaggcaagacu

SEQ ID NO: 728904 - RNA, 19 nt, Artificial Sequence
  Description of Artificial Sequence: Synthetic oligonucleotide
  Sense strand starting at position 2553 of SEQ ID NO: 586582
gagguacuuuaccuuguua

SEQ ID NO: 728905 - RNA, 19 nt, Artificial Sequence
  Description of Artificial Sequence: Synthetic oligonucleotide
  Antisense strand to SEQ ID NO: 728904
uaacaagguaaaguaccuc

SEQ ID NO: 728906 - RNA, 19 nt, Artificial Sequence
  Description of Artificial Sequence: Synthetic oligonucleotide
  Sense strand starting at position 2555 of SEQ ID NO: 586582
gguacuuuaccuuguuaug

SEQ ID NO: 728907 - RNA, 19 nt, Artificial Sequence
  Description of Artificial Sequence: Synthetic oligonucleotide
  Antisense strand to SEQ ID NO: 728906
cauaacaagguaaaguacc

SEQ ID NO: 728908 - RNA, 19 nt, Artificial Sequence
  Description of Artificial Sequence: Synthetic oligonucleotide
  Sense strand starting at position 2596 of SEQ ID NO: 586582
ggcagagcaguguacucaa

SEQ ID NO: 728909 - RNA, 19 nt, Artificial Sequence
  Description of Artificial Sequence: Synthetic oligonucleotide
  Antisense strand to SEQ ID NO: 728908
uugaguacacugcucugcc

SEQ ID NO: 728910 - RNA, 19 nt, Artificial Sequence
  Description of Artificial Sequence: Synthetic oligonucleotide
  Sense strand starting at position 2599 of SEQ ID NO: 586582
agagcaguguacucaaacu

SEQ ID NO: 728911 - RNA, 19 nt, Artificial Sequence
  Description of Artificial Sequence: Synthetic oligonucleotide
  Antisense strand to SEQ ID NO: 728910
aguuugaguacacugcucu

SEQ ID NO: 728912 - RNA, 19 nt, Artificial Sequence
  Description of Artificial Sequence: Synthetic oligonucleotide
  Sense strand starting at position 2658 of SEQ ID NO: 586582
uaucauugugaacggugau

SEQ ID NO: 728913 - RNA, 19 nt, Artificial Sequence
  Description of Artificial Sequence: Synthetic oligonucleotide
  Antisense strand to SEQ ID NO: 728912
aucaccguucacaaugaua

SEQ ID NO: 728914 - RNA, 19 nt, Artificial Sequence
  Description of Artificial Sequence: Synthetic oligonucleotide
  Sense strand starting at position 2659 of SEQ ID NO: 586582
aucauugugaacggugauu

SEQ ID NO: 728915 - RNA, 19 nt, Artificial Sequence
  Description of Artificial Sequence: Synthetic oligonucleotide
  Antisense strand to SEQ ID NO: 728914
aaucaccguucacaaugau

SEQ ID NO: 728916 - RNA, 19 nt, Artificial Sequence
  Description of Artificial Sequence: Synthetic oligonucleotide
  Sense strand starting at position 2661 of SEQ ID NO: 586582
cauugugaacggugauuga

SEQ ID NO: 728917 - RNA, 19 nt, Artificial Sequence
  Description of Artificial Sequence: Synthetic oligonucleotide
  Antisense strand to SEQ ID NO: 728916
ucaaucaccguucacaaug

SEQ ID NO: 728918 - RNA, 19 nt, Artificial Sequence
  Description of Artificial Sequence: Synthetic oligonucleotide
  Sense strand starting at position 2664 of SEQ ID NO: 586582
ugugaacggugauugaaca

SEQ ID NO: 728919 - RNA, 19 nt, Artificial Sequence
  Description of Artificial Sequence: Synthetic oligonucleotide
  Antisense strand to SEQ ID NO: 728918
uguucaaucaccguucaca

SEQ ID NO: 728920 - RNA, 19 nt, Artificial Sequence
  Description of Artificial Sequence: Synthetic oligonucleotide
  Sense strand starting at position 2800 of SEQ ID NO: 586582
gacuuacaaugguugacuu

SEQ ID NO: 728921 - RNA, 19 nt, Artificial Sequence
  Description of Artificial Sequence: Synthetic oligonucleotide
  Antisense strand to SEQ ID NO: 728920
aagucaaccauuguaaguc

SEQ ID NO: 728922 - RNA, 19 nt, Artificial Sequence
  Description of Artificial Sequence: Synthetic oligonucleotide
  Sense strand starting at position 2801 of SEQ ID NO: 586582
acuuacaaugguugacuua

SEQ ID NO: 728923 - RNA, 19 nt, Artificial Sequence
  Description of Artificial Sequence: Synthetic oligonucleotide
  Antisense strand to SEQ ID NO: 728922
uaagucaaccauuguaagu

SEQ ID NO: 728924 - RNA, 19 nt, Artificial Sequence
  Description of Artificial Sequence: Synthetic oligonucleotide
  Sense strand starting at position 2804 of SEQ ID NO: 586582
uacaaugguugacuuaaga

SEQ ID NO: 728925 - RNA, 19 nt, Artificial Sequence
  Description of Artificial Sequence: Synthetic oligonucleotide
  Antisense strand to SEQ ID NO: 728924
ucuuaagucaaccauugua

SEQ ID NO: 728926 - RNA, 19 nt, Artificial Sequence
  Description of Artificial Sequence: Synthetic oligonucleotide
  Sense strand starting at position 2861 of SEQ ID NO: 586582
ccaucuuuaagucgagaag

SEQ ID NO: 728927 - RNA, 19 nt, Artificial Sequence
  Description of Artificial Sequence: Synthetic oligonucleotide
  Antisense strand to SEQ ID NO: 728926
cuucucgacuuaaagaugg

SEQ ID NO: 728928 - RNA, 19 nt, Artificial Sequence
  Description of Artificial Sequence: Synthetic oligonucleotide
  Sense strand starting at position 2873 of SEQ ID NO: 586582
cgagaagaaucuggaaauu

SEQ ID NO: 728929 - RNA, 19 nt, Artificial Sequence
  Description of Artificial Sequence: Synthetic oligonucleotide
  Antisense strand to SEQ ID NO: 728928
aauuuccagauucuucucg

SEQ ID NO: 728930 - RNA, 19 nt, Artificial Sequence
  Description of Artificial Sequence: Synthetic oligonucleotide
  Sense strand starting at position 3233 of SEQ ID NO: 586582
gucugacaagucugaggga

SEQ ID NO: 728931 - RNA, 19 nt, Artificial Sequence
  Description of Artificial Sequence: Synthetic oligonucleotide
  Antisense strand to SEQ ID NO: 728930
ucccucagacuugucagac

SEQ ID NO: 728932 - RNA, 19 nt, Artificial Sequence
  Description of Artificial Sequence: Synthetic oligonucleotide
  Sense strand starting at position 3234 of SEQ ID NO: 586582
ucugacaagucugagggaa

SEQ ID NO: 728933 - RNA, 19 nt, Artificial Sequence
  Description of Artificial Sequence: Synthetic oligonucleotide
  Antisense strand to SEQ ID NO: 728932
uucccucagacuugucaga

SEQ ID NO: 728934 - RNA, 19 nt, Artificial Sequence
  Description of Artificial Sequence: Synthetic oligonucleotide
  Sense strand starting at position 3236 of SEQ ID NO: 586582
ugacaagucugagggaaca

SEQ ID NO: 728935 - RNA, 19 nt, Artificial Sequence
  Description of Artificial Sequence: Synthetic oligonucleotide
  Antisense strand to SEQ ID NO: 728934
uguucccucagacuuguca

SEQ ID NO: 728936 - RNA, 19 nt, Artificial Sequence
  Description of Artificial Sequence: Synthetic oligonucleotide
  Sense strand starting at position 3257 of SEQ ID NO: 586582
ugguaaacacugcgugauu

SEQ ID NO: 728937 - RNA, 19 nt, Artificial Sequence
  Description of Artificial Sequence: Synthetic oligonucleotide
  Antisense strand to SEQ ID NO: 728936
aaucacgcaguguuuacca

SEQ ID NO: 728938 - RNA, 19 nt, Artificial Sequence
  Description of Artificial Sequence: Synthetic oligonucleotide
  Sense strand starting at position 3259 of SEQ ID NO: 586582
guaaacacugcgugauuga

SEQ ID NO: 728939 - RNA, 19 nt, Artificial Sequence
  Description of Artificial Sequence: Synthetic oligonucleotide
  Antisense strand to SEQ ID NO: 728938
ucaaucacgcaguguuuac

SEQ ID NO: 728940 - RNA, 19 nt, Artificial Sequence
  Description of Artificial Sequence: Synthetic oligonucleotide
  Sense strand starting at position 3270 of SEQ ID NO: 586582
gugauugaggagugcuaag

SEQ ID NO: 728941 - RNA, 19 nt, Artificial Sequence
  Description of Artificial Sequence: Synthetic oligonucleotide
  Antisense strand to SEQ ID NO: 728940
cuuagcacuccucaaucac

SEQ ID NO: 728942 - RNA, 19 nt, Artificial Sequence
  Description of Artificial Sequence: Synthetic oligonucleotide
  Sense strand starting at position 3346 of SEQ ID NO: 586582
acaguaagaucuuggacuu

SEQ ID NO: 728943 - RNA, 19 nt, Artificial Sequence
  Description of Artificial Sequence: Synthetic oligonucleotide
  Antisense strand to SEQ ID NO: 728942
aaguccaagaucuuacugu

SEQ ID NO: 728944 - RNA, 19 nt, Artificial Sequence
  Description of Artificial Sequence: Synthetic oligonucleotide
  Sense strand starting at position 3347 of SEQ ID NO: 586582
caguaagaucuuggacuuu

SEQ ID NO: 728945 - RNA, 19 nt, Artificial Sequence
  Description of Artificial Sequence: Synthetic oligonucleotide
  Antisense strand to SEQ ID NO: 728944
aaaguccaagaucuuacug

SEQ ID NO: 728946 - RNA, 19 nt, Artificial Sequence
  Description of Artificial Sequence: Synthetic oligonucleotide
  Sense strand starting at position 3963 of SEQ ID NO: 586582
gagguuugcacugaagcga

SEQ ID NO: 728947 - RNA, 19 nt, Artificial Sequence
  Description of Artificial Sequence: Synthetic oligonucleotide
  Antisense strand to SEQ ID NO: 728946
ucgcuucagugcaaaccuc

SEQ ID NO: 728948 - RNA, 19 nt, Artificial Sequence
  Description of Artificial Sequence: Synthetic oligonucleotide
  Sense strand starting at position 15 of SEQ ID NO: 586583
ggguaccaucaagguaaua

SEQ ID NO: 728949 - RNA, 19 nt, Artificial Sequence
  Description of Artificial Sequence: Synthetic oligonucleotide
  Antisense strand to SEQ ID NO: 728948
uauuaccuugaugguaccc

SEQ ID NO: 728950 - RNA, 19 nt, Artificial Sequence
  Description of Artificial Sequence: Synthetic oligonucleotide
  Sense strand starting at position 53 of SEQ ID NO: 586583
cuuuaagucucagaguuug

SEQ ID NO: 728951 - RNA, 19 nt, Artificial Sequence
  Description of Artificial Sequence: Synthetic oligonucleotide
  Antisense strand to SEQ ID NO: 728950
caaacucugagacuuaaag

SEQ ID NO: 728952 - RNA, 19 nt, Artificial Sequence
  Description of Artificial Sequence: Synthetic oligonucleotide
  Sense strand starting at position 65 of SEQ ID NO: 586583
gaguuugucaagcgacaca

SEQ ID NO: 728953 - RNA, 19 nt, Artificial Sequence
  Description of Artificial Sequence: Synthetic oligonucleotide
  Antisense strand to SEQ ID NO: 728952
ugugucgcuugacaaacuc

SEQ ID NO: 728954 - RNA, 19 nt, Artificial Sequence
  Description of Artificial Sequence: Synthetic oligonucleotide
  Sense strand starting at position 163 of SEQ ID NO: 586583
aguaaacauugggaacaaa

SEQ ID NO: 728955 - RNA, 19 nt, Artificial Sequence
  Description of Artificial Sequence: Synthetic oligonucleotide
  Antisense strand to SEQ ID NO: 728954
uuuguucccaauguuuacu

SEQ ID NO: 728956 - RNA, 19 nt, Artificial Sequence
  Description of Artificial Sequence: Synthetic oligonucleotide
  Sense strand starting at position 316 of SEQ ID NO: 586583
cagggcauguucugacaga

SEQ ID NO: 728957 - RNA, 19 nt, Artificial Sequence
  Description of Artificial Sequence: Synthetic oligonucleotide
  Antisense strand to SEQ ID NO: 728956
ucugucagaacaugcccug

SEQ ID NO: 728958 - RNA, 19 nt, Artificial Sequence
  Description of Artificial Sequence: Synthetic oligonucleotide
  Sense strand starting at position 666 of SEQ ID NO: 586583
ggucauuaaucugcccuaa

SEQ ID NO: 728959 - RNA, 19 nt, Artificial Sequence
  Description of Artificial Sequence: Synthetic oligonucleotide
  Antisense strand to SEQ ID NO: 728958
uuagggcagauuaaugacc

SEQ ID NO: 728960 - RNA, 19 nt, Artificial Sequence
  Description of Artificial Sequence: Synthetic oligonucleotide
  Sense strand starting at position 677 of SEQ ID NO: 586583
ugcccuaaggccuagagaa

SEQ ID NO: 728961 - RNA, 19 nt, Artificial Sequence
  Description of Artificial Sequence: Synthetic oligonucleotide
  Antisense strand to SEQ ID NO: 728960
uucucuaggccuuagggca

SEQ ID NO: 728962 - RNA, 19 nt, Artificial Sequence
  Description of Artificial Sequence: Synthetic oligonucleotide
  Sense strand starting at position 689 of SEQ ID NO: 586583
uagagaaacuccuaggcgu

SEQ ID NO: 728963 - RNA, 19 nt, Artificial Sequence
  Description of Artificial Sequence: Synthetic oligonucleotide
  Antisense strand to SEQ ID NO: 728962
acgccuaggaguuucucua

SEQ ID NO: 728964 - RNA, 19 nt, Artificial Sequence
  Description of Artificial Sequence: Synthetic oligonucleotide
  Sense strand starting at position 716 of SEQ ID NO: 586583
gguguucuccuagaagacu

SEQ ID NO: 728965 - RNA, 19 nt, Artificial Sequence
  Description of Artificial Sequence: Synthetic oligonucleotide
  Antisense strand to SEQ ID NO: 728964
agucuucuaggagaacacc

SEQ ID NO: 728966 - RNA, 19 nt, Artificial Sequence
  Description of Artificial Sequence: Synthetic oligonucleotide
  Sense strand starting at position 739 of SEQ ID NO: 586583
ugacaacuguaucaaaggu

SEQ ID NO: 728967 - RNA, 19 nt, Artificial Sequence
  Description of Artificial Sequence: Synthetic oligonucleotide
  Antisense strand to SEQ ID NO: 728966
accuuugauacaguuguca

SEQ ID NO: 728968 - RNA, 19 nt, Artificial Sequence
  Description of Artificial Sequence: Synthetic oligonucleotide
  Sense strand starting at position 827 of SEQ ID NO: 586583
gcccuucuucuguauagca

SEQ ID NO: 728969 - RNA, 19 nt, Artificial Sequence
  Description of Artificial Sequence: Synthetic oligonucleotide
  Antisense strand to SEQ ID NO: 728968
ugcuauacagaagaagggc

SEQ ID NO: 728970 - RNA, 19 nt, Artificial Sequence
  Description of Artificial Sequence: Synthetic oligonucleotide
  Sense strand starting at position 856 of SEQ ID NO: 586583
agaagaaaugcuggagucu

SEQ ID NO: 728971 - RNA, 19 nt, Artificial Sequence
  Description of Artificial Sequence: Synthetic oligonucleotide
  Antisense strand to SEQ ID NO: 728970
agacuccagcauuucuucu

SEQ ID NO: 728972 - RNA, 19 nt, Artificial Sequence
  Description of Artificial Sequence: Synthetic oligonucleotide
  Sense strand starting at position 957 of SEQ ID NO: 586583
guauccugguguuuaggga

SEQ ID NO: 728973 - RNA, 19 nt, Artificial Sequence
  Description of Artificial Sequence: Synthetic oligonucleotide
  Antisense strand to SEQ ID NO: 728972
ucccuaaacaccaggauac

SEQ ID NO: 728974 - RNA, 19 nt, Artificial Sequence
  Description of Artificial Sequence: Synthetic oligonucleotide
  Sense strand starting at position 958 of SEQ ID NO: 586583
uauccugguguuuagggaa

SEQ ID NO: 728975 - RNA, 19 nt, Artificial Sequence
  Description of Artificial Sequence: Synthetic oligonucleotide
  Antisense strand to SEQ ID NO: 728974
uucccuaaacaccaggaua

SEQ ID NO: 728976 - RNA, 19 nt, Artificial Sequence
  Description of Artificial Sequence: Synthetic oligonucleotide
  Sense strand starting at position 961 of SEQ ID NO: 586583
ccugguguuuagggaaacu

SEQ ID NO: 728977 - RNA, 19 nt, Artificial Sequence
  Description of Artificial Sequence: Synthetic oligonucleotide
  Antisense strand to SEQ ID NO: 728976
aguuucccuaaacaccagg

SEQ ID NO: 728978 - RNA, 19 nt, Artificial Sequence
  Description of Artificial Sequence: Synthetic oligonucleotide
  Sense strand starting at position 1257 of SEQ ID NO: 586583
acagaauaauucgcgccuu

SEQ ID NO: 728979 - RNA, 19 nt, Artificial Sequence
  Description of Artificial Sequence: Synthetic oligonucleotide
  Antisense strand to SEQ ID NO: 728978
aaggcgcgaauuauucugu

SEQ ID NO: 728980 - RNA, 19 nt, Artificial Sequence
  Description of Artificial Sequence: Synthetic oligonucleotide
  Sense strand starting at position 2507 of SEQ ID NO: 586583
cacuaaggacuuugagguu

SEQ ID NO: 728981 - RNA, 19 nt, Artificial Sequence
  Description of Artificial Sequence: Synthetic oligonucleotide
  Antisense strand to SEQ ID NO: 728980
aaccucaaaguccuuagug

SEQ ID NO: 728982 - RNA, 19 nt, Artificial Sequence
  Description of Artificial Sequence: Synthetic oligonucleotide
  Sense strand starting at position 2671 of SEQ ID NO: 586583
acaaguauuggguacccau

SEQ ID NO: 728983 - RNA, 19 nt, Artificial Sequence
  Description of Artificial Sequence: Synthetic oligonucleotide
  Antisense strand to SEQ ID NO: 728982
auggguacccaauacuugu

SEQ ID NO: 728984 - RNA, 19 nt, Artificial Sequence
  Description of Artificial Sequence: Synthetic oligonucleotide
  Sense strand starting at position 2706 of SEQ ID NO: 586583
aaaucuauaguucggaaag

SEQ ID NO: 728985 - RNA, 19 nt, Artificial Sequence
  Description of Artificial Sequence: Synthetic oligonucleotide
  Antisense strand to SEQ ID NO: 728984
cuuuccgaacuauagauuu

SEQ ID NO: 728986 - RNA, 19 nt, Artificial Sequence
  Description of Artificial Sequence: Synthetic oligonucleotide
  Sense strand starting at position 2708 of SEQ ID NO: 586583
aucuauaguucggaaagga

SEQ ID NO: 728987 - RNA, 19 nt, Artificial Sequence
  Description of Artificial Sequence: Synthetic oligonucleotide
  Antisense strand to SEQ ID NO: 728986
uccuuuccgaacuauagau

SEQ ID NO: 728988 - RNA, 19 nt, Artificial Sequence
  Description of Artificial Sequence: Synthetic oligonucleotide
  Sense strand starting at position 2776 of SEQ ID NO: 586583
ccuaucuccggcugagaaa

SEQ ID NO: 728989 - RNA, 19 nt, Artificial Sequence
  Description of Artificial Sequence: Synthetic oligonucleotide
  Antisense strand to SEQ ID NO: 728988
uuucucagccggagauagg

SEQ ID NO: 728990 - RNA, 19 nt, Artificial Sequence
  Description of Artificial Sequence: Synthetic oligonucleotide
  Sense strand starting at position 2823 of SEQ ID NO: 586583
cagagagcgguuuguuauu

SEQ ID NO: 728991 - RNA, 19 nt, Artificial Sequence
  Description of Artificial Sequence: Synthetic oligonucleotide
  Antisense strand to SEQ ID NO: 728990
aauaacaaaccgcucucug

SEQ ID NO: 728992 - RNA, 19 nt, Artificial Sequence
  Description of Artificial Sequence: Synthetic oligonucleotide
  Sense strand starting at position 2828 of SEQ ID NO: 586583
agcgguuuguuauuuggga

SEQ ID NO: 728993 - RNA, 19 nt, Artificial Sequence
  Description of Artificial Sequence: Synthetic oligonucleotide
  Antisense strand to SEQ ID NO: 728992
ucccaaauaacaaaccgcu

SEQ ID NO: 728994 - RNA, 19 nt, Artificial Sequence
  Description of Artificial Sequence: Synthetic oligonucleotide
  Sense strand starting at position 2832 of SEQ ID NO: 586583
guuuguuauuugggagggu

SEQ ID NO: 728995 - RNA, 19 nt, Artificial Sequence
  Description of Artificial Sequence: Synthetic oligonucleotide
  Antisense strand to SEQ ID NO: 728994
acccucccaaauaacaaac

SEQ ID NO: 728996 - RNA, 19 nt, Artificial Sequence
  Description of Artificial Sequence: Synthetic oligonucleotide
  Sense strand starting at position 2873 of SEQ ID NO: 586583
ggaucauaagccuggcuua

SEQ ID NO: 728997 - RNA, 19 nt, Artificial Sequence
  Description of Artificial Sequence: Synthetic oligonucleotide
  Antisense strand to SEQ ID NO: 728996
uaagccaggcuuaugaucc

SEQ ID NO: 728998 - RNA, 19 nt, Artificial Sequence
  Description of Artificial Sequence: Synthetic oligonucleotide
  Sense strand starting at position 2886 of SEQ ID NO: 586583
ggcuuagacaagugugcau

SEQ ID NO: 728999 - RNA, 19 nt, Artificial Sequence
  Description of Artificial Sequence: Synthetic oligonucleotide
  Antisense strand to SEQ ID NO: 728998
augcacacuugucuaagcc

SEQ ID NO: 729000 - RNA, 19 nt, Artificial Sequence
  Description of Artificial Sequence: Synthetic oligonucleotide
  Sense strand starting at position 2890 of SEQ ID NO: 586583
uagacaagugugcauacaa

SEQ ID NO: 729001 - RNA, 19 nt, Artificial Sequence
  Description of Artificial Sequence: Synthetic oligonucleotide
  Antisense strand to SEQ ID NO: 729000
uuguaugcacacuugucua

SEQ ID NO: 729002 - RNA, 19 nt, Artificial Sequence
  Description of Artificial Sequence: Synthetic oligonucleotide
  Sense strand starting at position 3242 of SEQ ID NO: 586583
cugggaggcuggguuuauu

SEQ ID NO: 729003 - RNA, 19 nt, Artificial Sequence
  Description of Artificial Sequence: Synthetic oligonucleotide
  Antisense strand to SEQ ID NO: 729002
aauaaacccagccucccag

SEQ ID NO: 729004 - RNA, 19 nt, Artificial Sequence
  Description of Artificial Sequence: Synthetic oligonucleotide
  Sense strand starting at position 3314 of SEQ ID NO: 586583
ccacgagguucccugggau

SEQ ID NO: 729005 - RNA, 19 nt, Artificial Sequence
  Description of Artificial Sequence: Synthetic oligonucleotide
  Antisense strand to SEQ ID NO: 729004
aucccagggaaccucgugg

SEQ ID NO: 729006 - RNA, 19 nt, Artificial Sequence
  Description of Artificial Sequence: Synthetic oligonucleotide
  Sense strand starting at position 3384 of SEQ ID NO: 586583
uguuccaucugugugcaga

SEQ ID NO: 729007 - RNA, 19 nt, Artificial Sequence
  Description of Artificial Sequence: Synthetic oligonucleotide
  Antisense strand to SEQ ID NO: 729006
ucugcacacagauggaaca

SEQ ID NO: 729008 - RNA, 19 nt, Artificial Sequence
  Description of Artificial Sequence: Synthetic oligonucleotide
  Sense strand starting at position 3415 of SEQ ID NO: 586583
gccggauugccagcgaugu

SEQ ID NO: 729009 - RNA, 19 nt, Artificial Sequence
  Description of Artificial Sequence: Synthetic oligonucleotide
  Antisense strand to SEQ ID NO: 729008
acaucgcuggcaauccggc

SEQ ID NO: 729010 - RNA, 19 nt, Artificial Sequence
  Description of Artificial Sequence: Synthetic oligonucleotide
  Sense strand starting at position 3575 of SEQ ID NO: 586583
acagaaagugccugaccau

SEQ ID NO: 729011 - RNA, 19 nt, Artificial Sequence
  Description of Artificial Sequence: Synthetic oligonucleotide
  Antisense strand to SEQ ID NO: 729010
auggucaggcacuuucugu

SEQ ID NO: 729012 - RNA, 19 nt, Artificial Sequence
  Description of Artificial Sequence: Synthetic oligonucleotide
  Sense strand starting at position 3576 of SEQ ID NO: 586583
cagaaagugccugaccauu

SEQ ID NO: 729013 - RNA, 19 nt, Artificial Sequence
  Description of Artificial Sequence: Synthetic oligonucleotide
  Antisense strand to SEQ ID NO: 729012
aauggucaggcacuuucug

SEQ ID NO: 729014 - RNA, 19 nt, Artificial Sequence
  Description of Artificial Sequence: Synthetic oligonucleotide
  Sense strand starting at position 3610 of SEQ ID NO: 586583
guaccuuucuggccacaga

SEQ ID NO: 729015 - RNA, 19 nt, Artificial Sequence
  Description of Artificial Sequence: Synthetic oligonucleotide
  Antisense strand to SEQ ID NO: 729014
ucuguggccagaaagguac

SEQ ID NO: 729016 - RNA, 19 nt, Artificial Sequence
  Description of Artificial Sequence: Synthetic oligonucleotide
  Sense strand starting at position 3613 of SEQ ID NO: 586583
ccuuucuggccacagaaga

SEQ ID NO: 729017 - RNA, 19 nt, Artificial Sequence
  Description of Artificial Sequence: Synthetic oligonucleotide
  Antisense strand to SEQ ID NO: 729016
ucuucuguggccagaaagg

SEQ ID NO: 729018 - RNA, 19 nt, Artificial Sequence
  Description of Artificial Sequence: Synthetic oligonucleotide
  Sense strand starting at position 3706 of SEQ ID NO: 586583
ggguuacugggucacuaaa

SEQ ID NO: 729019 - RNA, 19 nt, Artificial Sequence
  Description of Artificial Sequence: Synthetic oligonucleotide
  Antisense strand to SEQ ID NO: 729018
uuuagugacccaguaaccc

SEQ ID NO: 729020 - RNA, 19 nt, Artificial Sequence
  Description of Artificial Sequence: Synthetic oligonucleotide
  Sense strand starting at position 3757 of SEQ ID NO: 586583
ugaguuaggaauggcuaga

SEQ ID NO: 729021 - RNA, 19 nt, Artificial Sequence
  Description of Artificial Sequence: Synthetic oligonucleotide
  Antisense strand to SEQ ID NO: 729020
ucuagccauuccuaacuca

SEQ ID NO: 729022 - RNA, 19 nt, Artificial Sequence
  Description of Artificial Sequence: Synthetic oligonucleotide
  Sense strand starting at position 3897 of SEQ ID NO: 586583
gggucaccuucccagugau

SEQ ID NO: 729023 - RNA, 19 nt, Artificial Sequence
  Description of Artificial Sequence: Synthetic oligonucleotide
  Antisense strand to SEQ ID NO: 729022
aucacugggaaggugaccc

SEQ ID NO: 729024 - RNA, 19 nt, Artificial Sequence
  Description of Artificial Sequence: Synthetic oligonucleotide
  Sense strand starting at position 3900 of SEQ ID NO: 586583
ucaccuucccagugauuac

SEQ ID NO: 729025 - RNA, 19 nt, Artificial Sequence
  Description of Artificial Sequence: Synthetic oligonucleotide
  Antisense strand to SEQ ID NO: 729024
guaaucacugggaagguga

SEQ ID NO: 729026 - RNA, 19 nt, Artificial Sequence
  Description of Artificial Sequence: Synthetic oligonucleotide
  Sense strand starting at position 3903 of SEQ ID NO: 586583
ccuucccagugauuacaga

SEQ ID NO: 729027 - RNA, 19 nt, Artificial Sequence
  Description of Artificial Sequence: Synthetic oligonucleotide
  Antisense strand to SEQ ID NO: 729026
ucuguaaucacugggaagg

SEQ ID NO: 729028 - RNA, 19 nt, Artificial Sequence
  Description of Artificial Sequence: Synthetic oligonucleotide
  Sense strand starting at position 30 of SEQ ID NO: 586584
uguuauguaaguugagaaa

SEQ ID NO: 729029 - RNA, 19 nt, Artificial Sequence
  Description of Artificial Sequence: Synthetic oligonucleotide
  Antisense strand to SEQ ID NO: 729028
uuucucaacuuacauaaca

SEQ ID NO: 729030 - RNA, 19 nt, Artificial Sequence
  Description of Artificial Sequence: Synthetic oligonucleotide
  Sense strand starting at position 110 of SEQ ID NO: 586584
uaugaaguccuaugguuaa

SEQ ID NO: 729031 - RNA, 19 nt, Artificial Sequence
  Description of Artificial Sequence: Synthetic oligonucleotide
  Antisense strand to SEQ ID NO: 729030
uuaaccauaggacuucaua

SEQ ID NO: 729032 - RNA, 19 nt, Artificial Sequence
  Description of Artificial Sequence: Synthetic oligonucleotide
  Sense strand starting at position 386 of SEQ ID NO: 586584
cuaauccauguguaacauu

SEQ ID NO: 729033 - RNA, 19 nt, Artificial Sequence
  Description of Artificial Sequence: Synthetic oligonucleotide
  Antisense strand to SEQ ID NO: 729032
aauguuacacauggauuag

SEQ ID NO: 729034 - RNA, 19 nt, Artificial Sequence
  Description of Artificial Sequence: Synthetic oligonucleotide
  Sense strand starting at position 468 of SEQ ID NO: 586584
cagagucaaugaguaaauu

SEQ ID NO: 729035 - RNA, 19 nt, Artificial Sequence
  Description of Artificial Sequence: Synthetic oligonucleotide
  Antisense strand to SEQ ID NO: 729034
aauuuacucauugacucug

SEQ ID NO: 729036 - RNA, 19 nt, Artificial Sequence
  Description of Artificial Sequence: Synthetic oligonucleotide
  Sense strand starting at position 531 of SEQ ID NO: 586584
cucaguccugcagagaaca

SEQ ID NO: 729037 - RNA, 19 nt, Artificial Sequence
  Description of Artificial Sequence: Synthetic oligonucleotide
  Antisense strand to SEQ ID NO: 729036
uguucucugcaggacugag

SEQ ID NO: 729038 - RNA, 19 nt, Artificial Sequence
  Description of Artificial Sequence: Synthetic oligonucleotide
  Sense strand starting at position 592 of SEQ ID NO: 586584
aaaugaauuugugagauag

SEQ ID NO: 729039 - RNA, 19 nt, Artificial Sequence
  Description of Artificial Sequence: Synthetic oligonucleotide
  Antisense strand to SEQ ID NO: 729038
cuaucucacaaauucauuu

SEQ ID NO: 729040 - RNA, 19 nt, Artificial Sequence
  Description of Artificial Sequence: Synthetic oligonucleotide
  Sense strand starting at position 600 of SEQ ID NO: 586584
uugugagauagcuggagaa

SEQ ID NO: 729041 - RNA, 19 nt, Artificial Sequence
  Description of Artificial Sequence: Synthetic oligonucleotide
  Antisense strand to SEQ ID NO: 729040
uucuccagcuaucucacaa

SEQ ID NO: 729042 - RNA, 19 nt, Artificial Sequence
  Description of Artificial Sequence: Synthetic oligonucleotide
  Sense strand starting at position 753 of SEQ ID NO: 586584
uguggucaugggcagagaa

SEQ ID NO: 729043 - RNA, 19 nt, Artificial Sequence
  Description of Artificial Sequence: Synthetic oligonucleotide
  Antisense strand to SEQ ID NO: 729042
uucucugcccaugaccaca

SEQ ID NO: 729044 - RNA, 19 nt, Artificial Sequence
  Description of Artificial Sequence: Synthetic oligonucleotide
  Sense strand starting at position 830 of SEQ ID NO: 586584
auuuauagucguugcucua

SEQ ID NO: 729045 - RNA, 19 nt, Artificial Sequence
  Description of Artificial Sequence: Synthetic oligonucleotide
  Antisense strand to SEQ ID NO: 729044
uagagcaacgacuauaaau

SEQ ID NO: 729046 - RNA, 19 nt, Artificial Sequence
  Description of Artificial Sequence: Synthetic oligonucleotide
  Sense strand starting at position 891 of SEQ ID NO: 586584
ccaagcuaucacugaaaga

SEQ ID NO: 729047 - RNA, 19 nt, Artificial Sequence
  Description of Artificial Sequence: Synthetic oligonucleotide
  Antisense strand to SEQ ID NO: 729046
ucuuucagugauagcuugg

SEQ ID NO: 729048 - RNA, 19 nt, Artificial Sequence
  Description of Artificial Sequence: Synthetic oligonucleotide
  Sense strand starting at position 1004 of SEQ ID NO: 586584
aaugacgauucuguuacaa

SEQ ID NO: 729049 - RNA, 19 nt, Artificial Sequence
  Description of Artificial Sequence: Synthetic oligonucleotide
  Antisense strand to SEQ ID NO: 729048
uuguaacagaaucgucauu

SEQ ID NO: 729050 - RNA, 19 nt, Artificial Sequence
  Description of Artificial Sequence: Synthetic oligonucleotide
  Sense strand starting at position 1031 of SEQ ID NO: 586584
guaucuaauguguaacuaa

SEQ ID NO: 729051 - RNA, 19 nt, Artificial Sequence
  Description of Artificial Sequence: Synthetic oligonucleotide
  Antisense strand to SEQ ID NO: 729050
uuaguuacacauuagauac

SEQ ID NO: 729052 - RNA, 19 nt, Artificial Sequence
  Description of Artificial Sequence: Synthetic oligonucleotide
  Sense strand starting at position 1069 of SEQ ID NO: 586584
ugccauggucucuaaagag

SEQ ID NO: 729053 - RNA, 19 nt, Artificial Sequence
  Description of Artificial Sequence: Synthetic oligonucleotide
  Antisense strand to SEQ ID NO: 729052
cucuuuagagaccauggca

SEQ ID NO: 729054 - RNA, 19 nt, Artificial Sequence
  Description of Artificial Sequence: Synthetic oligonucleotide
  Sense strand starting at position 1130 of SEQ ID NO: 586584
cugugaauaggaugaacuu

SEQ ID NO: 729055 - RNA, 19 nt, Artificial Sequence
  Description of Artificial Sequence: Synthetic oligonucleotide
  Antisense strand to SEQ ID NO: 729054
aaguucauccuauucacag

SEQ ID NO: 729056 - RNA, 19 nt, Artificial Sequence
  Description of Artificial Sequence: Synthetic oligonucleotide
  Sense strand starting at position 1156 of SEQ ID NO: 586584
aguauaaaugcugaaaucu

SEQ ID NO: 729057 - RNA, 19 nt, Artificial Sequence
  Description of Artificial Sequence: Synthetic oligonucleotide
  Antisense strand to SEQ ID NO: 729056
agauuucagcauuuauacu

SEQ ID NO: 729058 - RNA, 19 nt, Artificial Sequence
  Description of Artificial Sequence: Synthetic oligonucleotide
  Sense strand starting at position 1171 of SEQ ID NO: 586584
aucuaaguucgauacgaaa

SEQ ID NO: 729059 - RNA, 19 nt, Artificial Sequence
  Description of Artificial Sequence: Synthetic oligonucleotide
  Antisense strand to SEQ ID NO: 729058
uuucguaucgaacuuagau

SEQ ID NO: 729060 - RNA, 19 nt, Artificial Sequence
  Description of Artificial Sequence: Synthetic oligonucleotide
  Sense strand starting at position 1250 of SEQ ID NO: 586584
ugucaaugacgguagagaa

SEQ ID NO: 729061 - RNA, 19 nt, Artificial Sequence
  Description of Artificial Sequence: Synthetic oligonucleotide
  Antisense strand to SEQ ID NO: 729060
uucucuaccgucauugaca

SEQ ID NO: 729062 - RNA, 19 nt, Artificial Sequence
  Description of Artificial Sequence: Synthetic oligonucleotide
  Sense strand starting at position 1713 of SEQ ID NO: 586584
gccaguuaccgugagaaag

SEQ ID NO: 729063 - RNA, 19 nt, Artificial Sequence
  Description of Artificial Sequence: Synthetic oligonucleotide
  Antisense strand to SEQ ID NO: 729062
cuuucucacgguaacuggc

SEQ ID NO: 729064 - RNA, 19 nt, Artificial Sequence
  Description of Artificial Sequence: Synthetic oligonucleotide
  Sense strand starting at position 2236 of SEQ ID NO: 586584
gccucuguuuauuuguuga

SEQ ID NO: 729065 - RNA, 19 nt, Artificial Sequence
  Description of Artificial Sequence: Synthetic oligonucleotide
  Antisense strand to SEQ ID NO: 729064
ucaacaaauaaacagaggc

SEQ ID NO: 729066 - RNA, 19 nt, Artificial Sequence
  Description of Artificial Sequence: Synthetic oligonucleotide
  Sense strand starting at position 2238 of SEQ ID NO: 586584
cucuguuuauuuguugauu

SEQ ID NO: 729067 - RNA, 19 nt, Artificial Sequence
  Description of Artificial Sequence: Synthetic oligonucleotide
  Antisense strand to SEQ ID NO: 729066
aaucaacaaauaaacagag

SEQ ID NO: 729068 - RNA, 19 nt, Artificial Sequence
  Description of Artificial Sequence: Synthetic oligonucleotide
  Sense strand starting at position 2369 of SEQ ID NO: 586584
caagaagugccaggcaaau

SEQ ID NO: 729069 - RNA, 19 nt, Artificial Sequence
  Description of Artificial Sequence: Synthetic oligonucleotide
  Antisense strand to SEQ ID NO: 729068
auuugccuggcacuucuug

SEQ ID NO: 729070 - RNA, 19 nt, Artificial Sequence
  Description of Artificial Sequence: Synthetic oligonucleotide
  Sense strand starting at position 2405 of SEQ ID NO: 586584
cuagaauaaucagcaaagu

SEQ ID NO: 729071 - RNA, 19 nt, Artificial Sequence
  Description of Artificial Sequence: Synthetic oligonucleotide
  Antisense strand to SEQ ID NO: 729070
acuuugcugauuauucuag

SEQ ID NO: 729072 - RNA, 19 nt, Artificial Sequence
  Description of Artificial Sequence: Synthetic oligonucleotide
  Sense strand starting at position 2757 of SEQ ID NO: 586584
uguuaauagcaguaacuuu

SEQ ID NO: 729073 - RNA, 19 nt, Artificial Sequence
  Description of Artificial Sequence: Synthetic oligonucleotide
  Antisense strand to SEQ ID NO: 729072
aaaguuacugcuauuaaca

SEQ ID NO: 729074 - RNA, 19 nt, Artificial Sequence
  Description of Artificial Sequence: Synthetic oligonucleotide
  Sense strand starting at position 2772 of SEQ ID NO: 586584
cuuuauguugaguaaauag

SEQ ID NO: 729075 - RNA, 19 nt, Artificial Sequence
  Description of Artificial Sequence: Synthetic oligonucleotide
  Antisense strand to SEQ ID NO: 729074
cuauuuacucaacauaaag

SEQ ID NO: 729076 - RNA, 19 nt, Artificial Sequence
  Description of Artificial Sequence: Synthetic oligonucleotide
  Sense strand starting at position 2779 of SEQ ID NO: 586584
uugaguaaauaguccauau

SEQ ID NO: 729077 - RNA, 19 nt, Artificial Sequence
  Description of Artificial Sequence: Synthetic oligonucleotide
  Antisense strand to SEQ ID NO: 729076
auauggacuauuuacucaa

SEQ ID NO: 729078 - RNA, 19 nt, Artificial Sequence
  Description of Artificial Sequence: Synthetic oligonucleotide
  Sense strand starting at position 2783 of SEQ ID NO: 586584
guaaauaguccauauucga

SEQ ID NO: 729079 - RNA, 19 nt, Artificial Sequence
  Description of Artificial Sequence: Synthetic oligonucleotide
  Antisense strand to SEQ ID NO: 729078
ucgaauauggacuauuuac

SEQ ID NO: 729080 - RNA, 19 nt, Artificial Sequence
  Description of Artificial Sequence: Synthetic oligonucleotide
  Sense strand starting at position 2808 of SEQ ID NO: 586584
uugucuucggcguucuuua

SEQ ID NO: 729081 - RNA, 19 nt, Artificial Sequence
  Description of Artificial Sequence: Synthetic oligonucleotide
  Antisense strand to SEQ ID NO: 729080
uaaagaacgccgaagacaa

SEQ ID NO: 729082 - RNA, 19 nt, Artificial Sequence
  Description of Artificial Sequence: Synthetic oligonucleotide
  Sense strand starting at position 2865 of SEQ ID NO: 586584
gugauauauuuaguacguc

SEQ ID NO: 729083 - RNA, 19 nt, Artificial Sequence
  Description of Artificial Sequence: Synthetic oligonucleotide
  Antisense strand to SEQ ID NO: 729082
gacguacuaaauauaucac

SEQ ID NO: 729084 - RNA, 19 nt, Artificial Sequence
  Description of Artificial Sequence: Synthetic oligonucleotide
  Sense strand starting at position 2986 of SEQ ID NO: 586584
gggaaauugucauuaguuc

SEQ ID NO: 729085 - RNA, 19 nt, Artificial Sequence
  Description of Artificial Sequence: Synthetic oligonucleotide
  Antisense strand to SEQ ID NO: 729084
gaacuaaugacaauuuccc

SEQ ID NO: 729086 - RNA, 19 nt, Artificial Sequence
  Description of Artificial Sequence: Synthetic oligonucleotide
  Sense strand starting at position 3111 of SEQ ID NO: 586584
gcucuuaagcaggaaacuu

SEQ ID NO: 729087 - RNA, 19 nt, Artificial Sequence
  Description of Artificial Sequence: Synthetic oligonucleotide
  Antisense strand to SEQ ID NO: 729086
aaguuuccugcuuaagagc

SEQ ID NO: 729088 - RNA, 19 nt, Artificial Sequence
  Description of Artificial Sequence: Synthetic oligonucleotide
  Sense strand starting at position 3131 of SEQ ID NO: 586584
ccugucgugaaugaugaau

SEQ ID NO: 729089 - RNA, 19 nt, Artificial Sequence
  Description of Artificial Sequence: Synthetic oligonucleotide
  Antisense strand to SEQ ID NO: 729088
auucaucauucacgacagg

SEQ ID NO: 729090 - RNA, 19 nt, Artificial Sequence
  Description of Artificial Sequence: Synthetic oligonucleotide
  Sense strand starting at position 3355 of SEQ ID NO: 586584
gugaucuaagucugaauuc

SEQ ID NO: 729091 - RNA, 19 nt, Artificial Sequence
  Description of Artificial Sequence: Synthetic oligonucleotide
  Antisense strand to SEQ ID NO: 729090
gaauucagacuuagaucac

SEQ ID NO: 729092 - RNA, 19 nt, Artificial Sequence
  Description of Artificial Sequence: Synthetic oligonucleotide
  Sense strand starting at position 3496 of SEQ ID NO: 586584
aguauugcuuauuucucau

SEQ ID NO: 729093 - RNA, 19 nt, Artificial Sequence
  Description of Artificial Sequence: Synthetic oligonucleotide
  Antisense strand to SEQ ID NO: 729092
augagaaauaagcaauacu

SEQ ID NO: 729094 - RNA, 19 nt, Artificial Sequence
  Description of Artificial Sequence: Synthetic oligonucleotide
  Sense strand starting at position 3793 of SEQ ID NO: 586584
gaauuccuguuucugggau

SEQ ID NO: 729095 - RNA, 19 nt, Artificial Sequence
  Description of Artificial Sequence: Synthetic oligonucleotide
  Antisense strand to SEQ ID NO: 729094
aucccagaaacaggaauuc

SEQ ID NO: 729096 - RNA, 19 nt, Artificial Sequence
  Description of Artificial Sequence: Synthetic oligonucleotide
  Sense strand starting at position 3826 of SEQ ID NO: 586584
uucuuugagcuggaguuga

SEQ ID NO: 729097 - RNA, 19 nt, Artificial Sequence
  Description of Artificial Sequence: Synthetic oligonucleotide
  Antisense strand to SEQ ID NO: 729096
ucaacuccagcucaaagaa

SEQ ID NO: 729098 - RNA, 19 nt, Artificial Sequence
  Description of Artificial Sequence: Synthetic oligonucleotide
  Sense strand starting at position 3830 of SEQ ID NO: 586584
uugagcuggaguugaaauu

SEQ ID NO: 729099 - RNA, 19 nt, Artificial Sequence
  Description of Artificial Sequence: Synthetic oligonucleotide
  Antisense strand to SEQ ID NO: 729098
aauuucaacuccagcucaa

SEQ ID NO: 729100 - RNA, 19 nt, Artificial Sequence
  Description of Artificial Sequence: Synthetic oligonucleotide
  Sense strand starting at position 3836 of SEQ ID NO: 586584
uggaguugaaauugaguuu

SEQ ID NO: 729101 - RNA, 19 nt, Artificial Sequence
  Description of Artificial Sequence: Synthetic oligonucleotide
  Antisense strand to SEQ ID NO: 729100
aaacucaauuucaacucca

SEQ ID NO: 729102 - RNA, 19 nt, Artificial Sequence
  Description of Artificial Sequence: Synthetic oligonucleotide
  Sense strand starting at position 3941 of SEQ ID NO: 586584
uauuguauugcacagauag

SEQ ID NO: 729103 - RNA, 19 nt, Artificial Sequence
  Description of Artificial Sequence: Synthetic oligonucleotide
  Antisense strand to SEQ ID NO: 729102
cuaucugugcaauacaaua

SEQ ID NO: 729104 - RNA, 19 nt, Artificial Sequence
  Description of Artificial Sequence: Synthetic oligonucleotide
  Sense strand starting at position 3978 of SEQ ID NO: 586584
ucccaaauggauuguuaca

SEQ ID NO: 729105 - RNA, 19 nt, Artificial Sequence
  Description of Artificial Sequence: Synthetic oligonucleotide
  Antisense strand to SEQ ID NO: 729104
uguaacaauccauuuggga

SEQ ID NO: 729106 - RNA, 19 nt, Artificial Sequence
  Description of Artificial Sequence: Synthetic oligonucleotide
  Sense strand starting at position 3980 of SEQ ID NO: 586584
ccaaauggauuguuacaga

SEQ ID NO: 729107 - RNA, 19 nt, Artificial Sequence
  Description of Artificial Sequence: Synthetic oligonucleotide
  Antisense strand to SEQ ID NO: 729106
ucuguaacaauccauuugg

SEQ ID NO: 729108 - RNA, 19 nt, Artificial Sequence
  Description of Artificial Sequence: Synthetic oligonucleotide
  Sense strand starting at position 612 of SEQ ID NO: 586585
cucguaugacuugaauaac

SEQ ID NO: 729109 - RNA, 19 nt, Artificial Sequence
  Description of Artificial Sequence: Synthetic oligonucleotide
  Antisense strand to SEQ ID NO: 729108
guuauucaagucauacgag

SEQ ID NO: 729110 - RNA, 19 nt, Artificial Sequence
  Description of Artificial Sequence: Synthetic oligonucleotide
  Sense strand starting at position 622 of SEQ ID NO: 586585
uugaauaacugguccuaug

SEQ ID NO: 729111 - RNA, 19 nt, Artificial Sequence
  Description of Artificial Sequence: Synthetic oligonucleotide
  Antisense strand to SEQ ID NO: 729110
cauaggaccaguuauucaa

SEQ ID NO: 729112 - RNA, 19 nt, Artificial Sequence
  Description of Artificial Sequence: Synthetic oligonucleotide
  Sense strand starting at position 785 of SEQ ID NO: 586585
augaaaucaucauggauuu

SEQ ID NO: 729113 - RNA, 19 nt, Artificial Sequence
  Description of Artificial Sequence: Synthetic oligonucleotide
  Antisense strand to SEQ ID NO: 729112
aaauccaugaugauuucau

SEQ ID NO: 729114 - RNA, 19 nt, Artificial Sequence
  Description of Artificial Sequence: Synthetic oligonucleotide
  Sense strand starting at position 987 of SEQ ID NO: 586585
cccucuugguuucugaaga

SEQ ID NO: 729115 - RNA, 19 nt, Artificial Sequence
  Description of Artificial Sequence: Synthetic oligonucleotide
  Antisense strand to SEQ ID NO: 729114
ucuucagaaaccaagaggg

SEQ ID NO: 729116 - RNA, 19 nt, Artificial Sequence
  Description of Artificial Sequence: Synthetic oligonucleotide
  Sense strand starting at position 1060 of SEQ ID NO: 586585
ugcaguuuagguggaaaga

SEQ ID NO: 729117 - RNA, 19 nt, Artificial Sequence
  Description of Artificial Sequence: Synthetic oligonucleotide
  Antisense strand to SEQ ID NO: 729116
ucuuuccaccuaaacugca

SEQ ID NO: 729118 - RNA, 19 nt, Artificial Sequence
  Description of Artificial Sequence: Synthetic oligonucleotide
  Sense strand starting at position 1139 of SEQ ID NO: 586585
uugugacacuaaguuauaa

SEQ ID NO: 729119 - RNA, 19 nt, Artificial Sequence
  Description of Artificial Sequence: Synthetic oligonucleotide
  Antisense strand to SEQ ID NO: 729118
uuauaacuuagugucacaa

SEQ ID NO: 729120 - RNA, 19 nt, Artificial Sequence
  Description of Artificial Sequence: Synthetic oligonucleotide
  Sense strand starting at position 1163 of SEQ ID NO: 586585
guuugcacagguuaacaau

SEQ ID NO: 729121 - RNA, 19 nt, Artificial Sequence
  Description of Artificial Sequence: Synthetic oligonucleotide
  Antisense strand to SEQ ID NO: 729120
auuguuaaccugugcaaac

SEQ ID NO: 729122 - RNA, 19 nt, Artificial Sequence
  Description of Artificial Sequence: Synthetic oligonucleotide
  Sense strand starting at position 1568 of SEQ ID NO: 586585
uuuagauaagugcaacuua

SEQ ID NO: 729123 - RNA, 19 nt, Artificial Sequence
  Description of Artificial Sequence: Synthetic oligonucleotide
  Antisense strand to SEQ ID NO: 729122
uaaguugcacuuaucuaaa

SEQ ID NO: 729124 - RNA, 19 nt, Artificial Sequence
  Description of Artificial Sequence: Synthetic oligonucleotide
  Sense strand starting at position 1596 of SEQ ID NO: 586585
ggauucucucugcaucuga

SEQ ID NO: 729125 - RNA, 19 nt, Artificial Sequence
  Description of Artificial Sequence: Synthetic oligonucleotide
  Antisense strand to SEQ ID NO: 729124
ucagaugcagagagaaucc

SEQ ID NO: 729126 - RNA, 19 nt, Artificial Sequence
  Description of Artificial Sequence: Synthetic oligonucleotide
  Sense strand starting at position 1631 of SEQ ID NO: 586585
ugaauuuacuguuugcgaa

SEQ ID NO: 729127 - RNA, 19 nt, Artificial Sequence
  Description of Artificial Sequence: Synthetic oligonucleotide
  Antisense strand to SEQ ID NO: 729126
uucgcaaacaguaaauuca

SEQ ID NO: 729128 - RNA, 19 nt, Artificial Sequence
  Description of Artificial Sequence: Synthetic oligonucleotide
  Sense strand starting at position 1632 of SEQ ID NO: 586585
gaauuuacuguuugcgaau

SEQ ID NO: 729129 - RNA, 19 nt, Artificial Sequence
  Description of Artificial Sequence: Synthetic oligonucleotide
  Antisense strand to SEQ ID NO: 729128
auucgcaaacaguaaauuc

SEQ ID NO: 729130 - RNA, 19 nt, Artificial Sequence
  Description of Artificial Sequence: Synthetic oligonucleotide
  Sense strand starting at position 1633 of SEQ ID NO: 586585
aauuuacuguuugcgaaug

SEQ ID NO: 729131 - RNA, 19 nt, Artificial Sequence
  Description of Artificial Sequence: Synthetic oligonucleotide
  Antisense strand to SEQ ID NO: 729130
cauucgcaaacaguaaauu

SEQ ID NO: 729132 - RNA, 19 nt, Artificial Sequence
  Description of Artificial Sequence: Synthetic oligonucleotide
  Sense strand starting at position 1728 of SEQ ID NO: 586585
cuauuugcaugcucuagga

SEQ ID NO: 729133 - RNA, 19 nt, Artificial Sequence
  Description of Artificial Sequence: Synthetic oligonucleotide
  Antisense strand to SEQ ID NO: 729132
uccuagagcaugcaaauag

SEQ ID NO: 729134 - RNA, 19 nt, Artificial Sequence
  Description of Artificial Sequence: Synthetic oligonucleotide
  Sense strand starting at position 1759 of SEQ ID NO: 586585
guauuaaccugccugaaua

SEQ ID NO: 729135 - RNA, 19 nt, Artificial Sequence
  Description of Artificial Sequence: Synthetic oligonucleotide
  Antisense strand to SEQ ID NO: 729134
uauucaggcagguuaauac

SEQ ID NO: 729136 - RNA, 19 nt, Artificial Sequence
  Description of Artificial Sequence: Synthetic oligonucleotide
  Sense strand starting at position 1809 of SEQ ID NO: 586585
ggaaaugccaauuaguugu

SEQ ID NO: 729137 - RNA, 19 nt, Artificial Sequence
  Description of Artificial Sequence: Synthetic oligonucleotide
  Antisense strand to SEQ ID NO: 729136
acaacuaauuggcauuucc

SEQ ID NO: 729138 - RNA, 19 nt, Artificial Sequence
  Description of Artificial Sequence: Synthetic oligonucleotide
  Sense strand starting at position 1849 of SEQ ID NO: 586585
aucuuugaauguguaaaga

SEQ ID NO: 729139 - RNA, 19 nt, Artificial Sequence
  Description of Artificial Sequence: Synthetic oligonucleotide
  Antisense strand to SEQ ID NO: 729138
ucuuuacacauucaaagau

SEQ ID NO: 729140 - RNA, 19 nt, Artificial Sequence
  Description of Artificial Sequence: Synthetic oligonucleotide
  Sense strand starting at position 1859 of SEQ ID NO: 586585
guguaaagagcucagaagu

SEQ ID NO: 729141 - RNA, 19 nt, Artificial Sequence
  Description of Artificial Sequence: Synthetic oligonucleotide
  Antisense strand to SEQ ID NO: 729140
acuucugagcucuuuacac

SEQ ID NO: 729142 - RNA, 19 nt, Artificial Sequence
  Description of Artificial Sequence: Synthetic oligonucleotide
  Sense strand starting at position 2058 of SEQ ID NO: 586585
uugggauugguuggaauca

SEQ ID NO: 729143 - RNA, 19 nt, Artificial Sequence
  Description of Artificial Sequence: Synthetic oligonucleotide
  Antisense strand to SEQ ID NO: 729142
ugauuccaaccaaucccaa

SEQ ID NO: 729144 - RNA, 19 nt, Artificial Sequence
  Description of Artificial Sequence: Synthetic oligonucleotide
  Sense strand starting at position 2068 of SEQ ID NO: 586585
uuggaaucagcaugacauc

SEQ ID NO: 729145 - RNA, 19 nt, Artificial Sequence
  Description of Artificial Sequence: Synthetic oligonucleotide
  Antisense strand to SEQ ID NO: 729144
gaugucaugcugauuccaa

SEQ ID NO: 729146 - RNA, 19 nt, Artificial Sequence
  Description of Artificial Sequence: Synthetic oligonucleotide
  Sense strand starting at position 2187 of SEQ ID NO: 586585
cagugaaaccucuggcuag

SEQ ID NO: 729147 - RNA, 19 nt, Artificial Sequence
  Description of Artificial Sequence: Synthetic oligonucleotide
  Antisense strand to SEQ ID NO: 729146
cuagccagagguuucacug

SEQ ID NO: 729148 - RNA, 19 nt, Artificial Sequence
  Description of Artificial Sequence: Synthetic oligonucleotide
  Sense strand starting at position 2190 of SEQ ID NO: 586585
ugaaaccucuggcuaggau

SEQ ID NO: 729149 - RNA, 19 nt, Artificial Sequence
  Description of Artificial Sequence: Synthetic oligonucleotide
  Antisense strand to SEQ ID NO: 729148
auccuagccagagguuuca

SEQ ID NO: 729150 - RNA, 19 nt, Artificial Sequence
  Description of Artificial Sequence: Synthetic oligonucleotide
  Sense strand starting at position 2582 of SEQ ID NO: 586585
uggaaauaguaauucucuu

SEQ ID NO: 729151 - RNA, 19 nt, Artificial Sequence
  Description of Artificial Sequence: Synthetic oligonucleotide
  Antisense strand to SEQ ID NO: 729150
aagagaauuacuauuucca

SEQ ID NO: 729152 - RNA, 19 nt, Artificial Sequence
  Description of Artificial Sequence: Synthetic oligonucleotide
  Sense strand starting at position 2622 of SEQ ID NO: 586585
cuucccaggucuuuagaau

SEQ ID NO: 729153 - RNA, 19 nt, Artificial Sequence
  Description of Artificial Sequence: Synthetic oligonucleotide
  Antisense strand to SEQ ID NO: 729152
auucuaaagaccugggaag

SEQ ID NO: 729154 - RNA, 19 nt, Artificial Sequence
  Description of Artificial Sequence: Synthetic oligonucleotide
  Sense strand starting at position 2623 of SEQ ID NO: 586585
uucccaggucuuuagaauc

SEQ ID NO: 729155 - RNA, 19 nt, Artificial Sequence
  Description of Artificial Sequence: Synthetic oligonucleotide
  Antisense strand to SEQ ID NO: 729154
gauucuaaagaccugggaa

SEQ ID NO: 729156 - RNA, 19 nt, Artificial Sequence
  Description of Artificial Sequence: Synthetic oligonucleotide
  Sense strand starting at position 2791 of SEQ ID NO: 586585
agugaacacuccuugaaau

SEQ ID NO: 729157 - RNA, 19 nt, Artificial Sequence
  Description of Artificial Sequence: Synthetic oligonucleotide
  Antisense strand to SEQ ID NO: 729156
auuucaaggaguguucacu

SEQ ID NO: 729158 - RNA, 19 nt, Artificial Sequence
  Description of Artificial Sequence: Synthetic oligonucleotide
  Sense strand starting at position 2792 of SEQ ID NO: 586585
gugaacacuccuugaaaua

SEQ ID NO: 729159 - RNA, 19 nt, Artificial Sequence
  Description of Artificial Sequence: Synthetic oligonucleotide
  Antisense strand to SEQ ID NO: 729158
uauuucaaggaguguucac

SEQ ID NO: 729160 - RNA, 19 nt, Artificial Sequence
  Description of Artificial Sequence: Synthetic oligonucleotide
  Sense strand starting at position 2901 of SEQ ID NO: 586585
ggugaaggguuguuugaag

SEQ ID NO: 729161 - RNA, 19 nt, Artificial Sequence
  Description of Artificial Sequence: Synthetic oligonucleotide
  Antisense strand to SEQ ID NO: 729160
cuucaaacaacccuucacc

SEQ ID NO: 729162 - RNA, 19 nt, Artificial Sequence
  Description of Artificial Sequence: Synthetic oligonucleotide
  Sense strand starting at position 2908 of SEQ ID NO: 586585
gguuguuugaaggacuaca

SEQ ID NO: 729163 - RNA, 19 nt, Artificial Sequence
  Description of Artificial Sequence: Synthetic oligonucleotide
  Antisense strand to SEQ ID NO: 729162
uguaguccuucaaacaacc

SEQ ID NO: 729164 - RNA, 19 nt, Artificial Sequence
  Description of Artificial Sequence: Synthetic oligonucleotide
  Sense strand starting at position 2983 of SEQ ID NO: 586585
gcuaaugagagccauauga

SEQ ID NO: 729165 - RNA, 19 nt, Artificial Sequence
  Description of Artificial Sequence: Synthetic oligonucleotide
  Antisense strand to SEQ ID NO: 729164
ucauauggcucucauuagc

SEQ ID NO: 729166 - RNA, 19 nt, Artificial Sequence
  Description of Artificial Sequence: Synthetic oligonucleotide
  Sense strand starting at position 2993 of SEQ ID NO: 586585
gccauaugaccagauaugu

SEQ ID NO: 729167 - RNA, 19 nt, Artificial Sequence
  Description of Artificial Sequence: Synthetic oligonucleotide
  Antisense strand to SEQ ID NO: 729166
acauaucuggucauauggc

SEQ ID NO: 729168 - RNA, 19 nt, Artificial Sequence
  Description of Artificial Sequence: Synthetic oligonucleotide
  Sense strand starting at position 3148 of SEQ ID NO: 586585
gucucucuuggcuagauac

SEQ ID NO: 729169 - RNA, 19 nt, Artificial Sequence
  Description of Artificial Sequence: Synthetic oligonucleotide
  Antisense strand to SEQ ID NO: 729168
guaucuagccaagagagac

SEQ ID NO: 729170 - RNA, 19 nt, Artificial Sequence
  Description of Artificial Sequence: Synthetic oligonucleotide
  Sense strand starting at position 3222 of SEQ ID NO: 586585
acugcauaugcagaaauga

SEQ ID NO: 729171 - RNA, 19 nt, Artificial Sequence
  Description of Artificial Sequence: Synthetic oligonucleotide
  Antisense strand to SEQ ID NO: 729170
ucauuucugcauaugcagu

SEQ ID NO: 729172 - RNA, 19 nt, Artificial Sequence
  Description of Artificial Sequence: Synthetic oligonucleotide
  Sense strand starting at position 3251 of SEQ ID NO: 586585
aaaucauuagguuguagag

SEQ ID NO: 729173 - RNA, 19 nt, Artificial Sequence
  Description of Artificial Sequence: Synthetic oligonucleotide
  Antisense strand to SEQ ID NO: 729172
cucuacaaccuaaugauuu

SEQ ID NO: 729174 - RNA, 19 nt, Artificial Sequence
  Description of Artificial Sequence: Synthetic oligonucleotide
  Sense strand starting at position 3398 of SEQ ID NO: 586585
cugagaauuaguggaguca

SEQ ID NO: 729175 - RNA, 19 nt, Artificial Sequence
  Description of Artificial Sequence: Synthetic oligonucleotide
  Antisense strand to SEQ ID NO: 729174
ugacuccacuaauucucag

SEQ ID NO: 729176 - RNA, 19 nt, Artificial Sequence
  Description of Artificial Sequence: Synthetic oligonucleotide
  Sense strand starting at position 3458 of SEQ ID NO: 586585
gaacccuaguguccugaaa

SEQ ID NO: 729177 - RNA, 19 nt, Artificial Sequence
  Description of Artificial Sequence: Synthetic oligonucleotide
  Antisense strand to SEQ ID NO: 729176
uuucaggacacuaggguuc

SEQ ID NO: 729178 - RNA, 19 nt, Artificial Sequence
  Description of Artificial Sequence: Synthetic oligonucleotide
  Sense strand starting at position 3714 of SEQ ID NO: 586585
ugauacuauuucugagaag

SEQ ID NO: 729179 - RNA, 19 nt, Artificial Sequence
  Description of Artificial Sequence: Synthetic oligonucleotide
  Antisense strand to SEQ ID NO: 729178
cuucucagaaauaguauca

SEQ ID NO: 729180 - RNA, 19 nt, Artificial Sequence
  Description of Artificial Sequence: Synthetic oligonucleotide
  Sense strand starting at position 3746 of SEQ ID NO: 586585
cuuaaacaugggugucaca

SEQ ID NO: 729181 - RNA, 19 nt, Artificial Sequence
  Description of Artificial Sequence: Synthetic oligonucleotide
  Antisense strand to SEQ ID NO: 729180
ugugacacccauguuuaag

SEQ ID NO: 729182 - RNA, 19 nt, Artificial Sequence
  Description of Artificial Sequence: Synthetic oligonucleotide
  Sense strand starting at position 3798 of SEQ ID NO: 586585
acacaagugugacucugaa

SEQ ID NO: 729183 - RNA, 19 nt, Artificial Sequence
  Description of Artificial Sequence: Synthetic oligonucleotide
  Antisense strand to SEQ ID NO: 729182
uucagagucacacuugugu

SEQ ID NO: 729184 - RNA, 19 nt, Artificial Sequence
  Description of Artificial Sequence: Synthetic oligonucleotide
  Sense strand starting at position 3973 of SEQ ID NO: 586585
auagcuucuguggaauauu

SEQ ID NO: 729185 - RNA, 19 nt, Artificial Sequence
  Description of Artificial Sequence: Synthetic oligonucleotide
  Antisense strand to SEQ ID NO: 729184
aauauuccacagaagcuau

SEQ ID NO: 729186 - RNA, 19 nt, Artificial Sequence
  Description of Artificial Sequence: Synthetic oligonucleotide
  Sense strand starting at position 3976 of SEQ ID NO: 586585
gcuucuguggaauauucua

SEQ ID NO: 729187 - RNA, 19 nt, Artificial Sequence
  Description of Artificial Sequence: Synthetic oligonucleotide
  Antisense strand to SEQ ID NO: 729186
uagaauauuccacagaagc

SEQ ID NO: 729188 - RNA, 19 nt, Artificial Sequence
  Description of Artificial Sequence: Synthetic oligonucleotide
  Sense strand starting at position 25 of SEQ ID NO: 586586
ugcuguaauccugaaacuu

SEQ ID NO: 729189 - RNA, 19 nt, Artificial Sequence
  Description of Artificial Sequence: Synthetic oligonucleotide
  Antisense strand to SEQ ID NO: 729188
aaguuucaggauuacagca

SEQ ID NO: 729190 - RNA, 19 nt, Artificial Sequence
  Description of Artificial Sequence: Synthetic oligonucleotide
  Sense strand starting at position 71 of SEQ ID NO: 586586
caggacaucugguccuaua

SEQ ID NO: 729191 - RNA, 19 nt, Artificial Sequence
  Description of Artificial Sequence: Synthetic oligonucleotide
  Antisense strand to SEQ ID NO: 729190
uauaggaccagauguccug

SEQ ID NO: 729192 - RNA, 19 nt, Artificial Sequence
  Description of Artificial Sequence: Synthetic oligonucleotide
  Sense strand starting at position 95 of SEQ ID NO: 586586
agguccuacuguccugaaa

SEQ ID NO: 729193 - RNA, 19 nt, Artificial Sequence
  Description of Artificial Sequence: Synthetic oligonucleotide
  Antisense strand to SEQ ID NO: 729192
uuucaggacaguaggaccu

SEQ ID NO: 729194 - RNA, 19 nt, Artificial Sequence
  Description of Artificial Sequence: Synthetic oligonucleotide
  Sense strand starting at position 136 of SEQ ID NO: 586586
cagggagacuucugagaaa

SEQ ID NO: 729195 - RNA, 19 nt, Artificial Sequence
  Description of Artificial Sequence: Synthetic oligonucleotide
  Antisense strand to SEQ ID NO: 729194
uuucucagaagucucccug

SEQ ID NO: 729196 - RNA, 19 nt, Artificial Sequence
  Description of Artificial Sequence: Synthetic oligonucleotide
  Sense strand starting at position 139 of SEQ ID NO: 586586
ggagacuucugagaaagaa

SEQ ID NO: 729197 - RNA, 19 nt, Artificial Sequence
  Description of Artificial Sequence: Synthetic oligonucleotide
  Antisense strand to SEQ ID NO: 729196
uucuuucucagaagucucc

SEQ ID NO: 729198 - RNA, 19 nt, Artificial Sequence
  Description of Artificial Sequence: Synthetic oligonucleotide
  Sense strand starting at position 421 of SEQ ID NO: 586586
acugguaauggauggguaa

SEQ ID NO: 729199 - RNA, 19 nt, Artificial Sequence
  Description of Artificial Sequence: Synthetic oligonucleotide
  Antisense strand to SEQ ID NO: 729198
uuacccauccauuaccagu

SEQ ID NO: 729200 - RNA, 19 nt, Artificial Sequence
  Description of Artificial Sequence: Synthetic oligonucleotide
  Sense strand starting at position 422 of SEQ ID NO: 586586
cugguaauggauggguaaa

SEQ ID NO: 729201 - RNA, 19 nt, Artificial Sequence
  Description of Artificial Sequence: Synthetic oligonucleotide
  Antisense strand to SEQ ID NO: 729200
uuuacccauccauuaccag

SEQ ID NO: 729202 - RNA, 19 nt, Artificial Sequence
  Description of Artificial Sequence: Synthetic oligonucleotide
  Sense strand starting at position 572 of SEQ ID NO: 586586
uguguuaauuuccauuuac

SEQ ID NO: 729203 - RNA, 19 nt, Artificial Sequence
  Description of Artificial Sequence: Synthetic oligonucleotide
  Antisense strand to SEQ ID NO: 729202
guaaauggaaauuaacaca

SEQ ID NO: 729204 - RNA, 19 nt, Artificial Sequence
  Description of Artificial Sequence: Synthetic oligonucleotide
  Sense strand starting at position 713 of SEQ ID NO: 586586
guauaauauuucugggaca

SEQ ID NO: 729205 - RNA, 19 nt, Artificial Sequence
  Description of Artificial Sequence: Synthetic oligonucleotide
  Antisense strand to SEQ ID NO: 729204
ugucccagaaauauuauac

SEQ ID NO: 729206 - RNA, 19 nt, Artificial Sequence
  Description of Artificial Sequence: Synthetic oligonucleotide
  Sense strand starting at position 716 of SEQ ID NO: 586586
uaauauuucugggacagag

SEQ ID NO: 729207 - RNA, 19 nt, Artificial Sequence
  Description of Artificial Sequence: Synthetic oligonucleotide
  Antisense strand to SEQ ID NO: 729206
cucugucccagaaauauua

SEQ ID NO: 729208 - RNA, 19 nt, Artificial Sequence
  Description of Artificial Sequence: Synthetic oligonucleotide
  Sense strand starting at position 761 of SEQ ID NO: 586586
gaagauucgggcuggagag

SEQ ID NO: 729209 - RNA, 19 nt, Artificial Sequence
  Description of Artificial Sequence: Synthetic oligonucleotide
  Antisense strand to SEQ ID NO: 729208
cucuccagcccgaaucuuc

SEQ ID NO: 729210 - RNA, 19 nt, Artificial Sequence
  Description of Artificial Sequence: Synthetic oligonucleotide
  Sense strand starting at position 875 of SEQ ID NO: 586586
uuucuuguuccuuggagga

SEQ ID NO: 729211 - RNA, 19 nt, Artificial Sequence
  Description of Artificial Sequence: Synthetic oligonucleotide
  Antisense strand to SEQ ID NO: 729210
uccuccaaggaacaagaaa

SEQ ID NO: 729212 - RNA, 19 nt, Artificial Sequence
  Description of Artificial Sequence: Synthetic oligonucleotide
  Sense strand starting at position 934 of SEQ ID NO: 586586
aggagaugaucugggaaga

SEQ ID NO: 729213 - RNA, 19 nt, Artificial Sequence
  Description of Artificial Sequence: Synthetic oligonucleotide
  Antisense strand to SEQ ID NO: 729212
ucuucccagaucaucuccu

SEQ ID NO: 729214 - RNA, 19 nt, Artificial Sequence
  Description of Artificial Sequence: Synthetic oligonucleotide
  Sense strand starting at position 1072 of SEQ ID NO: 586586
uccggcuguucucugauuu

SEQ ID NO: 729215 - RNA, 19 nt, Artificial Sequence
  Description of Artificial Sequence: Synthetic oligonucleotide
  Antisense strand to SEQ ID NO: 729214
aaaucagagaacagccgga

SEQ ID NO: 729216 - RNA, 19 nt, Artificial Sequence
  Description of Artificial Sequence: Synthetic oligonucleotide
  Sense strand starting at position 1212 of SEQ ID NO: 586586
gcugcuugaguuuagaaga

SEQ ID NO: 729217 - RNA, 19 nt, Artificial Sequence
  Description of Artificial Sequence: Synthetic oligonucleotide
  Antisense strand to SEQ ID NO: 729216
ucuucuaaacucaagcagc

SEQ ID NO: 729218 - RNA, 19 nt, Artificial Sequence
  Description of Artificial Sequence: Synthetic oligonucleotide
  Sense strand starting at position 1262 of SEQ ID NO: 586586
ggcagugaucaucgggaga

SEQ ID NO: 729219 - RNA, 19 nt, Artificial Sequence
  Description of Artificial Sequence: Synthetic oligonucleotide
  Antisense strand to SEQ ID NO: 729218
ucucccgaugaucacugcc

SEQ ID NO: 729220 - RNA, 19 nt, Artificial Sequence
  Description of Artificial Sequence: Synthetic oligonucleotide
  Sense strand starting at position 1283 of SEQ ID NO: 586586
ggcagaagucaccauccau

SEQ ID NO: 729221 - RNA, 19 nt, Artificial Sequence
  Description of Artificial Sequence: Synthetic oligonucleotide
  Antisense strand to SEQ ID NO: 729220
auggauggugacuucugcc

SEQ ID NO: 729222 - RNA, 19 nt, Artificial Sequence
  Description of Artificial Sequence: Synthetic oligonucleotide
  Sense strand starting at position 1780 of SEQ ID NO: 586586
cauccagguuccuuggaga

SEQ ID NO: 729223 - RNA, 19 nt, Artificial Sequence
  Description of Artificial Sequence: Synthetic oligonucleotide
  Antisense strand to SEQ ID NO: 729222
ucuccaaggaaccuggaug

SEQ ID NO: 729224 - RNA, 19 nt, Artificial Sequence
  Description of Artificial Sequence: Synthetic oligonucleotide
  Sense strand starting at position 2330 of SEQ ID NO: 586586
ccuccaaguaggugucaga

SEQ ID NO: 729225 - RNA, 19 nt, Artificial Sequence
  Description of Artificial Sequence: Synthetic oligonucleotide
  Antisense strand to SEQ ID NO: 729224
ucugacaccuacuuggagg

SEQ ID NO: 729226 - RNA, 19 nt, Artificial Sequence
  Description of Artificial Sequence: Synthetic oligonucleotide
  Sense strand starting at position 2339 of SEQ ID NO: 586586
aggugucagaccuauguuu

SEQ ID NO: 729227 - RNA, 19 nt, Artificial Sequence
  Description of Artificial Sequence: Synthetic oligonucleotide
  Antisense strand to SEQ ID NO: 729226
aaacauaggucugacaccu

SEQ ID NO: 729228 - RNA, 19 nt, Artificial Sequence
  Description of Artificial Sequence: Synthetic oligonucleotide
  Sense strand starting at position 2614 of SEQ ID NO: 586586
cagaaauugucgucaaucu

SEQ ID NO: 729229 - RNA, 19 nt, Artificial Sequence
  Description of Artificial Sequence: Synthetic oligonucleotide
  Antisense strand to SEQ ID NO: 729228
agauugacgacaauuucug

SEQ ID NO: 729230 - RNA, 19 nt, Artificial Sequence
  Description of Artificial Sequence: Synthetic oligonucleotide
  Sense strand starting at position 2615 of SEQ ID NO: 586586
agaaauugucgucaaucuc

SEQ ID NO: 729231 - RNA, 19 nt, Artificial Sequence
  Description of Artificial Sequence: Synthetic oligonucleotide
  Antisense strand to SEQ ID NO: 729230
gagauugacgacaauuucu

SEQ ID NO: 729232 - RNA, 19 nt, Artificial Sequence
  Description of Artificial Sequence: Synthetic oligonucleotide
  Sense strand starting at position 2621 of SEQ ID NO: 586586
ugucgucaaucuccaugaa

SEQ ID NO: 729233 - RNA, 19 nt, Artificial Sequence
  Description of Artificial Sequence: Synthetic oligonucleotide
  Antisense strand to SEQ ID NO: 729232
uucauggagauugacgaca

SEQ ID NO: 729234 - RNA, 19 nt, Artificial Sequence
  Description of Artificial Sequence: Synthetic oligonucleotide
  Sense strand starting at position 2622 of SEQ ID NO: 586586
gucgucaaucuccaugaau

SEQ ID NO: 729235 - RNA, 19 nt, Artificial Sequence
  Description of Artificial Sequence: Synthetic oligonucleotide
  Antisense strand to SEQ ID NO: 729234
auucauggagauugacgac

SEQ ID NO: 729236 - RNA, 19 nt, Artificial Sequence
  Description of Artificial Sequence: Synthetic oligonucleotide
  Sense strand starting at position 2624 of SEQ ID NO: 586586
cgucaaucuccaugaauga

SEQ ID NO: 729237 - RNA, 19 nt, Artificial Sequence
  Description of Artificial Sequence: Synthetic oligonucleotide
  Antisense strand to SEQ ID NO: 729236
ucauucauggagauugacg

SEQ ID NO: 729238 - RNA, 19 nt, Artificial Sequence
  Description of Artificial Sequence: Synthetic oligonucleotide
  Sense strand starting at position 2711 of SEQ ID NO: 586586
cuggcuacuccggguaaga

SEQ ID NO: 729239 - RNA, 19 nt, Artificial Sequence
  Description of Artificial Sequence: Synthetic oligonucleotide
  Antisense strand to SEQ ID NO: 729238
ucuuacccggaguagccag

SEQ ID NO: 729240 - RNA, 19 nt, Artificial Sequence
  Description of Artificial Sequence: Synthetic oligonucleotide
  Sense strand starting at position 2713 of SEQ ID NO: 586586
ggcuacuccggguaagaca

SEQ ID NO: 729241 - RNA, 19 nt, Artificial Sequence
  Description of Artificial Sequence: Synthetic oligonucleotide
  Antisense strand to SEQ ID NO: 729240
ugucuuacccggaguagcc

SEQ ID NO: 729242 - RNA, 19 nt, Artificial Sequence
  Description of Artificial Sequence: Synthetic oligonucleotide
  Sense strand starting at position 2738 of SEQ ID NO: 586586
gccucagucuucucuuuga

SEQ ID NO: 729243 - RNA, 19 nt, Artificial Sequence
  Description of Artificial Sequence: Synthetic oligonucleotide
  Antisense strand to SEQ ID NO: 729242
ucaaagagaagacugaggc

SEQ ID NO: 729244 - RNA, 19 nt, Artificial Sequence
  Description of Artificial Sequence: Synthetic oligonucleotide
  Sense strand starting at position 2820 of SEQ ID NO: 586586
aggaaauggcucugacuug

SEQ ID NO: 729245 - RNA, 19 nt, Artificial Sequence
  Description of Artificial Sequence: Synthetic oligonucleotide
  Antisense strand to SEQ ID NO: 729244
caagucagagccauuuccu

SEQ ID NO: 729246 - RNA, 19 nt, Artificial Sequence
  Description of Artificial Sequence: Synthetic oligonucleotide
  Sense strand starting at position 2919 of SEQ ID NO: 586586
uuguucuggcuuuaaguaa

SEQ ID NO: 729247 - RNA, 19 nt, Artificial Sequence
  Description of Artificial Sequence: Synthetic oligonucleotide
  Antisense strand to SEQ ID NO: 729246
uuacuuaaagccagaacaa

SEQ ID NO: 729248 - RNA, 19 nt, Artificial Sequence
  Description of Artificial Sequence: Synthetic oligonucleotide
  Sense strand starting at position 3118 of SEQ ID NO: 586586
gcauuacaugauuggagga

SEQ ID NO: 729249 - RNA, 19 nt, Artificial Sequence
  Description of Artificial Sequence: Synthetic oligonucleotide
  Antisense strand to SEQ ID NO: 729248
uccuccaaucauguaaugc

SEQ ID NO: 729250 - RNA, 19 nt, Artificial Sequence
  Description of Artificial Sequence: Synthetic oligonucleotide
  Sense strand starting at position 3131 of SEQ ID NO: 586586
ggaggagugugcaauaaag

SEQ ID NO: 729251 - RNA, 19 nt, Artificial Sequence
  Description of Artificial Sequence: Synthetic oligonucleotide
  Antisense strand to SEQ ID NO: 729250
cuuuauugcacacuccucc

SEQ ID NO: 729252 - RNA, 19 nt, Artificial Sequence
  Description of Artificial Sequence: Synthetic oligonucleotide
  Sense strand starting at position 3237 of SEQ ID NO: 586586
gcuuguguacacugagaga

SEQ ID NO: 729253 - RNA, 19 nt, Artificial Sequence
  Description of Artificial Sequence: Synthetic oligonucleotide
  Antisense strand to SEQ ID NO: 729252
ucucucaguguacacaagc

SEQ ID NO: 729254 - RNA, 19 nt, Artificial Sequence
  Description of Artificial Sequence: Synthetic oligonucleotide
  Sense strand starting at position 3248 of SEQ ID NO: 586586
cugagagaaucagaucuau

SEQ ID NO: 729255 - RNA, 19 nt, Artificial Sequence
  Description of Artificial Sequence: Synthetic oligonucleotide
  Antisense strand to SEQ ID NO: 729254
auagaucugauucucucag

SEQ ID NO: 729256 - RNA, 19 nt, Artificial Sequence
  Description of Artificial Sequence: Synthetic oligonucleotide
  Sense strand starting at position 3268 of SEQ ID NO: 586586
uuaaguaauuggcuuguau

SEQ ID NO: 729257 - RNA, 19 nt, Artificial Sequence
  Description of Artificial Sequence: Synthetic oligonucleotide
  Antisense strand to SEQ ID NO: 729256
auacaagccaauuacuuaa

SEQ ID NO: 729258 - RNA, 19 nt, Artificial Sequence
  Description of Artificial Sequence: Synthetic oligonucleotide
  Sense strand starting at position 3270 of SEQ ID NO: 586586
aaguaauuggcuuguauaa

SEQ ID NO: 729259 - RNA, 19 nt, Artificial Sequence
  Description of Artificial Sequence: Synthetic oligonucleotide
  Antisense strand to SEQ ID NO: 729258
uuauacaagccaauuacuu

SEQ ID NO: 729260 - RNA, 19 nt, Artificial Sequence
  Description of Artificial Sequence: Synthetic oligonucleotide
  Sense strand starting at position 3437 of SEQ ID NO: 586586
augagucccgcccacauua

SEQ ID NO: 729261 - RNA, 19 nt, Artificial Sequence
  Description of Artificial Sequence: Synthetic oligonucleotide
  Antisense strand to SEQ ID NO: 729260
uaaugugggcgggacucau

SEQ ID NO: 729262 - RNA, 19 nt, Artificial Sequence
  Description of Artificial Sequence: Synthetic oligonucleotide
  Sense strand starting at position 3461 of SEQ ID NO: 586586
ggcgaucuucuuuacucaa

SEQ ID NO: 729263 - RNA, 19 nt, Artificial Sequence
  Description of Artificial Sequence: Synthetic oligonucleotide
  Antisense strand to SEQ ID NO: 729262
uugaguaaagaagaucgcc

SEQ ID NO: 729264 - RNA, 19 nt, Artificial Sequence
  Description of Artificial Sequence: Synthetic oligonucleotide
  Sense strand starting at position 3567 of SEQ ID NO: 586586
caaguugacucauagaaag

SEQ ID NO: 729265 - RNA, 19 nt, Artificial Sequence
  Description of Artificial Sequence: Synthetic oligonucleotide
  Antisense strand to SEQ ID NO: 729264
cuuucuaugagucaacuug

SEQ ID NO: 729266 - RNA, 19 nt, Artificial Sequence
  Description of Artificial Sequence: Synthetic oligonucleotide
  Sense strand starting at position 3624 of SEQ ID NO: 586586
ccaucaucccagugagacu

SEQ ID NO: 729267 - RNA, 19 nt, Artificial Sequence
  Description of Artificial Sequence: Synthetic oligonucleotide
  Antisense strand to SEQ ID NO: 729266
agucucacugggaugaugg

SEQ ID NO: 729268 - RNA, 19 nt, Artificial Sequence
  Description of Artificial Sequence: Synthetic oligonucleotide
  Sense strand starting at position 24 of SEQ ID NO: 586587
augguauugcuguaaggaa

SEQ ID NO: 729269 - RNA, 19 nt, Artificial Sequence
  Description of Artificial Sequence: Synthetic oligonucleotide
  Antisense strand to SEQ ID NO: 729268
uuccuuacagcaauaccau

SEQ ID NO: 729270 - RNA, 19 nt, Artificial Sequence
  Description of Artificial Sequence: Synthetic oligonucleotide
  Sense strand starting at position 140 of SEQ ID NO: 586587
cugacauacugguuuguuu

SEQ ID NO: 729271 - RNA, 19 nt, Artificial Sequence
  Description of Artificial Sequence: Synthetic oligonucleotide
  Antisense strand to SEQ ID NO: 729270
aaacaaaccaguaugucag

SEQ ID NO: 729272 - RNA, 19 nt, Artificial Sequence
  Description of Artificial Sequence: Synthetic oligonucleotide
  Sense strand starting at position 169 of SEQ ID NO: 586587
acucuaagcugcuuaagga

SEQ ID NO: 729273 - RNA, 19 nt, Artificial Sequence
  Description of Artificial Sequence: Synthetic oligonucleotide
  Antisense strand to SEQ ID NO: 729272
uccuuaagcagcuuagagu

SEQ ID NO: 729274 - RNA, 19 nt, Artificial Sequence
  Description of Artificial Sequence: Synthetic oligonucleotide
  Sense strand starting at position 170 of SEQ ID NO: 586587
cucuaagcugcuuaaggau

SEQ ID NO: 729275 - RNA, 19 nt, Artificial Sequence
  Description of Artificial Sequence: Synthetic oligonucleotide
  Antisense strand to SEQ ID NO: 729274
auccuuaagcagcuuagag

SEQ ID NO: 729276 - RNA, 19 nt, Artificial Sequence
  Description of Artificial Sequence: Synthetic oligonucleotide
  Sense strand starting at position 228 of SEQ ID NO: 586587
agcuuauagaguugagguu

SEQ ID NO: 729277 - RNA, 19 nt, Artificial Sequence
  Description of Artificial Sequence: Synthetic oligonucleotide
  Antisense strand to SEQ ID NO: 729276
aaccucaacucuauaagcu

SEQ ID NO: 729278 - RNA, 19 nt, Artificial Sequence
  Description of Artificial Sequence: Synthetic oligonucleotide
  Sense strand starting at position 234 of SEQ ID NO: 586587
uagaguugagguugcagaa

SEQ ID NO: 729279 - RNA, 19 nt, Artificial Sequence
  Description of Artificial Sequence: Synthetic oligonucleotide
  Antisense strand to SEQ ID NO: 729278
uucugcaaccucaacucua

SEQ ID NO: 729280 - RNA, 19 nt, Artificial Sequence
  Description of Artificial Sequence: Synthetic oligonucleotide
  Sense strand starting at position 259 of SEQ ID NO: 586587
cgacaagcucguuaaauaa

SEQ ID NO: 729281 - RNA, 19 nt, Artificial Sequence
  Description of Artificial Sequence: Synthetic oligonucleotide
  Antisense strand to SEQ ID NO: 729280
uuauuuaacgagcuugucg

SEQ ID NO: 729282 - RNA, 19 nt, Artificial Sequence
  Description of Artificial Sequence: Synthetic oligonucleotide
  Sense strand starting at position 277 of SEQ ID NO: 586587
aacaaaugcugugugacua

SEQ ID NO: 729283 - RNA, 19 nt, Artificial Sequence
  Description of Artificial Sequence: Synthetic oligonucleotide
  Antisense strand to SEQ ID NO: 729282
uagucacacagcauuuguu

SEQ ID NO: 729284 - RNA, 19 nt, Artificial Sequence
  Description of Artificial Sequence: Synthetic oligonucleotide
  Sense strand starting at position 302 of SEQ ID NO: 586587
caguaagugaucugcugag

SEQ ID NO: 729285 - RNA, 19 nt, Artificial Sequence
  Description of Artificial Sequence: Synthetic oligonucleotide
  Antisense strand to SEQ ID NO: 729284
cucagcagaucacuuacug

SEQ ID NO: 729286 - RNA, 19 nt, Artificial Sequence
  Description of Artificial Sequence: Synthetic oligonucleotide
  Sense strand starting at position 306 of SEQ ID NO: 586587
aagugaucugcugagccaa

SEQ ID NO: 729287 - RNA, 19 nt, Artificial Sequence
  Description of Artificial Sequence: Synthetic oligonucleotide
  Antisense strand to SEQ ID NO: 729286
uuggcucagcagaucacuu

SEQ ID NO: 729288 - RNA, 19 nt, Artificial Sequence
  Description of Artificial Sequence: Synthetic oligonucleotide
  Sense strand starting at position 308 of SEQ ID NO: 586587
gugaucugcugagccaaga

SEQ ID NO: 729289 - RNA, 19 nt, Artificial Sequence
  Description of Artificial Sequence: Synthetic oligonucleotide
  Antisense strand to SEQ ID NO: 729288
ucuuggcucagcagaucac

SEQ ID NO: 729290 - RNA, 19 nt, Artificial Sequence
  Description of Artificial Sequence: Synthetic oligonucleotide
  Sense strand starting at position 449 of SEQ ID NO: 586587
acugcuuggguguacgaaa

SEQ ID NO: 729291 - RNA, 19 nt, Artificial Sequence
  Description of Artificial Sequence: Synthetic oligonucleotide
  Antisense strand to SEQ ID NO: 729290
uuucguacacccaagcagu

SEQ ID NO: 729292 - RNA, 19 nt, Artificial Sequence
  Description of Artificial Sequence: Synthetic oligonucleotide
  Sense strand starting at position 504 of SEQ ID NO: 586587
gaacguaaucuacagagcu

SEQ ID NO: 729293 - RNA, 19 nt, Artificial Sequence
  Description of Artificial Sequence: Synthetic oligonucleotide
  Antisense strand to SEQ ID NO: 729292
agcucuguagauuacguuc

SEQ ID NO: 729294 - RNA, 19 nt, Artificial Sequence
  Description of Artificial Sequence: Synthetic oligonucleotide
  Sense strand starting at position 512 of SEQ ID NO: 586587
ucuacagagcucuaacagu

SEQ ID NO: 729295 - RNA, 19 nt, Artificial Sequence
  Description of Artificial Sequence: Synthetic oligonucleotide
  Antisense strand to SEQ ID NO: 729294
acuguuagagcucuguaga

SEQ ID NO: 729296 - RNA, 19 nt, Artificial Sequence
  Description of Artificial Sequence: Synthetic oligonucleotide
  Sense strand starting at position 648 of SEQ ID NO: 586587
ucaguuauccagcagggua

SEQ ID NO: 729297 - RNA, 19 nt, Artificial Sequence
  Description of Artificial Sequence: Synthetic oligonucleotide
  Antisense strand to SEQ ID NO: 729296
uacccugcuggauaacuga

SEQ ID NO: 729298 - RNA, 19 nt, Artificial Sequence
  Description of Artificial Sequence: Synthetic oligonucleotide
  Sense strand starting at position 1001 of SEQ ID NO: 586587
uguuucuuauaggcugaaa

SEQ ID NO: 729299 - RNA, 19 nt, Artificial Sequence
  Description of Artificial Sequence: Synthetic oligonucleotide
  Antisense strand to SEQ ID NO: 729298
uuucagccuauaagaaaca

SEQ ID NO: 729300 - RNA, 19 nt, Artificial Sequence
  Description of Artificial Sequence: Synthetic oligonucleotide
  Sense strand starting at position 2434 of SEQ ID NO: 586587
uugcauccuugggugauuu

SEQ ID NO: 729301 - RNA, 19 nt, Artificial Sequence
  Description of Artificial Sequence: Synthetic oligonucleotide
  Antisense strand to SEQ ID NO: 729300
aaaucacccaaggaugcaa

SEQ ID NO: 729302 - RNA, 19 nt, Artificial Sequence
  Description of Artificial Sequence: Synthetic oligonucleotide
  Sense strand starting at position 2610 of SEQ ID NO: 586587
gccuacauccgagucguau

SEQ ID NO: 729303 - RNA, 19 nt, Artificial Sequence
  Description of Artificial Sequence: Synthetic oligonucleotide
  Antisense strand to SEQ ID NO: 729302
auacgacucggauguaggc

SEQ ID NO: 729304 - RNA, 19 nt, Artificial Sequence
  Description of Artificial Sequence: Synthetic oligonucleotide
  Sense strand starting at position 2691 of SEQ ID NO: 586587
ggacgcugugcucucagua

SEQ ID NO: 729305 - RNA, 19 nt, Artificial Sequence
  Description of Artificial Sequence: Synthetic oligonucleotide
  Antisense strand to SEQ ID NO: 729304
uacugagagcacagcgucc

SEQ ID NO: 729306 - RNA, 19 nt, Artificial Sequence
  Description of Artificial Sequence: Synthetic oligonucleotide
  Sense strand starting at position 2834 of SEQ ID NO: 586587
aaagaagucuuccugagcu

SEQ ID NO: 729307 - RNA, 19 nt, Artificial Sequence
  Description of Artificial Sequence: Synthetic oligonucleotide
  Antisense strand to SEQ ID NO: 729306
agcucaggaagacuucuuu

SEQ ID NO: 729308 - RNA, 19 nt, Artificial Sequence
  Description of Artificial Sequence: Synthetic oligonucleotide
  Sense strand starting at position 2886 of SEQ ID NO: 586587
ccgagcauccgguugcauu

SEQ ID NO: 729309 - RNA, 19 nt, Artificial Sequence
  Description of Artificial Sequence: Synthetic oligonucleotide
  Antisense strand to SEQ ID NO: 729308
aaugcaaccggaugcucgg

SEQ ID NO: 729310 - RNA, 19 nt, Artificial Sequence
  Description of Artificial Sequence: Synthetic oligonucleotide
  Sense strand starting at position 2887 of SEQ ID NO: 586587
cgagcauccgguugcauuu

SEQ ID NO: 729311 - RNA, 19 nt, Artificial Sequence
  Description of Artificial Sequence: Synthetic oligonucleotide
  Antisense strand to SEQ ID NO: 729310
aaaugcaaccggaugcucg

SEQ ID NO: 729312 - RNA, 19 nt, Artificial Sequence
  Description of Artificial Sequence: Synthetic oligonucleotide
  Sense strand starting at position 3054 of SEQ ID NO: 586587
guuggacuucagggaacau

SEQ ID NO: 729313 - RNA, 19 nt, Artificial Sequence
  Description of Artificial Sequence: Synthetic oligonucleotide
  Antisense strand to SEQ ID NO: 729312
auguucccugaaguccaac

SEQ ID NO: 729314 - RNA, 19 nt, Artificial Sequence
  Description of Artificial Sequence: Synthetic oligonucleotide
  Sense strand starting at position 3109 of SEQ ID NO: 586587
uugcauaagugcuugagga

SEQ ID NO: 729315 - RNA, 19 nt, Artificial Sequence
  Description of Artificial Sequence: Synthetic oligonucleotide
  Antisense strand to SEQ ID NO: 729314
uccucaagcacuuaugcaa

SEQ ID NO: 729316 - RNA, 19 nt, Artificial Sequence
  Description of Artificial Sequence: Synthetic oligonucleotide
  Sense strand starting at position 3110 of SEQ ID NO: 586587
ugcauaagugcuugaggau

SEQ ID NO: 729317 - RNA, 19 nt, Artificial Sequence
  Description of Artificial Sequence: Synthetic oligonucleotide
  Antisense strand to SEQ ID NO: 729316
auccucaagcacuuaugca

SEQ ID NO: 729318 - RNA, 19 nt, Artificial Sequence
  Description of Artificial Sequence: Synthetic oligonucleotide
  Sense strand starting at position 3111 of SEQ ID NO: 586587
gcauaagugcuugaggauc

SEQ ID NO: 729319 - RNA, 19 nt, Artificial Sequence
  Description of Artificial Sequence: Synthetic oligonucleotide
  Antisense strand to SEQ ID NO: 729318
gauccucaagcacuuaugc

SEQ ID NO: 729320 - RNA, 19 nt, Artificial Sequence
  Description of Artificial Sequence: Synthetic oligonucleotide
  Sense strand starting at position 3117 of SEQ ID NO: 586587
gugcuugaggaucacacaa

SEQ ID NO: 729321 - RNA, 19 nt, Artificial Sequence
  Description of Artificial Sequence: Synthetic oligonucleotide
  Antisense strand to SEQ ID NO: 729320
uugugugauccucaagcac

SEQ ID NO: 729322 - RNA, 19 nt, Artificial Sequence
  Description of Artificial Sequence: Synthetic oligonucleotide
  Sense strand starting at position 3135 of SEQ ID NO: 586587
accagauacguagaucauc

SEQ ID NO: 729323 - RNA, 19 nt, Artificial Sequence
  Description of Artificial Sequence: Synthetic oligonucleotide
  Antisense strand to SEQ ID NO: 729322
gaugaucuacguaucuggu

SEQ ID NO: 729324 - RNA, 19 nt, Artificial Sequence
  Description of Artificial Sequence: Synthetic oligonucleotide
  Sense strand starting at position 3144 of SEQ ID NO: 586587
guagaucauccguagauca

SEQ ID NO: 729325 - RNA, 19 nt, Artificial Sequence
  Description of Artificial Sequence: Synthetic oligonucleotide
  Antisense strand to SEQ ID NO: 729324
ugaucuacggaugaucuac

SEQ ID NO: 729326 - RNA, 19 nt, Artificial Sequence
  Description of Artificial Sequence: Synthetic oligonucleotide
  Sense strand starting at position 3146 of SEQ ID NO: 586587
agaucauccguagaucauc

SEQ ID NO: 729327 - RNA, 19 nt, Artificial Sequence
  Description of Artificial Sequence: Synthetic oligonucleotide
  Antisense strand to SEQ ID NO: 729326
gaugaucuacggaugaucu

SEQ ID NO: 729328 - RNA, 19 nt, Artificial Sequence
  Description of Artificial Sequence: Synthetic oligonucleotide
  Sense strand starting at position 3164 of SEQ ID NO: 586587
cgcagucacaucgaagauu

SEQ ID NO: 729329 - RNA, 19 nt, Artificial Sequence
  Description of Artificial Sequence: Synthetic oligonucleotide
  Antisense strand to SEQ ID NO: 729328
aaucuucgaugugacugcg

SEQ ID NO: 729330 - RNA, 19 nt, Artificial Sequence
  Description of Artificial Sequence: Synthetic oligonucleotide
  Sense strand starting at position 3452 of SEQ ID NO: 586587
gccagaagcuucucauuag

SEQ ID NO: 729331 - RNA, 19 nt, Artificial Sequence
  Description of Artificial Sequence: Synthetic oligonucleotide
  Antisense strand to SEQ ID NO: 729330
cuaaugagaagcuucuggc

SEQ ID NO: 729332 - RNA, 19 nt, Artificial Sequence
  Description of Artificial Sequence: Synthetic oligonucleotide
  Sense strand starting at position 3502 of SEQ ID NO: 586587
gugugugagacccgauaag

SEQ ID NO: 729333 - RNA, 19 nt, Artificial Sequence
  Description of Artificial Sequence: Synthetic oligonucleotide
  Antisense strand to SEQ ID NO: 729332
cuuaucgggucucacacac

SEQ ID NO: 729334 - RNA, 19 nt, Artificial Sequence
  Description of Artificial Sequence: Synthetic oligonucleotide
  Sense strand starting at position 3634 of SEQ ID NO: 586587
uuuguuucccgucauuugu

SEQ ID NO: 729335 - RNA, 19 nt, Artificial Sequence
  Description of Artificial Sequence: Synthetic oligonucleotide
  Antisense strand to SEQ ID NO: 729334
acaaaugacgggaaacaaa

SEQ ID NO: 729336 - RNA, 19 nt, Artificial Sequence
  Description of Artificial Sequence: Synthetic oligonucleotide
  Sense strand starting at position 3704 of SEQ ID NO: 586587
aggugcauaccucaugaca

SEQ ID NO: 729337 - RNA, 19 nt, Artificial Sequence
  Description of Artificial Sequence: Synthetic oligonucleotide
  Antisense strand to SEQ ID NO: 729336
ugucaugagguaugcaccu

SEQ ID NO: 729338 - RNA, 19 nt, Artificial Sequence
  Description of Artificial Sequence: Synthetic oligonucleotide
  Sense strand starting at position 3736 of SEQ ID NO: 586587
auagauuuauguguugucu

SEQ ID NO: 729339 - RNA, 19 nt, Artificial Sequence
  Description of Artificial Sequence: Synthetic oligonucleotide
  Antisense strand to SEQ ID NO: 729338
agacaacacauaaaucuau

SEQ ID NO: 729340 - RNA, 19 nt, Artificial Sequence
  Description of Artificial Sequence: Synthetic oligonucleotide
  Sense strand starting at position 3744 of SEQ ID NO: 586587
auguguugucuccagaaug

SEQ ID NO: 729341 - RNA, 19 nt, Artificial Sequence
  Description of Artificial Sequence: Synthetic oligonucleotide
  Antisense strand to SEQ ID NO: 729340
cauucuggagacaacacau

SEQ ID NO: 729342 - RNA, 19 nt, Artificial Sequence
  Description of Artificial Sequence: Synthetic oligonucleotide
  Sense strand starting at position 3772 of SEQ ID NO: 586587
ugucuauuccuugagcuag

SEQ ID NO: 729343 - RNA, 19 nt, Artificial Sequence
  Description of Artificial Sequence: Synthetic oligonucleotide
  Antisense strand to SEQ ID NO: 729342
cuagcucaaggaauagaca

SEQ ID NO: 729344 - RNA, 19 nt, Artificial Sequence
  Description of Artificial Sequence: Synthetic oligonucleotide
  Sense strand starting at position 3888 of SEQ ID NO: 586587
ucaucuguacugggacauu

SEQ ID NO: 729345 - RNA, 19 nt, Artificial Sequence
  Description of Artificial Sequence: Synthetic oligonucleotide
  Antisense strand to SEQ ID NO: 729344
aaugucccaguacagauga

SEQ ID NO: 729346 - RNA, 19 nt, Artificial Sequence
  Description of Artificial Sequence: Synthetic oligonucleotide
  Sense strand starting at position 3976 of SEQ ID NO: 586587
caagaugucccgugggaau

SEQ ID NO: 729347 - RNA, 19 nt, Artificial Sequence
  Description of Artificial Sequence: Synthetic oligonucleotide
  Antisense strand to SEQ ID NO: 729346
auucccacgggacaucuug

SEQ ID NO: 729348 - RNA, 19 nt, Artificial Sequence
  Description of Artificial Sequence: Synthetic oligonucleotide
  Sense strand starting at position 30 of SEQ ID NO: 586588
cguugauguccuuacuguu

SEQ ID NO: 729349 - RNA, 19 nt, Artificial Sequence
  Description of Artificial Sequence: Synthetic oligonucleotide
  Antisense strand to SEQ ID NO: 729348
aacaguaaggacaucaacg

SEQ ID NO: 729350 - RNA, 19 nt, Artificial Sequence
  Description of Artificial Sequence: Synthetic oligonucleotide
  Sense strand starting at position 77 of SEQ ID NO: 586588
gggaucaacucuucucugu

SEQ ID NO: 729351 - RNA, 19 nt, Artificial Sequence
  Description of Artificial Sequence: Synthetic oligonucleotide
  Antisense strand to SEQ ID NO: 729350
acagagaagaguugauccc

SEQ ID NO: 729352 - RNA, 19 nt, Artificial Sequence
  Description of Artificial Sequence: Synthetic oligonucleotide
  Sense strand starting at position 351 of SEQ ID NO: 586588
aagggcaucuacgugagaa

SEQ ID NO: 729353 - RNA, 19 nt, Artificial Sequence
  Description of Artificial Sequence: Synthetic oligonucleotide
  Antisense strand to SEQ ID NO: 729352
uucucacguagaugcccuu

SEQ ID NO: 729354 - RNA, 19 nt, Artificial Sequence
  Description of Artificial Sequence: Synthetic oligonucleotide
  Sense strand starting at position 352 of SEQ ID NO: 586588
agggcaucuacgugagaag

SEQ ID NO: 729355 - RNA, 19 nt, Artificial Sequence
  Description of Artificial Sequence: Synthetic oligonucleotide
  Antisense strand to SEQ ID NO: 729354
cuucucacguagaugcccu

SEQ ID NO: 729356 - RNA, 19 nt, Artificial Sequence
  Description of Artificial Sequence: Synthetic oligonucleotide
  Sense strand starting at position 541 of SEQ ID NO: 586588
cucuuuaaucgacggagaa

SEQ ID NO: 729357 - RNA, 19 nt, Artificial Sequence
  Description of Artificial Sequence: Synthetic oligonucleotide
  Antisense strand to SEQ ID NO: 729356
uucuccgucgauuaaagag

SEQ ID NO: 729358 - RNA, 19 nt, Artificial Sequence
  Description of Artificial Sequence: Synthetic oligonucleotide
  Sense strand starting at position 542 of SEQ ID NO: 586588
ucuuuaaucgacggagaaa

SEQ ID NO: 729359 - RNA, 19 nt, Artificial Sequence
  Description of Artificial Sequence: Synthetic oligonucleotide
  Antisense strand to SEQ ID NO: 729358
uuucuccgucgauuaaaga

SEQ ID NO: 729360 - RNA, 19 nt, Artificial Sequence
  Description of Artificial Sequence: Synthetic oligonucleotide
  Sense strand starting at position 1040 of SEQ ID NO: 586588
uccaaauuagugugcuuag

SEQ ID NO: 729361 - RNA, 19 nt, Artificial Sequence
  Description of Artificial Sequence: Synthetic oligonucleotide
  Antisense strand to SEQ ID NO: 729360
cuaagcacacuaauuugga

SEQ ID NO: 729362 - RNA, 19 nt, Artificial Sequence
  Description of Artificial Sequence: Synthetic oligonucleotide
  Sense strand starting at position 1041 of SEQ ID NO: 586588
ccaaauuagugugcuuagu

SEQ ID NO: 729363 - RNA, 19 nt, Artificial Sequence
  Description of Artificial Sequence: Synthetic oligonucleotide
  Antisense strand to SEQ ID NO: 729362
acuaagcacacuaauuugg

SEQ ID NO: 729364 - RNA, 19 nt, Artificial Sequence
  Description of Artificial Sequence: Synthetic oligonucleotide
  Sense strand starting at position 1043 of SEQ ID NO: 586588
aaauuagugugcuuaguaa

SEQ ID NO: 729365 - RNA, 19 nt, Artificial Sequence
  Description of Artificial Sequence: Synthetic oligonucleotide
  Antisense strand to SEQ ID NO: 729364
uuacuaagcacacuaauuu

SEQ ID NO: 729366 - RNA, 19 nt, Artificial Sequence
  Description of Artificial Sequence: Synthetic oligonucleotide
  Sense strand starting at position 1079 of SEQ ID NO: 586588
cgcaauaggugcuauuacu

SEQ ID NO: 729367 - RNA, 19 nt, Artificial Sequence
  Description of Artificial Sequence: Synthetic oligonucleotide
  Antisense strand to SEQ ID NO: 729366
aguaauagcaccuauugcg

SEQ ID NO: 729368 - RNA, 19 nt, Artificial Sequence
  Description of Artificial Sequence: Synthetic oligonucleotide
  Sense strand starting at position 1085 of SEQ ID NO: 586588
aggugcuauuacucuaacu

SEQ ID NO: 729369 - RNA, 19 nt, Artificial Sequence
  Description of Artificial Sequence: Synthetic oligonucleotide
  Antisense strand to SEQ ID NO: 729368
aguuagaguaauagcaccu

SEQ ID NO: 729370 - RNA, 19 nt, Artificial Sequence
  Description of Artificial Sequence: Synthetic oligonucleotide
  Sense strand starting at position 1388 of SEQ ID NO: 586588
gaccgaauuccuggaaaca

SEQ ID NO: 729371 - RNA, 19 nt, Artificial Sequence
  Description of Artificial Sequence: Synthetic oligonucleotide
  Antisense strand to SEQ ID NO: 729370
uguuuccaggaauucgguc

SEQ ID NO: 729372 - RNA, 19 nt, Artificial Sequence
  Description of Artificial Sequence: Synthetic oligonucleotide
  Sense strand starting at position 2278 of SEQ ID NO: 586588
cagggauccgcggaugagu

SEQ ID NO: 729373 - RNA, 19 nt, Artificial Sequence
  Description of Artificial Sequence: Synthetic oligonucleotide
  Antisense strand to SEQ ID NO: 729372
acucauccgcggaucccug

SEQ ID NO: 729374 - RNA, 19 nt, Artificial Sequence
  Description of Artificial Sequence: Synthetic oligonucleotide
  Sense strand starting at position 2437 of SEQ ID NO: 586588
uagaacucguguuccacaa

SEQ ID NO: 729375 - RNA, 19 nt, Artificial Sequence
  Description of Artificial Sequence: Synthetic oligonucleotide
  Antisense strand to SEQ ID NO: 729374
uuguggaacacgaguucua

SEQ ID NO: 729376 - RNA, 19 nt, Artificial Sequence
  Description of Artificial Sequence: Synthetic oligonucleotide
  Sense strand starting at position 2439 of SEQ ID NO: 586588
gaacucguguuccacaaag

SEQ ID NO: 729377 - RNA, 19 nt, Artificial Sequence
  Description of Artificial Sequence: Synthetic oligonucleotide
  Antisense strand to SEQ ID NO: 729376
cuuuguggaacacgaguuc

SEQ ID NO: 729378 - RNA, 19 nt, Artificial Sequence
  Description of Artificial Sequence: Synthetic oligonucleotide
  Sense strand starting at position 2441 of SEQ ID NO: 586588
acucguguuccacaaaguu

SEQ ID NO: 729379 - RNA, 19 nt, Artificial Sequence
  Description of Artificial Sequence: Synthetic oligonucleotide
  Antisense strand to SEQ ID NO: 729378
aacuuuguggaacacgagu

SEQ ID NO: 729380 - RNA, 19 nt, Artificial Sequence
  Description of Artificial Sequence: Synthetic oligonucleotide
  Sense strand starting at position 2846 of SEQ ID NO: 586588
gugugaugcucaugccugu

SEQ ID NO: 729381 - RNA, 19 nt, Artificial Sequence
  Description of Artificial Sequence: Synthetic oligonucleotide
  Antisense strand to SEQ ID NO: 729380
acaggcaugagcaucacac

SEQ ID NO: 729382 - RNA, 19 nt, Artificial Sequence
  Description of Artificial Sequence: Synthetic oligonucleotide
  Sense strand starting at position 3323 of SEQ ID NO: 586588
gagucagccuguguucuga

SEQ ID NO: 729383 - RNA, 19 nt, Artificial Sequence
  Description of Artificial Sequence: Synthetic oligonucleotide
  Antisense strand to SEQ ID NO: 729382
ucagaacacaggcugacuc

SEQ ID NO: 729384 - RNA, 19 nt, Artificial Sequence
  Description of Artificial Sequence: Synthetic oligonucleotide
  Sense strand starting at position 3325 of SEQ ID NO: 586588
gucagccuguguucugauu

SEQ ID NO: 729385 - RNA, 19 nt, Artificial Sequence
  Description of Artificial Sequence: Synthetic oligonucleotide
  Antisense strand to SEQ ID NO: 729384
aaucagaacacaggcugac

SEQ ID NO: 729386 - RNA, 19 nt, Artificial Sequence
  Description of Artificial Sequence: Synthetic oligonucleotide
  Sense strand starting at position 3337 of SEQ ID NO: 586588
ucugauuugugccuguguu

SEQ ID NO: 729387 - RNA, 19 nt, Artificial Sequence
  Description of Artificial Sequence: Synthetic oligonucleotide
  Antisense strand to SEQ ID NO: 729386
aacacaggcacaaaucaga

SEQ ID NO: 729388 - RNA, 19 nt, Artificial Sequence
  Description of Artificial Sequence: Synthetic oligonucleotide
  Sense strand starting at position 3338 of SEQ ID NO: 586588
cugauuugugccuguguuc

SEQ ID NO: 729389 - RNA, 19 nt, Artificial Sequence
  Description of Artificial Sequence: Synthetic oligonucleotide
  Antisense strand to SEQ ID NO: 729388
gaacacaggcacaaaucag

SEQ ID NO: 729390 - RNA, 19 nt, Artificial Sequence
  Description of Artificial Sequence: Synthetic oligonucleotide
  Sense strand starting at position 3462 of SEQ ID NO: 586588
uuaaccacaucuuggagau

SEQ ID NO: 729391 - RNA, 19 nt, Artificial Sequence
  Description of Artificial Sequence: Synthetic oligonucleotide
  Antisense strand to SEQ ID NO: 729390
aucuccaagaugugguuaa

SEQ ID NO: 729392 - RNA, 19 nt, Artificial Sequence
  Description of Artificial Sequence: Synthetic oligonucleotide
  Sense strand starting at position 3892 of SEQ ID NO: 586588
caaucugucccucagggua

SEQ ID NO: 729393 - RNA, 19 nt, Artificial Sequence
  Description of Artificial Sequence: Synthetic oligonucleotide
  Antisense strand to SEQ ID NO: 729392
uacccugagggacagauug

SEQ ID NO: 729394 - RNA, 19 nt, Artificial Sequence
  Description of Artificial Sequence: Synthetic oligonucleotide
  Sense strand starting at position 296 of SEQ ID NO: 586589
ccaagagacucugucuuaa

SEQ ID NO: 729395 - RNA, 19 nt, Artificial Sequence
  Description of Artificial Sequence: Synthetic oligonucleotide
  Antisense strand to SEQ ID NO: 729394
uuaagacagagucucuugg

SEQ ID NO: 729396 - RNA, 19 nt, Artificial Sequence
  Description of Artificial Sequence: Synthetic oligonucleotide
  Sense strand starting at position 539 of SEQ ID NO: 586589
guggucuccuuaggaggaa

SEQ ID NO: 729397 - RNA, 19 nt, Artificial Sequence
  Description of Artificial Sequence: Synthetic oligonucleotide
  Antisense strand to SEQ ID NO: 729396
uuccuccuaaggagaccac

SEQ ID NO: 729398 - RNA, 19 nt, Artificial Sequence
  Description of Artificial Sequence: Synthetic oligonucleotide
  Sense strand starting at position 568 of SEQ ID NO: 586589
cacaguucccuugauguga

SEQ ID NO: 729399 - RNA, 19 nt, Artificial Sequence
  Description of Artificial Sequence: Synthetic oligonucleotide
  Antisense strand to SEQ ID NO: 729398
ucacaucaagggaacugug

SEQ ID NO: 729400 - RNA, 19 nt, Artificial Sequence
  Description of Artificial Sequence: Synthetic oligonucleotide
  Sense strand starting at position 570 of SEQ ID NO: 586589
caguucccuugaugugaaa

SEQ ID NO: 729401 - RNA, 19 nt, Artificial Sequence
  Description of Artificial Sequence: Synthetic oligonucleotide
  Antisense strand to SEQ ID NO: 729400
uuucacaucaagggaacug

SEQ ID NO: 729402 - RNA, 19 nt, Artificial Sequence
  Description of Artificial Sequence: Synthetic oligonucleotide
  Sense strand starting at position 752 of SEQ ID NO: 586589
gcuggagggccgugauaug

SEQ ID NO: 729403 - RNA, 19 nt, Artificial Sequence
  Description of Artificial Sequence: Synthetic oligonucleotide
  Antisense strand to SEQ ID NO: 729402
cauaucacggcccuccagc

SEQ ID NO: 729404 - RNA, 19 nt, Artificial Sequence
  Description of Artificial Sequence: Synthetic oligonucleotide
  Sense strand starting at position 761 of SEQ ID NO: 586589
ccgugauaugaucacaguu

SEQ ID NO: 729405 - RNA, 19 nt, Artificial Sequence
  Description of Artificial Sequence: Synthetic oligonucleotide
  Antisense strand to SEQ ID NO: 729404
aacugugaucauaucacgg

SEQ ID NO: 729406 - RNA, 19 nt, Artificial Sequence
  Description of Artificial Sequence: Synthetic oligonucleotide
  Sense strand starting at position 1144 of SEQ ID NO: 586589
acuuucugacacgaucuua

SEQ ID NO: 729407 - RNA, 19 nt, Artificial Sequence
  Description of Artificial Sequence: Synthetic oligonucleotide
  Antisense strand to SEQ ID NO: 729406
uaagaucgugucagaaagu

SEQ ID NO: 729408 - RNA, 19 nt, Artificial Sequence
  Description of Artificial Sequence: Synthetic oligonucleotide
  Sense strand starting at position 1149 of SEQ ID NO: 586589
cugacacgaucuuaauuac

SEQ ID NO: 729409 - RNA, 19 nt, Artificial Sequence
  Description of Artificial Sequence: Synthetic oligonucleotide
  Antisense strand to SEQ ID NO: 729408
guaauuaagaucgugucag

SEQ ID NO: 729410 - RNA, 19 nt, Artificial Sequence
  Description of Artificial Sequence: Synthetic oligonucleotide
  Sense strand starting at position 1218 of SEQ ID NO: 586589
agcuuauucccgugucucu

SEQ ID NO: 729411 - RNA, 19 nt, Artificial Sequence
  Description of Artificial Sequence: Synthetic oligonucleotide
  Antisense strand to SEQ ID NO: 729410
agagacacgggaauaagcu

SEQ ID NO: 729412 - RNA, 19 nt, Artificial Sequence
  Description of Artificial Sequence: Synthetic oligonucleotide
  Sense strand starting at position 1219 of SEQ ID NO: 586589
gcuuauucccgugucucua

SEQ ID NO: 729413 - RNA, 19 nt, Artificial Sequence
  Description of Artificial Sequence: Synthetic oligonucleotide
  Antisense strand to SEQ ID NO: 729412
uagagacacgggaauaagc

SEQ ID NO: 729414 - RNA, 19 nt, Artificial Sequence
  Description of Artificial Sequence: Synthetic oligonucleotide
  Sense strand starting at position 1245 of SEQ ID NO: 586589
guagauauuuaccgggcaa

SEQ ID NO: 729415 - RNA, 19 nt, Artificial Sequence
  Description of Artificial Sequence: Synthetic oligonucleotide
  Antisense strand to SEQ ID NO: 729414
uugcccgguaaauaucuac

SEQ ID NO: 729416 - RNA, 19 nt, Artificial Sequence
  Description of Artificial Sequence: Synthetic oligonucleotide
  Sense strand starting at position 1328 of SEQ ID NO: 586589
ggaagccuccucugaccaa

SEQ ID NO: 729417 - RNA, 19 nt, Artificial Sequence
  Description of Artificial Sequence: Synthetic oligonucleotide
  Antisense strand to SEQ ID NO: 729416
uuggucagaggaggcuucc

SEQ ID NO: 729418 - RNA, 19 nt, Artificial Sequence
  Description of Artificial Sequence: Synthetic oligonucleotide
  Sense strand starting at position 1594 of SEQ ID NO: 586589
gcgcucuugugcgguaaca

SEQ ID NO: 729419 - RNA, 19 nt, Artificial Sequence
  Description of Artificial Sequence: Synthetic oligonucleotide
  Antisense strand to SEQ ID NO: 729418
uguuaccgcacaagagcgc

SEQ ID NO: 729420 - RNA, 19 nt, Artificial Sequence
  Description of Artificial Sequence: Synthetic oligonucleotide
  Sense strand starting at position 1595 of SEQ ID NO: 586589
cgcucuugugcgguaacaa

SEQ ID NO: 729421 - RNA, 19 nt, Artificial Sequence
  Description of Artificial Sequence: Synthetic oligonucleotide
  Antisense strand to SEQ ID NO: 729420
uuguuaccgcacaagagcg

SEQ ID NO: 729422 - RNA, 19 nt, Artificial Sequence
  Description of Artificial Sequence: Synthetic oligonucleotide
  Sense strand starting at position 1596 of SEQ ID NO: 586589
gcucuugugcgguaacaau

SEQ ID NO: 729423 - RNA, 19 nt, Artificial Sequence
  Description of Artificial Sequence: Synthetic oligonucleotide
  Antisense strand to SEQ ID NO: 729422
auuguuaccgcacaagagc

SEQ ID NO: 729424 - RNA, 19 nt, Artificial Sequence
  Description of Artificial Sequence: Synthetic oligonucleotide
  Sense strand starting at position 1746 of SEQ ID NO: 586589
ccguucuuaccguguccaa

SEQ ID NO: 729425 - RNA, 19 nt, Artificial Sequence
  Description of Artificial Sequence: Synthetic oligonucleotide
  Antisense strand to SEQ ID NO: 729424
uuggacacgguaagaacgg

SEQ ID NO: 729426 - RNA, 19 nt, Artificial Sequence
  Description of Artificial Sequence: Synthetic oligonucleotide
  Sense strand starting at position 2434 of SEQ ID NO: 586589
acgugcucccugugcauaa

SEQ ID NO: 729427 - RNA, 19 nt, Artificial Sequence
  Description of Artificial Sequence: Synthetic oligonucleotide
  Antisense strand to SEQ ID NO: 729426
uuaugcacagggagcacgu

SEQ ID NO: 729428 - RNA, 19 nt, Artificial Sequence
  Description of Artificial Sequence: Synthetic oligonucleotide
  Sense strand starting at position 2617 of SEQ ID NO: 586589
cucaacucuccgggaggaa

SEQ ID NO: 729429 - RNA, 19 nt, Artificial Sequence
  Description of Artificial Sequence: Synthetic oligonucleotide
  Antisense strand to SEQ ID NO: 729428
uuccucccggagaguugag

SEQ ID NO: 729430 - RNA, 19 nt, Artificial Sequence
  Description of Artificial Sequence: Synthetic oligonucleotide
  Sense strand starting at position 2643 of SEQ ID NO: 586589
agcugaggcuauuuauagu

SEQ ID NO: 729431 - RNA, 19 nt, Artificial Sequence
  Description of Artificial Sequence: Synthetic oligonucleotide
  Antisense strand to SEQ ID NO: 729430
acuauaaauagccucagcu

SEQ ID NO: 729432 - RNA, 19 nt, Artificial Sequence
  Description of Artificial Sequence: Synthetic oligonucleotide
  Sense strand starting at position 2649 of SEQ ID NO: 586589
ggcuauuuauagugcuuau

SEQ ID NO: 729433 - RNA, 19 nt, Artificial Sequence
  Description of Artificial Sequence: Synthetic oligonucleotide
  Antisense strand to SEQ ID NO: 729432
auaagcacuauaaauagcc

SEQ ID NO: 729434 - RNA, 19 nt, Artificial Sequence
  Description of Artificial Sequence: Synthetic oligonucleotide
  Sense strand starting at position 2678 of SEQ ID NO: 586589
ggguguacaugagugaguu

SEQ ID NO: 729435 - RNA, 19 nt, Artificial Sequence
  Description of Artificial Sequence: Synthetic oligonucleotide
  Antisense strand to SEQ ID NO: 729434
aacucacucauguacaccc

SEQ ID NO: 729436 - RNA, 19 nt, Artificial Sequence
  Description of Artificial Sequence: Synthetic oligonucleotide
  Sense strand starting at position 2679 of SEQ ID NO: 586589
gguguacaugagugaguuu

SEQ ID NO: 729437 - RNA, 19 nt, Artificial Sequence
  Description of Artificial Sequence: Synthetic oligonucleotide
  Antisense strand to SEQ ID NO: 729436
aaacucacucauguacacc

SEQ ID NO: 729438 - RNA, 19 nt, Artificial Sequence
  Description of Artificial Sequence: Synthetic oligonucleotide
  Sense strand starting at position 3001 of SEQ ID NO: 586589
ggcccugaauaacuauuaa

SEQ ID NO: 729439 - RNA, 19 nt, Artificial Sequence
  Description of Artificial Sequence: Synthetic oligonucleotide
  Antisense strand to SEQ ID NO: 729438
uuaauaguuauucagggcc

SEQ ID NO: 729440 - RNA, 19 nt, Artificial Sequence
  Description of Artificial Sequence: Synthetic oligonucleotide
  Sense strand starting at position 3040 of SEQ ID NO: 586589
gugucacacucugcuguaa

SEQ ID NO: 729441 - RNA, 19 nt, Artificial Sequence
  Description of Artificial Sequence: Synthetic oligonucleotide
  Antisense strand to SEQ ID NO: 729440
uuacagcagagugugacac

SEQ ID NO: 729442 - RNA, 19 nt, Artificial Sequence
  Description of Artificial Sequence: Synthetic oligonucleotide
  Sense strand starting at position 3042 of SEQ ID NO: 586589
gucacacucugcuguaauc

SEQ ID NO: 729443 - RNA, 19 nt, Artificial Sequence
  Description of Artificial Sequence: Synthetic oligonucleotide
  Antisense strand to SEQ ID NO: 729442
gauuacagcagagugugac

SEQ ID NO: 729444 - RNA, 19 nt, Artificial Sequence
  Description of Artificial Sequence: Synthetic oligonucleotide
  Sense strand starting at position 3072 of SEQ ID NO: 586589
guacaugugccaugucaca

SEQ ID NO: 729445 - RNA, 19 nt, Artificial Sequence
  Description of Artificial Sequence: Synthetic oligonucleotide
  Antisense strand to SEQ ID NO: 729444
ugugacauggcacauguac

SEQ ID NO: 729446 - RNA, 19 nt, Artificial Sequence
  Description of Artificial Sequence: Synthetic oligonucleotide
  Sense strand starting at position 3468 of SEQ ID NO: 586589
ggaccugugcaauacaaua

SEQ ID NO: 729447 - RNA, 19 nt, Artificial Sequence
  Description of Artificial Sequence: Synthetic oligonucleotide
  Antisense strand to SEQ ID NO: 729446
uauuguauugcacaggucc

SEQ ID NO: 729448 - RNA, 19 nt, Artificial Sequence
  Description of Artificial Sequence: Synthetic oligonucleotide
  Sense strand starting at position 3542 of SEQ ID NO: 586589
gcuguaaggccuuaugagu

SEQ ID NO: 729449 - RNA, 19 nt, Artificial Sequence
  Description of Artificial Sequence: Synthetic oligonucleotide
  Antisense strand to SEQ ID NO: 729448
acucauaaggccuuacagc

SEQ ID NO: 729450 - RNA, 19 nt, Artificial Sequence
  Description of Artificial Sequence: Synthetic oligonucleotide
  Sense strand starting at position 3622 of SEQ ID NO: 586589
gcuguagaaucauacaagu

SEQ ID NO: 729451 - RNA, 19 nt, Artificial Sequence
  Description of Artificial Sequence: Synthetic oligonucleotide
  Antisense strand to SEQ ID NO: 729450
acuuguaugauucuacagc

SEQ ID NO: 729452 - RNA, 19 nt, Artificial Sequence
  Description of Artificial Sequence: Synthetic oligonucleotide
  Sense strand starting at position 3635 of SEQ ID NO: 586589
acaaguuuacaguaaguga

SEQ ID NO: 729453 - RNA, 19 nt, Artificial Sequence
  Description of Artificial Sequence: Synthetic oligonucleotide
  Antisense strand to SEQ ID NO: 729452
ucacuuacuguaaacuugu

SEQ ID NO: 729454 - RNA, 19 nt, Artificial Sequence
  Description of Artificial Sequence: Synthetic oligonucleotide
  Sense strand starting at position 3665 of SEQ ID NO: 586589
cagugcuguuguugaguuu

SEQ ID NO: 729455 - RNA, 19 nt, Artificial Sequence
  Description of Artificial Sequence: Synthetic oligonucleotide
  Antisense strand to SEQ ID NO: 729454
aaacucaacaacagcacug

SEQ ID NO: 729456 - RNA, 19 nt, Artificial Sequence
  Description of Artificial Sequence: Synthetic oligonucleotide
  Sense strand starting at position 3699 of SEQ ID NO: 586589
uaccuaacugggugaaugu

SEQ ID NO: 729457 - RNA, 19 nt, Artificial Sequence
  Description of Artificial Sequence: Synthetic oligonucleotide
  Antisense strand to SEQ ID NO: 729456
acauucacccaguuaggua

SEQ ID NO: 729458 - RNA, 19 nt, Artificial Sequence
  Description of Artificial Sequence: Synthetic oligonucleotide
  Sense strand starting at position 3708 of SEQ ID NO: 586589
gggugaauguuaguaucuc

SEQ ID NO: 729459 - RNA, 19 nt, Artificial Sequence
  Description of Artificial Sequence: Synthetic oligonucleotide
  Antisense strand to SEQ ID NO: 729458
gagauacuaacauucaccc

SEQ ID NO: 729460 - RNA, 19 nt, Artificial Sequence
  Description of Artificial Sequence: Synthetic oligonucleotide
  Sense strand starting at position 3709 of SEQ ID NO: 586589
ggugaauguuaguaucuca

SEQ ID NO: 729461 - RNA, 19 nt, Artificial Sequence
  Description of Artificial Sequence: Synthetic oligonucleotide
  Antisense strand to SEQ ID NO: 729460
ugagauacuaacauucacc

SEQ ID NO: 729462 - RNA, 19 nt, Artificial Sequence
  Description of Artificial Sequence: Synthetic oligonucleotide
  Sense strand starting at position 3752 of SEQ ID NO: 586589
agggaagauaacugugcau

SEQ ID NO: 729463 - RNA, 19 nt, Artificial Sequence
  Description of Artificial Sequence: Synthetic oligonucleotide
  Antisense strand to SEQ ID NO: 729462
augcacaguuaucuucccu

SEQ ID NO: 729464 - RNA, 19 nt, Artificial Sequence
  Description of Artificial Sequence: Synthetic oligonucleotide
  Sense strand starting at position 41 of SEQ ID NO: 586590
uuacaaugacucugaggua

SEQ ID NO: 729465 - RNA, 19 nt, Artificial Sequence
  Description of Artificial Sequence: Synthetic oligonucleotide
  Antisense strand to SEQ ID NO: 729464
uaccucagagucauuguaa

SEQ ID NO: 729466 - RNA, 19 nt, Artificial Sequence
  Description of Artificial Sequence: Synthetic oligonucleotide
  Sense strand starting at position 97 of SEQ ID NO: 586590
ucaagaaacuugcuuaaga

SEQ ID NO: 729467 - RNA, 19 nt, Artificial Sequence
  Description of Artificial Sequence: Synthetic oligonucleotide
  Antisense strand to SEQ ID NO: 729466
ucuuaagcaaguuucuuga

SEQ ID NO: 729468 - RNA, 19 nt, Artificial Sequence
  Description of Artificial Sequence: Synthetic oligonucleotide
  Sense strand starting at position 134 of SEQ ID NO: 586590
ucggauccauaaucaaauu

SEQ ID NO: 729469 - RNA, 19 nt, Artificial Sequence
  Description of Artificial Sequence: Synthetic oligonucleotide
  Antisense strand to SEQ ID NO: 729468
aauuugauuauggauccga

SEQ ID NO: 729470 - RNA, 19 nt, Artificial Sequence
  Description of Artificial Sequence: Synthetic oligonucleotide
  Sense strand starting at position 283 of SEQ ID NO: 586590
aacugugguucuccagaua

SEQ ID NO: 729471 - RNA, 19 nt, Artificial Sequence
  Description of Artificial Sequence: Synthetic oligonucleotide
  Antisense strand to SEQ ID NO: 729470
uaucuggagaaccacaguu

SEQ ID NO: 729472 - RNA, 19 nt, Artificial Sequence
  Description of Artificial Sequence: Synthetic oligonucleotide
  Sense strand starting at position 294 of SEQ ID NO: 586590
uccagauaacaaugugucu

SEQ ID NO: 729473 - RNA, 19 nt, Artificial Sequence
  Description of Artificial Sequence: Synthetic oligonucleotide
  Antisense strand to SEQ ID NO: 729472
agacacauuguuaucugga

SEQ ID NO: 729474 - RNA, 19 nt, Artificial Sequence
  Description of Artificial Sequence: Synthetic oligonucleotide
  Sense strand starting at position 313 of SEQ ID NO: 586590
ccgugaggaccauauagua

SEQ ID NO: 729475 - RNA, 19 nt, Artificial Sequence
  Description of Artificial Sequence: Synthetic oligonucleotide
  Antisense strand to SEQ ID NO: 729474
uacuauaugguccucacgg

SEQ ID NO: 729476 - RNA, 19 nt, Artificial Sequence
  Description of Artificial Sequence: Synthetic oligonucleotide
  Sense strand starting at position 485 of SEQ ID NO: 586590
aaacauaaugcuggguauu

SEQ ID NO: 729477 - RNA, 19 nt, Artificial Sequence
  Description of Artificial Sequence: Synthetic oligonucleotide
  Antisense strand to SEQ ID NO: 729476
aauacccagcauuauguuu

SEQ ID NO: 729478 - RNA, 19 nt, Artificial Sequence
  Description of Artificial Sequence: Synthetic oligonucleotide
  Sense strand starting at position 495 of SEQ ID NO: 586590
cuggguauuuaguuauguu

SEQ ID NO: 729479 - RNA, 19 nt, Artificial Sequence
  Description of Artificial Sequence: Synthetic oligonucleotide
  Antisense strand to SEQ ID NO: 729478
aacauaacuaaauacccag

SEQ ID NO: 729480 - RNA, 19 nt, Artificial Sequence
  Description of Artificial Sequence: Synthetic oligonucleotide
  Sense strand starting at position 505 of SEQ ID NO: 586590
aguuauguugaaugcuaaa

SEQ ID NO: 729481 - RNA, 19 nt, Artificial Sequence
  Description of Artificial Sequence: Synthetic oligonucleotide
  Antisense strand to SEQ ID NO: 729480
uuuagcauucaacauaacu

SEQ ID NO: 729482 - RNA, 19 nt, Artificial Sequence
  Description of Artificial Sequence: Synthetic oligonucleotide
  Sense strand starting at position 538 of SEQ ID NO: 586590
aacuaaaggucuccgucaa

SEQ ID NO: 729483 - RNA, 19 nt, Artificial Sequence
  Description of Artificial Sequence: Synthetic oligonucleotide
  Antisense strand to SEQ ID NO: 729482
uugacggagaccuuuaguu

SEQ ID NO: 729484 - RNA, 19 nt, Artificial Sequence
  Description of Artificial Sequence: Synthetic oligonucleotide
  Sense strand starting at position 539 of SEQ ID NO: 586590
acuaaaggucuccgucaaa

SEQ ID NO: 729485 - RNA, 19 nt, Artificial Sequence
  Description of Artificial Sequence: Synthetic oligonucleotide
  Antisense strand to SEQ ID NO: 729484
uuugacggagaccuuuagu

SEQ ID NO: 729486 - RNA, 19 nt, Artificial Sequence
  Description of Artificial Sequence: Synthetic oligonucleotide
  Sense strand starting at position 542 of SEQ ID NO: 586590
aaaggucuccgucaaauga

SEQ ID NO: 729487 - RNA, 19 nt, Artificial Sequence
  Description of Artificial Sequence: Synthetic oligonucleotide
  Antisense strand to SEQ ID NO: 729486
ucauuugacggagaccuuu

SEQ ID NO: 729488 - RNA, 19 nt, Artificial Sequence
  Description of Artificial Sequence: Synthetic oligonucleotide
  Sense strand starting at position 855 of SEQ ID NO: 586590
ucagaugcccaagacuuau

SEQ ID NO: 729489 - RNA, 19 nt, Artificial Sequence
  Description of Artificial Sequence: Synthetic oligonucleotide
  Antisense strand to SEQ ID NO: 729488
auaagucuugggcaucuga

SEQ ID NO: 729490 - RNA, 19 nt, Artificial Sequence
  Description of Artificial Sequence: Synthetic oligonucleotide
  Sense strand starting at position 1106 of SEQ ID NO: 586590
uccgauggcgcaguuaauu

SEQ ID NO: 729491 - RNA, 19 nt, Artificial Sequence
  Description of Artificial Sequence: Synthetic oligonucleotide
  Antisense strand to SEQ ID NO: 729490
aauuaacugcgccaucgga

SEQ ID NO: 729492 - RNA, 19 nt, Artificial Sequence
  Description of Artificial Sequence: Synthetic oligonucleotide
  Sense strand starting at position 1154 of SEQ ID NO: 586590
agguuaaucaaguagcaga

SEQ ID NO: 729493 - RNA, 19 nt, Artificial Sequence
  Description of Artificial Sequence: Synthetic oligonucleotide
  Antisense strand to SEQ ID NO: 729492
ucugcuacuugauuaaccu

SEQ ID NO: 729494 - RNA, 19 nt, Artificial Sequence
  Description of Artificial Sequence: Synthetic oligonucleotide
  Sense strand starting at position 1218 of SEQ ID NO: 586590
gaguuacaaaggugaguaa

SEQ ID NO: 729495 - RNA, 19 nt, Artificial Sequence
  Description of Artificial Sequence: Synthetic oligonucleotide
  Antisense strand to SEQ ID NO: 729494
uuacucaccuuuguaacuc

SEQ ID NO: 729496 - RNA, 19 nt, Artificial Sequence
  Description of Artificial Sequence: Synthetic oligonucleotide
  Sense strand starting at position 1221 of SEQ ID NO: 586590
uuacaaaggugaguaaacu

SEQ ID NO: 729497 - RNA, 19 nt, Artificial Sequence
  Description of Artificial Sequence: Synthetic oligonucleotide
  Antisense strand to SEQ ID NO: 729496
aguuuacucaccuuuguaa

SEQ ID NO: 729498 - RNA, 19 nt, Artificial Sequence
  Description of Artificial Sequence: Synthetic oligonucleotide
  Sense strand starting at position 1349 of SEQ ID NO: 586590
auauuaggcgucuaccuua

SEQ ID NO: 729499 - RNA, 19 nt, Artificial Sequence
  Description of Artificial Sequence: Synthetic oligonucleotide
  Antisense strand to SEQ ID NO: 729498
uaagguagacgccuaauau

SEQ ID NO: 729500 - RNA, 19 nt, Artificial Sequence
  Description of Artificial Sequence: Synthetic oligonucleotide
  Sense strand starting at position 1395 of SEQ ID NO: 586590
aaaggaaagcuuugucuuc

SEQ ID NO: 729501 - RNA, 19 nt, Artificial Sequence
  Description of Artificial Sequence: Synthetic oligonucleotide
  Antisense strand to SEQ ID NO: 729500
gaagacaaagcuuuccuuu

SEQ ID NO: 729502 - RNA, 19 nt, Artificial Sequence
  Description of Artificial Sequence: Synthetic oligonucleotide
  Sense strand starting at position 1517 of SEQ ID NO: 586590
ucaggauaguuaucuccau

SEQ ID NO: 729503 - RNA, 19 nt, Artificial Sequence
  Description of Artificial Sequence: Synthetic oligonucleotide
  Antisense strand to SEQ ID NO: 729502
auggagauaacuauccuga

SEQ ID NO: 729504 - RNA, 19 nt, Artificial Sequence
  Description of Artificial Sequence: Synthetic oligonucleotide
  Sense strand starting at position 1557 of SEQ ID NO: 586590
acuauauucgaguaauucu

SEQ ID NO: 729505 - RNA, 19 nt, Artificial Sequence
  Description of Artificial Sequence: Synthetic oligonucleotide
  Antisense strand to SEQ ID NO: 729504
agaauuacucgaauauagu

SEQ ID NO: 729506 - RNA, 19 nt, Artificial Sequence
  Description of Artificial Sequence: Synthetic oligonucleotide
  Sense strand starting at position 1565 of SEQ ID NO: 586590
cgaguaauucuugggacca

SEQ ID NO: 729507 - RNA, 19 nt, Artificial Sequence
  Description of Artificial Sequence: Synthetic oligonucleotide
  Antisense strand to SEQ ID NO: 729506
uggucccaagaauuacucg

SEQ ID NO: 729508 - RNA, 19 nt, Artificial Sequence
  Description of Artificial Sequence: Synthetic oligonucleotide
  Sense strand starting at position 1594 of SEQ ID NO: 586590
uacacagaccuuuggguaa

SEQ ID NO: 729509 - RNA, 19 nt, Artificial Sequence
  Description of Artificial Sequence: Synthetic oligonucleotide
  Antisense strand to SEQ ID NO: 729508
uuacccaaaggucugugua

SEQ ID NO: 729510 - RNA, 19 nt, Artificial Sequence
  Description of Artificial Sequence: Synthetic oligonucleotide
  Sense strand starting at position 2346 of SEQ ID NO: 586590
ggacaagucaaagggcaua

SEQ ID NO: 729511 - RNA, 19 nt, Artificial Sequence
  Description of Artificial Sequence: Synthetic oligonucleotide
  Antisense strand to SEQ ID NO: 729510
uaugcccuuugacuugucc

SEQ ID NO: 729512 - RNA, 19 nt, Artificial Sequence
  Description of Artificial Sequence: Synthetic oligonucleotide
  Sense strand starting at position 2488 of SEQ ID NO: 586590
uuguguguugcccuuauau

SEQ ID NO: 729513 - RNA, 19 nt, Artificial Sequence
  Description of Artificial Sequence: Synthetic oligonucleotide
  Antisense strand to SEQ ID NO: 729512
auauaagggcaacacacaa

SEQ ID NO: 729514 - RNA, 19 nt, Artificial Sequence
  Description of Artificial Sequence: Synthetic oligonucleotide
  Sense strand starting at position 2490 of SEQ ID NO: 586590
guguguugcccuuauauuu

SEQ ID NO: 729515 - RNA, 19 nt, Artificial Sequence
  Description of Artificial Sequence: Synthetic oligonucleotide
  Antisense strand to SEQ ID NO: 729514
aaauauaagggcaacacac

SEQ ID NO: 729516 - RNA, 19 nt, Artificial Sequence
  Description of Artificial Sequence: Synthetic oligonucleotide
  Sense strand starting at position 2554 of SEQ ID NO: 586590
uuagauuguuagguaguga

SEQ ID NO: 729517 - RNA, 19 nt, Artificial Sequence
  Description of Artificial Sequence: Synthetic oligonucleotide
  Antisense strand to SEQ ID NO: 729516
ucacuaccuaacaaucuaa

SEQ ID NO: 729518 - RNA, 19 nt, Artificial Sequence
  Description of Artificial Sequence: Synthetic oligonucleotide
  Sense strand starting at position 2592 of SEQ ID NO: 586590
uuaugagaguuuccaaauu

SEQ ID NO: 729519 - RNA, 19 nt, Artificial Sequence
  Description of Artificial Sequence: Synthetic oligonucleotide
  Antisense strand to SEQ ID NO: 729518
aauuuggaaacucucauaa

SEQ ID NO: 729520 - RNA, 19 nt, Artificial Sequence
  Description of Artificial Sequence: Synthetic oligonucleotide
  Sense strand starting at position 2612 of SEQ ID NO: 586590
ccugacaugcuucgaaaca

SEQ ID NO: 729521 - RNA, 19 nt, Artificial Sequence
  Description of Artificial Sequence: Synthetic oligonucleotide
  Antisense strand to SEQ ID NO: 729520
uguuucgaagcaugucagg

SEQ ID NO: 729522 - RNA, 19 nt, Artificial Sequence
  Description of Artificial Sequence: Synthetic oligonucleotide
  Sense strand starting at position 2747 of SEQ ID NO: 586590
acagaagaguaugcacaau

SEQ ID NO: 729523 - RNA, 19 nt, Artificial Sequence
  Description of Artificial Sequence: Synthetic oligonucleotide
  Antisense strand to SEQ ID NO: 729522
auugugcauacucuucugu

SEQ ID NO: 729524 - RNA, 19 nt, Artificial Sequence
  Description of Artificial Sequence: Synthetic oligonucleotide
  Sense strand starting at position 2753 of SEQ ID NO: 586590
gaguaugcacaauguuaca

SEQ ID NO: 729525 - RNA, 19 nt, Artificial Sequence
  Description of Artificial Sequence: Synthetic oligonucleotide
  Antisense strand to SEQ ID NO: 729524
uguaacauugugcauacuc

SEQ ID NO: 729526 - RNA, 19 nt, Artificial Sequence
  Description of Artificial Sequence: Synthetic oligonucleotide
  Sense strand starting at position 2780 of SEQ ID NO: 586590
uacauauuugcguaugucu

SEQ ID NO: 729527 - RNA, 19 nt, Artificial Sequence
  Description of Artificial Sequence: Synthetic oligonucleotide
  Antisense strand to SEQ ID NO: 729526
agacauacgcaaauaugua

SEQ ID NO: 729528 - RNA, 19 nt, Artificial Sequence
  Description of Artificial Sequence: Synthetic oligonucleotide
  Sense strand starting at position 2782 of SEQ ID NO: 586590
cauauuugcguaugucuaa

SEQ ID NO: 729529 - RNA, 19 nt, Artificial Sequence
  Description of Artificial Sequence: Synthetic oligonucleotide
  Antisense strand to SEQ ID NO: 729528
uuagacauacgcaaauaug

SEQ ID NO: 729530 - RNA, 19 nt, Artificial Sequence
  Description of Artificial Sequence: Synthetic oligonucleotide
  Sense strand starting at position 2783 of SEQ ID NO: 586590
auauuugcguaugucuaaa

SEQ ID NO: 729531 - RNA, 19 nt, Artificial Sequence
  Description of Artificial Sequence: Synthetic oligonucleotide
  Antisense strand to SEQ ID NO: 729530
uuuagacauacgcaaauau

SEQ ID NO: 729532 - RNA, 19 nt, Artificial Sequence
  Description of Artificial Sequence: Synthetic oligonucleotide
  Sense strand starting at position 3043 of SEQ ID NO: 586590
gaggcagggauccaguauu

SEQ ID NO: 729533 - RNA, 19 nt, Artificial Sequence
  Description of Artificial Sequence: Synthetic oligonucleotide
  Antisense strand to SEQ ID NO: 729532
aauacuggaucccugccuc

SEQ ID NO: 729534 - RNA, 19 nt, Artificial Sequence
  Description of Artificial Sequence: Synthetic oligonucleotide
  Sense strand starting at position 3070 of SEQ ID NO: 586590
ccaaauagaucuguugaau

SEQ ID NO: 729535 - RNA, 19 nt, Artificial Sequence
  Description of Artificial Sequence: Synthetic oligonucleotide
  Antisense strand to SEQ ID NO: 729534
auucaacagaucuauuugg

SEQ ID NO: 729536 - RNA, 19 nt, Artificial Sequence
  Description of Artificial Sequence: Synthetic oligonucleotide
  Sense strand starting at position 3245 of SEQ ID NO: 586590
augcaauuaccgugacaag

SEQ ID NO: 729537 - RNA, 19 nt, Artificial Sequence
  Description of Artificial Sequence: Synthetic oligonucleotide
  Antisense strand to SEQ ID NO: 729536
cuugucacgguaauugcau

SEQ ID NO: 729538 - RNA, 19 nt, Artificial Sequence
  Description of Artificial Sequence: Synthetic oligonucleotide
  Sense strand starting at position 3381 of SEQ ID NO: 586590
uaaaguaaagucggaacau

SEQ ID NO: 729539 - RNA, 19 nt, Artificial Sequence
  Description of Artificial Sequence: Synthetic oligonucleotide
  Antisense strand to SEQ ID NO: 729538
auguuccgacuuuacuuua

SEQ ID NO: 729540 - RNA, 19 nt, Artificial Sequence
  Description of Artificial Sequence: Synthetic oligonucleotide
  Sense strand starting at position 3484 of SEQ ID NO: 586590
ggcucuaggcuggaucuaa

SEQ ID NO: 729541 - RNA, 19 nt, Artificial Sequence
  Description of Artificial Sequence: Synthetic oligonucleotide
  Antisense strand to SEQ ID NO: 729540
uuagauccagccuagagcc

SEQ ID NO: 729542 - RNA, 19 nt, Artificial Sequence
  Description of Artificial Sequence: Synthetic oligonucleotide
  Sense strand starting at position 3537 of SEQ ID NO: 586590
cuccuaccuguguacgaaa

SEQ ID NO: 729543 - RNA, 19 nt, Artificial Sequence
  Description of Artificial Sequence: Synthetic oligonucleotide
  Antisense strand to SEQ ID NO: 729542
uuucguacacagguaggag

SEQ ID NO: 729544 - RNA, 19 nt, Artificial Sequence
  Description of Artificial Sequence: Synthetic oligonucleotide
  Sense strand starting at position 582 of SEQ ID NO: 586591
cuguauauauguguaagua

SEQ ID NO: 729545 - RNA, 19 nt, Artificial Sequence
  Description of Artificial Sequence: Synthetic oligonucleotide
  Antisense strand to SEQ ID NO: 729544
uacuuacacauauauacag

SEQ ID NO: 729546 - RNA, 19 nt, Artificial Sequence
  Description of Artificial Sequence: Synthetic oligonucleotide
  Sense strand starting at position 630 of SEQ ID NO: 586591
ggacaagucaaagggcaua

SEQ ID NO: 729547 - RNA, 19 nt, Artificial Sequence
  Description of Artificial Sequence: Synthetic oligonucleotide
  Antisense strand to SEQ ID NO: 729546
uaugcccuuugacuugucc

SEQ ID NO: 729548 - RNA, 19 nt, Artificial Sequence
  Description of Artificial Sequence: Synthetic oligonucleotide
  Sense strand starting at position 709 of SEQ ID NO: 586591
ccuugacuguuuccuuaca

SEQ ID NO: 729549 - RNA, 19 nt, Artificial Sequence
  Description of Artificial Sequence: Synthetic oligonucleotide
  Antisense strand to SEQ ID NO: 729548
uguaaggaaacagucaagg

SEQ ID NO: 729550 - RNA, 19 nt, Artificial Sequence
  Description of Artificial Sequence: Synthetic oligonucleotide
  Sense strand starting at position 710 of SEQ ID NO: 586591
cuugacuguuuccuuacau

SEQ ID NO: 729551 - RNA, 19 nt, Artificial Sequence
  Description of Artificial Sequence: Synthetic oligonucleotide
  Antisense strand to SEQ ID NO: 729550
auguaaggaaacagucaag

SEQ ID NO: 729552 - RNA, 19 nt, Artificial Sequence
  Description of Artificial Sequence: Synthetic oligonucleotide
  Sense strand starting at position 711 of SEQ ID NO: 586591
uugacuguuuccuuacauc

SEQ ID NO: 729553 - RNA, 19 nt, Artificial Sequence
  Description of Artificial Sequence: Synthetic oligonucleotide
  Antisense strand to SEQ ID NO: 729552
gauguaaggaaacagucaa

SEQ ID NO: 729554 - RNA, 19 nt, Artificial Sequence
  Description of Artificial Sequence: Synthetic oligonucleotide
  Sense strand starting at position 772 of SEQ ID NO: 586591
uuguguguugcccuuauau

SEQ ID NO: 729555 - RNA, 19 nt, Artificial Sequence
  Description of Artificial Sequence: Synthetic oligonucleotide
  Antisense strand to SEQ ID NO: 729554
auauaagggcaacacacaa

SEQ ID NO: 729556 - RNA, 19 nt, Artificial Sequence
  Description of Artificial Sequence: Synthetic oligonucleotide
  Sense strand starting at position 774 of SEQ ID NO: 586591
guguguugcccuuauauuu

SEQ ID NO: 729557 - RNA, 19 nt, Artificial Sequence
  Description of Artificial Sequence: Synthetic oligonucleotide
  Antisense strand to SEQ ID NO: 729556
aaauauaagggcaacacac

SEQ ID NO: 729558 - RNA, 19 nt, Artificial Sequence
  Description of Artificial Sequence: Synthetic oligonucleotide
  Sense strand starting at position 791 of SEQ ID NO: 586591
uucccauuguauguuugau

SEQ ID NO: 729559 - RNA, 19 nt, Artificial Sequence
  Description of Artificial Sequence: Synthetic oligonucleotide
  Antisense strand to SEQ ID NO: 729558
aucaaacauacaaugggaa

SEQ ID NO: 729560 - RNA, 19 nt, Artificial Sequence
  Description of Artificial Sequence: Synthetic oligonucleotide
  Sense strand starting at position 838 of SEQ ID NO: 586591
uuagauuguuagguaguga

SEQ ID NO: 729561 - RNA, 19 nt, Artificial Sequence
  Description of Artificial Sequence: Synthetic oligonucleotide
  Antisense strand to SEQ ID NO: 729560
ucacuaccuaacaaucuaa

SEQ ID NO: 729562 - RNA, 19 nt, Artificial Sequence
  Description of Artificial Sequence: Synthetic oligonucleotide
  Sense strand starting at position 876 of SEQ ID NO: 586591
uuaugagaguuuccaaauu

SEQ ID NO: 729563 - RNA, 19 nt, Artificial Sequence
  Description of Artificial Sequence: Synthetic oligonucleotide
  Antisense strand to SEQ ID NO: 729562
aauuuggaaacucucauaa

SEQ ID NO: 729564 - RNA, 19 nt, Artificial Sequence
  Description of Artificial Sequence: Synthetic oligonucleotide
  Sense strand starting at position 896 of SEQ ID NO: 586591
ccugacaugcuucgaaaca

SEQ ID NO: 729565 - RNA, 19 nt, Artificial Sequence
  Description of Artificial Sequence: Synthetic oligonucleotide
  Antisense strand to SEQ ID NO: 729564
uguuucgaagcaugucagg

SEQ ID NO: 729566 - RNA, 19 nt, Artificial Sequence
  Description of Artificial Sequence: Synthetic oligonucleotide
  Sense strand starting at position 1031 of SEQ ID NO: 586591
acagaagaguaugcacaau

SEQ ID NO: 729567 - RNA, 19 nt, Artificial Sequence
  Description of Artificial Sequence: Synthetic oligonucleotide
  Antisense strand to SEQ ID NO: 729566
auugugcauacucuucugu

SEQ ID NO: 729568 - RNA, 19 nt, Artificial Sequence
  Description of Artificial Sequence: Synthetic oligonucleotide
  Sense strand starting at position 1037 of SEQ ID NO: 586591
gaguaugcacaauguuaca

SEQ ID NO: 729569 - RNA, 19 nt, Artificial Sequence
  Description of Artificial Sequence: Synthetic oligonucleotide
  Antisense strand to SEQ ID NO: 729568
uguaacauugugcauacuc

SEQ ID NO: 729570 - RNA, 19 nt, Artificial Sequence
  Description of Artificial Sequence: Synthetic oligonucleotide
  Sense strand starting at position 1064 of SEQ ID NO: 586591
uacauauuugcguaugucu

SEQ ID NO: 729571 - RNA, 19 nt, Artificial Sequence
  Description of Artificial Sequence: Synthetic oligonucleotide
  Antisense strand to SEQ ID NO: 729570
agacauacgcaaauaugua

SEQ ID NO: 729572 - RNA, 19 nt, Artificial Sequence
  Description of Artificial Sequence: Synthetic oligonucleotide
  Sense strand starting at position 1066 of SEQ ID NO: 586591
cauauuugcguaugucuaa

SEQ ID NO: 729573 - RNA, 19 nt, Artificial Sequence
  Description of Artificial Sequence: Synthetic oligonucleotide
  Antisense strand to SEQ ID NO: 729572
uuagacauacgcaaauaug

SEQ ID NO: 729574 - RNA, 19 nt, Artificial Sequence
  Description of Artificial Sequence: Synthetic oligonucleotide
  Sense strand starting at position 1067 of SEQ ID NO: 586591
auauuugcguaugucuaaa

SEQ ID NO: 729575 - RNA, 19 nt, Artificial Sequence
  Description of Artificial Sequence: Synthetic oligonucleotide
  Antisense strand to SEQ ID NO: 729574
uuuagacauacgcaaauau

SEQ ID NO: 729576 - RNA, 19 nt, Artificial Sequence
  Description of Artificial Sequence: Synthetic oligonucleotide
  Sense strand starting at position 1229 of SEQ ID NO: 586591
ccucuaucauguuugcaua

SEQ ID NO: 729577 - RNA, 19 nt, Artificial Sequence
  Description of Artificial Sequence: Synthetic oligonucleotide
  Antisense strand to SEQ ID NO: 729576
uaugcaaacaugauagagg

SEQ ID NO: 729578 - RNA, 19 nt, Artificial Sequence
  Description of Artificial Sequence: Synthetic oligonucleotide
  Sense strand starting at position 1231 of SEQ ID NO: 586591
ucuaucauguuugcauaca

SEQ ID NO: 729579 - RNA, 19 nt, Artificial Sequence
  Description of Artificial Sequence: Synthetic oligonucleotide
  Antisense strand to SEQ ID NO: 729578
uguaugcaaacaugauaga

SEQ ID NO: 729580 - RNA, 19 nt, Artificial Sequence
  Description of Artificial Sequence: Synthetic oligonucleotide
  Sense strand starting at position 1327 of SEQ ID NO: 586591
gaggcagggauccaguauu

SEQ ID NO: 729581 - RNA, 19 nt, Artificial Sequence
  Description of Artificial Sequence: Synthetic oligonucleotide
  Antisense strand to SEQ ID NO: 729580
aauacuggaucccugccuc

SEQ ID NO: 729582 - RNA, 19 nt, Artificial Sequence
  Description of Artificial Sequence: Synthetic oligonucleotide
  Sense strand starting at position 1354 of SEQ ID NO: 586591
ccaaauagaucuguugaau

SEQ ID NO: 729583 - RNA, 19 nt, Artificial Sequence
  Description of Artificial Sequence: Synthetic oligonucleotide
  Antisense strand to SEQ ID NO: 729582
auucaacagaucuauuugg

SEQ ID NO: 729584 - RNA, 19 nt, Artificial Sequence
  Description of Artificial Sequence: Synthetic oligonucleotide
  Sense strand starting at position 1529 of SEQ ID NO: 586591
augcaauuaccgugacaag

SEQ ID NO: 729585 - RNA, 19 nt, Artificial Sequence
  Description of Artificial Sequence: Synthetic oligonucleotide
  Antisense strand to SEQ ID NO: 729584
cuugucacgguaauugcau

SEQ ID NO: 729586 - RNA, 19 nt, Artificial Sequence
  Description of Artificial Sequence: Synthetic oligonucleotide
  Sense strand starting at position 1665 of SEQ ID NO: 586591
uaaaguaaagucggaacau

SEQ ID NO: 729587 - RNA, 19 nt, Artificial Sequence
  Description of Artificial Sequence: Synthetic oligonucleotide
  Antisense strand to SEQ ID NO: 729586
auguuccgacuuuacuuua

SEQ ID NO: 729588 - RNA, 19 nt, Artificial Sequence
  Description of Artificial Sequence: Synthetic oligonucleotide
  Sense strand starting at position 1768 of SEQ ID NO: 586591
ggcucuaggcuggaucuaa

SEQ ID NO: 729589 - RNA, 19 nt, Artificial Sequence
  Description of Artificial Sequence: Synthetic oligonucleotide
  Antisense strand to SEQ ID NO: 729588
uuagauccagccuagagcc

SEQ ID NO: 729590 - RNA, 19 nt, Artificial Sequence
  Description of Artificial Sequence: Synthetic oligonucleotide
  Sense strand starting at position 1821 of SEQ ID NO: 586591
cuccuaccuguguacgaaa

SEQ ID NO: 729591 - RNA, 19 nt, Artificial Sequence
  Description of Artificial Sequence: Synthetic oligonucleotide
  Antisense strand to SEQ ID NO: 729590
uuucguacacagguaggag

SEQ ID NO: 729592 - RNA, 19 nt, Artificial Sequence
  Description of Artificial Sequence: Synthetic oligonucleotide
  Sense strand starting at position 1842 of SEQ ID NO: 586591
aaacuauucucgucgaagu

SEQ ID NO: 729593 - RNA, 19 nt, Artificial Sequence
  Description of Artificial Sequence: Synthetic oligonucleotide
  Antisense strand to SEQ ID NO: 729592
acuucgacgagaauaguuu

SEQ ID NO: 729594 - RNA, 19 nt, Artificial Sequence
  Description of Artificial Sequence: Synthetic oligonucleotide
  Sense strand starting at position 2654 of SEQ ID NO: 586591
ggcacagcucucuaaacca

SEQ ID NO: 729595 - RNA, 19 nt, Artificial Sequence
  Description of Artificial Sequence: Synthetic oligonucleotide
  Antisense strand to SEQ ID NO: 729594
ugguuuagagagcugugcc

SEQ ID NO: 729596 - RNA, 19 nt, Artificial Sequence
  Description of Artificial Sequence: Synthetic oligonucleotide
  Sense strand starting at position 2724 of SEQ ID NO: 586591
aaaucaucacgaugaaguc

SEQ ID NO: 729597 - RNA, 19 nt, Artificial Sequence
  Description of Artificial Sequence: Synthetic oligonucleotide
  Antisense strand to SEQ ID NO: 729596
gacuucaucgugaugauuu

SEQ ID NO: 729598 - RNA, 19 nt, Artificial Sequence
  Description of Artificial Sequence: Synthetic oligonucleotide
  Sense strand starting at position 2736 of SEQ ID NO: 586591
ugaagucagaggcgagaaa

SEQ ID NO: 729599 - RNA, 19 nt, Artificial Sequence
  Description of Artificial Sequence: Synthetic oligonucleotide
  Antisense strand to SEQ ID NO: 729598
uuucucgccucugacuuca

SEQ ID NO: 729600 - RNA, 19 nt, Artificial Sequence
  Description of Artificial Sequence: Synthetic oligonucleotide
  Sense strand starting at position 2826 of SEQ ID NO: 586591
gggagauaguagcuaucaa

SEQ ID NO: 729601 - RNA, 19 nt, Artificial Sequence
  Description of Artificial Sequence: Synthetic oligonucleotide
  Antisense strand to SEQ ID NO: 729600
uugauagcuacuaucuccc

SEQ ID NO: 729602 - RNA, 19 nt, Artificial Sequence
  Description of Artificial Sequence: Synthetic oligonucleotide
  Sense strand starting at position 3210 of SEQ ID NO: 586591
ccggccuaucaaugaauaa

SEQ ID NO: 729603 - RNA, 19 nt, Artificial Sequence
  Description of Artificial Sequence: Synthetic oligonucleotide
  Antisense strand to SEQ ID NO: 729602
uuauucauugauaggccgg

SEQ ID NO: 729604 - RNA, 19 nt, Artificial Sequence
  Description of Artificial Sequence: Synthetic oligonucleotide
  Sense strand starting at position 3251 of SEQ ID NO: 586591
gauaguauuggaggucaag

SEQ ID NO: 729605 - RNA, 19 nt, Artificial Sequence
  Description of Artificial Sequence: Synthetic oligonucleotide
  Antisense strand to SEQ ID NO: 729604
cuugaccuccaauacuauc

SEQ ID NO: 729606 - RNA, 19 nt, Artificial Sequence
  Description of Artificial Sequence: Synthetic oligonucleotide
  Sense strand starting at position 3263 of SEQ ID NO: 586591
ggucaagucaaguauguuc

SEQ ID NO: 729607 - RNA, 19 nt, Artificial Sequence
  Description of Artificial Sequence: Synthetic oligonucleotide
  Antisense strand to SEQ ID NO: 729606
gaacauacuugacuugacc

SEQ ID NO: 729608 - RNA, 19 nt, Artificial Sequence
  Description of Artificial Sequence: Synthetic oligonucleotide
  Sense strand starting at position 3271 of SEQ ID NO: 586591
caaguauguuccucuugga

SEQ ID NO: 729609 - RNA, 19 nt, Artificial Sequence
  Description of Artificial Sequence: Synthetic oligonucleotide
  Antisense strand to SEQ ID NO: 729608
uccaagaggaacauacuug

SEQ ID NO: 729610 - RNA, 19 nt, Artificial Sequence
  Description of Artificial Sequence: Synthetic oligonucleotide
  Sense strand starting at position 3276 of SEQ ID NO: 586591
auguuccucuuggaaauuu

SEQ ID NO: 729611 - RNA, 19 nt, Artificial Sequence
  Description of Artificial Sequence: Synthetic oligonucleotide
  Antisense strand to SEQ ID NO: 729610
aaauuuccaagaggaacau

SEQ ID NO: 729612 - RNA, 19 nt, Artificial Sequence
  Description of Artificial Sequence: Synthetic oligonucleotide
  Sense strand starting at position 3330 of SEQ ID NO: 586591
gcuaacauuuaugaaguau

SEQ ID NO: 729613 - RNA, 19 nt, Artificial Sequence
  Description of Artificial Sequence: Synthetic oligonucleotide
  Antisense strand to SEQ ID NO: 729612
auacuucauaaauguuagc

SEQ ID NO: 729614 - RNA, 19 nt, Artificial Sequence
  Description of Artificial Sequence: Synthetic oligonucleotide
  Sense strand starting at position 3628 of SEQ ID NO: 586591
uuauacuguucugcugaaa

SEQ ID NO: 729615 - RNA, 19 nt, Artificial Sequence
  Description of Artificial Sequence: Synthetic oligonucleotide
  Antisense strand to SEQ ID NO: 729614
uuucagcagaacaguauaa

SEQ ID NO: 729616 - RNA, 19 nt, Artificial Sequence
  Description of Artificial Sequence: Synthetic oligonucleotide
  Sense strand starting at position 3631 of SEQ ID NO: 586591
uacuguucugcugaaauug

SEQ ID NO: 729617 - RNA, 19 nt, Artificial Sequence
  Description of Artificial Sequence: Synthetic oligonucleotide
  Antisense strand to SEQ ID NO: 729616
caauuucagcagaacagua

SEQ ID NO: 729618 - RNA, 19 nt, Artificial Sequence
  Description of Artificial Sequence: Synthetic oligonucleotide
  Sense strand starting at position 3860 of SEQ ID NO: 586591
gaauuaggcuuucuuggau

SEQ ID NO: 729619 - RNA, 19 nt, Artificial Sequence
  Description of Artificial Sequence: Synthetic oligonucleotide
  Antisense strand to SEQ ID NO: 729618
auccaagaaagccuaauuc

SEQ ID NO: 729620 - RNA, 19 nt, Artificial Sequence
  Description of Artificial Sequence: Synthetic oligonucleotide
  Sense strand starting at position 3867 of SEQ ID NO: 586591
gcuuucuuggauggguaga

SEQ ID NO: 729621 - RNA, 19 nt, Artificial Sequence
  Description of Artificial Sequence: Synthetic oligonucleotide
  Antisense strand to SEQ ID NO: 729620
ucuacccauccaagaaagc

SEQ ID NO: 729622 - RNA, 19 nt, Artificial Sequence
  Description of Artificial Sequence: Synthetic oligonucleotide
  Sense strand starting at position 3891 of SEQ ID NO: 586591
uguggaggugugcagauaa

SEQ ID NO: 729623 - RNA, 19 nt, Artificial Sequence
  Description of Artificial Sequence: Synthetic oligonucleotide
  Antisense strand to SEQ ID NO: 729622
uuaucugcacaccuccaca

SEQ ID NO: 729624 - RNA, 19 nt, Artificial Sequence
  Description of Artificial Sequence: Synthetic oligonucleotide
  Sense strand starting at position 654 of SEQ ID NO: 586592
aggguacucagaggucaag

SEQ ID NO: 729625 - RNA, 19 nt, Artificial Sequence
  Description of Artificial Sequence: Synthetic oligonucleotide
  Antisense strand to SEQ ID NO: 729624
cuugaccucugaguacccu

SEQ ID NO: 729626 - RNA, 19 nt, Artificial Sequence
  Description of Artificial Sequence: Synthetic oligonucleotide
  Sense strand starting at position 657 of SEQ ID NO: 586592
guacucagaggucaagcua

SEQ ID NO: 729627 - RNA, 19 nt, Artificial Sequence
  Description of Artificial Sequence: Synthetic oligonucleotide
  Antisense strand to SEQ ID NO: 729626
uagcuugaccucugaguac

SEQ ID NO: 729628 - RNA, 19 nt, Artificial Sequence
  Description of Artificial Sequence: Synthetic oligonucleotide
  Sense strand starting at position 684 of SEQ ID NO: 586592
aaaggauggucucuccagu

SEQ ID NO: 729629 - RNA, 19 nt, Artificial Sequence
  Description of Artificial Sequence: Synthetic oligonucleotide
  Antisense strand to SEQ ID NO: 729628
acuggagagaccauccuuu

SEQ ID NO: 729630 - RNA, 19 nt, Artificial Sequence
  Description of Artificial Sequence: Synthetic oligonucleotide
  Sense strand starting at position 707 of SEQ ID NO: 586592
cuagguauuuaaggccaau

SEQ ID NO: 729631 - RNA, 19 nt, Artificial Sequence
  Description of Artificial Sequence: Synthetic oligonucleotide
  Antisense strand to SEQ ID NO: 729630
auuggccuuaaauaccuag

SEQ ID NO: 729632 - RNA, 19 nt, Artificial Sequence
  Description of Artificial Sequence: Synthetic oligonucleotide
  Sense strand starting at position 738 of SEQ ID NO: 586592
gcaucagcuuucuugucua

SEQ ID NO: 729633 - RNA, 19 nt, Artificial Sequence
  Description of Artificial Sequence: Synthetic oligonucleotide
  Antisense strand to SEQ ID NO: 729632
uagacaagaaagcugaugc

SEQ ID NO: 729634 - RNA, 19 nt, Artificial Sequence
  Description of Artificial Sequence: Synthetic oligonucleotide
  Sense strand starting at position 792 of SEQ ID NO: 586592
agaguuacgaguuagugaa

SEQ ID NO: 729635 - RNA, 19 nt, Artificial Sequence
  Description of Artificial Sequence: Synthetic oligonucleotide
  Antisense strand to SEQ ID NO: 729634
uucacuaacucguaacucu

SEQ ID NO: 729636 - RNA, 19 nt, Artificial Sequence
  Description of Artificial Sequence: Synthetic oligonucleotide
  Sense strand starting at position 796 of SEQ ID NO: 586592
uuacgaguuagugaaugcu

SEQ ID NO: 729637 - RNA, 19 nt, Artificial Sequence
  Description of Artificial Sequence: Synthetic oligonucleotide
  Antisense strand to SEQ ID NO: 729636
agcauucacuaacucguaa

SEQ ID NO: 729638 - RNA, 19 nt, Artificial Sequence
  Description of Artificial Sequence: Synthetic oligonucleotide
  Sense strand starting at position 992 of SEQ ID NO: 586592
ggcugucuugucucaagcu

SEQ ID NO: 729639 - RNA, 19 nt, Artificial Sequence
  Description of Artificial Sequence: Synthetic oligonucleotide
  Antisense strand to SEQ ID NO: 729638
agcuugagacaagacagcc

SEQ ID NO: 729640 - RNA, 19 nt, Artificial Sequence
  Description of Artificial Sequence: Synthetic oligonucleotide
  Sense strand starting at position 1083 of SEQ ID NO: 586592
ucgauucuucccugcccaa

SEQ ID NO: 729641 - RNA, 19 nt, Artificial Sequence
  Description of Artificial Sequence: Synthetic oligonucleotide
  Antisense strand to SEQ ID NO: 729640
uugggcagggaagaaucga

SEQ ID NO: 729642 - RNA, 19 nt, Artificial Sequence
  Description of Artificial Sequence: Synthetic oligonucleotide
  Sense strand starting at position 1124 of SEQ ID NO: 586592
gagaguucccuccggagau

SEQ ID NO: 729643 - RNA, 19 nt, Artificial Sequence
  Description of Artificial Sequence: Synthetic oligonucleotide
  Antisense strand to SEQ ID NO: 729642
aucuccggagggaacucuc

SEQ ID NO: 729644 - RNA, 19 nt, Artificial Sequence
  Description of Artificial Sequence: Synthetic oligonucleotide
  Sense strand starting at position 1136 of SEQ ID NO: 586592
cggagaugcccucaacaag

SEQ ID NO: 729645 - RNA, 19 nt, Artificial Sequence
  Description of Artificial Sequence: Synthetic oligonucleotide
  Antisense strand to SEQ ID NO: 729644
cuuguugagggcaucuccg

SEQ ID NO: 729646 - RNA, 19 nt, Artificial Sequence
  Description of Artificial Sequence: Synthetic oligonucleotide
  Sense strand starting at position 1544 of SEQ ID NO: 586592
accggaaacucuccacagu

SEQ ID NO: 729647 - RNA, 19 nt, Artificial Sequence
  Description of Artificial Sequence: Synthetic oligonucleotide
  Antisense strand to SEQ ID NO: 729646
acuguggagaguuuccggu

SEQ ID NO: 729648 - RNA, 19 nt, Artificial Sequence
  Description of Artificial Sequence: Synthetic oligonucleotide
  Sense strand starting at position 1643 of SEQ ID NO: 586592
aggacugggucauuacaca

SEQ ID NO: 729649 - RNA, 19 nt, Artificial Sequence
  Description of Artificial Sequence: Synthetic oligonucleotide
  Antisense strand to SEQ ID NO: 729648
uguguaaugacccaguccu

SEQ ID NO: 729650 - RNA, 19 nt, Artificial Sequence
  Description of Artificial Sequence: Synthetic oligonucleotide
  Sense strand starting at position 1667 of SEQ ID NO: 586592
gcccaucagaagugaaugu

SEQ ID NO: 729651 - RNA, 19 nt, Artificial Sequence
  Description of Artificial Sequence: Synthetic oligonucleotide
  Antisense strand to SEQ ID NO: 729650
acauucacuucugaugggc

SEQ ID NO: 729652 - RNA, 19 nt, Artificial Sequence
  Description of Artificial Sequence: Synthetic oligonucleotide
  Sense strand starting at position 1678 of SEQ ID NO: 586592
gugaaugugucggucagca

SEQ ID NO: 729653 - RNA, 19 nt, Artificial Sequence
  Description of Artificial Sequence: Synthetic oligonucleotide
  Antisense strand to SEQ ID NO: 729652
ugcugaccgacacauucac

SEQ ID NO: 729654 - RNA, 19 nt, Artificial Sequence
  Description of Artificial Sequence: Synthetic oligonucleotide
  Sense strand starting at position 1680 of SEQ ID NO: 586592
gaaugugucggucagcaag

SEQ ID NO: 729655 - RNA, 19 nt, Artificial Sequence
  Description of Artificial Sequence: Synthetic oligonucleotide
  Antisense strand to SEQ ID NO: 729654
cuugcugaccgacacauuc

SEQ ID NO: 729656 - RNA, 19 nt, Artificial Sequence
  Description of Artificial Sequence: Synthetic oligonucleotide
  Sense strand starting at position 1682 of SEQ ID NO: 586592
augugucggucagcaagua

SEQ ID NO: 729657 - RNA, 19 nt, Artificial Sequence
  Description of Artificial Sequence: Synthetic oligonucleotide
  Antisense strand to SEQ ID NO: 729656
uacuugcugaccgacacau

SEQ ID NO: 729658 - RNA, 19 nt, Artificial Sequence
  Description of Artificial Sequence: Synthetic oligonucleotide
  Sense strand starting at position 2169 of SEQ ID NO: 586592
gugcauuuagugugguuua

SEQ ID NO: 729659 - RNA, 19 nt, Artificial Sequence
  Description of Artificial Sequence: Synthetic oligonucleotide
  Antisense strand to SEQ ID NO: 729658
uaaaccacacuaaaugcac

SEQ ID NO: 729660 - RNA, 19 nt, Artificial Sequence
  Description of Artificial Sequence: Synthetic oligonucleotide
  Sense strand starting at position 2174 of SEQ ID NO: 586592
uuuagugugguuuauaaca

SEQ ID NO: 729661 - RNA, 19 nt, Artificial Sequence
  Description of Artificial Sequence: Synthetic oligonucleotide
  Antisense strand to SEQ ID NO: 729660
uguuauaaaccacacuaaa

SEQ ID NO: 729662 - RNA, 19 nt, Artificial Sequence
  Description of Artificial Sequence: Synthetic oligonucleotide
  Sense strand starting at position 2181 of SEQ ID NO: 586592
ugguuuauaacaugggugu

SEQ ID NO: 729663 - RNA, 19 nt, Artificial Sequence
  Description of Artificial Sequence: Synthetic oligonucleotide
  Antisense strand to SEQ ID NO: 729662
acacccauguuauaaacca

SEQ ID NO: 729664 - RNA, 19 nt, Artificial Sequence
  Description of Artificial Sequence: Synthetic oligonucleotide
  Sense strand starting at position 2235 of SEQ ID NO: 586592
aggccuuggcccuagaaua

SEQ ID NO: 729665 - RNA, 19 nt, Artificial Sequence
  Description of Artificial Sequence: Synthetic oligonucleotide
  Antisense strand to SEQ ID NO: 729664
uauucuagggccaaggccu

SEQ ID NO: 729666 - RNA, 19 nt, Artificial Sequence
  Description of Artificial Sequence: Synthetic oligonucleotide
  Sense strand starting at position 2278 of SEQ ID NO: 586592
cacaauucuggccgagcaa

SEQ ID NO: 729667 - RNA, 19 nt, Artificial Sequence
  Description of Artificial Sequence: Synthetic oligonucleotide
  Antisense strand to SEQ ID NO: 729666
uugcucggccagaauugug

SEQ ID NO: 729668 - RNA, 19 nt, Artificial Sequence
  Description of Artificial Sequence: Synthetic oligonucleotide
  Sense strand starting at position 2309 of SEQ ID NO: 586592
gaagcucugucugcacaga

SEQ ID NO: 729669 - RNA, 19 nt, Artificial Sequence
  Description of Artificial Sequence: Synthetic oligonucleotide
  Antisense strand to SEQ ID NO: 729668
ucugugcagacagagcuuc

SEQ ID NO: 729670 - RNA, 19 nt, Artificial Sequence
  Description of Artificial Sequence: Synthetic oligonucleotide
  Sense strand starting at position 2310 of SEQ ID NO: 586592
aagcucugucugcacagaa

SEQ ID NO: 729671 - RNA, 19 nt, Artificial Sequence
  Description of Artificial Sequence: Synthetic oligonucleotide
  Antisense strand to SEQ ID NO: 729670
uucugugcagacagagcuu

SEQ ID NO: 729672 - RNA, 19 nt, Artificial Sequence
  Description of Artificial Sequence: Synthetic oligonucleotide
  Sense strand starting at position 2446 of SEQ ID NO: 586592
gcccaacacggcuguuuaa

SEQ ID NO: 729673 - RNA, 19 nt, Artificial Sequence
  Description of Artificial Sequence: Synthetic oligonucleotide
  Antisense strand to SEQ ID NO: 729672
uuaaacagccguguugggc

SEQ ID NO: 729674 - RNA, 19 nt, Artificial Sequence
  Description of Artificial Sequence: Synthetic oligonucleotide
  Sense strand starting at position 2455 of SEQ ID NO: 586592
ggcuguuuaauacagagca

SEQ ID NO: 729675 - RNA, 19 nt, Artificial Sequence
  Description of Artificial Sequence: Synthetic oligonucleotide
  Antisense strand to SEQ ID NO: 729674
ugcucuguauuaaacagcc

SEQ ID NO: 729676 - RNA, 19 nt, Artificial Sequence
  Description of Artificial Sequence: Synthetic oligonucleotide
  Sense strand starting at position 2572 of SEQ ID NO: 586592
ggcugugaugagcgagagu

SEQ ID NO: 729677 - RNA, 19 nt, Artificial Sequence
  Description of Artificial Sequence: Synthetic oligonucleotide
  Antisense strand to SEQ ID NO: 729676
acucucgcucaucacagcc

SEQ ID NO: 729678 - RNA, 19 nt, Artificial Sequence
  Description of Artificial Sequence: Synthetic oligonucleotide
  Sense strand starting at position 2583 of SEQ ID NO: 586592
gcgagagucuguccaccau

SEQ ID NO: 729679 - RNA, 19 nt, Artificial Sequence
  Description of Artificial Sequence: Synthetic oligonucleotide
  Antisense strand to SEQ ID NO: 729678
augguggacagacucucgc

SEQ ID NO: 729680 - RNA, 19 nt, Artificial Sequence
  Description of Artificial Sequence: Synthetic oligonucleotide
  Sense strand starting at position 2688 of SEQ ID NO: 586592
gcucccuucugcccagaaa

SEQ ID NO: 729681 - RNA, 19 nt, Artificial Sequence
  Description of Artificial Sequence: Synthetic oligonucleotide
  Antisense strand to SEQ ID NO: 729680
uuucugggcagaagggagc

SEQ ID NO: 729682 - RNA, 19 nt, Artificial Sequence
  Description of Artificial Sequence: Synthetic oligonucleotide
  Sense strand starting at position 2740 of SEQ ID NO: 586592
ggcccaugacuuuggaagu

SEQ ID NO: 729683 - RNA, 19 nt, Artificial Sequence
  Description of Artificial Sequence: Synthetic oligonucleotide
  Antisense strand to SEQ ID NO: 729682
acuuccaaagucaugggcc

SEQ ID NO: 729684 - RNA, 19 nt, Artificial Sequence
  Description of Artificial Sequence: Synthetic oligonucleotide
  Sense strand starting at position 2751 of SEQ ID NO: 586592
uuggaaguucggugucaga

SEQ ID NO: 729685 - RNA, 19 nt, Artificial Sequence
  Description of Artificial Sequence: Synthetic oligonucleotide
  Antisense strand to SEQ ID NO: 729684
ucugacaccgaacuuccaa

SEQ ID NO: 729686 - RNA, 19 nt, Artificial Sequence
  Description of Artificial Sequence: Synthetic oligonucleotide
  Sense strand starting at position 2791 of SEQ ID NO: 586592
cggagucucugggugaaau

SEQ ID NO: 729687 - RNA, 19 nt, Artificial Sequence
  Description of Artificial Sequence: Synthetic oligonucleotide
  Antisense strand to SEQ ID NO: 729686
auuucacccagagacuccg

SEQ ID NO: 729688 - RNA, 19 nt, Artificial Sequence
  Description of Artificial Sequence: Synthetic oligonucleotide
  Sense strand starting at position 2792 of SEQ ID NO: 586592
ggagucucugggugaaaug

SEQ ID NO: 729689 - RNA, 19 nt, Artificial Sequence
  Description of Artificial Sequence: Synthetic oligonucleotide
  Antisense strand to SEQ ID NO: 729688
cauuucacccagagacucc

SEQ ID NO: 729690 - RNA, 19 nt, Artificial Sequence
  Description of Artificial Sequence: Synthetic oligonucleotide
  Sense strand starting at position 2883 of SEQ ID NO: 586592
ccuacaauugugugaggca

SEQ ID NO: 729691 - RNA, 19 nt, Artificial Sequence
  Description of Artificial Sequence: Synthetic oligonucleotide
  Antisense strand to SEQ ID NO: 729690
ugccucacacaauuguagg

SEQ ID NO: 729692 - RNA, 19 nt, Artificial Sequence
  Description of Artificial Sequence: Synthetic oligonucleotide
  Sense strand starting at position 2974 of SEQ ID NO: 586592
gcuggagucccaggagaca

SEQ ID NO: 729693 - RNA, 19 nt, Artificial Sequence
  Description of Artificial Sequence: Synthetic oligonucleotide
  Antisense strand to SEQ ID NO: 729692
ugucuccugggacuccagc

SEQ ID NO: 729694 - RNA, 19 nt, Artificial Sequence
  Description of Artificial Sequence: Synthetic oligonucleotide
  Sense strand starting at position 3392 of SEQ ID NO: 586592
cccagugcuucccuugacu

SEQ ID NO: 729695 - RNA, 19 nt, Artificial Sequence
  Description of Artificial Sequence: Synthetic oligonucleotide
  Antisense strand to SEQ ID NO: 729694
agucaagggaagcacuggg

SEQ ID NO: 729696 - RNA, 19 nt, Artificial Sequence
  Description of Artificial Sequence: Synthetic oligonucleotide
  Sense strand starting at position 3500 of SEQ ID NO: 586592
gggcuacaguuuccuacau

SEQ ID NO: 729697 - RNA, 19 nt, Artificial Sequence
  Description of Artificial Sequence: Synthetic oligonucleotide
  Antisense strand to SEQ ID NO: 729696
auguaggaaacuguagccc

SEQ ID NO: 729698 - RNA, 19 nt, Artificial Sequence
  Description of Artificial Sequence: Synthetic oligonucleotide
  Sense strand starting at position 3507 of SEQ ID NO: 586592
aguuuccuacaucgauaca

SEQ ID NO: 729699 - RNA, 19 nt, Artificial Sequence
  Description of Artificial Sequence: Synthetic oligonucleotide
  Antisense strand to SEQ ID NO: 729698
uguaucgauguaggaaacu

SEQ ID NO: 729700 - RNA, 19 nt, Artificial Sequence
  Description of Artificial Sequence: Synthetic oligonucleotide
  Sense strand starting at position 3537 of SEQ ID NO: 586592
ucugguucuggucacuuau

SEQ ID NO: 729701 - RNA, 19 nt, Artificial Sequence
  Description of Artificial Sequence: Synthetic oligonucleotide
  Antisense strand to SEQ ID NO: 729700
auaagugaccagaaccaga

SEQ ID NO: 729702 - RNA, 19 nt, Artificial Sequence
  Description of Artificial Sequence: Synthetic oligonucleotide
  Sense strand starting at position 3911 of SEQ ID NO: 586592
auuguugccuucuuaaguu

SEQ ID NO: 729703 - RNA, 19 nt, Artificial Sequence
  Description of Artificial Sequence: Synthetic oligonucleotide
  Antisense strand to SEQ ID NO: 729702
aacuuaagaaggcaacaau

SEQ ID NO: 729704 - RNA, 19 nt, Artificial Sequence
  Description of Artificial Sequence: Synthetic oligonucleotide
  Sense strand starting at position 7 of SEQ ID NO: 586593
ggcccaugacuuuggaagu

SEQ ID NO: 729705 - RNA, 19 nt, Artificial Sequence
  Description of Artificial Sequence: Synthetic oligonucleotide
  Antisense strand to SEQ ID NO: 729704
acuuccaaagucaugggcc

SEQ ID NO: 729706 - RNA, 19 nt, Artificial Sequence
  Description of Artificial Sequence: Synthetic oligonucleotide
  Sense strand starting at position 18 of SEQ ID NO: 586593
uuggaaguucggugucaga

SEQ ID NO: 729707 - RNA, 19 nt, Artificial Sequence
  Description of Artificial Sequence: Synthetic oligonucleotide
  Antisense strand to SEQ ID NO: 729706
ucugacaccgaacuuccaa

SEQ ID NO: 729708 - RNA, 19 nt, Artificial Sequence
  Description of Artificial Sequence: Synthetic oligonucleotide
  Sense strand starting at position 58 of SEQ ID NO: 586593
cggagucucugggugaaau

SEQ ID NO: 729709 - RNA, 19 nt, Artificial Sequence
  Description of Artificial Sequence: Synthetic oligonucleotide
  Antisense strand to SEQ ID NO: 729708
auuucacccagagacuccg

SEQ ID NO: 729710 - RNA, 19 nt, Artificial Sequence
  Description of Artificial Sequence: Synthetic oligonucleotide
  Sense strand starting at position 59 of SEQ ID NO: 586593
ggagucucugggugaaaug

SEQ ID NO: 729711 - RNA, 19 nt, Artificial Sequence
  Description of Artificial Sequence: Synthetic oligonucleotide
  Antisense strand to SEQ ID NO: 729710
cauuucacccagagacucc

SEQ ID NO: 729712 - RNA, 19 nt, Artificial Sequence
  Description of Artificial Sequence: Synthetic oligonucleotide
  Sense strand starting at position 150 of SEQ ID NO: 586593
ccuacaauugugugaggca

SEQ ID NO: 729713 - RNA, 19 nt, Artificial Sequence
  Description of Artificial Sequence: Synthetic oligonucleotide
  Antisense strand to SEQ ID NO: 729712
ugccucacacaauuguagg

SEQ ID NO: 729714 - RNA, 19 nt, Artificial Sequence
  Description of Artificial Sequence: Synthetic oligonucleotide
  Sense strand starting at position 241 of SEQ ID NO: 586593
gcuggagucccaggagaca

SEQ ID NO: 729715 - RNA, 19 nt, Artificial Sequence
  Description of Artificial Sequence: Synthetic oligonucleotide
  Antisense strand to SEQ ID NO: 729714
ugucuccugggacuccagc

SEQ ID NO: 729716 - RNA, 19 nt, Artificial Sequence
  Description of Artificial Sequence: Synthetic oligonucleotide
  Sense strand starting at position 659 of SEQ ID NO: 586593
cccagugcuucccuugacu

SEQ ID NO: 729717 - RNA, 19 nt, Artificial Sequence
  Description of Artificial Sequence: Synthetic oligonucleotide
  Antisense strand to SEQ ID NO: 729716
agucaagggaagcacuggg

SEQ ID NO: 729718 - RNA, 19 nt, Artificial Sequence
  Description of Artificial Sequence: Synthetic oligonucleotide
  Sense strand starting at position 767 of SEQ ID NO: 586593
gggcuacaguuuccuacau

SEQ ID NO: 729719 - RNA, 19 nt, Artificial Sequence
  Description of Artificial Sequence: Synthetic oligonucleotide
  Antisense strand to SEQ ID NO: 729718
auguaggaaacuguagccc

SEQ ID NO: 729720 - RNA, 19 nt, Artificial Sequence
  Description of Artificial Sequence: Synthetic oligonucleotide
  Sense strand starting at position 774 of SEQ ID NO: 586593
aguuuccuacaucgauaca

SEQ ID NO: 729721 - RNA, 19 nt, Artificial Sequence
  Description of Artificial Sequence: Synthetic oligonucleotide
  Antisense strand to SEQ ID NO: 729720
uguaucgauguaggaaacu

SEQ ID NO: 729722 - RNA, 19 nt, Artificial Sequence
  Description of Artificial Sequence: Synthetic oligonucleotide
  Sense strand starting at position 804 of SEQ ID NO: 586593
ucugguucuggucacuuau

SEQ ID NO: 729723 - RNA, 19 nt, Artificial Sequence
  Description of Artificial Sequence: Synthetic oligonucleotide
  Antisense strand to SEQ ID NO: 729722
auaagugaccagaaccaga

SEQ ID NO: 729724 - RNA, 19 nt, Artificial Sequence
  Description of Artificial Sequence: Synthetic oligonucleotide
  Sense strand starting at position 1178 of SEQ ID NO: 586593
auuguugccuucuuaaguu

SEQ ID NO: 729725 - RNA, 19 nt, Artificial Sequence
  Description of Artificial Sequence: Synthetic oligonucleotide
  Antisense strand to SEQ ID NO: 729724
aacuuaagaaggcaacaau

SEQ ID NO: 729726 - RNA, 19 nt, Artificial Sequence
  Description of Artificial Sequence: Synthetic oligonucleotide
  Sense strand starting at position 1347 of SEQ ID NO: 586593
cugccauuggccugaagau

SEQ ID NO: 729727 - RNA, 19 nt, Artificial Sequence
  Description of Artificial Sequence: Synthetic oligonucleotide
  Antisense strand to SEQ ID NO: 729726
aucuucaggccaauggcag

SEQ ID NO: 729728 - RNA, 19 nt, Artificial Sequence
  Description of Artificial Sequence: Synthetic oligonucleotide
  Sense strand starting at position 1348 of SEQ ID NO: 586593
ugccauuggccugaagauc

SEQ ID NO: 729729 - RNA, 19 nt, Artificial Sequence
  Description of Artificial Sequence: Synthetic oligonucleotide
  Antisense strand to SEQ ID NO: 729728
gaucuucaggccaauggca

SEQ ID NO: 729730 - RNA, 19 nt, Artificial Sequence
  Description of Artificial Sequence: Synthetic oligonucleotide
  Sense strand starting at position 1372 of SEQ ID NO: 586593
ggaugaacgcuuuaaccuc

SEQ ID NO: 729731 - RNA, 19 nt, Artificial Sequence
  Description of Artificial Sequence: Synthetic oligonucleotide
  Antisense strand to SEQ ID NO: 729730
gagguuaaagcguucaucc

SEQ ID NO: 729732 - RNA, 19 nt, Artificial Sequence
  Description of Artificial Sequence: Synthetic oligonucleotide
  Sense strand starting at position 1433 of SEQ ID NO: 586593
gggcgagugcaucgaaagu

SEQ ID NO: 729733 - RNA, 19 nt, Artificial Sequence
  Description of Artificial Sequence: Synthetic oligonucleotide
  Antisense strand to SEQ ID NO: 729732
acuuucgaugcacucgccc

SEQ ID NO: 729734 - RNA, 19 nt, Artificial Sequence
  Description of Artificial Sequence: Synthetic oligonucleotide
  Sense strand starting at position 1435 of SEQ ID NO: 586593
gcgagugcaucgaaaguaa

SEQ ID NO: 729735 - RNA, 19 nt, Artificial Sequence
  Description of Artificial Sequence: Synthetic oligonucleotide
  Antisense strand to SEQ ID NO: 729734
uuacuuucgaugcacucgc

SEQ ID NO: 729736 - RNA, 19 nt, Artificial Sequence
  Description of Artificial Sequence: Synthetic oligonucleotide
  Sense strand starting at position 2202 of SEQ ID NO: 586593
ggcaaucuggaauggcaaa

SEQ ID NO: 729737 - RNA, 19 nt, Artificial Sequence
  Description of Artificial Sequence: Synthetic oligonucleotide
  Antisense strand to SEQ ID NO: 729736
uuugccauuccagauugcc

SEQ ID NO: 729738 - RNA, 19 nt, Artificial Sequence
  Description of Artificial Sequence: Synthetic oligonucleotide
  Sense strand starting at position 2391 of SEQ ID NO: 586593
uggcucucgcccuagaaca

SEQ ID NO: 729739 - RNA, 19 nt, Artificial Sequence
  Description of Artificial Sequence: Synthetic oligonucleotide
  Antisense strand to SEQ ID NO: 729738
uguucuagggcgagagcca

SEQ ID NO: 729740 - RNA, 19 nt, Artificial Sequence
  Description of Artificial Sequence: Synthetic oligonucleotide
  Sense strand starting at position 2458 of SEQ ID NO: 586593
gcgggaauccucuagucac

SEQ ID NO: 729741 - RNA, 19 nt, Artificial Sequence
  Description of Artificial Sequence: Synthetic oligonucleotide
  Antisense strand to SEQ ID NO: 729740
gugacuagaggauucccgc

SEQ ID NO: 729742 - RNA, 19 nt, Artificial Sequence
  Description of Artificial Sequence: Synthetic oligonucleotide
  Sense strand starting at position 2674 of SEQ ID NO: 586593
uccuguuccuucucaugga

SEQ ID NO: 729743 - RNA, 19 nt, Artificial Sequence
  Description of Artificial Sequence: Synthetic oligonucleotide
  Antisense strand to SEQ ID NO: 729742
uccaugagaaggaacagga

SEQ ID NO: 729744 - RNA, 19 nt, Artificial Sequence
  Description of Artificial Sequence: Synthetic oligonucleotide
  Sense strand starting at position 2675 of SEQ ID NO: 586593
ccuguuccuucucauggaa

SEQ ID NO: 729745 - RNA, 19 nt, Artificial Sequence
  Description of Artificial Sequence: Synthetic oligonucleotide
  Antisense strand to SEQ ID NO: 729744
uuccaugagaaggaacagg

SEQ ID NO: 729746 - RNA, 19 nt, Artificial Sequence
  Description of Artificial Sequence: Synthetic oligonucleotide
  Sense strand starting at position 2678 of SEQ ID NO: 586593
guuccuucucauggaaugu

SEQ ID NO: 729747 - RNA, 19 nt, Artificial Sequence
  Description of Artificial Sequence: Synthetic oligonucleotide
  Antisense strand to SEQ ID NO: 729746
acauuccaugagaaggaac

SEQ ID NO: 729748 - RNA, 19 nt, Artificial Sequence
  Description of Artificial Sequence: Synthetic oligonucleotide
  Sense strand starting at position 2687 of SEQ ID NO: 586593
cauggaauguucuucgcuu

SEQ ID NO: 729749 - RNA, 19 nt, Artificial Sequence
  Description of Artificial Sequence: Synthetic oligonucleotide
  Antisense strand to SEQ ID NO: 729748
aagcgaagaacauuccaug

SEQ ID NO: 729750 - RNA, 19 nt, Artificial Sequence
  Description of Artificial Sequence: Synthetic oligonucleotide
  Sense strand starting at position 2691 of SEQ ID NO: 586593
gaauguucuucgcuuggua

SEQ ID NO: 729751 - RNA, 19 nt, Artificial Sequence
  Description of Artificial Sequence: Synthetic oligonucleotide
  Antisense strand to SEQ ID NO: 729750
uaccaagcgaagaacauuc

SEQ ID NO: 729752 - RNA, 19 nt, Artificial Sequence
  Description of Artificial Sequence: Synthetic oligonucleotide
  Sense strand starting at position 2694 of SEQ ID NO: 586593
uguucuucgcuugguaacu

SEQ ID NO: 729753 - RNA, 19 nt, Artificial Sequence
  Description of Artificial Sequence: Synthetic oligonucleotide
  Antisense strand to SEQ ID NO: 729752
aguuaccaagcgaagaaca

SEQ ID NO: 729754 - RNA, 19 nt, Artificial Sequence
  Description of Artificial Sequence: Synthetic oligonucleotide
  Sense strand starting at position 2759 of SEQ ID NO: 586593
ucuggaaagucugccuuga

SEQ ID NO: 729755 - RNA, 19 nt, Artificial Sequence
  Description of Artificial Sequence: Synthetic oligonucleotide
  Antisense strand to SEQ ID NO: 729754
ucaaggcagacuuuccaga

SEQ ID NO: 729756 - RNA, 19 nt, Artificial Sequence
  Description of Artificial Sequence: Synthetic oligonucleotide
  Sense strand starting at position 2761 of SEQ ID NO: 586593
uggaaagucugccuugacu

SEQ ID NO: 729757 - RNA, 19 nt, Artificial Sequence
  Description of Artificial Sequence: Synthetic oligonucleotide
  Antisense strand to SEQ ID NO: 729756
agucaaggcagacuuucca

SEQ ID NO: 729758 - RNA, 19 nt, Artificial Sequence
  Description of Artificial Sequence: Synthetic oligonucleotide
  Sense strand starting at position 2763 of SEQ ID NO: 586593
gaaagucugccuugacuuc

SEQ ID NO: 729759 - RNA, 19 nt, Artificial Sequence
  Description of Artificial Sequence: Synthetic oligonucleotide
  Antisense strand to SEQ ID NO: 729758
gaagucaaggcagacuuuc

SEQ ID NO: 729760 - RNA, 19 nt, Artificial Sequence
  Description of Artificial Sequence: Synthetic oligonucleotide
  Sense strand starting at position 2810 of SEQ ID NO: 586593
auagcuuccugguugauuu

SEQ ID NO: 729761 - RNA, 19 nt, Artificial Sequence
  Description of Artificial Sequence: Synthetic oligonucleotide
  Antisense strand to SEQ ID NO: 729760
aaaucaaccaggaagcuau

SEQ ID NO: 729762 - RNA, 19 nt, Artificial Sequence
  Description of Artificial Sequence: Synthetic oligonucleotide
  Sense strand starting at position 2929 of SEQ ID NO: 586593
acuuuauuccggugacauc

SEQ ID NO: 729763 - RNA, 19 nt, Artificial Sequence
  Description of Artificial Sequence: Synthetic oligonucleotide
  Antisense strand to SEQ ID NO: 729762
gaugucaccggaauaaagu

SEQ ID NO: 729764 - RNA, 19 nt, Artificial Sequence
  Description of Artificial Sequence: Synthetic oligonucleotide
  Sense strand starting at position 3076 of SEQ ID NO: 586593
gguguacugauguaagugu

SEQ ID NO: 729765 - RNA, 19 nt, Artificial Sequence
  Description of Artificial Sequence: Synthetic oligonucleotide
  Antisense strand to SEQ ID NO: 729764
acacuuacaucaguacacc

SEQ ID NO: 729766 - RNA, 19 nt, Artificial Sequence
  Description of Artificial Sequence: Synthetic oligonucleotide
  Sense strand starting at position 3460 of SEQ ID NO: 586593
caagcagagccuuguauuu

SEQ ID NO: 729767 - RNA, 19 nt, Artificial Sequence
  Description of Artificial Sequence: Synthetic oligonucleotide
  Antisense strand to SEQ ID NO: 729766
aaauacaaggcucugcuug

SEQ ID NO: 729768 - RNA, 19 nt, Artificial Sequence
  Description of Artificial Sequence: Synthetic oligonucleotide
  Sense strand starting at position 3490 of SEQ ID NO: 586593
aguaguauuuguugaugaa

SEQ ID NO: 729769 - RNA, 19 nt, Artificial Sequence
  Description of Artificial Sequence: Synthetic oligonucleotide
  Antisense strand to SEQ ID NO: 729768
uucaucaacaaauacuacu

SEQ ID NO: 729770 - RNA, 19 nt, Artificial Sequence
  Description of Artificial Sequence: Synthetic oligonucleotide
  Sense strand starting at position 3493 of SEQ ID NO: 586593
aguauuuguugaugaauca

SEQ ID NO: 729771 - RNA, 19 nt, Artificial Sequence
  Description of Artificial Sequence: Synthetic oligonucleotide
  Antisense strand to SEQ ID NO: 729770
ugauucaucaacaaauacu

SEQ ID NO: 729772 - RNA, 19 nt, Artificial Sequence
  Description of Artificial Sequence: Synthetic oligonucleotide
  Sense strand starting at position 3500 of SEQ ID NO: 586593
guugaugaaucagaacuuu

SEQ ID NO: 729773 - RNA, 19 nt, Artificial Sequence
  Description of Artificial Sequence: Synthetic oligonucleotide
  Antisense strand to SEQ ID NO: 729772
aaaguucugauucaucaac

SEQ ID NO: 729774 - RNA, 19 nt, Artificial Sequence
  Description of Artificial Sequence: Synthetic oligonucleotide
  Sense strand starting at position 3533 of SEQ ID NO: 586593
ucccuucuccuggguugaa

SEQ ID NO: 729775 - RNA, 19 nt, Artificial Sequence
  Description of Artificial Sequence: Synthetic oligonucleotide
  Antisense strand to SEQ ID NO: 729774
uucaacccaggagaaggga

SEQ ID NO: 729776 - RNA, 19 nt, Artificial Sequence
  Description of Artificial Sequence: Synthetic oligonucleotide
  Sense strand starting at position 3545 of SEQ ID NO: 586593
gguugaacuuuaccuuuaa

SEQ ID NO: 729777 - RNA, 19 nt, Artificial Sequence
  Description of Artificial Sequence: Synthetic oligonucleotide
  Antisense strand to SEQ ID NO: 729776
uuaaagguaaaguucaacc

SEQ ID NO: 729778 - RNA, 19 nt, Artificial Sequence
  Description of Artificial Sequence: Synthetic oligonucleotide
  Sense strand starting at position 3686 of SEQ ID NO: 586593
uuauuuguaucugcugagu

SEQ ID NO: 729779 - RNA, 19 nt, Artificial Sequence
  Description of Artificial Sequence: Synthetic oligonucleotide
  Antisense strand to SEQ ID NO: 729778
acucagcagauacaaauaa

SEQ ID NO: 729780 - RNA, 19 nt, Artificial Sequence
  Description of Artificial Sequence: Synthetic oligonucleotide
  Sense strand starting at position 3688 of SEQ ID NO: 586593
auuuguaucugcugaguau

SEQ ID NO: 729781 - RNA, 19 nt, Artificial Sequence
  Description of Artificial Sequence: Synthetic oligonucleotide
  Antisense strand to SEQ ID NO: 729780
auacucagcagauacaaau

SEQ ID NO: 729782 - RNA, 19 nt, Artificial Sequence
  Description of Artificial Sequence: Synthetic oligonucleotide
  Sense strand starting at position 3689 of SEQ ID NO: 586593
uuuguaucugcugaguauu

SEQ ID NO: 729783 - RNA, 19 nt, Artificial Sequence
  Description of Artificial Sequence: Synthetic oligonucleotide
  Antisense strand to SEQ ID NO: 729782
aauacucagcagauacaaa

SEQ ID NO: 729784 - RNA, 19 nt, Artificial Sequence
  Description of Artificial Sequence: Synthetic oligonucleotide
  Sense strand starting at position 2 of SEQ ID NO: 586594
ggcuguuuaauacagagca

SEQ ID NO: 729785 - RNA, 19 nt, Artificial Sequence
  Description of Artificial Sequence: Synthetic oligonucleotide
  Antisense strand to SEQ ID NO: 729784
ugcucuguauuaaacagcc

SEQ ID NO: 729786 - RNA, 19 nt, Artificial Sequence
  Description of Artificial Sequence: Synthetic oligonucleotide
  Sense strand starting at position 119 of SEQ ID NO: 586594
ggcugugaugagcgagagu

SEQ ID NO: 729787 - RNA, 19 nt, Artificial Sequence
  Description of Artificial Sequence: Synthetic oligonucleotide
  Antisense strand to SEQ ID NO: 729786
acucucgcucaucacagcc

SEQ ID NO: 729788 - RNA, 19 nt, Artificial Sequence
  Description of Artificial Sequence: Synthetic oligonucleotide
  Sense strand starting at position 130 of SEQ ID NO: 586594
gcgagagucuguccaccau

SEQ ID NO: 729789 - RNA, 19 nt, Artificial Sequence
  Description of Artificial Sequence: Synthetic oligonucleotide
  Antisense strand to SEQ ID NO: 729788
augguggacagacucucgc

SEQ ID NO: 729790 - RNA, 19 nt, Artificial Sequence
  Description of Artificial Sequence: Synthetic oligonucleotide
  Sense strand starting at position 235 of SEQ ID NO: 586594
gcucccuucugcccagaaa

SEQ ID NO: 729791 - RNA, 19 nt, Artificial Sequence
  Description of Artificial Sequence: Synthetic oligonucleotide
  Antisense strand to SEQ ID NO: 729790
uuucugggcagaagggagc

SEQ ID NO: 729792 - RNA, 19 nt, Artificial Sequence
  Description of Artificial Sequence: Synthetic oligonucleotide
  Sense strand starting at position 287 of SEQ ID NO: 586594
ggcccaugacuuuggaagu

SEQ ID NO: 729793 - RNA, 19 nt, Artificial Sequence
  Description of Artificial Sequence: Synthetic oligonucleotide
  Antisense strand to SEQ ID NO: 729792
acuuccaaagucaugggcc

SEQ ID NO: 729794 - RNA, 19 nt, Artificial Sequence
  Description of Artificial Sequence: Synthetic oligonucleotide
  Sense strand starting at position 298 of SEQ ID NO: 586594
uuggaaguucggugucaga

SEQ ID NO: 729795 - RNA, 19 nt, Artificial Sequence
  Description of Artificial Sequence: Synthetic oligonucleotide
  Antisense strand to SEQ ID NO: 729794
ucugacaccgaacuuccaa

SEQ ID NO: 729796 - RNA, 19 nt, Artificial Sequence
  Description of Artificial Sequence: Synthetic oligonucleotide
  Sense strand starting at position 338 of SEQ ID NO: 586594
cggagucucugggugaaau

SEQ ID NO: 729797 - RNA, 19 nt, Artificial Sequence
  Description of Artificial Sequence: Synthetic oligonucleotide
  Antisense strand to SEQ ID NO: 729796
auuucacccagagacuccg

SEQ ID NO: 729798 - RNA, 19 nt, Artificial Sequence
  Description of Artificial Sequence: Synthetic oligonucleotide
  Sense strand starting at position 339 of SEQ ID NO: 586594
ggagucucugggugaaaug

SEQ ID NO: 729799 - RNA, 19 nt, Artificial Sequence
  Description of Artificial Sequence: Synthetic oligonucleotide
  Antisense strand to SEQ ID NO: 729798
cauuucacccagagacucc

SEQ ID NO: 729800 - RNA, 19 nt, Artificial Sequence
  Description of Artificial Sequence: Synthetic oligonucleotide
  Sense strand starting at position 430 of SEQ ID NO: 586594
ccuacaauugugugaggca

SEQ ID NO: 729801 - RNA, 19 nt, Artificial Sequence
  Description of Artificial Sequence: Synthetic oligonucleotide
  Antisense strand to SEQ ID NO: 729800
ugccucacacaauuguagg

SEQ ID NO: 729802 - RNA, 19 nt, Artificial Sequence
  Description of Artificial Sequence: Synthetic oligonucleotide
  Sense strand starting at position 521 of SEQ ID NO: 586594
gcuggagucccaggagaca

SEQ ID NO: 729803 - RNA, 19 nt, Artificial Sequence
  Description of Artificial Sequence: Synthetic oligonucleotide
  Antisense strand to SEQ ID NO: 729802
ugucuccugggacuccagc

SEQ ID NO: 729804 - RNA, 19 nt, Artificial Sequence
  Description of Artificial Sequence: Synthetic oligonucleotide
  Sense strand starting at position 939 of SEQ ID NO: 586594
cccagugcuucccuugacu

SEQ ID NO: 729805 - RNA, 19 nt, Artificial Sequence
  Description of Artificial Sequence: Synthetic oligonucleotide
  Antisense strand to SEQ ID NO: 729804
agucaagggaagcacuggg

SEQ ID NO: 729806 - RNA, 19 nt, Artificial Sequence
  Description of Artificial Sequence: Synthetic oligonucleotide
  Sense strand starting at position 1047 of SEQ ID NO: 586594
gggcuacaguuuccuacau

SEQ ID NO: 729807 - RNA, 19 nt, Artificial Sequence
  Description of Artificial Sequence: Synthetic oligonucleotide
  Antisense strand to SEQ ID NO: 729806
auguaggaaacuguagccc

SEQ ID NO: 729808 - RNA, 19 nt, Artificial Sequence
  Description of Artificial Sequence: Synthetic oligonucleotide
  Sense strand starting at position 1054 of SEQ ID NO: 586594
aguuuccuacaucgauaca

SEQ ID NO: 729809 - RNA, 19 nt, Artificial Sequence
  Description of Artificial Sequence: Synthetic oligonucleotide
  Antisense strand to SEQ ID NO: 729808
uguaucgauguaggaaacu

SEQ ID NO: 729810 - RNA, 19 nt, Artificial Sequence
  Description of Artificial Sequence: Synthetic oligonucleotide
  Sense strand starting at position 1084 of SEQ ID NO: 586594
ucugguucuggucacuuau

SEQ ID NO: 729811 - RNA, 19 nt, Artificial Sequence
  Description of Artificial Sequence: Synthetic oligonucleotide
  Antisense strand to SEQ ID NO: 729810
auaagugaccagaaccaga

SEQ ID NO: 729812 - RNA, 19 nt, Artificial Sequence
  Description of Artificial Sequence: Synthetic oligonucleotide
  Sense strand starting at position 1458 of SEQ ID NO: 586594
auuguugccuucuuaaguu

SEQ ID NO: 729813 - RNA, 19 nt, Artificial Sequence
  Description of Artificial Sequence: Synthetic oligonucleotide
  Antisense strand to SEQ ID NO: 729812
aacuuaagaaggcaacaau

SEQ ID NO: 729814 - RNA, 19 nt, Artificial Sequence
  Description of Artificial Sequence: Synthetic oligonucleotide
  Sense strand starting at position 1627 of SEQ ID NO: 586594
cugccauuggccugaagau

SEQ ID NO: 729815 - RNA, 19 nt, Artificial Sequence
  Description of Artificial Sequence: Synthetic oligonucleotide
  Antisense strand to SEQ ID NO: 729814
aucuucaggccaauggcag

SEQ ID NO: 729816 - RNA, 19 nt, Artificial Sequence
  Description of Artificial Sequence: Synthetic oligonucleotide
  Sense strand starting at position 1628 of SEQ ID NO: 586594
ugccauuggccugaagauc

SEQ ID NO: 729817 - RNA, 19 nt, Artificial Sequence
  Description of Artificial Sequence: Synthetic oligonucleotide
  Antisense strand to SEQ ID NO: 729816
gaucuucaggccaauggca

SEQ ID NO: 729818 - RNA, 19 nt, Artificial Sequence
  Description of Artificial Sequence: Synthetic oligonucleotide
  Sense strand starting at position 1652 of SEQ ID NO: 586594
ggaugaacgcuuuaaccuc

SEQ ID NO: 729819 - RNA, 19 nt, Artificial Sequence
  Description of Artificial Sequence: Synthetic oligonucleotide
  Antisense strand to SEQ ID NO: 729818
gagguuaaagcguucaucc

SEQ ID NO: 729820 - RNA, 19 nt, Artificial Sequence
  Description of Artificial Sequence: Synthetic oligonucleotide
  Sense strand starting at position 1713 of SEQ ID NO: 586594
gggcgagugcaucgaaagu

SEQ ID NO: 729821 - RNA, 19 nt, Artificial Sequence
  Description of Artificial Sequence: Synthetic oligonucleotide
  Antisense strand to SEQ ID NO: 729820
acuuucgaugcacucgccc

SEQ ID NO: 729822 - RNA, 19 nt, Artificial Sequence
  Description of Artificial Sequence: Synthetic oligonucleotide
  Sense strand starting at position 2482 of SEQ ID NO: 586594
ggcaaucuggaauggcaaa

SEQ ID NO: 729823 - RNA, 19 nt, Artificial Sequence
  Description of Artificial Sequence: Synthetic oligonucleotide
  Antisense strand to SEQ ID NO: 729822
uuugccauuccagauugcc

SEQ ID NO: 729824 - RNA, 19 nt, Artificial Sequence
  Description of Artificial Sequence: Synthetic oligonucleotide
  Sense strand starting at position 2671 of SEQ ID NO: 586594
uggcucucgcccuagaaca

SEQ ID NO: 729825 - RNA, 19 nt, Artificial Sequence
  Description of Artificial Sequence: Synthetic oligonucleotide
  Antisense strand to SEQ ID NO: 729824
uguucuagggcgagagcca

SEQ ID NO: 729826 - RNA, 19 nt, Artificial Sequence
  Description of Artificial Sequence: Synthetic oligonucleotide
  Sense strand starting at position 2738 of SEQ ID NO: 586594
gcgggaauccucuagucac

SEQ ID NO: 729827 - RNA, 19 nt, Artificial Sequence
  Description of Artificial Sequence: Synthetic oligonucleotide
  Antisense strand to SEQ ID NO: 729826
gugacuagaggauucccgc

SEQ ID NO: 729828 - RNA, 19 nt, Artificial Sequence
  Description of Artificial Sequence: Synthetic oligonucleotide
  Sense strand starting at position 2954 of SEQ ID NO: 586594
uccuguuccuucucaugga

SEQ ID NO: 729829 - RNA, 19 nt, Artificial Sequence
  Description of Artificial Sequence: Synthetic oligonucleotide
  Antisense strand to SEQ ID NO: 729828
uccaugagaaggaacagga

SEQ ID NO: 729830 - RNA, 19 nt, Artificial Sequence
  Description of Artificial Sequence: Synthetic oligonucleotide
  Sense strand starting at position 2958 of SEQ ID NO: 586594
guuccuucucauggaaugu

SEQ ID NO: 729831 - RNA, 19 nt, Artificial Sequence
  Description of Artificial Sequence: Synthetic oligonucleotide
  Antisense strand to SEQ ID NO: 729830
acauuccaugagaaggaac

SEQ ID NO: 729832 - RNA, 19 nt, Artificial Sequence
  Description of Artificial Sequence: Synthetic oligonucleotide
  Sense strand starting at position 2967 of SEQ ID NO: 586594
cauggaauguucuucgcuu

SEQ ID NO: 729833 - RNA, 19 nt, Artificial Sequence
  Description of Artificial Sequence: Synthetic oligonucleotide
  Antisense strand to SEQ ID NO: 729832
aagcgaagaacauuccaug

SEQ ID NO: 729834 - RNA, 19 nt, Artificial Sequence
  Description of Artificial Sequence: Synthetic oligonucleotide
  Sense strand starting at position 2971 of SEQ ID NO: 586594
gaauguucuucgcuuggua

SEQ ID NO: 729835 - RNA, 19 nt, Artificial Sequence
  Description of Artificial Sequence: Synthetic oligonucleotide
  Antisense strand to SEQ ID NO: 729834
uaccaagcgaagaacauuc

SEQ ID NO: 729836 - RNA, 19 nt, Artificial Sequence
  Description of Artificial Sequence: Synthetic oligonucleotide
  Sense strand starting at position 3039 of SEQ ID NO: 586594
ucuggaaagucugccuuga

SEQ ID NO: 729837 - RNA, 19 nt, Artificial Sequence
  Description of Artificial Sequence: Synthetic oligonucleotide
  Antisense strand to SEQ ID NO: 729836
ucaaggcagacuuuccaga

SEQ ID NO: 729838 - RNA, 19 nt, Artificial Sequence
  Description of Artificial Sequence: Synthetic oligonucleotide
  Sense strand starting at position 3041 of SEQ ID NO: 586594
uggaaagucugccuugacu

SEQ ID NO: 729839 - RNA, 19 nt, Artificial Sequence
  Description of Artificial Sequence: Synthetic oligonucleotide
  Antisense strand to SEQ ID NO: 729838
agucaaggcagacuuucca

SEQ ID NO: 729840 - RNA, 19 nt, Artificial Sequence
  Description of Artificial Sequence: Synthetic oligonucleotide
  Sense strand starting at position 3043 of SEQ ID NO: 586594
gaaagucugccuugacuuc

SEQ ID NO: 729841 - RNA, 19 nt, Artificial Sequence
  Description of Artificial Sequence: Synthetic oligonucleotide
  Antisense strand to SEQ ID NO: 729840
gaagucaaggcagacuuuc

SEQ ID NO: 729842 - RNA, 19 nt, Artificial Sequence
  Description of Artificial Sequence: Synthetic oligonucleotide
  Sense strand starting at position 3090 of SEQ ID NO: 586594
auagcuuccugguugauuu

SEQ ID NO: 729843 - RNA, 19 nt, Artificial Sequence
  Description of Artificial Sequence: Synthetic oligonucleotide
  Antisense strand to SEQ ID NO: 729842
aaaucaaccaggaagcuau

SEQ ID NO: 729844 - RNA, 19 nt, Artificial Sequence
  Description of Artificial Sequence: Synthetic oligonucleotide
  Sense strand starting at position 3209 of SEQ ID NO: 586594
acuuuauuccggugacauc

SEQ ID NO: 729845 - RNA, 19 nt, Artificial Sequence
  Description of Artificial Sequence: Synthetic oligonucleotide
  Antisense strand to SEQ ID NO: 729844
gaugucaccggaauaaagu

SEQ ID NO: 729846 - RNA, 19 nt, Artificial Sequence
  Description of Artificial Sequence: Synthetic oligonucleotide
  Sense strand starting at position 3356 of SEQ ID NO: 586594
gguguacugauguaagugu

SEQ ID NO: 729847 - RNA, 19 nt, Artificial Sequence
  Description of Artificial Sequence: Synthetic oligonucleotide
  Antisense strand to SEQ ID NO: 729846
acacuuacaucaguacacc

SEQ ID NO: 729848 - RNA, 19 nt, Artificial Sequence
  Description of Artificial Sequence: Synthetic oligonucleotide
  Sense strand starting at position 3740 of SEQ ID NO: 586594
caagcagagccuuguauuu

SEQ ID NO: 729849 - RNA, 19 nt, Artificial Sequence
  Description of Artificial Sequence: Synthetic oligonucleotide
  Antisense strand to SEQ ID NO: 729848
aaauacaaggcucugcuug

SEQ ID NO: 729850 - RNA, 19 nt, Artificial Sequence
  Description of Artificial Sequence: Synthetic oligonucleotide
  Sense strand starting at position 3770 of SEQ ID NO: 586594
aguaguauuuguugaugaa

SEQ ID NO: 729851 - RNA, 19 nt, Artificial Sequence
  Description of Artificial Sequence: Synthetic oligonucleotide
  Antisense strand to SEQ ID NO: 729850
uucaucaacaaauacuacu

SEQ ID NO: 729852 - RNA, 19 nt, Artificial Sequence
  Description of Artificial Sequence: Synthetic oligonucleotide
  Sense strand starting at position 3773 of SEQ ID NO: 586594
aguauuuguugaugaauca

SEQ ID NO: 729853 - RNA, 19 nt, Artificial Sequence
  Description of Artificial Sequence: Synthetic oligonucleotide
  Antisense strand to SEQ ID NO: 729852
ugauucaucaacaaauacu

SEQ ID NO: 729854 - RNA, 19 nt, Artificial Sequence
  Description of Artificial Sequence: Synthetic oligonucleotide
  Sense strand starting at position 3780 of SEQ ID NO: 586594
guugaugaaucagaacuuu

SEQ ID NO: 729855 - RNA, 19 nt, Artificial Sequence
  Description of Artificial Sequence: Synthetic oligonucleotide
  Antisense strand to SEQ ID NO: 729854
aaaguucugauucaucaac

SEQ ID NO: 729856 - RNA, 19 nt, Artificial Sequence
  Description of Artificial Sequence: Synthetic oligonucleotide
  Sense strand starting at position 3813 of SEQ ID NO: 586594
ucccuucuccuggguugaa

SEQ ID NO: 729857 - RNA, 19 nt, Artificial Sequence
  Description of Artificial Sequence: Synthetic oligonucleotide
  Antisense strand to SEQ ID NO: 729856
uucaacccaggagaaggga

SEQ ID NO: 729858 - RNA, 19 nt, Artificial Sequence
  Description of Artificial Sequence: Synthetic oligonucleotide
  Sense strand starting at position 3825 of SEQ ID NO: 586594
gguugaacuuuaccuuuaa

SEQ ID NO: 729859 - RNA, 19 nt, Artificial Sequence
  Description of Artificial Sequence: Synthetic oligonucleotide
  Antisense strand to SEQ ID NO: 729858
uuaaagguaaaguucaacc

SEQ ID NO: 729860 - RNA, 19 nt, Artificial Sequence
  Description of Artificial Sequence: Synthetic oligonucleotide
  Sense strand starting at position 3966 of SEQ ID NO: 586594
uuauuuguaucugcugagu

SEQ ID NO: 729861 - RNA, 19 nt, Artificial Sequence
  Description of Artificial Sequence: Synthetic oligonucleotide
  Antisense strand to SEQ ID NO: 729860
acucagcagauacaaauaa

SEQ ID NO: 729862 - RNA, 19 nt, Artificial Sequence
  Description of Artificial Sequence: Synthetic oligonucleotide
  Sense strand starting at position 3969 of SEQ ID NO: 586594
uuuguaucugcugaguauu

SEQ ID NO: 729863 - RNA, 19 nt, Artificial Sequence
  Description of Artificial Sequence: Synthetic oligonucleotide
  Antisense strand to SEQ ID NO: 729862
aauacucagcagauacaaa

SEQ ID NO: 729864 - RNA, 19 nt, Artificial Sequence
  Description of Artificial Sequence: Synthetic oligonucleotide
  Sense strand starting at position 505 of SEQ ID NO: 586595
ucccgaaaugcucgauuug

SEQ ID NO: 729865 - RNA, 19 nt, Artificial Sequence
  Description of Artificial Sequence: Synthetic oligonucleotide
  Antisense strand to SEQ ID NO: 729864
caaaucgagcauuucggga

SEQ ID NO: 729866 - RNA, 19 nt, Artificial Sequence
  Description of Artificial Sequence: Synthetic oligonucleotide
  Sense strand starting at position 2330 of SEQ ID NO: 586595
gucagaacgcccuacauau

SEQ ID NO: 729867 - RNA, 19 nt, Artificial Sequence
  Description of Artificial Sequence: Synthetic oligonucleotide
  Antisense strand to SEQ ID NO: 729866
auauguagggcguucugac

SEQ ID NO: 729868 - RNA, 19 nt, Artificial Sequence
  Description of Artificial Sequence: Synthetic oligonucleotide
  Sense strand starting at position 2337 of SEQ ID NO: 586595
cgcccuacauaucuaaaga

SEQ ID NO: 729869 - RNA, 19 nt, Artificial Sequence
  Description of Artificial Sequence: Synthetic oligonucleotide
  Antisense strand to SEQ ID NO: 729868
ucuuuagauauguagggcg

SEQ ID NO: 729870 - RNA, 19 nt, Artificial Sequence
  Description of Artificial Sequence: Synthetic oligonucleotide
  Sense strand starting at position 2345 of SEQ ID NO: 586595
auaucuaaagaucgcagau

SEQ ID NO: 729871 - RNA, 19 nt, Artificial Sequence
  Description of Artificial Sequence: Synthetic oligonucleotide
  Antisense strand to SEQ ID NO: 729870
aucugcgaucuuuagauau

SEQ ID NO: 729872 - RNA, 19 nt, Artificial Sequence
  Description of Artificial Sequence: Synthetic oligonucleotide
  Sense strand starting at position 2364 of SEQ ID NO: 586595
acucaagggccaugaguau

SEQ ID NO: 729873 - RNA, 19 nt, Artificial Sequence
  Description of Artificial Sequence: Synthetic oligonucleotide
  Antisense strand to SEQ ID NO: 729872
auacucauggcccuugagu

SEQ ID NO: 729874 - RNA, 19 nt, Artificial Sequence
  Description of Artificial Sequence: Synthetic oligonucleotide
  Sense strand starting at position 2428 of SEQ ID NO: 586595
uucggaagagauugggauu

SEQ ID NO: 729875 - RNA, 19 nt, Artificial Sequence
  Description of Artificial Sequence: Synthetic oligonucleotide
  Antisense strand to SEQ ID NO: 729874
aaucccaaucucuuccgaa

SEQ ID NO: 729876 - RNA, 19 nt, Artificial Sequence
  Description of Artificial Sequence: Synthetic oligonucleotide
  Sense strand starting at position 2431 of SEQ ID NO: 586595
ggaagagauugggauucaa

SEQ ID NO: 729877 - RNA, 19 nt, Artificial Sequence
  Description of Artificial Sequence: Synthetic oligonucleotide
  Antisense strand to SEQ ID NO: 729876
uugaaucccaaucucuucc

SEQ ID NO: 729878 - RNA, 19 nt, Artificial Sequence
  Description of Artificial Sequence: Synthetic oligonucleotide
  Sense strand starting at position 2470 of SEQ ID NO: 586595
gugcguaugcaccucgauu

SEQ ID NO: 729879 - RNA, 19 nt, Artificial Sequence
  Description of Artificial Sequence: Synthetic oligonucleotide
  Antisense strand to SEQ ID NO: 729878
aaucgaggugcauacgcac

SEQ ID NO: 729880 - RNA, 19 nt, Artificial Sequence
  Description of Artificial Sequence: Synthetic oligonucleotide
  Sense strand starting at position 2471 of SEQ ID NO: 586595
ugcguaugcaccucgauua

SEQ ID NO: 729881 - RNA, 19 nt, Artificial Sequence
  Description of Artificial Sequence: Synthetic oligonucleotide
  Antisense strand to SEQ ID NO: 729880
uaaucgaggugcauacgca

SEQ ID NO: 729882 - RNA, 19 nt, Artificial Sequence
  Description of Artificial Sequence: Synthetic oligonucleotide
  Sense strand starting at position 2478 of SEQ ID NO: 586595
gcaccucgauuaucugaau

SEQ ID NO: 729883 - RNA, 19 nt, Artificial Sequence
  Description of Artificial Sequence: Synthetic oligonucleotide
  Antisense strand to SEQ ID NO: 729882
auucagauaaucgaggugc

SEQ ID NO: 729884 - RNA, 19 nt, Artificial Sequence
  Description of Artificial Sequence: Synthetic oligonucleotide
  Sense strand starting at position 2558 of SEQ ID NO: 586595
guuauuguggcacaucaau

SEQ ID NO: 729885 - RNA, 19 nt, Artificial Sequence
  Description of Artificial Sequence: Synthetic oligonucleotide
  Antisense strand to SEQ ID NO: 729884
auugaugugccacaauaac

SEQ ID NO: 729886 - RNA, 19 nt, Artificial Sequence
  Description of Artificial Sequence: Synthetic oligonucleotide
  Sense strand starting at position 2636 of SEQ ID NO: 586595
uccugacacgcucagagau

SEQ ID NO: 729887 - RNA, 19 nt, Artificial Sequence
  Description of Artificial Sequence: Synthetic oligonucleotide
  Antisense strand to SEQ ID NO: 729886
aucucugagcgugucagga

SEQ ID NO: 729888 - RNA, 19 nt, Artificial Sequence
  Description of Artificial Sequence: Synthetic oligonucleotide
  Sense strand starting at position 2643 of SEQ ID NO: 586595
acgcucagagauugggauu

SEQ ID NO: 729889 - RNA, 19 nt, Artificial Sequence
  Description of Artificial Sequence: Synthetic oligonucleotide
  Antisense strand to SEQ ID NO: 729888
aaucccaaucucugagcgu

SEQ ID NO: 729890 - RNA, 19 nt, Artificial Sequence
  Description of Artificial Sequence: Synthetic oligonucleotide
  Sense strand starting at position 2697 of SEQ ID NO: 586595
uuuaaagauccucggguga

SEQ ID NO: 729891 - RNA, 19 nt, Artificial Sequence
  Description of Artificial Sequence: Synthetic oligonucleotide
  Antisense strand to SEQ ID NO: 729890
ucacccgaggaucuuuaaa

SEQ ID NO: 729892 - RNA, 19 nt, Artificial Sequence
  Description of Artificial Sequence: Synthetic oligonucleotide
  Sense strand starting at position 2775 of SEQ ID NO: 586595
aucgauacaccuuauguca

SEQ ID NO: 729893 - RNA, 19 nt, Artificial Sequence
  Description of Artificial Sequence: Synthetic oligonucleotide
  Antisense strand to SEQ ID NO: 729892
ugacauaagguguaucgau

SEQ ID NO: 729894 - RNA, 19 nt, Artificial Sequence
  Description of Artificial Sequence: Synthetic oligonucleotide
  Sense strand starting at position 2915 of SEQ ID NO: 586595
acagaaguaggccaaaguu

SEQ ID NO: 729895 - RNA, 19 nt, Artificial Sequence
  Description of Artificial Sequence: Synthetic oligonucleotide
  Antisense strand to SEQ ID NO: 729894
aacuuuggccuacuucugu

SEQ ID NO: 729896 - RNA, 19 nt, Artificial Sequence
  Description of Artificial Sequence: Synthetic oligonucleotide
  Sense strand starting at position 2933 of SEQ ID NO: 586595
ugaagaauuccaggccuaa

SEQ ID NO: 729897 - RNA, 19 nt, Artificial Sequence
  Description of Artificial Sequence: Synthetic oligonucleotide
  Antisense strand to SEQ ID NO: 729896
uuaggccuggaauucuuca

SEQ ID NO: 729898 - RNA, 19 nt, Artificial Sequence
  Description of Artificial Sequence: Synthetic oligonucleotide
  Sense strand starting at position 2944 of SEQ ID NO: 586595
aggccuaaagcauaucuua

SEQ ID NO: 729899 - RNA, 19 nt, Artificial Sequence
  Description of Artificial Sequence: Synthetic oligonucleotide
  Antisense strand to SEQ ID NO: 729898
uaagauaugcuuuaggccu

SEQ ID NO: 729900 - RNA, 19 nt, Artificial Sequence
  Description of Artificial Sequence: Synthetic oligonucleotide
  Sense strand starting at position 2964 of SEQ ID NO: 586595
cuuauuuaguacucuuguu

SEQ ID NO: 729901 - RNA, 19 nt, Artificial Sequence
  Description of Artificial Sequence: Synthetic oligonucleotide
  Antisense strand to SEQ ID NO: 729900
aacaagaguacuaaauaag

SEQ ID NO: 729902 - RNA, 19 nt, Artificial Sequence
  Description of Artificial Sequence: Synthetic oligonucleotide
  Sense strand starting at position 2985 of SEQ ID NO: 586595
uggugagguuuaccaugaa

SEQ ID NO: 729903 - RNA, 19 nt, Artificial Sequence
  Description of Artificial Sequence: Synthetic oligonucleotide
  Antisense strand to SEQ ID NO: 729902
uucaugguaaaccucacca

SEQ ID NO: 729904 - RNA, 19 nt, Artificial Sequence
  Description of Artificial Sequence: Synthetic oligonucleotide
  Sense strand starting at position 2988 of SEQ ID NO: 586595
ugagguuuaccaugaaagu

SEQ ID NO: 729905 - RNA, 19 nt, Artificial Sequence
  Description of Artificial Sequence: Synthetic oligonucleotide
  Antisense strand to SEQ ID NO: 729904
acuuucaugguaaaccuca

SEQ ID NO: 729906 - RNA, 19 nt, Artificial Sequence
  Description of Artificial Sequence: Synthetic oligonucleotide
  Sense strand starting at position 3002 of SEQ ID NO: 586595
aaaguauagugagaauuug

SEQ ID NO: 729907 - RNA, 19 nt, Artificial Sequence
  Description of Artificial Sequence: Synthetic oligonucleotide
  Antisense strand to SEQ ID NO: 729906
caaauucucacuauacuuu

SEQ ID NO: 729908 - RNA, 19 nt, Artificial Sequence
  Description of Artificial Sequence: Synthetic oligonucleotide
  Sense strand starting at position 3035 of SEQ ID NO: 586595
uguauuaggucccuggaau

SEQ ID NO: 729909 - RNA, 19 nt, Artificial Sequence
  Description of Artificial Sequence: Synthetic oligonucleotide
  Antisense strand to SEQ ID NO: 729908
auuccagggaccuaauaca

SEQ ID NO: 729910 - RNA, 19 nt, Artificial Sequence
  Description of Artificial Sequence: Synthetic oligonucleotide
  Sense strand starting at position 3036 of SEQ ID NO: 586595
guauuaggucccuggaaug

SEQ ID NO: 729911 - RNA, 19 nt, Artificial Sequence
  Description of Artificial Sequence: Synthetic oligonucleotide
  Antisense strand to SEQ ID NO: 729910
cauuccagggaccuaauac

SEQ ID NO: 729912 - RNA, 19 nt, Artificial Sequence
  Description of Artificial Sequence: Synthetic oligonucleotide
  Sense strand starting at position 3124 of SEQ ID NO: 586595
guaacacaagcuuaauaug

SEQ ID NO: 729913 - RNA, 19 nt, Artificial Sequence
  Description of Artificial Sequence: Synthetic oligonucleotide
  Antisense strand to SEQ ID NO: 729912
cauauuaagcuuguguuac

SEQ ID NO: 729914 - RNA, 19 nt, Artificial Sequence
  Description of Artificial Sequence: Synthetic oligonucleotide
  Sense strand starting at position 3145 of SEQ ID NO: 586595
uugaaugaauugcugauua

SEQ ID NO: 729915 - RNA, 19 nt, Artificial Sequence
  Description of Artificial Sequence: Synthetic oligonucleotide
  Antisense strand to SEQ ID NO: 729914
uaaucagcaauucauucaa

SEQ ID NO: 729916 - RNA, 19 nt, Artificial Sequence
  Description of Artificial Sequence: Synthetic oligonucleotide
  Sense strand starting at position 3184 of SEQ ID NO: 586595
aguguauaaucaucaguaa

SEQ ID NO: 729917 - RNA, 19 nt, Artificial Sequence
  Description of Artificial Sequence: Synthetic oligonucleotide
  Antisense strand to SEQ ID NO: 729916
uuacugaugauuauacacu

SEQ ID NO: 729918 - RNA, 19 nt, Artificial Sequence
  Description of Artificial Sequence: Synthetic oligonucleotide
  Sense strand starting at position 3185 of SEQ ID NO: 586595
guguauaaucaucaguaau

SEQ ID NO: 729919 - RNA, 19 nt, Artificial Sequence
  Description of Artificial Sequence: Synthetic oligonucleotide
  Antisense strand to SEQ ID NO: 729918
auuacugaugauuauacac

SEQ ID NO: 729920 - RNA, 19 nt, Artificial Sequence
  Description of Artificial Sequence: Synthetic oligonucleotide
  Sense strand starting at position 3187 of SEQ ID NO: 586595
guauaaucaucaguaauuc

SEQ ID NO: 729921 - RNA, 19 nt, Artificial Sequence
  Description of Artificial Sequence: Synthetic oligonucleotide
  Antisense strand to SEQ ID NO: 729920
gaauuacugaugauuauac

SEQ ID NO: 729922 - RNA, 19 nt, Artificial Sequence
  Description of Artificial Sequence: Synthetic oligonucleotide
  Sense strand starting at position 3217 of SEQ ID NO: 586595
aguggcuuaugauuaauaa

SEQ ID NO: 729923 - RNA, 19 nt, Artificial Sequence
  Description of Artificial Sequence: Synthetic oligonucleotide
  Antisense strand to SEQ ID NO: 729922
uuauuaaucauaagccacu

SEQ ID NO: 729924 - RNA, 19 nt, Artificial Sequence
  Description of Artificial Sequence: Synthetic oligonucleotide
  Sense strand starting at position 3218 of SEQ ID NO: 586595
guggcuuaugauuaauaaa

SEQ ID NO: 729925 - RNA, 19 nt, Artificial Sequence
  Description of Artificial Sequence: Synthetic oligonucleotide
  Antisense strand to SEQ ID NO: 729924
uuuauuaaucauaagccac

SEQ ID NO: 729926 - RNA, 19 nt, Artificial Sequence
  Description of Artificial Sequence: Synthetic oligonucleotide
  Sense strand starting at position 3255 of SEQ ID NO: 586595
cuggaaauguuaucuaguu

SEQ ID NO: 729927 - RNA, 19 nt, Artificial Sequence
  Description of Artificial Sequence: Synthetic oligonucleotide
  Antisense strand to SEQ ID NO: 729926
aacuagauaacauuuccag

SEQ ID NO: 729928 - RNA, 19 nt, Artificial Sequence
  Description of Artificial Sequence: Synthetic oligonucleotide
  Sense strand starting at position 3256 of SEQ ID NO: 586595
uggaaauguuaucuaguug

SEQ ID NO: 729929 - RNA, 19 nt, Artificial Sequence
  Description of Artificial Sequence: Synthetic oligonucleotide
  Antisense strand to SEQ ID NO: 729928
caacuagauaacauuucca

SEQ ID NO: 729930 - RNA, 19 nt, Artificial Sequence
  Description of Artificial Sequence: Synthetic oligonucleotide
  Sense strand starting at position 3257 of SEQ ID NO: 586595
ggaaauguuaucuaguugu

SEQ ID NO: 729931 - RNA, 19 nt, Artificial Sequence
  Description of Artificial Sequence: Synthetic oligonucleotide
  Antisense strand to SEQ ID NO: 729930
acaacuagauaacauuucc

SEQ ID NO: 729932 - RNA, 19 nt, Artificial Sequence
  Description of Artificial Sequence: Synthetic oligonucleotide
  Sense strand starting at position 3346 of SEQ ID NO: 586595
uguuuagucuuauugaagg

SEQ ID NO: 729933 - RNA, 19 nt, Artificial Sequence
  Description of Artificial Sequence: Synthetic oligonucleotide
  Antisense strand to SEQ ID NO: 729932
ccuucaauaagacuaaaca

SEQ ID NO: 729934 - RNA, 19 nt, Artificial Sequence
  Description of Artificial Sequence: Synthetic oligonucleotide
  Sense strand starting at position 3762 of SEQ ID NO: 586595
ggcuuuaucccuuaggcuu

SEQ ID NO: 729935 - RNA, 19 nt, Artificial Sequence
  Description of Artificial Sequence: Synthetic oligonucleotide
  Antisense strand to SEQ ID NO: 729934
aagccuaagggauaaagcc

SEQ ID NO: 729936 - RNA, 19 nt, Artificial Sequence
  Description of Artificial Sequence: Synthetic oligonucleotide
  Sense strand starting at position 3795 of SEQ ID NO: 586595
uggauugacuaguuuaaag

SEQ ID NO: 729937 - RNA, 19 nt, Artificial Sequence
  Description of Artificial Sequence: Synthetic oligonucleotide
  Antisense strand to SEQ ID NO: 729936
cuuuaaacuagucaaucca

SEQ ID NO: 729938 - RNA, 19 nt, Artificial Sequence
  Description of Artificial Sequence: Synthetic oligonucleotide
  Sense strand starting at position 3828 of SEQ ID NO: 586595
gggagaacuugacucuggu

SEQ ID NO: 729939 - RNA, 19 nt, Artificial Sequence
  Description of Artificial Sequence: Synthetic oligonucleotide
  Antisense strand to SEQ ID NO: 729938
accagagucaaguucuccc

SEQ ID NO: 729940 - RNA, 19 nt, Artificial Sequence
  Description of Artificial Sequence: Synthetic oligonucleotide
  Sense strand starting at position 3907 of SEQ ID NO: 586595
auaaguguucuauaucaca

SEQ ID NO: 729941 - RNA, 19 nt, Artificial Sequence
  Description of Artificial Sequence: Synthetic oligonucleotide
  Antisense strand to SEQ ID NO: 729940
ugugauauagaacacuuau

SEQ ID NO: 729942 - RNA, 19 nt, Artificial Sequence
  Description of Artificial Sequence: Synthetic oligonucleotide
  Sense strand starting at position 3957 of SEQ ID NO: 586595
acgugauacaacuggguuu

SEQ ID NO: 729943 - RNA, 19 nt, Artificial Sequence
  Description of Artificial Sequence: Synthetic oligonucleotide
  Antisense strand to SEQ ID NO: 729942
aaacccaguuguaucacgu

SEQ ID NO: 729944 - RNA, 19 nt, Artificial Sequence
  Description of Artificial Sequence: Synthetic oligonucleotide
  Sense strand starting at position 185 of SEQ ID NO: 586596
ugacaagagucacugcauu

SEQ ID NO: 729945 - RNA, 19 nt, Artificial Sequence
  Description of Artificial Sequence: Synthetic oligonucleotide
  Antisense strand to SEQ ID NO: 729944
aaugcagugacucuuguca

SEQ ID NO: 729946 - RNA, 19 nt, Artificial Sequence
  Description of Artificial Sequence: Synthetic oligonucleotide
  Sense strand starting at position 191 of SEQ ID NO: 586596
gagucacugcauuagcaaa

SEQ ID NO: 729947 - RNA, 19 nt, Artificial Sequence
  Description of Artificial Sequence: Synthetic oligonucleotide
  Antisense strand to SEQ ID NO: 729946
uuugcuaaugcagugacuc

SEQ ID NO: 729948 - RNA, 19 nt, Artificial Sequence
  Description of Artificial Sequence: Synthetic oligonucleotide
  Sense strand starting at position 210 of SEQ ID NO: 586596
aauaaauguugggccuaua

SEQ ID NO: 729949 - RNA, 19 nt, Artificial Sequence
  Description of Artificial Sequence: Synthetic oligonucleotide
  Antisense strand to SEQ ID NO: 729948
uauaggcccaacauuuauu

SEQ ID NO: 729950 - RNA, 19 nt, Artificial Sequence
  Description of Artificial Sequence: Synthetic oligonucleotide
  Sense strand starting at position 250 of SEQ ID NO: 586596
uccuaaacucaugauucgu

SEQ ID NO: 729951 - RNA, 19 nt, Artificial Sequence
  Description of Artificial Sequence: Synthetic oligonucleotide
  Antisense strand to SEQ ID NO: 729950
acgaaucaugaguuuagga

SEQ ID NO: 729952 - RNA, 19 nt, Artificial Sequence
  Description of Artificial Sequence: Synthetic oligonucleotide
  Sense strand starting at position 380 of SEQ ID NO: 586596
cuugaacuuuccuuuguga

SEQ ID NO: 729953 - RNA, 19 nt, Artificial Sequence
  Description of Artificial Sequence: Synthetic oligonucleotide
  Antisense strand to SEQ ID NO: 729952
ucacaaaggaaaguucaag

SEQ ID NO: 729954 - RNA, 19 nt, Artificial Sequence
  Description of Artificial Sequence: Synthetic oligonucleotide
  Sense strand starting at position 382 of SEQ ID NO: 586596
ugaacuuuccuuugugauu

SEQ ID NO: 729955 - RNA, 19 nt, Artificial Sequence
  Description of Artificial Sequence: Synthetic oligonucleotide
  Antisense strand to SEQ ID NO: 729954
aaucacaaaggaaaguuca

SEQ ID NO: 729956 - RNA, 19 nt, Artificial Sequence
  Description of Artificial Sequence: Synthetic oligonucleotide
  Sense strand starting at position 499 of SEQ ID NO: 586596
aaugguuugccuggacaga

SEQ ID NO: 729957 - RNA, 19 nt, Artificial Sequence
  Description of Artificial Sequence: Synthetic oligonucleotide
  Antisense strand to SEQ ID NO: 729956
ucuguccaggcaaaccauu

SEQ ID NO: 729958 - RNA, 19 nt, Artificial Sequence
  Description of Artificial Sequence: Synthetic oligonucleotide
  Sense strand starting at position 500 of SEQ ID NO: 586596
augguuugccuggacagaa

SEQ ID NO: 729959 - RNA, 19 nt, Artificial Sequence
  Description of Artificial Sequence: Synthetic oligonucleotide
  Antisense strand to SEQ ID NO: 729958
uucuguccaggcaaaccau

SEQ ID NO: 729960 - RNA, 19 nt, Artificial Sequence
  Description of Artificial Sequence: Synthetic oligonucleotide
  Sense strand starting at position 510 of SEQ ID NO: 586596
uggacagaaagcuguuaau

SEQ ID NO: 729961 - RNA, 19 nt, Artificial Sequence
  Description of Artificial Sequence: Synthetic oligonucleotide
  Antisense strand to SEQ ID NO: 729960
auuaacagcuuucugucca

SEQ ID NO: 729962 - RNA, 19 nt, Artificial Sequence
  Description of Artificial Sequence: Synthetic oligonucleotide
  Sense strand starting at position 559 of SEQ ID NO: 586596
cucagagauugaucucagu

SEQ ID NO: 729963 - RNA, 19 nt, Artificial Sequence
  Description of Artificial Sequence: Synthetic oligonucleotide
  Antisense strand to SEQ ID NO: 729962
acugagaucaaucucugag

SEQ ID NO: 729964 - RNA, 19 nt, Artificial Sequence
  Description of Artificial Sequence: Synthetic oligonucleotide
  Sense strand starting at position 565 of SEQ ID NO: 586596
gauugaucucagugaggga

SEQ ID NO: 729965 - RNA, 19 nt, Artificial Sequence
  Description of Artificial Sequence: Synthetic oligonucleotide
  Antisense strand to SEQ ID NO: 729964
ucccucacugagaucaauc

SEQ ID NO: 729966 - RNA, 19 nt, Artificial Sequence
  Description of Artificial Sequence: Synthetic oligonucleotide
  Sense strand starting at position 754 of SEQ ID NO: 586596
aucuacagccucgaguuaa

SEQ ID NO: 729967 - RNA, 19 nt, Artificial Sequence
  Description of Artificial Sequence: Synthetic oligonucleotide
  Antisense strand to SEQ ID NO: 729966
uuaacucgaggcuguagau

SEQ ID NO: 729968 - RNA, 19 nt, Artificial Sequence
  Description of Artificial Sequence: Synthetic oligonucleotide
  Sense strand starting at position 764 of SEQ ID NO: 586596
ucgaguuaaaggcaaguua

SEQ ID NO: 729969 - RNA, 19 nt, Artificial Sequence
  Description of Artificial Sequence: Synthetic oligonucleotide
  Antisense strand to SEQ ID NO: 729968
uaacuugccuuuaacucga

SEQ ID NO: 729970 - RNA, 19 nt, Artificial Sequence
  Description of Artificial Sequence: Synthetic oligonucleotide
  Sense strand starting at position 776 of SEQ ID NO: 586596
caaguuaguccuuagugga

SEQ ID NO: 729971 - RNA, 19 nt, Artificial Sequence
  Description of Artificial Sequence: Synthetic oligonucleotide
  Antisense strand to SEQ ID NO: 729970
uccacuaaggacuaacuug

SEQ ID NO: 729972 - RNA, 19 nt, Artificial Sequence
  Description of Artificial Sequence: Synthetic oligonucleotide
  Sense strand starting at position 815 of SEQ ID NO: 586596
ggagaacauuguguacaga

SEQ ID NO: 729973 - RNA, 19 nt, Artificial Sequence
  Description of Artificial Sequence: Synthetic oligonucleotide
  Antisense strand to SEQ ID NO: 729972
ucuguacacaauguucucc

SEQ ID NO: 729974 - RNA, 19 nt, Artificial Sequence
  Description of Artificial Sequence: Synthetic oligonucleotide
  Sense strand starting at position 818 of SEQ ID NO: 586596
gaacauuguguacagacga

SEQ ID NO: 729975 - RNA, 19 nt, Artificial Sequence
  Description of Artificial Sequence: Synthetic oligonucleotide
  Antisense strand to SEQ ID NO: 729974
ucgucuguacacaauguuc

SEQ ID NO: 729976 - RNA, 19 nt, Artificial Sequence
  Description of Artificial Sequence: Synthetic oligonucleotide
  Sense strand starting at position 831 of SEQ ID NO: 586596
agacgaugcccuuaagaau

SEQ ID NO: 729977 - RNA, 19 nt, Artificial Sequence
  Description of Artificial Sequence: Synthetic oligonucleotide
  Antisense strand to SEQ ID NO: 729976
auucuuaagggcaucgucu

SEQ ID NO: 729978 - RNA, 19 nt, Artificial Sequence
  Description of Artificial Sequence: Synthetic oligonucleotide
  Sense strand starting at position 942 of SEQ ID NO: 586596
cagagugucuccucugaua

SEQ ID NO: 729979 - RNA, 19 nt, Artificial Sequence
  Description of Artificial Sequence: Synthetic oligonucleotide
  Antisense strand to SEQ ID NO: 729978
uaucagaggagacacucug

SEQ ID NO: 729980 - RNA, 19 nt, Artificial Sequence
  Description of Artificial Sequence: Synthetic oligonucleotide
  Sense strand starting at position 944 of SEQ ID NO: 586596
gagugucuccucugauaau

SEQ ID NO: 729981 - RNA, 19 nt, Artificial Sequence
  Description of Artificial Sequence: Synthetic oligonucleotide
  Antisense strand to SEQ ID NO: 729980
auuaucagaggagacacuc

SEQ ID NO: 729982 - RNA, 19 nt, Artificial Sequence
  Description of Artificial Sequence: Synthetic oligonucleotide
  Sense strand starting at position 985 of SEQ ID NO: 586596
gcagaaaugcuugacaccu

SEQ ID NO: 729983 - RNA, 19 nt, Artificial Sequence
  Description of Artificial Sequence: Synthetic oligonucleotide
  Antisense strand to SEQ ID NO: 729982
aggugucaagcauuucugc

SEQ ID NO: 729984 - RNA, 19 nt, Artificial Sequence
  Description of Artificial Sequence: Synthetic oligonucleotide
  Sense strand starting at position 1050 of SEQ ID NO: 586596
ccuugaaguucucugauga

SEQ ID NO: 729985 - RNA, 19 nt, Artificial Sequence
  Description of Artificial Sequence: Synthetic oligonucleotide
  Antisense strand to SEQ ID NO: 729984
ucaucagagaacuucaagg

SEQ ID NO: 729986 - RNA, 19 nt, Artificial Sequence
  Description of Artificial Sequence: Synthetic oligonucleotide
  Sense strand starting at position 1051 of SEQ ID NO: 586596
cuugaaguucucugaugac

SEQ ID NO: 729987 - RNA, 19 nt, Artificial Sequence
  Description of Artificial Sequence: Synthetic oligonucleotide
  Antisense strand to SEQ ID NO: 729986
gucaucagagaacuucaag

SEQ ID NO: 729988 - RNA, 19 nt, Artificial Sequence
  Description of Artificial Sequence: Synthetic oligonucleotide
  Sense strand starting at position 1060 of SEQ ID NO: 586596
cucugaugaccgcaacuua

SEQ ID NO: 729989 - RNA, 19 nt, Artificial Sequence
  Description of Artificial Sequence: Synthetic oligonucleotide
  Antisense strand to SEQ ID NO: 729988
uaaguugcggucaucagag

SEQ ID NO: 729990 - RNA, 19 nt, Artificial Sequence
  Description of Artificial Sequence: Synthetic oligonucleotide
  Sense strand starting at position 2319 of SEQ ID NO: 586596
ggcagagaguugcuaggaa

SEQ ID NO: 729991 - RNA, 19 nt, Artificial Sequence
  Description of Artificial Sequence: Synthetic oligonucleotide
  Antisense strand to SEQ ID NO: 729990
uuccuagcaacucucugcc

SEQ ID NO: 729992 - RNA, 19 nt, Artificial Sequence
  Description of Artificial Sequence: Synthetic oligonucleotide
  Sense strand starting at position 2544 of SEQ ID NO: 586596
acaagaacuccugaagcgu

SEQ ID NO: 729993 - RNA, 19 nt, Artificial Sequence
  Description of Artificial Sequence: Synthetic oligonucleotide
  Antisense strand to SEQ ID NO: 729992
acgcuucaggaguucuugu

SEQ ID NO: 729994 - RNA, 19 nt, Artificial Sequence
  Description of Artificial Sequence: Synthetic oligonucleotide
  Sense strand starting at position 2893 of SEQ ID NO: 586596
ggcuguucccggagcgacu

SEQ ID NO: 729995 - RNA, 19 nt, Artificial Sequence
  Description of Artificial Sequence: Synthetic oligonucleotide
  Antisense strand to SEQ ID NO: 729994
agucgcuccgggaacagcc

SEQ ID NO: 729996 - RNA, 19 nt, Artificial Sequence
  Description of Artificial Sequence: Synthetic oligonucleotide
  Sense strand starting at position 2916 of SEQ ID NO: 586596
gagauuucucgcugcuccu

SEQ ID NO: 729997 - RNA, 19 nt, Artificial Sequence
  Description of Artificial Sequence: Synthetic oligonucleotide
  Antisense strand to SEQ ID NO: 729996
aggagcagcgagaaaucuc

SEQ ID NO: 729998 - RNA, 19 nt, Artificial Sequence
  Description of Artificial Sequence: Synthetic oligonucleotide
  Sense strand starting at position 3287 of SEQ ID NO: 586596
guuuaacacggugaugguu

SEQ ID NO: 729999 - RNA, 19 nt, Artificial Sequence
  Description of Artificial Sequence: Synthetic oligonucleotide
  Antisense strand to SEQ ID NO: 729998
aaccaucaccguguuaaac

SEQ ID NO: 730000 - RNA, 19 nt, Artificial Sequence
  Description of Artificial Sequence: Synthetic oligonucleotide
  Sense strand starting at position 3332 of SEQ ID NO: 586596
auucccauucgaggaguuu

SEQ ID NO: 730001 - RNA, 19 nt, Artificial Sequence
  Description of Artificial Sequence: Synthetic oligonucleotide
  Antisense strand to SEQ ID NO: 730000
aaacuccucgaaugggaau

SEQ ID NO: 730002 - RNA, 19 nt, Artificial Sequence
  Description of Artificial Sequence: Synthetic oligonucleotide
  Sense strand starting at position 3341 of SEQ ID NO: 586596
cgaggaguuugaccucuca

SEQ ID NO: 730003 - RNA, 19 nt, Artificial Sequence
  Description of Artificial Sequence: Synthetic oligonucleotide
  Antisense strand to SEQ ID NO: 730002
ugagaggucaaacuccucg

SEQ ID NO: 730004 - RNA, 19 nt, Artificial Sequence
  Description of Artificial Sequence: Synthetic oligonucleotide
  Sense strand starting at position 3412 of SEQ ID NO: 586596
aggugaaauaugcgggagu

SEQ ID NO: 730005 - RNA, 19 nt, Artificial Sequence
  Description of Artificial Sequence: Synthetic oligonucleotide
  Antisense strand to SEQ ID NO: 730004
acucccgcauauuucaccu

SEQ ID NO: 730006 - RNA, 19 nt, Artificial Sequence
  Description of Artificial Sequence: Synthetic oligonucleotide
  Sense strand starting at position 3458 of SEQ ID NO: 586596
gucuccuuauuuguaguua

SEQ ID NO: 730007 - RNA, 19 nt, Artificial Sequence
  Description of Artificial Sequence: Synthetic oligonucleotide
  Antisense strand to SEQ ID NO: 730006
uaacuacaaauaaggagac

SEQ ID NO: 730008 - RNA, 19 nt, Artificial Sequence
  Description of Artificial Sequence: Synthetic oligonucleotide
  Sense strand starting at position 3530 of SEQ ID NO: 586596
gacugagugaauggaaagu

SEQ ID NO: 730009 - RNA, 19 nt, Artificial Sequence
  Description of Artificial Sequence: Synthetic oligonucleotide
  Antisense strand to SEQ ID NO: 730008
acuuuccauucacucaguc

SEQ ID NO: 730010 - RNA, 19 nt, Artificial Sequence
  Description of Artificial Sequence: Synthetic oligonucleotide
  Sense strand starting at position 3539 of SEQ ID NO: 586596
aauggaaaguaccugguua

SEQ ID NO: 730011 - RNA, 19 nt, Artificial Sequence
  Description of Artificial Sequence: Synthetic oligonucleotide
  Antisense strand to SEQ ID NO: 730010
uaaccagguacuuuccauu

SEQ ID NO: 730012 - RNA, 19 nt, Artificial Sequence
  Description of Artificial Sequence: Synthetic oligonucleotide
  Sense strand starting at position 3540 of SEQ ID NO: 586596
auggaaaguaccugguuaa

SEQ ID NO: 730013 - RNA, 19 nt, Artificial Sequence
  Description of Artificial Sequence: Synthetic oligonucleotide
  Antisense strand to SEQ ID NO: 730012
uuaaccagguacuuuccau

SEQ ID NO: 730014 - RNA, 19 nt, Artificial Sequence
  Description of Artificial Sequence: Synthetic oligonucleotide
  Sense strand starting at position 3541 of SEQ ID NO: 586596
uggaaaguaccugguuaau

SEQ ID NO: 730015 - RNA, 19 nt, Artificial Sequence
  Description of Artificial Sequence: Synthetic oligonucleotide
  Antisense strand to SEQ ID NO: 730014
auuaaccagguacuuucca

SEQ ID NO: 730016 - RNA, 19 nt, Artificial Sequence
  Description of Artificial Sequence: Synthetic oligonucleotide
  Sense strand starting at position 3543 of SEQ ID NO: 586596
gaaaguaccugguuaauaa

SEQ ID NO: 730017 - RNA, 19 nt, Artificial Sequence
  Description of Artificial Sequence: Synthetic oligonucleotide
  Antisense strand to SEQ ID NO: 730016
uuauuaaccagguacuuuc

SEQ ID NO: 730018 - RNA, 19 nt, Artificial Sequence
  Description of Artificial Sequence: Synthetic oligonucleotide
  Sense strand starting at position 3608 of SEQ ID NO: 586596
ggugcacaggauuaguuaa

SEQ ID NO: 730019 - RNA, 19 nt, Artificial Sequence
  Description of Artificial Sequence: Synthetic oligonucleotide
  Antisense strand to SEQ ID NO: 730018
uuaacuaauccugugcacc

SEQ ID NO: 730020 - RNA, 19 nt, Artificial Sequence
  Description of Artificial Sequence: Synthetic oligonucleotide
  Sense strand starting at position 3616 of SEQ ID NO: 586596
ggauuaguuaagcaaagca

SEQ ID NO: 730021 - RNA, 19 nt, Artificial Sequence
  Description of Artificial Sequence: Synthetic oligonucleotide
  Antisense strand to SEQ ID NO: 730020
ugcuuugcuuaacuaaucc

SEQ ID NO: 730022 - RNA, 19 nt, Artificial Sequence
  Description of Artificial Sequence: Synthetic oligonucleotide
  Sense strand starting at position 3924 of SEQ ID NO: 586596
auuagugacucuuccauug

SEQ ID NO: 730023 - RNA, 19 nt, Artificial Sequence
  Description of Artificial Sequence: Synthetic oligonucleotide
  Antisense strand to SEQ ID NO: 730022
caauggaagagucacuaau

SEQ ID NO: 730024 - RNA, 19 nt, Artificial Sequence
  Description of Artificial Sequence: Synthetic oligonucleotide
  Sense strand starting at position 81 of SEQ ID NO: 586597
uguagacguuucccaugau

SEQ ID NO: 730025 - RNA, 19 nt, Artificial Sequence
  Description of Artificial Sequence: Synthetic oligonucleotide
  Antisense strand to SEQ ID NO: 730024
aucaugggaaacgucuaca

SEQ ID NO: 730026 - RNA, 19 nt, Artificial Sequence
  Description of Artificial Sequence: Synthetic oligonucleotide
  Sense strand starting at position 84 of SEQ ID NO: 586597
agacguuucccaugauuau

SEQ ID NO: 730027 - RNA, 19 nt, Artificial Sequence
  Description of Artificial Sequence: Synthetic oligonucleotide
  Antisense strand to SEQ ID NO: 730026
auaaucaugggaaacgucu

SEQ ID NO: 730028 - RNA, 19 nt, Artificial Sequence
  Description of Artificial Sequence: Synthetic oligonucleotide
  Sense strand starting at position 85 of SEQ ID NO: 586597
gacguuucccaugauuauc

SEQ ID NO: 730029 - RNA, 19 nt, Artificial Sequence
  Description of Artificial Sequence: Synthetic oligonucleotide
  Antisense strand to SEQ ID NO: 730028
gauaaucaugggaaacguc

SEQ ID NO: 730030 - RNA, 19 nt, Artificial Sequence
  Description of Artificial Sequence: Synthetic oligonucleotide
  Sense strand starting at position 237 of SEQ ID NO: 586597
auacacagcagucgugauu

SEQ ID NO: 730031 - RNA, 19 nt, Artificial Sequence
  Description of Artificial Sequence: Synthetic oligonucleotide
  Antisense strand to SEQ ID NO: 730030
aaucacgacugcuguguau

SEQ ID NO: 730032 - RNA, 19 nt, Artificial Sequence
  Description of Artificial Sequence: Synthetic oligonucleotide
  Sense strand starting at position 296 of SEQ ID NO: 586597
ggcugaauccauggcauuc

SEQ ID NO: 730033 - RNA, 19 nt, Artificial Sequence
  Description of Artificial Sequence: Synthetic oligonucleotide
  Antisense strand to SEQ ID NO: 730032
gaaugccauggauucagcc

SEQ ID NO: 730034 - RNA, 19 nt, Artificial Sequence
  Description of Artificial Sequence: Synthetic oligonucleotide
  Sense strand starting at position 336 of SEQ ID NO: 586597
uuuacagguucucuggauu

SEQ ID NO: 730035 - RNA, 19 nt, Artificial Sequence
  Description of Artificial Sequence: Synthetic oligonucleotide
  Antisense strand to SEQ ID NO: 730034
aauccagagaaccuguaaa

SEQ ID NO: 730036 - RNA, 19 nt, Artificial Sequence
  Description of Artificial Sequence: Synthetic oligonucleotide
  Sense strand starting at position 494 of SEQ ID NO: 586597
uccgaauagaagugugaaa

SEQ ID NO: 730037 - RNA, 19 nt, Artificial Sequence
  Description of Artificial Sequence: Synthetic oligonucleotide
  Antisense strand to SEQ ID NO: 730036
uuucacacuucuauucgga

SEQ ID NO: 730038 - RNA, 19 nt, Artificial Sequence
  Description of Artificial Sequence: Synthetic oligonucleotide
  Sense strand starting at position 1636 of SEQ ID NO: 586597
gccauuuaccgaugugguu

SEQ ID NO: 730039 - RNA, 19 nt, Artificial Sequence
  Description of Artificial Sequence: Synthetic oligonucleotide
  Antisense strand to SEQ ID NO: 730038
aaccacaucgguaaauggc

SEQ ID NO: 730040 - RNA, 19 nt, Artificial Sequence
  Description of Artificial Sequence: Synthetic oligonucleotide
  Sense strand starting at position 1744 of SEQ ID NO: 586597
cggcgaugccugucauggu

SEQ ID NO: 730041 - RNA, 19 nt, Artificial Sequence
  Description of Artificial Sequence: Synthetic oligonucleotide
  Antisense strand to SEQ ID NO: 730040
accaugacaggcaucgccg

SEQ ID NO: 730042 - RNA, 19 nt, Artificial Sequence
  Description of Artificial Sequence: Synthetic oligonucleotide
  Sense strand starting at position 2184 of SEQ ID NO: 586597
gagccuccuugguuaugua

SEQ ID NO: 730043 - RNA, 19 nt, Artificial Sequence
  Description of Artificial Sequence: Synthetic oligonucleotide
  Antisense strand to SEQ ID NO: 730042
uacauaaccaaggaggcuc

SEQ ID NO: 730044 - RNA, 19 nt, Artificial Sequence
  Description of Artificial Sequence: Synthetic oligonucleotide
  Sense strand starting at position 2193 of SEQ ID NO: 586597
ugguuauguauaugacguu

SEQ ID NO: 730045 - RNA, 19 nt, Artificial Sequence
  Description of Artificial Sequence: Synthetic oligonucleotide
  Antisense strand to SEQ ID NO: 730044
aacgucauauacauaacca

SEQ ID NO: 730046 - RNA, 19 nt, Artificial Sequence
  Description of Artificial Sequence: Synthetic oligonucleotide
  Sense strand starting at position 2265 of SEQ ID NO: 586597
gggaguuacccuggucccu

SEQ ID NO: 730047 - RNA, 19 nt, Artificial Sequence
  Description of Artificial Sequence: Synthetic oligonucleotide
  Antisense strand to SEQ ID NO: 730046
agggaccaggguaacuccc

SEQ ID NO: 730048 - RNA, 19 nt, Artificial Sequence
  Description of Artificial Sequence: Synthetic oligonucleotide
  Sense strand starting at position 2277 of SEQ ID NO: 586597
ggucccucucagggacauu

SEQ ID NO: 730049 - RNA, 19 nt, Artificial Sequence
  Description of Artificial Sequence: Synthetic oligonucleotide
  Antisense strand to SEQ ID NO: 730048
aaugucccugagagggacc

SEQ ID NO: 730050 - RNA, 19 nt, Artificial Sequence
  Description of Artificial Sequence: Synthetic oligonucleotide
  Sense strand starting at position 2312 of SEQ ID NO: 586597
ccugucuaggugugacaca

SEQ ID NO: 730051 - RNA, 19 nt, Artificial Sequence
  Description of Artificial Sequence: Synthetic oligonucleotide
  Antisense strand to SEQ ID NO: 730050
ugugucacaccuagacagg

SEQ ID NO: 730052 - RNA, 19 nt, Artificial Sequence
  Description of Artificial Sequence: Synthetic oligonucleotide
  Sense strand starting at position 2350 of SEQ ID NO: 586597
agguaauugugugcaccuu

SEQ ID NO: 730053 - RNA, 19 nt, Artificial Sequence
  Description of Artificial Sequence: Synthetic oligonucleotide
  Antisense strand to SEQ ID NO: 730052
aaggugcacacaauuaccu

SEQ ID NO: 730054 - RNA, 19 nt, Artificial Sequence
  Description of Artificial Sequence: Synthetic oligonucleotide
  Sense strand starting at position 2396 of SEQ ID NO: 586597
acacauucuccggagguuu

SEQ ID NO: 730055 - RNA, 19 nt, Artificial Sequence
  Description of Artificial Sequence: Synthetic oligonucleotide
  Antisense strand to SEQ ID NO: 730054
aaaccuccggagaaugugu

SEQ ID NO: 730056 - RNA, 19 nt, Artificial Sequence
  Description of Artificial Sequence: Synthetic oligonucleotide
  Sense strand starting at position 2490 of SEQ ID NO: 586597
uagagugcuugguugucaa

SEQ ID NO: 730057 - RNA, 19 nt, Artificial Sequence
  Description of Artificial Sequence: Synthetic oligonucleotide
  Antisense strand to SEQ ID NO: 730056
uugacaaccaagcacucua

SEQ ID NO: 730058 - RNA, 19 nt, Artificial Sequence
  Description of Artificial Sequence: Synthetic oligonucleotide
  Sense strand starting at position 2498 of SEQ ID NO: 586597
uugguugucaagugcauuu

SEQ ID NO: 730059 - RNA, 19 nt, Artificial Sequence
  Description of Artificial Sequence: Synthetic oligonucleotide
  Antisense strand to SEQ ID NO: 730058
aaaugcacuugacaaccaa

SEQ ID NO: 730060 - RNA, 19 nt, Artificial Sequence
  Description of Artificial Sequence: Synthetic oligonucleotide
  Sense strand starting at position 2508 of SEQ ID NO: 586597
agugcauuugccuguguuu

SEQ ID NO: 730061 - RNA, 19 nt, Artificial Sequence
  Description of Artificial Sequence: Synthetic oligonucleotide
  Antisense strand to SEQ ID NO: 730060
aaacacaggcaaaugcacu

SEQ ID NO: 730062 - RNA, 19 nt, Artificial Sequence
  Description of Artificial Sequence: Synthetic oligonucleotide
  Sense strand starting at position 2630 of SEQ ID NO: 586597
ccaucucaggucugguaau

SEQ ID NO: 730063 - RNA, 19 nt, Artificial Sequence
  Description of Artificial Sequence: Synthetic oligonucleotide
  Antisense strand to SEQ ID NO: 730062
auuaccagaccugagaugg

SEQ ID NO: 730064 - RNA, 19 nt, Artificial Sequence
  Description of Artificial Sequence: Synthetic oligonucleotide
  Sense strand starting at position 2679 of SEQ ID NO: 586597
aggacagugcauugguuaa

SEQ ID NO: 730065 - RNA, 19 nt, Artificial Sequence
  Description of Artificial Sequence: Synthetic oligonucleotide
  Antisense strand to SEQ ID NO: 730064
uuaaccaaugcacuguccu

SEQ ID NO: 730066 - RNA, 19 nt, Artificial Sequence
  Description of Artificial Sequence: Synthetic oligonucleotide
  Sense strand starting at position 2782 of SEQ ID NO: 586597
gcauaauguugaccaggua

SEQ ID NO: 730067 - RNA, 19 nt, Artificial Sequence
  Description of Artificial Sequence: Synthetic oligonucleotide
  Antisense strand to SEQ ID NO: 730066
uaccuggucaacauuaugc

SEQ ID NO: 730068 - RNA, 19 nt, Artificial Sequence
  Description of Artificial Sequence: Synthetic oligonucleotide
  Sense strand starting at position 2816 of SEQ ID NO: 586597
uuuaguagcuucccugaaa

SEQ ID NO: 730069 - RNA, 19 nt, Artificial Sequence
  Description of Artificial Sequence: Synthetic oligonucleotide
  Antisense strand to SEQ ID NO: 730068
uuucagggaagcuacuaaa

SEQ ID NO: 730070 - RNA, 19 nt, Artificial Sequence
  Description of Artificial Sequence: Synthetic oligonucleotide
  Sense strand starting at position 2903 of SEQ ID NO: 586597
uucuguaaaguguguauuu

SEQ ID NO: 730071 - RNA, 19 nt, Artificial Sequence
  Description of Artificial Sequence: Synthetic oligonucleotide
  Antisense strand to SEQ ID NO: 730070
aaauacacacuuuacagaa

SEQ ID NO: 730072 - RNA, 19 nt, Artificial Sequence
  Description of Artificial Sequence: Synthetic oligonucleotide
  Sense strand starting at position 2957 of SEQ ID NO: 586597
acacauuaucagcaguuua

SEQ ID NO: 730073 - RNA, 19 nt, Artificial Sequence
  Description of Artificial Sequence: Synthetic oligonucleotide
  Antisense strand to SEQ ID NO: 730072
uaaacugcugauaaugugu

SEQ ID NO: 730074 - RNA, 19 nt, Artificial Sequence
  Description of Artificial Sequence: Synthetic oligonucleotide
  Sense strand starting at position 2967 of SEQ ID NO: 586597
agcaguuuaugacccaaca

SEQ ID NO: 730075 - RNA, 19 nt, Artificial Sequence
  Description of Artificial Sequence: Synthetic oligonucleotide
  Antisense strand to SEQ ID NO: 730074
uguugggucauaaacugcu

SEQ ID NO: 730076 - RNA, 19 nt, Artificial Sequence
  Description of Artificial Sequence: Synthetic oligonucleotide
  Sense strand starting at position 3064 of SEQ ID NO: 586597
ggugcagaugcauggagaa

SEQ ID NO: 730077 - RNA, 19 nt, Artificial Sequence
  Description of Artificial Sequence: Synthetic oligonucleotide
  Antisense strand to SEQ ID NO: 730076
uucuccaugcaucugcacc

SEQ ID NO: 730078 - RNA, 19 nt, Artificial Sequence
  Description of Artificial Sequence: Synthetic oligonucleotide
  Sense strand starting at position 3118 of SEQ ID NO: 586597
ugucuaguguuauuucuaa

SEQ ID NO: 730079 - RNA, 19 nt, Artificial Sequence
  Description of Artificial Sequence: Synthetic oligonucleotide
  Antisense strand to SEQ ID NO: 730078
uuagaaauaacacuagaca

SEQ ID NO: 730080 - RNA, 19 nt, Artificial Sequence
  Description of Artificial Sequence: Synthetic oligonucleotide
  Sense strand starting at position 3156 of SEQ ID NO: 586597
ucauguaagugcuuagagu

SEQ ID NO: 730081 - RNA, 19 nt, Artificial Sequence
  Description of Artificial Sequence: Synthetic oligonucleotide
  Antisense strand to SEQ ID NO: 730080
acucuaagcacuuacauga

SEQ ID NO: 730082 - RNA, 19 nt, Artificial Sequence
  Description of Artificial Sequence: Synthetic oligonucleotide
  Sense strand starting at position 3157 of SEQ ID NO: 586597
cauguaagugcuuagagua

SEQ ID NO: 730083 - RNA, 19 nt, Artificial Sequence
  Description of Artificial Sequence: Synthetic oligonucleotide
  Antisense strand to SEQ ID NO: 730082
uacucuaagcacuuacaug

SEQ ID NO: 730084 - RNA, 19 nt, Artificial Sequence
  Description of Artificial Sequence: Synthetic oligonucleotide
  Sense strand starting at position 3276 of SEQ ID NO: 586597
gugacaaacuugcugagau

SEQ ID NO: 730085 - RNA, 19 nt, Artificial Sequence
  Description of Artificial Sequence: Synthetic oligonucleotide
  Antisense strand to SEQ ID NO: 730084
aucucagcaaguuugucac

SEQ ID NO: 730086 - RNA, 19 nt, Artificial Sequence
  Description of Artificial Sequence: Synthetic oligonucleotide
  Sense strand starting at position 3457 of SEQ ID NO: 586597
gucuaaagagcaggaguua

SEQ ID NO: 730087 - RNA, 19 nt, Artificial Sequence
  Description of Artificial Sequence: Synthetic oligonucleotide
  Antisense strand to SEQ ID NO: 730086
uaacuccugcucuuuagac

SEQ ID NO: 730088 - RNA, 19 nt, Artificial Sequence
  Description of Artificial Sequence: Synthetic oligonucleotide
  Sense strand starting at position 3715 of SEQ ID NO: 586597
gcaguucuguccuccagag

SEQ ID NO: 730089 - RNA, 19 nt, Artificial Sequence
  Description of Artificial Sequence: Synthetic oligonucleotide
  Antisense strand to SEQ ID NO: 730088
cucuggaggacagaacugc

SEQ ID NO: 730090 - RNA, 19 nt, Artificial Sequence
  Description of Artificial Sequence: Synthetic oligonucleotide
  Sense strand starting at position 3717 of SEQ ID NO: 586597
aguucuguccuccagagga

SEQ ID NO: 730091 - RNA, 19 nt, Artificial Sequence
  Description of Artificial Sequence: Synthetic oligonucleotide
  Antisense strand to SEQ ID NO: 730090
uccucuggaggacagaacu

SEQ ID NO: 730092 - RNA, 19 nt, Artificial Sequence
  Description of Artificial Sequence: Synthetic oligonucleotide
  Sense strand starting at position 3738 of SEQ ID NO: 586597
aauugucuacguggaguua

SEQ ID NO: 730093 - RNA, 19 nt, Artificial Sequence
  Description of Artificial Sequence: Synthetic oligonucleotide
  Antisense strand to SEQ ID NO: 730092
uaacuccacguagacaauu

SEQ ID NO: 730094 - RNA, 19 nt, Artificial Sequence
  Description of Artificial Sequence: Synthetic oligonucleotide
  Sense strand starting at position 3739 of SEQ ID NO: 586597
auugucuacguggaguuau

SEQ ID NO: 730095 - RNA, 19 nt, Artificial Sequence
  Description of Artificial Sequence: Synthetic oligonucleotide
  Antisense strand to SEQ ID NO: 730094
auaacuccacguagacaau

SEQ ID NO: 730096 - RNA, 19 nt, Artificial Sequence
  Description of Artificial Sequence: Synthetic oligonucleotide
  Sense strand starting at position 3749 of SEQ ID NO: 586597
uggaguuauuaacucccaa

SEQ ID NO: 730097 - RNA, 19 nt, Artificial Sequence
  Description of Artificial Sequence: Synthetic oligonucleotide
  Antisense strand to SEQ ID NO: 730096
uugggaguuaauaacucca

SEQ ID NO: 730098 - RNA, 19 nt, Artificial Sequence
  Description of Artificial Sequence: Synthetic oligonucleotide
  Sense strand starting at position 3806 of SEQ ID NO: 586597
ugggaagugccagaaaugu

SEQ ID NO: 730099 - RNA, 19 nt, Artificial Sequence
  Description of Artificial Sequence: Synthetic oligonucleotide
  Antisense strand to SEQ ID NO: 730098
acauuucuggcacuuccca

SEQ ID NO: 730100 - RNA, 19 nt, Artificial Sequence
  Description of Artificial Sequence: Synthetic oligonucleotide
  Sense strand starting at position 3814 of SEQ ID NO: 586597
gccagaaaugugcagguga

SEQ ID NO: 730101 - RNA, 19 nt, Artificial Sequence
  Description of Artificial Sequence: Synthetic oligonucleotide
  Antisense strand to SEQ ID NO: 730100
ucaccugcacauuucuggc

SEQ ID NO: 730102 - RNA, 19 nt, Artificial Sequence
  Description of Artificial Sequence: Synthetic oligonucleotide
  Sense strand starting at position 3816 of SEQ ID NO: 586597
cagaaaugugcaggugaaa

SEQ ID NO: 730103 - RNA, 19 nt, Artificial Sequence
  Description of Artificial Sequence: Synthetic oligonucleotide
  Antisense strand to SEQ ID NO: 730102
uuucaccugcacauuucug

SEQ ID NO: 730104 - RNA, 19 nt, Artificial Sequence
  Description of Artificial Sequence: Synthetic oligonucleotide
  Sense strand starting at position 121 of SEQ ID NO: 586598
auguacugauaccucuauu

SEQ ID NO: 730105 - RNA, 19 nt, Artificial Sequence
  Description of Artificial Sequence: Synthetic oligonucleotide
  Antisense strand to SEQ ID NO: 730104
aauagagguaucaguacau

SEQ ID NO: 730106 - RNA, 19 nt, Artificial Sequence
  Description of Artificial Sequence: Synthetic oligonucleotide
  Sense strand starting at position 153 of SEQ ID NO: 586598
uuacaugcccugugaauaa

SEQ ID NO: 730107 - RNA, 19 nt, Artificial Sequence
  Description of Artificial Sequence: Synthetic oligonucleotide
  Antisense strand to SEQ ID NO: 730106
uuauucacagggcauguaa

SEQ ID NO: 730108 - RNA, 19 nt, Artificial Sequence
  Description of Artificial Sequence: Synthetic oligonucleotide
  Sense strand starting at position 157 of SEQ ID NO: 586598
augcccugugaauaacaua

SEQ ID NO: 730109 - RNA, 19 nt, Artificial Sequence
  Description of Artificial Sequence: Synthetic oligonucleotide
  Antisense strand to SEQ ID NO: 730108
uauguuauucacagggcau

SEQ ID NO: 730110 - RNA, 19 nt, Artificial Sequence
  Description of Artificial Sequence: Synthetic oligonucleotide
  Sense strand starting at position 186 of SEQ ID NO: 586598
uuauaaugcuucuuaugag

SEQ ID NO: 730111 - RNA, 19 nt, Artificial Sequence
  Description of Artificial Sequence: Synthetic oligonucleotide
  Antisense strand to SEQ ID NO: 730110
cucauaagaagcauuauaa

SEQ ID NO: 730112 - RNA, 19 nt, Artificial Sequence
  Description of Artificial Sequence: Synthetic oligonucleotide
  Sense strand starting at position 326 of SEQ ID NO: 586598
ucccgaguuacugacagaa

SEQ ID NO: 730113 - RNA, 19 nt, Artificial Sequence
  Description of Artificial Sequence: Synthetic oligonucleotide
  Antisense strand to SEQ ID NO: 730112
uucugucaguaacucggga

SEQ ID NO: 730114 - RNA, 19 nt, Artificial Sequence
  Description of Artificial Sequence: Synthetic oligonucleotide
  Sense strand starting at position 429 of SEQ ID NO: 586598
gcuuaacauuaguuaucag

SEQ ID NO: 730115 - RNA, 19 nt, Artificial Sequence
  Description of Artificial Sequence: Synthetic oligonucleotide
  Antisense strand to SEQ ID NO: 730114
cugauaacuaauguuaagc

SEQ ID NO: 730116 - RNA, 19 nt, Artificial Sequence
  Description of Artificial Sequence: Synthetic oligonucleotide
  Sense strand starting at position 469 of SEQ ID NO: 586598
auuccacaucaucgagauu

SEQ ID NO: 730117 - RNA, 19 nt, Artificial Sequence
  Description of Artificial Sequence: Synthetic oligonucleotide
  Antisense strand to SEQ ID NO: 730116
aaucucgaugauguggaau

SEQ ID NO: 730118 - RNA, 19 nt, Artificial Sequence
  Description of Artificial Sequence: Synthetic oligonucleotide
  Sense strand starting at position 713 of SEQ ID NO: 586598
gcguugauaggguuucguu

SEQ ID NO: 730119 - RNA, 19 nt, Artificial Sequence
  Description of Artificial Sequence: Synthetic oligonucleotide
  Antisense strand to SEQ ID NO: 730118
aacgaaacccuaucaacgc

SEQ ID NO: 730120 - RNA, 19 nt, Artificial Sequence
  Description of Artificial Sequence: Synthetic oligonucleotide
  Sense strand starting at position 714 of SEQ ID NO: 586598
cguugauaggguuucguuu

SEQ ID NO: 730121 - RNA, 19 nt, Artificial Sequence
  Description of Artificial Sequence: Synthetic oligonucleotide
  Antisense strand to SEQ ID NO: 730120
aaacgaaacccuaucaacg

SEQ ID NO: 730122 - RNA, 19 nt, Artificial Sequence
  Description of Artificial Sequence: Synthetic oligonucleotide
  Sense strand starting at position 1051 of SEQ ID NO: 586598
guucaauccguagggagaa

SEQ ID NO: 730123 - RNA, 19 nt, Artificial Sequence
  Description of Artificial Sequence: Synthetic oligonucleotide
  Antisense strand to SEQ ID NO: 730122
uucucccuacggauugaac

SEQ ID NO: 730124 - RNA, 19 nt, Artificial Sequence
  Description of Artificial Sequence: Synthetic oligonucleotide
  Sense strand starting at position 1076 of SEQ ID NO: 586598
ggucgaauucaaggaaguu

SEQ ID NO: 730125 - RNA, 19 nt, Artificial Sequence
  Description of Artificial Sequence: Synthetic oligonucleotide
  Antisense strand to SEQ ID NO: 730124
aacuuccuugaauucgacc

SEQ ID NO: 730126 - RNA, 19 nt, Artificial Sequence
  Description of Artificial Sequence: Synthetic oligonucleotide
  Sense strand starting at position 1281 of SEQ ID NO: 586598
acacgucgcgagucuuuaa

SEQ ID NO: 730127 - RNA, 19 nt, Artificial Sequence
  Description of Artificial Sequence: Synthetic oligonucleotide
  Antisense strand to SEQ ID NO: 730126
uuaaagacucgcgacgugu

SEQ ID NO: 730128 - RNA, 19 nt, Artificial Sequence
  Description of Artificial Sequence: Synthetic oligonucleotide
  Sense strand starting at position 1289 of SEQ ID NO: 586598
cgagucuuuaagggaaaca

SEQ ID NO: 730129 - RNA, 19 nt, Artificial Sequence
  Description of Artificial Sequence: Synthetic oligonucleotide
  Antisense strand to SEQ ID NO: 730128
uguuucccuuaaagacucg

SEQ ID NO: 730130 - RNA, 19 nt, Artificial Sequence
  Description of Artificial Sequence: Synthetic oligonucleotide
  Sense strand starting at position 2606 of SEQ ID NO: 586598
gggaaugaguaggacuaaa

SEQ ID NO: 730131 - RNA, 19 nt, Artificial Sequence
  Description of Artificial Sequence: Synthetic oligonucleotide
  Antisense strand to SEQ ID NO: 730130
uuuaguccuacucauuccc

SEQ ID NO: 730132 - RNA, 19 nt, Artificial Sequence
  Description of Artificial Sequence: Synthetic oligonucleotide
  Sense strand starting at position 2857 of SEQ ID NO: 586598
uuccguugugugcugcaau

SEQ ID NO: 730133 - RNA, 19 nt, Artificial Sequence
  Description of Artificial Sequence: Synthetic oligonucleotide
  Antisense strand to SEQ ID NO: 730132
auugcagcacacaacggaa

SEQ ID NO: 730134 - RNA, 19 nt, Artificial Sequence
  Description of Artificial Sequence: Synthetic oligonucleotide
  Sense strand starting at position 2921 of SEQ ID NO: 586598
uucagcguugcuucgcaaa

SEQ ID NO: 730135 - RNA, 19 nt, Artificial Sequence
  Description of Artificial Sequence: Synthetic oligonucleotide
  Antisense strand to SEQ ID NO: 730134
uuugcgaagcaacgcugaa

SEQ ID NO: 730136 - RNA, 19 nt, Artificial Sequence
  Description of Artificial Sequence: Synthetic oligonucleotide
  Sense strand starting at position 2926 of SEQ ID NO: 586598
cguugcuucgcaaagcgaa

SEQ ID NO: 730137 - RNA, 19 nt, Artificial Sequence
  Description of Artificial Sequence: Synthetic oligonucleotide
  Antisense strand to SEQ ID NO: 730136
uucgcuuugcgaagcaacg

SEQ ID NO: 730138 - RNA, 19 nt, Artificial Sequence
  Description of Artificial Sequence: Synthetic oligonucleotide
  Sense strand starting at position 3010 of SEQ ID NO: 586598
gcaggcaggcuguaaauuu

SEQ ID NO: 730139 - RNA, 19 nt, Artificial Sequence
  Description of Artificial Sequence: Synthetic oligonucleotide
  Antisense strand to SEQ ID NO: 730138
aaauuuacagccugccugc

SEQ ID NO: 730140 - RNA, 19 nt, Artificial Sequence
  Description of Artificial Sequence: Synthetic oligonucleotide
  Sense strand starting at position 3033 of SEQ ID NO: 586598
ggagcuauucguggaucaa

SEQ ID NO: 730141 - RNA, 19 nt, Artificial Sequence
  Description of Artificial Sequence: Synthetic oligonucleotide
  Antisense strand to SEQ ID NO: 730140
uugauccacgaauagcucc

SEQ ID NO: 730142 - RNA, 19 nt, Artificial Sequence
  Description of Artificial Sequence: Synthetic oligonucleotide
  Sense strand starting at position 3034 of SEQ ID NO: 586598
gagcuauucguggaucaaa

SEQ ID NO: 730143 - RNA, 19 nt, Artificial Sequence
  Description of Artificial Sequence: Synthetic oligonucleotide
  Antisense strand to SEQ ID NO: 730142
uuugauccacgaauagcuc

SEQ ID NO: 730144 - RNA, 19 nt, Artificial Sequence
  Description of Artificial Sequence: Synthetic oligonucleotide
  Sense strand starting at position 3148 of SEQ ID NO: 586598
ucugaaaggccauacagua

SEQ ID NO: 730145 - RNA, 19 nt, Artificial Sequence
  Description of Artificial Sequence: Synthetic oligonucleotide
  Antisense strand to SEQ ID NO: 730144
uacuguauggccuuucaga

SEQ ID NO: 730146 - RNA, 19 nt, Artificial Sequence
  Description of Artificial Sequence: Synthetic oligonucleotide
  Sense strand starting at position 3177 of SEQ ID NO: 586598
gggagccucuuccuguaaa

SEQ ID NO: 730147 - RNA, 19 nt, Artificial Sequence
  Description of Artificial Sequence: Synthetic oligonucleotide
  Antisense strand to SEQ ID NO: 730146
uuuacaggaagaggcuccc

SEQ ID NO: 730148 - RNA, 19 nt, Artificial Sequence
  Description of Artificial Sequence: Synthetic oligonucleotide
  Sense strand starting at position 3188 of SEQ ID NO: 586598
ccuguaaacuaggcuagau

SEQ ID NO: 730149 - RNA, 19 nt, Artificial Sequence
  Description of Artificial Sequence: Synthetic oligonucleotide
  Antisense strand to SEQ ID NO: 730148
aucuagccuaguuuacagg

SEQ ID NO: 730150 - RNA, 19 nt, Artificial Sequence
  Description of Artificial Sequence: Synthetic oligonucleotide
  Sense strand starting at position 3228 of SEQ ID NO: 586598
gcguguuaucaggaacuac

SEQ ID NO: 730151 - RNA, 19 nt, Artificial Sequence
  Description of Artificial Sequence: Synthetic oligonucleotide
  Antisense strand to SEQ ID NO: 730150
guaguuccugauaacacgc

SEQ ID NO: 730152 - RNA, 19 nt, Artificial Sequence
  Description of Artificial Sequence: Synthetic oligonucleotide
  Sense strand starting at position 3238 of SEQ ID NO: 586598
aggaacuacugauaaagga

SEQ ID NO: 730153 - RNA, 19 nt, Artificial Sequence
  Description of Artificial Sequence: Synthetic oligonucleotide
  Antisense strand to SEQ ID NO: 730152
uccuuuaucaguaguuccu

SEQ ID NO: 730154 - RNA, 19 nt, Artificial Sequence
  Description of Artificial Sequence: Synthetic oligonucleotide
  Sense strand starting at position 3323 of SEQ ID NO: 586598
cuguacuuagucuaauuaa

SEQ ID NO: 730155 - RNA, 19 nt, Artificial Sequence
  Description of Artificial Sequence: Synthetic oligonucleotide
  Antisense strand to SEQ ID NO: 730154
uuaauuagacuaaguacag

SEQ ID NO: 730156 - RNA, 19 nt, Artificial Sequence
  Description of Artificial Sequence: Synthetic oligonucleotide
  Sense strand starting at position 3344 of SEQ ID NO: 586598
aguuaagugguaugauauc

SEQ ID NO: 730157 - RNA, 19 nt, Artificial Sequence
  Description of Artificial Sequence: Synthetic oligonucleotide
  Antisense strand to SEQ ID NO: 730156
gauaucauaccacuuaacu

SEQ ID NO: 730158 - RNA, 19 nt, Artificial Sequence
  Description of Artificial Sequence: Synthetic oligonucleotide
  Sense strand starting at position 3435 of SEQ ID NO: 586598
agagaugcggucuaaacau

SEQ ID NO: 730159 - RNA, 19 nt, Artificial Sequence
  Description of Artificial Sequence: Synthetic oligonucleotide
  Antisense strand to SEQ ID NO: 730158
auguuuagaccgcaucucu

SEQ ID NO: 730160 - RNA, 19 nt, Artificial Sequence
  Description of Artificial Sequence: Synthetic oligonucleotide
  Sense strand starting at position 3469 of SEQ ID NO: 586598
aaaugauaccugcggcaag

SEQ ID NO: 730161 - RNA, 19 nt, Artificial Sequence
  Description of Artificial Sequence: Synthetic oligonucleotide
  Antisense strand to SEQ ID NO: 730160
cuugccgcagguaucauuu

SEQ ID NO: 730162 - RNA, 19 nt, Artificial Sequence
  Description of Artificial Sequence: Synthetic oligonucleotide
  Sense strand starting at position 3480 of SEQ ID NO: 586598
gcggcaaggaguucgugau

SEQ ID NO: 730163 - RNA, 19 nt, Artificial Sequence
  Description of Artificial Sequence: Synthetic oligonucleotide
  Antisense strand to SEQ ID NO: 730162
aucacgaacuccuugccgc

SEQ ID NO: 730164 - RNA, 19 nt, Artificial Sequence
  Description of Artificial Sequence: Synthetic oligonucleotide
  Sense strand starting at position 3538 of SEQ ID NO: 586598
gcaggagaauaucuugaua

SEQ ID NO: 730165 - RNA, 19 nt, Artificial Sequence
  Description of Artificial Sequence: Synthetic oligonucleotide
  Antisense strand to SEQ ID NO: 730164
uaucaagauauucuccugc

SEQ ID NO: 730166 - RNA, 19 nt, Artificial Sequence
  Description of Artificial Sequence: Synthetic oligonucleotide
  Sense strand starting at position 3627 of SEQ ID NO: 586598
guuaaugcaguccagacau

SEQ ID NO: 730167 - RNA, 19 nt, Artificial Sequence
  Description of Artificial Sequence: Synthetic oligonucleotide
  Antisense strand to SEQ ID NO: 730166
augucuggacugcauuaac

SEQ ID NO: 730168 - RNA, 19 nt, Artificial Sequence
  Description of Artificial Sequence: Synthetic oligonucleotide
  Sense strand starting at position 3629 of SEQ ID NO: 586598
uaaugcaguccagacauga

SEQ ID NO: 730169 - RNA, 19 nt, Artificial Sequence
  Description of Artificial Sequence: Synthetic oligonucleotide
  Antisense strand to SEQ ID NO: 730168
ucaugucuggacugcauua

SEQ ID NO: 730170 - RNA, 19 nt, Artificial Sequence
  Description of Artificial Sequence: Synthetic oligonucleotide
  Sense strand starting at position 3667 of SEQ ID NO: 586598
cuaacagugucagugagaa

SEQ ID NO: 730171 - RNA, 19 nt, Artificial Sequence
  Description of Artificial Sequence: Synthetic oligonucleotide
  Antisense strand to SEQ ID NO: 730170
uucucacugacacuguuag

SEQ ID NO: 730172 - RNA, 19 nt, Artificial Sequence
  Description of Artificial Sequence: Synthetic oligonucleotide
  Sense strand starting at position 3711 of SEQ ID NO: 586598
acuagccagcuaugauaaa

SEQ ID NO: 730173 - RNA, 19 nt, Artificial Sequence
  Description of Artificial Sequence: Synthetic oligonucleotide
  Antisense strand to SEQ ID NO: 730172
uuuaucauagcuggcuagu

SEQ ID NO: 730174 - RNA, 19 nt, Artificial Sequence
  Description of Artificial Sequence: Synthetic oligonucleotide
  Sense strand starting at position 3787 of SEQ ID NO: 586598
uuuaguuagggugauuaga

SEQ ID NO: 730175 - RNA, 19 nt, Artificial Sequence
  Description of Artificial Sequence: Synthetic oligonucleotide
  Antisense strand to SEQ ID NO: 730174
ucuaaucacccuaacuaaa

SEQ ID NO: 730176 - RNA, 19 nt, Artificial Sequence
  Description of Artificial Sequence: Synthetic oligonucleotide
  Sense strand starting at position 3789 of SEQ ID NO: 586598
uaguuagggugauuagaug

SEQ ID NO: 730177 - RNA, 19 nt, Artificial Sequence
  Description of Artificial Sequence: Synthetic oligonucleotide
  Antisense strand to SEQ ID NO: 730176
caucuaaucacccuaacua

SEQ ID NO: 730178 - RNA, 19 nt, Artificial Sequence
  Description of Artificial Sequence: Synthetic oligonucleotide
  Sense strand starting at position 3795 of SEQ ID NO: 586598
gggugauuagaugguguua

SEQ ID NO: 730179 - RNA, 19 nt, Artificial Sequence
  Description of Artificial Sequence: Synthetic oligonucleotide
  Antisense strand to SEQ ID NO: 730178
uaacaccaucuaaucaccc

SEQ ID NO: 730180 - RNA, 19 nt, Artificial Sequence
  Description of Artificial Sequence: Synthetic oligonucleotide
  Sense strand starting at position 3807 of SEQ ID NO: 586598
gguguuaucagugacuaua

SEQ ID NO: 730181 - RNA, 19 nt, Artificial Sequence
  Description of Artificial Sequence: Synthetic oligonucleotide
  Antisense strand to SEQ ID NO: 730180
uauagucacugauaacacc

SEQ ID NO: 730182 - RNA, 19 nt, Artificial Sequence
  Description of Artificial Sequence: Synthetic oligonucleotide
  Sense strand starting at position 3829 of SEQ ID NO: 586598
ggaguaaugaauugugagg

SEQ ID NO: 730183 - RNA, 19 nt, Artificial Sequence
  Description of Artificial Sequence: Synthetic oligonucleotide
  Antisense strand to SEQ ID NO: 730182
ccucacaauucauuacucc

SEQ ID NO: 730184 - RNA, 19 nt, Artificial Sequence
  Description of Artificial Sequence: Synthetic oligonucleotide
  Sense strand starting at position 2032 of SEQ ID NO: 586599
gcucaagcgagcucuucuu

SEQ ID NO: 730185 - RNA, 19 nt, Artificial Sequence
  Description of Artificial Sequence: Synthetic oligonucleotide
  Antisense strand to SEQ ID NO: 730184
aagaagagcucgcuugagc

SEQ ID NO: 730186 - RNA, 19 nt, Artificial Sequence
  Description of Artificial Sequence: Synthetic oligonucleotide
  Sense strand starting at position 2685 of SEQ ID NO: 586599
ggugguuugguggaggaga

SEQ ID NO: 730187 - RNA, 19 nt, Artificial Sequence
  Description of Artificial Sequence: Synthetic oligonucleotide
  Antisense strand to SEQ ID NO: 730186
ucuccuccaccaaaccacc

SEQ ID NO: 730188 - RNA, 19 nt, Artificial Sequence
  Description of Artificial Sequence: Synthetic oligonucleotide
  Sense strand starting at position 2813 of SEQ ID NO: 586599
agcggaaugcgcaggaauu

SEQ ID NO: 730189 - RNA, 19 nt, Artificial Sequence
  Description of Artificial Sequence: Synthetic oligonucleotide
  Antisense strand to SEQ ID NO: 730188
aauuccugcgcauuccgcu

SEQ ID NO: 730190 - RNA, 19 nt, Artificial Sequence
  Description of Artificial Sequence: Synthetic oligonucleotide
  Sense strand starting at position 2823 of SEQ ID NO: 586599
gcaggaauugguugucuuc

SEQ ID NO: 730191 - RNA, 19 nt, Artificial Sequence
  Description of Artificial Sequence: Synthetic oligonucleotide
  Antisense strand to SEQ ID NO: 730190
gaagacaaccaauuccugc

SEQ ID NO: 730192 - RNA, 19 nt, Artificial Sequence
  Description of Artificial Sequence: Synthetic oligonucleotide
  Sense strand starting at position 2927 of SEQ ID NO: 586599
aaaccagauuguuaacguu

SEQ ID NO: 730193 - RNA, 19 nt, Artificial Sequence
  Description of Artificial Sequence: Synthetic oligonucleotide
  Antisense strand to SEQ ID NO: 730192
aacguuaacaaucugguuu

SEQ ID NO: 730194 - RNA, 19 nt, Artificial Sequence
  Description of Artificial Sequence: Synthetic oligonucleotide
  Sense strand starting at position 2935 of SEQ ID NO: 586599
uuguuaacguugcagggau

SEQ ID NO: 730195 - RNA, 19 nt, Artificial Sequence
  Description of Artificial Sequence: Synthetic oligonucleotide
  Antisense strand to SEQ ID NO: 730194
aucccugcaacguuaacaa

SEQ ID NO: 730196 - RNA, 19 nt, Artificial Sequence
  Description of Artificial Sequence: Synthetic oligonucleotide
  Sense strand starting at position 2939 of SEQ ID NO: 586599
uaacguugcagggauugau

SEQ ID NO: 730197 - RNA, 19 nt, Artificial Sequence
  Description of Artificial Sequence: Synthetic oligonucleotide
  Antisense strand to SEQ ID NO: 730196
aucaaucccugcaacguua

SEQ ID NO: 730198 - RNA, 19 nt, Artificial Sequence
  Description of Artificial Sequence: Synthetic oligonucleotide
  Sense strand starting at position 2984 of SEQ ID NO: 586599
aucagagacucuccucgau

SEQ ID NO: 730199 - RNA, 19 nt, Artificial Sequence
  Description of Artificial Sequence: Synthetic oligonucleotide
  Antisense strand to SEQ ID NO: 730198
aucgaggagagucucugau

SEQ ID NO: 730200 - RNA, 19 nt, Artificial Sequence
  Description of Artificial Sequence: Synthetic oligonucleotide
  Sense strand starting at position 3024 of SEQ ID NO: 586599
uuucccguccuuuacgaau

SEQ ID NO: 730201 - RNA, 19 nt, Artificial Sequence
  Description of Artificial Sequence: Synthetic oligonucleotide
  Antisense strand to SEQ ID NO: 730200
auucguaaaggacgggaaa

SEQ ID NO: 730202 - RNA, 19 nt, Artificial Sequence
  Description of Artificial Sequence: Synthetic oligonucleotide
  Sense strand starting at position 3063 of SEQ ID NO: 586599
uucuaaaugucaucgucaa

SEQ ID NO: 730203 - RNA, 19 nt, Artificial Sequence
  Description of Artificial Sequence: Synthetic oligonucleotide
  Antisense strand to SEQ ID NO: 730202
uugacgaugacauuuagaa

SEQ ID NO: 730204 - RNA, 19 nt, Artificial Sequence
  Description of Artificial Sequence: Synthetic oligonucleotide
  Sense strand starting at position 3064 of SEQ ID NO: 586599
ucuaaaugucaucgucaag

SEQ ID NO: 730205 - RNA, 19 nt, Artificial Sequence
  Description of Artificial Sequence: Synthetic oligonucleotide
  Antisense strand to SEQ ID NO: 730204
cuugacgaugacauuuaga

SEQ ID NO: 730206 - RNA, 19 nt, Artificial Sequence
  Description of Artificial Sequence: Synthetic oligonucleotide
  Sense strand starting at position 3084 of SEQ ID NO: 586599
ggcgugcgucucugaaagu

SEQ ID NO: 730207 - RNA, 19 nt, Artificial Sequence
  Description of Artificial Sequence: Synthetic oligonucleotide
  Antisense strand to SEQ ID NO: 730206
acuuucagagacgcacgcc

SEQ ID NO: 730208 - RNA, 19 nt, Artificial Sequence
  Description of Artificial Sequence: Synthetic oligonucleotide
  Sense strand starting at position 3125 of SEQ ID NO: 586599
gcgcaucacugcgcauauu

SEQ ID NO: 730209 - RNA, 19 nt, Artificial Sequence
  Description of Artificial Sequence: Synthetic oligonucleotide
  Antisense strand to SEQ ID NO: 730208
aauaugcgcagugaugcgc

SEQ ID NO: 730210 - RNA, 19 nt, Artificial Sequence
  Description of Artificial Sequence: Synthetic oligonucleotide
  Sense strand starting at position 3126 of SEQ ID NO: 586599
cgcaucacugcgcauauuu

SEQ ID NO: 730211 - RNA, 19 nt, Artificial Sequence
  Description of Artificial Sequence: Synthetic oligonucleotide
  Antisense strand to SEQ ID NO: 730210
aaauaugcgcagugaugcg

SEQ ID NO: 730212 - RNA, 19 nt, Artificial Sequence
  Description of Artificial Sequence: Synthetic oligonucleotide
  Sense strand starting at position 3156 of SEQ ID NO: 586599
aagaguuaaagguguucgu

SEQ ID NO: 730213 - RNA, 19 nt, Artificial Sequence
  Description of Artificial Sequence: Synthetic oligonucleotide
  Antisense strand to SEQ ID NO: 730212
acgaacaccuuuaacucuu

SEQ ID NO: 730214 - RNA, 19 nt, Artificial Sequence
  Description of Artificial Sequence: Synthetic oligonucleotide
  Sense strand starting at position 3159 of SEQ ID NO: 586599
aguuaaagguguucguaug

SEQ ID NO: 730215 - RNA, 19 nt, Artificial Sequence
  Description of Artificial Sequence: Synthetic oligonucleotide
  Antisense strand to SEQ ID NO: 730214
cauacgaacaccuuuaacu

SEQ ID NO: 730216 - RNA, 19 nt, Artificial Sequence
  Description of Artificial Sequence: Synthetic oligonucleotide
  Sense strand starting at position 3160 of SEQ ID NO: 586599
guuaaagguguucguauga

SEQ ID NO: 730217 - RNA, 19 nt, Artificial Sequence
  Description of Artificial Sequence: Synthetic oligonucleotide
  Antisense strand to SEQ ID NO: 730216
ucauacgaacaccuuuaac

SEQ ID NO: 730218 - RNA, 19 nt, Artificial Sequence
  Description of Artificial Sequence: Synthetic oligonucleotide
  Sense strand starting at position 3250 of SEQ ID NO: 586599
ccgagucauuaggaaucau

SEQ ID NO: 730219 - RNA, 19 nt, Artificial Sequence
  Description of Artificial Sequence: Synthetic oligonucleotide
  Antisense strand to SEQ ID NO: 730218
augauuccuaaugacucgg

SEQ ID NO: 730220 - RNA, 19 nt, Artificial Sequence
  Description of Artificial Sequence: Synthetic oligonucleotide
  Sense strand starting at position 3308 of SEQ ID NO: 586599
cguggauggcgagaaguua

SEQ ID NO: 730221 - RNA, 19 nt, Artificial Sequence
  Description of Artificial Sequence: Synthetic oligonucleotide
  Antisense strand to SEQ ID NO: 730220
uaacuucucgccauccacg

SEQ ID NO: 730222 - RNA, 19 nt, Artificial Sequence
  Description of Artificial Sequence: Synthetic oligonucleotide
  Sense strand starting at position 3339 of SEQ ID NO: 586599
agguuuggaugcuuuagga

SEQ ID NO: 730223 - RNA, 19 nt, Artificial Sequence
  Description of Artificial Sequence: Synthetic oligonucleotide
  Antisense strand to SEQ ID NO: 730222
uccuaaagcauccaaaccu

SEQ ID NO: 730224 - RNA, 19 nt, Artificial Sequence
  Description of Artificial Sequence: Synthetic oligonucleotide
  Sense strand starting at position 3390 of SEQ ID NO: 586599
agagucagaucacauaaac

SEQ ID NO: 730225 - RNA, 19 nt, Artificial Sequence
  Description of Artificial Sequence: Synthetic oligonucleotide
  Antisense strand to SEQ ID NO: 730224
guuuaugugaucugacucu

SEQ ID NO: 730226 - RNA, 19 nt, Artificial Sequence
  Description of Artificial Sequence: Synthetic oligonucleotide
  Sense strand starting at position 3444 of SEQ ID NO: 586599
guguuuaugugacauauac

SEQ ID NO: 730227 - RNA, 19 nt, Artificial Sequence
  Description of Artificial Sequence: Synthetic oligonucleotide
  Antisense strand to SEQ ID NO: 730226
guauaugucacauaaacac

SEQ ID NO: 730228 - RNA, 19 nt, Artificial Sequence
  Description of Artificial Sequence: Synthetic oligonucleotide
  Sense strand starting at position 3474 of SEQ ID NO: 586599
gagucugcauuuggauagu

SEQ ID NO: 730229 - RNA, 19 nt, Artificial Sequence
  Description of Artificial Sequence: Synthetic oligonucleotide
  Antisense strand to SEQ ID NO: 730228
acuauccaaaugcagacuc

SEQ ID NO: 730230 - RNA, 19 nt, Artificial Sequence
  Description of Artificial Sequence: Synthetic oligonucleotide
  Sense strand starting at position 3483 of SEQ ID NO: 586599
uuuggauaguugugggaug

SEQ ID NO: 730231 - RNA, 19 nt, Artificial Sequence
  Description of Artificial Sequence: Synthetic oligonucleotide
  Antisense strand to SEQ ID NO: 730230
caucccacaacuauccaaa

SEQ ID NO: 730232 - RNA, 19 nt, Artificial Sequence
  Description of Artificial Sequence: Synthetic oligonucleotide
  Sense strand starting at position 3484 of SEQ ID NO: 586599
uuggauaguugugggauga

SEQ ID NO: 730233 - RNA, 19 nt, Artificial Sequence
  Description of Artificial Sequence: Synthetic oligonucleotide
  Antisense strand to SEQ ID NO: 730232
ucaucccacaacuauccaa

SEQ ID NO: 730234 - RNA, 19 nt, Artificial Sequence
  Description of Artificial Sequence: Synthetic oligonucleotide
  Sense strand starting at position 3486 of SEQ ID NO: 586599
ggauaguugugggaugaga

SEQ ID NO: 730235 - RNA, 19 nt, Artificial Sequence
  Description of Artificial Sequence: Synthetic oligonucleotide
  Antisense strand to SEQ ID NO: 730234
ucucaucccacaacuaucc

SEQ ID NO: 730236 - RNA, 19 nt, Artificial Sequence
  Description of Artificial Sequence: Synthetic oligonucleotide
  Sense strand starting at position 3488 of SEQ ID NO: 586599
auaguugugggaugagaug

SEQ ID NO: 730237 - RNA, 19 nt, Artificial Sequence
  Description of Artificial Sequence: Synthetic oligonucleotide
  Antisense strand to SEQ ID NO: 730236
caucucaucccacaacuau

SEQ ID NO: 730238 - RNA, 19 nt, Artificial Sequence
  Description of Artificial Sequence: Synthetic oligonucleotide
  Sense strand starting at position 3576 of SEQ ID NO: 586599
uuaagaucuuuggcaauaa

SEQ ID NO: 730239 - RNA, 19 nt, Artificial Sequence
  Description of Artificial Sequence: Synthetic oligonucleotide
  Antisense strand to SEQ ID NO: 730238
uuauugccaaagaucuuaa

SEQ ID NO: 730240 - RNA, 19 nt, Artificial Sequence
  Description of Artificial Sequence: Synthetic oligonucleotide
  Sense strand starting at position 3700 of SEQ ID NO: 586599
uguguuguacuuuacggaa

SEQ ID NO: 730241 - RNA, 19 nt, Artificial Sequence
  Description of Artificial Sequence: Synthetic oligonucleotide
  Antisense strand to SEQ ID NO: 730240
uuccguaaaguacaacaca

SEQ ID NO: 730242 - RNA, 19 nt, Artificial Sequence
  Description of Artificial Sequence: Synthetic oligonucleotide
  Sense strand starting at position 3772 of SEQ ID NO: 586599
ugaaaugggauacgucaaa

SEQ ID NO: 730243 - RNA, 19 nt, Artificial Sequence
  Description of Artificial Sequence: Synthetic oligonucleotide
  Antisense strand to SEQ ID NO: 730242
uuugacguaucccauuuca

SEQ ID NO: 730244 - RNA, 19 nt, Artificial Sequence
  Description of Artificial Sequence: Synthetic oligonucleotide
  Sense strand starting at position 3846 of SEQ ID NO: 586599
ccuuaucauguacaggauu

SEQ ID NO: 730245 - RNA, 19 nt, Artificial Sequence
  Description of Artificial Sequence: Synthetic oligonucleotide
  Antisense strand to SEQ ID NO: 730244
aauccuguacaugauaagg

SEQ ID NO: 730246 - RNA, 19 nt, Artificial Sequence
  Description of Artificial Sequence: Synthetic oligonucleotide
  Sense strand starting at position 3922 of SEQ ID NO: 586599
uaaggaauccugugucagu

SEQ ID NO: 730247 - RNA, 19 nt, Artificial Sequence
  Description of Artificial Sequence: Synthetic oligonucleotide
  Antisense strand to SEQ ID NO: 730246
acugacacaggauuccuua

SEQ ID NO: 730248 - RNA, 19 nt, Artificial Sequence
  Description of Artificial Sequence: Synthetic oligonucleotide
  Sense strand starting at position 3923 of SEQ ID NO: 586599
aaggaauccugugucagua

SEQ ID NO: 730249 - RNA, 19 nt, Artificial Sequence
  Description of Artificial Sequence: Synthetic oligonucleotide
  Antisense strand to SEQ ID NO: 730248
uacugacacaggauuccuu

SEQ ID NO: 730250 - RNA, 19 nt, Artificial Sequence
  Description of Artificial Sequence: Synthetic oligonucleotide
  Sense strand starting at position 3925 of SEQ ID NO: 586599
ggaauccugugucaguagu

SEQ ID NO: 730251 - RNA, 19 nt, Artificial Sequence
  Description of Artificial Sequence: Synthetic oligonucleotide
  Antisense strand to SEQ ID NO: 730250
acuacugacacaggauucc

SEQ ID NO: 730252 - RNA, 19 nt, Artificial Sequence
  Description of Artificial Sequence: Synthetic oligonucleotide
  Sense strand starting at position 3927 of SEQ ID NO: 586599
aauccugugucaguaguaa

SEQ ID NO: 730253 - RNA, 19 nt, Artificial Sequence
  Description of Artificial Sequence: Synthetic oligonucleotide
  Antisense strand to SEQ ID NO: 730252
uuacuacugacacaggauu

SEQ ID NO: 730254 - RNA, 19 nt, Artificial Sequence
  Description of Artificial Sequence: Synthetic oligonucleotide
  Sense strand starting at position 3931 of SEQ ID NO: 586599
cugugucaguaguaaugaa

SEQ ID NO: 730255 - RNA, 19 nt, Artificial Sequence
  Description of Artificial Sequence: Synthetic oligonucleotide
  Antisense strand to SEQ ID NO: 730254
uucauuacuacugacacag

SEQ ID NO: 730256 - RNA, 19 nt, Artificial Sequence
  Description of Artificial Sequence: Synthetic oligonucleotide
  Sense strand starting at position 3935 of SEQ ID NO: 586599
gucaguaguaaugaaguca

SEQ ID NO: 730257 - RNA, 19 nt, Artificial Sequence
  Description of Artificial Sequence: Synthetic oligonucleotide
  Antisense strand to SEQ ID NO: 730256
ugacuucauuacuacugac

SEQ ID NO: 730258 - RNA, 19 nt, Artificial Sequence
  Description of Artificial Sequence: Synthetic oligonucleotide
  Sense strand starting at position 3946 of SEQ ID NO: 586599
ugaagucagagcuaaugca

SEQ ID NO: 730259 - RNA, 19 nt, Artificial Sequence
  Description of Artificial Sequence: Synthetic oligonucleotide
  Antisense strand to SEQ ID NO: 730258
ugcauuagcucugacuuca

SEQ ID NO: 730260 - RNA, 19 nt, Artificial Sequence
  Description of Artificial Sequence: Synthetic oligonucleotide
  Sense strand starting at position 3965 of SEQ ID NO: 586599
ccauuuaaguuugaggaca

SEQ ID NO: 730261 - RNA, 19 nt, Artificial Sequence
  Description of Artificial Sequence: Synthetic oligonucleotide
  Antisense strand to SEQ ID NO: 730260
uguccucaaacuuaaaugg

SEQ ID NO: 730262 - RNA, 19 nt, Artificial Sequence
  Description of Artificial Sequence: Synthetic oligonucleotide
  Sense strand starting at position 3967 of SEQ ID NO: 586599
auuuaaguuugaggacaag

SEQ ID NO: 730263 - RNA, 19 nt, Artificial Sequence
  Description of Artificial Sequence: Synthetic oligonucleotide
  Antisense strand to SEQ ID NO: 730262
cuuguccucaaacuuaaau

SEQ ID NO: 730264 - RNA, 19 nt, Artificial Sequence
  Description of Artificial Sequence: Synthetic oligonucleotide
  Sense strand starting at position 94 of SEQ ID NO: 586600
gguuuccugucaccugaaa

SEQ ID NO: 730265 - RNA, 19 nt, Artificial Sequence
  Description of Artificial Sequence: Synthetic oligonucleotide
  Antisense strand to SEQ ID NO: 730264
uuucaggugacaggaaacc

SEQ ID NO: 730266 - RNA, 19 nt, Artificial Sequence
  Description of Artificial Sequence: Synthetic oligonucleotide
  Sense strand starting at position 233 of SEQ ID NO: 586600
aagagcaaguuucuucgaa

SEQ ID NO: 730267 - RNA, 19 nt, Artificial Sequence
  Description of Artificial Sequence: Synthetic oligonucleotide
  Antisense strand to SEQ ID NO: 730266
uucgaagaaacuugcucuu

SEQ ID NO: 730268 - RNA, 19 nt, Artificial Sequence
  Description of Artificial Sequence: Synthetic oligonucleotide
  Sense strand starting at position 234 of SEQ ID NO: 586600
agagcaaguuucuucgaag

SEQ ID NO: 730269 - RNA, 19 nt, Artificial Sequence
  Description of Artificial Sequence: Synthetic oligonucleotide
  Antisense strand to SEQ ID NO: 730268
cuucgaagaaacuugcucu

SEQ ID NO: 730270 - RNA, 19 nt, Artificial Sequence
  Description of Artificial Sequence: Synthetic oligonucleotide
  Sense strand starting at position 235 of SEQ ID NO: 586600
gagcaaguuucuucgaagg

SEQ ID NO: 730271 - RNA, 19 nt, Artificial Sequence
  Description of Artificial Sequence: Synthetic oligonucleotide
  Antisense strand to SEQ ID NO: 730270
ccuucgaagaaacuugcuc

SEQ ID NO: 730272 - RNA, 19 nt, Artificial Sequence
  Description of Artificial Sequence: Synthetic oligonucleotide
  Sense strand starting at position 237 of SEQ ID NO: 586600
gcaaguuucuucgaaggca

SEQ ID NO: 730273 - RNA, 19 nt, Artificial Sequence
  Description of Artificial Sequence: Synthetic oligonucleotide
  Antisense strand to SEQ ID NO: 730272
ugccuucgaagaaacuugc

SEQ ID NO: 730274 - RNA, 19 nt, Artificial Sequence
  Description of Artificial Sequence: Synthetic oligonucleotide
  Sense strand starting at position 496 of SEQ ID NO: 586600
gcccucaaccagugucauu

SEQ ID NO: 730275 - RNA, 19 nt, Artificial Sequence
  Description of Artificial Sequence: Synthetic oligonucleotide
  Antisense strand to SEQ ID NO: 730274
aaugacacugguugagggc

SEQ ID NO: 730276 - RNA, 19 nt, Artificial Sequence
  Description of Artificial Sequence: Synthetic oligonucleotide
  Sense strand starting at position 820 of SEQ ID NO: 586600
aagggaauuaggugacagu

SEQ ID NO: 730277 - RNA, 19 nt, Artificial Sequence
  Description of Artificial Sequence: Synthetic oligonucleotide
  Antisense strand to SEQ ID NO: 730276
acugucaccuaauucccuu

SEQ ID NO: 730278 - RNA, 19 nt, Artificial Sequence
  Description of Artificial Sequence: Synthetic oligonucleotide
  Sense strand starting at position 878 of SEQ ID NO: 586600
ggagcugcuuacccucaaa

SEQ ID NO: 730279 - RNA, 19 nt, Artificial Sequence
  Description of Artificial Sequence: Synthetic oligonucleotide
  Antisense strand to SEQ ID NO: 730278
uuugaggguaagcagcucc

SEQ ID NO: 730280 - RNA, 19 nt, Artificial Sequence
  Description of Artificial Sequence: Synthetic oligonucleotide
  Sense strand starting at position 943 of SEQ ID NO: 586600
cucgcagccuugucaaaga

SEQ ID NO: 730281 - RNA, 19 nt, Artificial Sequence
  Description of Artificial Sequence: Synthetic oligonucleotide
  Antisense strand to SEQ ID NO: 730280
ucuuugacaaggcugcgag

SEQ ID NO: 730282 - RNA, 19 nt, Artificial Sequence
  Description of Artificial Sequence: Synthetic oligonucleotide
  Sense strand starting at position 983 of SEQ ID NO: 586600
gggucuaacucacggguga

SEQ ID NO: 730283 - RNA, 19 nt, Artificial Sequence
  Description of Artificial Sequence: Synthetic oligonucleotide
  Antisense strand to SEQ ID NO: 730282
ucacccgugaguuagaccc

SEQ ID NO: 730284 - RNA, 19 nt, Artificial Sequence
  Description of Artificial Sequence: Synthetic oligonucleotide
  Sense strand starting at position 985 of SEQ ID NO: 586600
gucuaacucacgggugaca

SEQ ID NO: 730285 - RNA, 19 nt, Artificial Sequence
  Description of Artificial Sequence: Synthetic oligonucleotide
  Antisense strand to SEQ ID NO: 730284
ugucacccgugaguuagac

SEQ ID NO: 730286 - RNA, 19 nt, Artificial Sequence
  Description of Artificial Sequence: Synthetic oligonucleotide
  Sense strand starting at position 1096 of SEQ ID NO: 586600
cagucaagaucuggcaaga

SEQ ID NO: 730287 - RNA, 19 nt, Artificial Sequence
  Description of Artificial Sequence: Synthetic oligonucleotide
  Antisense strand to SEQ ID NO: 730286
ucuugccagaucuugacug

SEQ ID NO: 730288 - RNA, 19 nt, Artificial Sequence
  Description of Artificial Sequence: Synthetic oligonucleotide
  Sense strand starting at position 1530 of SEQ ID NO: 586600
ccucaaacuugcggaugau

SEQ ID NO: 730289 - RNA, 19 nt, Artificial Sequence
  Description of Artificial Sequence: Synthetic oligonucleotide
  Antisense strand to SEQ ID NO: 730288
aucauccgcaaguuugagg

SEQ ID NO: 730290 - RNA, 19 nt, Artificial Sequence
  Description of Artificial Sequence: Synthetic oligonucleotide
  Sense strand starting at position 1542 of SEQ ID NO: 586600
ggaugaugguguccaggaa

SEQ ID NO: 730291 - RNA, 19 nt, Artificial Sequence
  Description of Artificial Sequence: Synthetic oligonucleotide
  Antisense strand to SEQ ID NO: 730290
uuccuggacaccaucaucc

SEQ ID NO: 730292 - RNA, 19 nt, Artificial Sequence
  Description of Artificial Sequence: Synthetic oligonucleotide
  Sense strand starting at position 2379 of SEQ ID NO: 586600
cgagcacuggcuugguaua

SEQ ID NO: 730293 - RNA, 19 nt, Artificial Sequence
  Description of Artificial Sequence: Synthetic oligonucleotide
  Antisense strand to SEQ ID NO: 730292
uauaccaagccagugcucg

SEQ ID NO: 730294 - RNA, 19 nt, Artificial Sequence
  Description of Artificial Sequence: Synthetic oligonucleotide
  Sense strand starting at position 2519 of SEQ ID NO: 586600
gcagcagagcucugaaaua

SEQ ID NO: 730295 - RNA, 19 nt, Artificial Sequence
  Description of Artificial Sequence: Synthetic oligonucleotide
  Antisense strand to SEQ ID NO: 730294
uauuucagagcucugcugc

SEQ ID NO: 730296 - RNA, 19 nt, Artificial Sequence
  Description of Artificial Sequence: Synthetic oligonucleotide
  Sense strand starting at position 2718 of SEQ ID NO: 586600
gggacauucugacagcagu

SEQ ID NO: 730297 - RNA, 19 nt, Artificial Sequence
  Description of Artificial Sequence: Synthetic oligonucleotide
  Antisense strand to SEQ ID NO: 730296
acugcugucagaauguccc

SEQ ID NO: 730298 - RNA, 19 nt, Artificial Sequence
  Description of Artificial Sequence: Synthetic oligonucleotide
  Sense strand starting at position 3039 of SEQ ID NO: 586600
ccugcuugcgucugaguga

SEQ ID NO: 730299 - RNA, 19 nt, Artificial Sequence
  Description of Artificial Sequence: Synthetic oligonucleotide
  Antisense strand to SEQ ID NO: 730298
ucacucagacgcaagcagg

SEQ ID NO: 730300 - RNA, 19 nt, Artificial Sequence
  Description of Artificial Sequence: Synthetic oligonucleotide
  Sense strand starting at position 3069 of SEQ ID NO: 586600
cgcgguguccucggacuua

SEQ ID NO: 730301 - RNA, 19 nt, Artificial Sequence
  Description of Artificial Sequence: Synthetic oligonucleotide
  Antisense strand to SEQ ID NO: 730300
uaaguccgaggacaccgcg

SEQ ID NO: 730302 - RNA, 19 nt, Artificial Sequence
  Description of Artificial Sequence: Synthetic oligonucleotide
  Sense strand starting at position 3204 of SEQ ID NO: 586600
ggaucagagaccugucuag

SEQ ID NO: 730303 - RNA, 19 nt, Artificial Sequence
  Description of Artificial Sequence: Synthetic oligonucleotide
  Antisense strand to SEQ ID NO: 730302
cuagacaggucucugaucc

SEQ ID NO: 730304 - RNA, 19 nt, Artificial Sequence
  Description of Artificial Sequence: Synthetic oligonucleotide
  Sense strand starting at position 3578 of SEQ ID NO: 586600
gcucuugccugugcaguua

SEQ ID NO: 730305 - RNA, 19 nt, Artificial Sequence
  Description of Artificial Sequence: Synthetic oligonucleotide
  Antisense strand to SEQ ID NO: 730304
uaacugcacaggcaagagc

SEQ ID NO: 730306 - RNA, 19 nt, Artificial Sequence
  Description of Artificial Sequence: Synthetic oligonucleotide
  Sense strand starting at position 3618 of SEQ ID NO: 586600
ccagcaguuuccucacuca

SEQ ID NO: 730307 - RNA, 19 nt, Artificial Sequence
  Description of Artificial Sequence: Synthetic oligonucleotide
  Antisense strand to SEQ ID NO: 730306
ugagugaggaaacugcugg

SEQ ID NO: 730308 - RNA, 19 nt, Artificial Sequence
  Description of Artificial Sequence: Synthetic oligonucleotide
  Sense strand starting at position 3786 of SEQ ID NO: 586600
uggguugccuaccaugaau

SEQ ID NO: 730309 - RNA, 19 nt, Artificial Sequence
  Description of Artificial Sequence: Synthetic oligonucleotide
  Antisense strand to SEQ ID NO: 730308
auucaugguaggcaaccca

SEQ ID NO: 730310 - RNA, 19 nt, Artificial Sequence
  Description of Artificial Sequence: Synthetic oligonucleotide
  Sense strand starting at position 3809 of SEQ ID NO: 586600
gaugauucaugugugagug

SEQ ID NO: 730311 - RNA, 19 nt, Artificial Sequence
  Description of Artificial Sequence: Synthetic oligonucleotide
  Antisense strand to SEQ ID NO: 730310
cacucacacaugaaucauc

SEQ ID NO: 730312 - RNA, 19 nt, Artificial Sequence
  Description of Artificial Sequence: Synthetic oligonucleotide
  Sense strand starting at position 3810 of SEQ ID NO: 586600
augauucaugugugaguga

SEQ ID NO: 730313 - RNA, 19 nt, Artificial Sequence
  Description of Artificial Sequence: Synthetic oligonucleotide
  Antisense strand to SEQ ID NO: 730312
ucacucacacaugaaucau

SEQ ID NO: 730314 - RNA, 19 nt, Artificial Sequence
  Description of Artificial Sequence: Synthetic oligonucleotide
  Sense strand starting at position 3811 of SEQ ID NO: 586600
ugauucaugugugagugaa

SEQ ID NO: 730315 - RNA, 19 nt, Artificial Sequence
  Description of Artificial Sequence: Synthetic oligonucleotide
  Antisense strand to SEQ ID NO: 730314
uucacucacacaugaauca

SEQ ID NO: 730316 - RNA, 19 nt, Artificial Sequence
  Description of Artificial Sequence: Synthetic oligonucleotide
  Sense strand starting at position 3813 of SEQ ID NO: 586600
auucaugugugagugaagu

SEQ ID NO: 730317 - RNA, 19 nt, Artificial Sequence
  Description of Artificial Sequence: Synthetic oligonucleotide
  Antisense strand to SEQ ID NO: 730316
acuucacucacacaugaau

SEQ ID NO: 730318 - RNA, 19 nt, Artificial Sequence
  Description of Artificial Sequence: Synthetic oligonucleotide
  Sense strand starting at position 3815 of SEQ ID NO: 586600
ucaugugugagugaagugu

SEQ ID NO: 730319 - RNA, 19 nt, Artificial Sequence
  Description of Artificial Sequence: Synthetic oligonucleotide
  Antisense strand to SEQ ID NO: 730318
acacuucacucacacauga

SEQ ID NO: 730320 - RNA, 19 nt, Artificial Sequence
  Description of Artificial Sequence: Synthetic oligonucleotide
  Sense strand starting at position 103 of SEQ ID NO: 586601
cauaguugaugagucccaa

SEQ ID NO: 730321 - RNA, 19 nt, Artificial Sequence
  Description of Artificial Sequence: Synthetic oligonucleotide
  Antisense strand to SEQ ID NO: 730320
uugggacucaucaacuaug

SEQ ID NO: 730322 - RNA, 19 nt, Artificial Sequence
  Description of Artificial Sequence: Synthetic oligonucleotide
  Sense strand starting at position 107 of SEQ ID NO: 586601
guugaugagucccaaagac

SEQ ID NO: 730323 - RNA, 19 nt, Artificial Sequence
  Description of Artificial Sequence: Synthetic oligonucleotide
  Antisense strand to SEQ ID NO: 730322
gucuuugggacucaucaac

SEQ ID NO: 730324 - RNA, 19 nt, Artificial Sequence
  Description of Artificial Sequence: Synthetic oligonucleotide
  Sense strand starting at position 211 of SEQ ID NO: 586601
gaagucaagacgggucaua

SEQ ID NO: 730325 - RNA, 19 nt, Artificial Sequence
  Description of Artificial Sequence: Synthetic oligonucleotide
  Antisense strand to SEQ ID NO: 730324
uaugacccgucuugacuuc

SEQ ID NO: 730326 - RNA, 19 nt, Artificial Sequence
  Description of Artificial Sequence: Synthetic oligonucleotide
  Sense strand starting at position 220 of SEQ ID NO: 586601
acgggucauagucaaagau

SEQ ID NO: 730327 - RNA, 19 nt, Artificial Sequence
  Description of Artificial Sequence: Synthetic oligonucleotide
  Antisense strand to SEQ ID NO: 730326
aucuuugacuaugacccgu

SEQ ID NO: 730328 - RNA, 19 nt, Artificial Sequence
  Description of Artificial Sequence: Synthetic oligonucleotide
  Sense strand starting at position 353 of SEQ ID NO: 586601
cucugucugcugucuaagu

SEQ ID NO: 730329 - RNA, 19 nt, Artificial Sequence
  Description of Artificial Sequence: Synthetic oligonucleotide
  Antisense strand to SEQ ID NO: 730328
acuuagacagcagacagag

SEQ ID NO: 730330 - RNA, 19 nt, Artificial Sequence
  Description of Artificial Sequence: Synthetic oligonucleotide
  Sense strand starting at position 514 of SEQ ID NO: 586601
ggcucuucucugugccuga

SEQ ID NO: 730331 - RNA, 19 nt, Artificial Sequence
  Description of Artificial Sequence: Synthetic oligonucleotide
  Antisense strand to SEQ ID NO: 730330
ucaggcacagagaagagcc

SEQ ID NO: 730332 - RNA, 19 nt, Artificial Sequence
  Description of Artificial Sequence: Synthetic oligonucleotide
  Sense strand starting at position 728 of SEQ ID NO: 586601
ccuguuguccuauagaaua

SEQ ID NO: 730333 - RNA, 19 nt, Artificial Sequence
  Description of Artificial Sequence: Synthetic oligonucleotide
  Antisense strand to SEQ ID NO: 730332
uauucuauaggacaacagg

SEQ ID NO: 730334 - RNA, 19 nt, Artificial Sequence
  Description of Artificial Sequence: Synthetic oligonucleotide
  Sense strand starting at position 826 of SEQ ID NO: 586601
gaaagaguguaugagccaa

SEQ ID NO: 730335 - RNA, 19 nt, Artificial Sequence
  Description of Artificial Sequence: Synthetic oligonucleotide
  Antisense strand to SEQ ID NO: 730334
uuggcucauacacucuuuc

SEQ ID NO: 730336 - RNA, 19 nt, Artificial Sequence
  Description of Artificial Sequence: Synthetic oligonucleotide
  Sense strand starting at position 2154 of SEQ ID NO: 586601
ccugucaccgcagauuaau

SEQ ID NO: 730337 - RNA, 19 nt, Artificial Sequence
  Description of Artificial Sequence: Synthetic oligonucleotide
  Antisense strand to SEQ ID NO: 730336
auuaaucugcggugacagg

SEQ ID NO: 730338 - RNA, 19 nt, Artificial Sequence
  Description of Artificial Sequence: Synthetic oligonucleotide
  Sense strand starting at position 2163 of SEQ ID NO: 586601
gcagauuaauggucucccu

SEQ ID NO: 730339 - RNA, 19 nt, Artificial Sequence
  Description of Artificial Sequence: Synthetic oligonucleotide
  Antisense strand to SEQ ID NO: 730338
agggagaccauuaaucugc

SEQ ID NO: 730340 - RNA, 19 nt, Artificial Sequence
  Description of Artificial Sequence: Synthetic oligonucleotide
  Sense strand starting at position 2166 of SEQ ID NO: 586601
gauuaauggucucccugac

SEQ ID NO: 730341 - RNA, 19 nt, Artificial Sequence
  Description of Artificial Sequence: Synthetic oligonucleotide
  Antisense strand to SEQ ID NO: 730340
gucagggagaccauuaauc

SEQ ID NO: 730342 - RNA, 19 nt, Artificial Sequence
  Description of Artificial Sequence: Synthetic oligonucleotide
  Sense strand starting at position 2445 of SEQ ID NO: 586601
gggaaugcucuggagucaa

SEQ ID NO: 730343 - RNA, 19 nt, Artificial Sequence
  Description of Artificial Sequence: Synthetic oligonucleotide
  Antisense strand to SEQ ID NO: 730342
uugacuccagagcauuccc

SEQ ID NO: 730344 - RNA, 19 nt, Artificial Sequence
  Description of Artificial Sequence: Synthetic oligonucleotide
  Sense strand starting at position 2611 of SEQ ID NO: 586601
aggaguccuccacauuauc

SEQ ID NO: 730345 - RNA, 19 nt, Artificial Sequence
  Description of Artificial Sequence: Synthetic oligonucleotide
  Antisense strand to SEQ ID NO: 730344
gauaauguggaggacuccu

SEQ ID NO: 730346 - RNA, 19 nt, Artificial Sequence
  Description of Artificial Sequence: Synthetic oligonucleotide
  Sense strand starting at position 2699 of SEQ ID NO: 586601
uaaggugucggguggauga

SEQ ID NO: 730347 - RNA, 19 nt, Artificial Sequence
  Description of Artificial Sequence: Synthetic oligonucleotide
  Antisense strand to SEQ ID NO: 730346
ucauccacccgacaccuua

SEQ ID NO: 730348 - RNA, 19 nt, Artificial Sequence
  Description of Artificial Sequence: Synthetic oligonucleotide
  Sense strand starting at position 2868 of SEQ ID NO: 586601
ccaccucccuaugagaaga

SEQ ID NO: 730349 - RNA, 19 nt, Artificial Sequence
  Description of Artificial Sequence: Synthetic oligonucleotide
  Antisense strand to SEQ ID NO: 730348
ucuucucauagggaggugg

SEQ ID NO: 730350 - RNA, 19 nt, Artificial Sequence
  Description of Artificial Sequence: Synthetic oligonucleotide
  Sense strand starting at position 2902 of SEQ ID NO: 586601
augcuuuagggacauaguu

SEQ ID NO: 730351 - RNA, 19 nt, Artificial Sequence
  Description of Artificial Sequence: Synthetic oligonucleotide
  Antisense strand to SEQ ID NO: 730350
aacuaugucccuaaagcau

SEQ ID NO: 730352 - RNA, 19 nt, Artificial Sequence
  Description of Artificial Sequence: Synthetic oligonucleotide
  Sense strand starting at position 2983 of SEQ ID NO: 586601
ucaccuuggccuggaagaa

SEQ ID NO: 730353 - RNA, 19 nt, Artificial Sequence
  Description of Artificial Sequence: Synthetic oligonucleotide
  Antisense strand to SEQ ID NO: 730352
uucuuccaggccaagguga

SEQ ID NO: 730354 - RNA, 19 nt, Artificial Sequence
  Description of Artificial Sequence: Synthetic oligonucleotide
  Sense strand starting at position 3297 of SEQ ID NO: 586601
aucgcagcucuggaauaga

SEQ ID NO: 730355 - RNA, 19 nt, Artificial Sequence
  Description of Artificial Sequence: Synthetic oligonucleotide
  Antisense strand to SEQ ID NO: 730354
ucuauuccagagcugcgau

SEQ ID NO: 730356 - RNA, 19 nt, Artificial Sequence
  Description of Artificial Sequence: Synthetic oligonucleotide
  Sense strand starting at position 3466 of SEQ ID NO: 586601
gugaccuucucagugacau

SEQ ID NO: 730357 - RNA, 19 nt, Artificial Sequence
  Description of Artificial Sequence: Synthetic oligonucleotide
  Antisense strand to SEQ ID NO: 730356
augucacugagaaggucac

SEQ ID NO: 730358 - RNA, 19 nt, Artificial Sequence
  Description of Artificial Sequence: Synthetic oligonucleotide
  Sense strand starting at position 3467 of SEQ ID NO: 586601
ugaccuucucagugacauu

SEQ ID NO: 730359 - RNA, 19 nt, Artificial Sequence
  Description of Artificial Sequence: Synthetic oligonucleotide
  Antisense strand to SEQ ID NO: 730358
aaugucacugagaagguca

SEQ ID NO: 730360 - RNA, 19 nt, Artificial Sequence
  Description of Artificial Sequence: Synthetic oligonucleotide
  Sense strand starting at position 3486 of SEQ ID NO: 586601
guggguucgcuccuuuauc

SEQ ID NO: 730361 - RNA, 19 nt, Artificial Sequence
  Description of Artificial Sequence: Synthetic oligonucleotide
  Antisense strand to SEQ ID NO: 730360
gauaaaggagcgaacccac

SEQ ID NO: 730362 - RNA, 19 nt, Artificial Sequence
  Description of Artificial Sequence: Synthetic oligonucleotide
  Sense strand starting at position 3496 of SEQ ID NO: 586601
uccuuuaucuuaggugcua

SEQ ID NO: 730363 - RNA, 19 nt, Artificial Sequence
  Description of Artificial Sequence: Synthetic oligonucleotide
  Antisense strand to SEQ ID NO: 730362
uagcaccuaagauaaagga

SEQ ID NO: 730364 - RNA, 19 nt, Artificial Sequence
  Description of Artificial Sequence: Synthetic oligonucleotide
  Sense strand starting at position 3497 of SEQ ID NO: 586601
ccuuuaucuuaggugcuau

SEQ ID NO: 730365 - RNA, 19 nt, Artificial Sequence
  Description of Artificial Sequence: Synthetic oligonucleotide
  Antisense strand to SEQ ID NO: 730364
auagcaccuaagauaaagg

SEQ ID NO: 730366 - RNA, 19 nt, Artificial Sequence
  Description of Artificial Sequence: Synthetic oligonucleotide
  Sense strand starting at position 3512 of SEQ ID NO: 586601
cuaugaucucacggucacu

SEQ ID NO: 730367 - RNA, 19 nt, Artificial Sequence
  Description of Artificial Sequence: Synthetic oligonucleotide
  Antisense strand to SEQ ID NO: 730366
agugaccgugagaucauag

SEQ ID NO: 730368 - RNA, 19 nt, Artificial Sequence
  Description of Artificial Sequence: Synthetic oligonucleotide
  Sense strand starting at position 3557 of SEQ ID NO: 586601
ccuugagguccacaaaguu

SEQ ID NO: 730369 - RNA, 19 nt, Artificial Sequence
  Description of Artificial Sequence: Synthetic oligonucleotide
  Antisense strand to SEQ ID NO: 730368
aacuuuguggaccucaagg

SEQ ID NO: 730370 - RNA, 19 nt, Artificial Sequence
  Description of Artificial Sequence: Synthetic oligonucleotide
  Sense strand starting at position 3567 of SEQ ID NO: 586601
cacaaaguugagggugauu

SEQ ID NO: 730371 - RNA, 19 nt, Artificial Sequence
  Description of Artificial Sequence: Synthetic oligonucleotide
  Antisense strand to SEQ ID NO: 730370
aaucacccucaacuuugug

SEQ ID NO: 730372 - RNA, 19 nt, Artificial Sequence
  Description of Artificial Sequence: Synthetic oligonucleotide
  Sense strand starting at position 154 of SEQ ID NO: 586602
uggagaaugugcucaggga

SEQ ID NO: 730373 - RNA, 19 nt, Artificial Sequence
  Description of Artificial Sequence: Synthetic oligonucleotide
  Antisense strand to SEQ ID NO: 730372
ucccugagcacauucucca

SEQ ID NO: 730374 - RNA, 19 nt, Artificial Sequence
  Description of Artificial Sequence: Synthetic oligonucleotide
  Sense strand starting at position 158 of SEQ ID NO: 586602
gaaugugcucagggaagga

SEQ ID NO: 730375 - RNA, 19 nt, Artificial Sequence
  Description of Artificial Sequence: Synthetic oligonucleotide
  Antisense strand to SEQ ID NO: 730374
uccuucccugagcacauuc

SEQ ID NO: 730376 - RNA, 19 nt, Artificial Sequence
  Description of Artificial Sequence: Synthetic oligonucleotide
  Sense strand starting at position 270 of SEQ ID NO: 586602
gugggacuuggcugcauuu

SEQ ID NO: 730377 - RNA, 19 nt, Artificial Sequence
  Description of Artificial Sequence: Synthetic oligonucleotide
  Antisense strand to SEQ ID NO: 730376
aaaugcagccaagucccac

SEQ ID NO: 730378 - RNA, 19 nt, Artificial Sequence
  Description of Artificial Sequence: Synthetic oligonucleotide
  Sense strand starting at position 288 of SEQ ID NO: 586602
uucugaagggugugagaaa

SEQ ID NO: 730379 - RNA, 19 nt, Artificial Sequence
  Description of Artificial Sequence: Synthetic oligonucleotide
  Antisense strand to SEQ ID NO: 730378
uuucucacacccuucagaa

SEQ ID NO: 730380 - RNA, 19 nt, Artificial Sequence
  Description of Artificial Sequence: Synthetic oligonucleotide
  Sense strand starting at position 289 of SEQ ID NO: 586602
ucugaagggugugagaaau

SEQ ID NO: 730381 - RNA, 19 nt, Artificial Sequence
  Description of Artificial Sequence: Synthetic oligonucleotide
  Antisense strand to SEQ ID NO: 730380
auuucucacacccuucaga

SEQ ID NO: 730382 - RNA, 19 nt, Artificial Sequence
  Description of Artificial Sequence: Synthetic oligonucleotide
  Sense strand starting at position 359 of SEQ ID NO: 586602
gccugucccugcuucuaga

SEQ ID NO: 730383 - RNA, 19 nt, Artificial Sequence
  Description of Artificial Sequence: Synthetic oligonucleotide
  Antisense strand to SEQ ID NO: 730382
ucuagaagcagggacaggc

SEQ ID NO: 730384 - RNA, 19 nt, Artificial Sequence
  Description of Artificial Sequence: Synthetic oligonucleotide
  Sense strand starting at position 616 of SEQ ID NO: 586602
cauggcagcucauuaguga

SEQ ID NO: 730385 - RNA, 19 nt, Artificial Sequence
  Description of Artificial Sequence: Synthetic oligonucleotide
  Antisense strand to SEQ ID NO: 730384
ucacuaaugagcugccaug

SEQ ID NO: 730386 - RNA, 19 nt, Artificial Sequence
  Description of Artificial Sequence: Synthetic oligonucleotide
  Sense strand starting at position 657 of SEQ ID NO: 586602
aaggguuucucacagacac

SEQ ID NO: 730387 - RNA, 19 nt, Artificial Sequence
  Description of Artificial Sequence: Synthetic oligonucleotide
  Antisense strand to SEQ ID NO: 730386
gugucugugagaaacccuu

SEQ ID NO: 730388 - RNA, 19 nt, Artificial Sequence
  Description of Artificial Sequence: Synthetic oligonucleotide
  Sense strand starting at position 670 of SEQ ID NO: 586602
agacacuaggccugugaga

SEQ ID NO: 730389 - RNA, 19 nt, Artificial Sequence
  Description of Artificial Sequence: Synthetic oligonucleotide
  Antisense strand to SEQ ID NO: 730388
ucucacaggccuagugucu

SEQ ID NO: 730390 - RNA, 19 nt, Artificial Sequence
  Description of Artificial Sequence: Synthetic oligonucleotide
  Sense strand starting at position 672 of SEQ ID NO: 586602
acacuaggccugugagaca

SEQ ID NO: 730391 - RNA, 19 nt, Artificial Sequence
  Description of Artificial Sequence: Synthetic oligonucleotide
  Antisense strand to SEQ ID NO: 730390
ugucucacaggccuagugu

SEQ ID NO: 730392 - RNA, 19 nt, Artificial Sequence
  Description of Artificial Sequence: Synthetic oligonucleotide
  Sense strand starting at position 767 of SEQ ID NO: 586602
guucccuggcuugguuaau

SEQ ID NO: 730393 - RNA, 19 nt, Artificial Sequence
  Description of Artificial Sequence: Synthetic oligonucleotide
  Antisense strand to SEQ ID NO: 730392
auuaaccaagccagggaac

SEQ ID NO: 730394 - RNA, 19 nt, Artificial Sequence
  Description of Artificial Sequence: Synthetic oligonucleotide
  Sense strand starting at position 779 of SEQ ID NO: 586602
gguuaaugccaucacacau

SEQ ID NO: 730395 - RNA, 19 nt, Artificial Sequence
  Description of Artificial Sequence: Synthetic oligonucleotide
  Antisense strand to SEQ ID NO: 730394
augugugauggcauuaacc

SEQ ID NO: 730396 - RNA, 19 nt, Artificial Sequence
  Description of Artificial Sequence: Synthetic oligonucleotide
  Sense strand starting at position 804 of SEQ ID NO: 586602
uuacuuaagccagaaagcu

SEQ ID NO: 730397 - RNA, 19 nt, Artificial Sequence
  Description of Artificial Sequence: Synthetic oligonucleotide
  Antisense strand to SEQ ID NO: 730396
agcuuucuggcuuaaguaa

SEQ ID NO: 730398 - RNA, 19 nt, Artificial Sequence
  Description of Artificial Sequence: Synthetic oligonucleotide
  Sense strand starting at position 978 of SEQ ID NO: 586602
cgaagucucccaggagcaa

SEQ ID NO: 730399 - RNA, 19 nt, Artificial Sequence
  Description of Artificial Sequence: Synthetic oligonucleotide
  Antisense strand to SEQ ID NO: 730398
uugcuccugggagacuucg

SEQ ID NO: 730400 - RNA, 19 nt, Artificial Sequence
  Description of Artificial Sequence: Synthetic oligonucleotide
  Sense strand starting at position 1041 of SEQ ID NO: 586602
cgcuacuucuggcuuauau

SEQ ID NO: 730401 - RNA, 19 nt, Artificial Sequence
  Description of Artificial Sequence: Synthetic oligonucleotide
  Antisense strand to SEQ ID NO: 730400
auauaagccagaaguagcg

SEQ ID NO: 730402 - RNA, 19 nt, Artificial Sequence
  Description of Artificial Sequence: Synthetic oligonucleotide
  Sense strand starting at position 1051 of SEQ ID NO: 586602
ggcuuauaucagggauucu

SEQ ID NO: 730403 - RNA, 19 nt, Artificial Sequence
  Description of Artificial Sequence: Synthetic oligonucleotide
  Antisense strand to SEQ ID NO: 730402
agaaucccugauauaagcc

SEQ ID NO: 730404 - RNA, 19 nt, Artificial Sequence
  Description of Artificial Sequence: Synthetic oligonucleotide
  Sense strand starting at position 1060 of SEQ ID NO: 586602
cagggauucuaacucaguu

SEQ ID NO: 730405 - RNA, 19 nt, Artificial Sequence
  Description of Artificial Sequence: Synthetic oligonucleotide
  Antisense strand to SEQ ID NO: 730404
aacugaguuagaaucccug

SEQ ID NO: 730406 - RNA, 19 nt, Artificial Sequence
  Description of Artificial Sequence: Synthetic oligonucleotide
  Sense strand starting at position 1090 of SEQ ID NO: 586602
ggcgaauacuggcccucaa

SEQ ID NO: 730407 - RNA, 19 nt, Artificial Sequence
  Description of Artificial Sequence: Synthetic oligonucleotide
  Antisense strand to SEQ ID NO: 730406
uugagggccaguauucgcc

SEQ ID NO: 730408 - RNA, 19 nt, Artificial Sequence
  Description of Artificial Sequence: Synthetic oligonucleotide
  Sense strand starting at position 1172 of SEQ ID NO: 586602
cggucucaguccuucccaa

SEQ ID NO: 730409 - RNA, 19 nt, Artificial Sequence
  Description of Artificial Sequence: Synthetic oligonucleotide
  Antisense strand to SEQ ID NO: 730408
uugggaaggacugagaccg

SEQ ID NO: 730410 - RNA, 19 nt, Artificial Sequence
  Description of Artificial Sequence: Synthetic oligonucleotide
  Sense strand starting at position 1303 of SEQ ID NO: 586602
uccaguucugcuuaaguag

SEQ ID NO: 730411 - RNA, 19 nt, Artificial Sequence
  Description of Artificial Sequence: Synthetic oligonucleotide
  Antisense strand to SEQ ID NO: 730410
cuacuuaagcagaacugga

SEQ ID NO: 730412 - RNA, 19 nt, Artificial Sequence
  Description of Artificial Sequence: Synthetic oligonucleotide
  Sense strand starting at position 1347 of SEQ ID NO: 586602
gaagcugaauccucuggga

SEQ ID NO: 730413 - RNA, 19 nt, Artificial Sequence
  Description of Artificial Sequence: Synthetic oligonucleotide
  Antisense strand to SEQ ID NO: 730412
ucccagaggauucagcuuc

SEQ ID NO: 730414 - RNA, 19 nt, Artificial Sequence
  Description of Artificial Sequence: Synthetic oligonucleotide
  Sense strand starting at position 1586 of SEQ ID NO: 586602
cuccuucgucaagacaaau

SEQ ID NO: 730415 - RNA, 19 nt, Artificial Sequence
  Description of Artificial Sequence: Synthetic oligonucleotide
  Antisense strand to SEQ ID NO: 730414
auuugucuugacgaaggag

SEQ ID NO: 730416 - RNA, 19 nt, Artificial Sequence
  Description of Artificial Sequence: Synthetic oligonucleotide
  Sense strand starting at position 2186 of SEQ ID NO: 586602
cuugucuccgcuuaagauc

SEQ ID NO: 730417 - RNA, 19 nt, Artificial Sequence
  Description of Artificial Sequence: Synthetic oligonucleotide
  Antisense strand to SEQ ID NO: 730416
gaucuuaagcggagacaag

SEQ ID NO: 730418 - RNA, 19 nt, Artificial Sequence
  Description of Artificial Sequence: Synthetic oligonucleotide
  Sense strand starting at position 2326 of SEQ ID NO: 586602
cucacaaguuuacagaaga

SEQ ID NO: 730419 - RNA, 19 nt, Artificial Sequence
  Description of Artificial Sequence: Synthetic oligonucleotide
  Antisense strand to SEQ ID NO: 730418
ucuucuguaaacuugugag

SEQ ID NO: 730420 - RNA, 19 nt, Artificial Sequence
  Description of Artificial Sequence: Synthetic oligonucleotide
  Sense strand starting at position 2358 of SEQ ID NO: 586602
ggguuuagaucccugcuca

SEQ ID NO: 730421 - RNA, 19 nt, Artificial Sequence
  Description of Artificial Sequence: Synthetic oligonucleotide
  Antisense strand to SEQ ID NO: 730420
ugagcagggaucuaaaccc

SEQ ID NO: 730422 - RNA, 19 nt, Artificial Sequence
  Description of Artificial Sequence: Synthetic oligonucleotide
  Sense strand starting at position 2359 of SEQ ID NO: 586602
gguuuagaucccugcucag

SEQ ID NO: 730423 - RNA, 19 nt, Artificial Sequence
  Description of Artificial Sequence: Synthetic oligonucleotide
  Antisense strand to SEQ ID NO: 730422
cugagcagggaucuaaacc

SEQ ID NO: 730424 - RNA, 19 nt, Artificial Sequence
  Description of Artificial Sequence: Synthetic oligonucleotide
  Sense strand starting at position 2461 of SEQ ID NO: 586602
auagacuugcagugagcau

SEQ ID NO: 730425 - RNA, 19 nt, Artificial Sequence
  Description of Artificial Sequence: Synthetic oligonucleotide
  Antisense strand to SEQ ID NO: 730424
augcucacugcaagucuau

SEQ ID NO: 730426 - RNA, 19 nt, Artificial Sequence
  Description of Artificial Sequence: Synthetic oligonucleotide
  Sense strand starting at position 2468 of SEQ ID NO: 586602
ugcagugagcauuaaguga

SEQ ID NO: 730427 - RNA, 19 nt, Artificial Sequence
  Description of Artificial Sequence: Synthetic oligonucleotide
  Antisense strand to SEQ ID NO: 730426
ucacuuaaugcucacugca

SEQ ID NO: 730428 - RNA, 19 nt, Artificial Sequence
  Description of Artificial Sequence: Synthetic oligonucleotide
  Sense strand starting at position 2472 of SEQ ID NO: 586602
gugagcauuaagugagauu

SEQ ID NO: 730429 - RNA, 19 nt, Artificial Sequence
  Description of Artificial Sequence: Synthetic oligonucleotide
  Antisense strand to SEQ ID NO: 730428
aaucucacuuaaugcucac

SEQ ID NO: 730430 - RNA, 19 nt, Artificial Sequence
  Description of Artificial Sequence: Synthetic oligonucleotide
  Sense strand starting at position 2512 of SEQ ID NO: 586602
ucgguagagagaugguaaa

SEQ ID NO: 730431 - RNA, 19 nt, Artificial Sequence
  Description of Artificial Sequence: Synthetic oligonucleotide
  Antisense strand to SEQ ID NO: 730430
uuuaccaucucucuaccga

SEQ ID NO: 730432 - RNA, 19 nt, Artificial Sequence
  Description of Artificial Sequence: Synthetic oligonucleotide
  Sense strand starting at position 2522 of SEQ ID NO: 586602
gaugguaaaugcucaguaa

SEQ ID NO: 730433 - RNA, 19 nt, Artificial Sequence
  Description of Artificial Sequence: Synthetic oligonucleotide
  Antisense strand to SEQ ID NO: 730432
uuacugagcauuuaccauc

SEQ ID NO: 730434 - RNA, 19 nt, Artificial Sequence
  Description of Artificial Sequence: Synthetic oligonucleotide
  Sense strand starting at position 2849 of SEQ ID NO: 586602
cugggaaacuccuccuuga

SEQ ID NO: 730435 - RNA, 19 nt, Artificial Sequence
  Description of Artificial Sequence: Synthetic oligonucleotide
  Antisense strand to SEQ ID NO: 730434
ucaaggaggaguuucccag

SEQ ID NO: 730436 - RNA, 19 nt, Artificial Sequence
  Description of Artificial Sequence: Synthetic oligonucleotide
  Sense strand starting at position 2953 of SEQ ID NO: 586602
gcucucccucccugucaua

SEQ ID NO: 730437 - RNA, 19 nt, Artificial Sequence
  Description of Artificial Sequence: Synthetic oligonucleotide
  Antisense strand to SEQ ID NO: 730436
uaugacagggagggagagc

SEQ ID NO: 730438 - RNA, 19 nt, Artificial Sequence
  Description of Artificial Sequence: Synthetic oligonucleotide
  Sense strand starting at position 3239 of SEQ ID NO: 586602
cuauuccuggcagguuuaa

SEQ ID NO: 730439 - RNA, 19 nt, Artificial Sequence
  Description of Artificial Sequence: Synthetic oligonucleotide
  Antisense strand to SEQ ID NO: 730438
uuaaaccugccaggaauag

SEQ ID NO: 730440 - RNA, 19 nt, Artificial Sequence
  Description of Artificial Sequence: Synthetic oligonucleotide
  Sense strand starting at position 3466 of SEQ ID NO: 586602
cauggaguguuuguaagga

SEQ ID NO: 730441 - RNA, 19 nt, Artificial Sequence
  Description of Artificial Sequence: Synthetic oligonucleotide
  Antisense strand to SEQ ID NO: 730440
uccuuacaaacacuccaug

SEQ ID NO: 730442 - RNA, 19 nt, Artificial Sequence
  Description of Artificial Sequence: Synthetic oligonucleotide
  Sense strand starting at position 3471 of SEQ ID NO: 586602
aguguuuguaaggauuagu

SEQ ID NO: 730443 - RNA, 19 nt, Artificial Sequence
  Description of Artificial Sequence: Synthetic oligonucleotide
  Antisense strand to SEQ ID NO: 730442
acuaauccuuacaaacacu

SEQ ID NO: 730444 - RNA, 19 nt, Artificial Sequence
  Description of Artificial Sequence: Synthetic oligonucleotide
  Sense strand starting at position 3474 of SEQ ID NO: 586602
guuuguaaggauuaguaau

SEQ ID NO: 730445 - RNA, 19 nt, Artificial Sequence
  Description of Artificial Sequence: Synthetic oligonucleotide
  Antisense strand to SEQ ID NO: 730444
auuacuaauccuuacaaac

SEQ ID NO: 730446 - RNA, 19 nt, Artificial Sequence
  Description of Artificial Sequence: Synthetic oligonucleotide
  Sense strand starting at position 3498 of SEQ ID NO: 586602
gugcuuggcacagagguau

SEQ ID NO: 730447 - RNA, 19 nt, Artificial Sequence
  Description of Artificial Sequence: Synthetic oligonucleotide
  Antisense strand to SEQ ID NO: 730446
auaccucugugccaagcac

SEQ ID NO: 730448 - RNA, 19 nt, Artificial Sequence
  Description of Artificial Sequence: Synthetic oligonucleotide
  Sense strand starting at position 3816 of SEQ ID NO: 586602
guguuuguagugucugauu

SEQ ID NO: 730449 - RNA, 19 nt, Artificial Sequence
  Description of Artificial Sequence: Synthetic oligonucleotide
  Antisense strand to SEQ ID NO: 730448
aaucagacacuacaaacac

SEQ ID NO: 730450 - RNA, 19 nt, Artificial Sequence
  Description of Artificial Sequence: Synthetic oligonucleotide
  Sense strand starting at position 3818 of SEQ ID NO: 586602
guuuguagugucugauucu

SEQ ID NO: 730451 - RNA, 19 nt, Artificial Sequence
  Description of Artificial Sequence: Synthetic oligonucleotide
  Antisense strand to SEQ ID NO: 730450
agaaucagacacuacaaac

SEQ ID NO: 730452 - RNA, 19 nt, Artificial Sequence
  Description of Artificial Sequence: Synthetic oligonucleotide
  Sense strand starting at position 92 of SEQ ID NO: 586603
gucugcaaucuguggucuu

SEQ ID NO: 730453 - RNA, 19 nt, Artificial Sequence
  Description of Artificial Sequence: Synthetic oligonucleotide
  Antisense strand to SEQ ID NO: 730452
aagaccacagauugcagac

SEQ ID NO: 730454 - RNA, 19 nt, Artificial Sequence
  Description of Artificial Sequence: Synthetic oligonucleotide
  Sense strand starting at position 165 of SEQ ID NO: 586603
gcaccacugugacuaauga

SEQ ID NO: 730455 - RNA, 19 nt, Artificial Sequence
  Description of Artificial Sequence: Synthetic oligonucleotide
  Antisense strand to SEQ ID NO: 730454
ucauuagucacaguggugc

SEQ ID NO: 730456 - RNA, 19 nt, Artificial Sequence
  Description of Artificial Sequence: Synthetic oligonucleotide
  Sense strand starting at position 188 of SEQ ID NO: 586603
uuuccaauugcagagauua

SEQ ID NO: 730457 - RNA, 19 nt, Artificial Sequence
  Description of Artificial Sequence: Synthetic oligonucleotide
  Antisense strand to SEQ ID NO: 730456
uaaucucugcaauuggaaa

SEQ ID NO: 730458 - RNA, 19 nt, Artificial Sequence
  Description of Artificial Sequence: Synthetic oligonucleotide
  Sense strand starting at position 199 of SEQ ID NO: 586603
agagauuacuucuagauuu

SEQ ID NO: 730459 - RNA, 19 nt, Artificial Sequence
  Description of Artificial Sequence: Synthetic oligonucleotide
  Antisense strand to SEQ ID NO: 730458
aaaucuagaaguaaucucu

SEQ ID NO: 730460 - RNA, 19 nt, Artificial Sequence
  Description of Artificial Sequence: Synthetic oligonucleotide
  Sense strand starting at position 407 of SEQ ID NO: 586603
caucuucgguguccaguaa

SEQ ID NO: 730461 - RNA, 19 nt, Artificial Sequence
  Description of Artificial Sequence: Synthetic oligonucleotide
  Antisense strand to SEQ ID NO: 730460
uuacuggacaccgaagaug

SEQ ID NO: 730462 - RNA, 19 nt, Artificial Sequence
  Description of Artificial Sequence: Synthetic oligonucleotide
  Sense strand starting at position 408 of SEQ ID NO: 586603
aucuucgguguccaguaau

SEQ ID NO: 730463 - RNA, 19 nt, Artificial Sequence
  Description of Artificial Sequence: Synthetic oligonucleotide
  Antisense strand to SEQ ID NO: 730462
auuacuggacaccgaagau

SEQ ID NO: 730464 - RNA, 19 nt, Artificial Sequence
  Description of Artificial Sequence: Synthetic oligonucleotide
  Sense strand starting at position 411 of SEQ ID NO: 586603
uucgguguccaguaaugcu

SEQ ID NO: 730465 - RNA, 19 nt, Artificial Sequence
  Description of Artificial Sequence: Synthetic oligonucleotide
  Antisense strand to SEQ ID NO: 730464
agcauuacuggacaccgaa

SEQ ID NO: 730466 - RNA, 19 nt, Artificial Sequence
  Description of Artificial Sequence: Synthetic oligonucleotide
  Sense strand starting at position 619 of SEQ ID NO: 586603
acggucuuacucuaucaca

SEQ ID NO: 730467 - RNA, 19 nt, Artificial Sequence
  Description of Artificial Sequence: Synthetic oligonucleotide
  Antisense strand to SEQ ID NO: 730466
ugugauagaguaagaccgu

SEQ ID NO: 730468 - RNA, 19 nt, Artificial Sequence
  Description of Artificial Sequence: Synthetic oligonucleotide
  Sense strand starting at position 791 of SEQ ID NO: 586603
cacuguugcccugacuagu

SEQ ID NO: 730469 - RNA, 19 nt, Artificial Sequence
  Description of Artificial Sequence: Synthetic oligonucleotide
  Antisense strand to SEQ ID NO: 730468
acuagucagggcaacagug

SEQ ID NO: 730470 - RNA, 19 nt, Artificial Sequence
  Description of Artificial Sequence: Synthetic oligonucleotide
  Sense strand starting at position 797 of SEQ ID NO: 586603
ugcccugacuagucucuaa

SEQ ID NO: 730471 - RNA, 19 nt, Artificial Sequence
  Description of Artificial Sequence: Synthetic oligonucleotide
  Antisense strand to SEQ ID NO: 730470
uuagagacuagucagggca

SEQ ID NO: 730472 - RNA, 19 nt, Artificial Sequence
  Description of Artificial Sequence: Synthetic oligonucleotide
  Sense strand starting at position 809 of SEQ ID NO: 586603
ucucuaacugcugggauca

SEQ ID NO: 730473 - RNA, 19 nt, Artificial Sequence
  Description of Artificial Sequence: Synthetic oligonucleotide
  Antisense strand to SEQ ID NO: 730472
ugaucccagcaguuagaga

SEQ ID NO: 730474 - RNA, 19 nt, Artificial Sequence
  Description of Artificial Sequence: Synthetic oligonucleotide
  Sense strand starting at position 810 of SEQ ID NO: 586603
cucuaacugcugggaucaa

SEQ ID NO: 730475 - RNA, 19 nt, Artificial Sequence
  Description of Artificial Sequence: Synthetic oligonucleotide
  Antisense strand to SEQ ID NO: 730474
uugaucccagcaguuagag

SEQ ID NO: 730476 - RNA, 19 nt, Artificial Sequence
  Description of Artificial Sequence: Synthetic oligonucleotide
  Sense strand starting at position 900 of SEQ ID NO: 586603
ccgucucuugagugucauu

SEQ ID NO: 730477 - RNA, 19 nt, Artificial Sequence
  Description of Artificial Sequence: Synthetic oligonucleotide
  Antisense strand to SEQ ID NO: 730476
aaugacacucaagagacgg

SEQ ID NO: 730478 - RNA, 19 nt, Artificial Sequence
  Description of Artificial Sequence: Synthetic oligonucleotide
  Sense strand starting at position 921 of SEQ ID NO: 586603
agguguugacaugauagua

SEQ ID NO: 730479 - RNA, 19 nt, Artificial Sequence
  Description of Artificial Sequence: Synthetic oligonucleotide
  Antisense strand to SEQ ID NO: 730478
uacuaucaugucaacaccu

SEQ ID NO: 730480 - RNA, 19 nt, Artificial Sequence
  Description of Artificial Sequence: Synthetic oligonucleotide
  Sense strand starting at position 926 of SEQ ID NO: 586603
uugacaugauaguaucaca

SEQ ID NO: 730481 - RNA, 19 nt, Artificial Sequence
  Description of Artificial Sequence: Synthetic oligonucleotide
  Antisense strand to SEQ ID NO: 730480
ugugauacuaucaugucaa

SEQ ID NO: 730482 - RNA, 19 nt, Artificial Sequence
  Description of Artificial Sequence: Synthetic oligonucleotide
  Sense strand starting at position 949 of SEQ ID NO: 586603
uuaaguaagacccguggaa

SEQ ID NO: 730483 - RNA, 19 nt, Artificial Sequence
  Description of Artificial Sequence: Synthetic oligonucleotide
  Antisense strand to SEQ ID NO: 730482
uuccacgggucuuacuuaa

SEQ ID NO: 730484 - RNA, 19 nt, Artificial Sequence
  Description of Artificial Sequence: Synthetic oligonucleotide
  Sense strand starting at position 998 of SEQ ID NO: 586603
gagugaaagccaugggaug

SEQ ID NO: 730485 - RNA, 19 nt, Artificial Sequence
  Description of Artificial Sequence: Synthetic oligonucleotide
  Antisense strand to SEQ ID NO: 730484
caucccauggcuuucacuc

SEQ ID NO: 730486 - RNA, 19 nt, Artificial Sequence
  Description of Artificial Sequence: Synthetic oligonucleotide
  Sense strand starting at position 1074 of SEQ ID NO: 586603
uugccuuguuccuuaggua

SEQ ID NO: 730487 - RNA, 19 nt, Artificial Sequence
  Description of Artificial Sequence: Synthetic oligonucleotide
  Antisense strand to SEQ ID NO: 730486
uaccuaaggaacaaggcaa

SEQ ID NO: 730488 - RNA, 19 nt, Artificial Sequence
  Description of Artificial Sequence: Synthetic oligonucleotide
  Sense strand starting at position 1127 of SEQ ID NO: 586603
ccuguuggauucucuagaa

SEQ ID NO: 730489 - RNA, 19 nt, Artificial Sequence
  Description of Artificial Sequence: Synthetic oligonucleotide
  Antisense strand to SEQ ID NO: 730488
uucuagagaauccaacagg

SEQ ID NO: 730490 - RNA, 19 nt, Artificial Sequence
  Description of Artificial Sequence: Synthetic oligonucleotide
  Sense strand starting at position 1373 of SEQ ID NO: 586603
cccuccugucuucgguaaa

SEQ ID NO: 730491 - RNA, 19 nt, Artificial Sequence
  Description of Artificial Sequence: Synthetic oligonucleotide
  Antisense strand to SEQ ID NO: 730490
uuuaccgaagacaggaggg

SEQ ID NO: 730492 - RNA, 19 nt, Artificial Sequence
  Description of Artificial Sequence: Synthetic oligonucleotide
  Sense strand starting at position 1401 of SEQ ID NO: 586603
uggcgaugggaguaaauca

SEQ ID NO: 730493 - RNA, 19 nt, Artificial Sequence
  Description of Artificial Sequence: Synthetic oligonucleotide
  Antisense strand to SEQ ID NO: 730492
ugauuuacucccaucgcca

SEQ ID NO: 730494 - RNA, 19 nt, Artificial Sequence
  Description of Artificial Sequence: Synthetic oligonucleotide
  Sense strand starting at position 1462 of SEQ ID NO: 586603
acaccuaguggguguaauu

SEQ ID NO: 730495 - RNA, 19 nt, Artificial Sequence
  Description of Artificial Sequence: Synthetic oligonucleotide
  Antisense strand to SEQ ID NO: 730494
aauuacacccacuaggugu

SEQ ID NO: 730496 - RNA, 19 nt, Artificial Sequence
  Description of Artificial Sequence: Synthetic oligonucleotide
  Sense strand starting at position 2250 of SEQ ID NO: 586603
cggagucugccgugaagag

SEQ ID NO: 730497 - RNA, 19 nt, Artificial Sequence
  Description of Artificial Sequence: Synthetic oligonucleotide
  Antisense strand to SEQ ID NO: 730496
cucuucacggcagacuccg

SEQ ID NO: 730498 - RNA, 19 nt, Artificial Sequence
  Description of Artificial Sequence: Synthetic oligonucleotide
  Sense strand starting at position 2352 of SEQ ID NO: 586603
ggguccuugucuccucaau

SEQ ID NO: 730499 - RNA, 19 nt, Artificial Sequence
  Description of Artificial Sequence: Synthetic oligonucleotide
  Antisense strand to SEQ ID NO: 730498
auugaggagacaaggaccc

SEQ ID NO: 730500 - RNA, 19 nt, Artificial Sequence
  Description of Artificial Sequence: Synthetic oligonucleotide
  Sense strand starting at position 2382 of SEQ ID NO: 586603
gcagccuuuccuggaggau

SEQ ID NO: 730501 - RNA, 19 nt, Artificial Sequence
  Description of Artificial Sequence: Synthetic oligonucleotide
  Antisense strand to SEQ ID NO: 730500
auccuccaggaaaggcugc

SEQ ID NO: 730502 - RNA, 19 nt, Artificial Sequence
  Description of Artificial Sequence: Synthetic oligonucleotide
  Sense strand starting at position 2383 of SEQ ID NO: 586603
cagccuuuccuggaggaug

SEQ ID NO: 730503 - RNA, 19 nt, Artificial Sequence
  Description of Artificial Sequence: Synthetic oligonucleotide
  Antisense strand to SEQ ID NO: 730502
cauccuccaggaaaggcug

SEQ ID NO: 730504 - RNA, 19 nt, Artificial Sequence
  Description of Artificial Sequence: Synthetic oligonucleotide
  Sense strand starting at position 2535 of SEQ ID NO: 586603
aggagcgcuugaguucaau

SEQ ID NO: 730505 - RNA, 19 nt, Artificial Sequence
  Description of Artificial Sequence: Synthetic oligonucleotide
  Antisense strand to SEQ ID NO: 730504
auugaacucaagcgcuccu

SEQ ID NO: 730506 - RNA, 19 nt, Artificial Sequence
  Description of Artificial Sequence: Synthetic oligonucleotide
  Sense strand starting at position 2924 of SEQ ID NO: 586603
aauccuggcucuuugguaa

SEQ ID NO: 730507 - RNA, 19 nt, Artificial Sequence
  Description of Artificial Sequence: Synthetic oligonucleotide
  Antisense strand to SEQ ID NO: 730506
uuaccaaagagccaggauu

SEQ ID NO: 730508 - RNA, 19 nt, Artificial Sequence
  Description of Artificial Sequence: Synthetic oligonucleotide
  Sense strand starting at position 2930 of SEQ ID NO: 586603
ggcucuuugguaagcgaug

SEQ ID NO: 730509 - RNA, 19 nt, Artificial Sequence
  Description of Artificial Sequence: Synthetic oligonucleotide
  Antisense strand to SEQ ID NO: 730508
caucgcuuaccaaagagcc

SEQ ID NO: 730510 - RNA, 19 nt, Artificial Sequence
  Description of Artificial Sequence: Synthetic oligonucleotide
  Sense strand starting at position 3363 of SEQ ID NO: 586603
aucucauucucacagugua

SEQ ID NO: 730511 - RNA, 19 nt, Artificial Sequence
  Description of Artificial Sequence: Synthetic oligonucleotide
  Antisense strand to SEQ ID NO: 730510
uacacugugagaaugagau

SEQ ID NO: 730512 - RNA, 19 nt, Artificial Sequence
  Description of Artificial Sequence: Synthetic oligonucleotide
  Sense strand starting at position 3396 of SEQ ID NO: 586603
aacugagucguagauuaga

SEQ ID NO: 730513 - RNA, 19 nt, Artificial Sequence
  Description of Artificial Sequence: Synthetic oligonucleotide
  Antisense strand to SEQ ID NO: 730512
ucuaaucuacgacucaguu

SEQ ID NO: 730514 - RNA, 19 nt, Artificial Sequence
  Description of Artificial Sequence: Synthetic oligonucleotide
  Sense strand starting at position 3486 of SEQ ID NO: 586603
aggaguguccuaggucugu

SEQ ID NO: 730515 - RNA, 19 nt, Artificial Sequence
  Description of Artificial Sequence: Synthetic oligonucleotide
  Antisense strand to SEQ ID NO: 730514
acagaccuaggacacuccu

SEQ ID NO: 730516 - RNA, 19 nt, Artificial Sequence
  Description of Artificial Sequence: Synthetic oligonucleotide
  Sense strand starting at position 3490 of SEQ ID NO: 586603
guguccuaggucuguguuu

SEQ ID NO: 730517 - RNA, 19 nt, Artificial Sequence
  Description of Artificial Sequence: Synthetic oligonucleotide
  Antisense strand to SEQ ID NO: 730516
aaacacagaccuaggacac

SEQ ID NO: 730518 - RNA, 19 nt, Artificial Sequence
  Description of Artificial Sequence: Synthetic oligonucleotide
  Sense strand starting at position 3541 of SEQ ID NO: 586603
gggagaccuuguuuaaaca

SEQ ID NO: 730519 - RNA, 19 nt, Artificial Sequence
  Description of Artificial Sequence: Synthetic oligonucleotide
  Antisense strand to SEQ ID NO: 730518
uguuuaaacaaggucuccc

SEQ ID NO: 730520 - RNA, 19 nt, Artificial Sequence
  Description of Artificial Sequence: Synthetic oligonucleotide
  Sense strand starting at position 3601 of SEQ ID NO: 586603
gauggacgucauuauguua

SEQ ID NO: 730521 - RNA, 19 nt, Artificial Sequence
  Description of Artificial Sequence: Synthetic oligonucleotide
  Antisense strand to SEQ ID NO: 730520
uaacauaaugacguccauc

SEQ ID NO: 730522 - RNA, 19 nt, Artificial Sequence
  Description of Artificial Sequence: Synthetic oligonucleotide
  Sense strand starting at position 3692 of SEQ ID NO: 586603
cucauaaauuuagagagua

SEQ ID NO: 730523 - RNA, 19 nt, Artificial Sequence
  Description of Artificial Sequence: Synthetic oligonucleotide
  Antisense strand to SEQ ID NO: 730522
uacucucuaaauuuaugag

SEQ ID NO: 730524 - RNA, 19 nt, Artificial Sequence
  Description of Artificial Sequence: Synthetic oligonucleotide
  Sense strand starting at position 3729 of SEQ ID NO: 586603
ggaacgguugggugagaaa

SEQ ID NO: 730525 - RNA, 19 nt, Artificial Sequence
  Description of Artificial Sequence: Synthetic oligonucleotide
  Antisense strand to SEQ ID NO: 730524
uuucucacccaaccguucc

SEQ ID NO: 730526 - RNA, 19 nt, Artificial Sequence
  Description of Artificial Sequence: Synthetic oligonucleotide
  Sense strand starting at position 3732 of SEQ ID NO: 586603
acgguugggugagaaauga

SEQ ID NO: 730527 - RNA, 19 nt, Artificial Sequence
  Description of Artificial Sequence: Synthetic oligonucleotide
  Antisense strand to SEQ ID NO: 730526
ucauuucucacccaaccgu

SEQ ID NO: 730528 - RNA, 19 nt, Artificial Sequence
  Description of Artificial Sequence: Synthetic oligonucleotide
  Sense strand starting at position 3748 of SEQ ID NO: 586603
ugaagagauuuagguuaau

SEQ ID NO: 730529 - RNA, 19 nt, Artificial Sequence
  Description of Artificial Sequence: Synthetic oligonucleotide
  Antisense strand to SEQ ID NO: 730528
auuaaccuaaaucucuuca

SEQ ID NO: 730530 - RNA, 19 nt, Artificial Sequence
  Description of Artificial Sequence: Synthetic oligonucleotide
  Sense strand starting at position 3754 of SEQ ID NO: 586603
gauuuagguuaaugaagga

SEQ ID NO: 730531 - RNA, 19 nt, Artificial Sequence
  Description of Artificial Sequence: Synthetic oligonucleotide
  Antisense strand to SEQ ID NO: 730530
uccuucauuaaccuaaauc

SEQ ID NO: 730532 - RNA, 19 nt, Artificial Sequence
  Description of Artificial Sequence: Synthetic oligonucleotide
  Sense strand starting at position 129 of SEQ ID NO: 586604
ucggcugacuacuugauau

SEQ ID NO: 730533 - RNA, 19 nt, Artificial Sequence
  Description of Artificial Sequence: Synthetic oligonucleotide
  Antisense strand to SEQ ID NO: 730532
auaucaaguagucagccga

SEQ ID NO: 730534 - RNA, 19 nt, Artificial Sequence
  Description of Artificial Sequence: Synthetic oligonucleotide
  Sense strand starting at position 131 of SEQ ID NO: 586604
ggcugacuacuugauauac

SEQ ID NO: 730535 - RNA, 19 nt, Artificial Sequence
  Description of Artificial Sequence: Synthetic oligonucleotide
  Antisense strand to SEQ ID NO: 730534
guauaucaaguagucagcc

SEQ ID NO: 730536 - RNA, 19 nt, Artificial Sequence
  Description of Artificial Sequence: Synthetic oligonucleotide
  Sense strand starting at position 148 of SEQ ID NO: 586604
acagcaagugccuaaacau

SEQ ID NO: 730537 - RNA, 19 nt, Artificial Sequence
  Description of Artificial Sequence: Synthetic oligonucleotide
  Antisense strand to SEQ ID NO: 730536
auguuuaggcacuugcugu

SEQ ID NO: 730538 - RNA, 19 nt, Artificial Sequence
  Description of Artificial Sequence: Synthetic oligonucleotide
  Sense strand starting at position 184 of SEQ ID NO: 586604
gcaguuauuugcugucacu

SEQ ID NO: 730539 - RNA, 19 nt, Artificial Sequence
  Description of Artificial Sequence: Synthetic oligonucleotide
  Antisense strand to SEQ ID NO: 730538
agugacagcaaauaacugc

SEQ ID NO: 730540 - RNA, 19 nt, Artificial Sequence
  Description of Artificial Sequence: Synthetic oligonucleotide
  Sense strand starting at position 187 of SEQ ID NO: 586604
guuauuugcugucacugga

SEQ ID NO: 730541 - RNA, 19 nt, Artificial Sequence
  Description of Artificial Sequence: Synthetic oligonucleotide
  Antisense strand to SEQ ID NO: 730540
uccagugacagcaaauaac

SEQ ID NO: 730542 - RNA, 19 nt, Artificial Sequence
  Description of Artificial Sequence: Synthetic oligonucleotide
  Sense strand starting at position 214 of SEQ ID NO: 586604
aguugaaccucucagaacu

SEQ ID NO: 730543 - RNA, 19 nt, Artificial Sequence
  Description of Artificial Sequence: Synthetic oligonucleotide
  Antisense strand to SEQ ID NO: 730542
aguucugagagguucaacu

SEQ ID NO: 730544 - RNA, 19 nt, Artificial Sequence
  Description of Artificial Sequence: Synthetic oligonucleotide
  Sense strand starting at position 227 of SEQ ID NO: 586604
agaacuauguaucaacuga

SEQ ID NO: 730545 - RNA, 19 nt, Artificial Sequence
  Description of Artificial Sequence: Synthetic oligonucleotide
  Antisense strand to SEQ ID NO: 730544
ucaguugauacauaguucu

SEQ ID NO: 730546 - RNA, 19 nt, Artificial Sequence
  Description of Artificial Sequence: Synthetic oligonucleotide
  Sense strand starting at position 234 of SEQ ID NO: 586604
uguaucaacugagagauaa

SEQ ID NO: 730547 - RNA, 19 nt, Artificial Sequence
  Description of Artificial Sequence: Synthetic oligonucleotide
  Antisense strand to SEQ ID NO: 730546
uuaucucucaguugauaca

SEQ ID NO: 730548 - RNA, 19 nt, Artificial Sequence
  Description of Artificial Sequence: Synthetic oligonucleotide
  Sense strand starting at position 273 of SEQ ID NO: 586604
gcacauggacuuuguaaca

SEQ ID NO: 730549 - RNA, 19 nt, Artificial Sequence
  Description of Artificial Sequence: Synthetic oligonucleotide
  Antisense strand to SEQ ID NO: 730548
uguuacaaaguccaugugc

SEQ ID NO: 730550 - RNA, 19 nt, Artificial Sequence
  Description of Artificial Sequence: Synthetic oligonucleotide
  Sense strand starting at position 326 of SEQ ID NO: 586604
gcuuacuucccggaucuca

SEQ ID NO: 730551 - RNA, 19 nt, Artificial Sequence
  Description of Artificial Sequence: Synthetic oligonucleotide
  Antisense strand to SEQ ID NO: 730550
ugagauccgggaaguaagc

SEQ ID NO: 730552 - RNA, 19 nt, Artificial Sequence
  Description of Artificial Sequence: Synthetic oligonucleotide
  Sense strand starting at position 335 of SEQ ID NO: 586604
ccggaucucaguuauguuc

SEQ ID NO: 730553 - RNA, 19 nt, Artificial Sequence
  Description of Artificial Sequence: Synthetic oligonucleotide
  Antisense strand to SEQ ID NO: 730552
gaacauaacugagauccgg

SEQ ID NO: 730554 - RNA, 19 nt, Artificial Sequence
  Description of Artificial Sequence: Synthetic oligonucleotide
  Sense strand starting at position 342 of SEQ ID NO: 586604
ucaguuauguuccaaggag

SEQ ID NO: 730555 - RNA, 19 nt, Artificial Sequence
  Description of Artificial Sequence: Synthetic oligonucleotide
  Antisense strand to SEQ ID NO: 730554
cuccuuggaacauaacuga

SEQ ID NO: 730556 - RNA, 19 nt, Artificial Sequence
  Description of Artificial Sequence: Synthetic oligonucleotide
  Sense strand starting at position 388 of SEQ ID NO: 586604
cagagauguaagugugacu

SEQ ID NO: 730557 - RNA, 19 nt, Artificial Sequence
  Description of Artificial Sequence: Synthetic oligonucleotide
  Antisense strand to SEQ ID NO: 730556
agucacacuuacaucucug

SEQ ID NO: 730558 - RNA, 19 nt, Artificial Sequence
  Description of Artificial Sequence: Synthetic oligonucleotide
  Sense strand starting at position 391 of SEQ ID NO: 586604
agauguaagugugacuuua

SEQ ID NO: 730559 - RNA, 19 nt, Artificial Sequence
  Description of Artificial Sequence: Synthetic oligonucleotide
  Antisense strand to SEQ ID NO: 730558
uaaagucacacuuacaucu

SEQ ID NO: 730560 - RNA, 19 nt, Artificial Sequence
  Description of Artificial Sequence: Synthetic oligonucleotide
  Sense strand starting at position 393 of SEQ ID NO: 586604
auguaagugugacuuuaga

SEQ ID NO: 730561 - RNA, 19 nt, Artificial Sequence
  Description of Artificial Sequence: Synthetic oligonucleotide
  Antisense strand to SEQ ID NO: 730560
ucuaaagucacacuuacau

SEQ ID NO: 730562 - RNA, 19 nt, Artificial Sequence
  Description of Artificial Sequence: Synthetic oligonucleotide
  Sense strand starting at position 400 of SEQ ID NO: 586604
ugugacuuuagacgccaaa

SEQ ID NO: 730563 - RNA, 19 nt, Artificial Sequence
  Description of Artificial Sequence: Synthetic oligonucleotide
  Antisense strand to SEQ ID NO: 730562
uuuggcgucuaaagucaca

SEQ ID NO: 730564 - RNA, 19 nt, Artificial Sequence
  Description of Artificial Sequence: Synthetic oligonucleotide
  Sense strand starting at position 564 of SEQ ID NO: 586604
aaaguuaaagccugggcaa

SEQ ID NO: 730565 - RNA, 19 nt, Artificial Sequence
  Description of Artificial Sequence: Synthetic oligonucleotide
  Antisense strand to SEQ ID NO: 730564
uugcccaggcuuuaacuuu

SEQ ID NO: 730566 - RNA, 19 nt, Artificial Sequence
  Description of Artificial Sequence: Synthetic oligonucleotide
  Sense strand starting at position 859 of SEQ ID NO: 586604
acuauuaucugggaaagac

SEQ ID NO: 730567 - RNA, 19 nt, Artificial Sequence
  Description of Artificial Sequence: Synthetic oligonucleotide
  Antisense strand to SEQ ID NO: 730566
gucuuucccagauaauagu

SEQ ID NO: 730568 - RNA, 19 nt, Artificial Sequence
  Description of Artificial Sequence: Synthetic oligonucleotide
  Sense strand starting at position 869 of SEQ ID NO: 586604
gggaaagacucguuucacu

SEQ ID NO: 730569 - RNA, 19 nt, Artificial Sequence
  Description of Artificial Sequence: Synthetic oligonucleotide
  Antisense strand to SEQ ID NO: 730568
agugaaacgagucuuuccc

SEQ ID NO: 730570 - RNA, 19 nt, Artificial Sequence
  Description of Artificial Sequence: Synthetic oligonucleotide
  Sense strand starting at position 905 of SEQ ID NO: 586604
gcaugaaaucuguacucuu

SEQ ID NO: 730571 - RNA, 19 nt, Artificial Sequence
  Description of Artificial Sequence: Synthetic oligonucleotide
  Antisense strand to SEQ ID NO: 730570
aagaguacagauuucaugc

SEQ ID NO: 730572 - RNA, 19 nt, Artificial Sequence
  Description of Artificial Sequence: Synthetic oligonucleotide
  Sense strand starting at position 908 of SEQ ID NO: 586604
ugaaaucuguacucuugau

SEQ ID NO: 730573 - RNA, 19 nt, Artificial Sequence
  Description of Artificial Sequence: Synthetic oligonucleotide
  Antisense strand to SEQ ID NO: 730572
aucaagaguacagauuuca

SEQ ID NO: 730574 - RNA, 19 nt, Artificial Sequence
  Description of Artificial Sequence: Synthetic oligonucleotide
  Sense strand starting at position 914 of SEQ ID NO: 586604
cuguacucuugaucaggga

SEQ ID NO: 730575 - RNA, 19 nt, Artificial Sequence
  Description of Artificial Sequence: Synthetic oligonucleotide
  Antisense strand to SEQ ID NO: 730574
ucccugaucaagaguacag

SEQ ID NO: 730576 - RNA, 19 nt, Artificial Sequence
  Description of Artificial Sequence: Synthetic oligonucleotide
  Sense strand starting at position 1024 of SEQ ID NO: 586604
ccauuauuagauggaggca

SEQ ID NO: 730577 - RNA, 19 nt, Artificial Sequence
  Description of Artificial Sequence: Synthetic oligonucleotide
  Antisense strand to SEQ ID NO: 730576
ugccuccaucuaauaaugg

SEQ ID NO: 730578 - RNA, 19 nt, Artificial Sequence
  Description of Artificial Sequence: Synthetic oligonucleotide
  Sense strand starting at position 1052 of SEQ ID NO: 586604
cagaucguuucccaaagca

SEQ ID NO: 730579 - RNA, 19 nt, Artificial Sequence
  Description of Artificial Sequence: Synthetic oligonucleotide
  Antisense strand to SEQ ID NO: 730578
ugcuuugggaaacgaucug

SEQ ID NO: 730580 - RNA, 19 nt, Artificial Sequence
  Description of Artificial Sequence: Synthetic oligonucleotide
  Sense strand starting at position 1070 of SEQ ID NO: 586604
agcauuaauuacgccaaga

SEQ ID NO: 730581 - RNA, 19 nt, Artificial Sequence
  Description of Artificial Sequence: Synthetic oligonucleotide
  Antisense strand to SEQ ID NO: 730580
ucuuggcguaauuaaugcu

SEQ ID NO: 730582 - RNA, 19 nt, Artificial Sequence
  Description of Artificial Sequence: Synthetic oligonucleotide
  Sense strand starting at position 1125 of SEQ ID NO: 586604
cggugugauccuggaccca

SEQ ID NO: 730583 - RNA, 19 nt, Artificial Sequence
  Description of Artificial Sequence: Synthetic oligonucleotide
  Antisense strand to SEQ ID NO: 730582
uggguccaggaucacaccg

SEQ ID NO: 730584 - RNA, 19 nt, Artificial Sequence
  Description of Artificial Sequence: Synthetic oligonucleotide
  Sense strand starting at position 1342 of SEQ ID NO: 586604
cccauugauucgcggguuu

SEQ ID NO: 730585 - RNA, 19 nt, Artificial Sequence
  Description of Artificial Sequence: Synthetic oligonucleotide
  Antisense strand to SEQ ID NO: 730584
aaacccgcgaaucaauggg

SEQ ID NO: 730586 - RNA, 19 nt, Artificial Sequence
  Description of Artificial Sequence: Synthetic oligonucleotide
  Sense strand starting at position 1759 of SEQ ID NO: 586604
gcgcgucuuccagaucuuc

SEQ ID NO: 730587 - RNA, 19 nt, Artificial Sequence
  Description of Artificial Sequence: Synthetic oligonucleotide
  Antisense strand to SEQ ID NO: 730586
gaagaucuggaagacgcgc

SEQ ID NO: 730588 - RNA, 19 nt, Artificial Sequence
  Description of Artificial Sequence: Synthetic oligonucleotide
  Sense strand starting at position 2070 of SEQ ID NO: 586604
cagggacucccuugcaaga

SEQ ID NO: 730589 - RNA, 19 nt, Artificial Sequence
  Description of Artificial Sequence: Synthetic oligonucleotide
  Antisense strand to SEQ ID NO: 730588
ucuugcaagggagucccug

SEQ ID NO: 730590 - RNA, 19 nt, Artificial Sequence
  Description of Artificial Sequence: Synthetic oligonucleotide
  Sense strand starting at position 2093 of SEQ ID NO: 586604
cccggacucugccaaauuu

SEQ ID NO: 730591 - RNA, 19 nt, Artificial Sequence
  Description of Artificial Sequence: Synthetic oligonucleotide
  Antisense strand to SEQ ID NO: 730590
aaauuuggcagaguccggg

SEQ ID NO: 730592 - RNA, 19 nt, Artificial Sequence
  Description of Artificial Sequence: Synthetic oligonucleotide
  Sense strand starting at position 2144 of SEQ ID NO: 586604
ccagcaguuuccuuuacuu

SEQ ID NO: 730593 - RNA, 19 nt, Artificial Sequence
  Description of Artificial Sequence: Synthetic oligonucleotide
  Antisense strand to SEQ ID NO: 730592
aaguaaaggaaacugcugg

SEQ ID NO: 730594 - RNA, 19 nt, Artificial Sequence
  Description of Artificial Sequence: Synthetic oligonucleotide
  Sense strand starting at position 2221 of SEQ ID NO: 586604
acaggccuauuguaugaaa

SEQ ID NO: 730595 - RNA, 19 nt, Artificial Sequence
  Description of Artificial Sequence: Synthetic oligonucleotide
  Antisense strand to SEQ ID NO: 730594
uuucauacaauaggccugu

SEQ ID NO: 730596 - RNA, 19 nt, Artificial Sequence
  Description of Artificial Sequence: Synthetic oligonucleotide
  Sense strand starting at position 2275 of SEQ ID NO: 586604
cugaaauucuagcaguuug

SEQ ID NO: 730597 - RNA, 19 nt, Artificial Sequence
  Description of Artificial Sequence: Synthetic oligonucleotide
  Antisense strand to SEQ ID NO: 730596
caaacugcuagaauuucag

SEQ ID NO: 730598 - RNA, 19 nt, Artificial Sequence
  Description of Artificial Sequence: Synthetic oligonucleotide
  Sense strand starting at position 2343 of SEQ ID NO: 586604
ugggcaaccuaaugagagu

SEQ ID NO: 730599 - RNA, 19 nt, Artificial Sequence
  Description of Artificial Sequence: Synthetic oligonucleotide
  Antisense strand to SEQ ID NO: 730598
acucucauuagguugccca

SEQ ID NO: 730600 - RNA, 19 nt, Artificial Sequence
  Description of Artificial Sequence: Synthetic oligonucleotide
  Sense strand starting at position 2605 of SEQ ID NO: 586604
cugauugccucacucaaga

SEQ ID NO: 730601 - RNA, 19 nt, Artificial Sequence
  Description of Artificial Sequence: Synthetic oligonucleotide
  Antisense strand to SEQ ID NO: 730600
ucuugagugaggcaaucag

SEQ ID NO: 730602 - RNA, 19 nt, Artificial Sequence
  Description of Artificial Sequence: Synthetic oligonucleotide
  Sense strand starting at position 2695 of SEQ ID NO: 586604
gacugucuuuaagaaagag

SEQ ID NO: 730603 - RNA, 19 nt, Artificial Sequence
  Description of Artificial Sequence: Synthetic oligonucleotide
  Antisense strand to SEQ ID NO: 730602
cucuuucuuaaagacaguc

SEQ ID NO: 730604 - RNA, 19 nt, Artificial Sequence
  Description of Artificial Sequence: Synthetic oligonucleotide
  Sense strand starting at position 2778 of SEQ ID NO: 586604
gcacuuaaggaguacgaga

SEQ ID NO: 730605 - RNA, 19 nt, Artificial Sequence
  Description of Artificial Sequence: Synthetic oligonucleotide
  Antisense strand to SEQ ID NO: 730604
ucucguacuccuuaagugc

SEQ ID NO: 730606 - RNA, 19 nt, Artificial Sequence
  Description of Artificial Sequence: Synthetic oligonucleotide
  Sense strand starting at position 3062 of SEQ ID NO: 586604
cuugaauauuucuacggga

SEQ ID NO: 730607 - RNA, 19 nt, Artificial Sequence
  Description of Artificial Sequence: Synthetic oligonucleotide
  Antisense strand to SEQ ID NO: 730606
ucccguagaaauauucaag

SEQ ID NO: 730608 - RNA, 19 nt, Artificial Sequence
  Description of Artificial Sequence: Synthetic oligonucleotide
  Sense strand starting at position 81 of SEQ ID NO: 586605
gaaccuaaauguucggaua

SEQ ID NO: 730609 - RNA, 19 nt, Artificial Sequence
  Description of Artificial Sequence: Synthetic oligonucleotide
  Antisense strand to SEQ ID NO: 730608
uauccgaacauuuagguuc

SEQ ID NO: 730610 - RNA, 19 nt, Artificial Sequence
  Description of Artificial Sequence: Synthetic oligonucleotide
  Sense strand starting at position 83 of SEQ ID NO: 586605
accuaaauguucggauaau

SEQ ID NO: 730611 - RNA, 19 nt, Artificial Sequence
  Description of Artificial Sequence: Synthetic oligonucleotide
  Antisense strand to SEQ ID NO: 730610
auuauccgaacauuuaggu

SEQ ID NO: 730612 - RNA, 19 nt, Artificial Sequence
  Description of Artificial Sequence: Synthetic oligonucleotide
  Sense strand starting at position 84 of SEQ ID NO: 586605
ccuaaauguucggauaauc

SEQ ID NO: 730613 - RNA, 19 nt, Artificial Sequence
  Description of Artificial Sequence: Synthetic oligonucleotide
  Antisense strand to SEQ ID NO: 730612
gauuauccgaacauuuagg

SEQ ID NO: 730614 - RNA, 19 nt, Artificial Sequence
  Description of Artificial Sequence: Synthetic oligonucleotide
  Sense strand starting at position 93 of SEQ ID NO: 586605
ucggauaaucuuuauucua

SEQ ID NO: 730615 - RNA, 19 nt, Artificial Sequence
  Description of Artificial Sequence: Synthetic oligonucleotide
  Antisense strand to SEQ ID NO: 730614
uagaauaaagauuauccga

SEQ ID NO: 730616 - RNA, 19 nt, Artificial Sequence
  Description of Artificial Sequence: Synthetic oligonucleotide
  Sense strand starting at position 95 of SEQ ID NO: 586605
ggauaaucuuuauucuagu

SEQ ID NO: 730617 - RNA, 19 nt, Artificial Sequence
  Description of Artificial Sequence: Synthetic oligonucleotide
  Antisense strand to SEQ ID NO: 730616
acuagaauaaagauuaucc

SEQ ID NO: 730618 - RNA, 19 nt, Artificial Sequence
  Description of Artificial Sequence: Synthetic oligonucleotide
  Sense strand starting at position 101 of SEQ ID NO: 586605
ucuuuauucuaguugcgua

SEQ ID NO: 730619 - RNA, 19 nt, Artificial Sequence
  Description of Artificial Sequence: Synthetic oligonucleotide
  Antisense strand to SEQ ID NO: 730618
uacgcaacuagaauaaaga

SEQ ID NO: 730620 - RNA, 19 nt, Artificial Sequence
  Description of Artificial Sequence: Synthetic oligonucleotide
  Sense strand starting at position 104 of SEQ ID NO: 586605
uuauucuaguugcguagaa

SEQ ID NO: 730621 - RNA, 19 nt, Artificial Sequence
  Description of Artificial Sequence: Synthetic oligonucleotide
  Antisense strand to SEQ ID NO: 730620
uucuacgcaacuagaauaa

SEQ ID NO: 730622 - RNA, 19 nt, Artificial Sequence
  Description of Artificial Sequence: Synthetic oligonucleotide
  Sense strand starting at position 105 of SEQ ID NO: 586605
uauucuaguugcguagaau

SEQ ID NO: 730623 - RNA, 19 nt, Artificial Sequence
  Description of Artificial Sequence: Synthetic oligonucleotide
  Antisense strand to SEQ ID NO: 730622
auucuacgcaacuagaaua

SEQ ID NO: 730624 - RNA, 19 nt, Artificial Sequence
  Description of Artificial Sequence: Synthetic oligonucleotide
  Sense strand starting at position 106 of SEQ ID NO: 586605
auucuaguugcguagaaua

SEQ ID NO: 730625 - RNA, 19 nt, Artificial Sequence
  Description of Artificial Sequence: Synthetic oligonucleotide
  Antisense strand to SEQ ID NO: 730624
uauucuacgcaacuagaau

SEQ ID NO: 730626 - RNA, 19 nt, Artificial Sequence
  Description of Artificial Sequence: Synthetic oligonucleotide
  Sense strand starting at position 108 of SEQ ID NO: 586605
ucuaguugcguagaauaug

SEQ ID NO: 730627 - RNA, 19 nt, Artificial Sequence
  Description of Artificial Sequence: Synthetic oligonucleotide
  Antisense strand to SEQ ID NO: 730626
cauauucuacgcaacuaga

SEQ ID NO: 730628 - RNA, 19 nt, Artificial Sequence
  Description of Artificial Sequence: Synthetic oligonucleotide
  Sense strand starting at position 111 of SEQ ID NO: 586605
aguugcguagaauauguua

SEQ ID NO: 730629 - RNA, 19 nt, Artificial Sequence
  Description of Artificial Sequence: Synthetic oligonucleotide
  Antisense strand to SEQ ID NO: 730628
uaacauauucuacgcaacu

SEQ ID NO: 730630 - RNA, 19 nt, Artificial Sequence
  Description of Artificial Sequence: Synthetic oligonucleotide
  Sense strand starting at position 116 of SEQ ID NO: 586605
cguagaauauguuauggaa

SEQ ID NO: 730631 - RNA, 19 nt, Artificial Sequence
  Description of Artificial Sequence: Synthetic oligonucleotide
  Antisense strand to SEQ ID NO: 730630
uuccauaacauauucuacg

SEQ ID NO: 730632 - RNA, 19 nt, Artificial Sequence
  Description of Artificial Sequence: Synthetic oligonucleotide
  Sense strand starting at position 118 of SEQ ID NO: 586605
uagaauauguuauggaaac

SEQ ID NO: 730633 - RNA, 19 nt, Artificial Sequence
  Description of Artificial Sequence: Synthetic oligonucleotide
  Antisense strand to SEQ ID NO: 730632
guuuccauaacauauucua

SEQ ID NO: 730634 - RNA, 19 nt, Artificial Sequence
  Description of Artificial Sequence: Synthetic oligonucleotide
  Sense strand starting at position 119 of SEQ ID NO: 586605
agaauauguuauggaaaca

SEQ ID NO: 730635 - RNA, 19 nt, Artificial Sequence
  Description of Artificial Sequence: Synthetic oligonucleotide
  Antisense strand to SEQ ID NO: 730634
uguuuccauaacauauucu

SEQ ID NO: 730636 - RNA, 19 nt, Artificial Sequence
  Description of Artificial Sequence: Synthetic oligonucleotide
  Sense strand starting at position 132 of SEQ ID NO: 586605
gaaacaggauguggaaaua

SEQ ID NO: 730637 - RNA, 19 nt, Artificial Sequence
  Description of Artificial Sequence: Synthetic oligonucleotide
  Antisense strand to SEQ ID NO: 730636
uauuuccacauccuguuuc

SEQ ID NO: 730638 - RNA, 19 nt, Artificial Sequence
  Description of Artificial Sequence: Synthetic oligonucleotide
  Sense strand starting at position 160 of SEQ ID NO: 586605
auacaagacugcuaaagau

SEQ ID NO: 730639 - RNA, 19 nt, Artificial Sequence
  Description of Artificial Sequence: Synthetic oligonucleotide
  Antisense strand to SEQ ID NO: 730638
aucuuuagcagucuuguau

SEQ ID NO: 730640 - RNA, 19 nt, Artificial Sequence
  Description of Artificial Sequence: Synthetic oligonucleotide
  Sense strand starting at position 169 of SEQ ID NO: 586605
ugcuaaagauuauacgaaa

SEQ ID NO: 730641 - RNA, 19 nt, Artificial Sequence
  Description of Artificial Sequence: Synthetic oligonucleotide
  Antisense strand to SEQ ID NO: 730640
uuucguauaaucuuuagca

SEQ ID NO: 730642 - RNA, 19 nt, Artificial Sequence
  Description of Artificial Sequence: Synthetic oligonucleotide
  Sense strand starting at position 172 of SEQ ID NO: 586605
uaaagauuauacgaaacga

SEQ ID NO: 730643 - RNA, 19 nt, Artificial Sequence
  Description of Artificial Sequence: Synthetic oligonucleotide
  Antisense strand to SEQ ID NO: 730642
ucguuucguauaaucuuua

SEQ ID NO: 730644 - RNA, 19 nt, Artificial Sequence
  Description of Artificial Sequence: Synthetic oligonucleotide
  Sense strand starting at position 212 of SEQ ID NO: 586605
gugauaauuuacugugucu

SEQ ID NO: 730645 - RNA, 19 nt, Artificial Sequence
  Description of Artificial Sequence: Synthetic oligonucleotide
  Antisense strand to SEQ ID NO: 730644
agacacaguaaauuaucac

SEQ ID NO: 730646 - RNA, 19 nt, Artificial Sequence
  Description of Artificial Sequence: Synthetic oligonucleotide
  Sense strand starting at position 327 of SEQ ID NO: 586605
ugcaaagaacauugugauu

SEQ ID NO: 730647 - RNA, 19 nt, Artificial Sequence
  Description of Artificial Sequence: Synthetic oligonucleotide
  Antisense strand to SEQ ID NO: 730646
aaucacaauguucuuugca

SEQ ID NO: 730648 - RNA, 19 nt, Artificial Sequence
  Description of Artificial Sequence: Synthetic oligonucleotide
  Sense strand starting at position 336 of SEQ ID NO: 586605
cauugugauuuacaugguu

SEQ ID NO: 730649 - RNA, 19 nt, Artificial Sequence
  Description of Artificial Sequence: Synthetic oligonucleotide
  Antisense strand to SEQ ID NO: 730648
aaccauguaaaucacaaug

SEQ ID NO: 730650 - RNA, 19 nt, Artificial Sequence
  Description of Artificial Sequence: Synthetic oligonucleotide
  Sense strand starting at position 401 of SEQ ID NO: 586605
cuuguaguguuucuguaaa

SEQ ID NO: 730651 - RNA, 19 nt, Artificial Sequence
  Description of Artificial Sequence: Synthetic oligonucleotide
  Antisense strand to SEQ ID NO: 730650
uuuacagaaacacuacaag

SEQ ID NO: 730652 - RNA, 19 nt, Artificial Sequence
  Description of Artificial Sequence: Synthetic oligonucleotide
  Sense strand starting at position 453 of SEQ ID NO: 586605
auguccugcugucaaucaa

SEQ ID NO: 730653 - RNA, 19 nt, Artificial Sequence
  Description of Artificial Sequence: Synthetic oligonucleotide
  Antisense strand to SEQ ID NO: 730652
uugauugacagcaggacau

SEQ ID NO: 730654 - RNA, 19 nt, Artificial Sequence
  Description of Artificial Sequence: Synthetic oligonucleotide
  Sense strand starting at position 493 of SEQ ID NO: 586605
gucaccauaucugcuauua

SEQ ID NO: 730655 - RNA, 19 nt, Artificial Sequence
  Description of Artificial Sequence: Synthetic oligonucleotide
  Antisense strand to SEQ ID NO: 730654
uaauagcagauauggugac

SEQ ID NO: 730656 - RNA, 19 nt, Artificial Sequence
  Description of Artificial Sequence: Synthetic oligonucleotide
  Sense strand starting at position 504 of SEQ ID NO: 586605
ugcuauuacucgugagcgu

SEQ ID NO: 730657 - RNA, 19 nt, Artificial Sequence
  Description of Artificial Sequence: Synthetic oligonucleotide
  Antisense strand to SEQ ID NO: 730656
acgcucacgaguaauagca

SEQ ID NO: 730658 - RNA, 19 nt, Artificial Sequence
  Description of Artificial Sequence: Synthetic oligonucleotide
  Sense strand starting at position 517 of SEQ ID NO: 586605
gagcgugcucucgccaaga

SEQ ID NO: 730659 - RNA, 19 nt, Artificial Sequence
  Description of Artificial Sequence: Synthetic oligonucleotide
  Antisense strand to SEQ ID NO: 730658
ucuuggcgagagcacgcuc

SEQ ID NO: 730660 - RNA, 19 nt, Artificial Sequence
  Description of Artificial Sequence: Synthetic oligonucleotide
  Sense strand starting at position 519 of SEQ ID NO: 586605
gcgugcucucgccaagaga

SEQ ID NO: 730661 - RNA, 19 nt, Artificial Sequence
  Description of Artificial Sequence: Synthetic oligonucleotide
  Antisense strand to SEQ ID NO: 730660
ucucuuggcgagagcacgc

SEQ ID NO: 730662 - RNA, 19 nt, Artificial Sequence
  Description of Artificial Sequence: Synthetic oligonucleotide
  Sense strand starting at position 643 of SEQ ID NO: 586605
uuguuuaaaugccugugaa

SEQ ID NO: 730663 - RNA, 19 nt, Artificial Sequence
  Description of Artificial Sequence: Synthetic oligonucleotide
  Antisense strand to SEQ ID NO: 730662
uucacaggcauuuaaacaa

SEQ ID NO: 730664 - RNA, 19 nt, Artificial Sequence
  Description of Artificial Sequence: Synthetic oligonucleotide
  Sense strand starting at position 644 of SEQ ID NO: 586605
uguuuaaaugccugugaau

SEQ ID NO: 730665 - RNA, 19 nt, Artificial Sequence
  Description of Artificial Sequence: Synthetic oligonucleotide
  Antisense strand to SEQ ID NO: 730664
auucacaggcauuuaaaca

SEQ ID NO: 730666 - RNA, 19 nt, Artificial Sequence
  Description of Artificial Sequence: Synthetic oligonucleotide
  Sense strand starting at position 764 of SEQ ID NO: 586605
cgagcucucaaacgucaaa

SEQ ID NO: 730667 - RNA, 19 nt, Artificial Sequence
  Description of Artificial Sequence: Synthetic oligonucleotide
  Antisense strand to SEQ ID NO: 730666
uuugacguuugagagcucg

SEQ ID NO: 730668 - RNA, 19 nt, Artificial Sequence
  Description of Artificial Sequence: Synthetic oligonucleotide
  Sense strand starting at position 936 of SEQ ID NO: 586605
acugcacucuuuguaaagu

SEQ ID NO: 730669 - RNA, 19 nt, Artificial Sequence
  Description of Artificial Sequence: Synthetic oligonucleotide
  Antisense strand to SEQ ID NO: 730668
acuuuacaaagagugcagu

SEQ ID NO: 730670 - RNA, 19 nt, Artificial Sequence
  Description of Artificial Sequence: Synthetic oligonucleotide
  Sense strand starting at position 1143 of SEQ ID NO: 586605
gagcgagugccucaucugu

SEQ ID NO: 730671 - RNA, 19 nt, Artificial Sequence
  Description of Artificial Sequence: Synthetic oligonucleotide
  Antisense strand to SEQ ID NO: 730670
acagaugaggcacucgcuc

SEQ ID NO: 730672 - RNA, 19 nt, Artificial Sequence
  Description of Artificial Sequence: Synthetic oligonucleotide
  Sense strand starting at position 1245 of SEQ ID NO: 586605
caggaaguuugauaaagac

SEQ ID NO: 730673 - RNA, 19 nt, Artificial Sequence
  Description of Artificial Sequence: Synthetic oligonucleotide
  Antisense strand to SEQ ID NO: 730672
gucuuuaucaaacuuccug

SEQ ID NO: 730674 - RNA, 19 nt, Artificial Sequence
  Description of Artificial Sequence: Synthetic oligonucleotide
  Sense strand starting at position 1549 of SEQ ID NO: 586605
ccucuuuguucguguuugu

SEQ ID NO: 730675 - RNA, 19 nt, Artificial Sequence
  Description of Artificial Sequence: Synthetic oligonucleotide
  Antisense strand to SEQ ID NO: 730674
acaaacacgaacaaagagg

SEQ ID NO: 730676 - RNA, 19 nt, Artificial Sequence
  Description of Artificial Sequence: Synthetic oligonucleotide
  Sense strand starting at position 1550 of SEQ ID NO: 586605
cucuuuguucguguuuguu

SEQ ID NO: 730677 - RNA, 19 nt, Artificial Sequence
  Description of Artificial Sequence: Synthetic oligonucleotide
  Antisense strand to SEQ ID NO: 730676
aacaaacacgaacaaagag

SEQ ID NO: 730678 - RNA, 19 nt, Artificial Sequence
  Description of Artificial Sequence: Synthetic oligonucleotide
  Sense strand starting at position 1795 of SEQ ID NO: 586605
uuauuuaccugccguggaa

SEQ ID NO: 730679 - RNA, 19 nt, Artificial Sequence
  Description of Artificial Sequence: Synthetic oligonucleotide
  Antisense strand to SEQ ID NO: 730678
uuccacggcagguaaauaa

SEQ ID NO: 730680 - RNA, 19 nt, Artificial Sequence
  Description of Artificial Sequence: Synthetic oligonucleotide
  Sense strand starting at position 1810 of SEQ ID NO: 586605
ggaaccaguccuugcagau

SEQ ID NO: 730681 - RNA, 19 nt, Artificial Sequence
  Description of Artificial Sequence: Synthetic oligonucleotide
  Antisense strand to SEQ ID NO: 730680
aucugcaaggacugguucc

SEQ ID NO: 730682 - RNA, 19 nt, Artificial Sequence
  Description of Artificial Sequence: Synthetic oligonucleotide
  Sense strand starting at position 1816 of SEQ ID NO: 586605
aguccuugcagauaucgca

SEQ ID NO: 730683 - RNA, 19 nt, Artificial Sequence
  Description of Artificial Sequence: Synthetic oligonucleotide
  Antisense strand to SEQ ID NO: 730682
ugcgauaucugcaaggacu

SEQ ID NO: 730684 - RNA, 19 nt, Artificial Sequence
  Description of Artificial Sequence: Synthetic oligonucleotide
  Sense strand starting at position 1825 of SEQ ID NO: 586605
agauaucgcacucgaucau

SEQ ID NO: 730685 - RNA, 19 nt, Artificial Sequence
  Description of Artificial Sequence: Synthetic oligonucleotide
  Antisense strand to SEQ ID NO: 730684
augaucgagugcgauaucu

SEQ ID NO: 730686 - RNA, 19 nt, Artificial Sequence
  Description of Artificial Sequence: Synthetic oligonucleotide
  Sense strand starting at position 87 of SEQ ID NO: 586606
ugaagagaugcuuguggag

SEQ ID NO: 730687 - RNA, 19 nt, Artificial Sequence
  Description of Artificial Sequence: Synthetic oligonucleotide
  Antisense strand to SEQ ID NO: 730686
cuccacaagcaucucuuca

SEQ ID NO: 730688 - RNA, 19 nt, Artificial Sequence
  Description of Artificial Sequence: Synthetic oligonucleotide
  Sense strand starting at position 129 of SEQ ID NO: 586606
aacugaacauuuggaggaa

SEQ ID NO: 730689 - RNA, 19 nt, Artificial Sequence
  Description of Artificial Sequence: Synthetic oligonucleotide
  Antisense strand to SEQ ID NO: 730688
uuccuccaaauguucaguu

SEQ ID NO: 730690 - RNA, 19 nt, Artificial Sequence
  Description of Artificial Sequence: Synthetic oligonucleotide
  Sense strand starting at position 153 of SEQ ID NO: 586606
aaagauggagcuugcuaaa

SEQ ID NO: 730691 - RNA, 19 nt, Artificial Sequence
  Description of Artificial Sequence: Synthetic oligonucleotide
  Antisense strand to SEQ ID NO: 730690
uuuagcaagcuccaucuuu

SEQ ID NO: 730692 - RNA, 19 nt, Artificial Sequence
  Description of Artificial Sequence: Synthetic oligonucleotide
  Sense strand starting at position 412 of SEQ ID NO: 586606
ucaguuguuccacaacuac

SEQ ID NO: 730693 - RNA, 19 nt, Artificial Sequence
  Description of Artificial Sequence: Synthetic oligonucleotide
  Antisense strand to SEQ ID NO: 730692
guaguuguggaacaacuga

SEQ ID NO: 730694 - RNA, 19 nt, Artificial Sequence
  Description of Artificial Sequence: Synthetic oligonucleotide
  Sense strand starting at position 620 of SEQ ID NO: 586606
ccacacuuguguucccaga

SEQ ID NO: 730695 - RNA, 19 nt, Artificial Sequence
  Description of Artificial Sequence: Synthetic oligonucleotide
  Antisense strand to SEQ ID NO: 730694
ucugggaacacaagugugg

SEQ ID NO: 730696 - RNA, 19 nt, Artificial Sequence
  Description of Artificial Sequence: Synthetic oligonucleotide
  Sense strand starting at position 644 of SEQ ID NO: 586606
gguaaugaucccggagauc

SEQ ID NO: 730697 - RNA, 19 nt, Artificial Sequence
  Description of Artificial Sequence: Synthetic oligonucleotide
  Antisense strand to SEQ ID NO: 730696
gaucuccgggaucauuacc

SEQ ID NO: 730698 - RNA, 19 nt, Artificial Sequence
  Description of Artificial Sequence: Synthetic oligonucleotide
  Sense strand starting at position 948 of SEQ ID NO: 586606
gccacaguucuggaaguug

SEQ ID NO: 730699 - RNA, 19 nt, Artificial Sequence
  Description of Artificial Sequence: Synthetic oligonucleotide
  Antisense strand to SEQ ID NO: 730698
caacuuccagaacuguggc

SEQ ID NO: 730700 - RNA, 19 nt, Artificial Sequence
  Description of Artificial Sequence: Synthetic oligonucleotide
  Sense strand starting at position 953 of SEQ ID NO: 586606
aguucuggaaguuguagaa

SEQ ID NO: 730701 - RNA, 19 nt, Artificial Sequence
  Description of Artificial Sequence: Synthetic oligonucleotide
  Antisense strand to SEQ ID NO: 730700
uucuacaacuuccagaacu

SEQ ID NO: 730702 - RNA, 19 nt, Artificial Sequence
  Description of Artificial Sequence: Synthetic oligonucleotide
  Sense strand starting at position 1079 of SEQ ID NO: 586606
gagugcucugugggaggaa

SEQ ID NO: 730703 - RNA, 19 nt, Artificial Sequence
  Description of Artificial Sequence: Synthetic oligonucleotide
  Antisense strand to SEQ ID NO: 730702
uuccucccacagagcacuc

SEQ ID NO: 730704 - RNA, 19 nt, Artificial Sequence
  Description of Artificial Sequence: Synthetic oligonucleotide
  Sense strand starting at position 1155 of SEQ ID NO: 586606
agagaaugaaucuguuggu

SEQ ID NO: 730705 - RNA, 19 nt, Artificial Sequence
  Description of Artificial Sequence: Synthetic oligonucleotide
  Antisense strand to SEQ ID NO: 730704
accaacagauucauucucu

SEQ ID NO: 730706 - RNA, 19 nt, Artificial Sequence
  Description of Artificial Sequence: Synthetic oligonucleotide
  Sense strand starting at position 1229 of SEQ ID NO: 586606
acuuuaacuccugggagau

SEQ ID NO: 730707 - RNA, 19 nt, Artificial Sequence
  Description of Artificial Sequence: Synthetic oligonucleotide
  Antisense strand to SEQ ID NO: 730706
aucucccaggaguuaaagu

SEQ ID NO: 730708 - RNA, 19 nt, Artificial Sequence
  Description of Artificial Sequence: Synthetic oligonucleotide
  Sense strand starting at position 1230 of SEQ ID NO: 586606
cuuuaacuccugggagaug

SEQ ID NO: 730709 - RNA, 19 nt, Artificial Sequence
  Description of Artificial Sequence: Synthetic oligonucleotide
  Antisense strand to SEQ ID NO: 730708
caucucccaggaguuaaag

SEQ ID NO: 730710 - RNA, 19 nt, Artificial Sequence
  Description of Artificial Sequence: Synthetic oligonucleotide
  Sense strand starting at position 1293 of SEQ ID NO: 586606
caguuaguagaugaguguu

SEQ ID NO: 730711 - RNA, 19 nt, Artificial Sequence
  Description of Artificial Sequence: Synthetic oligonucleotide
  Antisense strand to SEQ ID NO: 730710
aacacucaucuacuaacug

SEQ ID NO: 730712 - RNA, 19 nt, Artificial Sequence
  Description of Artificial Sequence: Synthetic oligonucleotide
  Sense strand starting at position 1301 of SEQ ID NO: 586606
agaugaguguuugugggau

SEQ ID NO: 730713 - RNA, 19 nt, Artificial Sequence
  Description of Artificial Sequence: Synthetic oligonucleotide
  Antisense strand to SEQ ID NO: 730712
aucccacaaacacucaucu

SEQ ID NO: 730714 - RNA, 19 nt, Artificial Sequence
  Description of Artificial Sequence: Synthetic oligonucleotide
  Sense strand starting at position 1331 of SEQ ID NO: 586606
gagugacaacaucagugua

SEQ ID NO: 730715 - RNA, 19 nt, Artificial Sequence
  Description of Artificial Sequence: Synthetic oligonucleotide
  Antisense strand to SEQ ID NO: 730714
uacacugauguugucacuc

SEQ ID NO: 730716 - RNA, 19 nt, Artificial Sequence
  Description of Artificial Sequence: Synthetic oligonucleotide
  Sense strand starting at position 1333 of SEQ ID NO: 586606
gugacaacaucaguguauu

SEQ ID NO: 730717 - RNA, 19 nt, Artificial Sequence
  Description of Artificial Sequence: Synthetic oligonucleotide
  Antisense strand to SEQ ID NO: 730716
aauacacugauguugucac

SEQ ID NO: 730718 - RNA, 19 nt, Artificial Sequence
  Description of Artificial Sequence: Synthetic oligonucleotide
  Sense strand starting at position 1334 of SEQ ID NO: 586606
ugacaacaucaguguauuc

SEQ ID NO: 730719 - RNA, 19 nt, Artificial Sequence
  Description of Artificial Sequence: Synthetic oligonucleotide
  Antisense strand to SEQ ID NO: 730718
gaauacacugauguuguca

SEQ ID NO: 730720 - RNA, 19 nt, Artificial Sequence
  Description of Artificial Sequence: Synthetic oligonucleotide
  Sense strand starting at position 1632 of SEQ ID NO: 586606
gugccauuucucgaucccu

SEQ ID NO: 730721 - RNA, 19 nt, Artificial Sequence
  Description of Artificial Sequence: Synthetic oligonucleotide
  Antisense strand to SEQ ID NO: 730720
agggaucgagaaauggcac

SEQ ID NO: 730722 - RNA, 19 nt, Artificial Sequence
  Description of Artificial Sequence: Synthetic oligonucleotide
  Sense strand starting at position 1883 of SEQ ID NO: 586606
uuccuugauccuggagaag

SEQ ID NO: 730723 - RNA, 19 nt, Artificial Sequence
  Description of Artificial Sequence: Synthetic oligonucleotide
  Antisense strand to SEQ ID NO: 730722
cuucuccaggaucaaggaa

SEQ ID NO: 730724 - RNA, 19 nt, Artificial Sequence
  Description of Artificial Sequence: Synthetic oligonucleotide
  Sense strand starting at position 2234 of SEQ ID NO: 586606
ccgacaaagguuuaguguu

SEQ ID NO: 730725 - RNA, 19 nt, Artificial Sequence
  Description of Artificial Sequence: Synthetic oligonucleotide
  Antisense strand to SEQ ID NO: 730724
aacacuaaaccuuugucgg

SEQ ID NO: 730726 - RNA, 19 nt, Artificial Sequence
  Description of Artificial Sequence: Synthetic oligonucleotide
  Sense strand starting at position 2276 of SEQ ID NO: 586606
agcauuuauugggaaguua

SEQ ID NO: 730727 - RNA, 19 nt, Artificial Sequence
  Description of Artificial Sequence: Synthetic oligonucleotide
  Antisense strand to SEQ ID NO: 730726
uaacuucccaauaaaugcu

SEQ ID NO: 730728 - RNA, 19 nt, Artificial Sequence
  Description of Artificial Sequence: Synthetic oligonucleotide
  Sense strand starting at position 2360 of SEQ ID NO: 586606
uuuggaaagucccuaguca

SEQ ID NO: 730729 - RNA, 19 nt, Artificial Sequence
  Description of Artificial Sequence: Synthetic oligonucleotide
  Antisense strand to SEQ ID NO: 730728
ugacuagggacuuuccaaa

SEQ ID NO: 730730 - RNA, 19 nt, Artificial Sequence
  Description of Artificial Sequence: Synthetic oligonucleotide
  Sense strand starting at position 2523 of SEQ ID NO: 586606
uuuguuugccugggaauuu

SEQ ID NO: 730731 - RNA, 19 nt, Artificial Sequence
  Description of Artificial Sequence: Synthetic oligonucleotide
  Antisense strand to SEQ ID NO: 730730
aaauucccaggcaaacaaa

SEQ ID NO: 730732 - RNA, 19 nt, Artificial Sequence
  Description of Artificial Sequence: Synthetic oligonucleotide
  Sense strand starting at position 2689 of SEQ ID NO: 586606
guuucucucgguguuucau

SEQ ID NO: 730733 - RNA, 19 nt, Artificial Sequence
  Description of Artificial Sequence: Synthetic oligonucleotide
  Antisense strand to SEQ ID NO: 730732
augaaacaccgagagaaac

SEQ ID NO: 730734 - RNA, 19 nt, Artificial Sequence
  Description of Artificial Sequence: Synthetic oligonucleotide
  Sense strand starting at position 2803 of SEQ ID NO: 586606
ccacuuaaacucugaggca

SEQ ID NO: 730735 - RNA, 19 nt, Artificial Sequence
  Description of Artificial Sequence: Synthetic oligonucleotide
  Antisense strand to SEQ ID NO: 730734
ugccucagaguuuaagugg

SEQ ID NO: 730736 - RNA, 19 nt, Artificial Sequence
  Description of Artificial Sequence: Synthetic oligonucleotide
  Sense strand starting at position 3035 of SEQ ID NO: 586606
ccaagaugcuuucuaaaug

SEQ ID NO: 730737 - RNA, 19 nt, Artificial Sequence
  Description of Artificial Sequence: Synthetic oligonucleotide
  Antisense strand to SEQ ID NO: 730736
cauuuagaaagcaucuugg

SEQ ID NO: 730738 - RNA, 19 nt, Artificial Sequence
  Description of Artificial Sequence: Synthetic oligonucleotide
  Sense strand starting at position 3112 of SEQ ID NO: 586606
ccuuaccuguggucugaga

SEQ ID NO: 730739 - RNA, 19 nt, Artificial Sequence
  Description of Artificial Sequence: Synthetic oligonucleotide
  Antisense strand to SEQ ID NO: 730738
ucucagaccacagguaagg

SEQ ID NO: 730740 - RNA, 19 nt, Artificial Sequence
  Description of Artificial Sequence: Synthetic oligonucleotide
  Sense strand starting at position 3114 of SEQ ID NO: 586606
uuaccuguggucugagaga

SEQ ID NO: 730741 - RNA, 19 nt, Artificial Sequence
  Description of Artificial Sequence: Synthetic oligonucleotide
  Antisense strand to SEQ ID NO: 730740
ucucucagaccacagguaa

SEQ ID NO: 730742 - RNA, 19 nt, Artificial Sequence
  Description of Artificial Sequence: Synthetic oligonucleotide
  Sense strand starting at position 3512 of SEQ ID NO: 586606
gaaacagagugguuaguuu

SEQ ID NO: 730743 - RNA, 19 nt, Artificial Sequence
  Description of Artificial Sequence: Synthetic oligonucleotide
  Antisense strand to SEQ ID NO: 730742
aaacuaaccacucuguuuc

SEQ ID NO: 730744 - RNA, 19 nt, Artificial Sequence
  Description of Artificial Sequence: Synthetic oligonucleotide
  Sense strand starting at position 3586 of SEQ ID NO: 586606
ggaagugcguagaaagaaa

SEQ ID NO: 730745 - RNA, 19 nt, Artificial Sequence
  Description of Artificial Sequence: Synthetic oligonucleotide
  Antisense strand to SEQ ID NO: 730744
uuucuuucuacgcacuucc

SEQ ID NO: 730746 - RNA, 19 nt, Artificial Sequence
  Description of Artificial Sequence: Synthetic oligonucleotide
  Sense strand starting at position 3614 of SEQ ID NO: 586606
gaauaaagucauggcaaug

SEQ ID NO: 730747 - RNA, 19 nt, Artificial Sequence
  Description of Artificial Sequence: Synthetic oligonucleotide
  Antisense strand to SEQ ID NO: 730746
cauugccaugacuuuauuc

SEQ ID NO: 730748 - RNA, 19 nt, Artificial Sequence
  Description of Artificial Sequence: Synthetic oligonucleotide
  Sense strand starting at position 3682 of SEQ ID NO: 586606
ugcauuucugcaugacuag

SEQ ID NO: 730749 - RNA, 19 nt, Artificial Sequence
  Description of Artificial Sequence: Synthetic oligonucleotide
  Antisense strand to SEQ ID NO: 730748
cuagucaugcagaaaugca

SEQ ID NO: 730750 - RNA, 19 nt, Artificial Sequence
  Description of Artificial Sequence: Synthetic oligonucleotide
  Sense strand starting at position 3707 of SEQ ID NO: 586606
agugaugccagcgaacaau

SEQ ID NO: 730751 - RNA, 19 nt, Artificial Sequence
  Description of Artificial Sequence: Synthetic oligonucleotide
  Antisense strand to SEQ ID NO: 730750
auuguucgcuggcaucacu

SEQ ID NO: 730752 - RNA, 19 nt, Artificial Sequence
  Description of Artificial Sequence: Synthetic oligonucleotide
  Sense strand starting at position 3713 of SEQ ID NO: 586606
gccagcgaacaauggaauu

SEQ ID NO: 730753 - RNA, 19 nt, Artificial Sequence
  Description of Artificial Sequence: Synthetic oligonucleotide
  Antisense strand to SEQ ID NO: 730752
aauuccauuguucgcuggc

SEQ ID NO: 730754 - RNA, 19 nt, Artificial Sequence
  Description of Artificial Sequence: Synthetic oligonucleotide
  Sense strand starting at position 3779 of SEQ ID NO: 586606
caggauucuagagguguuu

SEQ ID NO: 730755 - RNA, 19 nt, Artificial Sequence
  Description of Artificial Sequence: Synthetic oligonucleotide
  Antisense strand to SEQ ID NO: 730754
aaacaccucuagaauccug

SEQ ID NO: 730756 - RNA, 19 nt, Artificial Sequence
  Description of Artificial Sequence: Synthetic oligonucleotide
  Sense strand starting at position 3937 of SEQ ID NO: 586606
agcugauguuucccuagga

SEQ ID NO: 730757 - RNA, 19 nt, Artificial Sequence
  Description of Artificial Sequence: Synthetic oligonucleotide
  Antisense strand to SEQ ID NO: 730756
uccuagggaaacaucagcu

SEQ ID NO: 730758 - RNA, 19 nt, Artificial Sequence
  Description of Artificial Sequence: Synthetic oligonucleotide
  Sense strand starting at position 3938 of SEQ ID NO: 586606
gcugauguuucccuaggaa

SEQ ID NO: 730759 - RNA, 19 nt, Artificial Sequence
  Description of Artificial Sequence: Synthetic oligonucleotide
  Antisense strand to SEQ ID NO: 730758
uuccuagggaaacaucagc

SEQ ID NO: 730760 - RNA, 19 nt, Artificial Sequence
  Description of Artificial Sequence: Synthetic oligonucleotide
  Sense strand starting at position 3941 of SEQ ID NO: 586606
gauguuucccuaggaagau

SEQ ID NO: 730761 - RNA, 19 nt, Artificial Sequence
  Description of Artificial Sequence: Synthetic oligonucleotide
  Antisense strand to SEQ ID NO: 730760
aucuuccuagggaaacauc

SEQ ID NO: 730762 - RNA, 19 nt, Artificial Sequence
  Description of Artificial Sequence: Synthetic oligonucleotide
  Sense strand starting at position 3966 of SEQ ID NO: 586606
ggagaccacuuagauuuga

SEQ ID NO: 730763 - RNA, 19 nt, Artificial Sequence
  Description of Artificial Sequence: Synthetic oligonucleotide
  Antisense strand to SEQ ID NO: 730762
ucaaaucuaaguggucucc

SEQ ID NO: 730764 - RNA, 19 nt, Artificial Sequence
  Description of Artificial Sequence: Synthetic oligonucleotide
  Sense strand starting at position 3971 of SEQ ID NO: 586606
ccacuuagauuugauaaga

SEQ ID NO: 730765 - RNA, 19 nt, Artificial Sequence
  Description of Artificial Sequence: Synthetic oligonucleotide
  Antisense strand to SEQ ID NO: 730764
ucuuaucaaaucuaagugg

SEQ ID NO: 730766 - RNA, 19 nt, Artificial Sequence
  Description of Artificial Sequence: Synthetic oligonucleotide
  Sense strand starting at position 80 of SEQ ID NO: 586607
ccuguuaaauaguuuauga

SEQ ID NO: 730767 - RNA, 19 nt, Artificial Sequence
  Description of Artificial Sequence: Synthetic oligonucleotide
  Antisense strand to SEQ ID NO: 730766
ucauaaacuauuuaacagg

SEQ ID NO: 730768 - RNA, 19 nt, Artificial Sequence
  Description of Artificial Sequence: Synthetic oligonucleotide
  Sense strand starting at position 328 of SEQ ID NO: 586607
aauguugauugacugcuaa

SEQ ID NO: 730769 - RNA, 19 nt, Artificial Sequence
  Description of Artificial Sequence: Synthetic oligonucleotide
  Antisense strand to SEQ ID NO: 730768
uuagcagucaaucaacauu

SEQ ID NO: 730770 - RNA, 19 nt, Artificial Sequence
  Description of Artificial Sequence: Synthetic oligonucleotide
  Sense strand starting at position 338 of SEQ ID NO: 586607
gacugcuaagauggacaua

SEQ ID NO: 730771 - RNA, 19 nt, Artificial Sequence
  Description of Artificial Sequence: Synthetic oligonucleotide
  Antisense strand to SEQ ID NO: 730770
uauguccaucuuagcaguc

SEQ ID NO: 730772 - RNA, 19 nt, Artificial Sequence
  Description of Artificial Sequence: Synthetic oligonucleotide
  Sense strand starting at position 470 of SEQ ID NO: 586607
ugcacagacuuguuauaga

SEQ ID NO: 730773 - RNA, 19 nt, Artificial Sequence
  Description of Artificial Sequence: Synthetic oligonucleotide
  Antisense strand to SEQ ID NO: 730772
ucuauaacaagucugugca

SEQ ID NO: 730774 - RNA, 19 nt, Artificial Sequence
  Description of Artificial Sequence: Synthetic oligonucleotide
  Sense strand starting at position 489 of SEQ ID NO: 586607
agaaaugaaucugauacag

SEQ ID NO: 730775 - RNA, 19 nt, Artificial Sequence
  Description of Artificial Sequence: Synthetic oligonucleotide
  Antisense strand to SEQ ID NO: 730774
cuguaucagauucauuucu

SEQ ID NO: 730776 - RNA, 19 nt, Artificial Sequence
  Description of Artificial Sequence: Synthetic oligonucleotide
  Sense strand starting at position 652 of SEQ ID NO: 586607
cccuucucucggcaguaaa

SEQ ID NO: 730777 - RNA, 19 nt, Artificial Sequence
  Description of Artificial Sequence: Synthetic oligonucleotide
  Antisense strand to SEQ ID NO: 730776
uuuacugccgagagaaggg

SEQ ID NO: 730778 - RNA, 19 nt, Artificial Sequence
  Description of Artificial Sequence: Synthetic oligonucleotide
  Sense strand starting at position 726 of SEQ ID NO: 586607
uacacaguuggauggaauu

SEQ ID NO: 730779 - RNA, 19 nt, Artificial Sequence
  Description of Artificial Sequence: Synthetic oligonucleotide
  Antisense strand to SEQ ID NO: 730778
aauuccauccaacugugua

SEQ ID NO: 730780 - RNA, 19 nt, Artificial Sequence
  Description of Artificial Sequence: Synthetic oligonucleotide
  Sense strand starting at position 879 of SEQ ID NO: 586607
aggaguugggugugaccua

SEQ ID NO: 730781 - RNA, 19 nt, Artificial Sequence
  Description of Artificial Sequence: Synthetic oligonucleotide
  Antisense strand to SEQ ID NO: 730780
uaggucacacccaacuccu

SEQ ID NO: 730782 - RNA, 19 nt, Artificial Sequence
  Description of Artificial Sequence: Synthetic oligonucleotide
  Sense strand starting at position 886 of SEQ ID NO: 586607
gggugugaccuaggaaaca

SEQ ID NO: 730783 - RNA, 19 nt, Artificial Sequence
  Description of Artificial Sequence: Synthetic oligonucleotide
  Antisense strand to SEQ ID NO: 730782
uguuuccuaggucacaccc

SEQ ID NO: 730784 - RNA, 19 nt, Artificial Sequence
  Description of Artificial Sequence: Synthetic oligonucleotide
  Sense strand starting at position 1447 of SEQ ID NO: 586607
gcgguuggugugaagcaau

SEQ ID NO: 730785 - RNA, 19 nt, Artificial Sequence
  Description of Artificial Sequence: Synthetic oligonucleotide
  Antisense strand to SEQ ID NO: 730784
auugcuucacaccaaccgc

SEQ ID NO: 730786 - RNA, 19 nt, Artificial Sequence
  Description of Artificial Sequence: Synthetic oligonucleotide
  Sense strand starting at position 2136 of SEQ ID NO: 586607
ggaggaaggcuuugagucu

SEQ ID NO: 730787 - RNA, 19 nt, Artificial Sequence
  Description of Artificial Sequence: Synthetic oligonucleotide
  Antisense strand to SEQ ID NO: 730786
agacucaaagccuuccucc

SEQ ID NO: 730788 - RNA, 19 nt, Artificial Sequence
  Description of Artificial Sequence: Synthetic oligonucleotide
  Sense strand starting at position 2164 of SEQ ID NO: 586607
ggcuguugcgagaggucuu

SEQ ID NO: 730789 - RNA, 19 nt, Artificial Sequence
  Description of Artificial Sequence: Synthetic oligonucleotide
  Antisense strand to SEQ ID NO: 730788
aagaccucucgcaacagcc

SEQ ID NO: 730790 - RNA, 19 nt, Artificial Sequence
  Description of Artificial Sequence: Synthetic oligonucleotide
  Sense strand starting at position 2333 of SEQ ID NO: 586607
gcaguaggaugugugauuu

SEQ ID NO: 730791 - RNA, 19 nt, Artificial Sequence
  Description of Artificial Sequence: Synthetic oligonucleotide
  Antisense strand to SEQ ID NO: 730790
aaaucacacauccuacugc

SEQ ID NO: 730792 - RNA, 19 nt, Artificial Sequence
  Description of Artificial Sequence: Synthetic oligonucleotide
  Sense strand starting at position 2343 of SEQ ID NO: 586607
gugugauuugcggaguuca

SEQ ID NO: 730793 - RNA, 19 nt, Artificial Sequence
  Description of Artificial Sequence: Synthetic oligonucleotide
  Antisense strand to SEQ ID NO: 730792
ugaacuccgcaaaucacac

SEQ ID NO: 730794 - RNA, 19 nt, Artificial Sequence
  Description of Artificial Sequence: Synthetic oligonucleotide
  Sense strand starting at position 2450 of SEQ ID NO: 586607
ccaguaguuccuugagauc

SEQ ID NO: 730795 - RNA, 19 nt, Artificial Sequence
  Description of Artificial Sequence: Synthetic oligonucleotide
  Antisense strand to SEQ ID NO: 730794
gaucucaaggaacuacugg

SEQ ID NO: 730796 - RNA, 19 nt, Artificial Sequence
  Description of Artificial Sequence: Synthetic oligonucleotide
  Sense strand starting at position 2494 of SEQ ID NO: 586607
aguucauacccgggacuga

SEQ ID NO: 730797 - RNA, 19 nt, Artificial Sequence
  Description of Artificial Sequence: Synthetic oligonucleotide
  Antisense strand to SEQ ID NO: 730796
ucagucccggguaugaacu

SEQ ID NO: 730798 - RNA, 19 nt, Artificial Sequence
  Description of Artificial Sequence: Synthetic oligonucleotide
  Sense strand starting at position 2635 of SEQ ID NO: 586607
uuccuuugagauugcauau

SEQ ID NO: 730799 - RNA, 19 nt, Artificial Sequence
  Description of Artificial Sequence: Synthetic oligonucleotide
  Antisense strand to SEQ ID NO: 730798
auaugcaaucucaaaggaa

SEQ ID NO: 730800 - RNA, 19 nt, Artificial Sequence
  Description of Artificial Sequence: Synthetic oligonucleotide
  Sense strand starting at position 2641 of SEQ ID NO: 586607
ugagauugcauauggguua

SEQ ID NO: 730801 - RNA, 19 nt, Artificial Sequence
  Description of Artificial Sequence: Synthetic oligonucleotide
  Antisense strand to SEQ ID NO: 730800
uaacccauaugcaaucuca

SEQ ID NO: 730802 - RNA, 19 nt, Artificial Sequence
  Description of Artificial Sequence: Synthetic oligonucleotide
  Sense strand starting at position 2644 of SEQ ID NO: 586607
gauugcauauggguuacau

SEQ ID NO: 730803 - RNA, 19 nt, Artificial Sequence
  Description of Artificial Sequence: Synthetic oligonucleotide
  Antisense strand to SEQ ID NO: 730802
auguaacccauaugcaauc

SEQ ID NO: 730804 - RNA, 19 nt, Artificial Sequence
  Description of Artificial Sequence: Synthetic oligonucleotide
  Sense strand starting at position 2663 of SEQ ID NO: 586607
gguuauugugucgauuucu

SEQ ID NO: 730805 - RNA, 19 nt, Artificial Sequence
  Description of Artificial Sequence: Synthetic oligonucleotide
  Antisense strand to SEQ ID NO: 730804
agaaaucgacacaauaacc

SEQ ID NO: 730806 - RNA, 19 nt, Artificial Sequence
  Description of Artificial Sequence: Synthetic oligonucleotide
  Sense strand starting at position 2669 of SEQ ID NO: 586607
ugugucgauuucucuaguu

SEQ ID NO: 730807 - RNA, 19 nt, Artificial Sequence
  Description of Artificial Sequence: Synthetic oligonucleotide
  Antisense strand to SEQ ID NO: 730806
aacuagagaaaucgacaca

SEQ ID NO: 730808 - RNA, 19 nt, Artificial Sequence
  Description of Artificial Sequence: Synthetic oligonucleotide
  Sense strand starting at position 2781 of SEQ ID NO: 586607
uaggcuguugugcaaauuu

SEQ ID NO: 730809 - RNA, 19 nt, Artificial Sequence
  Description of Artificial Sequence: Synthetic oligonucleotide
  Antisense strand to SEQ ID NO: 730808
aaauuugcacaacagccua

SEQ ID NO: 730810 - RNA, 19 nt, Artificial Sequence
  Description of Artificial Sequence: Synthetic oligonucleotide
  Sense strand starting at position 2860 of SEQ ID NO: 586607
acuuaaaugcugugaagag

SEQ ID NO: 730811 - RNA, 19 nt, Artificial Sequence
  Description of Artificial Sequence: Synthetic oligonucleotide
  Antisense strand to SEQ ID NO: 730810
cucuucacagcauuuaagu

SEQ ID NO: 730812 - RNA, 19 nt, Artificial Sequence
  Description of Artificial Sequence: Synthetic oligonucleotide
  Sense strand starting at position 2949 of SEQ ID NO: 586607
gcaauuagaguuuacuuau

SEQ ID NO: 730813 - RNA, 19 nt, Artificial Sequence
  Description of Artificial Sequence: Synthetic oligonucleotide
  Antisense strand to SEQ ID NO: 730812
auaaguaaacucuaauugc

SEQ ID NO: 730814 - RNA, 19 nt, Artificial Sequence
  Description of Artificial Sequence: Synthetic oligonucleotide
  Sense strand starting at position 3006 of SEQ ID NO: 586607
cuuaaucaucuugggacaa

SEQ ID NO: 730815 - RNA, 19 nt, Artificial Sequence
  Description of Artificial Sequence: Synthetic oligonucleotide
  Antisense strand to SEQ ID NO: 730814
uugucccaagaugauuaag

SEQ ID NO: 730816 - RNA, 19 nt, Artificial Sequence
  Description of Artificial Sequence: Synthetic oligonucleotide
  Sense strand starting at position 3205 of SEQ ID NO: 586607
gugucuuccuaaguaacag

SEQ ID NO: 730817 - RNA, 19 nt, Artificial Sequence
  Description of Artificial Sequence: Synthetic oligonucleotide
  Antisense strand to SEQ ID NO: 730816
cuguuacuuaggaagacac

SEQ ID NO: 730818 - RNA, 19 nt, Artificial Sequence
  Description of Artificial Sequence: Synthetic oligonucleotide
  Sense strand starting at position 3280 of SEQ ID NO: 586607
ugucauucugaagguagua

SEQ ID NO: 730819 - RNA, 19 nt, Artificial Sequence
  Description of Artificial Sequence: Synthetic oligonucleotide
  Antisense strand to SEQ ID NO: 730818
uacuaccuucagaaugaca

SEQ ID NO: 730820 - RNA, 19 nt, Artificial Sequence
  Description of Artificial Sequence: Synthetic oligonucleotide
  Sense strand starting at position 3339 of SEQ ID NO: 586607
uuaggaugugcucagaaau

SEQ ID NO: 730821 - RNA, 19 nt, Artificial Sequence
  Description of Artificial Sequence: Synthetic oligonucleotide
  Antisense strand to SEQ ID NO: 730820
auuucugagcacauccuaa

SEQ ID NO: 730822 - RNA, 19 nt, Artificial Sequence
  Description of Artificial Sequence: Synthetic oligonucleotide
  Sense strand starting at position 3420 of SEQ ID NO: 586607
uuuccuuaauagguaauga

SEQ ID NO: 730823 - RNA, 19 nt, Artificial Sequence
  Description of Artificial Sequence: Synthetic oligonucleotide
  Antisense strand to SEQ ID NO: 730822
ucauuaccuauuaaggaaa

SEQ ID NO: 730824 - RNA, 19 nt, Artificial Sequence
  Description of Artificial Sequence: Synthetic oligonucleotide
  Sense strand starting at position 3462 of SEQ ID NO: 586607
acucuugggugcuuaauua

SEQ ID NO: 730825 - RNA, 19 nt, Artificial Sequence
  Description of Artificial Sequence: Synthetic oligonucleotide
  Antisense strand to SEQ ID NO: 730824
uaauuaagcacccaagagu

SEQ ID NO: 730826 - RNA, 19 nt, Artificial Sequence
  Description of Artificial Sequence: Synthetic oligonucleotide
  Sense strand starting at position 3517 of SEQ ID NO: 586607
ugguacaguugucuaucaa

SEQ ID NO: 730827 - RNA, 19 nt, Artificial Sequence
  Description of Artificial Sequence: Synthetic oligonucleotide
  Antisense strand to SEQ ID NO: 730826
uugauagacaacuguacca

SEQ ID NO: 730828 - RNA, 19 nt, Artificial Sequence
  Description of Artificial Sequence: Synthetic oligonucleotide
  Sense strand starting at position 3518 of SEQ ID NO: 586607
gguacaguugucuaucaac

SEQ ID NO: 730829 - RNA, 19 nt, Artificial Sequence
  Description of Artificial Sequence: Synthetic oligonucleotide
  Antisense strand to SEQ ID NO: 730828
guugauagacaacuguacc

SEQ ID NO: 730830 - RNA, 19 nt, Artificial Sequence
  Description of Artificial Sequence: Synthetic oligonucleotide
  Sense strand starting at position 3576 of SEQ ID NO: 586607
cucucagaaccaugguaca

SEQ ID NO: 730831 - RNA, 19 nt, Artificial Sequence
  Description of Artificial Sequence: Synthetic oligonucleotide
  Antisense strand to SEQ ID NO: 730830
uguaccaugguucugagag

SEQ ID NO: 730832 - RNA, 19 nt, Artificial Sequence
  Description of Artificial Sequence: Synthetic oligonucleotide
  Sense strand starting at position 3689 of SEQ ID NO: 586607
cguauuagggcuuaauuau

SEQ ID NO: 730833 - RNA, 19 nt, Artificial Sequence
  Description of Artificial Sequence: Synthetic oligonucleotide
  Antisense strand to SEQ ID NO: 730832
auaauuaagcccuaauacg

SEQ ID NO: 730834 - RNA, 19 nt, Artificial Sequence
  Description of Artificial Sequence: Synthetic oligonucleotide
  Sense strand starting at position 3711 of SEQ ID NO: 586607
gguaacuccaguugagaaa

SEQ ID NO: 730835 - RNA, 19 nt, Artificial Sequence
  Description of Artificial Sequence: Synthetic oligonucleotide
  Antisense strand to SEQ ID NO: 730834
uuucucaacuggaguuacc

SEQ ID NO: 730836 - RNA, 19 nt, Artificial Sequence
  Description of Artificial Sequence: Synthetic oligonucleotide
  Sense strand starting at position 3718 of SEQ ID NO: 586607
ccaguugagaaagguuaca

SEQ ID NO: 730837 - RNA, 19 nt, Artificial Sequence
  Description of Artificial Sequence: Synthetic oligonucleotide
  Antisense strand to SEQ ID NO: 730836
uguaaccuuucucaacugg

SEQ ID NO: 730838 - RNA, 19 nt, Artificial Sequence
  Description of Artificial Sequence: Synthetic oligonucleotide
  Sense strand starting at position 3730 of SEQ ID NO: 586607
gguuacaaucaugguaaac

SEQ ID NO: 730839 - RNA, 19 nt, Artificial Sequence
  Description of Artificial Sequence: Synthetic oligonucleotide
  Antisense strand to SEQ ID NO: 730838
guuuaccaugauuguaacc

SEQ ID NO: 730840 - RNA, 19 nt, Artificial Sequence
  Description of Artificial Sequence: Synthetic oligonucleotide
  Sense strand starting at position 3880 of SEQ ID NO: 586607
uacucauaacgucaagagu

SEQ ID NO: 730841 - RNA, 19 nt, Artificial Sequence
  Description of Artificial Sequence: Synthetic oligonucleotide
  Antisense strand to SEQ ID NO: 730840
acucuugacguuaugagua

SEQ ID NO: 730842 - RNA, 19 nt, Artificial Sequence
  Description of Artificial Sequence: Synthetic oligonucleotide
  Sense strand starting at position 3915 of SEQ ID NO: 586607
aggugauagucaucccagu

SEQ ID NO: 730843 - RNA, 19 nt, Artificial Sequence
  Description of Artificial Sequence: Synthetic oligonucleotide
  Antisense strand to SEQ ID NO: 730842
acugggaugacuaucaccu

SEQ ID NO: 730844 - RNA, 19 nt, Artificial Sequence
  Description of Artificial Sequence: Synthetic oligonucleotide
  Sense strand starting at position 3956 of SEQ ID NO: 586607
cagagugaaguguaccaau

SEQ ID NO: 730845 - RNA, 19 nt, Artificial Sequence
  Description of Artificial Sequence: Synthetic oligonucleotide
  Antisense strand to SEQ ID NO: 730844
auugguacacuucacucug

SEQ ID NO: 730846 - RNA, 19 nt, Artificial Sequence
  Description of Artificial Sequence: Synthetic oligonucleotide
  Sense strand starting at position 2 of SEQ ID NO: 586608
aauaaugugcacugugaca

SEQ ID NO: 730847 - RNA, 19 nt, Artificial Sequence
  Description of Artificial Sequence: Synthetic oligonucleotide
  Antisense strand to SEQ ID NO: 730846
ugucacagugcacauuauu

SEQ ID NO: 730848 - RNA, 19 nt, Artificial Sequence
  Description of Artificial Sequence: Synthetic oligonucleotide
  Sense strand starting at position 40 of SEQ ID NO: 586608
aggcauugauucucaugga

SEQ ID NO: 730849 - RNA, 19 nt, Artificial Sequence
  Description of Artificial Sequence: Synthetic oligonucleotide
  Antisense strand to SEQ ID NO: 730848
uccaugagaaucaaugccu

SEQ ID NO: 730850 - RNA, 19 nt, Artificial Sequence
  Description of Artificial Sequence: Synthetic oligonucleotide
  Sense strand starting at position 154 of SEQ ID NO: 586608
agaacuaucuuguccaaag

SEQ ID NO: 730851 - RNA, 19 nt, Artificial Sequence
  Description of Artificial Sequence: Synthetic oligonucleotide
  Antisense strand to SEQ ID NO: 730850
cuuuggacaagauaguucu

SEQ ID NO: 730852 - RNA, 19 nt, Artificial Sequence
  Description of Artificial Sequence: Synthetic oligonucleotide
  Sense strand starting at position 504 of SEQ ID NO: 586608
ugagaaaccuugcuccaua

SEQ ID NO: 730853 - RNA, 19 nt, Artificial Sequence
  Description of Artificial Sequence: Synthetic oligonucleotide
  Antisense strand to SEQ ID NO: 730852
uauggagcaagguuucuca

SEQ ID NO: 730854 - RNA, 19 nt, Artificial Sequence
  Description of Artificial Sequence: Synthetic oligonucleotide
  Sense strand starting at position 516 of SEQ ID NO: 586608
cuccauauuuaggagguau

SEQ ID NO: 730855 - RNA, 19 nt, Artificial Sequence
  Description of Artificial Sequence: Synthetic oligonucleotide
  Antisense strand to SEQ ID NO: 730854
auaccuccuaaauauggag

SEQ ID NO: 730856 - RNA, 19 nt, Artificial Sequence
  Description of Artificial Sequence: Synthetic oligonucleotide
  Sense strand starting at position 644 of SEQ ID NO: 586608
aucucagauccuggaacua

SEQ ID NO: 730857 - RNA, 19 nt, Artificial Sequence
  Description of Artificial Sequence: Synthetic oligonucleotide
  Antisense strand to SEQ ID NO: 730856
uaguuccaggaucugagau

SEQ ID NO: 730858 - RNA, 19 nt, Artificial Sequence
  Description of Artificial Sequence: Synthetic oligonucleotide
  Sense strand starting at position 656 of SEQ ID NO: 586608
ggaacuauguuuccuguca

SEQ ID NO: 730859 - RNA, 19 nt, Artificial Sequence
  Description of Artificial Sequence: Synthetic oligonucleotide
  Antisense strand to SEQ ID NO: 730858
ugacaggaaacauaguucc

SEQ ID NO: 730860 - RNA, 19 nt, Artificial Sequence
  Description of Artificial Sequence: Synthetic oligonucleotide
  Sense strand starting at position 680 of SEQ ID NO: 586608
aaugauauacaucguggca

SEQ ID NO: 730861 - RNA, 19 nt, Artificial Sequence
  Description of Artificial Sequence: Synthetic oligonucleotide
  Antisense strand to SEQ ID NO: 730860
ugccacgauguauaucauu

SEQ ID NO: 730862 - RNA, 19 nt, Artificial Sequence
  Description of Artificial Sequence: Synthetic oligonucleotide
  Sense strand starting at position 809 of SEQ ID NO: 586608
caguuagaaugcucacaga

SEQ ID NO: 730863 - RNA, 19 nt, Artificial Sequence
  Description of Artificial Sequence: Synthetic oligonucleotide
  Antisense strand to SEQ ID NO: 730862
ucugugagcauucuaacug

SEQ ID NO: 730864 - RNA, 19 nt, Artificial Sequence
  Description of Artificial Sequence: Synthetic oligonucleotide
  Sense strand starting at position 960 of SEQ ID NO: 586608
agaaauguuugcguacaga

SEQ ID NO: 730865 - RNA, 19 nt, Artificial Sequence
  Description of Artificial Sequence: Synthetic oligonucleotide
  Antisense strand to SEQ ID NO: 730864
ucuguacgcaaacauuucu

SEQ ID NO: 730866 - RNA, 19 nt, Artificial Sequence
  Description of Artificial Sequence: Synthetic oligonucleotide
  Sense strand starting at position 963 of SEQ ID NO: 586608
aauguuugcguacagaauc

SEQ ID NO: 730867 - RNA, 19 nt, Artificial Sequence
  Description of Artificial Sequence: Synthetic oligonucleotide
  Antisense strand to SEQ ID NO: 730866
gauucuguacgcaaacauu

SEQ ID NO: 730868 - RNA, 19 nt, Artificial Sequence
  Description of Artificial Sequence: Synthetic oligonucleotide
  Sense strand starting at position 1083 of SEQ ID NO: 586608
ugugcucccagagauugaa

SEQ ID NO: 730869 - RNA, 19 nt, Artificial Sequence
  Description of Artificial Sequence: Synthetic oligonucleotide
  Antisense strand to SEQ ID NO: 730868
uucaaucucugggagcaca

SEQ ID NO: 730870 - RNA, 19 nt, Artificial Sequence
  Description of Artificial Sequence: Synthetic oligonucleotide
  Sense strand starting at position 1121 of SEQ ID NO: 586608
gguaaacuuccagacuuuc

SEQ ID NO: 730871 - RNA, 19 nt, Artificial Sequence
  Description of Artificial Sequence: Synthetic oligonucleotide
  Antisense strand to SEQ ID NO: 730870
gaaagucuggaaguuuacc

SEQ ID NO: 730872 - RNA, 19 nt, Artificial Sequence
  Description of Artificial Sequence: Synthetic oligonucleotide
  Sense strand starting at position 1177 of SEQ ID NO: 586608
ugguauaauccguacugua

SEQ ID NO: 730873 - RNA, 19 nt, Artificial Sequence
  Description of Artificial Sequence: Synthetic oligonucleotide
  Antisense strand to SEQ ID NO: 730872
uacaguacggauuauacca

SEQ ID NO: 730874 - RNA, 19 nt, Artificial Sequence
  Description of Artificial Sequence: Synthetic oligonucleotide
  Sense strand starting at position 1227 of SEQ ID NO: 586608
guucucacuguuuaagaau

SEQ ID NO: 730875 - RNA, 19 nt, Artificial Sequence
  Description of Artificial Sequence: Synthetic oligonucleotide
  Antisense strand to SEQ ID NO: 730874
auucuuaaacagugagaac

SEQ ID NO: 730876 - RNA, 19 nt, Artificial Sequence
  Description of Artificial Sequence: Synthetic oligonucleotide
  Sense strand starting at position 1297 of SEQ ID NO: 586608
guguucuuucgcuuagcuu

SEQ ID NO: 730877 - RNA, 19 nt, Artificial Sequence
  Description of Artificial Sequence: Synthetic oligonucleotide
  Antisense strand to SEQ ID NO: 730876
aagcuaagcgaaagaacac

SEQ ID NO: 730878 - RNA, 19 nt, Artificial Sequence
  Description of Artificial Sequence: Synthetic oligonucleotide
  Sense strand starting at position 1392 of SEQ ID NO: 586608
uuuggauuguaccuuugua

SEQ ID NO: 730879 - RNA, 19 nt, Artificial Sequence
  Description of Artificial Sequence: Synthetic oligonucleotide
  Antisense strand to SEQ ID NO: 730878
uacaaagguacaauccaaa

SEQ ID NO: 730880 - RNA, 19 nt, Artificial Sequence
  Description of Artificial Sequence: Synthetic oligonucleotide
  Sense strand starting at position 1396 of SEQ ID NO: 586608
gauuguaccuuuguaagac

SEQ ID NO: 730881 - RNA, 19 nt, Artificial Sequence
  Description of Artificial Sequence: Synthetic oligonucleotide
  Antisense strand to SEQ ID NO: 730880
gucuuacaaagguacaauc

SEQ ID NO: 730882 - RNA, 19 nt, Artificial Sequence
  Description of Artificial Sequence: Synthetic oligonucleotide
  Sense strand starting at position 1415 of SEQ ID NO: 586608
cagcaaccggucuaauauu

SEQ ID NO: 730883 - RNA, 19 nt, Artificial Sequence
  Description of Artificial Sequence: Synthetic oligonucleotide
  Antisense strand to SEQ ID NO: 730882
aauauuagaccgguugcug

SEQ ID NO: 730884 - RNA, 19 nt, Artificial Sequence
  Description of Artificial Sequence: Synthetic oligonucleotide
  Sense strand starting at position 1469 of SEQ ID NO: 586608
acugauaauaagugacgaa

SEQ ID NO: 730885 - RNA, 19 nt, Artificial Sequence
  Description of Artificial Sequence: Synthetic oligonucleotide
  Antisense strand to SEQ ID NO: 730884
uucgucacuuauuaucagu

SEQ ID NO: 730886 - RNA, 19 nt, Artificial Sequence
  Description of Artificial Sequence: Synthetic oligonucleotide
  Sense strand starting at position 2199 of SEQ ID NO: 586608
acgcauauugacugaucuu

SEQ ID NO: 730887 - RNA, 19 nt, Artificial Sequence
  Description of Artificial Sequence: Synthetic oligonucleotide
  Antisense strand to SEQ ID NO: 730886
aagaucagucaauaugcgu

SEQ ID NO: 730888 - RNA, 19 nt, Artificial Sequence
  Description of Artificial Sequence: Synthetic oligonucleotide
  Sense strand starting at position 2343 of SEQ ID NO: 586608
acacguuuaggaugagcua

SEQ ID NO: 730889 - RNA, 19 nt, Artificial Sequence
  Description of Artificial Sequence: Synthetic oligonucleotide
  Antisense strand to SEQ ID NO: 730888
uagcucauccuaaacgugu

SEQ ID NO: 730890 - RNA, 19 nt, Artificial Sequence
  Description of Artificial Sequence: Synthetic oligonucleotide
  Sense strand starting at position 2358 of SEQ ID NO: 586608
gcuaguaagaguggaaagu

SEQ ID NO: 730891 - RNA, 19 nt, Artificial Sequence
  Description of Artificial Sequence: Synthetic oligonucleotide
  Antisense strand to SEQ ID NO: 730890
acuuuccacucuuacuagc

SEQ ID NO: 730892 - RNA, 19 nt, Artificial Sequence
  Description of Artificial Sequence: Synthetic oligonucleotide
  Sense strand starting at position 2747 of SEQ ID NO: 586608
gcuugaguccgagagguga

SEQ ID NO: 730893 - RNA, 19 nt, Artificial Sequence
  Description of Artificial Sequence: Synthetic oligonucleotide
  Antisense strand to SEQ ID NO: 730892
ucaccucucggacucaagc

SEQ ID NO: 730894 - RNA, 19 nt, Artificial Sequence
  Description of Artificial Sequence: Synthetic oligonucleotide
  Sense strand starting at position 2751 of SEQ ID NO: 586608
gaguccgagaggugagaau

SEQ ID NO: 730895 - RNA, 19 nt, Artificial Sequence
  Description of Artificial Sequence: Synthetic oligonucleotide
  Antisense strand to SEQ ID NO: 730894
auucucaccucucggacuc

SEQ ID NO: 730896 - RNA, 19 nt, Artificial Sequence
  Description of Artificial Sequence: Synthetic oligonucleotide
  Sense strand starting at position 2763 of SEQ ID NO: 586608
ugagaauguagugagccau

SEQ ID NO: 730897 - RNA, 19 nt, Artificial Sequence
  Description of Artificial Sequence: Synthetic oligonucleotide
  Antisense strand to SEQ ID NO: 730896
auggcucacuacauucuca

SEQ ID NO: 730898 - RNA, 19 nt, Artificial Sequence
  Description of Artificial Sequence: Synthetic oligonucleotide
  Sense strand starting at position 2917 of SEQ ID NO: 586608
gcaggcuuugaggauauca

SEQ ID NO: 730899 - RNA, 19 nt, Artificial Sequence
  Description of Artificial Sequence: Synthetic oligonucleotide
  Antisense strand to SEQ ID NO: 730898
ugauauccucaaagccugc

SEQ ID NO: 730900 - RNA, 19 nt, Artificial Sequence
  Description of Artificial Sequence: Synthetic oligonucleotide
  Sense strand starting at position 2981 of SEQ ID NO: 586608
ugagauagugcuggcaacu

SEQ ID NO: 730901 - RNA, 19 nt, Artificial Sequence
  Description of Artificial Sequence: Synthetic oligonucleotide
  Antisense strand to SEQ ID NO: 730900
aguugccagcacuaucuca

SEQ ID NO: 730902 - RNA, 19 nt, Artificial Sequence
  Description of Artificial Sequence: Synthetic oligonucleotide
  Sense strand starting at position 3106 of SEQ ID NO: 586608
accgucacacccugagaau

SEQ ID NO: 730903 - RNA, 19 nt, Artificial Sequence
  Description of Artificial Sequence: Synthetic oligonucleotide
  Antisense strand to SEQ ID NO: 730902
auucucagggugugacggu

SEQ ID NO: 730904 - RNA, 19 nt, Artificial Sequence
  Description of Artificial Sequence: Synthetic oligonucleotide
  Sense strand starting at position 3305 of SEQ ID NO: 586608
ccaccucuugucuggauua

SEQ ID NO: 730905 - RNA, 19 nt, Artificial Sequence
  Description of Artificial Sequence: Synthetic oligonucleotide
  Antisense strand to SEQ ID NO: 730904
uaauccagacaagaggugg

SEQ ID NO: 730906 - RNA, 19 nt, Artificial Sequence
  Description of Artificial Sequence: Synthetic oligonucleotide
  Sense strand starting at position 3307 of SEQ ID NO: 586608
accucuugucuggauuaug

SEQ ID NO: 730907 - RNA, 19 nt, Artificial Sequence
  Description of Artificial Sequence: Synthetic oligonucleotide
  Antisense strand to SEQ ID NO: 730906
cauaauccagacaagaggu

SEQ ID NO: 730908 - RNA, 19 nt, Artificial Sequence
  Description of Artificial Sequence: Synthetic oligonucleotide
  Sense strand starting at position 3333 of SEQ ID NO: 586608
ucuagacagucucuguauu

SEQ ID NO: 730909 - RNA, 19 nt, Artificial Sequence
  Description of Artificial Sequence: Synthetic oligonucleotide
  Antisense strand to SEQ ID NO: 730908
aauacagagacugucuaga

SEQ ID NO: 730910 - RNA, 19 nt, Artificial Sequence
  Description of Artificial Sequence: Synthetic oligonucleotide
  Sense strand starting at position 3384 of SEQ ID NO: 586608
acucauuggccagagugaa

SEQ ID NO: 730911 - RNA, 19 nt, Artificial Sequence
  Description of Artificial Sequence: Synthetic oligonucleotide
  Antisense strand to SEQ ID NO: 730910
uucacucuggccaaugagu

SEQ ID NO: 730912 - RNA, 19 nt, Artificial Sequence
  Description of Artificial Sequence: Synthetic oligonucleotide
  Sense strand starting at position 3460 of SEQ ID NO: 586608
ugugaaguccuuuaugacc

SEQ ID NO: 730913 - RNA, 19 nt, Artificial Sequence
  Description of Artificial Sequence: Synthetic oligonucleotide
  Antisense strand to SEQ ID NO: 730912
ggucauaaaggacuucaca

SEQ ID NO: 730914 - RNA, 19 nt, Artificial Sequence
  Description of Artificial Sequence: Synthetic oligonucleotide
  Sense strand starting at position 3625 of SEQ ID NO: 586608
cucagauauccgcaggacu

SEQ ID NO: 730915 - RNA, 19 nt, Artificial Sequence
  Description of Artificial Sequence: Synthetic oligonucleotide
  Antisense strand to SEQ ID NO: 730914
aguccugcggauaucugag

SEQ ID NO: 730916 - RNA, 19 nt, Artificial Sequence
  Description of Artificial Sequence: Synthetic oligonucleotide
  Sense strand starting at position 3627 of SEQ ID NO: 586608
cagauauccgcaggacuag

SEQ ID NO: 730917 - RNA, 19 nt, Artificial Sequence
  Description of Artificial Sequence: Synthetic oligonucleotide
  Antisense strand to SEQ ID NO: 730916
cuaguccugcggauaucug

SEQ ID NO: 730918 - RNA, 19 nt, Artificial Sequence
  Description of Artificial Sequence: Synthetic oligonucleotide
  Sense strand starting at position 3917 of SEQ ID NO: 586608
uguaguagguccuuaauaa

SEQ ID NO: 730919 - RNA, 19 nt, Artificial Sequence
  Description of Artificial Sequence: Synthetic oligonucleotide
  Antisense strand to SEQ ID NO: 730918
uuauuaaggaccuacuaca

SEQ ID NO: 730920 - RNA, 19 nt, Artificial Sequence
  Description of Artificial Sequence: Synthetic oligonucleotide
  Sense strand starting at position 3918 of SEQ ID NO: 586608
guaguagguccuuaauaaa

SEQ ID NO: 730921 - RNA, 19 nt, Artificial Sequence
  Description of Artificial Sequence: Synthetic oligonucleotide
  Antisense strand to SEQ ID NO: 730920
uuuauuaaggaccuacuac

SEQ ID NO: 730922 - RNA, 19 nt, Artificial Sequence
  Description of Artificial Sequence: Synthetic oligonucleotide
  Sense strand starting at position 3964 of SEQ ID NO: 586608
aacagaaagugugugcauu

SEQ ID NO: 730923 - RNA, 19 nt, Artificial Sequence
  Description of Artificial Sequence: Synthetic oligonucleotide
  Antisense strand to SEQ ID NO: 730922
aaugcacacacuuucuguu

SEQ ID NO: 730924 - RNA, 19 nt, Artificial Sequence
  Description of Artificial Sequence: Synthetic oligonucleotide
  Sense strand starting at position 3965 of SEQ ID NO: 586608
acagaaagugugugcauuu

SEQ ID NO: 730925 - RNA, 19 nt, Artificial Sequence
  Description of Artificial Sequence: Synthetic oligonucleotide
  Antisense strand to SEQ ID NO: 730924
aaaugcacacacuuucugu

SEQ ID NO: 730926 - RNA, 19 nt, Artificial Sequence
  Description of Artificial Sequence: Synthetic oligonucleotide
  Sense strand starting at position 5 of SEQ ID NO: 586609
cuacaaugauuguuauggu

SEQ ID NO: 730927 - RNA, 19 nt, Artificial Sequence
  Description of Artificial Sequence: Synthetic oligonucleotide
  Antisense strand to SEQ ID NO: 730926
accauaacaaucauuguag

SEQ ID NO: 730928 - RNA, 19 nt, Artificial Sequence
  Description of Artificial Sequence: Synthetic oligonucleotide
  Sense strand starting at position 13 of SEQ ID NO: 586609
auuguuaugguuugggaaa

SEQ ID NO: 730929 - RNA, 19 nt, Artificial Sequence
  Description of Artificial Sequence: Synthetic oligonucleotide
  Antisense strand to SEQ ID NO: 730928
uuucccaaaccauaacaau

SEQ ID NO: 730930 - RNA, 19 nt, Artificial Sequence
  Description of Artificial Sequence: Synthetic oligonucleotide
  Sense strand starting at position 62 of SEQ ID NO: 586609
aauaaugugcacugugaca

SEQ ID NO: 730931 - RNA, 19 nt, Artificial Sequence
  Description of Artificial Sequence: Synthetic oligonucleotide
  Antisense strand to SEQ ID NO: 730930
ugucacagugcacauuauu

SEQ ID NO: 730932 - RNA, 19 nt, Artificial Sequence
  Description of Artificial Sequence: Synthetic oligonucleotide
  Sense strand starting at position 100 of SEQ ID NO: 586609
aggcauugauucucaugga

SEQ ID NO: 730933 - RNA, 19 nt, Artificial Sequence
  Description of Artificial Sequence: Synthetic oligonucleotide
  Antisense strand to SEQ ID NO: 730932
uccaugagaaucaaugccu

SEQ ID NO: 730934 - RNA, 19 nt, Artificial Sequence
  Description of Artificial Sequence: Synthetic oligonucleotide
  Sense strand starting at position 214 of SEQ ID NO: 586609
agaacuaucuuguccaaag

SEQ ID NO: 730935 - RNA, 19 nt, Artificial Sequence
  Description of Artificial Sequence: Synthetic oligonucleotide
  Antisense strand to SEQ ID NO: 730934
cuuuggacaagauaguucu

SEQ ID NO: 730936 - RNA, 19 nt, Artificial Sequence
  Description of Artificial Sequence: Synthetic oligonucleotide
  Sense strand starting at position 564 of SEQ ID NO: 586609
ugagaaaccuugcuccaua

SEQ ID NO: 730937 - RNA, 19 nt, Artificial Sequence
  Description of Artificial Sequence: Synthetic oligonucleotide
  Antisense strand to SEQ ID NO: 730936
uauggagcaagguuucuca

SEQ ID NO: 730938 - RNA, 19 nt, Artificial Sequence
  Description of Artificial Sequence: Synthetic oligonucleotide
  Sense strand starting at position 576 of SEQ ID NO: 586609
cuccauauuuaggagguau

SEQ ID NO: 730939 - RNA, 19 nt, Artificial Sequence
  Description of Artificial Sequence: Synthetic oligonucleotide
  Antisense strand to SEQ ID NO: 730938
auaccuccuaaauauggag

SEQ ID NO: 730940 - RNA, 19 nt, Artificial Sequence
  Description of Artificial Sequence: Synthetic oligonucleotide
  Sense strand starting at position 704 of SEQ ID NO: 586609
aucucagauccuggaacua

SEQ ID NO: 730941 - RNA, 19 nt, Artificial Sequence
  Description of Artificial Sequence: Synthetic oligonucleotide
  Antisense strand to SEQ ID NO: 730940
uaguuccaggaucugagau

SEQ ID NO: 730942 - RNA, 19 nt, Artificial Sequence
  Description of Artificial Sequence: Synthetic oligonucleotide
  Sense strand starting at position 716 of SEQ ID NO: 586609
ggaacuauguuuccuguca

SEQ ID NO: 730943 - RNA, 19 nt, Artificial Sequence
  Description of Artificial Sequence: Synthetic oligonucleotide
  Antisense strand to SEQ ID NO: 730942
ugacaggaaacauaguucc

SEQ ID NO: 730944 - RNA, 19 nt, Artificial Sequence
  Description of Artificial Sequence: Synthetic oligonucleotide
  Sense strand starting at position 740 of SEQ ID NO: 586609
aaugauauacaucguggca

SEQ ID NO: 730945 - RNA, 19 nt, Artificial Sequence
  Description of Artificial Sequence: Synthetic oligonucleotide
  Antisense strand to SEQ ID NO: 730944
ugccacgauguauaucauu

SEQ ID NO: 730946 - RNA, 19 nt, Artificial Sequence
  Description of Artificial Sequence: Synthetic oligonucleotide
  Sense strand starting at position 869 of SEQ ID NO: 586609
caguuagaaugcucacaga

SEQ ID NO: 730947 - RNA, 19 nt, Artificial Sequence
  Description of Artificial Sequence: Synthetic oligonucleotide
  Antisense strand to SEQ ID NO: 730946
ucugugagcauucuaacug

SEQ ID NO: 730948 - RNA, 19 nt, Artificial Sequence
  Description of Artificial Sequence: Synthetic oligonucleotide
  Sense strand starting at position 1020 of SEQ ID NO: 586609
agaaauguuugcguacaga

SEQ ID NO: 730949 - RNA, 19 nt, Artificial Sequence
  Description of Artificial Sequence: Synthetic oligonucleotide
  Antisense strand to SEQ ID NO: 730948
ucuguacgcaaacauuucu

SEQ ID NO: 730950 - RNA, 19 nt, Artificial Sequence
  Description of Artificial Sequence: Synthetic oligonucleotide
  Sense strand starting at position 1023 of SEQ ID NO: 586609
aauguuugcguacagaauc

SEQ ID NO: 730951 - RNA, 19 nt, Artificial Sequence
  Description of Artificial Sequence: Synthetic oligonucleotide
  Antisense strand to SEQ ID NO: 730950
gauucuguacgcaaacauu

SEQ ID NO: 730952 - RNA, 19 nt, Artificial Sequence
  Description of Artificial Sequence: Synthetic oligonucleotide
  Sense strand starting at position 1143 of SEQ ID NO: 586609
ugugcucccagagauugaa

SEQ ID NO: 730953 - RNA, 19 nt, Artificial Sequence
  Description of Artificial Sequence: Synthetic oligonucleotide
  Antisense strand to SEQ ID NO: 730952
uucaaucucugggagcaca

SEQ ID NO: 730954 - RNA, 19 nt, Artificial Sequence
  Description of Artificial Sequence: Synthetic oligonucleotide
  Sense strand starting at position 1181 of SEQ ID NO: 586609
gguaaacuuccagacuuuc

SEQ ID NO: 730955 - RNA, 19 nt, Artificial Sequence
  Description of Artificial Sequence: Synthetic oligonucleotide
  Antisense strand to SEQ ID NO: 730954
gaaagucuggaaguuuacc

SEQ ID NO: 730956 - RNA, 19 nt, Artificial Sequence
  Description of Artificial Sequence: Synthetic oligonucleotide
  Sense strand starting at position 1237 of SEQ ID NO: 586609
ugguauaauccguacugua

SEQ ID NO: 730957 - RNA, 19 nt, Artificial Sequence
  Description of Artificial Sequence: Synthetic oligonucleotide
  Antisense strand to SEQ ID NO: 730956
uacaguacggauuauacca

SEQ ID NO: 730958 - RNA, 19 nt, Artificial Sequence
  Description of Artificial Sequence: Synthetic oligonucleotide
  Sense strand starting at position 1287 of SEQ ID NO: 586609
guucucacuguuuaagaau

SEQ ID NO: 730959 - RNA, 19 nt, Artificial Sequence
  Description of Artificial Sequence: Synthetic oligonucleotide
  Antisense strand to SEQ ID NO: 730958
auucuuaaacagugagaac

SEQ ID NO: 730960 - RNA, 19 nt, Artificial Sequence
  Description of Artificial Sequence: Synthetic oligonucleotide
  Sense strand starting at position 1357 of SEQ ID NO: 586609
guguucuuucgcuuagcuu

SEQ ID NO: 730961 - RNA, 19 nt, Artificial Sequence
  Description of Artificial Sequence: Synthetic oligonucleotide
  Antisense strand to SEQ ID NO: 730960
aagcuaagcgaaagaacac

SEQ ID NO: 730962 - RNA, 19 nt, Artificial Sequence
  Description of Artificial Sequence: Synthetic oligonucleotide
  Sense strand starting at position 1452 of SEQ ID NO: 586609
uuuggauuguaccuuugua

SEQ ID NO: 730963 - RNA, 19 nt, Artificial Sequence
  Description of Artificial Sequence: Synthetic oligonucleotide
  Antisense strand to SEQ ID NO: 730962
uacaaagguacaauccaaa

SEQ ID NO: 730964 - RNA, 19 nt, Artificial Sequence
  Description of Artificial Sequence: Synthetic oligonucleotide
  Sense strand starting at position 1456 of SEQ ID NO: 586609
gauuguaccuuuguaagac

SEQ ID NO: 730965 - RNA, 19 nt, Artificial Sequence
  Description of Artificial Sequence: Synthetic oligonucleotide
  Antisense strand to SEQ ID NO: 730964
gucuuacaaagguacaauc

SEQ ID NO: 730966 - RNA, 19 nt, Artificial Sequence
  Description of Artificial Sequence: Synthetic oligonucleotide
  Sense strand starting at position 1475 of SEQ ID NO: 586609
cagcaaccggucuaauauu

SEQ ID NO: 730967 - RNA, 19 nt, Artificial Sequence
  Description of Artificial Sequence: Synthetic oligonucleotide
  Antisense strand to SEQ ID NO: 730966
aauauuagaccgguugcug

SEQ ID NO: 730968 - RNA, 19 nt, Artificial Sequence
  Description of Artificial Sequence: Synthetic oligonucleotide
  Sense strand starting at position 1529 of SEQ ID NO: 586609
acugauaauaagugacgaa

SEQ ID NO: 730969 - RNA, 19 nt, Artificial Sequence
  Description of Artificial Sequence: Synthetic oligonucleotide
  Antisense strand to SEQ ID NO: 730968
uucgucacuuauuaucagu

SEQ ID NO: 730970 - RNA, 19 nt, Artificial Sequence
  Description of Artificial Sequence: Synthetic oligonucleotide
  Sense strand starting at position 2259 of SEQ ID NO: 586609
acgcauauugacugaucuu

SEQ ID NO: 730971 - RNA, 19 nt, Artificial Sequence
  Description of Artificial Sequence: Synthetic oligonucleotide
  Antisense strand to SEQ ID NO: 730970
aagaucagucaauaugcgu

SEQ ID NO: 730972 - RNA, 19 nt, Artificial Sequence
  Description of Artificial Sequence: Synthetic oligonucleotide
  Sense strand starting at position 2403 of SEQ ID NO: 586609
acacguuuaggaugagcua

SEQ ID NO: 730973 - RNA, 19 nt, Artificial Sequence
  Description of Artificial Sequence: Synthetic oligonucleotide
  Antisense strand to SEQ ID NO: 730972
uagcucauccuaaacgugu

SEQ ID NO: 730974 - RNA, 19 nt, Artificial Sequence
  Description of Artificial Sequence: Synthetic oligonucleotide
  Sense strand starting at position 2418 of SEQ ID NO: 586609
gcuaguaagaguggaaagu

SEQ ID NO: 730975 - RNA, 19 nt, Artificial Sequence
  Description of Artificial Sequence: Synthetic oligonucleotide
  Antisense strand to SEQ ID NO: 730974
acuuuccacucuuacuagc

SEQ ID NO: 730976 - RNA, 19 nt, Artificial Sequence
  Description of Artificial Sequence: Synthetic oligonucleotide
  Sense strand starting at position 2807 of SEQ ID NO: 586609
gcuugaguccgagagguga

SEQ ID NO: 730977 - RNA, 19 nt, Artificial Sequence
  Description of Artificial Sequence: Synthetic oligonucleotide
  Antisense strand to SEQ ID NO: 730976
ucaccucucggacucaagc

SEQ ID NO: 730978 - RNA, 19 nt, Artificial Sequence
  Description of Artificial Sequence: Synthetic oligonucleotide
  Sense strand starting at position 2811 of SEQ ID NO: 586609
gaguccgagaggugagaau

SEQ ID NO: 730979 - RNA, 19 nt, Artificial Sequence
  Description of Artificial Sequence: Synthetic oligonucleotide
  Antisense strand to SEQ ID NO: 730978
auucucaccucucggacuc

SEQ ID NO: 730980 - RNA, 19 nt, Artificial Sequence
  Description of Artificial Sequence: Synthetic oligonucleotide
  Sense strand starting at position 2823 of SEQ ID NO: 586609
ugagaauguagugagccau

SEQ ID NO: 730981 - RNA, 19 nt, Artificial Sequence
  Description of Artificial Sequence: Synthetic oligonucleotide
  Antisense strand to SEQ ID NO: 730980
auggcucacuacauucuca

SEQ ID NO: 730982 - RNA, 19 nt, Artificial Sequence
  Description of Artificial Sequence: Synthetic oligonucleotide
  Sense strand starting at position 2977 of SEQ ID NO: 586609
gcaggcuuugaggauauca

SEQ ID NO: 730983 - RNA, 19 nt, Artificial Sequence
  Description of Artificial Sequence: Synthetic oligonucleotide
  Antisense strand to SEQ ID NO: 730982
ugauauccucaaagccugc

SEQ ID NO: 730984 - RNA, 19 nt, Artificial Sequence
  Description of Artificial Sequence: Synthetic oligonucleotide
  Sense strand starting at position 3041 of SEQ ID NO: 586609
ugagauagugcuggcaacu

SEQ ID NO: 730985 - RNA, 19 nt, Artificial Sequence
  Description of Artificial Sequence: Synthetic oligonucleotide
  Antisense strand to SEQ ID NO: 730984
aguugccagcacuaucuca

SEQ ID NO: 730986 - RNA, 19 nt, Artificial Sequence
  Description of Artificial Sequence: Synthetic oligonucleotide
  Sense strand starting at position 3166 of SEQ ID NO: 586609
accgucacacccugagaau

SEQ ID NO: 730987 - RNA, 19 nt, Artificial Sequence
  Description of Artificial Sequence: Synthetic oligonucleotide
  Antisense strand to SEQ ID NO: 730986
auucucagggugugacggu

SEQ ID NO: 730988 - RNA, 19 nt, Artificial Sequence
  Description of Artificial Sequence: Synthetic oligonucleotide
  Sense strand starting at position 3365 of SEQ ID NO: 586609
ccaccucuugucuggauua

SEQ ID NO: 730989 - RNA, 19 nt, Artificial Sequence
  Description of Artificial Sequence: Synthetic oligonucleotide
  Antisense strand to SEQ ID NO: 730988
uaauccagacaagaggugg

SEQ ID NO: 730990 - RNA, 19 nt, Artificial Sequence
  Description of Artificial Sequence: Synthetic oligonucleotide
  Sense strand starting at position 3367 of SEQ ID NO: 586609
accucuugucuggauuaug

SEQ ID NO: 730991 - RNA, 19 nt, Artificial Sequence
  Description of Artificial Sequence: Synthetic oligonucleotide
  Antisense strand to SEQ ID NO: 730990
cauaauccagacaagaggu

SEQ ID NO: 730992 - RNA, 19 nt, Artificial Sequence
  Description of Artificial Sequence: Synthetic oligonucleotide
  Sense strand starting at position 3393 of SEQ ID NO: 586609
ucuagacagucucuguauu

SEQ ID NO: 730993 - RNA, 19 nt, Artificial Sequence
  Description of Artificial Sequence: Synthetic oligonucleotide
  Antisense strand to SEQ ID NO: 730992
aauacagagacugucuaga

SEQ ID NO: 730994 - RNA, 19 nt, Artificial Sequence
  Description of Artificial Sequence: Synthetic oligonucleotide
  Sense strand starting at position 3444 of SEQ ID NO: 586609
acucauuggccagagugaa

SEQ ID NO: 730995 - RNA, 19 nt, Artificial Sequence
  Description of Artificial Sequence: Synthetic oligonucleotide
  Antisense strand to SEQ ID NO: 730994
uucacucuggccaaugagu

SEQ ID NO: 730996 - RNA, 19 nt, Artificial Sequence
  Description of Artificial Sequence: Synthetic oligonucleotide
  Sense strand starting at position 3520 of SEQ ID NO: 586609
ugugaaguccuuuaugacc

SEQ ID NO: 730997 - RNA, 19 nt, Artificial Sequence
  Description of Artificial Sequence: Synthetic oligonucleotide
  Antisense strand to SEQ ID NO: 730996
ggucauaaaggacuucaca

SEQ ID NO: 730998 - RNA, 19 nt, Artificial Sequence
  Description of Artificial Sequence: Synthetic oligonucleotide
  Sense strand starting at position 3685 of SEQ ID NO: 586609
cucagauauccgcaggacu

SEQ ID NO: 730999 - RNA, 19 nt, Artificial Sequence
  Description of Artificial Sequence: Synthetic oligonucleotide
  Antisense strand to SEQ ID NO: 730998
aguccugcggauaucugag

SEQ ID NO: 731000 - RNA, 19 nt, Artificial Sequence
  Description of Artificial Sequence: Synthetic oligonucleotide
  Sense strand starting at position 3687 of SEQ ID NO: 586609
cagauauccgcaggacuag

SEQ ID NO: 731001 - RNA, 19 nt, Artificial Sequence
  Description of Artificial Sequence: Synthetic oligonucleotide
  Antisense strand to SEQ ID NO: 731000
cuaguccugcggauaucug

SEQ ID NO: 731002 - RNA, 19 nt, Artificial Sequence
  Description of Artificial Sequence: Synthetic oligonucleotide
  Sense strand starting at position 3977 of SEQ ID NO: 586609
uguaguagguccuuaauaa

SEQ ID NO: 731003 - RNA, 19 nt, Artificial Sequence
  Description of Artificial Sequence: Synthetic oligonucleotide
  Antisense strand to SEQ ID NO: 731002
uuauuaaggaccuacuaca

SEQ ID NO: 731004 - RNA, 19 nt, Artificial Sequence
  Description of Artificial Sequence: Synthetic oligonucleotide
  Sense strand starting at position 3978 of SEQ ID NO: 586609
guaguagguccuuaauaaa

SEQ ID NO: 731005 - RNA, 19 nt, Artificial Sequence
  Description of Artificial Sequence: Synthetic oligonucleotide
  Antisense strand to SEQ ID NO: 731004
uuuauuaaggaccuacuac

SEQ ID NO: 731006 - RNA, 19 nt, Artificial Sequence
  Description of Artificial Sequence: Synthetic oligonucleotide
  Sense strand starting at position 4 of SEQ ID NO: 586610
aggcauugauucucaugga

SEQ ID NO: 731007 - RNA, 19 nt, Artificial Sequence
  Description of Artificial Sequence: Synthetic oligonucleotide
  Antisense strand to SEQ ID NO: 731006
uccaugagaaucaaugccu

SEQ ID NO: 731008 - RNA, 19 nt, Artificial Sequence
  Description of Artificial Sequence: Synthetic oligonucleotide
  Sense strand starting at position 118 of SEQ ID NO: 586610
agaacuaucuuguccaaag

SEQ ID NO: 731009 - RNA, 19 nt, Artificial Sequence
  Description of Artificial Sequence: Synthetic oligonucleotide
  Antisense strand to SEQ ID NO: 731008
cuuuggacaagauaguucu

SEQ ID NO: 731010 - RNA, 19 nt, Artificial Sequence
  Description of Artificial Sequence: Synthetic oligonucleotide
  Sense strand starting at position 468 of SEQ ID NO: 586610
ugagaaaccuugcuccaua

SEQ ID NO: 731011 - RNA, 19 nt, Artificial Sequence
  Description of Artificial Sequence: Synthetic oligonucleotide
  Antisense strand to SEQ ID NO: 731010
uauggagcaagguuucuca

SEQ ID NO: 731012 - RNA, 19 nt, Artificial Sequence
  Description of Artificial Sequence: Synthetic oligonucleotide
  Sense strand starting at position 480 of SEQ ID NO: 586610
cuccauauuuaggagguau

SEQ ID NO: 731013 - RNA, 19 nt, Artificial Sequence
  Description of Artificial Sequence: Synthetic oligonucleotide
  Antisense strand to SEQ ID NO: 731012
auaccuccuaaauauggag

SEQ ID NO: 731014 - RNA, 19 nt, Artificial Sequence
  Description of Artificial Sequence: Synthetic oligonucleotide
  Sense strand starting at position 608 of SEQ ID NO: 586610
aucucagauccuggaacua

SEQ ID NO: 731015 - RNA, 19 nt, Artificial Sequence
  Description of Artificial Sequence: Synthetic oligonucleotide
  Antisense strand to SEQ ID NO: 731014
uaguuccaggaucugagau

SEQ ID NO: 731016 - RNA, 19 nt, Artificial Sequence
  Description of Artificial Sequence: Synthetic oligonucleotide
  Sense strand starting at position 620 of SEQ ID NO: 586610
ggaacuauguuuccuguca

SEQ ID NO: 731017 - RNA, 19 nt, Artificial Sequence
  Description of Artificial Sequence: Synthetic oligonucleotide
  Antisense strand to SEQ ID NO: 731016
ugacaggaaacauaguucc

SEQ ID NO: 731018 - RNA, 19 nt, Artificial Sequence
  Description of Artificial Sequence: Synthetic oligonucleotide
  Sense strand starting at position 644 of SEQ ID NO: 586610
aaugauauacaucguggca

SEQ ID NO: 731019 - RNA, 19 nt, Artificial Sequence
  Description of Artificial Sequence: Synthetic oligonucleotide
  Antisense strand to SEQ ID NO: 731018
ugccacgauguauaucauu

SEQ ID NO: 731020 - RNA, 19 nt, Artificial Sequence
  Description of Artificial Sequence: Synthetic oligonucleotide
  Sense strand starting at position 773 of SEQ ID NO: 586610
caguuagaaugcucacaga

SEQ ID NO: 731021 - RNA, 19 nt, Artificial Sequence
  Description of Artificial Sequence: Synthetic oligonucleotide
  Antisense strand to SEQ ID NO: 731020
ucugugagcauucuaacug

SEQ ID NO: 731022 - RNA, 19 nt, Artificial Sequence
  Description of Artificial Sequence: Synthetic oligonucleotide
  Sense strand starting at position 924 of SEQ ID NO: 586610
agaaauguuugcguacaga

SEQ ID NO: 731023 - RNA, 19 nt, Artificial Sequence
  Description of Artificial Sequence: Synthetic oligonucleotide
  Antisense strand to SEQ ID NO: 731022
ucuguacgcaaacauuucu

SEQ ID NO: 731024 - RNA, 19 nt, Artificial Sequence
  Description of Artificial Sequence: Synthetic oligonucleotide
  Sense strand starting at position 927 of SEQ ID NO: 586610
aauguuugcguacagaauc

SEQ ID NO: 731025 - RNA, 19 nt, Artificial Sequence
  Description of Artificial Sequence: Synthetic oligonucleotide
  Antisense strand to SEQ ID NO: 731024
gauucuguacgcaaacauu

SEQ ID NO: 731026 - RNA, 19 nt, Artificial Sequence
  Description of Artificial Sequence: Synthetic oligonucleotide
  Sense strand starting at position 1047 of SEQ ID NO: 586610
ugugcucccagagauugaa

SEQ ID NO: 731027 - RNA, 19 nt, Artificial Sequence
  Description of Artificial Sequence: Synthetic oligonucleotide
  Antisense strand to SEQ ID NO: 731026
uucaaucucugggagcaca

SEQ ID NO: 731028 - RNA, 19 nt, Artificial Sequence
  Description of Artificial Sequence: Synthetic oligonucleotide
  Sense strand starting at position 1085 of SEQ ID NO: 586610
gguaaacuuccagacuuuc

SEQ ID NO: 731029 - RNA, 19 nt, Artificial Sequence
  Description of Artificial Sequence: Synthetic oligonucleotide
  Antisense strand to SEQ ID NO: 731028
gaaagucuggaaguuuacc

SEQ ID NO: 731030 - RNA, 19 nt, Artificial Sequence
  Description of Artificial Sequence: Synthetic oligonucleotide
  Sense strand starting at position 1141 of SEQ ID NO: 586610
ugguauaauccguacugua

SEQ ID NO: 731031 - RNA, 19 nt, Artificial Sequence
  Description of Artificial Sequence: Synthetic oligonucleotide
  Antisense strand to SEQ ID NO: 731030
uacaguacggauuauacca

SEQ ID NO: 731032 - RNA, 19 nt, Artificial Sequence
  Description of Artificial Sequence: Synthetic oligonucleotide
  Sense strand starting at position 1190 of SEQ ID NO: 586610
cguucucacuguuuaagaa

SEQ ID NO: 731033 - RNA, 19 nt, Artificial Sequence
  Description of Artificial Sequence: Synthetic oligonucleotide
  Antisense strand to SEQ ID NO: 731032
uucuuaaacagugagaacg

SEQ ID NO: 731034 - RNA, 19 nt, Artificial Sequence
  Description of Artificial Sequence: Synthetic oligonucleotide
  Sense strand starting at position 1191 of SEQ ID NO: 586610
guucucacuguuuaagaau

SEQ ID NO: 731035 - RNA, 19 nt, Artificial Sequence
  Description of Artificial Sequence: Synthetic oligonucleotide
  Antisense strand to SEQ ID NO: 731034
auucuuaaacagugagaac

SEQ ID NO: 731036 - RNA, 19 nt, Artificial Sequence
  Description of Artificial Sequence: Synthetic oligonucleotide
  Sense strand starting at position 1261 of SEQ ID NO: 586610
guguucuuucgcuuagcuu

SEQ ID NO: 731037 - RNA, 19 nt, Artificial Sequence
  Description of Artificial Sequence: Synthetic oligonucleotide
  Antisense strand to SEQ ID NO: 731036
aagcuaagcgaaagaacac

SEQ ID NO: 731038 - RNA, 19 nt, Artificial Sequence
  Description of Artificial Sequence: Synthetic oligonucleotide
  Sense strand starting at position 1356 of SEQ ID NO: 586610
uuuggauuguaccuuugua

SEQ ID NO: 731039 - RNA, 19 nt, Artificial Sequence
  Description of Artificial Sequence: Synthetic oligonucleotide
  Antisense strand to SEQ ID NO: 731038
uacaaagguacaauccaaa

SEQ ID NO: 731040 - RNA, 19 nt, Artificial Sequence
  Description of Artificial Sequence: Synthetic oligonucleotide
  Sense strand starting at position 1360 of SEQ ID NO: 586610
gauuguaccuuuguaagac

SEQ ID NO: 731041 - RNA, 19 nt, Artificial Sequence
  Description of Artificial Sequence: Synthetic oligonucleotide
  Antisense strand to SEQ ID NO: 731040
gucuuacaaagguacaauc

SEQ ID NO: 731042 - RNA, 19 nt, Artificial Sequence
  Description of Artificial Sequence: Synthetic oligonucleotide
  Sense strand starting at position 1379 of SEQ ID NO: 586610
cagcaaccggucuaauauu

SEQ ID NO: 731043 - RNA, 19 nt, Artificial Sequence
  Description of Artificial Sequence: Synthetic oligonucleotide
  Antisense strand to SEQ ID NO: 731042
aauauuagaccgguugcug

SEQ ID NO: 731044 - RNA, 19 nt, Artificial Sequence
  Description of Artificial Sequence: Synthetic oligonucleotide
  Sense strand starting at position 1433 of SEQ ID NO: 586610
acugauaauaagugacgaa

SEQ ID NO: 731045 - RNA, 19 nt, Artificial Sequence
  Description of Artificial Sequence: Synthetic oligonucleotide
  Antisense strand to SEQ ID NO: 731044
uucgucacuuauuaucagu

SEQ ID NO: 731046 - RNA, 19 nt, Artificial Sequence
  Description of Artificial Sequence: Synthetic oligonucleotide
  Sense strand starting at position 2163 of SEQ ID NO: 586610
acgcauauugacugaucuu

SEQ ID NO: 731047 - RNA, 19 nt, Artificial Sequence
  Description of Artificial Sequence: Synthetic oligonucleotide
  Antisense strand to SEQ ID NO: 731046
aagaucagucaauaugcgu

SEQ ID NO: 731048 - RNA, 19 nt, Artificial Sequence
  Description of Artificial Sequence: Synthetic oligonucleotide
  Sense strand starting at position 2307 of SEQ ID NO: 586610
acacguuuaggaugagcua

SEQ ID NO: 731049 - RNA, 19 nt, Artificial Sequence
  Description of Artificial Sequence: Synthetic oligonucleotide
  Antisense strand to SEQ ID NO: 731048
uagcucauccuaaacgugu

SEQ ID NO: 731050 - RNA, 19 nt, Artificial Sequence
  Description of Artificial Sequence: Synthetic oligonucleotide
  Sense strand starting at position 2322 of SEQ ID NO: 586610
gcuaguaagaguggaaagu

SEQ ID NO: 731051 - RNA, 19 nt, Artificial Sequence
  Description of Artificial Sequence: Synthetic oligonucleotide
  Antisense strand to SEQ ID NO: 731050
acuuuccacucuuacuagc

SEQ ID NO: 731052 - RNA, 19 nt, Artificial Sequence
  Description of Artificial Sequence: Synthetic oligonucleotide
  Sense strand starting at position 2711 of SEQ ID NO: 586610
gcuugaguccgagagguga

SEQ ID NO: 731053 - RNA, 19 nt, Artificial Sequence
  Description of Artificial Sequence: Synthetic oligonucleotide
  Antisense strand to SEQ ID NO: 731052
ucaccucucggacucaagc

SEQ ID NO: 731054 - RNA, 19 nt, Artificial Sequence
  Description of Artificial Sequence: Synthetic oligonucleotide
  Sense strand starting at position 2715 of SEQ ID NO: 586610
gaguccgagaggugagaau

SEQ ID NO: 731055 - RNA, 19 nt, Artificial Sequence
  Description of Artificial Sequence: Synthetic oligonucleotide
  Antisense strand to SEQ ID NO: 731054
auucucaccucucggacuc

SEQ ID NO: 731056 - RNA, 19 nt, Artificial Sequence
  Description of Artificial Sequence: Synthetic oligonucleotide
  Sense strand starting at position 2727 of SEQ ID NO: 586610
ugagaauguagugagccau

SEQ ID NO: 731057 - RNA, 19 nt, Artificial Sequence
  Description of Artificial Sequence: Synthetic oligonucleotide
  Antisense strand to SEQ ID NO: 731056
auggcucacuacauucuca

SEQ ID NO: 731058 - RNA, 19 nt, Artificial Sequence
  Description of Artificial Sequence: Synthetic oligonucleotide
  Sense strand starting at position 2881 of SEQ ID NO: 586610
gcaggcuuugaggauauca

SEQ ID NO: 731059 - RNA, 19 nt, Artificial Sequence
  Description of Artificial Sequence: Synthetic oligonucleotide
  Antisense strand to SEQ ID NO: 731058
ugauauccucaaagccugc

SEQ ID NO: 731060 - RNA, 19 nt, Artificial Sequence
  Description of Artificial Sequence: Synthetic oligonucleotide
  Sense strand starting at position 2945 of SEQ ID NO: 586610
ugagauagugcuggcaacu

SEQ ID NO: 731061 - RNA, 19 nt, Artificial Sequence
  Description of Artificial Sequence: Synthetic oligonucleotide
  Antisense strand to SEQ ID NO: 731060
aguugccagcacuaucuca

SEQ ID NO: 731062 - RNA, 19 nt, Artificial Sequence
  Description of Artificial Sequence: Synthetic oligonucleotide
  Sense strand starting at position 3070 of SEQ ID NO: 586610
accgucacacccugagaau

SEQ ID NO: 731063 - RNA, 19 nt, Artificial Sequence
  Description of Artificial Sequence: Synthetic oligonucleotide
  Antisense strand to SEQ ID NO: 731062
auucucagggugugacggu

SEQ ID NO: 731064 - RNA, 19 nt, Artificial Sequence
  Description of Artificial Sequence: Synthetic oligonucleotide
  Sense strand starting at position 3269 of SEQ ID NO: 586610
ccaccucuugucuggauua

SEQ ID NO: 731065 - RNA, 19 nt, Artificial Sequence
  Description of Artificial Sequence: Synthetic oligonucleotide
  Antisense strand to SEQ ID NO: 731064
uaauccagacaagaggugg

SEQ ID NO: 731066 - RNA, 19 nt, Artificial Sequence
  Description of Artificial Sequence: Synthetic oligonucleotide
  Sense strand starting at position 3271 of SEQ ID NO: 586610
accucuugucuggauuaug

SEQ ID NO: 731067 - RNA, 19 nt, Artificial Sequence
  Description of Artificial Sequence: Synthetic oligonucleotide
  Antisense strand to SEQ ID NO: 731066
cauaauccagacaagaggu

SEQ ID NO: 731068 - RNA, 19 nt, Artificial Sequence
  Description of Artificial Sequence: Synthetic oligonucleotide
  Sense strand starting at position 3297 of SEQ ID NO: 586610
ucuagacagucucuguauu

SEQ ID NO: 731069 - RNA, 19 nt, Artificial Sequence
  Description of Artificial Sequence: Synthetic oligonucleotide
  Antisense strand to SEQ ID NO: 731068
aauacagagacugucuaga

SEQ ID NO: 731070 - RNA, 19 nt, Artificial Sequence
  Description of Artificial Sequence: Synthetic oligonucleotide
  Sense strand starting at position 3348 of SEQ ID NO: 586610
acucauuggccagagugaa

SEQ ID NO: 731071 - RNA, 19 nt, Artificial Sequence
  Description of Artificial Sequence: Synthetic oligonucleotide
  Antisense strand to SEQ ID NO: 731070
uucacucuggccaaugagu

SEQ ID NO: 731072 - RNA, 19 nt, Artificial Sequence
  Description of Artificial Sequence: Synthetic oligonucleotide
  Sense strand starting at position 3424 of SEQ ID NO: 586610
ugugaaguccuuuaugacc

SEQ ID NO: 731073 - RNA, 19 nt, Artificial Sequence
  Description of Artificial Sequence: Synthetic oligonucleotide
  Antisense strand to SEQ ID NO: 731072
ggucauaaaggacuucaca

SEQ ID NO: 731074 - RNA, 19 nt, Artificial Sequence
  Description of Artificial Sequence: Synthetic oligonucleotide
  Sense strand starting at position 3589 of SEQ ID NO: 586610
cucagauauccgcaggacu

SEQ ID NO: 731075 - RNA, 19 nt, Artificial Sequence
  Description of Artificial Sequence: Synthetic oligonucleotide
  Antisense strand to SEQ ID NO: 731074
aguccugcggauaucugag

SEQ ID NO: 731076 - RNA, 19 nt, Artificial Sequence
  Description of Artificial Sequence: Synthetic oligonucleotide
  Sense strand starting at position 3591 of SEQ ID NO: 586610
cagauauccgcaggacuag

SEQ ID NO: 731077 - RNA, 19 nt, Artificial Sequence
  Description of Artificial Sequence: Synthetic oligonucleotide
  Antisense strand to SEQ ID NO: 731076
cuaguccugcggauaucug

SEQ ID NO: 731078 - RNA, 19 nt, Artificial Sequence
  Description of Artificial Sequence: Synthetic oligonucleotide
  Sense strand starting at position 3881 of SEQ ID NO: 586610
uguaguagguccuuaauaa

SEQ ID NO: 731079 - RNA, 19 nt, Artificial Sequence
  Description of Artificial Sequence: Synthetic oligonucleotide
  Antisense strand to SEQ ID NO: 731078
uuauuaaggaccuacuaca

SEQ ID NO: 731080 - RNA, 19 nt, Artificial Sequence
  Description of Artificial Sequence: Synthetic oligonucleotide
  Sense strand starting at position 3882 of SEQ ID NO: 586610
guaguagguccuuaauaaa

SEQ ID NO: 731081 - RNA, 19 nt, Artificial Sequence
  Description of Artificial Sequence: Synthetic oligonucleotide
  Antisense strand to SEQ ID NO: 731080
uuuauuaaggaccuacuac

SEQ ID NO: 731082 - RNA, 19 nt, Artificial Sequence
  Description of Artificial Sequence: Synthetic oligonucleotide
  Sense strand starting at position 3928 of SEQ ID NO: 586610
aacagaaagugugugcauu

SEQ ID NO: 731083 - RNA, 19 nt, Artificial Sequence
  Description of Artificial Sequence: Synthetic oligonucleotide
  Antisense strand to SEQ ID NO: 731082
aaugcacacacuuucuguu

SEQ ID NO: 731084 - RNA, 19 nt, Artificial Sequence
  Description of Artificial Sequence: Synthetic oligonucleotide
  Sense strand starting at position 3929 of SEQ ID NO: 586610
acagaaagugugugcauuu

SEQ ID NO: 731085 - RNA, 19 nt, Artificial Sequence
  Description of Artificial Sequence: Synthetic oligonucleotide
  Antisense strand to SEQ ID NO: 731084
aaaugcacacacuuucugu

SEQ ID NO: 731086 - RNA, 19 nt, Artificial Sequence
  Description of Artificial Sequence: Synthetic oligonucleotide
  Sense strand starting at position 32 of SEQ ID NO: 586611
aggcauugauucucaugga

SEQ ID NO: 731087 - RNA, 19 nt, Artificial Sequence
  Description of Artificial Sequence: Synthetic oligonucleotide
  Antisense strand to SEQ ID NO: 731086
uccaugagaaucaaugccu

SEQ ID NO: 731088 - RNA, 19 nt, Artificial Sequence
  Description of Artificial Sequence: Synthetic oligonucleotide
  Sense strand starting at position 146 of SEQ ID NO: 586611
agaacuaucuuguccaaag

SEQ ID NO: 731089 - RNA, 19 nt, Artificial Sequence
  Description of Artificial Sequence: Synthetic oligonucleotide
  Antisense strand to SEQ ID NO: 731088
cuuuggacaagauaguucu

SEQ ID NO: 731090 - RNA, 19 nt, Artificial Sequence
  Description of Artificial Sequence: Synthetic oligonucleotide
  Sense strand starting at position 496 of SEQ ID NO: 586611
ugagaaaccuugcuccaua

SEQ ID NO: 731091 - RNA, 19 nt, Artificial Sequence
  Description of Artificial Sequence: Synthetic oligonucleotide
  Antisense strand to SEQ ID NO: 731090
uauggagcaagguuucuca

SEQ ID NO: 731092 - RNA, 19 nt, Artificial Sequence
  Description of Artificial Sequence: Synthetic oligonucleotide
  Sense strand starting at position 508 of SEQ ID NO: 586611
cuccauauuuaggagguau

SEQ ID NO: 731093 - RNA, 19 nt, Artificial Sequence
  Description of Artificial Sequence: Synthetic oligonucleotide
  Antisense strand to SEQ ID NO: 731092
auaccuccuaaauauggag

SEQ ID NO: 731094 - RNA, 19 nt, Artificial Sequence
  Description of Artificial Sequence: Synthetic oligonucleotide
  Sense strand starting at position 636 of SEQ ID NO: 586611
aucucagauccuggaacua

SEQ ID NO: 731095 - RNA, 19 nt, Artificial Sequence
  Description of Artificial Sequence: Synthetic oligonucleotide
  Antisense strand to SEQ ID NO: 731094
uaguuccaggaucugagau

SEQ ID NO: 731096 - RNA, 19 nt, Artificial Sequence
  Description of Artificial Sequence: Synthetic oligonucleotide
  Sense strand starting at position 648 of SEQ ID NO: 586611
ggaacuauguuuccuguca

SEQ ID NO: 731097 - RNA, 19 nt, Artificial Sequence
  Description of Artificial Sequence: Synthetic oligonucleotide
  Antisense strand to SEQ ID NO: 731096
ugacaggaaacauaguucc

SEQ ID NO: 731098 - RNA, 19 nt, Artificial Sequence
  Description of Artificial Sequence: Synthetic oligonucleotide
  Sense strand starting at position 672 of SEQ ID NO: 586611
aaugauauacaucguggca

SEQ ID NO: 731099 - RNA, 19 nt, Artificial Sequence
  Description of Artificial Sequence: Synthetic oligonucleotide
  Antisense strand to SEQ ID NO: 731098
ugccacgauguauaucauu

SEQ ID NO: 731100 - RNA, 19 nt, Artificial Sequence
  Description of Artificial Sequence: Synthetic oligonucleotide
  Sense strand starting at position 801 of SEQ ID NO: 586611
caguuagaaugcucacaga

SEQ ID NO: 731101 - RNA, 19 nt, Artificial Sequence
  Description of Artificial Sequence: Synthetic oligonucleotide
  Antisense strand to SEQ ID NO: 731100
ucugugagcauucuaacug

SEQ ID NO: 731102 - RNA, 19 nt, Artificial Sequence
  Description of Artificial Sequence: Synthetic oligonucleotide
  Sense strand starting at position 952 of SEQ ID NO: 586611
agaaauguuugcguacaga

SEQ ID NO: 731103 - RNA, 19 nt, Artificial Sequence
  Description of Artificial Sequence: Synthetic oligonucleotide
  Antisense strand to SEQ ID NO: 731102
ucuguacgcaaacauuucu

SEQ ID NO: 731104 - RNA, 19 nt, Artificial Sequence
  Description of Artificial Sequence: Synthetic oligonucleotide
  Sense strand starting at position 955 of SEQ ID NO: 586611
aauguuugcguacagaauc

SEQ ID NO: 731105 - RNA, 19 nt, Artificial Sequence
  Description of Artificial Sequence: Synthetic oligonucleotide
  Antisense strand to SEQ ID NO: 731104
gauucuguacgcaaacauu

SEQ ID NO: 731106 - RNA, 19 nt, Artificial Sequence
  Description of Artificial Sequence: Synthetic oligonucleotide
  Sense strand starting at position 1075 of SEQ ID NO: 586611
ugugcucccagagauugaa

SEQ ID NO: 731107 - RNA, 19 nt, Artificial Sequence
  Description of Artificial Sequence: Synthetic oligonucleotide
  Antisense strand to SEQ ID NO: 731106
uucaaucucugggagcaca

SEQ ID NO: 731108 - RNA, 19 nt, Artificial Sequence
  Description of Artificial Sequence: Synthetic oligonucleotide
  Sense strand starting at position 1113 of SEQ ID NO: 586611
gguaaacuuccagacuuuc

SEQ ID NO: 731109 - RNA, 19 nt, Artificial Sequence
  Description of Artificial Sequence: Synthetic oligonucleotide
  Antisense strand to SEQ ID NO: 731108
gaaagucuggaaguuuacc

SEQ ID NO: 731110 - RNA, 19 nt, Artificial Sequence
  Description of Artificial Sequence: Synthetic oligonucleotide
  Sense strand starting at position 1169 of SEQ ID NO: 586611
ugguauaauccguacugua

SEQ ID NO: 731111 - RNA, 19 nt, Artificial Sequence
  Description of Artificial Sequence: Synthetic oligonucleotide
  Antisense strand to SEQ ID NO: 731110
uacaguacggauuauacca

SEQ ID NO: 731112 - RNA, 19 nt, Artificial Sequence
  Description of Artificial Sequence: Synthetic oligonucleotide
  Sense strand starting at position 1218 of SEQ ID NO: 586611
cguucucacuguuuaagaa

SEQ ID NO: 731113 - RNA, 19 nt, Artificial Sequence
  Description of Artificial Sequence: Synthetic oligonucleotide
  Antisense strand to SEQ ID NO: 731112
uucuuaaacagugagaacg

SEQ ID NO: 731114 - RNA, 19 nt, Artificial Sequence
  Description of Artificial Sequence: Synthetic oligonucleotide
  Sense strand starting at position 1219 of SEQ ID NO: 586611
guucucacuguuuaagaau

SEQ ID NO: 731115 - RNA, 19 nt, Artificial Sequence
  Description of Artificial Sequence: Synthetic oligonucleotide
  Antisense strand to SEQ ID NO: 731114
auucuuaaacagugagaac

SEQ ID NO: 731116 - RNA, 19 nt, Artificial Sequence
  Description of Artificial Sequence: Synthetic oligonucleotide
  Sense strand starting at position 1289 of SEQ ID NO: 586611
guguucuuucgcuuagcuu

SEQ ID NO: 731117 - RNA, 19 nt, Artificial Sequence
  Description of Artificial Sequence: Synthetic oligonucleotide
  Antisense strand to SEQ ID NO: 731116
aagcuaagcgaaagaacac

SEQ ID NO: 731118 - RNA, 19 nt, Artificial Sequence
  Description of Artificial Sequence: Synthetic oligonucleotide
  Sense strand starting at position 1384 of SEQ ID NO: 586611
uuuggauuguaccuuugua

SEQ ID NO: 731119 - RNA, 19 nt, Artificial Sequence
  Description of Artificial Sequence: Synthetic oligonucleotide
  Antisense strand to SEQ ID NO: 731118
uacaaagguacaauccaaa

SEQ ID NO: 731120 - RNA, 19 nt, Artificial Sequence
  Description of Artificial Sequence: Synthetic oligonucleotide
  Sense strand starting at position 1388 of SEQ ID NO: 586611
gauuguaccuuuguaagac

SEQ ID NO: 731121 - RNA, 19 nt, Artificial Sequence
  Description of Artificial Sequence: Synthetic oligonucleotide
  Antisense strand to SEQ ID NO: 731120
gucuuacaaagguacaauc

SEQ ID NO: 731122 - RNA, 19 nt, Artificial Sequence
  Description of Artificial Sequence: Synthetic oligonucleotide
  Sense strand starting at position 1407 of SEQ ID NO: 586611
cagcaaccggucuaauauu

SEQ ID NO: 731123 - RNA, 19 nt, Artificial Sequence
  Description of Artificial Sequence: Synthetic oligonucleotide
  Antisense strand to SEQ ID NO: 731122
aauauuagaccgguugcug

SEQ ID NO: 731124 - RNA, 19 nt, Artificial Sequence
  Description of Artificial Sequence: Synthetic oligonucleotide
  Sense strand starting at position 1461 of SEQ ID NO: 586611
acugauaauaagugacgaa

SEQ ID NO: 731125 - RNA, 19 nt, Artificial Sequence
  Description of Artificial Sequence: Synthetic oligonucleotide
  Antisense strand to SEQ ID NO: 731124
uucgucacuuauuaucagu

SEQ ID NO: 731126 - RNA, 19 nt, Artificial Sequence
  Description of Artificial Sequence: Synthetic oligonucleotide
  Sense strand starting at position 2191 of SEQ ID NO: 586611
acgcauauugacugaucuu

SEQ ID NO: 731127 - RNA, 19 nt, Artificial Sequence
  Description of Artificial Sequence: Synthetic oligonucleotide
  Antisense strand to SEQ ID NO: 731126
aagaucagucaauaugcgu

SEQ ID NO: 731128 - RNA, 19 nt, Artificial Sequence
  Description of Artificial Sequence: Synthetic oligonucleotide
  Sense strand starting at position 2335 of SEQ ID NO: 586611
acacguuuaggaugagcua

SEQ ID NO: 731129 - RNA, 19 nt, Artificial Sequence
  Description of Artificial Sequence: Synthetic oligonucleotide
  Antisense strand to SEQ ID NO: 731128
uagcucauccuaaacgugu

SEQ ID NO: 731130 - RNA, 19 nt, Artificial Sequence
  Description of Artificial Sequence: Synthetic oligonucleotide
  Sense strand starting at position 2350 of SEQ ID NO: 586611
gcuaguaagaguggaaagu

SEQ ID NO: 731131 - RNA, 19 nt, Artificial Sequence
  Description of Artificial Sequence: Synthetic oligonucleotide
  Antisense strand to SEQ ID NO: 731130
acuuuccacucuuacuagc

SEQ ID NO: 731132 - RNA, 19 nt, Artificial Sequence
  Description of Artificial Sequence: Synthetic oligonucleotide
  Sense strand starting at position 2739 of SEQ ID NO: 586611
gcuugaguccgagagguga

SEQ ID NO: 731133 - RNA, 19 nt, Artificial Sequence
  Description of Artificial Sequence: Synthetic oligonucleotide
  Antisense strand to SEQ ID NO: 731132
ucaccucucggacucaagc

SEQ ID NO: 731134 - RNA, 19 nt, Artificial Sequence
  Description of Artificial Sequence: Synthetic oligonucleotide
  Sense strand starting at position 2743 of SEQ ID NO: 586611
gaguccgagaggugagaau

SEQ ID NO: 731135 - RNA, 19 nt, Artificial Sequence
  Description of Artificial Sequence: Synthetic oligonucleotide
  Antisense strand to SEQ ID NO: 731134
auucucaccucucggacuc

SEQ ID NO: 731136 - RNA, 19 nt, Artificial Sequence
  Description of Artificial Sequence: Synthetic oligonucleotide
  Sense strand starting at position 2755 of SEQ ID NO: 586611
ugagaauguagugagccau

SEQ ID NO: 731137 - RNA, 19 nt, Artificial Sequence
  Description of Artificial Sequence: Synthetic oligonucleotide
  Antisense strand to SEQ ID NO: 731136
auggcucacuacauucuca

SEQ ID NO: 731138 - RNA, 19 nt, Artificial Sequence
  Description of Artificial Sequence: Synthetic oligonucleotide
  Sense strand starting at position 2909 of SEQ ID NO: 586611
gcaggcuuugaggauauca

SEQ ID NO: 731139 - RNA, 19 nt, Artificial Sequence
  Description of Artificial Sequence: Synthetic oligonucleotide
  Antisense strand to SEQ ID NO: 731138
ugauauccucaaagccugc

SEQ ID NO: 731140 - RNA, 19 nt, Artificial Sequence
  Description of Artificial Sequence: Synthetic oligonucleotide
  Sense strand starting at position 2973 of SEQ ID NO: 586611
ugagauagugcuggcaacu

SEQ ID NO: 731141 - RNA, 19 nt, Artificial Sequence
  Description of Artificial Sequence: Synthetic oligonucleotide
  Antisense strand to SEQ ID NO: 731140
aguugccagcacuaucuca

SEQ ID NO: 731142 - RNA, 19 nt, Artificial Sequence
  Description of Artificial Sequence: Synthetic oligonucleotide
  Sense strand starting at position 3098 of SEQ ID NO: 586611
accgucacacccugagaau

SEQ ID NO: 731143 - RNA, 19 nt, Artificial Sequence
  Description of Artificial Sequence: Synthetic oligonucleotide
  Antisense strand to SEQ ID NO: 731142
auucucagggugugacggu

SEQ ID NO: 731144 - RNA, 19 nt, Artificial Sequence
  Description of Artificial Sequence: Synthetic oligonucleotide
  Sense strand starting at position 3297 of SEQ ID NO: 586611
ccaccucuugucuggauua

SEQ ID NO: 731145 - RNA, 19 nt, Artificial Sequence
  Description of Artificial Sequence: Synthetic oligonucleotide
  Antisense strand to SEQ ID NO: 731144
uaauccagacaagaggugg

SEQ ID NO: 731146 - RNA, 19 nt, Artificial Sequence
  Description of Artificial Sequence: Synthetic oligonucleotide
  Sense strand starting at position 3299 of SEQ ID NO: 586611
accucuugucuggauuaug

SEQ ID NO: 731147 - RNA, 19 nt, Artificial Sequence
  Description of Artificial Sequence: Synthetic oligonucleotide
  Antisense strand to SEQ ID NO: 731146
cauaauccagacaagaggu

SEQ ID NO: 731148 - RNA, 19 nt, Artificial Sequence
  Description of Artificial Sequence: Synthetic oligonucleotide
  Sense strand starting at position 3325 of SEQ ID NO: 586611
ucuagacagucucuguauu

SEQ ID NO: 731149 - RNA, 19 nt, Artificial Sequence
  Description of Artificial Sequence: Synthetic oligonucleotide
  Antisense strand to SEQ ID NO: 731148
aauacagagacugucuaga

SEQ ID NO: 731150 - RNA, 19 nt, Artificial Sequence
  Description of Artificial Sequence: Synthetic oligonucleotide
  Sense strand starting at position 3376 of SEQ ID NO: 586611
acucauuggccagagugaa

SEQ ID NO: 731151 - RNA, 19 nt, Artificial Sequence
  Description of Artificial Sequence: Synthetic oligonucleotide
  Antisense strand to SEQ ID NO: 731150
uucacucuggccaaugagu

SEQ ID NO: 731152 - RNA, 19 nt, Artificial Sequence
  Description of Artificial Sequence: Synthetic oligonucleotide
  Sense strand starting at position 3452 of SEQ ID NO: 586611
ugugaaguccuuuaugacc

SEQ ID NO: 731153 - RNA, 19 nt, Artificial Sequence
  Description of Artificial Sequence: Synthetic oligonucleotide
  Antisense strand to SEQ ID NO: 731152
ggucauaaaggacuucaca

SEQ ID NO: 731154 - RNA, 19 nt, Artificial Sequence
  Description of Artificial Sequence: Synthetic oligonucleotide
  Sense strand starting at position 3617 of SEQ ID NO: 586611
cucagauauccgcaggacu

SEQ ID NO: 731155 - RNA, 19 nt, Artificial Sequence
  Description of Artificial Sequence: Synthetic oligonucleotide
  Antisense strand to SEQ ID NO: 731154
aguccugcggauaucugag

SEQ ID NO: 731156 - RNA, 19 nt, Artificial Sequence
  Description of Artificial Sequence: Synthetic oligonucleotide
  Sense strand starting at position 3619 of SEQ ID NO: 586611
cagauauccgcaggacuag

SEQ ID NO: 731157 - RNA, 19 nt, Artificial Sequence
  Description of Artificial Sequence: Synthetic oligonucleotide
  Antisense strand to SEQ ID NO: 731156
cuaguccugcggauaucug

SEQ ID NO: 731158 - RNA, 19 nt, Artificial Sequence
  Description of Artificial Sequence: Synthetic oligonucleotide
  Sense strand starting at position 3909 of SEQ ID NO: 586611
uguaguagguccuuaauaa

SEQ ID NO: 731159 - RNA, 19 nt, Artificial Sequence
  Description of Artificial Sequence: Synthetic oligonucleotide
  Antisense strand to SEQ ID NO: 731158
uuauuaaggaccuacuaca

SEQ ID NO: 731160 - RNA, 19 nt, Artificial Sequence
  Description of Artificial Sequence: Synthetic oligonucleotide
  Sense strand starting at position 3910 of SEQ ID NO: 586611
guaguagguccuuaauaaa

SEQ ID NO: 731161 - RNA, 19 nt, Artificial Sequence
  Description of Artificial Sequence: Synthetic oligonucleotide
  Antisense strand to SEQ ID NO: 731160
uuuauuaaggaccuacuac

SEQ ID NO: 731162 - RNA, 19 nt, Artificial Sequence
  Description of Artificial Sequence: Synthetic oligonucleotide
  Sense strand starting at position 3956 of SEQ ID NO: 586611
aacagaaagugugugcauu

SEQ ID NO: 731163 - RNA, 19 nt, Artificial Sequence
  Description of Artificial Sequence: Synthetic oligonucleotide
  Antisense strand to SEQ ID NO: 731162
aaugcacacacuuucuguu

SEQ ID NO: 731164 - RNA, 19 nt, Artificial Sequence
  Description of Artificial Sequence: Synthetic oligonucleotide
  Sense strand starting at position 3957 of SEQ ID NO: 586611
acagaaagugugugcauuu

SEQ ID NO: 731165 - RNA, 19 nt, Artificial Sequence
  Description of Artificial Sequence: Synthetic oligonucleotide
  Antisense strand to SEQ ID NO: 731164
aaaugcacacacuuucugu

SEQ ID NO: 731166 - RNA, 19 nt, Artificial Sequence
  Description of Artificial Sequence: Synthetic oligonucleotide
  Sense strand starting at position 11 of SEQ ID NO: 586612
acuaaaucagaccguguga

SEQ ID NO: 731167 - RNA, 19 nt, Artificial Sequence
  Description of Artificial Sequence: Synthetic oligonucleotide
  Antisense strand to SEQ ID NO: 731166
ucacacggucugauuuagu

SEQ ID NO: 731168 - RNA, 19 nt, Artificial Sequence
  Description of Artificial Sequence: Synthetic oligonucleotide
  Sense strand starting at position 13 of SEQ ID NO: 586612
uaaaucagaccgugugaau

SEQ ID NO: 731169 - RNA, 19 nt, Artificial Sequence
  Description of Artificial Sequence: Synthetic oligonucleotide
  Antisense strand to SEQ ID NO: 731168
auucacacggucugauuua

SEQ ID NO: 731170 - RNA, 19 nt, Artificial Sequence
  Description of Artificial Sequence: Synthetic oligonucleotide
  Sense strand starting at position 68 of SEQ ID NO: 586612
uucccaggauaagucaaau

SEQ ID NO: 731171 - RNA, 19 nt, Artificial Sequence
  Description of Artificial Sequence: Synthetic oligonucleotide
  Antisense strand to SEQ ID NO: 731170
auuugacuuauccugggaa

SEQ ID NO: 731172 - RNA, 19 nt, Artificial Sequence
  Description of Artificial Sequence: Synthetic oligonucleotide
  Sense strand starting at position 94 of SEQ ID NO: 586612
gcuguuuaccuguaaauga

SEQ ID NO: 731173 - RNA, 19 nt, Artificial Sequence
  Description of Artificial Sequence: Synthetic oligonucleotide
  Antisense strand to SEQ ID NO: 731172
ucauuuacagguaaacagc

SEQ ID NO: 731174 - RNA, 19 nt, Artificial Sequence
  Description of Artificial Sequence: Synthetic oligonucleotide
  Sense strand starting at position 116 of SEQ ID NO: 586612
gguacaguauaagcaauau

SEQ ID NO: 731175 - RNA, 19 nt, Artificial Sequence
  Description of Artificial Sequence: Synthetic oligonucleotide
  Antisense strand to SEQ ID NO: 731174
auauugcuuauacuguacc

SEQ ID NO: 731176 - RNA, 19 nt, Artificial Sequence
  Description of Artificial Sequence: Synthetic oligonucleotide
  Sense strand starting at position 128 of SEQ ID NO: 586612
gcaauaugauuaguuacaa

SEQ ID NO: 731177 - RNA, 19 nt, Artificial Sequence
  Description of Artificial Sequence: Synthetic oligonucleotide
  Antisense strand to SEQ ID NO: 731176
uuguaacuaaucauauugc

SEQ ID NO: 731178 - RNA, 19 nt, Artificial Sequence
  Description of Artificial Sequence: Synthetic oligonucleotide
  Sense strand starting at position 163 of SEQ ID NO: 586612
uagcauuacggguaacuuu

SEQ ID NO: 731179 - RNA, 19 nt, Artificial Sequence
  Description of Artificial Sequence: Synthetic oligonucleotide
  Antisense strand to SEQ ID NO: 731178
aaaguuacccguaaugcua

SEQ ID NO: 731180 - RNA, 19 nt, Artificial Sequence
  Description of Artificial Sequence: Synthetic oligonucleotide
  Sense strand starting at position 485 of SEQ ID NO: 586612
guuugaaagccauggaaug

SEQ ID NO: 731181 - RNA, 19 nt, Artificial Sequence
  Description of Artificial Sequence: Synthetic oligonucleotide
  Antisense strand to SEQ ID NO: 731180
cauuccauggcuuucaaac

SEQ ID NO: 731182 - RNA, 19 nt, Artificial Sequence
  Description of Artificial Sequence: Synthetic oligonucleotide
  Sense strand starting at position 486 of SEQ ID NO: 586612
uuugaaagccauggaaugu

SEQ ID NO: 731183 - RNA, 19 nt, Artificial Sequence
  Description of Artificial Sequence: Synthetic oligonucleotide
  Antisense strand to SEQ ID NO: 731182
acauuccauggcuuucaaa

SEQ ID NO: 731184 - RNA, 19 nt, Artificial Sequence
  Description of Artificial Sequence: Synthetic oligonucleotide
  Sense strand starting at position 881 of SEQ ID NO: 586612
gucagaagucccuagcuga

SEQ ID NO: 731185 - RNA, 19 nt, Artificial Sequence
  Description of Artificial Sequence: Synthetic oligonucleotide
  Antisense strand to SEQ ID NO: 731184
ucagcuagggacuucugac

SEQ ID NO: 731186 - RNA, 19 nt, Artificial Sequence
  Description of Artificial Sequence: Synthetic oligonucleotide
  Sense strand starting at position 951 of SEQ ID NO: 586612
cguggacucucaccuggaa

SEQ ID NO: 731187 - RNA, 19 nt, Artificial Sequence
  Description of Artificial Sequence: Synthetic oligonucleotide
  Antisense strand to SEQ ID NO: 731186
uuccaggugagaguccacg

SEQ ID NO: 731188 - RNA, 19 nt, Artificial Sequence
  Description of Artificial Sequence: Synthetic oligonucleotide
  Sense strand starting at position 997 of SEQ ID NO: 586612
ggcuaagauuaugugggau

SEQ ID NO: 731189 - RNA, 19 nt, Artificial Sequence
  Description of Artificial Sequence: Synthetic oligonucleotide
  Antisense strand to SEQ ID NO: 731188
aucccacauaaucuuagcc

SEQ ID NO: 731190 - RNA, 19 nt, Artificial Sequence
  Description of Artificial Sequence: Synthetic oligonucleotide
  Sense strand starting at position 1062 of SEQ ID NO: 586612
aggcuucuccuuuaaucag

SEQ ID NO: 731191 - RNA, 19 nt, Artificial Sequence
  Description of Artificial Sequence: Synthetic oligonucleotide
  Antisense strand to SEQ ID NO: 731190
cugauuaaaggagaagccu

SEQ ID NO: 731192 - RNA, 19 nt, Artificial Sequence
  Description of Artificial Sequence: Synthetic oligonucleotide
  Sense strand starting at position 1112 of SEQ ID NO: 586612
aaugcucccggcguuaauu

SEQ ID NO: 731193 - RNA, 19 nt, Artificial Sequence
  Description of Artificial Sequence: Synthetic oligonucleotide
  Antisense strand to SEQ ID NO: 731192
aauuaacgccgggagcauu

SEQ ID NO: 731194 - RNA, 19 nt, Artificial Sequence
  Description of Artificial Sequence: Synthetic oligonucleotide
  Sense strand starting at position 1158 of SEQ ID NO: 586612
gaacuuggccgcuaggaaa

SEQ ID NO: 731195 - RNA, 19 nt, Artificial Sequence
  Description of Artificial Sequence: Synthetic oligonucleotide
  Antisense strand to SEQ ID NO: 731194
uuuccuagcggccaaguuc

SEQ ID NO: 731196 - RNA, 19 nt, Artificial Sequence
  Description of Artificial Sequence: Synthetic oligonucleotide
  Sense strand starting at position 2366 of SEQ ID NO: 586612
gaccgugacagauauguau

SEQ ID NO: 731197 - RNA, 19 nt, Artificial Sequence
  Description of Artificial Sequence: Synthetic oligonucleotide
  Antisense strand to SEQ ID NO: 731196
auacauaucugucacgguc

SEQ ID NO: 731198 - RNA, 19 nt, Artificial Sequence
  Description of Artificial Sequence: Synthetic oligonucleotide
  Sense strand starting at position 2385 of SEQ ID NO: 586612
uacauaauccuggaugugu

SEQ ID NO: 731199 - RNA, 19 nt, Artificial Sequence
  Description of Artificial Sequence: Synthetic oligonucleotide
  Antisense strand to SEQ ID NO: 731198
acacauccaggauuaugua

SEQ ID NO: 731200 - RNA, 19 nt, Artificial Sequence
  Description of Artificial Sequence: Synthetic oligonucleotide
  Sense strand starting at position 2456 of SEQ ID NO: 586612
agguguuugcaauauacuc

SEQ ID NO: 731201 - RNA, 19 nt, Artificial Sequence
  Description of Artificial Sequence: Synthetic oligonucleotide
  Antisense strand to SEQ ID NO: 731200
gaguauauugcaaacaccu

SEQ ID NO: 731202 - RNA, 19 nt, Artificial Sequence
  Description of Artificial Sequence: Synthetic oligonucleotide
  Sense strand starting at position 2492 of SEQ ID NO: 586612
aggccauaggguuaaaguu

SEQ ID NO: 731203 - RNA, 19 nt, Artificial Sequence
  Description of Artificial Sequence: Synthetic oligonucleotide
  Antisense strand to SEQ ID NO: 731202
aacuuuaacccuauggccu

SEQ ID NO: 731204 - RNA, 19 nt, Artificial Sequence
  Description of Artificial Sequence: Synthetic oligonucleotide
  Sense strand starting at position 2499 of SEQ ID NO: 586612
aggguuaaaguuugggaau

SEQ ID NO: 731205 - RNA, 19 nt, Artificial Sequence
  Description of Artificial Sequence: Synthetic oligonucleotide
  Antisense strand to SEQ ID NO: 731204
auucccaaacuuuaacccu

SEQ ID NO: 731206 - RNA, 19 nt, Artificial Sequence
  Description of Artificial Sequence: Synthetic oligonucleotide
  Sense strand starting at position 2553 of SEQ ID NO: 586612
uggagauuaugaguuuauu

SEQ ID NO: 731207 - RNA, 19 nt, Artificial Sequence
  Description of Artificial Sequence: Synthetic oligonucleotide
  Antisense strand to SEQ ID NO: 731206
aauaaacucauaaucucca

SEQ ID NO: 731208 - RNA, 19 nt, Artificial Sequence
  Description of Artificial Sequence: Synthetic oligonucleotide
  Sense strand starting at position 2583 of SEQ ID NO: 586612
auacaacuugaggguauua

SEQ ID NO: 731209 - RNA, 19 nt, Artificial Sequence
  Description of Artificial Sequence: Synthetic oligonucleotide
  Antisense strand to SEQ ID NO: 731208
uaauacccucaaguuguau

SEQ ID NO: 731210 - RNA, 19 nt, Artificial Sequence
  Description of Artificial Sequence: Synthetic oligonucleotide
  Sense strand starting at position 2682 of SEQ ID NO: 586612
agaggaaagucagcucuaa

SEQ ID NO: 731211 - RNA, 19 nt, Artificial Sequence
  Description of Artificial Sequence: Synthetic oligonucleotide
  Antisense strand to SEQ ID NO: 731210
uuagagcugacuuuccucu

SEQ ID NO: 731212 - RNA, 19 nt, Artificial Sequence
  Description of Artificial Sequence: Synthetic oligonucleotide
  Sense strand starting at position 2686 of SEQ ID NO: 586612
gaaagucagcucuaaagcu

SEQ ID NO: 731213 - RNA, 19 nt, Artificial Sequence
  Description of Artificial Sequence: Synthetic oligonucleotide
  Antisense strand to SEQ ID NO: 731212
agcuuuagagcugacuuuc

SEQ ID NO: 731214 - RNA, 19 nt, Artificial Sequence
  Description of Artificial Sequence: Synthetic oligonucleotide
  Sense strand starting at position 2707 of SEQ ID NO: 586612
uggcuuuggaaauggauua

SEQ ID NO: 731215 - RNA, 19 nt, Artificial Sequence
  Description of Artificial Sequence: Synthetic oligonucleotide
  Antisense strand to SEQ ID NO: 731214
uaauccauuuccaaagcca

SEQ ID NO: 731216 - RNA, 19 nt, Artificial Sequence
  Description of Artificial Sequence: Synthetic oligonucleotide
  Sense strand starting at position 2774 of SEQ ID NO: 586612
gccucaauccuugagguaa

SEQ ID NO: 731217 - RNA, 19 nt, Artificial Sequence
  Description of Artificial Sequence: Synthetic oligonucleotide
  Antisense strand to SEQ ID NO: 731216
uuaccucaaggauugaggc

SEQ ID NO: 731218 - RNA, 19 nt, Artificial Sequence
  Description of Artificial Sequence: Synthetic oligonucleotide
  Sense strand starting at position 2802 of SEQ ID NO: 586612
cuaaguaacucuuuaagag

SEQ ID NO: 731219 - RNA, 19 nt, Artificial Sequence
  Description of Artificial Sequence: Synthetic oligonucleotide
  Antisense strand to SEQ ID NO: 731218
cucuuaaagaguuacuuag

SEQ ID NO: 731220 - RNA, 19 nt, Artificial Sequence
  Description of Artificial Sequence: Synthetic oligonucleotide
  Sense strand starting at position 2917 of SEQ ID NO: 586612
augguuugccuguucgcaa

SEQ ID NO: 731221 - RNA, 19 nt, Artificial Sequence
  Description of Artificial Sequence: Synthetic oligonucleotide
  Antisense strand to SEQ ID NO: 731220
uugcgaacaggcaaaccau

SEQ ID NO: 731222 - RNA, 19 nt, Artificial Sequence
  Description of Artificial Sequence: Synthetic oligonucleotide
  Sense strand starting at position 3175 of SEQ ID NO: 586612
ucagccuuuccugaaaggu

SEQ ID NO: 731223 - RNA, 19 nt, Artificial Sequence
  Description of Artificial Sequence: Synthetic oligonucleotide
  Antisense strand to SEQ ID NO: 731222
accuuucaggaaaggcuga

SEQ ID NO: 731224 - RNA, 19 nt, Artificial Sequence
  Description of Artificial Sequence: Synthetic oligonucleotide
  Sense strand starting at position 3208 of SEQ ID NO: 586612
ggaaucucuugauuggauc

SEQ ID NO: 731225 - RNA, 19 nt, Artificial Sequence
  Description of Artificial Sequence: Synthetic oligonucleotide
  Antisense strand to SEQ ID NO: 731224
gauccaaucaagagauucc

SEQ ID NO: 731226 - RNA, 19 nt, Artificial Sequence
  Description of Artificial Sequence: Synthetic oligonucleotide
  Sense strand starting at position 3343 of SEQ ID NO: 586612
cugagaaugucuccuccau

SEQ ID NO: 731227 - RNA, 19 nt, Artificial Sequence
  Description of Artificial Sequence: Synthetic oligonucleotide
  Antisense strand to SEQ ID NO: 731226
auggaggagacauucucag

SEQ ID NO: 731228 - RNA, 19 nt, Artificial Sequence
  Description of Artificial Sequence: Synthetic oligonucleotide
  Sense strand starting at position 3366 of SEQ ID NO: 586612
gcucauuucuucccaguga

SEQ ID NO: 731229 - RNA, 19 nt, Artificial Sequence
  Description of Artificial Sequence: Synthetic oligonucleotide
  Antisense strand to SEQ ID NO: 731228
ucacugggaagaaaugagc

SEQ ID NO: 731230 - RNA, 19 nt, Artificial Sequence
  Description of Artificial Sequence: Synthetic oligonucleotide
  Sense strand starting at position 3419 of SEQ ID NO: 586612
auguaugugaugugggaga

SEQ ID NO: 731231 - RNA, 19 nt, Artificial Sequence
  Description of Artificial Sequence: Synthetic oligonucleotide
  Antisense strand to SEQ ID NO: 731230
ucucccacaucacauacau

SEQ ID NO: 731232 - RNA, 19 nt, Artificial Sequence
  Description of Artificial Sequence: Synthetic oligonucleotide
  Sense strand starting at position 3667 of SEQ ID NO: 586612
cuuaaaguaucgguaggau

SEQ ID NO: 731233 - RNA, 19 nt, Artificial Sequence
  Description of Artificial Sequence: Synthetic oligonucleotide
  Antisense strand to SEQ ID NO: 731232
auccuaccgauacuuuaag

SEQ ID NO: 731234 - RNA, 19 nt, Artificial Sequence
  Description of Artificial Sequence: Synthetic oligonucleotide
  Sense strand starting at position 3670 of SEQ ID NO: 586612
aaaguaucgguaggauauc

SEQ ID NO: 731235 - RNA, 19 nt, Artificial Sequence
  Description of Artificial Sequence: Synthetic oligonucleotide
  Antisense strand to SEQ ID NO: 731234
gauauccuaccgauacuuu

SEQ ID NO: 731236 - RNA, 19 nt, Artificial Sequence
  Description of Artificial Sequence: Synthetic oligonucleotide
  Sense strand starting at position 3696 of SEQ ID NO: 586612
ucuaaauuacugggacauc

SEQ ID NO: 731237 - RNA, 19 nt, Artificial Sequence
  Description of Artificial Sequence: Synthetic oligonucleotide
  Antisense strand to SEQ ID NO: 731236
gaugucccaguaauuuaga

SEQ ID NO: 731238 - RNA, 19 nt, Artificial Sequence
  Description of Artificial Sequence: Synthetic oligonucleotide
  Sense strand starting at position 3813 of SEQ ID NO: 586612
aguucuagcaaaugggaaa

SEQ ID NO: 731239 - RNA, 19 nt, Artificial Sequence
  Description of Artificial Sequence: Synthetic oligonucleotide
  Antisense strand to SEQ ID NO: 731238
uuucccauuugcuagaacu

SEQ ID NO: 731240 - RNA, 19 nt, Artificial Sequence
  Description of Artificial Sequence: Synthetic oligonucleotide
  Sense strand starting at position 3878 of SEQ ID NO: 586612
cagauagauuuauaguaga

SEQ ID NO: 731241 - RNA, 19 nt, Artificial Sequence
  Description of Artificial Sequence: Synthetic oligonucleotide
  Antisense strand to SEQ ID NO: 731240
ucuacuauaaaucuaucug

SEQ ID NO: 731242 - RNA, 19 nt, Artificial Sequence
  Description of Artificial Sequence: Synthetic oligonucleotide
  Sense strand starting at position 3940 of SEQ ID NO: 586612
uaaaguauccauggguaaa

SEQ ID NO: 731243 - RNA, 19 nt, Artificial Sequence
  Description of Artificial Sequence: Synthetic oligonucleotide
  Antisense strand to SEQ ID NO: 731242
uuuacccauggauacuuua

SEQ ID NO: 731244 - RNA, 19 nt, Artificial Sequence
  Description of Artificial Sequence: Synthetic oligonucleotide
  Sense strand starting at position 3962 of SEQ ID NO: 586612
uguugucacugauuugcuu

SEQ ID NO: 731245 - RNA, 19 nt, Artificial Sequence
  Description of Artificial Sequence: Synthetic oligonucleotide
  Antisense strand to SEQ ID NO: 731244
aagcaaaucagugacaaca

SEQ ID NO: 731246 - RNA, 19 nt, Artificial Sequence
  Description of Artificial Sequence: Synthetic oligonucleotide
  Sense strand starting at position 39 of SEQ ID NO: 586613
agauuagucuaguuguaga

SEQ ID NO: 731247 - RNA, 19 nt, Artificial Sequence
  Description of Artificial Sequence: Synthetic oligonucleotide
  Antisense strand to SEQ ID NO: 731246
ucuacaacuagacuaaucu

SEQ ID NO: 731248 - RNA, 19 nt, Artificial Sequence
  Description of Artificial Sequence: Synthetic oligonucleotide
  Sense strand starting at position 198 of SEQ ID NO: 586613
ggauaaaguuuaucuuguc

SEQ ID NO: 731249 - RNA, 19 nt, Artificial Sequence
  Description of Artificial Sequence: Synthetic oligonucleotide
  Antisense strand to SEQ ID NO: 731248
gacaagauaaacuuuaucc

SEQ ID NO: 731250 - RNA, 19 nt, Artificial Sequence
  Description of Artificial Sequence: Synthetic oligonucleotide
  Sense strand starting at position 274 of SEQ ID NO: 586613
ggauuauucccaggugaua

SEQ ID NO: 731251 - RNA, 19 nt, Artificial Sequence
  Description of Artificial Sequence: Synthetic oligonucleotide
  Antisense strand to SEQ ID NO: 731250
uaucaccugggaauaaucc

SEQ ID NO: 731252 - RNA, 19 nt, Artificial Sequence
  Description of Artificial Sequence: Synthetic oligonucleotide
  Sense strand starting at position 283 of SEQ ID NO: 586613
ccaggugauauguaaaguu

SEQ ID NO: 731253 - RNA, 19 nt, Artificial Sequence
  Description of Artificial Sequence: Synthetic oligonucleotide
  Antisense strand to SEQ ID NO: 731252
aacuuuacauaucaccugg

SEQ ID NO: 731254 - RNA, 19 nt, Artificial Sequence
  Description of Artificial Sequence: Synthetic oligonucleotide
  Sense strand starting at position 363 of SEQ ID NO: 586613
gagcucuugcccugauuuc

SEQ ID NO: 731255 - RNA, 19 nt, Artificial Sequence
  Description of Artificial Sequence: Synthetic oligonucleotide
  Antisense strand to SEQ ID NO: 731254
gaaaucagggcaagagcuc

SEQ ID NO: 731256 - RNA, 19 nt, Artificial Sequence
  Description of Artificial Sequence: Synthetic oligonucleotide
  Sense strand starting at position 412 of SEQ ID NO: 586613
acaagccuuugauccgauu

SEQ ID NO: 731257 - RNA, 19 nt, Artificial Sequence
  Description of Artificial Sequence: Synthetic oligonucleotide
  Antisense strand to SEQ ID NO: 731256
aaucggaucaaaggcuugu

SEQ ID NO: 731258 - RNA, 19 nt, Artificial Sequence
  Description of Artificial Sequence: Synthetic oligonucleotide
  Sense strand starting at position 494 of SEQ ID NO: 586613
gauggaugauguguagaac

SEQ ID NO: 731259 - RNA, 19 nt, Artificial Sequence
  Description of Artificial Sequence: Synthetic oligonucleotide
  Antisense strand to SEQ ID NO: 731258
guucuacacaucauccauc

SEQ ID NO: 731260 - RNA, 19 nt, Artificial Sequence
  Description of Artificial Sequence: Synthetic oligonucleotide
  Sense strand starting at position 646 of SEQ ID NO: 586613
ucgcccugauuccuaacaa

SEQ ID NO: 731261 - RNA, 19 nt, Artificial Sequence
  Description of Artificial Sequence: Synthetic oligonucleotide
  Antisense strand to SEQ ID NO: 731260
uuguuaggaaucagggcga

SEQ ID NO: 731262 - RNA, 19 nt, Artificial Sequence
  Description of Artificial Sequence: Synthetic oligonucleotide
  Sense strand starting at position 1258 of SEQ ID NO: 586613
cugugaugagaugguucuu

SEQ ID NO: 731263 - RNA, 19 nt, Artificial Sequence
  Description of Artificial Sequence: Synthetic oligonucleotide
  Antisense strand to SEQ ID NO: 731262
aagaaccaucucaucacag

SEQ ID NO: 731264 - RNA, 19 nt, Artificial Sequence
  Description of Artificial Sequence: Synthetic oligonucleotide
  Sense strand starting at position 1316 of SEQ ID NO: 586613
ccugaaaucuuucccucga

SEQ ID NO: 731265 - RNA, 19 nt, Artificial Sequence
  Description of Artificial Sequence: Synthetic oligonucleotide
  Antisense strand to SEQ ID NO: 731264
ucgagggaaagauuucagg

SEQ ID NO: 731266 - RNA, 19 nt, Artificial Sequence
  Description of Artificial Sequence: Synthetic oligonucleotide
  Sense strand starting at position 2321 of SEQ ID NO: 586613
agaugugcccucggaacau

SEQ ID NO: 731267 - RNA, 19 nt, Artificial Sequence
  Description of Artificial Sequence: Synthetic oligonucleotide
  Antisense strand to SEQ ID NO: 731266
auguuccgagggcacaucu

SEQ ID NO: 731268 - RNA, 19 nt, Artificial Sequence
  Description of Artificial Sequence: Synthetic oligonucleotide
  Sense strand starting at position 2330 of SEQ ID NO: 586613
cucggaacaucccuuguaa

SEQ ID NO: 731269 - RNA, 19 nt, Artificial Sequence
  Description of Artificial Sequence: Synthetic oligonucleotide
  Antisense strand to SEQ ID NO: 731268
uuacaagggauguuccgag

SEQ ID NO: 731270 - RNA, 19 nt, Artificial Sequence
  Description of Artificial Sequence: Synthetic oligonucleotide
  Sense strand starting at position 2569 of SEQ ID NO: 586613
gguaguaguagccauaauu

SEQ ID NO: 731271 - RNA, 19 nt, Artificial Sequence
  Description of Artificial Sequence: Synthetic oligonucleotide
  Antisense strand to SEQ ID NO: 731270
aauuauggcuacuacuacc

SEQ ID NO: 731272 - RNA, 19 nt, Artificial Sequence
  Description of Artificial Sequence: Synthetic oligonucleotide
  Sense strand starting at position 2610 of SEQ ID NO: 586613
uguggagauguguaacauu

SEQ ID NO: 731273 - RNA, 19 nt, Artificial Sequence
  Description of Artificial Sequence: Synthetic oligonucleotide
  Antisense strand to SEQ ID NO: 731272
aauguuacacaucuccaca

SEQ ID NO: 731274 - RNA, 19 nt, Artificial Sequence
  Description of Artificial Sequence: Synthetic oligonucleotide
  Sense strand starting at position 2617 of SEQ ID NO: 586613
auguguaacauugggcauu

SEQ ID NO: 731275 - RNA, 19 nt, Artificial Sequence
  Description of Artificial Sequence: Synthetic oligonucleotide
  Antisense strand to SEQ ID NO: 731274
aaugcccaauguuacacau

SEQ ID NO: 731276 - RNA, 19 nt, Artificial Sequence
  Description of Artificial Sequence: Synthetic oligonucleotide
  Sense strand starting at position 2619 of SEQ ID NO: 586613
guguaacauugggcauuaa

SEQ ID NO: 731277 - RNA, 19 nt, Artificial Sequence
  Description of Artificial Sequence: Synthetic oligonucleotide
  Antisense strand to SEQ ID NO: 731276
uuaaugcccaauguuacac

SEQ ID NO: 731278 - RNA, 19 nt, Artificial Sequence
  Description of Artificial Sequence: Synthetic oligonucleotide
  Sense strand starting at position 2795 of SEQ ID NO: 586613
aucucagauucuguaaaug

SEQ ID NO: 731279 - RNA, 19 nt, Artificial Sequence
  Description of Artificial Sequence: Synthetic oligonucleotide
  Antisense strand to SEQ ID NO: 731278
cauuuacagaaucugagau

SEQ ID NO: 731280 - RNA, 19 nt, Artificial Sequence
  Description of Artificial Sequence: Synthetic oligonucleotide
  Sense strand starting at position 2804 of SEQ ID NO: 586613
ucuguaaaugggugaguua

SEQ ID NO: 731281 - RNA, 19 nt, Artificial Sequence
  Description of Artificial Sequence: Synthetic oligonucleotide
  Antisense strand to SEQ ID NO: 731280
uaacucacccauuuacaga

SEQ ID NO: 731282 - RNA, 19 nt, Artificial Sequence
  Description of Artificial Sequence: Synthetic oligonucleotide
  Sense strand starting at position 2805 of SEQ ID NO: 586613
cuguaaaugggugaguuau

SEQ ID NO: 731283 - RNA, 19 nt, Artificial Sequence
  Description of Artificial Sequence: Synthetic oligonucleotide
  Antisense strand to SEQ ID NO: 731282
auaacucacccauuuacag

SEQ ID NO: 731284 - RNA, 19 nt, Artificial Sequence
  Description of Artificial Sequence: Synthetic oligonucleotide
  Sense strand starting at position 2883 of SEQ ID NO: 586613
uggcccacucauuauaagu

SEQ ID NO: 731285 - RNA, 19 nt, Artificial Sequence
  Description of Artificial Sequence: Synthetic oligonucleotide
  Antisense strand to SEQ ID NO: 731284
acuuauaaugagugggcca

SEQ ID NO: 731286 - RNA, 19 nt, Artificial Sequence
  Description of Artificial Sequence: Synthetic oligonucleotide
  Sense strand starting at position 2910 of SEQ ID NO: 586613
ggcacauuuguuuguggca

SEQ ID NO: 731287 - RNA, 19 nt, Artificial Sequence
  Description of Artificial Sequence: Synthetic oligonucleotide
  Antisense strand to SEQ ID NO: 731286
ugccacaaacaaaugugcc

SEQ ID NO: 731288 - RNA, 19 nt, Artificial Sequence
  Description of Artificial Sequence: Synthetic oligonucleotide
  Sense strand starting at position 2911 of SEQ ID NO: 586613
gcacauuuguuuguggcau

SEQ ID NO: 731289 - RNA, 19 nt, Artificial Sequence
  Description of Artificial Sequence: Synthetic oligonucleotide
  Antisense strand to SEQ ID NO: 731288
augccacaaacaaaugugc

SEQ ID NO: 731290 - RNA, 19 nt, Artificial Sequence
  Description of Artificial Sequence: Synthetic oligonucleotide
  Sense strand starting at position 2960 of SEQ ID NO: 586613
acaugaaagucucuguaua

SEQ ID NO: 731291 - RNA, 19 nt, Artificial Sequence
  Description of Artificial Sequence: Synthetic oligonucleotide
  Antisense strand to SEQ ID NO: 731290
uauacagagacuuucaugu

SEQ ID NO: 731292 - RNA, 19 nt, Artificial Sequence
  Description of Artificial Sequence: Synthetic oligonucleotide
  Sense strand starting at position 2962 of SEQ ID NO: 586613
augaaagucucuguauaug

SEQ ID NO: 731293 - RNA, 19 nt, Artificial Sequence
  Description of Artificial Sequence: Synthetic oligonucleotide
  Antisense strand to SEQ ID NO: 731292
cauauacagagacuuucau

SEQ ID NO: 731294 - RNA, 19 nt, Artificial Sequence
  Description of Artificial Sequence: Synthetic oligonucleotide
  Sense strand starting at position 3141 of SEQ ID NO: 586613
augguauuaacauguugag

SEQ ID NO: 731295 - RNA, 19 nt, Artificial Sequence
  Description of Artificial Sequence: Synthetic oligonucleotide
  Antisense strand to SEQ ID NO: 731294
cucaacauguuaauaccau

SEQ ID NO: 731296 - RNA, 19 nt, Artificial Sequence
  Description of Artificial Sequence: Synthetic oligonucleotide
  Sense strand starting at position 3147 of SEQ ID NO: 586613
uuaacauguugaggaauuu

SEQ ID NO: 731297 - RNA, 19 nt, Artificial Sequence
  Description of Artificial Sequence: Synthetic oligonucleotide
  Antisense strand to SEQ ID NO: 731296
aaauuccucaacauguuaa

SEQ ID NO: 731298 - RNA, 19 nt, Artificial Sequence
  Description of Artificial Sequence: Synthetic oligonucleotide
  Sense strand starting at position 3259 of SEQ ID NO: 586613
uuucucaagucauuaaagu

SEQ ID NO: 731299 - RNA, 19 nt, Artificial Sequence
  Description of Artificial Sequence: Synthetic oligonucleotide
  Antisense strand to SEQ ID NO: 731298
acuuuaaugacuugagaaa

SEQ ID NO: 731300 - RNA, 19 nt, Artificial Sequence
  Description of Artificial Sequence: Synthetic oligonucleotide
  Sense strand starting at position 3260 of SEQ ID NO: 586613
uucucaagucauuaaaguc

SEQ ID NO: 731301 - RNA, 19 nt, Artificial Sequence
  Description of Artificial Sequence: Synthetic oligonucleotide
  Antisense strand to SEQ ID NO: 731300
gacuuuaaugacuugagaa

SEQ ID NO: 731302 - RNA, 19 nt, Artificial Sequence
  Description of Artificial Sequence: Synthetic oligonucleotide
  Sense strand starting at position 3342 of SEQ ID NO: 586613
auuagauauuaggcauugu

SEQ ID NO: 731303 - RNA, 19 nt, Artificial Sequence
  Description of Artificial Sequence: Synthetic oligonucleotide
  Antisense strand to SEQ ID NO: 731302
acaaugccuaauaucuaau

SEQ ID NO: 731304 - RNA, 19 nt, Artificial Sequence
  Description of Artificial Sequence: Synthetic oligonucleotide
  Sense strand starting at position 3346 of SEQ ID NO: 586613
gauauuaggcauuguuuaa

SEQ ID NO: 731305 - RNA, 19 nt, Artificial Sequence
  Description of Artificial Sequence: Synthetic oligonucleotide
  Antisense strand to SEQ ID NO: 731304
uuaaacaaugccuaauauc

SEQ ID NO: 731306 - RNA, 19 nt, Artificial Sequence
  Description of Artificial Sequence: Synthetic oligonucleotide
  Sense strand starting at position 3350 of SEQ ID NO: 586613
uuaggcauuguuuaaggau

SEQ ID NO: 731307 - RNA, 19 nt, Artificial Sequence
  Description of Artificial Sequence: Synthetic oligonucleotide
  Antisense strand to SEQ ID NO: 731306
auccuuaaacaaugccuaa

SEQ ID NO: 731308 - RNA, 19 nt, Artificial Sequence
  Description of Artificial Sequence: Synthetic oligonucleotide
  Sense strand starting at position 3404 of SEQ ID NO: 586613
ggaacauaaucugugugca

SEQ ID NO: 731309 - RNA, 19 nt, Artificial Sequence
  Description of Artificial Sequence: Synthetic oligonucleotide
  Antisense strand to SEQ ID NO: 731308
ugcacacagauuauguucc

SEQ ID NO: 731310 - RNA, 19 nt, Artificial Sequence
  Description of Artificial Sequence: Synthetic oligonucleotide
  Sense strand starting at position 3405 of SEQ ID NO: 586613
gaacauaaucugugugcau

SEQ ID NO: 731311 - RNA, 19 nt, Artificial Sequence
  Description of Artificial Sequence: Synthetic oligonucleotide
  Antisense strand to SEQ ID NO: 731310
augcacacagauuauguuc

SEQ ID NO: 731312 - RNA, 19 nt, Artificial Sequence
  Description of Artificial Sequence: Synthetic oligonucleotide
  Sense strand starting at position 3467 of SEQ ID NO: 586613
aucacaugauauguguauu

SEQ ID NO: 731313 - RNA, 19 nt, Artificial Sequence
  Description of Artificial Sequence: Synthetic oligonucleotide
  Antisense strand to SEQ ID NO: 731312
aauacacauaucaugugau

SEQ ID NO: 731314 - RNA, 19 nt, Artificial Sequence
  Description of Artificial Sequence: Synthetic oligonucleotide
  Sense strand starting at position 3497 of SEQ ID NO: 586613
ugacgaauaguguacaaau

SEQ ID NO: 731315 - RNA, 19 nt, Artificial Sequence
  Description of Artificial Sequence: Synthetic oligonucleotide
  Antisense strand to SEQ ID NO: 731314
auuuguacacuauucguca

SEQ ID NO: 731316 - RNA, 19 nt, Artificial Sequence
  Description of Artificial Sequence: Synthetic oligonucleotide
  Sense strand starting at position 3506 of SEQ ID NO: 586613
guguacaaauuccuuccaa

SEQ ID NO: 731317 - RNA, 19 nt, Artificial Sequence
  Description of Artificial Sequence: Synthetic oligonucleotide
  Antisense strand to SEQ ID NO: 731316
uuggaaggaauuuguacac

SEQ ID NO: 731318 - RNA, 19 nt, Artificial Sequence
  Description of Artificial Sequence: Synthetic oligonucleotide
  Sense strand starting at position 3655 of SEQ ID NO: 586613
auuggugacaucgagugau

SEQ ID NO: 731319 - RNA, 19 nt, Artificial Sequence
  Description of Artificial Sequence: Synthetic oligonucleotide
  Antisense strand to SEQ ID NO: 731318
aucacucgaugucaccaau

SEQ ID NO: 731320 - RNA, 19 nt, Artificial Sequence
  Description of Artificial Sequence: Synthetic oligonucleotide
  Sense strand starting at position 3714 of SEQ ID NO: 586613
caugucagggugugagaau

SEQ ID NO: 731321 - RNA, 19 nt, Artificial Sequence
  Description of Artificial Sequence: Synthetic oligonucleotide
  Antisense strand to SEQ ID NO: 731320
auucucacacccugacaug

SEQ ID NO: 731322 - RNA, 19 nt, Artificial Sequence
  Description of Artificial Sequence: Synthetic oligonucleotide
  Sense strand starting at position 3881 of SEQ ID NO: 586613
agaagcuugucaucuuuag

SEQ ID NO: 731323 - RNA, 19 nt, Artificial Sequence
  Description of Artificial Sequence: Synthetic oligonucleotide
  Antisense strand to SEQ ID NO: 731322
cuaaagaugacaagcuucu

SEQ ID NO: 731324 - RNA, 19 nt, Artificial Sequence
  Description of Artificial Sequence: Synthetic oligonucleotide
  Sense strand starting at position 3885 of SEQ ID NO: 586613
gcuugucaucuuuagguau

SEQ ID NO: 731325 - RNA, 19 nt, Artificial Sequence
  Description of Artificial Sequence: Synthetic oligonucleotide
  Antisense strand to SEQ ID NO: 731324
auaccuaaagaugacaagc

SEQ ID NO: 731326 - RNA, 19 nt, Artificial Sequence
  Description of Artificial Sequence: Synthetic oligonucleotide
  Sense strand starting at position 36 of SEQ ID NO: 586614
uguauuacaguuugauaug

SEQ ID NO: 731327 - RNA, 19 nt, Artificial Sequence
  Description of Artificial Sequence: Synthetic oligonucleotide
  Antisense strand to SEQ ID NO: 731326
cauaucaaacuguaauaca

SEQ ID NO: 731328 - RNA, 19 nt, Artificial Sequence
  Description of Artificial Sequence: Synthetic oligonucleotide
  Sense strand starting at position 37 of SEQ ID NO: 586614
guauuacaguuugauaugu

SEQ ID NO: 731329 - RNA, 19 nt, Artificial Sequence
  Description of Artificial Sequence: Synthetic oligonucleotide
  Antisense strand to SEQ ID NO: 731328
acauaucaaacuguaauac

SEQ ID NO: 731330 - RNA, 19 nt, Artificial Sequence
  Description of Artificial Sequence: Synthetic oligonucleotide
  Sense strand starting at position 48 of SEQ ID NO: 586614
ugauauguuaagggaggua

SEQ ID NO: 731331 - RNA, 19 nt, Artificial Sequence
  Description of Artificial Sequence: Synthetic oligonucleotide
  Antisense strand to SEQ ID NO: 731330
uaccucccuuaacauauca

SEQ ID NO: 731332 - RNA, 19 nt, Artificial Sequence
  Description of Artificial Sequence: Synthetic oligonucleotide
  Sense strand starting at position 51 of SEQ ID NO: 586614
uauguuaagggagguaauu

SEQ ID NO: 731333 - RNA, 19 nt, Artificial Sequence
  Description of Artificial Sequence: Synthetic oligonucleotide
  Antisense strand to SEQ ID NO: 731332
aauuaccucccuuaacaua

SEQ ID NO: 731334 - RNA, 19 nt, Artificial Sequence
  Description of Artificial Sequence: Synthetic oligonucleotide
  Sense strand starting at position 93 of SEQ ID NO: 586614
auaauugcuuucucuggau

SEQ ID NO: 731335 - RNA, 19 nt, Artificial Sequence
  Description of Artificial Sequence: Synthetic oligonucleotide
  Antisense strand to SEQ ID NO: 731334
auccagagaaagcaauuau

SEQ ID NO: 731336 - RNA, 19 nt, Artificial Sequence
  Description of Artificial Sequence: Synthetic oligonucleotide
  Sense strand starting at position 96 of SEQ ID NO: 586614
auugcuuucucuggauauu

SEQ ID NO: 731337 - RNA, 19 nt, Artificial Sequence
  Description of Artificial Sequence: Synthetic oligonucleotide
  Antisense strand to SEQ ID NO: 731336
aauauccagagaaagcaau

SEQ ID NO: 731338 - RNA, 19 nt, Artificial Sequence
  Description of Artificial Sequence: Synthetic oligonucleotide
  Sense strand starting at position 97 of SEQ ID NO: 586614
uugcuuucucuggauauua

SEQ ID NO: 731339 - RNA, 19 nt, Artificial Sequence
  Description of Artificial Sequence: Synthetic oligonucleotide
  Antisense strand to SEQ ID NO: 731338
uaauauccagagaaagcaa

SEQ ID NO: 731340 - RNA, 19 nt, Artificial Sequence
  Description of Artificial Sequence: Synthetic oligonucleotide
  Sense strand starting at position 99 of SEQ ID NO: 586614
gcuuucucuggauauuaca

SEQ ID NO: 731341 - RNA, 19 nt, Artificial Sequence
  Description of Artificial Sequence: Synthetic oligonucleotide
  Antisense strand to SEQ ID NO: 731340
uguaauauccagagaaagc

SEQ ID NO: 731342 - RNA, 19 nt, Artificial Sequence
  Description of Artificial Sequence: Synthetic oligonucleotide
  Sense strand starting at position 291 of SEQ ID NO: 586614
ugcacauguuaggucacaa

SEQ ID NO: 731343 - RNA, 19 nt, Artificial Sequence
  Description of Artificial Sequence: Synthetic oligonucleotide
  Antisense strand to SEQ ID NO: 731342
uugugaccuaacaugugca

SEQ ID NO: 731344 - RNA, 19 nt, Artificial Sequence
  Description of Artificial Sequence: Synthetic oligonucleotide
  Sense strand starting at position 897 of SEQ ID NO: 586614
guaacuauacgccaaccaa

SEQ ID NO: 731345 - RNA, 19 nt, Artificial Sequence
  Description of Artificial Sequence: Synthetic oligonucleotide
  Antisense strand to SEQ ID NO: 731344
uugguuggcguauaguuac

SEQ ID NO: 731346 - RNA, 19 nt, Artificial Sequence
  Description of Artificial Sequence: Synthetic oligonucleotide
  Sense strand starting at position 934 of SEQ ID NO: 586614
guggacuaauuccuagacu

SEQ ID NO: 731347 - RNA, 19 nt, Artificial Sequence
  Description of Artificial Sequence: Synthetic oligonucleotide
  Antisense strand to SEQ ID NO: 731346
agucuaggaauuaguccac

SEQ ID NO: 731348 - RNA, 19 nt, Artificial Sequence
  Description of Artificial Sequence: Synthetic oligonucleotide
  Sense strand starting at position 935 of SEQ ID NO: 586614
uggacuaauuccuagacuc

SEQ ID NO: 731349 - RNA, 19 nt, Artificial Sequence
  Description of Artificial Sequence: Synthetic oligonucleotide
  Antisense strand to SEQ ID NO: 731348
gagucuaggaauuagucca

SEQ ID NO: 731350 - RNA, 19 nt, Artificial Sequence
  Description of Artificial Sequence: Synthetic oligonucleotide
  Sense strand starting at position 1103 of SEQ ID NO: 586614
agaacuaaucucgguccaa

SEQ ID NO: 731351 - RNA, 19 nt, Artificial Sequence
  Description of Artificial Sequence: Synthetic oligonucleotide
  Antisense strand to SEQ ID NO: 731350
uuggaccgagauuaguucu

SEQ ID NO: 731352 - RNA, 19 nt, Artificial Sequence
  Description of Artificial Sequence: Synthetic oligonucleotide
  Sense strand starting at position 1385 of SEQ ID NO: 586614
ugugauacauuggaucaac

SEQ ID NO: 731353 - RNA, 19 nt, Artificial Sequence
  Description of Artificial Sequence: Synthetic oligonucleotide
  Antisense strand to SEQ ID NO: 731352
guugauccaauguaucaca

SEQ ID NO: 731354 - RNA, 19 nt, Artificial Sequence
  Description of Artificial Sequence: Synthetic oligonucleotide
  Sense strand starting at position 3132 of SEQ ID NO: 586614
aggucugguuacccuuaaa

SEQ ID NO: 731355 - RNA, 19 nt, Artificial Sequence
  Description of Artificial Sequence: Synthetic oligonucleotide
  Antisense strand to SEQ ID NO: 731354
uuuaaggguaaccagaccu

SEQ ID NO: 731356 - RNA, 19 nt, Artificial Sequence
  Description of Artificial Sequence: Synthetic oligonucleotide
  Sense strand starting at position 3171 of SEQ ID NO: 586614
agcggaucucucggcauaa

SEQ ID NO: 731357 - RNA, 19 nt, Artificial Sequence
  Description of Artificial Sequence: Synthetic oligonucleotide
  Antisense strand to SEQ ID NO: 731356
uuaugccgagagauccgcu

SEQ ID NO: 731358 - RNA, 19 nt, Artificial Sequence
  Description of Artificial Sequence: Synthetic oligonucleotide
  Sense strand starting at position 3172 of SEQ ID NO: 586614
gcggaucucucggcauaaa

SEQ ID NO: 731359 - RNA, 19 nt, Artificial Sequence
  Description of Artificial Sequence: Synthetic oligonucleotide
  Antisense strand to SEQ ID NO: 731358
uuuaugccgagagauccgc

SEQ ID NO: 731360 - RNA, 19 nt, Artificial Sequence
  Description of Artificial Sequence: Synthetic oligonucleotide
  Sense strand starting at position 3173 of SEQ ID NO: 586614
cggaucucucggcauaaac

SEQ ID NO: 731361 - RNA, 19 nt, Artificial Sequence
  Description of Artificial Sequence: Synthetic oligonucleotide
  Antisense strand to SEQ ID NO: 731360
guuuaugccgagagauccg

SEQ ID NO: 731362 - RNA, 19 nt, Artificial Sequence
  Description of Artificial Sequence: Synthetic oligonucleotide
  Sense strand starting at position 59 of SEQ ID NO: 586615
gaggaaugcucucuaugaa

SEQ ID NO: 731363 - RNA, 19 nt, Artificial Sequence
  Description of Artificial Sequence: Synthetic oligonucleotide
  Antisense strand to SEQ ID NO: 731362
uucauagagagcauuccuc

SEQ ID NO: 731364 - RNA, 19 nt, Artificial Sequence
  Description of Artificial Sequence: Synthetic oligonucleotide
  Sense strand starting at position 83 of SEQ ID NO: 586615
agagauuaguuauccaguu

SEQ ID NO: 731365 - RNA, 19 nt, Artificial Sequence
  Description of Artificial Sequence: Synthetic oligonucleotide
  Antisense strand to SEQ ID NO: 731364
aacuggauaacuaaucucu

SEQ ID NO: 731366 - RNA, 19 nt, Artificial Sequence
  Description of Artificial Sequence: Synthetic oligonucleotide
  Sense strand starting at position 84 of SEQ ID NO: 586615
gagauuaguuauccaguua

SEQ ID NO: 731367 - RNA, 19 nt, Artificial Sequence
  Description of Artificial Sequence: Synthetic oligonucleotide
  Antisense strand to SEQ ID NO: 731366
uaacuggauaacuaaucuc

SEQ ID NO: 731368 - RNA, 19 nt, Artificial Sequence
  Description of Artificial Sequence: Synthetic oligonucleotide
  Sense strand starting at position 103 of SEQ ID NO: 586615
agaauuugcuugccugauc

SEQ ID NO: 731369 - RNA, 19 nt, Artificial Sequence
  Description of Artificial Sequence: Synthetic oligonucleotide
  Antisense strand to SEQ ID NO: 731368
gaucaggcaagcaaauucu

SEQ ID NO: 731370 - RNA, 19 nt, Artificial Sequence
  Description of Artificial Sequence: Synthetic oligonucleotide
  Sense strand starting at position 401 of SEQ ID NO: 586615
ugugauauccagcaauucu

SEQ ID NO: 731371 - RNA, 19 nt, Artificial Sequence
  Description of Artificial Sequence: Synthetic oligonucleotide
  Antisense strand to SEQ ID NO: 731370
agaauugcuggauaucaca

SEQ ID NO: 731372 - RNA, 19 nt, Artificial Sequence
  Description of Artificial Sequence: Synthetic oligonucleotide
  Sense strand starting at position 420 of SEQ ID NO: 586615
auaaucucucuguagguua

SEQ ID NO: 731373 - RNA, 19 nt, Artificial Sequence
  Description of Artificial Sequence: Synthetic oligonucleotide
  Antisense strand to SEQ ID NO: 731372
uaaccuacagagagauuau

SEQ ID NO: 731374 - RNA, 19 nt, Artificial Sequence
  Description of Artificial Sequence: Synthetic oligonucleotide
  Sense strand starting at position 425 of SEQ ID NO: 586615
cucucuguagguuauacua

SEQ ID NO: 731375 - RNA, 19 nt, Artificial Sequence
  Description of Artificial Sequence: Synthetic oligonucleotide
  Antisense strand to SEQ ID NO: 731374
uaguauaaccuacagagag

SEQ ID NO: 731376 - RNA, 19 nt, Artificial Sequence
  Description of Artificial Sequence: Synthetic oligonucleotide
  Sense strand starting at position 511 of SEQ ID NO: 586615
gauugugguaaugauagua

SEQ ID NO: 731377 - RNA, 19 nt, Artificial Sequence
  Description of Artificial Sequence: Synthetic oligonucleotide
  Antisense strand to SEQ ID NO: 731376
uacuaucauuaccacaauc

SEQ ID NO: 731378 - RNA, 19 nt, Artificial Sequence
  Description of Artificial Sequence: Synthetic oligonucleotide
  Sense strand starting at position 792 of SEQ ID NO: 586615
auuuauucugcugguuauc

SEQ ID NO: 731379 - RNA, 19 nt, Artificial Sequence
  Description of Artificial Sequence: Synthetic oligonucleotide
  Antisense strand to SEQ ID NO: 731378
gauaaccagcagaauaaau

SEQ ID NO: 731380 - RNA, 19 nt, Artificial Sequence
  Description of Artificial Sequence: Synthetic oligonucleotide
  Sense strand starting at position 875 of SEQ ID NO: 586615
ugaagagguaauuguuuaa

SEQ ID NO: 731381 - RNA, 19 nt, Artificial Sequence
  Description of Artificial Sequence: Synthetic oligonucleotide
  Antisense strand to SEQ ID NO: 731380
uuaaacaauuaccucuuca

SEQ ID NO: 731382 - RNA, 19 nt, Artificial Sequence
  Description of Artificial Sequence: Synthetic oligonucleotide
  Sense strand starting at position 878 of SEQ ID NO: 586615
agagguaauuguuuaauca

SEQ ID NO: 731383 - RNA, 19 nt, Artificial Sequence
  Description of Artificial Sequence: Synthetic oligonucleotide
  Antisense strand to SEQ ID NO: 731382
ugauuaaacaauuaccucu

SEQ ID NO: 731384 - RNA, 19 nt, Artificial Sequence
  Description of Artificial Sequence: Synthetic oligonucleotide
  Sense strand starting at position 965 of SEQ ID NO: 586615
agcaguccacugcagaauu

SEQ ID NO: 731385 - RNA, 19 nt, Artificial Sequence
  Description of Artificial Sequence: Synthetic oligonucleotide
  Antisense strand to SEQ ID NO: 731384
aauucugcaguggacugcu

SEQ ID NO: 731386 - RNA, 19 nt, Artificial Sequence
  Description of Artificial Sequence: Synthetic oligonucleotide
  Sense strand starting at position 1038 of SEQ ID NO: 586615
gugauaaucuuucugcaaa

SEQ ID NO: 731387 - RNA, 19 nt, Artificial Sequence
  Description of Artificial Sequence: Synthetic oligonucleotide
  Antisense strand to SEQ ID NO: 731386
uuugcagaaagauuaucac

SEQ ID NO: 731388 - RNA, 19 nt, Artificial Sequence
  Description of Artificial Sequence: Synthetic oligonucleotide
  Sense strand starting at position 1085 of SEQ ID NO: 586615
ccaguucuaacgggacaac

SEQ ID NO: 731389 - RNA, 19 nt, Artificial Sequence
  Description of Artificial Sequence: Synthetic oligonucleotide
  Antisense strand to SEQ ID NO: 731388
guugucccguuagaacugg

SEQ ID NO: 731390 - RNA, 19 nt, Artificial Sequence
  Description of Artificial Sequence: Synthetic oligonucleotide
  Sense strand starting at position 1086 of SEQ ID NO: 586615
caguucuaacgggacaacu

SEQ ID NO: 731391 - RNA, 19 nt, Artificial Sequence
  Description of Artificial Sequence: Synthetic oligonucleotide
  Antisense strand to SEQ ID NO: 731390
aguugucccguuagaacug

SEQ ID NO: 731392 - RNA, 19 nt, Artificial Sequence
  Description of Artificial Sequence: Synthetic oligonucleotide
  Sense strand starting at position 1190 of SEQ ID NO: 586615
gcagcuuauugaucaaaga

SEQ ID NO: 731393 - RNA, 19 nt, Artificial Sequence
  Description of Artificial Sequence: Synthetic oligonucleotide
  Antisense strand to SEQ ID NO: 731392
ucuuugaucaauaagcugc

SEQ ID NO: 731394 - RNA, 19 nt, Artificial Sequence
  Description of Artificial Sequence: Synthetic oligonucleotide
  Sense strand starting at position 1272 of SEQ ID NO: 586615
ucagguugugaccauuauc

SEQ ID NO: 731395 - RNA, 19 nt, Artificial Sequence
  Description of Artificial Sequence: Synthetic oligonucleotide
  Antisense strand to SEQ ID NO: 731394
gauaauggucacaaccuga

SEQ ID NO: 731396 - RNA, 19 nt, Artificial Sequence
  Description of Artificial Sequence: Synthetic oligonucleotide
  Sense strand starting at position 1275 of SEQ ID NO: 586615
gguugugaccauuauccuu

SEQ ID NO: 731397 - RNA, 19 nt, Artificial Sequence
  Description of Artificial Sequence: Synthetic oligonucleotide
  Antisense strand to SEQ ID NO: 731396
aaggauaauggucacaacc

SEQ ID NO: 731398 - RNA, 19 nt, Artificial Sequence
  Description of Artificial Sequence: Synthetic oligonucleotide
  Sense strand starting at position 1360 of SEQ ID NO: 586615
auaacugauagaugugagu

SEQ ID NO: 731399 - RNA, 19 nt, Artificial Sequence
  Description of Artificial Sequence: Synthetic oligonucleotide
  Antisense strand to SEQ ID NO: 731398
acucacaucuaucaguuau

SEQ ID NO: 731400 - RNA, 19 nt, Artificial Sequence
  Description of Artificial Sequence: Synthetic oligonucleotide
  Sense strand starting at position 1362 of SEQ ID NO: 586615
aacugauagaugugaguag

SEQ ID NO: 731401 - RNA, 19 nt, Artificial Sequence
  Description of Artificial Sequence: Synthetic oligonucleotide
  Antisense strand to SEQ ID NO: 731400
cuacucacaucuaucaguu

SEQ ID NO: 731402 - RNA, 19 nt, Artificial Sequence
  Description of Artificial Sequence: Synthetic oligonucleotide
  Sense strand starting at position 1713 of SEQ ID NO: 586615
gucagagcacauuacacau

SEQ ID NO: 731403 - RNA, 19 nt, Artificial Sequence
  Description of Artificial Sequence: Synthetic oligonucleotide
  Antisense strand to SEQ ID NO: 731402
auguguaaugugcucugac

SEQ ID NO: 731404 - RNA, 19 nt, Artificial Sequence
  Description of Artificial Sequence: Synthetic oligonucleotide
  Sense strand starting at position 1906 of SEQ ID NO: 586615
gucaaugacaagugagaau

SEQ ID NO: 731405 - RNA, 19 nt, Artificial Sequence
  Description of Artificial Sequence: Synthetic oligonucleotide
  Antisense strand to SEQ ID NO: 731404
auucucacuugucauugac

SEQ ID NO: 731406 - RNA, 19 nt, Artificial Sequence
  Description of Artificial Sequence: Synthetic oligonucleotide
  Sense strand starting at position 2006 of SEQ ID NO: 586615
gcuaacaaugacuguccua

SEQ ID NO: 731407 - RNA, 19 nt, Artificial Sequence
  Description of Artificial Sequence: Synthetic oligonucleotide
  Antisense strand to SEQ ID NO: 731406
uaggacagucauuguuagc

SEQ ID NO: 731408 - RNA, 19 nt, Artificial Sequence
  Description of Artificial Sequence: Synthetic oligonucleotide
  Sense strand starting at position 2081 of SEQ ID NO: 586615
gguucccguuuauuuaaca

SEQ ID NO: 731409 - RNA, 19 nt, Artificial Sequence
  Description of Artificial Sequence: Synthetic oligonucleotide
  Antisense strand to SEQ ID NO: 731408
uguuaaauaaacgggaacc

SEQ ID NO: 731410 - RNA, 19 nt, Artificial Sequence
  Description of Artificial Sequence: Synthetic oligonucleotide
  Sense strand starting at position 2183 of SEQ ID NO: 586615
uggaaaucugcucagcuaa

SEQ ID NO: 731411 - RNA, 19 nt, Artificial Sequence
  Description of Artificial Sequence: Synthetic oligonucleotide
  Antisense strand to SEQ ID NO: 731410
uuagcugagcagauuucca

SEQ ID NO: 731412 - RNA, 19 nt, Artificial Sequence
  Description of Artificial Sequence: Synthetic oligonucleotide
  Sense strand starting at position 2286 of SEQ ID NO: 586615
gggucaccuuuccuccaau

SEQ ID NO: 731413 - RNA, 19 nt, Artificial Sequence
  Description of Artificial Sequence: Synthetic oligonucleotide
  Antisense strand to SEQ ID NO: 731412
auuggaggaaaggugaccc

SEQ ID NO: 731414 - RNA, 19 nt, Artificial Sequence
  Description of Artificial Sequence: Synthetic oligonucleotide
  Sense strand starting at position 2311 of SEQ ID NO: 586615
gaggaaacauuggaauaaa

SEQ ID NO: 731415 - RNA, 19 nt, Artificial Sequence
  Description of Artificial Sequence: Synthetic oligonucleotide
  Antisense strand to SEQ ID NO: 731414
uuuauuccaauguuuccuc

SEQ ID NO: 731416 - RNA, 19 nt, Artificial Sequence
  Description of Artificial Sequence: Synthetic oligonucleotide
  Sense strand starting at position 2671 of SEQ ID NO: 586615
ccauaacagccguaauaaa

SEQ ID NO: 731417 - RNA, 19 nt, Artificial Sequence
  Description of Artificial Sequence: Synthetic oligonucleotide
  Antisense strand to SEQ ID NO: 731416
uuuauuacggcuguuaugg

SEQ ID NO: 731418 - RNA, 19 nt, Artificial Sequence
  Description of Artificial Sequence: Synthetic oligonucleotide
  Sense strand starting at position 2679 of SEQ ID NO: 586615
gccguaauaaauuagcaga

SEQ ID NO: 731419 - RNA, 19 nt, Artificial Sequence
  Description of Artificial Sequence: Synthetic oligonucleotide
  Antisense strand to SEQ ID NO: 731418
ucugcuaauuuauuacggc

SEQ ID NO: 731420 - RNA, 19 nt, Artificial Sequence
  Description of Artificial Sequence: Synthetic oligonucleotide
  Sense strand starting at position 2681 of SEQ ID NO: 586615
cguaauaaauuagcagaaa

SEQ ID NO: 731421 - RNA, 19 nt, Artificial Sequence
  Description of Artificial Sequence: Synthetic oligonucleotide
  Antisense strand to SEQ ID NO: 731420
uuucugcuaauuuauuacg

SEQ ID NO: 731422 - RNA, 19 nt, Artificial Sequence
  Description of Artificial Sequence: Synthetic oligonucleotide
  Sense strand starting at position 2692 of SEQ ID NO: 586615
agcagaaacuuagcaacuu

SEQ ID NO: 731423 - RNA, 19 nt, Artificial Sequence
  Description of Artificial Sequence: Synthetic oligonucleotide
  Antisense strand to SEQ ID NO: 731422
aaguugcuaaguuucugcu

SEQ ID NO: 731424 - RNA, 19 nt, Artificial Sequence
  Description of Artificial Sequence: Synthetic oligonucleotide
  Sense strand starting at position 2765 of SEQ ID NO: 586615
guauuacaaggcugaucaa

SEQ ID NO: 731425 - RNA, 19 nt, Artificial Sequence
  Description of Artificial Sequence: Synthetic oligonucleotide
  Antisense strand to SEQ ID NO: 731424
uugaucagccuuguaauac

SEQ ID NO: 731426 - RNA, 19 nt, Artificial Sequence
  Description of Artificial Sequence: Synthetic oligonucleotide
  Sense strand starting at position 3131 of SEQ ID NO: 586615
ccugccauguauuugcaua

SEQ ID NO: 731427 - RNA, 19 nt, Artificial Sequence
  Description of Artificial Sequence: Synthetic oligonucleotide
  Antisense strand to SEQ ID NO: 731426
uaugcaaauacauggcagg

SEQ ID NO: 731428 - RNA, 19 nt, Artificial Sequence
  Description of Artificial Sequence: Synthetic oligonucleotide
  Sense strand starting at position 3133 of SEQ ID NO: 586615
ugccauguauuugcauaau

SEQ ID NO: 731429 - RNA, 19 nt, Artificial Sequence
  Description of Artificial Sequence: Synthetic oligonucleotide
  Antisense strand to SEQ ID NO: 731428
auuaugcaaauacauggca

SEQ ID NO: 731430 - RNA, 19 nt, Artificial Sequence
  Description of Artificial Sequence: Synthetic oligonucleotide
  Sense strand starting at position 3169 of SEQ ID NO: 586615
uguuccuuguuauuuguau

SEQ ID NO: 731431 - RNA, 19 nt, Artificial Sequence
  Description of Artificial Sequence: Synthetic oligonucleotide
  Antisense strand to SEQ ID NO: 731430
auacaaauaacaaggaaca

SEQ ID NO: 731432 - RNA, 19 nt, Artificial Sequence
  Description of Artificial Sequence: Synthetic oligonucleotide
  Sense strand starting at position 3213 of SEQ ID NO: 586615
ugugccucagcccuguaau

SEQ ID NO: 731433 - RNA, 19 nt, Artificial Sequence
  Description of Artificial Sequence: Synthetic oligonucleotide
  Antisense strand to SEQ ID NO: 731432
auuacagggcugaggcaca

SEQ ID NO: 731434 - RNA, 19 nt, Artificial Sequence
  Description of Artificial Sequence: Synthetic oligonucleotide
  Sense strand starting at position 3501 of SEQ ID NO: 586615
augucugucuuauuuccau

SEQ ID NO: 731435 - RNA, 19 nt, Artificial Sequence
  Description of Artificial Sequence: Synthetic oligonucleotide
  Antisense strand to SEQ ID NO: 731434
auggaaauaagacagacau

SEQ ID NO: 731436 - RNA, 19 nt, Artificial Sequence
  Description of Artificial Sequence: Synthetic oligonucleotide
  Sense strand starting at position 3507 of SEQ ID NO: 586615
gucuuauuuccauguucca

SEQ ID NO: 731437 - RNA, 19 nt, Artificial Sequence
  Description of Artificial Sequence: Synthetic oligonucleotide
  Antisense strand to SEQ ID NO: 731436
uggaacauggaaauaagac

SEQ ID NO: 731438 - RNA, 19 nt, Artificial Sequence
  Description of Artificial Sequence: Synthetic oligonucleotide
  Sense strand starting at position 3872 of SEQ ID NO: 586615
ggaguucagcaggaagcuu

SEQ ID NO: 731439 - RNA, 19 nt, Artificial Sequence
  Description of Artificial Sequence: Synthetic oligonucleotide
  Antisense strand to SEQ ID NO: 731438
aagcuuccugcugaacucc

SEQ ID NO: 731440 - RNA, 19 nt, Artificial Sequence
  Description of Artificial Sequence: Synthetic oligonucleotide
  Sense strand starting at position 3968 of SEQ ID NO: 586615
uuuagauaguagcccaaau

SEQ ID NO: 731441 - RNA, 19 nt, Artificial Sequence
  Description of Artificial Sequence: Synthetic oligonucleotide
  Antisense strand to SEQ ID NO: 731440
auuugggcuacuaucuaaa

SEQ ID NO: 731442 - RNA, 19 nt, Artificial Sequence
  Description of Artificial Sequence: Synthetic oligonucleotide
  Sense strand starting at position 173 of SEQ ID NO: 586616
ccuaacucacaacgugauu

SEQ ID NO: 731443 - RNA, 19 nt, Artificial Sequence
  Description of Artificial Sequence: Synthetic oligonucleotide
  Antisense strand to SEQ ID NO: 731442
aaucacguugugaguuagg

SEQ ID NO: 731444 - RNA, 19 nt, Artificial Sequence
  Description of Artificial Sequence: Synthetic oligonucleotide
  Sense strand starting at position 251 of SEQ ID NO: 586616
auuuaucugcugugucuua

SEQ ID NO: 731445 - RNA, 19 nt, Artificial Sequence
  Description of Artificial Sequence: Synthetic oligonucleotide
  Antisense strand to SEQ ID NO: 731444
uaagacacagcagauaaau

SEQ ID NO: 731446 - RNA, 19 nt, Artificial Sequence
  Description of Artificial Sequence: Synthetic oligonucleotide
  Sense strand starting at position 297 of SEQ ID NO: 586616
gggcucucuuuguugacua

SEQ ID NO: 731447 - RNA, 19 nt, Artificial Sequence
  Description of Artificial Sequence: Synthetic oligonucleotide
  Antisense strand to SEQ ID NO: 731446
uagucaacaaagagagccc

SEQ ID NO: 731448 - RNA, 19 nt, Artificial Sequence
  Description of Artificial Sequence: Synthetic oligonucleotide
  Sense strand starting at position 299 of SEQ ID NO: 586616
gcucucuuuguugacuaaa

SEQ ID NO: 731449 - RNA, 19 nt, Artificial Sequence
  Description of Artificial Sequence: Synthetic oligonucleotide
  Antisense strand to SEQ ID NO: 731448
uuuagucaacaaagagagc

SEQ ID NO: 731450 - RNA, 19 nt, Artificial Sequence
  Description of Artificial Sequence: Synthetic oligonucleotide
  Sense strand starting at position 392 of SEQ ID NO: 586616
cgggagguccuagguuaga

SEQ ID NO: 731451 - RNA, 19 nt, Artificial Sequence
  Description of Artificial Sequence: Synthetic oligonucleotide
  Antisense strand to SEQ ID NO: 731450
ucuaaccuaggaccucccg

SEQ ID NO: 731452 - RNA, 19 nt, Artificial Sequence
  Description of Artificial Sequence: Synthetic oligonucleotide
  Sense strand starting at position 395 of SEQ ID NO: 586616
gagguccuagguuagagua

SEQ ID NO: 731453 - RNA, 19 nt, Artificial Sequence
  Description of Artificial Sequence: Synthetic oligonucleotide
  Antisense strand to SEQ ID NO: 731452
uacucuaaccuaggaccuc

SEQ ID NO: 731454 - RNA, 19 nt, Artificial Sequence
  Description of Artificial Sequence: Synthetic oligonucleotide
  Sense strand starting at position 408 of SEQ ID NO: 586616
agaguaagguguuugcacu

SEQ ID NO: 731455 - RNA, 19 nt, Artificial Sequence
  Description of Artificial Sequence: Synthetic oligonucleotide
  Antisense strand to SEQ ID NO: 731454
agugcaaacaccuuacucu

SEQ ID NO: 731456 - RNA, 19 nt, Artificial Sequence
  Description of Artificial Sequence: Synthetic oligonucleotide
  Sense strand starting at position 486 of SEQ ID NO: 586616
augggaaaucucugcagag

SEQ ID NO: 731457 - RNA, 19 nt, Artificial Sequence
  Description of Artificial Sequence: Synthetic oligonucleotide
  Antisense strand to SEQ ID NO: 731456
cucugcagagauuucccau

SEQ ID NO: 731458 - RNA, 19 nt, Artificial Sequence
  Description of Artificial Sequence: Synthetic oligonucleotide
  Sense strand starting at position 490 of SEQ ID NO: 586616
gaaaucucugcagaggcuu

SEQ ID NO: 731459 - RNA, 19 nt, Artificial Sequence
  Description of Artificial Sequence: Synthetic oligonucleotide
  Antisense strand to SEQ ID NO: 731458
aagccucugcagagauuuc

SEQ ID NO: 731460 - RNA, 19 nt, Artificial Sequence
  Description of Artificial Sequence: Synthetic oligonucleotide
  Sense strand starting at position 501 of SEQ ID NO: 586616
agaggcuucagguguggau

SEQ ID NO: 731461 - RNA, 19 nt, Artificial Sequence
  Description of Artificial Sequence: Synthetic oligonucleotide
  Antisense strand to SEQ ID NO: 731460
auccacaccugaagccucu

SEQ ID NO: 731462 - RNA, 19 nt, Artificial Sequence
  Description of Artificial Sequence: Synthetic oligonucleotide
  Sense strand starting at position 503 of SEQ ID NO: 586616
aggcuucagguguggauau

SEQ ID NO: 731463 - RNA, 19 nt, Artificial Sequence
  Description of Artificial Sequence: Synthetic oligonucleotide
  Antisense strand to SEQ ID NO: 731462
auauccacaccugaagccu

SEQ ID NO: 731464 - RNA, 19 nt, Artificial Sequence
  Description of Artificial Sequence: Synthetic oligonucleotide
  Sense strand starting at position 515 of SEQ ID NO: 586616
uggauaugucuaugggcca

SEQ ID NO: 731465 - RNA, 19 nt, Artificial Sequence
  Description of Artificial Sequence: Synthetic oligonucleotide
  Antisense strand to SEQ ID NO: 731464
uggcccauagacauaucca

SEQ ID NO: 731466 - RNA, 19 nt, Artificial Sequence
  Description of Artificial Sequence: Synthetic oligonucleotide
  Sense strand starting at position 628 of SEQ ID NO: 586616
guuccaugaucccugaagu

SEQ ID NO: 731467 - RNA, 19 nt, Artificial Sequence
  Description of Artificial Sequence: Synthetic oligonucleotide
  Antisense strand to SEQ ID NO: 731466
acuucagggaucauggaac

SEQ ID NO: 731468 - RNA, 19 nt, Artificial Sequence
  Description of Artificial Sequence: Synthetic oligonucleotide
  Sense strand starting at position 629 of SEQ ID NO: 586616
uuccaugaucccugaaguc

SEQ ID NO: 731469 - RNA, 19 nt, Artificial Sequence
  Description of Artificial Sequence: Synthetic oligonucleotide
  Antisense strand to SEQ ID NO: 731468
gacuucagggaucauggaa

SEQ ID NO: 731470 - RNA, 19 nt, Artificial Sequence
  Description of Artificial Sequence: Synthetic oligonucleotide
  Sense strand starting at position 678 of SEQ ID NO: 586616
uagggcacugguuauaauu

SEQ ID NO: 731471 - RNA, 19 nt, Artificial Sequence
  Description of Artificial Sequence: Synthetic oligonucleotide
  Antisense strand to SEQ ID NO: 731470
aauuauaaccagugcccua

SEQ ID NO: 731472 - RNA, 19 nt, Artificial Sequence
  Description of Artificial Sequence: Synthetic oligonucleotide
  Sense strand starting at position 1168 of SEQ ID NO: 586616
cuaauaaugccuugcagaa

SEQ ID NO: 731473 - RNA, 19 nt, Artificial Sequence
  Description of Artificial Sequence: Synthetic oligonucleotide
  Antisense strand to SEQ ID NO: 731472
uucugcaaggcauuauuag

SEQ ID NO: 731474 - RNA, 19 nt, Artificial Sequence
  Description of Artificial Sequence: Synthetic oligonucleotide
  Sense strand starting at position 1227 of SEQ ID NO: 586616
gggcgcuuuccaagagguu

SEQ ID NO: 731475 - RNA, 19 nt, Artificial Sequence
  Description of Artificial Sequence: Synthetic oligonucleotide
  Antisense strand to SEQ ID NO: 731474
aaccucuuggaaagcgccc

SEQ ID NO: 731476 - RNA, 19 nt, Artificial Sequence
  Description of Artificial Sequence: Synthetic oligonucleotide
  Sense strand starting at position 1325 of SEQ ID NO: 586616
ccgguaaugcaauacucuu

SEQ ID NO: 731477 - RNA, 19 nt, Artificial Sequence
  Description of Artificial Sequence: Synthetic oligonucleotide
  Antisense strand to SEQ ID NO: 731476
aagaguauugcauuaccgg

SEQ ID NO: 731478 - RNA, 19 nt, Artificial Sequence
  Description of Artificial Sequence: Synthetic oligonucleotide
  Sense strand starting at position 1399 of SEQ ID NO: 586616
uucgauaugccacaucaua

SEQ ID NO: 731479 - RNA, 19 nt, Artificial Sequence
  Description of Artificial Sequence: Synthetic oligonucleotide
  Antisense strand to SEQ ID NO: 731478
uaugauguggcauaucgaa

SEQ ID NO: 731480 - RNA, 19 nt, Artificial Sequence
  Description of Artificial Sequence: Synthetic oligonucleotide
  Sense strand starting at position 1444 of SEQ ID NO: 586616
gccugcauucugcaggaaa

SEQ ID NO: 731481 - RNA, 19 nt, Artificial Sequence
  Description of Artificial Sequence: Synthetic oligonucleotide
  Antisense strand to SEQ ID NO: 731480
uuuccugcagaaugcaggc

SEQ ID NO: 731482 - RNA, 19 nt, Artificial Sequence
  Description of Artificial Sequence: Synthetic oligonucleotide
  Sense strand starting at position 1501 of SEQ ID NO: 586616
ucggguuccauggacaaga

SEQ ID NO: 731483 - RNA, 19 nt, Artificial Sequence
  Description of Artificial Sequence: Synthetic oligonucleotide
  Antisense strand to SEQ ID NO: 731482
ucuuguccauggaacccga

SEQ ID NO: 731484 - RNA, 19 nt, Artificial Sequence
  Description of Artificial Sequence: Synthetic oligonucleotide
  Sense strand starting at position 2659 of SEQ ID NO: 586616
gccuuccugccuuaagaag

SEQ ID NO: 731485 - RNA, 19 nt, Artificial Sequence
  Description of Artificial Sequence: Synthetic oligonucleotide
  Antisense strand to SEQ ID NO: 731484
cuucuuaaggcaggaaggc

SEQ ID NO: 731486 - RNA, 19 nt, Artificial Sequence
  Description of Artificial Sequence: Synthetic oligonucleotide
  Sense strand starting at position 2917 of SEQ ID NO: 586616
ggaguugacaucugucaag

SEQ ID NO: 731487 - RNA, 19 nt, Artificial Sequence
  Description of Artificial Sequence: Synthetic oligonucleotide
  Antisense strand to SEQ ID NO: 731486
cuugacagaugucaacucc

SEQ ID NO: 731488 - RNA, 19 nt, Artificial Sequence
  Description of Artificial Sequence: Synthetic oligonucleotide
  Sense strand starting at position 3039 of SEQ ID NO: 586616
uugcaucaagcagauauua

SEQ ID NO: 731489 - RNA, 19 nt, Artificial Sequence
  Description of Artificial Sequence: Synthetic oligonucleotide
  Antisense strand to SEQ ID NO: 731488
uaauaucugcuugaugcaa

SEQ ID NO: 731490 - RNA, 19 nt, Artificial Sequence
  Description of Artificial Sequence: Synthetic oligonucleotide
  Sense strand starting at position 3237 of SEQ ID NO: 586616
ggcgaauaguucuuccuaa

SEQ ID NO: 731491 - RNA, 19 nt, Artificial Sequence
  Description of Artificial Sequence: Synthetic oligonucleotide
  Antisense strand to SEQ ID NO: 731490
uuaggaagaacuauucgcc

SEQ ID NO: 731492 - RNA, 19 nt, Artificial Sequence
  Description of Artificial Sequence: Synthetic oligonucleotide
  Sense strand starting at position 3238 of SEQ ID NO: 586616
gcgaauaguucuuccuaag

SEQ ID NO: 731493 - RNA, 19 nt, Artificial Sequence
  Description of Artificial Sequence: Synthetic oligonucleotide
  Antisense strand to SEQ ID NO: 731492
cuuaggaagaacuauucgc

SEQ ID NO: 731494 - RNA, 19 nt, Artificial Sequence
  Description of Artificial Sequence: Synthetic oligonucleotide
  Sense strand starting at position 3267 of SEQ ID NO: 586616
gggcacucuucuguaggua

SEQ ID NO: 731495 - RNA, 19 nt, Artificial Sequence
  Description of Artificial Sequence: Synthetic oligonucleotide
  Antisense strand to SEQ ID NO: 731494
uaccuacagaagagugccc

SEQ ID NO: 731496 - RNA, 19 nt, Artificial Sequence
  Description of Artificial Sequence: Synthetic oligonucleotide
  Sense strand starting at position 3308 of SEQ ID NO: 586616
guacuugaaaccugguagu

SEQ ID NO: 731497 - RNA, 19 nt, Artificial Sequence
  Description of Artificial Sequence: Synthetic oligonucleotide
  Antisense strand to SEQ ID NO: 731496
acuaccagguuucaaguac

SEQ ID NO: 731498 - RNA, 19 nt, Artificial Sequence
  Description of Artificial Sequence: Synthetic oligonucleotide
  Sense strand starting at position 3490 of SEQ ID NO: 586616
agaaacugcccagauaugu

SEQ ID NO: 731499 - RNA, 19 nt, Artificial Sequence
  Description of Artificial Sequence: Synthetic oligonucleotide
  Antisense strand to SEQ ID NO: 731498
acauaucugggcaguuucu

SEQ ID NO: 731500 - RNA, 19 nt, Artificial Sequence
  Description of Artificial Sequence: Synthetic oligonucleotide
  Sense strand starting at position 3616 of SEQ ID NO: 586616
cgugcaacucuugaauggu

SEQ ID NO: 731501 - RNA, 19 nt, Artificial Sequence
  Description of Artificial Sequence: Synthetic oligonucleotide
  Antisense strand to SEQ ID NO: 731500
accauucaagaguugcacg

SEQ ID NO: 731502 - RNA, 19 nt, Artificial Sequence
  Description of Artificial Sequence: Synthetic oligonucleotide
  Sense strand starting at position 3619 of SEQ ID NO: 586616
gcaacucuugaauggucuu

SEQ ID NO: 731503 - RNA, 19 nt, Artificial Sequence
  Description of Artificial Sequence: Synthetic oligonucleotide
  Antisense strand to SEQ ID NO: 731502
aagaccauucaagaguugc

SEQ ID NO: 731504 - RNA, 19 nt, Artificial Sequence
  Description of Artificial Sequence: Synthetic oligonucleotide
  Sense strand starting at position 3632 of SEQ ID NO: 586616
ggucuuguccuguuguguu

SEQ ID NO: 731505 - RNA, 19 nt, Artificial Sequence
  Description of Artificial Sequence: Synthetic oligonucleotide
  Antisense strand to SEQ ID NO: 731504
aacacaacaggacaagacc

SEQ ID NO: 731506 - RNA, 19 nt, Artificial Sequence
  Description of Artificial Sequence: Synthetic oligonucleotide
  Sense strand starting at position 3732 of SEQ ID NO: 586616
ugcuauccugcuuaggauu

SEQ ID NO: 731507 - RNA, 19 nt, Artificial Sequence
  Description of Artificial Sequence: Synthetic oligonucleotide
  Antisense strand to SEQ ID NO: 731506
aauccuaagcaggauagca

SEQ ID NO: 731508 - RNA, 19 nt, Artificial Sequence
  Description of Artificial Sequence: Synthetic oligonucleotide
  Sense strand starting at position 3761 of SEQ ID NO: 586616
ccaguaagcccucaguaga

SEQ ID NO: 731509 - RNA, 19 nt, Artificial Sequence
  Description of Artificial Sequence: Synthetic oligonucleotide
  Antisense strand to SEQ ID NO: 731508
ucuacugagggcuuacugg

SEQ ID NO: 731510 - RNA, 19 nt, Artificial Sequence
  Description of Artificial Sequence: Synthetic oligonucleotide
  Sense strand starting at position 3764 of SEQ ID NO: 586616
guaagcccucaguagacaa

SEQ ID NO: 731511 - RNA, 19 nt, Artificial Sequence
  Description of Artificial Sequence: Synthetic oligonucleotide
  Antisense strand to SEQ ID NO: 731510
uugucuacugagggcuuac

SEQ ID NO: 731512 - RNA, 19 nt, Artificial Sequence
  Description of Artificial Sequence: Synthetic oligonucleotide
  Sense strand starting at position 3774 of SEQ ID NO: 586616
aguagacaaucguugguuu

SEQ ID NO: 731513 - RNA, 19 nt, Artificial Sequence
  Description of Artificial Sequence: Synthetic oligonucleotide
  Antisense strand to SEQ ID NO: 731512
aaaccaacgauugucuacu

SEQ ID NO: 731514 - RNA, 19 nt, Artificial Sequence
  Description of Artificial Sequence: Synthetic oligonucleotide
  Sense strand starting at position 3776 of SEQ ID NO: 586616
uagacaaucguugguuuga

SEQ ID NO: 731515 - RNA, 19 nt, Artificial Sequence
  Description of Artificial Sequence: Synthetic oligonucleotide
  Antisense strand to SEQ ID NO: 731514
ucaaaccaacgauugucua

SEQ ID NO: 731516 - RNA, 19 nt, Artificial Sequence
  Description of Artificial Sequence: Synthetic oligonucleotide
  Sense strand starting at position 3785 of SEQ ID NO: 586616
guugguuugagccagagca

SEQ ID NO: 731517 - RNA, 19 nt, Artificial Sequence
  Description of Artificial Sequence: Synthetic oligonucleotide
  Antisense strand to SEQ ID NO: 731516
ugcucuggcucaaaccaac

SEQ ID NO: 731518 - RNA, 19 nt, Artificial Sequence
  Description of Artificial Sequence: Synthetic oligonucleotide
  Sense strand starting at position 3802 of SEQ ID NO: 586616
caugcauuccgcccgugaa

SEQ ID NO: 731519 - RNA, 19 nt, Artificial Sequence
  Description of Artificial Sequence: Synthetic oligonucleotide
  Antisense strand to SEQ ID NO: 731518
uucacgggcggaaugcaug

SEQ ID NO: 731520 - RNA, 19 nt, Artificial Sequence
  Description of Artificial Sequence: Synthetic oligonucleotide
  Sense strand starting at position 3804 of SEQ ID NO: 586616
ugcauuccgcccgugaaga

SEQ ID NO: 731521 - RNA, 19 nt, Artificial Sequence
  Description of Artificial Sequence: Synthetic oligonucleotide
  Antisense strand to SEQ ID NO: 731520
ucuucacgggcggaaugca

SEQ ID NO: 731522 - RNA, 19 nt, Artificial Sequence
  Description of Artificial Sequence: Synthetic oligonucleotide
  Sense strand starting at position 12 of SEQ ID NO: 586617
cuaguuagccauuaggaaa

SEQ ID NO: 731523 - RNA, 19 nt, Artificial Sequence
  Description of Artificial Sequence: Synthetic oligonucleotide
  Antisense strand to SEQ ID NO: 731522
uuuccuaauggcuaacuag

SEQ ID NO: 731524 - RNA, 19 nt, Artificial Sequence
  Description of Artificial Sequence: Synthetic oligonucleotide
  Sense strand starting at position 85 of SEQ ID NO: 586617
cgccucuauuucccugaaa

SEQ ID NO: 731525 - RNA, 19 nt, Artificial Sequence
  Description of Artificial Sequence: Synthetic oligonucleotide
  Antisense strand to SEQ ID NO: 731524
uuucagggaaauagaggcg

SEQ ID NO: 731526 - RNA, 19 nt, Artificial Sequence
  Description of Artificial Sequence: Synthetic oligonucleotide
  Sense strand starting at position 100 of SEQ ID NO: 586617
gaaaguuaucaaugguuau

SEQ ID NO: 731527 - RNA, 19 nt, Artificial Sequence
  Description of Artificial Sequence: Synthetic oligonucleotide
  Antisense strand to SEQ ID NO: 731526
auaaccauugauaacuuuc

SEQ ID NO: 731528 - RNA, 19 nt, Artificial Sequence
  Description of Artificial Sequence: Synthetic oligonucleotide
  Sense strand starting at position 103 of SEQ ID NO: 586617
aguuaucaaugguuaugag

SEQ ID NO: 731529 - RNA, 19 nt, Artificial Sequence
  Description of Artificial Sequence: Synthetic oligonucleotide
  Antisense strand to SEQ ID NO: 731528
cucauaaccauugauaacu

SEQ ID NO: 731530 - RNA, 19 nt, Artificial Sequence
  Description of Artificial Sequence: Synthetic oligonucleotide
  Sense strand starting at position 112 of SEQ ID NO: 586617
ugguuaugagcggucuugu

SEQ ID NO: 731531 - RNA, 19 nt, Artificial Sequence
  Description of Artificial Sequence: Synthetic oligonucleotide
  Antisense strand to SEQ ID NO: 731530
acaagaccgcucauaacca

SEQ ID NO: 731532 - RNA, 19 nt, Artificial Sequence
  Description of Artificial Sequence: Synthetic oligonucleotide
  Sense strand starting at position 113 of SEQ ID NO: 586617
gguuaugagcggucuuguu

SEQ ID NO: 731533 - RNA, 19 nt, Artificial Sequence
  Description of Artificial Sequence: Synthetic oligonucleotide
  Antisense strand to SEQ ID NO: 731532
aacaagaccgcucauaacc

SEQ ID NO: 731534 - RNA, 19 nt, Artificial Sequence
  Description of Artificial Sequence: Synthetic oligonucleotide
  Sense strand starting at position 244 of SEQ ID NO: 586617
aaccaaucucagcgugaga

SEQ ID NO: 731535 - RNA, 19 nt, Artificial Sequence
  Description of Artificial Sequence: Synthetic oligonucleotide
  Antisense strand to SEQ ID NO: 731534
ucucacgcugagauugguu

SEQ ID NO: 731536 - RNA, 19 nt, Artificial Sequence
  Description of Artificial Sequence: Synthetic oligonucleotide
  Sense strand starting at position 259 of SEQ ID NO: 586617
gagagugagccaggaaguu

SEQ ID NO: 731537 - RNA, 19 nt, Artificial Sequence
  Description of Artificial Sequence: Synthetic oligonucleotide
  Antisense strand to SEQ ID NO: 731536
aacuuccuggcucacucuc

SEQ ID NO: 731538 - RNA, 19 nt, Artificial Sequence
  Description of Artificial Sequence: Synthetic oligonucleotide
  Sense strand starting at position 589 of SEQ ID NO: 586617
ccuggacauuuccaagacu

SEQ ID NO: 731539 - RNA, 19 nt, Artificial Sequence
  Description of Artificial Sequence: Synthetic oligonucleotide
  Antisense strand to SEQ ID NO: 731538
agucuuggaaauguccagg

SEQ ID NO: 731540 - RNA, 19 nt, Artificial Sequence
  Description of Artificial Sequence: Synthetic oligonucleotide
  Sense strand starting at position 655 of SEQ ID NO: 586617
acaccagaguccuuugaga

SEQ ID NO: 731541 - RNA, 19 nt, Artificial Sequence
  Description of Artificial Sequence: Synthetic oligonucleotide
  Antisense strand to SEQ ID NO: 731540
ucucaaaggacucuggugu

SEQ ID NO: 731542 - RNA, 19 nt, Artificial Sequence
  Description of Artificial Sequence: Synthetic oligonucleotide
  Sense strand starting at position 818 of SEQ ID NO: 586617
ggaugauauacacguugca

SEQ ID NO: 731543 - RNA, 19 nt, Artificial Sequence
  Description of Artificial Sequence: Synthetic oligonucleotide
  Antisense strand to SEQ ID NO: 731542
ugcaacguguauaucaucc

SEQ ID NO: 731544 - RNA, 19 nt, Artificial Sequence
  Description of Artificial Sequence: Synthetic oligonucleotide
  Sense strand starting at position 821 of SEQ ID NO: 586617
ugauauacacguugcaaga

SEQ ID NO: 731545 - RNA, 19 nt, Artificial Sequence
  Description of Artificial Sequence: Synthetic oligonucleotide
  Antisense strand to SEQ ID NO: 731544
ucuugcaacguguauauca

SEQ ID NO: 731546 - RNA, 19 nt, Artificial Sequence
  Description of Artificial Sequence: Synthetic oligonucleotide
  Sense strand starting at position 1013 of SEQ ID NO: 586617
gacagcaaugacuguccua

SEQ ID NO: 731547 - RNA, 19 nt, Artificial Sequence
  Description of Artificial Sequence: Synthetic oligonucleotide
  Antisense strand to SEQ ID NO: 731546
uaggacagucauugcuguc

SEQ ID NO: 731548 - RNA, 19 nt, Artificial Sequence
  Description of Artificial Sequence: Synthetic oligonucleotide
  Sense strand starting at position 1137 of SEQ ID NO: 586617
ccgguacucgaucauaucu

SEQ ID NO: 731549 - RNA, 19 nt, Artificial Sequence
  Description of Artificial Sequence: Synthetic oligonucleotide
  Antisense strand to SEQ ID NO: 731548
agauaugaucgaguaccgg

SEQ ID NO: 731550 - RNA, 19 nt, Artificial Sequence
  Description of Artificial Sequence: Synthetic oligonucleotide
  Sense strand starting at position 1143 of SEQ ID NO: 586617
cucgaucauaucuggauga

SEQ ID NO: 731551 - RNA, 19 nt, Artificial Sequence
  Description of Artificial Sequence: Synthetic oligonucleotide
  Antisense strand to SEQ ID NO: 731550
ucauccagauaugaucgag

SEQ ID NO: 731552 - RNA, 19 nt, Artificial Sequence
  Description of Artificial Sequence: Synthetic oligonucleotide
  Sense strand starting at position 1311 of SEQ ID NO: 586617
gagccagucgcaggagaaa

SEQ ID NO: 731553 - RNA, 19 nt, Artificial Sequence
  Description of Artificial Sequence: Synthetic oligonucleotide
  Antisense strand to SEQ ID NO: 731552
uuucuccugcgacuggcuc

SEQ ID NO: 731554 - RNA, 19 nt, Artificial Sequence
  Description of Artificial Sequence: Synthetic oligonucleotide
  Sense strand starting at position 2292 of SEQ ID NO: 586617
guuuaacagccucagaaau

SEQ ID NO: 731555 - RNA, 19 nt, Artificial Sequence
  Description of Artificial Sequence: Synthetic oligonucleotide
  Antisense strand to SEQ ID NO: 731554
auuucugaggcuguuaaac

SEQ ID NO: 731556 - RNA, 19 nt, Artificial Sequence
  Description of Artificial Sequence: Synthetic oligonucleotide
  Sense strand starting at position 2458 of SEQ ID NO: 586617
cgcggagucccagaaaguu

SEQ ID NO: 731557 - RNA, 19 nt, Artificial Sequence
  Description of Artificial Sequence: Synthetic oligonucleotide
  Antisense strand to SEQ ID NO: 731556
aacuuucugggacuccgcg

SEQ ID NO: 731558 - RNA, 19 nt, Artificial Sequence
  Description of Artificial Sequence: Synthetic oligonucleotide
  Sense strand starting at position 2500 of SEQ ID NO: 586617
uugcuaauaccugacaugu

SEQ ID NO: 731559 - RNA, 19 nt, Artificial Sequence
  Description of Artificial Sequence: Synthetic oligonucleotide
  Antisense strand to SEQ ID NO: 731558
acaugucagguauuagcaa

SEQ ID NO: 731560 - RNA, 19 nt, Artificial Sequence
  Description of Artificial Sequence: Synthetic oligonucleotide
  Sense strand starting at position 2668 of SEQ ID NO: 586617
gggagcaguucccuaaaua

SEQ ID NO: 731561 - RNA, 19 nt, Artificial Sequence
  Description of Artificial Sequence: Synthetic oligonucleotide
  Antisense strand to SEQ ID NO: 731560
uauuuagggaacugcuccc

SEQ ID NO: 731562 - RNA, 19 nt, Artificial Sequence
  Description of Artificial Sequence: Synthetic oligonucleotide
  Sense strand starting at position 2669 of SEQ ID NO: 586617
ggagcaguucccuaaauag

SEQ ID NO: 731563 - RNA, 19 nt, Artificial Sequence
  Description of Artificial Sequence: Synthetic oligonucleotide
  Antisense strand to SEQ ID NO: 731562
cuauuuagggaacugcucc

SEQ ID NO: 731564 - RNA, 19 nt, Artificial Sequence
  Description of Artificial Sequence: Synthetic oligonucleotide
  Sense strand starting at position 2693 of SEQ ID NO: 586617
cuacguagccauuaauuaa

SEQ ID NO: 731565 - RNA, 19 nt, Artificial Sequence
  Description of Artificial Sequence: Synthetic oligonucleotide
  Antisense strand to SEQ ID NO: 731564
uuaauuaauggcuacguag

SEQ ID NO: 731566 - RNA, 19 nt, Artificial Sequence
  Description of Artificial Sequence: Synthetic oligonucleotide
  Sense strand starting at position 2752 of SEQ ID NO: 586617
aaagaauccucucccgguu

SEQ ID NO: 731567 - RNA, 19 nt, Artificial Sequence
  Description of Artificial Sequence: Synthetic oligonucleotide
  Antisense strand to SEQ ID NO: 731566
aaccgggagaggauucuuu

SEQ ID NO: 731568 - RNA, 19 nt, Artificial Sequence
  Description of Artificial Sequence: Synthetic oligonucleotide
  Sense strand starting at position 2755 of SEQ ID NO: 586617
gaauccucucccgguugaa

SEQ ID NO: 731569 - RNA, 19 nt, Artificial Sequence
  Description of Artificial Sequence: Synthetic oligonucleotide
  Antisense strand to SEQ ID NO: 731568
uucaaccgggagaggauuc

SEQ ID NO: 731570 - RNA, 19 nt, Artificial Sequence
  Description of Artificial Sequence: Synthetic oligonucleotide
  Sense strand starting at position 2758 of SEQ ID NO: 586617
uccucucccgguugaaauu

SEQ ID NO: 731571 - RNA, 19 nt, Artificial Sequence
  Description of Artificial Sequence: Synthetic oligonucleotide
  Antisense strand to SEQ ID NO: 731570
aauuucaaccgggagagga

SEQ ID NO: 731572 - RNA, 19 nt, Artificial Sequence
  Description of Artificial Sequence: Synthetic oligonucleotide
  Sense strand starting at position 2764 of SEQ ID NO: 586617
cccgguugaaauugaaacu

SEQ ID NO: 731573 - RNA, 19 nt, Artificial Sequence
  Description of Artificial Sequence: Synthetic oligonucleotide
  Antisense strand to SEQ ID NO: 731572
aguuucaauuucaaccggg

SEQ ID NO: 731574 - RNA, 19 nt, Artificial Sequence
  Description of Artificial Sequence: Synthetic oligonucleotide
  Sense strand starting at position 2765 of SEQ ID NO: 586617
ccgguugaaauugaaacuu

SEQ ID NO: 731575 - RNA, 19 nt, Artificial Sequence
  Description of Artificial Sequence: Synthetic oligonucleotide
  Antisense strand to SEQ ID NO: 731574
aaguuucaauuucaaccgg

SEQ ID NO: 731576 - RNA, 19 nt, Artificial Sequence
  Description of Artificial Sequence: Synthetic oligonucleotide
  Sense strand starting at position 2785 of SEQ ID NO: 586617
aaauccuuugaguaacgau

SEQ ID NO: 731577 - RNA, 19 nt, Artificial Sequence
  Description of Artificial Sequence: Synthetic oligonucleotide
  Antisense strand to SEQ ID NO: 731576
aucguuacucaaaggauuu

SEQ ID NO: 731578 - RNA, 19 nt, Artificial Sequence
  Description of Artificial Sequence: Synthetic oligonucleotide
  Sense strand starting at position 2898 of SEQ ID NO: 586617
uagucuagcggcgagauaa

SEQ ID NO: 731579 - RNA, 19 nt, Artificial Sequence
  Description of Artificial Sequence: Synthetic oligonucleotide
  Antisense strand to SEQ ID NO: 731578
uuaucucgccgcuagacua

SEQ ID NO: 731580 - RNA, 19 nt, Artificial Sequence
  Description of Artificial Sequence: Synthetic oligonucleotide
  Sense strand starting at position 2899 of SEQ ID NO: 586617
agucuagcggcgagauaaa

SEQ ID NO: 731581 - RNA, 19 nt, Artificial Sequence
  Description of Artificial Sequence: Synthetic oligonucleotide
  Antisense strand to SEQ ID NO: 731580
uuuaucucgccgcuagacu

SEQ ID NO: 731582 - RNA, 19 nt, Artificial Sequence
  Description of Artificial Sequence: Synthetic oligonucleotide
  Sense strand starting at position 2906 of SEQ ID NO: 586617
cggcgagauaaacacauua

SEQ ID NO: 731583 - RNA, 19 nt, Artificial Sequence
  Description of Artificial Sequence: Synthetic oligonucleotide
  Antisense strand to SEQ ID NO: 731582
uaauguguuuaucucgccg

SEQ ID NO: 731584 - RNA, 19 nt, Artificial Sequence
  Description of Artificial Sequence: Synthetic oligonucleotide
  Sense strand starting at position 3238 of SEQ ID NO: 586617
gagugaauugugugcauuu

SEQ ID NO: 731585 - RNA, 19 nt, Artificial Sequence
  Description of Artificial Sequence: Synthetic oligonucleotide
  Antisense strand to SEQ ID NO: 731584
aaaugcacacaauucacuc

SEQ ID NO: 731586 - RNA, 19 nt, Artificial Sequence
  Description of Artificial Sequence: Synthetic oligonucleotide
  Sense strand starting at position 3405 of SEQ ID NO: 586617
gauagaguugaaugucacu

SEQ ID NO: 731587 - RNA, 19 nt, Artificial Sequence
  Description of Artificial Sequence: Synthetic oligonucleotide
  Antisense strand to SEQ ID NO: 731586
agugacauucaacucuauc

SEQ ID NO: 731588 - RNA, 19 nt, Artificial Sequence
  Description of Artificial Sequence: Synthetic oligonucleotide
  Sense strand starting at position 3410 of SEQ ID NO: 586617
aguugaaugucacuuuguu

SEQ ID NO: 731589 - RNA, 19 nt, Artificial Sequence
  Description of Artificial Sequence: Synthetic oligonucleotide
  Antisense strand to SEQ ID NO: 731588
aacaaagugacauucaacu

SEQ ID NO: 731590 - RNA, 19 nt, Artificial Sequence
  Description of Artificial Sequence: Synthetic oligonucleotide
  Sense strand starting at position 3491 of SEQ ID NO: 586617
guggcuauuuaaucugcau

SEQ ID NO: 731591 - RNA, 19 nt, Artificial Sequence
  Description of Artificial Sequence: Synthetic oligonucleotide
  Antisense strand to SEQ ID NO: 731590
augcagauuaaauagccac

SEQ ID NO: 731592 - RNA, 19 nt, Artificial Sequence
  Description of Artificial Sequence: Synthetic oligonucleotide
  Sense strand starting at position 3759 of SEQ ID NO: 586617
uucugaaguuccucuagac

SEQ ID NO: 731593 - RNA, 19 nt, Artificial Sequence
  Description of Artificial Sequence: Synthetic oligonucleotide
  Antisense strand to SEQ ID NO: 731592
gucuagaggaacuucagaa

SEQ ID NO: 731594 - RNA, 19 nt, Artificial Sequence
  Description of Artificial Sequence: Synthetic oligonucleotide
  Sense strand starting at position 3763 of SEQ ID NO: 586617
gaaguuccucuagacgauu

SEQ ID NO: 731595 - RNA, 19 nt, Artificial Sequence
  Description of Artificial Sequence: Synthetic oligonucleotide
  Antisense strand to SEQ ID NO: 731594
aaucgucuagaggaacuuc

SEQ ID NO: 731596 - RNA, 19 nt, Artificial Sequence
  Description of Artificial Sequence: Synthetic oligonucleotide
  Sense strand starting at position 3776 of SEQ ID NO: 586617
acgauuaacucuucguuaa

SEQ ID NO: 731597 - RNA, 19 nt, Artificial Sequence
  Description of Artificial Sequence: Synthetic oligonucleotide
  Antisense strand to SEQ ID NO: 731596
uuaacgaagaguuaaucgu

SEQ ID NO: 731598 - RNA, 19 nt, Artificial Sequence
  Description of Artificial Sequence: Synthetic oligonucleotide
  Sense strand starting at position 3819 of SEQ ID NO: 586617
agaauaauuuacuagcugu

SEQ ID NO: 731599 - RNA, 19 nt, Artificial Sequence
  Description of Artificial Sequence: Synthetic oligonucleotide
  Antisense strand to SEQ ID NO: 731598
acagcuaguaaauuauucu

SEQ ID NO: 731600 - RNA, 19 nt, Artificial Sequence
  Description of Artificial Sequence: Synthetic oligonucleotide
  Sense strand starting at position 3940 of SEQ ID NO: 586617
uguuauaucucccucagau

SEQ ID NO: 731601 - RNA, 19 nt, Artificial Sequence
  Description of Artificial Sequence: Synthetic oligonucleotide
  Antisense strand to SEQ ID NO: 731600
aucugagggagauauaaca

SEQ ID NO: 731602 - RNA, 19 nt, Artificial Sequence
  Description of Artificial Sequence: Synthetic oligonucleotide
  Sense strand starting at position 56 of SEQ ID NO: 586618
uuuagacacguuuaucuuu

SEQ ID NO: 731603 - RNA, 19 nt, Artificial Sequence
  Description of Artificial Sequence: Synthetic oligonucleotide
  Antisense strand to SEQ ID NO: 731602
aaagauaaacgugucuaaa

SEQ ID NO: 731604 - RNA, 19 nt, Artificial Sequence
  Description of Artificial Sequence: Synthetic oligonucleotide
  Sense strand starting at position 70 of SEQ ID NO: 586618
ucuuuaccuccggauaaau

SEQ ID NO: 731605 - RNA, 19 nt, Artificial Sequence
  Description of Artificial Sequence: Synthetic oligonucleotide
  Antisense strand to SEQ ID NO: 731604
auuuauccggagguaaaga

SEQ ID NO: 731606 - RNA, 19 nt, Artificial Sequence
  Description of Artificial Sequence: Synthetic oligonucleotide
  Sense strand starting at position 232 of SEQ ID NO: 586618
acuugaagcccaugguaua

SEQ ID NO: 731607 - RNA, 19 nt, Artificial Sequence
  Description of Artificial Sequence: Synthetic oligonucleotide
  Antisense strand to SEQ ID NO: 731606
uauaccaugggcuucaagu

SEQ ID NO: 731608 - RNA, 19 nt, Artificial Sequence
  Description of Artificial Sequence: Synthetic oligonucleotide
  Sense strand starting at position 233 of SEQ ID NO: 586618
cuugaagcccaugguauaa

SEQ ID NO: 731609 - RNA, 19 nt, Artificial Sequence
  Description of Artificial Sequence: Synthetic oligonucleotide
  Antisense strand to SEQ ID NO: 731608
uuauaccaugggcuucaag

SEQ ID NO: 731610 - RNA, 19 nt, Artificial Sequence
  Description of Artificial Sequence: Synthetic oligonucleotide
  Sense strand starting at position 244 of SEQ ID NO: 586618
ugguauaauuaauccguga

SEQ ID NO: 731611 - RNA, 19 nt, Artificial Sequence
  Description of Artificial Sequence: Synthetic oligonucleotide
  Antisense strand to SEQ ID NO: 731610
ucacggauuaauuauacca

SEQ ID NO: 731612 - RNA, 19 nt, Artificial Sequence
  Description of Artificial Sequence: Synthetic oligonucleotide
  Sense strand starting at position 248 of SEQ ID NO: 586618
auaauuaauccgugaucaa

SEQ ID NO: 731613 - RNA, 19 nt, Artificial Sequence
  Description of Artificial Sequence: Synthetic oligonucleotide
  Antisense strand to SEQ ID NO: 731612
uugaucacggauuaauuau

SEQ ID NO: 731614 - RNA, 19 nt, Artificial Sequence
  Description of Artificial Sequence: Synthetic oligonucleotide
  Sense strand starting at position 251 of SEQ ID NO: 586618
auuaauccgugaucaaaga

SEQ ID NO: 731615 - RNA, 19 nt, Artificial Sequence
  Description of Artificial Sequence: Synthetic oligonucleotide
  Antisense strand to SEQ ID NO: 731614
ucuuugaucacggauuaau

SEQ ID NO: 731616 - RNA, 19 nt, Artificial Sequence
  Description of Artificial Sequence: Synthetic oligonucleotide
  Sense strand starting at position 267 of SEQ ID NO: 586618
agaccuaaagauugcggua

SEQ ID NO: 731617 - RNA, 19 nt, Artificial Sequence
  Description of Artificial Sequence: Synthetic oligonucleotide
  Antisense strand to SEQ ID NO: 731616
uaccgcaaucuuuaggucu

SEQ ID NO: 731618 - RNA, 19 nt, Artificial Sequence
  Description of Artificial Sequence: Synthetic oligonucleotide
  Sense strand starting at position 272 of SEQ ID NO: 586618
uaaagauugcgguaguaga

SEQ ID NO: 731619 - RNA, 19 nt, Artificial Sequence
  Description of Artificial Sequence: Synthetic oligonucleotide
  Antisense strand to SEQ ID NO: 731618
ucuacuaccgcaaucuuua

SEQ ID NO: 731620 - RNA, 19 nt, Artificial Sequence
  Description of Artificial Sequence: Synthetic oligonucleotide
  Sense strand starting at position 409 of SEQ ID NO: 586618
cauguuaaagaucguauau

SEQ ID NO: 731621 - RNA, 19 nt, Artificial Sequence
  Description of Artificial Sequence: Synthetic oligonucleotide
  Antisense strand to SEQ ID NO: 731620
auauacgaucuuuaacaug

SEQ ID NO: 731622 - RNA, 19 nt, Artificial Sequence
  Description of Artificial Sequence: Synthetic oligonucleotide
  Sense strand starting at position 440 of SEQ ID NO: 586618
ggaugcccagucugauauu

SEQ ID NO: 731623 - RNA, 19 nt, Artificial Sequence
  Description of Artificial Sequence: Synthetic oligonucleotide
  Antisense strand to SEQ ID NO: 731622
aauaucagacugggcaucc

SEQ ID NO: 731624 - RNA, 19 nt, Artificial Sequence
  Description of Artificial Sequence: Synthetic oligonucleotide
  Sense strand starting at position 579 of SEQ ID NO: 586618
gcaauugucucauuaaaug

SEQ ID NO: 731625 - RNA, 19 nt, Artificial Sequence
  Description of Artificial Sequence: Synthetic oligonucleotide
  Antisense strand to SEQ ID NO: 731624
cauuuaaugagacaauugc

SEQ ID NO: 731626 - RNA, 19 nt, Artificial Sequence
  Description of Artificial Sequence: Synthetic oligonucleotide
  Sense strand starting at position 833 of SEQ ID NO: 586618
auuugacguucucugcauu

SEQ ID NO: 731627 - RNA, 19 nt, Artificial Sequence
  Description of Artificial Sequence: Synthetic oligonucleotide
  Antisense strand to SEQ ID NO: 731626
aaugcagagaacgucaaau

SEQ ID NO: 731628 - RNA, 19 nt, Artificial Sequence
  Description of Artificial Sequence: Synthetic oligonucleotide
  Sense strand starting at position 839 of SEQ ID NO: 586618
cguucucugcauuauuuaa

SEQ ID NO: 731629 - RNA, 19 nt, Artificial Sequence
  Description of Artificial Sequence: Synthetic oligonucleotide
  Antisense strand to SEQ ID NO: 731628
uuaaauaaugcagagaacg

SEQ ID NO: 731630 - RNA, 19 nt, Artificial Sequence
  Description of Artificial Sequence: Synthetic oligonucleotide
  Sense strand starting at position 1061 of SEQ ID NO: 586618
auaauugugucacuaagua

SEQ ID NO: 731631 - RNA, 19 nt, Artificial Sequence
  Description of Artificial Sequence: Synthetic oligonucleotide
  Antisense strand to SEQ ID NO: 731630
uacuuagugacacaauuau

SEQ ID NO: 731632 - RNA, 19 nt, Artificial Sequence
  Description of Artificial Sequence: Synthetic oligonucleotide
  Sense strand starting at position 1182 of SEQ ID NO: 586618
agguucucuuucccauaca

SEQ ID NO: 731633 - RNA, 19 nt, Artificial Sequence
  Description of Artificial Sequence: Synthetic oligonucleotide
  Antisense strand to SEQ ID NO: 731632
uguaugggaaagagaaccu

SEQ ID NO: 731634 - RNA, 19 nt, Artificial Sequence
  Description of Artificial Sequence: Synthetic oligonucleotide
  Sense strand starting at position 1395 of SEQ ID NO: 586618
ggaagagauugggaaucga

SEQ ID NO: 731635 - RNA, 19 nt, Artificial Sequence
  Description of Artificial Sequence: Synthetic oligonucleotide
  Antisense strand to SEQ ID NO: 731634
ucgauucccaaucucuucc

SEQ ID NO: 731636 - RNA, 19 nt, Artificial Sequence
  Description of Artificial Sequence: Synthetic oligonucleotide
  Sense strand starting at position 1399 of SEQ ID NO: 586618
gagauugggaaucgaguaa

SEQ ID NO: 731637 - RNA, 19 nt, Artificial Sequence
  Description of Artificial Sequence: Synthetic oligonucleotide
  Antisense strand to SEQ ID NO: 731636
uuacucgauucccaaucuc

SEQ ID NO: 731638 - RNA, 19 nt, Artificial Sequence
  Description of Artificial Sequence: Synthetic oligonucleotide
  Sense strand starting at position 1403 of SEQ ID NO: 586618
uugggaaucgaguaaccga

SEQ ID NO: 731639 - RNA, 19 nt, Artificial Sequence
  Description of Artificial Sequence: Synthetic oligonucleotide
  Antisense strand to SEQ ID NO: 731638
ucgguuacucgauucccaa

SEQ ID NO: 731640 - RNA, 19 nt, Artificial Sequence
  Description of Artificial Sequence: Synthetic oligonucleotide
  Sense strand starting at position 1417 of SEQ ID NO: 586618
accgaaacauuuggaaaug

SEQ ID NO: 731641 - RNA, 19 nt, Artificial Sequence
  Description of Artificial Sequence: Synthetic oligonucleotide
  Antisense strand to SEQ ID NO: 731640
cauuuccaaauguuucggu

SEQ ID NO: 731642 - RNA, 19 nt, Artificial Sequence
  Description of Artificial Sequence: Synthetic oligonucleotide
  Sense strand starting at position 1418 of SEQ ID NO: 586618
ccgaaacauuuggaaaugu

SEQ ID NO: 731643 - RNA, 19 nt, Artificial Sequence
  Description of Artificial Sequence: Synthetic oligonucleotide
  Antisense strand to SEQ ID NO: 731642
acauuuccaaauguuucgg

SEQ ID NO: 731644 - RNA, 19 nt, Artificial Sequence
  Description of Artificial Sequence: Synthetic oligonucleotide
  Sense strand starting at position 1446 of SEQ ID NO: 586618
aguggccucuccuuugaaa

SEQ ID NO: 731645 - RNA, 19 nt, Artificial Sequence
  Description of Artificial Sequence: Synthetic oligonucleotide
  Antisense strand to SEQ ID NO: 731644
uuucaaaggagaggccacu

SEQ ID NO: 731646 - RNA, 19 nt, Artificial Sequence
  Description of Artificial Sequence: Synthetic oligonucleotide
  Sense strand starting at position 2266 of SEQ ID NO: 586618
cucagucuugguuaggauu

SEQ ID NO: 731647 - RNA, 19 nt, Artificial Sequence
  Description of Artificial Sequence: Synthetic oligonucleotide
  Antisense strand to SEQ ID NO: 731646
aauccuaaccaagacugag

SEQ ID NO: 731648 - RNA, 19 nt, Artificial Sequence
  Description of Artificial Sequence: Synthetic oligonucleotide
  Sense strand starting at position 2309 of SEQ ID NO: 586618
gcaaucagacacuggauau

SEQ ID NO: 731649 - RNA, 19 nt, Artificial Sequence
  Description of Artificial Sequence: Synthetic oligonucleotide
  Antisense strand to SEQ ID NO: 731648
auauccagugucugauugc

SEQ ID NO: 731650 - RNA, 19 nt, Artificial Sequence
  Description of Artificial Sequence: Synthetic oligonucleotide
  Sense strand starting at position 2321 of SEQ ID NO: 586618
uggauauacgcauaauaca

SEQ ID NO: 731651 - RNA, 19 nt, Artificial Sequence
  Description of Artificial Sequence: Synthetic oligonucleotide
  Antisense strand to SEQ ID NO: 731650
uguauuaugcguauaucca

SEQ ID NO: 731652 - RNA, 19 nt, Artificial Sequence
  Description of Artificial Sequence: Synthetic oligonucleotide
  Sense strand starting at position 2481 of SEQ ID NO: 586618
ccagauauuccuggguuuc

SEQ ID NO: 731653 - RNA, 19 nt, Artificial Sequence
  Description of Artificial Sequence: Synthetic oligonucleotide
  Antisense strand to SEQ ID NO: 731652
gaaacccaggaauaucugg

SEQ ID NO: 731654 - RNA, 19 nt, Artificial Sequence
  Description of Artificial Sequence: Synthetic oligonucleotide
  Sense strand starting at position 2522 of SEQ ID NO: 586618
cugcauuugucccuguaua

SEQ ID NO: 731655 - RNA, 19 nt, Artificial Sequence
  Description of Artificial Sequence: Synthetic oligonucleotide
  Antisense strand to SEQ ID NO: 731654
uauacagggacaaaugcag

SEQ ID NO: 731656 - RNA, 19 nt, Artificial Sequence
  Description of Artificial Sequence: Synthetic oligonucleotide
  Sense strand starting at position 2523 of SEQ ID NO: 586618
ugcauuugucccuguauaa

SEQ ID NO: 731657 - RNA, 19 nt, Artificial Sequence
  Description of Artificial Sequence: Synthetic oligonucleotide
  Antisense strand to SEQ ID NO: 731656
uuauacagggacaaaugca

SEQ ID NO: 731658 - RNA, 19 nt, Artificial Sequence
  Description of Artificial Sequence: Synthetic oligonucleotide
  Sense strand starting at position 2653 of SEQ ID NO: 586618
gguuuauuacaucaguaaa

SEQ ID NO: 731659 - RNA, 19 nt, Artificial Sequence
  Description of Artificial Sequence: Synthetic oligonucleotide
  Antisense strand to SEQ ID NO: 731658
uuuacugauguaauaaacc

SEQ ID NO: 731660 - RNA, 19 nt, Artificial Sequence
  Description of Artificial Sequence: Synthetic oligonucleotide
  Sense strand starting at position 2717 of SEQ ID NO: 586618
gguauucucauagauggcu

SEQ ID NO: 731661 - RNA, 19 nt, Artificial Sequence
  Description of Artificial Sequence: Synthetic oligonucleotide
  Antisense strand to SEQ ID NO: 731660
agccaucuaugagaauacc

SEQ ID NO: 731662 - RNA, 19 nt, Artificial Sequence
  Description of Artificial Sequence: Synthetic oligonucleotide
  Sense strand starting at position 2790 of SEQ ID NO: 586618
uuuaaucagcuuggaagau

SEQ ID NO: 731663 - RNA, 19 nt, Artificial Sequence
  Description of Artificial Sequence: Synthetic oligonucleotide
  Antisense strand to SEQ ID NO: 731662
aucuuccaagcugauuaaa

SEQ ID NO: 731664 - RNA, 19 nt, Artificial Sequence
  Description of Artificial Sequence: Synthetic oligonucleotide
  Sense strand starting at position 2939 of SEQ ID NO: 586618
gaaacuuacugggcgcaau

SEQ ID NO: 731665 - RNA, 19 nt, Artificial Sequence
  Description of Artificial Sequence: Synthetic oligonucleotide
  Antisense strand to SEQ ID NO: 731664
auugcgcccaguaaguuuc

SEQ ID NO: 731666 - RNA, 19 nt, Artificial Sequence
  Description of Artificial Sequence: Synthetic oligonucleotide
  Sense strand starting at position 2985 of SEQ ID NO: 586618
gauguuucugaaugauaag

SEQ ID NO: 731667 - RNA, 19 nt, Artificial Sequence
  Description of Artificial Sequence: Synthetic oligonucleotide
  Antisense strand to SEQ ID NO: 731666
cuuaucauucagaaacauc

SEQ ID NO: 731668 - RNA, 19 nt, Artificial Sequence
  Description of Artificial Sequence: Synthetic oligonucleotide
  Sense strand starting at position 3047 of SEQ ID NO: 586618
gguccuuagaugugacaga

SEQ ID NO: 731669 - RNA, 19 nt, Artificial Sequence
  Description of Artificial Sequence: Synthetic oligonucleotide
  Antisense strand to SEQ ID NO: 731668
ucugucacaucuaaggacc

SEQ ID NO: 731670 - RNA, 19 nt, Artificial Sequence
  Description of Artificial Sequence: Synthetic oligonucleotide
  Sense strand starting at position 3126 of SEQ ID NO: 586618
gcuggagcugaggacaaau

SEQ ID NO: 731671 - RNA, 19 nt, Artificial Sequence
  Description of Artificial Sequence: Synthetic oligonucleotide
  Antisense strand to SEQ ID NO: 731670
auuuguccucagcuccagc

SEQ ID NO: 731672 - RNA, 19 nt, Artificial Sequence
  Description of Artificial Sequence: Synthetic oligonucleotide
  Sense strand starting at position 3152 of SEQ ID NO: 586618
guaccuggugugcaaauuu

SEQ ID NO: 731673 - RNA, 19 nt, Artificial Sequence
  Description of Artificial Sequence: Synthetic oligonucleotide
  Antisense strand to SEQ ID NO: 731672
aaauuugcacaccagguac

SEQ ID NO: 731674 - RNA, 19 nt, Artificial Sequence
  Description of Artificial Sequence: Synthetic oligonucleotide
  Sense strand starting at position 3211 of SEQ ID NO: 586618
agucccuguaggcagaaau

SEQ ID NO: 731675 - RNA, 19 nt, Artificial Sequence
  Description of Artificial Sequence: Synthetic oligonucleotide
  Antisense strand to SEQ ID NO: 731674
auuucugccuacagggacu

SEQ ID NO: 731676 - RNA, 19 nt, Artificial Sequence
  Description of Artificial Sequence: Synthetic oligonucleotide
  Sense strand starting at position 3737 of SEQ ID NO: 586618
aaagcaaauuuguagagau

SEQ ID NO: 731677 - RNA, 19 nt, Artificial Sequence
  Description of Artificial Sequence: Synthetic oligonucleotide
  Antisense strand to SEQ ID NO: 731676
aucucuacaaauuugcuuu

SEQ ID NO: 731678 - RNA, 19 nt, Artificial Sequence
  Description of Artificial Sequence: Synthetic oligonucleotide
  Sense strand starting at position 3846 of SEQ ID NO: 586618
cuucuaaagcauuggguua

SEQ ID NO: 731679 - RNA, 19 nt, Artificial Sequence
  Description of Artificial Sequence: Synthetic oligonucleotide
  Antisense strand to SEQ ID NO: 731678
uaacccaaugcuuuagaag

SEQ ID NO: 731680 - RNA, 19 nt, Artificial Sequence
  Description of Artificial Sequence: Synthetic oligonucleotide
  Sense strand starting at position 3892 of SEQ ID NO: 586618
guagauucuuaaguaacac

SEQ ID NO: 731681 - RNA, 19 nt, Artificial Sequence
  Description of Artificial Sequence: Synthetic oligonucleotide
  Antisense strand to SEQ ID NO: 731680
guguuacuuaagaaucuac

SEQ ID NO: 731682 - RNA, 19 nt, Artificial Sequence
  Description of Artificial Sequence: Synthetic oligonucleotide
  Sense strand starting at position 83 of SEQ ID NO: 586619
cgguaaauaagugauguua

SEQ ID NO: 731683 - RNA, 19 nt, Artificial Sequence
  Description of Artificial Sequence: Synthetic oligonucleotide
  Antisense strand to SEQ ID NO: 731682
uaacaucacuuauuuaccg

SEQ ID NO: 731684 - RNA, 19 nt, Artificial Sequence
  Description of Artificial Sequence: Synthetic oligonucleotide
  Sense strand starting at position 113 of SEQ ID NO: 586619
agcuaagaaaugugaguca

SEQ ID NO: 731685 - RNA, 19 nt, Artificial Sequence
  Description of Artificial Sequence: Synthetic oligonucleotide
  Antisense strand to SEQ ID NO: 731684
ugacucacauuucuuagcu

SEQ ID NO: 731686 - RNA, 19 nt, Artificial Sequence
  Description of Artificial Sequence: Synthetic oligonucleotide
  Sense strand starting at position 116 of SEQ ID NO: 586619
uaagaaaugugagucacuu

SEQ ID NO: 731687 - RNA, 19 nt, Artificial Sequence
  Description of Artificial Sequence: Synthetic oligonucleotide
  Antisense strand to SEQ ID NO: 731686
aagugacucacauuucuua

SEQ ID NO: 731688 - RNA, 19 nt, Artificial Sequence
  Description of Artificial Sequence: Synthetic oligonucleotide
  Sense strand starting at position 227 of SEQ ID NO: 586619
ggauuaaggcaaugcuuua

SEQ ID NO: 731689 - RNA, 19 nt, Artificial Sequence
  Description of Artificial Sequence: Synthetic oligonucleotide
  Antisense strand to SEQ ID NO: 731688
uaaagcauugccuuaaucc

SEQ ID NO: 731690 - RNA, 19 nt, Artificial Sequence
  Description of Artificial Sequence: Synthetic oligonucleotide
  Sense strand starting at position 249 of SEQ ID NO: 586619
ugcuaugauccacgaauga

SEQ ID NO: 731691 - RNA, 19 nt, Artificial Sequence
  Description of Artificial Sequence: Synthetic oligonucleotide
  Antisense strand to SEQ ID NO: 731690
ucauucguggaucauagca

SEQ ID NO: 731692 - RNA, 19 nt, Artificial Sequence
  Description of Artificial Sequence: Synthetic oligonucleotide
  Sense strand starting at position 270 of SEQ ID NO: 586619
acauauauucgagggagug

SEQ ID NO: 731693 - RNA, 19 nt, Artificial Sequence
  Description of Artificial Sequence: Synthetic oligonucleotide
  Antisense strand to SEQ ID NO: 731692
cacucccucgaauauaugu

SEQ ID NO: 731694 - RNA, 19 nt, Artificial Sequence
  Description of Artificial Sequence: Synthetic oligonucleotide
  Sense strand starting at position 381 of SEQ ID NO: 586619
auuugaagucugugguauu

SEQ ID NO: 731695 - RNA, 19 nt, Artificial Sequence
  Description of Artificial Sequence: Synthetic oligonucleotide
  Antisense strand to SEQ ID NO: 731694
aauaccacagacuucaaau

SEQ ID NO: 731696 - RNA, 19 nt, Artificial Sequence
  Description of Artificial Sequence: Synthetic oligonucleotide
  Sense strand starting at position 391 of SEQ ID NO: 586619
ugugguauuguagauacaa

SEQ ID NO: 731697 - RNA, 19 nt, Artificial Sequence
  Description of Artificial Sequence: Synthetic oligonucleotide
  Antisense strand to SEQ ID NO: 731696
uuguaucuacaauaccaca

SEQ ID NO: 731698 - RNA, 19 nt, Artificial Sequence
  Description of Artificial Sequence: Synthetic oligonucleotide
  Sense strand starting at position 449 of SEQ ID NO: 586619
acaugaaagucaguuacau

SEQ ID NO: 731699 - RNA, 19 nt, Artificial Sequence
  Description of Artificial Sequence: Synthetic oligonucleotide
  Antisense strand to SEQ ID NO: 731698
auguaacugacuuucaugu

SEQ ID NO: 731700 - RNA, 19 nt, Artificial Sequence
  Description of Artificial Sequence: Synthetic oligonucleotide
  Sense strand starting at position 593 of SEQ ID NO: 586619
agcagucagcguuugcuua

SEQ ID NO: 731701 - RNA, 19 nt, Artificial Sequence
  Description of Artificial Sequence: Synthetic oligonucleotide
  Antisense strand to SEQ ID NO: 731700
uaagcaaacgcugacugcu

SEQ ID NO: 731702 - RNA, 19 nt, Artificial Sequence
  Description of Artificial Sequence: Synthetic oligonucleotide
  Sense strand starting at position 788 of SEQ ID NO: 586619
cuacuuagauguguauuau

SEQ ID NO: 731703 - RNA, 19 nt, Artificial Sequence
  Description of Artificial Sequence: Synthetic oligonucleotide
  Antisense strand to SEQ ID NO: 731702
auaauacacaucuaaguag

SEQ ID NO: 731704 - RNA, 19 nt, Artificial Sequence
  Description of Artificial Sequence: Synthetic oligonucleotide
  Sense strand starting at position 899 of SEQ ID NO: 586619
ucaccuucgccagcguuaa

SEQ ID NO: 731705 - RNA, 19 nt, Artificial Sequence
  Description of Artificial Sequence: Synthetic oligonucleotide
  Antisense strand to SEQ ID NO: 731704
uuaacgcuggcgaagguga

SEQ ID NO: 731706 - RNA, 19 nt, Artificial Sequence
  Description of Artificial Sequence: Synthetic oligonucleotide
  Sense strand starting at position 2216 of SEQ ID NO: 586619
ugauaauuggguuguggaa

SEQ ID NO: 731707 - RNA, 19 nt, Artificial Sequence
  Description of Artificial Sequence: Synthetic oligonucleotide
  Antisense strand to SEQ ID NO: 731706
uuccacaacccaauuauca

SEQ ID NO: 731708 - RNA, 19 nt, Artificial Sequence
  Description of Artificial Sequence: Synthetic oligonucleotide
  Sense strand starting at position 2256 of SEQ ID NO: 586619
aguguaaggcuucauggga

SEQ ID NO: 731709 - RNA, 19 nt, Artificial Sequence
  Description of Artificial Sequence: Synthetic oligonucleotide
  Antisense strand to SEQ ID NO: 731708
ucccaugaagccuuacacu

SEQ ID NO: 731710 - RNA, 19 nt, Artificial Sequence
  Description of Artificial Sequence: Synthetic oligonucleotide
  Sense strand starting at position 2345 of SEQ ID NO: 586619
aggauauuacugcaaguua

SEQ ID NO: 731711 - RNA, 19 nt, Artificial Sequence
  Description of Artificial Sequence: Synthetic oligonucleotide
  Antisense strand to SEQ ID NO: 731710
uaacuugcaguaauauccu

SEQ ID NO: 731712 - RNA, 19 nt, Artificial Sequence
  Description of Artificial Sequence: Synthetic oligonucleotide
  Sense strand starting at position 2367 of SEQ ID NO: 586619
ucauguuacacggagcaca

SEQ ID NO: 731713 - RNA, 19 nt, Artificial Sequence
  Description of Artificial Sequence: Synthetic oligonucleotide
  Antisense strand to SEQ ID NO: 731712
ugugcuccguguaacauga

SEQ ID NO: 731714 - RNA, 19 nt, Artificial Sequence
  Description of Artificial Sequence: Synthetic oligonucleotide
  Sense strand starting at position 2452 of SEQ ID NO: 586619
augaaugucugccuaacua

SEQ ID NO: 731715 - RNA, 19 nt, Artificial Sequence
  Description of Artificial Sequence: Synthetic oligonucleotide
  Antisense strand to SEQ ID NO: 731714
uaguuaggcagacauucau

SEQ ID NO: 731716 - RNA, 19 nt, Artificial Sequence
  Description of Artificial Sequence: Synthetic oligonucleotide
  Sense strand starting at position 2494 of SEQ ID NO: 586619
acugaaaucaguugucagu

SEQ ID NO: 731717 - RNA, 19 nt, Artificial Sequence
  Description of Artificial Sequence: Synthetic oligonucleotide
  Antisense strand to SEQ ID NO: 731716
acugacaacugauuucagu

SEQ ID NO: 731718 - RNA, 19 nt, Artificial Sequence
  Description of Artificial Sequence: Synthetic oligonucleotide
  Sense strand starting at position 2607 of SEQ ID NO: 586619
uucuuucuacuguauagua

SEQ ID NO: 731719 - RNA, 19 nt, Artificial Sequence
  Description of Artificial Sequence: Synthetic oligonucleotide
  Antisense strand to SEQ ID NO: 731718
uacuauacaguagaaagaa

SEQ ID NO: 731720 - RNA, 19 nt, Artificial Sequence
  Description of Artificial Sequence: Synthetic oligonucleotide
  Sense strand starting at position 2609 of SEQ ID NO: 586619
cuuucuacuguauaguaau

SEQ ID NO: 731721 - RNA, 19 nt, Artificial Sequence
  Description of Artificial Sequence: Synthetic oligonucleotide
  Antisense strand to SEQ ID NO: 731720
auuacuauacaguagaaag

SEQ ID NO: 731722 - RNA, 19 nt, Artificial Sequence
  Description of Artificial Sequence: Synthetic oligonucleotide
  Sense strand starting at position 2630 of SEQ ID NO: 586619
acaggauuauuugaaauug

SEQ ID NO: 731723 - RNA, 19 nt, Artificial Sequence
  Description of Artificial Sequence: Synthetic oligonucleotide
  Antisense strand to SEQ ID NO: 731722
caauuucaaauaauccugu

SEQ ID NO: 731724 - RNA, 19 nt, Artificial Sequence
  Description of Artificial Sequence: Synthetic oligonucleotide
  Sense strand starting at position 3182 of SEQ ID NO: 586619
agaguaagauacuuauguc

SEQ ID NO: 731725 - RNA, 19 nt, Artificial Sequence
  Description of Artificial Sequence: Synthetic oligonucleotide
  Antisense strand to SEQ ID NO: 731724
gacauaaguaucuuacucu

SEQ ID NO: 731726 - RNA, 19 nt, Artificial Sequence
  Description of Artificial Sequence: Synthetic oligonucleotide
  Sense strand starting at position 3188 of SEQ ID NO: 586619
agauacuuaugucucugua

SEQ ID NO: 731727 - RNA, 19 nt, Artificial Sequence
  Description of Artificial Sequence: Synthetic oligonucleotide
  Antisense strand to SEQ ID NO: 731726
uacagagacauaaguaucu

SEQ ID NO: 731728 - RNA, 19 nt, Artificial Sequence
  Description of Artificial Sequence: Synthetic oligonucleotide
  Sense strand starting at position 3221 of SEQ ID NO: 586619
ucuauuaaucuagagguuc

SEQ ID NO: 731729 - RNA, 19 nt, Artificial Sequence
  Description of Artificial Sequence: Synthetic oligonucleotide
  Antisense strand to SEQ ID NO: 731728
gaaccucuagauuaauaga

SEQ ID NO: 731730 - RNA, 19 nt, Artificial Sequence
  Description of Artificial Sequence: Synthetic oligonucleotide
  Sense strand starting at position 3279 of SEQ ID NO: 586619
ucaggugaacccuggcaau

SEQ ID NO: 731731 - RNA, 19 nt, Artificial Sequence
  Description of Artificial Sequence: Synthetic oligonucleotide
  Antisense strand to SEQ ID NO: 731730
auugccaggguucaccuga

SEQ ID NO: 731732 - RNA, 19 nt, Artificial Sequence
  Description of Artificial Sequence: Synthetic oligonucleotide
  Sense strand starting at position 3420 of SEQ ID NO: 586619
guagaaaucugucuucuaa

SEQ ID NO: 731733 - RNA, 19 nt, Artificial Sequence
  Description of Artificial Sequence: Synthetic oligonucleotide
  Antisense strand to SEQ ID NO: 731732
uuagaagacagauuucuac

SEQ ID NO: 731734 - RNA, 19 nt, Artificial Sequence
  Description of Artificial Sequence: Synthetic oligonucleotide
  Sense strand starting at position 3438 of SEQ ID NO: 586619
acucuaaggccuugggaga

SEQ ID NO: 731735 - RNA, 19 nt, Artificial Sequence
  Description of Artificial Sequence: Synthetic oligonucleotide
  Antisense strand to SEQ ID NO: 731734
ucucccaaggccuuagagu

SEQ ID NO: 731736 - RNA, 19 nt, Artificial Sequence
  Description of Artificial Sequence: Synthetic oligonucleotide
  Sense strand starting at position 3439 of SEQ ID NO: 586619
cucuaaggccuugggagau

SEQ ID NO: 731737 - RNA, 19 nt, Artificial Sequence
  Description of Artificial Sequence: Synthetic oligonucleotide
  Antisense strand to SEQ ID NO: 731736
aucucccaaggccuuagag

SEQ ID NO: 731738 - RNA, 19 nt, Artificial Sequence
  Description of Artificial Sequence: Synthetic oligonucleotide
  Sense strand starting at position 3454 of SEQ ID NO: 586619
agaugaaggauccgugauu

SEQ ID NO: 731739 - RNA, 19 nt, Artificial Sequence
  Description of Artificial Sequence: Synthetic oligonucleotide
  Antisense strand to SEQ ID NO: 731738
aaucacggauccuucaucu

SEQ ID NO: 731740 - RNA, 19 nt, Artificial Sequence
  Description of Artificial Sequence: Synthetic oligonucleotide
  Sense strand starting at position 3455 of SEQ ID NO: 586619
gaugaaggauccgugauuc

SEQ ID NO: 731741 - RNA, 19 nt, Artificial Sequence
  Description of Artificial Sequence: Synthetic oligonucleotide
  Antisense strand to SEQ ID NO: 731740
gaaucacggauccuucauc

SEQ ID NO: 731742 - RNA, 19 nt, Artificial Sequence
  Description of Artificial Sequence: Synthetic oligonucleotide
  Sense strand starting at position 3478 of SEQ ID NO: 586619
gcagaaauguaagugauga

SEQ ID NO: 731743 - RNA, 19 nt, Artificial Sequence
  Description of Artificial Sequence: Synthetic oligonucleotide
  Antisense strand to SEQ ID NO: 731742
ucaucacuuacauuucugc

SEQ ID NO: 731744 - RNA, 19 nt, Artificial Sequence
  Description of Artificial Sequence: Synthetic oligonucleotide
  Sense strand starting at position 3498 of SEQ ID NO: 586619
aaagaaugcuguccuguaa

SEQ ID NO: 731745 - RNA, 19 nt, Artificial Sequence
  Description of Artificial Sequence: Synthetic oligonucleotide
  Antisense strand to SEQ ID NO: 731744
uuacaggacagcauucuuu

SEQ ID NO: 731746 - RNA, 19 nt, Artificial Sequence
  Description of Artificial Sequence: Synthetic oligonucleotide
  Sense strand starting at position 3502 of SEQ ID NO: 586619
aaugcuguccuguaauaag

SEQ ID NO: 731747 - RNA, 19 nt, Artificial Sequence
  Description of Artificial Sequence: Synthetic oligonucleotide
  Antisense strand to SEQ ID NO: 731746
cuuauuacaggacagcauu

SEQ ID NO: 731748 - RNA, 19 nt, Artificial Sequence
  Description of Artificial Sequence: Synthetic oligonucleotide
  Sense strand starting at position 3545 of SEQ ID NO: 586619
uccuuaguccuugauguua

SEQ ID NO: 731749 - RNA, 19 nt, Artificial Sequence
  Description of Artificial Sequence: Synthetic oligonucleotide
  Antisense strand to SEQ ID NO: 731748
uaacaucaaggacuaagga

SEQ ID NO: 731750 - RNA, 19 nt, Artificial Sequence
  Description of Artificial Sequence: Synthetic oligonucleotide
  Sense strand starting at position 3671 of SEQ ID NO: 586619
gcaugagacuuugccugga

SEQ ID NO: 731751 - RNA, 19 nt, Artificial Sequence
  Description of Artificial Sequence: Synthetic oligonucleotide
  Antisense strand to SEQ ID NO: 731750
uccaggcaaagucucaugc

SEQ ID NO: 731752 - RNA, 19 nt, Artificial Sequence
  Description of Artificial Sequence: Synthetic oligonucleotide
  Sense strand starting at position 3673 of SEQ ID NO: 586619
augagacuuugccuggaug

SEQ ID NO: 731753 - RNA, 19 nt, Artificial Sequence
  Description of Artificial Sequence: Synthetic oligonucleotide
  Antisense strand to SEQ ID NO: 731752
cauccaggcaaagucucau

SEQ ID NO: 731754 - RNA, 19 nt, Artificial Sequence
  Description of Artificial Sequence: Synthetic oligonucleotide
  Sense strand starting at position 3676 of SEQ ID NO: 586619
agacuuugccuggaugcaa

SEQ ID NO: 731755 - RNA, 19 nt, Artificial Sequence
  Description of Artificial Sequence: Synthetic oligonucleotide
  Antisense strand to SEQ ID NO: 731754
uugcauccaggcaaagucu

SEQ ID NO: 731756 - RNA, 19 nt, Artificial Sequence
  Description of Artificial Sequence: Synthetic oligonucleotide
  Sense strand starting at position 3761 of SEQ ID NO: 586619
gucuccuuaucugugaaag

SEQ ID NO: 731757 - RNA, 19 nt, Artificial Sequence
  Description of Artificial Sequence: Synthetic oligonucleotide
  Antisense strand to SEQ ID NO: 731756
cuuucacagauaaggagac

SEQ ID NO: 731758 - RNA, 19 nt, Artificial Sequence
  Description of Artificial Sequence: Synthetic oligonucleotide
  Sense strand starting at position 3927 of SEQ ID NO: 586619
uaaauaucgcaguaaagug

SEQ ID NO: 731759 - RNA, 19 nt, Artificial Sequence
  Description of Artificial Sequence: Synthetic oligonucleotide
  Antisense strand to SEQ ID NO: 731758
cacuuuacugcgauauuua

SEQ ID NO: 731760 - RNA, 19 nt, Artificial Sequence
  Description of Artificial Sequence: Synthetic oligonucleotide
  Sense strand starting at position 3980 of SEQ ID NO: 586619
gcaaguuauguuuacacua

SEQ ID NO: 731761 - RNA, 19 nt, Artificial Sequence
  Description of Artificial Sequence: Synthetic oligonucleotide
  Antisense strand to SEQ ID NO: 731760
uaguguaaacauaacuugc

SEQ ID NO: 731762 - RNA, 19 nt, Artificial Sequence
  Description of Artificial Sequence: Synthetic oligonucleotide
  Sense strand starting at position 72 of SEQ ID NO: 586620
uuggaacugagguaugcua

SEQ ID NO: 731763 - RNA, 19 nt, Artificial Sequence
  Description of Artificial Sequence: Synthetic oligonucleotide
  Antisense strand to SEQ ID NO: 731762
uagcauaccucaguuccaa

SEQ ID NO: 731764 - RNA, 19 nt, Artificial Sequence
  Description of Artificial Sequence: Synthetic oligonucleotide
  Sense strand starting at position 74 of SEQ ID NO: 586620
ggaacugagguaugcuaau

SEQ ID NO: 731765 - RNA, 19 nt, Artificial Sequence
  Description of Artificial Sequence: Synthetic oligonucleotide
  Antisense strand to SEQ ID NO: 731764
auuagcauaccucaguucc

SEQ ID NO: 731766 - RNA, 19 nt, Artificial Sequence
  Description of Artificial Sequence: Synthetic oligonucleotide
  Sense strand starting at position 80 of SEQ ID NO: 586620
gagguaugcuaaucucaca

SEQ ID NO: 731767 - RNA, 19 nt, Artificial Sequence
  Description of Artificial Sequence: Synthetic oligonucleotide
  Antisense strand to SEQ ID NO: 731766
ugugagauuagcauaccuc

SEQ ID NO: 731768 - RNA, 19 nt, Artificial Sequence
  Description of Artificial Sequence: Synthetic oligonucleotide
  Sense strand starting at position 176 of SEQ ID NO: 586620
uccuuaaagcaaugagauu

SEQ ID NO: 731769 - RNA, 19 nt, Artificial Sequence
  Description of Artificial Sequence: Synthetic oligonucleotide
  Antisense strand to SEQ ID NO: 731768
aaucucauugcuuuaagga

SEQ ID NO: 731770 - RNA, 19 nt, Artificial Sequence
  Description of Artificial Sequence: Synthetic oligonucleotide
  Sense strand starting at position 182 of SEQ ID NO: 586620
aagcaaugagauuguaaag

SEQ ID NO: 731771 - RNA, 19 nt, Artificial Sequence
  Description of Artificial Sequence: Synthetic oligonucleotide
  Antisense strand to SEQ ID NO: 731770
cuuuacaaucucauugcuu

SEQ ID NO: 731772 - RNA, 19 nt, Artificial Sequence
  Description of Artificial Sequence: Synthetic oligonucleotide
  Sense strand starting at position 189 of SEQ ID NO: 586620
gagauuguaaagggaugua

SEQ ID NO: 731773 - RNA, 19 nt, Artificial Sequence
  Description of Artificial Sequence: Synthetic oligonucleotide
  Antisense strand to SEQ ID NO: 731772
uacaucccuuuacaaucuc

SEQ ID NO: 731774 - RNA, 19 nt, Artificial Sequence
  Description of Artificial Sequence: Synthetic oligonucleotide
  Sense strand starting at position 401 of SEQ ID NO: 586620
auguaaaucaauugcgaag

SEQ ID NO: 731775 - RNA, 19 nt, Artificial Sequence
  Description of Artificial Sequence: Synthetic oligonucleotide
  Antisense strand to SEQ ID NO: 731774
cuucgcaauugauuuacau

SEQ ID NO: 731776 - RNA, 19 nt, Artificial Sequence
  Description of Artificial Sequence: Synthetic oligonucleotide
  Sense strand starting at position 408 of SEQ ID NO: 586620
ucaauugcgaagugaaacu

SEQ ID NO: 731777 - RNA, 19 nt, Artificial Sequence
  Description of Artificial Sequence: Synthetic oligonucleotide
  Antisense strand to SEQ ID NO: 731776
aguuucacuucgcaauuga

SEQ ID NO: 731778 - RNA, 19 nt, Artificial Sequence
  Description of Artificial Sequence: Synthetic oligonucleotide
  Sense strand starting at position 445 of SEQ ID NO: 586620
gcaugauuccaugaaguug

SEQ ID NO: 731779 - RNA, 19 nt, Artificial Sequence
  Description of Artificial Sequence: Synthetic oligonucleotide
  Antisense strand to SEQ ID NO: 731778
caacuucauggaaucaugc

SEQ ID NO: 731780 - RNA, 19 nt, Artificial Sequence
  Description of Artificial Sequence: Synthetic oligonucleotide
  Sense strand starting at position 469 of SEQ ID NO: 586620
agugcuauuggagaacugu

SEQ ID NO: 731781 - RNA, 19 nt, Artificial Sequence
  Description of Artificial Sequence: Synthetic oligonucleotide
  Antisense strand to SEQ ID NO: 731780
acaguucuccaauagcacu

SEQ ID NO: 731782 - RNA, 19 nt, Artificial Sequence
  Description of Artificial Sequence: Synthetic oligonucleotide
  Sense strand starting at position 477 of SEQ ID NO: 586620
uggagaacuguuugaauca

SEQ ID NO: 731783 - RNA, 19 nt, Artificial Sequence
  Description of Artificial Sequence: Synthetic oligonucleotide
  Antisense strand to SEQ ID NO: 731782
ugauucaaacaguucucca

SEQ ID NO: 731784 - RNA, 19 nt, Artificial Sequence
  Description of Artificial Sequence: Synthetic oligonucleotide
  Sense strand starting at position 527 of SEQ ID NO: 586620
gcagauuaaggucaguuaa

SEQ ID NO: 731785 - RNA, 19 nt, Artificial Sequence
  Description of Artificial Sequence: Synthetic oligonucleotide
  Antisense strand to SEQ ID NO: 731784
uuaacugaccuuaaucugc

SEQ ID NO: 731786 - RNA, 19 nt, Artificial Sequence
  Description of Artificial Sequence: Synthetic oligonucleotide
  Sense strand starting at position 529 of SEQ ID NO: 586620
agauuaaggucaguuaauc

SEQ ID NO: 731787 - RNA, 19 nt, Artificial Sequence
  Description of Artificial Sequence: Synthetic oligonucleotide
  Antisense strand to SEQ ID NO: 731786
gauuaacugaccuuaaucu

SEQ ID NO: 731788 - RNA, 19 nt, Artificial Sequence
  Description of Artificial Sequence: Synthetic oligonucleotide
  Sense strand starting at position 537 of SEQ ID NO: 586620
gucaguuaaucauugugga

SEQ ID NO: 731789 - RNA, 19 nt, Artificial Sequence
  Description of Artificial Sequence: Synthetic oligonucleotide
  Antisense strand to SEQ ID NO: 731788
uccacaaugauuaacugac

SEQ ID NO: 731790 - RNA, 19 nt, Artificial Sequence
  Description of Artificial Sequence: Synthetic oligonucleotide
  Sense strand starting at position 538 of SEQ ID NO: 586620
ucaguuaaucauuguggag

SEQ ID NO: 731791 - RNA, 19 nt, Artificial Sequence
  Description of Artificial Sequence: Synthetic oligonucleotide
  Antisense strand to SEQ ID NO: 731790
cuccacaaugauuaacuga

SEQ ID NO: 731792 - RNA, 19 nt, Artificial Sequence
  Description of Artificial Sequence: Synthetic oligonucleotide
  Sense strand starting at position 647 of SEQ ID NO: 586620
cgguaaauaagugauguua

SEQ ID NO: 731793 - RNA, 19 nt, Artificial Sequence
  Description of Artificial Sequence: Synthetic oligonucleotide
  Antisense strand to SEQ ID NO: 731792
uaacaucacuuauuuaccg

SEQ ID NO: 731794 - RNA, 19 nt, Artificial Sequence
  Description of Artificial Sequence: Synthetic oligonucleotide
  Sense strand starting at position 677 of SEQ ID NO: 586620
agcuaagaaaugugaguca

SEQ ID NO: 731795 - RNA, 19 nt, Artificial Sequence
  Description of Artificial Sequence: Synthetic oligonucleotide
  Antisense strand to SEQ ID NO: 731794
ugacucacauuucuuagcu

SEQ ID NO: 731796 - RNA, 19 nt, Artificial Sequence
  Description of Artificial Sequence: Synthetic oligonucleotide
  Sense strand starting at position 680 of SEQ ID NO: 586620
uaagaaaugugagucacuu

SEQ ID NO: 731797 - RNA, 19 nt, Artificial Sequence
  Description of Artificial Sequence: Synthetic oligonucleotide
  Antisense strand to SEQ ID NO: 731796
aagugacucacauuucuua

SEQ ID NO: 731798 - RNA, 19 nt, Artificial Sequence
  Description of Artificial Sequence: Synthetic oligonucleotide
  Sense strand starting at position 791 of SEQ ID NO: 586620
ggauuaaggcaaugcuuua

SEQ ID NO: 731799 - RNA, 19 nt, Artificial Sequence
  Description of Artificial Sequence: Synthetic oligonucleotide
  Antisense strand to SEQ ID NO: 731798
uaaagcauugccuuaaucc

SEQ ID NO: 731800 - RNA, 19 nt, Artificial Sequence
  Description of Artificial Sequence: Synthetic oligonucleotide
  Sense strand starting at position 813 of SEQ ID NO: 586620
ugcuaugauccacgaauga

SEQ ID NO: 731801 - RNA, 19 nt, Artificial Sequence
  Description of Artificial Sequence: Synthetic oligonucleotide
  Antisense strand to SEQ ID NO: 731800
ucauucguggaucauagca

SEQ ID NO: 731802 - RNA, 19 nt, Artificial Sequence
  Description of Artificial Sequence: Synthetic oligonucleotide
  Sense strand starting at position 834 of SEQ ID NO: 586620
acauauauucgagggagug

SEQ ID NO: 731803 - RNA, 19 nt, Artificial Sequence
  Description of Artificial Sequence: Synthetic oligonucleotide
  Antisense strand to SEQ ID NO: 731802
cacucccucgaauauaugu

SEQ ID NO: 731804 - RNA, 19 nt, Artificial Sequence
  Description of Artificial Sequence: Synthetic oligonucleotide
  Sense strand starting at position 945 of SEQ ID NO: 586620
auuugaagucugugguauu

SEQ ID NO: 731805 - RNA, 19 nt, Artificial Sequence
  Description of Artificial Sequence: Synthetic oligonucleotide
  Antisense strand to SEQ ID NO: 731804
aauaccacagacuucaaau

SEQ ID NO: 731806 - RNA, 19 nt, Artificial Sequence
  Description of Artificial Sequence: Synthetic oligonucleotide
  Sense strand starting at position 955 of SEQ ID NO: 586620
ugugguauuguagauacaa

SEQ ID NO: 731807 - RNA, 19 nt, Artificial Sequence
  Description of Artificial Sequence: Synthetic oligonucleotide
  Antisense strand to SEQ ID NO: 731806
uuguaucuacaauaccaca

SEQ ID NO: 731808 - RNA, 19 nt, Artificial Sequence
  Description of Artificial Sequence: Synthetic oligonucleotide
  Sense strand starting at position 1013 of SEQ ID NO: 586620
acaugaaagucaguuacau

SEQ ID NO: 731809 - RNA, 19 nt, Artificial Sequence
  Description of Artificial Sequence: Synthetic oligonucleotide
  Antisense strand to SEQ ID NO: 731808
auguaacugacuuucaugu

SEQ ID NO: 731810 - RNA, 19 nt, Artificial Sequence
  Description of Artificial Sequence: Synthetic oligonucleotide
  Sense strand starting at position 1157 of SEQ ID NO: 586620
agcagucagcguuugcuua

SEQ ID NO: 731811 - RNA, 19 nt, Artificial Sequence
  Description of Artificial Sequence: Synthetic oligonucleotide
  Antisense strand to SEQ ID NO: 731810
uaagcaaacgcugacugcu

SEQ ID NO: 731812 - RNA, 19 nt, Artificial Sequence
  Description of Artificial Sequence: Synthetic oligonucleotide
  Sense strand starting at position 1352 of SEQ ID NO: 586620
cuacuuagauguguauuau

SEQ ID NO: 731813 - RNA, 19 nt, Artificial Sequence
  Description of Artificial Sequence: Synthetic oligonucleotide
  Antisense strand to SEQ ID NO: 731812
auaauacacaucuaaguag

SEQ ID NO: 731814 - RNA, 19 nt, Artificial Sequence
  Description of Artificial Sequence: Synthetic oligonucleotide
  Sense strand starting at position 1463 of SEQ ID NO: 586620
ucaccuucgccagcguuaa

SEQ ID NO: 731815 - RNA, 19 nt, Artificial Sequence
  Description of Artificial Sequence: Synthetic oligonucleotide
  Antisense strand to SEQ ID NO: 731814
uuaacgcuggcgaagguga

SEQ ID NO: 731816 - RNA, 19 nt, Artificial Sequence
  Description of Artificial Sequence: Synthetic oligonucleotide
  Sense strand starting at position 2780 of SEQ ID NO: 586620
ugauaauuggguuguggaa

SEQ ID NO: 731817 - RNA, 19 nt, Artificial Sequence
  Description of Artificial Sequence: Synthetic oligonucleotide
  Antisense strand to SEQ ID NO: 731816
uuccacaacccaauuauca

SEQ ID NO: 731818 - RNA, 19 nt, Artificial Sequence
  Description of Artificial Sequence: Synthetic oligonucleotide
  Sense strand starting at position 2820 of SEQ ID NO: 586620
aguguaaggcuucauggga

SEQ ID NO: 731819 - RNA, 19 nt, Artificial Sequence
  Description of Artificial Sequence: Synthetic oligonucleotide
  Antisense strand to SEQ ID NO: 731818
ucccaugaagccuuacacu

SEQ ID NO: 731820 - RNA, 19 nt, Artificial Sequence
  Description of Artificial Sequence: Synthetic oligonucleotide
  Sense strand starting at position 2909 of SEQ ID NO: 586620
aggauauuacugcaaguua

SEQ ID NO: 731821 - RNA, 19 nt, Artificial Sequence
  Description of Artificial Sequence: Synthetic oligonucleotide
  Antisense strand to SEQ ID NO: 731820
uaacuugcaguaauauccu

SEQ ID NO: 731822 - RNA, 19 nt, Artificial Sequence
  Description of Artificial Sequence: Synthetic oligonucleotide
  Sense strand starting at position 2931 of SEQ ID NO: 586620
ucauguuacacggagcaca

SEQ ID NO: 731823 - RNA, 19 nt, Artificial Sequence
  Description of Artificial Sequence: Synthetic oligonucleotide
  Antisense strand to SEQ ID NO: 731822
ugugcuccguguaacauga

SEQ ID NO: 731824 - RNA, 19 nt, Artificial Sequence
  Description of Artificial Sequence: Synthetic oligonucleotide
  Sense strand starting at position 3016 of SEQ ID NO: 586620
augaaugucugccuaacua

SEQ ID NO: 731825 - RNA, 19 nt, Artificial Sequence
  Description of Artificial Sequence: Synthetic oligonucleotide
  Antisense strand to SEQ ID NO: 731824
uaguuaggcagacauucau

SEQ ID NO: 731826 - RNA, 19 nt, Artificial Sequence
  Description of Artificial Sequence: Synthetic oligonucleotide
  Sense strand starting at position 3058 of SEQ ID NO: 586620
acugaaaucaguugucagu

SEQ ID NO: 731827 - RNA, 19 nt, Artificial Sequence
  Description of Artificial Sequence: Synthetic oligonucleotide
  Antisense strand to SEQ ID NO: 731826
acugacaacugauuucagu

SEQ ID NO: 731828 - RNA, 19 nt, Artificial Sequence
  Description of Artificial Sequence: Synthetic oligonucleotide
  Sense strand starting at position 3171 of SEQ ID NO: 586620
uucuuucuacuguauagua

SEQ ID NO: 731829 - RNA, 19 nt, Artificial Sequence
  Description of Artificial Sequence: Synthetic oligonucleotide
  Antisense strand to SEQ ID NO: 731828
uacuauacaguagaaagaa

SEQ ID NO: 731830 - RNA, 19 nt, Artificial Sequence
  Description of Artificial Sequence: Synthetic oligonucleotide
  Sense strand starting at position 3173 of SEQ ID NO: 586620
cuuucuacuguauaguaau

SEQ ID NO: 731831 - RNA, 19 nt, Artificial Sequence
  Description of Artificial Sequence: Synthetic oligonucleotide
  Antisense strand to SEQ ID NO: 731830
auuacuauacaguagaaag

SEQ ID NO: 731832 - RNA, 19 nt, Artificial Sequence
  Description of Artificial Sequence: Synthetic oligonucleotide
  Sense strand starting at position 3194 of SEQ ID NO: 586620
acaggauuauuugaaauug

SEQ ID NO: 731833 - RNA, 19 nt, Artificial Sequence
  Description of Artificial Sequence: Synthetic oligonucleotide
  Antisense strand to SEQ ID NO: 731832
caauuucaaauaauccugu

SEQ ID NO: 731834 - RNA, 19 nt, Artificial Sequence
  Description of Artificial Sequence: Synthetic oligonucleotide
  Sense strand starting at position 3746 of SEQ ID NO: 586620
agaguaagauacuuauguc

SEQ ID NO: 731835 - RNA, 19 nt, Artificial Sequence
  Description of Artificial Sequence: Synthetic oligonucleotide
  Antisense strand to SEQ ID NO: 731834
gacauaaguaucuuacucu

SEQ ID NO: 731836 - RNA, 19 nt, Artificial Sequence
  Description of Artificial Sequence: Synthetic oligonucleotide
  Sense strand starting at position 3752 of SEQ ID NO: 586620
agauacuuaugucucugua

SEQ ID NO: 731837 - RNA, 19 nt, Artificial Sequence
  Description of Artificial Sequence: Synthetic oligonucleotide
  Antisense strand to SEQ ID NO: 731836
uacagagacauaaguaucu

SEQ ID NO: 731838 - RNA, 19 nt, Artificial Sequence
  Description of Artificial Sequence: Synthetic oligonucleotide
  Sense strand starting at position 3785 of SEQ ID NO: 586620
ucuauuaaucuagagguuc

SEQ ID NO: 731839 - RNA, 19 nt, Artificial Sequence
  Description of Artificial Sequence: Synthetic oligonucleotide
  Antisense strand to SEQ ID NO: 731838
gaaccucuagauuaauaga

SEQ ID NO: 731840 - RNA, 19 nt, Artificial Sequence
  Description of Artificial Sequence: Synthetic oligonucleotide
  Sense strand starting at position 3843 of SEQ ID NO: 586620
ucaggugaacccuggcaau

SEQ ID NO: 731841 - RNA, 19 nt, Artificial Sequence
  Description of Artificial Sequence: Synthetic oligonucleotide
  Antisense strand to SEQ ID NO: 731840
auugccaggguucaccuga

SEQ ID NO: 731842 - RNA, 19 nt, Artificial Sequence
  Description of Artificial Sequence: Synthetic oligonucleotide
  Sense strand starting at position 297 of SEQ ID NO: 586621
ucuccuuauccaggacagu

SEQ ID NO: 731843 - RNA, 19 nt, Artificial Sequence
  Description of Artificial Sequence: Synthetic oligonucleotide
  Antisense strand to SEQ ID NO: 731842
acuguccuggauaaggaga

SEQ ID NO: 731844 - RNA, 19 nt, Artificial Sequence
  Description of Artificial Sequence: Synthetic oligonucleotide
  Sense strand starting at position 306 of SEQ ID NO: 586621
ccaggacagucuguaucuu

SEQ ID NO: 731845 - RNA, 19 nt, Artificial Sequence
  Description of Artificial Sequence: Synthetic oligonucleotide
  Antisense strand to SEQ ID NO: 731844
aagauacagacuguccugg

SEQ ID NO: 731846 - RNA, 19 nt, Artificial Sequence
  Description of Artificial Sequence: Synthetic oligonucleotide
  Sense strand starting at position 330 of SEQ ID NO: 586621
ggcucuuucuucuguguca

SEQ ID NO: 731847 - RNA, 19 nt, Artificial Sequence
  Description of Artificial Sequence: Synthetic oligonucleotide
  Antisense strand to SEQ ID NO: 731846
ugacacagaagaaagagcc

SEQ ID NO: 731848 - RNA, 19 nt, Artificial Sequence
  Description of Artificial Sequence: Synthetic oligonucleotide
  Sense strand starting at position 331 of SEQ ID NO: 586621
gcucuuucuucugugucaa

SEQ ID NO: 731849 - RNA, 19 nt, Artificial Sequence
  Description of Artificial Sequence: Synthetic oligonucleotide
  Antisense strand to SEQ ID NO: 731848
uugacacagaagaaagagc

SEQ ID NO: 731850 - RNA, 19 nt, Artificial Sequence
  Description of Artificial Sequence: Synthetic oligonucleotide
  Sense strand starting at position 428 of SEQ ID NO: 586621
uacugaauggaugaguguu

SEQ ID NO: 731851 - RNA, 19 nt, Artificial Sequence
  Description of Artificial Sequence: Synthetic oligonucleotide
  Antisense strand to SEQ ID NO: 731850
aacacucauccauucagua

SEQ ID NO: 731852 - RNA, 19 nt, Artificial Sequence
  Description of Artificial Sequence: Synthetic oligonucleotide
  Sense strand starting at position 450 of SEQ ID NO: 586621
ggcuaaauguuccucagug

SEQ ID NO: 731853 - RNA, 19 nt, Artificial Sequence
  Description of Artificial Sequence: Synthetic oligonucleotide
  Antisense strand to SEQ ID NO: 731852
cacugaggaacauuuagcc

SEQ ID NO: 731854 - RNA, 19 nt, Artificial Sequence
  Description of Artificial Sequence: Synthetic oligonucleotide
  Sense strand starting at position 451 of SEQ ID NO: 586621
gcuaaauguuccucagugu

SEQ ID NO: 731855 - RNA, 19 nt, Artificial Sequence
  Description of Artificial Sequence: Synthetic oligonucleotide
  Antisense strand to SEQ ID NO: 731854
acacugaggaacauuuagc

SEQ ID NO: 731856 - RNA, 19 nt, Artificial Sequence
  Description of Artificial Sequence: Synthetic oligonucleotide
  Sense strand starting at position 454 of SEQ ID NO: 586621
aaauguuccucaguguggu

SEQ ID NO: 731857 - RNA, 19 nt, Artificial Sequence
  Description of Artificial Sequence: Synthetic oligonucleotide
  Antisense strand to SEQ ID NO: 731856
accacacugaggaacauuu

SEQ ID NO: 731858 - RNA, 19 nt, Artificial Sequence
  Description of Artificial Sequence: Synthetic oligonucleotide
  Sense strand starting at position 460 of SEQ ID NO: 586621
uccucagugugguggaaag

SEQ ID NO: 731859 - RNA, 19 nt, Artificial Sequence
  Description of Artificial Sequence: Synthetic oligonucleotide
  Antisense strand to SEQ ID NO: 731858
cuuuccaccacacugagga

SEQ ID NO: 731860 - RNA, 19 nt, Artificial Sequence
  Description of Artificial Sequence: Synthetic oligonucleotide
  Sense strand starting at position 462 of SEQ ID NO: 586621
cucagugugguggaaagaa

SEQ ID NO: 731861 - RNA, 19 nt, Artificial Sequence
  Description of Artificial Sequence: Synthetic oligonucleotide
  Antisense strand to SEQ ID NO: 731860
uucuuuccaccacacugag

SEQ ID NO: 731862 - RNA, 19 nt, Artificial Sequence
  Description of Artificial Sequence: Synthetic oligonucleotide
  Sense strand starting at position 499 of SEQ ID NO: 586621
ccagaaaguccuuggcagu

SEQ ID NO: 731863 - RNA, 19 nt, Artificial Sequence
  Description of Artificial Sequence: Synthetic oligonucleotide
  Antisense strand to SEQ ID NO: 731862
acugccaaggacuuucugg

SEQ ID NO: 731864 - RNA, 19 nt, Artificial Sequence
  Description of Artificial Sequence: Synthetic oligonucleotide
  Sense strand starting at position 550 of SEQ ID NO: 586621
gccaccugauccugaauga

SEQ ID NO: 731865 - RNA, 19 nt, Artificial Sequence
  Description of Artificial Sequence: Synthetic oligonucleotide
  Antisense strand to SEQ ID NO: 731864
ucauucaggaucagguggc

SEQ ID NO: 731866 - RNA, 19 nt, Artificial Sequence
  Description of Artificial Sequence: Synthetic oligonucleotide
  Sense strand starting at position 594 of SEQ ID NO: 586621
acugcuacuucucaaaggu

SEQ ID NO: 731867 - RNA, 19 nt, Artificial Sequence
  Description of Artificial Sequence: Synthetic oligonucleotide
  Antisense strand to SEQ ID NO: 731866
accuuugagaaguagcagu

SEQ ID NO: 731868 - RNA, 19 nt, Artificial Sequence
  Description of Artificial Sequence: Synthetic oligonucleotide
  Sense strand starting at position 969 of SEQ ID NO: 586621
acggcaacaaugugaauua

SEQ ID NO: 731869 - RNA, 19 nt, Artificial Sequence
  Description of Artificial Sequence: Synthetic oligonucleotide
  Antisense strand to SEQ ID NO: 731868
uaauucacauuguugccgu

SEQ ID NO: 731870 - RNA, 19 nt, Artificial Sequence
  Description of Artificial Sequence: Synthetic oligonucleotide
  Sense strand starting at position 980 of SEQ ID NO: 586621
gugaauuacaguuacguag

SEQ ID NO: 731871 - RNA, 19 nt, Artificial Sequence
  Description of Artificial Sequence: Synthetic oligonucleotide
  Antisense strand to SEQ ID NO: 731870
cuacguaacuguaauucac

SEQ ID NO: 731872 - RNA, 19 nt, Artificial Sequence
  Description of Artificial Sequence: Synthetic oligonucleotide
  Sense strand starting at position 988 of SEQ ID NO: 586621
caguuacguagacaggaau

SEQ ID NO: 731873 - RNA, 19 nt, Artificial Sequence
  Description of Artificial Sequence: Synthetic oligonucleotide
  Antisense strand to SEQ ID NO: 731872
auuccugucuacguaacug

SEQ ID NO: 731874 - RNA, 19 nt, Artificial Sequence
  Description of Artificial Sequence: Synthetic oligonucleotide
  Sense strand starting at position 994 of SEQ ID NO: 586621
cguagacaggaauguuauu

SEQ ID NO: 731875 - RNA, 19 nt, Artificial Sequence
  Description of Artificial Sequence: Synthetic oligonucleotide
  Antisense strand to SEQ ID NO: 731874
aauaacauuccugucuacg

SEQ ID NO: 731876 - RNA, 19 nt, Artificial Sequence
  Description of Artificial Sequence: Synthetic oligonucleotide
  Sense strand starting at position 999 of SEQ ID NO: 586621
acaggaauguuauugauug

SEQ ID NO: 731877 - RNA, 19 nt, Artificial Sequence
  Description of Artificial Sequence: Synthetic oligonucleotide
  Antisense strand to SEQ ID NO: 731876
caaucaauaacauuccugu

SEQ ID NO: 731878 - RNA, 19 nt, Artificial Sequence
  Description of Artificial Sequence: Synthetic oligonucleotide
  Sense strand starting at position 1000 of SEQ ID NO: 586621
caggaauguuauugauugu

SEQ ID NO: 731879 - RNA, 19 nt, Artificial Sequence
  Description of Artificial Sequence: Synthetic oligonucleotide
  Antisense strand to SEQ ID NO: 731878
acaaucaauaacauuccug

SEQ ID NO: 731880 - RNA, 19 nt, Artificial Sequence
  Description of Artificial Sequence: Synthetic oligonucleotide
  Sense strand starting at position 1003 of SEQ ID NO: 586621
gaauguuauugauuguaag

SEQ ID NO: 731881 - RNA, 19 nt, Artificial Sequence
  Description of Artificial Sequence: Synthetic oligonucleotide
  Antisense strand to SEQ ID NO: 731880
cuuacaaucaauaacauuc

SEQ ID NO: 731882 - RNA, 19 nt, Artificial Sequence
  Description of Artificial Sequence: Synthetic oligonucleotide
  Sense strand starting at position 2191 of SEQ ID NO: 586621
gcgggagcucucgggagaa

SEQ ID NO: 731883 - RNA, 19 nt, Artificial Sequence
  Description of Artificial Sequence: Synthetic oligonucleotide
  Antisense strand to SEQ ID NO: 731882
uucucccgagagcucccgc

SEQ ID NO: 731884 - RNA, 19 nt, Artificial Sequence
  Description of Artificial Sequence: Synthetic oligonucleotide
  Sense strand starting at position 2192 of SEQ ID NO: 586621
cgggagcucucgggagaaa

SEQ ID NO: 731885 - RNA, 19 nt, Artificial Sequence
  Description of Artificial Sequence: Synthetic oligonucleotide
  Antisense strand to SEQ ID NO: 731884
uuucucccgagagcucccg

SEQ ID NO: 731886 - RNA, 19 nt, Artificial Sequence
  Description of Artificial Sequence: Synthetic oligonucleotide
  Sense strand starting at position 2436 of SEQ ID NO: 586621
ccaguugguuguccugaca

SEQ ID NO: 731887 - RNA, 19 nt, Artificial Sequence
  Description of Artificial Sequence: Synthetic oligonucleotide
  Antisense strand to SEQ ID NO: 731886
ugucaggacaaccaacugg

SEQ ID NO: 731888 - RNA, 19 nt, Artificial Sequence
  Description of Artificial Sequence: Synthetic oligonucleotide
  Sense strand starting at position 2439 of SEQ ID NO: 586621
guugguuguccugacaauc

SEQ ID NO: 731889 - RNA, 19 nt, Artificial Sequence
  Description of Artificial Sequence: Synthetic oligonucleotide
  Antisense strand to SEQ ID NO: 731888
gauugucaggacaaccaac

SEQ ID NO: 731890 - RNA, 19 nt, Artificial Sequence
  Description of Artificial Sequence: Synthetic oligonucleotide
  Sense strand starting at position 2881 of SEQ ID NO: 586621
aggguaggguuggcagaua

SEQ ID NO: 731891 - RNA, 19 nt, Artificial Sequence
  Description of Artificial Sequence: Synthetic oligonucleotide
  Antisense strand to SEQ ID NO: 731890
uaucugccaacccuacccu

SEQ ID NO: 731892 - RNA, 19 nt, Artificial Sequence
  Description of Artificial Sequence: Synthetic oligonucleotide
  Sense strand starting at position 2882 of SEQ ID NO: 586621
ggguaggguuggcagauaa

SEQ ID NO: 731893 - RNA, 19 nt, Artificial Sequence
  Description of Artificial Sequence: Synthetic oligonucleotide
  Antisense strand to SEQ ID NO: 731892
uuaucugccaacccuaccc

SEQ ID NO: 731894 - RNA, 19 nt, Artificial Sequence
  Description of Artificial Sequence: Synthetic oligonucleotide
  Sense strand starting at position 2904 of SEQ ID NO: 586621
gcaggccacucaguuuaau

SEQ ID NO: 731895 - RNA, 19 nt, Artificial Sequence
  Description of Artificial Sequence: Synthetic oligonucleotide
  Antisense strand to SEQ ID NO: 731894
auuaaacugaguggccugc

SEQ ID NO: 731896 - RNA, 19 nt, Artificial Sequence
  Description of Artificial Sequence: Synthetic oligonucleotide
  Sense strand starting at position 2967 of SEQ ID NO: 586621
ucccuuauccacugggaua

SEQ ID NO: 731897 - RNA, 19 nt, Artificial Sequence
  Description of Artificial Sequence: Synthetic oligonucleotide
  Antisense strand to SEQ ID NO: 731896
uaucccaguggauaaggga

SEQ ID NO: 731898 - RNA, 19 nt, Artificial Sequence
  Description of Artificial Sequence: Synthetic oligonucleotide
  Sense strand starting at position 2969 of SEQ ID NO: 586621
ccuuauccacugggauagu

SEQ ID NO: 731899 - RNA, 19 nt, Artificial Sequence
  Description of Artificial Sequence: Synthetic oligonucleotide
  Antisense strand to SEQ ID NO: 731898
acuaucccaguggauaagg

SEQ ID NO: 731900 - RNA, 19 nt, Artificial Sequence
  Description of Artificial Sequence: Synthetic oligonucleotide
  Sense strand starting at position 2970 of SEQ ID NO: 586621
cuuauccacugggauaguu

SEQ ID NO: 731901 - RNA, 19 nt, Artificial Sequence
  Description of Artificial Sequence: Synthetic oligonucleotide
  Antisense strand to SEQ ID NO: 731900
aacuaucccaguggauaag

SEQ ID NO: 731902 - RNA, 19 nt, Artificial Sequence
  Description of Artificial Sequence: Synthetic oligonucleotide
  Sense strand starting at position 3009 of SEQ ID NO: 586621
ccugaaacuuuggauagca

SEQ ID NO: 731903 - RNA, 19 nt, Artificial Sequence
  Description of Artificial Sequence: Synthetic oligonucleotide
  Antisense strand to SEQ ID NO: 731902
ugcuauccaaaguuucagg

SEQ ID NO: 731904 - RNA, 19 nt, Artificial Sequence
  Description of Artificial Sequence: Synthetic oligonucleotide
  Sense strand starting at position 3147 of SEQ ID NO: 586621
uguacuaacuuguuaucac

SEQ ID NO: 731905 - RNA, 19 nt, Artificial Sequence
  Description of Artificial Sequence: Synthetic oligonucleotide
  Antisense strand to SEQ ID NO: 731904
gugauaacaaguuaguaca

SEQ ID NO: 731906 - RNA, 19 nt, Artificial Sequence
  Description of Artificial Sequence: Synthetic oligonucleotide
  Sense strand starting at position 3148 of SEQ ID NO: 586621
guacuaacuuguuaucaca

SEQ ID NO: 731907 - RNA, 19 nt, Artificial Sequence
  Description of Artificial Sequence: Synthetic oligonucleotide
  Antisense strand to SEQ ID NO: 731906
ugugauaacaaguuaguac

SEQ ID NO: 731908 - RNA, 19 nt, Artificial Sequence
  Description of Artificial Sequence: Synthetic oligonucleotide
  Sense strand starting at position 3151 of SEQ ID NO: 586621
cuaacuuguuaucacaugu

SEQ ID NO: 731909 - RNA, 19 nt, Artificial Sequence
  Description of Artificial Sequence: Synthetic oligonucleotide
  Antisense strand to SEQ ID NO: 731908
acaugugauaacaaguuag

SEQ ID NO: 731910 - RNA, 19 nt, Artificial Sequence
  Description of Artificial Sequence: Synthetic oligonucleotide
  Sense strand starting at position 3161 of SEQ ID NO: 586621
aucacaugucucgacaaga

SEQ ID NO: 731911 - RNA, 19 nt, Artificial Sequence
  Description of Artificial Sequence: Synthetic oligonucleotide
  Antisense strand to SEQ ID NO: 731910
ucuugucgagacaugugau

SEQ ID NO: 731912 - RNA, 19 nt, Artificial Sequence
  Description of Artificial Sequence: Synthetic oligonucleotide
  Sense strand starting at position 3276 of SEQ ID NO: 586621
ucacauuuauggugacauc

SEQ ID NO: 731913 - RNA, 19 nt, Artificial Sequence
  Description of Artificial Sequence: Synthetic oligonucleotide
  Antisense strand to SEQ ID NO: 731912
gaugucaccauaaauguga

SEQ ID NO: 731914 - RNA, 19 nt, Artificial Sequence
  Description of Artificial Sequence: Synthetic oligonucleotide
  Sense strand starting at position 3285 of SEQ ID NO: 586621
uggugacaucauugauauu

SEQ ID NO: 731915 - RNA, 19 nt, Artificial Sequence
  Description of Artificial Sequence: Synthetic oligonucleotide
  Antisense strand to SEQ ID NO: 731914
aauaucaaugaugucacca

SEQ ID NO: 731916 - RNA, 19 nt, Artificial Sequence
  Description of Artificial Sequence: Synthetic oligonucleotide
  Sense strand starting at position 3889 of SEQ ID NO: 586621
agacaauguugaggauaaa

SEQ ID NO: 731917 - RNA, 19 nt, Artificial Sequence
  Description of Artificial Sequence: Synthetic oligonucleotide
  Antisense strand to SEQ ID NO: 731916
uuuauccucaacauugucu

SEQ ID NO: 731918 - RNA, 19 nt, Artificial Sequence
  Description of Artificial Sequence: Synthetic oligonucleotide
  Sense strand starting at position 187 of SEQ ID NO: 586622
acgcaaguggcauaauaaa

SEQ ID NO: 731919 - RNA, 19 nt, Artificial Sequence
  Description of Artificial Sequence: Synthetic oligonucleotide
  Antisense strand to SEQ ID NO: 731918
uuuauuaugccacuugcgu

SEQ ID NO: 731920 - RNA, 19 nt, Artificial Sequence
  Description of Artificial Sequence: Synthetic oligonucleotide
  Sense strand starting at position 262 of SEQ ID NO: 586622
acuugcuucccucacgauu

SEQ ID NO: 731921 - RNA, 19 nt, Artificial Sequence
  Description of Artificial Sequence: Synthetic oligonucleotide
  Antisense strand to SEQ ID NO: 731920
aaucgugagggaagcaagu

SEQ ID NO: 731922 - RNA, 19 nt, Artificial Sequence
  Description of Artificial Sequence: Synthetic oligonucleotide
  Sense strand starting at position 276 of SEQ ID NO: 586622
cgauuaucauagcuaggua

SEQ ID NO: 731923 - RNA, 19 nt, Artificial Sequence
  Description of Artificial Sequence: Synthetic oligonucleotide
  Antisense strand to SEQ ID NO: 731922
uaccuagcuaugauaaucg

SEQ ID NO: 731924 - RNA, 19 nt, Artificial Sequence
  Description of Artificial Sequence: Synthetic oligonucleotide
  Sense strand starting at position 279 of SEQ ID NO: 586622
uuaucauagcuagguaaca

SEQ ID NO: 731925 - RNA, 19 nt, Artificial Sequence
  Description of Artificial Sequence: Synthetic oligonucleotide
  Antisense strand to SEQ ID NO: 731924
uguuaccuagcuaugauaa

SEQ ID NO: 731926 - RNA, 19 nt, Artificial Sequence
  Description of Artificial Sequence: Synthetic oligonucleotide
  Sense strand starting at position 321 of SEQ ID NO: 586622
aguugaaggcccugaauca

SEQ ID NO: 731927 - RNA, 19 nt, Artificial Sequence
  Description of Artificial Sequence: Synthetic oligonucleotide
  Antisense strand to SEQ ID NO: 731926
ugauucagggccuucaacu

SEQ ID NO: 731928 - RNA, 19 nt, Artificial Sequence
  Description of Artificial Sequence: Synthetic oligonucleotide
  Sense strand starting at position 322 of SEQ ID NO: 586622
guugaaggcccugaaucau

SEQ ID NO: 731929 - RNA, 19 nt, Artificial Sequence
  Description of Artificial Sequence: Synthetic oligonucleotide
  Antisense strand to SEQ ID NO: 731928
augauucagggccuucaac

SEQ ID NO: 731930 - RNA, 19 nt, Artificial Sequence
  Description of Artificial Sequence: Synthetic oligonucleotide
  Sense strand starting at position 613 of SEQ ID NO: 586622
auucuacaacuucgagaga

SEQ ID NO: 731931 - RNA, 19 nt, Artificial Sequence
  Description of Artificial Sequence: Synthetic oligonucleotide
  Antisense strand to SEQ ID NO: 731930
ucucucgaaguuguagaau

SEQ ID NO: 731932 - RNA, 19 nt, Artificial Sequence
  Description of Artificial Sequence: Synthetic oligonucleotide
  Sense strand starting at position 676 of SEQ ID NO: 586622
agcaguucgcuggcacuaa

SEQ ID NO: 731933 - RNA, 19 nt, Artificial Sequence
  Description of Artificial Sequence: Synthetic oligonucleotide
  Antisense strand to SEQ ID NO: 731932
uuagugccagcgaacugcu

SEQ ID NO: 731934 - RNA, 19 nt, Artificial Sequence
  Description of Artificial Sequence: Synthetic oligonucleotide
  Sense strand starting at position 727 of SEQ ID NO: 586622
aauaaccguucuguaagaa

SEQ ID NO: 731935 - RNA, 19 nt, Artificial Sequence
  Description of Artificial Sequence: Synthetic oligonucleotide
  Antisense strand to SEQ ID NO: 731934
uucuuacagaacgguuauu

SEQ ID NO: 731936 - RNA, 19 nt, Artificial Sequence
  Description of Artificial Sequence: Synthetic oligonucleotide
  Sense strand starting at position 728 of SEQ ID NO: 586622
auaaccguucuguaagaag

SEQ ID NO: 731937 - RNA, 19 nt, Artificial Sequence
  Description of Artificial Sequence: Synthetic oligonucleotide
  Antisense strand to SEQ ID NO: 731936
cuucuuacagaacgguuau

SEQ ID NO: 731938 - RNA, 19 nt, Artificial Sequence
  Description of Artificial Sequence: Synthetic oligonucleotide
  Sense strand starting at position 860 of SEQ ID NO: 586622
ucugcacucucuccgaaua

SEQ ID NO: 731939 - RNA, 19 nt, Artificial Sequence
  Description of Artificial Sequence: Synthetic oligonucleotide
  Antisense strand to SEQ ID NO: 731938
uauucggagagagugcaga

SEQ ID NO: 731940 - RNA, 19 nt, Artificial Sequence
  Description of Artificial Sequence: Synthetic oligonucleotide
  Sense strand starting at position 861 of SEQ ID NO: 586622
cugcacucucuccgaauaa

SEQ ID NO: 731941 - RNA, 19 nt, Artificial Sequence
  Description of Artificial Sequence: Synthetic oligonucleotide
  Antisense strand to SEQ ID NO: 731940
uuauucggagagagugcag

SEQ ID NO: 731942 - RNA, 19 nt, Artificial Sequence
  Description of Artificial Sequence: Synthetic oligonucleotide
  Sense strand starting at position 1027 of SEQ ID NO: 586622
gaagucaaauggcuuccua

SEQ ID NO: 731943 - RNA, 19 nt, Artificial Sequence
  Description of Artificial Sequence: Synthetic oligonucleotide
  Antisense strand to SEQ ID NO: 731942
uaggaagccauuugacuuc

SEQ ID NO: 731944 - RNA, 19 nt, Artificial Sequence
  Description of Artificial Sequence: Synthetic oligonucleotide
  Sense strand starting at position 1096 of SEQ ID NO: 586622
ggagcaagucgcugacaaa

SEQ ID NO: 731945 - RNA, 19 nt, Artificial Sequence
  Description of Artificial Sequence: Synthetic oligonucleotide
  Antisense strand to SEQ ID NO: 731944
uuugucagcgacuugcucc

SEQ ID NO: 731946 - RNA, 19 nt, Artificial Sequence
  Description of Artificial Sequence: Synthetic oligonucleotide
  Sense strand starting at position 1330 of SEQ ID NO: 586622
agaagagucgcggagaaga

SEQ ID NO: 731947 - RNA, 19 nt, Artificial Sequence
  Description of Artificial Sequence: Synthetic oligonucleotide
  Antisense strand to SEQ ID NO: 731946
ucuucuccgcgacucuucu

SEQ ID NO: 731948 - RNA, 19 nt, Artificial Sequence
  Description of Artificial Sequence: Synthetic oligonucleotide
  Sense strand starting at position 1623 of SEQ ID NO: 586622
cuuucuggcucucuggaaa

SEQ ID NO: 731949 - RNA, 19 nt, Artificial Sequence
  Description of Artificial Sequence: Synthetic oligonucleotide
  Antisense strand to SEQ ID NO: 731948
uuuccagagagccagaaag

SEQ ID NO: 731950 - RNA, 19 nt, Artificial Sequence
  Description of Artificial Sequence: Synthetic oligonucleotide
  Sense strand starting at position 3021 of SEQ ID NO: 586622
ccaguuaguuuccuuauua

SEQ ID NO: 731951 - RNA, 19 nt, Artificial Sequence
  Description of Artificial Sequence: Synthetic oligonucleotide
  Antisense strand to SEQ ID NO: 731950
uaauaaggaaacuaacugg

SEQ ID NO: 731952 - RNA, 19 nt, Artificial Sequence
  Description of Artificial Sequence: Synthetic oligonucleotide
  Sense strand starting at position 3067 of SEQ ID NO: 586622
gguucauaaggauguaaga

SEQ ID NO: 731953 - RNA, 19 nt, Artificial Sequence
  Description of Artificial Sequence: Synthetic oligonucleotide
  Antisense strand to SEQ ID NO: 731952
ucuuacauccuuaugaacc

SEQ ID NO: 731954 - RNA, 19 nt, Artificial Sequence
  Description of Artificial Sequence: Synthetic oligonucleotide
  Sense strand starting at position 3095 of SEQ ID NO: 586622
cgaugacagcucgagaaau

SEQ ID NO: 731955 - RNA, 19 nt, Artificial Sequence
  Description of Artificial Sequence: Synthetic oligonucleotide
  Antisense strand to SEQ ID NO: 731954
auuucucgagcugucaucg

SEQ ID NO: 731956 - RNA, 19 nt, Artificial Sequence
  Description of Artificial Sequence: Synthetic oligonucleotide
  Sense strand starting at position 3165 of SEQ ID NO: 586622
acguucaguguguugugau

SEQ ID NO: 731957 - RNA, 19 nt, Artificial Sequence
  Description of Artificial Sequence: Synthetic oligonucleotide
  Antisense strand to SEQ ID NO: 731956
aucacaacacacugaacgu

SEQ ID NO: 731958 - RNA, 19 nt, Artificial Sequence
  Description of Artificial Sequence: Synthetic oligonucleotide
  Sense strand starting at position 3253 of SEQ ID NO: 586622
gggcuagaauccgccugaa

SEQ ID NO: 731959 - RNA, 19 nt, Artificial Sequence
  Description of Artificial Sequence: Synthetic oligonucleotide
  Antisense strand to SEQ ID NO: 731958
uucaggcggauucuagccc

SEQ ID NO: 731960 - RNA, 19 nt, Artificial Sequence
  Description of Artificial Sequence: Synthetic oligonucleotide
  Sense strand starting at position 3288 of SEQ ID NO: 586622
gaaggacaguuacaaauau

SEQ ID NO: 731961 - RNA, 19 nt, Artificial Sequence
  Description of Artificial Sequence: Synthetic oligonucleotide
  Antisense strand to SEQ ID NO: 731960
auauuuguaacuguccuuc

SEQ ID NO: 731962 - RNA, 19 nt, Artificial Sequence
  Description of Artificial Sequence: Synthetic oligonucleotide
  Sense strand starting at position 3337 of SEQ ID NO: 586622
acacuuggacgaugaucua

SEQ ID NO: 731963 - RNA, 19 nt, Artificial Sequence
  Description of Artificial Sequence: Synthetic oligonucleotide
  Antisense strand to SEQ ID NO: 731962
uagaucaucguccaagugu

SEQ ID NO: 731964 - RNA, 19 nt, Artificial Sequence
  Description of Artificial Sequence: Synthetic oligonucleotide
  Sense strand starting at position 3373 of SEQ ID NO: 586622
acuaucgauuaguuuauga

SEQ ID NO: 731965 - RNA, 19 nt, Artificial Sequence
  Description of Artificial Sequence: Synthetic oligonucleotide
  Antisense strand to SEQ ID NO: 731964
ucauaaacuaaucgauagu

SEQ ID NO: 731966 - RNA, 19 nt, Artificial Sequence
  Description of Artificial Sequence: Synthetic oligonucleotide
  Sense strand starting at position 3375 of SEQ ID NO: 586622
uaucgauuaguuuaugaga

SEQ ID NO: 731967 - RNA, 19 nt, Artificial Sequence
  Description of Artificial Sequence: Synthetic oligonucleotide
  Antisense strand to SEQ ID NO: 731966
ucucauaaacuaaucgaua

SEQ ID NO: 731968 - RNA, 19 nt, Artificial Sequence
  Description of Artificial Sequence: Synthetic oligonucleotide
  Sense strand starting at position 3420 of SEQ ID NO: 586622
gggaaauaguaagaccuau

SEQ ID NO: 731969 - RNA, 19 nt, Artificial Sequence
  Description of Artificial Sequence: Synthetic oligonucleotide
  Antisense strand to SEQ ID NO: 731968
auaggucuuacuauuuccc

SEQ ID NO: 731970 - RNA, 19 nt, Artificial Sequence
  Description of Artificial Sequence: Synthetic oligonucleotide
  Sense strand starting at position 3531 of SEQ ID NO: 586622
uugaucuucgcaguguagu

SEQ ID NO: 731971 - RNA, 19 nt, Artificial Sequence
  Description of Artificial Sequence: Synthetic oligonucleotide
  Antisense strand to SEQ ID NO: 731970
acuacacugcgaagaucaa

SEQ ID NO: 731972 - RNA, 19 nt, Artificial Sequence
  Description of Artificial Sequence: Synthetic oligonucleotide
  Sense strand starting at position 3533 of SEQ ID NO: 586622
gaucuucgcaguguaguuu

SEQ ID NO: 731973 - RNA, 19 nt, Artificial Sequence
  Description of Artificial Sequence: Synthetic oligonucleotide
  Antisense strand to SEQ ID NO: 731972
aaacuacacugcgaagauc

SEQ ID NO: 731974 - RNA, 19 nt, Artificial Sequence
  Description of Artificial Sequence: Synthetic oligonucleotide
  Sense strand starting at position 3592 of SEQ ID NO: 586622
guuugcuuucccuucuagu

SEQ ID NO: 731975 - RNA, 19 nt, Artificial Sequence
  Description of Artificial Sequence: Synthetic oligonucleotide
  Antisense strand to SEQ ID NO: 731974
acuagaagggaaagcaaac

SEQ ID NO: 731976 - RNA, 19 nt, Artificial Sequence
  Description of Artificial Sequence: Synthetic oligonucleotide
  Sense strand starting at position 3613 of SEQ ID NO: 586622
cuaggauguuaacuuuaaa

SEQ ID NO: 731977 - RNA, 19 nt, Artificial Sequence
  Description of Artificial Sequence: Synthetic oligonucleotide
  Antisense strand to SEQ ID NO: 731976
uuuaaaguuaacauccuag

SEQ ID NO: 731978 - RNA, 19 nt, Artificial Sequence
  Description of Artificial Sequence: Synthetic oligonucleotide
  Sense strand starting at position 3635 of SEQ ID NO: 586622
ugucuucuacuugggcaaa

SEQ ID NO: 731979 - RNA, 19 nt, Artificial Sequence
  Description of Artificial Sequence: Synthetic oligonucleotide
  Antisense strand to SEQ ID NO: 731978
uuugcccaaguagaagaca

SEQ ID NO: 731980 - RNA, 19 nt, Artificial Sequence
  Description of Artificial Sequence: Synthetic oligonucleotide
  Sense strand starting at position 3663 of SEQ ID NO: 586622
cuuugauucccagagccua

SEQ ID NO: 731981 - RNA, 19 nt, Artificial Sequence
  Description of Artificial Sequence: Synthetic oligonucleotide
  Antisense strand to SEQ ID NO: 731980
uaggcucugggaaucaaag

SEQ ID NO: 731982 - RNA, 19 nt, Artificial Sequence
  Description of Artificial Sequence: Synthetic oligonucleotide
  Sense strand starting at position 3824 of SEQ ID NO: 586622
ggaggcuggcaugguaaau

SEQ ID NO: 731983 - RNA, 19 nt, Artificial Sequence
  Description of Artificial Sequence: Synthetic oligonucleotide
  Antisense strand to SEQ ID NO: 731982
auuuaccaugccagccucc

SEQ ID NO: 731984 - RNA, 19 nt, Artificial Sequence
  Description of Artificial Sequence: Synthetic oligonucleotide
  Sense strand starting at position 3861 of SEQ ID NO: 586622
gugccugacgauuacacau

SEQ ID NO: 731985 - RNA, 19 nt, Artificial Sequence
  Description of Artificial Sequence: Synthetic oligonucleotide
  Antisense strand to SEQ ID NO: 731984
auguguaaucgucaggcac

SEQ ID NO: 731986 - RNA, 19 nt, Artificial Sequence
  Description of Artificial Sequence: Synthetic oligonucleotide
  Sense strand starting at position 3889 of SEQ ID NO: 586622
acauauaugugacuaguga

SEQ ID NO: 731987 - RNA, 19 nt, Artificial Sequence
  Description of Artificial Sequence: Synthetic oligonucleotide
  Antisense strand to SEQ ID NO: 731986
ucacuagucacauauaugu

SEQ ID NO: 731988 - RNA, 19 nt, Artificial Sequence
  Description of Artificial Sequence: Synthetic oligonucleotide
  Sense strand starting at position 3890 of SEQ ID NO: 586622
cauauaugugacuagugau

SEQ ID NO: 731989 - RNA, 19 nt, Artificial Sequence
  Description of Artificial Sequence: Synthetic oligonucleotide
  Antisense strand to SEQ ID NO: 731988
aucacuagucacauauaug

SEQ ID NO: 731990 - RNA, 19 nt, Artificial Sequence
  Description of Artificial Sequence: Synthetic oligonucleotide
  Sense strand starting at position 3904 of SEQ ID NO: 586622
gugauaaacauaugaugug

SEQ ID NO: 731991 - RNA, 19 nt, Artificial Sequence
  Description of Artificial Sequence: Synthetic oligonucleotide
  Antisense strand to SEQ ID NO: 731990
cacaucauauguuuaucac

SEQ ID NO: 731992 - RNA, 19 nt, Artificial Sequence
  Description of Artificial Sequence: Synthetic oligonucleotide
  Sense strand starting at position 3918 of SEQ ID NO: 586622
augugaucuagugaaaguu

SEQ ID NO: 731993 - RNA, 19 nt, Artificial Sequence
  Description of Artificial Sequence: Synthetic oligonucleotide
  Antisense strand to SEQ ID NO: 731992
aacuuucacuagaucacau

SEQ ID NO: 731994 - RNA, 19 nt, Artificial Sequence
  Description of Artificial Sequence: Synthetic oligonucleotide
  Sense strand starting at position 3927 of SEQ ID NO: 586622
agugaaaguuuacucagua

SEQ ID NO: 731995 - RNA, 19 nt, Artificial Sequence
  Description of Artificial Sequence: Synthetic oligonucleotide
  Antisense strand to SEQ ID NO: 731994
uacugaguaaacuuucacu

SEQ ID NO: 731996 - RNA, 19 nt, Artificial Sequence
  Description of Artificial Sequence: Synthetic oligonucleotide
  Sense strand starting at position 3928 of SEQ ID NO: 586622
gugaaaguuuacucaguac

SEQ ID NO: 731997 - RNA, 19 nt, Artificial Sequence
  Description of Artificial Sequence: Synthetic oligonucleotide
  Antisense strand to SEQ ID NO: 731996
guacugaguaaacuuucac

SEQ ID NO: 731998 - RNA, 19 nt, Artificial Sequence
  Description of Artificial Sequence: Synthetic oligonucleotide
  Sense strand starting at position 50 of SEQ ID NO: 586623
ucaagaggugguugggaaa

SEQ ID NO: 731999 - RNA, 19 nt, Artificial Sequence
  Description of Artificial Sequence: Synthetic oligonucleotide
  Antisense strand to SEQ ID NO: 731998
uuucccaaccaccucuuga

SEQ ID NO: 732000 - RNA, 19 nt, Artificial Sequence
  Description of Artificial Sequence: Synthetic oligonucleotide
  Sense strand starting at position 57 of SEQ ID NO: 586623
gugguugggaaaugucuua

SEQ ID NO: 732001 - RNA, 19 nt, Artificial Sequence
  Description of Artificial Sequence: Synthetic oligonucleotide
  Antisense strand to SEQ ID NO: 732000
uaagacauuucccaaccac

SEQ ID NO: 732002 - RNA, 19 nt, Artificial Sequence
  Description of Artificial Sequence: Synthetic oligonucleotide
  Sense strand starting at position 69 of SEQ ID NO: 586623
ugucuuacucuagauugaa

SEQ ID NO: 732003 - RNA, 19 nt, Artificial Sequence
  Description of Artificial Sequence: Synthetic oligonucleotide
  Antisense strand to SEQ ID NO: 732002
uucaaucuagaguaagaca

SEQ ID NO: 732004 - RNA, 19 nt, Artificial Sequence
  Description of Artificial Sequence: Synthetic oligonucleotide
  Sense strand starting at position 140 of SEQ ID NO: 586623
ucuacuuuggcauauugaa

SEQ ID NO: 732005 - RNA, 19 nt, Artificial Sequence
  Description of Artificial Sequence: Synthetic oligonucleotide
  Antisense strand to SEQ ID NO: 732004
uucaauaugccaaaguaga

SEQ ID NO: 732006 - RNA, 19 nt, Artificial Sequence
  Description of Artificial Sequence: Synthetic oligonucleotide
  Sense strand starting at position 248 of SEQ ID NO: 586623
ugaaauuugcaaggcuguu

SEQ ID NO: 732007 - RNA, 19 nt, Artificial Sequence
  Description of Artificial Sequence: Synthetic oligonucleotide
  Antisense strand to SEQ ID NO: 732006
aacagccuugcaaauuuca

SEQ ID NO: 732008 - RNA, 19 nt, Artificial Sequence
  Description of Artificial Sequence: Synthetic oligonucleotide
  Sense strand starting at position 423 of SEQ ID NO: 586623
auaauaagccuguaauaug

SEQ ID NO: 732009 - RNA, 19 nt, Artificial Sequence
  Description of Artificial Sequence: Synthetic oligonucleotide
  Antisense strand to SEQ ID NO: 732008
cauauuacaggcuuauuau

SEQ ID NO: 732010 - RNA, 19 nt, Artificial Sequence
  Description of Artificial Sequence: Synthetic oligonucleotide
  Sense strand starting at position 433 of SEQ ID NO: 586623
uguaauaugcugcagacaa

SEQ ID NO: 732011 - RNA, 19 nt, Artificial Sequence
  Description of Artificial Sequence: Synthetic oligonucleotide
  Antisense strand to SEQ ID NO: 732010
uugucugcagcauauuaca

SEQ ID NO: 732012 - RNA, 19 nt, Artificial Sequence
  Description of Artificial Sequence: Synthetic oligonucleotide
  Sense strand starting at position 475 of SEQ ID NO: 586623
acccgagcugauuagauua

SEQ ID NO: 732013 - RNA, 19 nt, Artificial Sequence
  Description of Artificial Sequence: Synthetic oligonucleotide
  Antisense strand to SEQ ID NO: 732012
uaaucuaaucagcucgggu

SEQ ID NO: 732014 - RNA, 19 nt, Artificial Sequence
  Description of Artificial Sequence: Synthetic oligonucleotide
  Sense strand starting at position 727 of SEQ ID NO: 586623
aaacgagguuuacucuaga

SEQ ID NO: 732015 - RNA, 19 nt, Artificial Sequence
  Description of Artificial Sequence: Synthetic oligonucleotide
  Antisense strand to SEQ ID NO: 732014
ucuagaguaaaccucguuu

SEQ ID NO: 732016 - RNA, 19 nt, Artificial Sequence
  Description of Artificial Sequence: Synthetic oligonucleotide
  Sense strand starting at position 730 of SEQ ID NO: 586623
cgagguuuacucuagagcu

SEQ ID NO: 732017 - RNA, 19 nt, Artificial Sequence
  Description of Artificial Sequence: Synthetic oligonucleotide
  Antisense strand to SEQ ID NO: 732016
agcucuagaguaaaccucg

SEQ ID NO: 732018 - RNA, 19 nt, Artificial Sequence
  Description of Artificial Sequence: Synthetic oligonucleotide
  Sense strand starting at position 732 of SEQ ID NO: 586623
agguuuacucuagagcuaa

SEQ ID NO: 732019 - RNA, 19 nt, Artificial Sequence
  Description of Artificial Sequence: Synthetic oligonucleotide
  Antisense strand to SEQ ID NO: 732018
uuagcucuagaguaaaccu

SEQ ID NO: 732020 - RNA, 19 nt, Artificial Sequence
  Description of Artificial Sequence: Synthetic oligonucleotide
  Sense strand starting at position 777 of SEQ ID NO: 586623
auuguaucguucuuaagac

SEQ ID NO: 732021 - RNA, 19 nt, Artificial Sequence
  Description of Artificial Sequence: Synthetic oligonucleotide
  Antisense strand to SEQ ID NO: 732020
gucuuaagaacgauacaau

SEQ ID NO: 732022 - RNA, 19 nt, Artificial Sequence
  Description of Artificial Sequence: Synthetic oligonucleotide
  Sense strand starting at position 809 of SEQ ID NO: 586623
gacggaucuauacggaacu

SEQ ID NO: 732023 - RNA, 19 nt, Artificial Sequence
  Description of Artificial Sequence: Synthetic oligonucleotide
  Antisense strand to SEQ ID NO: 732022
aguuccguauagauccguc

SEQ ID NO: 732024 - RNA, 19 nt, Artificial Sequence
  Description of Artificial Sequence: Synthetic oligonucleotide
  Sense strand starting at position 841 of SEQ ID NO: 586623
gagagcacucuggauuguu

SEQ ID NO: 732025 - RNA, 19 nt, Artificial Sequence
  Description of Artificial Sequence: Synthetic oligonucleotide
  Antisense strand to SEQ ID NO: 732024
aacaauccagagugcucuc

SEQ ID NO: 732026 - RNA, 19 nt, Artificial Sequence
  Description of Artificial Sequence: Synthetic oligonucleotide
  Sense strand starting at position 920 of SEQ ID NO: 586623
gccauagaauuugugccaa

SEQ ID NO: 732027 - RNA, 19 nt, Artificial Sequence
  Description of Artificial Sequence: Synthetic oligonucleotide
  Antisense strand to SEQ ID NO: 732026
uuggcacaaauucuauggc

SEQ ID NO: 732028 - RNA, 19 nt, Artificial Sequence
  Description of Artificial Sequence: Synthetic oligonucleotide
  Sense strand starting at position 933 of SEQ ID NO: 586623
ugccaaucccuuggucaaa

SEQ ID NO: 732029 - RNA, 19 nt, Artificial Sequence
  Description of Artificial Sequence: Synthetic oligonucleotide
  Antisense strand to SEQ ID NO: 732028
uuugaccaagggauuggca

SEQ ID NO: 732030 - RNA, 19 nt, Artificial Sequence
  Description of Artificial Sequence: Synthetic oligonucleotide
  Sense strand starting at position 963 of SEQ ID NO: 586623
ugaaaugagccauauugua

SEQ ID NO: 732031 - RNA, 19 nt, Artificial Sequence
  Description of Artificial Sequence: Synthetic oligonucleotide
  Antisense strand to SEQ ID NO: 732030
uacaauauggcucauuuca

SEQ ID NO: 732032 - RNA, 19 nt, Artificial Sequence
  Description of Artificial Sequence: Synthetic oligonucleotide
  Sense strand starting at position 970 of SEQ ID NO: 586623
agccauauuguagauccua

SEQ ID NO: 732033 - RNA, 19 nt, Artificial Sequence
  Description of Artificial Sequence: Synthetic oligonucleotide
  Antisense strand to SEQ ID NO: 732032
uaggaucuacaauauggcu

SEQ ID NO: 732034 - RNA, 19 nt, Artificial Sequence
  Description of Artificial Sequence: Synthetic oligonucleotide
  Sense strand starting at position 1192 of SEQ ID NO: 586623
gagacugcccgucaagaaa

SEQ ID NO: 732035 - RNA, 19 nt, Artificial Sequence
  Description of Artificial Sequence: Synthetic oligonucleotide
  Antisense strand to SEQ ID NO: 732034
uuucuugacgggcagucuc

SEQ ID NO: 732036 - RNA, 19 nt, Artificial Sequence
  Description of Artificial Sequence: Synthetic oligonucleotide
  Sense strand starting at position 1253 of SEQ ID NO: 586623
acaagacgcgguugagaaa

SEQ ID NO: 732037 - RNA, 19 nt, Artificial Sequence
  Description of Artificial Sequence: Synthetic oligonucleotide
  Antisense strand to SEQ ID NO: 732036
uuucucaaccgcgucuugu

SEQ ID NO: 732038 - RNA, 19 nt, Artificial Sequence
  Description of Artificial Sequence: Synthetic oligonucleotide
  Sense strand starting at position 1447 of SEQ ID NO: 586623
ccgccauaaugcuccauuu

SEQ ID NO: 732039 - RNA, 19 nt, Artificial Sequence
  Description of Artificial Sequence: Synthetic oligonucleotide
  Antisense strand to SEQ ID NO: 732038
aaauggagcauuauggcgg

SEQ ID NO: 732040 - RNA, 19 nt, Artificial Sequence
  Description of Artificial Sequence: Synthetic oligonucleotide
  Sense strand starting at position 1511 of SEQ ID NO: 586623
cgucuugcgccggcaaaga

SEQ ID NO: 732041 - RNA, 19 nt, Artificial Sequence
  Description of Artificial Sequence: Synthetic oligonucleotide
  Antisense strand to SEQ ID NO: 732040
ucuuugccggcgcaagacg

SEQ ID NO: 732042 - RNA, 19 nt, Artificial Sequence
  Description of Artificial Sequence: Synthetic oligonucleotide
  Sense strand starting at position 1522 of SEQ ID NO: 586623
ggcaaagacaccugagagu

SEQ ID NO: 732043 - RNA, 19 nt, Artificial Sequence
  Description of Artificial Sequence: Synthetic oligonucleotide
  Antisense strand to SEQ ID NO: 732042
acucucaggugucuuugcc

SEQ ID NO: 732044 - RNA, 19 nt, Artificial Sequence
  Description of Artificial Sequence: Synthetic oligonucleotide
  Sense strand starting at position 2143 of SEQ ID NO: 586623
ccgcggaggcucgaagaua

SEQ ID NO: 732045 - RNA, 19 nt, Artificial Sequence
  Description of Artificial Sequence: Synthetic oligonucleotide
  Antisense strand to SEQ ID NO: 732044
uaucuucgagccuccgcgg

SEQ ID NO: 732046 - RNA, 19 nt, Artificial Sequence
  Description of Artificial Sequence: Synthetic oligonucleotide
  Sense strand starting at position 2184 of SEQ ID NO: 586623
gacggaaucucugucuuuc

SEQ ID NO: 732047 - RNA, 19 nt, Artificial Sequence
  Description of Artificial Sequence: Synthetic oligonucleotide
  Antisense strand to SEQ ID NO: 732046
gaaagacagagauuccguc

SEQ ID NO: 732048 - RNA, 19 nt, Artificial Sequence
  Description of Artificial Sequence: Synthetic oligonucleotide
  Sense strand starting at position 2228 of SEQ ID NO: 586623
accgaagguuugaggaagu

SEQ ID NO: 732049 - RNA, 19 nt, Artificial Sequence
  Description of Artificial Sequence: Synthetic oligonucleotide
  Antisense strand to SEQ ID NO: 732048
acuuccucaaaccuucggu

SEQ ID NO: 732050 - RNA, 19 nt, Artificial Sequence
  Description of Artificial Sequence: Synthetic oligonucleotide
  Sense strand starting at position 2230 of SEQ ID NO: 586623
cgaagguuugaggaagugu

SEQ ID NO: 732051 - RNA, 19 nt, Artificial Sequence
  Description of Artificial Sequence: Synthetic oligonucleotide
  Antisense strand to SEQ ID NO: 732050
acacuuccucaaaccuucg

SEQ ID NO: 732052 - RNA, 19 nt, Artificial Sequence
  Description of Artificial Sequence: Synthetic oligonucleotide
  Sense strand starting at position 2238 of SEQ ID NO: 586623
ugaggaagugucgguauuc

SEQ ID NO: 732053 - RNA, 19 nt, Artificial Sequence
  Description of Artificial Sequence: Synthetic oligonucleotide
  Antisense strand to SEQ ID NO: 732052
gaauaccgacacuuccuca

SEQ ID NO: 732054 - RNA, 19 nt, Artificial Sequence
  Description of Artificial Sequence: Synthetic oligonucleotide
  Sense strand starting at position 2290 of SEQ ID NO: 586623
ggcccucaagucuggauau

SEQ ID NO: 732055 - RNA, 19 nt, Artificial Sequence
  Description of Artificial Sequence: Synthetic oligonucleotide
  Antisense strand to SEQ ID NO: 732054
auauccagacuugagggcc

SEQ ID NO: 732056 - RNA, 19 nt, Artificial Sequence
  Description of Artificial Sequence: Synthetic oligonucleotide
  Sense strand starting at position 2300 of SEQ ID NO: 586623
ucuggauauaggugagcuu

SEQ ID NO: 732057 - RNA, 19 nt, Artificial Sequence
  Description of Artificial Sequence: Synthetic oligonucleotide
  Antisense strand to SEQ ID NO: 732056
aagcucaccuauauccaga

SEQ ID NO: 732058 - RNA, 19 nt, Artificial Sequence
  Description of Artificial Sequence: Synthetic oligonucleotide
  Sense strand starting at position 2581 of SEQ ID NO: 586623
agucuagugcugucucgau

SEQ ID NO: 732059 - RNA, 19 nt, Artificial Sequence
  Description of Artificial Sequence: Synthetic oligonucleotide
  Antisense strand to SEQ ID NO: 732058
aucgagacagcacuagacu

SEQ ID NO: 732060 - RNA, 19 nt, Artificial Sequence
  Description of Artificial Sequence: Synthetic oligonucleotide
  Sense strand starting at position 2810 of SEQ ID NO: 586623
uuuauauggcggugauuaa

SEQ ID NO: 732061 - RNA, 19 nt, Artificial Sequence
  Description of Artificial Sequence: Synthetic oligonucleotide
  Antisense strand to SEQ ID NO: 732060
uuaaucaccgccauauaaa

SEQ ID NO: 732062 - RNA, 19 nt, Artificial Sequence
  Description of Artificial Sequence: Synthetic oligonucleotide
  Sense strand starting at position 2811 of SEQ ID NO: 586623
uuauauggcggugauuaaa

SEQ ID NO: 732063 - RNA, 19 nt, Artificial Sequence
  Description of Artificial Sequence: Synthetic oligonucleotide
  Antisense strand to SEQ ID NO: 732062
uuuaaucaccgccauauaa

SEQ ID NO: 732064 - RNA, 19 nt, Artificial Sequence
  Description of Artificial Sequence: Synthetic oligonucleotide
  Sense strand starting at position 2839 of SEQ ID NO: 586623
gacagacagugaucucgaa

SEQ ID NO: 732065 - RNA, 19 nt, Artificial Sequence
  Description of Artificial Sequence: Synthetic oligonucleotide
  Antisense strand to SEQ ID NO: 732064
uucgagaucacugucuguc

SEQ ID NO: 732066 - RNA, 19 nt, Artificial Sequence
  Description of Artificial Sequence: Synthetic oligonucleotide
  Sense strand starting at position 3221 of SEQ ID NO: 586623
aggcucuucccugaccauu

SEQ ID NO: 732067 - RNA, 19 nt, Artificial Sequence
  Description of Artificial Sequence: Synthetic oligonucleotide
  Antisense strand to SEQ ID NO: 732066
aauggucagggaagagccu

SEQ ID NO: 732068 - RNA, 19 nt, Artificial Sequence
  Description of Artificial Sequence: Synthetic oligonucleotide
  Sense strand starting at position 3319 of SEQ ID NO: 586623
ggauuucucccgugacuuu

SEQ ID NO: 732069 - RNA, 19 nt, Artificial Sequence
  Description of Artificial Sequence: Synthetic oligonucleotide
  Antisense strand to SEQ ID NO: 732068
aaagucacgggagaaaucc

SEQ ID NO: 732070 - RNA, 19 nt, Artificial Sequence
  Description of Artificial Sequence: Synthetic oligonucleotide
  Sense strand starting at position 3806 of SEQ ID NO: 586623
aggaucgauuacuuucuga

SEQ ID NO: 732071 - RNA, 19 nt, Artificial Sequence
  Description of Artificial Sequence: Synthetic oligonucleotide
  Antisense strand to SEQ ID NO: 732070
ucagaaaguaaucgauccu

SEQ ID NO: 732072 - RNA, 19 nt, Artificial Sequence
  Description of Artificial Sequence: Synthetic oligonucleotide
  Sense strand starting at position 3809 of SEQ ID NO: 586623
aucgauuacuuucugagga

SEQ ID NO: 732073 - RNA, 19 nt, Artificial Sequence
  Description of Artificial Sequence: Synthetic oligonucleotide
  Antisense strand to SEQ ID NO: 732072
uccucagaaaguaaucgau

SEQ ID NO: 732074 - RNA, 19 nt, Artificial Sequence
  Description of Artificial Sequence: Synthetic oligonucleotide
  Sense strand starting at position 3825 of SEQ ID NO: 586623
ggaaacaguuucucagauu

SEQ ID NO: 732075 - RNA, 19 nt, Artificial Sequence
  Description of Artificial Sequence: Synthetic oligonucleotide
  Antisense strand to SEQ ID NO: 732074
aaucugagaaacuguuucc

SEQ ID NO: 732076 - RNA, 19 nt, Artificial Sequence
  Description of Artificial Sequence: Synthetic oligonucleotide
  Sense strand starting at position 3831 of SEQ ID NO: 586623
aguuucucagauugaaaua

SEQ ID NO: 732077 - RNA, 19 nt, Artificial Sequence
  Description of Artificial Sequence: Synthetic oligonucleotide
  Antisense strand to SEQ ID NO: 732076
uauuucaaucugagaaacu

SEQ ID NO: 732078 - RNA, 19 nt, Artificial Sequence
  Description of Artificial Sequence: Synthetic oligonucleotide
  Sense strand starting at position 58 of SEQ ID NO: 586624
uggagcuaaacuuauacga

SEQ ID NO: 732079 - RNA, 19 nt, Artificial Sequence
  Description of Artificial Sequence: Synthetic oligonucleotide
  Antisense strand to SEQ ID NO: 732078
ucguauaaguuuagcucca

SEQ ID NO: 732080 - RNA, 19 nt, Artificial Sequence
  Description of Artificial Sequence: Synthetic oligonucleotide
  Sense strand starting at position 60 of SEQ ID NO: 586624
gagcuaaacuuauacgaug

SEQ ID NO: 732081 - RNA, 19 nt, Artificial Sequence
  Description of Artificial Sequence: Synthetic oligonucleotide
  Antisense strand to SEQ ID NO: 732080
caucguauaaguuuagcuc

SEQ ID NO: 732082 - RNA, 19 nt, Artificial Sequence
  Description of Artificial Sequence: Synthetic oligonucleotide
  Sense strand starting at position 65 of SEQ ID NO: 586624
aaacuuauacgaugccagu

SEQ ID NO: 732083 - RNA, 19 nt, Artificial Sequence
  Description of Artificial Sequence: Synthetic oligonucleotide
  Antisense strand to SEQ ID NO: 732082
acuggcaucguauaaguuu

SEQ ID NO: 732084 - RNA, 19 nt, Artificial Sequence
  Description of Artificial Sequence: Synthetic oligonucleotide
  Sense strand starting at position 243 of SEQ ID NO: 586624
ggcguaauugugcacaccu

SEQ ID NO: 732085 - RNA, 19 nt, Artificial Sequence
  Description of Artificial Sequence: Synthetic oligonucleotide
  Antisense strand to SEQ ID NO: 732084
aggugugcacaauuacgcc

SEQ ID NO: 732086 - RNA, 19 nt, Artificial Sequence
  Description of Artificial Sequence: Synthetic oligonucleotide
  Sense strand starting at position 442 of SEQ ID NO: 586624
aaagaagccgagugaaugu

SEQ ID NO: 732087 - RNA, 19 nt, Artificial Sequence
  Description of Artificial Sequence: Synthetic oligonucleotide
  Antisense strand to SEQ ID NO: 732086
acauucacucggcuucuuu

SEQ ID NO: 732088 - RNA, 19 nt, Artificial Sequence
  Description of Artificial Sequence: Synthetic oligonucleotide
  Sense strand starting at position 451 of SEQ ID NO: 586624
gagugaauguuagaaucca

SEQ ID NO: 732089 - RNA, 19 nt, Artificial Sequence
  Description of Artificial Sequence: Synthetic oligonucleotide
  Antisense strand to SEQ ID NO: 732088
uggauucuaacauucacuc

SEQ ID NO: 732090 - RNA, 19 nt, Artificial Sequence
  Description of Artificial Sequence: Synthetic oligonucleotide
  Sense strand starting at position 530 of SEQ ID NO: 586624
cuggacuucucaguuccaa

SEQ ID NO: 732091 - RNA, 19 nt, Artificial Sequence
  Description of Artificial Sequence: Synthetic oligonucleotide
  Antisense strand to SEQ ID NO: 732090
uuggaacugagaaguccag

SEQ ID NO: 732092 - RNA, 19 nt, Artificial Sequence
  Description of Artificial Sequence: Synthetic oligonucleotide
  Sense strand starting at position 569 of SEQ ID NO: 586624
gccuguuggccauaccuau

SEQ ID NO: 732093 - RNA, 19 nt, Artificial Sequence
  Description of Artificial Sequence: Synthetic oligonucleotide
  Antisense strand to SEQ ID NO: 732092
auagguauggccaacaggc

SEQ ID NO: 732094 - RNA, 19 nt, Artificial Sequence
  Description of Artificial Sequence: Synthetic oligonucleotide
  Sense strand starting at position 575 of SEQ ID NO: 586624
uggccauaccuauaugcua

SEQ ID NO: 732095 - RNA, 19 nt, Artificial Sequence
  Description of Artificial Sequence: Synthetic oligonucleotide
  Antisense strand to SEQ ID NO: 732094
uagcauauagguauggcca

SEQ ID NO: 732096 - RNA, 19 nt, Artificial Sequence
  Description of Artificial Sequence: Synthetic oligonucleotide
  Sense strand starting at position 614 of SEQ ID NO: 586624
gccucauugacgugagcag

SEQ ID NO: 732097 - RNA, 19 nt, Artificial Sequence
  Description of Artificial Sequence: Synthetic oligonucleotide
  Antisense strand to SEQ ID NO: 732096
cugcucacgucaaugaggc

SEQ ID NO: 732098 - RNA, 19 nt, Artificial Sequence
  Description of Artificial Sequence: Synthetic oligonucleotide
  Sense strand starting at position 646 of SEQ ID NO: 586624
uauacuggcccuugaggaa

SEQ ID NO: 732099 - RNA, 19 nt, Artificial Sequence
  Description of Artificial Sequence: Synthetic oligonucleotide
  Antisense strand to SEQ ID NO: 732098
uuccucaagggccaguaua

SEQ ID NO: 732100 - RNA, 19 nt, Artificial Sequence
  Description of Artificial Sequence: Synthetic oligonucleotide
  Sense strand starting at position 667 of SEQ ID NO: 586624
aauccagcuccucggagau

SEQ ID NO: 732101 - RNA, 19 nt, Artificial Sequence
  Description of Artificial Sequence: Synthetic oligonucleotide
  Antisense strand to SEQ ID NO: 732100
aucuccgaggagcuggauu

SEQ ID NO: 732102 - RNA, 19 nt, Artificial Sequence
  Description of Artificial Sequence: Synthetic oligonucleotide
  Sense strand starting at position 671 of SEQ ID NO: 586624
cagcuccucggagauaaau

SEQ ID NO: 732103 - RNA, 19 nt, Artificial Sequence
  Description of Artificial Sequence: Synthetic oligonucleotide
  Antisense strand to SEQ ID NO: 732102
auuuaucuccgaggagcug

SEQ ID NO: 732104 - RNA, 19 nt, Artificial Sequence
  Description of Artificial Sequence: Synthetic oligonucleotide
  Sense strand starting at position 673 of SEQ ID NO: 586624
gcuccucggagauaaauag

SEQ ID NO: 732105 - RNA, 19 nt, Artificial Sequence
  Description of Artificial Sequence: Synthetic oligonucleotide
  Antisense strand to SEQ ID NO: 732104
cuauuuaucuccgaggagc

SEQ ID NO: 732106 - RNA, 19 nt, Artificial Sequence
  Description of Artificial Sequence: Synthetic oligonucleotide
  Sense strand starting at position 1187 of SEQ ID NO: 586624
guuggaggucuugguaugu

SEQ ID NO: 732107 - RNA, 19 nt, Artificial Sequence
  Description of Artificial Sequence: Synthetic oligonucleotide
  Antisense strand to SEQ ID NO: 732106
acauaccaagaccuccaac

SEQ ID NO: 732108 - RNA, 19 nt, Artificial Sequence
  Description of Artificial Sequence: Synthetic oligonucleotide
  Sense strand starting at position 1353 of SEQ ID NO: 586624
auugcaagauuccacggaa

SEQ ID NO: 732109 - RNA, 19 nt, Artificial Sequence
  Description of Artificial Sequence: Synthetic oligonucleotide
  Antisense strand to SEQ ID NO: 732108
uuccguggaaucuugcaau

SEQ ID NO: 732110 - RNA, 19 nt, Artificial Sequence
  Description of Artificial Sequence: Synthetic oligonucleotide
  Sense strand starting at position 1356 of SEQ ID NO: 586624
gcaagauuccacggaaacu

SEQ ID NO: 732111 - RNA, 19 nt, Artificial Sequence
  Description of Artificial Sequence: Synthetic oligonucleotide
  Antisense strand to SEQ ID NO: 732110
aguuuccguggaaucuugc

SEQ ID NO: 732112 - RNA, 19 nt, Artificial Sequence
  Description of Artificial Sequence: Synthetic oligonucleotide
  Sense strand starting at position 1365 of SEQ ID NO: 586624
cacggaaacuuugauuuga

SEQ ID NO: 732113 - RNA, 19 nt, Artificial Sequence
  Description of Artificial Sequence: Synthetic oligonucleotide
  Antisense strand to SEQ ID NO: 732112
ucaaaucaaaguuuccgug

SEQ ID NO: 732114 - RNA, 19 nt, Artificial Sequence
  Description of Artificial Sequence: Synthetic oligonucleotide
  Sense strand starting at position 1375 of SEQ ID NO: 586624
uugauuugauuccacaguu

SEQ ID NO: 732115 - RNA, 19 nt, Artificial Sequence
  Description of Artificial Sequence: Synthetic oligonucleotide
  Antisense strand to SEQ ID NO: 732114
aacuguggaaucaaaucaa

SEQ ID NO: 732116 - RNA, 19 nt, Artificial Sequence
  Description of Artificial Sequence: Synthetic oligonucleotide
  Sense strand starting at position 1388 of SEQ ID NO: 586624
acaguugucuggcuccuaa

SEQ ID NO: 732117 - RNA, 19 nt, Artificial Sequence
  Description of Artificial Sequence: Synthetic oligonucleotide
  Antisense strand to SEQ ID NO: 732116
uuaggagccagacaacugu

SEQ ID NO: 732118 - RNA, 19 nt, Artificial Sequence
  Description of Artificial Sequence: Synthetic oligonucleotide
  Sense strand starting at position 1490 of SEQ ID NO: 586624
ggaaacaccuagucaucua

SEQ ID NO: 732119 - RNA, 19 nt, Artificial Sequence
  Description of Artificial Sequence: Synthetic oligonucleotide
  Antisense strand to SEQ ID NO: 732118
uagaugacuagguguuucc

SEQ ID NO: 732120 - RNA, 19 nt, Artificial Sequence
  Description of Artificial Sequence: Synthetic oligonucleotide
  Sense strand starting at position 1939 of SEQ ID NO: 586624
acaucuuugccucgguacu

SEQ ID NO: 732121 - RNA, 19 nt, Artificial Sequence
  Description of Artificial Sequence: Synthetic oligonucleotide
  Antisense strand to SEQ ID NO: 732120
aguaccgaggcaaagaugu

SEQ ID NO: 732122 - RNA, 19 nt, Artificial Sequence
  Description of Artificial Sequence: Synthetic oligonucleotide
  Sense strand starting at position 1941 of SEQ ID NO: 586624
aucuuugccucgguacuua

SEQ ID NO: 732123 - RNA, 19 nt, Artificial Sequence
  Description of Artificial Sequence: Synthetic oligonucleotide
  Antisense strand to SEQ ID NO: 732122
uaaguaccgaggcaaagau

SEQ ID NO: 732124 - RNA, 19 nt, Artificial Sequence
  Description of Artificial Sequence: Synthetic oligonucleotide
  Sense strand starting at position 1945 of SEQ ID NO: 586624
uugccucgguacuuaaauu

SEQ ID NO: 732125 - RNA, 19 nt, Artificial Sequence
  Description of Artificial Sequence: Synthetic oligonucleotide
  Antisense strand to SEQ ID NO: 732124
aauuuaaguaccgaggcaa

SEQ ID NO: 732126 - RNA, 19 nt, Artificial Sequence
  Description of Artificial Sequence: Synthetic oligonucleotide
  Sense strand starting at position 1984 of SEQ ID NO: 586624
gcaucuaaggucggcauau

SEQ ID NO: 732127 - RNA, 19 nt, Artificial Sequence
  Description of Artificial Sequence: Synthetic oligonucleotide
  Antisense strand to SEQ ID NO: 732126
auaugccgaccuuagaugc

SEQ ID NO: 732128 - RNA, 19 nt, Artificial Sequence
  Description of Artificial Sequence: Synthetic oligonucleotide
  Sense strand starting at position 1985 of SEQ ID NO: 586624
caucuaaggucggcauauu

SEQ ID NO: 732129 - RNA, 19 nt, Artificial Sequence
  Description of Artificial Sequence: Synthetic oligonucleotide
  Antisense strand to SEQ ID NO: 732128
aauaugccgaccuuagaug

SEQ ID NO: 732130 - RNA, 19 nt, Artificial Sequence
  Description of Artificial Sequence: Synthetic oligonucleotide
  Sense strand starting at position 1995 of SEQ ID NO: 586624
cggcauauugacuggaagu

SEQ ID NO: 732131 - RNA, 19 nt, Artificial Sequence
  Description of Artificial Sequence: Synthetic oligonucleotide
  Antisense strand to SEQ ID NO: 732130
acuuccagucaauaugccg

SEQ ID NO: 732132 - RNA, 19 nt, Artificial Sequence
  Description of Artificial Sequence: Synthetic oligonucleotide
  Sense strand starting at position 1996 of SEQ ID NO: 586624
ggcauauugacuggaagua

SEQ ID NO: 732133 - RNA, 19 nt, Artificial Sequence
  Description of Artificial Sequence: Synthetic oligonucleotide
  Antisense strand to SEQ ID NO: 732132
uacuuccagucaauaugcc

SEQ ID NO: 732134 - RNA, 19 nt, Artificial Sequence
  Description of Artificial Sequence: Synthetic oligonucleotide
  Sense strand starting at position 2058 of SEQ ID NO: 586624
gcccauuguguggguuauu

SEQ ID NO: 732135 - RNA, 19 nt, Artificial Sequence
  Description of Artificial Sequence: Synthetic oligonucleotide
  Antisense strand to SEQ ID NO: 732134
aauaacccacacaaugggc

SEQ ID NO: 732136 - RNA, 19 nt, Artificial Sequence
  Description of Artificial Sequence: Synthetic oligonucleotide
  Sense strand starting at position 2059 of SEQ ID NO: 586624
cccauuguguggguuauua

SEQ ID NO: 732137 - RNA, 19 nt, Artificial Sequence
  Description of Artificial Sequence: Synthetic oligonucleotide
  Antisense strand to SEQ ID NO: 732136
uaauaacccacacaauggg

SEQ ID NO: 732138 - RNA, 19 nt, Artificial Sequence
  Description of Artificial Sequence: Synthetic oligonucleotide
  Sense strand starting at position 2061 of SEQ ID NO: 586624
cauuguguggguuauuaug

SEQ ID NO: 732139 - RNA, 19 nt, Artificial Sequence
  Description of Artificial Sequence: Synthetic oligonucleotide
  Antisense strand to SEQ ID NO: 732138
cauaauaacccacacaaug

SEQ ID NO: 732140 - RNA, 19 nt, Artificial Sequence
  Description of Artificial Sequence: Synthetic oligonucleotide
  Sense strand starting at position 2067 of SEQ ID NO: 586624
guggguuauuaugucagua

SEQ ID NO: 732141 - RNA, 19 nt, Artificial Sequence
  Description of Artificial Sequence: Synthetic oligonucleotide
  Antisense strand to SEQ ID NO: 732140
uacugacauaauaacccac

SEQ ID NO: 732142 - RNA, 19 nt, Artificial Sequence
  Description of Artificial Sequence: Synthetic oligonucleotide
  Sense strand starting at position 2071 of SEQ ID NO: 586624
guuauuaugucaguaucau

SEQ ID NO: 732143 - RNA, 19 nt, Artificial Sequence
  Description of Artificial Sequence: Synthetic oligonucleotide
  Antisense strand to SEQ ID NO: 732142
augauacugacauaauaac

SEQ ID NO: 732144 - RNA, 19 nt, Artificial Sequence
  Description of Artificial Sequence: Synthetic oligonucleotide
  Sense strand starting at position 2599 of SEQ ID NO: 586624
auguccuauuucugcaaga

SEQ ID NO: 732145 - RNA, 19 nt, Artificial Sequence
  Description of Artificial Sequence: Synthetic oligonucleotide
  Antisense strand to SEQ ID NO: 732144
ucuugcagaaauaggacau

SEQ ID NO: 732146 - RNA, 19 nt, Artificial Sequence
  Description of Artificial Sequence: Synthetic oligonucleotide
  Sense strand starting at position 2600 of SEQ ID NO: 586624
uguccuauuucugcaagac

SEQ ID NO: 732147 - RNA, 19 nt, Artificial Sequence
  Description of Artificial Sequence: Synthetic oligonucleotide
  Antisense strand to SEQ ID NO: 732146
gucuugcagaaauaggaca

SEQ ID NO: 732148 - RNA, 19 nt, Artificial Sequence
  Description of Artificial Sequence: Synthetic oligonucleotide
  Sense strand starting at position 3372 of SEQ ID NO: 586624
augggcugguugucauaua

SEQ ID NO: 732149 - RNA, 19 nt, Artificial Sequence
  Description of Artificial Sequence: Synthetic oligonucleotide
  Antisense strand to SEQ ID NO: 732148
uauaugacaaccagcccau

SEQ ID NO: 732150 - RNA, 19 nt, Artificial Sequence
  Description of Artificial Sequence: Synthetic oligonucleotide
  Sense strand starting at position 3834 of SEQ ID NO: 586624
agcacaagucacugagaau

SEQ ID NO: 732151 - RNA, 19 nt, Artificial Sequence
  Description of Artificial Sequence: Synthetic oligonucleotide
  Antisense strand to SEQ ID NO: 732150
auucucagugacuugugcu

SEQ ID NO: 732152 - RNA, 19 nt, Artificial Sequence
  Description of Artificial Sequence: Synthetic oligonucleotide
  Sense strand starting at position 3963 of SEQ ID NO: 586624
cuguucuuugcacagagua

SEQ ID NO: 732153 - RNA, 19 nt, Artificial Sequence
  Description of Artificial Sequence: Synthetic oligonucleotide
  Antisense strand to SEQ ID NO: 732152
uacucugugcaaagaacag

SEQ ID NO: 732154 - RNA, 19 nt, Artificial Sequence
  Description of Artificial Sequence: Synthetic oligonucleotide
  Sense strand starting at position 3977 of SEQ ID NO: 586624
gaguacaugugauugugga

SEQ ID NO: 732155 - RNA, 19 nt, Artificial Sequence
  Description of Artificial Sequence: Synthetic oligonucleotide
  Antisense strand to SEQ ID NO: 732154
uccacaaucacauguacuc

SEQ ID NO: 732156 - RNA, 19 nt, Artificial Sequence
  Description of Artificial Sequence: Synthetic oligonucleotide
  Sense strand starting at position 3978 of SEQ ID NO: 586624
aguacaugugauuguggau

SEQ ID NO: 732157 - RNA, 19 nt, Artificial Sequence
  Description of Artificial Sequence: Synthetic oligonucleotide
  Antisense strand to SEQ ID NO: 732156
auccacaaucacauguacu

SEQ ID NO: 732158 - RNA, 19 nt, Artificial Sequence
  Description of Artificial Sequence: Synthetic oligonucleotide
  Sense strand starting at position 72 of SEQ ID NO: 586625
gugaacucaucuguaauac

SEQ ID NO: 732159 - RNA, 19 nt, Artificial Sequence
  Description of Artificial Sequence: Synthetic oligonucleotide
  Antisense strand to SEQ ID NO: 732158
guauuacagaugaguucac

SEQ ID NO: 732160 - RNA, 19 nt, Artificial Sequence
  Description of Artificial Sequence: Synthetic oligonucleotide
  Sense strand starting at position 81 of SEQ ID NO: 586625
ucuguaauacugggaucau

SEQ ID NO: 732161 - RNA, 19 nt, Artificial Sequence
  Description of Artificial Sequence: Synthetic oligonucleotide
  Antisense strand to SEQ ID NO: 732160
augaucccaguauuacaga

SEQ ID NO: 732162 - RNA, 19 nt, Artificial Sequence
  Description of Artificial Sequence: Synthetic oligonucleotide
  Sense strand starting at position 82 of SEQ ID NO: 586625
cuguaauacugggaucaua

SEQ ID NO: 732163 - RNA, 19 nt, Artificial Sequence
  Description of Artificial Sequence: Synthetic oligonucleotide
  Antisense strand to SEQ ID NO: 732162
uaugaucccaguauuacag

SEQ ID NO: 732164 - RNA, 19 nt, Artificial Sequence
  Description of Artificial Sequence: Synthetic oligonucleotide
  Sense strand starting at position 142 of SEQ ID NO: 586625
caggaauagugccuagaac

SEQ ID NO: 732165 - RNA, 19 nt, Artificial Sequence
  Description of Artificial Sequence: Synthetic oligonucleotide
  Antisense strand to SEQ ID NO: 732164
guucuaggcacuauuccug

SEQ ID NO: 732166 - RNA, 19 nt, Artificial Sequence
  Description of Artificial Sequence: Synthetic oligonucleotide
  Sense strand starting at position 179 of SEQ ID NO: 586625
uauuaagugcuaugauuag

SEQ ID NO: 732167 - RNA, 19 nt, Artificial Sequence
  Description of Artificial Sequence: Synthetic oligonucleotide
  Antisense strand to SEQ ID NO: 732166
cuaaucauagcacuuaaua

SEQ ID NO: 732168 - RNA, 19 nt, Artificial Sequence
  Description of Artificial Sequence: Synthetic oligonucleotide
  Sense strand starting at position 183 of SEQ ID NO: 586625
aagugcuaugauuaguaau

SEQ ID NO: 732169 - RNA, 19 nt, Artificial Sequence
  Description of Artificial Sequence: Synthetic oligonucleotide
  Antisense strand to SEQ ID NO: 732168
auuacuaaucauagcacuu

SEQ ID NO: 732170 - RNA, 19 nt, Artificial Sequence
  Description of Artificial Sequence: Synthetic oligonucleotide
  Sense strand starting at position 185 of SEQ ID NO: 586625
gugcuaugauuaguaauac

SEQ ID NO: 732171 - RNA, 19 nt, Artificial Sequence
  Description of Artificial Sequence: Synthetic oligonucleotide
  Antisense strand to SEQ ID NO: 732170
guauuacuaaucauagcac

SEQ ID NO: 732172 - RNA, 19 nt, Artificial Sequence
  Description of Artificial Sequence: Synthetic oligonucleotide
  Sense strand starting at position 186 of SEQ ID NO: 586625
ugcuaugauuaguaauacu

SEQ ID NO: 732173 - RNA, 19 nt, Artificial Sequence
  Description of Artificial Sequence: Synthetic oligonucleotide
  Antisense strand to SEQ ID NO: 732172
aguauuacuaaucauagca

SEQ ID NO: 732174 - RNA, 19 nt, Artificial Sequence
  Description of Artificial Sequence: Synthetic oligonucleotide
  Sense strand starting at position 208 of SEQ ID NO: 586625
gccagaccugucugccuaa

SEQ ID NO: 732175 - RNA, 19 nt, Artificial Sequence
  Description of Artificial Sequence: Synthetic oligonucleotide
  Antisense strand to SEQ ID NO: 732174
uuaggcagacaggucuggc

SEQ ID NO: 732176 - RNA, 19 nt, Artificial Sequence
  Description of Artificial Sequence: Synthetic oligonucleotide
  Sense strand starting at position 209 of SEQ ID NO: 586625
ccagaccugucugccuaau

SEQ ID NO: 732177 - RNA, 19 nt, Artificial Sequence
  Description of Artificial Sequence: Synthetic oligonucleotide
  Antisense strand to SEQ ID NO: 732176
auuaggcagacaggucugg

SEQ ID NO: 732178 - RNA, 19 nt, Artificial Sequence
  Description of Artificial Sequence: Synthetic oligonucleotide
  Sense strand starting at position 296 of SEQ ID NO: 586625
cucgcuccagacuaaauau

SEQ ID NO: 732179 - RNA, 19 nt, Artificial Sequence
  Description of Artificial Sequence: Synthetic oligonucleotide
  Antisense strand to SEQ ID NO: 732178
auauuuagucuggagcgag

SEQ ID NO: 732180 - RNA, 19 nt, Artificial Sequence
  Description of Artificial Sequence: Synthetic oligonucleotide
  Sense strand starting at position 514 of SEQ ID NO: 586625
aagugugagugugcaaaca

SEQ ID NO: 732181 - RNA, 19 nt, Artificial Sequence
  Description of Artificial Sequence: Synthetic oligonucleotide
  Antisense strand to SEQ ID NO: 732180
uguuugcacacucacacuu

SEQ ID NO: 732182 - RNA, 19 nt, Artificial Sequence
  Description of Artificial Sequence: Synthetic oligonucleotide
  Sense strand starting at position 1000 of SEQ ID NO: 586625
uacguagugugaggauauu

SEQ ID NO: 732183 - RNA, 19 nt, Artificial Sequence
  Description of Artificial Sequence: Synthetic oligonucleotide
  Antisense strand to SEQ ID NO: 732182
aauauccucacacuacgua

SEQ ID NO: 732184 - RNA, 19 nt, Artificial Sequence
  Description of Artificial Sequence: Synthetic oligonucleotide
  Sense strand starting at position 1069 of SEQ ID NO: 586625
acaggaaacugugguauga

SEQ ID NO: 732185 - RNA, 19 nt, Artificial Sequence
  Description of Artificial Sequence: Synthetic oligonucleotide
  Antisense strand to SEQ ID NO: 732184
ucauaccacaguuuccugu

SEQ ID NO: 732186 - RNA, 19 nt, Artificial Sequence
  Description of Artificial Sequence: Synthetic oligonucleotide
  Sense strand starting at position 1079 of SEQ ID NO: 586625
gugguaugaggaggccuua

SEQ ID NO: 732187 - RNA, 19 nt, Artificial Sequence
  Description of Artificial Sequence: Synthetic oligonucleotide
  Antisense strand to SEQ ID NO: 732186
uaaggccuccucauaccac

SEQ ID NO: 732188 - RNA, 19 nt, Artificial Sequence
  Description of Artificial Sequence: Synthetic oligonucleotide
  Sense strand starting at position 1265 of SEQ ID NO: 586625
caguguuugcucugccuag

SEQ ID NO: 732189 - RNA, 19 nt, Artificial Sequence
  Description of Artificial Sequence: Synthetic oligonucleotide
  Antisense strand to SEQ ID NO: 732188
cuaggcagagcaaacacug

SEQ ID NO: 732190 - RNA, 19 nt, Artificial Sequence
  Description of Artificial Sequence: Synthetic oligonucleotide
  Sense strand starting at position 1266 of SEQ ID NO: 586625
aguguuugcucugccuagu

SEQ ID NO: 732191 - RNA, 19 nt, Artificial Sequence
  Description of Artificial Sequence: Synthetic oligonucleotide
  Antisense strand to SEQ ID NO: 732190
acuaggcagagcaaacacu

SEQ ID NO: 732192 - RNA, 19 nt, Artificial Sequence
  Description of Artificial Sequence: Synthetic oligonucleotide
  Sense strand starting at position 1383 of SEQ ID NO: 586625
ggagcaguugcugguauca

SEQ ID NO: 732193 - RNA, 19 nt, Artificial Sequence
  Description of Artificial Sequence: Synthetic oligonucleotide
  Antisense strand to SEQ ID NO: 732192
ugauaccagcaacugcucc

SEQ ID NO: 732194 - RNA, 19 nt, Artificial Sequence
  Description of Artificial Sequence: Synthetic oligonucleotide
  Sense strand starting at position 1425 of SEQ ID NO: 586625
ugauaucagcaccagaguu

SEQ ID NO: 732195 - RNA, 19 nt, Artificial Sequence
  Description of Artificial Sequence: Synthetic oligonucleotide
  Antisense strand to SEQ ID NO: 732194
aacucuggugcugauauca

SEQ ID NO: 732196 - RNA, 19 nt, Artificial Sequence
  Description of Artificial Sequence: Synthetic oligonucleotide
  Sense strand starting at position 1435 of SEQ ID NO: 586625
accagaguuucccagcauc

SEQ ID NO: 732197 - RNA, 19 nt, Artificial Sequence
  Description of Artificial Sequence: Synthetic oligonucleotide
  Antisense strand to SEQ ID NO: 732196
gaugcugggaaacucuggu

SEQ ID NO: 732198 - RNA, 19 nt, Artificial Sequence
  Description of Artificial Sequence: Synthetic oligonucleotide
  Sense strand starting at position 2639 of SEQ ID NO: 586625
gaccuaccuucgugucaca

SEQ ID NO: 732199 - RNA, 19 nt, Artificial Sequence
  Description of Artificial Sequence: Synthetic oligonucleotide
  Antisense strand to SEQ ID NO: 732198
ugugacacgaagguagguc

SEQ ID NO: 732200 - RNA, 19 nt, Artificial Sequence
  Description of Artificial Sequence: Synthetic oligonucleotide
  Sense strand starting at position 2642 of SEQ ID NO: 586625
cuaccuucgugucacauuu

SEQ ID NO: 732201 - RNA, 19 nt, Artificial Sequence
  Description of Artificial Sequence: Synthetic oligonucleotide
  Antisense strand to SEQ ID NO: 732200
aaaugugacacgaagguag

SEQ ID NO: 732202 - RNA, 19 nt, Artificial Sequence
  Description of Artificial Sequence: Synthetic oligonucleotide
  Sense strand starting at position 2688 of SEQ ID NO: 586625
cccaguuguuccuggcaca

SEQ ID NO: 732203 - RNA, 19 nt, Artificial Sequence
  Description of Artificial Sequence: Synthetic oligonucleotide
  Antisense strand to SEQ ID NO: 732202
ugugccaggaacaacuggg

SEQ ID NO: 732204 - RNA, 19 nt, Artificial Sequence
  Description of Artificial Sequence: Synthetic oligonucleotide
  Sense strand starting at position 2689 of SEQ ID NO: 586625
ccaguuguuccuggcacau

SEQ ID NO: 732205 - RNA, 19 nt, Artificial Sequence
  Description of Artificial Sequence: Synthetic oligonucleotide
  Antisense strand to SEQ ID NO: 732204
augugccaggaacaacugg

SEQ ID NO: 732206 - RNA, 19 nt, Artificial Sequence
  Description of Artificial Sequence: Synthetic oligonucleotide
  Sense strand starting at position 2713 of SEQ ID NO: 586625
gccucaaauaaacguguga

SEQ ID NO: 732207 - RNA, 19 nt, Artificial Sequence
  Description of Artificial Sequence: Synthetic oligonucleotide
  Antisense strand to SEQ ID NO: 732206
ucacacguuuauuugaggc

SEQ ID NO: 732208 - RNA, 19 nt, Artificial Sequence
  Description of Artificial Sequence: Synthetic oligonucleotide
  Sense strand starting at position 2715 of SEQ ID NO: 586625
cucaaauaaacgugugaug

SEQ ID NO: 732209 - RNA, 19 nt, Artificial Sequence
  Description of Artificial Sequence: Synthetic oligonucleotide
  Antisense strand to SEQ ID NO: 732208
caucacacguuuauuugag

SEQ ID NO: 732210 - RNA, 19 nt, Artificial Sequence
  Description of Artificial Sequence: Synthetic oligonucleotide
  Sense strand starting at position 2724 of SEQ ID NO: 586625
acgugugaugcgggaagga

SEQ ID NO: 732211 - RNA, 19 nt, Artificial Sequence
  Description of Artificial Sequence: Synthetic oligonucleotide
  Antisense strand to SEQ ID NO: 732210
uccuucccgcaucacacgu

SEQ ID NO: 732212 - RNA, 19 nt, Artificial Sequence
  Description of Artificial Sequence: Synthetic oligonucleotide
  Sense strand starting at position 2725 of SEQ ID NO: 586625
cgugugaugcgggaaggaa

SEQ ID NO: 732213 - RNA, 19 nt, Artificial Sequence
  Description of Artificial Sequence: Synthetic oligonucleotide
  Antisense strand to SEQ ID NO: 732212
uuccuucccgcaucacacg

SEQ ID NO: 732214 - RNA, 19 nt, Artificial Sequence
  Description of Artificial Sequence: Synthetic oligonucleotide
  Sense strand starting at position 2772 of SEQ ID NO: 586625
ugcgcuucacgaguucgaa

SEQ ID NO: 732215 - RNA, 19 nt, Artificial Sequence
  Description of Artificial Sequence: Synthetic oligonucleotide
  Antisense strand to SEQ ID NO: 732214
uucgaacucgugaagcgca

SEQ ID NO: 732216 - RNA, 19 nt, Artificial Sequence
  Description of Artificial Sequence: Synthetic oligonucleotide
  Sense strand starting at position 2773 of SEQ ID NO: 586625
gcgcuucacgaguucgaag

SEQ ID NO: 732217 - RNA, 19 nt, Artificial Sequence
  Description of Artificial Sequence: Synthetic oligonucleotide
  Antisense strand to SEQ ID NO: 732216
cuucgaacucgugaagcgc

SEQ ID NO: 732218 - RNA, 19 nt, Artificial Sequence
  Description of Artificial Sequence: Synthetic oligonucleotide
  Sense strand starting at position 2924 of SEQ ID NO: 586625
ccugcugugccagacagaa

SEQ ID NO: 732219 - RNA, 19 nt, Artificial Sequence
  Description of Artificial Sequence: Synthetic oligonucleotide
  Antisense strand to SEQ ID NO: 732218
uucugucuggcacagcagg

SEQ ID NO: 732220 - RNA, 19 nt, Artificial Sequence
  Description of Artificial Sequence: Synthetic oligonucleotide
  Sense strand starting at position 2981 of SEQ ID NO: 586625
gagacucugcucugaguuu

SEQ ID NO: 732221 - RNA, 19 nt, Artificial Sequence
  Description of Artificial Sequence: Synthetic oligonucleotide
  Antisense strand to SEQ ID NO: 732220
aaacucagagcagagucuc

SEQ ID NO: 732222 - RNA, 19 nt, Artificial Sequence
  Description of Artificial Sequence: Synthetic oligonucleotide
  Sense strand starting at position 3032 of SEQ ID NO: 586625
gcgcucugccugggcaaua

SEQ ID NO: 732223 - RNA, 19 nt, Artificial Sequence
  Description of Artificial Sequence: Synthetic oligonucleotide
  Antisense strand to SEQ ID NO: 732222
uauugcccaggcagagcgc

SEQ ID NO: 732224 - RNA, 19 nt, Artificial Sequence
  Description of Artificial Sequence: Synthetic oligonucleotide
  Sense strand starting at position 3033 of SEQ ID NO: 586625
cgcucugccugggcaauau

SEQ ID NO: 732225 - RNA, 19 nt, Artificial Sequence
  Description of Artificial Sequence: Synthetic oligonucleotide
  Antisense strand to SEQ ID NO: 732224
auauugcccaggcagagcg

SEQ ID NO: 732226 - RNA, 19 nt, Artificial Sequence
  Description of Artificial Sequence: Synthetic oligonucleotide
  Sense strand starting at position 3042 of SEQ ID NO: 586625
ugggcaauaucggagggaa

SEQ ID NO: 732227 - RNA, 19 nt, Artificial Sequence
  Description of Artificial Sequence: Synthetic oligonucleotide
  Antisense strand to SEQ ID NO: 732226
uucccuccgauauugccca

SEQ ID NO: 732228 - RNA, 19 nt, Artificial Sequence
  Description of Artificial Sequence: Synthetic oligonucleotide
  Sense strand starting at position 3045 of SEQ ID NO: 586625
gcaauaucggagggaagga

SEQ ID NO: 732229 - RNA, 19 nt, Artificial Sequence
  Description of Artificial Sequence: Synthetic oligonucleotide
  Antisense strand to SEQ ID NO: 732228
uccuucccuccgauauugc

SEQ ID NO: 732230 - RNA, 19 nt, Artificial Sequence
  Description of Artificial Sequence: Synthetic oligonucleotide
  Sense strand starting at position 3066 of SEQ ID NO: 586625
gggaauuccucgcccaguc

SEQ ID NO: 732231 - RNA, 19 nt, Artificial Sequence
  Description of Artificial Sequence: Synthetic oligonucleotide
  Antisense strand to SEQ ID NO: 732230
gacugggcgaggaauuccc

SEQ ID NO: 732232 - RNA, 19 nt, Artificial Sequence
  Description of Artificial Sequence: Synthetic oligonucleotide
  Sense strand starting at position 3200 of SEQ ID NO: 586625
cucggucauacccgagaca

SEQ ID NO: 732233 - RNA, 19 nt, Artificial Sequence
  Description of Artificial Sequence: Synthetic oligonucleotide
  Antisense strand to SEQ ID NO: 732232
ugucucggguaugaccgag

SEQ ID NO: 732234 - RNA, 19 nt, Artificial Sequence
  Description of Artificial Sequence: Synthetic oligonucleotide
  Sense strand starting at position 3403 of SEQ ID NO: 586625
gcgggcuccuuacaguaau

SEQ ID NO: 732235 - RNA, 19 nt, Artificial Sequence
  Description of Artificial Sequence: Synthetic oligonucleotide
  Antisense strand to SEQ ID NO: 732234
auuacuguaaggagcccgc

SEQ ID NO: 732236 - RNA, 19 nt, Artificial Sequence
  Description of Artificial Sequence: Synthetic oligonucleotide
  Sense strand starting at position 3466 of SEQ ID NO: 586625
gggaucccuaaacguuaaa

SEQ ID NO: 732237 - RNA, 19 nt, Artificial Sequence
  Description of Artificial Sequence: Synthetic oligonucleotide
  Antisense strand to SEQ ID NO: 732236
uuuaacguuuagggauccc

SEQ ID NO: 732238 - RNA, 19 nt, Artificial Sequence
  Description of Artificial Sequence: Synthetic oligonucleotide
  Sense strand starting at position 265 of SEQ ID NO: 586626
uugugaauacacuguauga

SEQ ID NO: 732239 - RNA, 19 nt, Artificial Sequence
  Description of Artificial Sequence: Synthetic oligonucleotide
  Antisense strand to SEQ ID NO: 732238
ucauacaguguauucacaa

SEQ ID NO: 732240 - RNA, 19 nt, Artificial Sequence
  Description of Artificial Sequence: Synthetic oligonucleotide
  Sense strand starting at position 278 of SEQ ID NO: 586626
guaugauauaugggcacaa

SEQ ID NO: 732241 - RNA, 19 nt, Artificial Sequence
  Description of Artificial Sequence: Synthetic oligonucleotide
  Antisense strand to SEQ ID NO: 732240
uugugcccauauaucauac

SEQ ID NO: 732242 - RNA, 19 nt, Artificial Sequence
  Description of Artificial Sequence: Synthetic oligonucleotide
  Sense strand starting at position 427 of SEQ ID NO: 586626
guacuuugucaauacucau

SEQ ID NO: 732243 - RNA, 19 nt, Artificial Sequence
  Description of Artificial Sequence: Synthetic oligonucleotide
  Antisense strand to SEQ ID NO: 732242
augaguauugacaaaguac

SEQ ID NO: 732244 - RNA, 19 nt, Artificial Sequence
  Description of Artificial Sequence: Synthetic oligonucleotide
  Sense strand starting at position 617 of SEQ ID NO: 586626
auucguacuugacuacuua

SEQ ID NO: 732245 - RNA, 19 nt, Artificial Sequence
  Description of Artificial Sequence: Synthetic oligonucleotide
  Antisense strand to SEQ ID NO: 732244
uaaguagucaaguacgaau

SEQ ID NO: 732246 - RNA, 19 nt, Artificial Sequence
  Description of Artificial Sequence: Synthetic oligonucleotide
  Sense strand starting at position 618 of SEQ ID NO: 586626
uucguacuugacuacuuaa

SEQ ID NO: 732247 - RNA, 19 nt, Artificial Sequence
  Description of Artificial Sequence: Synthetic oligonucleotide
  Antisense strand to SEQ ID NO: 732246
uuaaguagucaaguacgaa

SEQ ID NO: 732248 - RNA, 19 nt, Artificial Sequence
  Description of Artificial Sequence: Synthetic oligonucleotide
  Sense strand starting at position 642 of SEQ ID NO: 586626
acauucuuccagugacaug

SEQ ID NO: 732249 - RNA, 19 nt, Artificial Sequence
  Description of Artificial Sequence: Synthetic oligonucleotide
  Antisense strand to SEQ ID NO: 732248
caugucacuggaagaaugu

SEQ ID NO: 732250 - RNA, 19 nt, Artificial Sequence
  Description of Artificial Sequence: Synthetic oligonucleotide
  Sense strand starting at position 755 of SEQ ID NO: 586626
aaaugaguagcuugaacua

SEQ ID NO: 732251 - RNA, 19 nt, Artificial Sequence
  Description of Artificial Sequence: Synthetic oligonucleotide
  Antisense strand to SEQ ID NO: 732250
uaguucaagcuacucauuu

SEQ ID NO: 732252 - RNA, 19 nt, Artificial Sequence
  Description of Artificial Sequence: Synthetic oligonucleotide
  Sense strand starting at position 789 of SEQ ID NO: 586626
auaacuagaguuugcaaua

SEQ ID NO: 732253 - RNA, 19 nt, Artificial Sequence
  Description of Artificial Sequence: Synthetic oligonucleotide
  Antisense strand to SEQ ID NO: 732252
uauugcaaacucuaguuau

SEQ ID NO: 732254 - RNA, 19 nt, Artificial Sequence
  Description of Artificial Sequence: Synthetic oligonucleotide
  Sense strand starting at position 794 of SEQ ID NO: 586626
uagaguuugcaauauguuu

SEQ ID NO: 732255 - RNA, 19 nt, Artificial Sequence
  Description of Artificial Sequence: Synthetic oligonucleotide
  Antisense strand to SEQ ID NO: 732254
aaacauauugcaaacucua

SEQ ID NO: 732256 - RNA, 19 nt, Artificial Sequence
  Description of Artificial Sequence: Synthetic oligonucleotide
  Sense strand starting at position 805 of SEQ ID NO: 586626
auauguuuagacugagucu

SEQ ID NO: 732257 - RNA, 19 nt, Artificial Sequence
  Description of Artificial Sequence: Synthetic oligonucleotide
  Antisense strand to SEQ ID NO: 732256
agacucagucuaaacauau

SEQ ID NO: 732258 - RNA, 19 nt, Artificial Sequence
  Description of Artificial Sequence: Synthetic oligonucleotide
  Sense strand starting at position 820 of SEQ ID NO: 586626
gucugagaugaggguucaa

SEQ ID NO: 732259 - RNA, 19 nt, Artificial Sequence
  Description of Artificial Sequence: Synthetic oligonucleotide
  Antisense strand to SEQ ID NO: 732258
uugaacccucaucucagac

SEQ ID NO: 732260 - RNA, 19 nt, Artificial Sequence
  Description of Artificial Sequence: Synthetic oligonucleotide
  Sense strand starting at position 867 of SEQ ID NO: 586626
uguuauauggcucacucca

SEQ ID NO: 732261 - RNA, 19 nt, Artificial Sequence
  Description of Artificial Sequence: Synthetic oligonucleotide
  Antisense strand to SEQ ID NO: 732260
uggagugagccauauaaca

SEQ ID NO: 732262 - RNA, 19 nt, Artificial Sequence
  Description of Artificial Sequence: Synthetic oligonucleotide
  Sense strand starting at position 954 of SEQ ID NO: 586626
ggaagugguccuuaauuag

SEQ ID NO: 732263 - RNA, 19 nt, Artificial Sequence
  Description of Artificial Sequence: Synthetic oligonucleotide
  Antisense strand to SEQ ID NO: 732262
cuaauuaaggaccacuucc

SEQ ID NO: 732264 - RNA, 19 nt, Artificial Sequence
  Description of Artificial Sequence: Synthetic oligonucleotide
  Sense strand starting at position 1012 of SEQ ID NO: 586626
ggcauuucugguugucacu

SEQ ID NO: 732265 - RNA, 19 nt, Artificial Sequence
  Description of Artificial Sequence: Synthetic oligonucleotide
  Antisense strand to SEQ ID NO: 732264
agugacaaccagaaaugcc

SEQ ID NO: 732266 - RNA, 19 nt, Artificial Sequence
  Description of Artificial Sequence: Synthetic oligonucleotide
  Sense strand starting at position 1018 of SEQ ID NO: 586626
ucugguugucacuaugacu

SEQ ID NO: 732267 - RNA, 19 nt, Artificial Sequence
  Description of Artificial Sequence: Synthetic oligonucleotide
  Antisense strand to SEQ ID NO: 732266
agucauagugacaaccaga

SEQ ID NO: 732268 - RNA, 19 nt, Artificial Sequence
  Description of Artificial Sequence: Synthetic oligonucleotide
  Sense strand starting at position 1058 of SEQ ID NO: 586626
gccauuuaguguccaugga

SEQ ID NO: 732269 - RNA, 19 nt, Artificial Sequence
  Description of Artificial Sequence: Synthetic oligonucleotide
  Antisense strand to SEQ ID NO: 732268
uccauggacacuaaauggc

SEQ ID NO: 732270 - RNA, 19 nt, Artificial Sequence
  Description of Artificial Sequence: Synthetic oligonucleotide
  Sense strand starting at position 1074 of SEQ ID NO: 586626
ggaacagguuugcuaacau

SEQ ID NO: 732271 - RNA, 19 nt, Artificial Sequence
  Description of Artificial Sequence: Synthetic oligonucleotide
  Antisense strand to SEQ ID NO: 732270
auguuagcaaaccuguucc

SEQ ID NO: 732272 - RNA, 19 nt, Artificial Sequence
  Description of Artificial Sequence: Synthetic oligonucleotide
  Sense strand starting at position 1205 of SEQ ID NO: 586626
aagacuucuggugaggcua

SEQ ID NO: 732273 - RNA, 19 nt, Artificial Sequence
  Description of Artificial Sequence: Synthetic oligonucleotide
  Antisense strand to SEQ ID NO: 732272
uagccucaccagaagucuu

SEQ ID NO: 732274 - RNA, 19 nt, Artificial Sequence
  Description of Artificial Sequence: Synthetic oligonucleotide
  Sense strand starting at position 1472 of SEQ ID NO: 586626
augguuucucuguaacuac

SEQ ID NO: 732275 - RNA, 19 nt, Artificial Sequence
  Description of Artificial Sequence: Synthetic oligonucleotide
  Antisense strand to SEQ ID NO: 732274
guaguuacagagaaaccau

SEQ ID NO: 732276 - RNA, 19 nt, Artificial Sequence
  Description of Artificial Sequence: Synthetic oligonucleotide
  Sense strand starting at position 1517 of SEQ ID NO: 586626
ggcaacuagauguggagau

SEQ ID NO: 732277 - RNA, 19 nt, Artificial Sequence
  Description of Artificial Sequence: Synthetic oligonucleotide
  Antisense strand to SEQ ID NO: 732276
aucuccacaucuaguugcc

SEQ ID NO: 732278 - RNA, 19 nt, Artificial Sequence
  Description of Artificial Sequence: Synthetic oligonucleotide
  Sense strand starting at position 1702 of SEQ ID NO: 586626
ccgucaccgcuuucucauu

SEQ ID NO: 732279 - RNA, 19 nt, Artificial Sequence
  Description of Artificial Sequence: Synthetic oligonucleotide
  Antisense strand to SEQ ID NO: 732278
aaugagaaagcggugacgg

SEQ ID NO: 732280 - RNA, 19 nt, Artificial Sequence
  Description of Artificial Sequence: Synthetic oligonucleotide
  Sense strand starting at position 2593 of SEQ ID NO: 586626
gagagaaguaaccguaagu

SEQ ID NO: 732281 - RNA, 19 nt, Artificial Sequence
  Description of Artificial Sequence: Synthetic oligonucleotide
  Antisense strand to SEQ ID NO: 732280
acuuacgguuacuucucuc

SEQ ID NO: 732282 - RNA, 19 nt, Artificial Sequence
  Description of Artificial Sequence: Synthetic oligonucleotide
  Sense strand starting at position 2612 of SEQ ID NO: 586626
cucagcuucgcgguacaga

SEQ ID NO: 732283 - RNA, 19 nt, Artificial Sequence
  Description of Artificial Sequence: Synthetic oligonucleotide
  Antisense strand to SEQ ID NO: 732282
ucuguaccgcgaagcugag

SEQ ID NO: 732284 - RNA, 19 nt, Artificial Sequence
  Description of Artificial Sequence: Synthetic oligonucleotide
  Sense strand starting at position 2923 of SEQ ID NO: 586626
uccuuugagacguggaaag

SEQ ID NO: 732285 - RNA, 19 nt, Artificial Sequence
  Description of Artificial Sequence: Synthetic oligonucleotide
  Antisense strand to SEQ ID NO: 732284
cuuuccacgucucaaagga

SEQ ID NO: 732286 - RNA, 19 nt, Artificial Sequence
  Description of Artificial Sequence: Synthetic oligonucleotide
  Sense strand starting at position 3033 of SEQ ID NO: 586626
ugcagauggcuccagugaa

SEQ ID NO: 732287 - RNA, 19 nt, Artificial Sequence
  Description of Artificial Sequence: Synthetic oligonucleotide
  Antisense strand to SEQ ID NO: 732286
uucacuggagccaucugca

SEQ ID NO: 732288 - RNA, 19 nt, Artificial Sequence
  Description of Artificial Sequence: Synthetic oligonucleotide
  Sense strand starting at position 3212 of SEQ ID NO: 586626
gagaauuagucucccaagc

SEQ ID NO: 732289 - RNA, 19 nt, Artificial Sequence
  Description of Artificial Sequence: Synthetic oligonucleotide
  Antisense strand to SEQ ID NO: 732288
gcuugggagacuaauucuc

SEQ ID NO: 732290 - RNA, 19 nt, Artificial Sequence
  Description of Artificial Sequence: Synthetic oligonucleotide
  Sense strand starting at position 3239 of SEQ ID NO: 586626
cacggaauggcauaucgaa

SEQ ID NO: 732291 - RNA, 19 nt, Artificial Sequence
  Description of Artificial Sequence: Synthetic oligonucleotide
  Antisense strand to SEQ ID NO: 732290
uucgauaugccauuccgug

SEQ ID NO: 732292 - RNA, 19 nt, Artificial Sequence
  Description of Artificial Sequence: Synthetic oligonucleotide
  Sense strand starting at position 3246 of SEQ ID NO: 586626
uggcauaucgaacaaucuu

SEQ ID NO: 732293 - RNA, 19 nt, Artificial Sequence
  Description of Artificial Sequence: Synthetic oligonucleotide
  Antisense strand to SEQ ID NO: 732292
aagauuguucgauaugcca

SEQ ID NO: 732294 - RNA, 19 nt, Artificial Sequence
  Description of Artificial Sequence: Synthetic oligonucleotide
  Sense strand starting at position 3262 of SEQ ID NO: 586626
cuuguauuggaaugaccau

SEQ ID NO: 732295 - RNA, 19 nt, Artificial Sequence
  Description of Artificial Sequence: Synthetic oligonucleotide
  Antisense strand to SEQ ID NO: 732294
auggucauuccaauacaag

SEQ ID NO: 732296 - RNA, 19 nt, Artificial Sequence
  Description of Artificial Sequence: Synthetic oligonucleotide
  Sense strand starting at position 3290 of SEQ ID NO: 586626
gcuuuacugguagaucuga

SEQ ID NO: 732297 - RNA, 19 nt, Artificial Sequence
  Description of Artificial Sequence: Synthetic oligonucleotide
  Antisense strand to SEQ ID NO: 732296
ucagaucuaccaguaaagc

SEQ ID NO: 732298 - RNA, 19 nt, Artificial Sequence
  Description of Artificial Sequence: Synthetic oligonucleotide
  Sense strand starting at position 3321 of SEQ ID NO: 586626
aagauaagagucugcuguu

SEQ ID NO: 732299 - RNA, 19 nt, Artificial Sequence
  Description of Artificial Sequence: Synthetic oligonucleotide
  Antisense strand to SEQ ID NO: 732298
aacagcagacucuuaucuu

SEQ ID NO: 732300 - RNA, 19 nt, Artificial Sequence
  Description of Artificial Sequence: Synthetic oligonucleotide
  Sense strand starting at position 3414 of SEQ ID NO: 586626
uggguauguguaaggugua

SEQ ID NO: 732301 - RNA, 19 nt, Artificial Sequence
  Description of Artificial Sequence: Synthetic oligonucleotide
  Antisense strand to SEQ ID NO: 732300
uacaccuuacacauaccca

SEQ ID NO: 732302 - RNA, 19 nt, Artificial Sequence
  Description of Artificial Sequence: Synthetic oligonucleotide
  Sense strand starting at position 3750 of SEQ ID NO: 586626
aaugcugucagugauugga

SEQ ID NO: 732303 - RNA, 19 nt, Artificial Sequence
  Description of Artificial Sequence: Synthetic oligonucleotide
  Antisense strand to SEQ ID NO: 732302
uccaaucacugacagcauu

SEQ ID NO: 732304 - RNA, 19 nt, Artificial Sequence
  Description of Artificial Sequence: Synthetic oligonucleotide
  Sense strand starting at position 3754 of SEQ ID NO: 586626
cugucagugauuggacaau

SEQ ID NO: 732305 - RNA, 19 nt, Artificial Sequence
  Description of Artificial Sequence: Synthetic oligonucleotide
  Antisense strand to SEQ ID NO: 732304
auuguccaaucacugacag

SEQ ID NO: 732306 - RNA, 19 nt, Artificial Sequence
  Description of Artificial Sequence: Synthetic oligonucleotide
  Sense strand starting at position 3863 of SEQ ID NO: 586626
guugucauucugcaaacua

SEQ ID NO: 732307 - RNA, 19 nt, Artificial Sequence
  Description of Artificial Sequence: Synthetic oligonucleotide
  Antisense strand to SEQ ID NO: 732306
uaguuugcagaaugacaac

SEQ ID NO: 732308 - RNA, 19 nt, Artificial Sequence
  Description of Artificial Sequence: Synthetic oligonucleotide
  Sense strand starting at position 3875 of SEQ ID NO: 586626
caaacuacuguguagugua

SEQ ID NO: 732309 - RNA, 19 nt, Artificial Sequence
  Description of Artificial Sequence: Synthetic oligonucleotide
  Antisense strand to SEQ ID NO: 732308
uacacuacacaguaguuug

SEQ ID NO: 732310 - RNA, 19 nt, Artificial Sequence
  Description of Artificial Sequence: Synthetic oligonucleotide
  Sense strand starting at position 3883 of SEQ ID NO: 586626
uguguaguguagacuggua

SEQ ID NO: 732311 - RNA, 19 nt, Artificial Sequence
  Description of Artificial Sequence: Synthetic oligonucleotide
  Antisense strand to SEQ ID NO: 732310
uaccagucuacacuacaca

SEQ ID NO: 732312 - RNA, 19 nt, Artificial Sequence
  Description of Artificial Sequence: Synthetic oligonucleotide
  Sense strand starting at position 3944 of SEQ ID NO: 586626
aagaaagauggauguguuu

SEQ ID NO: 732313 - RNA, 19 nt, Artificial Sequence
  Description of Artificial Sequence: Synthetic oligonucleotide
  Antisense strand to SEQ ID NO: 732312
aaacacauccaucuuucuu

SEQ ID NO: 732314 - RNA, 19 nt, Artificial Sequence
  Description of Artificial Sequence: Synthetic oligonucleotide
  Sense strand starting at position 3947 of SEQ ID NO: 586626
aaagauggauguguuuaau

SEQ ID NO: 732315 - RNA, 19 nt, Artificial Sequence
  Description of Artificial Sequence: Synthetic oligonucleotide
  Antisense strand to SEQ ID NO: 732314
auuaaacacauccaucuuu

SEQ ID NO: 732316 - RNA, 19 nt, Artificial Sequence
  Description of Artificial Sequence: Synthetic oligonucleotide
  Sense strand starting at position 3950 of SEQ ID NO: 586626
gauggauguguuuaaugac

SEQ ID NO: 732317 - RNA, 19 nt, Artificial Sequence
  Description of Artificial Sequence: Synthetic oligonucleotide
  Antisense strand to SEQ ID NO: 732316
gucauuaaacacauccauc

SEQ ID NO: 732318 - RNA, 19 nt, Artificial Sequence
  Description of Artificial Sequence: Synthetic oligonucleotide
  Sense strand starting at position 281 of SEQ ID NO: 586627
uugugaauacacuguauga

SEQ ID NO: 732319 - RNA, 19 nt, Artificial Sequence
  Description of Artificial Sequence: Synthetic oligonucleotide
  Antisense strand to SEQ ID NO: 732318
ucauacaguguauucacaa

SEQ ID NO: 732320 - RNA, 19 nt, Artificial Sequence
  Description of Artificial Sequence: Synthetic oligonucleotide
  Sense strand starting at position 294 of SEQ ID NO: 586627
guaugauauaugggcacaa

SEQ ID NO: 732321 - RNA, 19 nt, Artificial Sequence
  Description of Artificial Sequence: Synthetic oligonucleotide
  Antisense strand to SEQ ID NO: 732320
uugugcccauauaucauac

SEQ ID NO: 732322 - RNA, 19 nt, Artificial Sequence
  Description of Artificial Sequence: Synthetic oligonucleotide
  Sense strand starting at position 443 of SEQ ID NO: 586627
guacuuugucaauacucau

SEQ ID NO: 732323 - RNA, 19 nt, Artificial Sequence
  Description of Artificial Sequence: Synthetic oligonucleotide
  Antisense strand to SEQ ID NO: 732322
augaguauugacaaaguac

SEQ ID NO: 732324 - RNA, 19 nt, Artificial Sequence
  Description of Artificial Sequence: Synthetic oligonucleotide
  Sense strand starting at position 633 of SEQ ID NO: 586627
auucguacuugacuacuua

SEQ ID NO: 732325 - RNA, 19 nt, Artificial Sequence
  Description of Artificial Sequence: Synthetic oligonucleotide
  Antisense strand to SEQ ID NO: 732324
uaaguagucaaguacgaau

SEQ ID NO: 732326 - RNA, 19 nt, Artificial Sequence
  Description of Artificial Sequence: Synthetic oligonucleotide
  Sense strand starting at position 634 of SEQ ID NO: 586627
uucguacuugacuacuuaa

SEQ ID NO: 732327 - RNA, 19 nt, Artificial Sequence
  Description of Artificial Sequence: Synthetic oligonucleotide
  Antisense strand to SEQ ID NO: 732326
uuaaguagucaaguacgaa

SEQ ID NO: 732328 - RNA, 19 nt, Artificial Sequence
  Description of Artificial Sequence: Synthetic oligonucleotide
  Sense strand starting at position 658 of SEQ ID NO: 586627
acauucuuccagugacaug

SEQ ID NO: 732329 - RNA, 19 nt, Artificial Sequence
  Description of Artificial Sequence: Synthetic oligonucleotide
  Antisense strand to SEQ ID NO: 732328
caugucacuggaagaaugu

SEQ ID NO: 732330 - RNA, 19 nt, Artificial Sequence
  Description of Artificial Sequence: Synthetic oligonucleotide
  Sense strand starting at position 771 of SEQ ID NO: 586627
aaaugaguagcuugaacua

SEQ ID NO: 732331 - RNA, 19 nt, Artificial Sequence
  Description of Artificial Sequence: Synthetic oligonucleotide
  Antisense strand to SEQ ID NO: 732330
uaguucaagcuacucauuu

SEQ ID NO: 732332 - RNA, 19 nt, Artificial Sequence
  Description of Artificial Sequence: Synthetic oligonucleotide
  Sense strand starting at position 805 of SEQ ID NO: 586627
auaacuagaguuugcaaua

SEQ ID NO: 732333 - RNA, 19 nt, Artificial Sequence
  Description of Artificial Sequence: Synthetic oligonucleotide
  Antisense strand to SEQ ID NO: 732332
uauugcaaacucuaguuau

SEQ ID NO: 732334 - RNA, 19 nt, Artificial Sequence
  Description of Artificial Sequence: Synthetic oligonucleotide
  Sense strand starting at position 810 of SEQ ID NO: 586627
uagaguuugcaauauguuu

SEQ ID NO: 732335 - RNA, 19 nt, Artificial Sequence
  Description of Artificial Sequence: Synthetic oligonucleotide
  Antisense strand to SEQ ID NO: 732334
aaacauauugcaaacucua

SEQ ID NO: 732336 - RNA, 19 nt, Artificial Sequence
  Description of Artificial Sequence: Synthetic oligonucleotide
  Sense strand starting at position 821 of SEQ ID NO: 586627
auauguuuagacugagucu

SEQ ID NO: 732337 - RNA, 19 nt, Artificial Sequence
  Description of Artificial Sequence: Synthetic oligonucleotide
  Antisense strand to SEQ ID NO: 732336
agacucagucuaaacauau

SEQ ID NO: 732338 - RNA, 19 nt, Artificial Sequence
  Description of Artificial Sequence: Synthetic oligonucleotide
  Sense strand starting at position 836 of SEQ ID NO: 586627
gucugagaugaggguucaa

SEQ ID NO: 732339 - RNA, 19 nt, Artificial Sequence
  Description of Artificial Sequence: Synthetic oligonucleotide
  Antisense strand to SEQ ID NO: 732338
uugaacccucaucucagac

SEQ ID NO: 732340 - RNA, 19 nt, Artificial Sequence
  Description of Artificial Sequence: Synthetic oligonucleotide
  Sense strand starting at position 883 of SEQ ID NO: 586627
uguuauauggcucacucca

SEQ ID NO: 732341 - RNA, 19 nt, Artificial Sequence
  Description of Artificial Sequence: Synthetic oligonucleotide
  Antisense strand to SEQ ID NO: 732340
uggagugagccauauaaca

SEQ ID NO: 732342 - RNA, 19 nt, Artificial Sequence
  Description of Artificial Sequence: Synthetic oligonucleotide
  Sense strand starting at position 970 of SEQ ID NO: 586627
ggaagugguccuuaauuag

SEQ ID NO: 732343 - RNA, 19 nt, Artificial Sequence
  Description of Artificial Sequence: Synthetic oligonucleotide
  Antisense strand to SEQ ID NO: 732342
cuaauuaaggaccacuucc

SEQ ID NO: 732344 - RNA, 19 nt, Artificial Sequence
  Description of Artificial Sequence: Synthetic oligonucleotide
  Sense strand starting at position 1028 of SEQ ID NO: 586627
ggcauuucugguugucacu

SEQ ID NO: 732345 - RNA, 19 nt, Artificial Sequence
  Description of Artificial Sequence: Synthetic oligonucleotide
  Antisense strand to SEQ ID NO: 732344
agugacaaccagaaaugcc

SEQ ID NO: 732346 - RNA, 19 nt, Artificial Sequence
  Description of Artificial Sequence: Synthetic oligonucleotide
  Sense strand starting at position 1034 of SEQ ID NO: 586627
ucugguugucacuaugacu

SEQ ID NO: 732347 - RNA, 19 nt, Artificial Sequence
  Description of Artificial Sequence: Synthetic oligonucleotide
  Antisense strand to SEQ ID NO: 732346
agucauagugacaaccaga

SEQ ID NO: 732348 - RNA, 19 nt, Artificial Sequence
  Description of Artificial Sequence: Synthetic oligonucleotide
  Sense strand starting at position 1074 of SEQ ID NO: 586627
gccauuuaguguccaugga

SEQ ID NO: 732349 - RNA, 19 nt, Artificial Sequence
  Description of Artificial Sequence: Synthetic oligonucleotide
  Antisense strand to SEQ ID NO: 732348
uccauggacacuaaauggc

SEQ ID NO: 732350 - RNA, 19 nt, Artificial Sequence
  Description of Artificial Sequence: Synthetic oligonucleotide
  Sense strand starting at position 1090 of SEQ ID NO: 586627
ggaacagguuugcuaacau

SEQ ID NO: 732351 - RNA, 19 nt, Artificial Sequence
  Description of Artificial Sequence: Synthetic oligonucleotide
  Antisense strand to SEQ ID NO: 732350
auguuagcaaaccuguucc

SEQ ID NO: 732352 - RNA, 19 nt, Artificial Sequence
  Description of Artificial Sequence: Synthetic oligonucleotide
  Sense strand starting at position 1221 of SEQ ID NO: 586627
aagacuucuggugaggcua

SEQ ID NO: 732353 - RNA, 19 nt, Artificial Sequence
  Description of Artificial Sequence: Synthetic oligonucleotide
  Antisense strand to SEQ ID NO: 732352
uagccucaccagaagucuu

SEQ ID NO: 732354 - RNA, 19 nt, Artificial Sequence
  Description of Artificial Sequence: Synthetic oligonucleotide
  Sense strand starting at position 1488 of SEQ ID NO: 586627
augguuucucuguaacuac

SEQ ID NO: 732355 - RNA, 19 nt, Artificial Sequence
  Description of Artificial Sequence: Synthetic oligonucleotide
  Antisense strand to SEQ ID NO: 732354
guaguuacagagaaaccau

SEQ ID NO: 732356 - RNA, 19 nt, Artificial Sequence
  Description of Artificial Sequence: Synthetic oligonucleotide
  Sense strand starting at position 1533 of SEQ ID NO: 586627
ggcaacuagauguggagau

SEQ ID NO: 732357 - RNA, 19 nt, Artificial Sequence
  Description of Artificial Sequence: Synthetic oligonucleotide
  Antisense strand to SEQ ID NO: 732356
aucuccacaucuaguugcc

SEQ ID NO: 732358 - RNA, 19 nt, Artificial Sequence
  Description of Artificial Sequence: Synthetic oligonucleotide
  Sense strand starting at position 1718 of SEQ ID NO: 586627
ccgucaccgcuuucucauu

SEQ ID NO: 732359 - RNA, 19 nt, Artificial Sequence
  Description of Artificial Sequence: Synthetic oligonucleotide
  Antisense strand to SEQ ID NO: 732358
aaugagaaagcggugacgg

SEQ ID NO: 732360 - RNA, 19 nt, Artificial Sequence
  Description of Artificial Sequence: Synthetic oligonucleotide
  Sense strand starting at position 2609 of SEQ ID NO: 586627
gagagaaguaaccguaagu

SEQ ID NO: 732361 - RNA, 19 nt, Artificial Sequence
  Description of Artificial Sequence: Synthetic oligonucleotide
  Antisense strand to SEQ ID NO: 732360
acuuacgguuacuucucuc

SEQ ID NO: 732362 - RNA, 19 nt, Artificial Sequence
  Description of Artificial Sequence: Synthetic oligonucleotide
  Sense strand starting at position 2628 of SEQ ID NO: 586627
cucagcuucgcgguacaga

SEQ ID NO: 732363 - RNA, 19 nt, Artificial Sequence
  Description of Artificial Sequence: Synthetic oligonucleotide
  Antisense strand to SEQ ID NO: 732362
ucuguaccgcgaagcugag

SEQ ID NO: 732364 - RNA, 19 nt, Artificial Sequence
  Description of Artificial Sequence: Synthetic oligonucleotide
  Sense strand starting at position 2939 of SEQ ID NO: 586627
uccuuugagacguggaaag

SEQ ID NO: 732365 - RNA, 19 nt, Artificial Sequence
  Description of Artificial Sequence: Synthetic oligonucleotide
  Antisense strand to SEQ ID NO: 732364
cuuuccacgucucaaagga

SEQ ID NO: 732366 - RNA, 19 nt, Artificial Sequence
  Description of Artificial Sequence: Synthetic oligonucleotide
  Sense strand starting at position 3049 of SEQ ID NO: 586627
ugcagauggcuccagugaa

SEQ ID NO: 732367 - RNA, 19 nt, Artificial Sequence
  Description of Artificial Sequence: Synthetic oligonucleotide
  Antisense strand to SEQ ID NO: 732366
uucacuggagccaucugca

SEQ ID NO: 732368 - RNA, 19 nt, Artificial Sequence
  Description of Artificial Sequence: Synthetic oligonucleotide
  Sense strand starting at position 3228 of SEQ ID NO: 586627
gagaauuagucucccaagc

SEQ ID NO: 732369 - RNA, 19 nt, Artificial Sequence
  Description of Artificial Sequence: Synthetic oligonucleotide
  Antisense strand to SEQ ID NO: 732368
gcuugggagacuaauucuc

SEQ ID NO: 732370 - RNA, 19 nt, Artificial Sequence
  Description of Artificial Sequence: Synthetic oligonucleotide
  Sense strand starting at position 3255 of SEQ ID NO: 586627
cacggaauggcauaucgaa

SEQ ID NO: 732371 - RNA, 19 nt, Artificial Sequence
  Description of Artificial Sequence: Synthetic oligonucleotide
  Antisense strand to SEQ ID NO: 732370
uucgauaugccauuccgug

SEQ ID NO: 732372 - RNA, 19 nt, Artificial Sequence
  Description of Artificial Sequence: Synthetic oligonucleotide
  Sense strand starting at position 3262 of SEQ ID NO: 586627
uggcauaucgaacaaucuu

SEQ ID NO: 732373 - RNA, 19 nt, Artificial Sequence
  Description of Artificial Sequence: Synthetic oligonucleotide
  Antisense strand to SEQ ID NO: 732372
aagauuguucgauaugcca

SEQ ID NO: 732374 - RNA, 19 nt, Artificial Sequence
  Description of Artificial Sequence: Synthetic oligonucleotide
  Sense strand starting at position 3278 of SEQ ID NO: 586627
cuuguauuggaaugaccau

SEQ ID NO: 732375 - RNA, 19 nt, Artificial Sequence
  Description of Artificial Sequence: Synthetic oligonucleotide
  Antisense strand to SEQ ID NO: 732374
auggucauuccaauacaag

SEQ ID NO: 732376 - RNA, 19 nt, Artificial Sequence
  Description of Artificial Sequence: Synthetic oligonucleotide
  Sense strand starting at position 3306 of SEQ ID NO: 586627
gcuuuacugguagaucuga

SEQ ID NO: 732377 - RNA, 19 nt, Artificial Sequence
  Description of Artificial Sequence: Synthetic oligonucleotide
  Antisense strand to SEQ ID NO: 732376
ucagaucuaccaguaaagc

SEQ ID NO: 732378 - RNA, 19 nt, Artificial Sequence
  Description of Artificial Sequence: Synthetic oligonucleotide
  Sense strand starting at position 3337 of SEQ ID NO: 586627
aagauaagagucugcuguu

SEQ ID NO: 732379 - RNA, 19 nt, Artificial Sequence
  Description of Artificial Sequence: Synthetic oligonucleotide
  Antisense strand to SEQ ID NO: 732378
aacagcagacucuuaucuu

SEQ ID NO: 732380 - RNA, 19 nt, Artificial Sequence
  Description of Artificial Sequence: Synthetic oligonucleotide
  Sense strand starting at position 3430 of SEQ ID NO: 586627
uggguauguguaaggugua

SEQ ID NO: 732381 - RNA, 19 nt, Artificial Sequence
  Description of Artificial Sequence: Synthetic oligonucleotide
  Antisense strand to SEQ ID NO: 732380
uacaccuuacacauaccca

SEQ ID NO: 732382 - RNA, 19 nt, Artificial Sequence
  Description of Artificial Sequence: Synthetic oligonucleotide
  Sense strand starting at position 3766 of SEQ ID NO: 586627
aaugcugucagugauugga

SEQ ID NO: 732383 - RNA, 19 nt, Artificial Sequence
  Description of Artificial Sequence: Synthetic oligonucleotide
  Antisense strand to SEQ ID NO: 732382
uccaaucacugacagcauu

SEQ ID NO: 732384 - RNA, 19 nt, Artificial Sequence
  Description of Artificial Sequence: Synthetic oligonucleotide
  Sense strand starting at position 3770 of SEQ ID NO: 586627
cugucagugauuggacaau

SEQ ID NO: 732385 - RNA, 19 nt, Artificial Sequence
  Description of Artificial Sequence: Synthetic oligonucleotide
  Antisense strand to SEQ ID NO: 732384
auuguccaaucacugacag

SEQ ID NO: 732386 - RNA, 19 nt, Artificial Sequence
  Description of Artificial Sequence: Synthetic oligonucleotide
  Sense strand starting at position 3879 of SEQ ID NO: 586627
guugucauucugcaaacua

SEQ ID NO: 732387 - RNA, 19 nt, Artificial Sequence
  Description of Artificial Sequence: Synthetic oligonucleotide
  Antisense strand to SEQ ID NO: 732386
uaguuugcagaaugacaac

SEQ ID NO: 732388 - RNA, 19 nt, Artificial Sequence
  Description of Artificial Sequence: Synthetic oligonucleotide
  Sense strand starting at position 3891 of SEQ ID NO: 586627
caaacuacuguguagugua

SEQ ID NO: 732389 - RNA, 19 nt, Artificial Sequence
  Description of Artificial Sequence: Synthetic oligonucleotide
  Antisense strand to SEQ ID NO: 732388
uacacuacacaguaguuug

SEQ ID NO: 732390 - RNA, 19 nt, Artificial Sequence
  Description of Artificial Sequence: Synthetic oligonucleotide
  Sense strand starting at position 3899 of SEQ ID NO: 586627
uguguaguguagacuggua

SEQ ID NO: 732391 - RNA, 19 nt, Artificial Sequence
  Description of Artificial Sequence: Synthetic oligonucleotide
  Antisense strand to SEQ ID NO: 732390
uaccagucuacacuacaca

SEQ ID NO: 732392 - RNA, 19 nt, Artificial Sequence
  Description of Artificial Sequence: Synthetic oligonucleotide
  Sense strand starting at position 3960 of SEQ ID NO: 586627
aagaaagauggauguguuu

SEQ ID NO: 732393 - RNA, 19 nt, Artificial Sequence
  Description of Artificial Sequence: Synthetic oligonucleotide
  Antisense strand to SEQ ID NO: 732392
aaacacauccaucuuucuu

SEQ ID NO: 732394 - RNA, 19 nt, Artificial Sequence
  Description of Artificial Sequence: Synthetic oligonucleotide
  Sense strand starting at position 3963 of SEQ ID NO: 586627
aaagauggauguguuuaau

SEQ ID NO: 732395 - RNA, 19 nt, Artificial Sequence
  Description of Artificial Sequence: Synthetic oligonucleotide
  Antisense strand to SEQ ID NO: 732394
auuaaacacauccaucuuu

SEQ ID NO: 732396 - RNA, 19 nt, Artificial Sequence
  Description of Artificial Sequence: Synthetic oligonucleotide
  Sense strand starting at position 3966 of SEQ ID NO: 586627
gauggauguguuuaaugac

SEQ ID NO: 732397 - RNA, 19 nt, Artificial Sequence
  Description of Artificial Sequence: Synthetic oligonucleotide
  Antisense strand to SEQ ID NO: 732396
gucauuaaacacauccauc

SEQ ID NO: 732398 - RNA, 19 nt, Artificial Sequence
  Description of Artificial Sequence: Synthetic oligonucleotide
  Sense strand starting at position 79 of SEQ ID NO: 586628
uugugaauacacuguauga

SEQ ID NO: 732399 - RNA, 19 nt, Artificial Sequence
  Description of Artificial Sequence: Synthetic oligonucleotide
  Antisense strand to SEQ ID NO: 732398
ucauacaguguauucacaa

SEQ ID NO: 732400 - RNA, 19 nt, Artificial Sequence
  Description of Artificial Sequence: Synthetic oligonucleotide
  Sense strand starting at position 92 of SEQ ID NO: 586628
guaugauauaugggcacaa

SEQ ID NO: 732401 - RNA, 19 nt, Artificial Sequence
  Description of Artificial Sequence: Synthetic oligonucleotide
  Antisense strand to SEQ ID NO: 732400
uugugcccauauaucauac

SEQ ID NO: 732402 - RNA, 19 nt, Artificial Sequence
  Description of Artificial Sequence: Synthetic oligonucleotide
  Sense strand starting at position 241 of SEQ ID NO: 586628
guacuuugucaauacucau

SEQ ID NO: 732403 - RNA, 19 nt, Artificial Sequence
  Description of Artificial Sequence: Synthetic oligonucleotide
  Antisense strand to SEQ ID NO: 732402
augaguauugacaaaguac

SEQ ID NO: 732404 - RNA, 19 nt, Artificial Sequence
  Description of Artificial Sequence: Synthetic oligonucleotide
  Sense strand starting at position 432 of SEQ ID NO: 586628
uucguacuugacuacuuaa

SEQ ID NO: 732405 - RNA, 19 nt, Artificial Sequence
  Description of Artificial Sequence: Synthetic oligonucleotide
  Antisense strand to SEQ ID NO: 732404
uuaaguagucaaguacgaa

SEQ ID NO: 732406 - RNA, 19 nt, Artificial Sequence
  Description of Artificial Sequence: Synthetic oligonucleotide
  Sense strand starting at position 456 of SEQ ID NO: 586628
acauucuuccagugacaug

SEQ ID NO: 732407 - RNA, 19 nt, Artificial Sequence
  Description of Artificial Sequence: Synthetic oligonucleotide
  Antisense strand to SEQ ID NO: 732406
caugucacuggaagaaugu

SEQ ID NO: 732408 - RNA, 19 nt, Artificial Sequence
  Description of Artificial Sequence: Synthetic oligonucleotide
  Sense strand starting at position 569 of SEQ ID NO: 586628
aaaugaguagcuugaacua

SEQ ID NO: 732409 - RNA, 19 nt, Artificial Sequence
  Description of Artificial Sequence: Synthetic oligonucleotide
  Antisense strand to SEQ ID NO: 732408
uaguucaagcuacucauuu

SEQ ID NO: 732410 - RNA, 19 nt, Artificial Sequence
  Description of Artificial Sequence: Synthetic oligonucleotide
  Sense strand starting at position 603 of SEQ ID NO: 586628
auaacuagaguuugcaaua

SEQ ID NO: 732411 - RNA, 19 nt, Artificial Sequence
  Description of Artificial Sequence: Synthetic oligonucleotide
  Antisense strand to SEQ ID NO: 732410
uauugcaaacucuaguuau

SEQ ID NO: 732412 - RNA, 19 nt, Artificial Sequence
  Description of Artificial Sequence: Synthetic oligonucleotide
  Sense strand starting at position 608 of SEQ ID NO: 586628
uagaguuugcaauauguuu

SEQ ID NO: 732413 - RNA, 19 nt, Artificial Sequence
  Description of Artificial Sequence: Synthetic oligonucleotide
  Antisense strand to SEQ ID NO: 732412
aaacauauugcaaacucua

SEQ ID NO: 732414 - RNA, 19 nt, Artificial Sequence
  Description of Artificial Sequence: Synthetic oligonucleotide
  Sense strand starting at position 619 of SEQ ID NO: 586628
auauguuuagacugagucu

SEQ ID NO: 732415 - RNA, 19 nt, Artificial Sequence
  Description of Artificial Sequence: Synthetic oligonucleotide
  Antisense strand to SEQ ID NO: 732414
agacucagucuaaacauau

SEQ ID NO: 732416 - RNA, 19 nt, Artificial Sequence
  Description of Artificial Sequence: Synthetic oligonucleotide
  Sense strand starting at position 634 of SEQ ID NO: 586628
gucugagaugaggguucaa

SEQ ID NO: 732417 - RNA, 19 nt, Artificial Sequence
  Description of Artificial Sequence: Synthetic oligonucleotide
  Antisense strand to SEQ ID NO: 732416
uugaacccucaucucagac

SEQ ID NO: 732418 - RNA, 19 nt, Artificial Sequence
  Description of Artificial Sequence: Synthetic oligonucleotide
  Sense strand starting at position 681 of SEQ ID NO: 586628
uguuauauggcucacucca

SEQ ID NO: 732419 - RNA, 19 nt, Artificial Sequence
  Description of Artificial Sequence: Synthetic oligonucleotide
  Antisense strand to SEQ ID NO: 732418
uggagugagccauauaaca

SEQ ID NO: 732420 - RNA, 19 nt, Artificial Sequence
  Description of Artificial Sequence: Synthetic oligonucleotide
  Sense strand starting at position 768 of SEQ ID NO: 586628
ggaagugguccuuaauuag

SEQ ID NO: 732421 - RNA, 19 nt, Artificial Sequence
  Description of Artificial Sequence: Synthetic oligonucleotide
  Antisense strand to SEQ ID NO: 732420
cuaauuaaggaccacuucc

SEQ ID NO: 732422 - RNA, 19 nt, Artificial Sequence
  Description of Artificial Sequence: Synthetic oligonucleotide
  Sense strand starting at position 826 of SEQ ID NO: 586628
ggcauuucugguugucacu

SEQ ID NO: 732423 - RNA, 19 nt, Artificial Sequence
  Description of Artificial Sequence: Synthetic oligonucleotide
  Antisense strand to SEQ ID NO: 732422
agugacaaccagaaaugcc

SEQ ID NO: 732424 - RNA, 19 nt, Artificial Sequence
  Description of Artificial Sequence: Synthetic oligonucleotide
  Sense strand starting at position 832 of SEQ ID NO: 586628
ucugguugucacuaugacu

SEQ ID NO: 732425 - RNA, 19 nt, Artificial Sequence
  Description of Artificial Sequence: Synthetic oligonucleotide
  Antisense strand to SEQ ID NO: 732424
agucauagugacaaccaga

SEQ ID NO: 732426 - RNA, 19 nt, Artificial Sequence
  Description of Artificial Sequence: Synthetic oligonucleotide
  Sense strand starting at position 872 of SEQ ID NO: 586628
gccauuuaguguccaugga

SEQ ID NO: 732427 - RNA, 19 nt, Artificial Sequence
  Description of Artificial Sequence: Synthetic oligonucleotide
  Antisense strand to SEQ ID NO: 732426
uccauggacacuaaauggc

SEQ ID NO: 732428 - RNA, 19 nt, Artificial Sequence
  Description of Artificial Sequence: Synthetic oligonucleotide
  Sense strand starting at position 888 of SEQ ID NO: 586628
ggaacagguuugcuaacau

SEQ ID NO: 732429 - RNA, 19 nt, Artificial Sequence
  Description of Artificial Sequence: Synthetic oligonucleotide
  Antisense strand to SEQ ID NO: 732428
auguuagcaaaccuguucc

SEQ ID NO: 732430 - RNA, 19 nt, Artificial Sequence
  Description of Artificial Sequence: Synthetic oligonucleotide
  Sense strand starting at position 1019 of SEQ ID NO: 586628
aagacuucuggugaggcua

SEQ ID NO: 732431 - RNA, 19 nt, Artificial Sequence
  Description of Artificial Sequence: Synthetic oligonucleotide
  Antisense strand to SEQ ID NO: 732430
uagccucaccagaagucuu

SEQ ID NO: 732432 - RNA, 19 nt, Artificial Sequence
  Description of Artificial Sequence: Synthetic oligonucleotide
  Sense strand starting at position 1286 of SEQ ID NO: 586628
augguuucucuguaacuac

SEQ ID NO: 732433 - RNA, 19 nt, Artificial Sequence
  Description of Artificial Sequence: Synthetic oligonucleotide
  Antisense strand to SEQ ID NO: 732432
guaguuacagagaaaccau

SEQ ID NO: 732434 - RNA, 19 nt, Artificial Sequence
  Description of Artificial Sequence: Synthetic oligonucleotide
  Sense strand starting at position 1331 of SEQ ID NO: 586628
ggcaacuagauguggagau

SEQ ID NO: 732435 - RNA, 19 nt, Artificial Sequence
  Description of Artificial Sequence: Synthetic oligonucleotide
  Antisense strand to SEQ ID NO: 732434
aucuccacaucuaguugcc

SEQ ID NO: 732436 - RNA, 19 nt, Artificial Sequence
  Description of Artificial Sequence: Synthetic oligonucleotide
  Sense strand starting at position 1516 of SEQ ID NO: 586628
ccgucaccgcuuucucauu

SEQ ID NO: 732437 - RNA, 19 nt, Artificial Sequence
  Description of Artificial Sequence: Synthetic oligonucleotide
  Antisense strand to SEQ ID NO: 732436
aaugagaaagcggugacgg

SEQ ID NO: 732438 - RNA, 19 nt, Artificial Sequence
  Description of Artificial Sequence: Synthetic oligonucleotide
  Sense strand starting at position 2407 of SEQ ID NO: 586628
gagagaaguaaccguaagu

SEQ ID NO: 732439 - RNA, 19 nt, Artificial Sequence
  Description of Artificial Sequence: Synthetic oligonucleotide
  Antisense strand to SEQ ID NO: 732438
acuuacgguuacuucucuc

SEQ ID NO: 732440 - RNA, 19 nt, Artificial Sequence
  Description of Artificial Sequence: Synthetic oligonucleotide
  Sense strand starting at position 2426 of SEQ ID NO: 586628
cucagcuucgcgguacaga

SEQ ID NO: 732441 - RNA, 19 nt, Artificial Sequence
  Description of Artificial Sequence: Synthetic oligonucleotide
  Antisense strand to SEQ ID NO: 732440
ucuguaccgcgaagcugag

SEQ ID NO: 732442 - RNA, 19 nt, Artificial Sequence
  Description of Artificial Sequence: Synthetic oligonucleotide
  Sense strand starting at position 2737 of SEQ ID NO: 586628
uccuuugagacguggaaag

SEQ ID NO: 732443 - RNA, 19 nt, Artificial Sequence
  Description of Artificial Sequence: Synthetic oligonucleotide
  Antisense strand to SEQ ID NO: 732442
cuuuccacgucucaaagga

SEQ ID NO: 732444 - RNA, 19 nt, Artificial Sequence
  Description of Artificial Sequence: Synthetic oligonucleotide
  Sense strand starting at position 2847 of SEQ ID NO: 586628
ugcagauggcuccagugaa

SEQ ID NO: 732445 - RNA, 19 nt, Artificial Sequence
  Description of Artificial Sequence: Synthetic oligonucleotide
  Antisense strand to SEQ ID NO: 732444
uucacuggagccaucugca

SEQ ID NO: 732446 - RNA, 19 nt, Artificial Sequence
  Description of Artificial Sequence: Synthetic oligonucleotide
  Sense strand starting at position 3026 of SEQ ID NO: 586628
gagaauuagucucccaagc

SEQ ID NO: 732447 - RNA, 19 nt, Artificial Sequence
  Description of Artificial Sequence: Synthetic oligonucleotide
  Antisense strand to SEQ ID NO: 732446
gcuugggagacuaauucuc

SEQ ID NO: 732448 - RNA, 19 nt, Artificial Sequence
  Description of Artificial Sequence: Synthetic oligonucleotide
  Sense strand starting at position 3053 of SEQ ID NO: 586628
cacggaauggcauaucgaa

SEQ ID NO: 732449 - RNA, 19 nt, Artificial Sequence
  Description of Artificial Sequence: Synthetic oligonucleotide
  Antisense strand to SEQ ID NO: 732448
uucgauaugccauuccgug

SEQ ID NO: 732450 - RNA, 19 nt, Artificial Sequence
  Description of Artificial Sequence: Synthetic oligonucleotide
  Sense strand starting at position 3060 of SEQ ID NO: 586628
uggcauaucgaacaaucuu

SEQ ID NO: 732451 - RNA, 19 nt, Artificial Sequence
  Description of Artificial Sequence: Synthetic oligonucleotide
  Antisense strand to SEQ ID NO: 732450
aagauuguucgauaugcca

SEQ ID NO: 732452 - RNA, 19 nt, Artificial Sequence
  Description of Artificial Sequence: Synthetic oligonucleotide
  Sense strand starting at position 3076 of SEQ ID NO: 586628
cuuguauuggaaugaccau

SEQ ID NO: 732453 - RNA, 19 nt, Artificial Sequence
  Description of Artificial Sequence: Synthetic oligonucleotide
  Antisense strand to SEQ ID NO: 732452
auggucauuccaauacaag

SEQ ID NO: 732454 - RNA, 19 nt, Artificial Sequence
  Description of Artificial Sequence: Synthetic oligonucleotide
  Sense strand starting at position 3104 of SEQ ID NO: 586628
gcuuuacugguagaucuga

SEQ ID NO: 732455 - RNA, 19 nt, Artificial Sequence
  Description of Artificial Sequence: Synthetic oligonucleotide
  Antisense strand to SEQ ID NO: 732454
ucagaucuaccaguaaagc

SEQ ID NO: 732456 - RNA, 19 nt, Artificial Sequence
  Description of Artificial Sequence: Synthetic oligonucleotide
  Sense strand starting at position 3228 of SEQ ID NO: 586628
uggguauguguaaggugua

SEQ ID NO: 732457 - RNA, 19 nt, Artificial Sequence
  Description of Artificial Sequence: Synthetic oligonucleotide
  Antisense strand to SEQ ID NO: 732456
uacaccuuacacauaccca

SEQ ID NO: 732458 - RNA, 19 nt, Artificial Sequence
  Description of Artificial Sequence: Synthetic oligonucleotide
  Sense strand starting at position 3564 of SEQ ID NO: 586628
aaugcugucagugauugga

SEQ ID NO: 732459 - RNA, 19 nt, Artificial Sequence
  Description of Artificial Sequence: Synthetic oligonucleotide
  Antisense strand to SEQ ID NO: 732458
uccaaucacugacagcauu

SEQ ID NO: 732460 - RNA, 19 nt, Artificial Sequence
  Description of Artificial Sequence: Synthetic oligonucleotide
  Sense strand starting at position 3568 of SEQ ID NO: 586628
cugucagugauuggacaau

SEQ ID NO: 732461 - RNA, 19 nt, Artificial Sequence
  Description of Artificial Sequence: Synthetic oligonucleotide
  Antisense strand to SEQ ID NO: 732460
auuguccaaucacugacag

SEQ ID NO: 732462 - RNA, 19 nt, Artificial Sequence
  Description of Artificial Sequence: Synthetic oligonucleotide
  Sense strand starting at position 3677 of SEQ ID NO: 586628
guugucauucugcaaacua

SEQ ID NO: 732463 - RNA, 19 nt, Artificial Sequence
  Description of Artificial Sequence: Synthetic oligonucleotide
  Antisense strand to SEQ ID NO: 732462
uaguuugcagaaugacaac

SEQ ID NO: 732464 - RNA, 19 nt, Artificial Sequence
  Description of Artificial Sequence: Synthetic oligonucleotide
  Sense strand starting at position 3689 of SEQ ID NO: 586628
caaacuacuguguagugua

SEQ ID NO: 732465 - RNA, 19 nt, Artificial Sequence
  Description of Artificial Sequence: Synthetic oligonucleotide
  Antisense strand to SEQ ID NO: 732464
uacacuacacaguaguuug

SEQ ID NO: 732466 - RNA, 19 nt, Artificial Sequence
  Description of Artificial Sequence: Synthetic oligonucleotide
  Sense strand starting at position 3697 of SEQ ID NO: 586628
uguguaguguagacuggua

SEQ ID NO: 732467 - RNA, 19 nt, Artificial Sequence
  Description of Artificial Sequence: Synthetic oligonucleotide
  Antisense strand to SEQ ID NO: 732466
uaccagucuacacuacaca

SEQ ID NO: 732468 - RNA, 19 nt, Artificial Sequence
  Description of Artificial Sequence: Synthetic oligonucleotide
  Sense strand starting at position 3758 of SEQ ID NO: 586628
aagaaagauggauguguuu

SEQ ID NO: 732469 - RNA, 19 nt, Artificial Sequence
  Description of Artificial Sequence: Synthetic oligonucleotide
  Antisense strand to SEQ ID NO: 732468
aaacacauccaucuuucuu

SEQ ID NO: 732470 - RNA, 19 nt, Artificial Sequence
  Description of Artificial Sequence: Synthetic oligonucleotide
  Sense strand starting at position 3761 of SEQ ID NO: 586628
aaagauggauguguuuaau

SEQ ID NO: 732471 - RNA, 19 nt, Artificial Sequence
  Description of Artificial Sequence: Synthetic oligonucleotide
  Antisense strand to SEQ ID NO: 732470
auuaaacacauccaucuuu

SEQ ID NO: 732472 - RNA, 19 nt, Artificial Sequence
  Description of Artificial Sequence: Synthetic oligonucleotide
  Sense strand starting at position 3764 of SEQ ID NO: 586628
gauggauguguuuaaugac

SEQ ID NO: 732473 - RNA, 19 nt, Artificial Sequence
  Description of Artificial Sequence: Synthetic oligonucleotide
  Antisense strand to SEQ ID NO: 732472
gucauuaaacacauccauc

SEQ ID NO: 732474 - RNA, 19 nt, Artificial Sequence
  Description of Artificial Sequence: Synthetic oligonucleotide
  Sense strand starting at position 3889 of SEQ ID NO: 586628
ccaacucugucucuggaaa

SEQ ID NO: 732475 - RNA, 19 nt, Artificial Sequence
  Description of Artificial Sequence: Synthetic oligonucleotide
  Antisense strand to SEQ ID NO: 732474
uuuccagagacagaguugg

SEQ ID NO: 732476 - RNA, 19 nt, Artificial Sequence
  Description of Artificial Sequence: Synthetic oligonucleotide
  Sense strand starting at position 3937 of SEQ ID NO: 586628
cagaguugaguguauuauu

SEQ ID NO: 732477 - RNA, 19 nt, Artificial Sequence
  Description of Artificial Sequence: Synthetic oligonucleotide
  Antisense strand to SEQ ID NO: 732476
aauaauacacucaacucug

SEQ ID NO: 732478 - RNA, 19 nt, Artificial Sequence
  Description of Artificial Sequence: Synthetic oligonucleotide
  Sense strand starting at position 4 of SEQ ID NO: 586629
aaauguguggcggaugcaa

SEQ ID NO: 732479 - RNA, 19 nt, Artificial Sequence
  Description of Artificial Sequence: Synthetic oligonucleotide
  Antisense strand to SEQ ID NO: 732478
uugcauccgccacacauuu

SEQ ID NO: 732480 - RNA, 19 nt, Artificial Sequence
  Description of Artificial Sequence: Synthetic oligonucleotide
  Sense strand starting at position 42 of SEQ ID NO: 586629
gcgaaagguugagcuacaa

SEQ ID NO: 732481 - RNA, 19 nt, Artificial Sequence
  Description of Artificial Sequence: Synthetic oligonucleotide
  Antisense strand to SEQ ID NO: 732480
uuguagcucaaccuuucgc

SEQ ID NO: 732482 - RNA, 19 nt, Artificial Sequence
  Description of Artificial Sequence: Synthetic oligonucleotide
  Sense strand starting at position 826 of SEQ ID NO: 586629
cguggagaucugugagcuu

SEQ ID NO: 732483 - RNA, 19 nt, Artificial Sequence
  Description of Artificial Sequence: Synthetic oligonucleotide
  Antisense strand to SEQ ID NO: 732482
aagcucacagaucuccacg

SEQ ID NO: 732484 - RNA, 19 nt, Artificial Sequence
  Description of Artificial Sequence: Synthetic oligonucleotide
  Sense strand starting at position 1470 of SEQ ID NO: 586629
caccguuuccacggaauua

SEQ ID NO: 732485 - RNA, 19 nt, Artificial Sequence
  Description of Artificial Sequence: Synthetic oligonucleotide
  Antisense strand to SEQ ID NO: 732484
uaauuccguggaaacggug

SEQ ID NO: 732486 - RNA, 19 nt, Artificial Sequence
  Description of Artificial Sequence: Synthetic oligonucleotide
  Sense strand starting at position 1601 of SEQ ID NO: 586629
ccgucuuccuuucuggaga

SEQ ID NO: 732487 - RNA, 19 nt, Artificial Sequence
  Description of Artificial Sequence: Synthetic oligonucleotide
  Antisense strand to SEQ ID NO: 732486
ucuccagaaaggaagacgg

SEQ ID NO: 732488 - RNA, 19 nt, Artificial Sequence
  Description of Artificial Sequence: Synthetic oligonucleotide
  Sense strand starting at position 1812 of SEQ ID NO: 586629
aaguuuagccuugggagga

SEQ ID NO: 732489 - RNA, 19 nt, Artificial Sequence
  Description of Artificial Sequence: Synthetic oligonucleotide
  Antisense strand to SEQ ID NO: 732488
uccucccaaggcuaaacuu

SEQ ID NO: 732490 - RNA, 19 nt, Artificial Sequence
  Description of Artificial Sequence: Synthetic oligonucleotide
  Sense strand starting at position 2142 of SEQ ID NO: 586629
cgcgcauuuacguucgcaa

SEQ ID NO: 732491 - RNA, 19 nt, Artificial Sequence
  Description of Artificial Sequence: Synthetic oligonucleotide
  Antisense strand to SEQ ID NO: 732490
uugcgaacguaaaugcgcg

SEQ ID NO: 732492 - RNA, 19 nt, Artificial Sequence
  Description of Artificial Sequence: Synthetic oligonucleotide
  Sense strand starting at position 2144 of SEQ ID NO: 586629
cgcauuuacguucgcaaga

SEQ ID NO: 732493 - RNA, 19 nt, Artificial Sequence
  Description of Artificial Sequence: Synthetic oligonucleotide
  Antisense strand to SEQ ID NO: 732492
ucuugcgaacguaaaugcg

SEQ ID NO: 732494 - RNA, 19 nt, Artificial Sequence
  Description of Artificial Sequence: Synthetic oligonucleotide
  Sense strand starting at position 2145 of SEQ ID NO: 586629
gcauuuacguucgcaagaa

SEQ ID NO: 732495 - RNA, 19 nt, Artificial Sequence
  Description of Artificial Sequence: Synthetic oligonucleotide
  Antisense strand to SEQ ID NO: 732494
uucuugcgaacguaaaugc

SEQ ID NO: 732496 - RNA, 19 nt, Artificial Sequence
  Description of Artificial Sequence: Synthetic oligonucleotide
  Sense strand starting at position 2149 of SEQ ID NO: 586629
uuacguucgcaagaaguga

SEQ ID NO: 732497 - RNA, 19 nt, Artificial Sequence
  Description of Artificial Sequence: Synthetic oligonucleotide
  Antisense strand to SEQ ID NO: 732496
ucacuucuugcgaacguaa

SEQ ID NO: 732498 - RNA, 19 nt, Artificial Sequence
  Description of Artificial Sequence: Synthetic oligonucleotide
  Sense strand starting at position 2153 of SEQ ID NO: 586629
guucgcaagaagugaauca

SEQ ID NO: 732499 - RNA, 19 nt, Artificial Sequence
  Description of Artificial Sequence: Synthetic oligonucleotide
  Antisense strand to SEQ ID NO: 732498
ugauucacuucuugcgaac

SEQ ID NO: 732500 - RNA, 19 nt, Artificial Sequence
  Description of Artificial Sequence: Synthetic oligonucleotide
  Sense strand starting at position 2253 of SEQ ID NO: 586629
cguguuuguucuuuagaaa

SEQ ID NO: 732501 - RNA, 19 nt, Artificial Sequence
  Description of Artificial Sequence: Synthetic oligonucleotide
  Antisense strand to SEQ ID NO: 732500
uuucuaaagaacaaacacg

SEQ ID NO: 732502 - RNA, 19 nt, Artificial Sequence
  Description of Artificial Sequence: Synthetic oligonucleotide
  Sense strand starting at position 2326 of SEQ ID NO: 586629
uacagugucuuccuaggaa

SEQ ID NO: 732503 - RNA, 19 nt, Artificial Sequence
  Description of Artificial Sequence: Synthetic oligonucleotide
  Antisense strand to SEQ ID NO: 732502
uuccuaggaagacacugua

SEQ ID NO: 732504 - RNA, 19 nt, Artificial Sequence
  Description of Artificial Sequence: Synthetic oligonucleotide
  Sense strand starting at position 2329 of SEQ ID NO: 586629
agugucuuccuaggaagga

SEQ ID NO: 732505 - RNA, 19 nt, Artificial Sequence
  Description of Artificial Sequence: Synthetic oligonucleotide
  Antisense strand to SEQ ID NO: 732504
uccuuccuaggaagacacu

SEQ ID NO: 732506 - RNA, 19 nt, Artificial Sequence
  Description of Artificial Sequence: Synthetic oligonucleotide
  Sense strand starting at position 2702 of SEQ ID NO: 586629
auggcuuuagcucagguaa

SEQ ID NO: 732507 - RNA, 19 nt, Artificial Sequence
  Description of Artificial Sequence: Synthetic oligonucleotide
  Antisense strand to SEQ ID NO: 732506
uuaccugagcuaaagccau

SEQ ID NO: 732508 - RNA, 19 nt, Artificial Sequence
  Description of Artificial Sequence: Synthetic oligonucleotide
  Sense strand starting at position 2732 of SEQ ID NO: 586629
acacuauuauuguuacuga

SEQ ID NO: 732509 - RNA, 19 nt, Artificial Sequence
  Description of Artificial Sequence: Synthetic oligonucleotide
  Antisense strand to SEQ ID NO: 732508
ucaguaacaauaauagugu

SEQ ID NO: 732510 - RNA, 19 nt, Artificial Sequence
  Description of Artificial Sequence: Synthetic oligonucleotide
  Sense strand starting at position 2827 of SEQ ID NO: 586629
aacgcucaucucgacgauu

SEQ ID NO: 732511 - RNA, 19 nt, Artificial Sequence
  Description of Artificial Sequence: Synthetic oligonucleotide
  Antisense strand to SEQ ID NO: 732510
aaucgucgagaugagcguu

SEQ ID NO: 732512 - RNA, 19 nt, Artificial Sequence
  Description of Artificial Sequence: Synthetic oligonucleotide
  Sense strand starting at position 2844 of SEQ ID NO: 586629
uucuccauggugugcaaau

SEQ ID NO: 732513 - RNA, 19 nt, Artificial Sequence
  Description of Artificial Sequence: Synthetic oligonucleotide
  Antisense strand to SEQ ID NO: 732512
auuugcacaccauggagaa

SEQ ID NO: 732514 - RNA, 19 nt, Artificial Sequence
  Description of Artificial Sequence: Synthetic oligonucleotide
  Sense strand starting at position 2909 of SEQ ID NO: 586629
guguaaccugccuggugaa

SEQ ID NO: 732515 - RNA, 19 nt, Artificial Sequence
  Description of Artificial Sequence: Synthetic oligonucleotide
  Antisense strand to SEQ ID NO: 732514
uucaccaggcagguuacac

SEQ ID NO: 732516 - RNA, 19 nt, Artificial Sequence
  Description of Artificial Sequence: Synthetic oligonucleotide
  Sense strand starting at position 2910 of SEQ ID NO: 586629
uguaaccugccuggugaaa

SEQ ID NO: 732517 - RNA, 19 nt, Artificial Sequence
  Description of Artificial Sequence: Synthetic oligonucleotide
  Antisense strand to SEQ ID NO: 732516
uuucaccaggcagguuaca

SEQ ID NO: 732518 - RNA, 19 nt, Artificial Sequence
  Description of Artificial Sequence: Synthetic oligonucleotide
  Sense strand starting at position 3042 of SEQ ID NO: 586629
ggaguccugcucugggcaa

SEQ ID NO: 732519 - RNA, 19 nt, Artificial Sequence
  Description of Artificial Sequence: Synthetic oligonucleotide
  Antisense strand to SEQ ID NO: 732518
uugcccagagcaggacucc

SEQ ID NO: 732520 - RNA, 19 nt, Artificial Sequence
  Description of Artificial Sequence: Synthetic oligonucleotide
  Sense strand starting at position 3044 of SEQ ID NO: 586629
aguccugcucugggcaaau

SEQ ID NO: 732521 - RNA, 19 nt, Artificial Sequence
  Description of Artificial Sequence: Synthetic oligonucleotide
  Antisense strand to SEQ ID NO: 732520
auuugcccagagcaggacu

SEQ ID NO: 732522 - RNA, 19 nt, Artificial Sequence
  Description of Artificial Sequence: Synthetic oligonucleotide
  Sense strand starting at position 3055 of SEQ ID NO: 586629
gggcaaauguggcuggaau

SEQ ID NO: 732523 - RNA, 19 nt, Artificial Sequence
  Description of Artificial Sequence: Synthetic oligonucleotide
  Antisense strand to SEQ ID NO: 732522
auuccagccacauuugccc

SEQ ID NO: 732524 - RNA, 19 nt, Artificial Sequence
  Description of Artificial Sequence: Synthetic oligonucleotide
  Sense strand starting at position 3056 of SEQ ID NO: 586629
ggcaaauguggcuggaauu

SEQ ID NO: 732525 - RNA, 19 nt, Artificial Sequence
  Description of Artificial Sequence: Synthetic oligonucleotide
  Antisense strand to SEQ ID NO: 732524
aauuccagccacauuugcc

SEQ ID NO: 732526 - RNA, 19 nt, Artificial Sequence
  Description of Artificial Sequence: Synthetic oligonucleotide
  Sense strand starting at position 3057 of SEQ ID NO: 586629
gcaaauguggcuggaauuc

SEQ ID NO: 732527 - RNA, 19 nt, Artificial Sequence
  Description of Artificial Sequence: Synthetic oligonucleotide
  Antisense strand to SEQ ID NO: 732526
gaauuccagccacauuugc

SEQ ID NO: 732528 - RNA, 19 nt, Artificial Sequence
  Description of Artificial Sequence: Synthetic oligonucleotide
  Sense strand starting at position 3078 of SEQ ID NO: 586629
ggaguauaguuaguuguca

SEQ ID NO: 732529 - RNA, 19 nt, Artificial Sequence
  Description of Artificial Sequence: Synthetic oligonucleotide
  Antisense strand to SEQ ID NO: 732528
ugacaacuaacuauacucc

SEQ ID NO: 732530 - RNA, 19 nt, Artificial Sequence
  Description of Artificial Sequence: Synthetic oligonucleotide
  Sense strand starting at position 3103 of SEQ ID NO: 586629
ucaggagacuuggcuuguu

SEQ ID NO: 732531 - RNA, 19 nt, Artificial Sequence
  Description of Artificial Sequence: Synthetic oligonucleotide
  Antisense strand to SEQ ID NO: 732530
aacaagccaagucuccuga

SEQ ID NO: 732532 - RNA, 19 nt, Artificial Sequence
  Description of Artificial Sequence: Synthetic oligonucleotide
  Sense strand starting at position 3124 of SEQ ID NO: 586629
ccagucauuuccgggagaa

SEQ ID NO: 732533 - RNA, 19 nt, Artificial Sequence
  Description of Artificial Sequence: Synthetic oligonucleotide
  Antisense strand to SEQ ID NO: 732532
uucucccggaaaugacugg

SEQ ID NO: 732534 - RNA, 19 nt, Artificial Sequence
  Description of Artificial Sequence: Synthetic oligonucleotide
  Sense strand starting at position 3139 of SEQ ID NO: 586629
agaagaguuuaagcggcua

SEQ ID NO: 732535 - RNA, 19 nt, Artificial Sequence
  Description of Artificial Sequence: Synthetic oligonucleotide
  Antisense strand to SEQ ID NO: 732534
uagccgcuuaaacucuucu

SEQ ID NO: 732536 - RNA, 19 nt, Artificial Sequence
  Description of Artificial Sequence: Synthetic oligonucleotide
  Sense strand starting at position 3170 of SEQ ID NO: 586629
uuaacuuagcuguaacgaa

SEQ ID NO: 732537 - RNA, 19 nt, Artificial Sequence
  Description of Artificial Sequence: Synthetic oligonucleotide
  Antisense strand to SEQ ID NO: 732536
uucguuacagcuaaguuaa

SEQ ID NO: 732538 - RNA, 19 nt, Artificial Sequence
  Description of Artificial Sequence: Synthetic oligonucleotide
  Sense strand starting at position 3222 of SEQ ID NO: 586629
agagucagcugcuuuacga

SEQ ID NO: 732539 - RNA, 19 nt, Artificial Sequence
  Description of Artificial Sequence: Synthetic oligonucleotide
  Antisense strand to SEQ ID NO: 732538
ucguaaagcagcugacucu

SEQ ID NO: 732540 - RNA, 19 nt, Artificial Sequence
  Description of Artificial Sequence: Synthetic oligonucleotide
  Sense strand starting at position 3229 of SEQ ID NO: 586629
gcugcuuuacgaguucgua

SEQ ID NO: 732541 - RNA, 19 nt, Artificial Sequence
  Description of Artificial Sequence: Synthetic oligonucleotide
  Antisense strand to SEQ ID NO: 732540
uacgaacucguaaagcagc

SEQ ID NO: 732542 - RNA, 19 nt, Artificial Sequence
  Description of Artificial Sequence: Synthetic oligonucleotide
  Sense strand starting at position 3230 of SEQ ID NO: 586629
cugcuuuacgaguucguaa

SEQ ID NO: 732543 - RNA, 19 nt, Artificial Sequence
  Description of Artificial Sequence: Synthetic oligonucleotide
  Antisense strand to SEQ ID NO: 732542
uuacgaacucguaaagcag

SEQ ID NO: 732544 - RNA, 19 nt, Artificial Sequence
  Description of Artificial Sequence: Synthetic oligonucleotide
  Sense strand starting at position 3288 of SEQ ID NO: 586629
aggugagugaggcauuaau

SEQ ID NO: 732545 - RNA, 19 nt, Artificial Sequence
  Description of Artificial Sequence: Synthetic oligonucleotide
  Antisense strand to SEQ ID NO: 732544
auuaaugccucacucaccu

SEQ ID NO: 732546 - RNA, 19 nt, Artificial Sequence
  Description of Artificial Sequence: Synthetic oligonucleotide
  Sense strand starting at position 3393 of SEQ ID NO: 586629
gccugaaagcgcugagaaa

SEQ ID NO: 732547 - RNA, 19 nt, Artificial Sequence
  Description of Artificial Sequence: Synthetic oligonucleotide
  Antisense strand to SEQ ID NO: 732546
uuucucagcgcuuucaggc

SEQ ID NO: 732548 - RNA, 19 nt, Artificial Sequence
  Description of Artificial Sequence: Synthetic oligonucleotide
  Sense strand starting at position 3405 of SEQ ID NO: 586629
ugagaaaguccuugcuguu

SEQ ID NO: 732549 - RNA, 19 nt, Artificial Sequence
  Description of Artificial Sequence: Synthetic oligonucleotide
  Antisense strand to SEQ ID NO: 732548
aacagcaaggacuuucuca

SEQ ID NO: 732550 - RNA, 19 nt, Artificial Sequence
  Description of Artificial Sequence: Synthetic oligonucleotide
  Sense strand starting at position 3715 of SEQ ID NO: 586629
ccucacuugcaguaguaaa

SEQ ID NO: 732551 - RNA, 19 nt, Artificial Sequence
  Description of Artificial Sequence: Synthetic oligonucleotide
  Antisense strand to SEQ ID NO: 732550
uuuacuacugcaagugagg

SEQ ID NO: 732552 - RNA, 19 nt, Artificial Sequence
  Description of Artificial Sequence: Synthetic oligonucleotide
  Sense strand starting at position 3733 of SEQ ID NO: 586629
auugaacacuacugagaaa

SEQ ID NO: 732553 - RNA, 19 nt, Artificial Sequence
  Description of Artificial Sequence: Synthetic oligonucleotide
  Antisense strand to SEQ ID NO: 732552
uuucucaguaguguucaau

SEQ ID NO: 732554 - RNA, 19 nt, Artificial Sequence
  Description of Artificial Sequence: Synthetic oligonucleotide
  Sense strand starting at position 3865 of SEQ ID NO: 586629
uugugcuucucuccuagaa

SEQ ID NO: 732555 - RNA, 19 nt, Artificial Sequence
  Description of Artificial Sequence: Synthetic oligonucleotide
  Antisense strand to SEQ ID NO: 732554
uucuaggagagaagcacaa

SEQ ID NO: 732556 - RNA, 19 nt, Artificial Sequence
  Description of Artificial Sequence: Synthetic oligonucleotide
  Sense strand starting at position 3869 of SEQ ID NO: 586629
gcuucucuccuagaagugu

SEQ ID NO: 732557 - RNA, 19 nt, Artificial Sequence
  Description of Artificial Sequence: Synthetic oligonucleotide
  Antisense strand to SEQ ID NO: 732556
acacuucuaggagagaagc

SEQ ID NO: 732558 - RNA, 19 nt, Artificial Sequence
  Description of Artificial Sequence: Synthetic oligonucleotide
  Sense strand starting at position 107 of SEQ ID NO: 586630
uugagaaacuuucucagug

SEQ ID NO: 732559 - RNA, 19 nt, Artificial Sequence
  Description of Artificial Sequence: Synthetic oligonucleotide
  Antisense strand to SEQ ID NO: 732558
cacugagaaaguuucucaa

SEQ ID NO: 732560 - RNA, 19 nt, Artificial Sequence
  Description of Artificial Sequence: Synthetic oligonucleotide
  Sense strand starting at position 226 of SEQ ID NO: 586630
agagcuaagcuccaaacua

SEQ ID NO: 732561 - RNA, 19 nt, Artificial Sequence
  Description of Artificial Sequence: Synthetic oligonucleotide
  Antisense strand to SEQ ID NO: 732560
uaguuuggagcuuagcucu

SEQ ID NO: 732562 - RNA, 19 nt, Artificial Sequence
  Description of Artificial Sequence: Synthetic oligonucleotide
  Sense strand starting at position 265 of SEQ ID NO: 586630
uggcaacuucuagaaguuc

SEQ ID NO: 732563 - RNA, 19 nt, Artificial Sequence
  Description of Artificial Sequence: Synthetic oligonucleotide
  Antisense strand to SEQ ID NO: 732562
gaacuucuagaaguugcca

SEQ ID NO: 732564 - RNA, 19 nt, Artificial Sequence
  Description of Artificial Sequence: Synthetic oligonucleotide
  Sense strand starting at position 277 of SEQ ID NO: 586630
gaaguucuguuaucugaaa

SEQ ID NO: 732565 - RNA, 19 nt, Artificial Sequence
  Description of Artificial Sequence: Synthetic oligonucleotide
  Antisense strand to SEQ ID NO: 732564
uuucagauaacagaacuuc

SEQ ID NO: 732566 - RNA, 19 nt, Artificial Sequence
  Description of Artificial Sequence: Synthetic oligonucleotide
  Sense strand starting at position 367 of SEQ ID NO: 586630
gcaugccuuccuucgucaa

SEQ ID NO: 732567 - RNA, 19 nt, Artificial Sequence
  Description of Artificial Sequence: Synthetic oligonucleotide
  Antisense strand to SEQ ID NO: 732566
uugacgaaggaaggcaugc

SEQ ID NO: 732568 - RNA, 19 nt, Artificial Sequence
  Description of Artificial Sequence: Synthetic oligonucleotide
  Sense strand starting at position 543 of SEQ ID NO: 586630
cccuccuuuggaugagaua

SEQ ID NO: 732569 - RNA, 19 nt, Artificial Sequence
  Description of Artificial Sequence: Synthetic oligonucleotide
  Antisense strand to SEQ ID NO: 732568
uaucucauccaaaggaggg

SEQ ID NO: 732570 - RNA, 19 nt, Artificial Sequence
  Description of Artificial Sequence: Synthetic oligonucleotide
  Sense strand starting at position 554 of SEQ ID NO: 586630
augagauauguauaaacgu

SEQ ID NO: 732571 - RNA, 19 nt, Artificial Sequence
  Description of Artificial Sequence: Synthetic oligonucleotide
  Antisense strand to SEQ ID NO: 732570
acguuuauacauaucucau

SEQ ID NO: 732572 - RNA, 19 nt, Artificial Sequence
  Description of Artificial Sequence: Synthetic oligonucleotide
  Sense strand starting at position 623 of SEQ ID NO: 586630
agaugacacuggucuuaaa

SEQ ID NO: 732573 - RNA, 19 nt, Artificial Sequence
  Description of Artificial Sequence: Synthetic oligonucleotide
  Antisense strand to SEQ ID NO: 732572
uuuaagaccagugucaucu

SEQ ID NO: 732574 - RNA, 19 nt, Artificial Sequence
  Description of Artificial Sequence: Synthetic oligonucleotide
  Sense strand starting at position 655 of SEQ ID NO: 586630
ugcaauaaacagugaaaua

SEQ ID NO: 732575 - RNA, 19 nt, Artificial Sequence
  Description of Artificial Sequence: Synthetic oligonucleotide
  Antisense strand to SEQ ID NO: 732574
uauuucacuguuuauugca

SEQ ID NO: 732576 - RNA, 19 nt, Artificial Sequence
  Description of Artificial Sequence: Synthetic oligonucleotide
  Sense strand starting at position 942 of SEQ ID NO: 586630
cugcaaauuggacaguaau

SEQ ID NO: 732577 - RNA, 19 nt, Artificial Sequence
  Description of Artificial Sequence: Synthetic oligonucleotide
  Antisense strand to SEQ ID NO: 732576
auuacuguccaauuugcag

SEQ ID NO: 732578 - RNA, 19 nt, Artificial Sequence
  Description of Artificial Sequence: Synthetic oligonucleotide
  Sense strand starting at position 1031 of SEQ ID NO: 586630
ugucuauaaagugacaguu

SEQ ID NO: 732579 - RNA, 19 nt, Artificial Sequence
  Description of Artificial Sequence: Synthetic oligonucleotide
  Antisense strand to SEQ ID NO: 732578
aacugucacuuuauagaca

SEQ ID NO: 732580 - RNA, 19 nt, Artificial Sequence
  Description of Artificial Sequence: Synthetic oligonucleotide
  Sense strand starting at position 1039 of SEQ ID NO: 586630
aagugacaguucucagaaa

SEQ ID NO: 732581 - RNA, 19 nt, Artificial Sequence
  Description of Artificial Sequence: Synthetic oligonucleotide
  Antisense strand to SEQ ID NO: 732580
uuucugagaacugucacuu

SEQ ID NO: 732582 - RNA, 19 nt, Artificial Sequence
  Description of Artificial Sequence: Synthetic oligonucleotide
  Sense strand starting at position 1062 of SEQ ID NO: 586630
guauuuaacuuuccuuugu

SEQ ID NO: 732583 - RNA, 19 nt, Artificial Sequence
  Description of Artificial Sequence: Synthetic oligonucleotide
  Antisense strand to SEQ ID NO: 732582
acaaaggaaaguuaaauac

SEQ ID NO: 732584 - RNA, 19 nt, Artificial Sequence
  Description of Artificial Sequence: Synthetic oligonucleotide
  Sense strand starting at position 1094 of SEQ ID NO: 586630
auguuaugucaggacucau

SEQ ID NO: 732585 - RNA, 19 nt, Artificial Sequence
  Description of Artificial Sequence: Synthetic oligonucleotide
  Antisense strand to SEQ ID NO: 732584
augaguccugacauaacau

SEQ ID NO: 732586 - RNA, 19 nt, Artificial Sequence
  Description of Artificial Sequence: Synthetic oligonucleotide
  Sense strand starting at position 1559 of SEQ ID NO: 586630
aaauauggguaguucuaau

SEQ ID NO: 732587 - RNA, 19 nt, Artificial Sequence
  Description of Artificial Sequence: Synthetic oligonucleotide
  Antisense strand to SEQ ID NO: 732586
auuagaacuacccauauuu

SEQ ID NO: 732588 - RNA, 19 nt, Artificial Sequence
  Description of Artificial Sequence: Synthetic oligonucleotide
  Sense strand starting at position 1791 of SEQ ID NO: 586630
gugucauuggacuaucauu

SEQ ID NO: 732589 - RNA, 19 nt, Artificial Sequence
  Description of Artificial Sequence: Synthetic oligonucleotide
  Antisense strand to SEQ ID NO: 732588
aaugauaguccaaugacac

SEQ ID NO: 732590 - RNA, 19 nt, Artificial Sequence
  Description of Artificial Sequence: Synthetic oligonucleotide
  Sense strand starting at position 1796 of SEQ ID NO: 586630
auuggacuaucauucugua

SEQ ID NO: 732591 - RNA, 19 nt, Artificial Sequence
  Description of Artificial Sequence: Synthetic oligonucleotide
  Antisense strand to SEQ ID NO: 732590
uacagaaugauaguccaau

SEQ ID NO: 732592 - RNA, 19 nt, Artificial Sequence
  Description of Artificial Sequence: Synthetic oligonucleotide
  Sense strand starting at position 1833 of SEQ ID NO: 586630
gugcuaauaugucccauuu

SEQ ID NO: 732593 - RNA, 19 nt, Artificial Sequence
  Description of Artificial Sequence: Synthetic oligonucleotide
  Antisense strand to SEQ ID NO: 732592
aaaugggacauauuagcac

SEQ ID NO: 732594 - RNA, 19 nt, Artificial Sequence
  Description of Artificial Sequence: Synthetic oligonucleotide
  Sense strand starting at position 1937 of SEQ ID NO: 586630
aggcaagacuuaccaggau

SEQ ID NO: 732595 - RNA, 19 nt, Artificial Sequence
  Description of Artificial Sequence: Synthetic oligonucleotide
  Antisense strand to SEQ ID NO: 732594
auccugguaagucuugccu

SEQ ID NO: 732596 - RNA, 19 nt, Artificial Sequence
  Description of Artificial Sequence: Synthetic oligonucleotide
  Sense strand starting at position 1959 of SEQ ID NO: 586630
ggagucuuuguggagaggu

SEQ ID NO: 732597 - RNA, 19 nt, Artificial Sequence
  Description of Artificial Sequence: Synthetic oligonucleotide
  Antisense strand to SEQ ID NO: 732596
accucuccacaaagacucc

SEQ ID NO: 732598 - RNA, 19 nt, Artificial Sequence
  Description of Artificial Sequence: Synthetic oligonucleotide
  Sense strand starting at position 2361 of SEQ ID NO: 586630
cuuguuucucaggaaugug

SEQ ID NO: 732599 - RNA, 19 nt, Artificial Sequence
  Description of Artificial Sequence: Synthetic oligonucleotide
  Antisense strand to SEQ ID NO: 732598
cacauuccugagaaacaag

SEQ ID NO: 732600 - RNA, 19 nt, Artificial Sequence
  Description of Artificial Sequence: Synthetic oligonucleotide
  Sense strand starting at position 2364 of SEQ ID NO: 586630
guuucucaggaaugugaga

SEQ ID NO: 732601 - RNA, 19 nt, Artificial Sequence
  Description of Artificial Sequence: Synthetic oligonucleotide
  Antisense strand to SEQ ID NO: 732600
ucucacauuccugagaaac

SEQ ID NO: 732602 - RNA, 19 nt, Artificial Sequence
  Description of Artificial Sequence: Synthetic oligonucleotide
  Sense strand starting at position 2468 of SEQ ID NO: 586630
ggcucaagaucaucuuaaa

SEQ ID NO: 732603 - RNA, 19 nt, Artificial Sequence
  Description of Artificial Sequence: Synthetic oligonucleotide
  Antisense strand to SEQ ID NO: 732602
uuuaagaugaucuugagcc

SEQ ID NO: 732604 - RNA, 19 nt, Artificial Sequence
  Description of Artificial Sequence: Synthetic oligonucleotide
  Sense strand starting at position 2480 of SEQ ID NO: 586630
ucuuaaauggcucauagau

SEQ ID NO: 732605 - RNA, 19 nt, Artificial Sequence
  Description of Artificial Sequence: Synthetic oligonucleotide
  Antisense strand to SEQ ID NO: 732604
aucuaugagccauuuaaga

SEQ ID NO: 732606 - RNA, 19 nt, Artificial Sequence
  Description of Artificial Sequence: Synthetic oligonucleotide
  Sense strand starting at position 2489 of SEQ ID NO: 586630
gcucauagauuucuguuua

SEQ ID NO: 732607 - RNA, 19 nt, Artificial Sequence
  Description of Artificial Sequence: Synthetic oligonucleotide
  Antisense strand to SEQ ID NO: 732606
uaaacagaaaucuaugagc

SEQ ID NO: 732608 - RNA, 19 nt, Artificial Sequence
  Description of Artificial Sequence: Synthetic oligonucleotide
  Sense strand starting at position 2526 of SEQ ID NO: 586630
acaacuaaccauuguggga

SEQ ID NO: 732609 - RNA, 19 nt, Artificial Sequence
  Description of Artificial Sequence: Synthetic oligonucleotide
  Antisense strand to SEQ ID NO: 732608
ucccacaaugguuaguugu

SEQ ID NO: 732610 - RNA, 19 nt, Artificial Sequence
  Description of Artificial Sequence: Synthetic oligonucleotide
  Sense strand starting at position 2567 of SEQ ID NO: 586630
gaauccaugugguuugaaa

SEQ ID NO: 732611 - RNA, 19 nt, Artificial Sequence
  Description of Artificial Sequence: Synthetic oligonucleotide
  Antisense strand to SEQ ID NO: 732610
uuucaaaccacauggauuc

SEQ ID NO: 732612 - RNA, 19 nt, Artificial Sequence
  Description of Artificial Sequence: Synthetic oligonucleotide
  Sense strand starting at position 2654 of SEQ ID NO: 586630
uugucaguggauuaauauc

SEQ ID NO: 732613 - RNA, 19 nt, Artificial Sequence
  Description of Artificial Sequence: Synthetic oligonucleotide
  Antisense strand to SEQ ID NO: 732612
gauauuaauccacugacaa

SEQ ID NO: 732614 - RNA, 19 nt, Artificial Sequence
  Description of Artificial Sequence: Synthetic oligonucleotide
  Sense strand starting at position 2660 of SEQ ID NO: 586630
guggauuaauaucuccauu

SEQ ID NO: 732615 - RNA, 19 nt, Artificial Sequence
  Description of Artificial Sequence: Synthetic oligonucleotide
  Antisense strand to SEQ ID NO: 732614
aauggagauauuaauccac

SEQ ID NO: 732616 - RNA, 19 nt, Artificial Sequence
  Description of Artificial Sequence: Synthetic oligonucleotide
  Sense strand starting at position 3086 of SEQ ID NO: 586630
ugcagucaauauuugcuaa

SEQ ID NO: 732617 - RNA, 19 nt, Artificial Sequence
  Description of Artificial Sequence: Synthetic oligonucleotide
  Antisense strand to SEQ ID NO: 732616
uuagcaaauauugacugca

SEQ ID NO: 732618 - RNA, 19 nt, Artificial Sequence
  Description of Artificial Sequence: Synthetic oligonucleotide
  Sense strand starting at position 3209 of SEQ ID NO: 586630
aagugugugagugaaauca

SEQ ID NO: 732619 - RNA, 19 nt, Artificial Sequence
  Description of Artificial Sequence: Synthetic oligonucleotide
  Antisense strand to SEQ ID NO: 732618
ugauuucacucacacacuu

SEQ ID NO: 732620 - RNA, 19 nt, Artificial Sequence
  Description of Artificial Sequence: Synthetic oligonucleotide
  Sense strand starting at position 3423 of SEQ ID NO: 586630
gcuuguugcauucuugagu

SEQ ID NO: 732621 - RNA, 19 nt, Artificial Sequence
  Description of Artificial Sequence: Synthetic oligonucleotide
  Antisense strand to SEQ ID NO: 732620
acucaagaaugcaacaagc

SEQ ID NO: 732622 - RNA, 19 nt, Artificial Sequence
  Description of Artificial Sequence: Synthetic oligonucleotide
  Sense strand starting at position 3428 of SEQ ID NO: 586630
uugcauucuugagugauuu

SEQ ID NO: 732623 - RNA, 19 nt, Artificial Sequence
  Description of Artificial Sequence: Synthetic oligonucleotide
  Antisense strand to SEQ ID NO: 732622
aaaucacucaagaaugcaa

SEQ ID NO: 732624 - RNA, 19 nt, Artificial Sequence
  Description of Artificial Sequence: Synthetic oligonucleotide
  Sense strand starting at position 3546 of SEQ ID NO: 586630
ucaugaauagguuaucgua

SEQ ID NO: 732625 - RNA, 19 nt, Artificial Sequence
  Description of Artificial Sequence: Synthetic oligonucleotide
  Antisense strand to SEQ ID NO: 732624
uacgauaaccuauucauga

SEQ ID NO: 732626 - RNA, 19 nt, Artificial Sequence
  Description of Artificial Sequence: Synthetic oligonucleotide
  Sense strand starting at position 3636 of SEQ ID NO: 586630
ucuuaagauuagguguaga

SEQ ID NO: 732627 - RNA, 19 nt, Artificial Sequence
  Description of Artificial Sequence: Synthetic oligonucleotide
  Antisense strand to SEQ ID NO: 732626
ucuacaccuaaucuuaaga

SEQ ID NO: 732628 - RNA, 19 nt, Artificial Sequence
  Description of Artificial Sequence: Synthetic oligonucleotide
  Sense strand starting at position 3639 of SEQ ID NO: 586630
uaagauuagguguagaguu

SEQ ID NO: 732629 - RNA, 19 nt, Artificial Sequence
  Description of Artificial Sequence: Synthetic oligonucleotide
  Antisense strand to SEQ ID NO: 732628
aacucuacaccuaaucuua

SEQ ID NO: 732630 - RNA, 19 nt, Artificial Sequence
  Description of Artificial Sequence: Synthetic oligonucleotide
  Sense strand starting at position 3659 of SEQ ID NO: 586630
gaagcugucaggcaggaua

SEQ ID NO: 732631 - RNA, 19 nt, Artificial Sequence
  Description of Artificial Sequence: Synthetic oligonucleotide
  Antisense strand to SEQ ID NO: 732630
uauccugccugacagcuuc

SEQ ID NO: 732632 - RNA, 19 nt, Artificial Sequence
  Description of Artificial Sequence: Synthetic oligonucleotide
  Sense strand starting at position 3760 of SEQ ID NO: 586630
ccuuaaaguguugauaucu

SEQ ID NO: 732633 - RNA, 19 nt, Artificial Sequence
  Description of Artificial Sequence: Synthetic oligonucleotide
  Antisense strand to SEQ ID NO: 732632
agauaucaacacuuuaagg

SEQ ID NO: 732634 - RNA, 19 nt, Artificial Sequence
  Description of Artificial Sequence: Synthetic oligonucleotide
  Sense strand starting at position 3810 of SEQ ID NO: 586630
uuuccuggagaguaguaua

SEQ ID NO: 732635 - RNA, 19 nt, Artificial Sequence
  Description of Artificial Sequence: Synthetic oligonucleotide
  Antisense strand to SEQ ID NO: 732634
uauacuacucuccaggaaa

SEQ ID NO: 732636 - RNA, 19 nt, Artificial Sequence
  Description of Artificial Sequence: Synthetic oligonucleotide
  Sense strand starting at position 3908 of SEQ ID NO: 586630
ugguaacuaucuuuccaga

SEQ ID NO: 732637 - RNA, 19 nt, Artificial Sequence
  Description of Artificial Sequence: Synthetic oligonucleotide
  Antisense strand to SEQ ID NO: 732636
ucuggaaagauaguuacca

SEQ ID NO: 732638 - RNA, 19 nt, Artificial Sequence
  Description of Artificial Sequence: Synthetic oligonucleotide
  Sense strand starting at position 201 of SEQ ID NO: 586631
agcccagucucaucucuua

SEQ ID NO: 732639 - RNA, 19 nt, Artificial Sequence
  Description of Artificial Sequence: Synthetic oligonucleotide
  Antisense strand to SEQ ID NO: 732638
uaagagaugagacugggcu

SEQ ID NO: 732640 - RNA, 19 nt, Artificial Sequence
  Description of Artificial Sequence: Synthetic oligonucleotide
  Sense strand starting at position 343 of SEQ ID NO: 586631
guguuaaccuggccuugaa

SEQ ID NO: 732641 - RNA, 19 nt, Artificial Sequence
  Description of Artificial Sequence: Synthetic oligonucleotide
  Antisense strand to SEQ ID NO: 732640
uucaaggccagguuaacac

SEQ ID NO: 732642 - RNA, 19 nt, Artificial Sequence
  Description of Artificial Sequence: Synthetic oligonucleotide
  Sense strand starting at position 346 of SEQ ID NO: 586631
uuaaccuggccuugaagau

SEQ ID NO: 732643 - RNA, 19 nt, Artificial Sequence
  Description of Artificial Sequence: Synthetic oligonucleotide
  Antisense strand to SEQ ID NO: 732642
aucuucaaggccagguuaa

SEQ ID NO: 732644 - RNA, 19 nt, Artificial Sequence
  Description of Artificial Sequence: Synthetic oligonucleotide
  Sense strand starting at position 536 of SEQ ID NO: 586631
ccggaaaguuaguuaccuu

SEQ ID NO: 732645 - RNA, 19 nt, Artificial Sequence
  Description of Artificial Sequence: Synthetic oligonucleotide
  Antisense strand to SEQ ID NO: 732644
aagguaacuaacuuuccgg

SEQ ID NO: 732646 - RNA, 19 nt, Artificial Sequence
  Description of Artificial Sequence: Synthetic oligonucleotide
  Sense strand starting at position 544 of SEQ ID NO: 586631
uuaguuaccuugucauaac

SEQ ID NO: 732647 - RNA, 19 nt, Artificial Sequence
  Description of Artificial Sequence: Synthetic oligonucleotide
  Antisense strand to SEQ ID NO: 732646
guuaugacaagguaacuaa

SEQ ID NO: 732648 - RNA, 19 nt, Artificial Sequence
  Description of Artificial Sequence: Synthetic oligonucleotide
  Sense strand starting at position 555 of SEQ ID NO: 586631
gucauaacauguugaauuu

SEQ ID NO: 732649 - RNA, 19 nt, Artificial Sequence
  Description of Artificial Sequence: Synthetic oligonucleotide
  Antisense strand to SEQ ID NO: 732648
aaauucaacauguuaugac

SEQ ID NO: 732650 - RNA, 19 nt, Artificial Sequence
  Description of Artificial Sequence: Synthetic oligonucleotide
  Sense strand starting at position 581 of SEQ ID NO: 586631
ccuggauucccucaauagu

SEQ ID NO: 732651 - RNA, 19 nt, Artificial Sequence
  Description of Artificial Sequence: Synthetic oligonucleotide
  Antisense strand to SEQ ID NO: 732650
acuauugagggaauccagg

SEQ ID NO: 732652 - RNA, 19 nt, Artificial Sequence
  Description of Artificial Sequence: Synthetic oligonucleotide
  Sense strand starting at position 584 of SEQ ID NO: 586631
ggauucccucaauagucuu

SEQ ID NO: 732653 - RNA, 19 nt, Artificial Sequence
  Description of Artificial Sequence: Synthetic oligonucleotide
  Antisense strand to SEQ ID NO: 732652
aagacuauugagggaaucc

SEQ ID NO: 732654 - RNA, 19 nt, Artificial Sequence
  Description of Artificial Sequence: Synthetic oligonucleotide
  Sense strand starting at position 754 of SEQ ID NO: 586631
gccuguaaucuagagaccu

SEQ ID NO: 732655 - RNA, 19 nt, Artificial Sequence
  Description of Artificial Sequence: Synthetic oligonucleotide
  Antisense strand to SEQ ID NO: 732654
aggucucuagauuacaggc

SEQ ID NO: 732656 - RNA, 19 nt, Artificial Sequence
  Description of Artificial Sequence: Synthetic oligonucleotide
  Sense strand starting at position 1286 of SEQ ID NO: 586631
ggcugugugcacuaaggga

SEQ ID NO: 732657 - RNA, 19 nt, Artificial Sequence
  Description of Artificial Sequence: Synthetic oligonucleotide
  Antisense strand to SEQ ID NO: 732656
ucccuuagugcacacagcc

SEQ ID NO: 732658 - RNA, 19 nt, Artificial Sequence
  Description of Artificial Sequence: Synthetic oligonucleotide
  Sense strand starting at position 1404 of SEQ ID NO: 586631
agaagucuaguggguaaag

SEQ ID NO: 732659 - RNA, 19 nt, Artificial Sequence
  Description of Artificial Sequence: Synthetic oligonucleotide
  Antisense strand to SEQ ID NO: 732658
cuuuacccacuagacuucu

SEQ ID NO: 732660 - RNA, 19 nt, Artificial Sequence
  Description of Artificial Sequence: Synthetic oligonucleotide
  Sense strand starting at position 1405 of SEQ ID NO: 586631
gaagucuaguggguaaaga

SEQ ID NO: 732661 - RNA, 19 nt, Artificial Sequence
  Description of Artificial Sequence: Synthetic oligonucleotide
  Antisense strand to SEQ ID NO: 732660
ucuuuacccacuagacuuc

SEQ ID NO: 732662 - RNA, 19 nt, Artificial Sequence
  Description of Artificial Sequence: Synthetic oligonucleotide
  Sense strand starting at position 1406 of SEQ ID NO: 586631
aagucuaguggguaaagau

SEQ ID NO: 732663 - RNA, 19 nt, Artificial Sequence
  Description of Artificial Sequence: Synthetic oligonucleotide
  Antisense strand to SEQ ID NO: 732662
aucuuuacccacuagacuu

SEQ ID NO: 732664 - RNA, 19 nt, Artificial Sequence
  Description of Artificial Sequence: Synthetic oligonucleotide
  Sense strand starting at position 1428 of SEQ ID NO: 586631
agucgugagaagcaugcua

SEQ ID NO: 732665 - RNA, 19 nt, Artificial Sequence
  Description of Artificial Sequence: Synthetic oligonucleotide
  Antisense strand to SEQ ID NO: 732664
uagcaugcuucucacgacu

SEQ ID NO: 732666 - RNA, 19 nt, Artificial Sequence
  Description of Artificial Sequence: Synthetic oligonucleotide
  Sense strand starting at position 1430 of SEQ ID NO: 586631
ucgugagaagcaugcuaga

SEQ ID NO: 732667 - RNA, 19 nt, Artificial Sequence
  Description of Artificial Sequence: Synthetic oligonucleotide
  Antisense strand to SEQ ID NO: 732666
ucuagcaugcuucucacga

SEQ ID NO: 732668 - RNA, 19 nt, Artificial Sequence
  Description of Artificial Sequence: Synthetic oligonucleotide
  Sense strand starting at position 2055 of SEQ ID NO: 586631
cgccucuagcaugaggauu

SEQ ID NO: 732669 - RNA, 19 nt, Artificial Sequence
  Description of Artificial Sequence: Synthetic oligonucleotide
  Antisense strand to SEQ ID NO: 732668
aauccucaugcuagaggcg

SEQ ID NO: 732670 - RNA, 19 nt, Artificial Sequence
  Description of Artificial Sequence: Synthetic oligonucleotide
  Sense strand starting at position 2133 of SEQ ID NO: 586631
gcacguugauuggugauau

SEQ ID NO: 732671 - RNA, 19 nt, Artificial Sequence
  Description of Artificial Sequence: Synthetic oligonucleotide
  Antisense strand to SEQ ID NO: 732670
auaucaccaaucaacgugc

SEQ ID NO: 732672 - RNA, 19 nt, Artificial Sequence
  Description of Artificial Sequence: Synthetic oligonucleotide
  Sense strand starting at position 2291 of SEQ ID NO: 586631
cagaguuccgccugagcca

SEQ ID NO: 732673 - RNA, 19 nt, Artificial Sequence
  Description of Artificial Sequence: Synthetic oligonucleotide
  Antisense strand to SEQ ID NO: 732672
uggcucaggcggaacucug

SEQ ID NO: 732674 - RNA, 19 nt, Artificial Sequence
  Description of Artificial Sequence: Synthetic oligonucleotide
  Sense strand starting at position 2351 of SEQ ID NO: 586631
agguuuaagacuggaccca

SEQ ID NO: 732675 - RNA, 19 nt, Artificial Sequence
  Description of Artificial Sequence: Synthetic oligonucleotide
  Antisense strand to SEQ ID NO: 732674
uggguccagucuuaaaccu

SEQ ID NO: 732676 - RNA, 19 nt, Artificial Sequence
  Description of Artificial Sequence: Synthetic oligonucleotide
  Sense strand starting at position 2387 of SEQ ID NO: 586631
ggaaauaacgugcaaugca

SEQ ID NO: 732677 - RNA, 19 nt, Artificial Sequence
  Description of Artificial Sequence: Synthetic oligonucleotide
  Antisense strand to SEQ ID NO: 732676
ugcauugcacguuauuucc

SEQ ID NO: 732678 - RNA, 19 nt, Artificial Sequence
  Description of Artificial Sequence: Synthetic oligonucleotide
  Sense strand starting at position 2394 of SEQ ID NO: 586631
acgugcaaugcaugugaaa

SEQ ID NO: 732679 - RNA, 19 nt, Artificial Sequence
  Description of Artificial Sequence: Synthetic oligonucleotide
  Antisense strand to SEQ ID NO: 732678
uuucacaugcauugcacgu

SEQ ID NO: 732680 - RNA, 19 nt, Artificial Sequence
  Description of Artificial Sequence: Synthetic oligonucleotide
  Sense strand starting at position 2661 of SEQ ID NO: 586631
agugcagugagcuauuaug

SEQ ID NO: 732681 - RNA, 19 nt, Artificial Sequence
  Description of Artificial Sequence: Synthetic oligonucleotide
  Antisense strand to SEQ ID NO: 732680
cauaauagcucacugcacu

SEQ ID NO: 732682 - RNA, 19 nt, Artificial Sequence
  Description of Artificial Sequence: Synthetic oligonucleotide
  Sense strand starting at position 2816 of SEQ ID NO: 586631
gcgcgaucucuggcucaau

SEQ ID NO: 732683 - RNA, 19 nt, Artificial Sequence
  Description of Artificial Sequence: Synthetic oligonucleotide
  Antisense strand to SEQ ID NO: 732682
auugagccagagaucgcgc

SEQ ID NO: 732684 - RNA, 19 nt, Artificial Sequence
  Description of Artificial Sequence: Synthetic oligonucleotide
  Sense strand starting at position 2819 of SEQ ID NO: 586631
cgaucucuggcucaauaca

SEQ ID NO: 732685 - RNA, 19 nt, Artificial Sequence
  Description of Artificial Sequence: Synthetic oligonucleotide
  Antisense strand to SEQ ID NO: 732684
uguauugagccagagaucg

SEQ ID NO: 732686 - RNA, 19 nt, Artificial Sequence
  Description of Artificial Sequence: Synthetic oligonucleotide
  Sense strand starting at position 3080 of SEQ ID NO: 586631
caagacagcucuuuguuga

SEQ ID NO: 732687 - RNA, 19 nt, Artificial Sequence
  Description of Artificial Sequence: Synthetic oligonucleotide
  Antisense strand to SEQ ID NO: 732686
ucaacaaagagcugucuug

SEQ ID NO: 732688 - RNA, 19 nt, Artificial Sequence
  Description of Artificial Sequence: Synthetic oligonucleotide
  Sense strand starting at position 3081 of SEQ ID NO: 586631
aagacagcucuuuguugaa

SEQ ID NO: 732689 - RNA, 19 nt, Artificial Sequence
  Description of Artificial Sequence: Synthetic oligonucleotide
  Antisense strand to SEQ ID NO: 732688
uucaacaaagagcugucuu

SEQ ID NO: 732690 - RNA, 19 nt, Artificial Sequence
  Description of Artificial Sequence: Synthetic oligonucleotide
  Sense strand starting at position 3085 of SEQ ID NO: 586631
cagcucuuuguugaagaca

SEQ ID NO: 732691 - RNA, 19 nt, Artificial Sequence
  Description of Artificial Sequence: Synthetic oligonucleotide
  Antisense strand to SEQ ID NO: 732690
ugucuucaacaaagagcug

SEQ ID NO: 732692 - RNA, 19 nt, Artificial Sequence
  Description of Artificial Sequence: Synthetic oligonucleotide
  Sense strand starting at position 3135 of SEQ ID NO: 586631
ccagauucaguccgggaca

SEQ ID NO: 732693 - RNA, 19 nt, Artificial Sequence
  Description of Artificial Sequence: Synthetic oligonucleotide
  Antisense strand to SEQ ID NO: 732692
ugucccggacugaaucugg

SEQ ID NO: 732694 - RNA, 19 nt, Artificial Sequence
  Description of Artificial Sequence: Synthetic oligonucleotide
  Sense strand starting at position 3137 of SEQ ID NO: 586631
agauucaguccgggacaau

SEQ ID NO: 732695 - RNA, 19 nt, Artificial Sequence
  Description of Artificial Sequence: Synthetic oligonucleotide
  Antisense strand to SEQ ID NO: 732694
auugucccggacugaaucu

SEQ ID NO: 732696 - RNA, 19 nt, Artificial Sequence
  Description of Artificial Sequence: Synthetic oligonucleotide
  Sense strand starting at position 3149 of SEQ ID NO: 586631
ggacaauguggugguaaau

SEQ ID NO: 732697 - RNA, 19 nt, Artificial Sequence
  Description of Artificial Sequence: Synthetic oligonucleotide
  Antisense strand to SEQ ID NO: 732696
auuuaccaccacauugucc

SEQ ID NO: 732698 - RNA, 19 nt, Artificial Sequence
  Description of Artificial Sequence: Synthetic oligonucleotide
  Sense strand starting at position 3233 of SEQ ID NO: 586631
aacaguaccuuggaaugau

SEQ ID NO: 732699 - RNA, 19 nt, Artificial Sequence
  Description of Artificial Sequence: Synthetic oligonucleotide
  Antisense strand to SEQ ID NO: 732698
aucauuccaagguacuguu

SEQ ID NO: 732700 - RNA, 19 nt, Artificial Sequence
  Description of Artificial Sequence: Synthetic oligonucleotide
  Sense strand starting at position 3236 of SEQ ID NO: 586631
aguaccuuggaaugauaca

SEQ ID NO: 732701 - RNA, 19 nt, Artificial Sequence
  Description of Artificial Sequence: Synthetic oligonucleotide
  Antisense strand to SEQ ID NO: 732700
uguaucauuccaagguacu

SEQ ID NO: 732702 - RNA, 19 nt, Artificial Sequence
  Description of Artificial Sequence: Synthetic oligonucleotide
  Sense strand starting at position 3344 of SEQ ID NO: 586631
gccauauuaauguggugga

SEQ ID NO: 732703 - RNA, 19 nt, Artificial Sequence
  Description of Artificial Sequence: Synthetic oligonucleotide
  Antisense strand to SEQ ID NO: 732702
uccaccacauuaauauggc

SEQ ID NO: 732704 - RNA, 19 nt, Artificial Sequence
  Description of Artificial Sequence: Synthetic oligonucleotide
  Sense strand starting at position 3361 of SEQ ID NO: 586631
gaggcuguguuagugaaau

SEQ ID NO: 732705 - RNA, 19 nt, Artificial Sequence
  Description of Artificial Sequence: Synthetic oligonucleotide
  Antisense strand to SEQ ID NO: 732704
auuucacuaacacagccuc

SEQ ID NO: 732706 - RNA, 19 nt, Artificial Sequence
  Description of Artificial Sequence: Synthetic oligonucleotide
  Sense strand starting at position 3363 of SEQ ID NO: 586631
ggcuguguuagugaaauaa

SEQ ID NO: 732707 - RNA, 19 nt, Artificial Sequence
  Description of Artificial Sequence: Synthetic oligonucleotide
  Antisense strand to SEQ ID NO: 732706
uuauuucacuaacacagcc

SEQ ID NO: 732708 - RNA, 19 nt, Artificial Sequence
  Description of Artificial Sequence: Synthetic oligonucleotide
  Sense strand starting at position 3367 of SEQ ID NO: 586631
guguuagugaaauaauaug

SEQ ID NO: 732709 - RNA, 19 nt, Artificial Sequence
  Description of Artificial Sequence: Synthetic oligonucleotide
  Antisense strand to SEQ ID NO: 732708
cauauuauuucacuaacac

SEQ ID NO: 732710 - RNA, 19 nt, Artificial Sequence
  Description of Artificial Sequence: Synthetic oligonucleotide
  Sense strand starting at position 3385 of SEQ ID NO: 586631
gaagaaugauucuagaagc

SEQ ID NO: 732711 - RNA, 19 nt, Artificial Sequence
  Description of Artificial Sequence: Synthetic oligonucleotide
  Antisense strand to SEQ ID NO: 732710
gcuucuagaaucauucuuc

SEQ ID NO: 732712 - RNA, 19 nt, Artificial Sequence
  Description of Artificial Sequence: Synthetic oligonucleotide
  Sense strand starting at position 3555 of SEQ ID NO: 586631
gcacucaagacuggguaaa

SEQ ID NO: 732713 - RNA, 19 nt, Artificial Sequence
  Description of Artificial Sequence: Synthetic oligonucleotide
  Antisense strand to SEQ ID NO: 732712
uuuacccagucuugagugc

SEQ ID NO: 732714 - RNA, 19 nt, Artificial Sequence
  Description of Artificial Sequence: Synthetic oligonucleotide
  Sense strand starting at position 3625 of SEQ ID NO: 586631
uguuaaagucugggugucu

SEQ ID NO: 732715 - RNA, 19 nt, Artificial Sequence
  Description of Artificial Sequence: Synthetic oligonucleotide
  Antisense strand to SEQ ID NO: 732714
agacacccagacuuuaaca

SEQ ID NO: 732716 - RNA, 19 nt, Artificial Sequence
  Description of Artificial Sequence: Synthetic oligonucleotide
  Sense strand starting at position 3626 of SEQ ID NO: 586631
guuaaagucugggugucuu

SEQ ID NO: 732717 - RNA, 19 nt, Artificial Sequence
  Description of Artificial Sequence: Synthetic oligonucleotide
  Antisense strand to SEQ ID NO: 732716
aagacacccagacuuuaac

SEQ ID NO: 732718 - RNA, 19 nt, Artificial Sequence
  Description of Artificial Sequence: Synthetic oligonucleotide
  Sense strand starting at position 49 of SEQ ID NO: 586632
agaagucacuugccuuaga

SEQ ID NO: 732719 - RNA, 19 nt, Artificial Sequence
  Description of Artificial Sequence: Synthetic oligonucleotide
  Antisense strand to SEQ ID NO: 732718
ucuaaggcaagugacuucu

SEQ ID NO: 732720 - RNA, 19 nt, Artificial Sequence
  Description of Artificial Sequence: Synthetic oligonucleotide
  Sense strand starting at position 50 of SEQ ID NO: 586632
gaagucacuugccuuagau

SEQ ID NO: 732721 - RNA, 19 nt, Artificial Sequence
  Description of Artificial Sequence: Synthetic oligonucleotide
  Antisense strand to SEQ ID NO: 732720
aucuaaggcaagugacuuc

SEQ ID NO: 732722 - RNA, 19 nt, Artificial Sequence
  Description of Artificial Sequence: Synthetic oligonucleotide
  Sense strand starting at position 149 of SEQ ID NO: 586632
ugaaguggccauuggaaca

SEQ ID NO: 732723 - RNA, 19 nt, Artificial Sequence
  Description of Artificial Sequence: Synthetic oligonucleotide
  Antisense strand to SEQ ID NO: 732722
uguuccaauggccacuuca

SEQ ID NO: 732724 - RNA, 19 nt, Artificial Sequence
  Description of Artificial Sequence: Synthetic oligonucleotide
  Sense strand starting at position 165 of SEQ ID NO: 586632
acacguaccucaguggaaa

SEQ ID NO: 732725 - RNA, 19 nt, Artificial Sequence
  Description of Artificial Sequence: Synthetic oligonucleotide
  Antisense strand to SEQ ID NO: 732724
uuuccacugagguacgugu

SEQ ID NO: 732726 - RNA, 19 nt, Artificial Sequence
  Description of Artificial Sequence: Synthetic oligonucleotide
  Sense strand starting at position 223 of SEQ ID NO: 586632
aacaguugugcugauauuc

SEQ ID NO: 732727 - RNA, 19 nt, Artificial Sequence
  Description of Artificial Sequence: Synthetic oligonucleotide
  Antisense strand to SEQ ID NO: 732726
gaauaucagcacaacuguu

SEQ ID NO: 732728 - RNA, 19 nt, Artificial Sequence
  Description of Artificial Sequence: Synthetic oligonucleotide
  Sense strand starting at position 333 of SEQ ID NO: 586632
augucucuggcauaaggau

SEQ ID NO: 732729 - RNA, 19 nt, Artificial Sequence
  Description of Artificial Sequence: Synthetic oligonucleotide
  Antisense strand to SEQ ID NO: 732728
auccuuaugccagagacau

SEQ ID NO: 732730 - RNA, 19 nt, Artificial Sequence
  Description of Artificial Sequence: Synthetic oligonucleotide
  Sense strand starting at position 378 of SEQ ID NO: 586632
acagaagagugcucuaaac

SEQ ID NO: 732731 - RNA, 19 nt, Artificial Sequence
  Description of Artificial Sequence: Synthetic oligonucleotide
  Antisense strand to SEQ ID NO: 732730
guuuagagcacucuucugu

SEQ ID NO: 732732 - RNA, 19 nt, Artificial Sequence
  Description of Artificial Sequence: Synthetic oligonucleotide
  Sense strand starting at position 492 of SEQ ID NO: 586632
ggcggagauuucuaccuag

SEQ ID NO: 732733 - RNA, 19 nt, Artificial Sequence
  Description of Artificial Sequence: Synthetic oligonucleotide
  Antisense strand to SEQ ID NO: 732732
cuagguagaaaucuccgcc

SEQ ID NO: 732734 - RNA, 19 nt, Artificial Sequence
  Description of Artificial Sequence: Synthetic oligonucleotide
  Sense strand starting at position 578 of SEQ ID NO: 586632
cuugguucugccuagcaca

SEQ ID NO: 732735 - RNA, 19 nt, Artificial Sequence
  Description of Artificial Sequence: Synthetic oligonucleotide
  Antisense strand to SEQ ID NO: 732734
ugugcuaggcagaaccaag

SEQ ID NO: 732736 - RNA, 19 nt, Artificial Sequence
  Description of Artificial Sequence: Synthetic oligonucleotide
  Sense strand starting at position 612 of SEQ ID NO: 586632
ugccauuucuuugugucuu

SEQ ID NO: 732737 - RNA, 19 nt, Artificial Sequence
  Description of Artificial Sequence: Synthetic oligonucleotide
  Antisense strand to SEQ ID NO: 732736
aagacacaaagaaauggca

SEQ ID NO: 732738 - RNA, 19 nt, Artificial Sequence
  Description of Artificial Sequence: Synthetic oligonucleotide
  Sense strand starting at position 2119 of SEQ ID NO: 586632
gggagacagucccuccuau

SEQ ID NO: 732739 - RNA, 19 nt, Artificial Sequence
  Description of Artificial Sequence: Synthetic oligonucleotide
  Antisense strand to SEQ ID NO: 732738
auaggagggacugucuccc

SEQ ID NO: 732740 - RNA, 19 nt, Artificial Sequence
  Description of Artificial Sequence: Synthetic oligonucleotide
  Sense strand starting at position 2239 of SEQ ID NO: 586632
aucuuugauaccgggacau

SEQ ID NO: 732741 - RNA, 19 nt, Artificial Sequence
  Description of Artificial Sequence: Synthetic oligonucleotide
  Antisense strand to SEQ ID NO: 732740
augucccgguaucaaagau

SEQ ID NO: 732742 - RNA, 19 nt, Artificial Sequence
  Description of Artificial Sequence: Synthetic oligonucleotide
  Sense strand starting at position 2298 of SEQ ID NO: 586632
cagaaagaguccuccagug

SEQ ID NO: 732743 - RNA, 19 nt, Artificial Sequence
  Description of Artificial Sequence: Synthetic oligonucleotide
  Antisense strand to SEQ ID NO: 732742
cacuggaggacucuuucug

SEQ ID NO: 732744 - RNA, 19 nt, Artificial Sequence
  Description of Artificial Sequence: Synthetic oligonucleotide
  Sense strand starting at position 2300 of SEQ ID NO: 586632
gaaagaguccuccaguguu

SEQ ID NO: 732745 - RNA, 19 nt, Artificial Sequence
  Description of Artificial Sequence: Synthetic oligonucleotide
  Antisense strand to SEQ ID NO: 732744
aacacuggaggacucuuuc

SEQ ID NO: 732746 - RNA, 19 nt, Artificial Sequence
  Description of Artificial Sequence: Synthetic oligonucleotide
  Sense strand starting at position 2303 of SEQ ID NO: 586632
agaguccuccaguguuaau

SEQ ID NO: 732747 - RNA, 19 nt, Artificial Sequence
  Description of Artificial Sequence: Synthetic oligonucleotide
  Antisense strand to SEQ ID NO: 732746
auuaacacuggaggacucu

SEQ ID NO: 732748 - RNA, 19 nt, Artificial Sequence
  Description of Artificial Sequence: Synthetic oligonucleotide
  Sense strand starting at position 2312 of SEQ ID NO: 586632
caguguuaauuggcaaaga

SEQ ID NO: 732749 - RNA, 19 nt, Artificial Sequence
  Description of Artificial Sequence: Synthetic oligonucleotide
  Antisense strand to SEQ ID NO: 732748
ucuuugccaauuaacacug

SEQ ID NO: 732750 - RNA, 19 nt, Artificial Sequence
  Description of Artificial Sequence: Synthetic oligonucleotide
  Sense strand starting at position 2387 of SEQ ID NO: 586632
cgugaugugguuuacuuca

SEQ ID NO: 732751 - RNA, 19 nt, Artificial Sequence
  Description of Artificial Sequence: Synthetic oligonucleotide
  Antisense strand to SEQ ID NO: 732750
ugaaguaaaccacaucacg

SEQ ID NO: 732752 - RNA, 19 nt, Artificial Sequence
  Description of Artificial Sequence: Synthetic oligonucleotide
  Sense strand starting at position 2428 of SEQ ID NO: 586632
uuuauuuguuuggaccaaa

SEQ ID NO: 732753 - RNA, 19 nt, Artificial Sequence
  Description of Artificial Sequence: Synthetic oligonucleotide
  Antisense strand to SEQ ID NO: 732752
uuugguccaaacaaauaaa

SEQ ID NO: 732754 - RNA, 19 nt, Artificial Sequence
  Description of Artificial Sequence: Synthetic oligonucleotide
  Sense strand starting at position 2439 of SEQ ID NO: 586632
ggaccaaauacguguaaug

SEQ ID NO: 732755 - RNA, 19 nt, Artificial Sequence
  Description of Artificial Sequence: Synthetic oligonucleotide
  Antisense strand to SEQ ID NO: 732754
cauuacacguauuuggucc

SEQ ID NO: 732756 - RNA, 19 nt, Artificial Sequence
  Description of Artificial Sequence: Synthetic oligonucleotide
  Sense strand starting at position 2441 of SEQ ID NO: 586632
accaaauacguguaaugau

SEQ ID NO: 732757 - RNA, 19 nt, Artificial Sequence
  Description of Artificial Sequence: Synthetic oligonucleotide
  Antisense strand to SEQ ID NO: 732756
aucauuacacguauuuggu

SEQ ID NO: 732758 - RNA, 19 nt, Artificial Sequence
  Description of Artificial Sequence: Synthetic oligonucleotide
  Sense strand starting at position 2502 of SEQ ID NO: 586632
cucaguaaacguugauuga

SEQ ID NO: 732759 - RNA, 19 nt, Artificial Sequence
  Description of Artificial Sequence: Synthetic oligonucleotide
  Antisense strand to SEQ ID NO: 732758
ucaaucaacguuuacugag

SEQ ID NO: 732760 - RNA, 19 nt, Artificial Sequence
  Description of Artificial Sequence: Synthetic oligonucleotide
  Sense strand starting at position 2588 of SEQ ID NO: 586632
cccaguuauugggugagaa

SEQ ID NO: 732761 - RNA, 19 nt, Artificial Sequence
  Description of Artificial Sequence: Synthetic oligonucleotide
  Antisense strand to SEQ ID NO: 732760
uucucacccaauaacuggg

SEQ ID NO: 732762 - RNA, 19 nt, Artificial Sequence
  Description of Artificial Sequence: Synthetic oligonucleotide
  Sense strand starting at position 2589 of SEQ ID NO: 586632
ccaguuauugggugagaaa

SEQ ID NO: 732763 - RNA, 19 nt, Artificial Sequence
  Description of Artificial Sequence: Synthetic oligonucleotide
  Antisense strand to SEQ ID NO: 732762
uuucucacccaauaacugg

SEQ ID NO: 732764 - RNA, 19 nt, Artificial Sequence
  Description of Artificial Sequence: Synthetic oligonucleotide
  Sense strand starting at position 2750 of SEQ ID NO: 586632
uggaaugaugugggaaagu

SEQ ID NO: 732765 - RNA, 19 nt, Artificial Sequence
  Description of Artificial Sequence: Synthetic oligonucleotide
  Antisense strand to SEQ ID NO: 732764
acuuucccacaucauucca

SEQ ID NO: 732766 - RNA, 19 nt, Artificial Sequence
  Description of Artificial Sequence: Synthetic oligonucleotide
  Sense strand starting at position 2761 of SEQ ID NO: 586632
gggaaagucuggcuuccca

SEQ ID NO: 732767 - RNA, 19 nt, Artificial Sequence
  Description of Artificial Sequence: Synthetic oligonucleotide
  Antisense strand to SEQ ID NO: 732766
ugggaagccagacuuuccc

SEQ ID NO: 732768 - RNA, 19 nt, Artificial Sequence
  Description of Artificial Sequence: Synthetic oligonucleotide
  Sense strand starting at position 2809 of SEQ ID NO: 586632
cagggcuggacaugugaaa

SEQ ID NO: 732769 - RNA, 19 nt, Artificial Sequence
  Description of Artificial Sequence: Synthetic oligonucleotide
  Antisense strand to SEQ ID NO: 732768
uuucacauguccagcccug

SEQ ID NO: 732770 - RNA, 19 nt, Artificial Sequence
  Description of Artificial Sequence: Synthetic oligonucleotide
  Sense strand starting at position 2889 of SEQ ID NO: 586632
ggguacucagcauaacuau

SEQ ID NO: 732771 - RNA, 19 nt, Artificial Sequence
  Description of Artificial Sequence: Synthetic oligonucleotide
  Antisense strand to SEQ ID NO: 732770
auaguuaugcugaguaccc

SEQ ID NO: 732772 - RNA, 19 nt, Artificial Sequence
  Description of Artificial Sequence: Synthetic oligonucleotide
  Sense strand starting at position 3120 of SEQ ID NO: 586632
aauaacccacggugauauu

SEQ ID NO: 732773 - RNA, 19 nt, Artificial Sequence
  Description of Artificial Sequence: Synthetic oligonucleotide
  Antisense strand to SEQ ID NO: 732772
aauaucaccguggguuauu

SEQ ID NO: 732774 - RNA, 19 nt, Artificial Sequence
  Description of Artificial Sequence: Synthetic oligonucleotide
  Sense strand starting at position 3194 of SEQ ID NO: 586632
gcgggcuuuguuaggcuaa

SEQ ID NO: 732775 - RNA, 19 nt, Artificial Sequence
  Description of Artificial Sequence: Synthetic oligonucleotide
  Antisense strand to SEQ ID NO: 732774
uuagccuaacaaagcccgc

SEQ ID NO: 732776 - RNA, 19 nt, Artificial Sequence
  Description of Artificial Sequence: Synthetic oligonucleotide
  Sense strand starting at position 3250 of SEQ ID NO: 586632
ggugaagauugucucuucu

SEQ ID NO: 732777 - RNA, 19 nt, Artificial Sequence
  Description of Artificial Sequence: Synthetic oligonucleotide
  Antisense strand to SEQ ID NO: 732776
agaagagacaaucuucacc

SEQ ID NO: 732778 - RNA, 19 nt, Artificial Sequence
  Description of Artificial Sequence: Synthetic oligonucleotide
  Sense strand starting at position 3252 of SEQ ID NO: 586632
ugaagauugucucuucuuc

SEQ ID NO: 732779 - RNA, 19 nt, Artificial Sequence
  Description of Artificial Sequence: Synthetic oligonucleotide
  Antisense strand to SEQ ID NO: 732778
gaagaagagacaaucuuca

SEQ ID NO: 732780 - RNA, 19 nt, Artificial Sequence
  Description of Artificial Sequence: Synthetic oligonucleotide
  Sense strand starting at position 3298 of SEQ ID NO: 586632
acuguuggcaaguacagaa

SEQ ID NO: 732781 - RNA, 19 nt, Artificial Sequence
  Description of Artificial Sequence: Synthetic oligonucleotide
  Antisense strand to SEQ ID NO: 732780
uucuguacuugccaacagu

SEQ ID NO: 732782 - RNA, 19 nt, Artificial Sequence
  Description of Artificial Sequence: Synthetic oligonucleotide
  Sense strand starting at position 3573 of SEQ ID NO: 586632
ucuugagcucuugaguagu

SEQ ID NO: 732783 - RNA, 19 nt, Artificial Sequence
  Description of Artificial Sequence: Synthetic oligonucleotide
  Antisense strand to SEQ ID NO: 732782
acuacucaagagcucaaga

SEQ ID NO: 732784 - RNA, 19 nt, Artificial Sequence
  Description of Artificial Sequence: Synthetic oligonucleotide
  Sense strand starting at position 3576 of SEQ ID NO: 586632
ugagcucuugaguaguaca

SEQ ID NO: 732785 - RNA, 19 nt, Artificial Sequence
  Description of Artificial Sequence: Synthetic oligonucleotide
  Antisense strand to SEQ ID NO: 732784
uguacuacucaagagcuca

SEQ ID NO: 732786 - RNA, 19 nt, Artificial Sequence
  Description of Artificial Sequence: Synthetic oligonucleotide
  Sense strand starting at position 3591 of SEQ ID NO: 586632
uacagagaccuuggucagu

SEQ ID NO: 732787 - RNA, 19 nt, Artificial Sequence
  Description of Artificial Sequence: Synthetic oligonucleotide
  Antisense strand to SEQ ID NO: 732786
acugaccaaggucucugua

SEQ ID NO: 732788 - RNA, 19 nt, Artificial Sequence
  Description of Artificial Sequence: Synthetic oligonucleotide
  Sense strand starting at position 3600 of SEQ ID NO: 586632
cuuggucagugccuugaaa

SEQ ID NO: 732789 - RNA, 19 nt, Artificial Sequence
  Description of Artificial Sequence: Synthetic oligonucleotide
  Antisense strand to SEQ ID NO: 732788
uuucaaggcacugaccaag

SEQ ID NO: 732790 - RNA, 19 nt, Artificial Sequence
  Description of Artificial Sequence: Synthetic oligonucleotide
  Sense strand starting at position 3667 of SEQ ID NO: 586632
cccacucuucuguguaaga

SEQ ID NO: 732791 - RNA, 19 nt, Artificial Sequence
  Description of Artificial Sequence: Synthetic oligonucleotide
  Antisense strand to SEQ ID NO: 732790
ucuuacacagaagaguggg

SEQ ID NO: 732792 - RNA, 19 nt, Artificial Sequence
  Description of Artificial Sequence: Synthetic oligonucleotide
  Sense strand starting at position 3668 of SEQ ID NO: 586632
ccacucuucuguguaagag

SEQ ID NO: 732793 - RNA, 19 nt, Artificial Sequence
  Description of Artificial Sequence: Synthetic oligonucleotide
  Antisense strand to SEQ ID NO: 732792
cucuuacacagaagagugg

SEQ ID NO: 732794 - RNA, 19 nt, Artificial Sequence
  Description of Artificial Sequence: Synthetic oligonucleotide
  Sense strand starting at position 3669 of SEQ ID NO: 586632
cacucuucuguguaagaga

SEQ ID NO: 732795 - RNA, 19 nt, Artificial Sequence
  Description of Artificial Sequence: Synthetic oligonucleotide
  Antisense strand to SEQ ID NO: 732794
ucucuuacacagaagagug

SEQ ID NO: 732796 - RNA, 19 nt, Artificial Sequence
  Description of Artificial Sequence: Synthetic oligonucleotide
  Sense strand starting at position 3973 of SEQ ID NO: 586632
gugcucauccuugaagauc

SEQ ID NO: 732797 - RNA, 19 nt, Artificial Sequence
  Description of Artificial Sequence: Synthetic oligonucleotide
  Antisense strand to SEQ ID NO: 732796
gaucuucaaggaugagcac

SEQ ID NO: 732798 - RNA, 19 nt, Artificial Sequence
  Description of Artificial Sequence: Synthetic oligonucleotide
  Sense strand starting at position 1107 of SEQ ID NO: 586633
uccaaauaacucugggcuu

SEQ ID NO: 732799 - RNA, 19 nt, Artificial Sequence
  Description of Artificial Sequence: Synthetic oligonucleotide
  Antisense strand to SEQ ID NO: 732798
aagcccagaguuauuugga

SEQ ID NO: 732800 - RNA, 19 nt, Artificial Sequence
  Description of Artificial Sequence: Synthetic oligonucleotide
  Sense strand starting at position 1404 of SEQ ID NO: 586633
accagucucuggcaaugau

SEQ ID NO: 732801 - RNA, 19 nt, Artificial Sequence
  Description of Artificial Sequence: Synthetic oligonucleotide
  Antisense strand to SEQ ID NO: 732800
aucauugccagagacuggu

SEQ ID NO: 732802 - RNA, 19 nt, Artificial Sequence
  Description of Artificial Sequence: Synthetic oligonucleotide
  Sense strand starting at position 1998 of SEQ ID NO: 586633
acguaaggucaagaguuua

SEQ ID NO: 732803 - RNA, 19 nt, Artificial Sequence
  Description of Artificial Sequence: Synthetic oligonucleotide
  Antisense strand to SEQ ID NO: 732802
uaaacucuugaccuuacgu

SEQ ID NO: 732804 - RNA, 19 nt, Artificial Sequence
  Description of Artificial Sequence: Synthetic oligonucleotide
  Sense strand starting at position 2350 of SEQ ID NO: 586633
ggagcaagauaaugaaacu

SEQ ID NO: 732805 - RNA, 19 nt, Artificial Sequence
  Description of Artificial Sequence: Synthetic oligonucleotide
  Antisense strand to SEQ ID NO: 732804
aguuucauuaucuugcucc

SEQ ID NO: 732806 - RNA, 19 nt, Artificial Sequence
  Description of Artificial Sequence: Synthetic oligonucleotide
  Sense strand starting at position 3300 of SEQ ID NO: 586633
gacccugucugucuguaaa

SEQ ID NO: 732807 - RNA, 19 nt, Artificial Sequence
  Description of Artificial Sequence: Synthetic oligonucleotide
  Antisense strand to SEQ ID NO: 732806
uuuacagacagacaggguc

SEQ ID NO: 732808 - RNA, 19 nt, Artificial Sequence
  Description of Artificial Sequence: Synthetic oligonucleotide
  Sense strand starting at position 3381 of SEQ ID NO: 586633
gcagguggaucaccuuauu

SEQ ID NO: 732809 - RNA, 19 nt, Artificial Sequence
  Description of Artificial Sequence: Synthetic oligonucleotide
  Antisense strand to SEQ ID NO: 732808
aauaaggugauccaccugc

SEQ ID NO: 732810 - RNA, 19 nt, Artificial Sequence
  Description of Artificial Sequence: Synthetic oligonucleotide
  Sense strand starting at position 3393 of SEQ ID NO: 586633
ccuuauuuaggucgggagu

SEQ ID NO: 732811 - RNA, 19 nt, Artificial Sequence
  Description of Artificial Sequence: Synthetic oligonucleotide
  Antisense strand to SEQ ID NO: 732810
acucccgaccuaaauaagg

SEQ ID NO: 732812 - RNA, 19 nt, Artificial Sequence
  Description of Artificial Sequence: Synthetic oligonucleotide
  Sense strand starting at position 3394 of SEQ ID NO: 586633
cuuauuuaggucgggaguu

SEQ ID NO: 732813 - RNA, 19 nt, Artificial Sequence
  Description of Artificial Sequence: Synthetic oligonucleotide
  Antisense strand to SEQ ID NO: 732812
aacucccgaccuaaauaag

SEQ ID NO: 732814 - RNA, 19 nt, Artificial Sequence
  Description of Artificial Sequence: Synthetic oligonucleotide
  Sense strand starting at position 3395 of SEQ ID NO: 586633
uuauuuaggucgggaguuu

SEQ ID NO: 732815 - RNA, 19 nt, Artificial Sequence
  Description of Artificial Sequence: Synthetic oligonucleotide
  Antisense strand to SEQ ID NO: 732814
aaacucccgaccuaaauaa

SEQ ID NO: 732816 - RNA, 19 nt, Artificial Sequence
  Description of Artificial Sequence: Synthetic oligonucleotide
  Sense strand starting at position 3712 of SEQ ID NO: 586633
gcagcuguuuaauggucaa

SEQ ID NO: 732817 - RNA, 19 nt, Artificial Sequence
  Description of Artificial Sequence: Synthetic oligonucleotide
  Antisense strand to SEQ ID NO: 732816
uugaccauuaaacagcugc

SEQ ID NO: 732818 - RNA, 19 nt, Artificial Sequence
  Description of Artificial Sequence: Synthetic oligonucleotide
  Sense strand starting at position 3715 of SEQ ID NO: 586633
gcuguuuaauggucaauag

SEQ ID NO: 732819 - RNA, 19 nt, Artificial Sequence
  Description of Artificial Sequence: Synthetic oligonucleotide
  Antisense strand to SEQ ID NO: 732818
cuauugaccauuaaacagc

SEQ ID NO: 732820 - RNA, 19 nt, Artificial Sequence
  Description of Artificial Sequence: Synthetic oligonucleotide
  Sense strand starting at position 3719 of SEQ ID NO: 586633
uuuaauggucaauagcaca

SEQ ID NO: 732821 - RNA, 19 nt, Artificial Sequence
  Description of Artificial Sequence: Synthetic oligonucleotide
  Antisense strand to SEQ ID NO: 732820
ugugcuauugaccauuaaa

SEQ ID NO: 732822 - RNA, 19 nt, Artificial Sequence
  Description of Artificial Sequence: Synthetic oligonucleotide
  Sense strand starting at position 3824 of SEQ ID NO: 586633
uccucaugucuguguggau

SEQ ID NO: 732823 - RNA, 19 nt, Artificial Sequence
  Description of Artificial Sequence: Synthetic oligonucleotide
  Antisense strand to SEQ ID NO: 732822
auccacacagacaugagga

SEQ ID NO: 732824 - RNA, 19 nt, Artificial Sequence
  Description of Artificial Sequence: Synthetic oligonucleotide
  Sense strand starting at position 84 of SEQ ID NO: 586634
ggcugucacacguggaaua

SEQ ID NO: 732825 - RNA, 19 nt, Artificial Sequence
  Description of Artificial Sequence: Synthetic oligonucleotide
  Antisense strand to SEQ ID NO: 732824
uauuccacgugugacagcc

SEQ ID NO: 732826 - RNA, 19 nt, Artificial Sequence
  Description of Artificial Sequence: Synthetic oligonucleotide
  Sense strand starting at position 85 of SEQ ID NO: 586634
gcugucacacguggaauaa

SEQ ID NO: 732827 - RNA, 19 nt, Artificial Sequence
  Description of Artificial Sequence: Synthetic oligonucleotide
  Antisense strand to SEQ ID NO: 732826
uuauuccacgugugacagc

SEQ ID NO: 732828 - RNA, 19 nt, Artificial Sequence
  Description of Artificial Sequence: Synthetic oligonucleotide
  Sense strand starting at position 160 of SEQ ID NO: 586634
ccucucuguuucucugaga

SEQ ID NO: 732829 - RNA, 19 nt, Artificial Sequence
  Description of Artificial Sequence: Synthetic oligonucleotide
  Antisense strand to SEQ ID NO: 732828
ucucagagaaacagagagg

SEQ ID NO: 732830 - RNA, 19 nt, Artificial Sequence
  Description of Artificial Sequence: Synthetic oligonucleotide
  Sense strand starting at position 175 of SEQ ID NO: 586634
gagacaacuguguggacaa

SEQ ID NO: 732831 - RNA, 19 nt, Artificial Sequence
  Description of Artificial Sequence: Synthetic oligonucleotide
  Antisense strand to SEQ ID NO: 732830
uuguccacacaguugucuc

SEQ ID NO: 732832 - RNA, 19 nt, Artificial Sequence
  Description of Artificial Sequence: Synthetic oligonucleotide
  Sense strand starting at position 645 of SEQ ID NO: 586634
uccuuuagccaauguggaa

SEQ ID NO: 732833 - RNA, 19 nt, Artificial Sequence
  Description of Artificial Sequence: Synthetic oligonucleotide
  Antisense strand to SEQ ID NO: 732832
uuccacauuggcuaaagga

SEQ ID NO: 732834 - RNA, 19 nt, Artificial Sequence
  Description of Artificial Sequence: Synthetic oligonucleotide
  Sense strand starting at position 764 of SEQ ID NO: 586634
aaaugaucaguguggccuu

SEQ ID NO: 732835 - RNA, 19 nt, Artificial Sequence
  Description of Artificial Sequence: Synthetic oligonucleotide
  Antisense strand to SEQ ID NO: 732834
aaggccacacugaucauuu

SEQ ID NO: 732836 - RNA, 19 nt, Artificial Sequence
  Description of Artificial Sequence: Synthetic oligonucleotide
  Sense strand starting at position 821 of SEQ ID NO: 586634
gcuagaagccuccauaucu

SEQ ID NO: 732837 - RNA, 19 nt, Artificial Sequence
  Description of Artificial Sequence: Synthetic oligonucleotide
  Antisense strand to SEQ ID NO: 732836
agauauggaggcuucuagc

SEQ ID NO: 732838 - RNA, 19 nt, Artificial Sequence
  Description of Artificial Sequence: Synthetic oligonucleotide
  Sense strand starting at position 830 of SEQ ID NO: 586634
cuccauaucugguucugca

SEQ ID NO: 732839 - RNA, 19 nt, Artificial Sequence
  Description of Artificial Sequence: Synthetic oligonucleotide
  Antisense strand to SEQ ID NO: 732838
ugcagaaccagauauggag

SEQ ID NO: 732840 - RNA, 19 nt, Artificial Sequence
  Description of Artificial Sequence: Synthetic oligonucleotide
  Sense strand starting at position 834 of SEQ ID NO: 586634
auaucugguucugcagaca

SEQ ID NO: 732841 - RNA, 19 nt, Artificial Sequence
  Description of Artificial Sequence: Synthetic oligonucleotide
  Antisense strand to SEQ ID NO: 732840
ugucugcagaaccagauau

SEQ ID NO: 732842 - RNA, 19 nt, Artificial Sequence
  Description of Artificial Sequence: Synthetic oligonucleotide
  Sense strand starting at position 1065 of SEQ ID NO: 586634
ggaagcugcuauucugaaa

SEQ ID NO: 732843 - RNA, 19 nt, Artificial Sequence
  Description of Artificial Sequence: Synthetic oligonucleotide
  Antisense strand to SEQ ID NO: 732842
uuucagaauagcagcuucc

SEQ ID NO: 732844 - RNA, 19 nt, Artificial Sequence
  Description of Artificial Sequence: Synthetic oligonucleotide
  Sense strand starting at position 1116 of SEQ ID NO: 586634
aacuguauuuaaggaguca

SEQ ID NO: 732845 - RNA, 19 nt, Artificial Sequence
  Description of Artificial Sequence: Synthetic oligonucleotide
  Antisense strand to SEQ ID NO: 732844
ugacuccuuaaauacaguu

SEQ ID NO: 732846 - RNA, 19 nt, Artificial Sequence
  Description of Artificial Sequence: Synthetic oligonucleotide
  Sense strand starting at position 1269 of SEQ ID NO: 586634
agcaguccuggcuagaagu

SEQ ID NO: 732847 - RNA, 19 nt, Artificial Sequence
  Description of Artificial Sequence: Synthetic oligonucleotide
  Antisense strand to SEQ ID NO: 732846
acuucuagccaggacugcu

SEQ ID NO: 732848 - RNA, 19 nt, Artificial Sequence
  Description of Artificial Sequence: Synthetic oligonucleotide
  Sense strand starting at position 1279 of SEQ ID NO: 586634
gcuagaaguucccuaauaa

SEQ ID NO: 732849 - RNA, 19 nt, Artificial Sequence
  Description of Artificial Sequence: Synthetic oligonucleotide
  Antisense strand to SEQ ID NO: 732848
uuauuagggaacuucuagc

SEQ ID NO: 732850 - RNA, 19 nt, Artificial Sequence
  Description of Artificial Sequence: Synthetic oligonucleotide
  Sense strand starting at position 1313 of SEQ ID NO: 586634
agagacaccucauuguaug

SEQ ID NO: 732851 - RNA, 19 nt, Artificial Sequence
  Description of Artificial Sequence: Synthetic oligonucleotide
  Antisense strand to SEQ ID NO: 732850
cauacaaugaggugucucu

SEQ ID NO: 732852 - RNA, 19 nt, Artificial Sequence
  Description of Artificial Sequence: Synthetic oligonucleotide
  Sense strand starting at position 1323 of SEQ ID NO: 586634
cauuguaugcauugcaaag

SEQ ID NO: 732853 - RNA, 19 nt, Artificial Sequence
  Description of Artificial Sequence: Synthetic oligonucleotide
  Antisense strand to SEQ ID NO: 732852
cuuugcaaugcauacaaug

SEQ ID NO: 732854 - RNA, 19 nt, Artificial Sequence
  Description of Artificial Sequence: Synthetic oligonucleotide
  Sense strand starting at position 1372 of SEQ ID NO: 586634
cugguaagacccugcacaa

SEQ ID NO: 732855 - RNA, 19 nt, Artificial Sequence
  Description of Artificial Sequence: Synthetic oligonucleotide
  Antisense strand to SEQ ID NO: 732854
uugugcagggucuuaccag

SEQ ID NO: 732856 - RNA, 19 nt, Artificial Sequence
  Description of Artificial Sequence: Synthetic oligonucleotide
  Sense strand starting at position 1406 of SEQ ID NO: 586634
uugagucuuccugacacuu

SEQ ID NO: 732857 - RNA, 19 nt, Artificial Sequence
  Description of Artificial Sequence: Synthetic oligonucleotide
  Antisense strand to SEQ ID NO: 732856
aagugucaggaagacucaa

SEQ ID NO: 732858 - RNA, 19 nt, Artificial Sequence
  Description of Artificial Sequence: Synthetic oligonucleotide
  Sense strand starting at position 1524 of SEQ ID NO: 586634
cugaauuccuacccgcaga

SEQ ID NO: 732859 - RNA, 19 nt, Artificial Sequence
  Description of Artificial Sequence: Synthetic oligonucleotide
  Antisense strand to SEQ ID NO: 732858
ucugcggguaggaauucag

SEQ ID NO: 732860 - RNA, 19 nt, Artificial Sequence
  Description of Artificial Sequence: Synthetic oligonucleotide
  Sense strand starting at position 1562 of SEQ ID NO: 586634
ugagacugaucacuugcau

SEQ ID NO: 732861 - RNA, 19 nt, Artificial Sequence
  Description of Artificial Sequence: Synthetic oligonucleotide
  Antisense strand to SEQ ID NO: 732860
augcaagugaucagucuca

SEQ ID NO: 732862 - RNA, 19 nt, Artificial Sequence
  Description of Artificial Sequence: Synthetic oligonucleotide
  Sense strand starting at position 1623 of SEQ ID NO: 586634
gugggacauccugaucuuu

SEQ ID NO: 732863 - RNA, 19 nt, Artificial Sequence
  Description of Artificial Sequence: Synthetic oligonucleotide
  Antisense strand to SEQ ID NO: 732862
aaagaucaggaugucccac

SEQ ID NO: 732864 - RNA, 19 nt, Artificial Sequence
  Description of Artificial Sequence: Synthetic oligonucleotide
  Sense strand starting at position 1644 of SEQ ID NO: 586634
ggaugugcccaaggcaauu

SEQ ID NO: 732865 - RNA, 19 nt, Artificial Sequence
  Description of Artificial Sequence: Synthetic oligonucleotide
  Antisense strand to SEQ ID NO: 732864
aauugccuugggcacaucc

SEQ ID NO: 732866 - RNA, 19 nt, Artificial Sequence
  Description of Artificial Sequence: Synthetic oligonucleotide
  Sense strand starting at position 1656 of SEQ ID NO: 586634
ggcaauuuccaaugcaucu

SEQ ID NO: 732867 - RNA, 19 nt, Artificial Sequence
  Description of Artificial Sequence: Synthetic oligonucleotide
  Antisense strand to SEQ ID NO: 732866
agaugcauuggaaauugcc

SEQ ID NO: 732868 - RNA, 19 nt, Artificial Sequence
  Description of Artificial Sequence: Synthetic oligonucleotide
  Sense strand starting at position 1805 of SEQ ID NO: 586634
ccuucuaucuggcuagaac

SEQ ID NO: 732869 - RNA, 19 nt, Artificial Sequence
  Description of Artificial Sequence: Synthetic oligonucleotide
  Antisense strand to SEQ ID NO: 732868
guucuagccagauagaagg

SEQ ID NO: 732870 - RNA, 19 nt, Artificial Sequence
  Description of Artificial Sequence: Synthetic oligonucleotide
  Sense strand starting at position 1806 of SEQ ID NO: 586634
cuucuaucuggcuagaacu

SEQ ID NO: 732871 - RNA, 19 nt, Artificial Sequence
  Description of Artificial Sequence: Synthetic oligonucleotide
  Antisense strand to SEQ ID NO: 732870
aguucuagccagauagaag

SEQ ID NO: 732872 - RNA, 19 nt, Artificial Sequence
  Description of Artificial Sequence: Synthetic oligonucleotide
  Sense strand starting at position 1814 of SEQ ID NO: 586634
uggcuagaacucgguacaa

SEQ ID NO: 732873 - RNA, 19 nt, Artificial Sequence
  Description of Artificial Sequence: Synthetic oligonucleotide
  Antisense strand to SEQ ID NO: 732872
uuguaccgaguucuagcca

SEQ ID NO: 732874 - RNA, 19 nt, Artificial Sequence
  Description of Artificial Sequence: Synthetic oligonucleotide
  Sense strand starting at position 1816 of SEQ ID NO: 586634
gcuagaacucgguacaaag

SEQ ID NO: 732875 - RNA, 19 nt, Artificial Sequence
  Description of Artificial Sequence: Synthetic oligonucleotide
  Antisense strand to SEQ ID NO: 732874
cuuuguaccgaguucuagc

SEQ ID NO: 732876 - RNA, 19 nt, Artificial Sequence
  Description of Artificial Sequence: Synthetic oligonucleotide
  Sense strand starting at position 1834 of SEQ ID NO: 586634
gcuaucauaguccagaacu

SEQ ID NO: 732877 - RNA, 19 nt, Artificial Sequence
  Description of Artificial Sequence: Synthetic oligonucleotide
  Antisense strand to SEQ ID NO: 732876
aguucuggacuaugauagc

SEQ ID NO: 732878 - RNA, 19 nt, Artificial Sequence
  Description of Artificial Sequence: Synthetic oligonucleotide
  Sense strand starting at position 2239 of SEQ ID NO: 586634
gcugguaggagcgagaaau

SEQ ID NO: 732879 - RNA, 19 nt, Artificial Sequence
  Description of Artificial Sequence: Synthetic oligonucleotide
  Antisense strand to SEQ ID NO: 732878
auuucucgcuccuaccagc

SEQ ID NO: 732880 - RNA, 19 nt, Artificial Sequence
  Description of Artificial Sequence: Synthetic oligonucleotide
  Sense strand starting at position 2249 of SEQ ID NO: 586634
gcgagaaauccuugauguc

SEQ ID NO: 732881 - RNA, 19 nt, Artificial Sequence
  Description of Artificial Sequence: Synthetic oligonucleotide
  Antisense strand to SEQ ID NO: 732880
gacaucaaggauuucucgc

SEQ ID NO: 732882 - RNA, 19 nt, Artificial Sequence
  Description of Artificial Sequence: Synthetic oligonucleotide
  Sense strand starting at position 2250 of SEQ ID NO: 586634
cgagaaauccuugaugucc

SEQ ID NO: 732883 - RNA, 19 nt, Artificial Sequence
  Description of Artificial Sequence: Synthetic oligonucleotide
  Antisense strand to SEQ ID NO: 732882
ggacaucaaggauuucucg

SEQ ID NO: 732884 - RNA, 19 nt, Artificial Sequence
  Description of Artificial Sequence: Synthetic oligonucleotide
  Sense strand starting at position 2711 of SEQ ID NO: 586634
ccguauuuccuacguacaa

SEQ ID NO: 732885 - RNA, 19 nt, Artificial Sequence
  Description of Artificial Sequence: Synthetic oligonucleotide
  Antisense strand to SEQ ID NO: 732884
uuguacguaggaaauacgg

SEQ ID NO: 732886 - RNA, 19 nt, Artificial Sequence
  Description of Artificial Sequence: Synthetic oligonucleotide
  Sense strand starting at position 2712 of SEQ ID NO: 586634
cguauuuccuacguacaaa

SEQ ID NO: 732887 - RNA, 19 nt, Artificial Sequence
  Description of Artificial Sequence: Synthetic oligonucleotide
  Antisense strand to SEQ ID NO: 732886
uuuguacguaggaaauacg

SEQ ID NO: 732888 - RNA, 19 nt, Artificial Sequence
  Description of Artificial Sequence: Synthetic oligonucleotide
  Sense strand starting at position 2947 of SEQ ID NO: 586634
gcugguaaggaauagcaau

SEQ ID NO: 732889 - RNA, 19 nt, Artificial Sequence
  Description of Artificial Sequence: Synthetic oligonucleotide
  Antisense strand to SEQ ID NO: 732888
auugcuauuccuuaccagc

SEQ ID NO: 732890 - RNA, 19 nt, Artificial Sequence
  Description of Artificial Sequence: Synthetic oligonucleotide
  Sense strand starting at position 3277 of SEQ ID NO: 586634
agaucagaccauugcacua

SEQ ID NO: 732891 - RNA, 19 nt, Artificial Sequence
  Description of Artificial Sequence: Synthetic oligonucleotide
  Antisense strand to SEQ ID NO: 732890
uagugcaauggucugaucu

SEQ ID NO: 732892 - RNA, 19 nt, Artificial Sequence
  Description of Artificial Sequence: Synthetic oligonucleotide
  Sense strand starting at position 3376 of SEQ ID NO: 586634
ugcaaaugacguuggugaa

SEQ ID NO: 732893 - RNA, 19 nt, Artificial Sequence
  Description of Artificial Sequence: Synthetic oligonucleotide
  Antisense strand to SEQ ID NO: 732892
uucaccaacgucauuugca

SEQ ID NO: 732894 - RNA, 19 nt, Artificial Sequence
  Description of Artificial Sequence: Synthetic oligonucleotide
  Sense strand starting at position 3509 of SEQ ID NO: 586634
uuguaaucucaguauccca

SEQ ID NO: 732895 - RNA, 19 nt, Artificial Sequence
  Description of Artificial Sequence: Synthetic oligonucleotide
  Antisense strand to SEQ ID NO: 732894
ugggauacugagauuacaa

SEQ ID NO: 732896 - RNA, 19 nt, Artificial Sequence
  Description of Artificial Sequence: Synthetic oligonucleotide
  Sense strand starting at position 3526 of SEQ ID NO: 586634
cacguugggcaccagauau

SEQ ID NO: 732897 - RNA, 19 nt, Artificial Sequence
  Description of Artificial Sequence: Synthetic oligonucleotide
  Antisense strand to SEQ ID NO: 732896
auaucuggugcccaacgug

SEQ ID NO: 732898 - RNA, 19 nt, Artificial Sequence
  Description of Artificial Sequence: Synthetic oligonucleotide
  Sense strand starting at position 3670 of SEQ ID NO: 586634
aucacauaucgguaguacu

SEQ ID NO: 732899 - RNA, 19 nt, Artificial Sequence
  Description of Artificial Sequence: Synthetic oligonucleotide
  Antisense strand to SEQ ID NO: 732898
aguacuaccgauaugugau

SEQ ID NO: 732900 - RNA, 19 nt, Artificial Sequence
  Description of Artificial Sequence: Synthetic oligonucleotide
  Sense strand starting at position 3978 of SEQ ID NO: 586634
aucuccauugcguaggaua

SEQ ID NO: 732901 - RNA, 19 nt, Artificial Sequence
  Description of Artificial Sequence: Synthetic oligonucleotide
  Antisense strand to SEQ ID NO: 732900
uauccuacgcaauggagau

SEQ ID NO: 732902 - RNA, 19 nt, Artificial Sequence
  Description of Artificial Sequence: Synthetic oligonucleotide
  Sense strand starting at position 3980 of SEQ ID NO: 586634
cuccauugcguaggauaga

SEQ ID NO: 732903 - RNA, 19 nt, Artificial Sequence
  Description of Artificial Sequence: Synthetic oligonucleotide
  Antisense strand to SEQ ID NO: 732902
ucuauccuacgcaauggag

SEQ ID NO: 732904 - RNA, 19 nt, Artificial Sequence
  Description of Artificial Sequence: Synthetic oligonucleotide
  Sense strand starting at position 6 of SEQ ID NO: 586635
caacgugcuccuggaagga

SEQ ID NO: 732905 - RNA, 19 nt, Artificial Sequence
  Description of Artificial Sequence: Synthetic oligonucleotide
  Antisense strand to SEQ ID NO: 732904
uccuuccaggagcacguug

SEQ ID NO: 732906 - RNA, 19 nt, Artificial Sequence
  Description of Artificial Sequence: Synthetic oligonucleotide
  Sense strand starting at position 73 of SEQ ID NO: 586635
ggucuugcucaggaucaca

SEQ ID NO: 732907 - RNA, 19 nt, Artificial Sequence
  Description of Artificial Sequence: Synthetic oligonucleotide
  Antisense strand to SEQ ID NO: 732906
ugugauccugagcaagacc

SEQ ID NO: 732908 - RNA, 19 nt, Artificial Sequence
  Description of Artificial Sequence: Synthetic oligonucleotide
  Sense strand starting at position 185 of SEQ ID NO: 586635
gcugaaggaugcccaagau

SEQ ID NO: 732909 - RNA, 19 nt, Artificial Sequence
  Description of Artificial Sequence: Synthetic oligonucleotide
  Antisense strand to SEQ ID NO: 732908
aucuugggcauccuucagc

SEQ ID NO: 732910 - RNA, 19 nt, Artificial Sequence
  Description of Artificial Sequence: Synthetic oligonucleotide
  Sense strand starting at position 386 of SEQ ID NO: 586635
acgccuuucucgcuggaga

SEQ ID NO: 732911 - RNA, 19 nt, Artificial Sequence
  Description of Artificial Sequence: Synthetic oligonucleotide
  Antisense strand to SEQ ID NO: 732910
ucuccagcgagaaaggcgu

SEQ ID NO: 732912 - RNA, 19 nt, Artificial Sequence
  Description of Artificial Sequence: Synthetic oligonucleotide
  Sense strand starting at position 387 of SEQ ID NO: 586635
cgccuuucucgcuggagaa

SEQ ID NO: 732913 - RNA, 19 nt, Artificial Sequence
  Description of Artificial Sequence: Synthetic oligonucleotide
  Antisense strand to SEQ ID NO: 732912
uucuccagcgagaaaggcg

SEQ ID NO: 732914 - RNA, 19 nt, Artificial Sequence
  Description of Artificial Sequence: Synthetic oligonucleotide
  Sense strand starting at position 388 of SEQ ID NO: 586635
gccuuucucgcuggagaaa

SEQ ID NO: 732915 - RNA, 19 nt, Artificial Sequence
  Description of Artificial Sequence: Synthetic oligonucleotide
  Antisense strand to SEQ ID NO: 732914
uuucuccagcgagaaaggc

SEQ ID NO: 732916 - RNA, 19 nt, Artificial Sequence
  Description of Artificial Sequence: Synthetic oligonucleotide
  Sense strand starting at position 899 of SEQ ID NO: 586635
gugugucuuaauuaugugu

SEQ ID NO: 732917 - RNA, 19 nt, Artificial Sequence
  Description of Artificial Sequence: Synthetic oligonucleotide
  Antisense strand to SEQ ID NO: 732916
acacauaauuaagacacac

SEQ ID NO: 732918 - RNA, 19 nt, Artificial Sequence
  Description of Artificial Sequence: Synthetic oligonucleotide
  Sense strand starting at position 901 of SEQ ID NO: 586635
gugucuuaauuaugugugu

SEQ ID NO: 732919 - RNA, 19 nt, Artificial Sequence
  Description of Artificial Sequence: Synthetic oligonucleotide
  Antisense strand to SEQ ID NO: 732918
acacacauaauuaagacac

SEQ ID NO: 732920 - RNA, 19 nt, Artificial Sequence
  Description of Artificial Sequence: Synthetic oligonucleotide
  Sense strand starting at position 1019 of SEQ ID NO: 586635
ccuggaguucuuugagaug

SEQ ID NO: 732921 - RNA, 19 nt, Artificial Sequence
  Description of Artificial Sequence: Synthetic oligonucleotide
  Antisense strand to SEQ ID NO: 732920
caucucaaagaacuccagg

SEQ ID NO: 732922 - RNA, 19 nt, Artificial Sequence
  Description of Artificial Sequence: Synthetic oligonucleotide
  Sense strand starting at position 1022 of SEQ ID NO: 586635
ggaguucuuugagauguac

SEQ ID NO: 732923 - RNA, 19 nt, Artificial Sequence
  Description of Artificial Sequence: Synthetic oligonucleotide
  Antisense strand to SEQ ID NO: 732922
guacaucucaaagaacucc

SEQ ID NO: 732924 - RNA, 19 nt, Artificial Sequence
  Description of Artificial Sequence: Synthetic oligonucleotide
  Sense strand starting at position 1083 of SEQ ID NO: 586635
guaccuuaacacugugaug

SEQ ID NO: 732925 - RNA, 19 nt, Artificial Sequence
  Description of Artificial Sequence: Synthetic oligonucleotide
  Antisense strand to SEQ ID NO: 732924
caucacaguguuaagguac

SEQ ID NO: 732926 - RNA, 19 nt, Artificial Sequence
  Description of Artificial Sequence: Synthetic oligonucleotide
  Sense strand starting at position 1088 of SEQ ID NO: 586635
uuaacacugugaugaggaa

SEQ ID NO: 732927 - RNA, 19 nt, Artificial Sequence
  Description of Artificial Sequence: Synthetic oligonucleotide
  Antisense strand to SEQ ID NO: 732926
uuccucaucacaguguuaa

SEQ ID NO: 732928 - RNA, 19 nt, Artificial Sequence
  Description of Artificial Sequence: Synthetic oligonucleotide
  Sense strand starting at position 1193 of SEQ ID NO: 586635
agaauuugcuuguggaagu

SEQ ID NO: 732929 - RNA, 19 nt, Artificial Sequence
  Description of Artificial Sequence: Synthetic oligonucleotide
  Antisense strand to SEQ ID NO: 732928
acuuccacaagcaaauucu

SEQ ID NO: 732930 - RNA, 19 nt, Artificial Sequence
  Description of Artificial Sequence: Synthetic oligonucleotide
  Sense strand starting at position 1194 of SEQ ID NO: 586635
gaauuugcuuguggaaguu

SEQ ID NO: 732931 - RNA, 19 nt, Artificial Sequence
  Description of Artificial Sequence: Synthetic oligonucleotide
  Antisense strand to SEQ ID NO: 732930
aacuuccacaagcaaauuc

SEQ ID NO: 732932 - RNA, 19 nt, Artificial Sequence
  Description of Artificial Sequence: Synthetic oligonucleotide
  Sense strand starting at position 1204 of SEQ ID NO: 586635
guggaaguuugaggacaua

SEQ ID NO: 732933 - RNA, 19 nt, Artificial Sequence
  Description of Artificial Sequence: Synthetic oligonucleotide
  Antisense strand to SEQ ID NO: 732932
uauguccucaaacuuccac

SEQ ID NO: 732934 - RNA, 19 nt, Artificial Sequence
  Description of Artificial Sequence: Synthetic oligonucleotide
  Sense strand starting at position 1215 of SEQ ID NO: 586635
aggacauaaugcccuauga

SEQ ID NO: 732935 - RNA, 19 nt, Artificial Sequence
  Description of Artificial Sequence: Synthetic oligonucleotide
  Antisense strand to SEQ ID NO: 732934
ucauagggcauuauguccu

SEQ ID NO: 732936 - RNA, 19 nt, Artificial Sequence
  Description of Artificial Sequence: Synthetic oligonucleotide
  Sense strand starting at position 1230 of SEQ ID NO: 586635
augaaugcgcuccaauguu

SEQ ID NO: 732937 - RNA, 19 nt, Artificial Sequence
  Description of Artificial Sequence: Synthetic oligonucleotide
  Antisense strand to SEQ ID NO: 732936
aacauuggagcgcauucau

SEQ ID NO: 732938 - RNA, 19 nt, Artificial Sequence
  Description of Artificial Sequence: Synthetic oligonucleotide
  Sense strand starting at position 1463 of SEQ ID NO: 586635
gccugacucccaugggaca

SEQ ID NO: 732939 - RNA, 19 nt, Artificial Sequence
  Description of Artificial Sequence: Synthetic oligonucleotide
  Antisense strand to SEQ ID NO: 732938
ugucccaugggagucaggc

SEQ ID NO: 732940 - RNA, 19 nt, Artificial Sequence
  Description of Artificial Sequence: Synthetic oligonucleotide
  Sense strand starting at position 2341 of SEQ ID NO: 586635
cggugucccugaagaggaa

SEQ ID NO: 732941 - RNA, 19 nt, Artificial Sequence
  Description of Artificial Sequence: Synthetic oligonucleotide
  Antisense strand to SEQ ID NO: 732940
uuccucuucagggacaccg

SEQ ID NO: 732942 - RNA, 19 nt, Artificial Sequence
  Description of Artificial Sequence: Synthetic oligonucleotide
  Sense strand starting at position 2596 of SEQ ID NO: 586635
gggagccguuauuuguaca

SEQ ID NO: 732943 - RNA, 19 nt, Artificial Sequence
  Description of Artificial Sequence: Synthetic oligonucleotide
  Antisense strand to SEQ ID NO: 732942
uguacaaauaacggcuccc

SEQ ID NO: 732944 - RNA, 19 nt, Artificial Sequence
  Description of Artificial Sequence: Synthetic oligonucleotide
  Sense strand starting at position 2599 of SEQ ID NO: 586635
agccguuauuuguacagag

SEQ ID NO: 732945 - RNA, 19 nt, Artificial Sequence
  Description of Artificial Sequence: Synthetic oligonucleotide
  Antisense strand to SEQ ID NO: 732944
cucuguacaaauaacggcu

SEQ ID NO: 732946 - RNA, 19 nt, Artificial Sequence
  Description of Artificial Sequence: Synthetic oligonucleotide
  Sense strand starting at position 2653 of SEQ ID NO: 586635
cgagguucuaacgagaaag

SEQ ID NO: 732947 - RNA, 19 nt, Artificial Sequence
  Description of Artificial Sequence: Synthetic oligonucleotide
  Antisense strand to SEQ ID NO: 732946
cuuucucguuagaaccucg

SEQ ID NO: 732948 - RNA, 19 nt, Artificial Sequence
  Description of Artificial Sequence: Synthetic oligonucleotide
  Sense strand starting at position 2655 of SEQ ID NO: 586635
agguucuaacgagaaagca

SEQ ID NO: 732949 - RNA, 19 nt, Artificial Sequence
  Description of Artificial Sequence: Synthetic oligonucleotide
  Antisense strand to SEQ ID NO: 732948
ugcuuucucguuagaaccu

SEQ ID NO: 732950 - RNA, 19 nt, Artificial Sequence
  Description of Artificial Sequence: Synthetic oligonucleotide
  Sense strand starting at position 2703 of SEQ ID NO: 586635
ggcugauuuccucgauccu

SEQ ID NO: 732951 - RNA, 19 nt, Artificial Sequence
  Description of Artificial Sequence: Synthetic oligonucleotide
  Antisense strand to SEQ ID NO: 732950
aggaucgaggaaaucagcc

SEQ ID NO: 732952 - RNA, 19 nt, Artificial Sequence
  Description of Artificial Sequence: Synthetic oligonucleotide
  Sense strand starting at position 2794 of SEQ ID NO: 586635
cuucccucgccggaugaaa

SEQ ID NO: 732953 - RNA, 19 nt, Artificial Sequence
  Description of Artificial Sequence: Synthetic oligonucleotide
  Antisense strand to SEQ ID NO: 732952
uuucauccggcgagggaag

SEQ ID NO: 732954 - RNA, 19 nt, Artificial Sequence
  Description of Artificial Sequence: Synthetic oligonucleotide
  Sense strand starting at position 3317 of SEQ ID NO: 586635
cauaguaggugcucugaaa

SEQ ID NO: 732955 - RNA, 19 nt, Artificial Sequence
  Description of Artificial Sequence: Synthetic oligonucleotide
  Antisense strand to SEQ ID NO: 732954
uuucagagcaccuacuaug

SEQ ID NO: 732956 - RNA, 19 nt, Artificial Sequence
  Description of Artificial Sequence: Synthetic oligonucleotide
  Sense strand starting at position 3576 of SEQ ID NO: 586635
ggcgucaccuccugccaua

SEQ ID NO: 732957 - RNA, 19 nt, Artificial Sequence
  Description of Artificial Sequence: Synthetic oligonucleotide
  Antisense strand to SEQ ID NO: 732956
uauggcaggaggugacgcc

SEQ ID NO: 732958 - RNA, 19 nt, Artificial Sequence
  Description of Artificial Sequence: Synthetic oligonucleotide
  Sense strand starting at position 125 of SEQ ID NO: 586636
gcgggaccgugaugugauu

SEQ ID NO: 732959 - RNA, 19 nt, Artificial Sequence
  Description of Artificial Sequence: Synthetic oligonucleotide
  Antisense strand to SEQ ID NO: 732958
aaucacaucacggucccgc

SEQ ID NO: 732960 - RNA, 19 nt, Artificial Sequence
  Description of Artificial Sequence: Synthetic oligonucleotide
  Sense strand starting at position 134 of SEQ ID NO: 586636
ugaugugauucuuggcugu

SEQ ID NO: 732961 - RNA, 19 nt, Artificial Sequence
  Description of Artificial Sequence: Synthetic oligonucleotide
  Antisense strand to SEQ ID NO: 732960
acagccaagaaucacauca

SEQ ID NO: 732962 - RNA, 19 nt, Artificial Sequence
  Description of Artificial Sequence: Synthetic oligonucleotide
  Sense strand starting at position 165 of SEQ ID NO: 586636
agagcagugccugugugua

SEQ ID NO: 732963 - RNA, 19 nt, Artificial Sequence
  Description of Artificial Sequence: Synthetic oligonucleotide
  Antisense strand to SEQ ID NO: 732962
uacacacaggcacugcucu

SEQ ID NO: 732964 - RNA, 19 nt, Artificial Sequence
  Description of Artificial Sequence: Synthetic oligonucleotide
  Sense strand starting at position 177 of SEQ ID NO: 586636
guguguaucaggugcuuga

SEQ ID NO: 732965 - RNA, 19 nt, Artificial Sequence
  Description of Artificial Sequence: Synthetic oligonucleotide
  Antisense strand to SEQ ID NO: 732964
ucaagcaccugauacacac

SEQ ID NO: 732966 - RNA, 19 nt, Artificial Sequence
  Description of Artificial Sequence: Synthetic oligonucleotide
  Sense strand starting at position 181 of SEQ ID NO: 586636
guaucaggugcuugaugaa

SEQ ID NO: 732967 - RNA, 19 nt, Artificial Sequence
  Description of Artificial Sequence: Synthetic oligonucleotide
  Antisense strand to SEQ ID NO: 732966
uucaucaagcaccugauac

SEQ ID NO: 732968 - RNA, 19 nt, Artificial Sequence
  Description of Artificial Sequence: Synthetic oligonucleotide
  Sense strand starting at position 184 of SEQ ID NO: 586636
ucaggugcuugaugaacau

SEQ ID NO: 732969 - RNA, 19 nt, Artificial Sequence
  Description of Artificial Sequence: Synthetic oligonucleotide
  Antisense strand to SEQ ID NO: 732968
auguucaucaagcaccuga

SEQ ID NO: 732970 - RNA, 19 nt, Artificial Sequence
  Description of Artificial Sequence: Synthetic oligonucleotide
  Sense strand starting at position 193 of SEQ ID NO: 586636
ugaugaacauugguuggua

SEQ ID NO: 732971 - RNA, 19 nt, Artificial Sequence
  Description of Artificial Sequence: Synthetic oligonucleotide
  Antisense strand to SEQ ID NO: 732970
uaccaaccaauguucauca

SEQ ID NO: 732972 - RNA, 19 nt, Artificial Sequence
  Description of Artificial Sequence: Synthetic oligonucleotide
  Sense strand starting at position 195 of SEQ ID NO: 586636
augaacauugguugguaga

SEQ ID NO: 732973 - RNA, 19 nt, Artificial Sequence
  Description of Artificial Sequence: Synthetic oligonucleotide
  Antisense strand to SEQ ID NO: 732972
ucuaccaaccaauguucau

SEQ ID NO: 732974 - RNA, 19 nt, Artificial Sequence
  Description of Artificial Sequence: Synthetic oligonucleotide
  Sense strand starting at position 388 of SEQ ID NO: 586636
ggcugugcugaaggugaau

SEQ ID NO: 732975 - RNA, 19 nt, Artificial Sequence
  Description of Artificial Sequence: Synthetic oligonucleotide
  Antisense strand to SEQ ID NO: 732974
auucaccuucagcacagcc

SEQ ID NO: 732976 - RNA, 19 nt, Artificial Sequence
  Description of Artificial Sequence: Synthetic oligonucleotide
  Sense strand starting at position 401 of SEQ ID NO: 586636
gugaauucccagugccuag

SEQ ID NO: 732977 - RNA, 19 nt, Artificial Sequence
  Description of Artificial Sequence: Synthetic oligonucleotide
  Antisense strand to SEQ ID NO: 732976
cuaggcacugggaauucac

SEQ ID NO: 732978 - RNA, 19 nt, Artificial Sequence
  Description of Artificial Sequence: Synthetic oligonucleotide
  Sense strand starting at position 488 of SEQ ID NO: 586636
acucuaacuguuggucuua

SEQ ID NO: 732979 - RNA, 19 nt, Artificial Sequence
  Description of Artificial Sequence: Synthetic oligonucleotide
  Antisense strand to SEQ ID NO: 732978
uaagaccaacaguuagagu

SEQ ID NO: 732980 - RNA, 19 nt, Artificial Sequence
  Description of Artificial Sequence: Synthetic oligonucleotide
  Sense strand starting at position 490 of SEQ ID NO: 586636
ucuaacuguuggucuuaca

SEQ ID NO: 732981 - RNA, 19 nt, Artificial Sequence
  Description of Artificial Sequence: Synthetic oligonucleotide
  Antisense strand to SEQ ID NO: 732980
uguaagaccaacaguuaga

SEQ ID NO: 732982 - RNA, 19 nt, Artificial Sequence
  Description of Artificial Sequence: Synthetic oligonucleotide
  Sense strand starting at position 493 of SEQ ID NO: 586636
aacuguuggucuuacagac

SEQ ID NO: 732983 - RNA, 19 nt, Artificial Sequence
  Description of Artificial Sequence: Synthetic oligonucleotide
  Antisense strand to SEQ ID NO: 732982
gucuguaagaccaacaguu

SEQ ID NO: 732984 - RNA, 19 nt, Artificial Sequence
  Description of Artificial Sequence: Synthetic oligonucleotide
  Sense strand starting at position 808 of SEQ ID NO: 586636
gccuuugucuugccaagaa

SEQ ID NO: 732985 - RNA, 19 nt, Artificial Sequence
  Description of Artificial Sequence: Synthetic oligonucleotide
  Antisense strand to SEQ ID NO: 732984
uucuuggcaagacaaaggc

SEQ ID NO: 732986 - RNA, 19 nt, Artificial Sequence
  Description of Artificial Sequence: Synthetic oligonucleotide
  Sense strand starting at position 934 of SEQ ID NO: 586636
augucagugggaugggaua

SEQ ID NO: 732987 - RNA, 19 nt, Artificial Sequence
  Description of Artificial Sequence: Synthetic oligonucleotide
  Antisense strand to SEQ ID NO: 732986
uaucccaucccacugacau

SEQ ID NO: 732988 - RNA, 19 nt, Artificial Sequence
  Description of Artificial Sequence: Synthetic oligonucleotide
  Sense strand starting at position 1194 of SEQ ID NO: 586636
gaucacaccugcugagaga

SEQ ID NO: 732989 - RNA, 19 nt, Artificial Sequence
  Description of Artificial Sequence: Synthetic oligonucleotide
  Antisense strand to SEQ ID NO: 732988
ucucucagcaggugugauc

SEQ ID NO: 732990 - RNA, 19 nt, Artificial Sequence
  Description of Artificial Sequence: Synthetic oligonucleotide
  Sense strand starting at position 1383 of SEQ ID NO: 586636
gguaguaggugaggauuca

SEQ ID NO: 732991 - RNA, 19 nt, Artificial Sequence
  Description of Artificial Sequence: Synthetic oligonucleotide
  Antisense strand to SEQ ID NO: 732990
ugaauccucaccuacuacc

SEQ ID NO: 732992 - RNA, 19 nt, Artificial Sequence
  Description of Artificial Sequence: Synthetic oligonucleotide
  Sense strand starting at position 1384 of SEQ ID NO: 586636
guaguaggugaggauucaa

SEQ ID NO: 732993 - RNA, 19 nt, Artificial Sequence
  Description of Artificial Sequence: Synthetic oligonucleotide
  Antisense strand to SEQ ID NO: 732992
uugaauccucaccuacuac

SEQ ID NO: 732994 - RNA, 19 nt, Artificial Sequence
  Description of Artificial Sequence: Synthetic oligonucleotide
  Sense strand starting at position 1494 of SEQ ID NO: 586636
ucuggaaagucuuccagga

SEQ ID NO: 732995 - RNA, 19 nt, Artificial Sequence
  Description of Artificial Sequence: Synthetic oligonucleotide
  Antisense strand to SEQ ID NO: 732994
uccuggaagacuuuccaga

SEQ ID NO: 732996 - RNA, 19 nt, Artificial Sequence
  Description of Artificial Sequence: Synthetic oligonucleotide
  Sense strand starting at position 1496 of SEQ ID NO: 586636
uggaaagucuuccaggaaa

SEQ ID NO: 732997 - RNA, 19 nt, Artificial Sequence
  Description of Artificial Sequence: Synthetic oligonucleotide
  Antisense strand to SEQ ID NO: 732996
uuuccuggaagacuuucca

SEQ ID NO: 732998 - RNA, 19 nt, Artificial Sequence
  Description of Artificial Sequence: Synthetic oligonucleotide
  Sense strand starting at position 1643 of SEQ ID NO: 586636
gagguuguguggucaggca

SEQ ID NO: 732999 - RNA, 19 nt, Artificial Sequence
  Description of Artificial Sequence: Synthetic oligonucleotide
  Antisense strand to SEQ ID NO: 732998
ugccugaccacacaaccuc

SEQ ID NO: 733000 - RNA, 19 nt, Artificial Sequence
  Description of Artificial Sequence: Synthetic oligonucleotide
  Sense strand starting at position 1645 of SEQ ID NO: 586636
gguuguguggucaggcaca

SEQ ID NO: 733001 - RNA, 19 nt, Artificial Sequence
  Description of Artificial Sequence: Synthetic oligonucleotide
  Antisense strand to SEQ ID NO: 733000
ugugccugaccacacaacc

SEQ ID NO: 733002 - RNA, 19 nt, Artificial Sequence
  Description of Artificial Sequence: Synthetic oligonucleotide
  Sense strand starting at position 1682 of SEQ ID NO: 586636
ggaggugaggcuggagaua

SEQ ID NO: 733003 - RNA, 19 nt, Artificial Sequence
  Description of Artificial Sequence: Synthetic oligonucleotide
  Antisense strand to SEQ ID NO: 733002
uaucuccagccucaccucc

SEQ ID NO: 733004 - RNA, 19 nt, Artificial Sequence
  Description of Artificial Sequence: Synthetic oligonucleotide
  Sense strand starting at position 1684 of SEQ ID NO: 586636
aggugaggcuggagauaaa

SEQ ID NO: 733005 - RNA, 19 nt, Artificial Sequence
  Description of Artificial Sequence: Synthetic oligonucleotide
  Antisense strand to SEQ ID NO: 733004
uuuaucuccagccucaccu

SEQ ID NO: 733006 - RNA, 19 nt, Artificial Sequence
  Description of Artificial Sequence: Synthetic oligonucleotide
  Sense strand starting at position 1711 of SEQ ID NO: 586636
ugaggaucuagguguagaa

SEQ ID NO: 733007 - RNA, 19 nt, Artificial Sequence
  Description of Artificial Sequence: Synthetic oligonucleotide
  Antisense strand to SEQ ID NO: 733006
uucuacaccuagauccuca

SEQ ID NO: 733008 - RNA, 19 nt, Artificial Sequence
  Description of Artificial Sequence: Synthetic oligonucleotide
  Sense strand starting at position 1784 of SEQ ID NO: 586636
ggcucugaguggcauucua

SEQ ID NO: 733009 - RNA, 19 nt, Artificial Sequence
  Description of Artificial Sequence: Synthetic oligonucleotide
  Antisense strand to SEQ ID NO: 733008
uagaaugccacucagagcc

SEQ ID NO: 733010 - RNA, 19 nt, Artificial Sequence
  Description of Artificial Sequence: Synthetic oligonucleotide
  Sense strand starting at position 1791 of SEQ ID NO: 586636
aguggcauucuaggaggaa

SEQ ID NO: 733011 - RNA, 19 nt, Artificial Sequence
  Description of Artificial Sequence: Synthetic oligonucleotide
  Antisense strand to SEQ ID NO: 733010
uuccuccuagaaugccacu

SEQ ID NO: 733012 - RNA, 19 nt, Artificial Sequence
  Description of Artificial Sequence: Synthetic oligonucleotide
  Sense strand starting at position 1792 of SEQ ID NO: 586636
guggcauucuaggaggaaa

SEQ ID NO: 733013 - RNA, 19 nt, Artificial Sequence
  Description of Artificial Sequence: Synthetic oligonucleotide
  Antisense strand to SEQ ID NO: 733012
uuuccuccuagaaugccac

SEQ ID NO: 733014 - RNA, 19 nt, Artificial Sequence
  Description of Artificial Sequence: Synthetic oligonucleotide
  Sense strand starting at position 1991 of SEQ ID NO: 586636
cagcuuagucugggaagga

SEQ ID NO: 733015 - RNA, 19 nt, Artificial Sequence
  Description of Artificial Sequence: Synthetic oligonucleotide
  Antisense strand to SEQ ID NO: 733014
uccuucccagacuaagcug

SEQ ID NO: 733016 - RNA, 19 nt, Artificial Sequence
  Description of Artificial Sequence: Synthetic oligonucleotide
  Sense strand starting at position 1992 of SEQ ID NO: 586636
agcuuagucugggaaggau

SEQ ID NO: 733017 - RNA, 19 nt, Artificial Sequence
  Description of Artificial Sequence: Synthetic oligonucleotide
  Antisense strand to SEQ ID NO: 733016
auccuucccagacuaagcu

SEQ ID NO: 733018 - RNA, 19 nt, Artificial Sequence
  Description of Artificial Sequence: Synthetic oligonucleotide
  Sense strand starting at position 2131 of SEQ ID NO: 586636
gcuggcaucagaggaaagu

SEQ ID NO: 733019 - RNA, 19 nt, Artificial Sequence
  Description of Artificial Sequence: Synthetic oligonucleotide
  Antisense strand to SEQ ID NO: 733018
acuuuccucugaugccagc

SEQ ID NO: 733020 - RNA, 19 nt, Artificial Sequence
  Description of Artificial Sequence: Synthetic oligonucleotide
  Sense strand starting at position 2263 of SEQ ID NO: 586636
gacagugaauguuuggaga

SEQ ID NO: 733021 - RNA, 19 nt, Artificial Sequence
  Description of Artificial Sequence: Synthetic oligonucleotide
  Antisense strand to SEQ ID NO: 733020
ucuccaaacauucacuguc

SEQ ID NO: 733022 - RNA, 19 nt, Artificial Sequence
  Description of Artificial Sequence: Synthetic oligonucleotide
  Sense strand starting at position 2265 of SEQ ID NO: 586636
cagugaauguuuggagaca

SEQ ID NO: 733023 - RNA, 19 nt, Artificial Sequence
  Description of Artificial Sequence: Synthetic oligonucleotide
  Antisense strand to SEQ ID NO: 733022
ugucuccaaacauucacug

SEQ ID NO: 733024 - RNA, 19 nt, Artificial Sequence
  Description of Artificial Sequence: Synthetic oligonucleotide
  Sense strand starting at position 2867 of SEQ ID NO: 586636
cuggaaagcuguuugcuca

SEQ ID NO: 733025 - RNA, 19 nt, Artificial Sequence
  Description of Artificial Sequence: Synthetic oligonucleotide
  Antisense strand to SEQ ID NO: 733024
ugagcaaacagcuuuccag

SEQ ID NO: 733026 - RNA, 19 nt, Artificial Sequence
  Description of Artificial Sequence: Synthetic oligonucleotide
  Sense strand starting at position 3171 of SEQ ID NO: 586636
gugugacucuuggccucau

SEQ ID NO: 733027 - RNA, 19 nt, Artificial Sequence
  Description of Artificial Sequence: Synthetic oligonucleotide
  Antisense strand to SEQ ID NO: 733026
augaggccaagagucacac

SEQ ID NO: 733028 - RNA, 19 nt, Artificial Sequence
  Description of Artificial Sequence: Synthetic oligonucleotide
  Sense strand starting at position 3172 of SEQ ID NO: 586636
ugugacucuuggccucauu

SEQ ID NO: 733029 - RNA, 19 nt, Artificial Sequence
  Description of Artificial Sequence: Synthetic oligonucleotide
  Antisense strand to SEQ ID NO: 733028
aaugaggccaagagucaca

SEQ ID NO: 733030 - RNA, 19 nt, Artificial Sequence
  Description of Artificial Sequence: Synthetic oligonucleotide
  Sense strand starting at position 3289 of SEQ ID NO: 586636
cucuaacacucuugggagu

SEQ ID NO: 733031 - RNA, 19 nt, Artificial Sequence
  Description of Artificial Sequence: Synthetic oligonucleotide
  Antisense strand to SEQ ID NO: 733030
acucccaagaguguuagag

SEQ ID NO: 733032 - RNA, 19 nt, Artificial Sequence
  Description of Artificial Sequence: Synthetic oligonucleotide
  Sense strand starting at position 359 of SEQ ID NO: 586637
cggugucccugaagaggaa

SEQ ID NO: 733033 - RNA, 19 nt, Artificial Sequence
  Description of Artificial Sequence: Synthetic oligonucleotide
  Antisense strand to SEQ ID NO: 733032
uuccucuucagggacaccg

SEQ ID NO: 733034 - RNA, 19 nt, Artificial Sequence
  Description of Artificial Sequence: Synthetic oligonucleotide
  Sense strand starting at position 614 of SEQ ID NO: 586637
gggagccguuauuuguaca

SEQ ID NO: 733035 - RNA, 19 nt, Artificial Sequence
  Description of Artificial Sequence: Synthetic oligonucleotide
  Antisense strand to SEQ ID NO: 733034
uguacaaauaacggcuccc

SEQ ID NO: 733036 - RNA, 19 nt, Artificial Sequence
  Description of Artificial Sequence: Synthetic oligonucleotide
  Sense strand starting at position 617 of SEQ ID NO: 586637
agccguuauuuguacagag

SEQ ID NO: 733037 - RNA, 19 nt, Artificial Sequence
  Description of Artificial Sequence: Synthetic oligonucleotide
  Antisense strand to SEQ ID NO: 733036
cucuguacaaauaacggcu

SEQ ID NO: 733038 - RNA, 19 nt, Artificial Sequence
  Description of Artificial Sequence: Synthetic oligonucleotide
  Sense strand starting at position 671 of SEQ ID NO: 586637
cgagguucuaacgagaaag

SEQ ID NO: 733039 - RNA, 19 nt, Artificial Sequence
  Description of Artificial Sequence: Synthetic oligonucleotide
  Antisense strand to SEQ ID NO: 733038
cuuucucguuagaaccucg

SEQ ID NO: 733040 - RNA, 19 nt, Artificial Sequence
  Description of Artificial Sequence: Synthetic oligonucleotide
  Sense strand starting at position 673 of SEQ ID NO: 586637
agguucuaacgagaaagca

SEQ ID NO: 733041 - RNA, 19 nt, Artificial Sequence
  Description of Artificial Sequence: Synthetic oligonucleotide
  Antisense strand to SEQ ID NO: 733040
ugcuuucucguuagaaccu

SEQ ID NO: 733042 - RNA, 19 nt, Artificial Sequence
  Description of Artificial Sequence: Synthetic oligonucleotide
  Sense strand starting at position 721 of SEQ ID NO: 586637
ggcugauuuccucgauccu

SEQ ID NO: 733043 - RNA, 19 nt, Artificial Sequence
  Description of Artificial Sequence: Synthetic oligonucleotide
  Antisense strand to SEQ ID NO: 733042
aggaucgaggaaaucagcc

SEQ ID NO: 733044 - RNA, 19 nt, Artificial Sequence
  Description of Artificial Sequence: Synthetic oligonucleotide
  Sense strand starting at position 812 of SEQ ID NO: 586637
cuucccucgccggaugaaa

SEQ ID NO: 733045 - RNA, 19 nt, Artificial Sequence
  Description of Artificial Sequence: Synthetic oligonucleotide
  Antisense strand to SEQ ID NO: 733044
uuucauccggcgagggaag

SEQ ID NO: 733046 - RNA, 19 nt, Artificial Sequence
  Description of Artificial Sequence: Synthetic oligonucleotide
  Sense strand starting at position 1335 of SEQ ID NO: 586637
cauaguaggugcucugaaa

SEQ ID NO: 733047 - RNA, 19 nt, Artificial Sequence
  Description of Artificial Sequence: Synthetic oligonucleotide
  Antisense strand to SEQ ID NO: 733046
uuucagagcaccuacuaug

SEQ ID NO: 733048 - RNA, 19 nt, Artificial Sequence
  Description of Artificial Sequence: Synthetic oligonucleotide
  Sense strand starting at position 1594 of SEQ ID NO: 586637
ggcgucaccuccugccaua

SEQ ID NO: 733049 - RNA, 19 nt, Artificial Sequence
  Description of Artificial Sequence: Synthetic oligonucleotide
  Antisense strand to SEQ ID NO: 733048
uauggcaggaggugacgcc

SEQ ID NO: 733050 - RNA, 19 nt, Artificial Sequence
  Description of Artificial Sequence: Synthetic oligonucleotide
  Sense strand starting at position 2007 of SEQ ID NO: 586637
ucuccacuggcugaguuaa

SEQ ID NO: 733051 - RNA, 19 nt, Artificial Sequence
  Description of Artificial Sequence: Synthetic oligonucleotide
  Antisense strand to SEQ ID NO: 733050
uuaacucagccaguggaga

SEQ ID NO: 733052 - RNA, 19 nt, Artificial Sequence
  Description of Artificial Sequence: Synthetic oligonucleotide
  Sense strand starting at position 2019 of SEQ ID NO: 586637
gaguuaaagucccgccuga

SEQ ID NO: 733053 - RNA, 19 nt, Artificial Sequence
  Description of Artificial Sequence: Synthetic oligonucleotide
  Antisense strand to SEQ ID NO: 733052
ucaggcgggacuuuaacuc

SEQ ID NO: 733054 - RNA, 19 nt, Artificial Sequence
  Description of Artificial Sequence: Synthetic oligonucleotide
  Sense strand starting at position 2023 of SEQ ID NO: 586637
uaaagucccgccugauauu

SEQ ID NO: 733055 - RNA, 19 nt, Artificial Sequence
  Description of Artificial Sequence: Synthetic oligonucleotide
  Antisense strand to SEQ ID NO: 733054
aauaucaggcgggacuuua

SEQ ID NO: 733056 - RNA, 19 nt, Artificial Sequence
  Description of Artificial Sequence: Synthetic oligonucleotide
  Sense strand starting at position 2041 of SEQ ID NO: 586637
ucacgcaccucgugacuua

SEQ ID NO: 733057 - RNA, 19 nt, Artificial Sequence
  Description of Artificial Sequence: Synthetic oligonucleotide
  Antisense strand to SEQ ID NO: 733056
uaagucacgaggugcguga

SEQ ID NO: 733058 - RNA, 19 nt, Artificial Sequence
  Description of Artificial Sequence: Synthetic oligonucleotide
  Sense strand starting at position 2211 of SEQ ID NO: 586637
cugacaagaugcugugagu

SEQ ID NO: 733059 - RNA, 19 nt, Artificial Sequence
  Description of Artificial Sequence: Synthetic oligonucleotide
  Antisense strand to SEQ ID NO: 733058
acucacagcaucuugucag

SEQ ID NO: 733060 - RNA, 19 nt, Artificial Sequence
  Description of Artificial Sequence: Synthetic oligonucleotide
  Sense strand starting at position 2349 of SEQ ID NO: 586637
ggagcaaugugcccauugu

SEQ ID NO: 733061 - RNA, 19 nt, Artificial Sequence
  Description of Artificial Sequence: Synthetic oligonucleotide
  Antisense strand to SEQ ID NO: 733060
acaaugggcacauugcucc

SEQ ID NO: 733062 - RNA, 19 nt, Artificial Sequence
  Description of Artificial Sequence: Synthetic oligonucleotide
  Sense strand starting at position 2350 of SEQ ID NO: 586637
gagcaaugugcccauugua

SEQ ID NO: 733063 - RNA, 19 nt, Artificial Sequence
  Description of Artificial Sequence: Synthetic oligonucleotide
  Antisense strand to SEQ ID NO: 733062
uacaaugggcacauugcuc

SEQ ID NO: 733064 - RNA, 19 nt, Artificial Sequence
  Description of Artificial Sequence: Synthetic oligonucleotide
  Sense strand starting at position 2359 of SEQ ID NO: 586637
gcccauuguagagaaagca

SEQ ID NO: 733065 - RNA, 19 nt, Artificial Sequence
  Description of Artificial Sequence: Synthetic oligonucleotide
  Antisense strand to SEQ ID NO: 733064
ugcuuucucuacaaugggc

SEQ ID NO: 733066 - RNA, 19 nt, Artificial Sequence
  Description of Artificial Sequence: Synthetic oligonucleotide
  Sense strand starting at position 2381 of SEQ ID NO: 586637
gggauauuguaccaaggga

SEQ ID NO: 733067 - RNA, 19 nt, Artificial Sequence
  Description of Artificial Sequence: Synthetic oligonucleotide
  Antisense strand to SEQ ID NO: 733066
ucccuugguacaauauccc

SEQ ID NO: 733068 - RNA, 19 nt, Artificial Sequence
  Description of Artificial Sequence: Synthetic oligonucleotide
  Sense strand starting at position 2538 of SEQ ID NO: 586637
gaggaagcuuuacagcauu

SEQ ID NO: 733069 - RNA, 19 nt, Artificial Sequence
  Description of Artificial Sequence: Synthetic oligonucleotide
  Antisense strand to SEQ ID NO: 733068
aaugcuguaaagcuuccuc

SEQ ID NO: 733070 - RNA, 19 nt, Artificial Sequence
  Description of Artificial Sequence: Synthetic oligonucleotide
  Sense strand starting at position 2571 of SEQ ID NO: 586637
aggcuuuggcaagagugaa

SEQ ID NO: 733071 - RNA, 19 nt, Artificial Sequence
  Description of Artificial Sequence: Synthetic oligonucleotide
  Antisense strand to SEQ ID NO: 733070
uucacucuugccaaagccu

SEQ ID NO: 733072 - RNA, 19 nt, Artificial Sequence
  Description of Artificial Sequence: Synthetic oligonucleotide
  Sense strand starting at position 2594 of SEQ ID NO: 586637
uuucuuugcugucaggaga

SEQ ID NO: 733073 - RNA, 19 nt, Artificial Sequence
  Description of Artificial Sequence: Synthetic oligonucleotide
  Antisense strand to SEQ ID NO: 733072
ucuccugacagcaaagaaa

SEQ ID NO: 733074 - RNA, 19 nt, Artificial Sequence
  Description of Artificial Sequence: Synthetic oligonucleotide
  Sense strand starting at position 2612 of SEQ ID NO: 586637
aauggaauuucguggugac

SEQ ID NO: 733075 - RNA, 19 nt, Artificial Sequence
  Description of Artificial Sequence: Synthetic oligonucleotide
  Antisense strand to SEQ ID NO: 733074
gucaccacgaaauuccauu

SEQ ID NO: 733076 - RNA, 19 nt, Artificial Sequence
  Description of Artificial Sequence: Synthetic oligonucleotide
  Sense strand starting at position 2615 of SEQ ID NO: 586637
ggaauuucguggugacuuc

SEQ ID NO: 733077 - RNA, 19 nt, Artificial Sequence
  Description of Artificial Sequence: Synthetic oligonucleotide
  Antisense strand to SEQ ID NO: 733076
gaagucaccacgaaauucc

SEQ ID NO: 733078 - RNA, 19 nt, Artificial Sequence
  Description of Artificial Sequence: Synthetic oligonucleotide
  Sense strand starting at position 2622 of SEQ ID NO: 586637
cguggugacuucuugaggu

SEQ ID NO: 733079 - RNA, 19 nt, Artificial Sequence
  Description of Artificial Sequence: Synthetic oligonucleotide
  Antisense strand to SEQ ID NO: 733078
accucaagaagucaccacg

SEQ ID NO: 733080 - RNA, 19 nt, Artificial Sequence
  Description of Artificial Sequence: Synthetic oligonucleotide
  Sense strand starting at position 2626 of SEQ ID NO: 586637
gugacuucuugaggucuga

SEQ ID NO: 733081 - RNA, 19 nt, Artificial Sequence
  Description of Artificial Sequence: Synthetic oligonucleotide
  Antisense strand to SEQ ID NO: 733080
ucagaccucaagaagucac

SEQ ID NO: 733082 - RNA, 19 nt, Artificial Sequence
  Description of Artificial Sequence: Synthetic oligonucleotide
  Sense strand starting at position 2955 of SEQ ID NO: 586637
gggccacuucucggcuuua

SEQ ID NO: 733083 - RNA, 19 nt, Artificial Sequence
  Description of Artificial Sequence: Synthetic oligonucleotide
  Antisense strand to SEQ ID NO: 733082
uaaagccgagaaguggccc

SEQ ID NO: 733084 - RNA, 19 nt, Artificial Sequence
  Description of Artificial Sequence: Synthetic oligonucleotide
  Sense strand starting at position 2956 of SEQ ID NO: 586637
ggccacuucucggcuuuaa

SEQ ID NO: 733085 - RNA, 19 nt, Artificial Sequence
  Description of Artificial Sequence: Synthetic oligonucleotide
  Antisense strand to SEQ ID NO: 733084
uuaaagccgagaaguggcc

SEQ ID NO: 733086 - RNA, 19 nt, Artificial Sequence
  Description of Artificial Sequence: Synthetic oligonucleotide
  Sense strand starting at position 2977 of SEQ ID NO: 586637
ccuugaaccggugguguua

SEQ ID NO: 733087 - RNA, 19 nt, Artificial Sequence
  Description of Artificial Sequence: Synthetic oligonucleotide
  Antisense strand to SEQ ID NO: 733086
uaacaccaccgguucaagg

SEQ ID NO: 733088 - RNA, 19 nt, Artificial Sequence
  Description of Artificial Sequence: Synthetic oligonucleotide
  Sense strand starting at position 2989 of SEQ ID NO: 586637
gguguuacucccugagccu

SEQ ID NO: 733089 - RNA, 19 nt, Artificial Sequence
  Description of Artificial Sequence: Synthetic oligonucleotide
  Antisense strand to SEQ ID NO: 733088
aggcucagggaguaacacc

SEQ ID NO: 733090 - RNA, 19 nt, Artificial Sequence
  Description of Artificial Sequence: Synthetic oligonucleotide
  Sense strand starting at position 3529 of SEQ ID NO: 586637
cauaaugggugacccauua

SEQ ID NO: 733091 - RNA, 19 nt, Artificial Sequence
  Description of Artificial Sequence: Synthetic oligonucleotide
  Antisense strand to SEQ ID NO: 733090
uaaugggucacccauuaug

SEQ ID NO: 733092 - RNA, 19 nt, Artificial Sequence
  Description of Artificial Sequence: Synthetic oligonucleotide
  Sense strand starting at position 3541 of SEQ ID NO: 586637
cccauuaacucggcaggaa

SEQ ID NO: 733093 - RNA, 19 nt, Artificial Sequence
  Description of Artificial Sequence: Synthetic oligonucleotide
  Antisense strand to SEQ ID NO: 733092
uuccugccgaguuaauggg

SEQ ID NO: 733094 - RNA, 19 nt, Artificial Sequence
  Description of Artificial Sequence: Synthetic oligonucleotide
  Sense strand starting at position 3578 of SEQ ID NO: 586637
ccacucaucggcugaugga

SEQ ID NO: 733095 - RNA, 19 nt, Artificial Sequence
  Description of Artificial Sequence: Synthetic oligonucleotide
  Antisense strand to SEQ ID NO: 733094
uccaucagccgaugagugg

SEQ ID NO: 733096 - RNA, 19 nt, Artificial Sequence
  Description of Artificial Sequence: Synthetic oligonucleotide
  Sense strand starting at position 3606 of SEQ ID NO: 586637
cacucagugucuugggaac

SEQ ID NO: 733097 - RNA, 19 nt, Artificial Sequence
  Description of Artificial Sequence: Synthetic oligonucleotide
  Antisense strand to SEQ ID NO: 733096
guucccaagacacugagug

SEQ ID NO: 733098 - RNA, 19 nt, Artificial Sequence
  Description of Artificial Sequence: Synthetic oligonucleotide
  Sense strand starting at position 3608 of SEQ ID NO: 586637
cucagugucuugggaacca

SEQ ID NO: 733099 - RNA, 19 nt, Artificial Sequence
  Description of Artificial Sequence: Synthetic oligonucleotide
  Antisense strand to SEQ ID NO: 733098
ugguucccaagacacugag

SEQ ID NO: 733100 - RNA, 19 nt, Artificial Sequence
  Description of Artificial Sequence: Synthetic oligonucleotide
  Sense strand starting at position 3641 of SEQ ID NO: 586637
aguagcagugcccagagau

SEQ ID NO: 733101 - RNA, 19 nt, Artificial Sequence
  Description of Artificial Sequence: Synthetic oligonucleotide
  Antisense strand to SEQ ID NO: 733100
aucucugggcacugcuacu

SEQ ID NO: 733102 - RNA, 19 nt, Artificial Sequence
  Description of Artificial Sequence: Synthetic oligonucleotide
  Sense strand starting at position 3777 of SEQ ID NO: 586637
cagaacuggcaguguuuga

SEQ ID NO: 733103 - RNA, 19 nt, Artificial Sequence
  Description of Artificial Sequence: Synthetic oligonucleotide
  Antisense strand to SEQ ID NO: 733102
ucaaacacugccaguucug

SEQ ID NO: 733104 - RNA, 19 nt, Artificial Sequence
  Description of Artificial Sequence: Synthetic oligonucleotide
  Sense strand starting at position 3976 of SEQ ID NO: 586637
gcugauucccauuacugca

SEQ ID NO: 733105 - RNA, 19 nt, Artificial Sequence
  Description of Artificial Sequence: Synthetic oligonucleotide
  Antisense strand to SEQ ID NO: 733104
ugcaguaaugggaaucagc

SEQ ID NO: 733106 - RNA, 19 nt, Artificial Sequence
  Description of Artificial Sequence: Synthetic oligonucleotide
  Sense strand starting at position 99 of SEQ ID NO: 586638
uguagucucccacaagcuu

SEQ ID NO: 733107 - RNA, 19 nt, Artificial Sequence
  Description of Artificial Sequence: Synthetic oligonucleotide
  Antisense strand to SEQ ID NO: 733106
aagcuugugggagacuaca

SEQ ID NO: 733108 - RNA, 19 nt, Artificial Sequence
  Description of Artificial Sequence: Synthetic oligonucleotide
  Sense strand starting at position 201 of SEQ ID NO: 586638
acacucugucagggauuga

SEQ ID NO: 733109 - RNA, 19 nt, Artificial Sequence
  Description of Artificial Sequence: Synthetic oligonucleotide
  Antisense strand to SEQ ID NO: 733108
ucaaucccugacagagugu

SEQ ID NO: 733110 - RNA, 19 nt, Artificial Sequence
  Description of Artificial Sequence: Synthetic oligonucleotide
  Sense strand starting at position 316 of SEQ ID NO: 586638
acuuuagcugccuaagaua

SEQ ID NO: 733111 - RNA, 19 nt, Artificial Sequence
  Description of Artificial Sequence: Synthetic oligonucleotide
  Antisense strand to SEQ ID NO: 733110
uaucuuaggcagcuaaagu

SEQ ID NO: 733112 - RNA, 19 nt, Artificial Sequence
  Description of Artificial Sequence: Synthetic oligonucleotide
  Sense strand starting at position 381 of SEQ ID NO: 586638
ucaacaauguuggaacaga

SEQ ID NO: 733113 - RNA, 19 nt, Artificial Sequence
  Description of Artificial Sequence: Synthetic oligonucleotide
  Antisense strand to SEQ ID NO: 733112
ucuguuccaacauuguuga

SEQ ID NO: 733114 - RNA, 19 nt, Artificial Sequence
  Description of Artificial Sequence: Synthetic oligonucleotide
  Sense strand starting at position 541 of SEQ ID NO: 586638
ccauccuuucuggguuaaa

SEQ ID NO: 733115 - RNA, 19 nt, Artificial Sequence
  Description of Artificial Sequence: Synthetic oligonucleotide
  Antisense strand to SEQ ID NO: 733114
uuuaacccagaaaggaugg

SEQ ID NO: 733116 - RNA, 19 nt, Artificial Sequence
  Description of Artificial Sequence: Synthetic oligonucleotide
  Sense strand starting at position 634 of SEQ ID NO: 586638
agugaucggagaugcuaau

SEQ ID NO: 733117 - RNA, 19 nt, Artificial Sequence
  Description of Artificial Sequence: Synthetic oligonucleotide
  Antisense strand to SEQ ID NO: 733116
auuagcaucuccgaucacu

SEQ ID NO: 733118 - RNA, 19 nt, Artificial Sequence
  Description of Artificial Sequence: Synthetic oligonucleotide
  Sense strand starting at position 801 of SEQ ID NO: 586638
ggaauugcgaaagaauguu

SEQ ID NO: 733119 - RNA, 19 nt, Artificial Sequence
  Description of Artificial Sequence: Synthetic oligonucleotide
  Antisense strand to SEQ ID NO: 733118
aacauucuuucgcaauucc

SEQ ID NO: 733120 - RNA, 19 nt, Artificial Sequence
  Description of Artificial Sequence: Synthetic oligonucleotide
  Sense strand starting at position 807 of SEQ ID NO: 586638
gcgaaagaauguucuaagc

SEQ ID NO: 733121 - RNA, 19 nt, Artificial Sequence
  Description of Artificial Sequence: Synthetic oligonucleotide
  Antisense strand to SEQ ID NO: 733120
gcuuagaacauucuuucgc

SEQ ID NO: 733122 - RNA, 19 nt, Artificial Sequence
  Description of Artificial Sequence: Synthetic oligonucleotide
  Sense strand starting at position 2369 of SEQ ID NO: 586638
gggcgaggguagucuaaga

SEQ ID NO: 733123 - RNA, 19 nt, Artificial Sequence
  Description of Artificial Sequence: Synthetic oligonucleotide
  Antisense strand to SEQ ID NO: 733122
ucuuagacuacccucgccc

SEQ ID NO: 733124 - RNA, 19 nt, Artificial Sequence
  Description of Artificial Sequence: Synthetic oligonucleotide
  Sense strand starting at position 2590 of SEQ ID NO: 586638
ccaagagucuuucuuguua

SEQ ID NO: 733125 - RNA, 19 nt, Artificial Sequence
  Description of Artificial Sequence: Synthetic oligonucleotide
  Antisense strand to SEQ ID NO: 733124
uaacaagaaagacucuugg

SEQ ID NO: 733126 - RNA, 19 nt, Artificial Sequence
  Description of Artificial Sequence: Synthetic oligonucleotide
  Sense strand starting at position 2597 of SEQ ID NO: 586638
ucuuucuuguuaccacaga

SEQ ID NO: 733127 - RNA, 19 nt, Artificial Sequence
  Description of Artificial Sequence: Synthetic oligonucleotide
  Antisense strand to SEQ ID NO: 733126
ucugugguaacaagaaaga

SEQ ID NO: 733128 - RNA, 19 nt, Artificial Sequence
  Description of Artificial Sequence: Synthetic oligonucleotide
  Sense strand starting at position 2703 of SEQ ID NO: 586638
gacaaaucucaaggguggu

SEQ ID NO: 733129 - RNA, 19 nt, Artificial Sequence
  Description of Artificial Sequence: Synthetic oligonucleotide
  Antisense strand to SEQ ID NO: 733128
accacccuugagauuuguc

SEQ ID NO: 733130 - RNA, 19 nt, Artificial Sequence
  Description of Artificial Sequence: Synthetic oligonucleotide
  Sense strand starting at position 2802 of SEQ ID NO: 586638
cccauacuuuccuuuaggu

SEQ ID NO: 733131 - RNA, 19 nt, Artificial Sequence
  Description of Artificial Sequence: Synthetic oligonucleotide
  Antisense strand to SEQ ID NO: 733130
accuaaaggaaaguauggg

SEQ ID NO: 733132 - RNA, 19 nt, Artificial Sequence
  Description of Artificial Sequence: Synthetic oligonucleotide
  Sense strand starting at position 2910 of SEQ ID NO: 586638
gguaguucggccaguguua

SEQ ID NO: 733133 - RNA, 19 nt, Artificial Sequence
  Description of Artificial Sequence: Synthetic oligonucleotide
  Antisense strand to SEQ ID NO: 733132
uaacacuggccgaacuacc

SEQ ID NO: 733134 - RNA, 19 nt, Artificial Sequence
  Description of Artificial Sequence: Synthetic oligonucleotide
  Sense strand starting at position 2923 of SEQ ID NO: 586638
guguuacacuuacuauaca

SEQ ID NO: 733135 - RNA, 19 nt, Artificial Sequence
  Description of Artificial Sequence: Synthetic oligonucleotide
  Antisense strand to SEQ ID NO: 733134
uguauaguaaguguaacac

SEQ ID NO: 733136 - RNA, 19 nt, Artificial Sequence
  Description of Artificial Sequence: Synthetic oligonucleotide
  Sense strand starting at position 2997 of SEQ ID NO: 586638
agacauagcagaugguuaa

SEQ ID NO: 733137 - RNA, 19 nt, Artificial Sequence
  Description of Artificial Sequence: Synthetic oligonucleotide
  Antisense strand to SEQ ID NO: 733136
uuaaccaucugcuaugucu

SEQ ID NO: 733138 - RNA, 19 nt, Artificial Sequence
  Description of Artificial Sequence: Synthetic oligonucleotide
  Sense strand starting at position 2998 of SEQ ID NO: 586638
gacauagcagaugguuaau

SEQ ID NO: 733139 - RNA, 19 nt, Artificial Sequence
  Description of Artificial Sequence: Synthetic oligonucleotide
  Antisense strand to SEQ ID NO: 733138
auuaaccaucugcuauguc

SEQ ID NO: 733140 - RNA, 19 nt, Artificial Sequence
  Description of Artificial Sequence: Synthetic oligonucleotide
  Sense strand starting at position 3007 of SEQ ID NO: 586638
gaugguuaauuguccagga

SEQ ID NO: 733141 - RNA, 19 nt, Artificial Sequence
  Description of Artificial Sequence: Synthetic oligonucleotide
  Antisense strand to SEQ ID NO: 733140
uccuggacaauuaaccauc

SEQ ID NO: 733142 - RNA, 19 nt, Artificial Sequence
  Description of Artificial Sequence: Synthetic oligonucleotide
  Sense strand starting at position 3008 of SEQ ID NO: 586638
augguuaauuguccaggaa

SEQ ID NO: 733143 - RNA, 19 nt, Artificial Sequence
  Description of Artificial Sequence: Synthetic oligonucleotide
  Antisense strand to SEQ ID NO: 733142
uuccuggacaauuaaccau

SEQ ID NO: 733144 - RNA, 19 nt, Artificial Sequence
  Description of Artificial Sequence: Synthetic oligonucleotide
  Sense strand starting at position 3009 of SEQ ID NO: 586638
ugguuaauuguccaggaac

SEQ ID NO: 733145 - RNA, 19 nt, Artificial Sequence
  Description of Artificial Sequence: Synthetic oligonucleotide
  Antisense strand to SEQ ID NO: 733144
guuccuggacaauuaacca

SEQ ID NO: 733146 - RNA, 19 nt, Artificial Sequence
  Description of Artificial Sequence: Synthetic oligonucleotide
  Sense strand starting at position 3011 of SEQ ID NO: 586638
guuaauuguccaggaacuu

SEQ ID NO: 733147 - RNA, 19 nt, Artificial Sequence
  Description of Artificial Sequence: Synthetic oligonucleotide
  Antisense strand to SEQ ID NO: 733146
aaguuccuggacaauuaac

SEQ ID NO: 733148 - RNA, 19 nt, Artificial Sequence
  Description of Artificial Sequence: Synthetic oligonucleotide
  Sense strand starting at position 3260 of SEQ ID NO: 586638
guuuccuucugauucugau

SEQ ID NO: 733149 - RNA, 19 nt, Artificial Sequence
  Description of Artificial Sequence: Synthetic oligonucleotide
  Antisense strand to SEQ ID NO: 733148
aucagaaucagaaggaaac

SEQ ID NO: 733150 - RNA, 19 nt, Artificial Sequence
  Description of Artificial Sequence: Synthetic oligonucleotide
  Sense strand starting at position 3391 of SEQ ID NO: 586638
gagcauuucuaucagagag

SEQ ID NO: 733151 - RNA, 19 nt, Artificial Sequence
  Description of Artificial Sequence: Synthetic oligonucleotide
  Antisense strand to SEQ ID NO: 733150
cucucugauagaaaugcuc

SEQ ID NO: 733152 - RNA, 19 nt, Artificial Sequence
  Description of Artificial Sequence: Synthetic oligonucleotide
  Sense strand starting at position 3393 of SEQ ID NO: 586638
gcauuucuaucagagagaa

SEQ ID NO: 733153 - RNA, 19 nt, Artificial Sequence
  Description of Artificial Sequence: Synthetic oligonucleotide
  Antisense strand to SEQ ID NO: 733152
uucucucugauagaaaugc

SEQ ID NO: 733154 - RNA, 19 nt, Artificial Sequence
  Description of Artificial Sequence: Synthetic oligonucleotide
  Sense strand starting at position 3403 of SEQ ID NO: 586638
cagagagaauucugauaga

SEQ ID NO: 733155 - RNA, 19 nt, Artificial Sequence
  Description of Artificial Sequence: Synthetic oligonucleotide
  Antisense strand to SEQ ID NO: 733154
ucuaucagaauucucucug

SEQ ID NO: 733156 - RNA, 19 nt, Artificial Sequence
  Description of Artificial Sequence: Synthetic oligonucleotide
  Sense strand starting at position 3406 of SEQ ID NO: 586638
agagaauucugauagaauu

SEQ ID NO: 733157 - RNA, 19 nt, Artificial Sequence
  Description of Artificial Sequence: Synthetic oligonucleotide
  Antisense strand to SEQ ID NO: 733156
aauucuaucagaauucucu

SEQ ID NO: 733158 - RNA, 19 nt, Artificial Sequence
  Description of Artificial Sequence: Synthetic oligonucleotide
  Sense strand starting at position 3433 of SEQ ID NO: 586638
agucuuaccuaauuggcua

SEQ ID NO: 733159 - RNA, 19 nt, Artificial Sequence
  Description of Artificial Sequence: Synthetic oligonucleotide
  Antisense strand to SEQ ID NO: 733158
uagccaauuagguaagacu

SEQ ID NO: 733160 - RNA, 19 nt, Artificial Sequence
  Description of Artificial Sequence: Synthetic oligonucleotide
  Sense strand starting at position 3446 of SEQ ID NO: 586638
uggcuauaucaacggcuau

SEQ ID NO: 733161 - RNA, 19 nt, Artificial Sequence
  Description of Artificial Sequence: Synthetic oligonucleotide
  Antisense strand to SEQ ID NO: 733160
auagccguugauauagcca

SEQ ID NO: 733162 - RNA, 19 nt, Artificial Sequence
  Description of Artificial Sequence: Synthetic oligonucleotide
  Sense strand starting at position 3447 of SEQ ID NO: 586638
ggcuauaucaacggcuauu

SEQ ID NO: 733163 - RNA, 19 nt, Artificial Sequence
  Description of Artificial Sequence: Synthetic oligonucleotide
  Antisense strand to SEQ ID NO: 733162
aauagccguugauauagcc

SEQ ID NO: 733164 - RNA, 19 nt, Artificial Sequence
  Description of Artificial Sequence: Synthetic oligonucleotide
  Sense strand starting at position 3457 of SEQ ID NO: 586638
acggcuauucuaugguaga

SEQ ID NO: 733165 - RNA, 19 nt, Artificial Sequence
  Description of Artificial Sequence: Synthetic oligonucleotide
  Antisense strand to SEQ ID NO: 733164
ucuaccauagaauagccgu

SEQ ID NO: 733166 - RNA, 19 nt, Artificial Sequence
  Description of Artificial Sequence: Synthetic oligonucleotide
  Sense strand starting at position 3479 of SEQ ID NO: 586638
gucauaaccuaagugauga

SEQ ID NO: 733167 - RNA, 19 nt, Artificial Sequence
  Description of Artificial Sequence: Synthetic oligonucleotide
  Antisense strand to SEQ ID NO: 733166
ucaucacuuagguuaugac

SEQ ID NO: 733168 - RNA, 19 nt, Artificial Sequence
  Description of Artificial Sequence: Synthetic oligonucleotide
  Sense strand starting at position 3512 of SEQ ID NO: 586638
auuugauagucugaagauu

SEQ ID NO: 733169 - RNA, 19 nt, Artificial Sequence
  Description of Artificial Sequence: Synthetic oligonucleotide
  Antisense strand to SEQ ID NO: 733168
aaucuucagacuaucaaau

SEQ ID NO: 733170 - RNA, 19 nt, Artificial Sequence
  Description of Artificial Sequence: Synthetic oligonucleotide
  Sense strand starting at position 3520 of SEQ ID NO: 586638
gucugaagauuugagauuc

SEQ ID NO: 733171 - RNA, 19 nt, Artificial Sequence
  Description of Artificial Sequence: Synthetic oligonucleotide
  Antisense strand to SEQ ID NO: 733170
gaaucucaaaucuucagac

SEQ ID NO: 733172 - RNA, 19 nt, Artificial Sequence
  Description of Artificial Sequence: Synthetic oligonucleotide
  Sense strand starting at position 3530 of SEQ ID NO: 586638
uugagauucuaugaagagg

SEQ ID NO: 733173 - RNA, 19 nt, Artificial Sequence
  Description of Artificial Sequence: Synthetic oligonucleotide
  Antisense strand to SEQ ID NO: 733172
ccucuucauagaaucucaa

SEQ ID NO: 733174 - RNA, 19 nt, Artificial Sequence
  Description of Artificial Sequence: Synthetic oligonucleotide
  Sense strand starting at position 3662 of SEQ ID NO: 586638
uuucuauaggcauguaauu

SEQ ID NO: 733175 - RNA, 19 nt, Artificial Sequence
  Description of Artificial Sequence: Synthetic oligonucleotide
  Antisense strand to SEQ ID NO: 733174
aauuacaugccuauagaaa

SEQ ID NO: 733176 - RNA, 19 nt, Artificial Sequence
  Description of Artificial Sequence: Synthetic oligonucleotide
  Sense strand starting at position 3689 of SEQ ID NO: 586638
guaauacauguccaucaga

SEQ ID NO: 733177 - RNA, 19 nt, Artificial Sequence
  Description of Artificial Sequence: Synthetic oligonucleotide
  Antisense strand to SEQ ID NO: 733176
ucugauggacauguauuac

SEQ ID NO: 733178 - RNA, 19 nt, Artificial Sequence
  Description of Artificial Sequence: Synthetic oligonucleotide
  Sense strand starting at position 3789 of SEQ ID NO: 586638
aguagcaugagacauguaa

SEQ ID NO: 733179 - RNA, 19 nt, Artificial Sequence
  Description of Artificial Sequence: Synthetic oligonucleotide
  Antisense strand to SEQ ID NO: 733178
uuacaugucucaugcuacu

SEQ ID NO: 733180 - RNA, 19 nt, Artificial Sequence
  Description of Artificial Sequence: Synthetic oligonucleotide
  Sense strand starting at position 3802 of SEQ ID NO: 586638
auguaagauuaagugagua

SEQ ID NO: 733181 - RNA, 19 nt, Artificial Sequence
  Description of Artificial Sequence: Synthetic oligonucleotide
  Antisense strand to SEQ ID NO: 733180
uacucacuuaaucuuacau

SEQ ID NO: 733182 - RNA, 19 nt, Artificial Sequence
  Description of Artificial Sequence: Synthetic oligonucleotide
  Sense strand starting at position 3820 of SEQ ID NO: 586638
aagaauuucuagcaagugu

SEQ ID NO: 733183 - RNA, 19 nt, Artificial Sequence
  Description of Artificial Sequence: Synthetic oligonucleotide
  Antisense strand to SEQ ID NO: 733182
acacuugcuagaaauucuu

SEQ ID NO: 733184 - RNA, 19 nt, Artificial Sequence
  Description of Artificial Sequence: Synthetic oligonucleotide
  Sense strand starting at position 3965 of SEQ ID NO: 586638
gaugcaucuugagugcauu

SEQ ID NO: 733185 - RNA, 19 nt, Artificial Sequence
  Description of Artificial Sequence: Synthetic oligonucleotide
  Antisense strand to SEQ ID NO: 733184
aaugcacucaagaugcauc

SEQ ID NO: 733186 - RNA, 19 nt, Artificial Sequence
  Description of Artificial Sequence: Synthetic oligonucleotide
  Sense strand starting at position 2 of SEQ ID NO: 586639
guuuccuacccaggaaacu

SEQ ID NO: 733187 - RNA, 19 nt, Artificial Sequence
  Description of Artificial Sequence: Synthetic oligonucleotide
  Antisense strand to SEQ ID NO: 733186
aguuuccuggguaggaaac

SEQ ID NO: 733188 - RNA, 19 nt, Artificial Sequence
  Description of Artificial Sequence: Synthetic oligonucleotide
  Sense strand starting at position 58 of SEQ ID NO: 586639
gcugucugcuaaugcuaau

SEQ ID NO: 733189 - RNA, 19 nt, Artificial Sequence
  Description of Artificial Sequence: Synthetic oligonucleotide
  Antisense strand to SEQ ID NO: 733188
auuagcauuagcagacagc

SEQ ID NO: 733190 - RNA, 19 nt, Artificial Sequence
  Description of Artificial Sequence: Synthetic oligonucleotide
  Sense strand starting at position 61 of SEQ ID NO: 586639
gucugcuaaugcuaauuaa

SEQ ID NO: 733191 - RNA, 19 nt, Artificial Sequence
  Description of Artificial Sequence: Synthetic oligonucleotide
  Antisense strand to SEQ ID NO: 733190
uuaauuagcauuagcagac

SEQ ID NO: 733192 - RNA, 19 nt, Artificial Sequence
  Description of Artificial Sequence: Synthetic oligonucleotide
  Sense strand starting at position 71 of SEQ ID NO: 586639
gcuaauuaacuguaacuag

SEQ ID NO: 733193 - RNA, 19 nt, Artificial Sequence
  Description of Artificial Sequence: Synthetic oligonucleotide
  Antisense strand to SEQ ID NO: 733192
cuaguuacaguuaauuagc

SEQ ID NO: 733194 - RNA, 19 nt, Artificial Sequence
  Description of Artificial Sequence: Synthetic oligonucleotide
  Sense strand starting at position 130 of SEQ ID NO: 586639
gggacacugucccuuuaag

SEQ ID NO: 733195 - RNA, 19 nt, Artificial Sequence
  Description of Artificial Sequence: Synthetic oligonucleotide
  Antisense strand to SEQ ID NO: 733194
cuuaaagggacaguguccc

SEQ ID NO: 733196 - RNA, 19 nt, Artificial Sequence
  Description of Artificial Sequence: Synthetic oligonucleotide
  Sense strand starting at position 165 of SEQ ID NO: 586639
cccuuugucugggagccua

SEQ ID NO: 733197 - RNA, 19 nt, Artificial Sequence
  Description of Artificial Sequence: Synthetic oligonucleotide
  Antisense strand to SEQ ID NO: 733196
uaggcucccagacaaaggg

SEQ ID NO: 733198 - RNA, 19 nt, Artificial Sequence
  Description of Artificial Sequence: Synthetic oligonucleotide
  Sense strand starting at position 478 of SEQ ID NO: 586639
gcucuaaccuaauucgaaa

SEQ ID NO: 733199 - RNA, 19 nt, Artificial Sequence
  Description of Artificial Sequence: Synthetic oligonucleotide
  Antisense strand to SEQ ID NO: 733198
uuucgaauuagguuagagc

SEQ ID NO: 733200 - RNA, 19 nt, Artificial Sequence
  Description of Artificial Sequence: Synthetic oligonucleotide
  Sense strand starting at position 607 of SEQ ID NO: 586639
acacaugaccucggucaca

SEQ ID NO: 733201 - RNA, 19 nt, Artificial Sequence
  Description of Artificial Sequence: Synthetic oligonucleotide
  Antisense strand to SEQ ID NO: 733200
ugugaccgaggucaugugu

SEQ ID NO: 733202 - RNA, 19 nt, Artificial Sequence
  Description of Artificial Sequence: Synthetic oligonucleotide
  Sense strand starting at position 714 of SEQ ID NO: 586639
gggauuaggaauugcugua

SEQ ID NO: 733203 - RNA, 19 nt, Artificial Sequence
  Description of Artificial Sequence: Synthetic oligonucleotide
  Antisense strand to SEQ ID NO: 733202
uacagcaauuccuaauccc

SEQ ID NO: 733204 - RNA, 19 nt, Artificial Sequence
  Description of Artificial Sequence: Synthetic oligonucleotide
  Sense strand starting at position 755 of SEQ ID NO: 586639
agggaacgcucuuccacaa

SEQ ID NO: 733205 - RNA, 19 nt, Artificial Sequence
  Description of Artificial Sequence: Synthetic oligonucleotide
  Antisense strand to SEQ ID NO: 733204
uuguggaagagcguucccu

SEQ ID NO: 733206 - RNA, 19 nt, Artificial Sequence
  Description of Artificial Sequence: Synthetic oligonucleotide
  Sense strand starting at position 922 of SEQ ID NO: 586639
uuccuugaugccuguucua

SEQ ID NO: 733207 - RNA, 19 nt, Artificial Sequence
  Description of Artificial Sequence: Synthetic oligonucleotide
  Antisense strand to SEQ ID NO: 733206
uagaacaggcaucaaggaa

SEQ ID NO: 733208 - RNA, 19 nt, Artificial Sequence
  Description of Artificial Sequence: Synthetic oligonucleotide
  Sense strand starting at position 927 of SEQ ID NO: 586639
ugaugccuguucuaccaga

SEQ ID NO: 733209 - RNA, 19 nt, Artificial Sequence
  Description of Artificial Sequence: Synthetic oligonucleotide
  Antisense strand to SEQ ID NO: 733208
ucugguagaacaggcauca

SEQ ID NO: 733210 - RNA, 19 nt, Artificial Sequence
  Description of Artificial Sequence: Synthetic oligonucleotide
  Sense strand starting at position 932 of SEQ ID NO: 586639
ccuguucuaccagacacua

SEQ ID NO: 733211 - RNA, 19 nt, Artificial Sequence
  Description of Artificial Sequence: Synthetic oligonucleotide
  Antisense strand to SEQ ID NO: 733210
uagugucugguagaacagg

SEQ ID NO: 733212 - RNA, 19 nt, Artificial Sequence
  Description of Artificial Sequence: Synthetic oligonucleotide
  Sense strand starting at position 1259 of SEQ ID NO: 586639
ugcauucuggcaggagcua

SEQ ID NO: 733213 - RNA, 19 nt, Artificial Sequence
  Description of Artificial Sequence: Synthetic oligonucleotide
  Antisense strand to SEQ ID NO: 733212
uagcuccugccagaaugca

SEQ ID NO: 733214 - RNA, 19 nt, Artificial Sequence
  Description of Artificial Sequence: Synthetic oligonucleotide
  Sense strand starting at position 1320 of SEQ ID NO: 586639
gccugacugucccuaagaa

SEQ ID NO: 733215 - RNA, 19 nt, Artificial Sequence
  Description of Artificial Sequence: Synthetic oligonucleotide
  Antisense strand to SEQ ID NO: 733214
uucuuagggacagucaggc

SEQ ID NO: 733216 - RNA, 19 nt, Artificial Sequence
  Description of Artificial Sequence: Synthetic oligonucleotide
  Sense strand starting at position 1324 of SEQ ID NO: 586639
gacugucccuaagaaggau

SEQ ID NO: 733217 - RNA, 19 nt, Artificial Sequence
  Description of Artificial Sequence: Synthetic oligonucleotide
  Antisense strand to SEQ ID NO: 733216
auccuucuuagggacaguc

SEQ ID NO: 733218 - RNA, 19 nt, Artificial Sequence
  Description of Artificial Sequence: Synthetic oligonucleotide
  Sense strand starting at position 1588 of SEQ ID NO: 586639
aguggagaaucaucguucu

SEQ ID NO: 733219 - RNA, 19 nt, Artificial Sequence
  Description of Artificial Sequence: Synthetic oligonucleotide
  Antisense strand to SEQ ID NO: 733218
agaacgaugauucuccacu

SEQ ID NO: 733220 - RNA, 19 nt, Artificial Sequence
  Description of Artificial Sequence: Synthetic oligonucleotide
  Sense strand starting at position 1591 of SEQ ID NO: 586639
ggagaaucaucguucuacc

SEQ ID NO: 733221 - RNA, 19 nt, Artificial Sequence
  Description of Artificial Sequence: Synthetic oligonucleotide
  Antisense strand to SEQ ID NO: 733220
gguagaacgaugauucucc

SEQ ID NO: 733222 - RNA, 19 nt, Artificial Sequence
  Description of Artificial Sequence: Synthetic oligonucleotide
  Sense strand starting at position 1729 of SEQ ID NO: 586639
gacaguaaccaaggaguuu

SEQ ID NO: 733223 - RNA, 19 nt, Artificial Sequence
  Description of Artificial Sequence: Synthetic oligonucleotide
  Antisense strand to SEQ ID NO: 733222
aaacuccuugguuacuguc

SEQ ID NO: 733224 - RNA, 19 nt, Artificial Sequence
  Description of Artificial Sequence: Synthetic oligonucleotide
  Sense strand starting at position 2141 of SEQ ID NO: 586639
gagcgagcgaucuaggcuu

SEQ ID NO: 733225 - RNA, 19 nt, Artificial Sequence
  Description of Artificial Sequence: Synthetic oligonucleotide
  Antisense strand to SEQ ID NO: 733224
aagccuagaucgcucgcuc

SEQ ID NO: 733226 - RNA, 19 nt, Artificial Sequence
  Description of Artificial Sequence: Synthetic oligonucleotide
  Sense strand starting at position 2194 of SEQ ID NO: 586639
gcccucaguccugaacaca

SEQ ID NO: 733227 - RNA, 19 nt, Artificial Sequence
  Description of Artificial Sequence: Synthetic oligonucleotide
  Antisense strand to SEQ ID NO: 733226
uguguucaggacugagggc

SEQ ID NO: 733228 - RNA, 19 nt, Artificial Sequence
  Description of Artificial Sequence: Synthetic oligonucleotide
  Sense strand starting at position 2333 of SEQ ID NO: 586639
ucgacuuccuauggacagu

SEQ ID NO: 733229 - RNA, 19 nt, Artificial Sequence
  Description of Artificial Sequence: Synthetic oligonucleotide
  Antisense strand to SEQ ID NO: 733228
acuguccauaggaagucga

SEQ ID NO: 733230 - RNA, 19 nt, Artificial Sequence
  Description of Artificial Sequence: Synthetic oligonucleotide
  Sense strand starting at position 2346 of SEQ ID NO: 586639
gacaguuugucuucgccaa

SEQ ID NO: 733231 - RNA, 19 nt, Artificial Sequence
  Description of Artificial Sequence: Synthetic oligonucleotide
  Antisense strand to SEQ ID NO: 733230
uuggcgaagacaaacuguc

SEQ ID NO: 733232 - RNA, 19 nt, Artificial Sequence
  Description of Artificial Sequence: Synthetic oligonucleotide
  Sense strand starting at position 2347 of SEQ ID NO: 586639
acaguuugucuucgccaaa

SEQ ID NO: 733233 - RNA, 19 nt, Artificial Sequence
  Description of Artificial Sequence: Synthetic oligonucleotide
  Antisense strand to SEQ ID NO: 733232
uuuggcgaagacaaacugu

SEQ ID NO: 733234 - RNA, 19 nt, Artificial Sequence
  Description of Artificial Sequence: Synthetic oligonucleotide
  Sense strand starting at position 2471 of SEQ ID NO: 586639
aggagaugcuaccagggau

SEQ ID NO: 733235 - RNA, 19 nt, Artificial Sequence
  Description of Artificial Sequence: Synthetic oligonucleotide
  Antisense strand to SEQ ID NO: 733234
aucccugguagcaucuccu

SEQ ID NO: 733236 - RNA, 19 nt, Artificial Sequence
  Description of Artificial Sequence: Synthetic oligonucleotide
  Sense strand starting at position 2574 of SEQ ID NO: 586639
caguccaagccuggucaua

SEQ ID NO: 733237 - RNA, 19 nt, Artificial Sequence
  Description of Artificial Sequence: Synthetic oligonucleotide
  Antisense strand to SEQ ID NO: 733236
uaugaccaggcuuggacug

SEQ ID NO: 733238 - RNA, 19 nt, Artificial Sequence
  Description of Artificial Sequence: Synthetic oligonucleotide
  Sense strand starting at position 2576 of SEQ ID NO: 586639
guccaagccuggucauaac

SEQ ID NO: 733239 - RNA, 19 nt, Artificial Sequence
  Description of Artificial Sequence: Synthetic oligonucleotide
  Antisense strand to SEQ ID NO: 733238
guuaugaccaggcuuggac

SEQ ID NO: 733240 - RNA, 19 nt, Artificial Sequence
  Description of Artificial Sequence: Synthetic oligonucleotide
  Sense strand starting at position 2799 of SEQ ID NO: 586639
guccuaucagcgugggacu

SEQ ID NO: 733241 - RNA, 19 nt, Artificial Sequence
  Description of Artificial Sequence: Synthetic oligonucleotide
  Antisense strand to SEQ ID NO: 733240
agucccacgcugauaggac

SEQ ID NO: 733242 - RNA, 19 nt, Artificial Sequence
  Description of Artificial Sequence: Synthetic oligonucleotide
  Sense strand starting at position 2851 of SEQ ID NO: 586639
cucucagaugcucagguua

SEQ ID NO: 733243 - RNA, 19 nt, Artificial Sequence
  Description of Artificial Sequence: Synthetic oligonucleotide
  Antisense strand to SEQ ID NO: 733242
uaaccugagcaucugagag

SEQ ID NO: 733244 - RNA, 19 nt, Artificial Sequence
  Description of Artificial Sequence: Synthetic oligonucleotide
  Sense strand starting at position 2853 of SEQ ID NO: 586639
cucagaugcucagguuaug

SEQ ID NO: 733245 - RNA, 19 nt, Artificial Sequence
  Description of Artificial Sequence: Synthetic oligonucleotide
  Antisense strand to SEQ ID NO: 733244
cauaaccugagcaucugag

SEQ ID NO: 733246 - RNA, 19 nt, Artificial Sequence
  Description of Artificial Sequence: Synthetic oligonucleotide
  Sense strand starting at position 2856 of SEQ ID NO: 586639
agaugcucagguuaugaca

SEQ ID NO: 733247 - RNA, 19 nt, Artificial Sequence
  Description of Artificial Sequence: Synthetic oligonucleotide
  Antisense strand to SEQ ID NO: 733246
ugucauaaccugagcaucu

SEQ ID NO: 733248 - RNA, 19 nt, Artificial Sequence
  Description of Artificial Sequence: Synthetic oligonucleotide
  Sense strand starting at position 2858 of SEQ ID NO: 586639
augcucagguuaugacauu

SEQ ID NO: 733249 - RNA, 19 nt, Artificial Sequence
  Description of Artificial Sequence: Synthetic oligonucleotide
  Antisense strand to SEQ ID NO: 733248
aaugucauaaccugagcau

SEQ ID NO: 733250 - RNA, 19 nt, Artificial Sequence
  Description of Artificial Sequence: Synthetic oligonucleotide
  Sense strand starting at position 3448 of SEQ ID NO: 586639
cugagugucuugcccacua

SEQ ID NO: 733251 - RNA, 19 nt, Artificial Sequence
  Description of Artificial Sequence: Synthetic oligonucleotide
  Antisense strand to SEQ ID NO: 733250
uagugggcaagacacucag

SEQ ID NO: 733252 - RNA, 19 nt, Artificial Sequence
  Description of Artificial Sequence: Synthetic oligonucleotide
  Sense strand starting at position 3450 of SEQ ID NO: 586639
gagugucuugcccacuaga

SEQ ID NO: 733253 - RNA, 19 nt, Artificial Sequence
  Description of Artificial Sequence: Synthetic oligonucleotide
  Antisense strand to SEQ ID NO: 733252
ucuagugggcaagacacuc

SEQ ID NO: 733254 - RNA, 19 nt, Artificial Sequence
  Description of Artificial Sequence: Synthetic oligonucleotide
  Sense strand starting at position 3500 of SEQ ID NO: 586639
ggacuaagcugugguuaca

SEQ ID NO: 733255 - RNA, 19 nt, Artificial Sequence
  Description of Artificial Sequence: Synthetic oligonucleotide
  Antisense strand to SEQ ID NO: 733254
uguaaccacagcuuagucc

SEQ ID NO: 733256 - RNA, 19 nt, Artificial Sequence
  Description of Artificial Sequence: Synthetic oligonucleotide
  Sense strand starting at position 3545 of SEQ ID NO: 586639
cgguucgaguccugauucu

SEQ ID NO: 733257 - RNA, 19 nt, Artificial Sequence
  Description of Artificial Sequence: Synthetic oligonucleotide
  Antisense strand to SEQ ID NO: 733256
agaaucaggacucgaaccg

SEQ ID NO: 733258 - RNA, 19 nt, Artificial Sequence
  Description of Artificial Sequence: Synthetic oligonucleotide
  Sense strand starting at position 51 of SEQ ID NO: 586640
ugggaagcauucucaggaa

SEQ ID NO: 733259 - RNA, 19 nt, Artificial Sequence
  Description of Artificial Sequence: Synthetic oligonucleotide
  Antisense strand to SEQ ID NO: 733258
uuccugagaaugcuuccca

SEQ ID NO: 733260 - RNA, 19 nt, Artificial Sequence
  Description of Artificial Sequence: Synthetic oligonucleotide
  Sense strand starting at position 54 of SEQ ID NO: 586640
gaagcauucucaggaagug

SEQ ID NO: 733261 - RNA, 19 nt, Artificial Sequence
  Description of Artificial Sequence: Synthetic oligonucleotide
  Antisense strand to SEQ ID NO: 733260
cacuuccugagaaugcuuc

SEQ ID NO: 733262 - RNA, 19 nt, Artificial Sequence
  Description of Artificial Sequence: Synthetic oligonucleotide
  Sense strand starting at position 55 of SEQ ID NO: 586640
aagcauucucaggaagugu

SEQ ID NO: 733263 - RNA, 19 nt, Artificial Sequence
  Description of Artificial Sequence: Synthetic oligonucleotide
  Antisense strand to SEQ ID NO: 733262
acacuuccugagaaugcuu

SEQ ID NO: 733264 - RNA, 19 nt, Artificial Sequence
  Description of Artificial Sequence: Synthetic oligonucleotide
  Sense strand starting at position 66 of SEQ ID NO: 586640
ggaagugugaucuggugca

SEQ ID NO: 733265 - RNA, 19 nt, Artificial Sequence
  Description of Artificial Sequence: Synthetic oligonucleotide
  Antisense strand to SEQ ID NO: 733264
ugcaccagaucacacuucc

SEQ ID NO: 733266 - RNA, 19 nt, Artificial Sequence
  Description of Artificial Sequence: Synthetic oligonucleotide
  Sense strand starting at position 167 of SEQ ID NO: 586640
ggcagucgcugugccaaau

SEQ ID NO: 733267 - RNA, 19 nt, Artificial Sequence
  Description of Artificial Sequence: Synthetic oligonucleotide
  Antisense strand to SEQ ID NO: 733266
auuuggcacagcgacugcc

SEQ ID NO: 733268 - RNA, 19 nt, Artificial Sequence
  Description of Artificial Sequence: Synthetic oligonucleotide
  Sense strand starting at position 168 of SEQ ID NO: 586640
gcagucgcugugccaaaua

SEQ ID NO: 733269 - RNA, 19 nt, Artificial Sequence
  Description of Artificial Sequence: Synthetic oligonucleotide
  Antisense strand to SEQ ID NO: 733268
uauuuggcacagcgacugc

SEQ ID NO: 733270 - RNA, 19 nt, Artificial Sequence
  Description of Artificial Sequence: Synthetic oligonucleotide
  Sense strand starting at position 205 of SEQ ID NO: 586640
gccugagucuugcugagau

SEQ ID NO: 733271 - RNA, 19 nt, Artificial Sequence
  Description of Artificial Sequence: Synthetic oligonucleotide
  Antisense strand to SEQ ID NO: 733270
aucucagcaagacucaggc

SEQ ID NO: 733272 - RNA, 19 nt, Artificial Sequence
  Description of Artificial Sequence: Synthetic oligonucleotide
  Sense strand starting at position 207 of SEQ ID NO: 586640
cugagucuugcugagauac

SEQ ID NO: 733273 - RNA, 19 nt, Artificial Sequence
  Description of Artificial Sequence: Synthetic oligonucleotide
  Antisense strand to SEQ ID NO: 733272
guaucucagcaagacucag

SEQ ID NO: 733274 - RNA, 19 nt, Artificial Sequence
  Description of Artificial Sequence: Synthetic oligonucleotide
  Sense strand starting at position 209 of SEQ ID NO: 586640
gagucuugcugagauacug

SEQ ID NO: 733275 - RNA, 19 nt, Artificial Sequence
  Description of Artificial Sequence: Synthetic oligonucleotide
  Antisense strand to SEQ ID NO: 733274
caguaucucagcaagacuc

SEQ ID NO: 733276 - RNA, 19 nt, Artificial Sequence
  Description of Artificial Sequence: Synthetic oligonucleotide
  Sense strand starting at position 217 of SEQ ID NO: 586640
cugagauacugacuagguu

SEQ ID NO: 733277 - RNA, 19 nt, Artificial Sequence
  Description of Artificial Sequence: Synthetic oligonucleotide
  Antisense strand to SEQ ID NO: 733276
aaccuagucaguaucucag

SEQ ID NO: 733278 - RNA, 19 nt, Artificial Sequence
  Description of Artificial Sequence: Synthetic oligonucleotide
  Sense strand starting at position 249 of SEQ ID NO: 586640
ggcccuguuucccuaugua

SEQ ID NO: 733279 - RNA, 19 nt, Artificial Sequence
  Description of Artificial Sequence: Synthetic oligonucleotide
  Antisense strand to SEQ ID NO: 733278
uacauagggaaacagggcc

SEQ ID NO: 733280 - RNA, 19 nt, Artificial Sequence
  Description of Artificial Sequence: Synthetic oligonucleotide
  Sense strand starting at position 257 of SEQ ID NO: 586640
uucccuauguaucagcuua

SEQ ID NO: 733281 - RNA, 19 nt, Artificial Sequence
  Description of Artificial Sequence: Synthetic oligonucleotide
  Antisense strand to SEQ ID NO: 733280
uaagcugauacauagggaa

SEQ ID NO: 733282 - RNA, 19 nt, Artificial Sequence
  Description of Artificial Sequence: Synthetic oligonucleotide
  Sense strand starting at position 299 of SEQ ID NO: 586640
ccgcuauagcauuggaucu

SEQ ID NO: 733283 - RNA, 19 nt, Artificial Sequence
  Description of Artificial Sequence: Synthetic oligonucleotide
  Antisense strand to SEQ ID NO: 733282
agauccaaugcuauagcgg

SEQ ID NO: 733284 - RNA, 19 nt, Artificial Sequence
  Description of Artificial Sequence: Synthetic oligonucleotide
  Sense strand starting at position 311 of SEQ ID NO: 586640
uggaucuggcaagguaaau

SEQ ID NO: 733285 - RNA, 19 nt, Artificial Sequence
  Description of Artificial Sequence: Synthetic oligonucleotide
  Antisense strand to SEQ ID NO: 733284
auuuaccuugccagaucca

SEQ ID NO: 733286 - RNA, 19 nt, Artificial Sequence
  Description of Artificial Sequence: Synthetic oligonucleotide
  Sense strand starting at position 320 of SEQ ID NO: 586640
caagguaaaugaggagaaa

SEQ ID NO: 733287 - RNA, 19 nt, Artificial Sequence
  Description of Artificial Sequence: Synthetic oligonucleotide
  Antisense strand to SEQ ID NO: 733286
uuucuccucauuuaccuug

SEQ ID NO: 733288 - RNA, 19 nt, Artificial Sequence
  Description of Artificial Sequence: Synthetic oligonucleotide
  Sense strand starting at position 347 of SEQ ID NO: 586640
uggcuuuagggauaaggca

SEQ ID NO: 733289 - RNA, 19 nt, Artificial Sequence
  Description of Artificial Sequence: Synthetic oligonucleotide
  Antisense strand to SEQ ID NO: 733288
ugccuuaucccuaaagcca

SEQ ID NO: 733290 - RNA, 19 nt, Artificial Sequence
  Description of Artificial Sequence: Synthetic oligonucleotide
  Sense strand starting at position 368 of SEQ ID NO: 586640
gggugacauuccuaucaca

SEQ ID NO: 733291 - RNA, 19 nt, Artificial Sequence
  Description of Artificial Sequence: Synthetic oligonucleotide
  Antisense strand to SEQ ID NO: 733290
ugugauaggaaugucaccc

SEQ ID NO: 733292 - RNA, 19 nt, Artificial Sequence
  Description of Artificial Sequence: Synthetic oligonucleotide
  Sense strand starting at position 526 of SEQ ID NO: 586640
ccuaacagauccuuggcaa

SEQ ID NO: 733293 - RNA, 19 nt, Artificial Sequence
  Description of Artificial Sequence: Synthetic oligonucleotide
  Antisense strand to SEQ ID NO: 733292
uugccaaggaucuguuagg

SEQ ID NO: 733294 - RNA, 19 nt, Artificial Sequence
  Description of Artificial Sequence: Synthetic oligonucleotide
  Sense strand starting at position 527 of SEQ ID NO: 586640
cuaacagauccuuggcaau

SEQ ID NO: 733295 - RNA, 19 nt, Artificial Sequence
  Description of Artificial Sequence: Synthetic oligonucleotide
  Antisense strand to SEQ ID NO: 733294
auugccaaggaucuguuag

SEQ ID NO: 733296 - RNA, 19 nt, Artificial Sequence
  Description of Artificial Sequence: Synthetic oligonucleotide
  Sense strand starting at position 798 of SEQ ID NO: 586640
gccugacccucugugaaga

SEQ ID NO: 733297 - RNA, 19 nt, Artificial Sequence
  Description of Artificial Sequence: Synthetic oligonucleotide
  Antisense strand to SEQ ID NO: 733296
ucuucacagagggucaggc

SEQ ID NO: 733298 - RNA, 19 nt, Artificial Sequence
  Description of Artificial Sequence: Synthetic oligonucleotide
  Sense strand starting at position 875 of SEQ ID NO: 586640
uuucaugggccugggaaga

SEQ ID NO: 733299 - RNA, 19 nt, Artificial Sequence
  Description of Artificial Sequence: Synthetic oligonucleotide
  Antisense strand to SEQ ID NO: 733298
ucuucccaggcccaugaaa

SEQ ID NO: 733300 - RNA, 19 nt, Artificial Sequence
  Description of Artificial Sequence: Synthetic oligonucleotide
  Sense strand starting at position 943 of SEQ ID NO: 586640
ggaucuaagugacagguca

SEQ ID NO: 733301 - RNA, 19 nt, Artificial Sequence
  Description of Artificial Sequence: Synthetic oligonucleotide
  Antisense strand to SEQ ID NO: 733300
ugaccugucacuuagaucc

SEQ ID NO: 733302 - RNA, 19 nt, Artificial Sequence
  Description of Artificial Sequence: Synthetic oligonucleotide
  Sense strand starting at position 1091 of SEQ ID NO: 586640
gagucaugcucccagccaa

SEQ ID NO: 733303 - RNA, 19 nt, Artificial Sequence
  Description of Artificial Sequence: Synthetic oligonucleotide
  Antisense strand to SEQ ID NO: 733302
uuggcugggagcaugacuc

SEQ ID NO: 733304 - RNA, 19 nt, Artificial Sequence
  Description of Artificial Sequence: Synthetic oligonucleotide
  Sense strand starting at position 1369 of SEQ ID NO: 586640
gccgcucuuucuuccgaga

SEQ ID NO: 733305 - RNA, 19 nt, Artificial Sequence
  Description of Artificial Sequence: Synthetic oligonucleotide
  Antisense strand to SEQ ID NO: 733304
ucucggaagaaagagcggc

SEQ ID NO: 733306 - RNA, 19 nt, Artificial Sequence
  Description of Artificial Sequence: Synthetic oligonucleotide
  Sense strand starting at position 1372 of SEQ ID NO: 586640
gcucuuucuuccgagacug

SEQ ID NO: 733307 - RNA, 19 nt, Artificial Sequence
  Description of Artificial Sequence: Synthetic oligonucleotide
  Antisense strand to SEQ ID NO: 733306
cagucucggaagaaagagc

SEQ ID NO: 733308 - RNA, 19 nt, Artificial Sequence
  Description of Artificial Sequence: Synthetic oligonucleotide
  Sense strand starting at position 1374 of SEQ ID NO: 586640
ucuuucuuccgagacugga

SEQ ID NO: 733309 - RNA, 19 nt, Artificial Sequence
  Description of Artificial Sequence: Synthetic oligonucleotide
  Antisense strand to SEQ ID NO: 733308
uccagucucggaagaaaga

SEQ ID NO: 733310 - RNA, 19 nt, Artificial Sequence
  Description of Artificial Sequence: Synthetic oligonucleotide
  Sense strand starting at position 2510 of SEQ ID NO: 586640
cgucucaggccucgcgaau

SEQ ID NO: 733311 - RNA, 19 nt, Artificial Sequence
  Description of Artificial Sequence: Synthetic oligonucleotide
  Antisense strand to SEQ ID NO: 733310
auucgcgaggccugagacg

SEQ ID NO: 733312 - RNA, 19 nt, Artificial Sequence
  Description of Artificial Sequence: Synthetic oligonucleotide
  Sense strand starting at position 2639 of SEQ ID NO: 586640
acggguuugggcugaguca

SEQ ID NO: 733313 - RNA, 19 nt, Artificial Sequence
  Description of Artificial Sequence: Synthetic oligonucleotide
  Antisense strand to SEQ ID NO: 733312
ugacucagcccaaacccgu

SEQ ID NO: 733314 - RNA, 19 nt, Artificial Sequence
  Description of Artificial Sequence: Synthetic oligonucleotide
  Sense strand starting at position 2640 of SEQ ID NO: 586640
cggguuugggcugagucaa

SEQ ID NO: 733315 - RNA, 19 nt, Artificial Sequence
  Description of Artificial Sequence: Synthetic oligonucleotide
  Antisense strand to SEQ ID NO: 733314
uugacucagcccaaacccg

SEQ ID NO: 733316 - RNA, 19 nt, Artificial Sequence
  Description of Artificial Sequence: Synthetic oligonucleotide
  Sense strand starting at position 2648 of SEQ ID NO: 586640
ggcugagucaagcguccaa

SEQ ID NO: 733317 - RNA, 19 nt, Artificial Sequence
  Description of Artificial Sequence: Synthetic oligonucleotide
  Antisense strand to SEQ ID NO: 733316
uuggacgcuugacucagcc

SEQ ID NO: 733318 - RNA, 19 nt, Artificial Sequence
  Description of Artificial Sequence: Synthetic oligonucleotide
  Sense strand starting at position 2652 of SEQ ID NO: 586640
gagucaagcguccaaagga

SEQ ID NO: 733319 - RNA, 19 nt, Artificial Sequence
  Description of Artificial Sequence: Synthetic oligonucleotide
  Antisense strand to SEQ ID NO: 733318
uccuuuggacgcuugacuc

SEQ ID NO: 733320 - RNA, 19 nt, Artificial Sequence
  Description of Artificial Sequence: Synthetic oligonucleotide
  Sense strand starting at position 2708 of SEQ ID NO: 586640
cugccuagauguggacaau

SEQ ID NO: 733321 - RNA, 19 nt, Artificial Sequence
  Description of Artificial Sequence: Synthetic oligonucleotide
  Antisense strand to SEQ ID NO: 733320
auuguccacaucuaggcag

SEQ ID NO: 733322 - RNA, 19 nt, Artificial Sequence
  Description of Artificial Sequence: Synthetic oligonucleotide
  Sense strand starting at position 2709 of SEQ ID NO: 586640
ugccuagauguggacaauu

SEQ ID NO: 733323 - RNA, 19 nt, Artificial Sequence
  Description of Artificial Sequence: Synthetic oligonucleotide
  Antisense strand to SEQ ID NO: 733322
aauuguccacaucuaggca

SEQ ID NO: 733324 - RNA, 19 nt, Artificial Sequence
  Description of Artificial Sequence: Synthetic oligonucleotide
  Sense strand starting at position 2717 of SEQ ID NO: 586640
uguggacaauucuagaaug

SEQ ID NO: 733325 - RNA, 19 nt, Artificial Sequence
  Description of Artificial Sequence: Synthetic oligonucleotide
  Antisense strand to SEQ ID NO: 733324
cauucuagaauuguccaca

SEQ ID NO: 733326 - RNA, 19 nt, Artificial Sequence
  Description of Artificial Sequence: Synthetic oligonucleotide
  Sense strand starting at position 2725 of SEQ ID NO: 586640
auucuagaaugcuggacau

SEQ ID NO: 733327 - RNA, 19 nt, Artificial Sequence
  Description of Artificial Sequence: Synthetic oligonucleotide
  Antisense strand to SEQ ID NO: 733326
auguccagcauucuagaau

SEQ ID NO: 733328 - RNA, 19 nt, Artificial Sequence
  Description of Artificial Sequence: Synthetic oligonucleotide
  Sense strand starting at position 2833 of SEQ ID NO: 586640
acgugaacccagugaacaa

SEQ ID NO: 733329 - RNA, 19 nt, Artificial Sequence
  Description of Artificial Sequence: Synthetic oligonucleotide
  Antisense strand to SEQ ID NO: 733328
uuguucacuggguucacgu

SEQ ID NO: 733330 - RNA, 19 nt, Artificial Sequence
  Description of Artificial Sequence: Synthetic oligonucleotide
  Sense strand starting at position 3760 of SEQ ID NO: 586640
ggcucaugccuguaguuag

SEQ ID NO: 733331 - RNA, 19 nt, Artificial Sequence
  Description of Artificial Sequence: Synthetic oligonucleotide
  Antisense strand to SEQ ID NO: 733330
cuaacuacaggcaugagcc

SEQ ID NO: 733332 - RNA, 19 nt, Artificial Sequence
  Description of Artificial Sequence: Synthetic oligonucleotide
  Sense strand starting at position 3763 of SEQ ID NO: 586640
ucaugccuguaguuaguua

SEQ ID NO: 733333 - RNA, 19 nt, Artificial Sequence
  Description of Artificial Sequence: Synthetic oligonucleotide
  Antisense strand to SEQ ID NO: 733332
uaacuaacuacaggcauga

SEQ ID NO: 733334 - RNA, 19 nt, Artificial Sequence
  Description of Artificial Sequence: Synthetic oligonucleotide
  Sense strand starting at position 3927 of SEQ ID NO: 586640
gaaugagagccuuguaacu

SEQ ID NO: 733335 - RNA, 19 nt, Artificial Sequence
  Description of Artificial Sequence: Synthetic oligonucleotide
  Antisense strand to SEQ ID NO: 733334
aguuacaaggcucucauuc

SEQ ID NO: 733336 - RNA, 19 nt, Artificial Sequence
  Description of Artificial Sequence: Synthetic oligonucleotide
  Sense strand starting at position 3929 of SEQ ID NO: 586640
augagagccuuguaacuug

SEQ ID NO: 733337 - RNA, 19 nt, Artificial Sequence
  Description of Artificial Sequence: Synthetic oligonucleotide
  Antisense strand to SEQ ID NO: 733336
caaguuacaaggcucucau

SEQ ID NO: 733338 - RNA, 19 nt, Artificial Sequence
  Description of Artificial Sequence: Synthetic oligonucleotide
  Sense strand starting at position 245 of SEQ ID NO: 586641
gaguauauacgguaagauu

SEQ ID NO: 733339 - RNA, 19 nt, Artificial Sequence
  Description of Artificial Sequence: Synthetic oligonucleotide
  Antisense strand to SEQ ID NO: 733338
aaucuuaccguauauacuc

SEQ ID NO: 733340 - RNA, 19 nt, Artificial Sequence
  Description of Artificial Sequence: Synthetic oligonucleotide
  Sense strand starting at position 253 of SEQ ID NO: 586641
acgguaagauuccauuuac

SEQ ID NO: 733341 - RNA, 19 nt, Artificial Sequence
  Description of Artificial Sequence: Synthetic oligonucleotide
  Antisense strand to SEQ ID NO: 733340
guaaauggaaucuuaccgu

SEQ ID NO: 733342 - RNA, 19 nt, Artificial Sequence
  Description of Artificial Sequence: Synthetic oligonucleotide
  Sense strand starting at position 323 of SEQ ID NO: 586641
aacguuuacccuuggugga

SEQ ID NO: 733343 - RNA, 19 nt, Artificial Sequence
  Description of Artificial Sequence: Synthetic oligonucleotide
  Antisense strand to SEQ ID NO: 733342
uccaccaaggguaaacguu

SEQ ID NO: 733344 - RNA, 19 nt, Artificial Sequence
  Description of Artificial Sequence: Synthetic oligonucleotide
  Sense strand starting at position 366 of SEQ ID NO: 586641
aggaaucagucucugggau

SEQ ID NO: 733345 - RNA, 19 nt, Artificial Sequence
  Description of Artificial Sequence: Synthetic oligonucleotide
  Antisense strand to SEQ ID NO: 733344
aucccagagacugauuccu

SEQ ID NO: 733346 - RNA, 19 nt, Artificial Sequence
  Description of Artificial Sequence: Synthetic oligonucleotide
  Sense strand starting at position 367 of SEQ ID NO: 586641
ggaaucagucucugggauc

SEQ ID NO: 733347 - RNA, 19 nt, Artificial Sequence
  Description of Artificial Sequence: Synthetic oligonucleotide
  Antisense strand to SEQ ID NO: 733346
gaucccagagacugauucc

SEQ ID NO: 733348 - RNA, 19 nt, Artificial Sequence
  Description of Artificial Sequence: Synthetic oligonucleotide
  Sense strand starting at position 464 of SEQ ID NO: 586641
ucucaaacuccugguggau

SEQ ID NO: 733349 - RNA, 19 nt, Artificial Sequence
  Description of Artificial Sequence: Synthetic oligonucleotide
  Antisense strand to SEQ ID NO: 733348
auccaccaggaguuugaga

SEQ ID NO: 733350 - RNA, 19 nt, Artificial Sequence
  Description of Artificial Sequence: Synthetic oligonucleotide
  Sense strand starting at position 508 of SEQ ID NO: 586641
augaaaugaucugaagggu

SEQ ID NO: 733351 - RNA, 19 nt, Artificial Sequence
  Description of Artificial Sequence: Synthetic oligonucleotide
  Antisense strand to SEQ ID NO: 733350
acccuucagaucauuucau

SEQ ID NO: 733352 - RNA, 19 nt, Artificial Sequence
  Description of Artificial Sequence: Synthetic oligonucleotide
  Sense strand starting at position 522 of SEQ ID NO: 586641
aggguacauguaugauuac

SEQ ID NO: 733353 - RNA, 19 nt, Artificial Sequence
  Description of Artificial Sequence: Synthetic oligonucleotide
  Antisense strand to SEQ ID NO: 733352
guaaucauacauguacccu

SEQ ID NO: 733354 - RNA, 19 nt, Artificial Sequence
  Description of Artificial Sequence: Synthetic oligonucleotide
  Sense strand starting at position 525 of SEQ ID NO: 586641
guacauguaugauuacaug

SEQ ID NO: 733355 - RNA, 19 nt, Artificial Sequence
  Description of Artificial Sequence: Synthetic oligonucleotide
  Antisense strand to SEQ ID NO: 733354
cauguaaucauacauguac

SEQ ID NO: 733356 - RNA, 19 nt, Artificial Sequence
  Description of Artificial Sequence: Synthetic oligonucleotide
  Sense strand starting at position 541 of SEQ ID NO: 586641
augaacuuaucucugugua

SEQ ID NO: 733357 - RNA, 19 nt, Artificial Sequence
  Description of Artificial Sequence: Synthetic oligonucleotide
  Antisense strand to SEQ ID NO: 733356
uacacagagauaaguucau

SEQ ID NO: 733358 - RNA, 19 nt, Artificial Sequence
  Description of Artificial Sequence: Synthetic oligonucleotide
  Sense strand starting at position 542 of SEQ ID NO: 586641
ugaacuuaucucuguguau

SEQ ID NO: 733359 - RNA, 19 nt, Artificial Sequence
  Description of Artificial Sequence: Synthetic oligonucleotide
  Antisense strand to SEQ ID NO: 733358
auacacagagauaaguuca

SEQ ID NO: 733360 - RNA, 19 nt, Artificial Sequence
  Description of Artificial Sequence: Synthetic oligonucleotide
  Sense strand starting at position 686 of SEQ ID NO: 586641
caagaucagugaguacaca

SEQ ID NO: 733361 - RNA, 19 nt, Artificial Sequence
  Description of Artificial Sequence: Synthetic oligonucleotide
  Antisense strand to SEQ ID NO: 733360
uguguacucacugaucuug

SEQ ID NO: 733362 - RNA, 19 nt, Artificial Sequence
  Description of Artificial Sequence: Synthetic oligonucleotide
  Sense strand starting at position 769 of SEQ ID NO: 586641
uuaggagaggcguaaauau

SEQ ID NO: 733363 - RNA, 19 nt, Artificial Sequence
  Description of Artificial Sequence: Synthetic oligonucleotide
  Antisense strand to SEQ ID NO: 733362
auauuuacgccucuccuaa

SEQ ID NO: 733364 - RNA, 19 nt, Artificial Sequence
  Description of Artificial Sequence: Synthetic oligonucleotide
  Sense strand starting at position 884 of SEQ ID NO: 586641
aaaguagacuuuccaaggu

SEQ ID NO: 733365 - RNA, 19 nt, Artificial Sequence
  Description of Artificial Sequence: Synthetic oligonucleotide
  Antisense strand to SEQ ID NO: 733364
accuuggaaagucuacuuu

SEQ ID NO: 733366 - RNA, 19 nt, Artificial Sequence
  Description of Artificial Sequence: Synthetic oligonucleotide
  Sense strand starting at position 888 of SEQ ID NO: 586641
uagacuuuccaaggucaag

SEQ ID NO: 733367 - RNA, 19 nt, Artificial Sequence
  Description of Artificial Sequence: Synthetic oligonucleotide
  Antisense strand to SEQ ID NO: 733366
cuugaccuuggaaagucua

SEQ ID NO: 733368 - RNA, 19 nt, Artificial Sequence
  Description of Artificial Sequence: Synthetic oligonucleotide
  Sense strand starting at position 956 of SEQ ID NO: 586641
agaagcugcuucccuaaga

SEQ ID NO: 733369 - RNA, 19 nt, Artificial Sequence
  Description of Artificial Sequence: Synthetic oligonucleotide
  Antisense strand to SEQ ID NO: 733368
ucuuagggaagcagcuucu

SEQ ID NO: 733370 - RNA, 19 nt, Artificial Sequence
  Description of Artificial Sequence: Synthetic oligonucleotide
  Sense strand starting at position 969 of SEQ ID NO: 586641
cuaagaaguugcuuccaua

SEQ ID NO: 733371 - RNA, 19 nt, Artificial Sequence
  Description of Artificial Sequence: Synthetic oligonucleotide
  Antisense strand to SEQ ID NO: 733370
uauggaagcaacuucuuag

SEQ ID NO: 733372 - RNA, 19 nt, Artificial Sequence
  Description of Artificial Sequence: Synthetic oligonucleotide
  Sense strand starting at position 1127 of SEQ ID NO: 586641
ggagguguugaccgggaca

SEQ ID NO: 733373 - RNA, 19 nt, Artificial Sequence
  Description of Artificial Sequence: Synthetic oligonucleotide
  Antisense strand to SEQ ID NO: 733372
ugucccggucaacaccucc

SEQ ID NO: 733374 - RNA, 19 nt, Artificial Sequence
  Description of Artificial Sequence: Synthetic oligonucleotide
  Sense strand starting at position 2063 of SEQ ID NO: 586641
ggcgccgaugcgucagaaa

SEQ ID NO: 733375 - RNA, 19 nt, Artificial Sequence
  Description of Artificial Sequence: Synthetic oligonucleotide
  Antisense strand to SEQ ID NO: 733374
uuucugacgcaucggcgcc

SEQ ID NO: 733376 - RNA, 19 nt, Artificial Sequence
  Description of Artificial Sequence: Synthetic oligonucleotide
  Sense strand starting at position 2423 of SEQ ID NO: 586641
ggagucucccgcggaaacu

SEQ ID NO: 733377 - RNA, 19 nt, Artificial Sequence
  Description of Artificial Sequence: Synthetic oligonucleotide
  Antisense strand to SEQ ID NO: 733376
aguuuccgcgggagacucc

SEQ ID NO: 733378 - RNA, 19 nt, Artificial Sequence
  Description of Artificial Sequence: Synthetic oligonucleotide
  Sense strand starting at position 2448 of SEQ ID NO: 586641
cugccaaaguagguugaaa

SEQ ID NO: 733379 - RNA, 19 nt, Artificial Sequence
  Description of Artificial Sequence: Synthetic oligonucleotide
  Antisense strand to SEQ ID NO: 733378
uuucaaccuacuuuggcag

SEQ ID NO: 733380 - RNA, 19 nt, Artificial Sequence
  Description of Artificial Sequence: Synthetic oligonucleotide
  Sense strand starting at position 2459 of SEQ ID NO: 586641
gguugaaaggucggaaauc

SEQ ID NO: 733381 - RNA, 19 nt, Artificial Sequence
  Description of Artificial Sequence: Synthetic oligonucleotide
  Antisense strand to SEQ ID NO: 733380
gauuuccgaccuuucaacc

SEQ ID NO: 733382 - RNA, 19 nt, Artificial Sequence
  Description of Artificial Sequence: Synthetic oligonucleotide
  Sense strand starting at position 2641 of SEQ ID NO: 586641
cccuaaacagcacguaaua

SEQ ID NO: 733383 - RNA, 19 nt, Artificial Sequence
  Description of Artificial Sequence: Synthetic oligonucleotide
  Antisense strand to SEQ ID NO: 733382
uauuacgugcuguuuaggg

SEQ ID NO: 733384 - RNA, 19 nt, Artificial Sequence
  Description of Artificial Sequence: Synthetic oligonucleotide
  Sense strand starting at position 2962 of SEQ ID NO: 586641
ggcgaucucugcucacaac

SEQ ID NO: 733385 - RNA, 19 nt, Artificial Sequence
  Description of Artificial Sequence: Synthetic oligonucleotide
  Antisense strand to SEQ ID NO: 733384
guugugagcagagaucgcc

SEQ ID NO: 733386 - RNA, 19 nt, Artificial Sequence
  Description of Artificial Sequence: Synthetic oligonucleotide
  Sense strand starting at position 3228 of SEQ ID NO: 586641
uuuaacagucaaugaaguu

SEQ ID NO: 733387 - RNA, 19 nt, Artificial Sequence
  Description of Artificial Sequence: Synthetic oligonucleotide
  Antisense strand to SEQ ID NO: 733386
aacuucauugacuguuaaa

SEQ ID NO: 733388 - RNA, 19 nt, Artificial Sequence
  Description of Artificial Sequence: Synthetic oligonucleotide
  Sense strand starting at position 3234 of SEQ ID NO: 586641
agucaaugaaguuguugua

SEQ ID NO: 733389 - RNA, 19 nt, Artificial Sequence
  Description of Artificial Sequence: Synthetic oligonucleotide
  Antisense strand to SEQ ID NO: 733388
uacaacaacuucauugacu

SEQ ID NO: 733390 - RNA, 19 nt, Artificial Sequence
  Description of Artificial Sequence: Synthetic oligonucleotide
  Sense strand starting at position 3438 of SEQ ID NO: 586641
ugaggcuuguucucagcau

SEQ ID NO: 733391 - RNA, 19 nt, Artificial Sequence
  Description of Artificial Sequence: Synthetic oligonucleotide
  Antisense strand to SEQ ID NO: 733390
augcugagaacaagccuca

SEQ ID NO: 733392 - RNA, 19 nt, Artificial Sequence
  Description of Artificial Sequence: Synthetic oligonucleotide
  Sense strand starting at position 3499 of SEQ ID NO: 586641
acugucaacugguuaaauu

SEQ ID NO: 733393 - RNA, 19 nt, Artificial Sequence
  Description of Artificial Sequence: Synthetic oligonucleotide
  Antisense strand to SEQ ID NO: 733392
aauuuaaccaguugacagu

SEQ ID NO: 733394 - RNA, 19 nt, Artificial Sequence
  Description of Artificial Sequence: Synthetic oligonucleotide
  Sense strand starting at position 3500 of SEQ ID NO: 586641
cugucaacugguuaaauuc

SEQ ID NO: 733395 - RNA, 19 nt, Artificial Sequence
  Description of Artificial Sequence: Synthetic oligonucleotide
  Antisense strand to SEQ ID NO: 733394
gaauuuaaccaguugacag

SEQ ID NO: 733396 - RNA, 19 nt, Artificial Sequence
  Description of Artificial Sequence: Synthetic oligonucleotide
  Sense strand starting at position 3564 of SEQ ID NO: 586641
cuggauaauuucuggguua

SEQ ID NO: 733397 - RNA, 19 nt, Artificial Sequence
  Description of Artificial Sequence: Synthetic oligonucleotide
  Antisense strand to SEQ ID NO: 733396
uaacccagaaauuauccag

SEQ ID NO: 733398 - RNA, 19 nt, Artificial Sequence
  Description of Artificial Sequence: Synthetic oligonucleotide
  Sense strand starting at position 3565 of SEQ ID NO: 586641
uggauaauuucuggguuaa

SEQ ID NO: 733399 - RNA, 19 nt, Artificial Sequence
  Description of Artificial Sequence: Synthetic oligonucleotide
  Antisense strand to SEQ ID NO: 733398
uuaacccagaaauuaucca

SEQ ID NO: 733400 - RNA, 19 nt, Artificial Sequence
  Description of Artificial Sequence: Synthetic oligonucleotide
  Sense strand starting at position 3575 of SEQ ID NO: 586641
cuggguuaauucucuccaa

SEQ ID NO: 733401 - RNA, 19 nt, Artificial Sequence
  Description of Artificial Sequence: Synthetic oligonucleotide
  Antisense strand to SEQ ID NO: 733400
uuggagagaauuaacccag

SEQ ID NO: 733402 - RNA, 19 nt, Artificial Sequence
  Description of Artificial Sequence: Synthetic oligonucleotide
  Sense strand starting at position 3576 of SEQ ID NO: 586641
uggguuaauucucuccaaa

SEQ ID NO: 733403 - RNA, 19 nt, Artificial Sequence
  Description of Artificial Sequence: Synthetic oligonucleotide
  Antisense strand to SEQ ID NO: 733402
uuuggagagaauuaaccca

SEQ ID NO: 733404 - RNA, 19 nt, Artificial Sequence
  Description of Artificial Sequence: Synthetic oligonucleotide
  Sense strand starting at position 3619 of SEQ ID NO: 586641
uaaaguguauggcauuuaa

SEQ ID NO: 733405 - RNA, 19 nt, Artificial Sequence
  Description of Artificial Sequence: Synthetic oligonucleotide
  Antisense strand to SEQ ID NO: 733404
uuaaaugccauacacuuua

SEQ ID NO: 733406 - RNA, 19 nt, Artificial Sequence
  Description of Artificial Sequence: Synthetic oligonucleotide
  Sense strand starting at position 3653 of SEQ ID NO: 586641
agugaaugcauguaguauu

SEQ ID NO: 733407 - RNA, 19 nt, Artificial Sequence
  Description of Artificial Sequence: Synthetic oligonucleotide
  Antisense strand to SEQ ID NO: 733406
aauacuacaugcauucacu

SEQ ID NO: 733408 - RNA, 19 nt, Artificial Sequence
  Description of Artificial Sequence: Synthetic oligonucleotide
  Sense strand starting at position 3663 of SEQ ID NO: 586641
uguaguauuccucaucuuu

SEQ ID NO: 733409 - RNA, 19 nt, Artificial Sequence
  Description of Artificial Sequence: Synthetic oligonucleotide
  Antisense strand to SEQ ID NO: 733408
aaagaugaggaauacuaca

SEQ ID NO: 733410 - RNA, 19 nt, Artificial Sequence
  Description of Artificial Sequence: Synthetic oligonucleotide
  Sense strand starting at position 3726 of SEQ ID NO: 586641
ugcaaucaucccuagaggu

SEQ ID NO: 733411 - RNA, 19 nt, Artificial Sequence
  Description of Artificial Sequence: Synthetic oligonucleotide
  Antisense strand to SEQ ID NO: 733410
accucuagggaugauugca

SEQ ID NO: 733412 - RNA, 19 nt, Artificial Sequence
  Description of Artificial Sequence: Synthetic oligonucleotide
  Sense strand starting at position 3767 of SEQ ID NO: 586641
acacuuaacccaggguagu

SEQ ID NO: 733413 - RNA, 19 nt, Artificial Sequence
  Description of Artificial Sequence: Synthetic oligonucleotide
  Antisense strand to SEQ ID NO: 733412
acuacccuggguuaagugu

SEQ ID NO: 733414 - RNA, 19 nt, Artificial Sequence
  Description of Artificial Sequence: Synthetic oligonucleotide
  Sense strand starting at position 3950 of SEQ ID NO: 586641
auaggaaagugcuuguaca

SEQ ID NO: 733415 - RNA, 19 nt, Artificial Sequence
  Description of Artificial Sequence: Synthetic oligonucleotide
  Antisense strand to SEQ ID NO: 733414
uguacaagcacuuuccuau

SEQ ID NO: 733416 - RNA, 19 nt, Artificial Sequence
  Description of Artificial Sequence: Synthetic oligonucleotide
  Sense strand starting at position 3951 of SEQ ID NO: 586641
uaggaaagugcuuguacau

SEQ ID NO: 733417 - RNA, 19 nt, Artificial Sequence
  Description of Artificial Sequence: Synthetic oligonucleotide
  Antisense strand to SEQ ID NO: 733416
auguacaagcacuuuccua

SEQ ID NO: 733418 - RNA, 19 nt, Artificial Sequence
  Description of Artificial Sequence: Synthetic oligonucleotide
  Sense strand starting at position 341 of SEQ ID NO: 586642
cccuuccugcaaugauuga

SEQ ID NO: 733419 - RNA, 19 nt, Artificial Sequence
  Description of Artificial Sequence: Synthetic oligonucleotide
  Antisense strand to SEQ ID NO: 733418
ucaaucauugcaggaaggg

SEQ ID NO: 733420 - RNA, 19 nt, Artificial Sequence
  Description of Artificial Sequence: Synthetic oligonucleotide
  Sense strand starting at position 351 of SEQ ID NO: 586642
aaugauugacguggacaaa

SEQ ID NO: 733421 - RNA, 19 nt, Artificial Sequence
  Description of Artificial Sequence: Synthetic oligonucleotide
  Antisense strand to SEQ ID NO: 733420
uuuguccacgucaaucauu

SEQ ID NO: 733422 - RNA, 19 nt, Artificial Sequence
  Description of Artificial Sequence: Synthetic oligonucleotide
  Sense strand starting at position 387 of SEQ ID NO: 586642
ugcaauuguggccaagaua

SEQ ID NO: 733423 - RNA, 19 nt, Artificial Sequence
  Description of Artificial Sequence: Synthetic oligonucleotide
  Antisense strand to SEQ ID NO: 733422
uaucuuggccacaauugca

SEQ ID NO: 733424 - RNA, 19 nt, Artificial Sequence
  Description of Artificial Sequence: Synthetic oligonucleotide
  Sense strand starting at position 425 of SEQ ID NO: 586642
cuaacagcccuagauuagu

SEQ ID NO: 733425 - RNA, 19 nt, Artificial Sequence
  Description of Artificial Sequence: Synthetic oligonucleotide
  Antisense strand to SEQ ID NO: 733424
acuaaucuagggcuguuag

SEQ ID NO: 733426 - RNA, 19 nt, Artificial Sequence
  Description of Artificial Sequence: Synthetic oligonucleotide
  Sense strand starting at position 436 of SEQ ID NO: 586642
agauuaguacuguggaagu

SEQ ID NO: 733427 - RNA, 19 nt, Artificial Sequence
  Description of Artificial Sequence: Synthetic oligonucleotide
  Antisense strand to SEQ ID NO: 733426
acuuccacaguacuaaucu

SEQ ID NO: 733428 - RNA, 19 nt, Artificial Sequence
  Description of Artificial Sequence: Synthetic oligonucleotide
  Sense strand starting at position 517 of SEQ ID NO: 586642
acuguuucuccugaccuau

SEQ ID NO: 733429 - RNA, 19 nt, Artificial Sequence
  Description of Artificial Sequence: Synthetic oligonucleotide
  Antisense strand to SEQ ID NO: 733428
auaggucaggagaaacagu

SEQ ID NO: 733430 - RNA, 19 nt, Artificial Sequence
  Description of Artificial Sequence: Synthetic oligonucleotide
  Sense strand starting at position 528 of SEQ ID NO: 586642
ugaccuauguucuuccaua

SEQ ID NO: 733431 - RNA, 19 nt, Artificial Sequence
  Description of Artificial Sequence: Synthetic oligonucleotide
  Antisense strand to SEQ ID NO: 733430
uauggaagaacauagguca

SEQ ID NO: 733432 - RNA, 19 nt, Artificial Sequence
  Description of Artificial Sequence: Synthetic oligonucleotide
  Sense strand starting at position 567 of SEQ ID NO: 586642
uuguuauauggacacuuua

SEQ ID NO: 733433 - RNA, 19 nt, Artificial Sequence
  Description of Artificial Sequence: Synthetic oligonucleotide
  Antisense strand to SEQ ID NO: 733432
uaaaguguccauauaacaa

SEQ ID NO: 733434 - RNA, 19 nt, Artificial Sequence
  Description of Artificial Sequence: Synthetic oligonucleotide
  Sense strand starting at position 795 of SEQ ID NO: 586642
ugaguccucagauggguuu

SEQ ID NO: 733435 - RNA, 19 nt, Artificial Sequence
  Description of Artificial Sequence: Synthetic oligonucleotide
  Antisense strand to SEQ ID NO: 733434
aaacccaucugaggacuca

SEQ ID NO: 733436 - RNA, 19 nt, Artificial Sequence
  Description of Artificial Sequence: Synthetic oligonucleotide
  Sense strand starting at position 1003 of SEQ ID NO: 586642
ggucuaaagaugugggaac

SEQ ID NO: 733437 - RNA, 19 nt, Artificial Sequence
  Description of Artificial Sequence: Synthetic oligonucleotide
  Antisense strand to SEQ ID NO: 733436
guucccacaucuuuagacc

SEQ ID NO: 733438 - RNA, 19 nt, Artificial Sequence
  Description of Artificial Sequence: Synthetic oligonucleotide
  Sense strand starting at position 1204 of SEQ ID NO: 586642
cauuuauacguaugcaugu

SEQ ID NO: 733439 - RNA, 19 nt, Artificial Sequence
  Description of Artificial Sequence: Synthetic oligonucleotide
  Antisense strand to SEQ ID NO: 733438
acaugcauacguauaaaug

SEQ ID NO: 733440 - RNA, 19 nt, Artificial Sequence
  Description of Artificial Sequence: Synthetic oligonucleotide
  Sense strand starting at position 1205 of SEQ ID NO: 586642
auuuauacguaugcaugua

SEQ ID NO: 733441 - RNA, 19 nt, Artificial Sequence
  Description of Artificial Sequence: Synthetic oligonucleotide
  Antisense strand to SEQ ID NO: 733440
uacaugcauacguauaaau

SEQ ID NO: 733442 - RNA, 19 nt, Artificial Sequence
  Description of Artificial Sequence: Synthetic oligonucleotide
  Sense strand starting at position 1298 of SEQ ID NO: 586642
cccauacacugauugugaa

SEQ ID NO: 733443 - RNA, 19 nt, Artificial Sequence
  Description of Artificial Sequence: Synthetic oligonucleotide
  Antisense strand to SEQ ID NO: 733442
uucacaaucaguguauggg

SEQ ID NO: 733444 - RNA, 19 nt, Artificial Sequence
  Description of Artificial Sequence: Synthetic oligonucleotide
  Sense strand starting at position 1299 of SEQ ID NO: 586642
ccauacacugauugugaau

SEQ ID NO: 733445 - RNA, 19 nt, Artificial Sequence
  Description of Artificial Sequence: Synthetic oligonucleotide
  Antisense strand to SEQ ID NO: 733444
auucacaaucaguguaugg

SEQ ID NO: 733446 - RNA, 19 nt, Artificial Sequence
  Description of Artificial Sequence: Synthetic oligonucleotide
  Sense strand starting at position 1329 of SEQ ID NO: 586642
ugagcuuucuauuuguaau

SEQ ID NO: 733447 - RNA, 19 nt, Artificial Sequence
  Description of Artificial Sequence: Synthetic oligonucleotide
  Antisense strand to SEQ ID NO: 733446
auuacaaauagaaagcuca

SEQ ID NO: 733448 - RNA, 19 nt, Artificial Sequence
  Description of Artificial Sequence: Synthetic oligonucleotide
  Sense strand starting at position 1385 of SEQ ID NO: 586642
gauccauuggguggccaua

SEQ ID NO: 733449 - RNA, 19 nt, Artificial Sequence
  Description of Artificial Sequence: Synthetic oligonucleotide
  Antisense strand to SEQ ID NO: 733448
uauggccacccaauggauc

SEQ ID NO: 733450 - RNA, 19 nt, Artificial Sequence
  Description of Artificial Sequence: Synthetic oligonucleotide
  Sense strand starting at position 1444 of SEQ ID NO: 586642
gcaaguauaaauggguuau

SEQ ID NO: 733451 - RNA, 19 nt, Artificial Sequence
  Description of Artificial Sequence: Synthetic oligonucleotide
  Antisense strand to SEQ ID NO: 733450
auaacccauuuauacuugc

SEQ ID NO: 733452 - RNA, 19 nt, Artificial Sequence
  Description of Artificial Sequence: Synthetic oligonucleotide
  Sense strand starting at position 2035 of SEQ ID NO: 586642
ucagacgucagcuagacau

SEQ ID NO: 733453 - RNA, 19 nt, Artificial Sequence
  Description of Artificial Sequence: Synthetic oligonucleotide
  Antisense strand to SEQ ID NO: 733452
augucuagcugacgucuga

SEQ ID NO: 733454 - RNA, 19 nt, Artificial Sequence
  Description of Artificial Sequence: Synthetic oligonucleotide
  Sense strand starting at position 2128 of SEQ ID NO: 586642
gggccauauuuagcugagu

SEQ ID NO: 733455 - RNA, 19 nt, Artificial Sequence
  Description of Artificial Sequence: Synthetic oligonucleotide
  Antisense strand to SEQ ID NO: 733454
acucagcuaaauauggccc

SEQ ID NO: 733456 - RNA, 19 nt, Artificial Sequence
  Description of Artificial Sequence: Synthetic oligonucleotide
  Sense strand starting at position 2142 of SEQ ID NO: 586642
ugagucugauagcucauga

SEQ ID NO: 733457 - RNA, 19 nt, Artificial Sequence
  Description of Artificial Sequence: Synthetic oligonucleotide
  Antisense strand to SEQ ID NO: 733456
ucaugagcuaucagacuca

SEQ ID NO: 733458 - RNA, 19 nt, Artificial Sequence
  Description of Artificial Sequence: Synthetic oligonucleotide
  Sense strand starting at position 2304 of SEQ ID NO: 586642
ugagaaaugucuccacaau

SEQ ID NO: 733459 - RNA, 19 nt, Artificial Sequence
  Description of Artificial Sequence: Synthetic oligonucleotide
  Antisense strand to SEQ ID NO: 733458
auuguggagacauuucuca

SEQ ID NO: 733460 - RNA, 19 nt, Artificial Sequence
  Description of Artificial Sequence: Synthetic oligonucleotide
  Sense strand starting at position 2318 of SEQ ID NO: 586642
acaauacuccauggguagu

SEQ ID NO: 733461 - RNA, 19 nt, Artificial Sequence
  Description of Artificial Sequence: Synthetic oligonucleotide
  Antisense strand to SEQ ID NO: 733460
acuacccauggaguauugu

SEQ ID NO: 733462 - RNA, 19 nt, Artificial Sequence
  Description of Artificial Sequence: Synthetic oligonucleotide
  Sense strand starting at position 2462 of SEQ ID NO: 586642
ucauaaauacugugagaug

SEQ ID NO: 733463 - RNA, 19 nt, Artificial Sequence
  Description of Artificial Sequence: Synthetic oligonucleotide
  Antisense strand to SEQ ID NO: 733462
caucucacaguauuuauga

SEQ ID NO: 733464 - RNA, 19 nt, Artificial Sequence
  Description of Artificial Sequence: Synthetic oligonucleotide
  Sense strand starting at position 2562 of SEQ ID NO: 586642
aguacagagaggugucuuu

SEQ ID NO: 733465 - RNA, 19 nt, Artificial Sequence
  Description of Artificial Sequence: Synthetic oligonucleotide
  Antisense strand to SEQ ID NO: 733464
aaagacaccucucuguacu

SEQ ID NO: 733466 - RNA, 19 nt, Artificial Sequence
  Description of Artificial Sequence: Synthetic oligonucleotide
  Sense strand starting at position 2572 of SEQ ID NO: 586642
ggugucuuucuccacugaa

SEQ ID NO: 733467 - RNA, 19 nt, Artificial Sequence
  Description of Artificial Sequence: Synthetic oligonucleotide
  Antisense strand to SEQ ID NO: 733466
uucaguggagaaagacacc

SEQ ID NO: 733468 - RNA, 19 nt, Artificial Sequence
  Description of Artificial Sequence: Synthetic oligonucleotide
  Sense strand starting at position 2679 of SEQ ID NO: 586642
augauuuauuaaggacuga

SEQ ID NO: 733469 - RNA, 19 nt, Artificial Sequence
  Description of Artificial Sequence: Synthetic oligonucleotide
  Antisense strand to SEQ ID NO: 733468
ucaguccuuaauaaaucau

SEQ ID NO: 733470 - RNA, 19 nt, Artificial Sequence
  Description of Artificial Sequence: Synthetic oligonucleotide
  Sense strand starting at position 2737 of SEQ ID NO: 586642
ucuacaguccuguaaggug

SEQ ID NO: 733471 - RNA, 19 nt, Artificial Sequence
  Description of Artificial Sequence: Synthetic oligonucleotide
  Antisense strand to SEQ ID NO: 733470
caccuuacaggacuguaga

SEQ ID NO: 733472 - RNA, 19 nt, Artificial Sequence
  Description of Artificial Sequence: Synthetic oligonucleotide
  Sense strand starting at position 2744 of SEQ ID NO: 586642
uccuguaagguguacauua

SEQ ID NO: 733473 - RNA, 19 nt, Artificial Sequence
  Description of Artificial Sequence: Synthetic oligonucleotide
  Antisense strand to SEQ ID NO: 733472
uaauguacaccuuacagga

SEQ ID NO: 733474 - RNA, 19 nt, Artificial Sequence
  Description of Artificial Sequence: Synthetic oligonucleotide
  Sense strand starting at position 2746 of SEQ ID NO: 586642
cuguaagguguacauuagu

SEQ ID NO: 733475 - RNA, 19 nt, Artificial Sequence
  Description of Artificial Sequence: Synthetic oligonucleotide
  Antisense strand to SEQ ID NO: 733474
acuaauguacaccuuacag

SEQ ID NO: 733476 - RNA, 19 nt, Artificial Sequence
  Description of Artificial Sequence: Synthetic oligonucleotide
  Sense strand starting at position 2839 of SEQ ID NO: 586642
gcuagaaucugagcccaga

SEQ ID NO: 733477 - RNA, 19 nt, Artificial Sequence
  Description of Artificial Sequence: Synthetic oligonucleotide
  Antisense strand to SEQ ID NO: 733476
ucugggcucagauucuagc

SEQ ID NO: 733478 - RNA, 19 nt, Artificial Sequence
  Description of Artificial Sequence: Synthetic oligonucleotide
  Sense strand starting at position 3130 of SEQ ID NO: 586642
aguacaugauauucugauu

SEQ ID NO: 733479 - RNA, 19 nt, Artificial Sequence
  Description of Artificial Sequence: Synthetic oligonucleotide
  Antisense strand to SEQ ID NO: 733478
aaucagaauaucauguacu

SEQ ID NO: 733480 - RNA, 19 nt, Artificial Sequence
  Description of Artificial Sequence: Synthetic oligonucleotide
  Sense strand starting at position 3155 of SEQ ID NO: 586642
ucagcagcuggugaauauu

SEQ ID NO: 733481 - RNA, 19 nt, Artificial Sequence
  Description of Artificial Sequence: Synthetic oligonucleotide
  Antisense strand to SEQ ID NO: 733480
aauauucaccagcugcuga

SEQ ID NO: 733482 - RNA, 19 nt, Artificial Sequence
  Description of Artificial Sequence: Synthetic oligonucleotide
  Sense strand starting at position 3292 of SEQ ID NO: 586642
agcagaauuacuggguuau

SEQ ID NO: 733483 - RNA, 19 nt, Artificial Sequence
  Description of Artificial Sequence: Synthetic oligonucleotide
  Antisense strand to SEQ ID NO: 733482
auaacccaguaauucugcu

SEQ ID NO: 733484 - RNA, 19 nt, Artificial Sequence
  Description of Artificial Sequence: Synthetic oligonucleotide
  Sense strand starting at position 3293 of SEQ ID NO: 586642
gcagaauuacuggguuaua

SEQ ID NO: 733485 - RNA, 19 nt, Artificial Sequence
  Description of Artificial Sequence: Synthetic oligonucleotide
  Antisense strand to SEQ ID NO: 733484
uauaacccaguaauucugc

SEQ ID NO: 733486 - RNA, 19 nt, Artificial Sequence
  Description of Artificial Sequence: Synthetic oligonucleotide
  Sense strand starting at position 3294 of SEQ ID NO: 586642
cagaauuacuggguuauau

SEQ ID NO: 733487 - RNA, 19 nt, Artificial Sequence
  Description of Artificial Sequence: Synthetic oligonucleotide
  Antisense strand to SEQ ID NO: 733486
auauaacccaguaauucug

SEQ ID NO: 733488 - RNA, 19 nt, Artificial Sequence
  Description of Artificial Sequence: Synthetic oligonucleotide
  Sense strand starting at position 3457 of SEQ ID NO: 586642
gagggugucaaaugauagu

SEQ ID NO: 733489 - RNA, 19 nt, Artificial Sequence
  Description of Artificial Sequence: Synthetic oligonucleotide
  Antisense strand to SEQ ID NO: 733488
acuaucauuugacacccuc

SEQ ID NO: 733490 - RNA, 19 nt, Artificial Sequence
  Description of Artificial Sequence: Synthetic oligonucleotide
  Sense strand starting at position 3697 of SEQ ID NO: 586642
auugucuccuuauuauuga

SEQ ID NO: 733491 - RNA, 19 nt, Artificial Sequence
  Description of Artificial Sequence: Synthetic oligonucleotide
  Antisense strand to SEQ ID NO: 733490
ucaauaauaaggagacaau

SEQ ID NO: 733492 - RNA, 19 nt, Artificial Sequence
  Description of Artificial Sequence: Synthetic oligonucleotide
  Sense strand starting at position 3728 of SEQ ID NO: 586642
uuuauaugugcuggagaca

SEQ ID NO: 733493 - RNA, 19 nt, Artificial Sequence
  Description of Artificial Sequence: Synthetic oligonucleotide
  Antisense strand to SEQ ID NO: 733492
ugucuccagcacauauaaa

SEQ ID NO: 733494 - RNA, 19 nt, Artificial Sequence
  Description of Artificial Sequence: Synthetic oligonucleotide
  Sense strand starting at position 3729 of SEQ ID NO: 586642
uuauaugugcuggagacaa

SEQ ID NO: 733495 - RNA, 19 nt, Artificial Sequence
  Description of Artificial Sequence: Synthetic oligonucleotide
  Antisense strand to SEQ ID NO: 733494
uugucuccagcacauauaa

SEQ ID NO: 733496 - RNA, 19 nt, Artificial Sequence
  Description of Artificial Sequence: Synthetic oligonucleotide
  Sense strand starting at position 3876 of SEQ ID NO: 586642
ugguguuauaguuaagaaa

SEQ ID NO: 733497 - RNA, 19 nt, Artificial Sequence
  Description of Artificial Sequence: Synthetic oligonucleotide
  Antisense strand to SEQ ID NO: 733496
uuucuuaacuauaacacca

SEQ ID NO: 733498 - RNA, 19 nt, Artificial Sequence
  Description of Artificial Sequence: Synthetic oligonucleotide
  Sense strand starting at position 94 of SEQ ID NO: 586643
aguguaaagucaucuggaa

SEQ ID NO: 733499 - RNA, 19 nt, Artificial Sequence
  Description of Artificial Sequence: Synthetic oligonucleotide
  Antisense strand to SEQ ID NO: 733498
uuccagaugacuuuacacu

SEQ ID NO: 733500 - RNA, 19 nt, Artificial Sequence
  Description of Artificial Sequence: Synthetic oligonucleotide
  Sense strand starting at position 107 of SEQ ID NO: 586643
cuggaaauuucuugaaucc

SEQ ID NO: 733501 - RNA, 19 nt, Artificial Sequence
  Description of Artificial Sequence: Synthetic oligonucleotide
  Antisense strand to SEQ ID NO: 733500
ggauucaagaaauuuccag

SEQ ID NO: 733502 - RNA, 19 nt, Artificial Sequence
  Description of Artificial Sequence: Synthetic oligonucleotide
  Sense strand starting at position 237 of SEQ ID NO: 586643
aggcauuuccugugacucu

SEQ ID NO: 733503 - RNA, 19 nt, Artificial Sequence
  Description of Artificial Sequence: Synthetic oligonucleotide
  Antisense strand to SEQ ID NO: 733502
agagucacaggaaaugccu

SEQ ID NO: 733504 - RNA, 19 nt, Artificial Sequence
  Description of Artificial Sequence: Synthetic oligonucleotide
  Sense strand starting at position 354 of SEQ ID NO: 586643
acagaaauuuagugcuaca

SEQ ID NO: 733505 - RNA, 19 nt, Artificial Sequence
  Description of Artificial Sequence: Synthetic oligonucleotide
  Antisense strand to SEQ ID NO: 733504
uguagcacuaaauuucugu

SEQ ID NO: 733506 - RNA, 19 nt, Artificial Sequence
  Description of Artificial Sequence: Synthetic oligonucleotide
  Sense strand starting at position 432 of SEQ ID NO: 586643
gauguagcucuggaagcaa

SEQ ID NO: 733507 - RNA, 19 nt, Artificial Sequence
  Description of Artificial Sequence: Synthetic oligonucleotide
  Antisense strand to SEQ ID NO: 733506
uugcuuccagagcuacauc

SEQ ID NO: 733508 - RNA, 19 nt, Artificial Sequence
  Description of Artificial Sequence: Synthetic oligonucleotide
  Sense strand starting at position 490 of SEQ ID NO: 586643
gucuuuacuggagacagua

SEQ ID NO: 733509 - RNA, 19 nt, Artificial Sequence
  Description of Artificial Sequence: Synthetic oligonucleotide
  Antisense strand to SEQ ID NO: 733508
uacugucuccaguaaagac

SEQ ID NO: 733510 - RNA, 19 nt, Artificial Sequence
  Description of Artificial Sequence: Synthetic oligonucleotide
  Sense strand starting at position 547 of SEQ ID NO: 586643
aacucuugaccucgagagu

SEQ ID NO: 733511 - RNA, 19 nt, Artificial Sequence
  Description of Artificial Sequence: Synthetic oligonucleotide
  Antisense strand to SEQ ID NO: 733510
acucucgaggucaagaguu

SEQ ID NO: 733512 - RNA, 19 nt, Artificial Sequence
  Description of Artificial Sequence: Synthetic oligonucleotide
  Sense strand starting at position 548 of SEQ ID NO: 586643
acucuugaccucgagagua

SEQ ID NO: 733513 - RNA, 19 nt, Artificial Sequence
  Description of Artificial Sequence: Synthetic oligonucleotide
  Antisense strand to SEQ ID NO: 733512
uacucucgaggucaagagu

SEQ ID NO: 733514 - RNA, 19 nt, Artificial Sequence
  Description of Artificial Sequence: Synthetic oligonucleotide
  Sense strand starting at position 550 of SEQ ID NO: 586643
ucuugaccucgagaguauu

SEQ ID NO: 733515 - RNA, 19 nt, Artificial Sequence
  Description of Artificial Sequence: Synthetic oligonucleotide
  Antisense strand to SEQ ID NO: 733514
aauacucucgaggucaaga

SEQ ID NO: 733516 - RNA, 19 nt, Artificial Sequence
  Description of Artificial Sequence: Synthetic oligonucleotide
  Sense strand starting at position 754 of SEQ ID NO: 586643
acauucuaugaauguauga

SEQ ID NO: 733517 - RNA, 19 nt, Artificial Sequence
  Description of Artificial Sequence: Synthetic oligonucleotide
  Antisense strand to SEQ ID NO: 733516
ucauacauucauagaaugu

SEQ ID NO: 733518 - RNA, 19 nt, Artificial Sequence
  Description of Artificial Sequence: Synthetic oligonucleotide
  Sense strand starting at position 798 of SEQ ID NO: 586643
gguaauggcggcagucaau

SEQ ID NO: 733519 - RNA, 19 nt, Artificial Sequence
  Description of Artificial Sequence: Synthetic oligonucleotide
  Antisense strand to SEQ ID NO: 733518
auugacugccgccauuacc

SEQ ID NO: 733520 - RNA, 19 nt, Artificial Sequence
  Description of Artificial Sequence: Synthetic oligonucleotide
  Sense strand starting at position 810 of SEQ ID NO: 586643
agucaauaacgccaaguua

SEQ ID NO: 733521 - RNA, 19 nt, Artificial Sequence
  Description of Artificial Sequence: Synthetic oligonucleotide
  Antisense strand to SEQ ID NO: 733520
uaacuuggcguuauugacu

SEQ ID NO: 733522 - RNA, 19 nt, Artificial Sequence
  Description of Artificial Sequence: Synthetic oligonucleotide
  Sense strand starting at position 1003 of SEQ ID NO: 586643
uuaagccaguuugucaaua

SEQ ID NO: 733523 - RNA, 19 nt, Artificial Sequence
  Description of Artificial Sequence: Synthetic oligonucleotide
  Antisense strand to SEQ ID NO: 733522
uauugacaaacuggcuuaa

SEQ ID NO: 733524 - RNA, 19 nt, Artificial Sequence
  Description of Artificial Sequence: Synthetic oligonucleotide
  Sense strand starting at position 1008 of SEQ ID NO: 586643
ccaguuugucaauaguuau

SEQ ID NO: 733525 - RNA, 19 nt, Artificial Sequence
  Description of Artificial Sequence: Synthetic oligonucleotide
  Antisense strand to SEQ ID NO: 733524
auaacuauugacaaacugg

SEQ ID NO: 733526 - RNA, 19 nt, Artificial Sequence
  Description of Artificial Sequence: Synthetic oligonucleotide
  Sense strand starting at position 1074 of SEQ ID NO: 586643
auaguuguuuccuucucau

SEQ ID NO: 733527 - RNA, 19 nt, Artificial Sequence
  Description of Artificial Sequence: Synthetic oligonucleotide
  Antisense strand to SEQ ID NO: 733526
augagaaggaaacaacuau

SEQ ID NO: 733528 - RNA, 19 nt, Artificial Sequence
  Description of Artificial Sequence: Synthetic oligonucleotide
  Sense strand starting at position 1232 of SEQ ID NO: 586643
guucuuaugagaugcgaaa

SEQ ID NO: 733529 - RNA, 19 nt, Artificial Sequence
  Description of Artificial Sequence: Synthetic oligonucleotide
  Antisense strand to SEQ ID NO: 733528
uuucgcaucucauaagaac

SEQ ID NO: 733530 - RNA, 19 nt, Artificial Sequence
  Description of Artificial Sequence: Synthetic oligonucleotide
  Sense strand starting at position 1265 of SEQ ID NO: 586643
gcaggugacaucuggaaag

SEQ ID NO: 733531 - RNA, 19 nt, Artificial Sequence
  Description of Artificial Sequence: Synthetic oligonucleotide
  Antisense strand to SEQ ID NO: 733530
cuuuccagaugucaccugc

SEQ ID NO: 733532 - RNA, 19 nt, Artificial Sequence
  Description of Artificial Sequence: Synthetic oligonucleotide
  Sense strand starting at position 1303 of SEQ ID NO: 586643
agcgauauaagcugaggau

SEQ ID NO: 733533 - RNA, 19 nt, Artificial Sequence
  Description of Artificial Sequence: Synthetic oligonucleotide
  Antisense strand to SEQ ID NO: 733532
auccucagcuuauaucgcu

SEQ ID NO: 733534 - RNA, 19 nt, Artificial Sequence
  Description of Artificial Sequence: Synthetic oligonucleotide
  Sense strand starting at position 1304 of SEQ ID NO: 586643
gcgauauaagcugaggauc

SEQ ID NO: 733535 - RNA, 19 nt, Artificial Sequence
  Description of Artificial Sequence: Synthetic oligonucleotide
  Antisense strand to SEQ ID NO: 733534
gauccucagcuuauaucgc

SEQ ID NO: 733536 - RNA, 19 nt, Artificial Sequence
  Description of Artificial Sequence: Synthetic oligonucleotide
  Sense strand starting at position 2036 of SEQ ID NO: 586643
gcgggaugucgugauggac

SEQ ID NO: 733537 - RNA, 19 nt, Artificial Sequence
  Description of Artificial Sequence: Synthetic oligonucleotide
  Antisense strand to SEQ ID NO: 733536
guccaucacgacaucccgc

SEQ ID NO: 733538 - RNA, 19 nt, Artificial Sequence
  Description of Artificial Sequence: Synthetic oligonucleotide
  Sense strand starting at position 2331 of SEQ ID NO: 586643
aggcucuucuccuuaaguu

SEQ ID NO: 733539 - RNA, 19 nt, Artificial Sequence
  Description of Artificial Sequence: Synthetic oligonucleotide
  Antisense strand to SEQ ID NO: 733538
aacuuaaggagaagagccu

SEQ ID NO: 733540 - RNA, 19 nt, Artificial Sequence
  Description of Artificial Sequence: Synthetic oligonucleotide
  Sense strand starting at position 2504 of SEQ ID NO: 586643
agacucaccugacauauga

SEQ ID NO: 733541 - RNA, 19 nt, Artificial Sequence
  Description of Artificial Sequence: Synthetic oligonucleotide
  Antisense strand to SEQ ID NO: 733540
ucauaugucaggugagucu

SEQ ID NO: 733542 - RNA, 19 nt, Artificial Sequence
  Description of Artificial Sequence: Synthetic oligonucleotide
  Sense strand starting at position 2531 of SEQ ID NO: 586643
augacucucuaggagaaau

SEQ ID NO: 733543 - RNA, 19 nt, Artificial Sequence
  Description of Artificial Sequence: Synthetic oligonucleotide
  Antisense strand to SEQ ID NO: 733542
auuucuccuagagagucau

SEQ ID NO: 733544 - RNA, 19 nt, Artificial Sequence
  Description of Artificial Sequence: Synthetic oligonucleotide
  Sense strand starting at position 2626 of SEQ ID NO: 586643
acuguaagcucccugagga

SEQ ID NO: 733545 - RNA, 19 nt, Artificial Sequence
  Description of Artificial Sequence: Synthetic oligonucleotide
  Antisense strand to SEQ ID NO: 733544
uccucagggagcuuacagu

SEQ ID NO: 733546 - RNA, 19 nt, Artificial Sequence
  Description of Artificial Sequence: Synthetic oligonucleotide
  Sense strand starting at position 2669 of SEQ ID NO: 586643
gugggaaaucccuggugca

SEQ ID NO: 733547 - RNA, 19 nt, Artificial Sequence
  Description of Artificial Sequence: Synthetic oligonucleotide
  Antisense strand to SEQ ID NO: 733546
ugcaccagggauuucccac

SEQ ID NO: 733548 - RNA, 19 nt, Artificial Sequence
  Description of Artificial Sequence: Synthetic oligonucleotide
  Sense strand starting at position 2702 of SEQ ID NO: 586643
gcagguguucucuaaagca

SEQ ID NO: 733549 - RNA, 19 nt, Artificial Sequence
  Description of Artificial Sequence: Synthetic oligonucleotide
  Antisense strand to SEQ ID NO: 733548
ugcuuuagagaacaccugc

SEQ ID NO: 733550 - RNA, 19 nt, Artificial Sequence
  Description of Artificial Sequence: Synthetic oligonucleotide
  Sense strand starting at position 2848 of SEQ ID NO: 586643
guaauauaguggucagagg

SEQ ID NO: 733551 - RNA, 19 nt, Artificial Sequence
  Description of Artificial Sequence: Synthetic oligonucleotide
  Antisense strand to SEQ ID NO: 733550
ccucugaccacuauauuac

SEQ ID NO: 733552 - RNA, 19 nt, Artificial Sequence
  Description of Artificial Sequence: Synthetic oligonucleotide
  Sense strand starting at position 3026 of SEQ ID NO: 586643
ccagcugucgaugauguua

SEQ ID NO: 733553 - RNA, 19 nt, Artificial Sequence
  Description of Artificial Sequence: Synthetic oligonucleotide
  Antisense strand to SEQ ID NO: 733552
uaacaucaucgacagcugg

SEQ ID NO: 733554 - RNA, 19 nt, Artificial Sequence
  Description of Artificial Sequence: Synthetic oligonucleotide
  Sense strand starting at position 3064 of SEQ ID NO: 586643
gaugaugcccagggaauau

SEQ ID NO: 733555 - RNA, 19 nt, Artificial Sequence
  Description of Artificial Sequence: Synthetic oligonucleotide
  Antisense strand to SEQ ID NO: 733554
auauucccugggcaucauc

SEQ ID NO: 733556 - RNA, 19 nt, Artificial Sequence
  Description of Artificial Sequence: Synthetic oligonucleotide
  Sense strand starting at position 3075 of SEQ ID NO: 586643
gggaauauuuguuggauga

SEQ ID NO: 733557 - RNA, 19 nt, Artificial Sequence
  Description of Artificial Sequence: Synthetic oligonucleotide
  Antisense strand to SEQ ID NO: 733556
ucauccaacaaauauuccc

SEQ ID NO: 733558 - RNA, 19 nt, Artificial Sequence
  Description of Artificial Sequence: Synthetic oligonucleotide
  Sense strand starting at position 3077 of SEQ ID NO: 586643
gaauauuuguuggaugauu

SEQ ID NO: 733559 - RNA, 19 nt, Artificial Sequence
  Description of Artificial Sequence: Synthetic oligonucleotide
  Antisense strand to SEQ ID NO: 733558
aaucauccaacaaauauuc

SEQ ID NO: 733560 - RNA, 19 nt, Artificial Sequence
  Description of Artificial Sequence: Synthetic oligonucleotide
  Sense strand starting at position 3088 of SEQ ID NO: 586643
ggaugauugaggcaagcca

SEQ ID NO: 733561 - RNA, 19 nt, Artificial Sequence
  Description of Artificial Sequence: Synthetic oligonucleotide
  Antisense strand to SEQ ID NO: 733560
uggcuugccucaaucaucc

SEQ ID NO: 733562 - RNA, 19 nt, Artificial Sequence
  Description of Artificial Sequence: Synthetic oligonucleotide
  Sense strand starting at position 3107 of SEQ ID NO: 586643
auaaauaucuaaggagaca

SEQ ID NO: 733563 - RNA, 19 nt, Artificial Sequence
  Description of Artificial Sequence: Synthetic oligonucleotide
  Antisense strand to SEQ ID NO: 733562
ugucuccuuagauauuuau

SEQ ID NO: 733564 - RNA, 19 nt, Artificial Sequence
  Description of Artificial Sequence: Synthetic oligonucleotide
  Sense strand starting at position 3220 of SEQ ID NO: 586643
gugggugaaucacuucaga

SEQ ID NO: 733565 - RNA, 19 nt, Artificial Sequence
  Description of Artificial Sequence: Synthetic oligonucleotide
  Antisense strand to SEQ ID NO: 733564
ucugaagugauucacccac

SEQ ID NO: 733566 - RNA, 19 nt, Artificial Sequence
  Description of Artificial Sequence: Synthetic oligonucleotide
  Sense strand starting at position 3471 of SEQ ID NO: 586643
cggcuuucugcugauuaua

SEQ ID NO: 733567 - RNA, 19 nt, Artificial Sequence
  Description of Artificial Sequence: Synthetic oligonucleotide
  Antisense strand to SEQ ID NO: 733566
uauaaucagcagaaagccg

SEQ ID NO: 733568 - RNA, 19 nt, Artificial Sequence
  Description of Artificial Sequence: Synthetic oligonucleotide
  Sense strand starting at position 3473 of SEQ ID NO: 586643
gcuuucugcugauuauaug

SEQ ID NO: 733569 - RNA, 19 nt, Artificial Sequence
  Description of Artificial Sequence: Synthetic oligonucleotide
  Antisense strand to SEQ ID NO: 733568
cauauaaucagcagaaagc

SEQ ID NO: 733570 - RNA, 19 nt, Artificial Sequence
  Description of Artificial Sequence: Synthetic oligonucleotide
  Sense strand starting at position 3479 of SEQ ID NO: 586643
ugcugauuauaugcagaau

SEQ ID NO: 733571 - RNA, 19 nt, Artificial Sequence
  Description of Artificial Sequence: Synthetic oligonucleotide
  Antisense strand to SEQ ID NO: 733570
auucugcauauaaucagca

SEQ ID NO: 733572 - RNA, 19 nt, Artificial Sequence
  Description of Artificial Sequence: Synthetic oligonucleotide
  Sense strand starting at position 3528 of SEQ ID NO: 586643
acacaaucacccuguugua

SEQ ID NO: 733573 - RNA, 19 nt, Artificial Sequence
  Description of Artificial Sequence: Synthetic oligonucleotide
  Antisense strand to SEQ ID NO: 733572
uacaacagggugauugugu

SEQ ID NO: 733574 - RNA, 19 nt, Artificial Sequence
  Description of Artificial Sequence: Synthetic oligonucleotide
  Sense strand starting at position 3868 of SEQ ID NO: 586643
ucaggaagcuucucacuuu

SEQ ID NO: 733575 - RNA, 19 nt, Artificial Sequence
  Description of Artificial Sequence: Synthetic oligonucleotide
  Antisense strand to SEQ ID NO: 733574
aaagugagaagcuuccuga

SEQ ID NO: 733576 - RNA, 19 nt, Artificial Sequence
  Description of Artificial Sequence: Synthetic oligonucleotide
  Sense strand starting at position 3975 of SEQ ID NO: 586643
ccugauaauccugguagug

SEQ ID NO: 733577 - RNA, 19 nt, Artificial Sequence
  Description of Artificial Sequence: Synthetic oligonucleotide
  Antisense strand to SEQ ID NO: 733576
cacuaccaggauuaucagg

SEQ ID NO: 733578 - RNA, 19 nt, Artificial Sequence
  Description of Artificial Sequence: Synthetic oligonucleotide
  Sense strand starting at position 228 of SEQ ID NO: 586644
ugaggagucucacuugaca

SEQ ID NO: 733579 - RNA, 19 nt, Artificial Sequence
  Description of Artificial Sequence: Synthetic oligonucleotide
  Antisense strand to SEQ ID NO: 733578
ugucaagugagacuccuca

SEQ ID NO: 733580 - RNA, 19 nt, Artificial Sequence
  Description of Artificial Sequence: Synthetic oligonucleotide
  Sense strand starting at position 373 of SEQ ID NO: 586644
cgcugauggccuugacuca

SEQ ID NO: 733581 - RNA, 19 nt, Artificial Sequence
  Description of Artificial Sequence: Synthetic oligonucleotide
  Antisense strand to SEQ ID NO: 733580
ugagucaaggccaucagcg

SEQ ID NO: 733582 - RNA, 19 nt, Artificial Sequence
  Description of Artificial Sequence: Synthetic oligonucleotide
  Sense strand starting at position 374 of SEQ ID NO: 586644
gcugauggccuugacucaa

SEQ ID NO: 733583 - RNA, 19 nt, Artificial Sequence
  Description of Artificial Sequence: Synthetic oligonucleotide
  Antisense strand to SEQ ID NO: 733582
uugagucaaggccaucagc

SEQ ID NO: 733584 - RNA, 19 nt, Artificial Sequence
  Description of Artificial Sequence: Synthetic oligonucleotide
  Sense strand starting at position 524 of SEQ ID NO: 586644
ggauuuaaauagcaccuau

SEQ ID NO: 733585 - RNA, 19 nt, Artificial Sequence
  Description of Artificial Sequence: Synthetic oligonucleotide
  Antisense strand to SEQ ID NO: 733584
auaggugcuauuuaaaucc

SEQ ID NO: 733586 - RNA, 19 nt, Artificial Sequence
  Description of Artificial Sequence: Synthetic oligonucleotide
  Sense strand starting at position 1031 of SEQ ID NO: 586644
aacaaacaccugggugauu

SEQ ID NO: 733587 - RNA, 19 nt, Artificial Sequence
  Description of Artificial Sequence: Synthetic oligonucleotide
  Antisense strand to SEQ ID NO: 733586
aaucacccagguguuuguu

SEQ ID NO: 733588 - RNA, 19 nt, Artificial Sequence
  Description of Artificial Sequence: Synthetic oligonucleotide
  Sense strand starting at position 1072 of SEQ ID NO: 586644
acauucuauccauggguga

SEQ ID NO: 733589 - RNA, 19 nt, Artificial Sequence
  Description of Artificial Sequence: Synthetic oligonucleotide
  Antisense strand to SEQ ID NO: 733588
ucacccauggauagaaugu

SEQ ID NO: 733590 - RNA, 19 nt, Artificial Sequence
  Description of Artificial Sequence: Synthetic oligonucleotide
  Sense strand starting at position 1074 of SEQ ID NO: 586644
auucuauccaugggugagu

SEQ ID NO: 733591 - RNA, 19 nt, Artificial Sequence
  Description of Artificial Sequence: Synthetic oligonucleotide
  Antisense strand to SEQ ID NO: 733590
acucacccauggauagaau

SEQ ID NO: 733592 - RNA, 19 nt, Artificial Sequence
  Description of Artificial Sequence: Synthetic oligonucleotide
  Sense strand starting at position 1087 of SEQ ID NO: 586644
gugaguuccaccgagucuu

SEQ ID NO: 733593 - RNA, 19 nt, Artificial Sequence
  Description of Artificial Sequence: Synthetic oligonucleotide
  Antisense strand to SEQ ID NO: 733592
aagacucgguggaacucac

SEQ ID NO: 733594 - RNA, 19 nt, Artificial Sequence
  Description of Artificial Sequence: Synthetic oligonucleotide
  Sense strand starting at position 1187 of SEQ ID NO: 586644
acucaugugccagauucua

SEQ ID NO: 733595 - RNA, 19 nt, Artificial Sequence
  Description of Artificial Sequence: Synthetic oligonucleotide
  Antisense strand to SEQ ID NO: 733594
uagaaucuggcacaugagu

SEQ ID NO: 733596 - RNA, 19 nt, Artificial Sequence
  Description of Artificial Sequence: Synthetic oligonucleotide
  Sense strand starting at position 1192 of SEQ ID NO: 586644
ugugccagauucuaccauu

SEQ ID NO: 733597 - RNA, 19 nt, Artificial Sequence
  Description of Artificial Sequence: Synthetic oligonucleotide
  Antisense strand to SEQ ID NO: 733596
aaugguagaaucuggcaca

SEQ ID NO: 733598 - RNA, 19 nt, Artificial Sequence
  Description of Artificial Sequence: Synthetic oligonucleotide
  Sense strand starting at position 1269 of SEQ ID NO: 586644
agugucacucuugaaaucu

SEQ ID NO: 733599 - RNA, 19 nt, Artificial Sequence
  Description of Artificial Sequence: Synthetic oligonucleotide
  Antisense strand to SEQ ID NO: 733598
agauuucaagagugacacu

SEQ ID NO: 733600 - RNA, 19 nt, Artificial Sequence
  Description of Artificial Sequence: Synthetic oligonucleotide
  Sense strand starting at position 1278 of SEQ ID NO: 586644
cuugaaaucugcuuagaac

SEQ ID NO: 733601 - RNA, 19 nt, Artificial Sequence
  Description of Artificial Sequence: Synthetic oligonucleotide
  Antisense strand to SEQ ID NO: 733600
guucuaagcagauuucaag

SEQ ID NO: 733602 - RNA, 19 nt, Artificial Sequence
  Description of Artificial Sequence: Synthetic oligonucleotide
  Sense strand starting at position 1279 of SEQ ID NO: 586644
uugaaaucugcuuagaacc

SEQ ID NO: 733603 - RNA, 19 nt, Artificial Sequence
  Description of Artificial Sequence: Synthetic oligonucleotide
  Antisense strand to SEQ ID NO: 733602
gguucuaagcagauuucaa

SEQ ID NO: 733604 - RNA, 19 nt, Artificial Sequence
  Description of Artificial Sequence: Synthetic oligonucleotide
  Sense strand starting at position 1358 of SEQ ID NO: 586644
agccucggguccucagaaa

SEQ ID NO: 733605 - RNA, 19 nt, Artificial Sequence
  Description of Artificial Sequence: Synthetic oligonucleotide
  Antisense strand to SEQ ID NO: 733604
uuucugaggacccgaggcu

SEQ ID NO: 733606 - RNA, 19 nt, Artificial Sequence
  Description of Artificial Sequence: Synthetic oligonucleotide
  Sense strand starting at position 1437 of SEQ ID NO: 586644
acucccuaguucuguggaa

SEQ ID NO: 733607 - RNA, 19 nt, Artificial Sequence
  Description of Artificial Sequence: Synthetic oligonucleotide
  Antisense strand to SEQ ID NO: 733606
uuccacagaacuagggagu

SEQ ID NO: 733608 - RNA, 19 nt, Artificial Sequence
  Description of Artificial Sequence: Synthetic oligonucleotide
  Sense strand starting at position 1477 of SEQ ID NO: 586644
ucuccuugcucuguuuaua

SEQ ID NO: 733609 - RNA, 19 nt, Artificial Sequence
  Description of Artificial Sequence: Synthetic oligonucleotide
  Antisense strand to SEQ ID NO: 733608
uauaaacagagcaaggaga

SEQ ID NO: 733610 - RNA, 19 nt, Artificial Sequence
  Description of Artificial Sequence: Synthetic oligonucleotide
  Sense strand starting at position 2291 of SEQ ID NO: 586644
cugcuucuguccuuuggau

SEQ ID NO: 733611 - RNA, 19 nt, Artificial Sequence
  Description of Artificial Sequence: Synthetic oligonucleotide
  Antisense strand to SEQ ID NO: 733610
auccaaaggacagaagcag

SEQ ID NO: 733612 - RNA, 19 nt, Artificial Sequence
  Description of Artificial Sequence: Synthetic oligonucleotide
  Sense strand starting at position 2392 of SEQ ID NO: 586644
cagagcuggucuucucuga

SEQ ID NO: 733613 - RNA, 19 nt, Artificial Sequence
  Description of Artificial Sequence: Synthetic oligonucleotide
  Antisense strand to SEQ ID NO: 733612
ucagagaagaccagcucug

SEQ ID NO: 733614 - RNA, 19 nt, Artificial Sequence
  Description of Artificial Sequence: Synthetic oligonucleotide
  Sense strand starting at position 2396 of SEQ ID NO: 586644
gcuggucuucucugaucca

SEQ ID NO: 733615 - RNA, 19 nt, Artificial Sequence
  Description of Artificial Sequence: Synthetic oligonucleotide
  Antisense strand to SEQ ID NO: 733614
uggaucagagaagaccagc

SEQ ID NO: 733616 - RNA, 19 nt, Artificial Sequence
  Description of Artificial Sequence: Synthetic oligonucleotide
  Sense strand starting at position 2397 of SEQ ID NO: 586644
cuggucuucucugauccaa

SEQ ID NO: 733617 - RNA, 19 nt, Artificial Sequence
  Description of Artificial Sequence: Synthetic oligonucleotide
  Antisense strand to SEQ ID NO: 733616
uuggaucagagaagaccag

SEQ ID NO: 733618 - RNA, 19 nt, Artificial Sequence
  Description of Artificial Sequence: Synthetic oligonucleotide
  Sense strand starting at position 2416 of SEQ ID NO: 586644
ggaccaguccuugaguucu

SEQ ID NO: 733619 - RNA, 19 nt, Artificial Sequence
  Description of Artificial Sequence: Synthetic oligonucleotide
  Antisense strand to SEQ ID NO: 733618
agaacucaaggacuggucc

SEQ ID NO: 733620 - RNA, 19 nt, Artificial Sequence
  Description of Artificial Sequence: Synthetic oligonucleotide
  Sense strand starting at position 3287 of SEQ ID NO: 586644
gugaacugguaaugaagau

SEQ ID NO: 733621 - RNA, 19 nt, Artificial Sequence
  Description of Artificial Sequence: Synthetic oligonucleotide
  Antisense strand to SEQ ID NO: 733620
aucuucauuaccaguucac

SEQ ID NO: 733622 - RNA, 19 nt, Artificial Sequence
  Description of Artificial Sequence: Synthetic oligonucleotide
  Sense strand starting at position 3330 of SEQ ID NO: 586644
ucaauaugcagugaugugu

SEQ ID NO: 733623 - RNA, 19 nt, Artificial Sequence
  Description of Artificial Sequence: Synthetic oligonucleotide
  Antisense strand to SEQ ID NO: 733622
acacaucacugcauauuga

SEQ ID NO: 733624 - RNA, 19 nt, Artificial Sequence
  Description of Artificial Sequence: Synthetic oligonucleotide
  Sense strand starting at position 3334 of SEQ ID NO: 586644
uaugcagugaugugucaga

SEQ ID NO: 733625 - RNA, 19 nt, Artificial Sequence
  Description of Artificial Sequence: Synthetic oligonucleotide
  Antisense strand to SEQ ID NO: 733624
ucugacacaucacugcaua

SEQ ID NO: 733626 - RNA, 19 nt, Artificial Sequence
  Description of Artificial Sequence: Synthetic oligonucleotide
  Sense strand starting at position 3366 of SEQ ID NO: 586644
agauuauauguaugcagau

SEQ ID NO: 733627 - RNA, 19 nt, Artificial Sequence
  Description of Artificial Sequence: Synthetic oligonucleotide
  Antisense strand to SEQ ID NO: 733626
aucugcauacauauaaucu

SEQ ID NO: 733628 - RNA, 19 nt, Artificial Sequence
  Description of Artificial Sequence: Synthetic oligonucleotide
  Sense strand starting at position 3367 of SEQ ID NO: 586644
gauuauauguaugcagauc

SEQ ID NO: 733629 - RNA, 19 nt, Artificial Sequence
  Description of Artificial Sequence: Synthetic oligonucleotide
  Antisense strand to SEQ ID NO: 733628
gaucugcauacauauaauc

SEQ ID NO: 733630 - RNA, 19 nt, Artificial Sequence
  Description of Artificial Sequence: Synthetic oligonucleotide
  Sense strand starting at position 3577 of SEQ ID NO: 586644
cuggauguggcggaucuau

SEQ ID NO: 733631 - RNA, 19 nt, Artificial Sequence
  Description of Artificial Sequence: Synthetic oligonucleotide
  Antisense strand to SEQ ID NO: 733630
auagauccgccacauccag

SEQ ID NO: 733632 - RNA, 19 nt, Artificial Sequence
  Description of Artificial Sequence: Synthetic oligonucleotide
  Sense strand starting at position 3585 of SEQ ID NO: 586644
ggcggaucuaucuaucuau

SEQ ID NO: 733633 - RNA, 19 nt, Artificial Sequence
  Description of Artificial Sequence: Synthetic oligonucleotide
  Antisense strand to SEQ ID NO: 733632
auagauagauagauccgcc

SEQ ID NO: 733634 - RNA, 19 nt, Artificial Sequence
  Description of Artificial Sequence: Synthetic oligonucleotide
  Sense strand starting at position 3880 of SEQ ID NO: 586644
caaggucuauccugaugag

SEQ ID NO: 733635 - RNA, 19 nt, Artificial Sequence
  Description of Artificial Sequence: Synthetic oligonucleotide
  Antisense strand to SEQ ID NO: 733634
cucaucaggauagaccuug

SEQ ID NO: 733636 - RNA, 19 nt, Artificial Sequence
  Description of Artificial Sequence: Synthetic oligonucleotide
  Sense strand starting at position 3883 of SEQ ID NO: 586644
ggucuauccugaugagggu

SEQ ID NO: 733637 - RNA, 19 nt, Artificial Sequence
  Description of Artificial Sequence: Synthetic oligonucleotide
  Antisense strand to SEQ ID NO: 733636
acccucaucaggauagacc

SEQ ID NO: 733638 - RNA, 19 nt, Artificial Sequence
  Description of Artificial Sequence: Synthetic oligonucleotide
  Sense strand starting at position 3915 of SEQ ID NO: 586644
gagggaaaguuuggcauga

SEQ ID NO: 733639 - RNA, 19 nt, Artificial Sequence
  Description of Artificial Sequence: Synthetic oligonucleotide
  Antisense strand to SEQ ID NO: 733638
ucaugccaaacuuucccuc

SEQ ID NO: 733640 - RNA, 19 nt, Artificial Sequence
  Description of Artificial Sequence: Synthetic oligonucleotide
  Sense strand starting at position 3916 of SEQ ID NO: 586644
agggaaaguuuggcaugaa

SEQ ID NO: 733641 - RNA, 19 nt, Artificial Sequence
  Description of Artificial Sequence: Synthetic oligonucleotide
  Antisense strand to SEQ ID NO: 733640
uucaugccaaacuuucccu

SEQ ID NO: 733642 - RNA, 19 nt, Artificial Sequence
  Description of Artificial Sequence: Synthetic oligonucleotide
  Sense strand starting at position 3917 of SEQ ID NO: 586644
gggaaaguuuggcaugaac

SEQ ID NO: 733643 - RNA, 19 nt, Artificial Sequence
  Description of Artificial Sequence: Synthetic oligonucleotide
  Antisense strand to SEQ ID NO: 733642
guucaugccaaacuuuccc

SEQ ID NO: 733644 - RNA, 19 nt, Artificial Sequence
  Description of Artificial Sequence: Synthetic oligonucleotide
  Sense strand starting at position 3919 of SEQ ID NO: 586644
gaaaguuuggcaugaacua

SEQ ID NO: 733645 - RNA, 19 nt, Artificial Sequence
  Description of Artificial Sequence: Synthetic oligonucleotide
  Antisense strand to SEQ ID NO: 733644
uaguucaugccaaacuuuc

SEQ ID NO: 733646 - RNA, 19 nt, Artificial Sequence
  Description of Artificial Sequence: Synthetic oligonucleotide
  Sense strand starting at position 108 of SEQ ID NO: 586645
gauggauucuuacuguacu

SEQ ID NO: 733647 - RNA, 19 nt, Artificial Sequence
  Description of Artificial Sequence: Synthetic oligonucleotide
  Antisense strand to SEQ ID NO: 733646
aguacaguaagaauccauc

SEQ ID NO: 733648 - RNA, 19 nt, Artificial Sequence
  Description of Artificial Sequence: Synthetic oligonucleotide
  Sense strand starting at position 111 of SEQ ID NO: 586645
ggauucuuacuguacucau

SEQ ID NO: 733649 - RNA, 19 nt, Artificial Sequence
  Description of Artificial Sequence: Synthetic oligonucleotide
  Antisense strand to SEQ ID NO: 733648
augaguacaguaagaaucc

SEQ ID NO: 733650 - RNA, 19 nt, Artificial Sequence
  Description of Artificial Sequence: Synthetic oligonucleotide
  Sense strand starting at position 204 of SEQ ID NO: 586645
aaaggucagccuggugaga

SEQ ID NO: 733651 - RNA, 19 nt, Artificial Sequence
  Description of Artificial Sequence: Synthetic oligonucleotide
  Antisense strand to SEQ ID NO: 733650
ucucaccaggcugaccuuu

SEQ ID NO: 733652 - RNA, 19 nt, Artificial Sequence
  Description of Artificial Sequence: Synthetic oligonucleotide
  Sense strand starting at position 231 of SEQ ID NO: 586645
ucaagagagugauugguuu

SEQ ID NO: 733653 - RNA, 19 nt, Artificial Sequence
  Description of Artificial Sequence: Synthetic oligonucleotide
  Antisense strand to SEQ ID NO: 733652
aaaccaaucacucucuuga

SEQ ID NO: 733654 - RNA, 19 nt, Artificial Sequence
  Description of Artificial Sequence: Synthetic oligonucleotide
  Sense strand starting at position 233 of SEQ ID NO: 586645
aagagagugauugguuuau

SEQ ID NO: 733655 - RNA, 19 nt, Artificial Sequence
  Description of Artificial Sequence: Synthetic oligonucleotide
  Antisense strand to SEQ ID NO: 733654
auaaaccaaucacucucuu

SEQ ID NO: 733656 - RNA, 19 nt, Artificial Sequence
  Description of Artificial Sequence: Synthetic oligonucleotide
  Sense strand starting at position 235 of SEQ ID NO: 586645
gagagugauugguuuauca

SEQ ID NO: 733657 - RNA, 19 nt, Artificial Sequence
  Description of Artificial Sequence: Synthetic oligonucleotide
  Antisense strand to SEQ ID NO: 733656
ugauaaaccaaucacucuc

SEQ ID NO: 733658 - RNA, 19 nt, Artificial Sequence
  Description of Artificial Sequence: Synthetic oligonucleotide
  Sense strand starting at position 237 of SEQ ID NO: 586645
gagugauugguuuaucaug

SEQ ID NO: 733659 - RNA, 19 nt, Artificial Sequence
  Description of Artificial Sequence: Synthetic oligonucleotide
  Antisense strand to SEQ ID NO: 733658
caugauaaaccaaucacuc

SEQ ID NO: 733660 - RNA, 19 nt, Artificial Sequence
  Description of Artificial Sequence: Synthetic oligonucleotide
  Sense strand starting at position 415 of SEQ ID NO: 586645
gggagucuugagugacuaa

SEQ ID NO: 733661 - RNA, 19 nt, Artificial Sequence
  Description of Artificial Sequence: Synthetic oligonucleotide
  Antisense strand to SEQ ID NO: 733660
uuagucacucaagacuccc

SEQ ID NO: 733662 - RNA, 19 nt, Artificial Sequence
  Description of Artificial Sequence: Synthetic oligonucleotide
  Sense strand starting at position 416 of SEQ ID NO: 586645
ggagucuugagugacuaau

SEQ ID NO: 733663 - RNA, 19 nt, Artificial Sequence
  Description of Artificial Sequence: Synthetic oligonucleotide
  Antisense strand to SEQ ID NO: 733662
auuagucacucaagacucc

SEQ ID NO: 733664 - RNA, 19 nt, Artificial Sequence
  Description of Artificial Sequence: Synthetic oligonucleotide
  Sense strand starting at position 418 of SEQ ID NO: 586645
agucuugagugacuaauua

SEQ ID NO: 733665 - RNA, 19 nt, Artificial Sequence
  Description of Artificial Sequence: Synthetic oligonucleotide
  Antisense strand to SEQ ID NO: 733664
uaauuagucacucaagacu

SEQ ID NO: 733666 - RNA, 19 nt, Artificial Sequence
  Description of Artificial Sequence: Synthetic oligonucleotide
  Sense strand starting at position 422 of SEQ ID NO: 586645
uugagugacuaauuacacu

SEQ ID NO: 733667 - RNA, 19 nt, Artificial Sequence
  Description of Artificial Sequence: Synthetic oligonucleotide
  Antisense strand to SEQ ID NO: 733666
aguguaauuagucacucaa

SEQ ID NO: 733668 - RNA, 19 nt, Artificial Sequence
  Description of Artificial Sequence: Synthetic oligonucleotide
  Sense strand starting at position 628 of SEQ ID NO: 586645
cucucauggccagacaaua

SEQ ID NO: 733669 - RNA, 19 nt, Artificial Sequence
  Description of Artificial Sequence: Synthetic oligonucleotide
  Antisense strand to SEQ ID NO: 733668
uauugucuggccaugagag

SEQ ID NO: 733670 - RNA, 19 nt, Artificial Sequence
  Description of Artificial Sequence: Synthetic oligonucleotide
  Sense strand starting at position 788 of SEQ ID NO: 586645
cuuuauagagcuuaaaugu

SEQ ID NO: 733671 - RNA, 19 nt, Artificial Sequence
  Description of Artificial Sequence: Synthetic oligonucleotide
  Antisense strand to SEQ ID NO: 733670
acauuuaagcucuauaaag

SEQ ID NO: 733672 - RNA, 19 nt, Artificial Sequence
  Description of Artificial Sequence: Synthetic oligonucleotide
  Sense strand starting at position 826 of SEQ ID NO: 586645
ugaugauuucuuugugguu

SEQ ID NO: 733673 - RNA, 19 nt, Artificial Sequence
  Description of Artificial Sequence: Synthetic oligonucleotide
  Antisense strand to SEQ ID NO: 733672
aaccacaaagaaaucauca

SEQ ID NO: 733674 - RNA, 19 nt, Artificial Sequence
  Description of Artificial Sequence: Synthetic oligonucleotide
  Sense strand starting at position 885 of SEQ ID NO: 586645
uggccauuauaguuagaac

SEQ ID NO: 733675 - RNA, 19 nt, Artificial Sequence
  Description of Artificial Sequence: Synthetic oligonucleotide
  Antisense strand to SEQ ID NO: 733674
guucuaacuauaauggcca

SEQ ID NO: 733676 - RNA, 19 nt, Artificial Sequence
  Description of Artificial Sequence: Synthetic oligonucleotide
  Sense strand starting at position 965 of SEQ ID NO: 586645
ccuacuucuggguagcuau

SEQ ID NO: 733677 - RNA, 19 nt, Artificial Sequence
  Description of Artificial Sequence: Synthetic oligonucleotide
  Antisense strand to SEQ ID NO: 733676
auagcuacccagaaguagg

SEQ ID NO: 733678 - RNA, 19 nt, Artificial Sequence
  Description of Artificial Sequence: Synthetic oligonucleotide
  Sense strand starting at position 997 of SEQ ID NO: 586645
cugcaagagcaagaguauu

SEQ ID NO: 733679 - RNA, 19 nt, Artificial Sequence
  Description of Artificial Sequence: Synthetic oligonucleotide
  Antisense strand to SEQ ID NO: 733678
aauacucuugcucuugcag

SEQ ID NO: 733680 - RNA, 19 nt, Artificial Sequence
  Description of Artificial Sequence: Synthetic oligonucleotide
  Sense strand starting at position 1005 of SEQ ID NO: 586645
gcaagaguauuuguaagcu

SEQ ID NO: 733681 - RNA, 19 nt, Artificial Sequence
  Description of Artificial Sequence: Synthetic oligonucleotide
  Antisense strand to SEQ ID NO: 733680
agcuuacaaauacucuugc

SEQ ID NO: 733682 - RNA, 19 nt, Artificial Sequence
  Description of Artificial Sequence: Synthetic oligonucleotide
  Sense strand starting at position 1011 of SEQ ID NO: 586645
guauuuguaagcuguggau

SEQ ID NO: 733683 - RNA, 19 nt, Artificial Sequence
  Description of Artificial Sequence: Synthetic oligonucleotide
  Antisense strand to SEQ ID NO: 733682
auccacagcuuacaaauac

SEQ ID NO: 733684 - RNA, 19 nt, Artificial Sequence
  Description of Artificial Sequence: Synthetic oligonucleotide
  Sense strand starting at position 1025 of SEQ ID NO: 586645
uggauuaugucccuaggau

SEQ ID NO: 733685 - RNA, 19 nt, Artificial Sequence
  Description of Artificial Sequence: Synthetic oligonucleotide
  Antisense strand to SEQ ID NO: 733684
auccuagggacauaaucca

SEQ ID NO: 733686 - RNA, 19 nt, Artificial Sequence
  Description of Artificial Sequence: Synthetic oligonucleotide
  Sense strand starting at position 1121 of SEQ ID NO: 586645
guucucggugaucauuaaa

SEQ ID NO: 733687 - RNA, 19 nt, Artificial Sequence
  Description of Artificial Sequence: Synthetic oligonucleotide
  Antisense strand to SEQ ID NO: 733686
uuuaaugaucaccgagaac

SEQ ID NO: 733688 - RNA, 19 nt, Artificial Sequence
  Description of Artificial Sequence: Synthetic oligonucleotide
  Sense strand starting at position 1210 of SEQ ID NO: 586645
ccuguaucucaaggucaaa

SEQ ID NO: 733689 - RNA, 19 nt, Artificial Sequence
  Description of Artificial Sequence: Synthetic oligonucleotide
  Antisense strand to SEQ ID NO: 733688
uuugaccuugagauacagg

SEQ ID NO: 733690 - RNA, 19 nt, Artificial Sequence
  Description of Artificial Sequence: Synthetic oligonucleotide
  Sense strand starting at position 1440 of SEQ ID NO: 586645
aggaccuugugaucuuacu

SEQ ID NO: 733691 - RNA, 19 nt, Artificial Sequence
  Description of Artificial Sequence: Synthetic oligonucleotide
  Antisense strand to SEQ ID NO: 733690
aguaagaucacaagguccu

SEQ ID NO: 733692 - RNA, 19 nt, Artificial Sequence
  Description of Artificial Sequence: Synthetic oligonucleotide
  Sense strand starting at position 1505 of SEQ ID NO: 586645
uuuguuugaccgucuguuu

SEQ ID NO: 733693 - RNA, 19 nt, Artificial Sequence
  Description of Artificial Sequence: Synthetic oligonucleotide
  Antisense strand to SEQ ID NO: 733692
aaacagacggucaaacaaa

SEQ ID NO: 733694 - RNA, 19 nt, Artificial Sequence
  Description of Artificial Sequence: Synthetic oligonucleotide
  Sense strand starting at position 1985 of SEQ ID NO: 586645
guaauuuggucauaaggaa

SEQ ID NO: 733695 - RNA, 19 nt, Artificial Sequence
  Description of Artificial Sequence: Synthetic oligonucleotide
  Antisense strand to SEQ ID NO: 733694
uuccuuaugaccaaauuac

SEQ ID NO: 733696 - RNA, 19 nt, Artificial Sequence
  Description of Artificial Sequence: Synthetic oligonucleotide
  Sense strand starting at position 2017 of SEQ ID NO: 586645
uggaguagcaguuaaucaa

SEQ ID NO: 733697 - RNA, 19 nt, Artificial Sequence
  Description of Artificial Sequence: Synthetic oligonucleotide
  Antisense strand to SEQ ID NO: 733696
uugauuaacugcuacucca

SEQ ID NO: 733698 - RNA, 19 nt, Artificial Sequence
  Description of Artificial Sequence: Synthetic oligonucleotide
  Sense strand starting at position 2020 of SEQ ID NO: 586645
aguagcaguuaaucaacua

SEQ ID NO: 733699 - RNA, 19 nt, Artificial Sequence
  Description of Artificial Sequence: Synthetic oligonucleotide
  Antisense strand to SEQ ID NO: 733698
uaguugauuaacugcuacu

SEQ ID NO: 733700 - RNA, 19 nt, Artificial Sequence
  Description of Artificial Sequence: Synthetic oligonucleotide
  Sense strand starting at position 2138 of SEQ ID NO: 586645
ucuuguuucccaggaaaua

SEQ ID NO: 733701 - RNA, 19 nt, Artificial Sequence
  Description of Artificial Sequence: Synthetic oligonucleotide
  Antisense strand to SEQ ID NO: 733700
uauuuccugggaaacaaga

SEQ ID NO: 733702 - RNA, 19 nt, Artificial Sequence
  Description of Artificial Sequence: Synthetic oligonucleotide
  Sense strand starting at position 2199 of SEQ ID NO: 586645
aggucuuacuaagugauug

SEQ ID NO: 733703 - RNA, 19 nt, Artificial Sequence
  Description of Artificial Sequence: Synthetic oligonucleotide
  Antisense strand to SEQ ID NO: 733702
caaucacuuaguaagaccu

SEQ ID NO: 733704 - RNA, 19 nt, Artificial Sequence
  Description of Artificial Sequence: Synthetic oligonucleotide
  Sense strand starting at position 2200 of SEQ ID NO: 586645
ggucuuacuaagugauuga

SEQ ID NO: 733705 - RNA, 19 nt, Artificial Sequence
  Description of Artificial Sequence: Synthetic oligonucleotide
  Antisense strand to SEQ ID NO: 733704
ucaaucacuuaguaagacc

SEQ ID NO: 733706 - RNA, 19 nt, Artificial Sequence
  Description of Artificial Sequence: Synthetic oligonucleotide
  Sense strand starting at position 2203 of SEQ ID NO: 586645
cuuacuaagugauugaaau

SEQ ID NO: 733707 - RNA, 19 nt, Artificial Sequence
  Description of Artificial Sequence: Synthetic oligonucleotide
  Antisense strand to SEQ ID NO: 733706
auuucaaucacuuaguaag

SEQ ID NO: 733708 - RNA, 19 nt, Artificial Sequence
  Description of Artificial Sequence: Synthetic oligonucleotide
  Sense strand starting at position 2586 of SEQ ID NO: 586645
aagugauuauaucuggauu

SEQ ID NO: 733709 - RNA, 19 nt, Artificial Sequence
  Description of Artificial Sequence: Synthetic oligonucleotide
  Antisense strand to SEQ ID NO: 733708
aauccagauauaaucacuu

SEQ ID NO: 733710 - RNA, 19 nt, Artificial Sequence
  Description of Artificial Sequence: Synthetic oligonucleotide
  Sense strand starting at position 2738 of SEQ ID NO: 586645
gacagacagucccuguaua

SEQ ID NO: 733711 - RNA, 19 nt, Artificial Sequence
  Description of Artificial Sequence: Synthetic oligonucleotide
  Antisense strand to SEQ ID NO: 733710
uauacagggacugucuguc

SEQ ID NO: 733712 - RNA, 19 nt, Artificial Sequence
  Description of Artificial Sequence: Synthetic oligonucleotide
  Sense strand starting at position 2739 of SEQ ID NO: 586645
acagacagucccuguauau

SEQ ID NO: 733713 - RNA, 19 nt, Artificial Sequence
  Description of Artificial Sequence: Synthetic oligonucleotide
  Antisense strand to SEQ ID NO: 733712
auauacagggacugucugu

SEQ ID NO: 733714 - RNA, 19 nt, Artificial Sequence
  Description of Artificial Sequence: Synthetic oligonucleotide
  Sense strand starting at position 2804 of SEQ ID NO: 586645
acagauaaaucaguaagcu

SEQ ID NO: 733715 - RNA, 19 nt, Artificial Sequence
  Description of Artificial Sequence: Synthetic oligonucleotide
  Antisense strand to SEQ ID NO: 733714
agcuuacugauuuaucugu

SEQ ID NO: 733716 - RNA, 19 nt, Artificial Sequence
  Description of Artificial Sequence: Synthetic oligonucleotide
  Sense strand starting at position 2994 of SEQ ID NO: 586645
uguggaagagaugguuaau

SEQ ID NO: 733717 - RNA, 19 nt, Artificial Sequence
  Description of Artificial Sequence: Synthetic oligonucleotide
  Antisense strand to SEQ ID NO: 733716
auuaaccaucucuuccaca

SEQ ID NO: 733718 - RNA, 19 nt, Artificial Sequence
  Description of Artificial Sequence: Synthetic oligonucleotide
  Sense strand starting at position 3152 of SEQ ID NO: 586645
ugcugaacaggguauuagu

SEQ ID NO: 733719 - RNA, 19 nt, Artificial Sequence
  Description of Artificial Sequence: Synthetic oligonucleotide
  Antisense strand to SEQ ID NO: 733718
acuaauacccuguucagca

SEQ ID NO: 733720 - RNA, 19 nt, Artificial Sequence
  Description of Artificial Sequence: Synthetic oligonucleotide
  Sense strand starting at position 3355 of SEQ ID NO: 586645
ucuugaagacuaggucuca

SEQ ID NO: 733721 - RNA, 19 nt, Artificial Sequence
  Description of Artificial Sequence: Synthetic oligonucleotide
  Antisense strand to SEQ ID NO: 733720
ugagaccuagucuucaaga

SEQ ID NO: 733722 - RNA, 19 nt, Artificial Sequence
  Description of Artificial Sequence: Synthetic oligonucleotide
  Sense strand starting at position 3796 of SEQ ID NO: 586645
uguuauuugcagugguuau

SEQ ID NO: 733723 - RNA, 19 nt, Artificial Sequence
  Description of Artificial Sequence: Synthetic oligonucleotide
  Antisense strand to SEQ ID NO: 733722
auaaccacugcaaauaaca

SEQ ID NO: 733724 - RNA, 19 nt, Artificial Sequence
  Description of Artificial Sequence: Synthetic oligonucleotide
  Sense strand starting at position 3797 of SEQ ID NO: 586645
guuauuugcagugguuaug

SEQ ID NO: 733725 - RNA, 19 nt, Artificial Sequence
  Description of Artificial Sequence: Synthetic oligonucleotide
  Antisense strand to SEQ ID NO: 733724
cauaaccacugcaaauaac

SEQ ID NO: 733726 - RNA, 19 nt, Artificial Sequence
  Description of Artificial Sequence: Synthetic oligonucleotide
  Sense strand starting at position 437 of SEQ ID NO: 586646
gugguuuguuuguugagac

SEQ ID NO: 733727 - RNA, 19 nt, Artificial Sequence
  Description of Artificial Sequence: Synthetic oligonucleotide
  Antisense strand to SEQ ID NO: 733726
gucucaacaaacaaaccac

SEQ ID NO: 733728 - RNA, 19 nt, Artificial Sequence
  Description of Artificial Sequence: Synthetic oligonucleotide
  Sense strand starting at position 2273 of SEQ ID NO: 586646
ggcuaugagcuuuggcaac

SEQ ID NO: 733729 - RNA, 19 nt, Artificial Sequence
  Description of Artificial Sequence: Synthetic oligonucleotide
  Antisense strand to SEQ ID NO: 733728
guugccaaagcucauagcc

SEQ ID NO: 733730 - RNA, 19 nt, Artificial Sequence
  Description of Artificial Sequence: Synthetic oligonucleotide
  Sense strand starting at position 57 of SEQ ID NO: 586647
uuugcaaaccuagaguaua

SEQ ID NO: 733731 - RNA, 19 nt, Artificial Sequence
  Description of Artificial Sequence: Synthetic oligonucleotide
  Antisense strand to SEQ ID NO: 733730
uauacucuagguuugcaaa

SEQ ID NO: 733732 - RNA, 19 nt, Artificial Sequence
  Description of Artificial Sequence: Synthetic oligonucleotide
  Sense strand starting at position 175 of SEQ ID NO: 586647
ucuuaauuaugugucacaa

SEQ ID NO: 733733 - RNA, 19 nt, Artificial Sequence
  Description of Artificial Sequence: Synthetic oligonucleotide
  Antisense strand to SEQ ID NO: 733732
uugugacacauaauuaaga

SEQ ID NO: 733734 - RNA, 19 nt, Artificial Sequence
  Description of Artificial Sequence: Synthetic oligonucleotide
  Sense strand starting at position 447 of SEQ ID NO: 586647
uuuacuggauuguucuaua

SEQ ID NO: 733735 - RNA, 19 nt, Artificial Sequence
  Description of Artificial Sequence: Synthetic oligonucleotide
  Antisense strand to SEQ ID NO: 733734
uauagaacaauccaguaaa

SEQ ID NO: 733736 - RNA, 19 nt, Artificial Sequence
  Description of Artificial Sequence: Synthetic oligonucleotide
  Sense strand starting at position 452 of SEQ ID NO: 586647
uggauuguucuauacuacu

SEQ ID NO: 733737 - RNA, 19 nt, Artificial Sequence
  Description of Artificial Sequence: Synthetic oligonucleotide
  Antisense strand to SEQ ID NO: 733736
aguaguauagaacaaucca

SEQ ID NO: 733738 - RNA, 19 nt, Artificial Sequence
  Description of Artificial Sequence: Synthetic oligonucleotide
  Sense strand starting at position 482 of SEQ ID NO: 586647
acugaaguucccuguggau

SEQ ID NO: 733739 - RNA, 19 nt, Artificial Sequence
  Description of Artificial Sequence: Synthetic oligonucleotide
  Antisense strand to SEQ ID NO: 733738
auccacagggaacuucagu

SEQ ID NO: 733740 - RNA, 19 nt, Artificial Sequence
  Description of Artificial Sequence: Synthetic oligonucleotide
  Sense strand starting at position 488 of SEQ ID NO: 586647
guucccuguggauggauaa

SEQ ID NO: 733741 - RNA, 19 nt, Artificial Sequence
  Description of Artificial Sequence: Synthetic oligonucleotide
  Antisense strand to SEQ ID NO: 733740
uuauccauccacagggaac

SEQ ID NO: 733742 - RNA, 19 nt, Artificial Sequence
  Description of Artificial Sequence: Synthetic oligonucleotide
  Sense strand starting at position 489 of SEQ ID NO: 586647
uucccuguggauggauaau

SEQ ID NO: 733743 - RNA, 19 nt, Artificial Sequence
  Description of Artificial Sequence: Synthetic oligonucleotide
  Antisense strand to SEQ ID NO: 733742
auuauccauccacagggaa

SEQ ID NO: 733744 - RNA, 19 nt, Artificial Sequence
  Description of Artificial Sequence: Synthetic oligonucleotide
  Sense strand starting at position 495 of SEQ ID NO: 586647
guggauggauaaucaguau

SEQ ID NO: 733745 - RNA, 19 nt, Artificial Sequence
  Description of Artificial Sequence: Synthetic oligonucleotide
  Antisense strand to SEQ ID NO: 733744
auacugauuauccauccac

SEQ ID NO: 733746 - RNA, 19 nt, Artificial Sequence
  Description of Artificial Sequence: Synthetic oligonucleotide
  Sense strand starting at position 530 of SEQ ID NO: 586647
gaaaucauguuguuuggag

SEQ ID NO: 733747 - RNA, 19 nt, Artificial Sequence
  Description of Artificial Sequence: Synthetic oligonucleotide
  Antisense strand to SEQ ID NO: 733746
cuccaaacaacaugauuuc

SEQ ID NO: 733748 - RNA, 19 nt, Artificial Sequence
  Description of Artificial Sequence: Synthetic oligonucleotide
  Sense strand starting at position 531 of SEQ ID NO: 586647
aaaucauguuguuuggaga

SEQ ID NO: 733749 - RNA, 19 nt, Artificial Sequence
  Description of Artificial Sequence: Synthetic oligonucleotide
  Antisense strand to SEQ ID NO: 733748
ucuccaaacaacaugauuu

SEQ ID NO: 733750 - RNA, 19 nt, Artificial Sequence
  Description of Artificial Sequence: Synthetic oligonucleotide
  Sense strand starting at position 538 of SEQ ID NO: 586647
guuguuuggagacauacau

SEQ ID NO: 733751 - RNA, 19 nt, Artificial Sequence
  Description of Artificial Sequence: Synthetic oligonucleotide
  Antisense strand to SEQ ID NO: 733750
auguaugucuccaaacaac

SEQ ID NO: 733752 - RNA, 19 nt, Artificial Sequence
  Description of Artificial Sequence: Synthetic oligonucleotide
  Sense strand starting at position 688 of SEQ ID NO: 586647
auguuucuuuggucuauuu

SEQ ID NO: 733753 - RNA, 19 nt, Artificial Sequence
  Description of Artificial Sequence: Synthetic oligonucleotide
  Antisense strand to SEQ ID NO: 733752
aaauagaccaaagaaacau

SEQ ID NO: 733754 - RNA, 19 nt, Artificial Sequence
  Description of Artificial Sequence: Synthetic oligonucleotide
  Sense strand starting at position 957 of SEQ ID NO: 586647
gaguaugcccuguaauaau

SEQ ID NO: 733755 - RNA, 19 nt, Artificial Sequence
  Description of Artificial Sequence: Synthetic oligonucleotide
  Antisense strand to SEQ ID NO: 733754
auuauuacagggcauacuc

SEQ ID NO: 733756 - RNA, 19 nt, Artificial Sequence
  Description of Artificial Sequence: Synthetic oligonucleotide
  Sense strand starting at position 966 of SEQ ID NO: 586647
cuguaauaaucacugaguc

SEQ ID NO: 733757 - RNA, 19 nt, Artificial Sequence
  Description of Artificial Sequence: Synthetic oligonucleotide
  Antisense strand to SEQ ID NO: 733756
gacucagugauuauuacag

SEQ ID NO: 733758 - RNA, 19 nt, Artificial Sequence
  Description of Artificial Sequence: Synthetic oligonucleotide
  Sense strand starting at position 967 of SEQ ID NO: 586647
uguaauaaucacugagucu

SEQ ID NO: 733759 - RNA, 19 nt, Artificial Sequence
  Description of Artificial Sequence: Synthetic oligonucleotide
  Antisense strand to SEQ ID NO: 733758
agacucagugauuauuaca

SEQ ID NO: 733760 - RNA, 19 nt, Artificial Sequence
  Description of Artificial Sequence: Synthetic oligonucleotide
  Sense strand starting at position 1085 of SEQ ID NO: 586647
uucuguaccucacuuuaga

SEQ ID NO: 733761 - RNA, 19 nt, Artificial Sequence
  Description of Artificial Sequence: Synthetic oligonucleotide
  Antisense strand to SEQ ID NO: 733760
ucuaaagugagguacagaa

SEQ ID NO: 733762 - RNA, 19 nt, Artificial Sequence
  Description of Artificial Sequence: Synthetic oligonucleotide
  Sense strand starting at position 1378 of SEQ ID NO: 586647
cucccaugauaaguagauu

SEQ ID NO: 733763 - RNA, 19 nt, Artificial Sequence
  Description of Artificial Sequence: Synthetic oligonucleotide
  Antisense strand to SEQ ID NO: 733762
aaucuacuuaucaugggag

SEQ ID NO: 733764 - RNA, 19 nt, Artificial Sequence
  Description of Artificial Sequence: Synthetic oligonucleotide
  Sense strand starting at position 1444 of SEQ ID NO: 586647
uuucuuucccaaggaauag

SEQ ID NO: 733765 - RNA, 19 nt, Artificial Sequence
  Description of Artificial Sequence: Synthetic oligonucleotide
  Antisense strand to SEQ ID NO: 733764
cuauuccuugggaaagaaa

SEQ ID NO: 733766 - RNA, 19 nt, Artificial Sequence
  Description of Artificial Sequence: Synthetic oligonucleotide
  Sense strand starting at position 1506 of SEQ ID NO: 586647
uaguaaguauaauuggcau

SEQ ID NO: 733767 - RNA, 19 nt, Artificial Sequence
  Description of Artificial Sequence: Synthetic oligonucleotide
  Antisense strand to SEQ ID NO: 733766
augccaauuauacuuacua

SEQ ID NO: 733768 - RNA, 19 nt, Artificial Sequence
  Description of Artificial Sequence: Synthetic oligonucleotide
  Sense strand starting at position 1604 of SEQ ID NO: 586647
agucuuguugcugaugaga

SEQ ID NO: 733769 - RNA, 19 nt, Artificial Sequence
  Description of Artificial Sequence: Synthetic oligonucleotide
  Antisense strand to SEQ ID NO: 733768
ucucaucagcaacaagacu

SEQ ID NO: 733770 - RNA, 19 nt, Artificial Sequence
  Description of Artificial Sequence: Synthetic oligonucleotide
  Sense strand starting at position 1646 of SEQ ID NO: 586647
auguacucuuccucugaga

SEQ ID NO: 733771 - RNA, 19 nt, Artificial Sequence
  Description of Artificial Sequence: Synthetic oligonucleotide
  Antisense strand to SEQ ID NO: 733770
ucucagaggaagaguacau

SEQ ID NO: 733772 - RNA, 19 nt, Artificial Sequence
  Description of Artificial Sequence: Synthetic oligonucleotide
  Sense strand starting at position 1648 of SEQ ID NO: 586647
guacucuuccucugagaca

SEQ ID NO: 733773 - RNA, 19 nt, Artificial Sequence
  Description of Artificial Sequence: Synthetic oligonucleotide
  Antisense strand to SEQ ID NO: 733772
ugucucagaggaagaguac

SEQ ID NO: 733774 - RNA, 19 nt, Artificial Sequence
  Description of Artificial Sequence: Synthetic oligonucleotide
  Sense strand starting at position 1703 of SEQ ID NO: 586647
uuauuuccauugucuuagu

SEQ ID NO: 733775 - RNA, 19 nt, Artificial Sequence
  Description of Artificial Sequence: Synthetic oligonucleotide
  Antisense strand to SEQ ID NO: 733774
acuaagacaauggaaauaa

SEQ ID NO: 733776 - RNA, 19 nt, Artificial Sequence
  Description of Artificial Sequence: Synthetic oligonucleotide
  Sense strand starting at position 1725 of SEQ ID NO: 586647
ugaucauaccuccauguuu

SEQ ID NO: 733777 - RNA, 19 nt, Artificial Sequence
  Description of Artificial Sequence: Synthetic oligonucleotide
  Antisense strand to SEQ ID NO: 733776
aaacauggagguaugauca

SEQ ID NO: 733778 - RNA, 19 nt, Artificial Sequence
  Description of Artificial Sequence: Synthetic oligonucleotide
  Sense strand starting at position 1733 of SEQ ID NO: 586647
ccuccauguuugucaaaga

SEQ ID NO: 733779 - RNA, 19 nt, Artificial Sequence
  Description of Artificial Sequence: Synthetic oligonucleotide
  Antisense strand to SEQ ID NO: 733778
ucuuugacaaacauggagg

SEQ ID NO: 733780 - RNA, 19 nt, Artificial Sequence
  Description of Artificial Sequence: Synthetic oligonucleotide
  Sense strand starting at position 1738 of SEQ ID NO: 586647
auguuugucaaagaguaga

SEQ ID NO: 733781 - RNA, 19 nt, Artificial Sequence
  Description of Artificial Sequence: Synthetic oligonucleotide
  Antisense strand to SEQ ID NO: 733780
ucuacucuuugacaaacau

SEQ ID NO: 733782 - RNA, 19 nt, Artificial Sequence
  Description of Artificial Sequence: Synthetic oligonucleotide
  Sense strand starting at position 1772 of SEQ ID NO: 586647
gcgugauuucaggagccuu

SEQ ID NO: 733783 - RNA, 19 nt, Artificial Sequence
  Description of Artificial Sequence: Synthetic oligonucleotide
  Antisense strand to SEQ ID NO: 733782
aaggcuccugaaaucacgc

SEQ ID NO: 733784 - RNA, 19 nt, Artificial Sequence
  Description of Artificial Sequence: Synthetic oligonucleotide
  Sense strand starting at position 1780 of SEQ ID NO: 586647
ucaggagccuugguacaaa

SEQ ID NO: 733785 - RNA, 19 nt, Artificial Sequence
  Description of Artificial Sequence: Synthetic oligonucleotide
  Antisense strand to SEQ ID NO: 733784
uuuguaccaaggcuccuga

SEQ ID NO: 733786 - RNA, 19 nt, Artificial Sequence
  Description of Artificial Sequence: Synthetic oligonucleotide
  Sense strand starting at position 2218 of SEQ ID NO: 586647
aagaaauaugucuguccag

SEQ ID NO: 733787 - RNA, 19 nt, Artificial Sequence
  Description of Artificial Sequence: Synthetic oligonucleotide
  Antisense strand to SEQ ID NO: 733786
cuggacagacauauuucuu

SEQ ID NO: 733788 - RNA, 19 nt, Artificial Sequence
  Description of Artificial Sequence: Synthetic oligonucleotide
  Sense strand starting at position 2219 of SEQ ID NO: 586647
agaaauaugucuguccaga

SEQ ID NO: 733789 - RNA, 19 nt, Artificial Sequence
  Description of Artificial Sequence: Synthetic oligonucleotide
  Antisense strand to SEQ ID NO: 733788
ucuggacagacauauuucu

SEQ ID NO: 733790 - RNA, 19 nt, Artificial Sequence
  Description of Artificial Sequence: Synthetic oligonucleotide
  Sense strand starting at position 2276 of SEQ ID NO: 586647
gcuuucucgcgagucuuua

SEQ ID NO: 733791 - RNA, 19 nt, Artificial Sequence
  Description of Artificial Sequence: Synthetic oligonucleotide
  Antisense strand to SEQ ID NO: 733790
uaaagacucgcgagaaagc

SEQ ID NO: 733792 - RNA, 19 nt, Artificial Sequence
  Description of Artificial Sequence: Synthetic oligonucleotide
  Sense strand starting at position 2471 of SEQ ID NO: 586647
augauugaaucugcaggga

SEQ ID NO: 733793 - RNA, 19 nt, Artificial Sequence
  Description of Artificial Sequence: Synthetic oligonucleotide
  Antisense strand to SEQ ID NO: 733792
ucccugcagauucaaucau

SEQ ID NO: 733794 - RNA, 19 nt, Artificial Sequence
  Description of Artificial Sequence: Synthetic oligonucleotide
  Sense strand starting at position 2593 of SEQ ID NO: 586647
ggaagagaugguggcuaaa

SEQ ID NO: 733795 - RNA, 19 nt, Artificial Sequence
  Description of Artificial Sequence: Synthetic oligonucleotide
  Antisense strand to SEQ ID NO: 733794
uuuagccaccaucucuucc

SEQ ID NO: 733796 - RNA, 19 nt, Artificial Sequence
  Description of Artificial Sequence: Synthetic oligonucleotide
  Sense strand starting at position 2780 of SEQ ID NO: 586647
ucugcagucggguagaaga

SEQ ID NO: 733797 - RNA, 19 nt, Artificial Sequence
  Description of Artificial Sequence: Synthetic oligonucleotide
  Antisense strand to SEQ ID NO: 733796
ucuucuacccgacugcaga

SEQ ID NO: 733798 - RNA, 19 nt, Artificial Sequence
  Description of Artificial Sequence: Synthetic oligonucleotide
  Sense strand starting at position 2949 of SEQ ID NO: 586647
ucauucuggcuccaaugaa

SEQ ID NO: 733799 - RNA, 19 nt, Artificial Sequence
  Description of Artificial Sequence: Synthetic oligonucleotide
  Antisense strand to SEQ ID NO: 733798
uucauuggagccagaauga

SEQ ID NO: 733800 - RNA, 19 nt, Artificial Sequence
  Description of Artificial Sequence: Synthetic oligonucleotide
  Sense strand starting at position 3442 of SEQ ID NO: 586647
ugagcuuccaucuggaaga

SEQ ID NO: 733801 - RNA, 19 nt, Artificial Sequence
  Description of Artificial Sequence: Synthetic oligonucleotide
  Antisense strand to SEQ ID NO: 733800
ucuuccagauggaagcuca

SEQ ID NO: 733802 - RNA, 19 nt, Artificial Sequence
  Description of Artificial Sequence: Synthetic oligonucleotide
  Sense strand starting at position 3449 of SEQ ID NO: 586647
ccaucuggaagaugucaga

SEQ ID NO: 733803 - RNA, 19 nt, Artificial Sequence
  Description of Artificial Sequence: Synthetic oligonucleotide
  Antisense strand to SEQ ID NO: 733802
ucugacaucuuccagaugg

SEQ ID NO: 733804 - RNA, 19 nt, Artificial Sequence
  Description of Artificial Sequence: Synthetic oligonucleotide
  Sense strand starting at position 3460 of SEQ ID NO: 586647
augucagaagaaugucacu

SEQ ID NO: 733805 - RNA, 19 nt, Artificial Sequence
  Description of Artificial Sequence: Synthetic oligonucleotide
  Antisense strand to SEQ ID NO: 733804
agugacauucuucugacau

SEQ ID NO: 733806 - RNA, 19 nt, Artificial Sequence
  Description of Artificial Sequence: Synthetic oligonucleotide
  Sense strand starting at position 3494 of SEQ ID NO: 586647
guuucuucugaguaacaga

SEQ ID NO: 733807 - RNA, 19 nt, Artificial Sequence
  Description of Artificial Sequence: Synthetic oligonucleotide
  Antisense strand to SEQ ID NO: 733806
ucuguuacucagaagaaac

SEQ ID NO: 733808 - RNA, 19 nt, Artificial Sequence
  Description of Artificial Sequence: Synthetic oligonucleotide
  Sense strand starting at position 3823 of SEQ ID NO: 586647
cugaaaucuuaacccgaaa

SEQ ID NO: 733809 - RNA, 19 nt, Artificial Sequence
  Description of Artificial Sequence: Synthetic oligonucleotide
  Antisense strand to SEQ ID NO: 733808
uuucggguuaagauuucag

SEQ ID NO: 733810 - RNA, 19 nt, Artificial Sequence
  Description of Artificial Sequence: Synthetic oligonucleotide
  Sense strand starting at position 176 of SEQ ID NO: 586648
acagaccuauauugagaga

SEQ ID NO: 733811 - RNA, 19 nt, Artificial Sequence
  Description of Artificial Sequence: Synthetic oligonucleotide
  Antisense strand to SEQ ID NO: 733810
ucucucaauauaggucugu

SEQ ID NO: 733812 - RNA, 19 nt, Artificial Sequence
  Description of Artificial Sequence: Synthetic oligonucleotide
  Sense strand starting at position 232 of SEQ ID NO: 586648
uugugacauuaauugugau

SEQ ID NO: 733813 - RNA, 19 nt, Artificial Sequence
  Description of Artificial Sequence: Synthetic oligonucleotide
  Antisense strand to SEQ ID NO: 733812
aucacaauuaaugucacaa

SEQ ID NO: 733814 - RNA, 19 nt, Artificial Sequence
  Description of Artificial Sequence: Synthetic oligonucleotide
  Sense strand starting at position 242 of SEQ ID NO: 586648
aauugugaugcucaucagu

SEQ ID NO: 733815 - RNA, 19 nt, Artificial Sequence
  Description of Artificial Sequence: Synthetic oligonucleotide
  Antisense strand to SEQ ID NO: 733814
acugaugagcaucacaauu

SEQ ID NO: 733816 - RNA, 19 nt, Artificial Sequence
  Description of Artificial Sequence: Synthetic oligonucleotide
  Sense strand starting at position 424 of SEQ ID NO: 586648
aaccaugucuuucccggaa

SEQ ID NO: 733817 - RNA, 19 nt, Artificial Sequence
  Description of Artificial Sequence: Synthetic oligonucleotide
  Antisense strand to SEQ ID NO: 733816
uuccgggaaagacaugguu

SEQ ID NO: 733818 - RNA, 19 nt, Artificial Sequence
  Description of Artificial Sequence: Synthetic oligonucleotide
  Sense strand starting at position 584 of SEQ ID NO: 586648
gagagucugccaggcacau

SEQ ID NO: 733819 - RNA, 19 nt, Artificial Sequence
  Description of Artificial Sequence: Synthetic oligonucleotide
  Antisense strand to SEQ ID NO: 733818
augugccuggcagacucuc

SEQ ID NO: 733820 - RNA, 19 nt, Artificial Sequence
  Description of Artificial Sequence: Synthetic oligonucleotide
  Sense strand starting at position 617 of SEQ ID NO: 586648
cuuugucugugguuaugau

SEQ ID NO: 733821 - RNA, 19 nt, Artificial Sequence
  Description of Artificial Sequence: Synthetic oligonucleotide
  Antisense strand to SEQ ID NO: 733820
aucauaaccacagacaaag

SEQ ID NO: 733822 - RNA, 19 nt, Artificial Sequence
  Description of Artificial Sequence: Synthetic oligonucleotide
  Sense strand starting at position 618 of SEQ ID NO: 586648
uuugucugugguuaugauu

SEQ ID NO: 733823 - RNA, 19 nt, Artificial Sequence
  Description of Artificial Sequence: Synthetic oligonucleotide
  Antisense strand to SEQ ID NO: 733822
aaucauaaccacagacaaa

SEQ ID NO: 733824 - RNA, 19 nt, Artificial Sequence
  Description of Artificial Sequence: Synthetic oligonucleotide
  Sense strand starting at position 624 of SEQ ID NO: 586648
ugugguuaugauuguuauc

SEQ ID NO: 733825 - RNA, 19 nt, Artificial Sequence
  Description of Artificial Sequence: Synthetic oligonucleotide
  Antisense strand to SEQ ID NO: 733824
gauaacaaucauaaccaca

SEQ ID NO: 733826 - RNA, 19 nt, Artificial Sequence
  Description of Artificial Sequence: Synthetic oligonucleotide
  Sense strand starting at position 626 of SEQ ID NO: 586648
ugguuaugauuguuaucuu

SEQ ID NO: 733827 - RNA, 19 nt, Artificial Sequence
  Description of Artificial Sequence: Synthetic oligonucleotide
  Antisense strand to SEQ ID NO: 733826
aagauaacaaucauaacca

SEQ ID NO: 733828 - RNA, 19 nt, Artificial Sequence
  Description of Artificial Sequence: Synthetic oligonucleotide
  Sense strand starting at position 629 of SEQ ID NO: 586648
uuaugauuguuaucuucgu

SEQ ID NO: 733829 - RNA, 19 nt, Artificial Sequence
  Description of Artificial Sequence: Synthetic oligonucleotide
  Antisense strand to SEQ ID NO: 733828
acgaagauaacaaucauaa

SEQ ID NO: 733830 - RNA, 19 nt, Artificial Sequence
  Description of Artificial Sequence: Synthetic oligonucleotide
  Sense strand starting at position 630 of SEQ ID NO: 586648
uaugauuguuaucuucguu

SEQ ID NO: 733831 - RNA, 19 nt, Artificial Sequence
  Description of Artificial Sequence: Synthetic oligonucleotide
  Antisense strand to SEQ ID NO: 733830
aacgaagauaacaaucaua

SEQ ID NO: 733832 - RNA, 19 nt, Artificial Sequence
  Description of Artificial Sequence: Synthetic oligonucleotide
  Sense strand starting at position 647 of SEQ ID NO: 586648
uuagucgucacuuagagag

SEQ ID NO: 733833 - RNA, 19 nt, Artificial Sequence
  Description of Artificial Sequence: Synthetic oligonucleotide
  Antisense strand to SEQ ID NO: 733832
cucucuaagugacgacuaa

SEQ ID NO: 733834 - RNA, 19 nt, Artificial Sequence
  Description of Artificial Sequence: Synthetic oligonucleotide
  Sense strand starting at position 708 of SEQ ID NO: 586648
aucagcaaacacugaguua

SEQ ID NO: 733835 - RNA, 19 nt, Artificial Sequence
  Description of Artificial Sequence: Synthetic oligonucleotide
  Antisense strand to SEQ ID NO: 733834
uaacucaguguuugcugau

SEQ ID NO: 733836 - RNA, 19 nt, Artificial Sequence
  Description of Artificial Sequence: Synthetic oligonucleotide
  Sense strand starting at position 711 of SEQ ID NO: 586648
agcaaacacugaguuagaa

SEQ ID NO: 733837 - RNA, 19 nt, Artificial Sequence
  Description of Artificial Sequence: Synthetic oligonucleotide
  Antisense strand to SEQ ID NO: 733836
uucuaacucaguguuugcu

SEQ ID NO: 733838 - RNA, 19 nt, Artificial Sequence
  Description of Artificial Sequence: Synthetic oligonucleotide
  Sense strand starting at position 721 of SEQ ID NO: 586648
gaguuagaauagucgaggu

SEQ ID NO: 733839 - RNA, 19 nt, Artificial Sequence
  Description of Artificial Sequence: Synthetic oligonucleotide
  Antisense strand to SEQ ID NO: 733838
accucgacuauucuaacuc

SEQ ID NO: 733840 - RNA, 19 nt, Artificial Sequence
  Description of Artificial Sequence: Synthetic oligonucleotide
  Sense strand starting at position 723 of SEQ ID NO: 586648
guuagaauagucgagguca

SEQ ID NO: 733841 - RNA, 19 nt, Artificial Sequence
  Description of Artificial Sequence: Synthetic oligonucleotide
  Antisense strand to SEQ ID NO: 733840
ugaccucgacuauucuaac

SEQ ID NO: 733842 - RNA, 19 nt, Artificial Sequence
  Description of Artificial Sequence: Synthetic oligonucleotide
  Sense strand starting at position 725 of SEQ ID NO: 586648
uagaauagucgaggucaac

SEQ ID NO: 733843 - RNA, 19 nt, Artificial Sequence
  Description of Artificial Sequence: Synthetic oligonucleotide
  Antisense strand to SEQ ID NO: 733842
guugaccucgacuauucua

SEQ ID NO: 733844 - RNA, 19 nt, Artificial Sequence
  Description of Artificial Sequence: Synthetic oligonucleotide
  Sense strand starting at position 1032 of SEQ ID NO: 586648
agaccuccuuggucucaaa

SEQ ID NO: 733845 - RNA, 19 nt, Artificial Sequence
  Description of Artificial Sequence: Synthetic oligonucleotide
  Antisense strand to SEQ ID NO: 733844
uuugagaccaaggaggucu

SEQ ID NO: 733846 - RNA, 19 nt, Artificial Sequence
  Description of Artificial Sequence: Synthetic oligonucleotide
  Sense strand starting at position 1069 of SEQ ID NO: 586648
augcaauugucugugagca

SEQ ID NO: 733847 - RNA, 19 nt, Artificial Sequence
  Description of Artificial Sequence: Synthetic oligonucleotide
  Antisense strand to SEQ ID NO: 733846
ugcucacagacaauugcau

SEQ ID NO: 733848 - RNA, 19 nt, Artificial Sequence
  Description of Artificial Sequence: Synthetic oligonucleotide
  Sense strand starting at position 1073 of SEQ ID NO: 586648
aauugucugugagcacaga

SEQ ID NO: 733849 - RNA, 19 nt, Artificial Sequence
  Description of Artificial Sequence: Synthetic oligonucleotide
  Antisense strand to SEQ ID NO: 733848
ucugugcucacagacaauu

SEQ ID NO: 733850 - RNA, 19 nt, Artificial Sequence
  Description of Artificial Sequence: Synthetic oligonucleotide
  Sense strand starting at position 1348 of SEQ ID NO: 586648
ugucucuuaccuggcagaa

SEQ ID NO: 733851 - RNA, 19 nt, Artificial Sequence
  Description of Artificial Sequence: Synthetic oligonucleotide
  Antisense strand to SEQ ID NO: 733850
uucugccagguaagagaca

SEQ ID NO: 733852 - RNA, 19 nt, Artificial Sequence
  Description of Artificial Sequence: Synthetic oligonucleotide
  Sense strand starting at position 1996 of SEQ ID NO: 586648
ccuaaagcuucccugggau

SEQ ID NO: 733853 - RNA, 19 nt, Artificial Sequence
  Description of Artificial Sequence: Synthetic oligonucleotide
  Antisense strand to SEQ ID NO: 733852
aucccagggaagcuuuagg

SEQ ID NO: 733854 - RNA, 19 nt, Artificial Sequence
  Description of Artificial Sequence: Synthetic oligonucleotide
  Sense strand starting at position 2192 of SEQ ID NO: 586648
gcauguaaaugacuaauau

SEQ ID NO: 733855 - RNA, 19 nt, Artificial Sequence
  Description of Artificial Sequence: Synthetic oligonucleotide
  Antisense strand to SEQ ID NO: 733854
auauuagucauuuacaugc

SEQ ID NO: 733856 - RNA, 19 nt, Artificial Sequence
  Description of Artificial Sequence: Synthetic oligonucleotide
  Sense strand starting at position 3223 of SEQ ID NO: 586648
gccagcauuccagacagaa

SEQ ID NO: 733857 - RNA, 19 nt, Artificial Sequence
  Description of Artificial Sequence: Synthetic oligonucleotide
  Antisense strand to SEQ ID NO: 733856
uucugucuggaaugcuggc

SEQ ID NO: 733858 - RNA, 19 nt, Artificial Sequence
  Description of Artificial Sequence: Synthetic oligonucleotide
  Sense strand starting at position 3246 of SEQ ID NO: 586648
ccaggugcuccaugacaca

SEQ ID NO: 733859 - RNA, 19 nt, Artificial Sequence
  Description of Artificial Sequence: Synthetic oligonucleotide
  Antisense strand to SEQ ID NO: 733858
ugugucauggagcaccugg

SEQ ID NO: 733860 - RNA, 19 nt, Artificial Sequence
  Description of Artificial Sequence: Synthetic oligonucleotide
  Sense strand starting at position 3264 of SEQ ID NO: 586648
acggacagauccuugcaga

SEQ ID NO: 733861 - RNA, 19 nt, Artificial Sequence
  Description of Artificial Sequence: Synthetic oligonucleotide
  Antisense strand to SEQ ID NO: 733860
ucugcaaggaucuguccgu

SEQ ID NO: 733862 - RNA, 19 nt, Artificial Sequence
  Description of Artificial Sequence: Synthetic oligonucleotide
  Sense strand starting at position 3265 of SEQ ID NO: 586648
cggacagauccuugcagag

SEQ ID NO: 733863 - RNA, 19 nt, Artificial Sequence
  Description of Artificial Sequence: Synthetic oligonucleotide
  Antisense strand to SEQ ID NO: 733862
cucugcaaggaucuguccg

SEQ ID NO: 733864 - RNA, 19 nt, Artificial Sequence
  Description of Artificial Sequence: Synthetic oligonucleotide
  Sense strand starting at position 3269 of SEQ ID NO: 586648
cagauccuugcagagaagu

SEQ ID NO: 733865 - RNA, 19 nt, Artificial Sequence
  Description of Artificial Sequence: Synthetic oligonucleotide
  Antisense strand to SEQ ID NO: 733864
acuucucugcaaggaucug

SEQ ID NO: 733866 - RNA, 19 nt, Artificial Sequence
  Description of Artificial Sequence: Synthetic oligonucleotide
  Sense strand starting at position 3280 of SEQ ID NO: 586648
agagaagugagacguucua

SEQ ID NO: 733867 - RNA, 19 nt, Artificial Sequence
  Description of Artificial Sequence: Synthetic oligonucleotide
  Antisense strand to SEQ ID NO: 733866
uagaacgucucacuucucu

SEQ ID NO: 733868 - RNA, 19 nt, Artificial Sequence
  Description of Artificial Sequence: Synthetic oligonucleotide
  Sense strand starting at position 3292 of SEQ ID NO: 586648
cguucuagagccuggacaa

SEQ ID NO: 733869 - RNA, 19 nt, Artificial Sequence
  Description of Artificial Sequence: Synthetic oligonucleotide
  Antisense strand to SEQ ID NO: 733868
uuguccaggcucuagaacg

SEQ ID NO: 733870 - RNA, 19 nt, Artificial Sequence
  Description of Artificial Sequence: Synthetic oligonucleotide
  Sense strand starting at position 3293 of SEQ ID NO: 586648
guucuagagccuggacaau

SEQ ID NO: 733871 - RNA, 19 nt, Artificial Sequence
  Description of Artificial Sequence: Synthetic oligonucleotide
  Antisense strand to SEQ ID NO: 733870
auuguccaggcucuagaac

SEQ ID NO: 733872 - RNA, 19 nt, Artificial Sequence
  Description of Artificial Sequence: Synthetic oligonucleotide
  Sense strand starting at position 3314 of SEQ ID NO: 586648
cauaaauggccgugaggac

SEQ ID NO: 733873 - RNA, 19 nt, Artificial Sequence
  Description of Artificial Sequence: Synthetic oligonucleotide
  Antisense strand to SEQ ID NO: 733872
guccucacggccauuuaug

SEQ ID NO: 733874 - RNA, 19 nt, Artificial Sequence
  Description of Artificial Sequence: Synthetic oligonucleotide
  Sense strand starting at position 3323 of SEQ ID NO: 586648
ccgugaggacuuugcuuua

SEQ ID NO: 733875 - RNA, 19 nt, Artificial Sequence
  Description of Artificial Sequence: Synthetic oligonucleotide
  Antisense strand to SEQ ID NO: 733874
uaaagcaaaguccucacgg

SEQ ID NO: 733876 - RNA, 19 nt, Artificial Sequence
  Description of Artificial Sequence: Synthetic oligonucleotide
  Sense strand starting at position 3368 of SEQ ID NO: 586648
uucccucuaugaguuagaa

SEQ ID NO: 733877 - RNA, 19 nt, Artificial Sequence
  Description of Artificial Sequence: Synthetic oligonucleotide
  Antisense strand to SEQ ID NO: 733876
uucuaacucauagagggaa

SEQ ID NO: 733878 - RNA, 19 nt, Artificial Sequence
  Description of Artificial Sequence: Synthetic oligonucleotide
  Sense strand starting at position 3380 of SEQ ID NO: 586648
guuagaauuccaugacaac

SEQ ID NO: 733879 - RNA, 19 nt, Artificial Sequence
  Description of Artificial Sequence: Synthetic oligonucleotide
  Antisense strand to SEQ ID NO: 733878
guugucauggaauucuaac

SEQ ID NO: 733880 - RNA, 19 nt, Artificial Sequence
  Description of Artificial Sequence: Synthetic oligonucleotide
  Sense strand starting at position 3523 of SEQ ID NO: 586648
uuugauguugcauaguauu

SEQ ID NO: 733881 - RNA, 19 nt, Artificial Sequence
  Description of Artificial Sequence: Synthetic oligonucleotide
  Antisense strand to SEQ ID NO: 733880
aauacuaugcaacaucaaa

SEQ ID NO: 733882 - RNA, 19 nt, Artificial Sequence
  Description of Artificial Sequence: Synthetic oligonucleotide
  Sense strand starting at position 3593 of SEQ ID NO: 586648
gagggcgauguagaaauau

SEQ ID NO: 733883 - RNA, 19 nt, Artificial Sequence
  Description of Artificial Sequence: Synthetic oligonucleotide
  Antisense strand to SEQ ID NO: 733882
auauuucuacaucgcccuc

SEQ ID NO: 733884 - RNA, 19 nt, Artificial Sequence
  Description of Artificial Sequence: Synthetic oligonucleotide
  Sense strand starting at position 3809 of SEQ ID NO: 586648
ucacauugcugcucgauga

SEQ ID NO: 733885 - RNA, 19 nt, Artificial Sequence
  Description of Artificial Sequence: Synthetic oligonucleotide
  Antisense strand to SEQ ID NO: 733884
ucaucgagcagcaauguga

SEQ ID NO: 733886 - RNA, 19 nt, Artificial Sequence
  Description of Artificial Sequence: Synthetic oligonucleotide
  Sense strand starting at position 3820 of SEQ ID NO: 586648
cucgaugacuccuuucuga

SEQ ID NO: 733887 - RNA, 19 nt, Artificial Sequence
  Description of Artificial Sequence: Synthetic oligonucleotide
  Antisense strand to SEQ ID NO: 733886
ucagaaaggagucaucgag

SEQ ID NO: 733888 - RNA, 19 nt, Artificial Sequence
  Description of Artificial Sequence: Synthetic oligonucleotide
  Sense strand starting at position 3964 of SEQ ID NO: 586648
aagguaggcucuuucucua

SEQ ID NO: 733889 - RNA, 19 nt, Artificial Sequence
  Description of Artificial Sequence: Synthetic oligonucleotide
  Antisense strand to SEQ ID NO: 733888
uagagaaagagccuaccuu

SEQ ID NO: 733890 - RNA, 19 nt, Artificial Sequence
  Description of Artificial Sequence: Synthetic oligonucleotide
  Sense strand starting at position 70 of SEQ ID NO: 586649
uuggaugucccacagauuc

SEQ ID NO: 733891 - RNA, 19 nt, Artificial Sequence
  Description of Artificial Sequence: Synthetic oligonucleotide
  Antisense strand to SEQ ID NO: 733890
gaaucugugggacauccaa

SEQ ID NO: 733892 - RNA, 19 nt, Artificial Sequence
  Description of Artificial Sequence: Synthetic oligonucleotide
  Sense strand starting at position 196 of SEQ ID NO: 586649
ggaauagaaucacauuaua

SEQ ID NO: 733893 - RNA, 19 nt, Artificial Sequence
  Description of Artificial Sequence: Synthetic oligonucleotide
  Antisense strand to SEQ ID NO: 733892
uauaaugugauucuauucc

SEQ ID NO: 733894 - RNA, 19 nt, Artificial Sequence
  Description of Artificial Sequence: Synthetic oligonucleotide
  Sense strand starting at position 287 of SEQ ID NO: 586649
cagacuacuuucccgguau

SEQ ID NO: 733895 - RNA, 19 nt, Artificial Sequence
  Description of Artificial Sequence: Synthetic oligonucleotide
  Antisense strand to SEQ ID NO: 733894
auaccgggaaaguagucug

SEQ ID NO: 733896 - RNA, 19 nt, Artificial Sequence
  Description of Artificial Sequence: Synthetic oligonucleotide
  Sense strand starting at position 309 of SEQ ID NO: 586649
ugggucauuacccaaguga

SEQ ID NO: 733897 - RNA, 19 nt, Artificial Sequence
  Description of Artificial Sequence: Synthetic oligonucleotide
  Antisense strand to SEQ ID NO: 733896
ucacuuggguaaugaccca

SEQ ID NO: 733898 - RNA, 19 nt, Artificial Sequence
  Description of Artificial Sequence: Synthetic oligonucleotide
  Sense strand starting at position 401 of SEQ ID NO: 586649
uuagcuuugugaucaaagg

SEQ ID NO: 733899 - RNA, 19 nt, Artificial Sequence
  Description of Artificial Sequence: Synthetic oligonucleotide
  Antisense strand to SEQ ID NO: 733898
ccuuugaucacaaagcuaa

SEQ ID NO: 733900 - RNA, 19 nt, Artificial Sequence
  Description of Artificial Sequence: Synthetic oligonucleotide
  Sense strand starting at position 402 of SEQ ID NO: 586649
uagcuuugugaucaaaggu

SEQ ID NO: 733901 - RNA, 19 nt, Artificial Sequence
  Description of Artificial Sequence: Synthetic oligonucleotide
  Antisense strand to SEQ ID NO: 733900
accuuugaucacaaagcua

SEQ ID NO: 733902 - RNA, 19 nt, Artificial Sequence
  Description of Artificial Sequence: Synthetic oligonucleotide
  Sense strand starting at position 513 of SEQ ID NO: 586649
aaauauaagucagcaggga

SEQ ID NO: 733903 - RNA, 19 nt, Artificial Sequence
  Description of Artificial Sequence: Synthetic oligonucleotide
  Antisense strand to SEQ ID NO: 733902
ucccugcugacuuauauuu

SEQ ID NO: 733904 - RNA, 19 nt, Artificial Sequence
  Description of Artificial Sequence: Synthetic oligonucleotide
  Sense strand starting at position 517 of SEQ ID NO: 586649
auaagucagcagggacaaa

SEQ ID NO: 733905 - RNA, 19 nt, Artificial Sequence
  Description of Artificial Sequence: Synthetic oligonucleotide
  Antisense strand to SEQ ID NO: 733904
uuugucccugcugacuuau

SEQ ID NO: 733906 - RNA, 19 nt, Artificial Sequence
  Description of Artificial Sequence: Synthetic oligonucleotide
  Sense strand starting at position 682 of SEQ ID NO: 586649
uacaguagccuuuagguua

SEQ ID NO: 733907 - RNA, 19 nt, Artificial Sequence
  Description of Artificial Sequence: Synthetic oligonucleotide
  Antisense strand to SEQ ID NO: 733906
uaaccuaaaggcuacugua

SEQ ID NO: 733908 - RNA, 19 nt, Artificial Sequence
  Description of Artificial Sequence: Synthetic oligonucleotide
  Sense strand starting at position 866 of SEQ ID NO: 586649
cuaaauuaaucaguugucu

SEQ ID NO: 733909 - RNA, 19 nt, Artificial Sequence
  Description of Artificial Sequence: Synthetic oligonucleotide
  Antisense strand to SEQ ID NO: 733908
agacaacugauuaauuuag

SEQ ID NO: 733910 - RNA, 19 nt, Artificial Sequence
  Description of Artificial Sequence: Synthetic oligonucleotide
  Sense strand starting at position 941 of SEQ ID NO: 586649
auaugacuguauucucaua

SEQ ID NO: 733911 - RNA, 19 nt, Artificial Sequence
  Description of Artificial Sequence: Synthetic oligonucleotide
  Antisense strand to SEQ ID NO: 733910
uaugagaauacagucauau

SEQ ID NO: 733912 - RNA, 19 nt, Artificial Sequence
  Description of Artificial Sequence: Synthetic oligonucleotide
  Sense strand starting at position 967 of SEQ ID NO: 586649
ugcauugaagcugaucaga

SEQ ID NO: 733913 - RNA, 19 nt, Artificial Sequence
  Description of Artificial Sequence: Synthetic oligonucleotide
  Antisense strand to SEQ ID NO: 733912
ucugaucagcuucaaugca

SEQ ID NO: 733914 - RNA, 19 nt, Artificial Sequence
  Description of Artificial Sequence: Synthetic oligonucleotide
  Sense strand starting at position 1095 of SEQ ID NO: 586649
cuugaauacucucucgaca

SEQ ID NO: 733915 - RNA, 19 nt, Artificial Sequence
  Description of Artificial Sequence: Synthetic oligonucleotide
  Antisense strand to SEQ ID NO: 733914
ugucgagagaguauucaag

SEQ ID NO: 733916 - RNA, 19 nt, Artificial Sequence
  Description of Artificial Sequence: Synthetic oligonucleotide
  Sense strand starting at position 1100 of SEQ ID NO: 586649
auacucucucgacaaugua

SEQ ID NO: 733917 - RNA, 19 nt, Artificial Sequence
  Description of Artificial Sequence: Synthetic oligonucleotide
  Antisense strand to SEQ ID NO: 733916
uacauugucgagagaguau

SEQ ID NO: 733918 - RNA, 19 nt, Artificial Sequence
  Description of Artificial Sequence: Synthetic oligonucleotide
  Sense strand starting at position 1426 of SEQ ID NO: 586649
acaggaacgcucugggaau

SEQ ID NO: 733919 - RNA, 19 nt, Artificial Sequence
  Description of Artificial Sequence: Synthetic oligonucleotide
  Antisense strand to SEQ ID NO: 733918
auucccagagcguuccugu

SEQ ID NO: 733920 - RNA, 19 nt, Artificial Sequence
  Description of Artificial Sequence: Synthetic oligonucleotide
  Sense strand starting at position 1428 of SEQ ID NO: 586649
aggaacgcucugggaauaa

SEQ ID NO: 733921 - RNA, 19 nt, Artificial Sequence
  Description of Artificial Sequence: Synthetic oligonucleotide
  Antisense strand to SEQ ID NO: 733920
uuauucccagagcguuccu

SEQ ID NO: 733922 - RNA, 19 nt, Artificial Sequence
  Description of Artificial Sequence: Synthetic oligonucleotide
  Sense strand starting at position 1438 of SEQ ID NO: 586649
ugggaauaacccuggguau

SEQ ID NO: 733923 - RNA, 19 nt, Artificial Sequence
  Description of Artificial Sequence: Synthetic oligonucleotide
  Antisense strand to SEQ ID NO: 733922
auacccaggguuauuccca

SEQ ID NO: 733924 - RNA, 19 nt, Artificial Sequence
  Description of Artificial Sequence: Synthetic oligonucleotide
  Sense strand starting at position 1439 of SEQ ID NO: 586649
gggaauaacccuggguauu

SEQ ID NO: 733925 - RNA, 19 nt, Artificial Sequence
  Description of Artificial Sequence: Synthetic oligonucleotide
  Antisense strand to SEQ ID NO: 733924
aauacccaggguuauuccc

SEQ ID NO: 733926 - RNA, 19 nt, Artificial Sequence
  Description of Artificial Sequence: Synthetic oligonucleotide
  Sense strand starting at position 1593 of SEQ ID NO: 586649
uugagauaguuuccagaag

SEQ ID NO: 733927 - RNA, 19 nt, Artificial Sequence
  Description of Artificial Sequence: Synthetic oligonucleotide
  Antisense strand to SEQ ID NO: 733926
cuucuggaaacuaucucaa

SEQ ID NO: 733928 - RNA, 19 nt, Artificial Sequence
  Description of Artificial Sequence: Synthetic oligonucleotide
  Sense strand starting at position 2084 of SEQ ID NO: 586649
gggagugcauauuccaaua

SEQ ID NO: 733929 - RNA, 19 nt, Artificial Sequence
  Description of Artificial Sequence: Synthetic oligonucleotide
  Antisense strand to SEQ ID NO: 733928
uauuggaauaugcacuccc

SEQ ID NO: 733930 - RNA, 19 nt, Artificial Sequence
  Description of Artificial Sequence: Synthetic oligonucleotide
  Sense strand starting at position 2089 of SEQ ID NO: 586649
ugcauauuccaauagguca

SEQ ID NO: 733931 - RNA, 19 nt, Artificial Sequence
  Description of Artificial Sequence: Synthetic oligonucleotide
  Antisense strand to SEQ ID NO: 733930
ugaccuauuggaauaugca

SEQ ID NO: 733932 - RNA, 19 nt, Artificial Sequence
  Description of Artificial Sequence: Synthetic oligonucleotide
  Sense strand starting at position 2305 of SEQ ID NO: 586649
guuguaucuccugugcuua

SEQ ID NO: 733933 - RNA, 19 nt, Artificial Sequence
  Description of Artificial Sequence: Synthetic oligonucleotide
  Antisense strand to SEQ ID NO: 733932
uaagcacaggagauacaac

SEQ ID NO: 733934 - RNA, 19 nt, Artificial Sequence
  Description of Artificial Sequence: Synthetic oligonucleotide
  Sense strand starting at position 2441 of SEQ ID NO: 586649
cagaguucucuugguauaa

SEQ ID NO: 733935 - RNA, 19 nt, Artificial Sequence
  Description of Artificial Sequence: Synthetic oligonucleotide
  Antisense strand to SEQ ID NO: 733934
uuauaccaagagaacucug

SEQ ID NO: 733936 - RNA, 19 nt, Artificial Sequence
  Description of Artificial Sequence: Synthetic oligonucleotide
  Sense strand starting at position 2442 of SEQ ID NO: 586649
agaguucucuugguauaac

SEQ ID NO: 733937 - RNA, 19 nt, Artificial Sequence
  Description of Artificial Sequence: Synthetic oligonucleotide
  Antisense strand to SEQ ID NO: 733936
guuauaccaagagaacucu

SEQ ID NO: 733938 - RNA, 19 nt, Artificial Sequence
  Description of Artificial Sequence: Synthetic oligonucleotide
  Sense strand starting at position 2445 of SEQ ID NO: 586649
guucucuugguauaacuca

SEQ ID NO: 733939 - RNA, 19 nt, Artificial Sequence
  Description of Artificial Sequence: Synthetic oligonucleotide
  Antisense strand to SEQ ID NO: 733938
ugaguuauaccaagagaac

SEQ ID NO: 733940 - RNA, 19 nt, Artificial Sequence
  Description of Artificial Sequence: Synthetic oligonucleotide
  Sense strand starting at position 2758 of SEQ ID NO: 586649
uugagauugcccuauugca

SEQ ID NO: 733941 - RNA, 19 nt, Artificial Sequence
  Description of Artificial Sequence: Synthetic oligonucleotide
  Antisense strand to SEQ ID NO: 733940
ugcaauagggcaaucucaa

SEQ ID NO: 733942 - RNA, 19 nt, Artificial Sequence
  Description of Artificial Sequence: Synthetic oligonucleotide
  Sense strand starting at position 2850 of SEQ ID NO: 586649
gugggaagaugccucuagu

SEQ ID NO: 733943 - RNA, 19 nt, Artificial Sequence
  Description of Artificial Sequence: Synthetic oligonucleotide
  Antisense strand to SEQ ID NO: 733942
acuagaggcaucuucccac

SEQ ID NO: 733944 - RNA, 19 nt, Artificial Sequence
  Description of Artificial Sequence: Synthetic oligonucleotide
  Sense strand starting at position 2853 of SEQ ID NO: 586649
ggaagaugccucuagugga

SEQ ID NO: 733945 - RNA, 19 nt, Artificial Sequence
  Description of Artificial Sequence: Synthetic oligonucleotide
  Antisense strand to SEQ ID NO: 733944
uccacuagaggcaucuucc

SEQ ID NO: 733946 - RNA, 19 nt, Artificial Sequence
  Description of Artificial Sequence: Synthetic oligonucleotide
  Sense strand starting at position 3051 of SEQ ID NO: 586649
guauaugcacccugaaucu

SEQ ID NO: 733947 - RNA, 19 nt, Artificial Sequence
  Description of Artificial Sequence: Synthetic oligonucleotide
  Antisense strand to SEQ ID NO: 733946
agauucagggugcauauac

SEQ ID NO: 733948 - RNA, 19 nt, Artificial Sequence
  Description of Artificial Sequence: Synthetic oligonucleotide
  Sense strand starting at position 3110 of SEQ ID NO: 586649
aacggaggaucuuucuuua

SEQ ID NO: 733949 - RNA, 19 nt, Artificial Sequence
  Description of Artificial Sequence: Synthetic oligonucleotide
  Antisense strand to SEQ ID NO: 733948
uaaagaaagauccuccguu

SEQ ID NO: 733950 - RNA, 19 nt, Artificial Sequence
  Description of Artificial Sequence: Synthetic oligonucleotide
  Sense strand starting at position 3258 of SEQ ID NO: 586649
gagcuuugugaaugagaua

SEQ ID NO: 733951 - RNA, 19 nt, Artificial Sequence
  Description of Artificial Sequence: Synthetic oligonucleotide
  Antisense strand to SEQ ID NO: 733950
uaucucauucacaaagcuc

SEQ ID NO: 733952 - RNA, 19 nt, Artificial Sequence
  Description of Artificial Sequence: Synthetic oligonucleotide
  Sense strand starting at position 3259 of SEQ ID NO: 586649
agcuuugugaaugagauau

SEQ ID NO: 733953 - RNA, 19 nt, Artificial Sequence
  Description of Artificial Sequence: Synthetic oligonucleotide
  Antisense strand to SEQ ID NO: 733952
auaucucauucacaaagcu

SEQ ID NO: 733954 - RNA, 19 nt, Artificial Sequence
  Description of Artificial Sequence: Synthetic oligonucleotide
  Sense strand starting at position 3271 of SEQ ID NO: 586649
gagauauuccugugaguga

SEQ ID NO: 733955 - RNA, 19 nt, Artificial Sequence
  Description of Artificial Sequence: Synthetic oligonucleotide
  Antisense strand to SEQ ID NO: 733954
ucacucacaggaauaucuc

SEQ ID NO: 733956 - RNA, 19 nt, Artificial Sequence
  Description of Artificial Sequence: Synthetic oligonucleotide
  Sense strand starting at position 3274 of SEQ ID NO: 586649
auauuccugugagugacuu

SEQ ID NO: 733957 - RNA, 19 nt, Artificial Sequence
  Description of Artificial Sequence: Synthetic oligonucleotide
  Antisense strand to SEQ ID NO: 733956
aagucacucacaggaauau

SEQ ID NO: 733958 - RNA, 19 nt, Artificial Sequence
  Description of Artificial Sequence: Synthetic oligonucleotide
  Sense strand starting at position 3275 of SEQ ID NO: 586649
uauuccugugagugacuua

SEQ ID NO: 733959 - RNA, 19 nt, Artificial Sequence
  Description of Artificial Sequence: Synthetic oligonucleotide
  Antisense strand to SEQ ID NO: 733958
uaagucacucacaggaaua

SEQ ID NO: 733960 - RNA, 19 nt, Artificial Sequence
  Description of Artificial Sequence: Synthetic oligonucleotide
  Sense strand starting at position 3278 of SEQ ID NO: 586649
uccugugagugacuuacau

SEQ ID NO: 733961 - RNA, 19 nt, Artificial Sequence
  Description of Artificial Sequence: Synthetic oligonucleotide
  Antisense strand to SEQ ID NO: 733960
auguaagucacucacagga

SEQ ID NO: 733962 - RNA, 19 nt, Artificial Sequence
  Description of Artificial Sequence: Synthetic oligonucleotide
  Sense strand starting at position 3296 of SEQ ID NO: 586649
uccagaagaagguguagau

SEQ ID NO: 733963 - RNA, 19 nt, Artificial Sequence
  Description of Artificial Sequence: Synthetic oligonucleotide
  Antisense strand to SEQ ID NO: 733962
aucuacaccuucuucugga

SEQ ID NO: 733964 - RNA, 19 nt, Artificial Sequence
  Description of Artificial Sequence: Synthetic oligonucleotide
  Sense strand starting at position 3426 of SEQ ID NO: 586649
cagauaugugcucagggca

SEQ ID NO: 733965 - RNA, 19 nt, Artificial Sequence
  Description of Artificial Sequence: Synthetic oligonucleotide
  Antisense strand to SEQ ID NO: 733964
ugcccugagcacauaucug

SEQ ID NO: 733966 - RNA, 19 nt, Artificial Sequence
  Description of Artificial Sequence: Synthetic oligonucleotide
  Sense strand starting at position 3924 of SEQ ID NO: 586649
uccuuuccaugucuggaua

SEQ ID NO: 733967 - RNA, 19 nt, Artificial Sequence
  Description of Artificial Sequence: Synthetic oligonucleotide
  Antisense strand to SEQ ID NO: 733966
uauccagacauggaaagga

SEQ ID NO: 733968 - RNA, 19 nt, Artificial Sequence
  Description of Artificial Sequence: Synthetic oligonucleotide
  Sense strand starting at position 3927 of SEQ ID NO: 586649
uuuccaugucuggauagua

SEQ ID NO: 733969 - RNA, 19 nt, Artificial Sequence
  Description of Artificial Sequence: Synthetic oligonucleotide
  Antisense strand to SEQ ID NO: 733968
uacuauccagacauggaaa

SEQ ID NO: 733970 - RNA, 19 nt, Artificial Sequence
  Description of Artificial Sequence: Synthetic oligonucleotide
  Sense strand starting at position 76 of SEQ ID NO: 586650
aggagagaauucuggacaa

SEQ ID NO: 733971 - RNA, 19 nt, Artificial Sequence
  Description of Artificial Sequence: Synthetic oligonucleotide
  Antisense strand to SEQ ID NO: 733970
uuguccagaauucucuccu

SEQ ID NO: 733972 - RNA, 19 nt, Artificial Sequence
  Description of Artificial Sequence: Synthetic oligonucleotide
  Sense strand starting at position 326 of SEQ ID NO: 586650
agaauaacauuuggucuuu

SEQ ID NO: 733973 - RNA, 19 nt, Artificial Sequence
  Description of Artificial Sequence: Synthetic oligonucleotide
  Antisense strand to SEQ ID NO: 733972
aaagaccaaauguuauucu

SEQ ID NO: 733974 - RNA, 19 nt, Artificial Sequence
  Description of Artificial Sequence: Synthetic oligonucleotide
  Sense strand starting at position 528 of SEQ ID NO: 586650
ggagguuucgacugguucu

SEQ ID NO: 733975 - RNA, 19 nt, Artificial Sequence
  Description of Artificial Sequence: Synthetic oligonucleotide
  Antisense strand to SEQ ID NO: 733974
agaaccagucgaaaccucc

SEQ ID NO: 733976 - RNA, 19 nt, Artificial Sequence
  Description of Artificial Sequence: Synthetic oligonucleotide
  Sense strand starting at position 582 of SEQ ID NO: 586650
gccugaguguucccaggug

SEQ ID NO: 733977 - RNA, 19 nt, Artificial Sequence
  Description of Artificial Sequence: Synthetic oligonucleotide
  Antisense strand to SEQ ID NO: 733976
caccugggaacacucaggc

SEQ ID NO: 733978 - RNA, 19 nt, Artificial Sequence
  Description of Artificial Sequence: Synthetic oligonucleotide
  Sense strand starting at position 689 of SEQ ID NO: 586650
gggugaggcuucgggaaug

SEQ ID NO: 733979 - RNA, 19 nt, Artificial Sequence
  Description of Artificial Sequence: Synthetic oligonucleotide
  Antisense strand to SEQ ID NO: 733978
cauucccgaagccucaccc

SEQ ID NO: 733980 - RNA, 19 nt, Artificial Sequence
  Description of Artificial Sequence: Synthetic oligonucleotide
  Sense strand starting at position 847 of SEQ ID NO: 586650
ggugcaugguuggacagau

SEQ ID NO: 733981 - RNA, 19 nt, Artificial Sequence
  Description of Artificial Sequence: Synthetic oligonucleotide
  Antisense strand to SEQ ID NO: 733980
aucuguccaaccaugcacc

SEQ ID NO: 733982 - RNA, 19 nt, Artificial Sequence
  Description of Artificial Sequence: Synthetic oligonucleotide
  Sense strand starting at position 989 of SEQ ID NO: 586650
ugggaauucuaagaucccu

SEQ ID NO: 733983 - RNA, 19 nt, Artificial Sequence
  Description of Artificial Sequence: Synthetic oligonucleotide
  Antisense strand to SEQ ID NO: 733982
agggaucuuagaauuccca

SEQ ID NO: 733984 - RNA, 19 nt, Artificial Sequence
  Description of Artificial Sequence: Synthetic oligonucleotide
  Sense strand starting at position 997 of SEQ ID NO: 586650
cuaagaucccuaugagguc

SEQ ID NO: 733985 - RNA, 19 nt, Artificial Sequence
  Description of Artificial Sequence: Synthetic oligonucleotide
  Antisense strand to SEQ ID NO: 733984
gaccucauagggaucuuag

SEQ ID NO: 733986 - RNA, 19 nt, Artificial Sequence
  Description of Artificial Sequence: Synthetic oligonucleotide
  Sense strand starting at position 1055 of SEQ ID NO: 586650
ggaggaaucucagauaagc

SEQ ID NO: 733987 - RNA, 19 nt, Artificial Sequence
  Description of Artificial Sequence: Synthetic oligonucleotide
  Antisense strand to SEQ ID NO: 733986
gcuuaucugagauuccucc

SEQ ID NO: 733988 - RNA, 19 nt, Artificial Sequence
  Description of Artificial Sequence: Synthetic oligonucleotide
  Sense strand starting at position 1213 of SEQ ID NO: 586650
agcagaaaccucgggcuua

SEQ ID NO: 733989 - RNA, 19 nt, Artificial Sequence
  Description of Artificial Sequence: Synthetic oligonucleotide
  Antisense strand to SEQ ID NO: 733988
uaagcccgagguuucugcu

SEQ ID NO: 733990 - RNA, 19 nt, Artificial Sequence
  Description of Artificial Sequence: Synthetic oligonucleotide
  Sense strand starting at position 1214 of SEQ ID NO: 586650
gcagaaaccucgggcuuag

SEQ ID NO: 733991 - RNA, 19 nt, Artificial Sequence
  Description of Artificial Sequence: Synthetic oligonucleotide
  Antisense strand to SEQ ID NO: 733990
cuaagcccgagguuucugc

SEQ ID NO: 733992 - RNA, 19 nt, Artificial Sequence
  Description of Artificial Sequence: Synthetic oligonucleotide
  Sense strand starting at position 1316 of SEQ ID NO: 586650
gaaagcaguuauuagagga

SEQ ID NO: 733993 - RNA, 19 nt, Artificial Sequence
  Description of Artificial Sequence: Synthetic oligonucleotide
  Antisense strand to SEQ ID NO: 733992
uccucuaauaacugcuuuc

SEQ ID NO: 733994 - RNA, 19 nt, Artificial Sequence
  Description of Artificial Sequence: Synthetic oligonucleotide
  Sense strand starting at position 1427 of SEQ ID NO: 586650
gugcgcagauaugcaaaua

SEQ ID NO: 733995 - RNA, 19 nt, Artificial Sequence
  Description of Artificial Sequence: Synthetic oligonucleotide
  Antisense strand to SEQ ID NO: 733994
uauuugcauaucugcgcac

SEQ ID NO: 733996 - RNA, 19 nt, Artificial Sequence
  Description of Artificial Sequence: Synthetic oligonucleotide
  Sense strand starting at position 1485 of SEQ ID NO: 586650
gggcguucugugcaaacga

SEQ ID NO: 733997 - RNA, 19 nt, Artificial Sequence
  Description of Artificial Sequence: Synthetic oligonucleotide
  Antisense strand to SEQ ID NO: 733996
ucguuugcacagaacgccc

SEQ ID NO: 733998 - RNA, 19 nt, Artificial Sequence
  Description of Artificial Sequence: Synthetic oligonucleotide
  Sense strand starting at position 1487 of SEQ ID NO: 586650
gcguucugugcaaacgaga

SEQ ID NO: 733999 - RNA, 19 nt, Artificial Sequence
  Description of Artificial Sequence: Synthetic oligonucleotide
  Antisense strand to SEQ ID NO: 733998
ucucguuugcacagaacgc

SEQ ID NO: 734000 - RNA, 19 nt, Artificial Sequence
  Description of Artificial Sequence: Synthetic oligonucleotide
  Sense strand starting at position 1702 of SEQ ID NO: 586650
ugaugucugacaggucgua

SEQ ID NO: 734001 - RNA, 19 nt, Artificial Sequence
  Description of Artificial Sequence: Synthetic oligonucleotide
  Antisense strand to SEQ ID NO: 734000
uacgaccugucagacauca

SEQ ID NO: 734002 - RNA, 19 nt, Artificial Sequence
  Description of Artificial Sequence: Synthetic oligonucleotide
  Sense strand starting at position 2103 of SEQ ID NO: 586650
gccggagucugacgagaga

SEQ ID NO: 734003 - RNA, 19 nt, Artificial Sequence
  Description of Artificial Sequence: Synthetic oligonucleotide
  Antisense strand to SEQ ID NO: 734002
ucucucgucagacuccggc

SEQ ID NO: 734004 - RNA, 19 nt, Artificial Sequence
  Description of Artificial Sequence: Synthetic oligonucleotide
  Sense strand starting at position 2473 of SEQ ID NO: 586650
gcgggugagcuagaacuuu

SEQ ID NO: 734005 - RNA, 19 nt, Artificial Sequence
  Description of Artificial Sequence: Synthetic oligonucleotide
  Antisense strand to SEQ ID NO: 734004
aaaguucuagcucacccgc

SEQ ID NO: 734006 - RNA, 19 nt, Artificial Sequence
  Description of Artificial Sequence: Synthetic oligonucleotide
  Sense strand starting at position 2485 of SEQ ID NO: 586650
gaacuuuaagacugagguu

SEQ ID NO: 734007 - RNA, 19 nt, Artificial Sequence
  Description of Artificial Sequence: Synthetic oligonucleotide
  Antisense strand to SEQ ID NO: 734006
aaccucagucuuaaaguuc

SEQ ID NO: 734008 - RNA, 19 nt, Artificial Sequence
  Description of Artificial Sequence: Synthetic oligonucleotide
  Sense strand starting at position 2494 of SEQ ID NO: 586650
gacugagguuaagaaugaa

SEQ ID NO: 734009 - RNA, 19 nt, Artificial Sequence
  Description of Artificial Sequence: Synthetic oligonucleotide
  Antisense strand to SEQ ID NO: 734008
uucauucuuaaccucaguc

SEQ ID NO: 734010 - RNA, 19 nt, Artificial Sequence
  Description of Artificial Sequence: Synthetic oligonucleotide
  Sense strand starting at position 2562 of SEQ ID NO: 586650
gugcgagcuggacguguua

SEQ ID NO: 734011 - RNA, 19 nt, Artificial Sequence
  Description of Artificial Sequence: Synthetic oligonucleotide
  Antisense strand to SEQ ID NO: 734010
uaacacguccagcucgcac

SEQ ID NO: 734012 - RNA, 19 nt, Artificial Sequence
  Description of Artificial Sequence: Synthetic oligonucleotide
  Sense strand starting at position 2897 of SEQ ID NO: 586650
cgcccuuggugcuacgaau

SEQ ID NO: 734013 - RNA, 19 nt, Artificial Sequence
  Description of Artificial Sequence: Synthetic oligonucleotide
  Antisense strand to SEQ ID NO: 734012
auucguagcaccaagggcg

SEQ ID NO: 734014 - RNA, 19 nt, Artificial Sequence
  Description of Artificial Sequence: Synthetic oligonucleotide
  Sense strand starting at position 2931 of SEQ ID NO: 586650
gagggaaguugaugcguua

SEQ ID NO: 734015 - RNA, 19 nt, Artificial Sequence
  Description of Artificial Sequence: Synthetic oligonucleotide
  Antisense strand to SEQ ID NO: 734014
uaacgcaucaacuucccuc

SEQ ID NO: 734016 - RNA, 19 nt, Artificial Sequence
  Description of Artificial Sequence: Synthetic oligonucleotide
  Sense strand starting at position 2934 of SEQ ID NO: 586650
ggaaguugaugcguuagca

SEQ ID NO: 734017 - RNA, 19 nt, Artificial Sequence
  Description of Artificial Sequence: Synthetic oligonucleotide
  Antisense strand to SEQ ID NO: 734016
ugcuaacgcaucaacuucc

SEQ ID NO: 734018 - RNA, 19 nt, Artificial Sequence
  Description of Artificial Sequence: Synthetic oligonucleotide
  Sense strand starting at position 2942 of SEQ ID NO: 586650
augcguuagcaagagcgaa

SEQ ID NO: 734019 - RNA, 19 nt, Artificial Sequence
  Description of Artificial Sequence: Synthetic oligonucleotide
  Antisense strand to SEQ ID NO: 734018
uucgcucuugcuaacgcau

SEQ ID NO: 734020 - RNA, 19 nt, Artificial Sequence
  Description of Artificial Sequence: Synthetic oligonucleotide
  Sense strand starting at position 2977 of SEQ ID NO: 586650
gcuggcuugcucuagaaac

SEQ ID NO: 734021 - RNA, 19 nt, Artificial Sequence
  Description of Artificial Sequence: Synthetic oligonucleotide
  Antisense strand to SEQ ID NO: 734020
guuucuagagcaagccagc

SEQ ID NO: 734022 - RNA, 19 nt, Artificial Sequence
  Description of Artificial Sequence: Synthetic oligonucleotide
  Sense strand starting at position 2979 of SEQ ID NO: 586650
uggcuugcucuagaaacca

SEQ ID NO: 734023 - RNA, 19 nt, Artificial Sequence
  Description of Artificial Sequence: Synthetic oligonucleotide
  Antisense strand to SEQ ID NO: 734022
ugguuucuagagcaagcca

SEQ ID NO: 734024 - RNA, 19 nt, Artificial Sequence
  Description of Artificial Sequence: Synthetic oligonucleotide
  Sense strand starting at position 432 of SEQ ID NO: 586651
gaaucuaaguuuccuggca

SEQ ID NO: 734025 - RNA, 19 nt, Artificial Sequence
  Description of Artificial Sequence: Synthetic oligonucleotide
  Antisense strand to SEQ ID NO: 734024
ugccaggaaacuuagauuc

SEQ ID NO: 734026 - RNA, 19 nt, Artificial Sequence
  Description of Artificial Sequence: Synthetic oligonucleotide
  Sense strand starting at position 957 of SEQ ID NO: 586651
uugugugguggucagaaga

SEQ ID NO: 734027 - RNA, 19 nt, Artificial Sequence
  Description of Artificial Sequence: Synthetic oligonucleotide
  Antisense strand to SEQ ID NO: 734026
ucuucugaccaccacacaa

SEQ ID NO: 734028 - RNA, 19 nt, Artificial Sequence
  Description of Artificial Sequence: Synthetic oligonucleotide
  Sense strand starting at position 1029 of SEQ ID NO: 586651
cagucaauaugggugggau

SEQ ID NO: 734029 - RNA, 19 nt, Artificial Sequence
  Description of Artificial Sequence: Synthetic oligonucleotide
  Antisense strand to SEQ ID NO: 734028
aucccacccauauugacug

SEQ ID NO: 734030 - RNA, 19 nt, Artificial Sequence
  Description of Artificial Sequence: Synthetic oligonucleotide
  Sense strand starting at position 1030 of SEQ ID NO: 586651
agucaauaugggugggaug

SEQ ID NO: 734031 - RNA, 19 nt, Artificial Sequence
  Description of Artificial Sequence: Synthetic oligonucleotide
  Antisense strand to SEQ ID NO: 734030
caucccacccauauugacu

SEQ ID NO: 734032 - RNA, 19 nt, Artificial Sequence
  Description of Artificial Sequence: Synthetic oligonucleotide
  Sense strand starting at position 1031 of SEQ ID NO: 586651
gucaauaugggugggauga

SEQ ID NO: 734033 - RNA, 19 nt, Artificial Sequence
  Description of Artificial Sequence: Synthetic oligonucleotide
  Antisense strand to SEQ ID NO: 734032
ucaucccacccauauugac

SEQ ID NO: 734034 - RNA, 19 nt, Artificial Sequence
  Description of Artificial Sequence: Synthetic oligonucleotide
  Sense strand starting at position 1032 of SEQ ID NO: 586651
ucaauaugggugggaugau

SEQ ID NO: 734035 - RNA, 19 nt, Artificial Sequence
  Description of Artificial Sequence: Synthetic oligonucleotide
  Antisense strand to SEQ ID NO: 734034
aucaucccacccauauuga

SEQ ID NO: 734036 - RNA, 19 nt, Artificial Sequence
  Description of Artificial Sequence: Synthetic oligonucleotide
  Sense strand starting at position 1188 of SEQ ID NO: 586651
gucacuuagucuuugaaga

SEQ ID NO: 734037 - RNA, 19 nt, Artificial Sequence
  Description of Artificial Sequence: Synthetic oligonucleotide
  Antisense strand to SEQ ID NO: 734036
ucuucaaagacuaagugac

SEQ ID NO: 734038 - RNA, 19 nt, Artificial Sequence
  Description of Artificial Sequence: Synthetic oligonucleotide
  Sense strand starting at position 1189 of SEQ ID NO: 586651
ucacuuagucuuugaagaa

SEQ ID NO: 734039 - RNA, 19 nt, Artificial Sequence
  Description of Artificial Sequence: Synthetic oligonucleotide
  Antisense strand to SEQ ID NO: 734038
uucuucaaagacuaaguga

SEQ ID NO: 734040 - RNA, 19 nt, Artificial Sequence
  Description of Artificial Sequence: Synthetic oligonucleotide
  Sense strand starting at position 1275 of SEQ ID NO: 586651
ggaagaguguggaaguaug

SEQ ID NO: 734041 - RNA, 19 nt, Artificial Sequence
  Description of Artificial Sequence: Synthetic oligonucleotide
  Antisense strand to SEQ ID NO: 734040
cauacuuccacacucuucc

SEQ ID NO: 734042 - RNA, 19 nt, Artificial Sequence
  Description of Artificial Sequence: Synthetic oligonucleotide
  Sense strand starting at position 1327 of SEQ ID NO: 586651
agagaugaacucugccuau

SEQ ID NO: 734043 - RNA, 19 nt, Artificial Sequence
  Description of Artificial Sequence: Synthetic oligonucleotide
  Antisense strand to SEQ ID NO: 734042
auaggcagaguucaucucu

SEQ ID NO: 734044 - RNA, 19 nt, Artificial Sequence
  Description of Artificial Sequence: Synthetic oligonucleotide
  Sense strand starting at position 1429 of SEQ ID NO: 586651
cuguguuaacucgacucau

SEQ ID NO: 734045 - RNA, 19 nt, Artificial Sequence
  Description of Artificial Sequence: Synthetic oligonucleotide
  Antisense strand to SEQ ID NO: 734044
augagucgaguuaacacag

SEQ ID NO: 734046 - RNA, 19 nt, Artificial Sequence
  Description of Artificial Sequence: Synthetic oligonucleotide
  Sense strand starting at position 1450 of SEQ ID NO: 586651
gaaaucaaauguguuaaug

SEQ ID NO: 734047 - RNA, 19 nt, Artificial Sequence
  Description of Artificial Sequence: Synthetic oligonucleotide
  Antisense strand to SEQ ID NO: 734046
cauuaacacauuugauuuc

SEQ ID NO: 734048 - RNA, 19 nt, Artificial Sequence
  Description of Artificial Sequence: Synthetic oligonucleotide
  Sense strand starting at position 1478 of SEQ ID NO: 586651
aggaacuauuuagagcuau

SEQ ID NO: 734049 - RNA, 19 nt, Artificial Sequence
  Description of Artificial Sequence: Synthetic oligonucleotide
  Antisense strand to SEQ ID NO: 734048
auagcucuaaauaguuccu

SEQ ID NO: 734050 - RNA, 19 nt, Artificial Sequence
  Description of Artificial Sequence: Synthetic oligonucleotide
  Sense strand starting at position 2156 of SEQ ID NO: 586651
uguucuguucgcuuaucuu

SEQ ID NO: 734051 - RNA, 19 nt, Artificial Sequence
  Description of Artificial Sequence: Synthetic oligonucleotide
  Antisense strand to SEQ ID NO: 734050
aagauaagcgaacagaaca

SEQ ID NO: 734052 - RNA, 19 nt, Artificial Sequence
  Description of Artificial Sequence: Synthetic oligonucleotide
  Sense strand starting at position 2257 of SEQ ID NO: 586651
uugucaucccacgauagga

SEQ ID NO: 734053 - RNA, 19 nt, Artificial Sequence
  Description of Artificial Sequence: Synthetic oligonucleotide
  Antisense strand to SEQ ID NO: 734052
uccuaucgugggaugacaa

SEQ ID NO: 734054 - RNA, 19 nt, Artificial Sequence
  Description of Artificial Sequence: Synthetic oligonucleotide
  Sense strand starting at position 2325 of SEQ ID NO: 586651
agagucguacuuuagaagu

SEQ ID NO: 734055 - RNA, 19 nt, Artificial Sequence
  Description of Artificial Sequence: Synthetic oligonucleotide
  Antisense strand to SEQ ID NO: 734054
acuucuaaaguacgacucu

SEQ ID NO: 734056 - RNA, 19 nt, Artificial Sequence
  Description of Artificial Sequence: Synthetic oligonucleotide
  Sense strand starting at position 2335 of SEQ ID NO: 586651
uuuagaagugucuaauguc

SEQ ID NO: 734057 - RNA, 19 nt, Artificial Sequence
  Description of Artificial Sequence: Synthetic oligonucleotide
  Antisense strand to SEQ ID NO: 734056
gacauuagacacuucuaaa

SEQ ID NO: 734058 - RNA, 19 nt, Artificial Sequence
  Description of Artificial Sequence: Synthetic oligonucleotide
  Sense strand starting at position 2341 of SEQ ID NO: 586651
agugucuaaugucucuaaa

SEQ ID NO: 734059 - RNA, 19 nt, Artificial Sequence
  Description of Artificial Sequence: Synthetic oligonucleotide
  Antisense strand to SEQ ID NO: 734058
uuuagagacauuagacacu

SEQ ID NO: 734060 - RNA, 19 nt, Artificial Sequence
  Description of Artificial Sequence: Synthetic oligonucleotide
  Sense strand starting at position 2344 of SEQ ID NO: 586651
gucuaaugucucuaaagca

SEQ ID NO: 734061 - RNA, 19 nt, Artificial Sequence
  Description of Artificial Sequence: Synthetic oligonucleotide
  Antisense strand to SEQ ID NO: 734060
ugcuuuagagacauuagac

SEQ ID NO: 734062 - RNA, 19 nt, Artificial Sequence
  Description of Artificial Sequence: Synthetic oligonucleotide
  Sense strand starting at position 2356 of SEQ ID NO: 586651
uaaagcagucuguaggaaa

SEQ ID NO: 734063 - RNA, 19 nt, Artificial Sequence
  Description of Artificial Sequence: Synthetic oligonucleotide
  Antisense strand to SEQ ID NO: 734062
uuuccuacagacugcuuua

SEQ ID NO: 734064 - RNA, 19 nt, Artificial Sequence
  Description of Artificial Sequence: Synthetic oligonucleotide
  Sense strand starting at position 2411 of SEQ ID NO: 586651
aggagaugagggugcauau

SEQ ID NO: 734065 - RNA, 19 nt, Artificial Sequence
  Description of Artificial Sequence: Synthetic oligonucleotide
  Antisense strand to SEQ ID NO: 734064
auaugcacccucaucuccu

SEQ ID NO: 734066 - RNA, 19 nt, Artificial Sequence
  Description of Artificial Sequence: Synthetic oligonucleotide
  Sense strand starting at position 2420 of SEQ ID NO: 586651
gggugcauauaagugaaau

SEQ ID NO: 734067 - RNA, 19 nt, Artificial Sequence
  Description of Artificial Sequence: Synthetic oligonucleotide
  Antisense strand to SEQ ID NO: 734066
auuucacuuauaugcaccc

SEQ ID NO: 734068 - RNA, 19 nt, Artificial Sequence
  Description of Artificial Sequence: Synthetic oligonucleotide
  Sense strand starting at position 2421 of SEQ ID NO: 586651
ggugcauauaagugaaaua

SEQ ID NO: 734069 - RNA, 19 nt, Artificial Sequence
  Description of Artificial Sequence: Synthetic oligonucleotide
  Antisense strand to SEQ ID NO: 734068
uauuucacuuauaugcacc

SEQ ID NO: 734070 - RNA, 19 nt, Artificial Sequence
  Description of Artificial Sequence: Synthetic oligonucleotide
  Sense strand starting at position 2422 of SEQ ID NO: 586651
gugcauauaagugaaauag

SEQ ID NO: 734071 - RNA, 19 nt, Artificial Sequence
  Description of Artificial Sequence: Synthetic oligonucleotide
  Antisense strand to SEQ ID NO: 734070
cuauuucacuuauaugcac

SEQ ID NO: 734072 - RNA, 19 nt, Artificial Sequence
  Description of Artificial Sequence: Synthetic oligonucleotide
  Sense strand starting at position 2448 of SEQ ID NO: 586651
gguuccuguccuuaugauu

SEQ ID NO: 734073 - RNA, 19 nt, Artificial Sequence
  Description of Artificial Sequence: Synthetic oligonucleotide
  Antisense strand to SEQ ID NO: 734072
aaucauaaggacaggaacc

SEQ ID NO: 734074 - RNA, 19 nt, Artificial Sequence
  Description of Artificial Sequence: Synthetic oligonucleotide
  Sense strand starting at position 2507 of SEQ ID NO: 586651
agagcugauuuccaauuaa

SEQ ID NO: 734075 - RNA, 19 nt, Artificial Sequence
  Description of Artificial Sequence: Synthetic oligonucleotide
  Antisense strand to SEQ ID NO: 734074
uuaauuggaaaucagcucu

SEQ ID NO: 734076 - RNA, 19 nt, Artificial Sequence
  Description of Artificial Sequence: Synthetic oligonucleotide
  Sense strand starting at position 2879 of SEQ ID NO: 586651
cuauuauugccauagugau

SEQ ID NO: 734077 - RNA, 19 nt, Artificial Sequence
  Description of Artificial Sequence: Synthetic oligonucleotide
  Antisense strand to SEQ ID NO: 734076
aucacuauggcaauaauag

SEQ ID NO: 734078 - RNA, 19 nt, Artificial Sequence
  Description of Artificial Sequence: Synthetic oligonucleotide
  Sense strand starting at position 2886 of SEQ ID NO: 586651
ugccauagugaugacaaua

SEQ ID NO: 734079 - RNA, 19 nt, Artificial Sequence
  Description of Artificial Sequence: Synthetic oligonucleotide
  Antisense strand to SEQ ID NO: 734078
uauugucaucacuauggca

SEQ ID NO: 734080 - RNA, 19 nt, Artificial Sequence
  Description of Artificial Sequence: Synthetic oligonucleotide
  Sense strand starting at position 2906 of SEQ ID NO: 586651
agauccuugcagggaagua

SEQ ID NO: 734081 - RNA, 19 nt, Artificial Sequence
  Description of Artificial Sequence: Synthetic oligonucleotide
  Antisense strand to SEQ ID NO: 734080
uacuucccugcaaggaucu

SEQ ID NO: 734082 - RNA, 19 nt, Artificial Sequence
  Description of Artificial Sequence: Synthetic oligonucleotide
  Sense strand starting at position 3040 of SEQ ID NO: 586651
gacaccauccauugacgau

SEQ ID NO: 734083 - RNA, 19 nt, Artificial Sequence
  Description of Artificial Sequence: Synthetic oligonucleotide
  Antisense strand to SEQ ID NO: 734082
aucgucaauggaugguguc

SEQ ID NO: 734084 - RNA, 19 nt, Artificial Sequence
  Description of Artificial Sequence: Synthetic oligonucleotide
  Sense strand starting at position 3047 of SEQ ID NO: 586651
uccauugacgauuaucuuu

SEQ ID NO: 734085 - RNA, 19 nt, Artificial Sequence
  Description of Artificial Sequence: Synthetic oligonucleotide
  Antisense strand to SEQ ID NO: 734084
aaagauaaucgucaaugga

SEQ ID NO: 734086 - RNA, 19 nt, Artificial Sequence
  Description of Artificial Sequence: Synthetic oligonucleotide
  Sense strand starting at position 3052 of SEQ ID NO: 586651
ugacgauuaucuuucucag

SEQ ID NO: 734087 - RNA, 19 nt, Artificial Sequence
  Description of Artificial Sequence: Synthetic oligonucleotide
  Antisense strand to SEQ ID NO: 734086
cugagaaagauaaucguca

SEQ ID NO: 734088 - RNA, 19 nt, Artificial Sequence
  Description of Artificial Sequence: Synthetic oligonucleotide
  Sense strand starting at position 3215 of SEQ ID NO: 586651
aguagagauuccuccaagg

SEQ ID NO: 734089 - RNA, 19 nt, Artificial Sequence
  Description of Artificial Sequence: Synthetic oligonucleotide
  Antisense strand to SEQ ID NO: 734088
ccuuggaggaaucucuacu

SEQ ID NO: 734090 - RNA, 19 nt, Artificial Sequence
  Description of Artificial Sequence: Synthetic oligonucleotide
  Sense strand starting at position 3655 of SEQ ID NO: 586651
ucagucuaucgaggagagu

SEQ ID NO: 734091 - RNA, 19 nt, Artificial Sequence
  Description of Artificial Sequence: Synthetic oligonucleotide
  Antisense strand to SEQ ID NO: 734090
acucuccucgauagacuga

SEQ ID NO: 734092 - RNA, 19 nt, Artificial Sequence
  Description of Artificial Sequence: Synthetic oligonucleotide
  Sense strand starting at position 3791 of SEQ ID NO: 586651
ggaagauaguaaucaggca

SEQ ID NO: 734093 - RNA, 19 nt, Artificial Sequence
  Description of Artificial Sequence: Synthetic oligonucleotide
  Antisense strand to SEQ ID NO: 734092
ugccugauuacuaucuucc

SEQ ID NO: 734094 - RNA, 19 nt, Artificial Sequence
  Description of Artificial Sequence: Synthetic oligonucleotide
  Sense strand starting at position 3869 of SEQ ID NO: 586651
guuaauguccuacaggaca

SEQ ID NO: 734095 - RNA, 19 nt, Artificial Sequence
  Description of Artificial Sequence: Synthetic oligonucleotide
  Antisense strand to SEQ ID NO: 734094
uguccuguaggacauuaac

SEQ ID NO: 734096 - RNA, 19 nt, Artificial Sequence
  Description of Artificial Sequence: Synthetic oligonucleotide
  Sense strand starting at position 3892 of SEQ ID NO: 586651
aacuauagccuuugagguu

SEQ ID NO: 734097 - RNA, 19 nt, Artificial Sequence
  Description of Artificial Sequence: Synthetic oligonucleotide
  Antisense strand to SEQ ID NO: 734096
aaccucaaaggcuauaguu

SEQ ID NO: 734098 - RNA, 19 nt, Artificial Sequence
  Description of Artificial Sequence: Synthetic oligonucleotide
  Sense strand starting at position 3898 of SEQ ID NO: 586651
agccuuugagguuagucua

SEQ ID NO: 734099 - RNA, 19 nt, Artificial Sequence
  Description of Artificial Sequence: Synthetic oligonucleotide
  Antisense strand to SEQ ID NO: 734098
uagacuaaccucaaaggcu

SEQ ID NO: 734100 - RNA, 19 nt, Artificial Sequence
  Description of Artificial Sequence: Synthetic oligonucleotide
  Sense strand starting at position 3901 of SEQ ID NO: 586651
cuuugagguuagucuaaga

SEQ ID NO: 734101 - RNA, 19 nt, Artificial Sequence
  Description of Artificial Sequence: Synthetic oligonucleotide
  Antisense strand to SEQ ID NO: 734100
ucuuagacuaaccucaaag

SEQ ID NO: 734102 - RNA, 19 nt, Artificial Sequence
  Description of Artificial Sequence: Synthetic oligonucleotide
  Sense strand starting at position 3953 of SEQ ID NO: 586651
uguccauccucauuagaca

SEQ ID NO: 734103 - RNA, 19 nt, Artificial Sequence
  Description of Artificial Sequence: Synthetic oligonucleotide
  Antisense strand to SEQ ID NO: 734102
ugucuaaugaggauggaca

SEQ ID NO: 734104 - RNA, 19 nt, Artificial Sequence
  Description of Artificial Sequence: Synthetic oligonucleotide
  Sense strand starting at position 8 of SEQ ID NO: 586652
aguugaaucacagggugua

SEQ ID NO: 734105 - RNA, 19 nt, Artificial Sequence
  Description of Artificial Sequence: Synthetic oligonucleotide
  Antisense strand to SEQ ID NO: 734104
uacacccugugauucaacu

SEQ ID NO: 734106 - RNA, 19 nt, Artificial Sequence
  Description of Artificial Sequence: Synthetic oligonucleotide
  Sense strand starting at position 311 of SEQ ID NO: 586652
gugcuuguauaucuuauuu

SEQ ID NO: 734107 - RNA, 19 nt, Artificial Sequence
  Description of Artificial Sequence: Synthetic oligonucleotide
  Antisense strand to SEQ ID NO: 734106
aaauaagauauacaagcac

SEQ ID NO: 734108 - RNA, 19 nt, Artificial Sequence
  Description of Artificial Sequence: Synthetic oligonucleotide
  Sense strand starting at position 329 of SEQ ID NO: 586652
ucccauuuaugggagguaa

SEQ ID NO: 734109 - RNA, 19 nt, Artificial Sequence
  Description of Artificial Sequence: Synthetic oligonucleotide
  Antisense strand to SEQ ID NO: 734108
uuaccucccauaaauggga

SEQ ID NO: 734110 - RNA, 19 nt, Artificial Sequence
  Description of Artificial Sequence: Synthetic oligonucleotide
  Sense strand starting at position 451 of SEQ ID NO: 586652
cuaagagcaugauugcuaa

SEQ ID NO: 734111 - RNA, 19 nt, Artificial Sequence
  Description of Artificial Sequence: Synthetic oligonucleotide
  Antisense strand to SEQ ID NO: 734110
uuagcaaucaugcucuuag

SEQ ID NO: 734112 - RNA, 19 nt, Artificial Sequence
  Description of Artificial Sequence: Synthetic oligonucleotide
  Sense strand starting at position 493 of SEQ ID NO: 586652
gugggaauccuugaccucu

SEQ ID NO: 734113 - RNA, 19 nt, Artificial Sequence
  Description of Artificial Sequence: Synthetic oligonucleotide
  Antisense strand to SEQ ID NO: 734112
agaggucaaggauucccac

SEQ ID NO: 734114 - RNA, 19 nt, Artificial Sequence
  Description of Artificial Sequence: Synthetic oligonucleotide
  Sense strand starting at position 495 of SEQ ID NO: 586652
gggaauccuugaccucuua

SEQ ID NO: 734115 - RNA, 19 nt, Artificial Sequence
  Description of Artificial Sequence: Synthetic oligonucleotide
  Antisense strand to SEQ ID NO: 734114
uaagaggucaaggauuccc

SEQ ID NO: 734116 - RNA, 19 nt, Artificial Sequence
  Description of Artificial Sequence: Synthetic oligonucleotide
  Sense strand starting at position 837 of SEQ ID NO: 586652
uuuggagggcuugggaaau

SEQ ID NO: 734117 - RNA, 19 nt, Artificial Sequence
  Description of Artificial Sequence: Synthetic oligonucleotide
  Antisense strand to SEQ ID NO: 734116
auuucccaagcccuccaaa

SEQ ID NO: 734118 - RNA, 19 nt, Artificial Sequence
  Description of Artificial Sequence: Synthetic oligonucleotide
  Sense strand starting at position 847 of SEQ ID NO: 586652
uugggaaauuguccacgga

SEQ ID NO: 734119 - RNA, 19 nt, Artificial Sequence
  Description of Artificial Sequence: Synthetic oligonucleotide
  Antisense strand to SEQ ID NO: 734118
uccguggacaauuucccaa

SEQ ID NO: 734120 - RNA, 19 nt, Artificial Sequence
  Description of Artificial Sequence: Synthetic oligonucleotide
  Sense strand starting at position 850 of SEQ ID NO: 586652
ggaaauuguccacggagug

SEQ ID NO: 734121 - RNA, 19 nt, Artificial Sequence
  Description of Artificial Sequence: Synthetic oligonucleotide
  Antisense strand to SEQ ID NO: 734120
cacuccguggacaauuucc

SEQ ID NO: 734122 - RNA, 19 nt, Artificial Sequence
  Description of Artificial Sequence: Synthetic oligonucleotide
  Sense strand starting at position 1032 of SEQ ID NO: 586652
uugccugcuuauuugcaaa

SEQ ID NO: 734123 - RNA, 19 nt, Artificial Sequence
  Description of Artificial Sequence: Synthetic oligonucleotide
  Antisense strand to SEQ ID NO: 734122
uuugcaaauaagcaggcaa

SEQ ID NO: 734124 - RNA, 19 nt, Artificial Sequence
  Description of Artificial Sequence: Synthetic oligonucleotide
  Sense strand starting at position 1180 of SEQ ID NO: 586652
uuaagagcauggucauauu

SEQ ID NO: 734125 - RNA, 19 nt, Artificial Sequence
  Description of Artificial Sequence: Synthetic oligonucleotide
  Antisense strand to SEQ ID NO: 734124
aauaugaccaugcucuuaa

SEQ ID NO: 734126 - RNA, 19 nt, Artificial Sequence
  Description of Artificial Sequence: Synthetic oligonucleotide
  Sense strand starting at position 1223 of SEQ ID NO: 586652
cucacucuccuguaacagu

SEQ ID NO: 734127 - RNA, 19 nt, Artificial Sequence
  Description of Artificial Sequence: Synthetic oligonucleotide
  Antisense strand to SEQ ID NO: 734126
acuguuacaggagagugag

SEQ ID NO: 734128 - RNA, 19 nt, Artificial Sequence
  Description of Artificial Sequence: Synthetic oligonucleotide
  Sense strand starting at position 1431 of SEQ ID NO: 586652
aggcaaauauuauugaacu

SEQ ID NO: 734129 - RNA, 19 nt, Artificial Sequence
  Description of Artificial Sequence: Synthetic oligonucleotide
  Antisense strand to SEQ ID NO: 734128
aguucaauaauauuugccu

SEQ ID NO: 734130 - RNA, 19 nt, Artificial Sequence
  Description of Artificial Sequence: Synthetic oligonucleotide
  Sense strand starting at position 1516 of SEQ ID NO: 586652
uguagucuccuuuaauuaa

SEQ ID NO: 734131 - RNA, 19 nt, Artificial Sequence
  Description of Artificial Sequence: Synthetic oligonucleotide
  Antisense strand to SEQ ID NO: 734130
uuaauuaaaggagacuaca

SEQ ID NO: 734132 - RNA, 19 nt, Artificial Sequence
  Description of Artificial Sequence: Synthetic oligonucleotide
  Sense strand starting at position 1535 of SEQ ID NO: 586652
cagguagagaguuaacagu

SEQ ID NO: 734133 - RNA, 19 nt, Artificial Sequence
  Description of Artificial Sequence: Synthetic oligonucleotide
  Antisense strand to SEQ ID NO: 734132
acuguuaacucucuaccug

SEQ ID NO: 734134 - RNA, 19 nt, Artificial Sequence
  Description of Artificial Sequence: Synthetic oligonucleotide
  Sense strand starting at position 1563 of SEQ ID NO: 586652
uguugaacaucugcaagaa

SEQ ID NO: 734135 - RNA, 19 nt, Artificial Sequence
  Description of Artificial Sequence: Synthetic oligonucleotide
  Antisense strand to SEQ ID NO: 734134
uucuugcagauguucaaca

SEQ ID NO: 734136 - RNA, 19 nt, Artificial Sequence
  Description of Artificial Sequence: Synthetic oligonucleotide
  Sense strand starting at position 1608 of SEQ ID NO: 586652
gucauaguggcuuaagaaa

SEQ ID NO: 734137 - RNA, 19 nt, Artificial Sequence
  Description of Artificial Sequence: Synthetic oligonucleotide
  Antisense strand to SEQ ID NO: 734136
uuucuuaagccacuaugac

SEQ ID NO: 734138 - RNA, 19 nt, Artificial Sequence
  Description of Artificial Sequence: Synthetic oligonucleotide
  Sense strand starting at position 2027 of SEQ ID NO: 586652
ggcagagcucauuggauga

SEQ ID NO: 734139 - RNA, 19 nt, Artificial Sequence
  Description of Artificial Sequence: Synthetic oligonucleotide
  Antisense strand to SEQ ID NO: 734138
ucauccaaugagcucugcc

SEQ ID NO: 734140 - RNA, 19 nt, Artificial Sequence
  Description of Artificial Sequence: Synthetic oligonucleotide
  Sense strand starting at position 2031 of SEQ ID NO: 586652
gagcucauuggaugaggaa

SEQ ID NO: 734141 - RNA, 19 nt, Artificial Sequence
  Description of Artificial Sequence: Synthetic oligonucleotide
  Antisense strand to SEQ ID NO: 734140
uuccucauccaaugagcuc

SEQ ID NO: 734142 - RNA, 19 nt, Artificial Sequence
  Description of Artificial Sequence: Synthetic oligonucleotide
  Sense strand starting at position 2313 of SEQ ID NO: 586652
acaugaagauuugagaucu

SEQ ID NO: 734143 - RNA, 19 nt, Artificial Sequence
  Description of Artificial Sequence: Synthetic oligonucleotide
  Antisense strand to SEQ ID NO: 734142
agaucucaaaucuucaugu

SEQ ID NO: 734144 - RNA, 19 nt, Artificial Sequence
  Description of Artificial Sequence: Synthetic oligonucleotide
  Sense strand starting at position 2368 of SEQ ID NO: 586652
uuggaaaguugggcagaaa

SEQ ID NO: 734145 - RNA, 19 nt, Artificial Sequence
  Description of Artificial Sequence: Synthetic oligonucleotide
  Antisense strand to SEQ ID NO: 734144
uuucugcccaacuuuccaa

SEQ ID NO: 734146 - RNA, 19 nt, Artificial Sequence
  Description of Artificial Sequence: Synthetic oligonucleotide
  Sense strand starting at position 2565 of SEQ ID NO: 586652
auaauagcauaggugagaa

SEQ ID NO: 734147 - RNA, 19 nt, Artificial Sequence
  Description of Artificial Sequence: Synthetic oligonucleotide
  Antisense strand to SEQ ID NO: 734146
uucucaccuaugcuauuau

SEQ ID NO: 734148 - RNA, 19 nt, Artificial Sequence
  Description of Artificial Sequence: Synthetic oligonucleotide
  Sense strand starting at position 2577 of SEQ ID NO: 586652
gugagaacuggcugaaaua

SEQ ID NO: 734149 - RNA, 19 nt, Artificial Sequence
  Description of Artificial Sequence: Synthetic oligonucleotide
  Antisense strand to SEQ ID NO: 734148
uauuucagccaguucucac

SEQ ID NO: 734150 - RNA, 19 nt, Artificial Sequence
  Description of Artificial Sequence: Synthetic oligonucleotide
  Sense strand starting at position 2586 of SEQ ID NO: 586652
ggcugaaauauugauaguu

SEQ ID NO: 734151 - RNA, 19 nt, Artificial Sequence
  Description of Artificial Sequence: Synthetic oligonucleotide
  Antisense strand to SEQ ID NO: 734150
aacuaucaauauuucagcc

SEQ ID NO: 734152 - RNA, 19 nt, Artificial Sequence
  Description of Artificial Sequence: Synthetic oligonucleotide
  Sense strand starting at position 2641 of SEQ ID NO: 586652
uguugagugcuauacacag

SEQ ID NO: 734153 - RNA, 19 nt, Artificial Sequence
  Description of Artificial Sequence: Synthetic oligonucleotide
  Antisense strand to SEQ ID NO: 734152
cuguguauagcacucaaca

SEQ ID NO: 734154 - RNA, 19 nt, Artificial Sequence
  Description of Artificial Sequence: Synthetic oligonucleotide
  Sense strand starting at position 2663 of SEQ ID NO: 586652
agauuuacuucugauacag

SEQ ID NO: 734155 - RNA, 19 nt, Artificial Sequence
  Description of Artificial Sequence: Synthetic oligonucleotide
  Antisense strand to SEQ ID NO: 734154
cuguaucagaaguaaaucu

SEQ ID NO: 734156 - RNA, 19 nt, Artificial Sequence
  Description of Artificial Sequence: Synthetic oligonucleotide
  Sense strand starting at position 2746 of SEQ ID NO: 586652
gaauaaguugcccaaguuu

SEQ ID NO: 734157 - RNA, 19 nt, Artificial Sequence
  Description of Artificial Sequence: Synthetic oligonucleotide
  Antisense strand to SEQ ID NO: 734156
aaacuugggcaacuuauuc

SEQ ID NO: 734158 - RNA, 19 nt, Artificial Sequence
  Description of Artificial Sequence: Synthetic oligonucleotide
  Sense strand starting at position 2761 of SEQ ID NO: 586652
guuugcacagcugaugaaa

SEQ ID NO: 734159 - RNA, 19 nt, Artificial Sequence
  Description of Artificial Sequence: Synthetic oligonucleotide
  Antisense strand to SEQ ID NO: 734158
uuucaucagcugugcaaac

SEQ ID NO: 734160 - RNA, 19 nt, Artificial Sequence
  Description of Artificial Sequence: Synthetic oligonucleotide
  Sense strand starting at position 2830 of SEQ ID NO: 586652
ggcagaguucccugggaua

SEQ ID NO: 734161 - RNA, 19 nt, Artificial Sequence
  Description of Artificial Sequence: Synthetic oligonucleotide
  Antisense strand to SEQ ID NO: 734160
uaucccagggaacucugcc

SEQ ID NO: 734162 - RNA, 19 nt, Artificial Sequence
  Description of Artificial Sequence: Synthetic oligonucleotide
  Sense strand starting at position 2832 of SEQ ID NO: 586652
cagaguucccugggauagu

SEQ ID NO: 734163 - RNA, 19 nt, Artificial Sequence
  Description of Artificial Sequence: Synthetic oligonucleotide
  Antisense strand to SEQ ID NO: 734162
acuaucccagggaacucug

SEQ ID NO: 734164 - RNA, 19 nt, Artificial Sequence
  Description of Artificial Sequence: Synthetic oligonucleotide
  Sense strand starting at position 2884 of SEQ ID NO: 586652
aggguucuugaauggauag

SEQ ID NO: 734165 - RNA, 19 nt, Artificial Sequence
  Description of Artificial Sequence: Synthetic oligonucleotide
  Antisense strand to SEQ ID NO: 734164
cuauccauucaagaacccu

SEQ ID NO: 734166 - RNA, 19 nt, Artificial Sequence
  Description of Artificial Sequence: Synthetic oligonucleotide
  Sense strand starting at position 2885 of SEQ ID NO: 586652
ggguucuugaauggauaga

SEQ ID NO: 734167 - RNA, 19 nt, Artificial Sequence
  Description of Artificial Sequence: Synthetic oligonucleotide
  Antisense strand to SEQ ID NO: 734166
ucuauccauucaagaaccc

SEQ ID NO: 734168 - RNA, 19 nt, Artificial Sequence
  Description of Artificial Sequence: Synthetic oligonucleotide
  Sense strand starting at position 2994 of SEQ ID NO: 586652
aaguuagggcuguaaacau

SEQ ID NO: 734169 - RNA, 19 nt, Artificial Sequence
  Description of Artificial Sequence: Synthetic oligonucleotide
  Antisense strand to SEQ ID NO: 734168
auguuuacagcccuaacuu

SEQ ID NO: 734170 - RNA, 19 nt, Artificial Sequence
  Description of Artificial Sequence: Synthetic oligonucleotide
  Sense strand starting at position 3084 of SEQ ID NO: 586652
uuaugacugagauggcauu

SEQ ID NO: 734171 - RNA, 19 nt, Artificial Sequence
  Description of Artificial Sequence: Synthetic oligonucleotide
  Antisense strand to SEQ ID NO: 734170
aaugccaucucagucauaa

SEQ ID NO: 734172 - RNA, 19 nt, Artificial Sequence
  Description of Artificial Sequence: Synthetic oligonucleotide
  Sense strand starting at position 3301 of SEQ ID NO: 586652
ugggaucuaucccuuugau

SEQ ID NO: 734173 - RNA, 19 nt, Artificial Sequence
  Description of Artificial Sequence: Synthetic oligonucleotide
  Antisense strand to SEQ ID NO: 734172
aucaaagggauagauccca

SEQ ID NO: 734174 - RNA, 19 nt, Artificial Sequence
  Description of Artificial Sequence: Synthetic oligonucleotide
  Sense strand starting at position 3359 of SEQ ID NO: 586652
uggguagaagccuaacuuu

SEQ ID NO: 734175 - RNA, 19 nt, Artificial Sequence
  Description of Artificial Sequence: Synthetic oligonucleotide
  Antisense strand to SEQ ID NO: 734174
aaaguuaggcuucuaccca

SEQ ID NO: 734176 - RNA, 19 nt, Artificial Sequence
  Description of Artificial Sequence: Synthetic oligonucleotide
  Sense strand starting at position 3446 of SEQ ID NO: 586652
cuuaaugugcuugacauau

SEQ ID NO: 734177 - RNA, 19 nt, Artificial Sequence
  Description of Artificial Sequence: Synthetic oligonucleotide
  Antisense strand to SEQ ID NO: 734176
auaugucaagcacauuaag

SEQ ID NO: 734178 - RNA, 19 nt, Artificial Sequence
  Description of Artificial Sequence: Synthetic oligonucleotide
  Sense strand starting at position 3535 of SEQ ID NO: 586652
cuccucaugguaugacuua

SEQ ID NO: 734179 - RNA, 19 nt, Artificial Sequence
  Description of Artificial Sequence: Synthetic oligonucleotide
  Antisense strand to SEQ ID NO: 734178
uaagucauaccaugaggag

SEQ ID NO: 734180 - RNA, 19 nt, Artificial Sequence
  Description of Artificial Sequence: Synthetic oligonucleotide
  Sense strand starting at position 3575 of SEQ ID NO: 586652
cucaguuaccaugaggcaa

SEQ ID NO: 734181 - RNA, 19 nt, Artificial Sequence
  Description of Artificial Sequence: Synthetic oligonucleotide
  Antisense strand to SEQ ID NO: 734180
uugccucaugguaacugag

SEQ ID NO: 734182 - RNA, 19 nt, Artificial Sequence
  Description of Artificial Sequence: Synthetic oligonucleotide
  Sense strand starting at position 3688 of SEQ ID NO: 586652
ugaccuacugcccagauau

SEQ ID NO: 734183 - RNA, 19 nt, Artificial Sequence
  Description of Artificial Sequence: Synthetic oligonucleotide
  Antisense strand to SEQ ID NO: 734182
auaucugggcaguagguca

SEQ ID NO: 734184 - RNA, 19 nt, Artificial Sequence
  Description of Artificial Sequence: Synthetic oligonucleotide
  Sense strand starting at position 32 of SEQ ID NO: 586653
gccgcuuacgaaguuuaua

SEQ ID NO: 734185 - RNA, 19 nt, Artificial Sequence
  Description of Artificial Sequence: Synthetic oligonucleotide
  Antisense strand to SEQ ID NO: 734184
uauaaacuucguaagcggc

SEQ ID NO: 734186 - RNA, 19 nt, Artificial Sequence
  Description of Artificial Sequence: Synthetic oligonucleotide
  Sense strand starting at position 35 of SEQ ID NO: 586653
gcuuacgaaguuuauagaa

SEQ ID NO: 734187 - RNA, 19 nt, Artificial Sequence
  Description of Artificial Sequence: Synthetic oligonucleotide
  Antisense strand to SEQ ID NO: 734186
uucuauaaacuucguaagc

SEQ ID NO: 734188 - RNA, 19 nt, Artificial Sequence
  Description of Artificial Sequence: Synthetic oligonucleotide
  Sense strand starting at position 206 of SEQ ID NO: 586653
gaaugagcaccgugguaga

SEQ ID NO: 734189 - RNA, 19 nt, Artificial Sequence
  Description of Artificial Sequence: Synthetic oligonucleotide
  Antisense strand to SEQ ID NO: 734188
ucuaccacggugcucauuc

SEQ ID NO: 734190 - RNA, 19 nt, Artificial Sequence
  Description of Artificial Sequence: Synthetic oligonucleotide
  Sense strand starting at position 326 of SEQ ID NO: 586653
uggugaagaagcuguaguu

SEQ ID NO: 734191 - RNA, 19 nt, Artificial Sequence
  Description of Artificial Sequence: Synthetic oligonucleotide
  Antisense strand to SEQ ID NO: 734190
aacuacagcuucuucacca

SEQ ID NO: 734192 - RNA, 19 nt, Artificial Sequence
  Description of Artificial Sequence: Synthetic oligonucleotide
  Sense strand starting at position 338 of SEQ ID NO: 586653
uguaguuggagguguuaag

SEQ ID NO: 734193 - RNA, 19 nt, Artificial Sequence
  Description of Artificial Sequence: Synthetic oligonucleotide
  Antisense strand to SEQ ID NO: 734192
cuuaacaccuccaacuaca

SEQ ID NO: 734194 - RNA, 19 nt, Artificial Sequence
  Description of Artificial Sequence: Synthetic oligonucleotide
  Sense strand starting at position 392 of SEQ ID NO: 586653
uggaguugccugcaacauu

SEQ ID NO: 734195 - RNA, 19 nt, Artificial Sequence
  Description of Artificial Sequence: Synthetic oligonucleotide
  Antisense strand to SEQ ID NO: 734194
aauguugcaggcaacucca

SEQ ID NO: 734196 - RNA, 19 nt, Artificial Sequence
  Description of Artificial Sequence: Synthetic oligonucleotide
  Sense strand starting at position 401 of SEQ ID NO: 586653
cugcaacauuggucaccau

SEQ ID NO: 734197 - RNA, 19 nt, Artificial Sequence
  Description of Artificial Sequence: Synthetic oligonucleotide
  Antisense strand to SEQ ID NO: 734196
auggugaccaauguugcag

SEQ ID NO: 734198 - RNA, 19 nt, Artificial Sequence
  Description of Artificial Sequence: Synthetic oligonucleotide
  Sense strand starting at position 473 of SEQ ID NO: 586653
cgucguugaggacagagau

SEQ ID NO: 734199 - RNA, 19 nt, Artificial Sequence
  Description of Artificial Sequence: Synthetic oligonucleotide
  Antisense strand to SEQ ID NO: 734198
aucucuguccucaacgacg

SEQ ID NO: 734200 - RNA, 19 nt, Artificial Sequence
  Description of Artificial Sequence: Synthetic oligonucleotide
  Sense strand starting at position 613 of SEQ ID NO: 586653
cgaggugcguccaugauga

SEQ ID NO: 734201 - RNA, 19 nt, Artificial Sequence
  Description of Artificial Sequence: Synthetic oligonucleotide
  Antisense strand to SEQ ID NO: 734200
ucaucauggacgcaccucg

SEQ ID NO: 734202 - RNA, 19 nt, Artificial Sequence
  Description of Artificial Sequence: Synthetic oligonucleotide
  Sense strand starting at position 720 of SEQ ID NO: 586653
gguggaauugguggguaua

SEQ ID NO: 734203 - RNA, 19 nt, Artificial Sequence
  Description of Artificial Sequence: Synthetic oligonucleotide
  Antisense strand to SEQ ID NO: 734202
uauacccaccaauuccacc

SEQ ID NO: 734204 - RNA, 19 nt, Artificial Sequence
  Description of Artificial Sequence: Synthetic oligonucleotide
  Sense strand starting at position 721 of SEQ ID NO: 586653
guggaauugguggguauau

SEQ ID NO: 734205 - RNA, 19 nt, Artificial Sequence
  Description of Artificial Sequence: Synthetic oligonucleotide
  Antisense strand to SEQ ID NO: 734204
auauacccaccaauuccac

SEQ ID NO: 734206 - RNA, 19 nt, Artificial Sequence
  Description of Artificial Sequence: Synthetic oligonucleotide
  Sense strand starting at position 722 of SEQ ID NO: 586653
uggaauugguggguauaua

SEQ ID NO: 734207 - RNA, 19 nt, Artificial Sequence
  Description of Artificial Sequence: Synthetic oligonucleotide
  Antisense strand to SEQ ID NO: 734206
uauauacccaccaauucca

SEQ ID NO: 734208 - RNA, 19 nt, Artificial Sequence
  Description of Artificial Sequence: Synthetic oligonucleotide
  Sense strand starting at position 730 of SEQ ID NO: 586653
guggguauauacucucgaa

SEQ ID NO: 734209 - RNA, 19 nt, Artificial Sequence
  Description of Artificial Sequence: Synthetic oligonucleotide
  Antisense strand to SEQ ID NO: 734208
uucgagaguauauacccac

SEQ ID NO: 734210 - RNA, 19 nt, Artificial Sequence
  Description of Artificial Sequence: Synthetic oligonucleotide
  Sense strand starting at position 734 of SEQ ID NO: 586653
guauauacucucgaagcca

SEQ ID NO: 734211 - RNA, 19 nt, Artificial Sequence
  Description of Artificial Sequence: Synthetic oligonucleotide
  Antisense strand to SEQ ID NO: 734210
uggcuucgagaguauauac

SEQ ID NO: 734212 - RNA, 19 nt, Artificial Sequence
  Description of Artificial Sequence: Synthetic oligonucleotide
  Sense strand starting at position 791 of SEQ ID NO: 586653
gguugugguguagaugcaa
